United States Patent Application Publication US 2007/0042381 A1 - sequence listing, part 53

SEQ ID NO: 2390900 - RNA, 13 nt, Human
caugcagagcgcc

SEQ ID NO: 2390901 - RNA, 19 nt, Human
caugcagacaugagugcgu

SEQ ID NO: 2390902 - RNA, 22 nt, Human
caugcacugugaaggacccuug

SEQ ID NO: 2390903 - RNA, 19 nt, Human
caugcacuguucccccugu

SEQ ID NO: 2390904 - RNA, 23 nt, Human
caugcacuguucccccugugcag

SEQ ID NO: 2390905 - RNA, 20 nt, Human
caugcacugugaaggacccu

SEQ ID NO: 2390906 - RNA, 18 nt, Human
caugcacugugaaggacc

SEQ ID NO: 2390907 - RNA, 17 nt, Human
caugcacugugaaggac

SEQ ID NO: 2390908 - RNA, 16 nt, Human
caugcacugugaagga

SEQ ID NO: 2390909 - RNA, 14 nt, Human
caugcacugugaag

SEQ ID NO: 2390910 - RNA, 13 nt, Human
caugcacugugaa

SEQ ID NO: 2390911 - RNA, 10 nt, Human
caugcacugu

SEQ ID NO: 2390912 - RNA, 23 nt, Human
caugcagcccaugcccaccugcc

SEQ ID NO: 2390913 - RNA, 22 nt, Human
caugcagcccaugcccaccugc

SEQ ID NO: 2390914 - RNA, 22 nt, Human
caugcgcucagggccaugcuga

SEQ ID NO: 2390915 - RNA, 15 nt, Human
caugcagccgugauc

SEQ ID NO: 2390916 - RNA, 17 nt, Human
caugcagccgugaucaa

SEQ ID NO: 2390917 - RNA, 23 nt, Human
caugcgcucagggccaugcugag

SEQ ID NO: 2390918 - RNA, 21 nt, Human
caugcagccgugaucaaggga

SEQ ID NO: 2390919 - RNA, 14 nt, Human
caugcggagaacaa

SEQ ID NO: 2390920 - RNA, 16 nt, Human
caugcggagaacaaau

SEQ ID NO: 2390921 - RNA, 23 nt, Human
caugcggagaacaaaugugaagg

SEQ ID NO: 2390922 - RNA, 13 nt, Human
caugcggcccagc

SEQ ID NO: 2390923 - RNA, 14 nt, Human
caugcggcccagcc

SEQ ID NO: 2390924 - RNA, 14 nt, Human
caugcagcaucuaa

SEQ ID NO: 2390925 - RNA, 19 nt, Human
caugcagauggggcucccg

SEQ ID NO: 2390926 - RNA, 20 nt, Human
caugcagcccaugcccaccu

SEQ ID NO: 2390927 - RNA, 19 nt, Human
caugcagcccaugcccacc

SEQ ID NO: 2390928 - RNA, 16 nt, Human
caugcagcccaugccc

SEQ ID NO: 2390929 - RNA, 17 nt, Human
caugcagccacugugcu

SEQ ID NO: 2390930 - RNA, 13 nt, Human
cauggaggcacac

SEQ ID NO: 2390931 - RNA, 14 nt, Human
cauggaggagcuug

SEQ ID NO: 2390932 - RNA, 14 nt, Human
cauggagcuggccg

SEQ ID NO: 2390933 - RNA, 18 nt, Human
cauggagccccagccccc

SEQ ID NO: 2390934 - RNA, 13 nt, Human
cauggagcuggcc

SEQ ID NO: 2390935 - RNA, 17 nt, Human
cauggagccagcucccu

SEQ ID NO: 2390936 - RNA, 14 nt, Human
cauggagccccagc

SEQ ID NO: 2390937 - RNA, 15 nt, Human
cauggagccccagcc

SEQ ID NO: 2390938 - RNA, 12 nt, Human
cauggagcuggc

SEQ ID NO: 2390939 - RNA, 16 nt, Human
cauggagccccagccc

SEQ ID NO: 2390940 - RNA, 17 nt, Human
cauggagccccagcccc

SEQ ID NO: 2390941 - RNA, 15 nt, Human
cauggacuuccacug

SEQ ID NO: 2390942 - RNA, 22 nt, Human
cauggacuucugccagcauaau

SEQ ID NO: 2390943 - RNA, 14 nt, Human
cauggagccagcuc

SEQ ID NO: 2390944 - RNA, 15 nt, Human
cauggacuucacaua

SEQ ID NO: 2390945 - RNA, 21 nt, Human
cauggacucuacacugugaac

SEQ ID NO: 2390946 - RNA, 15 nt, Human
cauggacccggagcu

SEQ ID NO: 2390947 - RNA, 19 nt, Human
cauggacguucggggcaug

SEQ ID NO: 2390948 - RNA, 14 nt, Human
cauggacuucacau

SEQ ID NO: 2390949 - RNA, 12 nt, Human
cauggacccgga

SEQ ID NO: 2390950 - RNA, 23 nt, Human
cauggacaccccuuauccaggac

SEQ ID NO: 2390951 - RNA, 14 nt, Human
cauggacaccccuu

SEQ ID NO: 2390952 - RNA, 21 nt, Human
cauggacaccccuuauccagg

SEQ ID NO: 2390953 - RNA, 22 nt, Human
cauggacaccccuuauccagga

SEQ ID NO: 2390954 - RNA, 21 nt, Human
cauggaaauucccuucaucug

SEQ ID NO: 2390955 - RNA, 18 nt, Human
cauggaaaccugaaaaaa

SEQ ID NO: 2390956 - RNA, 20 nt, Human
cauggaauuggagcucgugg

SEQ ID NO: 2390957 - RNA, 16 nt, Human
cauggaauuuguaagu

SEQ ID NO: 2390958 - RNA, 19 nt, Human
cauggaauuuguaaguuua

SEQ ID NO: 2390959 - RNA, 16 nt, Human
caugcuucuuccuuac

SEQ ID NO: 2390960 - RNA, 13 nt, Human
caugcuuguguua

SEQ ID NO: 2390961 - RNA, 17 nt, Human
caugcuuugugaacaag

SEQ ID NO: 2390962 - RNA, 17 nt, Human
cauggaaaccugaaaaa

SEQ ID NO: 2390963 - RNA, 22 nt, Human
caugcugugugacucaaaccaa

SEQ ID NO: 2390964 - RNA, 14 nt, Human
caugcuucuuccuu

SEQ ID NO: 2390965 - RNA, 20 nt, Human
cauguacaugaagaagcuaa

SEQ ID NO: 2390966 - RNA, 19 nt, Human
cauguacccuaaggucauu

SEQ ID NO: 2390967 - RNA, 19 nt, Human
cauguaccauuugcauggc

SEQ ID NO: 2390968 - RNA, 16 nt, Human
cauguaaaagagucau

SEQ ID NO: 2390969 - RNA, 14 nt, Human
cauguaaaagaguc

SEQ ID NO: 2390970 - RNA, 18 nt, Human
cauguaaacaaaauuuag

SEQ ID NO: 2390971 - RNA, 21 nt, Human
cauguaaacaaaauuuaguuu

SEQ ID NO: 2390972 - RNA, 16 nt, Human
cauguaaacugugcac

SEQ ID NO: 2390973 - RNA, 22 nt, Human
cauguaaacacgccugcaaacg

SEQ ID NO: 2390974 - RNA, 15 nt, Human
cauguaaacugugca

SEQ ID NO: 2390975 - RNA, 13 nt, Human
cauguacuguagu

SEQ ID NO: 2390976 - RNA, 23 nt, Human
cauguacugagccuuguaauucu

SEQ ID NO: 2390977 - RNA, 13 nt, Human
cauguaccccaau

SEQ ID NO: 2390978 - RNA, 19 nt, Human
cauguacugagccuuguaa

SEQ ID NO: 2390979 - RNA, 22 nt, Human
cauguacugagccuuguaauuc

SEQ ID NO: 2390980 - RNA, 14 nt, Human
cauguacuguaguu

SEQ ID NO: 2390981 - RNA, 13 nt, Human
caugucggccucu

SEQ ID NO: 2390982 - RNA, 22 nt, Human
cauguacuguaguuuuucuuca

SEQ ID NO: 2390983 - RNA, 22 nt, Human
caugucuauaaucccagcacuu

SEQ ID NO: 2390984 - RNA, 14 nt, Human
caugucggccucua

SEQ ID NO: 2390985 - RNA, 14 nt, Human
caugucgugaccaa

SEQ ID NO: 2390986 - RNA, 16 nt, Human
caugucuccuauccug

SEQ ID NO: 2390987 - RNA, 17 nt, Human
caugucuauucagcuuc

SEQ ID NO: 2390988 - RNA, 16 nt, Human
caugucuauucagcuu

SEQ ID NO: 2390989 - RNA, 23 nt, Human
caugguggcaccagcgaagggag

SEQ ID NO: 2390990 - RNA, 22 nt, Human
cauggugccugagaggcaggca

SEQ ID NO: 2390991 - RNA, 18 nt, Human
cauggugaaaauguacug

SEQ ID NO: 2390992 - RNA, 19 nt, Human
cauggugaaaauguacuga

SEQ ID NO: 2390993 - RNA, 21 nt, Human
cauggugaaaauguacugaga

SEQ ID NO: 2390994 - RNA, 18 nt, Human
cauggugccugagaggca

SEQ ID NO: 2390995 - RNA, 19 nt, Human
cauggugccugagaggcag

SEQ ID NO: 2390996 - RNA, 21 nt, Human
cauggugccugagaggcaggc

SEQ ID NO: 2390997 - RNA, 23 nt, Human
cauggucggaaaacaugcuacac

SEQ ID NO: 2390998 - RNA, 15 nt, Human
cauggucacacacug

SEQ ID NO: 2390999 - RNA, 14 nt, Human
cauggucacacacu

SEQ ID NO: 2391000 - RNA, 21 nt, Human
caugguacccccuucugggca

SEQ ID NO: 2391001 - RNA, 11 nt, Human
cauggugaaaa

SEQ ID NO: 2391002 - RNA, 19 nt, Human
caugguggguucaggggac

SEQ ID NO: 2391003 - RNA, 22 nt, Human
caugguggguccaugggcagag

SEQ ID NO: 2391004 - RNA, 21 nt, Human
caugguggguccaugggcaga

SEQ ID NO: 2391005 - RNA, 18 nt, Human
caugguggcgcaagccug

SEQ ID NO: 2391006 - RNA, 17 nt, Human
caugguggcgcaagccu

SEQ ID NO: 2391007 - RNA, 12 nt, Human
caugguggcgca

SEQ ID NO: 2391008 - RNA, 20 nt, Human
caugguggcgcaagccugua

SEQ ID NO: 2391009 - RNA, 14 nt, Human
caugguguaauaag

SEQ ID NO: 2391010 - RNA, 13 nt, Human
caugguguaauaa

SEQ ID NO: 2391011 - RNA, 19 nt, Human
cauggucggaaaacaugcu

SEQ ID NO: 2391012 - RNA, 17 nt, Human
cauggucggaaaacaug

SEQ ID NO: 2391013 - RNA, 18 nt, Human
cauguguaaucaauaaac

SEQ ID NO: 2391014 - RNA, 22 nt, Human
cauguguaaucaauaaacgauu

SEQ ID NO: 2391015 - RNA, 23 nt, Human
cauguguaaucaauaaacgauuu

SEQ ID NO: 2391016 - RNA, 20 nt, Human
caugugcuaguaauuggaaa

SEQ ID NO: 2391017 - RNA, 12 nt, Human
cauguguauguu

SEQ ID NO: 2391018 - RNA, 18 nt, Human
cauguguaugggcaaaaa

SEQ ID NO: 2391019 - RNA, 14 nt, Human
cauguguagccugu

SEQ ID NO: 2391020 - RNA, 20 nt, Human
cauguguacuuaauuucuuu

SEQ ID NO: 2391021 - RNA, 16 nt, Human
cauguguagccugugc

SEQ ID NO: 2391022 - RNA, 18 nt, Human
cauguguagccugugcau

SEQ ID NO: 2391023 - RNA, 22 nt, Human
caugugccagguuuuuggucug

SEQ ID NO: 2391024 - RNA, 14 nt, Human
caugugcacaugca

SEQ ID NO: 2391025 - RNA, 14 nt, Human
caugugccugaucc

SEQ ID NO: 2391026 - RNA, 15 nt, Human
caugugccugaucca

SEQ ID NO: 2391027 - RNA, 19 nt, Human
caugugccugauccagccu

SEQ ID NO: 2391028 - RNA, 20 nt, Human
caugugccugauccagccuc

SEQ ID NO: 2391029 - RNA, 17 nt, Human
caugugcccccucuacc

SEQ ID NO: 2391030 - RNA, 16 nt, Human
caugugccgaaugugc

SEQ ID NO: 2391031 - RNA, 17 nt, Human
caugugugagugugugc

SEQ ID NO: 2391032 - RNA, 16 nt, Human
cauguguuaaguauuu

SEQ ID NO: 2391033 - RNA, 15 nt, Human
caugugugagugugu

SEQ ID NO: 2391034 - RNA, 21 nt, Human
cauguguccugguucccguuu

SEQ ID NO: 2391035 - RNA, 15 nt, Human
cauguguccugguuc

SEQ ID NO: 2391036 - RNA, 19 nt, Human
cauguguuugguucugggg

SEQ ID NO: 2391037 - RNA, 20 nt, Human
cauguguuuuaauuccaaua

SEQ ID NO: 2391038 - RNA, 18 nt, Human
cauguguuggcagccucu

SEQ ID NO: 2391039 - RNA, 18 nt, Human
cauguguuuacuuuaugu

SEQ ID NO: 2391040 - RNA, 10 nt, Human
cauguuucuu

SEQ ID NO: 2391041 - RNA, 21 nt, Human
cauguuuccucuaguucuuug

SEQ ID NO: 2391042 - RNA, 13 nt, Human
cauguuuccucua

SEQ ID NO: 2391043 - RNA, 22 nt, Human
cauguuucauguuuugugacua

SEQ ID NO: 2391044 - RNA, 16 nt, Human
cauguuucauguuuug

SEQ ID NO: 2391045 - RNA, 17 nt, Human
cauguuucauguuuugu

SEQ ID NO: 2391046 - RNA, 14 nt, Human
cauguguugaaaaa

SEQ ID NO: 2391047 - RNA, 13 nt, Human
cauguuucauguu

SEQ ID NO: 2391048 - RNA, 17 nt, Human
caugucucucagaauuc

SEQ ID NO: 2391049 - RNA, 17 nt, Human
caugucuccuauccugg

SEQ ID NO: 2391050 - RNA, 14 nt, Human
caugucugcauuuc

SEQ ID NO: 2391051 - RNA, 14 nt, Human
caugucucgacuca

SEQ ID NO: 2391052 - RNA, 12 nt, Human
caugucuggcua

SEQ ID NO: 2391053 - RNA, 23 nt, Human
caugucugcauuucgguggcuag

SEQ ID NO: 2391054 - RNA, 15 nt, Human
caugucugcauuucg

SEQ ID NO: 2391055 - RNA, 13 nt, Human
caugucuuaauga

SEQ ID NO: 2391056 - RNA, 14 nt, Human
caugucuuaaugaa

SEQ ID NO: 2391057 - RNA, 15 nt, Human
caugucuuaaugaag

SEQ ID NO: 2391058 - RNA, 16 nt, Human
caugucuuaaugaagu

SEQ ID NO: 2391059 - RNA, 17 nt, Human
caugucuuaaugaaguu

SEQ ID NO: 2391060 - RNA, 18 nt, Human
caugucuuaaugaaguuu

SEQ ID NO: 2391061 - RNA, 20 nt, Human
caugucuuaaugaaguuuga

SEQ ID NO: 2391062 - RNA, 23 nt, Human
caugucuuaaugaaguuugaaug

SEQ ID NO: 2391063 - RNA, 21 nt, Human
caugucuuaaugaaguuugaa

SEQ ID NO: 2391064 - RNA, 22 nt, Human
caugucuuaaugaaguuugaau

SEQ ID NO: 2391065 - RNA, 13 nt, Human
caugucuuguaca

SEQ ID NO: 2391066 - RNA, 14 nt, Human
caugucuuguacau

SEQ ID NO: 2391067 - RNA, 15 nt, Human
caugucuuguacaug

SEQ ID NO: 2391068 - RNA, 17 nt, Human
caugucuuguacaugug

SEQ ID NO: 2391069 - RNA, 16 nt, Human
caugugacucugaagc

SEQ ID NO: 2391070 - RNA, 13 nt, Human
caugugacucuga

SEQ ID NO: 2391071 - RNA, 17 nt, Human
caugugacucugaagcu

SEQ ID NO: 2391072 - RNA, 15 nt, Human
caugugaugagagga

SEQ ID NO: 2391073 - RNA, 16 nt, Human
caugugaugagaggaa

SEQ ID NO: 2391074 - RNA, 17 nt, Human
caugugaugagaggaaa

SEQ ID NO: 2391075 - RNA, 18 nt, Human
caugugaugagaggaaau

SEQ ID NO: 2391076 - RNA, 20 nt, Human
caugugaugagaggaaauca

SEQ ID NO: 2391077 - RNA, 22 nt, Human
caugugauccuuuuauguuauu

SEQ ID NO: 2391078 - RNA, 12 nt, Human
caugugauccuu

SEQ ID NO: 2391079 - RNA, 16 nt, Human
caugugauccuuuuau

SEQ ID NO: 2391080 - RNA, 18 nt, Human
caugugauccuuuuaugu

SEQ ID NO: 2391081 - RNA, 19 nt, Human
caugugauccuuuuauguu

SEQ ID NO: 2391082 - RNA, 21 nt, Human
caugugaugagaggaaaucac

SEQ ID NO: 2391083 - RNA, 22 nt, Human
cauuaaaaaaaaaaaaaaaagu

SEQ ID NO: 2391084 - RNA, 13 nt, Human
cauguuuguaaaa

SEQ ID NO: 2391085 - RNA, 17 nt, Human
cauguuuuuguuuucuu

SEQ ID NO: 2391086 - RNA, 20 nt, Human
cauguuuuucuucucccuca

SEQ ID NO: 2391087 - RNA, 19 nt, Human
cauguuuuucuucucccuc

SEQ ID NO: 2391088 - RNA, 13 nt, Human
cauguuucuucau

SEQ ID NO: 2391089 - RNA, 21 nt, Human
cauguuucucuggccccaagg

SEQ ID NO: 2391090 - RNA, 16 nt, Human
cauguuugcugaacac

SEQ ID NO: 2391091 - RNA, 14 nt, Human
cauguuugcuucau

SEQ ID NO: 2391092 - RNA, 14 nt, Human
cauguuugugauug

SEQ ID NO: 2391093 - RNA, 12 nt, Human
cauguuugugau

SEQ ID NO: 2391094 - RNA, 22 nt, Human
cauuaaaacaauauuguuucua

SEQ ID NO: 2391095 - RNA, 21 nt, Human
cauuaaaacaauauuguuucu

SEQ ID NO: 2391096 - RNA, 19 nt, Human
cauuaaaacugaagucuga

SEQ ID NO: 2391097 - RNA, 22 nt, Human
cauuaaaacugaagucugaaau

SEQ ID NO: 2391098 - RNA, 12 nt, Human
cauuaaaacaau

SEQ ID NO: 2391099 - RNA, 23 nt, Human
cauguuuuuguuuucuuugaaug

SEQ ID NO: 2391100 - RNA, 22 nt, Human
cauuaaaaaugcauauacuuua

SEQ ID NO: 2391101 - RNA, 17 nt, Human
cauuaaaagaaaauaaa

SEQ ID NO: 2391102 - RNA, 14 nt, Human
cauuaaaagaaaau

SEQ ID NO: 2391103 - RNA, 13 nt, Human
cauuaaaagaaaa

SEQ ID NO: 2391104 - RNA, 12 nt, Human
cauuaaaagaaa

SEQ ID NO: 2391105 - RNA, 20 nt, Human
cauuaaaagaaaauaaaaaa

SEQ ID NO: 2391106 - RNA, 21 nt, Human
cauuaaaacugaagucugaaa

SEQ ID NO: 2391107 - RNA, 23 nt, Human
cagggaauuucaggaacuagaga

SEQ ID NO: 2391108 - RNA, 15 nt, Human
cagggacaccagcca

SEQ ID NO: 2391109 - RNA, 16 nt, Human
cagggacaccagccag

SEQ ID NO: 2391110 - RNA, 17 nt, Human
cagggacaccagccagg

SEQ ID NO: 2391111 - RNA, 19 nt, Human
cagggacaccagccaggcu

SEQ ID NO: 2391112 - RNA, 20 nt, Human
cagggacaccagccaggcuc

SEQ ID NO: 2391113 - RNA, 21 nt, Human
cagggacaccagccaggcucu

SEQ ID NO: 2391114 - RNA, 22 nt, Human
cagggacaccagccaggcucug

SEQ ID NO: 2391115 - RNA, 23 nt, Human
cagggacaccagccaggcucugu

SEQ ID NO: 2391116 - RNA, 23 nt, Human
cagggacagagacaccugcaccu

SEQ ID NO: 2391117 - RNA, 22 nt, Human
cagggacagagacaccugcacc

SEQ ID NO: 2391118 - RNA, 13 nt, Human
cagggacagagcc

SEQ ID NO: 2391119 - RNA, 14 nt, Human
cagggacagagcca

SEQ ID NO: 2391120 - RNA, 21 nt, Human
cagggacagagacaccugcac

SEQ ID NO: 2391121 - RNA, 20 nt, Human
cagggacagagacaccugca

SEQ ID NO: 2391122 - RNA, 19 nt, Human
cagggacagagacaccugc

SEQ ID NO: 2391123 - RNA, 18 nt, Human
cagggacagagacaccug

SEQ ID NO: 2391124 - RNA, 17 nt, Human
cagggacagagacaccu

SEQ ID NO: 2391125 - RNA, 14 nt, Human
cagggacagagaca

SEQ ID NO: 2391126 - RNA, 13 nt, Human
cagggacagaggg

SEQ ID NO: 2391127 - RNA, 18 nt, Human
cagggacagaggccccag

SEQ ID NO: 2391128 - RNA, 16 nt, Human
cagggacagaggcccc

SEQ ID NO: 2391129 - RNA, 14 nt, Human
cagggacagaggcc

SEQ ID NO: 2391130 - RNA, 15 nt, Human
cagggacagagccau

SEQ ID NO: 2391131 - RNA, 16 nt, Human
cagggacagagccaug

SEQ ID NO: 2391132 - RNA, 14 nt, Human
cagggacagagggg

SEQ ID NO: 2391133 - RNA, 20 nt, Human
cagggacagaggggguggcc

SEQ ID NO: 2391134 - RNA, 13 nt, Human
cagggaagcuggc

SEQ ID NO: 2391135 - RNA, 22 nt, Human
cagggaagcuacagguuacaac

SEQ ID NO: 2391136 - RNA, 24 nt, Human
cagggaagcuacagguuacaacag

SEQ ID NO: 2391137 - RNA, 18 nt, Human
cagggaagcuacagguua

SEQ ID NO: 2391138 - RNA, 19 nt, Human
cagggaagcuacagguuac

SEQ ID NO: 2391139 - RNA, 20 nt, Human
cagggaagcuacagguuaca

SEQ ID NO: 2391140 - RNA, 21 nt, Human
cagggaagcuacagguuacaa

SEQ ID NO: 2391141 - RNA, 17 nt, Human
cagggaagcuggccgag

SEQ ID NO: 2391142 - RNA, 14 nt, Human
cagggaagcuggcc

SEQ ID NO: 2391143 - RNA, 23 nt, Human
cagggaaguccccaggccccagg

SEQ ID NO: 2391144 - RNA, 23 nt, Human
cagggaaugccugagugccuggc

SEQ ID NO: 2391145 - RNA, 21 nt, Human
cagggaaguguaagaaacaca

SEQ ID NO: 2391146 - RNA, 17 nt, Human
cagggaagugcucugau

SEQ ID NO: 2391147 - RNA, 18 nt, Human
cagggaaguccccaggcc

SEQ ID NO: 2391148 - RNA, 17 nt, Human
cagggaaguccccaggc

SEQ ID NO: 2391149 - RNA, 16 nt, Human
cagggaaguccccagg

SEQ ID NO: 2391150 - RNA, 14 nt, Human
cagggaagucccca

SEQ ID NO: 2391151 - RNA, 19 nt, Human
cagggaaggggaggcagcc

SEQ ID NO: 2391152 - RNA, 17 nt, Human
cagggaaggggacaagg

SEQ ID NO: 2391153 - RNA, 15 nt, Human
cagggaaggggacaa

SEQ ID NO: 2391154 - RNA, 21 nt, Human
cagggaaaagcagcucucccc

SEQ ID NO: 2391155 - RNA, 20 nt, Human
cagggaaaagcagcucuccc

SEQ ID NO: 2391156 - RNA, 19 nt, Human
cagggaaaagcagcucucc

SEQ ID NO: 2391157 - RNA, 17 nt, Human
cagggaaaagcagcucu

SEQ ID NO: 2391158 - RNA, 16 nt, Human
cagggaaacagcuaau

SEQ ID NO: 2391159 - RNA, 15 nt, Human
cagggaaaauauaua

SEQ ID NO: 2391160 - RNA, 22 nt, Human
cagggaaacagcuaaugggaca

SEQ ID NO: 2391161 - RNA, 23 nt, Human
cagggaaaggcucugaaagccag

SEQ ID NO: 2391162 - RNA, 14 nt, Human
cagggaaaggcucu

SEQ ID NO: 2391163 - RNA, 15 nt, Human
cagggaaaggccagu

SEQ ID NO: 2391164 - RNA, 20 nt, Human
cagggaaaaugcagcaggga

SEQ ID NO: 2391165 - RNA, 20 nt, Human
cagggaaaauuauuugcaua

SEQ ID NO: 2391166 - RNA, 22 nt, Human
cagggaaccguuauuauaauug

SEQ ID NO: 2391167 - RNA, 23 nt, Human
cagggaaccguuauuauaauugu

SEQ ID NO: 2391168 - RNA, 19 nt, Human
cagggaacccugcuugcac

SEQ ID NO: 2391169 - RNA, 22 nt, Human
cagggaacccugcuugcacuuu

SEQ ID NO: 2391170 - RNA, 14 nt, Human
cagggaagcuacag

SEQ ID NO: 2391171 - RNA, 15 nt, Human
cagggaagcuacagg

SEQ ID NO: 2391172 - RNA, 17 nt, Human
cagggaagcuacagguu

SEQ ID NO: 2391173 - RNA, 22 nt, Human
cagggaagagcagaacggagcc

SEQ ID NO: 2391174 - RNA, 16 nt, Human
cagggaagagaaagug

SEQ ID NO: 2391175 - RNA, 15 nt, Human
cagggaagagcagaa

SEQ ID NO: 2391176 - RNA, 17 nt, Human
cagggaagagcagaacg

SEQ ID NO: 2391177 - RNA, 11 nt, Human
cagggcacugc

SEQ ID NO: 2391178 - RNA, 15 nt, Human
cagggcacugcugcu

SEQ ID NO: 2391179 - RNA, 14 nt, Human
cagggcacuucaca

SEQ ID NO: 2391180 - RNA, 17 nt, Human
cagggcacuucacagag

SEQ ID NO: 2391181 - RNA, 18 nt, Human
cagggcacuucacagagu

SEQ ID NO: 2391182 - RNA, 15 nt, Human
cagggcagagccggg

SEQ ID NO: 2391183 - RNA, 12 nt, Human
cagggcagagcc

SEQ ID NO: 2391184 - RNA, 16 nt, Human
cagggcagagccggga

SEQ ID NO: 2391185 - RNA, 13 nt, Human
cagggcagaguga

SEQ ID NO: 2391186 - RNA, 20 nt, Human
cagggcacuucacagagugu

SEQ ID NO: 2391187 - RNA, 19 nt, Human
cagggcagagugagaccca

SEQ ID NO: 2391188 - RNA, 13 nt, Human
cagggcagcgcca

SEQ ID NO: 2391189 - RNA, 15 nt, Human
cagggcagcgccagg

SEQ ID NO: 2391190 - RNA, 14 nt, Human
cagggcagcgccag

SEQ ID NO: 2391191 - RNA, 22 nt, Human
cagggcagcgccaggcugacca

SEQ ID NO: 2391192 - RNA, 14 nt, Human
cagggcagcugggc

SEQ ID NO: 2391193 - RNA, 15 nt, Human
cagggcagcugggcc

SEQ ID NO: 2391194 - RNA, 16 nt, Human
cagggcagcugggccc

SEQ ID NO: 2391195 - RNA, 17 nt, Human
cagggcagcugggccca

SEQ ID NO: 2391196 - RNA, 18 nt, Human
cagggcagcugggcccaa

SEQ ID NO: 2391197 - RNA, 20 nt, Human
cagggcagcugggcccaacc

SEQ ID NO: 2391198 - RNA, 19 nt, Human
cagggcagcgccaggcuga

SEQ ID NO: 2391199 - RNA, 18 nt, Human
cagggcagcgccaggcug

SEQ ID NO: 2391200 - RNA, 17 nt, Human
cagggcagcgccaggcu

SEQ ID NO: 2391201 - RNA, 16 nt, Human
cagggcagcgccaggc

SEQ ID NO: 2391202 - RNA, 22 nt, Human
cagggcacaccgggcacucaga

SEQ ID NO: 2391203 - RNA, 23 nt, Human
cagggcacaccgggcacucagaa

SEQ ID NO: 2391204 - RNA, 15 nt, Human
cagggcacaccgggc

SEQ ID NO: 2391205 - RNA, 17 nt, Human
cagggcacaccgggcac

SEQ ID NO: 2391206 - RNA, 19 nt, Human
cagggcacaccgggcacuc

SEQ ID NO: 2391207 - RNA, 21 nt, Human
cagggcacaccgggcacucag

SEQ ID NO: 2391208 - RNA, 13 nt, Human
cagggauuugagg

SEQ ID NO: 2391209 - RNA, 16 nt, Human
cagggauugcugccac

SEQ ID NO: 2391210 - RNA, 14 nt, Human
cagggauuugagga

SEQ ID NO: 2391211 - RNA, 20 nt, Human
cagggauuaaccucugcacu

SEQ ID NO: 2391212 - RNA, 18 nt, Human
cagggauuaaccucugca

SEQ ID NO: 2391213 - RNA, 19 nt, Human
cagggauuaaccucugcac

SEQ ID NO: 2391214 - RNA, 18 nt, Human
cagggauguacaaggcga

SEQ ID NO: 2391215 - RNA, 17 nt, Human
cagggauuaaccucugc

SEQ ID NO: 2391216 - RNA, 12 nt, Human
cagggagaagcu

SEQ ID NO: 2391217 - RNA, 15 nt, Human
cagggacuugaaguu

SEQ ID NO: 2391218 - RNA, 19 nt, Human
cagggacuugaaguuguua

SEQ ID NO: 2391219 - RNA, 14 nt, Human
cagggacuugaagu

SEQ ID NO: 2391220 - RNA, 18 nt, Human
cagggacuguuccugucu

SEQ ID NO: 2391221 - RNA, 23 nt, Human
cagggacuguuccugucucagca

SEQ ID NO: 2391222 - RNA, 18 nt, Human
cagggcaaugaugaauga

SEQ ID NO: 2391223 - RNA, 14 nt, Human
cagggcacaccggg

SEQ ID NO: 2391224 - RNA, 21 nt, Human
cagggaccuuuggagaccauu

SEQ ID NO: 2391225 - RNA, 21 nt, Human
cagggacuaugaaugggcaaa

SEQ ID NO: 2391226 - RNA, 23 nt, Human
cagggacugaaaaccucuccuca

SEQ ID NO: 2391227 - RNA, 21 nt, Human
cagggacugaaaaccucuccu

SEQ ID NO: 2391228 - RNA, 20 nt, Human
cagggacugaaaaccucucc

SEQ ID NO: 2391229 - RNA, 19 nt, Human
cagggaccaaggaccccuc

SEQ ID NO: 2391230 - RNA, 13 nt, Human
cagggaccacagc

SEQ ID NO: 2391231 - RNA, 14 nt, Human
cagggaccacagca

SEQ ID NO: 2391232 - RNA, 15 nt, Human
cagggaccacagcaa

SEQ ID NO: 2391233 - RNA, 22 nt, Human
cagggacccacuucacacacag

SEQ ID NO: 2391234 - RNA, 17 nt, Human
cagggaccacagcaagg

SEQ ID NO: 2391235 - RNA, 20 nt, Human
cagggaccacagcaaggcac

SEQ ID NO: 2391236 - RNA, 16 nt, Human
cagggaccccugcccu

SEQ ID NO: 2391237 - RNA, 15 nt, Human
cagggaccccugccc

SEQ ID NO: 2391238 - RNA, 14 nt, Human
cagggaccccugcc

SEQ ID NO: 2391239 - RNA, 18 nt, Human
cagggaccaaggaccccu

SEQ ID NO: 2391240 - RNA, 15 nt, Human
cagggaccaaggacc

SEQ ID NO: 2391241 - RNA, 14 nt, Human
cagggaccaaggac

SEQ ID NO: 2391242 - RNA, 17 nt, Human
cagggacagagccaugc

SEQ ID NO: 2391243 - RNA, 16 nt, Human
cagggaccacacccug

SEQ ID NO: 2391244 - RNA, 22 nt, Human
cagggaccacacccuguacugu

SEQ ID NO: 2391245 - RNA, 18 nt, Human
cagggacaggauaagagg

SEQ ID NO: 2391246 - RNA, 23 nt, Human
cagggacagaggggguggccucc

SEQ ID NO: 2391247 - RNA, 23 nt, Human
cagggacagaggccccagccucc

SEQ ID NO: 2391248 - RNA, 12 nt, Human
cagggacaggau

SEQ ID NO: 2391249 - RNA, 21 nt, Human
cagggacagaggccccagccu

SEQ ID NO: 2391250 - RNA, 19 nt, Human
cagggacagaggccccagc

SEQ ID NO: 2391251 - RNA, 14 nt, Human
cagggcccugcaga

SEQ ID NO: 2391252 - RNA, 13 nt, Human
cagggcccugcag

SEQ ID NO: 2391253 - RNA, 21 nt, Human
cagggcccugagcucggugga

SEQ ID NO: 2391254 - RNA, 15 nt, Human
cagggcccugagcuc

SEQ ID NO: 2391255 - RNA, 18 nt, Human
cagggcccugcagagggg

SEQ ID NO: 2391256 - RNA, 15 nt, Human
cagggcccugcagag

SEQ ID NO: 2391257 - RNA, 12 nt, Human
cagggccuggaa

SEQ ID NO: 2391258 - RNA, 22 nt, Human
cagggccugcaggaccugccug

SEQ ID NO: 2391259 - RNA, 22 nt, Human
cagggccugagccuggccagcc

SEQ ID NO: 2391260 - RNA, 21 nt, Human
cagggccugagccuggccagc

SEQ ID NO: 2391261 - RNA, 20 nt, Human
cagggccugagccuggccag

SEQ ID NO: 2391262 - RNA, 19 nt, Human
cagggccugagccuggcca

SEQ ID NO: 2391263 - RNA, 18 nt, Human
cagggccugagccuggcc

SEQ ID NO: 2391264 - RNA, 17 nt, Human
cagggccugagccuggc

SEQ ID NO: 2391265 - RNA, 16 nt, Human
cagggccugagccugg

SEQ ID NO: 2391266 - RNA, 19 nt, Human
cagggccuagcugcuacaa

SEQ ID NO: 2391267 - RNA, 20 nt, Human
cagggccuagcugcuacaaa

SEQ ID NO: 2391268 - RNA, 21 nt, Human
cagggccuagcugcuacaaag

SEQ ID NO: 2391269 - RNA, 22 nt, Human
cagggccuagcugcuacaaaga

SEQ ID NO: 2391270 - RNA, 23 nt, Human
cagggccuagcugcuacaaagaa

SEQ ID NO: 2391271 - RNA, 16 nt, Human
cagggccucacacggu

SEQ ID NO: 2391272 - RNA, 21 nt, Human
cagggccccagaaggcaggga

SEQ ID NO: 2391273 - RNA, 21 nt, Human
cagggccccucacccugccuu

SEQ ID NO: 2391274 - RNA, 22 nt, Human
cagggccccucacccugccuua

SEQ ID NO: 2391275 - RNA, 21 nt, Human
cagggcccccaucucaugccc

SEQ ID NO: 2391276 - RNA, 18 nt, Human
cagggccccucacccugc

SEQ ID NO: 2391277 - RNA, 16 nt, Human
cagggcccccaucuca

SEQ ID NO: 2391278 - RNA, 15 nt, Human
cagggcccccaucuc

SEQ ID NO: 2391279 - RNA, 15 nt, Human
cagggccccagcacu

SEQ ID NO: 2391280 - RNA, 14 nt, Human
cagggccccagcac

SEQ ID NO: 2391281 - RNA, 17 nt, Human
cagggccccagaaggca

SEQ ID NO: 2391282 - RNA, 15 nt, Human
cagggccccagaagg

SEQ ID NO: 2391283 - RNA, 13 nt, Human
cagggccccagaa

SEQ ID NO: 2391284 - RNA, 17 nt, Human
cagggcccacacccccu

SEQ ID NO: 2391285 - RNA, 22 nt, Human
cagggccccagcacuaaagcag

SEQ ID NO: 2391286 - RNA, 16 nt, Human
cagggccccagcacua

SEQ ID NO: 2391287 - RNA, 21 nt, Human
cagggcccccagcgagagucc

SEQ ID NO: 2391288 - RNA, 20 nt, Human
cagggccccaggcauugcca

SEQ ID NO: 2391289 - RNA, 22 nt, Human
cagggcccagagcccagcucca

SEQ ID NO: 2391290 - RNA, 21 nt, Human
cagggcccagagcccagcucc

SEQ ID NO: 2391291 - RNA, 19 nt, Human
cagggcccagagcccagcu

SEQ ID NO: 2391292 - RNA, 18 nt, Human
cagggcccagagcccagc

SEQ ID NO: 2391293 - RNA, 16 nt, Human
cagggcccagagccca

SEQ ID NO: 2391294 - RNA, 15 nt, Human
cagggcccagagccc

SEQ ID NO: 2391295 - RNA, 14 nt, Human
cagggcccagagcc

SEQ ID NO: 2391296 - RNA, 13 nt, Human
cagggcccagagc

SEQ ID NO: 2391297 - RNA, 12 nt, Human
cagggcccagag

SEQ ID NO: 2391298 - RNA, 17 nt, Human
cagggcccaagucccug

SEQ ID NO: 2391299 - RNA, 18 nt, Human
cagggcccaagucccugu

SEQ ID NO: 2391300 - RNA, 19 nt, Human
cagggcccaagucccuguu

SEQ ID NO: 2391301 - RNA, 14 nt, Human
cagggcccacaccc

SEQ ID NO: 2391302 - RNA, 23 nt, Human
cagggccaugcugaggccugggc

SEQ ID NO: 2391303 - RNA, 22 nt, Human
cagggccaugcugaggccuggg

SEQ ID NO: 2391304 - RNA, 13 nt, Human
cagggccaacccu

SEQ ID NO: 2391305 - RNA, 22 nt, Human
cagggcaugccccggccaccuc

SEQ ID NO: 2391306 - RNA, 23 nt, Human
cagggcaugccccggccaccucu

SEQ ID NO: 2391307 - RNA, 20 nt, Human
cagggcauggccagguggcc

SEQ ID NO: 2391308 - RNA, 17 nt, Human
cagggcauggcugggaa

SEQ ID NO: 2391309 - RNA, 19 nt, Human
cagggcaugcauuuugcag

SEQ ID NO: 2391310 - RNA, 15 nt, Human
cagggcaugccacgu

SEQ ID NO: 2391311 - RNA, 18 nt, Human
cagggcaugccccggcca

SEQ ID NO: 2391312 - RNA, 21 nt, Human
cagggcaugccccggccaccu

SEQ ID NO: 2391313 - RNA, 14 nt, Human
cagggcaucuccug

SEQ ID NO: 2391314 - RNA, 13 nt, Human
cagggcaucuccu

SEQ ID NO: 2391315 - RNA, 15 nt, Human
cagggcaucuccugu

SEQ ID NO: 2391316 - RNA, 16 nt, Human
cagggcaucuccagga

SEQ ID NO: 2391317 - RNA, 17 nt, Human
cagggcaucuccaggaa

SEQ ID NO: 2391318 - RNA, 18 nt, Human
cagggcaucuccaggaag

SEQ ID NO: 2391319 - RNA, 21 nt, Human
cagggcaucuccaggaaggcg

SEQ ID NO: 2391320 - RNA, 17 nt, Human
cagggcagggcucugau

SEQ ID NO: 2391321 - RNA, 21 nt, Human
cagggcagucauuggcugucu

SEQ ID NO: 2391322 - RNA, 15 nt, Human
cagggcaucuccagg

SEQ ID NO: 2391323 - RNA, 19 nt, Human
cagggcagggcucugauau

SEQ ID NO: 2391324 - RNA, 16 nt, Human
cagggcagggcucuga

SEQ ID NO: 2391325 - RNA, 15 nt, Human
cagggcagggcucug

SEQ ID NO: 2391326 - RNA, 13 nt, Human
cagggcagggcca

SEQ ID NO: 2391327 - RNA, 13 nt, Human
cagggcagggccc

SEQ ID NO: 2391328 - RNA, 21 nt, Human
cagggcagcugggcccaaccc

SEQ ID NO: 2391329 - RNA, 22 nt, Human
cagggcagcugggcccaacccu

SEQ ID NO: 2391330 - RNA, 18 nt, Human
cagggccaacccuucucc

SEQ ID NO: 2391331 - RNA, 17 nt, Human
cagggccaacuugaggg

SEQ ID NO: 2391332 - RNA, 19 nt, Human
cagggccaacuugagggcc

SEQ ID NO: 2391333 - RNA, 22 nt, Human
cagggccaacuugagggcccag

SEQ ID NO: 2391334 - RNA, 17 nt, Human
cagggccacgugccagg

SEQ ID NO: 2391335 - RNA, 16 nt, Human
cagggccacgugccag

SEQ ID NO: 2391336 - RNA, 15 nt, Human
cagggccacgugcca

SEQ ID NO: 2391337 - RNA, 17 nt, Human
cagggccacucugccuc

SEQ ID NO: 2391338 - RNA, 16 nt, Human
cagggccacucugccu

SEQ ID NO: 2391339 - RNA, 12 nt, Human
cagggccacucu

SEQ ID NO: 2391340 - RNA, 19 nt, Human
cagggccacucccggcacu

SEQ ID NO: 2391341 - RNA, 21 nt, Human
cagggccacgugccaggcccg

SEQ ID NO: 2391342 - RNA, 13 nt, Human
cagggccacuccc

SEQ ID NO: 2391343 - RNA, 20 nt, Human
cagggccacgugccaggccc

SEQ ID NO: 2391344 - RNA, 18 nt, Human
cagggccacgugccaggc

SEQ ID NO: 2391345 - RNA, 20 nt, Human
cagggccacucugccucugc

SEQ ID NO: 2391346 - RNA, 18 nt, Human
cagggccacucugccucu

SEQ ID NO: 2391347 - RNA, 12 nt, Human
cagggccaggac

SEQ ID NO: 2391348 - RNA, 13 nt, Human
cagggccaggacu

SEQ ID NO: 2391349 - RNA, 19 nt, Human
cagggccagggcccugcag

SEQ ID NO: 2391350 - RNA, 18 nt, Human
cagggccagggcccugca

SEQ ID NO: 2391351 - RNA, 16 nt, Human
cagggccagggcccug

SEQ ID NO: 2391352 - RNA, 15 nt, Human
cagggccagggcccu

SEQ ID NO: 2391353 - RNA, 13 nt, Human
cagggccagggcc

SEQ ID NO: 2391354 - RNA, 12 nt, Human
cagggccagggc

SEQ ID NO: 2391355 - RNA, 14 nt, Human
cagggccaggacug

SEQ ID NO: 2391356 - RNA, 15 nt, Human
cagggccaggacuga

SEQ ID NO: 2391357 - RNA, 18 nt, Human
cagggccaggacugagcc

SEQ ID NO: 2391358 - RNA, 20 nt, Human
cagggccaggacugagcccc

SEQ ID NO: 2391359 - RNA, 14 nt, Human
cagggccaugcuga

SEQ ID NO: 2391360 - RNA, 16 nt, Human
cagggccaugccugcc

SEQ ID NO: 2391361 - RNA, 17 nt, Human
cagggccaugccugccc

SEQ ID NO: 2391362 - RNA, 16 nt, Human
cagggccaugcugagg

SEQ ID NO: 2391363 - RNA, 17 nt, Human
cagggccaugcugaggc

SEQ ID NO: 2391364 - RNA, 18 nt, Human
cagggccaugcugaggcc

SEQ ID NO: 2391365 - RNA, 21 nt, Human
cagggccaugcugaggccugg

SEQ ID NO: 2391366 - RNA, 14 nt, Human
caggggccagagga

SEQ ID NO: 2391367 - RNA, 21 nt, Human
caggggcauguauuggccugg

SEQ ID NO: 2391368 - RNA, 22 nt, Human
caggggcauguauuggccugga

SEQ ID NO: 2391369 - RNA, 23 nt, Human
caggggcauguauuggccuggag

SEQ ID NO: 2391370 - RNA, 15 nt, Human
caggggccagaggaa

SEQ ID NO: 2391371 - RNA, 20 nt, Human
caggggcccaaggcggcccc

SEQ ID NO: 2391372 - RNA, 21 nt, Human
caggggcccaaggcggccccu

SEQ ID NO: 2391373 - RNA, 13 nt, Human
caggggcaggcac

SEQ ID NO: 2391374 - RNA, 14 nt, Human
caggggcaggcaca

SEQ ID NO: 2391375 - RNA, 15 nt, Human
caggggcaggcacag

SEQ ID NO: 2391376 - RNA, 16 nt, Human
caggggcaggcacagc

SEQ ID NO: 2391377 - RNA, 17 nt, Human
caggggcaggcacagca

SEQ ID NO: 2391378 - RNA, 22 nt, Human
caggggcaggcacagcacaggg

SEQ ID NO: 2391379 - RNA, 20 nt, Human
caggggcauguauuggccug

SEQ ID NO: 2391380 - RNA, 19 nt, Human
caggggccccuccagcuug

SEQ ID NO: 2391381 - RNA, 20 nt, Human
caggggccccuccagcuugu

SEQ ID NO: 2391382 - RNA, 22 nt, Human
caggggcccaaggcggccccuc

SEQ ID NO: 2391383 - RNA, 16 nt, Human
caggggcccacaggga

SEQ ID NO: 2391384 - RNA, 11 nt, Human
caggggccccg

SEQ ID NO: 2391385 - RNA, 13 nt, Human
caggggccccucc

SEQ ID NO: 2391386 - RNA, 15 nt, Human
caggggccccuccag

SEQ ID NO: 2391387 - RNA, 16 nt, Human
caggggccccuccagc

SEQ ID NO: 2391388 - RNA, 17 nt, Human
caggggccccuccagcu

SEQ ID NO: 2391389 - RNA, 18 nt, Human
caggggccccuccagcuu

SEQ ID NO: 2391390 - RNA, 19 nt, Human
caggggaggguagagcgga

SEQ ID NO: 2391391 - RNA, 20 nt, Human
caggggauugaagcccucca

SEQ ID NO: 2391392 - RNA, 14 nt, Human
caggggcaggagga

SEQ ID NO: 2391393 - RNA, 18 nt, Human
caggggagucccgucagg

SEQ ID NO: 2391394 - RNA, 16 nt, Human
caggggauggcguggu

SEQ ID NO: 2391395 - RNA, 22 nt, Human
caggggauggcguggucaagca

SEQ ID NO: 2391396 - RNA, 14 nt, Human
caggggauugaagc

SEQ ID NO: 2391397 - RNA, 17 nt, Human
caggggauugaagcccu

SEQ ID NO: 2391398 - RNA, 19 nt, Human
caggggcuggcuucaggag

SEQ ID NO: 2391399 - RNA, 15 nt, Human
caggggcuggcuuca

SEQ ID NO: 2391400 - RNA, 17 nt, Human
caggggcuggcuucagg

SEQ ID NO: 2391401 - RNA, 22 nt, Human
caggggcugcuuccuccuggaa

SEQ ID NO: 2391402 - RNA, 12 nt, Human
caggggcuggcu

SEQ ID NO: 2391403 - RNA, 13 nt, Human
caggggcuggcuu

SEQ ID NO: 2391404 - RNA, 16 nt, Human
caggggcugcuuccuc

SEQ ID NO: 2391405 - RNA, 18 nt, Human
caggggcugcuuccuccu

SEQ ID NO: 2391406 - RNA, 19 nt, Human
caggggcugcuuccuccug

SEQ ID NO: 2391407 - RNA, 20 nt, Human
caggggcugcuuccuccugg

SEQ ID NO: 2391408 - RNA, 13 nt, Human
caggggcugcuuc

SEQ ID NO: 2391409 - RNA, 19 nt, Human
caggggcugcccgcuccca

SEQ ID NO: 2391410 - RNA, 20 nt, Human
caggggcugcccgcucccag

SEQ ID NO: 2391411 - RNA, 13 nt, Human
caggggcugcccg

SEQ ID NO: 2391412 - RNA, 14 nt, Human
caggggcugcccgc

SEQ ID NO: 2391413 - RNA, 16 nt, Human
caggggcugcccgcuc

SEQ ID NO: 2391414 - RNA, 18 nt, Human
caggggcugcccgcuccc

SEQ ID NO: 2391415 - RNA, 15 nt, Human
caggggcucuggaga

SEQ ID NO: 2391416 - RNA, 16 nt, Human
caggggcucuggagag

SEQ ID NO: 2391417 - RNA, 17 nt, Human
caggggcucuggagaga

SEQ ID NO: 2391418 - RNA, 18 nt, Human
caggggcucuggagagaa

SEQ ID NO: 2391419 - RNA, 20 nt, Human
caggggcucuggagagaaac

SEQ ID NO: 2391420 - RNA, 19 nt, Human
caggggcucuggagagaaa

SEQ ID NO: 2391421 - RNA, 12 nt, Human
caggggcugccc

SEQ ID NO: 2391422 - RNA, 18 nt, Human
caggggcguguggcucac

SEQ ID NO: 2391423 - RNA, 15 nt, Human
caggggcguggaggg

SEQ ID NO: 2391424 - RNA, 17 nt, Human
caggggcuacaagaggg

SEQ ID NO: 2391425 - RNA, 18 nt, Human
caggggcuacaagaggga

SEQ ID NO: 2391426 - RNA, 23 nt, Human
caggggccuggagauccuccugc

SEQ ID NO: 2391427 - RNA, 19 nt, Human
caggggcuacaagagggaa

SEQ ID NO: 2391428 - RNA, 13 nt, Human
caggggcucugga

SEQ ID NO: 2391429 - RNA, 14 nt, Human
caggggcucuggag

SEQ ID NO: 2391430 - RNA, 12 nt, Human
caggggccugga

SEQ ID NO: 2391431 - RNA, 13 nt, Human
caggggccuggag

SEQ ID NO: 2391432 - RNA, 14 nt, Human
caggggccuggaga

SEQ ID NO: 2391433 - RNA, 15 nt, Human
caggggccuggagau

SEQ ID NO: 2391434 - RNA, 22 nt, Human
caggggccuggagauccuccug

SEQ ID NO: 2391435 - RNA, 14 nt, Human
cagggccuugccca

SEQ ID NO: 2391436 - RNA, 13 nt, Human
cagggccuugccc

SEQ ID NO: 2391437 - RNA, 22 nt, Human
cagggccuggggagauggagga

SEQ ID NO: 2391438 - RNA, 16 nt, Human
cagggccuggcucagg

SEQ ID NO: 2391439 - RNA, 19 nt, Human
cagggccuggcucaggugg

SEQ ID NO: 2391440 - RNA, 17 nt, Human
cagggccuggaagacag

SEQ ID NO: 2391441 - RNA, 18 nt, Human
cagggccuggaagacaga

SEQ ID NO: 2391442 - RNA, 19 nt, Human
cagggccuggaagacagag

SEQ ID NO: 2391443 - RNA, 13 nt, Human
cagggccuggcuc

SEQ ID NO: 2391444 - RNA, 14 nt, Human
cagggccuggcuca

SEQ ID NO: 2391445 - RNA, 15 nt, Human
cagggccuggcucag

SEQ ID NO: 2391446 - RNA, 24 nt, Human
cagggccuugcccagagaugccuc

SEQ ID NO: 2391447 - RNA, 20 nt, Human
cagggccuugcccagagaug

SEQ ID NO: 2391448 - RNA, 19 nt, Human
cagggccuugcccagagau

SEQ ID NO: 2391449 - RNA, 18 nt, Human
cagggccuugcccagaga

SEQ ID NO: 2391450 - RNA, 17 nt, Human
cagggccuugcccagag

SEQ ID NO: 2391451 - RNA, 16 nt, Human
cagggccuugcccaga

SEQ ID NO: 2391452 - RNA, 15 nt, Human
cagggccuugcccag

SEQ ID NO: 2391453 - RNA, 13 nt, Human
cagggcgagacuc

SEQ ID NO: 2391454 - RNA, 11 nt, Human
caggggacagg

SEQ ID NO: 2391455 - RNA, 16 nt, Human
caggggacaggauggu

SEQ ID NO: 2391456 - RNA, 21 nt, Human
caggggacucagcccugaggu

SEQ ID NO: 2391457 - RNA, 20 nt, Human
caggggacucagcccugagg

SEQ ID NO: 2391458 - RNA, 18 nt, Human
caggggacucagcccuga

SEQ ID NO: 2391459 - RNA, 17 nt, Human
caggggacucagcccug

SEQ ID NO: 2391460 - RNA, 15 nt, Human
caggggacucagccc

SEQ ID NO: 2391461 - RNA, 17 nt, Human
caggggaccacaccucc

SEQ ID NO: 2391462 - RNA, 15 nt, Human
caggggaccacaccu

SEQ ID NO: 2391463 - RNA, 16 nt, Human
caggggacaggagucc

SEQ ID NO: 2391464 - RNA, 22 nt, Human
caggggacaggaguccacuuug

SEQ ID NO: 2391465 - RNA, 21 nt, Human
caggggagagggucuggagaa

SEQ ID NO: 2391466 - RNA, 20 nt, Human
caggggagagggucuggaga

SEQ ID NO: 2391467 - RNA, 23 nt, Human
caggggacucagcccugagguga

SEQ ID NO: 2391468 - RNA, 17 nt, Human
caggggagagggucugg

SEQ ID NO: 2391469 - RNA, 21 nt, Human
caggggagcccuccacgccgg

SEQ ID NO: 2391470 - RNA, 13 nt, Human
caggggagcccuc

SEQ ID NO: 2391471 - RNA, 15 nt, Human
caggggagcccucca

SEQ ID NO: 2391472 - RNA, 12 nt, Human
caggggagcccu

SEQ ID NO: 2391473 - RNA, 13 nt, Human
cagggggccaggu

SEQ ID NO: 2391474 - RNA, 16 nt, Human
cagggggccaggugca

SEQ ID NO: 2391475 - RNA, 22 nt, Human
cagggggccagucccugaggca

SEQ ID NO: 2391476 - RNA, 11 nt, Human
cagggggccag

SEQ ID NO: 2391477 - RNA, 18 nt, Human
cagggggacuagccccug

SEQ ID NO: 2391478 - RNA, 19 nt, Human
cagggggaagguggggucc

SEQ ID NO: 2391479 - RNA, 12 nt, Human
caggggcuguuu

SEQ ID NO: 2391480 - RNA, 15 nt, Human
caggggcuguuugag

SEQ ID NO: 2391481 - RNA, 19 nt, Human
cagggggccaggugcacag

SEQ ID NO: 2391482 - RNA, 20 nt, Human
cagggggcccaccagagcug

SEQ ID NO: 2391483 - RNA, 21 nt, Human
cagggggcccaccagagcugu

SEQ ID NO: 2391484 - RNA, 15 nt, Human
caggggggugaggag

SEQ ID NO: 2391485 - RNA, 19 nt, Human
caggggggugaggagcugg

SEQ ID NO: 2391486 - RNA, 18 nt, Human
caggggggugaggagcug

SEQ ID NO: 2391487 - RNA, 19 nt, Human
cagggggguugugaggccu

SEQ ID NO: 2391488 - RNA, 20 nt, Human
cagggggguugugaggccug

SEQ ID NO: 2391489 - RNA, 20 nt, Human
caggggugcccccuccucuc

SEQ ID NO: 2391490 - RNA, 14 nt, Human
caggcucucaacag

SEQ ID NO: 2391491 - RNA, 13 nt, Human
caggcucucaaca

SEQ ID NO: 2391492 - RNA, 23 nt, Human
caggcucugcccugcccuagcuc

SEQ ID NO: 2391493 - RNA, 22 nt, Human
caggcucugcccugcccuagcu

SEQ ID NO: 2391494 - RNA, 21 nt, Human
caggcucugcccugcccuagc

SEQ ID NO: 2391495 - RNA, 15 nt, Human
caggcucugcccugc

SEQ ID NO: 2391496 - RNA, 13 nt, Human
caggcucugcccu

SEQ ID NO: 2391497 - RNA, 14 nt, Human
caggcucugcccug

SEQ ID NO: 2391498 - RNA, 21 nt, Human
caggcucucaggccagcugcu

SEQ ID NO: 2391499 - RNA, 23 nt, Human
caggcucucaggccagcugcuug

SEQ ID NO: 2391500 - RNA, 17 nt, Human
caggcucucaggccagc

SEQ ID NO: 2391501 - RNA, 18 nt, Human
caggcucucaggccagcu

SEQ ID NO: 2391502 - RNA, 19 nt, Human
caggcucucaggccagcug

SEQ ID NO: 2391503 - RNA, 20 nt, Human
caggcucucaggccagcugc

SEQ ID NO: 2391504 - RNA, 20 nt, Human
caggcuccuuccugucuucc

SEQ ID NO: 2391505 - RNA, 18 nt, Human
caggcuccuuccugucuu

SEQ ID NO: 2391506 - RNA, 21 nt, Human
caggcuccuuccugucuuccu

SEQ ID NO: 2391507 - RNA, 21 nt, Human
caggcuccuuuagcgcccagu

SEQ ID NO: 2391508 - RNA, 20 nt, Human
caggcucgggcuccccagcc

SEQ ID NO: 2391509 - RNA, 12 nt, Human
caggcucucagg

SEQ ID NO: 2391510 - RNA, 13 nt, Human
caggcucucaggc

SEQ ID NO: 2391511 - RNA, 14 nt, Human
caggcucucaggcc

SEQ ID NO: 2391512 - RNA, 15 nt, Human
caggcucucaggcca

SEQ ID NO: 2391513 - RNA, 16 nt, Human
caggcucucaggccag

SEQ ID NO: 2391514 - RNA, 23 nt, Human
caggccgccccagccucugagcc

SEQ ID NO: 2391515 - RNA, 14 nt, Human
caggccgcccugcg

SEQ ID NO: 2391516 - RNA, 14 nt, Human
caggcuacugucag

SEQ ID NO: 2391517 - RNA, 13 nt, Human
caggcuagaugua

SEQ ID NO: 2391518 - RNA, 19 nt, Human
caggcuagauguauguacu

SEQ ID NO: 2391519 - RNA, 15 nt, Human
caggcuagaaccugg

SEQ ID NO: 2391520 - RNA, 19 nt, Human
caggccggcgagcccugug

SEQ ID NO: 2391521 - RNA, 16 nt, Human
caggcuagagugcagu

SEQ ID NO: 2391522 - RNA, 13 nt, Human
caggcucacugcc

SEQ ID NO: 2391523 - RNA, 14 nt, Human
caggcucacugcca

SEQ ID NO: 2391524 - RNA, 15 nt, Human
caggcucacugccag

SEQ ID NO: 2391525 - RNA, 16 nt, Human
caggcucacugccagg

SEQ ID NO: 2391526 - RNA, 23 nt, Human
caggcucacugccaggccagccu

SEQ ID NO: 2391527 - RNA, 18 nt, Human
caggcucacugccaggcc

SEQ ID NO: 2391528 - RNA, 20 nt, Human
caggcucacugccaggccag

SEQ ID NO: 2391529 - RNA, 21 nt, Human
caggcucacugccaggccagc

SEQ ID NO: 2391530 - RNA, 22 nt, Human
caggcucacugccaggccagcc

SEQ ID NO: 2391531 - RNA, 14 nt, Human
caggcuccuuuagc

SEQ ID NO: 2391532 - RNA, 17 nt, Human
caggcuccuuccugucu

SEQ ID NO: 2391533 - RNA, 14 nt, Human
caggcuccuuccug

SEQ ID NO: 2391534 - RNA, 13 nt, Human
caggcuccuuccu

SEQ ID NO: 2391535 - RNA, 12 nt, Human
caggcuccuucc

SEQ ID NO: 2391536 - RNA, 18 nt, Human
caggcuccugccaccacg

SEQ ID NO: 2391537 - RNA, 19 nt, Human
caggcuccuuuagcgccca

SEQ ID NO: 2391538 - RNA, 20 nt, Human
caggcuccuuuagcgcccag

SEQ ID NO: 2391539 - RNA, 22 nt, Human
caggcucauagggaagaccugc

SEQ ID NO: 2391540 - RNA, 16 nt, Human
caggcuccugccacca

SEQ ID NO: 2391541 - RNA, 15 nt, Human
caggcuccugccacc

SEQ ID NO: 2391542 - RNA, 14 nt, Human
caggcuccugccac

SEQ ID NO: 2391543 - RNA, 13 nt, Human
caggcuccugcca

SEQ ID NO: 2391544 - RNA, 21 nt, Human
caggccgccccagccucugag

SEQ ID NO: 2391545 - RNA, 20 nt, Human
caggccgccccagccucuga

SEQ ID NO: 2391546 - RNA, 18 nt, Human
caggccgccccagccucu

SEQ ID NO: 2391547 - RNA, 16 nt, Human
caggccgccccagccu

SEQ ID NO: 2391548 - RNA, 14 nt, Human
caggccgccccagc

SEQ ID NO: 2391549 - RNA, 22 nt, Human
caggccgcagcucuugcccuuc

SEQ ID NO: 2391550 - RNA, 15 nt, Human
caggccgcagcucuu

SEQ ID NO: 2391551 - RNA, 18 nt, Human
caggccgcagcucuugcc

SEQ ID NO: 2391552 - RNA, 22 nt, Human
caggcccugcacuguccugcuc

SEQ ID NO: 2391553 - RNA, 17 nt, Human
caggcccuuuccucagg

SEQ ID NO: 2391554 - RNA, 16 nt, Human
caggcccuuuccucag

SEQ ID NO: 2391555 - RNA, 18 nt, Human
caggccgagaagccagug

SEQ ID NO: 2391556 - RNA, 13 nt, Human
caggccgcagcuc

SEQ ID NO: 2391557 - RNA, 14 nt, Human
caggccgcagcucu

SEQ ID NO: 2391558 - RNA, 19 nt, Human
caggcccuuccucuccacu

SEQ ID NO: 2391559 - RNA, 20 nt, Human
caggcccuuccucuccacug

SEQ ID NO: 2391560 - RNA, 21 nt, Human
caggcccuuccucuccacugc

SEQ ID NO: 2391561 - RNA, 23 nt, Human
caggcccuuccucuccacugccu

SEQ ID NO: 2391562 - RNA, 16 nt, Human
caggcccuuccucucc

SEQ ID NO: 2391563 - RNA, 17 nt, Human
caggcccuuccucucca

SEQ ID NO: 2391564 - RNA, 15 nt, Human
caggcccuuccucuc

SEQ ID NO: 2391565 - RNA, 21 nt, Human
caggcccuuauuuucaagaaa

SEQ ID NO: 2391566 - RNA, 22 nt, Human
caggcccuggccuccccugcca

SEQ ID NO: 2391567 - RNA, 14 nt, Human
caggcccuggccuc

SEQ ID NO: 2391568 - RNA, 19 nt, Human
caggcccugcacuguccug

SEQ ID NO: 2391569 - RNA, 20 nt, Human
caggcccugcacuguccugc

SEQ ID NO: 2391570 - RNA, 15 nt, Human
caggcccugcacugu

SEQ ID NO: 2391571 - RNA, 16 nt, Human
caggcccugcacuguc

SEQ ID NO: 2391572 - RNA, 17 nt, Human
caggcccugcacugucc

SEQ ID NO: 2391573 - RNA, 18 nt, Human
caggcccugcacuguccu

SEQ ID NO: 2391574 - RNA, 15 nt, Human
caggcccuggccucc

SEQ ID NO: 2391575 - RNA, 17 nt, Human
caggcccuggccucccc

SEQ ID NO: 2391576 - RNA, 18 nt, Human
caggcccuggccuccccu

SEQ ID NO: 2391577 - RNA, 20 nt, Human
caggcccuggccuccccugc

SEQ ID NO: 2391578 - RNA, 16 nt, Human
caggcccucugcccac

SEQ ID NO: 2391579 - RNA, 17 nt, Human
caggcccucugcccacu

SEQ ID NO: 2391580 - RNA, 19 nt, Human
caggcccucugcccacucc

SEQ ID NO: 2391581 - RNA, 20 nt, Human
caggcccucugcccacuccc

SEQ ID NO: 2391582 - RNA, 11 nt, Human
caggcccugca

SEQ ID NO: 2391583 - RNA, 12 nt, Human
caggcccugcac

SEQ ID NO: 2391584 - RNA, 13 nt, Human
caggcccugcacu

SEQ ID NO: 2391585 - RNA, 14 nt, Human
caggcccugcacug

SEQ ID NO: 2391586 - RNA, 23 nt, Human
caggcccugcacuguccugcucc

SEQ ID NO: 2391587 - RNA, 21 nt, Human
caggcccucugcccacucccu

SEQ ID NO: 2391588 - RNA, 22 nt, Human
caggcccucugcccacucccug

SEQ ID NO: 2391589 - RNA, 14 nt, Human
caggcccggggcug

SEQ ID NO: 2391590 - RNA, 19 nt, Human
caggcccggcgcgguggcu

SEQ ID NO: 2391591 - RNA, 22 nt, Human
caggcccucccuguuccccaga

SEQ ID NO: 2391592 - RNA, 15 nt, Human
caggcccggggcugg

SEQ ID NO: 2391593 - RNA, 23 nt, Human
caggcccucccuguuccccagag

SEQ ID NO: 2391594 - RNA, 13 nt, Human
caggcccucugcc

SEQ ID NO: 2391595 - RNA, 14 nt, Human
caggcccucugccc

SEQ ID NO: 2391596 - RNA, 15 nt, Human
caggcccucugccca

SEQ ID NO: 2391597 - RNA, 22 nt, Human
caggcccggcuccaggcuccuu

SEQ ID NO: 2391598 - RNA, 16 nt, Human
caggcccggggcuggc

SEQ ID NO: 2391599 - RNA, 18 nt, Human
caggcccggcgcgguggc

SEQ ID NO: 2391600 - RNA, 20 nt, Human
caggcccggcuccaggcucc

SEQ ID NO: 2391601 - RNA, 21 nt, Human
caggcccggcuccaggcuccu

SEQ ID NO: 2391602 - RNA, 17 nt, Human
caggcccggcuccaggc

SEQ ID NO: 2391603 - RNA, 16 nt, Human
caggcccggcuccagg

SEQ ID NO: 2391604 - RNA, 18 nt, Human
caggcccggcuccaggcu

SEQ ID NO: 2391605 - RNA, 19 nt, Human
caggcccggcuccaggcuc

SEQ ID NO: 2391606 - RNA, 15 nt, Human
cagggaaaagcagcu

SEQ ID NO: 2391607 - RNA, 23 nt, Human
caggcuuuguuuauagcuugcgc

SEQ ID NO: 2391608 - RNA, 23 nt, Human
caggcuuuuuuaucaugugaaau

SEQ ID NO: 2391609 - RNA, 15 nt, Human
caggcuugccugcag

SEQ ID NO: 2391610 - RNA, 16 nt, Human
caggcuugccugcagg

SEQ ID NO: 2391611 - RNA, 17 nt, Human
caggcuugccugcaggc

SEQ ID NO: 2391612 - RNA, 18 nt, Human
caggcuugccugcaggca

SEQ ID NO: 2391613 - RNA, 14 nt, Human
caggcuuccuuggc

SEQ ID NO: 2391614 - RNA, 15 nt, Human
caggcuucacccuga

SEQ ID NO: 2391615 - RNA, 22 nt, Human
caggcuucacccugaaugguuc

SEQ ID NO: 2391616 - RNA, 22 nt, Human
caggcuuagucacugagacagc

SEQ ID NO: 2391617 - RNA, 23 nt, Human
caggcuuagucacugagacagcc

SEQ ID NO: 2391618 - RNA, 23 nt, Human
caggcuggucucaaacuccugac

SEQ ID NO: 2391619 - RNA, 13 nt, Human
caggcuggucuca

SEQ ID NO: 2391620 - RNA, 12 nt, Human
caggcuggucuc

SEQ ID NO: 2391621 - RNA, 19 nt, Human
caggcuggucucaaacucu

SEQ ID NO: 2391622 - RNA, 22 nt, Human
caggcuggucucgaacuccuga

SEQ ID NO: 2391623 - RNA, 20 nt, Human
caggcuggucucgaacuccu

SEQ ID NO: 2391624 - RNA, 14 nt, Human
caggcuguauccca

SEQ ID NO: 2391625 - RNA, 23 nt, Human
caggcuggucucgaacuccugac

SEQ ID NO: 2391626 - RNA, 18 nt, Human
caggcuggugggaggggc

SEQ ID NO: 2391627 - RNA, 15 nt, Human
caggcuggugggagg

SEQ ID NO: 2391628 - RNA, 20 nt, Human
caggcuguaucccaugagcc

SEQ ID NO: 2391629 - RNA, 21 nt, Human
caggcuguaucccaugagccu

SEQ ID NO: 2391630 - RNA, 22 nt, Human
caggcuguaucccaugagccuc

SEQ ID NO: 2391631 - RNA, 23 nt, Human
caggcuguaucccaugagccuca

SEQ ID NO: 2391632 - RNA, 17 nt, Human
caggcugugggccucaa

SEQ ID NO: 2391633 - RNA, 16 nt, Human
caggcugugggccuca

SEQ ID NO: 2391634 - RNA, 22 nt, Human
caggcugugcgcugacaaccac

SEQ ID NO: 2391635 - RNA, 19 nt, Human
caggcugugcgcugacaac

SEQ ID NO: 2391636 - RNA, 16 nt, Human
caggcugucuggccag

SEQ ID NO: 2391637 - RNA, 17 nt, Human
caggcugucuggccagg

SEQ ID NO: 2391638 - RNA, 14 nt, Human
caggcugugaguuu

SEQ ID NO: 2391639 - RNA, 16 nt, Human
caggcuuagucacuga

SEQ ID NO: 2391640 - RNA, 17 nt, Human
caggcuuagucacugag

SEQ ID NO: 2391641 - RNA, 20 nt, Human
caggcuuagucacugagaca

SEQ ID NO: 2391642 - RNA, 21 nt, Human
caggcuuagucacugagacag

SEQ ID NO: 2391643 - RNA, 18 nt, Human
caggcucuucuccuuuca

SEQ ID NO: 2391644 - RNA, 22 nt, Human
caggcucuucuccuuucacaac

SEQ ID NO: 2391645 - RNA, 14 nt, Human
caggcugaccacag

SEQ ID NO: 2391646 - RNA, 22 nt, Human
caggcucuuuggggucagccag

SEQ ID NO: 2391647 - RNA, 14 nt, Human
caggcugacaucug

SEQ ID NO: 2391648 - RNA, 18 nt, Human
caggcugaagcagguucc

SEQ ID NO: 2391649 - RNA, 23 nt, Human
caggcucuuuggggucagccagg

SEQ ID NO: 2391650 - RNA, 12 nt, Human
caggcugagccu

SEQ ID NO: 2391651 - RNA, 22 nt, Human
caggcugaccacagcacagcca

SEQ ID NO: 2391652 - RNA, 21 nt, Human
caggcugaccacagcacagcc

SEQ ID NO: 2391653 - RNA, 20 nt, Human
caggcugaccacagcacagc

SEQ ID NO: 2391654 - RNA, 17 nt, Human
caggcugaccacagcac

SEQ ID NO: 2391655 - RNA, 15 nt, Human
caggcugaccacagc

SEQ ID NO: 2391656 - RNA, 14 nt, Human
caggcucuucuccu

SEQ ID NO: 2391657 - RNA, 15 nt, Human
caggcucuucuccuu

SEQ ID NO: 2391658 - RNA, 12 nt, Human
caggcucuucuc

SEQ ID NO: 2391659 - RNA, 21 nt, Human
caggcucuuagcagcuuccag

SEQ ID NO: 2391660 - RNA, 22 nt, Human
caggcucuuagcagcuuccaga

SEQ ID NO: 2391661 - RNA, 12 nt, Human
caggcucuuagc

SEQ ID NO: 2391662 - RNA, 23 nt, Human
caggcucugugcugacccuccug

SEQ ID NO: 2391663 - RNA, 24 nt, Human
caggcucugugcugacccuccugu

SEQ ID NO: 2391664 - RNA, 15 nt, Human
caggcucuuagcagc

SEQ ID NO: 2391665 - RNA, 18 nt, Human
caggcucuuagcagcuuc

SEQ ID NO: 2391666 - RNA, 17 nt, Human
caggcucugccucaccu

SEQ ID NO: 2391667 - RNA, 13 nt, Human
caggcucugugcu

SEQ ID NO: 2391668 - RNA, 14 nt, Human
caggcucugugcug

SEQ ID NO: 2391669 - RNA, 15 nt, Human
caggcucugugcuga

SEQ ID NO: 2391670 - RNA, 18 nt, Human
caggcucugugcugaccc

SEQ ID NO: 2391671 - RNA, 19 nt, Human
caggcucugugcugacccu

SEQ ID NO: 2391672 - RNA, 21 nt, Human
caggcucugugcugacccucc

SEQ ID NO: 2391673 - RNA, 22 nt, Human
caggcucugugcugacccuccu

SEQ ID NO: 2391674 - RNA, 16 nt, Human
caggcugccguggggc

SEQ ID NO: 2391675 - RNA, 21 nt, Human
caggcugccaaggccagagug

SEQ ID NO: 2391676 - RNA, 22 nt, Human
caggcugccaaggccagagugg

SEQ ID NO: 2391677 - RNA, 11 nt, Human
caggcugaggu

SEQ ID NO: 2391678 - RNA, 16 nt, Human
caggcugacaucugug

SEQ ID NO: 2391679 - RNA, 21 nt, Human
caggcugagccucagucuccc

SEQ ID NO: 2391680 - RNA, 17 nt, Human
caggcugagccucaguc

SEQ ID NO: 2391681 - RNA, 16 nt, Human
caggcugagccucagu

SEQ ID NO: 2391682 - RNA, 15 nt, Human
caggcugagccucag

SEQ ID NO: 2391683 - RNA, 14 nt, Human
caggcugagccuca

SEQ ID NO: 2391684 - RNA, 13 nt, Human
caggcugagccuc

SEQ ID NO: 2391685 - RNA, 23 nt, Human
caggcugggcuucaguggcagcu

SEQ ID NO: 2391686 - RNA, 21 nt, Human
caggcugggucgcccuggacu

SEQ ID NO: 2391687 - RNA, 23 nt, Human
caggcugggucgcccuggacugu

SEQ ID NO: 2391688 - RNA, 21 nt, Human
caggcuggccaguccaggcug

SEQ ID NO: 2391689 - RNA, 13 nt, Human
caggcuggggcug

SEQ ID NO: 2391690 - RNA, 18 nt, Human
caggcuggggcugaccuu

SEQ ID NO: 2391691 - RNA, 16 nt, Human
caggcuggcccugccc

SEQ ID NO: 2391692 - RNA, 15 nt, Human
caggcuggcccugcc

SEQ ID NO: 2391693 - RNA, 14 nt, Human
caggcuggcccugc

SEQ ID NO: 2391694 - RNA, 12 nt, Human
caggcuggcccu

SEQ ID NO: 2391695 - RNA, 14 nt, Human
caggcuggccaguc

SEQ ID NO: 2391696 - RNA, 16 nt, Human
caggcuggccagucca

SEQ ID NO: 2391697 - RNA, 18 nt, Human
caggcuggccaguccagg

SEQ ID NO: 2391698 - RNA, 19 nt, Human
caggcuggccaguccaggc

SEQ ID NO: 2391699 - RNA, 16 nt, Human
caggcuggccagcccc

SEQ ID NO: 2391700 - RNA, 17 nt, Human
caggcuggccagcccca

SEQ ID NO: 2391701 - RNA, 18 nt, Human
caggcuggccagccccac

SEQ ID NO: 2391702 - RNA, 19 nt, Human
caggcuggccagccccaca

SEQ ID NO: 2391703 - RNA, 20 nt, Human
caggcuggccagccccacag

SEQ ID NO: 2391704 - RNA, 21 nt, Human
caggcuggccagccccacagc

SEQ ID NO: 2391705 - RNA, 23 nt, Human
caggcuggccagccccacagccc

SEQ ID NO: 2391706 - RNA, 21 nt, Human
caggcuggcaccgccuucucu

SEQ ID NO: 2391707 - RNA, 13 nt, Human
caggcuggcagcu

SEQ ID NO: 2391708 - RNA, 20 nt, Human
caggcuggcaccgccuucuc

SEQ ID NO: 2391709 - RNA, 21 nt, Human
caggcuggagguaaggccuuu

SEQ ID NO: 2391710 - RNA, 15 nt, Human
caggcuggcagcucu

SEQ ID NO: 2391711 - RNA, 16 nt, Human
caggcuggcagcucuc

SEQ ID NO: 2391712 - RNA, 17 nt, Human
caggcuggcagcucucc

SEQ ID NO: 2391713 - RNA, 18 nt, Human
caggcuggcagcucucca

SEQ ID NO: 2391714 - RNA, 12 nt, Human
caggcuggccag

SEQ ID NO: 2391715 - RNA, 19 nt, Human
caggcuggcagcucuccag

SEQ ID NO: 2391716 - RNA, 20 nt, Human
caggcuggcagcucuccagu

SEQ ID NO: 2391717 - RNA, 11 nt, Human
caggcuggcca

SEQ ID NO: 2391718 - RNA, 13 nt, Human
caggcuggccagc

SEQ ID NO: 2391719 - RNA, 14 nt, Human
caggcuggccagcc

SEQ ID NO: 2391720 - RNA, 15 nt, Human
caggcuggccagccc

SEQ ID NO: 2391721 - RNA, 15 nt, Human
caggcugcuugggau

SEQ ID NO: 2391722 - RNA, 12 nt, Human
caggcugcuugg

SEQ ID NO: 2391723 - RNA, 14 nt, Human
caggcuggacgugg

SEQ ID NO: 2391724 - RNA, 21 nt, Human
caggcugcuggcgccucugca

SEQ ID NO: 2391725 - RNA, 20 nt, Human
caggcuggagguaaggccuu

SEQ ID NO: 2391726 - RNA, 16 nt, Human
caggcugcuggaggaa

SEQ ID NO: 2391727 - RNA, 12 nt, Human
caggcugcuggc

SEQ ID NO: 2391728 - RNA, 13 nt, Human
caggcugcuggcg

SEQ ID NO: 2391729 - RNA, 16 nt, Human
caggcugcuggcgccu

SEQ ID NO: 2391730 - RNA, 18 nt, Human
caggcugcuggcgccucu

SEQ ID NO: 2391731 - RNA, 20 nt, Human
caggcugcuggcgccucugc

SEQ ID NO: 2391732 - RNA, 22 nt, Human
caggcugcuggcgccucugcaa

SEQ ID NO: 2391733 - RNA, 15 nt, Human
caggcugcuggagga

SEQ ID NO: 2391734 - RNA, 14 nt, Human
caggcugcuggagg

SEQ ID NO: 2391735 - RNA, 12 nt, Human
caggcugcugga

SEQ ID NO: 2391736 - RNA, 11 nt, Human
caggcugcugg

SEQ ID NO: 2391737 - RNA, 23 nt, Human
caggcugcucuugaacuccugac

SEQ ID NO: 2391738 - RNA, 17 nt, Human
caggcugcucagggcug

SEQ ID NO: 2391739 - RNA, 18 nt, Human
caggcugcucagggcugg

SEQ ID NO: 2391740 - RNA, 20 nt, Human
caggcugcucuugaacuccu

SEQ ID NO: 2391741 - RNA, 12 nt, Human
caggcugcucuu

SEQ ID NO: 2391742 - RNA, 18 nt, Human
caggccccaggcagggcc

SEQ ID NO: 2391743 - RNA, 17 nt, Human
caggccccaggaagccg

SEQ ID NO: 2391744 - RNA, 16 nt, Human
caggccccaggaagcc

SEQ ID NO: 2391745 - RNA, 15 nt, Human
caggccccaggaagc

SEQ ID NO: 2391746 - RNA, 14 nt, Human
caggccccaggaag

SEQ ID NO: 2391747 - RNA, 13 nt, Human
caggccccaggaa

SEQ ID NO: 2391748 - RNA, 13 nt, Human
caggccccagcaa

SEQ ID NO: 2391749 - RNA, 13 nt, Human
caggcccccaagc

SEQ ID NO: 2391750 - RNA, 23 nt, Human
caggccccaaaaccacagcccug

SEQ ID NO: 2391751 - RNA, 22 nt, Human
caggccccaaaaccacagcccu

SEQ ID NO: 2391752 - RNA, 19 nt, Human
caggccccaaaaccacagc

SEQ ID NO: 2391753 - RNA, 17 nt, Human
caggccccaaaaccaca

SEQ ID NO: 2391754 - RNA, 15 nt, Human
caggccccaggaaag

SEQ ID NO: 2391755 - RNA, 22 nt, Human
caggcccagcauugcugguucu

SEQ ID NO: 2391756 - RNA, 18 nt, Human
caggccauggaggcagaa

SEQ ID NO: 2391757 - RNA, 21 nt, Human
caggccauuccccgucucugg

SEQ ID NO: 2391758 - RNA, 19 nt, Human
caggcccaagagaugaaga

SEQ ID NO: 2391759 - RNA, 18 nt, Human
caggcccaagagaugaag

SEQ ID NO: 2391760 - RNA, 13 nt, Human
caggcccacagua

SEQ ID NO: 2391761 - RNA, 10 nt, Human
caggcccagc

SEQ ID NO: 2391762 - RNA, 11 nt, Human
caggcccagca

SEQ ID NO: 2391763 - RNA, 12 nt, Human
caggcccagcau

SEQ ID NO: 2391764 - RNA, 19 nt, Human
caggcccagcauugcuggu

SEQ ID NO: 2391765 - RNA, 20 nt, Human
caggcccagcauugcugguu

SEQ ID NO: 2391766 - RNA, 21 nt, Human
caggcccagcauugcugguuc

SEQ ID NO: 2391767 - RNA, 15 nt, Human
caggcccccaccacu

SEQ ID NO: 2391768 - RNA, 17 nt, Human
caggcccccaagccugc

SEQ ID NO: 2391769 - RNA, 15 nt, Human
caggcccccaagccu

SEQ ID NO: 2391770 - RNA, 19 nt, Human
caggcccccaagccugcag

SEQ ID NO: 2391771 - RNA, 18 nt, Human
caggcccccaagccugca

SEQ ID NO: 2391772 - RNA, 21 nt, Human
caggcccccagaaccccuggc

SEQ ID NO: 2391773 - RNA, 19 nt, Human
caggcccccaggugccagu

SEQ ID NO: 2391774 - RNA, 14 nt, Human
caggcccccaggug

SEQ ID NO: 2391775 - RNA, 23 nt, Human
caggccccgcuuguccagcgccu

SEQ ID NO: 2391776 - RNA, 22 nt, Human
caggccccgcuuguccagcgcc

SEQ ID NO: 2391777 - RNA, 19 nt, Human
caggccccgcuuguccagc

SEQ ID NO: 2391778 - RNA, 18 nt, Human
caggccccgcuuguccag

SEQ ID NO: 2391779 - RNA, 17 nt, Human
caggccccgcuugucca

SEQ ID NO: 2391780 - RNA, 23 nt, Human
caggccccgaggacccagaccca

SEQ ID NO: 2391781 - RNA, 21 nt, Human
caggccccgaggacccagacc

SEQ ID NO: 2391782 - RNA, 22 nt, Human
caggccccgaggacccagaccc

SEQ ID NO: 2391783 - RNA, 13 nt, Human
caggccccugcca

SEQ ID NO: 2391784 - RNA, 17 nt, Human
caggccccgaggaccca

SEQ ID NO: 2391785 - RNA, 18 nt, Human
caggccccgaggacccag

SEQ ID NO: 2391786 - RNA, 20 nt, Human
caggccccgaggacccagac

SEQ ID NO: 2391787 - RNA, 20 nt, Human
caggcccccaggugccaguu

SEQ ID NO: 2391788 - RNA, 23 nt, Human
caggccacauggggcugggcagc

SEQ ID NO: 2391789 - RNA, 13 nt, Human
caggccaccagga

SEQ ID NO: 2391790 - RNA, 15 nt, Human
caggccaccaggaug

SEQ ID NO: 2391791 - RNA, 16 nt, Human
caggccaccaggaugg

SEQ ID NO: 2391792 - RNA, 20 nt, Human
caggccacaagacccuugug

SEQ ID NO: 2391793 - RNA, 21 nt, Human
caggccaggcccucugcccac

SEQ ID NO: 2391794 - RNA, 22 nt, Human
caggccaggcccucugcccacu

SEQ ID NO: 2391795 - RNA, 21 nt, Human
caggccaggcuccuuccuguc

SEQ ID NO: 2391796 - RNA, 16 nt, Human
caggccaguaagggaa

SEQ ID NO: 2391797 - RNA, 16 nt, Human
caggccaggugcagug

SEQ ID NO: 2391798 - RNA, 18 nt, Human
caggccaggcuccuuccu

SEQ ID NO: 2391799 - RNA, 12 nt, Human
caggccaggcuc

SEQ ID NO: 2391800 - RNA, 15 nt, Human
caggccaggugcagu

SEQ ID NO: 2391801 - RNA, 23 nt, Human
caggccaccauauucagugcugu

SEQ ID NO: 2391802 - RNA, 21 nt, Human
caggccagggggccagucccu

SEQ ID NO: 2391803 - RNA, 21 nt, Human
caggccaucaucaguggagcc

SEQ ID NO: 2391804 - RNA, 21 nt, Human
caggccaguaagggaaauaga

SEQ ID NO: 2391805 - RNA, 22 nt, Human
caggccaguaagggaaauagaa

SEQ ID NO: 2391806 - RNA, 23 nt, Human
caggccaguaagggaaauagaaa

SEQ ID NO: 2391807 - RNA, 18 nt, Human
caggccauccggccccca

SEQ ID NO: 2391808 - RNA, 13 nt, Human
caggccaucuucc

SEQ ID NO: 2391809 - RNA, 14 nt, Human
caggccaucuucca

SEQ ID NO: 2391810 - RNA, 18 nt, Human
caggccauuccccgucuc

SEQ ID NO: 2391811 - RNA, 15 nt, Human
caggccaucuuccag

SEQ ID NO: 2391812 - RNA, 16 nt, Human
caggccaucuuccagg

SEQ ID NO: 2391813 - RNA, 19 nt, Human
caggccaucuuccaggugg

SEQ ID NO: 2391814 - RNA, 15 nt, Human
caggccauggaggca

SEQ ID NO: 2391815 - RNA, 23 nt, Human
caggccaagagcagaggcagcga

SEQ ID NO: 2391816 - RNA, 19 nt, Human
caggccaaggccuucuccu

SEQ ID NO: 2391817 - RNA, 21 nt, Human
caggccaagagcagaggcagc

SEQ ID NO: 2391818 - RNA, 19 nt, Human
caggccaagagcagaggca

SEQ ID NO: 2391819 - RNA, 13 nt, Human
caggccacaagac

SEQ ID NO: 2391820 - RNA, 17 nt, Human
caggccacaagacccuu

SEQ ID NO: 2391821 - RNA, 18 nt, Human
caggccacaagacccuug

SEQ ID NO: 2391822 - RNA, 18 nt, Human
caggccaagagcagaggc

SEQ ID NO: 2391823 - RNA, 17 nt, Human
caggccaagaaacgucu

SEQ ID NO: 2391824 - RNA, 23 nt, Human
caggccaaacucaccugccccuc

SEQ ID NO: 2391825 - RNA, 21 nt, Human
caggcauuugacugaagaugc

SEQ ID NO: 2391826 - RNA, 23 nt, Human
caggcauuugacugaagaugcag

SEQ ID NO: 2391827 - RNA, 18 nt, Human
caggcauuugacugaaga

SEQ ID NO: 2391828 - RNA, 18 nt, Human
caggccaaacucaccugc

SEQ ID NO: 2391829 - RNA, 13 nt, Human
caggcccggcucc

SEQ ID NO: 2391830 - RNA, 21 nt, Human
caggccccgugaggcaauggg

SEQ ID NO: 2391831 - RNA, 22 nt, Human
caggccccuuuucacucccucc

SEQ ID NO: 2391832 - RNA, 14 nt, Human
caggcccggcucca

SEQ ID NO: 2391833 - RNA, 15 nt, Human
caggcccggcuccag

SEQ ID NO: 2391834 - RNA, 15 nt, Human
caggccccugccacc

SEQ ID NO: 2391835 - RNA, 17 nt, Human
caggccccugccacccu

SEQ ID NO: 2391836 - RNA, 19 nt, Human
caggccccugccacccugg

SEQ ID NO: 2391837 - RNA, 20 nt, Human
caggccccugccacccuggg

SEQ ID NO: 2391838 - RNA, 20 nt, Human
caggcagggccaacccuucu

SEQ ID NO: 2391839 - RNA, 22 nt, Human
caggcagggccaacccuucucc

SEQ ID NO: 2391840 - RNA, 19 nt, Human
caggcaggaagggcaggaa

SEQ ID NO: 2391841 - RNA, 20 nt, Human
caggcaggcuaaggcgugga

SEQ ID NO: 2391842 - RNA, 23 nt, Human
caggcaggcuaaggcguggagcu

SEQ ID NO: 2391843 - RNA, 21 nt, Human
caggcaggccaaggccuucuc

SEQ ID NO: 2391844 - RNA, 12 nt, Human
caggcaggcugu

SEQ ID NO: 2391845 - RNA, 13 nt, Human
caggcaggcugug

SEQ ID NO: 2391846 - RNA, 19 nt, Human
caggcaggcugugcgcuga

SEQ ID NO: 2391847 - RNA, 13 nt, Human
caggcagguccag

SEQ ID NO: 2391848 - RNA, 12 nt, Human
caggcaggggug

SEQ ID NO: 2391849 - RNA, 13 nt, Human
caggcaggggugg

SEQ ID NO: 2391850 - RNA, 17 nt, Human
caggcaggggugggggu

SEQ ID NO: 2391851 - RNA, 21 nt, Human
caggcagggguggggguggag

SEQ ID NO: 2391852 - RNA, 22 nt, Human
caggcagggguggggguggagg

SEQ ID NO: 2391853 - RNA, 23 nt, Human
caggcagggguggggguggaggc

SEQ ID NO: 2391854 - RNA, 17 nt, Human
caggcagggcugacucu

SEQ ID NO: 2391855 - RNA, 23 nt, Human
caggcagggcugacucuaggugc

SEQ ID NO: 2391856 - RNA, 15 nt, Human
caggcagcuggauga

SEQ ID NO: 2391857 - RNA, 18 nt, Human
caggcagcuggaugagac

SEQ ID NO: 2391858 - RNA, 20 nt, Human
caggcagcuuuaaccauuaa

SEQ ID NO: 2391859 - RNA, 13 nt, Human
caggcagccugga

SEQ ID NO: 2391860 - RNA, 12 nt, Human
caggcagcgaug

SEQ ID NO: 2391861 - RNA, 21 nt, Human
caggcagcgauggucucagaa

SEQ ID NO: 2391862 - RNA, 18 nt, Human
caggcagcgauggucuca

SEQ ID NO: 2391863 - RNA, 14 nt, Human
caggcagcgccaag

SEQ ID NO: 2391864 - RNA, 15 nt, Human
caggcagcgccaagc

SEQ ID NO: 2391865 - RNA, 19 nt, Human
caggcagcuuuuucucucc

SEQ ID NO: 2391866 - RNA, 22 nt, Human
caggcagcuuuuucucucccac

SEQ ID NO: 2391867 - RNA, 18 nt, Human
caggcaggaagggcagga

SEQ ID NO: 2391868 - RNA, 20 nt, Human
caggcaggaaggcugagagg

SEQ ID NO: 2391869 - RNA, 16 nt, Human
caggcagccaggccac

SEQ ID NO: 2391870 - RNA, 17 nt, Human
caggcagccaggccaca

SEQ ID NO: 2391871 - RNA, 12 nt, Human
caggcagcccua

SEQ ID NO: 2391872 - RNA, 22 nt, Human
caggcaacugaggcagacagca

SEQ ID NO: 2391873 - RNA, 20 nt, Human
caggcaacugaggcagacag

SEQ ID NO: 2391874 - RNA, 17 nt, Human
caggcaaggucuggccu

SEQ ID NO: 2391875 - RNA, 22 nt, Human
caggcaaggucuggccucaggu

SEQ ID NO: 2391876 - RNA, 18 nt, Human
caggcaagugaagaaaag

SEQ ID NO: 2391877 - RNA, 14 nt, Human
caggcagccaggcc

SEQ ID NO: 2391878 - RNA, 15 nt, Human
caggcagccaggcca

SEQ ID NO: 2391879 - RNA, 14 nt, Human
caggcaagcaccuc

SEQ ID NO: 2391880 - RNA, 15 nt, Human
caggcaagcaccucc

SEQ ID NO: 2391881 - RNA, 16 nt, Human
caggcaagcaccuccu

SEQ ID NO: 2391882 - RNA, 21 nt, Human
caggcaagcaccuccugccuc

SEQ ID NO: 2391883 - RNA, 20 nt, Human
caggauucuuccucccuccc

SEQ ID NO: 2391884 - RNA, 13 nt, Human
caggauugaagag

SEQ ID NO: 2391885 - RNA, 15 nt, Human
caggauugaagagca

SEQ ID NO: 2391886 - RNA, 22 nt, Human
caggauuugaacucagaucugu

SEQ ID NO: 2391887 - RNA, 21 nt, Human
caggauuucgugggucuguuu

SEQ ID NO: 2391888 - RNA, 21 nt, Human
caggauuugaacucagaucug

SEQ ID NO: 2391889 - RNA, 19 nt, Human
caggcaacugaggcagaca

SEQ ID NO: 2391890 - RNA, 18 nt, Human
caggcaacugaggcagac

SEQ ID NO: 2391891 - RNA, 17 nt, Human
caggcaacugaggcaga

SEQ ID NO: 2391892 - RNA, 16 nt, Human
caggcaacugaggcag

SEQ ID NO: 2391893 - RNA, 15 nt, Human
caggcaacugaggca

SEQ ID NO: 2391894 - RNA, 16 nt, Human
caggcaaagcaaguga

SEQ ID NO: 2391895 - RNA, 11 nt, Human
caggcaaauca

SEQ ID NO: 2391896 - RNA, 13 nt, Human
caggcaaaucagu

SEQ ID NO: 2391897 - RNA, 22 nt, Human
caggauuuuaacaaaagcaaga

SEQ ID NO: 2391898 - RNA, 18 nt, Human
caggcaaaauccuugcuu

SEQ ID NO: 2391899 - RNA, 14 nt, Human
caggcaaaauccuu

SEQ ID NO: 2391900 - RNA, 16 nt, Human
caggauuuuaaucuuu

SEQ ID NO: 2391901 - RNA, 15 nt, Human
caggcauguucucug

SEQ ID NO: 2391902 - RNA, 18 nt, Human
caggcauguucucugagg

SEQ ID NO: 2391903 - RNA, 19 nt, Human
caggcauguucucugagga

SEQ ID NO: 2391904 - RNA, 20 nt, Human
caggcauguucucugaggac

SEQ ID NO: 2391905 - RNA, 13 nt, Human
caggcauucccca

SEQ ID NO: 2391906 - RNA, 15 nt, Human
caggcauuccccagg

SEQ ID NO: 2391907 - RNA, 16 nt, Human
caggcauuccccagga

SEQ ID NO: 2391908 - RNA, 17 nt, Human
caggcauuccccaggag

SEQ ID NO: 2391909 - RNA, 24 nt, Human
caggcauuccccaggaggccagcc

SEQ ID NO: 2391910 - RNA, 19 nt, Human
caggcauugccaagggcuu

SEQ ID NO: 2391911 - RNA, 22 nt, Human
caggcauuccccaggaggccag

SEQ ID NO: 2391912 - RNA, 23 nt, Human
caggcauuccccaggaggccagc

SEQ ID NO: 2391913 - RNA, 18 nt, Human
caggcauuccccaggagg

SEQ ID NO: 2391914 - RNA, 19 nt, Human
caggcauuccccaggaggc

SEQ ID NO: 2391915 - RNA, 20 nt, Human
caggcauuccccaggaggcc

SEQ ID NO: 2391916 - RNA, 21 nt, Human
caggcauuccccaggaggcca

SEQ ID NO: 2391917 - RNA, 14 nt, Human
caggcagguccagg

SEQ ID NO: 2391918 - RNA, 15 nt, Human
caggcagguccaggg

SEQ ID NO: 2391919 - RNA, 19 nt, Human
caggcagguccaggguuug

SEQ ID NO: 2391920 - RNA, 12 nt, Human
caggcaggucuu

SEQ ID NO: 2391921 - RNA, 13 nt, Human
caggcaggucuug

SEQ ID NO: 2391922 - RNA, 22 nt, Human
caggcaggucuugaacuccugg

SEQ ID NO: 2391923 - RNA, 15 nt, Human
caggcaggugggaug

SEQ ID NO: 2391924 - RNA, 23 nt, Human
caggcaggucuugaacuccuggc

SEQ ID NO: 2391925 - RNA, 19 nt, Human
caggcauaggccugggugc

SEQ ID NO: 2391926 - RNA, 18 nt, Human
caggcauaggccugggug

SEQ ID NO: 2391927 - RNA, 14 nt, Human
caggcaucacagcu

SEQ ID NO: 2391928 - RNA, 15 nt, Human
caggcaucacagcua

SEQ ID NO: 2391929 - RNA, 17 nt, Human
caggcauaggccugggu

SEQ ID NO: 2391930 - RNA, 16 nt, Human
caggcauaggccuggg

SEQ ID NO: 2391931 - RNA, 15 nt, Human
caggcauaggccugg

SEQ ID NO: 2391932 - RNA, 14 nt, Human
caggcauaggccug

SEQ ID NO: 2391933 - RNA, 17 nt, Human
caggcaguuggccagag

SEQ ID NO: 2391934 - RNA, 14 nt, Human
caggcauagaggcu

SEQ ID NO: 2391935 - RNA, 17 nt, Human
caggcauagaggcuucu

SEQ ID NO: 2391936 - RNA, 18 nt, Human
caggcauagaggcuucuc

SEQ ID NO: 2391937 - RNA, 19 nt, Human
caggcauagaggcuucucc

SEQ ID NO: 2391938 - RNA, 21 nt, Human
caggcauagaggcuucuccgc

SEQ ID NO: 2391939 - RNA, 23 nt, Human
caggcauagaggcuucuccgcca

SEQ ID NO: 2391940 - RNA, 22 nt, Human
caggcagugaugcuggaugcuc

SEQ ID NO: 2391941 - RNA, 20 nt, Human
caggcagugaugcuggaugc

SEQ ID NO: 2391942 - RNA, 23 nt, Human
caggcagucgggggcuggccuag

SEQ ID NO: 2391943 - RNA, 24 nt, Human
caggcagucgggggcuggccuagg

SEQ ID NO: 2391944 - RNA, 19 nt, Human
caggcagucgggggcuggc

SEQ ID NO: 2391945 - RNA, 20 nt, Human
caggcagucgggggcuggcc

SEQ ID NO: 2391946 - RNA, 21 nt, Human
caggcagucgggggcuggccu

SEQ ID NO: 2391947 - RNA, 22 nt, Human
caggcagucgggggcuggccua

SEQ ID NO: 2391948 - RNA, 15 nt, Human
caggcagggugcagu

SEQ ID NO: 2391949 - RNA, 20 nt, Human
caggcagguagccaggggga

SEQ ID NO: 2391950 - RNA, 14 nt, Human
caggcaggugccug

SEQ ID NO: 2391951 - RNA, 16 nt, Human
caggcaggugccugga

SEQ ID NO: 2391952 - RNA, 16 nt, Human
caggcagucgggggcu

SEQ ID NO: 2391953 - RNA, 18 nt, Human
caggcagucgggggcugg

SEQ ID NO: 2391954 - RNA, 14 nt, Human
caggcaugccugug

SEQ ID NO: 2391955 - RNA, 17 nt, Human
caggcaugcaugugcuu

SEQ ID NO: 2391956 - RNA, 12 nt, Human
caggcaugaagu

SEQ ID NO: 2391957 - RNA, 20 nt, Human
caggcaugaacauguacugu

SEQ ID NO: 2391958 - RNA, 12 nt, Human
caggcauccucc

SEQ ID NO: 2391959 - RNA, 17 nt, Human
caggcaugguggcccac

SEQ ID NO: 2391960 - RNA, 16 nt, Human
caggcaugccugugug

SEQ ID NO: 2391961 - RNA, 15 nt, Human
caggcaugccugugu

SEQ ID NO: 2391962 - RNA, 16 nt, Human
caggaugaacccagga

SEQ ID NO: 2391963 - RNA, 17 nt, Human
caggaugaacccaggac

SEQ ID NO: 2391964 - RNA, 23 nt, Human
caggaucucuuagcauuuuaauu

SEQ ID NO: 2391965 - RNA, 15 nt, Human
caggaugaacccagg

SEQ ID NO: 2391966 - RNA, 18 nt, Human
caggaucucuuagcauuu

SEQ ID NO: 2391967 - RNA, 15 nt, Human
caggaugacccugcg

SEQ ID NO: 2391968 - RNA, 16 nt, Human
caggaugaccuggaua

SEQ ID NO: 2391969 - RNA, 17 nt, Human
caggaugaccuggauaa

SEQ ID NO: 2391970 - RNA, 20 nt, Human
caggaugacgguauuaugcu

SEQ ID NO: 2391971 - RNA, 21 nt, Human
caggaugacgguauuaugcuu

SEQ ID NO: 2391972 - RNA, 18 nt, Human
caggaugaugacuaugga

SEQ ID NO: 2391973 - RNA, 20 nt, Human
caggaugaugacuauggaaa

SEQ ID NO: 2391974 - RNA, 24 nt, Human
caggaugcccagggccacucugcc

SEQ ID NO: 2391975 - RNA, 22 nt, Human
caggaugcccagggccacucug

SEQ ID NO: 2391976 - RNA, 19 nt, Human
caggaugcccagggccacu

SEQ ID NO: 2391977 - RNA, 23 nt, Human
caggauggaggggugguccugac

SEQ ID NO: 2391978 - RNA, 22 nt, Human
caggauggaggggugguccuga

SEQ ID NO: 2391979 - RNA, 21 nt, Human
caggauggaggggugguccug

SEQ ID NO: 2391980 - RNA, 15 nt, Human
caggauggaggggug

SEQ ID NO: 2391981 - RNA, 23 nt, Human
caggauggccgggcgcgguggcu

SEQ ID NO: 2391982 - RNA, 17 nt, Human
caggaugcccagggcca

SEQ ID NO: 2391983 - RNA, 14 nt, Human
caggaugcccaggg

SEQ ID NO: 2391984 - RNA, 13 nt, Human
caggaugcccagg

SEQ ID NO: 2391985 - RNA, 23 nt, Human
caggaugcuaacaucuaaaaaua

SEQ ID NO: 2391986 - RNA, 22 nt, Human
caggaugaugacuauggaaaga

SEQ ID NO: 2391987 - RNA, 21 nt, Human
caggaugggggcuggccucug

SEQ ID NO: 2391988 - RNA, 19 nt, Human
caggauguacaaggacagc

SEQ ID NO: 2391989 - RNA, 18 nt, Human
caggauucuuccucccuc

SEQ ID NO: 2391990 - RNA, 17 nt, Human
caggauucuuccucccu

SEQ ID NO: 2391991 - RNA, 19 nt, Human
caggaugggggcuggccuc

SEQ ID NO: 2391992 - RNA, 23 nt, Human
caggauggcccuucccacuggag

SEQ ID NO: 2391993 - RNA, 15 nt, Human
caggauggccuggcc

SEQ ID NO: 2391994 - RNA, 16 nt, Human
caggauggccuggcca

SEQ ID NO: 2391995 - RNA, 18 nt, Human
caggaugggggcuggccu

SEQ ID NO: 2391996 - RNA, 17 nt, Human
caggauggccuggccag

SEQ ID NO: 2391997 - RNA, 24 nt, Human
caggauggccuggccagggccugg

SEQ ID NO: 2391998 - RNA, 21 nt, Human
caggaugguucccuugaugaa

SEQ ID NO: 2391999 - RNA, 23 nt, Human
caggaugguucccuugaugaaga

SEQ ID NO: 2392000 - RNA, 13 nt, Human
caggaucagucug

SEQ ID NO: 2392001 - RNA, 14 nt, Human
caggaucagucuga

SEQ ID NO: 2392002 - RNA, 23 nt, Human
caggaucagauugcaugugacuc

SEQ ID NO: 2392003 - RNA, 20 nt, Human
caggaucagauugcauguga

SEQ ID NO: 2392004 - RNA, 24 nt, Human
caggaucagauugcaugugacucu

SEQ ID NO: 2392005 - RNA, 16 nt, Human
caggaucccaggggcc

SEQ ID NO: 2392006 - RNA, 23 nt, Human
caggaucaugguguaauaagaca

SEQ ID NO: 2392007 - RNA, 21 nt, Human
caggaucccaggggcccaagg

SEQ ID NO: 2392008 - RNA, 15 nt, Human
caggaucauggugua

SEQ ID NO: 2392009 - RNA, 16 nt, Human
caggaucaugguguaa

SEQ ID NO: 2392010 - RNA, 18 nt, Human
caggaucaugguguaaua

SEQ ID NO: 2392011 - RNA, 19 nt, Human
caggaucaugguguaauaa

SEQ ID NO: 2392012 - RNA, 21 nt, Human
caggaucaugguguaauaaga

SEQ ID NO: 2392013 - RNA, 22 nt, Human
caggaucaugguguaauaagac

SEQ ID NO: 2392014 - RNA, 19 nt, Human
caggauccuauucucacca

SEQ ID NO: 2392015 - RNA, 22 nt, Human
caggaucccaggggcccaaggc

SEQ ID NO: 2392016 - RNA, 20 nt, Human
caggauccuauucucaccag

SEQ ID NO: 2392017 - RNA, 23 nt, Human
caggaucgcaagagccauguaga

SEQ ID NO: 2392018 - RNA, 21 nt, Human
caggauccuauucucaccagg

SEQ ID NO: 2392019 - RNA, 22 nt, Human
caggauccuauucucaccagga

SEQ ID NO: 2392020 - RNA, 15 nt, Human
caggagcacaggcag

SEQ ID NO: 2392021 - RNA, 16 nt, Human
caggagcacaggcagc

SEQ ID NO: 2392022 - RNA, 17 nt, Human
caggagcacaggcagcu

SEQ ID NO: 2392023 - RNA, 18 nt, Human
caggagcacaggcagcug

SEQ ID NO: 2392024 - RNA, 23 nt, Human
caggagcacaggcagcuggauga

SEQ ID NO: 2392025 - RNA, 19 nt, Human
caggagcaaauguuucugc

SEQ ID NO: 2392026 - RNA, 22 nt, Human
caggagcaaauguuucugcagu

SEQ ID NO: 2392027 - RNA, 20 nt, Human
caggagauggaaguugcagu

SEQ ID NO: 2392028 - RNA, 12 nt, Human
caggagagggaa

SEQ ID NO: 2392029 - RNA, 16 nt, Human
caggagauugagaagg

SEQ ID NO: 2392030 - RNA, 17 nt, Human
caggagauugagaagga

SEQ ID NO: 2392031 - RNA, 19 nt, Human
caggagauugagaaggaga

SEQ ID NO: 2392032 - RNA, 20 nt, Human
caggagauugagaaggagag

SEQ ID NO: 2392033 - RNA, 21 nt, Human
caggagauugagaaggagaga

SEQ ID NO: 2392034 - RNA, 22 nt, Human
caggagauugagaaggagagaa

SEQ ID NO: 2392035 - RNA, 23 nt, Human
caggagauugagaaggagagaaa

SEQ ID NO: 2392036 - RNA, 18 nt, Human
caggagcaaauguuucug

SEQ ID NO: 2392037 - RNA, 23 nt, Human
caggagagccagcccucccuguc

SEQ ID NO: 2392038 - RNA, 21 nt, Human
caggagagccagcccucccug

SEQ ID NO: 2392039 - RNA, 19 nt, Human
caggagagccagcccuccc

SEQ ID NO: 2392040 - RNA, 14 nt, Human
caggagaggagagc

SEQ ID NO: 2392041 - RNA, 15 nt, Human
caggagaggagagcc

SEQ ID NO: 2392042 - RNA, 16 nt, Human
caggagaggagagcca

SEQ ID NO: 2392043 - RNA, 17 nt, Human
caggagaggagagccag

SEQ ID NO: 2392044 - RNA, 18 nt, Human
caggagagccagcccucc

SEQ ID NO: 2392045 - RNA, 17 nt, Human
caggagagccagcccuc

SEQ ID NO: 2392046 - RNA, 16 nt, Human
caggagagccagcccu

SEQ ID NO: 2392047 - RNA, 15 nt, Human
caggagagccagccc

SEQ ID NO: 2392048 - RNA, 13 nt, Human
caggagagccagc

SEQ ID NO: 2392049 - RNA, 22 nt, Human
caggagagcagcggggcgaagc

SEQ ID NO: 2392050 - RNA, 23 nt, Human
caggagagagaaagccaggcagg

SEQ ID NO: 2392051 - RNA, 12 nt, Human
caggagagcagc

SEQ ID NO: 2392052 - RNA, 17 nt, Human
caggagaggggcagaac

SEQ ID NO: 2392053 - RNA, 15 nt, Human
caggagaggggcaga

SEQ ID NO: 2392054 - RNA, 12 nt, Human
caggagaguaga

SEQ ID NO: 2392055 - RNA, 20 nt, Human
caggagaggagcgggaccug

SEQ ID NO: 2392056 - RNA, 22 nt, Human
caggagaggagagccagagaag

SEQ ID NO: 2392057 - RNA, 12 nt, Human
caggagaggagc

SEQ ID NO: 2392058 - RNA, 18 nt, Human
caggagaggagagccaga

SEQ ID NO: 2392059 - RNA, 19 nt, Human
caggagaggagagccagag

SEQ ID NO: 2392060 - RNA, 20 nt, Human
caggagaggagagccagaga

SEQ ID NO: 2392061 - RNA, 21 nt, Human
caggagaggagagccagagaa

SEQ ID NO: 2392062 - RNA, 16 nt, Human
caggagacccacaggu

SEQ ID NO: 2392063 - RNA, 14 nt, Human
caggagagaaaggg

SEQ ID NO: 2392064 - RNA, 15 nt, Human
caggagacaggaagg

SEQ ID NO: 2392065 - RNA, 19 nt, Human
caggagagaguugaaccua

SEQ ID NO: 2392066 - RNA, 19 nt, Human
caggagagagaaagccagg

SEQ ID NO: 2392067 - RNA, 20 nt, Human
caggagagagaaagccaggc

SEQ ID NO: 2392068 - RNA, 12 nt, Human
caggagagagaa

SEQ ID NO: 2392069 - RNA, 13 nt, Human
caggagagagaaa

SEQ ID NO: 2392070 - RNA, 14 nt, Human
caggagagagaaag

SEQ ID NO: 2392071 - RNA, 18 nt, Human
caggagagagaaagccag

SEQ ID NO: 2392072 - RNA, 12 nt, Human
caggagacaucc

SEQ ID NO: 2392073 - RNA, 14 nt, Human
caggagacaggaag

SEQ ID NO: 2392074 - RNA, 22 nt, Human
caggagaaggccaauuccuaua

SEQ ID NO: 2392075 - RNA, 21 nt, Human
caggagaaggccaauuccuau

SEQ ID NO: 2392076 - RNA, 19 nt, Human
caggagaaggccaauuccu

SEQ ID NO: 2392077 - RNA, 17 nt, Human
caggagaaccacuacau

SEQ ID NO: 2392078 - RNA, 19 nt, Human
caggacuuaacggcuccag

SEQ ID NO: 2392079 - RNA, 20 nt, Human
caggacuuaacggcuccagg

SEQ ID NO: 2392080 - RNA, 21 nt, Human
caggacuuaacggcuccagga

SEQ ID NO: 2392081 - RNA, 23 nt, Human
caggacuuaacggcuccaggauu

SEQ ID NO: 2392082 - RNA, 11 nt, Human
caggagaacca

SEQ ID NO: 2392083 - RNA, 23 nt, Human
caggagaaaugcauccauuccuc

SEQ ID NO: 2392084 - RNA, 20 nt, Human
caggacuuggucugauuuca

SEQ ID NO: 2392085 - RNA, 23 nt, Human
caggacuuggucugauuucagga

SEQ ID NO: 2392086 - RNA, 24 nt, Human
caggacggggccggccaggugggc

SEQ ID NO: 2392087 - RNA, 22 nt, Human
caggacggggccggccaggugg

SEQ ID NO: 2392088 - RNA, 23 nt, Human
caggacggggccggccagguggg

SEQ ID NO: 2392089 - RNA, 16 nt, Human
caggacuauagcccag

SEQ ID NO: 2392090 - RNA, 17 nt, Human
caggacuauagcccagg

SEQ ID NO: 2392091 - RNA, 18 nt, Human
caggacuauagcccaggu

SEQ ID NO: 2392092 - RNA, 20 nt, Human
caggacuauauuugggccug

SEQ ID NO: 2392093 - RNA, 16 nt, Human
caggacucagaagccu

SEQ ID NO: 2392094 - RNA, 19 nt, Human
caggacucagaagccucug

SEQ ID NO: 2392095 - RNA, 18 nt, Human
caggacucagaagccucu

SEQ ID NO: 2392096 - RNA, 21 nt, Human
caggacucagaagccucuggg

SEQ ID NO: 2392097 - RNA, 20 nt, Human
caggacucagaagccucugg

SEQ ID NO: 2392098 - RNA, 21 nt, Human
caggacuauagcccagguccu

SEQ ID NO: 2392099 - RNA, 14 nt, Human
caggacucagcucc

SEQ ID NO: 2392100 - RNA, 17 nt, Human
caggacucagcucccca

SEQ ID NO: 2392101 - RNA, 18 nt, Human
caggacucagcuccccag

SEQ ID NO: 2392102 - RNA, 21 nt, Human
caggacucccuccucaccucu

SEQ ID NO: 2392103 - RNA, 20 nt, Human
caggacucccuccucaccuc

SEQ ID NO: 2392104 - RNA, 19 nt, Human
caggacucccuccucaccu

SEQ ID NO: 2392105 - RNA, 17 nt, Human
caggacucccuccucac

SEQ ID NO: 2392106 - RNA, 16 nt, Human
caggacucccuccuca

SEQ ID NO: 2392107 - RNA, 15 nt, Human
caggacucccuccuc

SEQ ID NO: 2392108 - RNA, 14 nt, Human
caggacucccuccu

SEQ ID NO: 2392109 - RNA, 13 nt, Human
caggacucccucc

SEQ ID NO: 2392110 - RNA, 19 nt, Human
caggacucagcuccccaga

SEQ ID NO: 2392111 - RNA, 20 nt, Human
caggacucagcuccccagag

SEQ ID NO: 2392112 - RNA, 21 nt, Human
caggacucagcuccccagagu

SEQ ID NO: 2392113 - RNA, 15 nt, Human
caggacuccccaggc

SEQ ID NO: 2392114 - RNA, 16 nt, Human
caggacuccccaggcc

SEQ ID NO: 2392115 - RNA, 17 nt, Human
caggacuccccaggcca

SEQ ID NO: 2392116 - RNA, 18 nt, Human
caggacuccccaggccag

SEQ ID NO: 2392117 - RNA, 19 nt, Human
caggacuccccaggccagg

SEQ ID NO: 2392118 - RNA, 20 nt, Human
caggacuccccaggccaggc

SEQ ID NO: 2392119 - RNA, 21 nt, Human
caggacugaauuguccccagu

SEQ ID NO: 2392120 - RNA, 20 nt, Human
caggacugaauuguccccag

SEQ ID NO: 2392121 - RNA, 14 nt, Human
caggacugagcccc

SEQ ID NO: 2392122 - RNA, 17 nt, Human
caggacugagccccgca

SEQ ID NO: 2392123 - RNA, 19 nt, Human
caggacugaauugucccca

SEQ ID NO: 2392124 - RNA, 18 nt, Human
caggacugaauugucccc

SEQ ID NO: 2392125 - RNA, 20 nt, Human
caggacucugcccagaccac

SEQ ID NO: 2392126 - RNA, 18 nt, Human
caggacucuugugaaaag

SEQ ID NO: 2392127 - RNA, 18 nt, Human
caggacugagccccgcag

SEQ ID NO: 2392128 - RNA, 20 nt, Human
caggacugagccccgcagac

SEQ ID NO: 2392129 - RNA, 19 nt, Human
caggacugcaacaggcuug

SEQ ID NO: 2392130 - RNA, 13 nt, Human
caggacugcacag

SEQ ID NO: 2392131 - RNA, 20 nt, Human
caggacugggccacuucugg

SEQ ID NO: 2392132 - RNA, 14 nt, Human
caggacugugacuc

SEQ ID NO: 2392133 - RNA, 15 nt, Human
caggacugggccacu

SEQ ID NO: 2392134 - RNA, 16 nt, Human
caggacugggccacuu

SEQ ID NO: 2392135 - RNA, 12 nt, Human
caggacugggcc

SEQ ID NO: 2392136 - RNA, 13 nt, Human
caggacugggcca

SEQ ID NO: 2392137 - RNA, 23 nt, Human
caggacucccuccucaccucugg

SEQ ID NO: 2392138 - RNA, 22 nt, Human
caggacucccuccucaccucug

SEQ ID NO: 2392139 - RNA, 12 nt, Human
caggacucugcc

SEQ ID NO: 2392140 - RNA, 13 nt, Human
caggacucugccu

SEQ ID NO: 2392141 - RNA, 15 nt, Human
caggacucugccucc

SEQ ID NO: 2392142 - RNA, 16 nt, Human
caggacucugccuccu

SEQ ID NO: 2392143 - RNA, 23 nt, Human
caggagccccgaggccuucucug

SEQ ID NO: 2392144 - RNA, 11 nt, Human
caggagcccug

SEQ ID NO: 2392145 - RNA, 20 nt, Human
caggagccccgaggccuucu

SEQ ID NO: 2392146 - RNA, 22 nt, Human
caggagccccgaggccuucucu

SEQ ID NO: 2392147 - RNA, 14 nt, Human
caggagcccuggga

SEQ ID NO: 2392148 - RNA, 16 nt, Human
caggagcccugggagg

SEQ ID NO: 2392149 - RNA, 18 nt, Human
caggagcccugggaggcu

SEQ ID NO: 2392150 - RNA, 19 nt, Human
caggagcccugggaggcuc

SEQ ID NO: 2392151 - RNA, 15 nt, Human
caggagccccgaggc

SEQ ID NO: 2392152 - RNA, 20 nt, Human
caggagcaguaucaugaagc

SEQ ID NO: 2392153 - RNA, 16 nt, Human
caggagcaguaucaug

SEQ ID NO: 2392154 - RNA, 15 nt, Human
caggagcagccucag

SEQ ID NO: 2392155 - RNA, 20 nt, Human
caggagcagccucagaacaa

SEQ ID NO: 2392156 - RNA, 23 nt, Human
caggagcagccucagaacaaagu

SEQ ID NO: 2392157 - RNA, 16 nt, Human
caggagccccgaggcc

SEQ ID NO: 2392158 - RNA, 18 nt, Human
caggagccccgaggccuu

SEQ ID NO: 2392159 - RNA, 12 nt, Human
caggagcagcca

SEQ ID NO: 2392160 - RNA, 13 nt, Human
caggagcagccac

SEQ ID NO: 2392161 - RNA, 14 nt, Human
caggagcagccaca

SEQ ID NO: 2392162 - RNA, 19 nt, Human
caggagcagccacauuccu

SEQ ID NO: 2392163 - RNA, 15 nt, Human
caggagccugugccu

SEQ ID NO: 2392164 - RNA, 16 nt, Human
caggagccugugccuc

SEQ ID NO: 2392165 - RNA, 20 nt, Human
caggagccuccugcccuuac

SEQ ID NO: 2392166 - RNA, 12 nt, Human
caggagccuggc

SEQ ID NO: 2392167 - RNA, 11 nt, Human
caggagccugg

SEQ ID NO: 2392168 - RNA, 14 nt, Human
caggagccuccugc

SEQ ID NO: 2392169 - RNA, 17 nt, Human
caggagccuccugcccu

SEQ ID NO: 2392170 - RNA, 22 nt, Human
caggagcauccaccuccuucuc

SEQ ID NO: 2392171 - RNA, 20 nt, Human
caggagcauccaccuccuuc

SEQ ID NO: 2392172 - RNA, 21 nt, Human
caggagcccugggaggcucug

SEQ ID NO: 2392173 - RNA, 21 nt, Human
caggagucccaaggaaagccc

SEQ ID NO: 2392174 - RNA, 19 nt, Human
caggagucccaaggaaagc

SEQ ID NO: 2392175 - RNA, 14 nt, Human
caggagucccugcc

SEQ ID NO: 2392176 - RNA, 21 nt, Human
caggagucccugccaucaugu

SEQ ID NO: 2392177 - RNA, 15 nt, Human
caggagucccugcca

SEQ ID NO: 2392178 - RNA, 15 nt, Human
caggagucccuggua

SEQ ID NO: 2392179 - RNA, 14 nt, Human
caggagucccuggu

SEQ ID NO: 2392180 - RNA, 13 nt, Human
caggagucccugg

SEQ ID NO: 2392181 - RNA, 24 nt, Human
caggagucccaaggaaagccccag

SEQ ID NO: 2392182 - RNA, 12 nt, Human
caggagugagca

SEQ ID NO: 2392183 - RNA, 18 nt, Human
caggagucccaaggaaag

SEQ ID NO: 2392184 - RNA, 17 nt, Human
caggagucccaaggaaa

SEQ ID NO: 2392185 - RNA, 16 nt, Human
caggagucccaaggaa

SEQ ID NO: 2392186 - RNA, 15 nt, Human
caggagucccaagga

SEQ ID NO: 2392187 - RNA, 14 nt, Human
caggaguccacuuu

SEQ ID NO: 2392188 - RNA, 18 nt, Human
caggaguccacuuuguuu

SEQ ID NO: 2392189 - RNA, 16 nt, Human
caggaguuggaagugu

SEQ ID NO: 2392190 - RNA, 19 nt, Human
caggaguucgaggcugcag

SEQ ID NO: 2392191 - RNA, 23 nt, Human
caggaguucgagaccagccuggc

SEQ ID NO: 2392192 - RNA, 18 nt, Human
caggaguucgaggcugca

SEQ ID NO: 2392193 - RNA, 21 nt, Human
caggaguuugagaccaaccug

SEQ ID NO: 2392194 - RNA, 19 nt, Human
caggaguuucguuuucaaa

SEQ ID NO: 2392195 - RNA, 21 nt, Human
caggaguucgagaccagccug

SEQ ID NO: 2392196 - RNA, 23 nt, Human
caggaguucaauaaaugucuguu

SEQ ID NO: 2392197 - RNA, 22 nt, Human
caggaguuagaggccagccugg

SEQ ID NO: 2392198 - RNA, 21 nt, Human
caggaguucaauaaaugucug

SEQ ID NO: 2392199 - RNA, 21 nt, Human
caggaguuagaggccagccug

SEQ ID NO: 2392200 - RNA, 20 nt, Human
caggaguuagaggccagccu

SEQ ID NO: 2392201 - RNA, 19 nt, Human
caggaguuagaggccagcc

SEQ ID NO: 2392202 - RNA, 18 nt, Human
caggaguuagaggccagc

SEQ ID NO: 2392203 - RNA, 17 nt, Human
caggaguuagaggccag

SEQ ID NO: 2392204 - RNA, 16 nt, Human
caggaguuagaggcca

SEQ ID NO: 2392205 - RNA, 19 nt, Human
caggaguuaaaaagggcag

SEQ ID NO: 2392206 - RNA, 17 nt, Human
caggaguggguugauuu

SEQ ID NO: 2392207 - RNA, 22 nt, Human
caggagugggaaaacacugcca

SEQ ID NO: 2392208 - RNA, 22 nt, Human
caggaguuugaggcugcagcga

SEQ ID NO: 2392209 - RNA, 21 nt, Human
caggaguuugaggcugcagcg

SEQ ID NO: 2392210 - RNA, 20 nt, Human
caggaguuugaggcugcagc

SEQ ID NO: 2392211 - RNA, 18 nt, Human
caggaguuugaggcugca

SEQ ID NO: 2392212 - RNA, 23 nt, Human
caggaguuugagaccaaccuggg

SEQ ID NO: 2392213 - RNA, 22 nt, Human
caggaguuugagaccaaccugg

SEQ ID NO: 2392214 - RNA, 17 nt, Human
caggauacucugucaga

SEQ ID NO: 2392215 - RNA, 14 nt, Human
caggauacaugugc

SEQ ID NO: 2392216 - RNA, 18 nt, Human
caggauaauaaaguguuu

SEQ ID NO: 2392217 - RNA, 20 nt, Human
caggauacucugucagaugg

SEQ ID NO: 2392218 - RNA, 18 nt, Human
caggauacucugucagau

SEQ ID NO: 2392219 - RNA, 23 nt, Human
caggauacucugucagaugggaa

SEQ ID NO: 2392220 - RNA, 15 nt, Human
caggauaguugcucc

SEQ ID NO: 2392221 - RNA, 13 nt, Human
caggauagacuuu

SEQ ID NO: 2392222 - RNA, 14 nt, Human
caggugacauguga

SEQ ID NO: 2392223 - RNA, 16 nt, Human
caggugacaugugaaa

SEQ ID NO: 2392224 - RNA, 17 nt, Human
caggugacaugugaaac

SEQ ID NO: 2392225 - RNA, 17 nt, Human
caggugaccuucuggga

SEQ ID NO: 2392226 - RNA, 23 nt, Human
caggugaccaaaauccccuucuc

SEQ ID NO: 2392227 - RNA, 18 nt, Human
caggugacaugugaaacc

SEQ ID NO: 2392228 - RNA, 21 nt, Human
caggugacaugugaaaccuuu

SEQ ID NO: 2392229 - RNA, 12 nt, Human
caggugacaugu

SEQ ID NO: 2392230 - RNA, 20 nt, Human
caggugaagcaccaagcuca

SEQ ID NO: 2392231 - RNA, 21 nt, Human
caggucuuuccuaaggcugca

SEQ ID NO: 2392232 - RNA, 19 nt, Human
caggucuuuccuaaggcug

SEQ ID NO: 2392233 - RNA, 14 nt, Human
caggucuuuccuaa

SEQ ID NO: 2392234 - RNA, 22 nt, Human
caggucuccucuuaaaaaauaa

SEQ ID NO: 2392235 - RNA, 19 nt, Human
caggucuuggagcugagcc

SEQ ID NO: 2392236 - RNA, 20 nt, Human
caggucuucaucgaaucuac

SEQ ID NO: 2392237 - RNA, 13 nt, Human
caggucuuuccua

SEQ ID NO: 2392238 - RNA, 23 nt, Human
caggucuuggagcugagccucuc

SEQ ID NO: 2392239 - RNA, 20 nt, Human
caggucuuggagcugagccu

SEQ ID NO: 2392240 - RNA, 21 nt, Human
caggucuuggagcugagccuc

SEQ ID NO: 2392241 - RNA, 20 nt, Human
caggugagaagcagaggaag

SEQ ID NO: 2392242 - RNA, 13 nt, Human
caggugagaagca

SEQ ID NO: 2392243 - RNA, 18 nt, Human
caggugaccuucugggaa

SEQ ID NO: 2392244 - RNA, 21 nt, Human
caggugagcaaccaguuggcu

SEQ ID NO: 2392245 - RNA, 21 nt, Human
caggugcugcuacccucccug

SEQ ID NO: 2392246 - RNA, 15 nt, Human
caggugagcccaugg

SEQ ID NO: 2392247 - RNA, 17 nt, Human
caggugagcccauggcc

SEQ ID NO: 2392248 - RNA, 21 nt, Human
caggugagaagcagaggaagg

SEQ ID NO: 2392249 - RNA, 19 nt, Human
cagguggccaugccucagc

SEQ ID NO: 2392250 - RNA, 22 nt, Human
cagguggcucugaggugccugu

SEQ ID NO: 2392251 - RNA, 13 nt, Human
cagguggccaugc

SEQ ID NO: 2392252 - RNA, 15 nt, Human
cagguggccaugccu

SEQ ID NO: 2392253 - RNA, 23 nt, Human
cagguggcugacccagucccugg

SEQ ID NO: 2392254 - RNA, 20 nt, Human
cagguggcugacccaguccc

SEQ ID NO: 2392255 - RNA, 19 nt, Human
cagguggcugacccagucc

SEQ ID NO: 2392256 - RNA, 16 nt, Human
cagguggcugacccag

SEQ ID NO: 2392257 - RNA, 15 nt, Human
cagguggcugaccca

SEQ ID NO: 2392258 - RNA, 14 nt, Human
cagguggcugaccc

SEQ ID NO: 2392259 - RNA, 16 nt, Human
cagguggccacuccag

SEQ ID NO: 2392260 - RNA, 19 nt, Human
cagguggccacuccagacc

SEQ ID NO: 2392261 - RNA, 21 nt, Human
cagguggccacuccagacccc

SEQ ID NO: 2392262 - RNA, 19 nt, Human
cagguggccagccuggauc

SEQ ID NO: 2392263 - RNA, 15 nt, Human
cagguggccacucca

SEQ ID NO: 2392264 - RNA, 21 nt, Human
cagguggcaggaccaggacua

SEQ ID NO: 2392265 - RNA, 18 nt, Human
cagguggcaggaccagga

SEQ ID NO: 2392266 - RNA, 20 nt, Human
cagguggcaggaccaggacu

SEQ ID NO: 2392267 - RNA, 21 nt, Human
cagguggaggugucaggcugc

SEQ ID NO: 2392268 - RNA, 23 nt, Human
cagguggaggugucaggcugcug

SEQ ID NO: 2392269 - RNA, 15 nt, Human
cagguggcaggacca

SEQ ID NO: 2392270 - RNA, 16 nt, Human
cagguggcaggaccag

SEQ ID NO: 2392271 - RNA, 17 nt, Human
cagguggcaggaccagg

SEQ ID NO: 2392272 - RNA, 20 nt, Human
caggugagcccauggcccuc

SEQ ID NO: 2392273 - RNA, 22 nt, Human
caggugcugcuacccucccugc

SEQ ID NO: 2392274 - RNA, 23 nt, Human
caggugcugcuacccucccugcu

SEQ ID NO: 2392275 - RNA, 13 nt, Human
caggugcugcugc

SEQ ID NO: 2392276 - RNA, 21 nt, Human
cagguccugcagucuggcuga

SEQ ID NO: 2392277 - RNA, 21 nt, Human
cagguccucugauacccagag

SEQ ID NO: 2392278 - RNA, 22 nt, Human
cagguccucugauacccagagc

SEQ ID NO: 2392279 - RNA, 20 nt, Human
cagguccucagagaauuucu

SEQ ID NO: 2392280 - RNA, 15 nt, Human
cagguccucagagaa

SEQ ID NO: 2392281 - RNA, 19 nt, Human
caggucccuaauaaagcug

SEQ ID NO: 2392282 - RNA, 20 nt, Human
caggucccuaauaaagcugu

SEQ ID NO: 2392283 - RNA, 21 nt, Human
caggucccuaauaaagcugug

SEQ ID NO: 2392284 - RNA, 22 nt, Human
caggucccuaauaaagcugugu

SEQ ID NO: 2392285 - RNA, 11 nt, Human
caggucuccuc

SEQ ID NO: 2392286 - RNA, 19 nt, Human
caggucucccacgugggag

SEQ ID NO: 2392287 - RNA, 20 nt, Human
caggucucccacgugggaga

SEQ ID NO: 2392288 - RNA, 12 nt, Human
caggucucccac

SEQ ID NO: 2392289 - RNA, 14 nt, Human
caggucucacgggc

SEQ ID NO: 2392290 - RNA, 13 nt, Human
caggucucccacg

SEQ ID NO: 2392291 - RNA, 14 nt, Human
caggucuccucuua

SEQ ID NO: 2392292 - RNA, 13 nt, Human
caggucuccucuu

SEQ ID NO: 2392293 - RNA, 22 nt, Human
caggucucccacgugggagaca

SEQ ID NO: 2392294 - RNA, 19 nt, Human
caggucuccuccaccgcca

SEQ ID NO: 2392295 - RNA, 17 nt, Human
caggucuccucuuaaaa

SEQ ID NO: 2392296 - RNA, 15 nt, Human
caggucuccucuuaa

SEQ ID NO: 2392297 - RNA, 18 nt, Human
caggucuugaacuccugg

SEQ ID NO: 2392298 - RNA, 19 nt, Human
caggucuugaacuccuggc

SEQ ID NO: 2392299 - RNA, 20 nt, Human
caggucuugaacuccuggcc

SEQ ID NO: 2392300 - RNA, 21 nt, Human
caggucuugaacuccuggccu

SEQ ID NO: 2392301 - RNA, 22 nt, Human
caggucuugaacuccuggccuc

SEQ ID NO: 2392302 - RNA, 23 nt, Human
caggucuugaacuccuggccuca

SEQ ID NO: 2392303 - RNA, 22 nt, Human
caggucaauacaguacaggcag

SEQ ID NO: 2392304 - RNA, 23 nt, Human
caggucaauacaguacaggcagc

SEQ ID NO: 2392305 - RNA, 17 nt, Human
caggucacacgaggggc

SEQ ID NO: 2392306 - RNA, 16 nt, Human
cagguauguugccuuu

SEQ ID NO: 2392307 - RNA, 20 nt, Human
cagguauguugccuuuaugg

SEQ ID NO: 2392308 - RNA, 23 nt, Human
cagguauggaaggguuuguggcu

SEQ ID NO: 2392309 - RNA, 14 nt, Human
cagguauguugccu

SEQ ID NO: 2392310 - RNA, 15 nt, Human
cagguauguugccuu

SEQ ID NO: 2392311 - RNA, 20 nt, Human
caggucaggaguucgagacc

SEQ ID NO: 2392312 - RNA, 16 nt, Human
caggucagggugagga

SEQ ID NO: 2392313 - RNA, 12 nt, Human
cagguccccaga

SEQ ID NO: 2392314 - RNA, 23 nt, Human
cagguccagcucuggaggggagg

SEQ ID NO: 2392315 - RNA, 18 nt, Human
cagguccccagcuuuggc

SEQ ID NO: 2392316 - RNA, 13 nt, Human
cagguccccagac

SEQ ID NO: 2392317 - RNA, 22 nt, Human
cagguccacggucuguucuuga

SEQ ID NO: 2392318 - RNA, 13 nt, Human
cagguccagcucu

SEQ ID NO: 2392319 - RNA, 14 nt, Human
cagguccagcucug

SEQ ID NO: 2392320 - RNA, 16 nt, Human
cagguccagcucugga

SEQ ID NO: 2392321 - RNA, 17 nt, Human
cagguccagcucuggag

SEQ ID NO: 2392322 - RNA, 19 nt, Human
cagguccagcucuggaggg

SEQ ID NO: 2392323 - RNA, 11 nt, Human
caggucccuaa

SEQ ID NO: 2392324 - RNA, 12 nt, Human
caggucccuaau

SEQ ID NO: 2392325 - RNA, 13 nt, Human
caggucccuaaua

SEQ ID NO: 2392326 - RNA, 14 nt, Human
caggucccuaauaa

SEQ ID NO: 2392327 - RNA, 15 nt, Human
caggucccuaauaaa

SEQ ID NO: 2392328 - RNA, 16 nt, Human
caggucccuaauaaag

SEQ ID NO: 2392329 - RNA, 17 nt, Human
caggucccuaauaaagc

SEQ ID NO: 2392330 - RNA, 18 nt, Human
caggucccuaauaaagcu

SEQ ID NO: 2392331 - RNA, 20 nt, Human
cagguaugaccuucuaggaa

SEQ ID NO: 2392332 - RNA, 18 nt, Human
cagguaucuccaggauug

SEQ ID NO: 2392333 - RNA, 22 nt, Human
cagguaucuccaggauugaaga

SEQ ID NO: 2392334 - RNA, 14 nt, Human
cagguaucuccagg

SEQ ID NO: 2392335 - RNA, 15 nt, Human
cagguaucuccagga

SEQ ID NO: 2392336 - RNA, 16 nt, Human
cagguaucuccaggau

SEQ ID NO: 2392337 - RNA, 17 nt, Human
cagguauagacuccuga

SEQ ID NO: 2392338 - RNA, 23 nt, Human
cagguaguugcaauugaauuaaa

SEQ ID NO: 2392339 - RNA, 18 nt, Human
cagguaguugcaauugaa

SEQ ID NO: 2392340 - RNA, 23 nt, Human
cagguaggaggcaaauaucuuga

SEQ ID NO: 2392341 - RNA, 14 nt, Human
cagguaggaggcaa

SEQ ID NO: 2392342 - RNA, 19 nt, Human
cagguagaacacaagguca

SEQ ID NO: 2392343 - RNA, 19 nt, Human
cagguagcugccccuggcu

SEQ ID NO: 2392344 - RNA, 18 nt, Human
cagguagcugccccuggc

SEQ ID NO: 2392345 - RNA, 16 nt, Human
cagguagcugccccug

SEQ ID NO: 2392346 - RNA, 15 nt, Human
cagguagcugccccu

SEQ ID NO: 2392347 - RNA, 14 nt, Human
cagguagcugcccc

SEQ ID NO: 2392348 - RNA, 12 nt, Human
cagguagccagg

SEQ ID NO: 2392349 - RNA, 23 nt, Human
cagguagcugccccuggcucuga

SEQ ID NO: 2392350 - RNA, 21 nt, Human
cagguagcugccccuggcucu

SEQ ID NO: 2392351 - RNA, 20 nt, Human
cagguagcugccccuggcuc

SEQ ID NO: 2392352 - RNA, 22 nt, Human
cagguagcugccccuggcucug

SEQ ID NO: 2392353 - RNA, 20 nt, Human
cagguaacaggcagauacag

SEQ ID NO: 2392354 - RNA, 21 nt, Human
cagguaacaggcagauacagg

SEQ ID NO: 2392355 - RNA, 20 nt, Human
cagguaaucgaccugccucg

SEQ ID NO: 2392356 - RNA, 19 nt, Human
cagguaaucgaccugccuc

SEQ ID NO: 2392357 - RNA, 18 nt, Human
cagguaaucgaccugccu

SEQ ID NO: 2392358 - RNA, 17 nt, Human
cagguaaucgaccugcc

SEQ ID NO: 2392359 - RNA, 13 nt, Human
cagguaccagcug

SEQ ID NO: 2392360 - RNA, 14 nt, Human
cagguaccagcugc

SEQ ID NO: 2392361 - RNA, 15 nt, Human
cagguaccagcugcg

SEQ ID NO: 2392362 - RNA, 19 nt, Human
cagguaaugugaauaaauu

SEQ ID NO: 2392363 - RNA, 13 nt, Human
cagguaaugugaa

SEQ ID NO: 2392364 - RNA, 17 nt, Human
cagguaaauuaagacau

SEQ ID NO: 2392365 - RNA, 15 nt, Human
cagguaaugagggac

SEQ ID NO: 2392366 - RNA, 17 nt, Human
cagguaaugagggacug

SEQ ID NO: 2392367 - RNA, 20 nt, Human
cagguaaugagggacuggaa

SEQ ID NO: 2392368 - RNA, 22 nt, Human
cagguaaugagggacuggaacc

SEQ ID NO: 2392369 - RNA, 23 nt, Human
cagguaaugagggacuggaacca

SEQ ID NO: 2392370 - RNA, 21 nt, Human
cagguaccagcugcgcuugcu

SEQ ID NO: 2392371 - RNA, 16 nt, Human
cagguaccagcugcgc

SEQ ID NO: 2392372 - RNA, 17 nt, Human
cagguaccagcugcgcu

SEQ ID NO: 2392373 - RNA, 18 nt, Human
cagguaccagcugcgcuu

SEQ ID NO: 2392374 - RNA, 19 nt, Human
cagguaccagcugcgcuug

SEQ ID NO: 2392375 - RNA, 12 nt, Human
cagggucccugg

SEQ ID NO: 2392376 - RNA, 14 nt, Human
cagggucccuggug

SEQ ID NO: 2392377 - RNA, 14 nt, Human
cagggucaggagag

SEQ ID NO: 2392378 - RNA, 22 nt, Human
caggguccacaggaagugaaga

SEQ ID NO: 2392379 - RNA, 21 nt, Human
cagggucacugaaggccuggc

SEQ ID NO: 2392380 - RNA, 17 nt, Human
cagggucccauuucuca

SEQ ID NO: 2392381 - RNA, 13 nt, Human
cagggucccucug

SEQ ID NO: 2392382 - RNA, 15 nt, Human
cagggucccuggugg

SEQ ID NO: 2392383 - RNA, 18 nt, Human
cagggucccugguggcag

SEQ ID NO: 2392384 - RNA, 19 nt, Human
cagggucccugguggcagc

SEQ ID NO: 2392385 - RNA, 22 nt, Human
cagggucccugguggcagcuca

SEQ ID NO: 2392386 - RNA, 20 nt, Human
cagggucacugaaggccugg

SEQ ID NO: 2392387 - RNA, 21 nt, Human
caggguauuccagagugggga

SEQ ID NO: 2392388 - RNA, 20 nt, Human
caggguauuccagagugggg

SEQ ID NO: 2392389 - RNA, 21 nt, Human
caggguagcccgccugccagu

SEQ ID NO: 2392390 - RNA, 18 nt, Human
caggguauggacuaucug

SEQ ID NO: 2392391 - RNA, 23 nt, Human
caggguauggacuaucugucugg

SEQ ID NO: 2392392 - RNA, 16 nt, Human
caggguagcagguacc

SEQ ID NO: 2392393 - RNA, 13 nt, Human
caggguagcaggu

SEQ ID NO: 2392394 - RNA, 23 nt, Human
caggguagauaaccuguacuuca

SEQ ID NO: 2392395 - RNA, 13 nt, Human
caggguagcccgc

SEQ ID NO: 2392396 - RNA, 15 nt, Human
caggguagcccgccu

SEQ ID NO: 2392397 - RNA, 16 nt, Human
caggguagcccgccug

SEQ ID NO: 2392398 - RNA, 20 nt, Human
caggguagcccgccugccag

SEQ ID NO: 2392399 - RNA, 22 nt, Human
cagggguugcagugagcggaga

SEQ ID NO: 2392400 - RNA, 13 nt, Human
cagggguucgaga

SEQ ID NO: 2392401 - RNA, 17 nt, Human
cagggguucgagaccag

SEQ ID NO: 2392402 - RNA, 21 nt, Human
cagggguucgagaccagucug

SEQ ID NO: 2392403 - RNA, 13 nt, Human
cagggguuucucg

SEQ ID NO: 2392404 - RNA, 13 nt, Human
cagggguugcagu

SEQ ID NO: 2392405 - RNA, 15 nt, Human
cagggguugcaguga

SEQ ID NO: 2392406 - RNA, 22 nt, Human
cagggguggcugccucauuuag

SEQ ID NO: 2392407 - RNA, 12 nt, Human
cagggguggggg

SEQ ID NO: 2392408 - RNA, 20 nt, Human
cagggguggggguggaggcu

SEQ ID NO: 2392409 - RNA, 22 nt, Human
cagggguggggguggaggcuuc

SEQ ID NO: 2392410 - RNA, 15 nt, Human
cagguaaacuccugu

SEQ ID NO: 2392411 - RNA, 16 nt, Human
caggguuuugccaugu

SEQ ID NO: 2392412 - RNA, 16 nt, Human
cagggucucacucugu

SEQ ID NO: 2392413 - RNA, 14 nt, Human
cagguaacaggcag

SEQ ID NO: 2392414 - RNA, 15 nt, Human
cagguaacaggcaga

SEQ ID NO: 2392415 - RNA, 16 nt, Human
cagguaacaggcagau

SEQ ID NO: 2392416 - RNA, 17 nt, Human
cagguaacaggcagaua

SEQ ID NO: 2392417 - RNA, 18 nt, Human
caggguccuguagcccua

SEQ ID NO: 2392418 - RNA, 15 nt, Human
cagggucccugcugu

SEQ ID NO: 2392419 - RNA, 21 nt, Human
cagggucccauuucucacuga

SEQ ID NO: 2392420 - RNA, 13 nt, Human
cagggucccugcu

SEQ ID NO: 2392421 - RNA, 15 nt, Human
cagggucccucugug

SEQ ID NO: 2392422 - RNA, 16 nt, Human
cagggucccucugugu

SEQ ID NO: 2392423 - RNA, 23 nt, Human
cagggucccugguggcagcucac

SEQ ID NO: 2392424 - RNA, 21 nt, Human
cagggucucacuauguugccc

SEQ ID NO: 2392425 - RNA, 22 nt, Human
cagggucucacuauguugccca

SEQ ID NO: 2392426 - RNA, 23 nt, Human
cagggucucacuauguugcccag

SEQ ID NO: 2392427 - RNA, 15 nt, Human
cagggucucacucug

SEQ ID NO: 2392428 - RNA, 22 nt, Human
caggggugcccccuccucuccc

SEQ ID NO: 2392429 - RNA, 23 nt, Human
caggggugcccccuccucuccca

SEQ ID NO: 2392430 - RNA, 13 nt, Human
caggggugccccc

SEQ ID NO: 2392431 - RNA, 15 nt, Human
caggggugcccccuc

SEQ ID NO: 2392432 - RNA, 16 nt, Human
caggggugcccccucc

SEQ ID NO: 2392433 - RNA, 17 nt, Human
caggggugcccccuccu

SEQ ID NO: 2392434 - RNA, 16 nt, Human
caggggucucccugga

SEQ ID NO: 2392435 - RNA, 20 nt, Human
caggggugauuucagagagg

SEQ ID NO: 2392436 - RNA, 21 nt, Human
caggggucgucaccaccucuc

SEQ ID NO: 2392437 - RNA, 18 nt, Human
caggggucgucaccaccu

SEQ ID NO: 2392438 - RNA, 17 nt, Human
caggggucucccuggag

SEQ ID NO: 2392439 - RNA, 20 nt, Human
caggggucccagccaccccg

SEQ ID NO: 2392440 - RNA, 18 nt, Human
caggggucccagccaccc

SEQ ID NO: 2392441 - RNA, 16 nt, Human
cagggggugugucugc

SEQ ID NO: 2392442 - RNA, 14 nt, Human
caggggugggacac

SEQ ID NO: 2392443 - RNA, 15 nt, Human
caggggugggacacc

SEQ ID NO: 2392444 - RNA, 20 nt, Human
caggggugggacacccugug

SEQ ID NO: 2392445 - RNA, 21 nt, Human
caggggugggacacccuguga

SEQ ID NO: 2392446 - RNA, 22 nt, Human
cagguggcugacccagucccug

SEQ ID NO: 2392447 - RNA, 21 nt, Human
caggugggcgggcagcacagc

SEQ ID NO: 2392448 - RNA, 22 nt, Human
caggugggcgggcagcacagca

SEQ ID NO: 2392449 - RNA, 17 nt, Human
caggugggcguggucac

SEQ ID NO: 2392450 - RNA, 23 nt, Human
caggugggcguggucacugcugu

SEQ ID NO: 2392451 - RNA, 21 nt, Human
caggugggcguggucacugcu

SEQ ID NO: 2392452 - RNA, 16 nt, Human
caggugggcuucccag

SEQ ID NO: 2392453 - RNA, 22 nt, Human
cagguggggagacugggcugag

SEQ ID NO: 2392454 - RNA, 20 nt, Human
cagguggggagacugggcug

SEQ ID NO: 2392455 - RNA, 19 nt, Human
cagguggggagacugggcu

SEQ ID NO: 2392456 - RNA, 19 nt, Human
caggugggcuucccagugg

SEQ ID NO: 2392457 - RNA, 22 nt, Human
caggugggcuucccaguggcug

SEQ ID NO: 2392458 - RNA, 13 nt, Human
cagguggggcagc

SEQ ID NO: 2392459 - RNA, 14 nt, Human
cagguggggcagcu

SEQ ID NO: 2392460 - RNA, 15 nt, Human
cagguggggcagcuu

SEQ ID NO: 2392461 - RNA, 16 nt, Human
cagguggggcagcuug

SEQ ID NO: 2392462 - RNA, 17 nt, Human
cagguggggcagcuuga

SEQ ID NO: 2392463 - RNA, 18 nt, Human
cagguggggucacucugg

SEQ ID NO: 2392464 - RNA, 12 nt, Human
cagguggggagg

SEQ ID NO: 2392465 - RNA, 23 nt, Human
caggugggcuucccaguggcugc

SEQ ID NO: 2392466 - RNA, 23 nt, Human
cagguggggagacugggcugagg

SEQ ID NO: 2392467 - RNA, 23 nt, Human
cagguggggagucagggaccccu

SEQ ID NO: 2392468 - RNA, 15 nt, Human
cagguggggaggggg

SEQ ID NO: 2392469 - RNA, 17 nt, Human
cagguggggugaggcag

SEQ ID NO: 2392470 - RNA, 23 nt, Human
cagguggggucacucuggcagcu

SEQ ID NO: 2392471 - RNA, 18 nt, Human
caggugguuauggagagg

SEQ ID NO: 2392472 - RNA, 22 nt, Human
cagguggggugaggcagugggu

SEQ ID NO: 2392473 - RNA, 16 nt, Human
caggugguccugagac

SEQ ID NO: 2392474 - RNA, 20 nt, Human
caggugguccugagaccuga

SEQ ID NO: 2392475 - RNA, 15 nt, Human
caggugguggcacug

SEQ ID NO: 2392476 - RNA, 19 nt, Human
caggugguggcacugagcc

SEQ ID NO: 2392477 - RNA, 20 nt, Human
caggugguggcacugagccc

SEQ ID NO: 2392478 - RNA, 19 nt, Human
cagguggggucacucuggc

SEQ ID NO: 2392479 - RNA, 20 nt, Human
cagguggggucacucuggca

SEQ ID NO: 2392480 - RNA, 21 nt, Human
cagguggggucacucuggcag

SEQ ID NO: 2392481 - RNA, 22 nt, Human
cagguggggucacucuggcagc

SEQ ID NO: 2392482 - RNA, 21 nt, Human
caggugguggcacugagcccc

SEQ ID NO: 2392483 - RNA, 22 nt, Human
caggugguggcacugagccccc

SEQ ID NO: 2392484 - RNA, 21 nt, Human
caggugguggcugcaaggugg

SEQ ID NO: 2392485 - RNA, 20 nt, Human
caggugguuauggagagggu

SEQ ID NO: 2392486 - RNA, 11 nt, Human
caggugucccu

SEQ ID NO: 2392487 - RNA, 14 nt, Human
caggugucccugca

SEQ ID NO: 2392488 - RNA, 13 nt, Human
caguaauaacucu

SEQ ID NO: 2392489 - RNA, 12 nt, Human
caguaauaacuc

SEQ ID NO: 2392490 - RNA, 13 nt, Human
caguaaguuccua

SEQ ID NO: 2392491 - RNA, 14 nt, Human
caguaagucuuuuu

SEQ ID NO: 2392492 - RNA, 18 nt, Human
caguaaguaucuggagga

SEQ ID NO: 2392493 - RNA, 15 nt, Human
caguaagccacugcc

SEQ ID NO: 2392494 - RNA, 19 nt, Human
caguaagcugcucuauugu

SEQ ID NO: 2392495 - RNA, 13 nt, Human
caguaaggcaggg

SEQ ID NO: 2392496 - RNA, 15 nt, Human
caguaagggaaauag

SEQ ID NO: 2392497 - RNA, 18 nt, Human
caguaagggaaauagaaa

SEQ ID NO: 2392498 - RNA, 20 nt, Human
caguacaggcagcacagaga

SEQ ID NO: 2392499 - RNA, 19 nt, Human
caguacaggcagcacagag

SEQ ID NO: 2392500 - RNA, 16 nt, Human
caguacaggcagcaca

SEQ ID NO: 2392501 - RNA, 14 nt, Human
caguacaggcagca

SEQ ID NO: 2392502 - RNA, 13 nt, Human
caguacaggcagc

SEQ ID NO: 2392503 - RNA, 12 nt, Human
caguacaggcag

SEQ ID NO: 2392504 - RNA, 17 nt, Human
caguaauuugaggacaa

SEQ ID NO: 2392505 - RNA, 16 nt, Human
caguaauugugaaaau

SEQ ID NO: 2392506 - RNA, 21 nt, Human
caguaauugguccgaucuuug

SEQ ID NO: 2392507 - RNA, 14 nt, Human
caguaauugugaaa

SEQ ID NO: 2392508 - RNA, 20 nt, Human
caguaauauuuauauauuua

SEQ ID NO: 2392509 - RNA, 13 nt, Human
caguaauauuuau

SEQ ID NO: 2392510 - RNA, 14 nt, Human
caguacccucucag

SEQ ID NO: 2392511 - RNA, 15 nt, Human
caguacccucucagc

SEQ ID NO: 2392512 - RNA, 16 nt, Human
caguacccucucagcu

SEQ ID NO: 2392513 - RNA, 19 nt, Human
caguacccucucagcucca

SEQ ID NO: 2392514 - RNA, 20 nt, Human
caguacccucucagcuccag

SEQ ID NO: 2392515 - RNA, 22 nt, Human
caguacccucucagcuccaggu

SEQ ID NO: 2392516 - RNA, 24 nt, Human
caguacccucucagcuccaggugg

SEQ ID NO: 2392517 - RNA, 16 nt, Human
caguaccuuugucaca

SEQ ID NO: 2392518 - RNA, 15 nt, Human
caguaccuuugucac

SEQ ID NO: 2392519 - RNA, 17 nt, Human
caguaccuuugucacaa

SEQ ID NO: 2392520 - RNA, 21 nt, Human
caguaccuggaggaggagcag

SEQ ID NO: 2392521 - RNA, 23 nt, Human
caguaccuucaaacuagggccaa

SEQ ID NO: 2392522 - RNA, 20 nt, Human
caguaccuauaaaguaaagc

SEQ ID NO: 2392523 - RNA, 20 nt, Human
caguaccuccugucucuggc

SEQ ID NO: 2392524 - RNA, 22 nt, Human
caguaccuauaaaguaaagcua

SEQ ID NO: 2392525 - RNA, 12 nt, Human
caguaccuccug

SEQ ID NO: 2392526 - RNA, 12 nt, Human
caguaccuggag

SEQ ID NO: 2392527 - RNA, 13 nt, Human
caguaccuggagg

SEQ ID NO: 2392528 - RNA, 14 nt, Human
caguaccuggagga

SEQ ID NO: 2392529 - RNA, 15 nt, Human
caguaccuggaggag

SEQ ID NO: 2392530 - RNA, 12 nt, Human
cagguucagcuu

SEQ ID NO: 2392531 - RNA, 24 nt, Human
cagguuaucgaaauaacaauguua

SEQ ID NO: 2392532 - RNA, 14 nt, Human
cagguuauuuuagu

SEQ ID NO: 2392533 - RNA, 16 nt, Human
cagguuauuuuaguuu

SEQ ID NO: 2392534 - RNA, 21 nt, Human
cagguuauuuuaguuucuguu

SEQ ID NO: 2392535 - RNA, 20 nt, Human
cagguucacaggcgaggccu

SEQ ID NO: 2392536 - RNA, 22 nt, Human
cagguucacaggcgaggccugg

SEQ ID NO: 2392537 - RNA, 19 nt, Human
cagguuaucgaaauaacaa

SEQ ID NO: 2392538 - RNA, 20 nt, Human
cagguuaucgaaauaacaau

SEQ ID NO: 2392539 - RNA, 23 nt, Human
cagguuaucgaaauaacaauguu

SEQ ID NO: 2392540 - RNA, 16 nt, Human
cagguuaucugggcau

SEQ ID NO: 2392541 - RNA, 19 nt, Human
cagguuagaaccuagaagg

SEQ ID NO: 2392542 - RNA, 22 nt, Human
cagguuacaacagauuugugaa

SEQ ID NO: 2392543 - RNA, 23 nt, Human
cagguuacaacagauuugugaac

SEQ ID NO: 2392544 - RNA, 23 nt, Human
cagguuagaaccuagaagggcua

SEQ ID NO: 2392545 - RNA, 13 nt, Human
cagguucagcuug

SEQ ID NO: 2392546 - RNA, 14 nt, Human
cagguucccaagcu

SEQ ID NO: 2392547 - RNA, 17 nt, Human
cagguucccaagcucag

SEQ ID NO: 2392548 - RNA, 15 nt, Human
cagguucccaagcuc

SEQ ID NO: 2392549 - RNA, 14 nt, Human
cagguuccaucccg

SEQ ID NO: 2392550 - RNA, 17 nt, Human
cagguuccuauggcugg

SEQ ID NO: 2392551 - RNA, 15 nt, Human
cagguucuauuugga

SEQ ID NO: 2392552 - RNA, 20 nt, Human
cagguucuccguuagcuccu

SEQ ID NO: 2392553 - RNA, 22 nt, Human
caguaaaugggggugcauuuga

SEQ ID NO: 2392554 - RNA, 20 nt, Human
caguaaaugggggugcauuu

SEQ ID NO: 2392555 - RNA, 16 nt, Human
cagguucuauuuggaa

SEQ ID NO: 2392556 - RNA, 17 nt, Human
cagguucuauuuggaau

SEQ ID NO: 2392557 - RNA, 19 nt, Human
cagguucuauuuggaauuu

SEQ ID NO: 2392558 - RNA, 21 nt, Human
cagguucuauuuggaauuuau

SEQ ID NO: 2392559 - RNA, 21 nt, Human
caguaaaugggggugcauuug

SEQ ID NO: 2392560 - RNA, 14 nt, Human
caguaacuuuaugu

SEQ ID NO: 2392561 - RNA, 16 nt, Human
caguaacuuuaugugu

SEQ ID NO: 2392562 - RNA, 17 nt, Human
caguaacuuuaugugua

SEQ ID NO: 2392563 - RNA, 18 nt, Human
caguaacuuuauguguaa

SEQ ID NO: 2392564 - RNA, 19 nt, Human
caguaacuuuauguguaaa

SEQ ID NO: 2392565 - RNA, 20 nt, Human
caguaacuuuauguguaaau

SEQ ID NO: 2392566 - RNA, 18 nt, Human
caguaacgcgucuuccug

SEQ ID NO: 2392567 - RNA, 19 nt, Human
caguaacgcgucuuccuga

SEQ ID NO: 2392568 - RNA, 20 nt, Human
caguaacgcgucuuccugag

SEQ ID NO: 2392569 - RNA, 18 nt, Human
caguaacgcaggggaaac

SEQ ID NO: 2392570 - RNA, 21 nt, Human
caguaacgcgucuuccugagu

SEQ ID NO: 2392571 - RNA, 16 nt, Human
caguaacucaucuguc

SEQ ID NO: 2392572 - RNA, 14 nt, Human
caguaacucaucug

SEQ ID NO: 2392573 - RNA, 15 nt, Human
caggugucccugcac

SEQ ID NO: 2392574 - RNA, 16 nt, Human
caggugucccugcacu

SEQ ID NO: 2392575 - RNA, 18 nt, Human
caggugucccugcacuug

SEQ ID NO: 2392576 - RNA, 19 nt, Human
caggugucccugcacuugc

SEQ ID NO: 2392577 - RNA, 12 nt, Human
caggugugaacc

SEQ ID NO: 2392578 - RNA, 16 nt, Human
cagguguuuaguugca

SEQ ID NO: 2392579 - RNA, 20 nt, Human
cagguguucuacacucaucu

SEQ ID NO: 2392580 - RNA, 13 nt, Human
cagguguugccaa

SEQ ID NO: 2392581 - RNA, 14 nt, Human
cagguguugccaaa

SEQ ID NO: 2392582 - RNA, 12 nt, Human
cagguguucuuc

SEQ ID NO: 2392583 - RNA, 22 nt, Human
cagguguuacuguaauuccuca

SEQ ID NO: 2392584 - RNA, 11 nt, Human
cagguuacaac

SEQ ID NO: 2392585 - RNA, 12 nt, Human
cagguuacaaca

SEQ ID NO: 2392586 - RNA, 13 nt, Human
cagguuacaacag

SEQ ID NO: 2392587 - RNA, 14 nt, Human
cagguuacaacaga

SEQ ID NO: 2392588 - RNA, 15 nt, Human
cagguuacaacagau

SEQ ID NO: 2392589 - RNA, 16 nt, Human
cagguuacaacagauu

SEQ ID NO: 2392590 - RNA, 17 nt, Human
cagguuacaacagauuu

SEQ ID NO: 2392591 - RNA, 19 nt, Human
cagguuacaacagauuugu

SEQ ID NO: 2392592 - RNA, 21 nt, Human
cagguuacaacagauuuguga

SEQ ID NO: 2392593 - RNA, 22 nt, Human
caggugugagucaccaagccca

SEQ ID NO: 2392594 - RNA, 23 nt, Human
caggugugagucaccaagcccag

SEQ ID NO: 2392595 - RNA, 13 nt, Human
caggugugcacgu

SEQ ID NO: 2392596 - RNA, 15 nt, Human
caggugugcacgugg

SEQ ID NO: 2392597 - RNA, 21 nt, Human
caggugugagccaccacgccc

SEQ ID NO: 2392598 - RNA, 20 nt, Human
cagguguguccaccugggca

SEQ ID NO: 2392599 - RNA, 21 nt, Human
cagguguguccaccugggcau

SEQ ID NO: 2392600 - RNA, 23 nt, Human
caggugugcacguggcauguggc

SEQ ID NO: 2392601 - RNA, 18 nt, Human
caggugugccgacagaag

SEQ ID NO: 2392602 - RNA, 19 nt, Human
caggugugccgacagaagg

SEQ ID NO: 2392603 - RNA, 16 nt, Human
caggugugaaccacca

SEQ ID NO: 2392604 - RNA, 19 nt, Human
caggugugaaccaccacac

SEQ ID NO: 2392605 - RNA, 22 nt, Human
caggugugaaccaccacaccca

SEQ ID NO: 2392606 - RNA, 23 nt, Human
caggugugaaccaccacacccag

SEQ ID NO: 2392607 - RNA, 20 nt, Human
caggugugagucaccaagcc

SEQ ID NO: 2392608 - RNA, 21 nt, Human
caggugugagucaccaagccc

SEQ ID NO: 2392609 - RNA, 16 nt, Human
caggugugagucacca

SEQ ID NO: 2392610 - RNA, 21 nt, Human
caggugucauauauggggggc

SEQ ID NO: 2392611 - RNA, 18 nt, Human
caggugugagccaccacg

SEQ ID NO: 2392612 - RNA, 21 nt, Human
cagucauuuuuguuucuaccu

SEQ ID NO: 2392613 - RNA, 17 nt, Human
caguccaaauguccucc

SEQ ID NO: 2392614 - RNA, 21 nt, Human
caguccaaauguccuccagaa

SEQ ID NO: 2392615 - RNA, 18 nt, Human
caguccaaauguccucca

SEQ ID NO: 2392616 - RNA, 23 nt, Human
caguccaaauguccuccagaagc

SEQ ID NO: 2392617 - RNA, 22 nt, Human
caguccaaauguccuccagaag

SEQ ID NO: 2392618 - RNA, 23 nt, Human
cagucauuuuuguuucuaccucc

SEQ ID NO: 2392619 - RNA, 19 nt, Human
caguccaaggaaaccacag

SEQ ID NO: 2392620 - RNA, 22 nt, Human
caguccaaggaaaccacagcug

SEQ ID NO: 2392621 - RNA, 23 nt, Human
caguccaaggaaaccacagcugc

SEQ ID NO: 2392622 - RNA, 20 nt, Human
caguccaccugagcugccau

SEQ ID NO: 2392623 - RNA, 18 nt, Human
caguccaccugagcugcc

SEQ ID NO: 2392624 - RNA, 16 nt, Human
caguccaccugagcug

SEQ ID NO: 2392625 - RNA, 15 nt, Human
caguccaccugagcu

SEQ ID NO: 2392626 - RNA, 24 nt, Human
caguccaaggaaaccacagcugcu

SEQ ID NO: 2392627 - RNA, 13 nt, Human
caguccacaaaau

SEQ ID NO: 2392628 - RNA, 13 nt, Human
caguccagccugg

SEQ ID NO: 2392629 - RNA, 14 nt, Human
caguccagccugga

SEQ ID NO: 2392630 - RNA, 15 nt, Human
caguccagccuggag

SEQ ID NO: 2392631 - RNA, 12 nt, Human
cagucauuuaaa

SEQ ID NO: 2392632 - RNA, 22 nt, Human
cagucauuagacuccuccucca

SEQ ID NO: 2392633 - RNA, 11 nt, Human
cagucauuuaa

SEQ ID NO: 2392634 - RNA, 21 nt, Human
cagucauuggcugucuccuag

SEQ ID NO: 2392635 - RNA, 17 nt, Human
cagucauuggcugucuc

SEQ ID NO: 2392636 - RNA, 13 nt, Human
cagucauuggcug

SEQ ID NO: 2392637 - RNA, 24 nt, Human
cagucauggcaccaaagccaccag

SEQ ID NO: 2392638 - RNA, 18 nt, Human
cagucauuagacuccucc

SEQ ID NO: 2392639 - RNA, 19 nt, Human
cagucaugcauaaauaugc

SEQ ID NO: 2392640 - RNA, 20 nt, Human
cagucaugcauaaauaugca

SEQ ID NO: 2392641 - RNA, 23 nt, Human
cagucaugcauaaauaugcagug

SEQ ID NO: 2392642 - RNA, 23 nt, Human
cagucauuaugagaggcaaugau

SEQ ID NO: 2392643 - RNA, 13 nt, Human
cagucauuaugag

SEQ ID NO: 2392644 - RNA, 16 nt, Human
caguccauagcagaga

SEQ ID NO: 2392645 - RNA, 23 nt, Human
caguccaggaugcuaacaucuaa

SEQ ID NO: 2392646 - RNA, 17 nt, Human
caguccagccuggagau

SEQ ID NO: 2392647 - RNA, 15 nt, Human
caguccaggcugccg

SEQ ID NO: 2392648 - RNA, 18 nt, Human
caguccaggcugccgugg

SEQ ID NO: 2392649 - RNA, 14 nt, Human
caguccauugaaag

SEQ ID NO: 2392650 - RNA, 13 nt, Human
caguccaugaaga

SEQ ID NO: 2392651 - RNA, 19 nt, Human
cagucccaucagagagcga

SEQ ID NO: 2392652 - RNA, 13 nt, Human
cagucccaggggc

SEQ ID NO: 2392653 - RNA, 12 nt, Human
caguccccaccc

SEQ ID NO: 2392654 - RNA, 13 nt, Human
caguccccacccc

SEQ ID NO: 2392655 - RNA, 14 nt, Human
caguccccaccccu

SEQ ID NO: 2392656 - RNA, 15 nt, Human
caguccccaccccug

SEQ ID NO: 2392657 - RNA, 16 nt, Human
caguccccaccccugc

SEQ ID NO: 2392658 - RNA, 17 nt, Human
caguccccaccccugcc

SEQ ID NO: 2392659 - RNA, 18 nt, Human
caguccccaccccugccc

SEQ ID NO: 2392660 - RNA, 16 nt, Human
caguccagccuggaga

SEQ ID NO: 2392661 - RNA, 13 nt, Human
caguauguuguca

SEQ ID NO: 2392662 - RNA, 18 nt, Human
caguauguugucaaagag

SEQ ID NO: 2392663 - RNA, 23 nt, Human
caguauggguuagggaaaacauu

SEQ ID NO: 2392664 - RNA, 16 nt, Human
caguaugucccauagg

SEQ ID NO: 2392665 - RNA, 16 nt, Human
caguauuacuucugcu

SEQ ID NO: 2392666 - RNA, 12 nt, Human
caguauguggaa

SEQ ID NO: 2392667 - RNA, 21 nt, Human
caguauggguuagggaaaaca

SEQ ID NO: 2392668 - RNA, 16 nt, Human
caguauggguuaggga

SEQ ID NO: 2392669 - RNA, 18 nt, Human
caguauuacuucugcuac

SEQ ID NO: 2392670 - RNA, 17 nt, Human
cagucacugaauuccau

SEQ ID NO: 2392671 - RNA, 19 nt, Human
caguauuacuucugcuaca

SEQ ID NO: 2392672 - RNA, 23 nt, Human
cagucagauuuccagucuccacc

SEQ ID NO: 2392673 - RNA, 20 nt, Human
cagucagauuuccagucucc

SEQ ID NO: 2392674 - RNA, 12 nt, Human
cagucagccucu

SEQ ID NO: 2392675 - RNA, 13 nt, Human
cagucagccucuc

SEQ ID NO: 2392676 - RNA, 14 nt, Human
cagucagccucucu

SEQ ID NO: 2392677 - RNA, 17 nt, Human
cagucagccucucuccc

SEQ ID NO: 2392678 - RNA, 18 nt, Human
cagucagccucucuccca

SEQ ID NO: 2392679 - RNA, 21 nt, Human
cagucagccucucucccaguc

SEQ ID NO: 2392680 - RNA, 17 nt, Human
cagucagauuuccaguc

SEQ ID NO: 2392681 - RNA, 21 nt, Human
cagucacugucccucaaauga

SEQ ID NO: 2392682 - RNA, 22 nt, Human
cagucacugucccucaaaugac

SEQ ID NO: 2392683 - RNA, 14 nt, Human
cagucacuggaggu

SEQ ID NO: 2392684 - RNA, 15 nt, Human
caguauguugucaaa

SEQ ID NO: 2392685 - RNA, 23 nt, Human
cagucacuggagguugaagccaa

SEQ ID NO: 2392686 - RNA, 21 nt, Human
cagucagguaguugcaauuga

SEQ ID NO: 2392687 - RNA, 12 nt, Human
cagucaggggca

SEQ ID NO: 2392688 - RNA, 17 nt, Human
cagucaggggcagcuga

SEQ ID NO: 2392689 - RNA, 15 nt, Human
cagucauaacuaaau

SEQ ID NO: 2392690 - RNA, 24 nt, Human
cagucaucuugaccaagcaggaag

SEQ ID NO: 2392691 - RNA, 13 nt, Human
cagucaugcauaa

SEQ ID NO: 2392692 - RNA, 22 nt, Human
cagucaucuugaccaagcagga

SEQ ID NO: 2392693 - RNA, 21 nt, Human
cagucaucuugaccaagcagg

SEQ ID NO: 2392694 - RNA, 14 nt, Human
cagucaugcauaaa

SEQ ID NO: 2392695 - RNA, 16 nt, Human
cagucaugcauaaaua

SEQ ID NO: 2392696 - RNA, 17 nt, Human
cagucaugcauaaauau

SEQ ID NO: 2392697 - RNA, 18 nt, Human
cagucaugcauaaauaug

SEQ ID NO: 2392698 - RNA, 16 nt, Human
cagucaguaauugcca

SEQ ID NO: 2392699 - RNA, 15 nt, Human
cagucaguauuguuu

SEQ ID NO: 2392700 - RNA, 17 nt, Human
cagucagugcaaauguc

SEQ ID NO: 2392701 - RNA, 18 nt, Human
cagucaucuugaccaagc

SEQ ID NO: 2392702 - RNA, 18 nt, Human
cagucagugcaaauguca

SEQ ID NO: 2392703 - RNA, 12 nt, Human
cagucaggauga

SEQ ID NO: 2392704 - RNA, 21 nt, Human
cagucaggaaaggaaucauuu

SEQ ID NO: 2392705 - RNA, 22 nt, Human
cagucagccucucucccagucu

SEQ ID NO: 2392706 - RNA, 22 nt, Human
cagucaggaaagagaacuucca

SEQ ID NO: 2392707 - RNA, 15 nt, Human
cagucaggaaagaga

SEQ ID NO: 2392708 - RNA, 18 nt, Human
cagucaggaaagagaacu

SEQ ID NO: 2392709 - RNA, 18 nt, Human
caguagcaguagaugcau

SEQ ID NO: 2392710 - RNA, 19 nt, Human
caguagauuuucuuuaaaa

SEQ ID NO: 2392711 - RNA, 23 nt, Human
caguagauuuucuuuaaaagaau

SEQ ID NO: 2392712 - RNA, 16 nt, Human
caguagauuuuccaaa

SEQ ID NO: 2392713 - RNA, 18 nt, Human
caguagauuuuccaaaug

SEQ ID NO: 2392714 - RNA, 13 nt, Human
caguagauuuucu

SEQ ID NO: 2392715 - RNA, 14 nt, Human
caguagauuuucuu

SEQ ID NO: 2392716 - RNA, 20 nt, Human
caguagcuguggugaggugg

SEQ ID NO: 2392717 - RNA, 21 nt, Human
caguaggagcccagcucugaa

SEQ ID NO: 2392718 - RNA, 15 nt, Human
caguaggagcccagc

SEQ ID NO: 2392719 - RNA, 14 nt, Human
caguaggagcccag

SEQ ID NO: 2392720 - RNA, 12 nt, Human
caguaggagccc

SEQ ID NO: 2392721 - RNA, 19 nt, Human
caguagaaauaauaugcau

SEQ ID NO: 2392722 - RNA, 12 nt, Human
caguagacaagc

SEQ ID NO: 2392723 - RNA, 18 nt, Human
caguagaaauaauaugca

SEQ ID NO: 2392724 - RNA, 19 nt, Human
caguacuuuggaggccccu

SEQ ID NO: 2392725 - RNA, 16 nt, Human
caguacuuuggaggcc

SEQ ID NO: 2392726 - RNA, 20 nt, Human
caguacuuuggaggccccua

SEQ ID NO: 2392727 - RNA, 16 nt, Human
caguagagucaucucc

SEQ ID NO: 2392728 - RNA, 15 nt, Human
caguagagucaucuc

SEQ ID NO: 2392729 - RNA, 17 nt, Human
caguagagucaucucca

SEQ ID NO: 2392730 - RNA, 23 nt, Human
caguagaggcuauggacagggca

SEQ ID NO: 2392731 - RNA, 20 nt, Human
caguagaaggucggaggcuu

SEQ ID NO: 2392732 - RNA, 20 nt, Human
caguagaccuuguuacuucu

SEQ ID NO: 2392733 - RNA, 23 nt, Human
caguagaaggucggaggcuuggg

SEQ ID NO: 2392734 - RNA, 22 nt, Human
caguaguagccuccagguuucc

SEQ ID NO: 2392735 - RNA, 14 nt, Human
caguaguaccaaau

SEQ ID NO: 2392736 - RNA, 16 nt, Human
caguagucucugugcu

SEQ ID NO: 2392737 - RNA, 15 nt, Human
caguagguuggcagu

SEQ ID NO: 2392738 - RNA, 18 nt, Human
caguaggcucaacuaggg

SEQ ID NO: 2392739 - RNA, 22 nt, Human
caguaggagcccagcucugaaa

SEQ ID NO: 2392740 - RNA, 22 nt, Human
caguaggugcccagaauaaguu

SEQ ID NO: 2392741 - RNA, 23 nt, Human
caguagucuugaugaccaaaguc

SEQ ID NO: 2392742 - RNA, 17 nt, Human
caguagucucugugcuu

SEQ ID NO: 2392743 - RNA, 23 nt, Human
caguagucucugugcuuugacuc

SEQ ID NO: 2392744 - RNA, 12 nt, Human
caguagugauag

SEQ ID NO: 2392745 - RNA, 12 nt, Human
caguauaauucu

SEQ ID NO: 2392746 - RNA, 14 nt, Human
caguauaauucugu

SEQ ID NO: 2392747 - RNA, 14 nt, Human
caguauaaacaaag

SEQ ID NO: 2392748 - RNA, 19 nt, Human
caguauaaacaaaguuacu

SEQ ID NO: 2392749 - RNA, 15 nt, Human
caguaucucagggcc

SEQ ID NO: 2392750 - RNA, 12 nt, Human
caguaucuugaa

SEQ ID NO: 2392751 - RNA, 18 nt, Human
caguaucuugaagacuuu

SEQ ID NO: 2392752 - RNA, 21 nt, Human
caguaucuugaagacuuuucu

SEQ ID NO: 2392753 - RNA, 13 nt, Human
caguaugaaaaua

SEQ ID NO: 2392754 - RNA, 23 nt, Human
caguaucuauauauguguaugua

SEQ ID NO: 2392755 - RNA, 12 nt, Human
caguauggcagc

SEQ ID NO: 2392756 - RNA, 14 nt, Human
caguaugaaaauaa

SEQ ID NO: 2392757 - RNA, 20 nt, Human
caguaugagucaaugugcag

SEQ ID NO: 2392758 - RNA, 21 nt, Human
caguaugagucaaugugcagu

SEQ ID NO: 2392759 - RNA, 23 nt, Human
caguaugagucaaugugcagugu

SEQ ID NO: 2392760 - RNA, 22 nt, Human
caguauauuuauagucacaaga

SEQ ID NO: 2392761 - RNA, 13 nt, Human
caguauauuuaua

SEQ ID NO: 2392762 - RNA, 14 nt, Human
caguauacaguccu

SEQ ID NO: 2392763 - RNA, 22 nt, Human
caguauaauucuguacugauuu

SEQ ID NO: 2392764 - RNA, 23 nt, Human
caguauaauugaguuuucagugg

SEQ ID NO: 2392765 - RNA, 19 nt, Human
caguauaauucuguacuga

SEQ ID NO: 2392766 - RNA, 20 nt, Human
caguauaauucuguacugau

SEQ ID NO: 2392767 - RNA, 24 nt, Human
caguaucaggccugccagacggca

SEQ ID NO: 2392768 - RNA, 20 nt, Human
caguaucaggccugccagac

SEQ ID NO: 2392769 - RNA, 17 nt, Human
caguaucaggccugcca

SEQ ID NO: 2392770 - RNA, 14 nt, Human
caguaucaggccug

SEQ ID NO: 2392771 - RNA, 15 nt, Human
caguauauuuauagu

SEQ ID NO: 2392772 - RNA, 14 nt, Human
caguauauuuauag

SEQ ID NO: 2392773 - RNA, 22 nt, Human
caguaucacugucuuuccuaga

SEQ ID NO: 2392774 - RNA, 14 nt, Human
caguaucacugucu

SEQ ID NO: 2392775 - RNA, 15 nt, Human
caguaucaugaagcc

SEQ ID NO: 2392776 - RNA, 14 nt, Human
caguaucaugaagc

SEQ ID NO: 2392777 - RNA, 16 nt, Human
caguaucaugcccugu

SEQ ID NO: 2392778 - RNA, 13 nt, Human
caguaucaugccc

SEQ ID NO: 2392779 - RNA, 13 nt, Human
caguaucucaggg

SEQ ID NO: 2392780 - RNA, 18 nt, Human
caguaucuauauaugugu

SEQ ID NO: 2392781 - RNA, 16 nt, Human
caguaucuauauaugu

SEQ ID NO: 2392782 - RNA, 19 nt, Human
caguaucuauauaugugua

SEQ ID NO: 2392783 - RNA, 20 nt, Human
caguaucuauauauguguau

SEQ ID NO: 2392784 - RNA, 21 nt, Human
caguaucuauauauguguaug

SEQ ID NO: 2392785 - RNA, 22 nt, Human
caguaucuauauauguguaugu

SEQ ID NO: 2392786 - RNA, 19 nt, Human
caguaucaugcccugugca

SEQ ID NO: 2392787 - RNA, 17 nt, Human
caguaucaugcccugug

SEQ ID NO: 2392788 - RNA, 20 nt, Human
caguaucaugcccugugcaa

SEQ ID NO: 2392789 - RNA, 16 nt, Human
caguauccacuuugca

SEQ ID NO: 2392790 - RNA, 22 nt, Human
cagucccugggggaagcccugg

SEQ ID NO: 2392791 - RNA, 21 nt, Human
cagucccugggggaagcccug

SEQ ID NO: 2392792 - RNA, 20 nt, Human
cagucccugggggaagcccu

SEQ ID NO: 2392793 - RNA, 12 nt, Human
cagucccugggg

SEQ ID NO: 2392794 - RNA, 15 nt, Human
cagucccuauguauu

SEQ ID NO: 2392795 - RNA, 17 nt, Human
cagucccugccaaugga

SEQ ID NO: 2392796 - RNA, 15 nt, Human
caguccuaagaaaga

SEQ ID NO: 2392797 - RNA, 19 nt, Human
caguccuaagaaagaggag

SEQ ID NO: 2392798 - RNA, 13 nt, Human
caguccuagcugc

SEQ ID NO: 2392799 - RNA, 17 nt, Human
caguccuagcugcacag

SEQ ID NO: 2392800 - RNA, 18 nt, Human
caguccuagcugcacagg

SEQ ID NO: 2392801 - RNA, 23 nt, Human
caguccuagcugcacagggcagc

SEQ ID NO: 2392802 - RNA, 12 nt, Human
caguccucccau

SEQ ID NO: 2392803 - RNA, 13 nt, Human
caguccucccauc

SEQ ID NO: 2392804 - RNA, 14 nt, Human
caguccucccaucu

SEQ ID NO: 2392805 - RNA, 15 nt, Human
caguccucccaucuc

SEQ ID NO: 2392806 - RNA, 12 nt, Human
cagucccugcca

SEQ ID NO: 2392807 - RNA, 23 nt, Human
cagucccugaggcagguccccag

SEQ ID NO: 2392808 - RNA, 20 nt, Human
cagucccugaggcagguccc

SEQ ID NO: 2392809 - RNA, 19 nt, Human
caguccccucccaucuggg

SEQ ID NO: 2392810 - RNA, 22 nt, Human
caguccccucccaucugggagu

SEQ ID NO: 2392811 - RNA, 14 nt, Human
caguccccucccau

SEQ ID NO: 2392812 - RNA, 15 nt, Human
caguccccucccauc

SEQ ID NO: 2392813 - RNA, 16 nt, Human
caguccccucccaucu

SEQ ID NO: 2392814 - RNA, 17 nt, Human
caguccccucccaucug

SEQ ID NO: 2392815 - RNA, 14 nt, Human
cagucccuaaagaa

SEQ ID NO: 2392816 - RNA, 14 nt, Human
cagucccugaggca

SEQ ID NO: 2392817 - RNA, 13 nt, Human
cagucccugccaa

SEQ ID NO: 2392818 - RNA, 14 nt, Human
cagucccugccaau

SEQ ID NO: 2392819 - RNA, 15 nt, Human
cagucccugccaaug

SEQ ID NO: 2392820 - RNA, 16 nt, Human
cagucccugccaaugg

SEQ ID NO: 2392821 - RNA, 23 nt, Human
caguccccgugaaggagagcccu

SEQ ID NO: 2392822 - RNA, 18 nt, Human
cagucccccaaccccagc

SEQ ID NO: 2392823 - RNA, 18 nt, Human
caguccccgugccccgcc

SEQ ID NO: 2392824 - RNA, 12 nt, Human
caguccccuccc

SEQ ID NO: 2392825 - RNA, 13 nt, Human
caguccccuccca

SEQ ID NO: 2392826 - RNA, 16 nt, Human
cagucccccugcccca

SEQ ID NO: 2392827 - RNA, 17 nt, Human
cagucccccugccccag

SEQ ID NO: 2392828 - RNA, 21 nt, Human
caguccccaccccugccccca

SEQ ID NO: 2392829 - RNA, 19 nt, Human
caguccccaccccugcccc

SEQ ID NO: 2392830 - RNA, 20 nt, Human
caguccccaccccugccccc

SEQ ID NO: 2392831 - RNA, 20 nt, Human
caguccccccacccucauuc

SEQ ID NO: 2392832 - RNA, 14 nt, Human
caguccccccaccc

SEQ ID NO: 2392833 - RNA, 16 nt, Human
cagucccccaacccca

SEQ ID NO: 2392834 - RNA, 12 nt, Human
cagugagccuga

SEQ ID NO: 2392835 - RNA, 23 nt, Human
cagugagccaagaucgcgccacu

SEQ ID NO: 2392836 - RNA, 13 nt, Human
cagugagccaaga

SEQ ID NO: 2392837 - RNA, 24 nt, Human
cagugagccgagauugcaccacug

SEQ ID NO: 2392838 - RNA, 22 nt, Human
cagugagcuuggaaaggaccag

SEQ ID NO: 2392839 - RNA, 13 nt, Human
cagugaggcccag

SEQ ID NO: 2392840 - RNA, 19 nt, Human
cagugagccgcaucuucuc

SEQ ID NO: 2392841 - RNA, 17 nt, Human
cagugagcggagaucgc

SEQ ID NO: 2392842 - RNA, 13 nt, Human
cagugagcugaga

SEQ ID NO: 2392843 - RNA, 12 nt, Human
cagugaggcucu

SEQ ID NO: 2392844 - RNA, 13 nt, Human
cagugaggcucug

SEQ ID NO: 2392845 - RNA, 14 nt, Human
cagugaggcucugc

SEQ ID NO: 2392846 - RNA, 15 nt, Human
cagugaggcucugcc

SEQ ID NO: 2392847 - RNA, 16 nt, Human
cagugaggcucugccc

SEQ ID NO: 2392848 - RNA, 17 nt, Human
cagugaggcccagggag

SEQ ID NO: 2392849 - RNA, 16 nt, Human
cagugaggcccaggga

SEQ ID NO: 2392850 - RNA, 21 nt, Human
cagugagggagggcugucauc

SEQ ID NO: 2392851 - RNA, 21 nt, Human
cagugaggcccagggagaggc

SEQ ID NO: 2392852 - RNA, 21 nt, Human
cagugaggcucugcccuuggu

SEQ ID NO: 2392853 - RNA, 17 nt, Human
cagugagucgaggacag

SEQ ID NO: 2392854 - RNA, 18 nt, Human
cagugagucgaggacagg

SEQ ID NO: 2392855 - RNA, 17 nt, Human
cagugaggcucugcccu

SEQ ID NO: 2392856 - RNA, 18 nt, Human
cagugaggcucugcccuu

SEQ ID NO: 2392857 - RNA, 19 nt, Human
cagugaggcucugcccuug

SEQ ID NO: 2392858 - RNA, 20 nt, Human
cagugaggcucugcccuugg

SEQ ID NO: 2392859 - RNA, 13 nt, Human
cagugaaagcauc

SEQ ID NO: 2392860 - RNA, 14 nt, Human
cagugaaagcauca

SEQ ID NO: 2392861 - RNA, 21 nt, Human
cagugaaaauguaagcuguuu

SEQ ID NO: 2392862 - RNA, 14 nt, Human
cagugaaccaaaga

SEQ ID NO: 2392863 - RNA, 20 nt, Human
cagugaaccaaagagacugg

SEQ ID NO: 2392864 - RNA, 21 nt, Human
cagugaaccaaagagacugga

SEQ ID NO: 2392865 - RNA, 20 nt, Human
cagugaaaacaagugcuggc

SEQ ID NO: 2392866 - RNA, 21 nt, Human
cagugaaaacaagugcuggca

SEQ ID NO: 2392867 - RNA, 12 nt, Human
cagugaaaaugu

SEQ ID NO: 2392868 - RNA, 15 nt, Human
cagugaaaauguaag

SEQ ID NO: 2392869 - RNA, 18 nt, Human
cagugaaaauguaagcug

SEQ ID NO: 2392870 - RNA, 17 nt, Human
cagugaaugauucagug

SEQ ID NO: 2392871 - RNA, 23 nt, Human
cagugaaccaaagagacuggagc

SEQ ID NO: 2392872 - RNA, 20 nt, Human
cagugacagaguucacuaua

SEQ ID NO: 2392873 - RNA, 18 nt, Human
cagugacagaguucacua

SEQ ID NO: 2392874 - RNA, 16 nt, Human
cagugacagaguucac

SEQ ID NO: 2392875 - RNA, 23 nt, Human
cagugacacuucagagagcuggu

SEQ ID NO: 2392876 - RNA, 17 nt, Human
cagugacagacaggcuc

SEQ ID NO: 2392877 - RNA, 18 nt, Human
cagugacagacaggcucu

SEQ ID NO: 2392878 - RNA, 22 nt, Human
cagugacacuucagagagcugg

SEQ ID NO: 2392879 - RNA, 19 nt, Human
cagugacacuucagagagc

SEQ ID NO: 2392880 - RNA, 18 nt, Human
cagugacacuucagagag

SEQ ID NO: 2392881 - RNA, 17 nt, Human
cagugacacuucagaga

SEQ ID NO: 2392882 - RNA, 15 nt, Human
cagugacagacaggc

SEQ ID NO: 2392883 - RNA, 16 nt, Human
cagugacagacaggcu

SEQ ID NO: 2392884 - RNA, 16 nt, Human
cagugacacuucagag

SEQ ID NO: 2392885 - RNA, 20 nt, Human
cagugaaugauucaguguua

SEQ ID NO: 2392886 - RNA, 18 nt, Human
cagugaaugauucagugu

SEQ ID NO: 2392887 - RNA, 12 nt, Human
cagugaauucuu

SEQ ID NO: 2392888 - RNA, 20 nt, Human
cagugacucgggcuccugug

SEQ ID NO: 2392889 - RNA, 21 nt, Human
cagugacucgggcuccugugc

SEQ ID NO: 2392890 - RNA, 22 nt, Human
cagugacucgggcuccugugcc

SEQ ID NO: 2392891 - RNA, 23 nt, Human
cagugacucgggcuccugugccc

SEQ ID NO: 2392892 - RNA, 15 nt, Human
cagugagacagcucu

SEQ ID NO: 2392893 - RNA, 18 nt, Human
cagugagauuacagagga

SEQ ID NO: 2392894 - RNA, 19 nt, Human
cagugagauuacagaggaa

SEQ ID NO: 2392895 - RNA, 20 nt, Human
cagugagauuacagaggaag

SEQ ID NO: 2392896 - RNA, 16 nt, Human
cagugagcacucccaa

SEQ ID NO: 2392897 - RNA, 21 nt, Human
cagugagaaaaagcuccuguc

SEQ ID NO: 2392898 - RNA, 22 nt, Human
cagugagaaaaagcuccugucc

SEQ ID NO: 2392899 - RNA, 14 nt, Human
cagugagaaaaagc

SEQ ID NO: 2392900 - RNA, 19 nt, Human
cagugagaaaaagcuccug

SEQ ID NO: 2392901 - RNA, 20 nt, Human
cagugagaaaaagcuccugu

SEQ ID NO: 2392902 - RNA, 22 nt, Human
cagugacgugcaccuguacuca

SEQ ID NO: 2392903 - RNA, 13 nt, Human
cagugacuccagg

SEQ ID NO: 2392904 - RNA, 14 nt, Human
cagugacuccagga

SEQ ID NO: 2392905 - RNA, 18 nt, Human
cagugacgugcaccugua

SEQ ID NO: 2392906 - RNA, 17 nt, Human
cagugacgugcaccugu

SEQ ID NO: 2392907 - RNA, 15 nt, Human
cagugacuccaggag

SEQ ID NO: 2392908 - RNA, 16 nt, Human
cagugacuccaggaga

SEQ ID NO: 2392909 - RNA, 17 nt, Human
cagugacuccaggagag

SEQ ID NO: 2392910 - RNA, 21 nt, Human
cagugacuccaggagaggagc

SEQ ID NO: 2392911 - RNA, 16 nt, Human
cagugacucgggcucc

SEQ ID NO: 2392912 - RNA, 17 nt, Human
cagugacucgggcuccu

SEQ ID NO: 2392913 - RNA, 18 nt, Human
cagugacucgggcuccug

SEQ ID NO: 2392914 - RNA, 19 nt, Human
cagugacucgggcuccugu

SEQ ID NO: 2392915 - RNA, 16 nt, Human
cagugaccugaggaag

SEQ ID NO: 2392916 - RNA, 14 nt, Human
cagugaccugagga

SEQ ID NO: 2392917 - RNA, 19 nt, Human
cagugaccugaggaagcgu

SEQ ID NO: 2392918 - RNA, 19 nt, Human
cagugaccugcuggguaaa

SEQ ID NO: 2392919 - RNA, 18 nt, Human
cagugaccugaggaagcg

SEQ ID NO: 2392920 - RNA, 17 nt, Human
cagugaccugaggaagc

SEQ ID NO: 2392921 - RNA, 16 nt, Human
cagugacgugcaccug

SEQ ID NO: 2392922 - RNA, 12 nt, Human
caguccuuccac

SEQ ID NO: 2392923 - RNA, 18 nt, Human
cagucuggaggggcaugg

SEQ ID NO: 2392924 - RNA, 16 nt, Human
cagucuggaggggcau

SEQ ID NO: 2392925 - RNA, 13 nt, Human
cagucuggagggg

SEQ ID NO: 2392926 - RNA, 12 nt, Human
cagucuggaggg

SEQ ID NO: 2392927 - RNA, 19 nt, Human
cagucuggaaugcaguggu

SEQ ID NO: 2392928 - RNA, 21 nt, Human
cagucuguuccccauggccac

SEQ ID NO: 2392929 - RNA, 23 nt, Human
cagucugucaugaacauguuccu

SEQ ID NO: 2392930 - RNA, 15 nt, Human
cagucuguggaucag

SEQ ID NO: 2392931 - RNA, 21 nt, Human
cagucuggaggggcauggcca

SEQ ID NO: 2392932 - RNA, 18 nt, Human
cagucuggcugagcccug

SEQ ID NO: 2392933 - RNA, 20 nt, Human
cagucuggcugagcccugcu

SEQ ID NO: 2392934 - RNA, 12 nt, Human
cagucugucaug

SEQ ID NO: 2392935 - RNA, 24 nt, Human
cagucugucaugaacauguuccug

SEQ ID NO: 2392936 - RNA, 23 nt, Human
cagucuugaauuucuaaaaaaca

SEQ ID NO: 2392937 - RNA, 22 nt, Human
cagucuugaauuucuaaaaaac

SEQ ID NO: 2392938 - RNA, 15 nt, Human
cagucuugaauuucu

SEQ ID NO: 2392939 - RNA, 21 nt, Human
cagucuuccugacacuuuaau

SEQ ID NO: 2392940 - RNA, 18 nt, Human
cagucuuccugacacuuu

SEQ ID NO: 2392941 - RNA, 17 nt, Human
cagucuuccugacacuu

SEQ ID NO: 2392942 - RNA, 16 nt, Human
cagucuuccugacacu

SEQ ID NO: 2392943 - RNA, 13 nt, Human
cagucuuccugac

SEQ ID NO: 2392944 - RNA, 21 nt, Human
cagucuuccauuugcaaggga

SEQ ID NO: 2392945 - RNA, 18 nt, Human
cagucuuccauuugcaag

SEQ ID NO: 2392946 - RNA, 17 nt, Human
cagucuuccauuugcaa

SEQ ID NO: 2392947 - RNA, 15 nt, Human
cagucuuccauuugc

SEQ ID NO: 2392948 - RNA, 18 nt, Human
cagucuugacgaguguga

SEQ ID NO: 2392949 - RNA, 15 nt, Human
cagucuugcagcagg

SEQ ID NO: 2392950 - RNA, 16 nt, Human
cagucuuggcucacug

SEQ ID NO: 2392951 - RNA, 17 nt, Human
cagucuuguauuaaguu

SEQ ID NO: 2392952 - RNA, 13 nt, Human
cagucuugugcuu

SEQ ID NO: 2392953 - RNA, 14 nt, Human
cagucuugcagcag

SEQ ID NO: 2392954 - RNA, 22 nt, Human
cagucuuuaaucugagaggcca

SEQ ID NO: 2392955 - RNA, 17 nt, Human
cagugaaaaacuauuaa

SEQ ID NO: 2392956 - RNA, 16 nt, Human
cagugaaaacaagugc

SEQ ID NO: 2392957 - RNA, 18 nt, Human
cagugaaaacaagugcug

SEQ ID NO: 2392958 - RNA, 14 nt, Human
cagugaaaaacuau

SEQ ID NO: 2392959 - RNA, 22 nt, Human
cagucuuuuuggugaggguaac

SEQ ID NO: 2392960 - RNA, 20 nt, Human
cagugaaagaaaauaacaau

SEQ ID NO: 2392961 - RNA, 16 nt, Human
cagugaaagaaaauaa

SEQ ID NO: 2392962 - RNA, 18 nt, Human
cagucuggaaugcagugg

SEQ ID NO: 2392963 - RNA, 21 nt, Human
caguccuuaccagcagagcac

SEQ ID NO: 2392964 - RNA, 19 nt, Human
caguccuuaccagcagagc

SEQ ID NO: 2392965 - RNA, 20 nt, Human
caguccuuaccagcagagca

SEQ ID NO: 2392966 - RNA, 23 nt, Human
caguccugggagaaccucaggcu

SEQ ID NO: 2392967 - RNA, 22 nt, Human
caguccugggagaaccucaggc

SEQ ID NO: 2392968 - RNA, 21 nt, Human
caguccugggagaaccucagg

SEQ ID NO: 2392969 - RNA, 13 nt, Human
caguccugggaga

SEQ ID NO: 2392970 - RNA, 12 nt, Human
caguccugggag

SEQ ID NO: 2392971 - RNA, 11 nt, Human
caguccuggcc

SEQ ID NO: 2392972 - RNA, 13 nt, Human
caguccuggccug

SEQ ID NO: 2392973 - RNA, 19 nt, Human
caguccuggccuggcuucu

SEQ ID NO: 2392974 - RNA, 15 nt, Human
caguccuuaccagca

SEQ ID NO: 2392975 - RNA, 18 nt, Human
caguccuuaccagcagag

SEQ ID NO: 2392976 - RNA, 21 nt, Human
caguccugccuggccaggcag

SEQ ID NO: 2392977 - RNA, 17 nt, Human
caguccugccuggccag

SEQ ID NO: 2392978 - RNA, 16 nt, Human
caguccugccuggcca

SEQ ID NO: 2392979 - RNA, 18 nt, Human
caguccugccuggccagg

SEQ ID NO: 2392980 - RNA, 22 nt, Human
caguccuggaagccagcuuucc

SEQ ID NO: 2392981 - RNA, 17 nt, Human
caguccuggaagccagc

SEQ ID NO: 2392982 - RNA, 15 nt, Human
caguccugccuggcc

SEQ ID NO: 2392983 - RNA, 14 nt, Human
caguccugccuggc

SEQ ID NO: 2392984 - RNA, 13 nt, Human
caguccugccugg

SEQ ID NO: 2392985 - RNA, 12 nt, Human
caguccugccug

SEQ ID NO: 2392986 - RNA, 19 nt, Human
caguccugccucagccucc

SEQ ID NO: 2392987 - RNA, 17 nt, Human
caguccugccucagccu

SEQ ID NO: 2392988 - RNA, 22 nt, Human
caguccugaucagagccguggu

SEQ ID NO: 2392989 - RNA, 13 nt, Human
caguccucuuuca

SEQ ID NO: 2392990 - RNA, 20 nt, Human
caguccucuccaccuagugg

SEQ ID NO: 2392991 - RNA, 22 nt, Human
caguccucuccaccuaguggcu

SEQ ID NO: 2392992 - RNA, 23 nt, Human
caguccuccccucacagccucug

SEQ ID NO: 2392993 - RNA, 22 nt, Human
caguccuccccucacagccucu

SEQ ID NO: 2392994 - RNA, 13 nt, Human
caguccucuccac

SEQ ID NO: 2392995 - RNA, 12 nt, Human
caguccuccccu

SEQ ID NO: 2392996 - RNA, 13 nt, Human
caguccuccccuc

SEQ ID NO: 2392997 - RNA, 14 nt, Human
caguccuccccuca

SEQ ID NO: 2392998 - RNA, 15 nt, Human
caguccuccccucac

SEQ ID NO: 2392999 - RNA, 18 nt, Human
caguccuccccucacagc

SEQ ID NO: 2393000 - RNA, 19 nt, Human
caguccuccccucacagcc

SEQ ID NO: 2393001 - RNA, 20 nt, Human
caguccuccccucacagccu

SEQ ID NO: 2393002 - RNA, 21 nt, Human
caguccuccccucacagccuc

SEQ ID NO: 2393003 - RNA, 16 nt, Human
caguccucccaucuca

SEQ ID NO: 2393004 - RNA, 17 nt, Human
caguccucccaucucac

SEQ ID NO: 2393005 - RNA, 17 nt, Human
cagugcuguggccuggg

SEQ ID NO: 2393006 - RNA, 23 nt, Human
cagugccuuaccuccugcccagg

SEQ ID NO: 2393007 - RNA, 22 nt, Human
cagugccuuaccuccugcccag

SEQ ID NO: 2393008 - RNA, 21 nt, Human
cagugccuuaccuccugccca

SEQ ID NO: 2393009 - RNA, 20 nt, Human
cagugccuuaccuccugccc

SEQ ID NO: 2393010 - RNA, 19 nt, Human
cagugccuuaccuccugcc

SEQ ID NO: 2393011 - RNA, 18 nt, Human
cagugccuuaccuccugc

SEQ ID NO: 2393012 - RNA, 17 nt, Human
cagugccuuaccuccug

SEQ ID NO: 2393013 - RNA, 18 nt, Human
cagugccugggaauguau

SEQ ID NO: 2393014 - RNA, 20 nt, Human
cagugccugggaauguauua

SEQ ID NO: 2393015 - RNA, 14 nt, Human
cagugccugggaau

SEQ ID NO: 2393016 - RNA, 12 nt, Human
cagugccugcug

SEQ ID NO: 2393017 - RNA, 13 nt, Human
cagugccugcuga

SEQ ID NO: 2393018 - RNA, 11 nt, Human
cagugccugcu

SEQ ID NO: 2393019 - RNA, 10 nt, Human
cagugccugc

SEQ ID NO: 2393020 - RNA, 11 nt, Human
cagugccuuau

SEQ ID NO: 2393021 - RNA, 13 nt, Human
cagugccuuaugg

SEQ ID NO: 2393022 - RNA, 18 nt, Human
cagugccgagaaggaagc

SEQ ID NO: 2393023 - RNA, 15 nt, Human
cagugccgagaagga

SEQ ID NO: 2393024 - RNA, 17 nt, Human
cagugccgccgccucgc

SEQ ID NO: 2393025 - RNA, 18 nt, Human
cagugccgccgccucgcc

SEQ ID NO: 2393026 - RNA, 19 nt, Human
cagugccgccgccucgccc

SEQ ID NO: 2393027 - RNA, 20 nt, Human
cagugccgccgccucgccca

SEQ ID NO: 2393028 - RNA, 22 nt, Human
cagugccgccgccucgcccacc

SEQ ID NO: 2393029 - RNA, 23 nt, Human
cagugccgccgccucgcccaccg

SEQ ID NO: 2393030 - RNA, 15 nt, Human
cagugccuuauggaa

SEQ ID NO: 2393031 - RNA, 16 nt, Human
cagugccuuauggaac

SEQ ID NO: 2393032 - RNA, 17 nt, Human
cagugccuuauggaaca

SEQ ID NO: 2393033 - RNA, 18 nt, Human
cagugccuuauggaacac

SEQ ID NO: 2393034 - RNA, 19 nt, Human
cagugccuuauggaacacu

SEQ ID NO: 2393035 - RNA, 20 nt, Human
cagugccuuauggaacacuc

SEQ ID NO: 2393036 - RNA, 21 nt, Human
cagugccuuauggaacacucu

SEQ ID NO: 2393037 - RNA, 22 nt, Human
cagugccuuauggaacacucug

SEQ ID NO: 2393038 - RNA, 19 nt, Human
cagugagucgaggacaggg

SEQ ID NO: 2393039 - RNA, 20 nt, Human
cagugagucgaggacaggga

SEQ ID NO: 2393040 - RNA, 22 nt, Human
cagugagucgaggacagggagg

SEQ ID NO: 2393041 - RNA, 23 nt, Human
cagugagucgaggacagggaggu

SEQ ID NO: 2393042 - RNA, 18 nt, Human
cagugagucucuucagaa

SEQ ID NO: 2393043 - RNA, 14 nt, Human
cagugagugagccu

SEQ ID NO: 2393044 - RNA, 17 nt, Human
cagugagucucuucaga

SEQ ID NO: 2393045 - RNA, 15 nt, Human
cagugagucucuuca

SEQ ID NO: 2393046 - RNA, 15 nt, Human
cagugagugagccug

SEQ ID NO: 2393047 - RNA, 16 nt, Human
cagugagugagccugg

SEQ ID NO: 2393048 - RNA, 17 nt, Human
cagugagugagccuggc

SEQ ID NO: 2393049 - RNA, 18 nt, Human
cagugagugagccuggcu

SEQ ID NO: 2393050 - RNA, 16 nt, Human
cagugaggugcccagc

SEQ ID NO: 2393051 - RNA, 23 nt, Human
cagugagggucuucuuacaugca

SEQ ID NO: 2393052 - RNA, 16 nt, Human
cagugagggucuucuu

SEQ ID NO: 2393053 - RNA, 15 nt, Human
cagugaggugcccag

SEQ ID NO: 2393054 - RNA, 20 nt, Human
cagugauauggcagaagaca

SEQ ID NO: 2393055 - RNA, 21 nt, Human
cagugauauggcagaagacac

SEQ ID NO: 2393056 - RNA, 22 nt, Human
cagugauauggcagaagacacc

SEQ ID NO: 2393057 - RNA, 23 nt, Human
cagugauauggcagaagacacca

SEQ ID NO: 2393058 - RNA, 19 nt, Human
cagugagugagccuggcuc

SEQ ID NO: 2393059 - RNA, 20 nt, Human
cagugagugagccuggcucu

SEQ ID NO: 2393060 - RNA, 21 nt, Human
cagugagugagccuggcucuu

SEQ ID NO: 2393061 - RNA, 18 nt, Human
cagugaguuacagcgaga

SEQ ID NO: 2393062 - RNA, 22 nt, Human
cagugaguuacagcgagaggca

SEQ ID NO: 2393063 - RNA, 23 nt, Human
cagugaguuacagcgagaggcag

SEQ ID NO: 2393064 - RNA, 15 nt, Human
cagugauauggcaga

SEQ ID NO: 2393065 - RNA, 18 nt, Human
cagugauauggcagaaga

SEQ ID NO: 2393066 - RNA, 20 nt, Human
cagugaugcuggaugcuccu

SEQ ID NO: 2393067 - RNA, 18 nt, Human
cagugaugcuggaugcuc

SEQ ID NO: 2393068 - RNA, 21 nt, Human
cagugaucuccauauguuaca

SEQ ID NO: 2393069 - RNA, 16 nt, Human
cagugaucuccauaug

SEQ ID NO: 2393070 - RNA, 15 nt, Human
cagugaucuccauau

SEQ ID NO: 2393071 - RNA, 13 nt, Human
cagugaucuccau

SEQ ID NO: 2393072 - RNA, 17 nt, Human
cagugaucaaaguccga

SEQ ID NO: 2393073 - RNA, 17 nt, Human
cagugauuaccagggac

SEQ ID NO: 2393074 - RNA, 18 nt, Human
cagugcccauuccucacc

SEQ ID NO: 2393075 - RNA, 14 nt, Human
cagugcccauuccu

SEQ ID NO: 2393076 - RNA, 23 nt, Human
cagugauguaccaugaaacaaag

SEQ ID NO: 2393077 - RNA, 17 nt, Human
cagugaugggagaguag

SEQ ID NO: 2393078 - RNA, 18 nt, Human
cagugauuaccagggacu

SEQ ID NO: 2393079 - RNA, 15 nt, Human
cagugcccuccagga

SEQ ID NO: 2393080 - RNA, 19 nt, Human
cagugcccucauuuuaugu

SEQ ID NO: 2393081 - RNA, 17 nt, Human
cagugcccucauuuuau

SEQ ID NO: 2393082 - RNA, 14 nt, Human
cagugccccuagcu

SEQ ID NO: 2393083 - RNA, 19 nt, Human
cagugcccauuccucaccu

SEQ ID NO: 2393084 - RNA, 23 nt, Human
cagugcccccacugaccagaacu

SEQ ID NO: 2393085 - RNA, 22 nt, Human
cagugcccccacugaccagaac

SEQ ID NO: 2393086 - RNA, 21 nt, Human
cagugcccccacugaccagaa

SEQ ID NO: 2393087 - RNA, 20 nt, Human
cagugcccccacugaccaga

SEQ ID NO: 2393088 - RNA, 17 nt, Human
cagugcccccacugacc

SEQ ID NO: 2393089 - RNA, 15 nt, Human
cagugcccccacuga

SEQ ID NO: 2393090 - RNA, 12 nt, Human
cagugcccccac

SEQ ID NO: 2393091 - RNA, 23 nt, Human
cagugccuuccauaauuaugaca

SEQ ID NO: 2393092 - RNA, 17 nt, Human
cagugccuuccauaauu

SEQ ID NO: 2393093 - RNA, 16 nt, Human
cagugccuuccauaau

SEQ ID NO: 2393094 - RNA, 15 nt, Human
cagugccuuccauaa

SEQ ID NO: 2393095 - RNA, 14 nt, Human
cagugccuuccaua

SEQ ID NO: 2393096 - RNA, 18 nt, Human
cagugccuucaauaaaug

SEQ ID NO: 2393097 - RNA, 15 nt, Human
cagugccuucaauaa

SEQ ID NO: 2393098 - RNA, 16 nt, Human
cagugccuucaauaaa

SEQ ID NO: 2393099 - RNA, 23 nt, Human
cagugccuuauggaacacucuga

SEQ ID NO: 2393100 - RNA, 24 nt, Human
cagugcgcgugcacguggagagcu

SEQ ID NO: 2393101 - RNA, 18 nt, Human
cagugcgauucuggauaa

SEQ ID NO: 2393102 - RNA, 22 nt, Human
cagugccuuccuguuuuucaca

SEQ ID NO: 2393103 - RNA, 14 nt, Human
cagugccuugggga

SEQ ID NO: 2393104 - RNA, 21 nt, Human
cagugccuuggggaauuuccu

SEQ ID NO: 2393105 - RNA, 22 nt, Human
cagugccuuggggaauuuccuc

SEQ ID NO: 2393106 - RNA, 14 nt, Human
cagugcuaaaaaug

SEQ ID NO: 2393107 - RNA, 15 nt, Human
cagugcuaaaaaugg

SEQ ID NO: 2393108 - RNA, 16 nt, Human
cagugcuaaaaauggg

SEQ ID NO: 2393109 - RNA, 17 nt, Human
cagugcuaaaaauggga

SEQ ID NO: 2393110 - RNA, 19 nt, Human
cagugcuaaaaaugggacu

SEQ ID NO: 2393111 - RNA, 20 nt, Human
cagugcuaaaaaugggacuu

SEQ ID NO: 2393112 - RNA, 22 nt, Human
cagugcuaaaaaugggacuucu

SEQ ID NO: 2393113 - RNA, 23 nt, Human
cagugcuauuuugugcccacugu

SEQ ID NO: 2393114 - RNA, 14 nt, Human
cagugcucccucac

SEQ ID NO: 2393115 - RNA, 14 nt, Human
cagugcucgcuguu

SEQ ID NO: 2393116 - RNA, 15 nt, Human
cagugcucgcuguug

SEQ ID NO: 2393117 - RNA, 16 nt, Human
cagugcucgcuguugc

SEQ ID NO: 2393118 - RNA, 17 nt, Human
cagugcucgcuguugcu

SEQ ID NO: 2393119 - RNA, 18 nt, Human
cagugcucgcuguugcug

SEQ ID NO: 2393120 - RNA, 19 nt, Human
cagugcucgcuguugcuga

SEQ ID NO: 2393121 - RNA, 20 nt, Human
cagugcucgcuguugcugaa

SEQ ID NO: 2393122 - RNA, 21 nt, Human
cagugcucgcuguugcugaau

SEQ ID NO: 2393123 - RNA, 22 nt, Human
cagugcucgcuguugcugaaua

SEQ ID NO: 2393124 - RNA, 15 nt, Human
cagcaagucaggguu

SEQ ID NO: 2393125 - RNA, 14 nt, Human
cagcaagucucuuu

SEQ ID NO: 2393126 - RNA, 12 nt, Human
cagcaagugaga

SEQ ID NO: 2393127 - RNA, 23 nt, Human
cagcaagggugaugggaaagcau

SEQ ID NO: 2393128 - RNA, 22 nt, Human
cagcaagggugaugggaaagca

SEQ ID NO: 2393129 - RNA, 14 nt, Human
cagcaagugagagc

SEQ ID NO: 2393130 - RNA, 15 nt, Human
cagcaagugagagcu

SEQ ID NO: 2393131 - RNA, 16 nt, Human
cagcaagugagagcug

SEQ ID NO: 2393132 - RNA, 17 nt, Human
cagcaagugagagcugg

SEQ ID NO: 2393133 - RNA, 20 nt, Human
cagcaacuugucuuuuucug

SEQ ID NO: 2393134 - RNA, 22 nt, Human
cagcaagaagauccuaaaacaa

SEQ ID NO: 2393135 - RNA, 17 nt, Human
cagcaaggagauuuaca

SEQ ID NO: 2393136 - RNA, 18 nt, Human
cagcaaggagauuuacaa

SEQ ID NO: 2393137 - RNA, 18 nt, Human
cagcaaggaggcuggcug

SEQ ID NO: 2393138 - RNA, 19 nt, Human
cagcaaggaggcuggcugg

SEQ ID NO: 2393139 - RNA, 20 nt, Human
cagcaaggaggcuggcuggg

SEQ ID NO: 2393140 - RNA, 21 nt, Human
cagcaaggaggcuggcugggg

SEQ ID NO: 2393141 - RNA, 22 nt, Human
cagcaaggaggcuggcuggggc

SEQ ID NO: 2393142 - RNA, 15 nt, Human
cagcaaggcaccugc

SEQ ID NO: 2393143 - RNA, 16 nt, Human
cagcaaggcaccugca

SEQ ID NO: 2393144 - RNA, 17 nt, Human
cagcaaggcaccugcag

SEQ ID NO: 2393145 - RNA, 19 nt, Human
cagcaagggugaugggaaa

SEQ ID NO: 2393146 - RNA, 23 nt, Human
cagcaaggcaccugcagguuggg

SEQ ID NO: 2393147 - RNA, 14 nt, Human
cagcacugucucag

SEQ ID NO: 2393148 - RNA, 20 nt, Human
cagcacugucccuugccuca

SEQ ID NO: 2393149 - RNA, 16 nt, Human
cagcacugucccuugc

SEQ ID NO: 2393150 - RNA, 18 nt, Human
cagcacugucccuugccu

SEQ ID NO: 2393151 - RNA, 15 nt, Human
cagcacacagggcag

SEQ ID NO: 2393152 - RNA, 12 nt, Human
cagcacuguccc

SEQ ID NO: 2393153 - RNA, 13 nt, Human
cagcacugucccu

SEQ ID NO: 2393154 - RNA, 14 nt, Human
cagcacugucccuu

SEQ ID NO: 2393155 - RNA, 14 nt, Human
cagcacacagggca

SEQ ID NO: 2393156 - RNA, 13 nt, Human
cagcacacagggc

SEQ ID NO: 2393157 - RNA, 16 nt, Human
cagcacaaggccaucu

SEQ ID NO: 2393158 - RNA, 13 nt, Human
cagcacaaggcca

SEQ ID NO: 2393159 - RNA, 20 nt, Human
cagcaauucuccugccucag

SEQ ID NO: 2393160 - RNA, 19 nt, Human
cagcaauucuccugccuca

SEQ ID NO: 2393161 - RNA, 18 nt, Human
cagcaauucuccugccuc

SEQ ID NO: 2393162 - RNA, 17 nt, Human
cagcaauucuccugccu

SEQ ID NO: 2393163 - RNA, 16 nt, Human
cagcaauucuccugcc

SEQ ID NO: 2393164 - RNA, 15 nt, Human
cagcaauucuccugc

SEQ ID NO: 2393165 - RNA, 18 nt, Human
cagcaaugacaucucagg

SEQ ID NO: 2393166 - RNA, 16 nt, Human
cagcaauauguaaaua

SEQ ID NO: 2393167 - RNA, 19 nt, Human
cagcaaugacaucucaggg

SEQ ID NO: 2393168 - RNA, 15 nt, Human
cagcaauauguaaau

SEQ ID NO: 2393169 - RNA, 22 nt, Human
cagcaaugauguccagaagaau

SEQ ID NO: 2393170 - RNA, 20 nt, Human
cagcaaugacaucucagggg

SEQ ID NO: 2393171 - RNA, 21 nt, Human
cagcaaugacaucucaggggc

SEQ ID NO: 2393172 - RNA, 18 nt, Human
cagcaaugauguccagaa

SEQ ID NO: 2393173 - RNA, 20 nt, Human
cagcaaugauguccagaaga

SEQ ID NO: 2393174 - RNA, 22 nt, Human
cagcaauaaagcagcguuucua

SEQ ID NO: 2393175 - RNA, 19 nt, Human
cagcaagugagagcugggu

SEQ ID NO: 2393176 - RNA, 21 nt, Human
cagcaagugagagcugggugu

SEQ ID NO: 2393177 - RNA, 21 nt, Human
cagcaauaaagcagcguuucu

SEQ ID NO: 2393178 - RNA, 13 nt, Human
cagcaauaaagca

SEQ ID NO: 2393179 - RNA, 18 nt, Human
cagcagagacuugggaca

SEQ ID NO: 2393180 - RNA, 19 nt, Human
cagcagagacuugggacau

SEQ ID NO: 2393181 - RNA, 21 nt, Human
cagcagagacuugggacauug

SEQ ID NO: 2393182 - RNA, 14 nt, Human
cagcagacuaugaa

SEQ ID NO: 2393183 - RNA, 17 nt, Human
cagcagacauugucagc

SEQ ID NO: 2393184 - RNA, 13 nt, Human
cagcagacauugu

SEQ ID NO: 2393185 - RNA, 14 nt, Human
cagcagacauuguc

SEQ ID NO: 2393186 - RNA, 16 nt, Human
cagcagacauugucag

SEQ ID NO: 2393187 - RNA, 11 nt, Human
cagcagagcac

SEQ ID NO: 2393188 - RNA, 13 nt, Human
cagcagagcaccu

SEQ ID NO: 2393189 - RNA, 18 nt, Human
cagcacuuugggaggccu

SEQ ID NO: 2393190 - RNA, 13 nt, Human
cagcagaaggggg

SEQ ID NO: 2393191 - RNA, 17 nt, Human
cagcagaaggggguggu

SEQ ID NO: 2393192 - RNA, 22 nt, Human
cagcagaaaugccuuacccuca

SEQ ID NO: 2393193 - RNA, 19 nt, Human
cagcagaaaugccuuaccc

SEQ ID NO: 2393194 - RNA, 23 nt, Human
cagcacugucucaguuucacuuu

SEQ ID NO: 2393195 - RNA, 15 nt, Human
cagcacugucucagu

SEQ ID NO: 2393196 - RNA, 13 nt, Human
cagcacuuauuua

SEQ ID NO: 2393197 - RNA, 19 nt, Human
cagcacuuggagaggcuga

SEQ ID NO: 2393198 - RNA, 17 nt, Human
cagcacuuguccagcug

SEQ ID NO: 2393199 - RNA, 15 nt, Human
cagcacuuguccagc

SEQ ID NO: 2393200 - RNA, 13 nt, Human
cagcacuuguaua

SEQ ID NO: 2393201 - RNA, 18 nt, Human
cagcacuuugggaggcca

SEQ ID NO: 2393202 - RNA, 16 nt, Human
cagcacuuugggaggc

SEQ ID NO: 2393203 - RNA, 15 nt, Human
cagcacuuugggagg

SEQ ID NO: 2393204 - RNA, 19 nt, Human
cagcacuuguccagcugag

SEQ ID NO: 2393205 - RNA, 18 nt, Human
cagcacuuguccagcuga

SEQ ID NO: 2393206 - RNA, 23 nt, Human
cagcacuuugggaggcugaggcg

SEQ ID NO: 2393207 - RNA, 22 nt, Human
cagcacuuugggaggcugaggc

SEQ ID NO: 2393208 - RNA, 20 nt, Human
cagcacuuugggaggcugag

SEQ ID NO: 2393209 - RNA, 19 nt, Human
cagcacuuugggaggcuga

SEQ ID NO: 2393210 - RNA, 18 nt, Human
cagcacuuugggaggcug

SEQ ID NO: 2393211 - RNA, 22 nt, Human
cagcacuuugggaggccuaggc

SEQ ID NO: 2393212 - RNA, 23 nt, Human
cagcacuuugggaggccaaggag

SEQ ID NO: 2393213 - RNA, 22 nt, Human
cagcacuuugggaggccaagga

SEQ ID NO: 2393214 - RNA, 20 nt, Human
cagcacuuugggaggccaag

SEQ ID NO: 2393215 - RNA, 17 nt, Human
cagcagaaaugccuuac

SEQ ID NO: 2393216 - RNA, 15 nt, Human
cagcagaaaugccuu

SEQ ID NO: 2393217 - RNA, 19 nt, Human
cagcagccagcucucagcc

SEQ ID NO: 2393218 - RNA, 18 nt, Human
cagcagccagcucucagc

SEQ ID NO: 2393219 - RNA, 17 nt, Human
cagcagccagcucucag

SEQ ID NO: 2393220 - RNA, 15 nt, Human
cagcagccagcucuc

SEQ ID NO: 2393221 - RNA, 14 nt, Human
cagcagccagcucu

SEQ ID NO: 2393222 - RNA, 13 nt, Human
cagcagccagcuc

SEQ ID NO: 2393223 - RNA, 21 nt, Human
cagcagccagcucucagccaa

SEQ ID NO: 2393224 - RNA, 20 nt, Human
cagcagccagcucucagcca

SEQ ID NO: 2393225 - RNA, 18 nt, Human
cagcagccaucauaggaa

SEQ ID NO: 2393226 - RNA, 21 nt, Human
cagcagccaucauaggaaggg

SEQ ID NO: 2393227 - RNA, 22 nt, Human
cagcagccaucauaggaaggga

SEQ ID NO: 2393228 - RNA, 19 nt, Human
cagcagcccuccucacccc

SEQ ID NO: 2393229 - RNA, 17 nt, Human
cagcagcccuccucacc

SEQ ID NO: 2393230 - RNA, 15 nt, Human
cagcagcccuccuca

SEQ ID NO: 2393231 - RNA, 14 nt, Human
cagcagcccuccuc

SEQ ID NO: 2393232 - RNA, 12 nt, Human
cagcagcccucc

SEQ ID NO: 2393233 - RNA, 11 nt, Human
cagcagcccuc

SEQ ID NO: 2393234 - RNA, 24 nt, Human
cagcagcccuaaggaucucucagg

SEQ ID NO: 2393235 - RNA, 18 nt, Human
cagcagcccuccucaccc

SEQ ID NO: 2393236 - RNA, 13 nt, Human
cagcagccccugc

SEQ ID NO: 2393237 - RNA, 16 nt, Human
cagcagccccugcaca

SEQ ID NO: 2393238 - RNA, 23 nt, Human
cagcagccccugcacaaagcccu

SEQ ID NO: 2393239 - RNA, 11 nt, Human
cagcagcccua

SEQ ID NO: 2393240 - RNA, 16 nt, Human
cagcagcccuaaggau

SEQ ID NO: 2393241 - RNA, 20 nt, Human
cagcagcccuaaggaucucu

SEQ ID NO: 2393242 - RNA, 23 nt, Human
cagcagcccuaaggaucucucag

SEQ ID NO: 2393243 - RNA, 16 nt, Human
cagcagaucccagcuc

SEQ ID NO: 2393244 - RNA, 15 nt, Human
cagcagaucccagcu

SEQ ID NO: 2393245 - RNA, 13 nt, Human
cagcagagugugg

SEQ ID NO: 2393246 - RNA, 15 nt, Human
cagcagaggcacugg

SEQ ID NO: 2393247 - RNA, 16 nt, Human
cagcagaggcacuggg

SEQ ID NO: 2393248 - RNA, 21 nt, Human
cagcagaucccagcucacguc

SEQ ID NO: 2393249 - RNA, 18 nt, Human
cagcagaucccagcucac

SEQ ID NO: 2393250 - RNA, 17 nt, Human
cagcagaucccagcuca

SEQ ID NO: 2393251 - RNA, 13 nt, Human
cagcagauuuuag

SEQ ID NO: 2393252 - RNA, 14 nt, Human
cagauuuuuacaaa

SEQ ID NO: 2393253 - RNA, 15 nt, Human
cagauuuuuacaaau

SEQ ID NO: 2393254 - RNA, 22 nt, Human
cagauuuuuuacagcugccugc

SEQ ID NO: 2393255 - RNA, 13 nt, Human
cagcaaaaagcaa

SEQ ID NO: 2393256 - RNA, 14 nt, Human
cagcaaaaagcaaa

SEQ ID NO: 2393257 - RNA, 20 nt, Human
cagcaaaaagcaaaaucauu

SEQ ID NO: 2393258 - RNA, 19 nt, Human
cagauuuuuuacagcugcc

SEQ ID NO: 2393259 - RNA, 16 nt, Human
cagauuuuuacacaug

SEQ ID NO: 2393260 - RNA, 20 nt, Human
cagauuuugggguuguguug

SEQ ID NO: 2393261 - RNA, 23 nt, Human
cagauuuugcuguauauuuguga

SEQ ID NO: 2393262 - RNA, 19 nt, Human
cagauuuugcuguauauuu

SEQ ID NO: 2393263 - RNA, 21 nt, Human
cagauuuugggguuguguugu

SEQ ID NO: 2393264 - RNA, 23 nt, Human
cagauuuugggguuguguuguca

SEQ ID NO: 2393265 - RNA, 16 nt, Human
cagauuuugauagcaa

SEQ ID NO: 2393266 - RNA, 22 nt, Human
cagauuuucagcaaacucuuuu

SEQ ID NO: 2393267 - RNA, 19 nt, Human
cagauuuucagcaaacucu

SEQ ID NO: 2393268 - RNA, 17 nt, Human
cagauuuugcuguauau

SEQ ID NO: 2393269 - RNA, 16 nt, Human
cagauuuugcuguaua

SEQ ID NO: 2393270 - RNA, 20 nt, Human
cagauuuugauagcaaagcg

SEQ ID NO: 2393271 - RNA, 18 nt, Human
cagauuuugauagcaaag

SEQ ID NO: 2393272 - RNA, 19 nt, Human
cagauuuugauagcaaagc

SEQ ID NO: 2393273 - RNA, 14 nt, Human
cagauuuuccugaa

SEQ ID NO: 2393274 - RNA, 15 nt, Human
cagauuuuccugaaa

SEQ ID NO: 2393275 - RNA, 15 nt, Human
cagauuuuaauuuug

SEQ ID NO: 2393276 - RNA, 23 nt, Human
cagauuuuaauuuugaauaaaua

SEQ ID NO: 2393277 - RNA, 24 nt, Human
cagauuugugaacucagccaagca

SEQ ID NO: 2393278 - RNA, 14 nt, Human
cagauuuguguuau

SEQ ID NO: 2393279 - RNA, 22 nt, Human
cagauuuuaaaaagucuucacu

SEQ ID NO: 2393280 - RNA, 18 nt, Human
cagauuuuaggaaaugaa

SEQ ID NO: 2393281 - RNA, 14 nt, Human
cagauucuuuccug

SEQ ID NO: 2393282 - RNA, 12 nt, Human
cagauuugugaa

SEQ ID NO: 2393283 - RNA, 14 nt, Human
cagauuugugaacu

SEQ ID NO: 2393284 - RNA, 15 nt, Human
cagauuugugaacuc

SEQ ID NO: 2393285 - RNA, 16 nt, Human
cagauuugugaacuca

SEQ ID NO: 2393286 - RNA, 17 nt, Human
cagauuugugaacucag

SEQ ID NO: 2393287 - RNA, 23 nt, Human
cagauuugugaacucagccaagc

SEQ ID NO: 2393288 - RNA, 15 nt, Human
cagauuuucagcaaa

SEQ ID NO: 2393289 - RNA, 13 nt, Human
cagauuuucagca

SEQ ID NO: 2393290 - RNA, 17 nt, Human
cagcaacacaagcugga

SEQ ID NO: 2393291 - RNA, 21 nt, Human
cagcaacacaagcuggaagca

SEQ ID NO: 2393292 - RNA, 12 nt, Human
cagcaaccccag

SEQ ID NO: 2393293 - RNA, 14 nt, Human
cagcaacccuccua

SEQ ID NO: 2393294 - RNA, 17 nt, Human
cagcaaccccaggcuga

SEQ ID NO: 2393295 - RNA, 16 nt, Human
cagcaaccccaggcug

SEQ ID NO: 2393296 - RNA, 13 nt, Human
cagcaaccccagg

SEQ ID NO: 2393297 - RNA, 23 nt, Human
cagcaacgcaggcccccaggugc

SEQ ID NO: 2393298 - RNA, 22 nt, Human
cagcaacuugucuuuuucugga

SEQ ID NO: 2393299 - RNA, 19 nt, Human
cagcaacuugucuuuuucu

SEQ ID NO: 2393300 - RNA, 18 nt, Human
cagcaacuugucuuuuuc

SEQ ID NO: 2393301 - RNA, 15 nt, Human
cagcaacuugucuuu

SEQ ID NO: 2393302 - RNA, 20 nt, Human
cagcaacugaauaaauaccu

SEQ ID NO: 2393303 - RNA, 14 nt, Human
cagcaacugaauaa

SEQ ID NO: 2393304 - RNA, 15 nt, Human
cagcaacugaauaaa

SEQ ID NO: 2393305 - RNA, 21 nt, Human
cagcaacugaauaaauaccuc

SEQ ID NO: 2393306 - RNA, 14 nt, Human
cagcaacuccaacu

SEQ ID NO: 2393307 - RNA, 12 nt, Human
cagcaacugaau

SEQ ID NO: 2393308 - RNA, 13 nt, Human
cagcaacugaaua

SEQ ID NO: 2393309 - RNA, 20 nt, Human
cagcaacggggaggccaagu

SEQ ID NO: 2393310 - RNA, 19 nt, Human
cagcaaauuaauuggcagc

SEQ ID NO: 2393311 - RNA, 22 nt, Human
cagcaaauuaauuggcagcaga

SEQ ID NO: 2393312 - RNA, 23 nt, Human
cagcaaauuaauuggcagcagau

SEQ ID NO: 2393313 - RNA, 16 nt, Human
cagcaacacaagcugg

SEQ ID NO: 2393314 - RNA, 17 nt, Human
cagcaaauuaauuggca

SEQ ID NO: 2393315 - RNA, 22 nt, Human
cagcaaagccccaugcuggagc

SEQ ID NO: 2393316 - RNA, 23 nt, Human
cagcaaagccccaugcuggagcc

SEQ ID NO: 2393317 - RNA, 15 nt, Human
cagcaaaacuccauc

SEQ ID NO: 2393318 - RNA, 18 nt, Human
cagcaaaagaugcuucuc

SEQ ID NO: 2393319 - RNA, 15 nt, Human
cagcaaaaagcaaaa

SEQ ID NO: 2393320 - RNA, 16 nt, Human
cagcaaaccggggccu

SEQ ID NO: 2393321 - RNA, 14 nt, Human
cagcaaaccggggc

SEQ ID NO: 2393322 - RNA, 22 nt, Human
cagcaaaaugugaaugggaaaa

SEQ ID NO: 2393323 - RNA, 20 nt, Human
cagcaaacucuuuucccacu

SEQ ID NO: 2393324 - RNA, 19 nt, Human
cagcaaagagugggcugca

SEQ ID NO: 2393325 - RNA, 12 nt, Human
cagcaaagcccc

SEQ ID NO: 2393326 - RNA, 13 nt, Human
cagcaaagcccca

SEQ ID NO: 2393327 - RNA, 14 nt, Human
cagcaaagccccau

SEQ ID NO: 2393328 - RNA, 21 nt, Human
cagcaaagccccaugcuggag

SEQ ID NO: 2393329 - RNA, 14 nt, Human
cagauuacugccca

SEQ ID NO: 2393330 - RNA, 17 nt, Human
cagauguuuuacgucug

SEQ ID NO: 2393331 - RNA, 18 nt, Human
cagauguuuuacgucugg

SEQ ID NO: 2393332 - RNA, 22 nt, Human
cagauguuuuacgucugggaga

SEQ ID NO: 2393333 - RNA, 14 nt, Human
cagauguuucuuuu

SEQ ID NO: 2393334 - RNA, 19 nt, Human
cagauguuucuuuuguaug

SEQ ID NO: 2393335 - RNA, 22 nt, Human
cagauguuucuuuuguauguaa

SEQ ID NO: 2393336 - RNA, 23 nt, Human
cagauguuuccagacuuccuuga

SEQ ID NO: 2393337 - RNA, 18 nt, Human
cagauguuuccagacuuc

SEQ ID NO: 2393338 - RNA, 14 nt, Human
cagauucacacugu

SEQ ID NO: 2393339 - RNA, 19 nt, Human
cagauucacacugucuggu

SEQ ID NO: 2393340 - RNA, 21 nt, Human
cagauucccagagcaaaauaa

SEQ ID NO: 2393341 - RNA, 19 nt, Human
cagauucccagagcaaaau

SEQ ID NO: 2393342 - RNA, 18 nt, Human
cagauucccagagcaaaa

SEQ ID NO: 2393343 - RNA, 23 nt, Human
cagauuccaggcgaugugcaagu

SEQ ID NO: 2393344 - RNA, 21 nt, Human
cagauuccaggcgaugugcaa

SEQ ID NO: 2393345 - RNA, 15 nt, Human
cagauucauuuuucu

SEQ ID NO: 2393346 - RNA, 17 nt, Human
cagauucccagagcaaa

SEQ ID NO: 2393347 - RNA, 14 nt, Human
cagauucccagagc

SEQ ID NO: 2393348 - RNA, 23 nt, Human
cagauguugaaugcccacaggca

SEQ ID NO: 2393349 - RNA, 19 nt, Human
cagauguucucucccaggg

SEQ ID NO: 2393350 - RNA, 14 nt, Human
cagauguuuccaga

SEQ ID NO: 2393351 - RNA, 16 nt, Human
cagauguuuccagacu

SEQ ID NO: 2393352 - RNA, 15 nt, Human
cagauguuuccagac

SEQ ID NO: 2393353 - RNA, 22 nt, Human
cagaugucuucugccuguuaua

SEQ ID NO: 2393354 - RNA, 17 nt, Human
cagaugucuucugccug

SEQ ID NO: 2393355 - RNA, 18 nt, Human
cagaugucuucugccugu

SEQ ID NO: 2393356 - RNA, 20 nt, Human
cagaugugguaacuguuaaa

SEQ ID NO: 2393357 - RNA, 13 nt, Human
cagaugucuucug

SEQ ID NO: 2393358 - RNA, 15 nt, Human
cagaugucuucugcc

SEQ ID NO: 2393359 - RNA, 16 nt, Human
cagaugucuucugccu

SEQ ID NO: 2393360 - RNA, 23 nt, Human
cagaugggugcuuggaggaagga

SEQ ID NO: 2393361 - RNA, 15 nt, Human
cagauggggccucug

SEQ ID NO: 2393362 - RNA, 21 nt, Human
cagauggggcucccgcccgug

SEQ ID NO: 2393363 - RNA, 14 nt, Human
cagaugggggaaag

SEQ ID NO: 2393364 - RNA, 19 nt, Human
cagaugggggaaagcacag

SEQ ID NO: 2393365 - RNA, 22 nt, Human
cagaugguuuuauaaucugauu

SEQ ID NO: 2393366 - RNA, 14 nt, Human
cagaugcuuuucug

SEQ ID NO: 2393367 - RNA, 20 nt, Human
cagauggaaccgcaggaagc

SEQ ID NO: 2393368 - RNA, 19 nt, Human
cagauggaaccgcaggaag

SEQ ID NO: 2393369 - RNA, 18 nt, Human
cagauggaaccgcaggaa

SEQ ID NO: 2393370 - RNA, 14 nt, Human
cagauggaaccgca

SEQ ID NO: 2393371 - RNA, 14 nt, Human
cagaugcuuuccug

SEQ ID NO: 2393372 - RNA, 21 nt, Human
cagaugcuuuccugcacauua

SEQ ID NO: 2393373 - RNA, 16 nt, Human
cagauggaaugcugug

SEQ ID NO: 2393374 - RNA, 17 nt, Human
cagauggaaugcugugu

SEQ ID NO: 2393375 - RNA, 19 nt, Human
cagauggaaugcuguguua

SEQ ID NO: 2393376 - RNA, 21 nt, Human
cagauggaaugcuguguuaaa

SEQ ID NO: 2393377 - RNA, 21 nt, Human
cagauggauuugccugugcca

SEQ ID NO: 2393378 - RNA, 15 nt, Human
cagauggauuugccu

SEQ ID NO: 2393379 - RNA, 22 nt, Human
cagauggauugauaauugcauu

SEQ ID NO: 2393380 - RNA, 23 nt, Human
cagauggauugauaauugcauuc

SEQ ID NO: 2393381 - RNA, 22 nt, Human
cagauggaaccgcaggaagcug

SEQ ID NO: 2393382 - RNA, 21 nt, Human
cagauggaaccgcaggaagcu

SEQ ID NO: 2393383 - RNA, 18 nt, Human
cagauggacuccagccug

SEQ ID NO: 2393384 - RNA, 19 nt, Human
cagauggacuccagccugc

SEQ ID NO: 2393385 - RNA, 22 nt, Human
cagauggauuugccugugccac

SEQ ID NO: 2393386 - RNA, 12 nt, Human
cagauggcacuu

SEQ ID NO: 2393387 - RNA, 16 nt, Human
cagauggcauguguuu

SEQ ID NO: 2393388 - RNA, 18 nt, Human
cagaugggugcuuggagg

SEQ ID NO: 2393389 - RNA, 22 nt, Human
cagauggcauguguuuacuuua

SEQ ID NO: 2393390 - RNA, 14 nt, Human
cagauggggccucu

SEQ ID NO: 2393391 - RNA, 16 nt, Human
cagaugccccagagcu

SEQ ID NO: 2393392 - RNA, 13 nt, Human
cagaugccccaga

SEQ ID NO: 2393393 - RNA, 22 nt, Human
cagaugcccagagggcccaggc

SEQ ID NO: 2393394 - RNA, 20 nt, Human
cagaugcccagagggcccag

SEQ ID NO: 2393395 - RNA, 19 nt, Human
cagaugcccagagggccca

SEQ ID NO: 2393396 - RNA, 15 nt, Human
cagaugcccagaggg

SEQ ID NO: 2393397 - RNA, 17 nt, Human
cagaugcagggcaguca

SEQ ID NO: 2393398 - RNA, 18 nt, Human
cagaugccccagagcugu

SEQ ID NO: 2393399 - RNA, 14 nt, Human
cagaugccuccacc

SEQ ID NO: 2393400 - RNA, 22 nt, Human
cagaugccuccaccccccagaa

SEQ ID NO: 2393401 - RNA, 17 nt, Human
cagaugcuucugggaga

SEQ ID NO: 2393402 - RNA, 13 nt, Human
cagaugcuucugg

SEQ ID NO: 2393403 - RNA, 12 nt, Human
cagaugcuucug

SEQ ID NO: 2393404 - RNA, 15 nt, Human
cagaugcugugcaaa

SEQ ID NO: 2393405 - RNA, 15 nt, Human
cagaugcugauguuc

SEQ ID NO: 2393406 - RNA, 16 nt, Human
cagaugcugauguuca

SEQ ID NO: 2393407 - RNA, 17 nt, Human
cagaugcugauguucag

SEQ ID NO: 2393408 - RNA, 18 nt, Human
cagaugcugauguucagu

SEQ ID NO: 2393409 - RNA, 20 nt, Human
cagaugcugauguucagugu

SEQ ID NO: 2393410 - RNA, 21 nt, Human
cagaugcugauguucagugua

SEQ ID NO: 2393411 - RNA, 22 nt, Human
cagaugcugauguucaguguaa

SEQ ID NO: 2393412 - RNA, 18 nt, Human
cagaugcuggucaugugu

SEQ ID NO: 2393413 - RNA, 13 nt, Human
cagaugcugaugu

SEQ ID NO: 2393414 - RNA, 14 nt, Human
cagaugcugauguu

SEQ ID NO: 2393415 - RNA, 17 nt, Human
cagcccaaagaaggaaa

SEQ ID NO: 2393416 - RNA, 23 nt, Human
cagcccaaaccaccagaagccca

SEQ ID NO: 2393417 - RNA, 21 nt, Human
cagcccaaaccaccagaagcc

SEQ ID NO: 2393418 - RNA, 20 nt, Human
cagcccaaaccaccagaagc

SEQ ID NO: 2393419 - RNA, 20 nt, Human
cagccauuaccauggagaca

SEQ ID NO: 2393420 - RNA, 19 nt, Human
cagccauucacugccccca

SEQ ID NO: 2393421 - RNA, 19 nt, Human
cagccauuggcuauuuaaa

SEQ ID NO: 2393422 - RNA, 20 nt, Human
cagccauuggcuauuuaaaa

SEQ ID NO: 2393423 - RNA, 19 nt, Human
cagcccaaaccaccagaag

SEQ ID NO: 2393424 - RNA, 16 nt, Human
cagcccaaaccaccag

SEQ ID NO: 2393425 - RNA, 22 nt, Human
cagccaugaggaguugcuguuu

SEQ ID NO: 2393426 - RNA, 15 nt, Human
cagccaucugcccag

SEQ ID NO: 2393427 - RNA, 16 nt, Human
cagccaucugcccagg

SEQ ID NO: 2393428 - RNA, 17 nt, Human
cagccaucugcccaggg

SEQ ID NO: 2393429 - RNA, 18 nt, Human
cagccaucugcccagggg

SEQ ID NO: 2393430 - RNA, 16 nt, Human
cagccauuaccaugga

SEQ ID NO: 2393431 - RNA, 13 nt, Human
cagccaugugcug

SEQ ID NO: 2393432 - RNA, 17 nt, Human
cagccaugugcugcgug

SEQ ID NO: 2393433 - RNA, 18 nt, Human
cagccaugaggaguugcu

SEQ ID NO: 2393434 - RNA, 17 nt, Human
cagccaugucugcauuu

SEQ ID NO: 2393435 - RNA, 19 nt, Human
cagccaucugcccaggggu

SEQ ID NO: 2393436 - RNA, 21 nt, Human
cagccaucugcccaggggugc

SEQ ID NO: 2393437 - RNA, 17 nt, Human
cagccaucaaaaugcuu

SEQ ID NO: 2393438 - RNA, 16 nt, Human
cagccaucaaaaugcu

SEQ ID NO: 2393439 - RNA, 13 nt, Human
cagccaucugccc

SEQ ID NO: 2393440 - RNA, 19 nt, Human
cagccaucauaggaaggga

SEQ ID NO: 2393441 - RNA, 17 nt, Human
cagccaucccagccuug

SEQ ID NO: 2393442 - RNA, 18 nt, Human
cagccaucauaggaaggg

SEQ ID NO: 2393443 - RNA, 15 nt, Human
cagcccaccccucaa

SEQ ID NO: 2393444 - RNA, 19 nt, Human
cagcccaccccccucauuu

SEQ ID NO: 2393445 - RNA, 17 nt, Human
cagcccaccccccucau

SEQ ID NO: 2393446 - RNA, 16 nt, Human
cagcccaccccccuca

SEQ ID NO: 2393447 - RNA, 14 nt, Human
cagcccaccccccu

SEQ ID NO: 2393448 - RNA, 19 nt, Human
cagcccacauagugauggu

SEQ ID NO: 2393449 - RNA, 12 nt, Human
cagcccaccccc

SEQ ID NO: 2393450 - RNA, 11 nt, Human
cagcccacccc

SEQ ID NO: 2393451 - RNA, 21 nt, Human
cagccaugugcugcgugccug

SEQ ID NO: 2393452 - RNA, 22 nt, Human
cagccauuggcuauuuaaaacu

SEQ ID NO: 2393453 - RNA, 10 nt, Human
cagcccaagu

SEQ ID NO: 2393454 - RNA, 15 nt, Human
cagcccacuucugcc

SEQ ID NO: 2393455 - RNA, 15 nt, Human
cagcccacguccugu

SEQ ID NO: 2393456 - RNA, 16 nt, Human
cagcccacguccuguc

SEQ ID NO: 2393457 - RNA, 18 nt, Human
cagcccacguccugucag

SEQ ID NO: 2393458 - RNA, 19 nt, Human
cagcccacguccugucagu

SEQ ID NO: 2393459 - RNA, 16 nt, Human
cagcccaccuggcuuu

SEQ ID NO: 2393460 - RNA, 21 nt, Human
cagcccacccuccugucuucc

SEQ ID NO: 2393461 - RNA, 22 nt, Human
cagcccacccuccugucuuccc

SEQ ID NO: 2393462 - RNA, 24 nt, Human
cagcccacccuccugucuucccag

SEQ ID NO: 2393463 - RNA, 12 nt, Human
cagcccacccuc

SEQ ID NO: 2393464 - RNA, 13 nt, Human
cagcccacccucc

SEQ ID NO: 2393465 - RNA, 15 nt, Human
cagcccacccuccug

SEQ ID NO: 2393466 - RNA, 16 nt, Human
cagcccacccuccugu

SEQ ID NO: 2393467 - RNA, 17 nt, Human
cagcccacccuccuguc

SEQ ID NO: 2393468 - RNA, 18 nt, Human
cagcccacccuccugucu

SEQ ID NO: 2393469 - RNA, 22 nt, Human
cagcccauucucucuccugucc

SEQ ID NO: 2393470 - RNA, 21 nt, Human
cagcccauucucucuccuguc

SEQ ID NO: 2393471 - RNA, 20 nt, Human
cagcccauucucucuccugu

SEQ ID NO: 2393472 - RNA, 18 nt, Human
cagcccauucucucuccu

SEQ ID NO: 2393473 - RNA, 21 nt, Human
cagcccaugcccaccugccca

SEQ ID NO: 2393474 - RNA, 19 nt, Human
cagcccaugcccaccugcc

SEQ ID NO: 2393475 - RNA, 24 nt, Human
cagcccaugcccaccugcccauca

SEQ ID NO: 2393476 - RNA, 17 nt, Human
cagcccaugcccaccug

SEQ ID NO: 2393477 - RNA, 16 nt, Human
cagcccaugcccaccu

SEQ ID NO: 2393478 - RNA, 15 nt, Human
cagcccaugcccacc

SEQ ID NO: 2393479 - RNA, 19 nt, Human
cagcccaggguucccccag

SEQ ID NO: 2393480 - RNA, 18 nt, Human
cagcccaggguuccccca

SEQ ID NO: 2393481 - RNA, 17 nt, Human
cagcccaggguuccccc

SEQ ID NO: 2393482 - RNA, 11 nt, Human
cagcccagggu

SEQ ID NO: 2393483 - RNA, 22 nt, Human
cagccccaaaacucuccucugc

SEQ ID NO: 2393484 - RNA, 20 nt, Human
cagccccaaaacucuccucu

SEQ ID NO: 2393485 - RNA, 21 nt, Human
cagccccaaaacucuccucug

SEQ ID NO: 2393486 - RNA, 20 nt, Human
cagcccacguccugucagug

SEQ ID NO: 2393487 - RNA, 12 nt, Human
cagcccagagac

SEQ ID NO: 2393488 - RNA, 11 nt, Human
cagcccagaga

SEQ ID NO: 2393489 - RNA, 18 nt, Human
cagcccacuucugccaua

SEQ ID NO: 2393490 - RNA, 22 nt, Human
cagcccagagacauacuugaag

SEQ ID NO: 2393491 - RNA, 21 nt, Human
cagcccagagacauacuugaa

SEQ ID NO: 2393492 - RNA, 13 nt, Human
cagcccagagaca

SEQ ID NO: 2393493 - RNA, 12 nt, Human
cagcccagggac

SEQ ID NO: 2393494 - RNA, 16 nt, Human
cagcccagggcuccug

SEQ ID NO: 2393495 - RNA, 23 nt, Human
cagcccaggccgggguggagcau

SEQ ID NO: 2393496 - RNA, 17 nt, Human
cagcccagggcuccugc

SEQ ID NO: 2393497 - RNA, 18 nt, Human
cagcccagggcuccugca

SEQ ID NO: 2393498 - RNA, 19 nt, Human
cagcccagggcuccugcac

SEQ ID NO: 2393499 - RNA, 21 nt, Human
cagcccagggcuccugcacuu

SEQ ID NO: 2393500 - RNA, 17 nt, Human
cagcccagcccagcugg

SEQ ID NO: 2393501 - RNA, 15 nt, Human
cagcccagcccagcu

SEQ ID NO: 2393502 - RNA, 13 nt, Human
cagcccagcccag

SEQ ID NO: 2393503 - RNA, 22 nt, Human
cagccagugaccugaggaagcg

SEQ ID NO: 2393504 - RNA, 21 nt, Human
cagccagugaccugaggaagc

SEQ ID NO: 2393505 - RNA, 20 nt, Human
cagccagugaccugaggaag

SEQ ID NO: 2393506 - RNA, 23 nt, Human
cagccauacuuaucucucugugc

SEQ ID NO: 2393507 - RNA, 20 nt, Human
cagccauacuuaucucucug

SEQ ID NO: 2393508 - RNA, 21 nt, Human
cagccauacuuaucucucugu

SEQ ID NO: 2393509 - RNA, 13 nt, Human
cagccaucaaaau

SEQ ID NO: 2393510 - RNA, 19 nt, Human
cagccagugaccugaggaa

SEQ ID NO: 2393511 - RNA, 16 nt, Human
cagccagugaccugag

SEQ ID NO: 2393512 - RNA, 22 nt, Human
cagccagucccguuucauuuag

SEQ ID NO: 2393513 - RNA, 13 nt, Human
cagccaguaaaug

SEQ ID NO: 2393514 - RNA, 22 nt, Human
cagccaguaaaugggggugcau

SEQ ID NO: 2393515 - RNA, 23 nt, Human
cagccacggccaggccagaggga

SEQ ID NO: 2393516 - RNA, 14 nt, Human
cagccacucgggag

SEQ ID NO: 2393517 - RNA, 21 nt, Human
cagccacucgggaggcugaga

SEQ ID NO: 2393518 - RNA, 17 nt, Human
cagccagaacguggcuc

SEQ ID NO: 2393519 - RNA, 23 nt, Human
cagccacucgggaggcugagaca

SEQ ID NO: 2393520 - RNA, 23 nt, Human
cagccagaacguggcucugcugg

SEQ ID NO: 2393521 - RNA, 20 nt, Human
cagccagaacguggcucugc

SEQ ID NO: 2393522 - RNA, 21 nt, Human
cagccagaacguggcucugcu

SEQ ID NO: 2393523 - RNA, 22 nt, Human
cagccagaacguggcucugcug

SEQ ID NO: 2393524 - RNA, 14 nt, Human
cagccacggccagg

SEQ ID NO: 2393525 - RNA, 15 nt, Human
cagccacggccaggc

SEQ ID NO: 2393526 - RNA, 16 nt, Human
cagccacggccaggcc

SEQ ID NO: 2393527 - RNA, 17 nt, Human
cagccacggccaggcca

SEQ ID NO: 2393528 - RNA, 18 nt, Human
cagccacggccaggccag

SEQ ID NO: 2393529 - RNA, 19 nt, Human
cagccacggccaggccaga

SEQ ID NO: 2393530 - RNA, 21 nt, Human
cagccacggccaggccagagg

SEQ ID NO: 2393531 - RNA, 22 nt, Human
cagccacggccaggccagaggg

SEQ ID NO: 2393532 - RNA, 12 nt, Human
cagccacacugu

SEQ ID NO: 2393533 - RNA, 23 nt, Human
cagccacacacacagaaaauaua

SEQ ID NO: 2393534 - RNA, 14 nt, Human
cagccacauuccug

SEQ ID NO: 2393535 - RNA, 22 nt, Human
cagccacacacacagaaaauau

SEQ ID NO: 2393536 - RNA, 21 nt, Human
cagccacacacacagaaaaua

SEQ ID NO: 2393537 - RNA, 20 nt, Human
cagccacacacacagaaaau

SEQ ID NO: 2393538 - RNA, 19 nt, Human
cagccacacacacagaaaa

SEQ ID NO: 2393539 - RNA, 18 nt, Human
cagccacacacacagaaa

SEQ ID NO: 2393540 - RNA, 17 nt, Human
cagccacacacacagaa

SEQ ID NO: 2393541 - RNA, 16 nt, Human
cagccacacacacaga

SEQ ID NO: 2393542 - RNA, 15 nt, Human
cagccacacacacag

SEQ ID NO: 2393543 - RNA, 23 nt, Human
cagccaagguuuuauaaggcuga

SEQ ID NO: 2393544 - RNA, 21 nt, Human
cagccaaggccgaagcucugg

SEQ ID NO: 2393545 - RNA, 22 nt, Human
cagccaaggccgaagcucuggc

SEQ ID NO: 2393546 - RNA, 23 nt, Human
cagccaaggccgaagcucuggcu

SEQ ID NO: 2393547 - RNA, 20 nt, Human
cagccaagggaugaaagaga

SEQ ID NO: 2393548 - RNA, 19 nt, Human
cagccaagcacaguggugg

SEQ ID NO: 2393549 - RNA, 23 nt, Human
cagccaagcacagugguggcagg

SEQ ID NO: 2393550 - RNA, 13 nt, Human
cagccaagcacag

SEQ ID NO: 2393551 - RNA, 14 nt, Human
cagccaagcacagu

SEQ ID NO: 2393552 - RNA, 16 nt, Human
cagccaagcacagugg

SEQ ID NO: 2393553 - RNA, 17 nt, Human
cagccaagcacaguggu

SEQ ID NO: 2393554 - RNA, 17 nt, Human
cagccaauuauguuaaa

SEQ ID NO: 2393555 - RNA, 18 nt, Human
cagccaauuauguuaaac

SEQ ID NO: 2393556 - RNA, 9 nt, Human
cagccacac

SEQ ID NO: 2393557 - RNA, 14 nt, Human
cagccacacacaca

SEQ ID NO: 2393558 - RNA, 13 nt, Human
cagccacacacac

SEQ ID NO: 2393559 - RNA, 12 nt, Human
cagccacacaca

SEQ ID NO: 2393560 - RNA, 11 nt, Human
cagccacacac

SEQ ID NO: 2393561 - RNA, 11 nt, Human
cagccaccccg

SEQ ID NO: 2393562 - RNA, 19 nt, Human
cagccacauuccugaugcu

SEQ ID NO: 2393563 - RNA, 15 nt, Human
cagccacauuccuga

SEQ ID NO: 2393564 - RNA, 17 nt, Human
cagccacauuccugaug

SEQ ID NO: 2393565 - RNA, 21 nt, Human
cagccaccccgggcucucugc

SEQ ID NO: 2393566 - RNA, 20 nt, Human
cagccaccccgggcucucug

SEQ ID NO: 2393567 - RNA, 17 nt, Human
cagccaccccgggcucu

SEQ ID NO: 2393568 - RNA, 23 nt, Human
cagccacaguuuccucaucuguc

SEQ ID NO: 2393569 - RNA, 12 nt, Human
cagccaccagcg

SEQ ID NO: 2393570 - RNA, 22 nt, Human
cagccaccccgggcucucugcu

SEQ ID NO: 2393571 - RNA, 16 nt, Human
cagccaccucucuuuu

SEQ ID NO: 2393572 - RNA, 15 nt, Human
cagccaccucucuuu

SEQ ID NO: 2393573 - RNA, 18 nt, Human
cagccacgaggugcaaca

SEQ ID NO: 2393574 - RNA, 21 nt, Human
cagccaccgaagccgccugug

SEQ ID NO: 2393575 - RNA, 23 nt, Human
cagcaucucccucacugaaacca

SEQ ID NO: 2393576 - RNA, 17 nt, Human
cagcagggccucaaagu

SEQ ID NO: 2393577 - RNA, 17 nt, Human
cagcagggcugcuguga

SEQ ID NO: 2393578 - RNA, 20 nt, Human
cagcaggguagucugguuuc

SEQ ID NO: 2393579 - RNA, 23 nt, Human
cagcauccuuuucugcagagggg

SEQ ID NO: 2393580 - RNA, 18 nt, Human
cagcagggucuuuucauc

SEQ ID NO: 2393581 - RNA, 18 nt, Human
cagcagggcugcugugaa

SEQ ID NO: 2393582 - RNA, 21 nt, Human
cagcauccuggcacccggccc

SEQ ID NO: 2393583 - RNA, 19 nt, Human
cagcauccuggcacccggc

SEQ ID NO: 2393584 - RNA, 20 nt, Human
cagcauccuggcacccggcc

SEQ ID NO: 2393585 - RNA, 15 nt, Human
cagcauucucacucc

SEQ ID NO: 2393586 - RNA, 14 nt, Human
cagcauucucacuc

SEQ ID NO: 2393587 - RNA, 14 nt, Human
cagcauuccagccc

SEQ ID NO: 2393588 - RNA, 16 nt, Human
cagcauuccagccccu

SEQ ID NO: 2393589 - RNA, 20 nt, Human
cagcauuccagccccucugg

SEQ ID NO: 2393590 - RNA, 21 nt, Human
cagcauuccagccccucuggu

SEQ ID NO: 2393591 - RNA, 23 nt, Human
cagcaugaccugugaccagcacu

SEQ ID NO: 2393592 - RNA, 17 nt, Human
cagcaugaggaacuagc

SEQ ID NO: 2393593 - RNA, 20 nt, Human
cagcaugggcccaggaaugc

SEQ ID NO: 2393594 - RNA, 21 nt, Human
cagcaugaccugugaccagca

SEQ ID NO: 2393595 - RNA, 22 nt, Human
cagcauguguauuuccagugca

SEQ ID NO: 2393596 - RNA, 17 nt, Human
cagcauguugcugagga

SEQ ID NO: 2393597 - RNA, 18 nt, Human
cagcauguugcugaggag

SEQ ID NO: 2393598 - RNA, 18 nt, Human
cagcauuacaaauugcuu

SEQ ID NO: 2393599 - RNA, 18 nt, Human
cagcaugucuauucagcu

SEQ ID NO: 2393600 - RNA, 17 nt, Human
cagccaaacccaugagg

SEQ ID NO: 2393601 - RNA, 16 nt, Human
cagccaaacccaugag

SEQ ID NO: 2393602 - RNA, 17 nt, Human
cagccaaacccugucug

SEQ ID NO: 2393603 - RNA, 16 nt, Human
cagccaaacccugucu

SEQ ID NO: 2393604 - RNA, 15 nt, Human
cagccaaacccuguc

SEQ ID NO: 2393605 - RNA, 19 nt, Human
cagccaaacccaugaggca

SEQ ID NO: 2393606 - RNA, 16 nt, Human
cagccaaagccuccuc

SEQ ID NO: 2393607 - RNA, 15 nt, Human
cagccaaagccuccu

SEQ ID NO: 2393608 - RNA, 18 nt, Human
cagcauuuuacugauuca

SEQ ID NO: 2393609 - RNA, 23 nt, Human
cagcauuuccacaccaagcagca

SEQ ID NO: 2393610 - RNA, 15 nt, Human
cagcauuucugaagu

SEQ ID NO: 2393611 - RNA, 16 nt, Human
cagcauuucugaagug

SEQ ID NO: 2393612 - RNA, 14 nt, Human
cagcauugcugguu

SEQ ID NO: 2393613 - RNA, 15 nt, Human
cagcauugcugguuc

SEQ ID NO: 2393614 - RNA, 13 nt, Human
cagcauugcuuuc

SEQ ID NO: 2393615 - RNA, 12 nt, Human
cagcauugcuuu

SEQ ID NO: 2393616 - RNA, 16 nt, Human
cagcauugcugguucu

SEQ ID NO: 2393617 - RNA, 17 nt, Human
cagcauugcugguucua

SEQ ID NO: 2393618 - RNA, 16 nt, Human
cagcauugcuuucuga

SEQ ID NO: 2393619 - RNA, 14 nt, Human
cagcauugcuuucu

SEQ ID NO: 2393620 - RNA, 21 nt, Human
cagcauuuccacaccaagcag

SEQ ID NO: 2393621 - RNA, 20 nt, Human
cagcauuuccacaccaagca

SEQ ID NO: 2393622 - RNA, 21 nt, Human
cagccaacgaguaauuuauug

SEQ ID NO: 2393623 - RNA, 18 nt, Human
cagccaaccccuguggag

SEQ ID NO: 2393624 - RNA, 16 nt, Human
cagccaaccccugugg

SEQ ID NO: 2393625 - RNA, 21 nt, Human
cagccaaccccuguggagccc

SEQ ID NO: 2393626 - RNA, 15 nt, Human
cagccaaccccugug

SEQ ID NO: 2393627 - RNA, 14 nt, Human
cagccaaccccugu

SEQ ID NO: 2393628 - RNA, 12 nt, Human
cagccaaccccu

SEQ ID NO: 2393629 - RNA, 23 nt, Human
cagccaacagguggcaggaccag

SEQ ID NO: 2393630 - RNA, 18 nt, Human
cagccaacagguggcagg

SEQ ID NO: 2393631 - RNA, 19 nt, Human
cagccaacagguggcagga

SEQ ID NO: 2393632 - RNA, 22 nt, Human
cagccaacagguggcaggacca

SEQ ID NO: 2393633 - RNA, 18 nt, Human
cagccaacuauggccugu

SEQ ID NO: 2393634 - RNA, 13 nt, Human
cagccaacucauu

SEQ ID NO: 2393635 - RNA, 11 nt, Human
cagccaagcac

SEQ ID NO: 2393636 - RNA, 22 nt, Human
cagccaaauguaauugaauaaa

SEQ ID NO: 2393637 - RNA, 19 nt, Human
cagccaacacgcaccugcc

SEQ ID NO: 2393638 - RNA, 20 nt, Human
cagccaaagauaaucucuca

SEQ ID NO: 2393639 - RNA, 17 nt, Human
cagccaaagauaaucuc

SEQ ID NO: 2393640 - RNA, 23 nt, Human
cagccaacacgcaccugccucag

SEQ ID NO: 2393641 - RNA, 22 nt, Human
cagccaacacgcaccugccuca

SEQ ID NO: 2393642 - RNA, 20 nt, Human
cagccaacacgcaccugccu

SEQ ID NO: 2393643 - RNA, 21 nt, Human
cagccaaagccuccuccagcc

SEQ ID NO: 2393644 - RNA, 18 nt, Human
cagccaaagccuccucca

SEQ ID NO: 2393645 - RNA, 18 nt, Human
cagcagggagggcuucug

SEQ ID NO: 2393646 - RNA, 20 nt, Human
cagcaggcucucaggccagc

SEQ ID NO: 2393647 - RNA, 22 nt, Human
cagcaggcucucaggccagcug

SEQ ID NO: 2393648 - RNA, 16 nt, Human
cagcaggcucucaggc

SEQ ID NO: 2393649 - RNA, 17 nt, Human
cagcaggcucucaggcc

SEQ ID NO: 2393650 - RNA, 18 nt, Human
cagcaggcucucaggcca

SEQ ID NO: 2393651 - RNA, 19 nt, Human
cagcaggcucucaggccag

SEQ ID NO: 2393652 - RNA, 15 nt, Human
cagcagggccucaaa

SEQ ID NO: 2393653 - RNA, 14 nt, Human
cagcagggccucaa

SEQ ID NO: 2393654 - RNA, 11 nt, Human
cagcagggcua

SEQ ID NO: 2393655 - RNA, 21 nt, Human
cagcagggcuacccugagcug

SEQ ID NO: 2393656 - RNA, 19 nt, Human
cagcagggcuacccugagc

SEQ ID NO: 2393657 - RNA, 16 nt, Human
cagcagggccacuccc

SEQ ID NO: 2393658 - RNA, 17 nt, Human
cagcagggccacucccg

SEQ ID NO: 2393659 - RNA, 22 nt, Human
cagcagggaugcccuggaggug

SEQ ID NO: 2393660 - RNA, 21 nt, Human
cagcagggaugcccuggaggu

SEQ ID NO: 2393661 - RNA, 18 nt, Human
cagcagggaugcccugga

SEQ ID NO: 2393662 - RNA, 16 nt, Human
cagcagggaugcccug

SEQ ID NO: 2393663 - RNA, 20 nt, Human
cagcagggagggcuucugcc

SEQ ID NO: 2393664 - RNA, 24 nt, Human
cagcagggaaaaugcagcagggau

SEQ ID NO: 2393665 - RNA, 15 nt, Human
cagcagggaugcccu

SEQ ID NO: 2393666 - RNA, 23 nt, Human
cagcagggaaaaugcagcaggga

SEQ ID NO: 2393667 - RNA, 22 nt, Human
cagcagggaaaaugcagcaggg

SEQ ID NO: 2393668 - RNA, 14 nt, Human
cagcauccuggcac

SEQ ID NO: 2393669 - RNA, 15 nt, Human
cagcauccuggcacc

SEQ ID NO: 2393670 - RNA, 16 nt, Human
cagcauccuggcaccc

SEQ ID NO: 2393671 - RNA, 17 nt, Human
cagcauccuggcacccg

SEQ ID NO: 2393672 - RNA, 18 nt, Human
cagcagccuggacccugu

SEQ ID NO: 2393673 - RNA, 15 nt, Human
cagcagccuggaccc

SEQ ID NO: 2393674 - RNA, 14 nt, Human
cagcagccuggacc

SEQ ID NO: 2393675 - RNA, 12 nt, Human
cagcagccugga

SEQ ID NO: 2393676 - RNA, 13 nt, Human
cagcagcucaggc

SEQ ID NO: 2393677 - RNA, 12 nt, Human
cagcagcucagg

SEQ ID NO: 2393678 - RNA, 17 nt, Human
cagcagcgccuuuccca

SEQ ID NO: 2393679 - RNA, 21 nt, Human
cagcagcgaccaccccugccu

SEQ ID NO: 2393680 - RNA, 17 nt, Human
cagcagcggaaccgccc

SEQ ID NO: 2393681 - RNA, 15 nt, Human
cagcagcgguggccu

SEQ ID NO: 2393682 - RNA, 17 nt, Human
cagcagccuuuaaugca

SEQ ID NO: 2393683 - RNA, 20 nt, Human
cagcagcgaccaccccugcc

SEQ ID NO: 2393684 - RNA, 21 nt, Human
cagcagccuggggcuggccuc

SEQ ID NO: 2393685 - RNA, 20 nt, Human
cagcagccuggggcuggccu

SEQ ID NO: 2393686 - RNA, 22 nt, Human
cagcagccuggacccuguggau

SEQ ID NO: 2393687 - RNA, 19 nt, Human
cagcagccuggacccugug

SEQ ID NO: 2393688 - RNA, 16 nt, Human
cagcagcucaggcaca

SEQ ID NO: 2393689 - RNA, 16 nt, Human
cagcagcgguggccuc

SEQ ID NO: 2393690 - RNA, 18 nt, Human
cagcagcugaacagccaa

SEQ ID NO: 2393691 - RNA, 15 nt, Human
cagcagcucaggcac

SEQ ID NO: 2393692 - RNA, 14 nt, Human
cagcagcucaggca

SEQ ID NO: 2393693 - RNA, 17 nt, Human
cagcagcuuuuaauaca

SEQ ID NO: 2393694 - RNA, 17 nt, Human
cagcagcuucaccagag

SEQ ID NO: 2393695 - RNA, 18 nt, Human
cagcagcuucaccagagc

SEQ ID NO: 2393696 - RNA, 20 nt, Human
cagcagcugaacagccaaau

SEQ ID NO: 2393697 - RNA, 12 nt, Human
cagcagcuucac

SEQ ID NO: 2393698 - RNA, 16 nt, Human
cagcagcuucaccaga

SEQ ID NO: 2393699 - RNA, 18 nt, Human
cagcaggaggccaggccg

SEQ ID NO: 2393700 - RNA, 15 nt, Human
cagcaggaggccagg

SEQ ID NO: 2393701 - RNA, 14 nt, Human
cagcaggaggccag

SEQ ID NO: 2393702 - RNA, 12 nt, Human
cagcaggcucuc

SEQ ID NO: 2393703 - RNA, 14 nt, Human
cagcaggcucucag

SEQ ID NO: 2393704 - RNA, 15 nt, Human
cagcaggcucucagg

SEQ ID NO: 2393705 - RNA, 23 nt, Human
cagcccauucucucuccugucca

SEQ ID NO: 2393706 - RNA, 14 nt, Human
cagcucaccagccc

SEQ ID NO: 2393707 - RNA, 18 nt, Human
cagccuccaugcugccuc

SEQ ID NO: 2393708 - RNA, 21 nt, Human
caggaaaaaaaaaaaaaagac

SEQ ID NO: 2393709 - RNA, 18 nt, Human
caggaacagaaggaugaa

SEQ ID NO: 2393710 - RNA, 15 nt, Human
caggaacagaaggau

SEQ ID NO: 2393711 - RNA, 20 nt, Human
caggaaaacugacagaggag

SEQ ID NO: 2393712 - RNA, 14 nt, Human
caggaacagaagga

SEQ ID NO: 2393713 - RNA, 19 nt, Human
caggaaaacugacagagga

SEQ ID NO: 2393714 - RNA, 23 nt, Human
caggaaaacgggaccggccaggc

SEQ ID NO: 2393715 - RNA, 23 nt, Human
caggaacagcuaugggagcccca

SEQ ID NO: 2393716 - RNA, 22 nt, Human
caggaacagcuaugggagcccc

SEQ ID NO: 2393717 - RNA, 20 nt, Human
caggaacagcuaugggagcc

SEQ ID NO: 2393718 - RNA, 14 nt, Human
caggaacagcuaug

SEQ ID NO: 2393719 - RNA, 18 nt, Human
caggaaccacaagacugc

SEQ ID NO: 2393720 - RNA, 19 nt, Human
cagcuuugugacuguauau

SEQ ID NO: 2393721 - RNA, 14 nt, Human
cagcuuugcugcug

SEQ ID NO: 2393722 - RNA, 18 nt, Human
cagcuuugugacuguaua

SEQ ID NO: 2393723 - RNA, 20 nt, Human
cagcuuuucccaaaagccca

SEQ ID NO: 2393724 - RNA, 18 nt, Human
cagcuuuucccaaaagcc

SEQ ID NO: 2393725 - RNA, 19 nt, Human
cagcuuuuugucuuuucug

SEQ ID NO: 2393726 - RNA, 19 nt, Human
cagcuuuuuuuuccccccu

SEQ ID NO: 2393727 - RNA, 16 nt, Human
cagcuuuuugucuuuu

SEQ ID NO: 2393728 - RNA, 13 nt, Human
cagcuuuuugucu

SEQ ID NO: 2393729 - RNA, 16 nt, Human
cagcuuuuccucccuu

SEQ ID NO: 2393730 - RNA, 15 nt, Human
cagcuuuugcuucau

SEQ ID NO: 2393731 - RNA, 19 nt, Human
cagcuuuuuaaaguggguu

SEQ ID NO: 2393732 - RNA, 17 nt, Human
cagcuuuuuaccaaguu

SEQ ID NO: 2393733 - RNA, 14 nt, Human
cagcuuugccuucc

SEQ ID NO: 2393734 - RNA, 23 nt, Human
cagcuuugcccaacaccagcccc

SEQ ID NO: 2393735 - RNA, 22 nt, Human
cagcuuugcccaacaccagccc

SEQ ID NO: 2393736 - RNA, 16 nt, Human
cagcuuugccuuccac

SEQ ID NO: 2393737 - RNA, 15 nt, Human
cagcuuugccuucca

SEQ ID NO: 2393738 - RNA, 11 nt, Human
cagcuuugcua

SEQ ID NO: 2393739 - RNA, 18 nt, Human
cagcuuugccuuccacgc

SEQ ID NO: 2393740 - RNA, 22 nt, Human
cagcuuugcuaccaaagcaccu

SEQ ID NO: 2393741 - RNA, 12 nt, Human
cagcuuugcugc

SEQ ID NO: 2393742 - RNA, 13 nt, Human
cagcuuugcugcu

SEQ ID NO: 2393743 - RNA, 14 nt, Human
cagcuuugauauuu

SEQ ID NO: 2393744 - RNA, 20 nt, Human
cagcuuugaucccugacauc

SEQ ID NO: 2393745 - RNA, 17 nt, Human
cagcuuugaucccugac

SEQ ID NO: 2393746 - RNA, 16 nt, Human
cagcuuugaucccuga

SEQ ID NO: 2393747 - RNA, 23 nt, Human
cagcuuuguuuguugucagcuga

SEQ ID NO: 2393748 - RNA, 22 nt, Human
cagcuuuguuuguugucagcug

SEQ ID NO: 2393749 - RNA, 21 nt, Human
cagcuuuguuuguugucagcu

SEQ ID NO: 2393750 - RNA, 12 nt, Human
cagcuuuguuug

SEQ ID NO: 2393751 - RNA, 16 nt, Human
cagcuuucaugauuag

SEQ ID NO: 2393752 - RNA, 20 nt, Human
cagcuuucaugauuagcaag

SEQ ID NO: 2393753 - RNA, 17 nt, Human
cagcuuucaugauuagc

SEQ ID NO: 2393754 - RNA, 23 nt, Human
cagcuuuccccaugucucgacuc

SEQ ID NO: 2393755 - RNA, 23 nt, Human
cagcuuuccucaaaacuucagac

SEQ ID NO: 2393756 - RNA, 19 nt, Human
cagcuuucccugccucuca

SEQ ID NO: 2393757 - RNA, 17 nt, Human
cagcuuucccugccucu

SEQ ID NO: 2393758 - RNA, 17 nt, Human
cagcuuguuauuuauaa

SEQ ID NO: 2393759 - RNA, 15 nt, Human
cagcuuguguuguca

SEQ ID NO: 2393760 - RNA, 22 nt, Human
cagcuuuaaaaaauuaaucugg

SEQ ID NO: 2393761 - RNA, 19 nt, Human
cagcuuuacaugcaauuua

SEQ ID NO: 2393762 - RNA, 21 nt, Human
cagcuuuacaugcaauuuauu

SEQ ID NO: 2393763 - RNA, 22 nt, Human
cagcuuuaaacucagggacaga

SEQ ID NO: 2393764 - RNA, 15 nt, Human
cagcuuuaaccauua

SEQ ID NO: 2393765 - RNA, 20 nt, Human
cagcuuuaaccauuaaaacu

SEQ ID NO: 2393766 - RNA, 15 nt, Human
cagcuuuacaugcaa

SEQ ID NO: 2393767 - RNA, 13 nt, Human
cagcuuuaaacaa

SEQ ID NO: 2393768 - RNA, 15 nt, Human
cagcuuuaaacaaau

SEQ ID NO: 2393769 - RNA, 17 nt, Human
cagcuuuaaacucaggg

SEQ ID NO: 2393770 - RNA, 18 nt, Human
cagcuuuaaacucaggga

SEQ ID NO: 2393771 - RNA, 19 nt, Human
cagcuuuaaacucagggac

SEQ ID NO: 2393772 - RNA, 20 nt, Human
cagcuuuaaacucagggaca

SEQ ID NO: 2393773 - RNA, 21 nt, Human
cagcuuuaaacucagggacag

SEQ ID NO: 2393774 - RNA, 21 nt, Human
cagcuuguaaauagcucaggu

SEQ ID NO: 2393775 - RNA, 22 nt, Human
cagcuuguaaauagcucaggug

SEQ ID NO: 2393776 - RNA, 13 nt, Human
cagcuuguauuuu

SEQ ID NO: 2393777 - RNA, 14 nt, Human
cagcuugugcacaa

SEQ ID NO: 2393778 - RNA, 15 nt, Human
cagcuugugcacaau

SEQ ID NO: 2393779 - RNA, 15 nt, Human
cagcuuguggagccc

SEQ ID NO: 2393780 - RNA, 17 nt, Human
cagcuuguggagcccca

SEQ ID NO: 2393781 - RNA, 18 nt, Human
cagcuuguggagccccac

SEQ ID NO: 2393782 - RNA, 21 nt, Human
cagcuuguggagccccacacu

SEQ ID NO: 2393783 - RNA, 18 nt, Human
cagcuuguaaauagcuca

SEQ ID NO: 2393784 - RNA, 18 nt, Human
cagcuugggcccagcugg

SEQ ID NO: 2393785 - RNA, 19 nt, Human
cagcuugggcccagcuggg

SEQ ID NO: 2393786 - RNA, 20 nt, Human
cagcuugggcccagcugggc

SEQ ID NO: 2393787 - RNA, 21 nt, Human
cagcuugggcccagcugggcu

SEQ ID NO: 2393788 - RNA, 23 nt, Human
cagcuugggcccagcugggcucu

SEQ ID NO: 2393789 - RNA, 22 nt, Human
cagcuugggcccagcugggcuc

SEQ ID NO: 2393790 - RNA, 19 nt, Human
cagcuuguaaauagcucag

SEQ ID NO: 2393791 - RNA, 20 nt, Human
cagcuuguaaauagcucagg

SEQ ID NO: 2393792 - RNA, 19 nt, Human
cagcuugaucaaaggcaca

SEQ ID NO: 2393793 - RNA, 23 nt, Human
cagcuugaucaaaggcacacagc

SEQ ID NO: 2393794 - RNA, 15 nt, Human
cagcuucuucaucuu

SEQ ID NO: 2393795 - RNA, 14 nt, Human
cagcuugagccggg

SEQ ID NO: 2393796 - RNA, 21 nt, Human
cagcuugagccgggccccugg

SEQ ID NO: 2393797 - RNA, 22 nt, Human
cagcuugagccgggccccuggg

SEQ ID NO: 2393798 - RNA, 22 nt, Human
cagcuugcguuagaaugaggag

SEQ ID NO: 2393799 - RNA, 13 nt, Human
cagcuugccccgg

SEQ ID NO: 2393800 - RNA, 16 nt, Human
cagcuugccccggccc

SEQ ID NO: 2393801 - RNA, 12 nt, Human
cagcuugccccg

SEQ ID NO: 2393802 - RNA, 14 nt, Human
cagcuugcugcccu

SEQ ID NO: 2393803 - RNA, 23 nt, Human
cagcuugcucuucagugggagaa

SEQ ID NO: 2393804 - RNA, 15 nt, Human
cagcuugcucuucag

SEQ ID NO: 2393805 - RNA, 19 nt, Human
cagcuugcugcccuaggcu

SEQ ID NO: 2393806 - RNA, 17 nt, Human
cagcuugcugcccuagg

SEQ ID NO: 2393807 - RNA, 13 nt, Human
cagcuugggccca

SEQ ID NO: 2393808 - RNA, 14 nt, Human
cagcuugggcccag

SEQ ID NO: 2393809 - RNA, 16 nt, Human
cagcuugggcccagcu

SEQ ID NO: 2393810 - RNA, 17 nt, Human
cagcuugggcccagcug

SEQ ID NO: 2393811 - RNA, 18 nt, Human
cagcuugaggguugggcu

SEQ ID NO: 2393812 - RNA, 19 nt, Human
cagcuugaggguugggcug

SEQ ID NO: 2393813 - RNA, 20 nt, Human
cagcuugaggguugggcugg

SEQ ID NO: 2393814 - RNA, 21 nt, Human
cagcuugaggguugggcuggu

SEQ ID NO: 2393815 - RNA, 14 nt, Human
cagcuugaggguug

SEQ ID NO: 2393816 - RNA, 15 nt, Human
cagcuugaggguugg

SEQ ID NO: 2393817 - RNA, 15 nt, Human
cagcuugaccugagg

SEQ ID NO: 2393818 - RNA, 16 nt, Human
cagcuugaccugaggc

SEQ ID NO: 2393819 - RNA, 17 nt, Human
cagcuugaccugaggcu

SEQ ID NO: 2393820 - RNA, 19 nt, Human
cagcuugaccugaggcugu

SEQ ID NO: 2393821 - RNA, 20 nt, Human
cagcuugaccugaggcugug

SEQ ID NO: 2393822 - RNA, 21 nt, Human
cagcuugaccugaggcugugg

SEQ ID NO: 2393823 - RNA, 22 nt, Human
cagcuugaccugaggcuguggu

SEQ ID NO: 2393824 - RNA, 23 nt, Human
cagcuugaccugaggcugugguc

SEQ ID NO: 2393825 - RNA, 18 nt, Human
cagcuugaccgugaggcc

SEQ ID NO: 2393826 - RNA, 19 nt, Human
cagcuugaccgugaggcca

SEQ ID NO: 2393827 - RNA, 20 nt, Human
cagcuugaccgugaggccag

SEQ ID NO: 2393828 - RNA, 21 nt, Human
cagcuugaccgugaggccaga

SEQ ID NO: 2393829 - RNA, 21 nt, Human
cagcuucucauccugcaggca

SEQ ID NO: 2393830 - RNA, 19 nt, Human
cagcuucuauuagccaguc

SEQ ID NO: 2393831 - RNA, 12 nt, Human
cagcuucuccag

SEQ ID NO: 2393832 - RNA, 13 nt, Human
cagcuucuccagg

SEQ ID NO: 2393833 - RNA, 14 nt, Human
cagcuucugccacu

SEQ ID NO: 2393834 - RNA, 13 nt, Human
cagcuucugccac

SEQ ID NO: 2393835 - RNA, 11 nt, Human
cagcuucugcc

SEQ ID NO: 2393836 - RNA, 12 nt, Human
cagcuucugcca

SEQ ID NO: 2393837 - RNA, 16 nt, Human
cagcuucuccugugug

SEQ ID NO: 2393838 - RNA, 15 nt, Human
cagcuucuccugugu

SEQ ID NO: 2393839 - RNA, 14 nt, Human
cagcuucuccaggc

SEQ ID NO: 2393840 - RNA, 15 nt, Human
cagcuucuccaggcu

SEQ ID NO: 2393841 - RNA, 19 nt, Human
cagcuucucauccugcagg

SEQ ID NO: 2393842 - RNA, 20 nt, Human
cagcuucucauccugcaggc

SEQ ID NO: 2393843 - RNA, 18 nt, Human
cagcuucucauccugcag

SEQ ID NO: 2393844 - RNA, 18 nt, Human
cagcuucuauccuugacu

SEQ ID NO: 2393845 - RNA, 22 nt, Human
cagcuucguuuauuuucaagaa

SEQ ID NO: 2393846 - RNA, 22 nt, Human
cagcuucuuaauauaacugccu

SEQ ID NO: 2393847 - RNA, 23 nt, Human
cagcuucugguacucuccuagag

SEQ ID NO: 2393848 - RNA, 14 nt, Human
cagcuucuucaucu

SEQ ID NO: 2393849 - RNA, 19 nt, Human
cagcuucugguacucuccu

SEQ ID NO: 2393850 - RNA, 20 nt, Human
cagcuucugguacucuccua

SEQ ID NO: 2393851 - RNA, 21 nt, Human
cagcuucugguacucuccuag

SEQ ID NO: 2393852 - RNA, 22 nt, Human
cagcuucugguacucuccuaga

SEQ ID NO: 2393853 - RNA, 18 nt, Human
cagcuugaaacugagaug

SEQ ID NO: 2393854 - RNA, 20 nt, Human
cagcuucugccacuucccag

SEQ ID NO: 2393855 - RNA, 23 nt, Human
cagcuucugccacuucccaggua

SEQ ID NO: 2393856 - RNA, 15 nt, Human
cagcuucugccacuu

SEQ ID NO: 2393857 - RNA, 17 nt, Human
cagcuucugccacuucc

SEQ ID NO: 2393858 - RNA, 18 nt, Human
cagcuucugccacuuccc

SEQ ID NO: 2393859 - RNA, 19 nt, Human
cagcuucugccacuuccca

SEQ ID NO: 2393860 - RNA, 14 nt, Human
cagcuucugcuggg

SEQ ID NO: 2393861 - RNA, 15 nt, Human
cagcuucugcugggc

SEQ ID NO: 2393862 - RNA, 16 nt, Human
cagcuucugcugggcu

SEQ ID NO: 2393863 - RNA, 17 nt, Human
cagcuucugcugggcug

SEQ ID NO: 2393864 - RNA, 18 nt, Human
cagcuucugcugggcugg

SEQ ID NO: 2393865 - RNA, 14 nt, Human
cagcuucugguacu

SEQ ID NO: 2393866 - RNA, 19 nt, Human
cagcuucauuuccuguguc

SEQ ID NO: 2393867 - RNA, 22 nt, Human
cagcuguaagaagagacuggga

SEQ ID NO: 2393868 - RNA, 21 nt, Human
cagcuguaagaagagacuggg

SEQ ID NO: 2393869 - RNA, 16 nt, Human
cagcuguaaucuauga

SEQ ID NO: 2393870 - RNA, 19 nt, Human
cagcuguaugauucccagc

SEQ ID NO: 2393871 - RNA, 20 nt, Human
cagcuucauuuccugugucu

SEQ ID NO: 2393872 - RNA, 21 nt, Human
cagcuucauuuccugugucuu

SEQ ID NO: 2393873 - RNA, 23 nt, Human
cagcuuccccucucuccuccugc

SEQ ID NO: 2393874 - RNA, 14 nt, Human
cagcuuccuaccca

SEQ ID NO: 2393875 - RNA, 19 nt, Human
cagcuuccuacccacaccu

SEQ ID NO: 2393876 - RNA, 20 nt, Human
cagcuuccuacccacaccuc

SEQ ID NO: 2393877 - RNA, 22 nt, Human
cagcuuccuacccacaccucug

SEQ ID NO: 2393878 - RNA, 20 nt, Human
cagcuucguuuauuuucaag

SEQ ID NO: 2393879 - RNA, 22 nt, Human
cagcuuccccucucuccuccug

SEQ ID NO: 2393880 - RNA, 18 nt, Human
cagcuuccccucucuccu

SEQ ID NO: 2393881 - RNA, 17 nt, Human
cagcuucauuuguguca

SEQ ID NO: 2393882 - RNA, 17 nt, Human
cagcuguacuucgucuu

SEQ ID NO: 2393883 - RNA, 13 nt, Human
cagcuucauuugu

SEQ ID NO: 2393884 - RNA, 15 nt, Human
cagcuucauuugugu

SEQ ID NO: 2393885 - RNA, 22 nt, Human
caggaagaaaucacagaaucau

SEQ ID NO: 2393886 - RNA, 22 nt, Human
caggaagaaaggagucugcaca

SEQ ID NO: 2393887 - RNA, 14 nt, Human
caggaagaaaucac

SEQ ID NO: 2393888 - RNA, 21 nt, Human
caggaagaaaucacagaauca

SEQ ID NO: 2393889 - RNA, 14 nt, Human
caggaagagagcau

SEQ ID NO: 2393890 - RNA, 21 nt, Human
caggaagaugaaagaggaggu

SEQ ID NO: 2393891 - RNA, 18 nt, Human
caggaagaucuuaaauuu

SEQ ID NO: 2393892 - RNA, 15 nt, Human
caggaagcaccccau

SEQ ID NO: 2393893 - RNA, 14 nt, Human
caggaagcacccca

SEQ ID NO: 2393894 - RNA, 17 nt, Human
caggaagcaccccaugc

SEQ ID NO: 2393895 - RNA, 16 nt, Human
caggaagcaccccaug

SEQ ID NO: 2393896 - RNA, 14 nt, Human
caggaagcagcuuu

SEQ ID NO: 2393897 - RNA, 15 nt, Human
caggaacuauaaaaa

SEQ ID NO: 2393898 - RNA, 17 nt, Human
caggaacuauaaaaaca

SEQ ID NO: 2393899 - RNA, 19 nt, Human
caggaaccacaccacaucu

SEQ ID NO: 2393900 - RNA, 16 nt, Human
caggaaccacaccaca

SEQ ID NO: 2393901 - RNA, 13 nt, Human
caggaacugggcc

SEQ ID NO: 2393902 - RNA, 12 nt, Human
caggaacugggc

SEQ ID NO: 2393903 - RNA, 14 nt, Human
caggaacucccagc

SEQ ID NO: 2393904 - RNA, 15 nt, Human
caggaacucccagca

SEQ ID NO: 2393905 - RNA, 16 nt, Human
caggaacucccagcaa

SEQ ID NO: 2393906 - RNA, 17 nt, Human
caggaacucccagcaac

SEQ ID NO: 2393907 - RNA, 22 nt, Human
caggaagccagcaggcucucag

SEQ ID NO: 2393908 - RNA, 22 nt, Human
caggaagcauucagagagcagc

SEQ ID NO: 2393909 - RNA, 23 nt, Human
caggaagcaaacuaagcccccgc

SEQ ID NO: 2393910 - RNA, 18 nt, Human
caggaagcauucagagag

SEQ ID NO: 2393911 - RNA, 19 nt, Human
caggaagcauucagagagc

SEQ ID NO: 2393912 - RNA, 20 nt, Human
caggaagcauucagagagca

SEQ ID NO: 2393913 - RNA, 19 nt, Human
caggaagccagcaggcucu

SEQ ID NO: 2393914 - RNA, 21 nt, Human
caggaagccagcaggcucuca

SEQ ID NO: 2393915 - RNA, 14 nt, Human
caggaagccagcag

SEQ ID NO: 2393916 - RNA, 16 nt, Human
caggaagccagcaggc

SEQ ID NO: 2393917 - RNA, 17 nt, Human
caggaagccagcaggcu

SEQ ID NO: 2393918 - RNA, 18 nt, Human
caggaagccagcaggcuc

SEQ ID NO: 2393919 - RNA, 17 nt, Human
caggaagcugcuccgug

SEQ ID NO: 2393920 - RNA, 15 nt, Human
caggaagcugcuccg

SEQ ID NO: 2393921 - RNA, 18 nt, Human
caggaagcugcuccgugc

SEQ ID NO: 2393922 - RNA, 16 nt, Human
caggaaggagagccug

SEQ ID NO: 2393923 - RNA, 15 nt, Human
caggaaggagagccu

SEQ ID NO: 2393924 - RNA, 14 nt, Human
caggaaggagagcc

SEQ ID NO: 2393925 - RNA, 13 nt, Human
caggaaggagagc

SEQ ID NO: 2393926 - RNA, 14 nt, Human
caggaaggaaguca

SEQ ID NO: 2393927 - RNA, 12 nt, Human
caggaaggagag

SEQ ID NO: 2393928 - RNA, 17 nt, Human
caggaagcucagacugg

SEQ ID NO: 2393929 - RNA, 21 nt, Human
caggaagccgugcccugcccc

SEQ ID NO: 2393930 - RNA, 12 nt, Human
caggaagcucag

SEQ ID NO: 2393931 - RNA, 21 nt, Human
caggaagccugcaguccugga

SEQ ID NO: 2393932 - RNA, 23 nt, Human
caggaagcucagggccuggcuca

SEQ ID NO: 2393933 - RNA, 20 nt, Human
caggaagcucagggccuggc

SEQ ID NO: 2393934 - RNA, 21 nt, Human
caggaagcucagggccuggcu

SEQ ID NO: 2393935 - RNA, 13 nt, Human
caggaagcucagg

SEQ ID NO: 2393936 - RNA, 13 nt, Human
caggaagccccca

SEQ ID NO: 2393937 - RNA, 19 nt, Human
caggaagcccccaaguuga

SEQ ID NO: 2393938 - RNA, 13 nt, Human
caggaagccugca

SEQ ID NO: 2393939 - RNA, 19 nt, Human
caggaagccugcaguccug

SEQ ID NO: 2393940 - RNA, 14 nt, Human
caggaagcucaggg

SEQ ID NO: 2393941 - RNA, 15 nt, Human
caggaagcucagggc

SEQ ID NO: 2393942 - RNA, 16 nt, Human
caggaagcucagggcc

SEQ ID NO: 2393943 - RNA, 17 nt, Human
caggaagcucagggccu

SEQ ID NO: 2393944 - RNA, 18 nt, Human
caggaagcucagggccug

SEQ ID NO: 2393945 - RNA, 19 nt, Human
caggaagcucagggccugg

SEQ ID NO: 2393946 - RNA, 17 nt, Human
caggaccuguggccaag

SEQ ID NO: 2393947 - RNA, 20 nt, Human
caggaccuucgggcugugcc

SEQ ID NO: 2393948 - RNA, 22 nt, Human
caggaccuucgggcugugcccg

SEQ ID NO: 2393949 - RNA, 21 nt, Human
caggaccuucgggcugugccc

SEQ ID NO: 2393950 - RNA, 13 nt, Human
caggaccuuuuga

SEQ ID NO: 2393951 - RNA, 20 nt, Human
caggaccuuuugaaguaguu

SEQ ID NO: 2393952 - RNA, 14 nt, Human
caggacgcuucuga

SEQ ID NO: 2393953 - RNA, 15 nt, Human
caggacgcuucugaa

SEQ ID NO: 2393954 - RNA, 16 nt, Human
caggacgcuucugaau

SEQ ID NO: 2393955 - RNA, 21 nt, Human
caggacgcuucugaaugcugc

SEQ ID NO: 2393956 - RNA, 22 nt, Human
caggacgcuucugaaugcugcu

SEQ ID NO: 2393957 - RNA, 16 nt, Human
caggacggggccggcc

SEQ ID NO: 2393958 - RNA, 19 nt, Human
caggacggggccggccagg

SEQ ID NO: 2393959 - RNA, 20 nt, Human
caggacggggccggccaggu

SEQ ID NO: 2393960 - RNA, 13 nt, Human
caggaccugacua

SEQ ID NO: 2393961 - RNA, 13 nt, Human
caggaccugccug

SEQ ID NO: 2393962 - RNA, 21 nt, Human
caggaccucugaaacccugga

SEQ ID NO: 2393963 - RNA, 15 nt, Human
caggacacagucaga

SEQ ID NO: 2393964 - RNA, 14 nt, Human
caggacaccacacc

SEQ ID NO: 2393965 - RNA, 13 nt, Human
caggacacaguca

SEQ ID NO: 2393966 - RNA, 17 nt, Human
caggacaccacacccag

SEQ ID NO: 2393967 - RNA, 19 nt, Human
caggacaccacacccagcc

SEQ ID NO: 2393968 - RNA, 20 nt, Human
caggacaccacacccagccu

SEQ ID NO: 2393969 - RNA, 21 nt, Human
caggacaccacacccagccuc

SEQ ID NO: 2393970 - RNA, 18 nt, Human
caggaccuggcugccaua

SEQ ID NO: 2393971 - RNA, 22 nt, Human
caggacaccacacccagccuca

SEQ ID NO: 2393972 - RNA, 20 nt, Human
caggaccugggaccuccccu

SEQ ID NO: 2393973 - RNA, 17 nt, Human
caggaccuggcugccau

SEQ ID NO: 2393974 - RNA, 16 nt, Human
caggaccuggcugcca

SEQ ID NO: 2393975 - RNA, 14 nt, Human
caggaccuggcugc

SEQ ID NO: 2393976 - RNA, 19 nt, Human
caggaccugccuguagccc

SEQ ID NO: 2393977 - RNA, 15 nt, Human
caggaccugccugua

SEQ ID NO: 2393978 - RNA, 14 nt, Human
caggaccugccugu

SEQ ID NO: 2393979 - RNA, 17 nt, Human
caggaauguguggcaga

SEQ ID NO: 2393980 - RNA, 13 nt, Human
caggaaugggcug

SEQ ID NO: 2393981 - RNA, 14 nt, Human
caggaaugaucucu

SEQ ID NO: 2393982 - RNA, 21 nt, Human
caggaaugccaaggagacauc

SEQ ID NO: 2393983 - RNA, 17 nt, Human
caggaauguguggccug

SEQ ID NO: 2393984 - RNA, 16 nt, Human
caggaauguguggccu

SEQ ID NO: 2393985 - RNA, 19 nt, Human
caggaauguuaaagucagu

SEQ ID NO: 2393986 - RNA, 18 nt, Human
caggaauguuaaagucag

SEQ ID NO: 2393987 - RNA, 23 nt, Human
caggaauguguggccugcacagu

SEQ ID NO: 2393988 - RNA, 21 nt, Human
caggaauguguggccugcaca

SEQ ID NO: 2393989 - RNA, 19 nt, Human
caggaauguguggccugca

SEQ ID NO: 2393990 - RNA, 20 nt, Human
caggaaugaagccuuagcca

SEQ ID NO: 2393991 - RNA, 19 nt, Human
caggacaacgaggaagccc

SEQ ID NO: 2393992 - RNA, 17 nt, Human
caggacaaugucugaac

SEQ ID NO: 2393993 - RNA, 18 nt, Human
caggacaacgaggaagcc

SEQ ID NO: 2393994 - RNA, 16 nt, Human
caggacaacgaggaag

SEQ ID NO: 2393995 - RNA, 15 nt, Human
caggacaacgaggaa

SEQ ID NO: 2393996 - RNA, 21 nt, Human
caggaauuucccaggacccug

SEQ ID NO: 2393997 - RNA, 20 nt, Human
caggaauuucccaggacccu

SEQ ID NO: 2393998 - RNA, 19 nt, Human
caggaauuucccaggaccc

SEQ ID NO: 2393999 - RNA, 18 nt, Human
caggaauuucccaggacc

SEQ ID NO: 2394000 - RNA, 17 nt, Human
caggaauuucccaggac

SEQ ID NO: 2394001 - RNA, 16 nt, Human
caggaauuucccagga

SEQ ID NO: 2394002 - RNA, 18 nt, Human
caggaaggaugagcauuu

SEQ ID NO: 2394003 - RNA, 18 nt, Human
caggaaggagagccugcu

SEQ ID NO: 2394004 - RNA, 17 nt, Human
caggaaggagagccugc

SEQ ID NO: 2394005 - RNA, 19 nt, Human
caggaaggcugagaggaga

SEQ ID NO: 2394006 - RNA, 15 nt, Human
caggaaggcuaaagg

SEQ ID NO: 2394007 - RNA, 18 nt, Human
caggaaggggguccaccc

SEQ ID NO: 2394008 - RNA, 22 nt, Human
caggaagggccuacagcccauu

SEQ ID NO: 2394009 - RNA, 21 nt, Human
caggaagggcaggaaggagag

SEQ ID NO: 2394010 - RNA, 12 nt, Human
caggaaguacug

SEQ ID NO: 2394011 - RNA, 14 nt, Human
caggaaguacugga

SEQ ID NO: 2394012 - RNA, 16 nt, Human
caggaaguacuggaga

SEQ ID NO: 2394013 - RNA, 21 nt, Human
caggaaggggguccacccagc

SEQ ID NO: 2394014 - RNA, 23 nt, Human
caggaaggggguccacccagcaa

SEQ ID NO: 2394015 - RNA, 16 nt, Human
caggaaguagaggagg

SEQ ID NO: 2394016 - RNA, 23 nt, Human
caggaauaaggccuuaauauguu

SEQ ID NO: 2394017 - RNA, 17 nt, Human
caggaauauuuuccaaa

SEQ ID NO: 2394018 - RNA, 16 nt, Human
caggaaucaagagcug

SEQ ID NO: 2394019 - RNA, 17 nt, Human
caggaaucaagagcugc

SEQ ID NO: 2394020 - RNA, 18 nt, Human
caggaaucaagagcugcc

SEQ ID NO: 2394021 - RNA, 23 nt, Human
caggaaucaagagcugcccuccu

SEQ ID NO: 2394022 - RNA, 12 nt, Human
caggaauaaggc

SEQ ID NO: 2394023 - RNA, 10 nt, Human
caggaaguga

SEQ ID NO: 2394024 - RNA, 16 nt, Human
caggaagucuucaggg

SEQ ID NO: 2394025 - RNA, 17 nt, Human
caggaaguacuggagaa

SEQ ID NO: 2394026 - RNA, 18 nt, Human
caggaaguacuggagaaa

SEQ ID NO: 2394027 - RNA, 20 nt, Human
caggaaguacuggagaaaau

SEQ ID NO: 2394028 - RNA, 15 nt, Human
caggaaguagaggag

SEQ ID NO: 2394029 - RNA, 10 nt, Human
cagcucagga

SEQ ID NO: 2394030 - RNA, 18 nt, Human
cagcucagcgccagccug

SEQ ID NO: 2394031 - RNA, 12 nt, Human
cagcucaggaca

SEQ ID NO: 2394032 - RNA, 11 nt, Human
cagcucagcgc

SEQ ID NO: 2394033 - RNA, 13 nt, Human
cagcucagcgcca

SEQ ID NO: 2394034 - RNA, 17 nt, Human
cagcucagcgccagccu

SEQ ID NO: 2394035 - RNA, 21 nt, Human
cagcucaggcacacuucuucu

SEQ ID NO: 2394036 - RNA, 12 nt, Human
cagcucaggcac

SEQ ID NO: 2394037 - RNA, 13 nt, Human
cagcucaggaucu

SEQ ID NO: 2394038 - RNA, 11 nt, Human
cagcucaggau

SEQ ID NO: 2394039 - RNA, 22 nt, Human
cagcucaggacagaugccacac

SEQ ID NO: 2394040 - RNA, 19 nt, Human
cagcucaggacagaugcca

SEQ ID NO: 2394041 - RNA, 18 nt, Human
cagcucaggacagaugcc

SEQ ID NO: 2394042 - RNA, 16 nt, Human
cagcucaggacagaug

SEQ ID NO: 2394043 - RNA, 13 nt, Human
cagcucaggacag

SEQ ID NO: 2394044 - RNA, 13 nt, Human
cagcucagagagg

SEQ ID NO: 2394045 - RNA, 17 nt, Human
cagcucagagagggugg

SEQ ID NO: 2394046 - RNA, 19 nt, Human
cagcucagagaggguggga

SEQ ID NO: 2394047 - RNA, 20 nt, Human
cagcucagagagggugggag

SEQ ID NO: 2394048 - RNA, 23 nt, Human
cagcucaguucuagucucucugg

SEQ ID NO: 2394049 - RNA, 15 nt, Human
cagcucaucucuguc

SEQ ID NO: 2394050 - RNA, 17 nt, Human
cagcucaugcccccuuu

SEQ ID NO: 2394051 - RNA, 18 nt, Human
cagcucagucccaucaga

SEQ ID NO: 2394052 - RNA, 12 nt, Human
cagcucaguccc

SEQ ID NO: 2394053 - RNA, 23 nt, Human
cagcucaggcacacuucuucuug

SEQ ID NO: 2394054 - RNA, 15 nt, Human
cagcuccuguaacau

SEQ ID NO: 2394055 - RNA, 16 nt, Human
cagcuccuucuguccu

SEQ ID NO: 2394056 - RNA, 17 nt, Human
cagcuccuucuguccua

SEQ ID NO: 2394057 - RNA, 21 nt, Human
cagcuccuucuguccuacucu

SEQ ID NO: 2394058 - RNA, 23 nt, Human
cagcuccuucuguccuacucugu

SEQ ID NO: 2394059 - RNA, 12 nt, Human
cagcucuccccu

SEQ ID NO: 2394060 - RNA, 14 nt, Human
cagcucucccucug

SEQ ID NO: 2394061 - RNA, 12 nt, Human
cagcucucccuc

SEQ ID NO: 2394062 - RNA, 18 nt, Human
cagcucucccucuggccc

SEQ ID NO: 2394063 - RNA, 17 nt, Human
cagcucucccucuggcc

SEQ ID NO: 2394064 - RNA, 16 nt, Human
cagcucucccucuggc

SEQ ID NO: 2394065 - RNA, 15 nt, Human
cagcucucccucugg

SEQ ID NO: 2394066 - RNA, 11 nt, Human
cagcucuccag

SEQ ID NO: 2394067 - RNA, 12 nt, Human
cagcucuccagu

SEQ ID NO: 2394068 - RNA, 13 nt, Human
cagcucuccaguc

SEQ ID NO: 2394069 - RNA, 14 nt, Human
cagcucuccaguca

SEQ ID NO: 2394070 - RNA, 20 nt, Human
cagcucuagacaacccugca

SEQ ID NO: 2394071 - RNA, 17 nt, Human
cagcucuagacaacccu

SEQ ID NO: 2394072 - RNA, 15 nt, Human
cagcucuacuggucu

SEQ ID NO: 2394073 - RNA, 12 nt, Human
cagcucucagcc

SEQ ID NO: 2394074 - RNA, 20 nt, Human
cagcucuagacacugccaca

SEQ ID NO: 2394075 - RNA, 13 nt, Human
cagcucucagcca

SEQ ID NO: 2394076 - RNA, 21 nt, Human
cagcucuagacaacccugcaa

SEQ ID NO: 2394077 - RNA, 22 nt, Human
cagcuccuugggaggaagcaga

SEQ ID NO: 2394078 - RNA, 23 nt, Human
cagcuccuugggaggaagcagaa

SEQ ID NO: 2394079 - RNA, 17 nt, Human
cagcuccuugggaggaa

SEQ ID NO: 2394080 - RNA, 18 nt, Human
cagcuccuugggaggaag

SEQ ID NO: 2394081 - RNA, 20 nt, Human
cagcuccuugggaggaagca

SEQ ID NO: 2394082 - RNA, 21 nt, Human
cagcuccuugggaggaagcag

SEQ ID NO: 2394083 - RNA, 16 nt, Human
cagcuccuuccuggag

SEQ ID NO: 2394084 - RNA, 12 nt, Human
cagcuccuuggg

SEQ ID NO: 2394085 - RNA, 16 nt, Human
cagcuccuugggagga

SEQ ID NO: 2394086 - RNA, 14 nt, Human
cagcuccuuccugg

SEQ ID NO: 2394087 - RNA, 13 nt, Human
cagcuccuuccug

SEQ ID NO: 2394088 - RNA, 17 nt, Human
cagcucuggacagcccc

SEQ ID NO: 2394089 - RNA, 23 nt, Human
cagcucuggacagccccacccug

SEQ ID NO: 2394090 - RNA, 11 nt, Human
cagcucuggag

SEQ ID NO: 2394091 - RNA, 21 nt, Human
cagcucuggacagccccaccc

SEQ ID NO: 2394092 - RNA, 18 nt, Human
cagcucuggacagcccca

SEQ ID NO: 2394093 - RNA, 21 nt, Human
cagcucugcaagaauugaagc

SEQ ID NO: 2394094 - RNA, 20 nt, Human
cagcucugcauacucauuag

SEQ ID NO: 2394095 - RNA, 23 nt, Human
cagcucucccucuggcccugccu

SEQ ID NO: 2394096 - RNA, 21 nt, Human
cagcucucccucuggcccugc

SEQ ID NO: 2394097 - RNA, 20 nt, Human
cagcucucccucuggcccug

SEQ ID NO: 2394098 - RNA, 19 nt, Human
cagcucucccucuggcccu

SEQ ID NO: 2394099 - RNA, 19 nt, Human
cagcucugaaaccaguguu

SEQ ID NO: 2394100 - RNA, 18 nt, Human
cagcucugaaaccagugu

SEQ ID NO: 2394101 - RNA, 16 nt, Human
cagcucugcaagaauu

SEQ ID NO: 2394102 - RNA, 15 nt, Human
cagcucugcaagaau

SEQ ID NO: 2394103 - RNA, 14 nt, Human
cagcucuggcuucc

SEQ ID NO: 2394104 - RNA, 14 nt, Human
cagcucugggagag

SEQ ID NO: 2394105 - RNA, 19 nt, Human
cagcucugggccauucucc

SEQ ID NO: 2394106 - RNA, 12 nt, Human
cagcucugggcc

SEQ ID NO: 2394107 - RNA, 12 nt, Human
cagcucuggcuu

SEQ ID NO: 2394108 - RNA, 16 nt, Human
cagcucuggagggggu

SEQ ID NO: 2394109 - RNA, 18 nt, Human
cagcucuggaggggaggg

SEQ ID NO: 2394110 - RNA, 14 nt, Human
cagcucuggagggg

SEQ ID NO: 2394111 - RNA, 10 nt, Human
cagcucuggu

SEQ ID NO: 2394112 - RNA, 13 nt, Human
cagcucuggucca

SEQ ID NO: 2394113 - RNA, 16 nt, Human
cagcucugguccauag

SEQ ID NO: 2394114 - RNA, 17 nt, Human
cagcucugguccauaga

SEQ ID NO: 2394115 - RNA, 18 nt, Human
cagcucugguccauagag

SEQ ID NO: 2394116 - RNA, 21 nt, Human
cagcucugguccauagagagc

SEQ ID NO: 2394117 - RNA, 12 nt, Human
cagcucuguccu

SEQ ID NO: 2394118 - RNA, 13 nt, Human
cagcucuguccug

SEQ ID NO: 2394119 - RNA, 22 nt, Human
cagcucugguccauagagagca

SEQ ID NO: 2394120 - RNA, 23 nt, Human
cagcucugguccauagagagcaa

SEQ ID NO: 2394121 - RNA, 14 nt, Human
cagcucuguccugg

SEQ ID NO: 2394122 - RNA, 16 nt, Human
cagcucuguccuggga

SEQ ID NO: 2394123 - RNA, 17 nt, Human
cagcucuguccugggag

SEQ ID NO: 2394124 - RNA, 18 nt, Human
cagcucuguccugggagu

SEQ ID NO: 2394125 - RNA, 21 nt, Human
cagcucuguguugccaugugu

SEQ ID NO: 2394126 - RNA, 17 nt, Human
cagcucuguguugccau

SEQ ID NO: 2394127 - RNA, 23 nt, Human
cagcucugggccauucuccacag

SEQ ID NO: 2394128 - RNA, 22 nt, Human
cagcucugggccauucuccaca

SEQ ID NO: 2394129 - RNA, 23 nt, Human
cagcucuguccugggagugagcu

SEQ ID NO: 2394130 - RNA, 10 nt, Human
cagcucuuau

SEQ ID NO: 2394131 - RNA, 21 nt, Human
cagcucuuauauugccauuuc

SEQ ID NO: 2394132 - RNA, 13 nt, Human
cagcucuucucca

SEQ ID NO: 2394133 - RNA, 15 nt, Human
cagcucugggagagg

SEQ ID NO: 2394134 - RNA, 14 nt, Human
cagcucuucuccag

SEQ ID NO: 2394135 - RNA, 15 nt, Human
cagcucuucuccagg

SEQ ID NO: 2394136 - RNA, 16 nt, Human
cagcucuucuccaggc

SEQ ID NO: 2394137 - RNA, 17 nt, Human
cagcucuucuccaggcu

SEQ ID NO: 2394138 - RNA, 18 nt, Human
cagcucuucuccaggcug

SEQ ID NO: 2394139 - RNA, 19 nt, Human
cagcucuucuccaggcugu

SEQ ID NO: 2394140 - RNA, 23 nt, Human
cagcucuucugccggcccugggg

SEQ ID NO: 2394141 - RNA, 15 nt, Human
cagcucuugcccuuc

SEQ ID NO: 2394142 - RNA, 22 nt, Human
cagcucuucugccggcccuggg

SEQ ID NO: 2394143 - RNA, 13 nt, Human
cagcucuucugcc

SEQ ID NO: 2394144 - RNA, 16 nt, Human
cagcucuugcccuucc

SEQ ID NO: 2394145 - RNA, 17 nt, Human
cagcucuugcccuuccc

SEQ ID NO: 2394146 - RNA, 18 nt, Human
cagcucuugcccuucccu

SEQ ID NO: 2394147 - RNA, 19 nt, Human
cagcucuugcccuucccug

SEQ ID NO: 2394148 - RNA, 20 nt, Human
cagcucuugcccuucccugu

SEQ ID NO: 2394149 - RNA, 21 nt, Human
cagcucuugcccuucccuguc

SEQ ID NO: 2394150 - RNA, 23 nt, Human
cagcucuugcccuucccuguccc

SEQ ID NO: 2394151 - RNA, 14 nt, Human
cagcucuugcuaau

SEQ ID NO: 2394152 - RNA, 20 nt, Human
cagcucuugcuaaucagugu

SEQ ID NO: 2394153 - RNA, 21 nt, Human
cagcucuugcuaaucaguguc

SEQ ID NO: 2394154 - RNA, 22 nt, Human
cagcucuugcuaaucagugucu

SEQ ID NO: 2394155 - RNA, 23 nt, Human
cagcucuugcuaaucagugucuc

SEQ ID NO: 2394156 - RNA, 23 nt, Human
cagcucuucuccaggcuguaucc

SEQ ID NO: 2394157 - RNA, 18 nt, Human
cagcucuucuccccaggu

SEQ ID NO: 2394158 - RNA, 18 nt, Human
cagcucuuggcuccacug

SEQ ID NO: 2394159 - RNA, 13 nt, Human
cagcucuuuccuc

SEQ ID NO: 2394160 - RNA, 24 nt, Human
cagcucuugcuaaucagugucuca

SEQ ID NO: 2394161 - RNA, 17 nt, Human
cagcucuuggcuccacu

SEQ ID NO: 2394162 - RNA, 16 nt, Human
cagcucuuggcuccac

SEQ ID NO: 2394163 - RNA, 22 nt, Human
cagcucuuugaaauagucugug

SEQ ID NO: 2394164 - RNA, 21 nt, Human
cagcucuuuccuccuuccaug

SEQ ID NO: 2394165 - RNA, 19 nt, Human
cagcucuuuccuccuucca

SEQ ID NO: 2394166 - RNA, 18 nt, Human
cagcucuuuccuccuucc

SEQ ID NO: 2394167 - RNA, 17 nt, Human
cagcucuuuccuccuuc

SEQ ID NO: 2394168 - RNA, 16 nt, Human
cagcucuuuccuccuu

SEQ ID NO: 2394169 - RNA, 14 nt, Human
cagcucuuuccucc

SEQ ID NO: 2394170 - RNA, 21 nt, Human
cagcugaaauaugcuggcugg

SEQ ID NO: 2394171 - RNA, 22 nt, Human
cagcugaaauaugcuggcugga

SEQ ID NO: 2394172 - RNA, 19 nt, Human
cagcugaaauaugcuggcu

SEQ ID NO: 2394173 - RNA, 15 nt, Human
cagcugaaauacuga

SEQ ID NO: 2394174 - RNA, 22 nt, Human
cagcucuuuccuccuuccaugg

SEQ ID NO: 2394175 - RNA, 16 nt, Human
cagcugaauuaucuau

SEQ ID NO: 2394176 - RNA, 15 nt, Human
cagcugaacagccaa

SEQ ID NO: 2394177 - RNA, 16 nt, Human
cagcugaccuuuguca

SEQ ID NO: 2394178 - RNA, 17 nt, Human
cagcugaccucuguugu

SEQ ID NO: 2394179 - RNA, 18 nt, Human
cagcugaccucuguuguc

SEQ ID NO: 2394180 - RNA, 14 nt, Human
cagcugacaguccu

SEQ ID NO: 2394181 - RNA, 15 nt, Human
cagcugacaguccuc

SEQ ID NO: 2394182 - RNA, 16 nt, Human
cagcugacaguccucu

SEQ ID NO: 2394183 - RNA, 18 nt, Human
cagcugacaguccucucc

SEQ ID NO: 2394184 - RNA, 21 nt, Human
cagcugacaguccucuccacc

SEQ ID NO: 2394185 - RNA, 17 nt, Human
cagcugaccauggaaga

SEQ ID NO: 2394186 - RNA, 13 nt, Human
cagcugaccucug

SEQ ID NO: 2394187 - RNA, 18 nt, Human
cagcugccugggaucccu

SEQ ID NO: 2394188 - RNA, 23 nt, Human
cagcugccugggaucccucaucc

SEQ ID NO: 2394189 - RNA, 18 nt, Human
cagcugcgguccacccag

SEQ ID NO: 2394190 - RNA, 15 nt, Human
cagcugccugggauc

SEQ ID NO: 2394191 - RNA, 19 nt, Human
cagcugcgguccacccagg

SEQ ID NO: 2394192 - RNA, 20 nt, Human
cagcugcgguccacccagga

SEQ ID NO: 2394193 - RNA, 21 nt, Human
cagcugcgguccacccaggag

SEQ ID NO: 2394194 - RNA, 22 nt, Human
cagcugcgguccacccaggagc

SEQ ID NO: 2394195 - RNA, 23 nt, Human
cagcugcgguccacccaggagcc

SEQ ID NO: 2394196 - RNA, 24 nt, Human
cagcugcgguccacccaggagccc

SEQ ID NO: 2394197 - RNA, 21 nt, Human
cagcugcuccccucccuccuc

SEQ ID NO: 2394198 - RNA, 20 nt, Human
cagcugcuccccucccuccu

SEQ ID NO: 2394199 - RNA, 23 nt, Human
cagcugcuccuagagggaggggc

SEQ ID NO: 2394200 - RNA, 19 nt, Human
cagcugcuccuagagggag

SEQ ID NO: 2394201 - RNA, 18 nt, Human
cagcugcuccuagaggga

SEQ ID NO: 2394202 - RNA, 12 nt, Human
cagcugcuccua

SEQ ID NO: 2394203 - RNA, 18 nt, Human
cagcugcuccccucccuc

SEQ ID NO: 2394204 - RNA, 17 nt, Human
cagcugcuccccucccu

SEQ ID NO: 2394205 - RNA, 16 nt, Human
cagcugcuccccuccc

SEQ ID NO: 2394206 - RNA, 15 nt, Human
cagcugcuccccucc

SEQ ID NO: 2394207 - RNA, 13 nt, Human
cagcugcuccccu

SEQ ID NO: 2394208 - RNA, 19 nt, Human
cagcugcgcuugcuuuucu

SEQ ID NO: 2394209 - RNA, 17 nt, Human
cagcugcuacuacuccu

SEQ ID NO: 2394210 - RNA, 17 nt, Human
cagcugcgcuugcuuuu

SEQ ID NO: 2394211 - RNA, 21 nt, Human
cagcugcucaauaaaguacaa

SEQ ID NO: 2394212 - RNA, 14 nt, Human
cagcugcuggagac

SEQ ID NO: 2394213 - RNA, 15 nt, Human
cagcugcuggagacu

SEQ ID NO: 2394214 - RNA, 21 nt, Human
cagcugcugaaacaacaaaua

SEQ ID NO: 2394215 - RNA, 20 nt, Human
cagcugcugaaacaacaaau

SEQ ID NO: 2394216 - RNA, 13 nt, Human
cagcugcuugggc

SEQ ID NO: 2394217 - RNA, 14 nt, Human
cagcugcuugggcu

SEQ ID NO: 2394218 - RNA, 15 nt, Human
cagcugcuugggcuu

SEQ ID NO: 2394219 - RNA, 16 nt, Human
cagcugcuugggcuuc

SEQ ID NO: 2394220 - RNA, 18 nt, Human
cagcugcuugggcuucau

SEQ ID NO: 2394221 - RNA, 19 nt, Human
cagcugcuugggcuucauc

SEQ ID NO: 2394222 - RNA, 21 nt, Human
cagcugcuugggcuucauccu

SEQ ID NO: 2394223 - RNA, 22 nt, Human
cagcugcuugggcuucauccuc

SEQ ID NO: 2394224 - RNA, 19 nt, Human
cagcuggugguaucugagu

SEQ ID NO: 2394225 - RNA, 22 nt, Human
cagcuggugggaagcgucuguc

SEQ ID NO: 2394226 - RNA, 20 nt, Human
cagcuggugggaagcgucug

SEQ ID NO: 2394227 - RNA, 18 nt, Human
cagcugguugagguuuca

SEQ ID NO: 2394228 - RNA, 20 nt, Human
cagcuguaagaagagacugg

SEQ ID NO: 2394229 - RNA, 19 nt, Human
cagcuguaagaagagacug

SEQ ID NO: 2394230 - RNA, 18 nt, Human
cagcuguaacacagcuga

SEQ ID NO: 2394231 - RNA, 20 nt, Human
cagcuguaacacagcugaga

SEQ ID NO: 2394232 - RNA, 18 nt, Human
cagcuguaugauucccag

SEQ ID NO: 2394233 - RNA, 16 nt, Human
cagcuggguuggaaaa

SEQ ID NO: 2394234 - RNA, 19 nt, Human
cagcuggguggcacugcca

SEQ ID NO: 2394235 - RNA, 20 nt, Human
cagcuggguggcacugccau

SEQ ID NO: 2394236 - RNA, 21 nt, Human
cagcuggguggcacugccaug

SEQ ID NO: 2394237 - RNA, 22 nt, Human
cagcuggguggcacugccaugc

SEQ ID NO: 2394238 - RNA, 17 nt, Human
cagcuggguuggaaaac

SEQ ID NO: 2394239 - RNA, 21 nt, Human
cagcuggggccaggcuggguc

SEQ ID NO: 2394240 - RNA, 22 nt, Human
cagcuggggccaggcugggucg

SEQ ID NO: 2394241 - RNA, 21 nt, Human
cagcugggguggggaccucag

SEQ ID NO: 2394242 - RNA, 18 nt, Human
cagcuggggcguggggag

SEQ ID NO: 2394243 - RNA, 19 nt, Human
cagcuggggcguggggagg

SEQ ID NO: 2394244 - RNA, 20 nt, Human
cagcuggggcguggggaggg

SEQ ID NO: 2394245 - RNA, 21 nt, Human
cagcuggggcguggggagggc

SEQ ID NO: 2394246 - RNA, 22 nt, Human
cagcugggguggggaccucagg

SEQ ID NO: 2394247 - RNA, 23 nt, Human
cagcugggguggggaccucaggc

SEQ ID NO: 2394248 - RNA, 20 nt, Human
cagcugggucaggcagggug

SEQ ID NO: 2394249 - RNA, 18 nt, Human
cagcugggucaggcaggg

SEQ ID NO: 2394250 - RNA, 16 nt, Human
cagcuggguggcacug

SEQ ID NO: 2394251 - RNA, 17 nt, Human
cagcuggguggcacugc

SEQ ID NO: 2394252 - RNA, 18 nt, Human
cagcuggguggcacugcc

SEQ ID NO: 2394253 - RNA, 16 nt, Human
cagcugggucaggcag

SEQ ID NO: 2394254 - RNA, 15 nt, Human
cagcugggucaggca

SEQ ID NO: 2394255 - RNA, 14 nt, Human
cagcugggucaggc

SEQ ID NO: 2394256 - RNA, 18 nt, Human
cagcuggagaaauauggu

SEQ ID NO: 2394257 - RNA, 16 nt, Human
cagcuggagaagaccc

SEQ ID NO: 2394258 - RNA, 14 nt, Human
cagcuggcagcaga

SEQ ID NO: 2394259 - RNA, 19 nt, Human
cagcuggauuggguuauga

SEQ ID NO: 2394260 - RNA, 21 nt, Human
cagcuggaugagacuuccaaa

SEQ ID NO: 2394261 - RNA, 15 nt, Human
cagcuggauuggguu

SEQ ID NO: 2394262 - RNA, 18 nt, Human
cagcuggaugauggucuu

SEQ ID NO: 2394263 - RNA, 23 nt, Human
cagcuggaugagaauuugagugc

SEQ ID NO: 2394264 - RNA, 18 nt, Human
cagcuggcagcagagugu

SEQ ID NO: 2394265 - RNA, 15 nt, Human
cagcuggcagcagag

SEQ ID NO: 2394266 - RNA, 17 nt, Human
cagcuggcccgugacag

SEQ ID NO: 2394267 - RNA, 18 nt, Human
cagcuggcccgugacaga

SEQ ID NO: 2394268 - RNA, 19 nt, Human
cagcuggccgggagccuga

SEQ ID NO: 2394269 - RNA, 23 nt, Human
cagcugcuuuugucuaugggacu

SEQ ID NO: 2394270 - RNA, 16 nt, Human
cagcugcuuguguccc

SEQ ID NO: 2394271 - RNA, 22 nt, Human
cagcugcuugugucccuccugg

SEQ ID NO: 2394272 - RNA, 23 nt, Human
cagcugcuugugucccuccuggg

SEQ ID NO: 2394273 - RNA, 22 nt, Human
cagcuggaaaagggucuuggga

SEQ ID NO: 2394274 - RNA, 12 nt, Human
cagcugcuucuc

SEQ ID NO: 2394275 - RNA, 15 nt, Human
cagcugcuucuccca

SEQ ID NO: 2394276 - RNA, 14 nt, Human
cagcugcuuguguc

SEQ ID NO: 2394277 - RNA, 15 nt, Human
cagcugcuugugucc

SEQ ID NO: 2394278 - RNA, 18 nt, Human
cagcugcuggagacuccu

SEQ ID NO: 2394279 - RNA, 19 nt, Human
cagcugcuggagacuccua

SEQ ID NO: 2394280 - RNA, 23 nt, Human
cagcugcuggagacuccuaggca

SEQ ID NO: 2394281 - RNA, 22 nt, Human
cagcugcuuuugucuaugggac

SEQ ID NO: 2394282 - RNA, 12 nt, Human
cagcugggaggc

SEQ ID NO: 2394283 - RNA, 13 nt, Human
cagcugggaggca

SEQ ID NO: 2394284 - RNA, 14 nt, Human
cagcugggaggcaa

SEQ ID NO: 2394285 - RNA, 22 nt, Human
cagcugggaggcaagaggggug

SEQ ID NO: 2394286 - RNA, 17 nt, Human
cagcuggccgucacuug

SEQ ID NO: 2394287 - RNA, 19 nt, Human
cagcuggcccgugacagac

SEQ ID NO: 2394288 - RNA, 14 nt, Human
cagcugggcccaac

SEQ ID NO: 2394289 - RNA, 23 nt, Human
cagcugggaggcaagaggggugg

SEQ ID NO: 2394290 - RNA, 15 nt, Human
cagcugggcccaacc

SEQ ID NO: 2394291 - RNA, 23 nt, Human
cagcugggaucacauguggacuu

SEQ ID NO: 2394292 - RNA, 15 nt, Human
cagcugggcucugca

SEQ ID NO: 2394293 - RNA, 16 nt, Human
cagcugggcucugcaa

SEQ ID NO: 2394294 - RNA, 21 nt, Human
cagcugggcccaacccugucu

SEQ ID NO: 2394295 - RNA, 17 nt, Human
cagcugggcccaacccu

SEQ ID NO: 2394296 - RNA, 11 nt, Human
cagcugggcuc

SEQ ID NO: 2394297 - RNA, 18 nt, Human
cagcuggggccaggcugg

SEQ ID NO: 2394298 - RNA, 17 nt, Human
cagcugggcucugcaau

SEQ ID NO: 2394299 - RNA, 14 nt, Human
cagcugggcucugc

SEQ ID NO: 2394300 - RNA, 15 nt, Human
cagcugggcucugcc

SEQ ID NO: 2394301 - RNA, 16 nt, Human
cagcugggcucugcca

SEQ ID NO: 2394302 - RNA, 18 nt, Human
cagcugggcucugccacc

SEQ ID NO: 2394303 - RNA, 12 nt, Human
cagcugggcugu

SEQ ID NO: 2394304 - RNA, 14 nt, Human
cagcugggcugugg

SEQ ID NO: 2394305 - RNA, 19 nt, Human
cagcuggggccaggcuggg

SEQ ID NO: 2394306 - RNA, 20 nt, Human
cagcuggggccaggcugggu

SEQ ID NO: 2394307 - RNA, 22 nt, Human
caggaagcucagggccuggcuc

SEQ ID NO: 2394308 - RNA, 13 nt, Human
cagcccugacccu

SEQ ID NO: 2394309 - RNA, 16 nt, Human
cagcccugacccugug

SEQ ID NO: 2394310 - RNA, 22 nt, Human
cagcccugaggugaaagggagc

SEQ ID NO: 2394311 - RNA, 12 nt, Human
cagcccugaggu

SEQ ID NO: 2394312 - RNA, 22 nt, Human
cagcccuccucaccccgucugg

SEQ ID NO: 2394313 - RNA, 21 nt, Human
cagcccugaguuccuagccac

SEQ ID NO: 2394314 - RNA, 19 nt, Human
cagcccugaguuccuagcc

SEQ ID NO: 2394315 - RNA, 18 nt, Human
cagcccugaguuccuagc

SEQ ID NO: 2394316 - RNA, 16 nt, Human
cagcccuccucacccc

SEQ ID NO: 2394317 - RNA, 14 nt, Human
cagcccuccucacc

SEQ ID NO: 2394318 - RNA, 13 nt, Human
cagcccuccucac

SEQ ID NO: 2394319 - RNA, 12 nt, Human
cagcccuccuca

SEQ ID NO: 2394320 - RNA, 22 nt, Human
cagcccucccuguccuccucgg

SEQ ID NO: 2394321 - RNA, 21 nt, Human
cagcccucccuguccuccucg

SEQ ID NO: 2394322 - RNA, 20 nt, Human
cagcccucccuguccuccuc

SEQ ID NO: 2394323 - RNA, 19 nt, Human
cagcccucccuguccuccu

SEQ ID NO: 2394324 - RNA, 18 nt, Human
cagcccucccuguccucc

SEQ ID NO: 2394325 - RNA, 16 nt, Human
cagcccucccuguccu

SEQ ID NO: 2394326 - RNA, 15 nt, Human
cagcccucccugucc

SEQ ID NO: 2394327 - RNA, 14 nt, Human
cagcccucccuguc

SEQ ID NO: 2394328 - RNA, 13 nt, Human
cagcccucccugu

SEQ ID NO: 2394329 - RNA, 20 nt, Human
cagcccucccgccccuuccc

SEQ ID NO: 2394330 - RNA, 21 nt, Human
cagcccuccccauggagccag

SEQ ID NO: 2394331 - RNA, 16 nt, Human
cagcccucccugcccc

SEQ ID NO: 2394332 - RNA, 17 nt, Human
cagcccucccugccccu

SEQ ID NO: 2394333 - RNA, 18 nt, Human
cagcccucccugccccuc

SEQ ID NO: 2394334 - RNA, 22 nt, Human
cagcccucccugccccucccuu

SEQ ID NO: 2394335 - RNA, 18 nt, Human
cagcccugcagagggcac

SEQ ID NO: 2394336 - RNA, 20 nt, Human
cagcccugcagagggcacag

SEQ ID NO: 2394337 - RNA, 13 nt, Human
cagcccugcuggc

SEQ ID NO: 2394338 - RNA, 14 nt, Human
cagcccugcuggcc

SEQ ID NO: 2394339 - RNA, 16 nt, Human
cagcccugcuggccgc

SEQ ID NO: 2394340 - RNA, 18 nt, Human
cagcccugcuggccgccu

SEQ ID NO: 2394341 - RNA, 20 nt, Human
cagcccugcuggccgccuca

SEQ ID NO: 2394342 - RNA, 13 nt, Human
cagcccugcagag

SEQ ID NO: 2394343 - RNA, 14 nt, Human
cagcccugcagagg

SEQ ID NO: 2394344 - RNA, 15 nt, Human
cagcccugcagaggg

SEQ ID NO: 2394345 - RNA, 16 nt, Human
cagcccugcagagggc

SEQ ID NO: 2394346 - RNA, 22 nt, Human
cagccuagccgaccucagccuu

SEQ ID NO: 2394347 - RNA, 21 nt, Human
cagccuagccgaccucagccu

SEQ ID NO: 2394348 - RNA, 20 nt, Human
cagccuagccgaccucagcc

SEQ ID NO: 2394349 - RNA, 19 nt, Human
cagccuagccgaccucagc

SEQ ID NO: 2394350 - RNA, 18 nt, Human
cagccuagccgaccucag

SEQ ID NO: 2394351 - RNA, 17 nt, Human
cagccuagccgaccuca

SEQ ID NO: 2394352 - RNA, 15 nt, Human
cagccuagccgaccu

SEQ ID NO: 2394353 - RNA, 21 nt, Human
cagccguguaaccauggaccc

SEQ ID NO: 2394354 - RNA, 16 nt, Human
cagccuaagaugaaga

SEQ ID NO: 2394355 - RNA, 19 nt, Human
cagccgucagccaaaugua

SEQ ID NO: 2394356 - RNA, 21 nt, Human
cagccgguaccugggaagggg

SEQ ID NO: 2394357 - RNA, 16 nt, Human
cagccgugaugcucag

SEQ ID NO: 2394358 - RNA, 18 nt, Human
cagccgucagccaaaugu

SEQ ID NO: 2394359 - RNA, 17 nt, Human
cagccgguaccugggaa

SEQ ID NO: 2394360 - RNA, 19 nt, Human
cagccgguaccugggaagg

SEQ ID NO: 2394361 - RNA, 9 nt, Human
cagccgugc

SEQ ID NO: 2394362 - RNA, 14 nt, Human
cagccgugccuuca

SEQ ID NO: 2394363 - RNA, 16 nt, Human
cagccgugccuucagc

SEQ ID NO: 2394364 - RNA, 18 nt, Human
cagccgugccuucagcuc

SEQ ID NO: 2394365 - RNA, 20 nt, Human
cagccgugccuucagcucua

SEQ ID NO: 2394366 - RNA, 17 nt, Human
cagccgugaugcucagg

SEQ ID NO: 2394367 - RNA, 19 nt, Human
cagccgugaugcucaggcu

SEQ ID NO: 2394368 - RNA, 11 nt, Human
cagcccugggc

SEQ ID NO: 2394369 - RNA, 20 nt, Human
cagcccuggcugaaggacug

SEQ ID NO: 2394370 - RNA, 16 nt, Human
cagcccuggcugaagg

SEQ ID NO: 2394371 - RNA, 17 nt, Human
cagcccuggcugaagga

SEQ ID NO: 2394372 - RNA, 15 nt, Human
cagcccuggcucugc

SEQ ID NO: 2394373 - RNA, 16 nt, Human
cagcccuggcucugca

SEQ ID NO: 2394374 - RNA, 13 nt, Human
cagcccuggcuga

SEQ ID NO: 2394375 - RNA, 15 nt, Human
cagcccuggcugaag

SEQ ID NO: 2394376 - RNA, 17 nt, Human
cagcccuggaggugcca

SEQ ID NO: 2394377 - RNA, 18 nt, Human
cagcccuggaggugccag

SEQ ID NO: 2394378 - RNA, 19 nt, Human
cagcccuggaggugccagc

SEQ ID NO: 2394379 - RNA, 22 nt, Human
cagcccuggaggugccagcaaa

SEQ ID NO: 2394380 - RNA, 20 nt, Human
cagcccuggagucaugccaa

SEQ ID NO: 2394381 - RNA, 14 nt, Human
cagcccuggaguca

SEQ ID NO: 2394382 - RNA, 12 nt, Human
cagcccuggcuc

SEQ ID NO: 2394383 - RNA, 22 nt, Human
cagcccugggccccaccaccua

SEQ ID NO: 2394384 - RNA, 21 nt, Human
cagcccugggccccaccaccu

SEQ ID NO: 2394385 - RNA, 20 nt, Human
cagcccugggccccaccacc

SEQ ID NO: 2394386 - RNA, 19 nt, Human
cagcccugggccccaccac

SEQ ID NO: 2394387 - RNA, 18 nt, Human
cagcccugggccccacca

SEQ ID NO: 2394388 - RNA, 17 nt, Human
cagcccugggccccacc

SEQ ID NO: 2394389 - RNA, 13 nt, Human
cagcccugggccc

SEQ ID NO: 2394390 - RNA, 12 nt, Human
cagcccugggcc

SEQ ID NO: 2394391 - RNA, 23 nt, Human
cagcccugggccccaccaccuag

SEQ ID NO: 2394392 - RNA, 15 nt, Human
cagccgguaccuggg

SEQ ID NO: 2394393 - RNA, 11 nt, Human
cagcccugcuu

SEQ ID NO: 2394394 - RNA, 13 nt, Human
cagcccugcuuug

SEQ ID NO: 2394395 - RNA, 19 nt, Human
cagcccugcuuugggcugc

SEQ ID NO: 2394396 - RNA, 20 nt, Human
cagcccugcuuugggcugcc

SEQ ID NO: 2394397 - RNA, 21 nt, Human
cagcccugcuuugggcugccc

SEQ ID NO: 2394398 - RNA, 22 nt, Human
cagcccugcuuugggcugcccu

SEQ ID NO: 2394399 - RNA, 23 nt, Human
cagcccugcuuugggcugcccug

SEQ ID NO: 2394400 - RNA, 23 nt, Human
cagcccugcuggccgccucaccc

SEQ ID NO: 2394401 - RNA, 21 nt, Human
cagcccugcuggccgccucac

SEQ ID NO: 2394402 - RNA, 12 nt, Human
cagcccuggagg

SEQ ID NO: 2394403 - RNA, 19 nt, Human
cagccucccaaagugcugg

SEQ ID NO: 2394404 - RNA, 20 nt, Human
cagccucccaaagugcuggg

SEQ ID NO: 2394405 - RNA, 21 nt, Human
cagccucccaaagugcuggga

SEQ ID NO: 2394406 - RNA, 23 nt, Human
cagccucccaaagugcugggauu

SEQ ID NO: 2394407 - RNA, 15 nt, Human
cagccuccaugcugc

SEQ ID NO: 2394408 - RNA, 17 nt, Human
cagccuccaugcugccu

SEQ ID NO: 2394409 - RNA, 20 nt, Human
cagccuccaugcugccucca

SEQ ID NO: 2394410 - RNA, 17 nt, Human
cagccuccagccucugu

SEQ ID NO: 2394411 - RNA, 14 nt, Human
cagccuccaugcug

SEQ ID NO: 2394412 - RNA, 13 nt, Human
cagccuccagccu

SEQ ID NO: 2394413 - RNA, 14 nt, Human
cagccuccagccuc

SEQ ID NO: 2394414 - RNA, 15 nt, Human
cagccuccagccucu

SEQ ID NO: 2394415 - RNA, 16 nt, Human
cagccuccagccucug

SEQ ID NO: 2394416 - RNA, 23 nt, Human
cagccucccauccagggccccca

SEQ ID NO: 2394417 - RNA, 17 nt, Human
cagccuccccugccagg

SEQ ID NO: 2394418 - RNA, 16 nt, Human
cagccuccccugccag

SEQ ID NO: 2394419 - RNA, 20 nt, Human
cagccucccauccagggccc

SEQ ID NO: 2394420 - RNA, 19 nt, Human
cagccucccauccagggcc

SEQ ID NO: 2394421 - RNA, 18 nt, Human
cagccucccauccagggc

SEQ ID NO: 2394422 - RNA, 16 nt, Human
cagccucccauccagg

SEQ ID NO: 2394423 - RNA, 18 nt, Human
cagccucccacccccauc

SEQ ID NO: 2394424 - RNA, 16 nt, Human
cagccucccaccccca

SEQ ID NO: 2394425 - RNA, 19 nt, Human
cagccucccacccccaucu

SEQ ID NO: 2394426 - RNA, 14 nt, Human
cagccucccaucca

SEQ ID NO: 2394427 - RNA, 14 nt, Human
cagccucccacccc

SEQ ID NO: 2394428 - RNA, 19 nt, Human
cagccucccaaguagcugg

SEQ ID NO: 2394429 - RNA, 20 nt, Human
cagccucccgaauagcuggg

SEQ ID NO: 2394430 - RNA, 22 nt, Human
cagccuccccugccagggcagg

SEQ ID NO: 2394431 - RNA, 20 nt, Human
cagccuccccugccagggca

SEQ ID NO: 2394432 - RNA, 19 nt, Human
cagccuccccugccagggc

SEQ ID NO: 2394433 - RNA, 18 nt, Human
cagccuccccugccaggg

SEQ ID NO: 2394434 - RNA, 21 nt, Human
cagccucccgaauagcuggga

SEQ ID NO: 2394435 - RNA, 22 nt, Human
cagccucccgaauagcugggac

SEQ ID NO: 2394436 - RNA, 14 nt, Human
cagccucacagaag

SEQ ID NO: 2394437 - RNA, 13 nt, Human
cagccucacagaa

SEQ ID NO: 2394438 - RNA, 12 nt, Human
cagccucacaga

SEQ ID NO: 2394439 - RNA, 20 nt, Human
cagccucaauaagccuuguc

SEQ ID NO: 2394440 - RNA, 21 nt, Human
cagccucaauaagccuugucg

SEQ ID NO: 2394441 - RNA, 20 nt, Human
cagccucacaguccuuacca

SEQ ID NO: 2394442 - RNA, 14 nt, Human
cagccucacagucc

SEQ ID NO: 2394443 - RNA, 15 nt, Human
cagccucacaguccu

SEQ ID NO: 2394444 - RNA, 14 nt, Human
cagccuccaagcuc

SEQ ID NO: 2394445 - RNA, 19 nt, Human
cagccucaguccuccccuc

SEQ ID NO: 2394446 - RNA, 21 nt, Human
cagccucaguccuccccucac

SEQ ID NO: 2394447 - RNA, 22 nt, Human
cagccucaguccuccccucaca

SEQ ID NO: 2394448 - RNA, 23 nt, Human
cagccucaguccuccccucacag

SEQ ID NO: 2394449 - RNA, 12 nt, Human
cagccuccagcc

SEQ ID NO: 2394450 - RNA, 20 nt, Human
cagccuccaagcuccaucuc

SEQ ID NO: 2394451 - RNA, 22 nt, Human
cagccucagggacgacucugac

SEQ ID NO: 2394452 - RNA, 15 nt, Human
cagccucaguccucc

SEQ ID NO: 2394453 - RNA, 16 nt, Human
cagccucaguccuccc

SEQ ID NO: 2394454 - RNA, 19 nt, Human
cagccucaaccuccugggc

SEQ ID NO: 2394455 - RNA, 20 nt, Human
cagccucaaccuccugggcu

SEQ ID NO: 2394456 - RNA, 21 nt, Human
cagccucaaccuccugggcua

SEQ ID NO: 2394457 - RNA, 19 nt, Human
cagccucaagucacuccca

SEQ ID NO: 2394458 - RNA, 21 nt, Human
cagccucaagucacucccaag

SEQ ID NO: 2394459 - RNA, 18 nt, Human
cagccucaauaagccuug

SEQ ID NO: 2394460 - RNA, 19 nt, Human
cagccucaauaagccuugu

SEQ ID NO: 2394461 - RNA, 17 nt, Human
cagccucaaccuccugg

SEQ ID NO: 2394462 - RNA, 18 nt, Human
cagccucaaccuccuggg

SEQ ID NO: 2394463 - RNA, 18 nt, Human
cagccuaggggucaggga

SEQ ID NO: 2394464 - RNA, 15 nt, Human
cagccuaccaugaga

SEQ ID NO: 2394465 - RNA, 21 nt, Human
cagccuagggcugagcugggg

SEQ ID NO: 2394466 - RNA, 19 nt, Human
cagccuaggggucagggac

SEQ ID NO: 2394467 - RNA, 16 nt, Human
cagccuaguugaucag

SEQ ID NO: 2394468 - RNA, 16 nt, Human
cagcccgcugagugga

SEQ ID NO: 2394469 - RNA, 17 nt, Human
cagcccgcugaguggac

SEQ ID NO: 2394470 - RNA, 15 nt, Human
cagcccggaccuugg

SEQ ID NO: 2394471 - RNA, 18 nt, Human
cagcccggaccuuggcag

SEQ ID NO: 2394472 - RNA, 12 nt, Human
cagcccggccug

SEQ ID NO: 2394473 - RNA, 14 nt, Human
cagcccggccugcu

SEQ ID NO: 2394474 - RNA, 20 nt, Human
cagcccggccugcucccagc

SEQ ID NO: 2394475 - RNA, 21 nt, Human
cagcccggccugcucccagca

SEQ ID NO: 2394476 - RNA, 23 nt, Human
cagcccggccugcucccagcagc

SEQ ID NO: 2394477 - RNA, 15 nt, Human
cagcccggcgccacc

SEQ ID NO: 2394478 - RNA, 21 nt, Human
cagcccggcgccaccauccug

SEQ ID NO: 2394479 - RNA, 15 nt, Human
cagcccggcucccac

SEQ ID NO: 2394480 - RNA, 13 nt, Human
cagcccgggcucu

SEQ ID NO: 2394481 - RNA, 14 nt, Human
cagcccgggcucug

SEQ ID NO: 2394482 - RNA, 15 nt, Human
cagcccgggcucugc

SEQ ID NO: 2394483 - RNA, 16 nt, Human
cagcccgggcucugcc

SEQ ID NO: 2394484 - RNA, 18 nt, Human
cagccccuugagaaaccu

SEQ ID NO: 2394485 - RNA, 17 nt, Human
cagccccuugagaaacc

SEQ ID NO: 2394486 - RNA, 20 nt, Human
cagccccuucucagaaucua

SEQ ID NO: 2394487 - RNA, 22 nt, Human
cagccccuucucagaaucuacc

SEQ ID NO: 2394488 - RNA, 24 nt, Human
cagccccuucugacccaugcugcc

SEQ ID NO: 2394489 - RNA, 22 nt, Human
cagccccuucugacccaugcug

SEQ ID NO: 2394490 - RNA, 23 nt, Human
cagccccuucugacccaugcugc

SEQ ID NO: 2394491 - RNA, 16 nt, Human
cagccccuucugaccc

SEQ ID NO: 2394492 - RNA, 17 nt, Human
cagccccuucugaccca

SEQ ID NO: 2394493 - RNA, 19 nt, Human
cagccccuucugacccaug

SEQ ID NO: 2394494 - RNA, 21 nt, Human
cagccccuucugacccaugcu

SEQ ID NO: 2394495 - RNA, 15 nt, Human
cagcccguguggccc

SEQ ID NO: 2394496 - RNA, 19 nt, Human
cagcccggcugguuuugua

SEQ ID NO: 2394497 - RNA, 13 nt, Human
cagcccggcuggu

SEQ ID NO: 2394498 - RNA, 14 nt, Human
cagcccggcugguu

SEQ ID NO: 2394499 - RNA, 22 nt, Human
cagcccggcugguuuuguaaga

SEQ ID NO: 2394500 - RNA, 21 nt, Human
cagcccguguggccccuucac

SEQ ID NO: 2394501 - RNA, 20 nt, Human
cagcccguguggccccuuca

SEQ ID NO: 2394502 - RNA, 18 nt, Human
cagcccguguggccccuu

SEQ ID NO: 2394503 - RNA, 17 nt, Human
cagcccguguggccccu

SEQ ID NO: 2394504 - RNA, 17 nt, Human
cagcccuaaggaucucu

SEQ ID NO: 2394505 - RNA, 21 nt, Human
cagcccuaaaucuagacucaa

SEQ ID NO: 2394506 - RNA, 21 nt, Human
cagcccgggcucugccuccca

SEQ ID NO: 2394507 - RNA, 22 nt, Human
cagcccgggcucugccucccau

SEQ ID NO: 2394508 - RNA, 17 nt, Human
cagcccgggcucugccu

SEQ ID NO: 2394509 - RNA, 18 nt, Human
cagcccgggcucugccuc

SEQ ID NO: 2394510 - RNA, 19 nt, Human
cagcccgggcucugccucc

SEQ ID NO: 2394511 - RNA, 20 nt, Human
cagcccgggcucugccuccc

SEQ ID NO: 2394512 - RNA, 13 nt, Human
cagcccucccugc

SEQ ID NO: 2394513 - RNA, 15 nt, Human
cagcccucccugccc

SEQ ID NO: 2394514 - RNA, 23 nt, Human
cagcccuccaucuaaacugcccc

SEQ ID NO: 2394515 - RNA, 20 nt, Human
cagcccuccccauggagcca

SEQ ID NO: 2394516 - RNA, 17 nt, Human
cagcccucaucccgagc

SEQ ID NO: 2394517 - RNA, 14 nt, Human
cagcccucaucccg

SEQ ID NO: 2394518 - RNA, 13 nt, Human
cagcccucauccc

SEQ ID NO: 2394519 - RNA, 22 nt, Human
cagcccuccaucuaaacugccc

SEQ ID NO: 2394520 - RNA, 18 nt, Human
cagcccucauuggcucuu

SEQ ID NO: 2394521 - RNA, 13 nt, Human
cagcccucacccc

SEQ ID NO: 2394522 - RNA, 14 nt, Human
cagcccucaccccu

SEQ ID NO: 2394523 - RNA, 15 nt, Human
cagcccucaccccug

SEQ ID NO: 2394524 - RNA, 18 nt, Human
cagcccucaccccugguu

SEQ ID NO: 2394525 - RNA, 14 nt, Human
cagcccuauggaug

SEQ ID NO: 2394526 - RNA, 15 nt, Human
cagcccuauggaugu

SEQ ID NO: 2394527 - RNA, 20 nt, Human
cagcccuauggauguggggu

SEQ ID NO: 2394528 - RNA, 18 nt, Human
cagcccuaggguggagag

SEQ ID NO: 2394529 - RNA, 23 nt, Human
cagcccuagagccugccuggagc

SEQ ID NO: 2394530 - RNA, 18 nt, Human
cagcccuagagccugccu

SEQ ID NO: 2394531 - RNA, 20 nt, Human
cagcccuagagccugccugg

SEQ ID NO: 2394532 - RNA, 21 nt, Human
cagcccuagagccugccugga

SEQ ID NO: 2394533 - RNA, 22 nt, Human
cagcccuagagccugccuggag

SEQ ID NO: 2394534 - RNA, 18 nt, Human
cagcccuaaggaucucuc

SEQ ID NO: 2394535 - RNA, 19 nt, Human
cagcccuaaggaucucuca

SEQ ID NO: 2394536 - RNA, 20 nt, Human
cagcccuaaggaucucucag

SEQ ID NO: 2394537 - RNA, 21 nt, Human
cagcccuaaggaucucucagg

SEQ ID NO: 2394538 - RNA, 22 nt, Human
cagcccuaaggaucucucagga

SEQ ID NO: 2394539 - RNA, 12 nt, Human
cagcccuagagc

SEQ ID NO: 2394540 - RNA, 15 nt, Human
cagcccuagagccug

SEQ ID NO: 2394541 - RNA, 16 nt, Human
cagcccuagagccugc

SEQ ID NO: 2394542 - RNA, 13 nt, Human
cagccccagugcc

SEQ ID NO: 2394543 - RNA, 14 nt, Human
cagccccagugccc

SEQ ID NO: 2394544 - RNA, 15 nt, Human
cagccccagugccca

SEQ ID NO: 2394545 - RNA, 16 nt, Human
cagccccagugcccac

SEQ ID NO: 2394546 - RNA, 17 nt, Human
cagccccagugcccaca

SEQ ID NO: 2394547 - RNA, 18 nt, Human
cagccccagugcccacag

SEQ ID NO: 2394548 - RNA, 11 nt, Human
cagccccaucc

SEQ ID NO: 2394549 - RNA, 21 nt, Human
cagccccaucccaaacccuuc

SEQ ID NO: 2394550 - RNA, 22 nt, Human
cagccccacccaggagggaggg

SEQ ID NO: 2394551 - RNA, 21 nt, Human
cagccccacccaggagggagg

SEQ ID NO: 2394552 - RNA, 16 nt, Human
cagccccacccaggag

SEQ ID NO: 2394553 - RNA, 15 nt, Human
cagccccacccagga

SEQ ID NO: 2394554 - RNA, 20 nt, Human
cagccccacagcccacgucc

SEQ ID NO: 2394555 - RNA, 14 nt, Human
cagccccacccagg

SEQ ID NO: 2394556 - RNA, 13 nt, Human
cagccccacccag

SEQ ID NO: 2394557 - RNA, 12 nt, Human
cagccccaccca

SEQ ID NO: 2394558 - RNA, 11 nt, Human
cagccccaccc

SEQ ID NO: 2394559 - RNA, 12 nt, Human
cagccccacagc

SEQ ID NO: 2394560 - RNA, 13 nt, Human
cagccccacagcc

SEQ ID NO: 2394561 - RNA, 14 nt, Human
cagccccacagccc

SEQ ID NO: 2394562 - RNA, 15 nt, Human
cagccccacagccca

SEQ ID NO: 2394563 - RNA, 16 nt, Human
cagccccacagcccac

SEQ ID NO: 2394564 - RNA, 18 nt, Human
cagccccacagcccacgu

SEQ ID NO: 2394565 - RNA, 15 nt, Human
cagccccagagcagg

SEQ ID NO: 2394566 - RNA, 16 nt, Human
cagccccauucugccu

SEQ ID NO: 2394567 - RNA, 17 nt, Human
cagccccauucugccug

SEQ ID NO: 2394568 - RNA, 18 nt, Human
cagccccauucugccugc

SEQ ID NO: 2394569 - RNA, 23 nt, Human
cagccccuggaugcagccucaca

SEQ ID NO: 2394570 - RNA, 20 nt, Human
cagccccuguucuggcagag

SEQ ID NO: 2394571 - RNA, 21 nt, Human
cagccccuggccccaggaccu

SEQ ID NO: 2394572 - RNA, 13 nt, Human
cagccccuggccc

SEQ ID NO: 2394573 - RNA, 21 nt, Human
cagccccuguucuggcagagu

SEQ ID NO: 2394574 - RNA, 20 nt, Human
cagccccuguauggcacugg

SEQ ID NO: 2394575 - RNA, 15 nt, Human
cagccccuucucaga

SEQ ID NO: 2394576 - RNA, 16 nt, Human
cagccccuucucagaa

SEQ ID NO: 2394577 - RNA, 13 nt, Human
cagccccauucug

SEQ ID NO: 2394578 - RNA, 14 nt, Human
cagccccauucugc

SEQ ID NO: 2394579 - RNA, 16 nt, Human
cagccccauccucugu

SEQ ID NO: 2394580 - RNA, 22 nt, Human
cagccccauccucuguacagag

SEQ ID NO: 2394581 - RNA, 22 nt, Human
cagccccaucccaaacccuuca

SEQ ID NO: 2394582 - RNA, 12 nt, Human
cagccccauccu

SEQ ID NO: 2394583 - RNA, 13 nt, Human
cagccccauccuc

SEQ ID NO: 2394584 - RNA, 14 nt, Human
cagccccauccucu

SEQ ID NO: 2394585 - RNA, 21 nt, Human
cagcuaccucaaccaaugcca

SEQ ID NO: 2394586 - RNA, 17 nt, Human
cagcuacuaaugauguu

SEQ ID NO: 2394587 - RNA, 21 nt, Human
cagcuacccuuuuucuccagc

SEQ ID NO: 2394588 - RNA, 24 nt, Human
cagcuacccuuuuucuccagcugg

SEQ ID NO: 2394589 - RNA, 18 nt, Human
cagcuacaccuuucuccu

SEQ ID NO: 2394590 - RNA, 18 nt, Human
cagcuaccagguguucua

SEQ ID NO: 2394591 - RNA, 21 nt, Human
cagcuaaucuguagggcugga

SEQ ID NO: 2394592 - RNA, 21 nt, Human
cagcuacucagaagccugagg

SEQ ID NO: 2394593 - RNA, 20 nt, Human
cagcuacucagaagccugag

SEQ ID NO: 2394594 - RNA, 19 nt, Human
cagcuacucagaagccuga

SEQ ID NO: 2394595 - RNA, 16 nt, Human
cagcuacucagaagcc

SEQ ID NO: 2394596 - RNA, 15 nt, Human
cagcuacucagaagc

SEQ ID NO: 2394597 - RNA, 14 nt, Human
cagcuacucagaag

SEQ ID NO: 2394598 - RNA, 23 nt, Human
cagcuacucaagaggcugaggca

SEQ ID NO: 2394599 - RNA, 20 nt, Human
cagcuacucaagaggcugag

SEQ ID NO: 2394600 - RNA, 19 nt, Human
cagcuacucaagaggcuga

SEQ ID NO: 2394601 - RNA, 19 nt, Human
cagcuacuaaugauguuuu

SEQ ID NO: 2394602 - RNA, 18 nt, Human
cagcuacucaggaggcug

SEQ ID NO: 2394603 - RNA, 16 nt, Human
cagcuacucaggaggc

SEQ ID NO: 2394604 - RNA, 13 nt, Human
cagcuacucagga

SEQ ID NO: 2394605 - RNA, 12 nt, Human
cagcuacucagg

SEQ ID NO: 2394606 - RNA, 23 nt, Human
cagcuacucagaagccugaggcu

SEQ ID NO: 2394607 - RNA, 22 nt, Human
cagcuacucagaagccugaggc

SEQ ID NO: 2394608 - RNA, 16 nt, Human
cagcuacugauuuuug

SEQ ID NO: 2394609 - RNA, 19 nt, Human
cagcuacuugggaggcuga

SEQ ID NO: 2394610 - RNA, 15 nt, Human
cagcuacuuccuccu

SEQ ID NO: 2394611 - RNA, 19 nt, Human
cagcuacugauuuuuguga

SEQ ID NO: 2394612 - RNA, 17 nt, Human
cagcuacuuccuccucc

SEQ ID NO: 2394613 - RNA, 21 nt, Human
cagcuacuuccuccuccccac

SEQ ID NO: 2394614 - RNA, 15 nt, Human
cagcuaaugggacac

SEQ ID NO: 2394615 - RNA, 16 nt, Human
cagcuaaugggacacu

SEQ ID NO: 2394616 - RNA, 19 nt, Human
cagcuaaggacauuuccca

SEQ ID NO: 2394617 - RNA, 19 nt, Human
cagcuaaucagcauucuca

SEQ ID NO: 2394618 - RNA, 12 nt, Human
cagcuaaucugu

SEQ ID NO: 2394619 - RNA, 14 nt, Human
cagcuaaucuguag

SEQ ID NO: 2394620 - RNA, 16 nt, Human
cagcuaaucuguaggg

SEQ ID NO: 2394621 - RNA, 17 nt, Human
cagcuaaucuguagggc

SEQ ID NO: 2394622 - RNA, 19 nt, Human
cagcuaaucuguagggcug

SEQ ID NO: 2394623 - RNA, 20 nt, Human
cagcuaacauggaaguacua

SEQ ID NO: 2394624 - RNA, 23 nt, Human
cagcuaagaaaagauuuuaauca

SEQ ID NO: 2394625 - RNA, 12 nt, Human
cagcuaagaaaa

SEQ ID NO: 2394626 - RNA, 13 nt, Human
cagcuaagaaccu

SEQ ID NO: 2394627 - RNA, 14 nt, Human
cagcgccagccugu

SEQ ID NO: 2394628 - RNA, 22 nt, Human
cagcgccaagcaaccugggucc

SEQ ID NO: 2394629 - RNA, 19 nt, Human
cagcuaagaaccuggaacu

SEQ ID NO: 2394630 - RNA, 18 nt, Human
cagcuaagaaccuggaac

SEQ ID NO: 2394631 - RNA, 16 nt, Human
cagcuaagaaccugga

SEQ ID NO: 2394632 - RNA, 14 nt, Human
cagcuaagaaccug

SEQ ID NO: 2394633 - RNA, 23 nt, Human
cagcuaagaaccuggaacuuggg

SEQ ID NO: 2394634 - RNA, 15 nt, Human
cagcuaagcuaggaa

SEQ ID NO: 2394635 - RNA, 18 nt, Human
cagcuaagcuaggaauga

SEQ ID NO: 2394636 - RNA, 19 nt, Human
cagcgacauagcccauccc

SEQ ID NO: 2394637 - RNA, 14 nt, Human
cagcgaagggagug

SEQ ID NO: 2394638 - RNA, 20 nt, Human
cagcgacauagcccaucccu

SEQ ID NO: 2394639 - RNA, 14 nt, Human
cagcgaccaccccu

SEQ ID NO: 2394640 - RNA, 16 nt, Human
cagcgaccaccccugc

SEQ ID NO: 2394641 - RNA, 16 nt, Human
cagcgaccgcccccuc

SEQ ID NO: 2394642 - RNA, 20 nt, Human
cagcgaccaccccugccucc

SEQ ID NO: 2394643 - RNA, 21 nt, Human
cagcgaccaccccugccucca

SEQ ID NO: 2394644 - RNA, 17 nt, Human
cagcgaccgcccccucc

SEQ ID NO: 2394645 - RNA, 18 nt, Human
cagcgaccgcccccuccu

SEQ ID NO: 2394646 - RNA, 13 nt, Human
cagcgagcccugg

SEQ ID NO: 2394647 - RNA, 18 nt, Human
cagcgaccuuccucaucc

SEQ ID NO: 2394648 - RNA, 17 nt, Human
cagcgacuccguuggcc

SEQ ID NO: 2394649 - RNA, 21 nt, Human
cagcgacuccguuggccacuc

SEQ ID NO: 2394650 - RNA, 22 nt, Human
cagcgacuccguuggccacucc

SEQ ID NO: 2394651 - RNA, 16 nt, Human
cagcgagcccuggugg

SEQ ID NO: 2394652 - RNA, 17 nt, Human
cagcgagcccugguggc

SEQ ID NO: 2394653 - RNA, 19 nt, Human
cagcgagcccugguggcag

SEQ ID NO: 2394654 - RNA, 20 nt, Human
cagcgagcccugguggcagu

SEQ ID NO: 2394655 - RNA, 21 nt, Human
cagcgagcccugguggcagug

SEQ ID NO: 2394656 - RNA, 13 nt, Human
cagcgagaggcag

SEQ ID NO: 2394657 - RNA, 18 nt, Human
cagcgagaggcagagaaa

SEQ ID NO: 2394658 - RNA, 20 nt, Human
cagcgagaggcagagaaaga

SEQ ID NO: 2394659 - RNA, 22 nt, Human
cagcgaguuguggaaagccucu

SEQ ID NO: 2394660 - RNA, 18 nt, Human
cagcgaggaggcuccaga

SEQ ID NO: 2394661 - RNA, 17 nt, Human
cagcgaggaggcuccag

SEQ ID NO: 2394662 - RNA, 16 nt, Human
cagcgaggaggcucca

SEQ ID NO: 2394663 - RNA, 14 nt, Human
cagcgccaagcaac

SEQ ID NO: 2394664 - RNA, 16 nt, Human
cagcgccaagcaaccu

SEQ ID NO: 2394665 - RNA, 17 nt, Human
cagcgccaagcaaccug

SEQ ID NO: 2394666 - RNA, 19 nt, Human
cagcgccaagcaaccuggg

SEQ ID NO: 2394667 - RNA, 23 nt, Human
cagcgccaagcaaccugggucca

SEQ ID NO: 2394668 - RNA, 23 nt, Human
cagcgauguaugcagcuaucugg

SEQ ID NO: 2394669 - RNA, 18 nt, Human
cagcgauguaugcagcua

SEQ ID NO: 2394670 - RNA, 22 nt, Human
cagcgauguaugcagcuaucug

SEQ ID NO: 2394671 - RNA, 19 nt, Human
cagcuaacauggaaguacu

SEQ ID NO: 2394672 - RNA, 18 nt, Human
cagcuaacauggaaguac

SEQ ID NO: 2394673 - RNA, 13 nt, Human
cagcuauuuuuau

SEQ ID NO: 2394674 - RNA, 16 nt, Human
cagcuauuuuuacuag

SEQ ID NO: 2394675 - RNA, 15 nt, Human
cagcucaaaggcaca

SEQ ID NO: 2394676 - RNA, 18 nt, Human
cagcuauuuuuacuagaa

SEQ ID NO: 2394677 - RNA, 19 nt, Human
cagcucaaaggcacaguga

SEQ ID NO: 2394678 - RNA, 18 nt, Human
cagcuauugauauaaaua

SEQ ID NO: 2394679 - RNA, 13 nt, Human
cagcuaugcuggu

SEQ ID NO: 2394680 - RNA, 21 nt, Human
cagcuauguuauauugaaaaa

SEQ ID NO: 2394681 - RNA, 20 nt, Human
cagcuauguuauauugaaaa

SEQ ID NO: 2394682 - RNA, 19 nt, Human
cagcucaagucuucccuga

SEQ ID NO: 2394683 - RNA, 13 nt, Human
cagcucaagucuu

SEQ ID NO: 2394684 - RNA, 16 nt, Human
cagcucaauggacugg

SEQ ID NO: 2394685 - RNA, 20 nt, Human
cagcucaaggaaaggccuga

SEQ ID NO: 2394686 - RNA, 19 nt, Human
cagcucaaggaaaggccug

SEQ ID NO: 2394687 - RNA, 13 nt, Human
cagcucaccagcc

SEQ ID NO: 2394688 - RNA, 15 nt, Human
cagcucaccagcccc

SEQ ID NO: 2394689 - RNA, 16 nt, Human
cagcucaccagcccca

SEQ ID NO: 2394690 - RNA, 17 nt, Human
cagcucaccagccccag

SEQ ID NO: 2394691 - RNA, 19 nt, Human
cagcucaccagccccagug

SEQ ID NO: 2394692 - RNA, 19 nt, Human
cagcuagguggggccuaga

SEQ ID NO: 2394693 - RNA, 16 nt, Human
cagcuauaccugugcc

SEQ ID NO: 2394694 - RNA, 15 nt, Human
cagcuauaccugugc

SEQ ID NO: 2394695 - RNA, 18 nt, Human
cagcuauaacaguaggga

SEQ ID NO: 2394696 - RNA, 15 nt, Human
cagcuacuugggagg

SEQ ID NO: 2394697 - RNA, 15 nt, Human
cagcuacuugggaag

SEQ ID NO: 2394698 - RNA, 16 nt, Human
cagcuacuugggaagc

SEQ ID NO: 2394699 - RNA, 16 nt, Human
cagcuacuugggaggc

SEQ ID NO: 2394700 - RNA, 17 nt, Human
cagcuacuuuaacacca

SEQ ID NO: 2394701 - RNA, 23 nt, Human
cagcuagaaauaagcccaacaga

SEQ ID NO: 2394702 - RNA, 23 nt, Human
cagcuaugggagccccagggucu

SEQ ID NO: 2394703 - RNA, 22 nt, Human
cagcuaugggagccccaggguc

SEQ ID NO: 2394704 - RNA, 21 nt, Human
cagcuaugggagccccagggu

SEQ ID NO: 2394705 - RNA, 20 nt, Human
cagcuaugggagccccaggg

SEQ ID NO: 2394706 - RNA, 18 nt, Human
cagcuaugggagccccag

SEQ ID NO: 2394707 - RNA, 17 nt, Human
cagcuaugggagcccca

SEQ ID NO: 2394708 - RNA, 15 nt, Human
cagcuaugggagccc

SEQ ID NO: 2394709 - RNA, 13 nt, Human
cagcuaugggagc

SEQ ID NO: 2394710 - RNA, 17 nt, Human
cagcuaucucucaguga

SEQ ID NO: 2394711 - RNA, 20 nt, Human
cagcuauaacaguagggaug

SEQ ID NO: 2394712 - RNA, 23 nt, Human
cagcuauaccugugccucggcuu

SEQ ID NO: 2394713 - RNA, 18 nt, Human
cagcuaucucucagugaa

SEQ ID NO: 2394714 - RNA, 23 nt, Human
cagcuaucuggucaaccuccugg

SEQ ID NO: 2394715 - RNA, 22 nt, Human
cagcuauaccugugccucggcu

SEQ ID NO: 2394716 - RNA, 21 nt, Human
cagcuauaccugugccucggc

SEQ ID NO: 2394717 - RNA, 19 nt, Human
cagcuauaccugugccucg

SEQ ID NO: 2394718 - RNA, 17 nt, Human
cagcuauaccugugccu

SEQ ID NO: 2394719 - RNA, 17 nt, Human
cagcucacgucacacuu

SEQ ID NO: 2394720 - RNA, 14 nt, Human
cagcucacugcaac

SEQ ID NO: 2394721 - RNA, 12 nt, Human
cagcucacugca

SEQ ID NO: 2394722 - RNA, 19 nt, Human
cagcucaccccccacacuc

SEQ ID NO: 2394723 - RNA, 20 nt, Human
cagcucaccccccacacuca

SEQ ID NO: 2394724 - RNA, 22 nt, Human
cagcucaccccccacacucacu

SEQ ID NO: 2394725 - RNA, 14 nt, Human
cagcucaccccugg

SEQ ID NO: 2394726 - RNA, 19 nt, Human
cagcucaccucucccuugg

SEQ ID NO: 2394727 - RNA, 20 nt, Human
cagcucaccucucccuugga

SEQ ID NO: 2394728 - RNA, 15 nt, Human
cagcucacugcaacc

SEQ ID NO: 2394729 - RNA, 21 nt, Human
cagcucacugcaaccuucgcc

SEQ ID NO: 2394730 - RNA, 12 nt, Human
cagcucagagag

SEQ ID NO: 2394731 - RNA, 22 nt, Human
cagcucagaaguuucuucuuua

SEQ ID NO: 2394732 - RNA, 21 nt, Human
cagcucagaaguuucuucuuu

SEQ ID NO: 2394733 - RNA, 22 nt, Human
cagcucaagucuucccugauca

SEQ ID NO: 2394734 - RNA, 20 nt, Human
cagcucacccagccccaggg

SEQ ID NO: 2394735 - RNA, 12 nt, Human
cagcucaccccc

SEQ ID NO: 2394736 - RNA, 18 nt, Human
cagcucaccccccacacu

SEQ ID NO: 2394737 - RNA, 20 nt, Human
cagcucaauggacuggaagg

SEQ ID NO: 2394738 - RNA, 22 nt, Human
cagcucaccagccccagugccc

SEQ ID NO: 2394739 - RNA, 20 nt, Human
cagcucaccagccccagugc

SEQ ID NO: 2394740 - RNA, 21 nt, Human
cagcucaccagccccagugcc

SEQ ID NO: 2394741 - RNA, 13 nt, Human
cagcucaccucuc

SEQ ID NO: 2394742 - RNA, 15 nt, Human
cagcucaccucuccc

SEQ ID NO: 2394743 - RNA, 16 nt, Human
cagcucaccucucccu

SEQ ID NO: 2394744 - RNA, 17 nt, Human
cagcucaccucucccuu

SEQ ID NO: 2394745 - RNA, 17 nt, Human
cagccuguaucuugggg

SEQ ID NO: 2394746 - RNA, 23 nt, Human
cagccuggugggccuccucuguc

SEQ ID NO: 2394747 - RNA, 19 nt, Human
cagccugucccauggacac

SEQ ID NO: 2394748 - RNA, 21 nt, Human
cagccugucccauggacacuc

SEQ ID NO: 2394749 - RNA, 22 nt, Human
cagccugucccauggacacucc

SEQ ID NO: 2394750 - RNA, 12 nt, Human
cagccuguccug

SEQ ID NO: 2394751 - RNA, 15 nt, Human
cagccuguccugggc

SEQ ID NO: 2394752 - RNA, 19 nt, Human
cagccuguccugggcuggu

SEQ ID NO: 2394753 - RNA, 15 nt, Human
cagccugucucuucc

SEQ ID NO: 2394754 - RNA, 12 nt, Human
cagccuguggcg

SEQ ID NO: 2394755 - RNA, 19 nt, Human
cagccugucucuuccauau

SEQ ID NO: 2394756 - RNA, 21 nt, Human
cagccuguggcaucuuugccu

SEQ ID NO: 2394757 - RNA, 19 nt, Human
cagccuguggcaucuuugc

SEQ ID NO: 2394758 - RNA, 15 nt, Human
cagccuguggcaucu

SEQ ID NO: 2394759 - RNA, 12 nt, Human
cagccuguggca

SEQ ID NO: 2394760 - RNA, 16 nt, Human
cagccugugcugcccg

SEQ ID NO: 2394761 - RNA, 14 nt, Human
cagccugugcugcc

SEQ ID NO: 2394762 - RNA, 16 nt, Human
cagccugucucuucca

SEQ ID NO: 2394763 - RNA, 17 nt, Human
cagccugucucuuccau

SEQ ID NO: 2394764 - RNA, 18 nt, Human
cagccuggugggccuccu

SEQ ID NO: 2394765 - RNA, 17 nt, Human
cagccuggugggccucc

SEQ ID NO: 2394766 - RNA, 16 nt, Human
cagccuggugggccuc

SEQ ID NO: 2394767 - RNA, 15 nt, Human
cagccuggugggccu

SEQ ID NO: 2394768 - RNA, 20 nt, Human
cagccuggucaacaugguga

SEQ ID NO: 2394769 - RNA, 19 nt, Human
cagccuggggucuggaguu

SEQ ID NO: 2394770 - RNA, 20 nt, Human
cagccugggugacagaguga

SEQ ID NO: 2394771 - RNA, 15 nt, Human
cagccuggggucugg

SEQ ID NO: 2394772 - RNA, 21 nt, Human
cagccuggggcuggccuccca

SEQ ID NO: 2394773 - RNA, 18 nt, Human
cagccuggggcuggccuc

SEQ ID NO: 2394774 - RNA, 17 nt, Human
cagccuggggcuggccu

SEQ ID NO: 2394775 - RNA, 21 nt, Human
cagccugggcagccaggcugc

SEQ ID NO: 2394776 - RNA, 20 nt, Human
cagccugggcagccaggcug

SEQ ID NO: 2394777 - RNA, 19 nt, Human
cagccugggcagccaggcu

SEQ ID NO: 2394778 - RNA, 18 nt, Human
cagccugggcagccaggc

SEQ ID NO: 2394779 - RNA, 17 nt, Human
cagccugggcagccagg

SEQ ID NO: 2394780 - RNA, 20 nt, Human
cagccugggcagcauagcaa

SEQ ID NO: 2394781 - RNA, 15 nt, Human
cagccugggcgacag

SEQ ID NO: 2394782 - RNA, 11 nt, Human
cagccugggcg

SEQ ID NO: 2394783 - RNA, 19 nt, Human
cagccugggcaaugugaua

SEQ ID NO: 2394784 - RNA, 16 nt, Human
cagccugggcaaugug

SEQ ID NO: 2394785 - RNA, 21 nt, Human
cagccuggcuucuggagcccu

SEQ ID NO: 2394786 - RNA, 20 nt, Human
cagccuggcuucuggagccc

SEQ ID NO: 2394787 - RNA, 20 nt, Human
cagccugggcaacagagcaa

SEQ ID NO: 2394788 - RNA, 19 nt, Human
cagccugggcaacagagca

SEQ ID NO: 2394789 - RNA, 20 nt, Human
cagccugggcaacacagcga

SEQ ID NO: 2394790 - RNA, 21 nt, Human
cagccuuccccuugcccaggg

SEQ ID NO: 2394791 - RNA, 16 nt, Human
cagccuuccccuugcc

SEQ ID NO: 2394792 - RNA, 21 nt, Human
cagccuucccccucccagggc

SEQ ID NO: 2394793 - RNA, 20 nt, Human
cagccuucccccucccaggg

SEQ ID NO: 2394794 - RNA, 23 nt, Human
cagccuuccccuugcccagggcu

SEQ ID NO: 2394795 - RNA, 14 nt, Human
cagccuuccucugc

SEQ ID NO: 2394796 - RNA, 15 nt, Human
cagccuuccucugca

SEQ ID NO: 2394797 - RNA, 18 nt, Human
cagccuuccucugcagcu

SEQ ID NO: 2394798 - RNA, 19 nt, Human
cagccuuccucugcagcug

SEQ ID NO: 2394799 - RNA, 20 nt, Human
cagccuuccucugcagcuga

SEQ ID NO: 2394800 - RNA, 21 nt, Human
cagccuguggcggugccuggg

SEQ ID NO: 2394801 - RNA, 20 nt, Human
cagccuguggcggugccugg

SEQ ID NO: 2394802 - RNA, 19 nt, Human
cagccuguggcggugccug

SEQ ID NO: 2394803 - RNA, 18 nt, Human
cagccuguggcggugccu

SEQ ID NO: 2394804 - RNA, 16 nt, Human
cagccuguuggacccg

SEQ ID NO: 2394805 - RNA, 14 nt, Human
cagccuucccccuc

SEQ ID NO: 2394806 - RNA, 23 nt, Human
cagccuucagacagagaggacug

SEQ ID NO: 2394807 - RNA, 22 nt, Human
cagccuguggcggugccugggu

SEQ ID NO: 2394808 - RNA, 17 nt, Human
cagccuugaccauucuc

SEQ ID NO: 2394809 - RNA, 16 nt, Human
cagccuucuuccaucc

SEQ ID NO: 2394810 - RNA, 21 nt, Human
cagccuuccucugcagcugac

SEQ ID NO: 2394811 - RNA, 22 nt, Human
cagccuuccucugcagcugacc

SEQ ID NO: 2394812 - RNA, 23 nt, Human
cagccuuccucugcagcugaccu

SEQ ID NO: 2394813 - RNA, 18 nt, Human
cagccuucuuccauccca

SEQ ID NO: 2394814 - RNA, 20 nt, Human
cagccuugaccauucuccac

SEQ ID NO: 2394815 - RNA, 21 nt, Human
cagccuugaccauucuccacc

SEQ ID NO: 2394816 - RNA, 21 nt, Human
cagcgaaaggauguaaacagu

SEQ ID NO: 2394817 - RNA, 17 nt, Human
cagccuuugccuccccg

SEQ ID NO: 2394818 - RNA, 23 nt, Human
cagccuuugaucagguggggagu

SEQ ID NO: 2394819 - RNA, 22 nt, Human
cagccuuugaucagguggggag

SEQ ID NO: 2394820 - RNA, 19 nt, Human
cagccuuugaucagguggg

SEQ ID NO: 2394821 - RNA, 23 nt, Human
cagccuuucucccaggccaggcu

SEQ ID NO: 2394822 - RNA, 20 nt, Human
cagccuuucucccaggccag

SEQ ID NO: 2394823 - RNA, 19 nt, Human
cagccuuucucccaggcca

SEQ ID NO: 2394824 - RNA, 18 nt, Human
cagccuuucucccaggcc

SEQ ID NO: 2394825 - RNA, 17 nt, Human
cagccuuucucccaggc

SEQ ID NO: 2394826 - RNA, 17 nt, Human
cagccuuggcaucuaga

SEQ ID NO: 2394827 - RNA, 21 nt, Human
cagccuuggauaaugcuguug

SEQ ID NO: 2394828 - RNA, 21 nt, Human
cagccuucuuugcuugccucu

SEQ ID NO: 2394829 - RNA, 16 nt, Human
cagccuugccagagau

SEQ ID NO: 2394830 - RNA, 15 nt, Human
cagccuugccagaga

SEQ ID NO: 2394831 - RNA, 14 nt, Human
cagccuugccagag

SEQ ID NO: 2394832 - RNA, 13 nt, Human
cagccuugccaga

SEQ ID NO: 2394833 - RNA, 22 nt, Human
cagccuugaccauucuccaccu

SEQ ID NO: 2394834 - RNA, 23 nt, Human
cagccuugaccauucuccaccug

SEQ ID NO: 2394835 - RNA, 21 nt, Human
cagccuucuuccaucccagga

SEQ ID NO: 2394836 - RNA, 23 nt, Human
cagccuucuuccaucccaggaca

SEQ ID NO: 2394837 - RNA, 14 nt, Human
cagccuucuuugcu

SEQ ID NO: 2394838 - RNA, 17 nt, Human
cagccuucuuugcuugc

SEQ ID NO: 2394839 - RNA, 24 nt, Human
cagccuugaccauucuccaccugc

SEQ ID NO: 2394840 - RNA, 20 nt, Human
cagccuccugaguagcugga

SEQ ID NO: 2394841 - RNA, 15 nt, Human
cagccuccugaguag

SEQ ID NO: 2394842 - RNA, 23 nt, Human
cagccuccucugucugcccuuca

SEQ ID NO: 2394843 - RNA, 20 nt, Human
cagccugcuccagcuguuca

SEQ ID NO: 2394844 - RNA, 14 nt, Human
cagccucuagggac

SEQ ID NO: 2394845 - RNA, 15 nt, Human
cagccucuagggacc

SEQ ID NO: 2394846 - RNA, 19 nt, Human
cagccucuagggaccccuc

SEQ ID NO: 2394847 - RNA, 20 nt, Human
cagccucuagggaccccucc

SEQ ID NO: 2394848 - RNA, 19 nt, Human
cagccuccguauuucagac

SEQ ID NO: 2394849 - RNA, 18 nt, Human
cagccuccguauuucaga

SEQ ID NO: 2394850 - RNA, 16 nt, Human
cagccuccucaucugg

SEQ ID NO: 2394851 - RNA, 17 nt, Human
cagccuccucaucuggg

SEQ ID NO: 2394852 - RNA, 23 nt, Human
cagccuccucaucugggggagug

SEQ ID NO: 2394853 - RNA, 13 nt, Human
cagccuccuccug

SEQ ID NO: 2394854 - RNA, 15 nt, Human
cagccuccuccugac

SEQ ID NO: 2394855 - RNA, 12 nt, Human
cagccuccucug

SEQ ID NO: 2394856 - RNA, 14 nt, Human
cagccuccucugga

SEQ ID NO: 2394857 - RNA, 17 nt, Human
cagccuccucuggacgg

SEQ ID NO: 2394858 - RNA, 21 nt, Human
cagccuccucuggacggcagg

SEQ ID NO: 2394859 - RNA, 22 nt, Human
cagccuccucuggacggcaggc

SEQ ID NO: 2394860 - RNA, 23 nt, Human
cagccuccucuggacggcaggcu

SEQ ID NO: 2394861 - RNA, 17 nt, Human
cagccuccucugucugc

SEQ ID NO: 2394862 - RNA, 19 nt, Human
cagccuccgagagggagag

SEQ ID NO: 2394863 - RNA, 20 nt, Human
cagccuccgagagggagaga

SEQ ID NO: 2394864 - RNA, 18 nt, Human
cagccucccugaagccuu

SEQ ID NO: 2394865 - RNA, 21 nt, Human
cagccucccugucggccuggu

SEQ ID NO: 2394866 - RNA, 17 nt, Human
cagccuccgagagggag

SEQ ID NO: 2394867 - RNA, 17 nt, Human
cagccucccugaagccu

SEQ ID NO: 2394868 - RNA, 16 nt, Human
cagccucccugaagcc

SEQ ID NO: 2394869 - RNA, 14 nt, Human
cagccucccugaag

SEQ ID NO: 2394870 - RNA, 12 nt, Human
cagccucccuga

SEQ ID NO: 2394871 - RNA, 23 nt, Human
cagccucccgaauagcugggacu

SEQ ID NO: 2394872 - RNA, 19 nt, Human
cagccucccgaguagcugg

SEQ ID NO: 2394873 - RNA, 20 nt, Human
cagccucccgaguagcuggg

SEQ ID NO: 2394874 - RNA, 21 nt, Human
cagccucccgaguagcuggga

SEQ ID NO: 2394875 - RNA, 22 nt, Human
cagccucccgaguagcugggac

SEQ ID NO: 2394876 - RNA, 23 nt, Human
cagccucccgaguagcugggacu

SEQ ID NO: 2394877 - RNA, 23 nt, Human
cagccucccucugaccugcaggc

SEQ ID NO: 2394878 - RNA, 22 nt, Human
cagccucccucugaccugcagg

SEQ ID NO: 2394879 - RNA, 21 nt, Human
cagccucccucugaccugcag

SEQ ID NO: 2394880 - RNA, 15 nt, Human
cagccucccucugac

SEQ ID NO: 2394881 - RNA, 14 nt, Human
cagccucccucuga

SEQ ID NO: 2394882 - RNA, 13 nt, Human
cagccucccucug

SEQ ID NO: 2394883 - RNA, 21 nt, Human
cagccucccuauuuuuuuucu

SEQ ID NO: 2394884 - RNA, 19 nt, Human
cagccuggacccuguggau

SEQ ID NO: 2394885 - RNA, 15 nt, Human
cagccuggacccugu

SEQ ID NO: 2394886 - RNA, 22 nt, Human
cagccugcuccuucccaggagu

SEQ ID NO: 2394887 - RNA, 16 nt, Human
cagccuggacauagag

SEQ ID NO: 2394888 - RNA, 13 nt, Human
cagccuggacccc

SEQ ID NO: 2394889 - RNA, 15 nt, Human
cagccuggaccccca

SEQ ID NO: 2394890 - RNA, 16 nt, Human
cagccuggacccccag

SEQ ID NO: 2394891 - RNA, 21 nt, Human
cagccucuagggaccccuccu

SEQ ID NO: 2394892 - RNA, 20 nt, Human
cagccugcuccuucccagga

SEQ ID NO: 2394893 - RNA, 21 nt, Human
cagccugcuccuucccaggag

SEQ ID NO: 2394894 - RNA, 21 nt, Human
cagccuggcacagggcagugg

SEQ ID NO: 2394895 - RNA, 13 nt, Human
cagccuggcacag

SEQ ID NO: 2394896 - RNA, 20 nt, Human
cagccuggcacagggcagug

SEQ ID NO: 2394897 - RNA, 12 nt, Human
cagccuggaggc

SEQ ID NO: 2394898 - RNA, 17 nt, Human
cagccuggaucuccuca

SEQ ID NO: 2394899 - RNA, 17 nt, Human
cagccuggacccccagc

SEQ ID NO: 2394900 - RNA, 18 nt, Human
cagccuggacccccagcu

SEQ ID NO: 2394901 - RNA, 16 nt, Human
cagccuggagaugaaa

SEQ ID NO: 2394902 - RNA, 13 nt, Human
cagccuggaggcc

SEQ ID NO: 2394903 - RNA, 10 nt, Human
cagccuggca

SEQ ID NO: 2394904 - RNA, 23 nt, Human
cagccuggcgaaaccccaucucu

SEQ ID NO: 2394905 - RNA, 12 nt, Human
cagccuggcucc

SEQ ID NO: 2394906 - RNA, 21 nt, Human
cagccuggcucccacaggcag

SEQ ID NO: 2394907 - RNA, 22 nt, Human
cagccuggcucccacaggcagc

SEQ ID NO: 2394908 - RNA, 23 nt, Human
cagccuggcucccacaggcagcu

SEQ ID NO: 2394909 - RNA, 19 nt, Human
cagccuggcuucuggagcc

SEQ ID NO: 2394910 - RNA, 17 nt, Human
cagccuggcuucuggag

SEQ ID NO: 2394911 - RNA, 16 nt, Human
cagccuggcuucugga

SEQ ID NO: 2394912 - RNA, 15 nt, Human
cagccuggcuucugg

SEQ ID NO: 2394913 - RNA, 14 nt, Human
cagccuggcuucug

SEQ ID NO: 2394914 - RNA, 20 nt, Human
cagccuggccagacacaggc

SEQ ID NO: 2394915 - RNA, 18 nt, Human
cagccuggccagacacag

SEQ ID NO: 2394916 - RNA, 17 nt, Human
cagccuggccagacaca

SEQ ID NO: 2394917 - RNA, 15 nt, Human
cagccuggccagaca

SEQ ID NO: 2394918 - RNA, 14 nt, Human
cagccuggccagac

SEQ ID NO: 2394919 - RNA, 13 nt, Human
cagccuggccaga

SEQ ID NO: 2394920 - RNA, 12 nt, Human
cagccuggccca

SEQ ID NO: 2394921 - RNA, 13 nt, Human
cagccuggcccag

SEQ ID NO: 2394922 - RNA, 11 nt, Human
cagccuggccc

SEQ ID NO: 2394923 - RNA, 14 nt, Human
cagccuggcccagc

SEQ ID NO: 2394924 - RNA, 15 nt, Human
cagccuggcccagcu

SEQ ID NO: 2394925 - RNA, 16 nt, Human
cagccuggcccagcuc

SEQ ID NO: 2394926 - RNA, 17 nt, Human
cagccuggcccagcucc

SEQ ID NO: 2394927 - RNA, 18 nt, Human
cagccuggcccagcuccc

SEQ ID NO: 2394928 - RNA, 19 nt, Human
cagccuggcccagcucccc

SEQ ID NO: 2394929 - RNA, 20 nt, Human
cagccuggcccagcuccccc

SEQ ID NO: 2394930 - RNA, 18 nt, Human
cagaauggggugcaugaa

SEQ ID NO: 2394931 - RNA, 21 nt, Human
cagaaugcuguacaucuauuu

SEQ ID NO: 2394932 - RNA, 18 nt, Human
cagaaugcuguacaucua

SEQ ID NO: 2394933 - RNA, 17 nt, Human
cagaaugcuguacaucu

SEQ ID NO: 2394934 - RNA, 16 nt, Human
cagaaugcuguacauc

SEQ ID NO: 2394935 - RNA, 11 nt, Human
cagaaugcugu

SEQ ID NO: 2394936 - RNA, 14 nt, Human
cagaaugugauuuc

SEQ ID NO: 2394937 - RNA, 16 nt, Human
cagaauguuuuacugu

SEQ ID NO: 2394938 - RNA, 20 nt, Human
cagaauguuuuacugugaaa

SEQ ID NO: 2394939 - RNA, 17 nt, Human
cagaauguuuuuaaaau

SEQ ID NO: 2394940 - RNA, 18 nt, Human
cagaaucuacccaaagga

SEQ ID NO: 2394941 - RNA, 15 nt, Human
cagaaucucgcucug

SEQ ID NO: 2394942 - RNA, 15 nt, Human
cagaaugaggcugcu

SEQ ID NO: 2394943 - RNA, 14 nt, Human
cagaaugaggcugc

SEQ ID NO: 2394944 - RNA, 18 nt, Human
cagaaugcugcaggacuu

SEQ ID NO: 2394945 - RNA, 17 nt, Human
cagaaugcuagcucuga

SEQ ID NO: 2394946 - RNA, 21 nt, Human
cagaaugcuagcucugagcca

SEQ ID NO: 2394947 - RNA, 18 nt, Human
cagaaugaggaauaauaa

SEQ ID NO: 2394948 - RNA, 16 nt, Human
cagaaugagugcuuca

SEQ ID NO: 2394949 - RNA, 11 nt, Human
cagaauucuca

SEQ ID NO: 2394950 - RNA, 15 nt, Human
cagaauuaacuccau

SEQ ID NO: 2394951 - RNA, 18 nt, Human
cagaauucucuaguuuga

SEQ ID NO: 2394952 - RNA, 15 nt, Human
cagaauucucuaguu

SEQ ID NO: 2394953 - RNA, 14 nt, Human
cagaauucugcuac

SEQ ID NO: 2394954 - RNA, 13 nt, Human
cagaauucugcua

SEQ ID NO: 2394955 - RNA, 15 nt, Human
cagaauuccuuuucu

SEQ ID NO: 2394956 - RNA, 23 nt, Human
cagaauucugcuaccucacuggg

SEQ ID NO: 2394957 - RNA, 21 nt, Human
cagaauucugcuaccucacug

SEQ ID NO: 2394958 - RNA, 13 nt, Human
cagaauugaucau

SEQ ID NO: 2394959 - RNA, 14 nt, Human
cagaauuucccaaa

SEQ ID NO: 2394960 - RNA, 16 nt, Human
cagaauugugucugca

SEQ ID NO: 2394961 - RNA, 17 nt, Human
cagaauugugucugcag

SEQ ID NO: 2394962 - RNA, 18 nt, Human
cagaauugugucugcagg

SEQ ID NO: 2394963 - RNA, 23 nt, Human
cagaauuggauacauacaccagc

SEQ ID NO: 2394964 - RNA, 21 nt, Human
cagacaaaaacagccucacag

SEQ ID NO: 2394965 - RNA, 20 nt, Human
cagacaaaaacagccucaca

SEQ ID NO: 2394966 - RNA, 19 nt, Human
cagacaaaaacagccucac

SEQ ID NO: 2394967 - RNA, 18 nt, Human
cagacaaaaacagccuca

SEQ ID NO: 2394968 - RNA, 12 nt, Human
cagacaaagcgu

SEQ ID NO: 2394969 - RNA, 24 nt, Human
cagaauuucccaaagcagugcaug

SEQ ID NO: 2394970 - RNA, 19 nt, Human
cagaauuuggguucugccu

SEQ ID NO: 2394971 - RNA, 17 nt, Human
cagaauuucccaaagca

SEQ ID NO: 2394972 - RNA, 18 nt, Human
cagaauuucccaaagcag

SEQ ID NO: 2394973 - RNA, 19 nt, Human
cagaauuucccaaagcagu

SEQ ID NO: 2394974 - RNA, 20 nt, Human
cagaauuucccaaagcagug

SEQ ID NO: 2394975 - RNA, 16 nt, Human
cagacaacagaaguca

SEQ ID NO: 2394976 - RNA, 15 nt, Human
cagacaacagaaguc

SEQ ID NO: 2394977 - RNA, 14 nt, Human
cagacaacagaagu

SEQ ID NO: 2394978 - RNA, 13 nt, Human
cagacaacagaag

SEQ ID NO: 2394979 - RNA, 20 nt, Human
cagacaacaaaccuguuucu

SEQ ID NO: 2394980 - RNA, 22 nt, Human
cagacaaaaacagccucacaga

SEQ ID NO: 2394981 - RNA, 17 nt, Human
cagacaaaccagaagca

SEQ ID NO: 2394982 - RNA, 22 nt, Human
cagacaaaugugguuacacacu

SEQ ID NO: 2394983 - RNA, 22 nt, Human
cagacaaagcgugguggacaug

SEQ ID NO: 2394984 - RNA, 22 nt, Human
cagacaacagaagucaugaagc

SEQ ID NO: 2394985 - RNA, 17 nt, Human
cagacaacagaagucau

SEQ ID NO: 2394986 - RNA, 21 nt, Human
cagacaaaguaauuccucuca

SEQ ID NO: 2394987 - RNA, 19 nt, Human
cagacaagcaacagguuuu

SEQ ID NO: 2394988 - RNA, 23 nt, Human
cagacaagcaacagguuuuauaa

SEQ ID NO: 2394989 - RNA, 23 nt, Human
cagacaagguagcccuggccaga

SEQ ID NO: 2394990 - RNA, 16 nt, Human
cagacaagguagcccu

SEQ ID NO: 2394991 - RNA, 12 nt, Human
cagacacacaca

SEQ ID NO: 2394992 - RNA, 14 nt, Human
cagacacacacaca

SEQ ID NO: 2394993 - RNA, 11 nt, Human
cagacacacac

SEQ ID NO: 2394994 - RNA, 13 nt, Human
cagacacacacac

SEQ ID NO: 2394995 - RNA, 14 nt, Human
cagacacacacacg

SEQ ID NO: 2394996 - RNA, 15 nt, Human
cagacacacacacgc

SEQ ID NO: 2394997 - RNA, 16 nt, Human
cagacacacacacgca

SEQ ID NO: 2394998 - RNA, 17 nt, Human
cagacacacacacgcac

SEQ ID NO: 2394999 - RNA, 18 nt, Human
cagacacacacacgcacg

SEQ ID NO: 2395000 - RNA, 21 nt, Human
cagacacacacacgcacgcac

SEQ ID NO: 2395001 - RNA, 22 nt, Human
cagacacacacacgcacgcaca

SEQ ID NO: 2395002 - RNA, 18 nt, Human
cagacacacgcacacaca

SEQ ID NO: 2395003 - RNA, 14 nt, Human
cagacacagaagag

SEQ ID NO: 2395004 - RNA, 14 nt, Human
cagacacaggcccu

SEQ ID NO: 2395005 - RNA, 18 nt, Human
cagacacaggcccucccu

SEQ ID NO: 2395006 - RNA, 15 nt, Human
cagacacaggcccuc

SEQ ID NO: 2395007 - RNA, 14 nt, Human
cagacacaugucca

SEQ ID NO: 2395008 - RNA, 17 nt, Human
cagacacauguccaaga

SEQ ID NO: 2395009 - RNA, 21 nt, Human
cagacacauguccaagaagcc

SEQ ID NO: 2395010 - RNA, 22 nt, Human
cagacacauguccaagaagccc

SEQ ID NO: 2395011 - RNA, 23 nt, Human
cagacacauguccaagaagccca

SEQ ID NO: 2395012 - RNA, 17 nt, Human
cagacacccaggacuua

SEQ ID NO: 2395013 - RNA, 15 nt, Human
cagacacccaggacu

SEQ ID NO: 2395014 - RNA, 14 nt, Human
cagacacccaggac

SEQ ID NO: 2395015 - RNA, 13 nt, Human
cagacacccagga

SEQ ID NO: 2395016 - RNA, 12 nt, Human
cagacacccagg

SEQ ID NO: 2395017 - RNA, 22 nt, Human
cagacacagggacuugaaguug

SEQ ID NO: 2395018 - RNA, 13 nt, Human
cagacacccaccc

SEQ ID NO: 2395019 - RNA, 17 nt, Human
cagacacagggacuuga

SEQ ID NO: 2395020 - RNA, 18 nt, Human
cagacacagggacuugaa

SEQ ID NO: 2395021 - RNA, 20 nt, Human
cagacacagggacuugaagu

SEQ ID NO: 2395022 - RNA, 21 nt, Human
cagacacagggacuugaaguu

SEQ ID NO: 2395023 - RNA, 13 nt, Human
cagacacaggccc

SEQ ID NO: 2395024 - RNA, 14 nt, Human
cagacacaggcccg

SEQ ID NO: 2395025 - RNA, 15 nt, Human
cagacacaggcccgg

SEQ ID NO: 2395026 - RNA, 17 nt, Human
cagacacaggcccggcu

SEQ ID NO: 2395027 - RNA, 18 nt, Human
cagacacaggcccggcuc

SEQ ID NO: 2395028 - RNA, 21 nt, Human
cagacacaggcccggcuccag

SEQ ID NO: 2395029 - RNA, 22 nt, Human
cagacacaggcccggcuccagg

SEQ ID NO: 2395030 - RNA, 23 nt, Human
cagacacaggcccggcuccaggc

SEQ ID NO: 2395031 - RNA, 21 nt, Human
cagacauucugccaggccccc

SEQ ID NO: 2395032 - RNA, 16 nt, Human
cagacauucugccagg

SEQ ID NO: 2395033 - RNA, 13 nt, Human
cagacauucugcc

SEQ ID NO: 2395034 - RNA, 22 nt, Human
cagacauguuuuccgugaaaac

SEQ ID NO: 2395035 - RNA, 18 nt, Human
cagacauguuuuccguga

SEQ ID NO: 2395036 - RNA, 22 nt, Human
cagacauguggugggacaggga

SEQ ID NO: 2395037 - RNA, 12 nt, Human
cagacauguuuu

SEQ ID NO: 2395038 - RNA, 18 nt, Human
cagacauguggugggaca

SEQ ID NO: 2395039 - RNA, 18 nt, Human
cagacaugccacaaggac

SEQ ID NO: 2395040 - RNA, 22 nt, Human
cagacauccauguuuguaaaac

SEQ ID NO: 2395041 - RNA, 23 nt, Human
cagacauccauguuuguaaaacu

SEQ ID NO: 2395042 - RNA, 15 nt, Human
cagacaucucugcac

SEQ ID NO: 2395043 - RNA, 17 nt, Human
cagacaucucugcaccc

SEQ ID NO: 2395044 - RNA, 19 nt, Human
cagacauccauguuuguaa

SEQ ID NO: 2395045 - RNA, 21 nt, Human
cagacacugaccauccacucu

SEQ ID NO: 2395046 - RNA, 19 nt, Human
cagacauacuaaccagcag

SEQ ID NO: 2395047 - RNA, 19 nt, Human
cagacauagaauuaacaca

SEQ ID NO: 2395048 - RNA, 17 nt, Human
cagacauagaauuaaca

SEQ ID NO: 2395049 - RNA, 21 nt, Human
cagacacuuuuuugaguggau

SEQ ID NO: 2395050 - RNA, 19 nt, Human
cagacacucugcucugccc

SEQ ID NO: 2395051 - RNA, 20 nt, Human
cagacacucugcucugcccu

SEQ ID NO: 2395052 - RNA, 13 nt, Human
cagacacucuggc

SEQ ID NO: 2395053 - RNA, 14 nt, Human
cagacacucuggcu

SEQ ID NO: 2395054 - RNA, 20 nt, Human
cagacaguuaagagaaauga

SEQ ID NO: 2395055 - RNA, 18 nt, Human
cagacaccuuggacaucc

SEQ ID NO: 2395056 - RNA, 14 nt, Human
cagacaccuuggac

SEQ ID NO: 2395057 - RNA, 17 nt, Human
cagacacggaucugaga

SEQ ID NO: 2395058 - RNA, 22 nt, Human
cagacacggaucugagaaucuu

SEQ ID NO: 2395059 - RNA, 11 nt, Human
cagacacuaag

SEQ ID NO: 2395060 - RNA, 12 nt, Human
cagacacuaagu

SEQ ID NO: 2395061 - RNA, 18 nt, Human
cagacacuaaguuauagu

SEQ ID NO: 2395062 - RNA, 21 nt, Human
cagacacuaaguuauaguaua

SEQ ID NO: 2395063 - RNA, 12 nt, Human
cagacacucugc

SEQ ID NO: 2395064 - RNA, 13 nt, Human
cagacacucugcu

SEQ ID NO: 2395065 - RNA, 14 nt, Human
cagacacucugcuc

SEQ ID NO: 2395066 - RNA, 16 nt, Human
cagacacucugcucug

SEQ ID NO: 2395067 - RNA, 19 nt, Human
cagacaccuugacagggca

SEQ ID NO: 2395068 - RNA, 15 nt, Human
cagacaccgccacau

SEQ ID NO: 2395069 - RNA, 21 nt, Human
cagacacccucaaccucuucu

SEQ ID NO: 2395070 - RNA, 15 nt, Human
cagacacccucaacc

SEQ ID NO: 2395071 - RNA, 14 nt, Human
cagacacccucaac

SEQ ID NO: 2395072 - RNA, 20 nt, Human
cagacaccuugacagggcac

SEQ ID NO: 2395073 - RNA, 22 nt, Human
cagacaccuugacagggcacac

SEQ ID NO: 2395074 - RNA, 13 nt, Human
cagaccagcucuu

SEQ ID NO: 2395075 - RNA, 16 nt, Human
cagaccauaauguuac

SEQ ID NO: 2395076 - RNA, 13 nt, Human
cagaccacggcuc

SEQ ID NO: 2395077 - RNA, 23 nt, Human
cagaccacgcccguccugccugu

SEQ ID NO: 2395078 - RNA, 24 nt, Human
cagaccacgcccguccugccugug

SEQ ID NO: 2395079 - RNA, 20 nt, Human
cagaccacaucuuuaucugu

SEQ ID NO: 2395080 - RNA, 20 nt, Human
cagacauuguuuugccaaca

SEQ ID NO: 2395081 - RNA, 22 nt, Human
cagacauuguuuugccaacauu

SEQ ID NO: 2395082 - RNA, 13 nt, Human
cagaccaccccgc

SEQ ID NO: 2395083 - RNA, 15 nt, Human
cagaccaccccgccu

SEQ ID NO: 2395084 - RNA, 19 nt, Human
cagaccaccccgccugccc

SEQ ID NO: 2395085 - RNA, 22 nt, Human
cagaccaccccgccugcccuca

SEQ ID NO: 2395086 - RNA, 22 nt, Human
cagaccacgcccguccugccug

SEQ ID NO: 2395087 - RNA, 20 nt, Human
cagaccacaaaacuuuucua

SEQ ID NO: 2395088 - RNA, 14 nt, Human
cagaccacaaaacu

SEQ ID NO: 2395089 - RNA, 14 nt, Human
cagacauuggcacc

SEQ ID NO: 2395090 - RNA, 11 nt, Human
cagacauuguc

SEQ ID NO: 2395091 - RNA, 14 nt, Human
cagacauugucagc

SEQ ID NO: 2395092 - RNA, 11 nt, Human
cagacauuguu

SEQ ID NO: 2395093 - RNA, 15 nt, Human
cagacauugucagca

SEQ ID NO: 2395094 - RNA, 17 nt, Human
cagacauugucagcaaa

SEQ ID NO: 2395095 - RNA, 21 nt, Human
cagacauugucagcaaauuaa

SEQ ID NO: 2395096 - RNA, 13 nt, Human
cagacauuguuuu

SEQ ID NO: 2395097 - RNA, 15 nt, Human
cagacauuguuuugc

SEQ ID NO: 2395098 - RNA, 19 nt, Human
cagacauuguuuugccaac

SEQ ID NO: 2395099 - RNA, 17 nt, Human
cagacccccagcaaccc

SEQ ID NO: 2395100 - RNA, 13 nt, Human
cagacccccagca

SEQ ID NO: 2395101 - RNA, 16 nt, Human
cagacccccacucuca

SEQ ID NO: 2395102 - RNA, 14 nt, Human
cagacccccacucu

SEQ ID NO: 2395103 - RNA, 13 nt, Human
cagacccccacuc

SEQ ID NO: 2395104 - RNA, 23 nt, Human
cagacccccaccccuuccccacu

SEQ ID NO: 2395105 - RNA, 22 nt, Human
cagacccccaccccuuccccac

SEQ ID NO: 2395106 - RNA, 21 nt, Human
cagacccccaccccuucccca

SEQ ID NO: 2395107 - RNA, 20 nt, Human
cagacccccaccccuucccc

SEQ ID NO: 2395108 - RNA, 19 nt, Human
cagacccccaccccuuccc

SEQ ID NO: 2395109 - RNA, 18 nt, Human
cagacccccaccccuucc

SEQ ID NO: 2395110 - RNA, 17 nt, Human
cagacccccaccccuuc

SEQ ID NO: 2395111 - RNA, 15 nt, Human
cagacccccaccccu

SEQ ID NO: 2395112 - RNA, 14 nt, Human
cagacccccacccc

SEQ ID NO: 2395113 - RNA, 13 nt, Human
cagacccccaccc

SEQ ID NO: 2395114 - RNA, 15 nt, Human
cagaccccagcggcu

SEQ ID NO: 2395115 - RNA, 16 nt, Human
cagaccccagcggcug

SEQ ID NO: 2395116 - RNA, 14 nt, Human
cagaccccagcggc

SEQ ID NO: 2395117 - RNA, 12 nt, Human
cagaccccagcg

SEQ ID NO: 2395118 - RNA, 12 nt, Human
cagacccagugg

SEQ ID NO: 2395119 - RNA, 16 nt, Human
cagaccccucuggcca

SEQ ID NO: 2395120 - RNA, 13 nt, Human
cagaccccucugg

SEQ ID NO: 2395121 - RNA, 18 nt, Human
cagacccccagcaacccu

SEQ ID NO: 2395122 - RNA, 15 nt, Human
cagacccccuggaga

SEQ ID NO: 2395123 - RNA, 21 nt, Human
cagaccccucuggccaggaug

SEQ ID NO: 2395124 - RNA, 20 nt, Human
cagaccccucuggccaggau

SEQ ID NO: 2395125 - RNA, 18 nt, Human
cagaccccucuggccagg

SEQ ID NO: 2395126 - RNA, 17 nt, Human
cagaccccucuggccag

SEQ ID NO: 2395127 - RNA, 13 nt, Human
cagaccccuggcu

SEQ ID NO: 2395128 - RNA, 14 nt, Human
cagaccccuggcuu

SEQ ID NO: 2395129 - RNA, 15 nt, Human
cagaccccuggcuuu

SEQ ID NO: 2395130 - RNA, 16 nt, Human
cagaccccuggcuuuu

SEQ ID NO: 2395131 - RNA, 18 nt, Human
cagaccccuggcuuuuca

SEQ ID NO: 2395132 - RNA, 16 nt, Human
cagacccggcugcgug

SEQ ID NO: 2395133 - RNA, 12 nt, Human
cagacccugccc

SEQ ID NO: 2395134 - RNA, 13 nt, Human
cagacccugcccu

SEQ ID NO: 2395135 - RNA, 14 nt, Human
cagacccugcccug

SEQ ID NO: 2395136 - RNA, 12 nt, Human
cagacccggcug

SEQ ID NO: 2395137 - RNA, 14 nt, Human
cagacccggcugcg

SEQ ID NO: 2395138 - RNA, 22 nt, Human
cagaccccucuggccaggaugg

SEQ ID NO: 2395139 - RNA, 16 nt, Human
cagaccccuucagcca

SEQ ID NO: 2395140 - RNA, 23 nt, Human
cagaccccuggcuuuucacugcu

SEQ ID NO: 2395141 - RNA, 21 nt, Human
cagaccccuggcuuuucacug

SEQ ID NO: 2395142 - RNA, 22 nt, Human
cagaccccuggcuuuucacugc

SEQ ID NO: 2395143 - RNA, 17 nt, Human
cagacccuaccccacca

SEQ ID NO: 2395144 - RNA, 16 nt, Human
cagacccuaccccacc

SEQ ID NO: 2395145 - RNA, 15 nt, Human
cagacccuaccccac

SEQ ID NO: 2395146 - RNA, 18 nt, Human
cagacccuaccccaccac

SEQ ID NO: 2395147 - RNA, 22 nt, Human
cagacccugcccugugggcccc

SEQ ID NO: 2395148 - RNA, 21 nt, Human
cagaccgaacuguuguauaaa

SEQ ID NO: 2395149 - RNA, 18 nt, Human
cagaccuaaugcuccuug

SEQ ID NO: 2395150 - RNA, 17 nt, Human
cagaccuaaugcuccuu

SEQ ID NO: 2395151 - RNA, 16 nt, Human
cagaccuaaugcuccu

SEQ ID NO: 2395152 - RNA, 15 nt, Human
cagaccuaaugcucc

SEQ ID NO: 2395153 - RNA, 22 nt, Human
cagaccuaggauuucaugauuu

SEQ ID NO: 2395154 - RNA, 18 nt, Human
cagaccuauuccuccugg

SEQ ID NO: 2395155 - RNA, 19 nt, Human
cagaccuauuccuccuggg

SEQ ID NO: 2395156 - RNA, 15 nt, Human
cagacccugcccugu

SEQ ID NO: 2395157 - RNA, 16 nt, Human
cagacccugcccugug

SEQ ID NO: 2395158 - RNA, 17 nt, Human
cagacccugcccugugg

SEQ ID NO: 2395159 - RNA, 21 nt, Human
cagacccugcccugugggccc

SEQ ID NO: 2395160 - RNA, 18 nt, Human
cagagaaaggggagccca

SEQ ID NO: 2395161 - RNA, 18 nt, Human
cagagaaagaggaagcuu

SEQ ID NO: 2395162 - RNA, 19 nt, Human
cagagaaagaagagacagg

SEQ ID NO: 2395163 - RNA, 20 nt, Human
cagagaaagaagagacagga

SEQ ID NO: 2395164 - RNA, 21 nt, Human
cagagaaagaagagacaggag

SEQ ID NO: 2395165 - RNA, 22 nt, Human
cagagaaagaagagacaggagg

SEQ ID NO: 2395166 - RNA, 23 nt, Human
cagagaaagaagagacaggaggg

SEQ ID NO: 2395167 - RNA, 13 nt, Human
cagagaaagagga

SEQ ID NO: 2395168 - RNA, 15 nt, Human
cagagaaagaggaag

SEQ ID NO: 2395169 - RNA, 17 nt, Human
cagagaaagaggaagcu

SEQ ID NO: 2395170 - RNA, 19 nt, Human
cagagaaaguacuucucca

SEQ ID NO: 2395171 - RNA, 23 nt, Human
cagagaaaguacuucuccacccu

SEQ ID NO: 2395172 - RNA, 20 nt, Human
cagacuuuuuuuaaauagua

SEQ ID NO: 2395173 - RNA, 15 nt, Human
cagagaaagaagaga

SEQ ID NO: 2395174 - RNA, 18 nt, Human
cagagaaagaagagacag

SEQ ID NO: 2395175 - RNA, 14 nt, Human
cagacucccauucc

SEQ ID NO: 2395176 - RNA, 18 nt, Human
cagacucccauuccugaa

SEQ ID NO: 2395177 - RNA, 17 nt, Human
cagacucccauuccuga

SEQ ID NO: 2395178 - RNA, 20 nt, Human
cagacucacaaccugaaccu

SEQ ID NO: 2395179 - RNA, 21 nt, Human
cagacucacaaccugaaccua

SEQ ID NO: 2395180 - RNA, 14 nt, Human
cagacucagacauu

SEQ ID NO: 2395181 - RNA, 18 nt, Human
cagacucaguuugucaga

SEQ ID NO: 2395182 - RNA, 17 nt, Human
cagacucaguuugucag

SEQ ID NO: 2395183 - RNA, 14 nt, Human
cagacucaauaaaa

SEQ ID NO: 2395184 - RNA, 16 nt, Human
cagacucaguuuguca

SEQ ID NO: 2395185 - RNA, 15 nt, Human
cagacuucacacugc

SEQ ID NO: 2395186 - RNA, 21 nt, Human
cagacuucccugaauguauug

SEQ ID NO: 2395187 - RNA, 15 nt, Human
cagacuuccuugaga

SEQ ID NO: 2395188 - RNA, 16 nt, Human
cagacuucuccagacc

SEQ ID NO: 2395189 - RNA, 15 nt, Human
cagacuucuccagac

SEQ ID NO: 2395190 - RNA, 14 nt, Human
cagacuucuccaga

SEQ ID NO: 2395191 - RNA, 13 nt, Human
cagacuucuccag

SEQ ID NO: 2395192 - RNA, 24 nt, Human
cagacuuccuugagacacggagcc

SEQ ID NO: 2395193 - RNA, 15 nt, Human
cagacuuuaaagaau

SEQ ID NO: 2395194 - RNA, 20 nt, Human
cagacuucuccagacccacc

SEQ ID NO: 2395195 - RNA, 23 nt, Human
cagacuuuggaaaaugcauugua

SEQ ID NO: 2395196 - RNA, 22 nt, Human
cagacuuuggaaaaugcauugu

SEQ ID NO: 2395197 - RNA, 19 nt, Human
cagacuuuggaaaaugcau

SEQ ID NO: 2395198 - RNA, 20 nt, Human
cagacuuuacaugacacagc

SEQ ID NO: 2395199 - RNA, 21 nt, Human
cagacuuuacaugacacagcu

SEQ ID NO: 2395200 - RNA, 20 nt, Human
cagacuuugcuucccauugu

SEQ ID NO: 2395201 - RNA, 13 nt, Human
cagaccugccucu

SEQ ID NO: 2395202 - RNA, 16 nt, Human
cagaccugccucuucc

SEQ ID NO: 2395203 - RNA, 22 nt, Human
cagaccugagcuccccaccacc

SEQ ID NO: 2395204 - RNA, 13 nt, Human
cagaccuggagcc

SEQ ID NO: 2395205 - RNA, 14 nt, Human
cagaccuggagccc

SEQ ID NO: 2395206 - RNA, 23 nt, Human
cagaccugauccuggaggcccag

SEQ ID NO: 2395207 - RNA, 22 nt, Human
cagaccugauccuggaggccca

SEQ ID NO: 2395208 - RNA, 20 nt, Human
cagaccugauccuggaggcc

SEQ ID NO: 2395209 - RNA, 17 nt, Human
cagaccugauccuggag

SEQ ID NO: 2395210 - RNA, 17 nt, Human
cagaccugagcucccca

SEQ ID NO: 2395211 - RNA, 12 nt, Human
cagaccugagcu

SEQ ID NO: 2395212 - RNA, 23 nt, Human
cagaccuccccagccccuagccc

SEQ ID NO: 2395213 - RNA, 14 nt, Human
cagaccugauccug

SEQ ID NO: 2395214 - RNA, 13 nt, Human
cagaccugauccu

SEQ ID NO: 2395215 - RNA, 12 nt, Human
cagaccucccca

SEQ ID NO: 2395216 - RNA, 14 nt, Human
cagaccuccccagc

SEQ ID NO: 2395217 - RNA, 15 nt, Human
cagaccuccccagcc

SEQ ID NO: 2395218 - RNA, 16 nt, Human
cagaccuccccagccc

SEQ ID NO: 2395219 - RNA, 18 nt, Human
cagaccuccccagccccu

SEQ ID NO: 2395220 - RNA, 19 nt, Human
cagaccuccccagccccua

SEQ ID NO: 2395221 - RNA, 21 nt, Human
cagaccuccccagccccuagc

SEQ ID NO: 2395222 - RNA, 22 nt, Human
cagaccuccccagccccuagcc

SEQ ID NO: 2395223 - RNA, 23 nt, Human
cagacgccggggacagaggccug

SEQ ID NO: 2395224 - RNA, 13 nt, Human
cagaccuuuuauc

SEQ ID NO: 2395225 - RNA, 16 nt, Human
cagacgccugaggaac

SEQ ID NO: 2395226 - RNA, 15 nt, Human
cagaccuuugaggau

SEQ ID NO: 2395227 - RNA, 21 nt, Human
cagaccuucuaggacgccacc

SEQ ID NO: 2395228 - RNA, 19 nt, Human
cagaccuuguucacacucu

SEQ ID NO: 2395229 - RNA, 17 nt, Human
cagacgcacgugggucu

SEQ ID NO: 2395230 - RNA, 20 nt, Human
cagaccuguuagcagacagg

SEQ ID NO: 2395231 - RNA, 19 nt, Human
cagaccuguuagcagacag

SEQ ID NO: 2395232 - RNA, 23 nt, Human
cagaccuggagccccuggguggg

SEQ ID NO: 2395233 - RNA, 12 nt, Human
cagaccuguccu

SEQ ID NO: 2395234 - RNA, 13 nt, Human
cagaccuguccuc

SEQ ID NO: 2395235 - RNA, 17 nt, Human
cagaccuguccuccugg

SEQ ID NO: 2395236 - RNA, 15 nt, Human
cagaccuggagcccc

SEQ ID NO: 2395237 - RNA, 16 nt, Human
cagaccuggagccccu

SEQ ID NO: 2395238 - RNA, 17 nt, Human
cagaccuggagccccug

SEQ ID NO: 2395239 - RNA, 18 nt, Human
cagaccuggagccccugg

SEQ ID NO: 2395240 - RNA, 19 nt, Human
cagaccuggagccccuggg

SEQ ID NO: 2395241 - RNA, 20 nt, Human
cagaccuggagccccugggu

SEQ ID NO: 2395242 - RNA, 21 nt, Human
cagaccuggagccccugggug

SEQ ID NO: 2395243 - RNA, 22 nt, Human
cagaccuggagccccugggugg

SEQ ID NO: 2395244 - RNA, 19 nt, Human
cagacucacaaccugaacc

SEQ ID NO: 2395245 - RNA, 23 nt, Human
cagacucaaaugcucagaccagc

SEQ ID NO: 2395246 - RNA, 22 nt, Human
cagacucaaaugcucagaccag

SEQ ID NO: 2395247 - RNA, 19 nt, Human
cagacuauuuaacuugagg

SEQ ID NO: 2395248 - RNA, 22 nt, Human
cagacuaguuuaguuaaaugag

SEQ ID NO: 2395249 - RNA, 18 nt, Human
cagacuauuuaacuugag

SEQ ID NO: 2395250 - RNA, 22 nt, Human
cagacuagaauucuagugcugc

SEQ ID NO: 2395251 - RNA, 23 nt, Human
cagacuagaauucuagugcugcu

SEQ ID NO: 2395252 - RNA, 15 nt, Human
cagacgucccuccac

SEQ ID NO: 2395253 - RNA, 20 nt, Human
cagacguaugcuuauuuuaa

SEQ ID NO: 2395254 - RNA, 19 nt, Human
cagacgguucaccagccuc

SEQ ID NO: 2395255 - RNA, 17 nt, Human
cagacguaggggagggg

SEQ ID NO: 2395256 - RNA, 17 nt, Human
cagacgguucaccagcc

SEQ ID NO: 2395257 - RNA, 17 nt, Human
cagacggcacccaccca

SEQ ID NO: 2395258 - RNA, 16 nt, Human
cagacggcacccaccc

SEQ ID NO: 2395259 - RNA, 15 nt, Human
cagacggcacccacc

SEQ ID NO: 2395260 - RNA, 15 nt, Human
cagaagggagaagga

SEQ ID NO: 2395261 - RNA, 19 nt, Human
cagaagggacuucacgaag

SEQ ID NO: 2395262 - RNA, 17 nt, Human
cagaaggcucuucugac

SEQ ID NO: 2395263 - RNA, 10 nt, Human
cagaagggag

SEQ ID NO: 2395264 - RNA, 12 nt, Human
cagaaggcucuu

SEQ ID NO: 2395265 - RNA, 14 nt, Human
cagaaggcucuucu

SEQ ID NO: 2395266 - RNA, 12 nt, Human
cagaagggaggc

SEQ ID NO: 2395267 - RNA, 15 nt, Human
cagaagggaggcugg

SEQ ID NO: 2395268 - RNA, 16 nt, Human
cagaagggggccauga

SEQ ID NO: 2395269 - RNA, 15 nt, Human
cagaagggggccaug

SEQ ID NO: 2395270 - RNA, 14 nt, Human
cagaagggggccau

SEQ ID NO: 2395271 - RNA, 17 nt, Human
cagaagggggagaccaa

SEQ ID NO: 2395272 - RNA, 18 nt, Human
cagaagggggccaugagg

SEQ ID NO: 2395273 - RNA, 14 nt, Human
cagaaggggguggu

SEQ ID NO: 2395274 - RNA, 20 nt, Human
cagaaggggaggggagacag

SEQ ID NO: 2395275 - RNA, 15 nt, Human
cagaaggggagggga

SEQ ID NO: 2395276 - RNA, 16 nt, Human
cagaagguugugauga

SEQ ID NO: 2395277 - RNA, 23 nt, Human
cagaagguugcucuagauugaga

SEQ ID NO: 2395278 - RNA, 15 nt, Human
cagaagguauuccuu

SEQ ID NO: 2395279 - RNA, 19 nt, Human
cagaaggggguggugucuc

SEQ ID NO: 2395280 - RNA, 20 nt, Human
cagaaggggguggugucucc

SEQ ID NO: 2395281 - RNA, 21 nt, Human
cagaaggggguggugucucca

SEQ ID NO: 2395282 - RNA, 20 nt, Human
cagaagggguuuggucuggg

SEQ ID NO: 2395283 - RNA, 22 nt, Human
cagaagggguuuggucugggac

SEQ ID NO: 2395284 - RNA, 18 nt, Human
cagaagucaugaagccca

SEQ ID NO: 2395285 - RNA, 17 nt, Human
cagaagucaugaagccc

SEQ ID NO: 2395286 - RNA, 16 nt, Human
cagaagucaugaagcc

SEQ ID NO: 2395287 - RNA, 17 nt, Human
cagaaucuaaagccagu

SEQ ID NO: 2395288 - RNA, 15 nt, Human
cagaaucuaaagcca

SEQ ID NO: 2395289 - RNA, 16 nt, Human
cagaaucuaaagccag

SEQ ID NO: 2395290 - RNA, 18 nt, Human
cagaaucucaaauaacua

SEQ ID NO: 2395291 - RNA, 17 nt, Human
cagaaucucaaauaacu

SEQ ID NO: 2395292 - RNA, 16 nt, Human
cagaagucaagcccag

SEQ ID NO: 2395293 - RNA, 14 nt, Human
cagaaggaggagga

SEQ ID NO: 2395294 - RNA, 13 nt, Human
cagaaggaggagg

SEQ ID NO: 2395295 - RNA, 17 nt, Human
cagaaggaugaaugagg

SEQ ID NO: 2395296 - RNA, 18 nt, Human
cagaaggcaaacccauca

SEQ ID NO: 2395297 - RNA, 19 nt, Human
cagaaggcaaaugacuuug

SEQ ID NO: 2395298 - RNA, 18 nt, Human
cagaaggcaaaugacuuu

SEQ ID NO: 2395299 - RNA, 13 nt, Human
cagaaggccaaga

SEQ ID NO: 2395300 - RNA, 14 nt, Human
cagaaggccaagaa

SEQ ID NO: 2395301 - RNA, 18 nt, Human
cagaaggccaagaaucaa

SEQ ID NO: 2395302 - RNA, 13 nt, Human
cagaaggcaggga

SEQ ID NO: 2395303 - RNA, 23 nt, Human
cagaaggcauaucagucucugag

SEQ ID NO: 2395304 - RNA, 20 nt, Human
cagaaggcaaaugacuuugg

SEQ ID NO: 2395305 - RNA, 14 nt, Human
cagaaggccaagag

SEQ ID NO: 2395306 - RNA, 18 nt, Human
cagaaggccaagaggcug

SEQ ID NO: 2395307 - RNA, 20 nt, Human
cagaaggagaaggaaggaga

SEQ ID NO: 2395308 - RNA, 18 nt, Human
cagaaggagaaggaagga

SEQ ID NO: 2395309 - RNA, 14 nt, Human
cagaaggagaagga

SEQ ID NO: 2395310 - RNA, 14 nt, Human
cagaaggaccuccu

SEQ ID NO: 2395311 - RNA, 21 nt, Human
cagaaggaagggcauccuucu

SEQ ID NO: 2395312 - RNA, 19 nt, Human
cagaaggaagacuucaucc

SEQ ID NO: 2395313 - RNA, 16 nt, Human
cagaagcuucugccca

SEQ ID NO: 2395314 - RNA, 14 nt, Human
cagaagcuucagaa

SEQ ID NO: 2395315 - RNA, 17 nt, Human
cagaaggaaaaaugugu

SEQ ID NO: 2395316 - RNA, 19 nt, Human
cagaaggaaaaauguguaa

SEQ ID NO: 2395317 - RNA, 20 nt, Human
cagaaggaaaaauguguaau

SEQ ID NO: 2395318 - RNA, 18 nt, Human
cagaagcgggacgagacc

SEQ ID NO: 2395319 - RNA, 15 nt, Human
cagaagccucuggcu

SEQ ID NO: 2395320 - RNA, 14 nt, Human
cagaagccucuggc

SEQ ID NO: 2395321 - RNA, 19 nt, Human
cagaagccucuggcuagag

SEQ ID NO: 2395322 - RNA, 16 nt, Human
cagaagccucuggguc

SEQ ID NO: 2395323 - RNA, 15 nt, Human
cagaagccugaggcu

SEQ ID NO: 2395324 - RNA, 14 nt, Human
cagaagccugaggc

SEQ ID NO: 2395325 - RNA, 19 nt, Human
cagaagccugaggcuggga

SEQ ID NO: 2395326 - RNA, 18 nt, Human
cagaagccugaugcugac

SEQ ID NO: 2395327 - RNA, 16 nt, Human
cagaagcugagcacca

SEQ ID NO: 2395328 - RNA, 21 nt, Human
cagaagcugagcaccagggga

SEQ ID NO: 2395329 - RNA, 19 nt, Human
cagaagcugagcaccaggg

SEQ ID NO: 2395330 - RNA, 12 nt, Human
cagaagcuucca

SEQ ID NO: 2395331 - RNA, 16 nt, Human
cagaaggaagacuuca

SEQ ID NO: 2395332 - RNA, 17 nt, Human
cagaaggaagacuucau

SEQ ID NO: 2395333 - RNA, 18 nt, Human
cagaaggaagacuucauc

SEQ ID NO: 2395334 - RNA, 20 nt, Human
cagaagauagcuucacccca

SEQ ID NO: 2395335 - RNA, 20 nt, Human
cagaagagaugggcuuguuu

SEQ ID NO: 2395336 - RNA, 15 nt, Human
cagaagauaacuuga

SEQ ID NO: 2395337 - RNA, 22 nt, Human
cagaagauaacuugagcaccgu

SEQ ID NO: 2395338 - RNA, 15 nt, Human
cagaagauccccuca

SEQ ID NO: 2395339 - RNA, 18 nt, Human
cagaagauccccucagga

SEQ ID NO: 2395340 - RNA, 19 nt, Human
cagaagauccccucaggac

SEQ ID NO: 2395341 - RNA, 21 nt, Human
cagaagagaugggcuuguuuu

SEQ ID NO: 2395342 - RNA, 19 nt, Human
cagaagacacugcaaaggc

SEQ ID NO: 2395343 - RNA, 20 nt, Human
cagaagacaccagagcagau

SEQ ID NO: 2395344 - RNA, 21 nt, Human
cagaagacaccagagcagaug

SEQ ID NO: 2395345 - RNA, 21 nt, Human
cagaagaccacaaaaauugac

SEQ ID NO: 2395346 - RNA, 22 nt, Human
cagaagaauugaacccaggagg

SEQ ID NO: 2395347 - RNA, 14 nt, Human
cagaagacaccaga

SEQ ID NO: 2395348 - RNA, 15 nt, Human
cagaagacaccagag

SEQ ID NO: 2395349 - RNA, 16 nt, Human
cagaagacaccagagc

SEQ ID NO: 2395350 - RNA, 17 nt, Human
cagaagacaccagagca

SEQ ID NO: 2395351 - RNA, 18 nt, Human
cagaagacaccagagcag

SEQ ID NO: 2395352 - RNA, 19 nt, Human
cagaagacaccagagcaga

SEQ ID NO: 2395353 - RNA, 21 nt, Human
cagaagacacugaugggcaac

SEQ ID NO: 2395354 - RNA, 15 nt, Human
cagaagaaggcagca

SEQ ID NO: 2395355 - RNA, 18 nt, Human
cagaagaauaugacagcu

SEQ ID NO: 2395356 - RNA, 12 nt, Human
cagaagaauauu

SEQ ID NO: 2395357 - RNA, 14 nt, Human
cagaagaauauuca

SEQ ID NO: 2395358 - RNA, 15 nt, Human
cagaagaauauucag

SEQ ID NO: 2395359 - RNA, 16 nt, Human
cagaagaauauucagg

SEQ ID NO: 2395360 - RNA, 21 nt, Human
cagaagaauugaacccaggag

SEQ ID NO: 2395361 - RNA, 20 nt, Human
cagaagaauugaacccagga

SEQ ID NO: 2395362 - RNA, 19 nt, Human
cagaagaauugaacccagg

SEQ ID NO: 2395363 - RNA, 17 nt, Human
cagaagaauugaaccca

SEQ ID NO: 2395364 - RNA, 17 nt, Human
cagaagaauauucagga

SEQ ID NO: 2395365 - RNA, 18 nt, Human
cagaagaauauucaggac

SEQ ID NO: 2395366 - RNA, 19 nt, Human
cagaagaauauucaggacu

SEQ ID NO: 2395367 - RNA, 20 nt, Human
cagaagaauauucaggacuu

SEQ ID NO: 2395368 - RNA, 14 nt, Human
cagaagaaggcagc

SEQ ID NO: 2395369 - RNA, 11 nt, Human
cagaagaaaga

SEQ ID NO: 2395370 - RNA, 23 nt, Human
cagaagauccccucaggacugca

SEQ ID NO: 2395371 - RNA, 13 nt, Human
cagaagcagcucu

SEQ ID NO: 2395372 - RNA, 14 nt, Human
cagaagcaggauag

SEQ ID NO: 2395373 - RNA, 14 nt, Human
cagaagcaggcugg

SEQ ID NO: 2395374 - RNA, 14 nt, Human
cagaagcagcucuu

SEQ ID NO: 2395375 - RNA, 20 nt, Human
cagaagcaacccaaauguuc

SEQ ID NO: 2395376 - RNA, 19 nt, Human
cagaagcaacccaaauguu

SEQ ID NO: 2395377 - RNA, 13 nt, Human
cagaagccucugg

SEQ ID NO: 2395378 - RNA, 18 nt, Human
cagaagccuccccagcuc

SEQ ID NO: 2395379 - RNA, 22 nt, Human
cagaagccuccccagcucaccc

SEQ ID NO: 2395380 - RNA, 20 nt, Human
cagaagccucacugcaagca

SEQ ID NO: 2395381 - RNA, 19 nt, Human
cagaagccaggagcaaaug

SEQ ID NO: 2395382 - RNA, 14 nt, Human
cagaagcccagaau

SEQ ID NO: 2395383 - RNA, 12 nt, Human
cagaagcccaga

SEQ ID NO: 2395384 - RNA, 23 nt, Human
cagaagcaguugagucgucauca

SEQ ID NO: 2395385 - RNA, 15 nt, Human
cagaagcaggcugga

SEQ ID NO: 2395386 - RNA, 16 nt, Human
cagaagcaggcuggag

SEQ ID NO: 2395387 - RNA, 14 nt, Human
cagaagcauuaacu

SEQ ID NO: 2395388 - RNA, 15 nt, Human
cagaagccaggagca

SEQ ID NO: 2395389 - RNA, 16 nt, Human
cagaagccaggagcaa

SEQ ID NO: 2395390 - RNA, 17 nt, Human
cagaagccaggagcaaa

SEQ ID NO: 2395391 - RNA, 11 nt, Human
cagaagcccag

SEQ ID NO: 2395392 - RNA, 18 nt, Human
cagaacuggacucaggau

SEQ ID NO: 2395393 - RNA, 13 nt, Human
cagaacuggacuc

SEQ ID NO: 2395394 - RNA, 24 nt, Human
cagaacugagcuccucugggcagg

SEQ ID NO: 2395395 - RNA, 23 nt, Human
cagaacugagcuccucugggcag

SEQ ID NO: 2395396 - RNA, 20 nt, Human
cagaacugagcuccucuggg

SEQ ID NO: 2395397 - RNA, 17 nt, Human
cagaacugagcuccucu

SEQ ID NO: 2395398 - RNA, 16 nt, Human
cagaacugagcuccuc

SEQ ID NO: 2395399 - RNA, 15 nt, Human
cagaacugagcuccu

SEQ ID NO: 2395400 - RNA, 13 nt, Human
cagaacugagcuc

SEQ ID NO: 2395401 - RNA, 22 nt, Human
cagaacugaaccggcuuuacca

SEQ ID NO: 2395402 - RNA, 21 nt, Human
cagaacugaaccggcuuuacc

SEQ ID NO: 2395403 - RNA, 16 nt, Human
cagaacucuuucaaaa

SEQ ID NO: 2395404 - RNA, 15 nt, Human
cagaacucuuucaaa

SEQ ID NO: 2395405 - RNA, 14 nt, Human
cagaacucuuucaa

SEQ ID NO: 2395406 - RNA, 18 nt, Human
cagaacucacuggggccu

SEQ ID NO: 2395407 - RNA, 15 nt, Human
cagaacucacugggg

SEQ ID NO: 2395408 - RNA, 22 nt, Human
cagaacucaaauggggccagau

SEQ ID NO: 2395409 - RNA, 21 nt, Human
cagaacucaaauggggccaga

SEQ ID NO: 2395410 - RNA, 20 nt, Human
cagaacucaaauggggccag

SEQ ID NO: 2395411 - RNA, 15 nt, Human
cagaacuagaauuug

SEQ ID NO: 2395412 - RNA, 14 nt, Human
cagaaccuguccuu

SEQ ID NO: 2395413 - RNA, 21 nt, Human
cagaaccuggagggcuagaac

SEQ ID NO: 2395414 - RNA, 13 nt, Human
cagaaccuggagg

SEQ ID NO: 2395415 - RNA, 20 nt, Human
cagaaccuggagggcuagaa

SEQ ID NO: 2395416 - RNA, 21 nt, Human
cagaaccucuuccccagaaag

SEQ ID NO: 2395417 - RNA, 12 nt, Human
cagaaccuggag

SEQ ID NO: 2395418 - RNA, 21 nt, Human
cagaacggagccccaggccuc

SEQ ID NO: 2395419 - RNA, 13 nt, Human
cagaacguggcuc

SEQ ID NO: 2395420 - RNA, 15 nt, Human
cagaacguggcucug

SEQ ID NO: 2395421 - RNA, 21 nt, Human
cagaaccuuguuauuucucag

SEQ ID NO: 2395422 - RNA, 18 nt, Human
cagaaccuuguuauuucu

SEQ ID NO: 2395423 - RNA, 17 nt, Human
cagaaccuuguuauuuc

SEQ ID NO: 2395424 - RNA, 16 nt, Human
cagaaccuuguuauuu

SEQ ID NO: 2395425 - RNA, 18 nt, Human
cagaacuaaacucauuua

SEQ ID NO: 2395426 - RNA, 17 nt, Human
cagaacuaaacucauuu

SEQ ID NO: 2395427 - RNA, 18 nt, Human
cagaacguggcucugcug

SEQ ID NO: 2395428 - RNA, 19 nt, Human
cagaacguggcucugcugg

SEQ ID NO: 2395429 - RNA, 20 nt, Human
cagaacuaaacucauuuaua

SEQ ID NO: 2395430 - RNA, 19 nt, Human
cagaacuaaacucauuuau

SEQ ID NO: 2395431 - RNA, 13 nt, Human
cagaacuagaauu

SEQ ID NO: 2395432 - RNA, 19 nt, Human
cagaacuagaauuugauua

SEQ ID NO: 2395433 - RNA, 22 nt, Human
cagaacccuuggagccaaugga

SEQ ID NO: 2395434 - RNA, 23 nt, Human
cagaaccccuggcuccaggccag

SEQ ID NO: 2395435 - RNA, 10 nt, Human
cagaaccagg

SEQ ID NO: 2395436 - RNA, 23 nt, Human
cagaaccccuacaugaaacagaa

SEQ ID NO: 2395437 - RNA, 15 nt, Human
cagaaccauccauag

SEQ ID NO: 2395438 - RNA, 18 nt, Human
cagaaccucuuccccaga

SEQ ID NO: 2395439 - RNA, 16 nt, Human
cagaaccucuucccca

SEQ ID NO: 2395440 - RNA, 15 nt, Human
cagaaccucuucccc

SEQ ID NO: 2395441 - RNA, 14 nt, Human
cagaaccucuuccc

SEQ ID NO: 2395442 - RNA, 12 nt, Human
cagaaccucuuc

SEQ ID NO: 2395443 - RNA, 19 nt, Human
cagaacccuuggcuugccc

SEQ ID NO: 2395444 - RNA, 14 nt, Human
cagaacccuuggcu

SEQ ID NO: 2395445 - RNA, 19 nt, Human
cacuuucucaguuuucaua

SEQ ID NO: 2395446 - RNA, 15 nt, Human
cacuuugaaaugugu

SEQ ID NO: 2395447 - RNA, 17 nt, Human
cacuuugaaauguguuu

SEQ ID NO: 2395448 - RNA, 19 nt, Human
cacuuugaaauguguuucu

SEQ ID NO: 2395449 - RNA, 20 nt, Human
cacuuugaaauguguuucug

SEQ ID NO: 2395450 - RNA, 16 nt, Human
cacuugggucuucccu

SEQ ID NO: 2395451 - RNA, 16 nt, Human
cacuuucuauagcaga

SEQ ID NO: 2395452 - RNA, 20 nt, Human
cacuuucuauccucuguaaa

SEQ ID NO: 2395453 - RNA, 22 nt, Human
cacuuucuagccagaggagaga

SEQ ID NO: 2395454 - RNA, 13 nt, Human
cacuuugcucugg

SEQ ID NO: 2395455 - RNA, 12 nt, Human
cacuuugcucug

SEQ ID NO: 2395456 - RNA, 19 nt, Human
cacuuugcucuggguggaa

SEQ ID NO: 2395457 - RNA, 22 nt, Human
cacuuugcacugauauaucaug

SEQ ID NO: 2395458 - RNA, 12 nt, Human
cacuuugcauaa

SEQ ID NO: 2395459 - RNA, 14 nt, Human
cacuuugcacagcu

SEQ ID NO: 2395460 - RNA, 19 nt, Human
cacuuugcacugauauauc

SEQ ID NO: 2395461 - RNA, 17 nt, Human
cacuuugcacagcucuc

SEQ ID NO: 2395462 - RNA, 23 nt, Human
cacuuugggaggccaaggagggc

SEQ ID NO: 2395463 - RNA, 14 nt, Human
cacuuugggaggcc

SEQ ID NO: 2395464 - RNA, 20 nt, Human
cacuuugguacauggccagu

SEQ ID NO: 2395465 - RNA, 19 nt, Human
cacuuugguacauggccag

SEQ ID NO: 2395466 - RNA, 16 nt, Human
cacuuugggaggccaa

SEQ ID NO: 2395467 - RNA, 13 nt, Human
cacuuugggaggc

SEQ ID NO: 2395468 - RNA, 12 nt, Human
cacuuugggagg

SEQ ID NO: 2395469 - RNA, 13 nt, Human
cacuuuguucugg

SEQ ID NO: 2395470 - RNA, 14 nt, Human
cacuuuguucuggc

SEQ ID NO: 2395471 - RNA, 16 nt, Human
cacuuuguucuggcuc

SEQ ID NO: 2395472 - RNA, 23 nt, Human
cacuuuguucuggcucuuccagg

SEQ ID NO: 2395473 - RNA, 23 nt, Human
cacuuuuuuuuuccaaaaaaaua

SEQ ID NO: 2395474 - RNA, 14 nt, Human
cacuuuuuuuuucc

SEQ ID NO: 2395475 - RNA, 16 nt, Human
cacuuuuuuuuuccaa

SEQ ID NO: 2395476 - RNA, 21 nt, Human
cacuuuuuugaguggaugaug

SEQ ID NO: 2395477 - RNA, 21 nt, Human
cacuuuuuuggggauaugcuu

SEQ ID NO: 2395478 - RNA, 12 nt, Human
cacuuuuuucca

SEQ ID NO: 2395479 - RNA, 14 nt, Human
cacuuuuuuccaca

SEQ ID NO: 2395480 - RNA, 19 nt, Human
cagaaaacgguuaaaacug

SEQ ID NO: 2395481 - RNA, 14 nt, Human
cagaaaaccccagc

SEQ ID NO: 2395482 - RNA, 16 nt, Human
cagaaaacauguuucc

SEQ ID NO: 2395483 - RNA, 11 nt, Human
cagaaaacauu

SEQ ID NO: 2395484 - RNA, 12 nt, Human
cagaaaacauug

SEQ ID NO: 2395485 - RNA, 13 nt, Human
cagaaaacauugu

SEQ ID NO: 2395486 - RNA, 14 nt, Human
cagaaaacauuguu

SEQ ID NO: 2395487 - RNA, 16 nt, Human
cagaaaacauuguucc

SEQ ID NO: 2395488 - RNA, 18 nt, Human
cagaaaacauuguuccag

SEQ ID NO: 2395489 - RNA, 19 nt, Human
cagaaaaacucugggaaau

SEQ ID NO: 2395490 - RNA, 19 nt, Human
cagaaaaacguguugccuu

SEQ ID NO: 2395491 - RNA, 16 nt, Human
cagaaaaacucuggga

SEQ ID NO: 2395492 - RNA, 21 nt, Human
cagaaaaauaacuucaagcaa

SEQ ID NO: 2395493 - RNA, 19 nt, Human
cacuuugggaggccaagga

SEQ ID NO: 2395494 - RNA, 12 nt, Human
cacuuuguucuu

SEQ ID NO: 2395495 - RNA, 18 nt, Human
cacuuuguucuuuaggag

SEQ ID NO: 2395496 - RNA, 20 nt, Human
cacuuugucgcccaggcugg

SEQ ID NO: 2395497 - RNA, 14 nt, Human
cacuuuguucuuua

SEQ ID NO: 2395498 - RNA, 17 nt, Human
cacuuuuaauaaacuuu

SEQ ID NO: 2395499 - RNA, 20 nt, Human
cacuuuguuucguggggagg

SEQ ID NO: 2395500 - RNA, 21 nt, Human
cacuuuguuucguggggaggu

SEQ ID NO: 2395501 - RNA, 13 nt, Human
cacuuuucaguga

SEQ ID NO: 2395502 - RNA, 18 nt, Human
cacuuuuauuuagcacca

SEQ ID NO: 2395503 - RNA, 12 nt, Human
cacuuuucucca

SEQ ID NO: 2395504 - RNA, 18 nt, Human
cacuuuugacaaaggcaa

SEQ ID NO: 2395505 - RNA, 17 nt, Human
cacuuuugacaaaggca

SEQ ID NO: 2395506 - RNA, 16 nt, Human
cacuuuuccucccuca

SEQ ID NO: 2395507 - RNA, 14 nt, Human
cacuuuuguucuug

SEQ ID NO: 2395508 - RNA, 19 nt, Human
cacuuuuucauuugccuau

SEQ ID NO: 2395509 - RNA, 20 nt, Human
cacuuuuucauuugccuauu

SEQ ID NO: 2395510 - RNA, 22 nt, Human
cacuuuugguuaagucuguuuu

SEQ ID NO: 2395511 - RNA, 22 nt, Human
cacuuuuguucuugguuuguaa

SEQ ID NO: 2395512 - RNA, 22 nt, Human
cagaaacaucaguuacucugaa

SEQ ID NO: 2395513 - RNA, 19 nt, Human
cagaaacaucaguuacucu

SEQ ID NO: 2395514 - RNA, 17 nt, Human
cagaaacaucaguuacu

SEQ ID NO: 2395515 - RNA, 22 nt, Human
cagaaacaggugcaucugggga

SEQ ID NO: 2395516 - RNA, 18 nt, Human
cagaaacaggugcaucug

SEQ ID NO: 2395517 - RNA, 23 nt, Human
cagaaacacccucacacugggac

SEQ ID NO: 2395518 - RNA, 22 nt, Human
cagaaacacccucacacuggga

SEQ ID NO: 2395519 - RNA, 18 nt, Human
cagaaacacccucacacu

SEQ ID NO: 2395520 - RNA, 21 nt, Human
cagaaacacccucacacuggg

SEQ ID NO: 2395521 - RNA, 20 nt, Human
cagaaacacccucacacugg

SEQ ID NO: 2395522 - RNA, 19 nt, Human
cagaaacuguucccaccug

SEQ ID NO: 2395523 - RNA, 14 nt, Human
cagaaaccaguuau

SEQ ID NO: 2395524 - RNA, 20 nt, Human
cagaaacgaaguagaaaggg

SEQ ID NO: 2395525 - RNA, 20 nt, Human
cagaaacuugugaaguggaa

SEQ ID NO: 2395526 - RNA, 13 nt, Human
cagaaaccaguua

SEQ ID NO: 2395527 - RNA, 15 nt, Human
cagaaacagugaguu

SEQ ID NO: 2395528 - RNA, 23 nt, Human
cagaaacaucaguuacucugaag

SEQ ID NO: 2395529 - RNA, 15 nt, Human
cagaaaccaguuaug

SEQ ID NO: 2395530 - RNA, 24 nt, Human
cagaaagaaguggggacagagcag

SEQ ID NO: 2395531 - RNA, 19 nt, Human
cagaaagauggaugugcuu

SEQ ID NO: 2395532 - RNA, 20 nt, Human
cagaaagacugagcucaagg

SEQ ID NO: 2395533 - RNA, 18 nt, Human
cagaaagcagaacaguga

SEQ ID NO: 2395534 - RNA, 16 nt, Human
cagaacaguuuguaca

SEQ ID NO: 2395535 - RNA, 23 nt, Human
cagaacagugauuaccagggacu

SEQ ID NO: 2395536 - RNA, 16 nt, Human
cagaacaucauuagaa

SEQ ID NO: 2395537 - RNA, 15 nt, Human
cagaacaucauuaga

SEQ ID NO: 2395538 - RNA, 17 nt, Human
cagaacaucauuagaac

SEQ ID NO: 2395539 - RNA, 18 nt, Human
cagaacaucauuagaaca

SEQ ID NO: 2395540 - RNA, 18 nt, Human
cagaaccagaugaguaaa

SEQ ID NO: 2395541 - RNA, 14 nt, Human
cagaaagccuauca

SEQ ID NO: 2395542 - RNA, 16 nt, Human
cagaaagccuaucaaa

SEQ ID NO: 2395543 - RNA, 22 nt, Human
cagaaagccuaucaaagaccuu

SEQ ID NO: 2395544 - RNA, 15 nt, Human
cagaaagcugccugg

SEQ ID NO: 2395545 - RNA, 14 nt, Human
cagaaagcugccug

SEQ ID NO: 2395546 - RNA, 19 nt, Human
cagaaagccugggugacau

SEQ ID NO: 2395547 - RNA, 22 nt, Human
cagaaagccugggugacauuug

SEQ ID NO: 2395548 - RNA, 21 nt, Human
cagaaagauggaugugcuuug

SEQ ID NO: 2395549 - RNA, 18 nt, Human
cagaaagcauaaaauucu

SEQ ID NO: 2395550 - RNA, 16 nt, Human
cagaaagcauuacauu

SEQ ID NO: 2395551 - RNA, 19 nt, Human
cagaaagcagaacagugau

SEQ ID NO: 2395552 - RNA, 20 nt, Human
cagaaaacgguuaaaacugu

SEQ ID NO: 2395553 - RNA, 14 nt, Human
cagaaaagcaccug

SEQ ID NO: 2395554 - RNA, 19 nt, Human
cagaaaagcaccugccgac

SEQ ID NO: 2395555 - RNA, 17 nt, Human
cagaaaagcaccugccg

SEQ ID NO: 2395556 - RNA, 16 nt, Human
cagaaaagcaccugcc

SEQ ID NO: 2395557 - RNA, 15 nt, Human
cagaaaagcaccugc

SEQ ID NO: 2395558 - RNA, 13 nt, Human
cagaaaaggacag

SEQ ID NO: 2395559 - RNA, 14 nt, Human
cagaaaaggacaga

SEQ ID NO: 2395560 - RNA, 17 nt, Human
cagaaaagggaaguugu

SEQ ID NO: 2395561 - RNA, 18 nt, Human
cagaaaagggaaguugug

SEQ ID NO: 2395562 - RNA, 21 nt, Human
cagaaaauauacuguaaagaa

SEQ ID NO: 2395563 - RNA, 20 nt, Human
cagaaaauauacuguaaaga

SEQ ID NO: 2395564 - RNA, 19 nt, Human
cagaaaauauacuguaaag

SEQ ID NO: 2395565 - RNA, 18 nt, Human
cagaaaauauacuguaaa

SEQ ID NO: 2395566 - RNA, 11 nt, Human
cagaaaauaua

SEQ ID NO: 2395567 - RNA, 13 nt, Human
cagaaaauauacu

SEQ ID NO: 2395568 - RNA, 12 nt, Human
cagaaaauauac

SEQ ID NO: 2395569 - RNA, 17 nt, Human
cagaaaauauacuguaa

SEQ ID NO: 2395570 - RNA, 16 nt, Human
cagaaaauauacugua

SEQ ID NO: 2395571 - RNA, 15 nt, Human
cagaaaauauacugu

SEQ ID NO: 2395572 - RNA, 14 nt, Human
cagaaaauauacug

SEQ ID NO: 2395573 - RNA, 16 nt, Human
cagaaaauggaagaca

SEQ ID NO: 2395574 - RNA, 20 nt, Human
cagaaaauggaagacagcuc

SEQ ID NO: 2395575 - RNA, 21 nt, Human
cagaaaauggaagacagcucu

SEQ ID NO: 2395576 - RNA, 22 nt, Human
cagaaaauggaagacagcucuu

SEQ ID NO: 2395577 - RNA, 23 nt, Human
cagaaaauggaagacagcucuua

SEQ ID NO: 2395578 - RNA, 14 nt, Human
cagaaaauguugag

SEQ ID NO: 2395579 - RNA, 19 nt, Human
cagaaaauauuauguguuu

SEQ ID NO: 2395580 - RNA, 20 nt, Human
cagaaacaaaaacacuaaaa

SEQ ID NO: 2395581 - RNA, 18 nt, Human
cagaaacaaaaacacuaa

SEQ ID NO: 2395582 - RNA, 16 nt, Human
cagaaaauugcacaau

SEQ ID NO: 2395583 - RNA, 23 nt, Human
cagaaaauguugagaaucccaaa

SEQ ID NO: 2395584 - RNA, 18 nt, Human
cagaaaauguugagaauc

SEQ ID NO: 2395585 - RNA, 16 nt, Human
cagacaacaaaccugu

SEQ ID NO: 2395586 - RNA, 20 nt, Human
cagaggagagucccagagca

SEQ ID NO: 2395587 - RNA, 22 nt, Human
cagaggagagucccagagcagg

SEQ ID NO: 2395588 - RNA, 20 nt, Human
cagaggagagaggacccccu

SEQ ID NO: 2395589 - RNA, 14 nt, Human
cagaggagggcagc

SEQ ID NO: 2395590 - RNA, 18 nt, Human
cagaggagggcagcagaa

SEQ ID NO: 2395591 - RNA, 23 nt, Human
cagaggagagucccagagcagga

SEQ ID NO: 2395592 - RNA, 11 nt, Human
cagaggcagcc

SEQ ID NO: 2395593 - RNA, 23 nt, Human
cagaggaugagcucuacccaggg

SEQ ID NO: 2395594 - RNA, 21 nt, Human
cagaggaguacaggugaagca

SEQ ID NO: 2395595 - RNA, 13 nt, Human
cagaggauggcca

SEQ ID NO: 2395596 - RNA, 15 nt, Human
cagaggauggccagu

SEQ ID NO: 2395597 - RNA, 16 nt, Human
cagaggauggccagug

SEQ ID NO: 2395598 - RNA, 17 nt, Human
cagaggauggccagugu

SEQ ID NO: 2395599 - RNA, 18 nt, Human
cagaggauggccaguguc

SEQ ID NO: 2395600 - RNA, 13 nt, Human
cagaggaggggcc

SEQ ID NO: 2395601 - RNA, 22 nt, Human
cagaggagggcagcagaagggg

SEQ ID NO: 2395602 - RNA, 20 nt, Human
cagaggaggggccgcugcca

SEQ ID NO: 2395603 - RNA, 17 nt, Human
cagaggaguacagguga

SEQ ID NO: 2395604 - RNA, 19 nt, Human
cagaggaggggccgcugcc

SEQ ID NO: 2395605 - RNA, 14 nt, Human
cagaggaggggccg

SEQ ID NO: 2395606 - RNA, 21 nt, Human
cagaggaugagcucuacccag

SEQ ID NO: 2395607 - RNA, 19 nt, Human
cagaggaugagcucuaccc

SEQ ID NO: 2395608 - RNA, 17 nt, Human
cagaggaugagcucuac

SEQ ID NO: 2395609 - RNA, 15 nt, Human
cagaggaugagcucu

SEQ ID NO: 2395610 - RNA, 22 nt, Human
cagaggacucacuugcccacac

SEQ ID NO: 2395611 - RNA, 13 nt, Human
cagaggagagagg

SEQ ID NO: 2395612 - RNA, 15 nt, Human
cagaggagagaggac

SEQ ID NO: 2395613 - RNA, 19 nt, Human
cagaggagagaggaccccc

SEQ ID NO: 2395614 - RNA, 16 nt, Human
cagaggaagagcaggc

SEQ ID NO: 2395615 - RNA, 18 nt, Human
cagaggaaucacucuugu

SEQ ID NO: 2395616 - RNA, 23 nt, Human
cagaggaaucacucuuguggaug

SEQ ID NO: 2395617 - RNA, 21 nt, Human
cagaggaaggggccagaggcu

SEQ ID NO: 2395618 - RNA, 20 nt, Human
cagaggaaggggccagaggc

SEQ ID NO: 2395619 - RNA, 19 nt, Human
cagaggaaggggccagagg

SEQ ID NO: 2395620 - RNA, 18 nt, Human
cagaggaaggggccagag

SEQ ID NO: 2395621 - RNA, 13 nt, Human
cagaggacagauc

SEQ ID NO: 2395622 - RNA, 23 nt, Human
cagaggacagaucaauggcgcag

SEQ ID NO: 2395623 - RNA, 22 nt, Human
cagaggacaguauuugugggga

SEQ ID NO: 2395624 - RNA, 20 nt, Human
cagagccccacacggaggca

SEQ ID NO: 2395625 - RNA, 23 nt, Human
cagagccccacacggaggcaucu

SEQ ID NO: 2395626 - RNA, 16 nt, Human
cagagccccacacgga

SEQ ID NO: 2395627 - RNA, 13 nt, Human
cagagccccacac

SEQ ID NO: 2395628 - RNA, 14 nt, Human
cagagcccagcucc

SEQ ID NO: 2395629 - RNA, 23 nt, Human
cagagcccacgcccccacuggug

SEQ ID NO: 2395630 - RNA, 13 nt, Human
cagagcccagcuc

SEQ ID NO: 2395631 - RNA, 11 nt, Human
cagagcccagc

SEQ ID NO: 2395632 - RNA, 17 nt, Human
cagagcccacgccccca

SEQ ID NO: 2395633 - RNA, 19 nt, Human
cagagcccacgcccccacu

SEQ ID NO: 2395634 - RNA, 20 nt, Human
cagagcccacgcccccacug

SEQ ID NO: 2395635 - RNA, 21 nt, Human
cagagcccacgcccccacugg

SEQ ID NO: 2395636 - RNA, 12 nt, Human
cagagccugcag

SEQ ID NO: 2395637 - RNA, 20 nt, Human
cagagccgugguccuuuggg

SEQ ID NO: 2395638 - RNA, 19 nt, Human
cagagccgugguccuuugg

SEQ ID NO: 2395639 - RNA, 12 nt, Human
cagaggaagagc

SEQ ID NO: 2395640 - RNA, 22 nt, Human
cagaggaacuguccagagagca

SEQ ID NO: 2395641 - RNA, 20 nt, Human
cagaggaacuguccagagag

SEQ ID NO: 2395642 - RNA, 21 nt, Human
cagaggaacuguccagagagc

SEQ ID NO: 2395643 - RNA, 15 nt, Human
cagaggaagagcagg

SEQ ID NO: 2395644 - RNA, 14 nt, Human
cagaggaagagcag

SEQ ID NO: 2395645 - RNA, 16 nt, Human
cagaggaaggggccag

SEQ ID NO: 2395646 - RNA, 13 nt, Human
cagaggaaggaga

SEQ ID NO: 2395647 - RNA, 13 nt, Human
cagagccugcagu

SEQ ID NO: 2395648 - RNA, 17 nt, Human
cagaggaacuguccaga

SEQ ID NO: 2395649 - RNA, 19 nt, Human
cagaggaacuguccagaga

SEQ ID NO: 2395650 - RNA, 20 nt, Human
cagaggaaagcaaaggagau

SEQ ID NO: 2395651 - RNA, 20 nt, Human
cagagcacuggguugcaggg

SEQ ID NO: 2395652 - RNA, 23 nt, Human
cagagcaccuuagacagucccug

SEQ ID NO: 2395653 - RNA, 11 nt, Human
cagagcagaga

SEQ ID NO: 2395654 - RNA, 12 nt, Human
cagagcagagac

SEQ ID NO: 2395655 - RNA, 18 nt, Human
cagagcaccuuagacagu

SEQ ID NO: 2395656 - RNA, 19 nt, Human
cagagcaccuuagacaguc

SEQ ID NO: 2395657 - RNA, 21 nt, Human
cagagcaccuuagacaguccc

SEQ ID NO: 2395658 - RNA, 22 nt, Human
cagagcaccuuagacagucccu

SEQ ID NO: 2395659 - RNA, 13 nt, Human
cagagcagagacc

SEQ ID NO: 2395660 - RNA, 14 nt, Human
cagagcagagacca

SEQ ID NO: 2395661 - RNA, 15 nt, Human
cagagcagagaccau

SEQ ID NO: 2395662 - RNA, 17 nt, Human
cagagcagagaccaucc

SEQ ID NO: 2395663 - RNA, 18 nt, Human
cagagcagagaccauccc

SEQ ID NO: 2395664 - RNA, 19 nt, Human
cagagcagagaccaucccu

SEQ ID NO: 2395665 - RNA, 21 nt, Human
cagagcagagaccaucccuga

SEQ ID NO: 2395666 - RNA, 13 nt, Human
cagagcagaugca

SEQ ID NO: 2395667 - RNA, 14 nt, Human
cagagcagaugcag

SEQ ID NO: 2395668 - RNA, 15 nt, Human
cagagcagaugcaga

SEQ ID NO: 2395669 - RNA, 16 nt, Human
cagagcagaugcagag

SEQ ID NO: 2395670 - RNA, 19 nt, Human
cagagcagaugcagagagc

SEQ ID NO: 2395671 - RNA, 20 nt, Human
cagagcagaugcagagagcc

SEQ ID NO: 2395672 - RNA, 21 nt, Human
cagagcagaugcagagagcca

SEQ ID NO: 2395673 - RNA, 13 nt, Human
cagagcagcagug

SEQ ID NO: 2395674 - RNA, 15 nt, Human
cagagcaggggcagg

SEQ ID NO: 2395675 - RNA, 14 nt, Human
cagagcaggggcag

SEQ ID NO: 2395676 - RNA, 17 nt, Human
cagagcaggaggccccu

SEQ ID NO: 2395677 - RNA, 18 nt, Human
cagagcaggaggccccug

SEQ ID NO: 2395678 - RNA, 19 nt, Human
cagagcaggaggccccugg

SEQ ID NO: 2395679 - RNA, 23 nt, Human
cagagcaggaggccccuggccca

SEQ ID NO: 2395680 - RNA, 21 nt, Human
cagagcaggaagcauucagag

SEQ ID NO: 2395681 - RNA, 20 nt, Human
cagagcagcagugaaaacaa

SEQ ID NO: 2395682 - RNA, 14 nt, Human
cagagcaggacugc

SEQ ID NO: 2395683 - RNA, 14 nt, Human
cagagcaggaggcc

SEQ ID NO: 2395684 - RNA, 15 nt, Human
cagagcaggaggccc

SEQ ID NO: 2395685 - RNA, 21 nt, Human
cagagcagugggccuggccag

SEQ ID NO: 2395686 - RNA, 20 nt, Human
cagagcagugggccuggcca

SEQ ID NO: 2395687 - RNA, 17 nt, Human
cagagcagugggccugg

SEQ ID NO: 2395688 - RNA, 15 nt, Human
cagagcagugggccu

SEQ ID NO: 2395689 - RNA, 22 nt, Human
cagagccaccccuaaagagaua

SEQ ID NO: 2395690 - RNA, 21 nt, Human
cagagcauuuccaacaccaca

SEQ ID NO: 2395691 - RNA, 23 nt, Human
cagagcauuacgugagccaggua

SEQ ID NO: 2395692 - RNA, 19 nt, Human
cagagcauuacgugagcca

SEQ ID NO: 2395693 - RNA, 20 nt, Human
cagagcauuacgugagccag

SEQ ID NO: 2395694 - RNA, 21 nt, Human
cagagcauuacgugagccagg

SEQ ID NO: 2395695 - RNA, 22 nt, Human
cagagcauuacgugagccaggu

SEQ ID NO: 2395696 - RNA, 18 nt, Human
cagagcauuacgugagcc

SEQ ID NO: 2395697 - RNA, 23 nt, Human
cagagcagggguccuugguguga

SEQ ID NO: 2395698 - RNA, 22 nt, Human
cagagcagugggccuggccagc

SEQ ID NO: 2395699 - RNA, 14 nt, Human
cagagccauggacu

SEQ ID NO: 2395700 - RNA, 11 nt, Human
cagagccaugg

SEQ ID NO: 2395701 - RNA, 17 nt, Human
cagagccaugcugggaa

SEQ ID NO: 2395702 - RNA, 23 nt, Human
cagagccaggggggugaggagcu

SEQ ID NO: 2395703 - RNA, 15 nt, Human
cagagcccaccuugg

SEQ ID NO: 2395704 - RNA, 17 nt, Human
cagagcccaccuuggcu

SEQ ID NO: 2395705 - RNA, 19 nt, Human
cagagcccaccuuggcuca

SEQ ID NO: 2395706 - RNA, 20 nt, Human
cagagcccaccuuggcucaa

SEQ ID NO: 2395707 - RNA, 16 nt, Human
cagagcccacgccccc

SEQ ID NO: 2395708 - RNA, 22 nt, Human
cagagauaguggggagacuucu

SEQ ID NO: 2395709 - RNA, 20 nt, Human
cagagauccaaaagaagccc

SEQ ID NO: 2395710 - RNA, 19 nt, Human
cagagauccaaaagaagcc

SEQ ID NO: 2395711 - RNA, 15 nt, Human
cagagaguggcuccu

SEQ ID NO: 2395712 - RNA, 18 nt, Human
cagagaguggcuccuccc

SEQ ID NO: 2395713 - RNA, 13 nt, Human
cagagaguggcuc

SEQ ID NO: 2395714 - RNA, 14 nt, Human
cagagaguggcucc

SEQ ID NO: 2395715 - RNA, 16 nt, Human
cagagaccuccugccu

SEQ ID NO: 2395716 - RNA, 23 nt, Human
cagagagucccacugccucaggu

SEQ ID NO: 2395717 - RNA, 14 nt, Human
cagagaguccucug

SEQ ID NO: 2395718 - RNA, 15 nt, Human
cagagaguccucugg

SEQ ID NO: 2395719 - RNA, 16 nt, Human
cagagaguccucugga

SEQ ID NO: 2395720 - RNA, 17 nt, Human
cagagaguccucuggau

SEQ ID NO: 2395721 - RNA, 18 nt, Human
cagagaguccucuggaug

SEQ ID NO: 2395722 - RNA, 19 nt, Human
cagagaguccucuggaugg

SEQ ID NO: 2395723 - RNA, 21 nt, Human
cagagaugccuccaccgcugc

SEQ ID NO: 2395724 - RNA, 19 nt, Human
cagagaugccuccaccgcu

SEQ ID NO: 2395725 - RNA, 18 nt, Human
cagagaugccuccaccgc

SEQ ID NO: 2395726 - RNA, 16 nt, Human
cagagaugccuccacc

SEQ ID NO: 2395727 - RNA, 15 nt, Human
cagagaugccuccac

SEQ ID NO: 2395728 - RNA, 14 nt, Human
cagagaugccucca

SEQ ID NO: 2395729 - RNA, 13 nt, Human
cagagaugccucc

SEQ ID NO: 2395730 - RNA, 23 nt, Human
cagagauccaaaagaagccccca

SEQ ID NO: 2395731 - RNA, 21 nt, Human
cagagauccaaaagaagcccc

SEQ ID NO: 2395732 - RNA, 20 nt, Human
cagagaugcaccaccaagcc

SEQ ID NO: 2395733 - RNA, 21 nt, Human
cagagaugcaccaccaagcca

SEQ ID NO: 2395734 - RNA, 18 nt, Human
cagagaugggacugggag

SEQ ID NO: 2395735 - RNA, 15 nt, Human
cagagaugggacugg

SEQ ID NO: 2395736 - RNA, 23 nt, Human
cagagauggagguucucucggag

SEQ ID NO: 2395737 - RNA, 21 nt, Human
cagagauggagguucucucgg

SEQ ID NO: 2395738 - RNA, 22 nt, Human
cagagaugggacugggagggcc

SEQ ID NO: 2395739 - RNA, 19 nt, Human
cagagaugggacugggagg

SEQ ID NO: 2395740 - RNA, 23 nt, Human
cagagaugggacugggagggccc

SEQ ID NO: 2395741 - RNA, 14 nt, Human
cagagaugugcacc

SEQ ID NO: 2395742 - RNA, 15 nt, Human
cagagcaagucugca

SEQ ID NO: 2395743 - RNA, 16 nt, Human
cagagcaagucugcag

SEQ ID NO: 2395744 - RNA, 17 nt, Human
cagagcaagucugcagg

SEQ ID NO: 2395745 - RNA, 20 nt, Human
cagagcaagauccugucuuu

SEQ ID NO: 2395746 - RNA, 18 nt, Human
cagagcaagauccugucu

SEQ ID NO: 2395747 - RNA, 20 nt, Human
cagagcaagacucugucuca

SEQ ID NO: 2395748 - RNA, 16 nt, Human
cagagcaaaauaauuu

SEQ ID NO: 2395749 - RNA, 14 nt, Human
cagagcaaaauaau

SEQ ID NO: 2395750 - RNA, 16 nt, Human
cagagaugugcaccca

SEQ ID NO: 2395751 - RNA, 21 nt, Human
cagagauuggaaugggcagcu

SEQ ID NO: 2395752 - RNA, 22 nt, Human
cagagauuggaaugggcagcuc

SEQ ID NO: 2395753 - RNA, 23 nt, Human
cagagauuggaaugggcagcuca

SEQ ID NO: 2395754 - RNA, 20 nt, Human
cagagcaagugagacccugu

SEQ ID NO: 2395755 - RNA, 14 nt, Human
cagagcaagugaga

SEQ ID NO: 2395756 - RNA, 18 nt, Human
cagagcacagcagccccu

SEQ ID NO: 2395757 - RNA, 18 nt, Human
cagagcaagucugcaggu

SEQ ID NO: 2395758 - RNA, 16 nt, Human
cagagcaccuuagaca

SEQ ID NO: 2395759 - RNA, 23 nt, Human
cagagacucagggccccagcacu

SEQ ID NO: 2395760 - RNA, 22 nt, Human
cagagacucagggccccagcac

SEQ ID NO: 2395761 - RNA, 21 nt, Human
cagagacucagggccccagca

SEQ ID NO: 2395762 - RNA, 20 nt, Human
cagagacucagggccccagc

SEQ ID NO: 2395763 - RNA, 13 nt, Human
cagagacuccugc

SEQ ID NO: 2395764 - RNA, 14 nt, Human
cagagacuccugca

SEQ ID NO: 2395765 - RNA, 15 nt, Human
cagagacuccugcag

SEQ ID NO: 2395766 - RNA, 16 nt, Human
cagagacuccugcagg

SEQ ID NO: 2395767 - RNA, 17 nt, Human
cagagacuccugcaggc

SEQ ID NO: 2395768 - RNA, 18 nt, Human
cagagacuccugcaggca

SEQ ID NO: 2395769 - RNA, 19 nt, Human
cagagacuccugcaggcag

SEQ ID NO: 2395770 - RNA, 19 nt, Human
cagagacucagggccccag

SEQ ID NO: 2395771 - RNA, 20 nt, Human
cagagaccguccucaccccu

SEQ ID NO: 2395772 - RNA, 18 nt, Human
cagagaccuccugccucc

SEQ ID NO: 2395773 - RNA, 19 nt, Human
cagagacccucugccacca

SEQ ID NO: 2395774 - RNA, 20 nt, Human
cagagacccucugccaccag

SEQ ID NO: 2395775 - RNA, 13 nt, Human
cagagaccguccu

SEQ ID NO: 2395776 - RNA, 16 nt, Human
cagagaccguccucac

SEQ ID NO: 2395777 - RNA, 17 nt, Human
cagagaccguccucacc

SEQ ID NO: 2395778 - RNA, 18 nt, Human
cagagaccguccucaccc

SEQ ID NO: 2395779 - RNA, 19 nt, Human
cagagaccguccucacccc

SEQ ID NO: 2395780 - RNA, 21 nt, Human
cagagaccaucccugaaggcc

SEQ ID NO: 2395781 - RNA, 14 nt, Human
cagagaccauugca

SEQ ID NO: 2395782 - RNA, 15 nt, Human
cagagacccucugcc

SEQ ID NO: 2395783 - RNA, 17 nt, Human
cagagaccaucccugaa

SEQ ID NO: 2395784 - RNA, 18 nt, Human
cagagaccaucccugaag

SEQ ID NO: 2395785 - RNA, 19 nt, Human
cagagaccaucccugaagg

SEQ ID NO: 2395786 - RNA, 20 nt, Human
cagagaccaucccugaaggc

SEQ ID NO: 2395787 - RNA, 23 nt, Human
cagagaagcuauaaauuccucuu

SEQ ID NO: 2395788 - RNA, 21 nt, Human
cagagaagcuauaaauuccuc

SEQ ID NO: 2395789 - RNA, 15 nt, Human
cagagaagccccuuc

SEQ ID NO: 2395790 - RNA, 24 nt, Human
cagagaagccccuuccccauggga

SEQ ID NO: 2395791 - RNA, 17 nt, Human
cagagaagccccuuccc

SEQ ID NO: 2395792 - RNA, 18 nt, Human
cagagaagccccuucccc

SEQ ID NO: 2395793 - RNA, 20 nt, Human
cagagaagccaaaagauugg

SEQ ID NO: 2395794 - RNA, 23 nt, Human
cagagaagagaguauuggguaga

SEQ ID NO: 2395795 - RNA, 23 nt, Human
cagagaacuaacacuauuuuaug

SEQ ID NO: 2395796 - RNA, 20 nt, Human
cagagaacuaacacuauuuu

SEQ ID NO: 2395797 - RNA, 21 nt, Human
cagagaacuaacacuauuuua

SEQ ID NO: 2395798 - RNA, 22 nt, Human
cagagaacuaacacuauuuuau

SEQ ID NO: 2395799 - RNA, 19 nt, Human
cagagaaaggggagcccac

SEQ ID NO: 2395800 - RNA, 18 nt, Human
cagagaacuaacacuauu

SEQ ID NO: 2395801 - RNA, 17 nt, Human
cagagaaggcaggaaug

SEQ ID NO: 2395802 - RNA, 14 nt, Human
cagagaaggcagga

SEQ ID NO: 2395803 - RNA, 13 nt, Human
cagagaaggcagg

SEQ ID NO: 2395804 - RNA, 20 nt, Human
cagagaaggcaggaaugugu

SEQ ID NO: 2395805 - RNA, 13 nt, Human
cagagaagugaca

SEQ ID NO: 2395806 - RNA, 14 nt, Human
cagagaagugacag

SEQ ID NO: 2395807 - RNA, 15 nt, Human
cagagaagugacagg

SEQ ID NO: 2395808 - RNA, 16 nt, Human
cagagaagugacaggg

SEQ ID NO: 2395809 - RNA, 19 nt, Human
cagagaaugaaagggccca

SEQ ID NO: 2395810 - RNA, 17 nt, Human
cagagaagugacaggga

SEQ ID NO: 2395811 - RNA, 18 nt, Human
cagagaagugacagggaa

SEQ ID NO: 2395812 - RNA, 19 nt, Human
cagagaagugacagggaag

SEQ ID NO: 2395813 - RNA, 20 nt, Human
cagagaagugacagggaagc

SEQ ID NO: 2395814 - RNA, 21 nt, Human
cagagaagugacagggaagcu

SEQ ID NO: 2395815 - RNA, 22 nt, Human
cagagaagugacagggaagcua

SEQ ID NO: 2395816 - RNA, 23 nt, Human
cagagaagugacagggaagcuac

SEQ ID NO: 2395817 - RNA, 24 nt, Human
cagagaagugacagggaagcuaca

SEQ ID NO: 2395818 - RNA, 15 nt, Human
cagagaauucucuua

SEQ ID NO: 2395819 - RNA, 21 nt, Human
cagagaauugcugauucuuga

SEQ ID NO: 2395820 - RNA, 14 nt, Human
cagagaauucuuag

SEQ ID NO: 2395821 - RNA, 19 nt, Human
cagagaaucauacuuagca

SEQ ID NO: 2395822 - RNA, 11 nt, Human
cagagaaguuc

SEQ ID NO: 2395823 - RNA, 11 nt, Human
cagagaauaua

SEQ ID NO: 2395824 - RNA, 20 nt, Human
cagagaaugaaagggcccag

SEQ ID NO: 2395825 - RNA, 21 nt, Human
cagagaaugaaagggcccaga

SEQ ID NO: 2395826 - RNA, 14 nt, Human
cagagacagagagg

SEQ ID NO: 2395827 - RNA, 16 nt, Human
cagagacagagaggac

SEQ ID NO: 2395828 - RNA, 22 nt, Human
cagagacaccugcaccuccccc

SEQ ID NO: 2395829 - RNA, 20 nt, Human
cagagacaccugcaccuccc

SEQ ID NO: 2395830 - RNA, 18 nt, Human
cagagacaccugcaccuc

SEQ ID NO: 2395831 - RNA, 17 nt, Human
cagagacaccugcaccu

SEQ ID NO: 2395832 - RNA, 16 nt, Human
cagagacaccugcacc

SEQ ID NO: 2395833 - RNA, 15 nt, Human
cagagacaccugcac

SEQ ID NO: 2395834 - RNA, 14 nt, Human
cagagacaccugca

SEQ ID NO: 2395835 - RNA, 13 nt, Human
cagagacaccugc

SEQ ID NO: 2395836 - RNA, 16 nt, Human
cagagacacaagccuu

SEQ ID NO: 2395837 - RNA, 17 nt, Human
cagagacacaagccuuc

SEQ ID NO: 2395838 - RNA, 23 nt, Human
cagagaauuucuaccauuucaga

SEQ ID NO: 2395839 - RNA, 22 nt, Human
cagagaauuucuaccauuucag

SEQ ID NO: 2395840 - RNA, 16 nt, Human
cagagaauuucuacca

SEQ ID NO: 2395841 - RNA, 15 nt, Human
cagagaauuucuacc

SEQ ID NO: 2395842 - RNA, 13 nt, Human
cagagaauuucua

SEQ ID NO: 2395843 - RNA, 14 nt, Human
cagagacacaagcc

SEQ ID NO: 2395844 - RNA, 15 nt, Human
cagagacacaagccu

SEQ ID NO: 2395845 - RNA, 23 nt, Human
cagagacaggaaaauccucuggc

SEQ ID NO: 2395846 - RNA, 22 nt, Human
cagagacaggaaaauccucugg

SEQ ID NO: 2395847 - RNA, 21 nt, Human
cagagacaggaaaauccucug

SEQ ID NO: 2395848 - RNA, 15 nt, Human
cagagacaggaaaau

SEQ ID NO: 2395849 - RNA, 14 nt, Human
cagagacaggaaaa

SEQ ID NO: 2395850 - RNA, 13 nt, Human
cagagacaggaaa

SEQ ID NO: 2395851 - RNA, 19 nt, Human
cagagacaggcccaagaga

SEQ ID NO: 2395852 - RNA, 14 nt, Human
cagagacaggccca

SEQ ID NO: 2395853 - RNA, 22 nt, Human
cagagacaggaagucuucaggg

SEQ ID NO: 2395854 - RNA, 16 nt, Human
cagagacauacuugaa

SEQ ID NO: 2395855 - RNA, 15 nt, Human
cagagacauacuuga

SEQ ID NO: 2395856 - RNA, 23 nt, Human
cagagacaggcccaagagaugaa

SEQ ID NO: 2395857 - RNA, 23 nt, Human
cagagacauacuugaagggccag

SEQ ID NO: 2395858 - RNA, 21 nt, Human
cagagacauacuugaagggcc

SEQ ID NO: 2395859 - RNA, 20 nt, Human
cagagacauacuugaagggc

SEQ ID NO: 2395860 - RNA, 19 nt, Human
cagagacauacuugaaggg

SEQ ID NO: 2395861 - RNA, 17 nt, Human
cagagacauacuugaag

SEQ ID NO: 2395862 - RNA, 13 nt, Human
cagagaccauccc

SEQ ID NO: 2395863 - RNA, 13 nt, Human
cagagacauuccu

SEQ ID NO: 2395864 - RNA, 19 nt, Human
cagagacauuccuccgagc

SEQ ID NO: 2395865 - RNA, 14 nt, Human
cagagaccaucccu

SEQ ID NO: 2395866 - RNA, 16 nt, Human
cagagaccaucccuga

SEQ ID NO: 2395867 - RNA, 14 nt, Human
cagaugcaaugacu

SEQ ID NO: 2395868 - RNA, 21 nt, Human
cagaugcaaugugcuacugau

SEQ ID NO: 2395869 - RNA, 15 nt, Human
cagaugcaaugugcu

SEQ ID NO: 2395870 - RNA, 13 nt, Human
cagaugcaccagc

SEQ ID NO: 2395871 - RNA, 14 nt, Human
cagaugcaccagcc

SEQ ID NO: 2395872 - RNA, 16 nt, Human
cagaugcaccagcccu

SEQ ID NO: 2395873 - RNA, 17 nt, Human
cagaugcaccagcccuu

SEQ ID NO: 2395874 - RNA, 22 nt, Human
cagaugcaccagcccuuagcag

SEQ ID NO: 2395875 - RNA, 20 nt, Human
cagaugcagagagccauuuu

SEQ ID NO: 2395876 - RNA, 16 nt, Human
cagaugcagagagcca

SEQ ID NO: 2395877 - RNA, 18 nt, Human
cagaugcagagagccauu

SEQ ID NO: 2395878 - RNA, 14 nt, Human
cagaugcagggcag

SEQ ID NO: 2395879 - RNA, 13 nt, Human
cagaugcagggca

SEQ ID NO: 2395880 - RNA, 13 nt, Human
cagaugaccccuc

SEQ ID NO: 2395881 - RNA, 14 nt, Human
cagaugaccccucc

SEQ ID NO: 2395882 - RNA, 18 nt, Human
cagaugaccccuccccua

SEQ ID NO: 2395883 - RNA, 19 nt, Human
cagaugagaaacucuugag

SEQ ID NO: 2395884 - RNA, 23 nt, Human
cagaugcaaagaggcaagaggcu

SEQ ID NO: 2395885 - RNA, 18 nt, Human
cagaugcaaagaggcaag

SEQ ID NO: 2395886 - RNA, 17 nt, Human
cagaugcaaagaggcaa

SEQ ID NO: 2395887 - RNA, 23 nt, Human
cagaugaugccaaccucuggagc

SEQ ID NO: 2395888 - RNA, 14 nt, Human
cagaugauccauga

SEQ ID NO: 2395889 - RNA, 16 nt, Human
cagaugcaaagaggca

SEQ ID NO: 2395890 - RNA, 12 nt, Human
cagaugagcugu

SEQ ID NO: 2395891 - RNA, 17 nt, Human
cagaugagaaacucuug

SEQ ID NO: 2395892 - RNA, 16 nt, Human
cagaugaguaaaggag

SEQ ID NO: 2395893 - RNA, 23 nt, Human
cagaucugugccccaugccuguc

SEQ ID NO: 2395894 - RNA, 21 nt, Human
cagaucugugccccaugccug

SEQ ID NO: 2395895 - RNA, 20 nt, Human
cagaucugugccccaugccu

SEQ ID NO: 2395896 - RNA, 18 nt, Human
cagaucugugccccaugc

SEQ ID NO: 2395897 - RNA, 18 nt, Human
cagaucugucugauagga

SEQ ID NO: 2395898 - RNA, 17 nt, Human
cagaugaaugccgugga

SEQ ID NO: 2395899 - RNA, 20 nt, Human
cagaugaacucuuagaaaug

SEQ ID NO: 2395900 - RNA, 14 nt, Human
cagaugaaugauaa

SEQ ID NO: 2395901 - RNA, 23 nt, Human
cagaugaauguauuuauuuggga

SEQ ID NO: 2395902 - RNA, 19 nt, Human
cagaugaaugauaaacucu

SEQ ID NO: 2395903 - RNA, 20 nt, Human
cagaugacaaaaauucaacu

SEQ ID NO: 2395904 - RNA, 19 nt, Human
cagaugaauguauuuauuu

SEQ ID NO: 2395905 - RNA, 15 nt, Human
cagaugaauguauuu

SEQ ID NO: 2395906 - RNA, 15 nt, Human
cagaucugugcccca

SEQ ID NO: 2395907 - RNA, 14 nt, Human
cagaucugugcccc

SEQ ID NO: 2395908 - RNA, 13 nt, Human
cagaucugugccc

SEQ ID NO: 2395909 - RNA, 12 nt, Human
cagaucugugcc

SEQ ID NO: 2395910 - RNA, 13 nt, Human
cagaucugucuga

SEQ ID NO: 2395911 - RNA, 18 nt, Human
cagaucuggucccuugca

SEQ ID NO: 2395912 - RNA, 17 nt, Human
cagaucuggucccuugc

SEQ ID NO: 2395913 - RNA, 24 nt, Human
cagaucugacaugauuccuuccug

SEQ ID NO: 2395914 - RNA, 23 nt, Human
cagaucuggaaccucagccuggc

SEQ ID NO: 2395915 - RNA, 22 nt, Human
cagaucuggaaccucagccugg

SEQ ID NO: 2395916 - RNA, 21 nt, Human
cagaucuggaaccucagccug

SEQ ID NO: 2395917 - RNA, 20 nt, Human
cagaucuggaaccucagccu

SEQ ID NO: 2395918 - RNA, 19 nt, Human
cagaucuggaaccucagcc

SEQ ID NO: 2395919 - RNA, 18 nt, Human
cagaucuggaaccucagc

SEQ ID NO: 2395920 - RNA, 15 nt, Human
cagaucuggaaccuc

SEQ ID NO: 2395921 - RNA, 14 nt, Human
cagaucuggaaccu

SEQ ID NO: 2395922 - RNA, 23 nt, Human
cagaucugacaugauuccuuccu

SEQ ID NO: 2395923 - RNA, 22 nt, Human
cagaucugacaugauuccuucc

SEQ ID NO: 2395924 - RNA, 19 nt, Human
cagauccuuguuucaaaca

SEQ ID NO: 2395925 - RNA, 18 nt, Human
cagaucggaucuguugca

SEQ ID NO: 2395926 - RNA, 14 nt, Human
cagaucuccuggca

SEQ ID NO: 2395927 - RNA, 19 nt, Human
cagaucuaccccuuacuua

SEQ ID NO: 2395928 - RNA, 20 nt, Human
cagaucucuaacuucaccau

SEQ ID NO: 2395929 - RNA, 13 nt, Human
cagauccuuguuu

SEQ ID NO: 2395930 - RNA, 17 nt, Human
cagauacaauguauuua

SEQ ID NO: 2395931 - RNA, 14 nt, Human
cagauccuuguuuc

SEQ ID NO: 2395932 - RNA, 15 nt, Human
cagauccuuguuuca

SEQ ID NO: 2395933 - RNA, 16 nt, Human
cagauccuuguuucaa

SEQ ID NO: 2395934 - RNA, 18 nt, Human
cagauccuuguuucaaac

SEQ ID NO: 2395935 - RNA, 14 nt, Human
cagauccuggaaau

SEQ ID NO: 2395936 - RNA, 20 nt, Human
cagauacaggaaaagcugcu

SEQ ID NO: 2395937 - RNA, 21 nt, Human
cagauacaggaaaagcugcug

SEQ ID NO: 2395938 - RNA, 22 nt, Human
cagauacaggaaaagcugcuga

SEQ ID NO: 2395939 - RNA, 20 nt, Human
cagagugugggaagggagag

SEQ ID NO: 2395940 - RNA, 19 nt, Human
cagagugugggaagggaga

SEQ ID NO: 2395941 - RNA, 23 nt, Human
cagaguguggccuucggacaacu

SEQ ID NO: 2395942 - RNA, 21 nt, Human
cagaguggucuuucuggagag

SEQ ID NO: 2395943 - RNA, 12 nt, Human
cagagugugcug

SEQ ID NO: 2395944 - RNA, 22 nt, Human
cagaguggucuuucuggagagg

SEQ ID NO: 2395945 - RNA, 18 nt, Human
cagagugugcuggaggac

SEQ ID NO: 2395946 - RNA, 15 nt, Human
cagagugugcuggag

SEQ ID NO: 2395947 - RNA, 16 nt, Human
cagagugugcuggagg

SEQ ID NO: 2395948 - RNA, 20 nt, Human
cagaguucacuauaaauggu

SEQ ID NO: 2395949 - RNA, 14 nt, Human
cagaguucacuaua

SEQ ID NO: 2395950 - RNA, 12 nt, Human
cagaguucacua

SEQ ID NO: 2395951 - RNA, 14 nt, Human
cagaguugaagaca

SEQ ID NO: 2395952 - RNA, 16 nt, Human
cagaguuccccaugca

SEQ ID NO: 2395953 - RNA, 18 nt, Human
cagaguuccccaugcaga

SEQ ID NO: 2395954 - RNA, 24 nt, Human
cagaguuccccaugcagacaugag

SEQ ID NO: 2395955 - RNA, 17 nt, Human
cagaguuccugcggagu

SEQ ID NO: 2395956 - RNA, 23 nt, Human
cagaguuccugcggagugaagag

SEQ ID NO: 2395957 - RNA, 22 nt, Human
cagaguuccugcggagugaaga

SEQ ID NO: 2395958 - RNA, 15 nt, Human
cagaguucugcucua

SEQ ID NO: 2395959 - RNA, 15 nt, Human
cagaguugaagacag

SEQ ID NO: 2395960 - RNA, 16 nt, Human
cagaguugaagacaga

SEQ ID NO: 2395961 - RNA, 22 nt, Human
cagaguugaagacagagcuaca

SEQ ID NO: 2395962 - RNA, 20 nt, Human
cagaguugcugcaaaccuga

SEQ ID NO: 2395963 - RNA, 20 nt, Human
cagaguugacaugagauuua

SEQ ID NO: 2395964 - RNA, 15 nt, Human
cagaguugcugggag

SEQ ID NO: 2395965 - RNA, 19 nt, Human
cagaguugcugggagcuga

SEQ ID NO: 2395966 - RNA, 20 nt, Human
cagaguugcugggagcugaa

SEQ ID NO: 2395967 - RNA, 12 nt, Human
cagaguuguaaa

SEQ ID NO: 2395968 - RNA, 14 nt, Human
cagaguuguuacau

SEQ ID NO: 2395969 - RNA, 13 nt, Human
cagaguuguaaau

SEQ ID NO: 2395970 - RNA, 14 nt, Human
cagaguuguaaaua

SEQ ID NO: 2395971 - RNA, 16 nt, Human
cagaguuguaaauaua

SEQ ID NO: 2395972 - RNA, 17 nt, Human
cagaguuguaaauauau

SEQ ID NO: 2395973 - RNA, 18 nt, Human
cagaguuguaaauauaua

SEQ ID NO: 2395974 - RNA, 19 nt, Human
cagaguuguaaauauauaa

SEQ ID NO: 2395975 - RNA, 20 nt, Human
cagaguuguaaauauauaaa

SEQ ID NO: 2395976 - RNA, 23 nt, Human
cagaguuguaaauauauaaauau

SEQ ID NO: 2395977 - RNA, 17 nt, Human
cagaguugaagacagag

SEQ ID NO: 2395978 - RNA, 18 nt, Human
cagaguugaagacagagc

SEQ ID NO: 2395979 - RNA, 19 nt, Human
cagaguugaagacagagcu

SEQ ID NO: 2395980 - RNA, 20 nt, Human
cagaguugaagacagagcua

SEQ ID NO: 2395981 - RNA, 23 nt, Human
cagaguugugcacauggcuuagu

SEQ ID NO: 2395982 - RNA, 17 nt, Human
cagaguuuguguguugu

SEQ ID NO: 2395983 - RNA, 19 nt, Human
cagaguuuguguguugucu

SEQ ID NO: 2395984 - RNA, 22 nt, Human
cagaguuuguguguugucuuga

SEQ ID NO: 2395985 - RNA, 23 nt, Human
cagaguuuagaggaaaaaaauga

SEQ ID NO: 2395986 - RNA, 19 nt, Human
cagaguuguuacauuuuua

SEQ ID NO: 2395987 - RNA, 18 nt, Human
cagaguuguuacauuuuu

SEQ ID NO: 2395988 - RNA, 15 nt, Human
cagaguuguuacauu

SEQ ID NO: 2395989 - RNA, 21 nt, Human
cagauaaaauuauagauggga

SEQ ID NO: 2395990 - RNA, 15 nt, Human
cagaguuuuuaugua

SEQ ID NO: 2395991 - RNA, 16 nt, Human
cagauaaaauuauaga

SEQ ID NO: 2395992 - RNA, 14 nt, Human
cagauaaacaguag

SEQ ID NO: 2395993 - RNA, 22 nt, Human
cagauaaagguucaugcaaacu

SEQ ID NO: 2395994 - RNA, 23 nt, Human
cagauaaauaguuuaugauucca

SEQ ID NO: 2395995 - RNA, 18 nt, Human
cagauaaucagccucuua

SEQ ID NO: 2395996 - RNA, 17 nt, Human
cagauaaucagccucuu

SEQ ID NO: 2395997 - RNA, 16 nt, Human
cagauaaucagccucu

SEQ ID NO: 2395998 - RNA, 15 nt, Human
cagauaaucagccuc

SEQ ID NO: 2395999 - RNA, 14 nt, Human
cagauaaucacaau

SEQ ID NO: 2396000 - RNA, 19 nt, Human
cagauaaucagccucuuaa

SEQ ID NO: 2396001 - RNA, 14 nt, Human
cagauaaucagugu

SEQ ID NO: 2396002 - RNA, 16 nt, Human
cagauaaugugaaaau

SEQ ID NO: 2396003 - RNA, 13 nt, Human
cagauacaaugua

SEQ ID NO: 2396004 - RNA, 14 nt, Human
cagauacaauguau

SEQ ID NO: 2396005 - RNA, 14 nt, Human
cagauaaugugaaa

SEQ ID NO: 2396006 - RNA, 13 nt, Human
cagauaaugugaa

SEQ ID NO: 2396007 - RNA, 21 nt, Human
cagauaagaaugcugguuuuc

SEQ ID NO: 2396008 - RNA, 19 nt, Human
cagauaagaaugcugguuu

SEQ ID NO: 2396009 - RNA, 22 nt, Human
cagauaagcaagagagauguuu

SEQ ID NO: 2396010 - RNA, 20 nt, Human
cagauaagcaagagagaugu

SEQ ID NO: 2396011 - RNA, 21 nt, Human
cagauaacuguuauuuauaau

SEQ ID NO: 2396012 - RNA, 20 nt, Human
cagauaacuguuauuuauaa

SEQ ID NO: 2396013 - RNA, 17 nt, Human
cagauaaccagcuguaa

SEQ ID NO: 2396014 - RNA, 14 nt, Human
cagauaacuguuau

SEQ ID NO: 2396015 - RNA, 19 nt, Human
cagauaacuguuauuuaua

SEQ ID NO: 2396016 - RNA, 16 nt, Human
cagauaacuguuauuu

SEQ ID NO: 2396017 - RNA, 23 nt, Human
cagagugcaagccccugcuccag

SEQ ID NO: 2396018 - RNA, 18 nt, Human
cagagugcaagccccugc

SEQ ID NO: 2396019 - RNA, 20 nt, Human
cagagugagacccugucucu

SEQ ID NO: 2396020 - RNA, 19 nt, Human
cagagugagacucugucuc

SEQ ID NO: 2396021 - RNA, 20 nt, Human
cagagugagacucugucuca

SEQ ID NO: 2396022 - RNA, 20 nt, Human
cagagugcaagccccugcuc

SEQ ID NO: 2396023 - RNA, 14 nt, Human
cagagugcccagaa

SEQ ID NO: 2396024 - RNA, 13 nt, Human
cagagugcccaga

SEQ ID NO: 2396025 - RNA, 15 nt, Human
cagagugcccagaac

SEQ ID NO: 2396026 - RNA, 13 nt, Human
cagaguggccugg

SEQ ID NO: 2396027 - RNA, 12 nt, Human
cagaguggccug

SEQ ID NO: 2396028 - RNA, 14 nt, Human
cagaguggaaugcu

SEQ ID NO: 2396029 - RNA, 15 nt, Human
cagaguggucuuucu

SEQ ID NO: 2396030 - RNA, 23 nt, Human
cagaguggccuggccaggagcuc

SEQ ID NO: 2396031 - RNA, 22 nt, Human
cagaguggccuggccaggagcu

SEQ ID NO: 2396032 - RNA, 21 nt, Human
cagaguggccuggccaggagc

SEQ ID NO: 2396033 - RNA, 18 nt, Human
cagaguggccuggccagg

SEQ ID NO: 2396034 - RNA, 17 nt, Human
cagaguggccuggccag

SEQ ID NO: 2396035 - RNA, 16 nt, Human
cagaguggccuggcca

SEQ ID NO: 2396036 - RNA, 15 nt, Human
cagaguggccuggcc

SEQ ID NO: 2396037 - RNA, 23 nt, Human
cagagucucgcucuguugcccag

SEQ ID NO: 2396038 - RNA, 18 nt, Human
cagagucggaacggagaa

SEQ ID NO: 2396039 - RNA, 15 nt, Human
cagagucggaacgga

SEQ ID NO: 2396040 - RNA, 23 nt, Human
cagagucggaacggagaaaggug

SEQ ID NO: 2396041 - RNA, 15 nt, Human
cagagugagacccag

SEQ ID NO: 2396042 - RNA, 14 nt, Human
cagagugagaccca

SEQ ID NO: 2396043 - RNA, 20 nt, Human
cagagucuggugaagcucac

SEQ ID NO: 2396044 - RNA, 18 nt, Human
cagagucuugcuaccuca

SEQ ID NO: 2396045 - RNA, 22 nt, Human
cagagucucacuguugcccagg

SEQ ID NO: 2396046 - RNA, 23 nt, Human
cagagucucacuguugcccaggc

SEQ ID NO: 2396047 - RNA, 19 nt, Human
cagagugagacccugucuc

SEQ ID NO: 2396048 - RNA, 15 nt, Human
cagagugagacccug

SEQ ID NO: 2396049 - RNA, 20 nt, Human
cagagugagacccagcccuc

SEQ ID NO: 2396050 - RNA, 17 nt, Human
cagagugagacccagcc

SEQ ID NO: 2396051 - RNA, 16 nt, Human
cagagugagacucugu

SEQ ID NO: 2396052 - RNA, 17 nt, Human
cagagugagacucuguc

SEQ ID NO: 2396053 - RNA, 18 nt, Human
cagagugagacucugucu

SEQ ID NO: 2396054 - RNA, 13 nt, Human
cagagucucacug

SEQ ID NO: 2396055 - RNA, 14 nt, Human
cagaguccuuucca

SEQ ID NO: 2396056 - RNA, 15 nt, Human
cagaguccuuuccaa

SEQ ID NO: 2396057 - RNA, 15 nt, Human
cagagucagcagaac

SEQ ID NO: 2396058 - RNA, 22 nt, Human
cagagggcccaggcaggccacc

SEQ ID NO: 2396059 - RNA, 16 nt, Human
cagaguccaggcccca

SEQ ID NO: 2396060 - RNA, 15 nt, Human
cagaguccaggcccc

SEQ ID NO: 2396061 - RNA, 14 nt, Human
cagaguccaggccc

SEQ ID NO: 2396062 - RNA, 17 nt, Human
cagagucucacuguugc

SEQ ID NO: 2396063 - RNA, 19 nt, Human
cagagucucacuguugccc

SEQ ID NO: 2396064 - RNA, 20 nt, Human
cagagucucacuguugccca

SEQ ID NO: 2396065 - RNA, 21 nt, Human
cagagucucacuguugcccag

SEQ ID NO: 2396066 - RNA, 18 nt, Human
cagagggcccaggcaggc

SEQ ID NO: 2396067 - RNA, 16 nt, Human
cagagggcccaggcag

SEQ ID NO: 2396068 - RNA, 15 nt, Human
cagagggcccaggca

SEQ ID NO: 2396069 - RNA, 13 nt, Human
cagagggcccagg

SEQ ID NO: 2396070 - RNA, 18 nt, Human
cagagggcagaggcugga

SEQ ID NO: 2396071 - RNA, 17 nt, Human
cagagggcagaggcugg

SEQ ID NO: 2396072 - RNA, 16 nt, Human
cagagggcagaggcug

SEQ ID NO: 2396073 - RNA, 23 nt, Human
cagagggaggaaucgaggaacca

SEQ ID NO: 2396074 - RNA, 22 nt, Human
cagagggaggaaucgaggaacc

SEQ ID NO: 2396075 - RNA, 19 nt, Human
cagagggacuuuguauaga

SEQ ID NO: 2396076 - RNA, 14 nt, Human
cagagggcacucug

SEQ ID NO: 2396077 - RNA, 15 nt, Human
cagagggccugcaag

SEQ ID NO: 2396078 - RNA, 19 nt, Human
cagagggccugcaagggag

SEQ ID NO: 2396079 - RNA, 20 nt, Human
cagagggagugacagaggca

SEQ ID NO: 2396080 - RNA, 21 nt, Human
cagagggagugacagaggcag

SEQ ID NO: 2396081 - RNA, 22 nt, Human
cagagggagugacagaggcagc

SEQ ID NO: 2396082 - RNA, 23 nt, Human
cagagggagugacagaggcagcc

SEQ ID NO: 2396083 - RNA, 16 nt, Human
cagaggccuauaauga

SEQ ID NO: 2396084 - RNA, 20 nt, Human
cagaggcccucgcugccagc

SEQ ID NO: 2396085 - RNA, 20 nt, Human
cagaggccuauaaugaagcu

SEQ ID NO: 2396086 - RNA, 19 nt, Human
cagaggcccucgcugccag

SEQ ID NO: 2396087 - RNA, 23 nt, Human
cagaggcccccagcccagggcuc

SEQ ID NO: 2396088 - RNA, 24 nt, Human
cagaggcccccagcccagggcucc

SEQ ID NO: 2396089 - RNA, 17 nt, Human
cagaggccccagccucc

SEQ ID NO: 2396090 - RNA, 16 nt, Human
cagaggccccagccuc

SEQ ID NO: 2396091 - RNA, 14 nt, Human
cagaggccccagcc

SEQ ID NO: 2396092 - RNA, 13 nt, Human
cagaggccccagc

SEQ ID NO: 2396093 - RNA, 16 nt, Human
cagaggcccccagccc

SEQ ID NO: 2396094 - RNA, 17 nt, Human
cagaggcccccagccca

SEQ ID NO: 2396095 - RNA, 19 nt, Human
cagaggcccccagcccagg

SEQ ID NO: 2396096 - RNA, 22 nt, Human
cagaggcccccagcccagggcu

SEQ ID NO: 2396097 - RNA, 13 nt, Human
cagaggcugccuc

SEQ ID NO: 2396098 - RNA, 20 nt, Human
cagaggcuauuauuuucacu

SEQ ID NO: 2396099 - RNA, 18 nt, Human
cagaggcgcacugugacc

SEQ ID NO: 2396100 - RNA, 23 nt, Human
cagaggcgcaugaauuugugaag

SEQ ID NO: 2396101 - RNA, 13 nt, Human
cagaggccugccc

SEQ ID NO: 2396102 - RNA, 14 nt, Human
cagaggccugcccg

SEQ ID NO: 2396103 - RNA, 17 nt, Human
cagaggcgcacugugac

SEQ ID NO: 2396104 - RNA, 19 nt, Human
cagagggaagaaaagagcu

SEQ ID NO: 2396105 - RNA, 23 nt, Human
cagagggaaaguaaauauuucag

SEQ ID NO: 2396106 - RNA, 20 nt, Human
cagaggcuucuucagaucag

SEQ ID NO: 2396107 - RNA, 16 nt, Human
cagaggcuucuucaga

SEQ ID NO: 2396108 - RNA, 15 nt, Human
cagaggcuucuucag

SEQ ID NO: 2396109 - RNA, 21 nt, Human
cagaggcuggaggcagggccu

SEQ ID NO: 2396110 - RNA, 14 nt, Human
cagaggcuggguuc

SEQ ID NO: 2396111 - RNA, 20 nt, Human
cagaggcuggaggcagggcc

SEQ ID NO: 2396112 - RNA, 19 nt, Human
cagaggcuggaggcagggc

SEQ ID NO: 2396113 - RNA, 12 nt, Human
cagaggcugggu

SEQ ID NO: 2396114 - RNA, 13 nt, Human
cagaggcuggguu

SEQ ID NO: 2396115 - RNA, 18 nt, Human
cagaggcuggaggcaggg

SEQ ID NO: 2396116 - RNA, 17 nt, Human
cagaggcuggaggcagg

SEQ ID NO: 2396117 - RNA, 16 nt, Human
cagaggcuggaggcag

SEQ ID NO: 2396118 - RNA, 14 nt, Human
cagaggcuggaggc

SEQ ID NO: 2396119 - RNA, 17 nt, Human
cagaggcuaauucugca

SEQ ID NO: 2396120 - RNA, 13 nt, Human
cagaggcuggagg

SEQ ID NO: 2396121 - RNA, 14 nt, Human
cagaggcugcccca

SEQ ID NO: 2396122 - RNA, 23 nt, Human
cagaggcugccucucccaucacu

SEQ ID NO: 2396123 - RNA, 14 nt, Human
cagagggagugaca

SEQ ID NO: 2396124 - RNA, 16 nt, Human
cagagggagugacaga

SEQ ID NO: 2396125 - RNA, 18 nt, Human
cagagggagugacagagg

SEQ ID NO: 2396126 - RNA, 19 nt, Human
cagagggagugacagaggc

SEQ ID NO: 2396127 - RNA, 21 nt, Human
cagaggauugcugccccauca

SEQ ID NO: 2396128 - RNA, 19 nt, Human
cagaggauggccagugucu

SEQ ID NO: 2396129 - RNA, 22 nt, Human
cagaggauggccagugucuguc

SEQ ID NO: 2396130 - RNA, 23 nt, Human
cagaggcagccccauucugccug

SEQ ID NO: 2396131 - RNA, 19 nt, Human
cagaggccaugggccuccu

SEQ ID NO: 2396132 - RNA, 16 nt, Human
cagaggccaugggccu

SEQ ID NO: 2396133 - RNA, 20 nt, Human
cagaggccaugggccuccug

SEQ ID NO: 2396134 - RNA, 21 nt, Human
cagaggccaugggccuccugu

SEQ ID NO: 2396135 - RNA, 14 nt, Human
cagaggccauggca

SEQ ID NO: 2396136 - RNA, 20 nt, Human
cagaggccagaggcccccag

SEQ ID NO: 2396137 - RNA, 12 nt, Human
cagaggcagccc

SEQ ID NO: 2396138 - RNA, 13 nt, Human
cagaggcagcccc

SEQ ID NO: 2396139 - RNA, 14 nt, Human
cagaggcagcccca

SEQ ID NO: 2396140 - RNA, 15 nt, Human
cagaggcagccccau

SEQ ID NO: 2396141 - RNA, 18 nt, Human
cagaggcagccccauucu

SEQ ID NO: 2396142 - RNA, 19 nt, Human
cagaggcagccccauucug

SEQ ID NO: 2396143 - RNA, 20 nt, Human
cagaggcagccccauucugc

SEQ ID NO: 2396144 - RNA, 22 nt, Human
cagaggcagccccauucugccu

SEQ ID NO: 2396145 - RNA, 13 nt, Human
cagcagcccuccu

SEQ ID NO: 2396146 - RNA, 15 nt, Human
cagaugccccagagc

SEQ ID NO: 2396147 - RNA, 21 nt, Human
cacccuuuuccagcuggauga

SEQ ID NO: 2396148 - RNA, 21 nt, Human
caccgaaguggacuggccccu

SEQ ID NO: 2396149 - RNA, 22 nt, Human
caccgaaaacguggcugcuuca

SEQ ID NO: 2396150 - RNA, 19 nt, Human
caccgaaaacguggcugcu

SEQ ID NO: 2396151 - RNA, 21 nt, Human
caccgaaaacguggcugcuuc

SEQ ID NO: 2396152 - RNA, 23 nt, Human
cacccuuggccugucucaucccc

SEQ ID NO: 2396153 - RNA, 21 nt, Human
cacccuuggccugucucaucc

SEQ ID NO: 2396154 - RNA, 22 nt, Human
cacccuuggaggcugucuucuc

SEQ ID NO: 2396155 - RNA, 17 nt, Human
cacccuuuuccagcugg

SEQ ID NO: 2396156 - RNA, 15 nt, Human
cacccuuuuccagcu

SEQ ID NO: 2396157 - RNA, 20 nt, Human
cacccuuugcugugaggcug

SEQ ID NO: 2396158 - RNA, 22 nt, Human
cacccuuugcugugaggcuguc

SEQ ID NO: 2396159 - RNA, 15 nt, Human
caccgaaaacguggc

SEQ ID NO: 2396160 - RNA, 18 nt, Human
caccgaaaacguggcugc

SEQ ID NO: 2396161 - RNA, 18 nt, Human
caccgagaguagccgaga

SEQ ID NO: 2396162 - RNA, 13 nt, Human
caccgagaauguu

SEQ ID NO: 2396163 - RNA, 17 nt, Human
caccgagggcgaccccg

SEQ ID NO: 2396164 - RNA, 12 nt, Human
caccgagugggg

SEQ ID NO: 2396165 - RNA, 19 nt, Human
caccgacgcgucuccuguu

SEQ ID NO: 2396166 - RNA, 22 nt, Human
caccgaaguggacuggccccug

SEQ ID NO: 2396167 - RNA, 23 nt, Human
caccgaaguggacuggccccugg

SEQ ID NO: 2396168 - RNA, 17 nt, Human
caccgacgcgucuccug

SEQ ID NO: 2396169 - RNA, 18 nt, Human
caccgacgcgucuccugu

SEQ ID NO: 2396170 - RNA, 12 nt, Human
caccgcagacag

SEQ ID NO: 2396171 - RNA, 13 nt, Human
caccgcagacagg

SEQ ID NO: 2396172 - RNA, 14 nt, Human
caccgcagacagga

SEQ ID NO: 2396173 - RNA, 15 nt, Human
caccgcagacaggac

SEQ ID NO: 2396174 - RNA, 17 nt, Human
caccgcagacaggacca

SEQ ID NO: 2396175 - RNA, 18 nt, Human
caccgcagacaggaccag

SEQ ID NO: 2396176 - RNA, 23 nt, Human
cacccuuccccuccuucucccuu

SEQ ID NO: 2396177 - RNA, 22 nt, Human
cacccuuccccuccuucucccu

SEQ ID NO: 2396178 - RNA, 14 nt, Human
cacccuuccccucc

SEQ ID NO: 2396179 - RNA, 13 nt, Human
cacccuuccccuc

SEQ ID NO: 2396180 - RNA, 22 nt, Human
cacccuucacauacccuccccc

SEQ ID NO: 2396181 - RNA, 20 nt, Human
cacccuucacauacccuccc

SEQ ID NO: 2396182 - RNA, 16 nt, Human
cacccuuaccaugugc

SEQ ID NO: 2396183 - RNA, 18 nt, Human
cacccuuggccugucuca

SEQ ID NO: 2396184 - RNA, 15 nt, Human
cacccuuggccuguc

SEQ ID NO: 2396185 - RNA, 13 nt, Human
cacccuuggccug

SEQ ID NO: 2396186 - RNA, 12 nt, Human
cacccuuggccu

SEQ ID NO: 2396187 - RNA, 21 nt, Human
cacccuuggaggcugucuucu

SEQ ID NO: 2396188 - RNA, 20 nt, Human
cacccuuggaggcugucuuc

SEQ ID NO: 2396189 - RNA, 19 nt, Human
cacccuuggaggcugucuu

SEQ ID NO: 2396190 - RNA, 17 nt, Human
cacccuuggaggcuguc

SEQ ID NO: 2396191 - RNA, 16 nt, Human
cacccuuggacuugag

SEQ ID NO: 2396192 - RNA, 13 nt, Human
cacccuucuuucc

SEQ ID NO: 2396193 - RNA, 15 nt, Human
cacccuucuuuccuc

SEQ ID NO: 2396194 - RNA, 16 nt, Human
cacccuucuuuccucu

SEQ ID NO: 2396195 - RNA, 18 nt, Human
cacccuucuuuccucuuc

SEQ ID NO: 2396196 - RNA, 19 nt, Human
cacccuucuuuccucuucc

SEQ ID NO: 2396197 - RNA, 20 nt, Human
cacccuucuuuccucuuccc

SEQ ID NO: 2396198 - RNA, 21 nt, Human
cacccuucuuuccucuucccc

SEQ ID NO: 2396199 - RNA, 12 nt, Human
cacccuugccca

SEQ ID NO: 2396200 - RNA, 23 nt, Human
cacccuugcccaccccaccccca

SEQ ID NO: 2396201 - RNA, 13 nt, Human
cacccuuggacuu

SEQ ID NO: 2396202 - RNA, 14 nt, Human
cacccuuggacuug

SEQ ID NO: 2396203 - RNA, 11 nt, Human
cacccugugau

SEQ ID NO: 2396204 - RNA, 12 nt, Human
cacccugugaug

SEQ ID NO: 2396205 - RNA, 15 nt, Human
cacccugugaugggg

SEQ ID NO: 2396206 - RNA, 18 nt, Human
cacccugugauggggccc

SEQ ID NO: 2396207 - RNA, 20 nt, Human
cacccugugauggggcccug

SEQ ID NO: 2396208 - RNA, 21 nt, Human
cacccugugauggggcccugc

SEQ ID NO: 2396209 - RNA, 22 nt, Human
cacccugugauggggcccugcc

SEQ ID NO: 2396210 - RNA, 23 nt, Human
cacccugugauggggcccugccu

SEQ ID NO: 2396211 - RNA, 20 nt, Human
cacccuagucccuuccccuc

SEQ ID NO: 2396212 - RNA, 18 nt, Human
cacccuagucccuucccc

SEQ ID NO: 2396213 - RNA, 18 nt, Human
cacccucaaccucuucug

SEQ ID NO: 2396214 - RNA, 16 nt, Human
cacccuaguuucccug

SEQ ID NO: 2396215 - RNA, 17 nt, Human
cacccuaguuucccuga

SEQ ID NO: 2396216 - RNA, 12 nt, Human
cacccucacacu

SEQ ID NO: 2396217 - RNA, 16 nt, Human
cacccucagcaccccu

SEQ ID NO: 2396218 - RNA, 17 nt, Human
cacccucagcaccccuu

SEQ ID NO: 2396219 - RNA, 18 nt, Human
cacccucagcaccccuuc

SEQ ID NO: 2396220 - RNA, 17 nt, Human
cacccugucuaaaaaac

SEQ ID NO: 2396221 - RNA, 22 nt, Human
cacccugucccccagcucuggu

SEQ ID NO: 2396222 - RNA, 23 nt, Human
cacccugucccccagcucuggug

SEQ ID NO: 2396223 - RNA, 16 nt, Human
cacccugucccccagc

SEQ ID NO: 2396224 - RNA, 18 nt, Human
cacccugucccccagcuc

SEQ ID NO: 2396225 - RNA, 19 nt, Human
cacccugucccccagcucu

SEQ ID NO: 2396226 - RNA, 20 nt, Human
cacccugucccccagcucug

SEQ ID NO: 2396227 - RNA, 17 nt, Human
cacccuagucccuuccc

SEQ ID NO: 2396228 - RNA, 16 nt, Human
cacccuagucccuucc

SEQ ID NO: 2396229 - RNA, 16 nt, Human
cacccuaccugugccu

SEQ ID NO: 2396230 - RNA, 14 nt, Human
cacccuaccuguuc

SEQ ID NO: 2396231 - RNA, 16 nt, Human
cacccuaccuguucag

SEQ ID NO: 2396232 - RNA, 12 nt, Human
cacccuaccugu

SEQ ID NO: 2396233 - RNA, 21 nt, Human
cacccguucugcuggccugga

SEQ ID NO: 2396234 - RNA, 19 nt, Human
cacccguucugcuggccug

SEQ ID NO: 2396235 - RNA, 20 nt, Human
cacccguucugcuggccugg

SEQ ID NO: 2396236 - RNA, 17 nt, Human
cacccguggagauggga

SEQ ID NO: 2396237 - RNA, 18 nt, Human
cacccguucugcuggccu

SEQ ID NO: 2396238 - RNA, 16 nt, Human
cacccguggagauggg

SEQ ID NO: 2396239 - RNA, 13 nt, Human
cacccgggcucag

SEQ ID NO: 2396240 - RNA, 23 nt, Human
cacccgggcucagggaccacagc

SEQ ID NO: 2396241 - RNA, 15 nt, Human
cacccggcugcagag

SEQ ID NO: 2396242 - RNA, 21 nt, Human
cacccggcugcagaggccaga

SEQ ID NO: 2396243 - RNA, 23 nt, Human
cacccgaugcugcuuuccccugu

SEQ ID NO: 2396244 - RNA, 13 nt, Human
cacccgccucucc

SEQ ID NO: 2396245 - RNA, 14 nt, Human
cacccgccucuccc

SEQ ID NO: 2396246 - RNA, 16 nt, Human
cacccgccuuuuauaa

SEQ ID NO: 2396247 - RNA, 12 nt, Human
cacccggccccu

SEQ ID NO: 2396248 - RNA, 19 nt, Human
cacccgcuaagagggaggg

SEQ ID NO: 2396249 - RNA, 13 nt, Human
cacccggccccug

SEQ ID NO: 2396250 - RNA, 14 nt, Human
cacccggccccugc

SEQ ID NO: 2396251 - RNA, 16 nt, Human
cacccggccccugcug

SEQ ID NO: 2396252 - RNA, 17 nt, Human
cacccggccccugcugg

SEQ ID NO: 2396253 - RNA, 18 nt, Human
cacccggccccugcuggu

SEQ ID NO: 2396254 - RNA, 21 nt, Human
cacccggccccugcugguuca

SEQ ID NO: 2396255 - RNA, 13 nt, Human
caccccuucccca

SEQ ID NO: 2396256 - RNA, 12 nt, Human
caccccuucccc

SEQ ID NO: 2396257 - RNA, 11 nt, Human
caccccuuccc

SEQ ID NO: 2396258 - RNA, 16 nt, Human
caccccuuccaugugg

SEQ ID NO: 2396259 - RNA, 20 nt, Human
caccccuuauccaggacucu

SEQ ID NO: 2396260 - RNA, 11 nt, Human
caccccuucca

SEQ ID NO: 2396261 - RNA, 14 nt, Human
caccccuuccaugu

SEQ ID NO: 2396262 - RNA, 15 nt, Human
caccccuuccaugug

SEQ ID NO: 2396263 - RNA, 17 nt, Human
caccccugugcuccgug

SEQ ID NO: 2396264 - RNA, 21 nt, Human
caccccugugcuccgugccuc

SEQ ID NO: 2396265 - RNA, 22 nt, Human
caccccugugcuccgugccucc

SEQ ID NO: 2396266 - RNA, 23 nt, Human
caccccugugcuccgugccucca

SEQ ID NO: 2396267 - RNA, 16 nt, Human
caccccuuauccagga

SEQ ID NO: 2396268 - RNA, 17 nt, Human
caccccuuauccaggac

SEQ ID NO: 2396269 - RNA, 18 nt, Human
caccccuuauccaggacu

SEQ ID NO: 2396270 - RNA, 19 nt, Human
caccccuuauccaggacuc

SEQ ID NO: 2396271 - RNA, 17 nt, Human
caccccugguucucauc

SEQ ID NO: 2396272 - RNA, 18 nt, Human
caccccugguucucaucu

SEQ ID NO: 2396273 - RNA, 18 nt, Human
caccccugggggcucuca

SEQ ID NO: 2396274 - RNA, 14 nt, Human
caccccugggggcu

SEQ ID NO: 2396275 - RNA, 12 nt, Human
caccccuggggg

SEQ ID NO: 2396276 - RNA, 17 nt, Human
caccccuguccucacug

SEQ ID NO: 2396277 - RNA, 18 nt, Human
caccccuguccucacugc

SEQ ID NO: 2396278 - RNA, 20 nt, Human
caccccuguccucacugcuc

SEQ ID NO: 2396279 - RNA, 21 nt, Human
caccccuguccucacugcucc

SEQ ID NO: 2396280 - RNA, 23 nt, Human
caccccuguccucacugcucccu

SEQ ID NO: 2396281 - RNA, 13 nt, Human
caccccugucucu

SEQ ID NO: 2396282 - RNA, 12 nt, Human
caccccugugcu

SEQ ID NO: 2396283 - RNA, 13 nt, Human
caccccugugcuc

SEQ ID NO: 2396284 - RNA, 18 nt, Human
caccccuuccccacugcc

SEQ ID NO: 2396285 - RNA, 12 nt, Human
caccccuuccug

SEQ ID NO: 2396286 - RNA, 15 nt, Human
caccccuuccccacu

SEQ ID NO: 2396287 - RNA, 14 nt, Human
caccccuuccccac

SEQ ID NO: 2396288 - RNA, 13 nt, Human
caccccuuccugu

SEQ ID NO: 2396289 - RNA, 14 nt, Human
caccccuuccuguc

SEQ ID NO: 2396290 - RNA, 16 nt, Human
caccccuuccuguccc

SEQ ID NO: 2396291 - RNA, 22 nt, Human
caccccuuccugucccaccucu

SEQ ID NO: 2396292 - RNA, 12 nt, Human
caccccuucucu

SEQ ID NO: 2396293 - RNA, 18 nt, Human
caccccuucucuccuccc

SEQ ID NO: 2396294 - RNA, 21 nt, Human
caccccuucucuccuccccaa

SEQ ID NO: 2396295 - RNA, 19 nt, Human
caccccuugcucucaaccc

SEQ ID NO: 2396296 - RNA, 13 nt, Human
cacccgaccacac

SEQ ID NO: 2396297 - RNA, 18 nt, Human
cacccgaggcugcccacu

SEQ ID NO: 2396298 - RNA, 17 nt, Human
cacccgaggcugcccac

SEQ ID NO: 2396299 - RNA, 13 nt, Human
cacccgaugcugc

SEQ ID NO: 2396300 - RNA, 14 nt, Human
cacccgaugcugcu

SEQ ID NO: 2396301 - RNA, 15 nt, Human
cacccgaugcugcuu

SEQ ID NO: 2396302 - RNA, 16 nt, Human
cacccgaugcugcuuu

SEQ ID NO: 2396303 - RNA, 18 nt, Human
cacccgaugcugcuuucc

SEQ ID NO: 2396304 - RNA, 19 nt, Human
cacccgaugcugcuuuccc

SEQ ID NO: 2396305 - RNA, 16 nt, Human
cacccgaggcugccca

SEQ ID NO: 2396306 - RNA, 15 nt, Human
cacccgaggcugccc

SEQ ID NO: 2396307 - RNA, 12 nt, Human
cacccgaggcug

SEQ ID NO: 2396308 - RNA, 16 nt, Human
cacccgacuccucaaa

SEQ ID NO: 2396309 - RNA, 15 nt, Human
cacccgacuccucaa

SEQ ID NO: 2396310 - RNA, 14 nt, Human
cacccgacuccuca

SEQ ID NO: 2396311 - RNA, 24 nt, Human
caccccugcccugggauguccaca

SEQ ID NO: 2396312 - RNA, 16 nt, Human
caccccugcccuggga

SEQ ID NO: 2396313 - RNA, 12 nt, Human
caccccugccuc

SEQ ID NO: 2396314 - RNA, 13 nt, Human
caccccugccucc

SEQ ID NO: 2396315 - RNA, 15 nt, Human
caccccugcccuggg

SEQ ID NO: 2396316 - RNA, 19 nt, Human
caccccugcccccagcccc

SEQ ID NO: 2396317 - RNA, 21 nt, Human
caccccugcccccacuuccug

SEQ ID NO: 2396318 - RNA, 18 nt, Human
caccccugcccccagccc

SEQ ID NO: 2396319 - RNA, 23 nt, Human
caccccugccuccacccucugag

SEQ ID NO: 2396320 - RNA, 20 nt, Human
caccccugccuccacccucu

SEQ ID NO: 2396321 - RNA, 22 nt, Human
caccccugccuccacccucuga

SEQ ID NO: 2396322 - RNA, 14 nt, Human
caccccugccucca

SEQ ID NO: 2396323 - RNA, 15 nt, Human
caccccugccuccac

SEQ ID NO: 2396324 - RNA, 16 nt, Human
caccccugccuccacc

SEQ ID NO: 2396325 - RNA, 18 nt, Human
caccccugccuccacccu

SEQ ID NO: 2396326 - RNA, 23 nt, Human
caccccuccuuccuugaccagca

SEQ ID NO: 2396327 - RNA, 12 nt, Human
caccccucucug

SEQ ID NO: 2396328 - RNA, 11 nt, Human
caccccugccc

SEQ ID NO: 2396329 - RNA, 15 nt, Human
caccccucucugcau

SEQ ID NO: 2396330 - RNA, 13 nt, Human
caccccugccccc

SEQ ID NO: 2396331 - RNA, 14 nt, Human
caccccugccccca

SEQ ID NO: 2396332 - RNA, 18 nt, Human
caccccugcccccacuuc

SEQ ID NO: 2396333 - RNA, 14 nt, Human
caccccuccuuccu

SEQ ID NO: 2396334 - RNA, 12 nt, Human
caccccuccuuc

SEQ ID NO: 2396335 - RNA, 18 nt, Human
caccccucccuuucuccc

SEQ ID NO: 2396336 - RNA, 22 nt, Human
caccccuccccugcccuagagc

SEQ ID NO: 2396337 - RNA, 15 nt, Human
caccccucccuuucu

SEQ ID NO: 2396338 - RNA, 15 nt, Human
caccccuccccugcc

SEQ ID NO: 2396339 - RNA, 13 nt, Human
caccccuccccau

SEQ ID NO: 2396340 - RNA, 17 nt, Human
caccccucccauuagga

SEQ ID NO: 2396341 - RNA, 13 nt, Human
caccccuccagga

SEQ ID NO: 2396342 - RNA, 10 nt, Human
caccccuccc

SEQ ID NO: 2396343 - RNA, 12 nt, Human
caccccucccau

SEQ ID NO: 2396344 - RNA, 13 nt, Human
caccccucccauu

SEQ ID NO: 2396345 - RNA, 12 nt, Human
caccccucacuc

SEQ ID NO: 2396346 - RNA, 17 nt, Human
caccccucacucuggcc

SEQ ID NO: 2396347 - RNA, 20 nt, Human
caccccucaacaccucugca

SEQ ID NO: 2396348 - RNA, 13 nt, Human
cacauauugauuu

SEQ ID NO: 2396349 - RNA, 20 nt, Human
cacauauugauuuccguuaa

SEQ ID NO: 2396350 - RNA, 14 nt, Human
caccguacugugga

SEQ ID NO: 2396351 - RNA, 23 nt, Human
caccgucauggcuuaauguuuau

SEQ ID NO: 2396352 - RNA, 15 nt, Human
caccgucauggcuua

SEQ ID NO: 2396353 - RNA, 19 nt, Human
caccgucauggcuuaaugu

SEQ ID NO: 2396354 - RNA, 14 nt, Human
caccguccgcccug

SEQ ID NO: 2396355 - RNA, 15 nt, Human
caccguccgcccugc

SEQ ID NO: 2396356 - RNA, 16 nt, Human
caccguccgcccugcu

SEQ ID NO: 2396357 - RNA, 15 nt, Human
caccgugccuggcca

SEQ ID NO: 2396358 - RNA, 15 nt, Human
caccguggcuaagag

SEQ ID NO: 2396359 - RNA, 17 nt, Human
caccguggaggaggaag

SEQ ID NO: 2396360 - RNA, 20 nt, Human
caccguggaccuuccugcca

SEQ ID NO: 2396361 - RNA, 23 nt, Human
caccguggaccuuccugccacca

SEQ ID NO: 2396362 - RNA, 16 nt, Human
caccguggaccuuccu

SEQ ID NO: 2396363 - RNA, 17 nt, Human
caccguggaccuuccug

SEQ ID NO: 2396364 - RNA, 18 nt, Human
caccguggaccuuccugc

SEQ ID NO: 2396365 - RNA, 19 nt, Human
caccguggaccuuccugcc

SEQ ID NO: 2396366 - RNA, 20 nt, Human
caccgugccuggccacgccc

SEQ ID NO: 2396367 - RNA, 15 nt, Human
caccguggaccuucc

SEQ ID NO: 2396368 - RNA, 18 nt, Human
caccguccgcccugcucc

SEQ ID NO: 2396369 - RNA, 19 nt, Human
caccguccgcccugcuccu

SEQ ID NO: 2396370 - RNA, 23 nt, Human
caccucaguucccuuggccucag

SEQ ID NO: 2396371 - RNA, 12 nt, Human
caccucaugccc

SEQ ID NO: 2396372 - RNA, 14 nt, Human
caccucaugcccac

SEQ ID NO: 2396373 - RNA, 15 nt, Human
caccucaugcccacc

SEQ ID NO: 2396374 - RNA, 16 nt, Human
caccucaugcccaccc

SEQ ID NO: 2396375 - RNA, 17 nt, Human
caccucaugcccacccc

SEQ ID NO: 2396376 - RNA, 18 nt, Human
caccucaugcccaccccc

SEQ ID NO: 2396377 - RNA, 22 nt, Human
caccucaguucccuuggccuca

SEQ ID NO: 2396378 - RNA, 21 nt, Human
caccucaguucccuuggccuc

SEQ ID NO: 2396379 - RNA, 20 nt, Human
caccucaguucccuuggccu

SEQ ID NO: 2396380 - RNA, 19 nt, Human
caccucaguucccuuggcc

SEQ ID NO: 2396381 - RNA, 18 nt, Human
caccucaguucccuuggc

SEQ ID NO: 2396382 - RNA, 17 nt, Human
caccucaguucccuugg

SEQ ID NO: 2396383 - RNA, 11 nt, Human
caccucaguuc

SEQ ID NO: 2396384 - RNA, 15 nt, Human
caccguguaaaccaa

SEQ ID NO: 2396385 - RNA, 16 nt, Human
caccguguaaaccaaa

SEQ ID NO: 2396386 - RNA, 15 nt, Human
caccgugggcaggga

SEQ ID NO: 2396387 - RNA, 13 nt, Human
caccgugggcucc

SEQ ID NO: 2396388 - RNA, 18 nt, Human
caccgugggcucccugac

SEQ ID NO: 2396389 - RNA, 17 nt, Human
caccgugggcucccuga

SEQ ID NO: 2396390 - RNA, 15 nt, Human
caccgggcacucaga

SEQ ID NO: 2396391 - RNA, 22 nt, Human
caccgggcacucagaagacacu

SEQ ID NO: 2396392 - RNA, 15 nt, Human
caccgggccacagag

SEQ ID NO: 2396393 - RNA, 18 nt, Human
caccgggccacagagaaa

SEQ ID NO: 2396394 - RNA, 13 nt, Human
caccgggccugga

SEQ ID NO: 2396395 - RNA, 15 nt, Human
caccggggccucgga

SEQ ID NO: 2396396 - RNA, 13 nt, Human
caccgcugccuaa

SEQ ID NO: 2396397 - RNA, 12 nt, Human
caccgcugccua

SEQ ID NO: 2396398 - RNA, 21 nt, Human
caccgcuccccagcccagggu

SEQ ID NO: 2396399 - RNA, 20 nt, Human
caccgcuccccagcccaggg

SEQ ID NO: 2396400 - RNA, 18 nt, Human
caccgcuccccagcccag

SEQ ID NO: 2396401 - RNA, 17 nt, Human
caccgcuccccagccca

SEQ ID NO: 2396402 - RNA, 16 nt, Human
caccgcuccccagccc

SEQ ID NO: 2396403 - RNA, 14 nt, Human
caccgcuccccagc

SEQ ID NO: 2396404 - RNA, 19 nt, Human
caccgcugccuaaguggcu

SEQ ID NO: 2396405 - RNA, 22 nt, Human
caccgcuuccggcuccugugcu

SEQ ID NO: 2396406 - RNA, 22 nt, Human
caccgcugccuaaguggcugcu

SEQ ID NO: 2396407 - RNA, 22 nt, Human
caccggagcuuucaaagaagga

SEQ ID NO: 2396408 - RNA, 23 nt, Human
caccgcuuccggcuccugugcuu

SEQ ID NO: 2396409 - RNA, 17 nt, Human
caccgccuccuacagcc

SEQ ID NO: 2396410 - RNA, 13 nt, Human
caccgcuccccag

SEQ ID NO: 2396411 - RNA, 21 nt, Human
caccgagaguagccgagagcc

SEQ ID NO: 2396412 - RNA, 13 nt, Human
caccgcagucguc

SEQ ID NO: 2396413 - RNA, 19 nt, Human
caccgcagucgucgcacag

SEQ ID NO: 2396414 - RNA, 14 nt, Human
caccgcaugccccc

SEQ ID NO: 2396415 - RNA, 21 nt, Human
caccgcagacaggaccaggga

SEQ ID NO: 2396416 - RNA, 15 nt, Human
caccgcaugcccccu

SEQ ID NO: 2396417 - RNA, 16 nt, Human
caccgcaugcccccuc

SEQ ID NO: 2396418 - RNA, 18 nt, Human
caccgcaugcccccucgu

SEQ ID NO: 2396419 - RNA, 19 nt, Human
caccgcaugcccccucgug

SEQ ID NO: 2396420 - RNA, 22 nt, Human
caccgcaugcccccucgugcca

SEQ ID NO: 2396421 - RNA, 21 nt, Human
caccgccacaauaaagaucgc

SEQ ID NO: 2396422 - RNA, 18 nt, Human
caccgccacauggcuucc

SEQ ID NO: 2396423 - RNA, 13 nt, Human
caccgccauggcu

SEQ ID NO: 2396424 - RNA, 23 nt, Human
caccgccauggcuuccaaggugg

SEQ ID NO: 2396425 - RNA, 16 nt, Human
caccgccauggcuucc

SEQ ID NO: 2396426 - RNA, 22 nt, Human
caccgccauggcuuccaaggug

SEQ ID NO: 2396427 - RNA, 19 nt, Human
caccgccgacuuuguaccc

SEQ ID NO: 2396428 - RNA, 22 nt, Human
caccgccgacuuuguacccccc

SEQ ID NO: 2396429 - RNA, 14 nt, Human
caccgggcacucag

SEQ ID NO: 2396430 - RNA, 20 nt, Human
caccggcuggccuggccccu

SEQ ID NO: 2396431 - RNA, 17 nt, Human
caccggcuggccuggcc

SEQ ID NO: 2396432 - RNA, 18 nt, Human
caccggcuggccuggccc

SEQ ID NO: 2396433 - RNA, 22 nt, Human
caccggauccuggguggucugc

SEQ ID NO: 2396434 - RNA, 21 nt, Human
caccggauccuggguggucug

SEQ ID NO: 2396435 - RNA, 15 nt, Human
caccggauccugggu

SEQ ID NO: 2396436 - RNA, 14 nt, Human
caccggcuggccug

SEQ ID NO: 2396437 - RNA, 15 nt, Human
caccggcuggccugg

SEQ ID NO: 2396438 - RNA, 16 nt, Human
caccggcuggccuggc

SEQ ID NO: 2396439 - RNA, 19 nt, Human
caccucucccugacccugu

SEQ ID NO: 2396440 - RNA, 14 nt, Human
caccucucccucaa

SEQ ID NO: 2396441 - RNA, 19 nt, Human
caccucucccucaacaagg

SEQ ID NO: 2396442 - RNA, 18 nt, Human
caccucuccaagggcuuc

SEQ ID NO: 2396443 - RNA, 22 nt, Human
caccucuccaagggcuucugca

SEQ ID NO: 2396444 - RNA, 12 nt, Human
caccucucccuc

SEQ ID NO: 2396445 - RNA, 13 nt, Human
caccucucccuca

SEQ ID NO: 2396446 - RNA, 13 nt, Human
caccucucccuug

SEQ ID NO: 2396447 - RNA, 14 nt, Human
caccucucccuugg

SEQ ID NO: 2396448 - RNA, 17 nt, Human
caccucucccuuggauu

SEQ ID NO: 2396449 - RNA, 12 nt, Human
caccuccuucuc

SEQ ID NO: 2396450 - RNA, 11 nt, Human
caccucuccaa

SEQ ID NO: 2396451 - RNA, 12 nt, Human
caccucuccaag

SEQ ID NO: 2396452 - RNA, 13 nt, Human
caccucuccaagg

SEQ ID NO: 2396453 - RNA, 15 nt, Human
caccucuccaagggc

SEQ ID NO: 2396454 - RNA, 16 nt, Human
caccucuccaagggcu

SEQ ID NO: 2396455 - RNA, 19 nt, Human
caccucccugaaccauccc

SEQ ID NO: 2396456 - RNA, 16 nt, Human
caccucccucccggca

SEQ ID NO: 2396457 - RNA, 12 nt, Human
caccucccuccc

SEQ ID NO: 2396458 - RNA, 12 nt, Human
caccucccugcc

SEQ ID NO: 2396459 - RNA, 14 nt, Human
caccuccucaugua

SEQ ID NO: 2396460 - RNA, 17 nt, Human
caccucccugccuccag

SEQ ID NO: 2396461 - RNA, 15 nt, Human
caccucccugccucc

SEQ ID NO: 2396462 - RNA, 14 nt, Human
caccucccugccuc

SEQ ID NO: 2396463 - RNA, 13 nt, Human
caccucccugccu

SEQ ID NO: 2396464 - RNA, 14 nt, Human
caccucccugaccc

SEQ ID NO: 2396465 - RNA, 14 nt, Human
caccuccugccucg

SEQ ID NO: 2396466 - RNA, 13 nt, Human
caccuccugccuc

SEQ ID NO: 2396467 - RNA, 11 nt, Human
caccuccugcc

SEQ ID NO: 2396468 - RNA, 21 nt, Human
caccuccccaggccguggcug

SEQ ID NO: 2396469 - RNA, 14 nt, Human
caccuccccagccu

SEQ ID NO: 2396470 - RNA, 14 nt, Human
caccuccccaggcc

SEQ ID NO: 2396471 - RNA, 15 nt, Human
caccuccccaggccg

SEQ ID NO: 2396472 - RNA, 21 nt, Human
caccucccccaucucuucugg

SEQ ID NO: 2396473 - RNA, 14 nt, Human
caccucccccaucu

SEQ ID NO: 2396474 - RNA, 18 nt, Human
caccuccccuauccaccc

SEQ ID NO: 2396475 - RNA, 14 nt, Human
caccuccccuaucc

SEQ ID NO: 2396476 - RNA, 13 nt, Human
caccuccccuauc

SEQ ID NO: 2396477 - RNA, 16 nt, Human
caccucccccugcccc

SEQ ID NO: 2396478 - RNA, 23 nt, Human
caccuccccccacugcaggcccc

SEQ ID NO: 2396479 - RNA, 20 nt, Human
caccucccccucccccuucu

SEQ ID NO: 2396480 - RNA, 22 nt, Human
caccuccccccacugcaggccc

SEQ ID NO: 2396481 - RNA, 21 nt, Human
caccuccccccacugcaggcc

SEQ ID NO: 2396482 - RNA, 18 nt, Human
caccuccccccacugcag

SEQ ID NO: 2396483 - RNA, 17 nt, Human
caccuccccccacugca

SEQ ID NO: 2396484 - RNA, 16 nt, Human
caccuccccccacugc

SEQ ID NO: 2396485 - RNA, 15 nt, Human
caccuccccccacug

SEQ ID NO: 2396486 - RNA, 14 nt, Human
caccuccccccacu

SEQ ID NO: 2396487 - RNA, 14 nt, Human
caccuccccuccuu

SEQ ID NO: 2396488 - RNA, 11 nt, Human
caccuccccuc

SEQ ID NO: 2396489 - RNA, 20 nt, Human
caccuccccuauccacccag

SEQ ID NO: 2396490 - RNA, 19 nt, Human
caccuccccuauccaccca

SEQ ID NO: 2396491 - RNA, 23 nt, Human
caccuccccuccuugccuccugu

SEQ ID NO: 2396492 - RNA, 15 nt, Human
caccuccccuccuug

SEQ ID NO: 2396493 - RNA, 10 nt, Human
caccucccug

SEQ ID NO: 2396494 - RNA, 10 nt, Human
caccucccuc

SEQ ID NO: 2396495 - RNA, 16 nt, Human
caccucccauccuaau

SEQ ID NO: 2396496 - RNA, 13 nt, Human
caccucccauccu

SEQ ID NO: 2396497 - RNA, 9 nt, Human
caccucccc

SEQ ID NO: 2396498 - RNA, 13 nt, Human
caccuccccacgc

SEQ ID NO: 2396499 - RNA, 12 nt, Human
caccucccagga

SEQ ID NO: 2396500 - RNA, 11 nt, Human
caccucccagg

SEQ ID NO: 2396501 - RNA, 14 nt, Human
caccuccccagcau

SEQ ID NO: 2396502 - RNA, 16 nt, Human
caccuccccagcauuc

SEQ ID NO: 2396503 - RNA, 14 nt, Human
caccuccccacgcc

SEQ ID NO: 2396504 - RNA, 17 nt, Human
caccuccccacgcccuc

SEQ ID NO: 2396505 - RNA, 19 nt, Human
caccuccccacgcccuccc

SEQ ID NO: 2396506 - RNA, 21 nt, Human
caccuccccacgcccuccccu

SEQ ID NO: 2396507 - RNA, 10 nt, Human
caccucccag

SEQ ID NO: 2396508 - RNA, 16 nt, Human
caccuccacauccucc

SEQ ID NO: 2396509 - RNA, 17 nt, Human
caccuccacauccucca

SEQ ID NO: 2396510 - RNA, 11 nt, Human
caccucaugga

SEQ ID NO: 2396511 - RNA, 12 nt, Human
caccucauggaa

SEQ ID NO: 2396512 - RNA, 14 nt, Human
caccucauggaauu

SEQ ID NO: 2396513 - RNA, 19 nt, Human
caccucaugcccacccccu

SEQ ID NO: 2396514 - RNA, 20 nt, Human
caccucaugcccacccccug

SEQ ID NO: 2396515 - RNA, 21 nt, Human
caccucaugcccacccccugc

SEQ ID NO: 2396516 - RNA, 22 nt, Human
caccucaugcccacccccugcc

SEQ ID NO: 2396517 - RNA, 13 nt, Human
caccuccacaguu

SEQ ID NO: 2396518 - RNA, 14 nt, Human
caccuccacaguuc

SEQ ID NO: 2396519 - RNA, 18 nt, Human
caccuccacaguucagug

SEQ ID NO: 2396520 - RNA, 20 nt, Human
caccuccacaguucaguggc

SEQ ID NO: 2396521 - RNA, 22 nt, Human
caccugcauccguaguucccug

SEQ ID NO: 2396522 - RNA, 22 nt, Human
caccugcagguugggccauacu

SEQ ID NO: 2396523 - RNA, 23 nt, Human
caccugcagguugggccauacug

SEQ ID NO: 2396524 - RNA, 18 nt, Human
caccugcagguugggcca

SEQ ID NO: 2396525 - RNA, 19 nt, Human
caccugcucccaggccagu

SEQ ID NO: 2396526 - RNA, 13 nt, Human
caccugcucccag

SEQ ID NO: 2396527 - RNA, 14 nt, Human
caccugcucccagg

SEQ ID NO: 2396528 - RNA, 23 nt, Human
caccugcugagaaaacaugccuc

SEQ ID NO: 2396529 - RNA, 23 nt, Human
caccugcggugcuaucuccccca

SEQ ID NO: 2396530 - RNA, 15 nt, Human
caccugcuggaguga

SEQ ID NO: 2396531 - RNA, 13 nt, Human
caccugcugcugc

SEQ ID NO: 2396532 - RNA, 22 nt, Human
caccugcugagagacccaagga

SEQ ID NO: 2396533 - RNA, 19 nt, Human
caccugcugagagacccaa

SEQ ID NO: 2396534 - RNA, 18 nt, Human
caccugcugagagaccca

SEQ ID NO: 2396535 - RNA, 14 nt, Human
caccugcucuucua

SEQ ID NO: 2396536 - RNA, 20 nt, Human
caccugcuggccccucaccu

SEQ ID NO: 2396537 - RNA, 18 nt, Human
caccugcuggccccucac

SEQ ID NO: 2396538 - RNA, 17 nt, Human
caccugcuggccccuca

SEQ ID NO: 2396539 - RNA, 16 nt, Human
caccugcuggccccuc

SEQ ID NO: 2396540 - RNA, 15 nt, Human
caccugcuggccccu

SEQ ID NO: 2396541 - RNA, 14 nt, Human
caccugcuggcccc

SEQ ID NO: 2396542 - RNA, 13 nt, Human
caccugcuggccc

SEQ ID NO: 2396543 - RNA, 22 nt, Human
caccugcuggccccucaccugg

SEQ ID NO: 2396544 - RNA, 20 nt, Human
caccuggaauauauaaccag

SEQ ID NO: 2396545 - RNA, 18 nt, Human
caccugagguuaggaguu

SEQ ID NO: 2396546 - RNA, 20 nt, Human
caccugaggugggcccagga

SEQ ID NO: 2396547 - RNA, 21 nt, Human
caccugaggugggcccaggac

SEQ ID NO: 2396548 - RNA, 17 nt, Human
caccugaggugggccca

SEQ ID NO: 2396549 - RNA, 18 nt, Human
caccugaggugggcccag

SEQ ID NO: 2396550 - RNA, 19 nt, Human
caccugaggugggcccagg

SEQ ID NO: 2396551 - RNA, 23 nt, Human
caccugagcccggaugcuucucc

SEQ ID NO: 2396552 - RNA, 21 nt, Human
caccugagcccggaugcuucu

SEQ ID NO: 2396553 - RNA, 15 nt, Human
caccugaggugggcc

SEQ ID NO: 2396554 - RNA, 15 nt, Human
caccugacucugaaa

SEQ ID NO: 2396555 - RNA, 20 nt, Human
caccugacucugaaaucuga

SEQ ID NO: 2396556 - RNA, 23 nt, Human
caccugacucugaaaucugaaga

SEQ ID NO: 2396557 - RNA, 21 nt, Human
caccugagcaggaccucugaa

SEQ ID NO: 2396558 - RNA, 20 nt, Human
caccugagcaggaccucuga

SEQ ID NO: 2396559 - RNA, 19 nt, Human
caccugagcaggaccucug

SEQ ID NO: 2396560 - RNA, 16 nt, Human
caccugagcaggaccu

SEQ ID NO: 2396561 - RNA, 15 nt, Human
caccugcaccucccc

SEQ ID NO: 2396562 - RNA, 14 nt, Human
caccugcaccuccc

SEQ ID NO: 2396563 - RNA, 13 nt, Human
caccugcaccucc

SEQ ID NO: 2396564 - RNA, 11 nt, Human
caccugcaccu

SEQ ID NO: 2396565 - RNA, 19 nt, Human
caccugcaccuccccccac

SEQ ID NO: 2396566 - RNA, 17 nt, Human
caccugcaccucccccc

SEQ ID NO: 2396567 - RNA, 22 nt, Human
caccugcaccuccccccacugc

SEQ ID NO: 2396568 - RNA, 23 nt, Human
caccugcacuuaaggcacucugu

SEQ ID NO: 2396569 - RNA, 24 nt, Human
caccugaggugggcccaggaccag

SEQ ID NO: 2396570 - RNA, 11 nt, Human
caccugaugug

SEQ ID NO: 2396571 - RNA, 15 nt, Human
caccugauguguaca

SEQ ID NO: 2396572 - RNA, 23 nt, Human
caccugagucacccuaccugugc

SEQ ID NO: 2396573 - RNA, 19 nt, Human
caccugagucacccuaccu

SEQ ID NO: 2396574 - RNA, 21 nt, Human
caccugauucaacuaaaaaaa

SEQ ID NO: 2396575 - RNA, 19 nt, Human
caccugauucaacuaaaaa

SEQ ID NO: 2396576 - RNA, 18 nt, Human
caccugauucaacuaaaa

SEQ ID NO: 2396577 - RNA, 17 nt, Human
caccugauucaacuaaa

SEQ ID NO: 2396578 - RNA, 16 nt, Human
caccugauucaacuaa

SEQ ID NO: 2396579 - RNA, 15 nt, Human
caccugauucaacua

SEQ ID NO: 2396580 - RNA, 16 nt, Human
caccugauguguacau

SEQ ID NO: 2396581 - RNA, 23 nt, Human
caccugaagacucauucuucugu

SEQ ID NO: 2396582 - RNA, 14 nt, Human
caccugaagacuca

SEQ ID NO: 2396583 - RNA, 15 nt, Human
caccugaagacucau

SEQ ID NO: 2396584 - RNA, 22 nt, Human
caccucuucucuuccuguaaca

SEQ ID NO: 2396585 - RNA, 19 nt, Human
caccucuuuguguuuuauu

SEQ ID NO: 2396586 - RNA, 17 nt, Human
caccucuucucuuccug

SEQ ID NO: 2396587 - RNA, 18 nt, Human
caccucuucucuuccugu

SEQ ID NO: 2396588 - RNA, 14 nt, Human
caccucuucacccc

SEQ ID NO: 2396589 - RNA, 20 nt, Human
caccucuucaccccccacuc

SEQ ID NO: 2396590 - RNA, 22 nt, Human
caccucugugaccucaggcacu

SEQ ID NO: 2396591 - RNA, 20 nt, Human
caccucugugaccucaggca

SEQ ID NO: 2396592 - RNA, 22 nt, Human
caccucuuaaagaaaacccacc

SEQ ID NO: 2396593 - RNA, 19 nt, Human
caccucuggacuggcuaga

SEQ ID NO: 2396594 - RNA, 13 nt, Human
caccucugugacc

SEQ ID NO: 2396595 - RNA, 14 nt, Human
caccucugugaccu

SEQ ID NO: 2396596 - RNA, 15 nt, Human
caccucugugaccuc

SEQ ID NO: 2396597 - RNA, 17 nt, Human
caccucugugaccucag

SEQ ID NO: 2396598 - RNA, 18 nt, Human
caccucugugaccucagg

SEQ ID NO: 2396599 - RNA, 19 nt, Human
caccucugugaccucaggc

SEQ ID NO: 2396600 - RNA, 18 nt, Human
caccucuggacuggcuag

SEQ ID NO: 2396601 - RNA, 17 nt, Human
caccucuggacuggcua

SEQ ID NO: 2396602 - RNA, 13 nt, Human
caccucuggacug

SEQ ID NO: 2396603 - RNA, 22 nt, Human
caccucugcggaccccagcugu

SEQ ID NO: 2396604 - RNA, 20 nt, Human
caccucugcggaccccagcu

SEQ ID NO: 2396605 - RNA, 21 nt, Human
caccucugcggaccccagcug

SEQ ID NO: 2396606 - RNA, 14 nt, Human
caccucugccucaa

SEQ ID NO: 2396607 - RNA, 12 nt, Human
caccucugcgga

SEQ ID NO: 2396608 - RNA, 18 nt, Human
caccucugcggaccccag

SEQ ID NO: 2396609 - RNA, 19 nt, Human
caccucugcggaccccagc

SEQ ID NO: 2396610 - RNA, 13 nt, Human
caccucugccuca

SEQ ID NO: 2396611 - RNA, 19 nt, Human
caccucugccagaagaucc

SEQ ID NO: 2396612 - RNA, 12 nt, Human
caccucugccag

SEQ ID NO: 2396613 - RNA, 13 nt, Human
caccucugccaga

SEQ ID NO: 2396614 - RNA, 23 nt, Human
caccucucccucaacaagggaga

SEQ ID NO: 2396615 - RNA, 16 nt, Human
caccucucuccuuugc

SEQ ID NO: 2396616 - RNA, 22 nt, Human
caccucugaaaacggcccucuu

SEQ ID NO: 2396617 - RNA, 22 nt, Human
caccucugaccuaucacuucca

SEQ ID NO: 2396618 - RNA, 19 nt, Human
caccucugcacaagcugca

SEQ ID NO: 2396619 - RNA, 18 nt, Human
caccucugcacaagcugc

SEQ ID NO: 2396620 - RNA, 15 nt, Human
caccucucucacucc

SEQ ID NO: 2396621 - RNA, 17 nt, Human
caccucucucacuccuu

SEQ ID NO: 2396622 - RNA, 18 nt, Human
caccucucucacuccuug

SEQ ID NO: 2396623 - RNA, 19 nt, Human
caccucucucacuccuuga

SEQ ID NO: 2396624 - RNA, 18 nt, Human
caccuguaaucccagcac

SEQ ID NO: 2396625 - RNA, 16 nt, Human
caccuguaaucccagc

SEQ ID NO: 2396626 - RNA, 21 nt, Human
caccuguaaucccagcuacuu

SEQ ID NO: 2396627 - RNA, 14 nt, Human
caccuguaaaccug

SEQ ID NO: 2396628 - RNA, 16 nt, Human
caccuguaaaccugag

SEQ ID NO: 2396629 - RNA, 15 nt, Human
caccuguaaaccuga

SEQ ID NO: 2396630 - RNA, 16 nt, Human
caccugguuccggaau

SEQ ID NO: 2396631 - RNA, 20 nt, Human
caccugguuccggaauccug

SEQ ID NO: 2396632 - RNA, 21 nt, Human
caccugguuccggaauccugu

SEQ ID NO: 2396633 - RNA, 23 nt, Human
caccugguuccggaauccugucc

SEQ ID NO: 2396634 - RNA, 17 nt, Human
caccugguggccucugc

SEQ ID NO: 2396635 - RNA, 15 nt, Human
caccugguggccucu

SEQ ID NO: 2396636 - RNA, 20 nt, Human
caccuggggugugggaggcc

SEQ ID NO: 2396637 - RNA, 19 nt, Human
caccugggcaccuggggag

SEQ ID NO: 2396638 - RNA, 15 nt, Human
caccugggcaccugg

SEQ ID NO: 2396639 - RNA, 12 nt, Human
caccugggcacc

SEQ ID NO: 2396640 - RNA, 16 nt, Human
caccugggcuuaagaa

SEQ ID NO: 2396641 - RNA, 19 nt, Human
caccugggcuuaagaaauc

SEQ ID NO: 2396642 - RNA, 20 nt, Human
caccuggggcagucaccugc

SEQ ID NO: 2396643 - RNA, 19 nt, Human
caccuggggcagucaccug

SEQ ID NO: 2396644 - RNA, 15 nt, Human
caccuggggcaguca

SEQ ID NO: 2396645 - RNA, 14 nt, Human
caccuggggcaguc

SEQ ID NO: 2396646 - RNA, 22 nt, Human
caccuggggagugggacagagu

SEQ ID NO: 2396647 - RNA, 17 nt, Human
caccuggggagugggac

SEQ ID NO: 2396648 - RNA, 15 nt, Human
caccuggggaguggg

SEQ ID NO: 2396649 - RNA, 14 nt, Human
caccuggggagugg

SEQ ID NO: 2396650 - RNA, 22 nt, Human
caccuggggugugggaggcccg

SEQ ID NO: 2396651 - RNA, 18 nt, Human
caccuggggugugggagg

SEQ ID NO: 2396652 - RNA, 10 nt, Human
caccuggggu

SEQ ID NO: 2396653 - RNA, 23 nt, Human
caccuggggcagucaccugccca

SEQ ID NO: 2396654 - RNA, 14 nt, Human
caccuggggcugcu

SEQ ID NO: 2396655 - RNA, 15 nt, Human
caccuggggcugcug

SEQ ID NO: 2396656 - RNA, 21 nt, Human
caccugucaaacaaagccaga

SEQ ID NO: 2396657 - RNA, 20 nt, Human
caccugucaaacaaagccag

SEQ ID NO: 2396658 - RNA, 13 nt, Human
caccugucaaaca

SEQ ID NO: 2396659 - RNA, 19 nt, Human
caccuguagucccagcuac

SEQ ID NO: 2396660 - RNA, 20 nt, Human
caccuguagucccagcuacu

SEQ ID NO: 2396661 - RNA, 18 nt, Human
caccuguagucccagcua

SEQ ID NO: 2396662 - RNA, 18 nt, Human
caccuguacucuuccgaa

SEQ ID NO: 2396663 - RNA, 16 nt, Human
caccuguagucccagc

SEQ ID NO: 2396664 - RNA, 15 nt, Human
caccuguagucccag

SEQ ID NO: 2396665 - RNA, 22 nt, Human
caccuguagcacuuacugguag

SEQ ID NO: 2396666 - RNA, 15 nt, Human
caccuguagcagcca

SEQ ID NO: 2396667 - RNA, 22 nt, Human
caccuguacucaggaggcugag

SEQ ID NO: 2396668 - RNA, 16 nt, Human
caccuguacucaggag

SEQ ID NO: 2396669 - RNA, 15 nt, Human
caccuguacucagga

SEQ ID NO: 2396670 - RNA, 23 nt, Human
caccuguacucaggaggcugagg

SEQ ID NO: 2396671 - RNA, 15 nt, Human
caccuguacucuucc

SEQ ID NO: 2396672 - RNA, 17 nt, Human
caccuguacucuuccga

SEQ ID NO: 2396673 - RNA, 18 nt, Human
caccuguagcacuuacug

SEQ ID NO: 2396674 - RNA, 23 nt, Human
caccugucaaacaaagccagaag

SEQ ID NO: 2396675 - RNA, 14 nt, Human
caccugucaggccu

SEQ ID NO: 2396676 - RNA, 15 nt, Human
caccugucccagaaa

SEQ ID NO: 2396677 - RNA, 18 nt, Human
caccugucucagccuccc

SEQ ID NO: 2396678 - RNA, 17 nt, Human
caccugucucagccucc

SEQ ID NO: 2396679 - RNA, 15 nt, Human
caccugucucagccu

SEQ ID NO: 2396680 - RNA, 14 nt, Human
caccugucccagaa

SEQ ID NO: 2396681 - RNA, 19 nt, Human
caccugucucagccuccca

SEQ ID NO: 2396682 - RNA, 16 nt, Human
caccuggccccauguc

SEQ ID NO: 2396683 - RNA, 15 nt, Human
caccuggccccaugu

SEQ ID NO: 2396684 - RNA, 14 nt, Human
caccuggccccaug

SEQ ID NO: 2396685 - RNA, 11 nt, Human
caccuggcccc

SEQ ID NO: 2396686 - RNA, 17 nt, Human
caccuggccaccugagg

SEQ ID NO: 2396687 - RNA, 19 nt, Human
caccuggccaccugaggug

SEQ ID NO: 2396688 - RNA, 20 nt, Human
caccuggccaccugaggugg

SEQ ID NO: 2396689 - RNA, 21 nt, Human
caccuggccaccugagguggg

SEQ ID NO: 2396690 - RNA, 22 nt, Human
caccuggccccaugucucucag

SEQ ID NO: 2396691 - RNA, 20 nt, Human
caccuggccccaugucucuc

SEQ ID NO: 2396692 - RNA, 17 nt, Human
caccuggcacugcugug

SEQ ID NO: 2396693 - RNA, 23 nt, Human
caccuggcaucgcaccauucuga

SEQ ID NO: 2396694 - RNA, 18 nt, Human
caccuggcacugcugugc

SEQ ID NO: 2396695 - RNA, 11 nt, Human
caccuggccac

SEQ ID NO: 2396696 - RNA, 12 nt, Human
caccuggccacc

SEQ ID NO: 2396697 - RNA, 13 nt, Human
caccuggccaccu

SEQ ID NO: 2396698 - RNA, 14 nt, Human
caccuggccaccug

SEQ ID NO: 2396699 - RNA, 15 nt, Human
caccuggccaccuga

SEQ ID NO: 2396700 - RNA, 12 nt, Human
caccuggccucu

SEQ ID NO: 2396701 - RNA, 13 nt, Human
caccuggccucug

SEQ ID NO: 2396702 - RNA, 14 nt, Human
caccuggccucugc

SEQ ID NO: 2396703 - RNA, 15 nt, Human
caccuggccucugca

SEQ ID NO: 2396704 - RNA, 23 nt, Human
caccuggccucugcacuccccug

SEQ ID NO: 2396705 - RNA, 11 nt, Human
caccugggcac

SEQ ID NO: 2396706 - RNA, 22 nt, Human
caccuggcugagguuccucugc

SEQ ID NO: 2396707 - RNA, 23 nt, Human
caccuggcugagguuccucugcc

SEQ ID NO: 2396708 - RNA, 19 nt, Human
caccuggcugagccuggcu

SEQ ID NO: 2396709 - RNA, 19 nt, Human
caccuggcugagguuccuc

SEQ ID NO: 2396710 - RNA, 20 nt, Human
caccuggcugagguuccucu

SEQ ID NO: 2396711 - RNA, 21 nt, Human
caccuggcugagguuccucug

SEQ ID NO: 2396712 - RNA, 17 nt, Human
caccuggccucugcacu

SEQ ID NO: 2396713 - RNA, 18 nt, Human
caccuggccucugcacuc

SEQ ID NO: 2396714 - RNA, 19 nt, Human
caccuggccucugcacucc

SEQ ID NO: 2396715 - RNA, 20 nt, Human
caccuggccucugcacuccc

SEQ ID NO: 2396716 - RNA, 16 nt, Human
cacgccagauucuuuc

SEQ ID NO: 2396717 - RNA, 19 nt, Human
cacgcaggaacucccagca

SEQ ID NO: 2396718 - RNA, 20 nt, Human
cacgcaggaacucccagcaa

SEQ ID NO: 2396719 - RNA, 13 nt, Human
cacgcaggaacuc

SEQ ID NO: 2396720 - RNA, 16 nt, Human
cacgcaggaacuccca

SEQ ID NO: 2396721 - RNA, 17 nt, Human
cacgcaggaacucccag

SEQ ID NO: 2396722 - RNA, 16 nt, Human
cacgcacgcacacaca

SEQ ID NO: 2396723 - RNA, 13 nt, Human
cacgccacugcac

SEQ ID NO: 2396724 - RNA, 15 nt, Human
cacgccacugcacua

SEQ ID NO: 2396725 - RNA, 19 nt, Human
cacgccagauucuuuccug

SEQ ID NO: 2396726 - RNA, 20 nt, Human
cacgccagauucuuuccuga

SEQ ID NO: 2396727 - RNA, 22 nt, Human
cacgccagauucuuuccugagg

SEQ ID NO: 2396728 - RNA, 13 nt, Human
cacgcccuccccu

SEQ ID NO: 2396729 - RNA, 15 nt, Human
cacgcccuccccucc

SEQ ID NO: 2396730 - RNA, 20 nt, Human
cacgcccguccugccugugg

SEQ ID NO: 2396731 - RNA, 21 nt, Human
cacgcccguccugccuguggc

SEQ ID NO: 2396732 - RNA, 14 nt, Human
cacgcccguccugc

SEQ ID NO: 2396733 - RNA, 15 nt, Human
cacgcccguccugcc

SEQ ID NO: 2396734 - RNA, 16 nt, Human
cacgcccguccugccu

SEQ ID NO: 2396735 - RNA, 19 nt, Human
cacgcccguccugccugug

SEQ ID NO: 2396736 - RNA, 17 nt, Human
cacgcccccacugguga

SEQ ID NO: 2396737 - RNA, 18 nt, Human
cacgcccccacuggugac

SEQ ID NO: 2396738 - RNA, 22 nt, Human
cacgccacugcacuccagccug

SEQ ID NO: 2396739 - RNA, 14 nt, Human
cacgccacugcacu

SEQ ID NO: 2396740 - RNA, 23 nt, Human
cacgcccaugugugagugugugc

SEQ ID NO: 2396741 - RNA, 15 nt, Human
cacgcccauguguga

SEQ ID NO: 2396742 - RNA, 14 nt, Human
cacgcccaugugug

SEQ ID NO: 2396743 - RNA, 23 nt, Human
cacgccagauucuuuccugaggc

SEQ ID NO: 2396744 - RNA, 13 nt, Human
cacgcccccacug

SEQ ID NO: 2396745 - RNA, 15 nt, Human
cacgcccccacuggu

SEQ ID NO: 2396746 - RNA, 14 nt, Human
cacgcacacacaca

SEQ ID NO: 2396747 - RNA, 13 nt, Human
cacgcacacacac

SEQ ID NO: 2396748 - RNA, 15 nt, Human
cacgcacacacacaa

SEQ ID NO: 2396749 - RNA, 21 nt, Human
cacgauguggcccuggccugc

SEQ ID NO: 2396750 - RNA, 12 nt, Human
cacgcacacaca

SEQ ID NO: 2396751 - RNA, 16 nt, Human
cacgauuucuguuuag

SEQ ID NO: 2396752 - RNA, 14 nt, Human
cacgauuucuguuu

SEQ ID NO: 2396753 - RNA, 12 nt, Human
cacgauuucugu

SEQ ID NO: 2396754 - RNA, 20 nt, Human
cacgcacacacacacacagg

SEQ ID NO: 2396755 - RNA, 15 nt, Human
cacgcacacacacac

SEQ ID NO: 2396756 - RNA, 12 nt, Human
cacgcaccuccc

SEQ ID NO: 2396757 - RNA, 19 nt, Human
cacgcaccucccauccuaa

SEQ ID NO: 2396758 - RNA, 15 nt, Human
cacgcaccucccauc

SEQ ID NO: 2396759 - RNA, 14 nt, Human
cacgcaccucccau

SEQ ID NO: 2396760 - RNA, 22 nt, Human
cacgcacacacacacacaggag

SEQ ID NO: 2396761 - RNA, 15 nt, Human
cacgcaccugccuca

SEQ ID NO: 2396762 - RNA, 12 nt, Human
cacgcaccugcc

SEQ ID NO: 2396763 - RNA, 17 nt, Human
cacgcacuucgggaggu

SEQ ID NO: 2396764 - RNA, 16 nt, Human
cacgcaccugccucag

SEQ ID NO: 2396765 - RNA, 13 nt, Human
cacgcaccugggu

SEQ ID NO: 2396766 - RNA, 12 nt, Human
cacgcacgcaca

SEQ ID NO: 2396767 - RNA, 13 nt, Human
cacgcacgcacac

SEQ ID NO: 2396768 - RNA, 14 nt, Human
cacgcacgcacaca

SEQ ID NO: 2396769 - RNA, 15 nt, Human
cacgcacgcacacac

SEQ ID NO: 2396770 - RNA, 20 nt, Human
cacgagcuguuuacuaggga

SEQ ID NO: 2396771 - RNA, 22 nt, Human
cacgagcaggcuacugucagcu

SEQ ID NO: 2396772 - RNA, 22 nt, Human
cacgauguggcccuggccugcu

SEQ ID NO: 2396773 - RNA, 18 nt, Human
cacgauguggcccuggcc

SEQ ID NO: 2396774 - RNA, 17 nt, Human
cacgauguggcccuggc

SEQ ID NO: 2396775 - RNA, 16 nt, Human
cacgauguggcccugg

SEQ ID NO: 2396776 - RNA, 15 nt, Human
cacgauguggcccug

SEQ ID NO: 2396777 - RNA, 14 nt, Human
cacgauguggcccu

SEQ ID NO: 2396778 - RNA, 15 nt, Human
cacgaugaaaaacuu

SEQ ID NO: 2396779 - RNA, 20 nt, Human
cacgauaaauaaucggccca

SEQ ID NO: 2396780 - RNA, 12 nt, Human
cacgaugaaaaa

SEQ ID NO: 2396781 - RNA, 23 nt, Human
cacgagcaaagugaagacacugg

SEQ ID NO: 2396782 - RNA, 13 nt, Human
cacgagagcccgg

SEQ ID NO: 2396783 - RNA, 17 nt, Human
cacgagcaggcuacugu

SEQ ID NO: 2396784 - RNA, 20 nt, Human
cacgagcaggcuacugucag

SEQ ID NO: 2396785 - RNA, 19 nt, Human
cacgagcaggcuacuguca

SEQ ID NO: 2396786 - RNA, 14 nt, Human
caccuuccagcucc

SEQ ID NO: 2396787 - RNA, 15 nt, Human
caccuuccagcuccu

SEQ ID NO: 2396788 - RNA, 15 nt, Human
caccuucccagcucu

SEQ ID NO: 2396789 - RNA, 13 nt, Human
caccuucccagcu

SEQ ID NO: 2396790 - RNA, 12 nt, Human
caccuucccagc

SEQ ID NO: 2396791 - RNA, 16 nt, Human
caccuuccagcuccug

SEQ ID NO: 2396792 - RNA, 18 nt, Human
caccuuccagcuccugua

SEQ ID NO: 2396793 - RNA, 19 nt, Human
caccuucaauuccugggcc

SEQ ID NO: 2396794 - RNA, 18 nt, Human
caccuucaauuccugggc

SEQ ID NO: 2396795 - RNA, 17 nt, Human
caccuucaauuccuggg

SEQ ID NO: 2396796 - RNA, 15 nt, Human
caccuuauauuuacg

SEQ ID NO: 2396797 - RNA, 18 nt, Human
caccuuaggcagggaagu

SEQ ID NO: 2396798 - RNA, 15 nt, Human
caccuuaguggcuuu

SEQ ID NO: 2396799 - RNA, 17 nt, Human
caccuuaggcagggaag

SEQ ID NO: 2396800 - RNA, 14 nt, Human
caccuuaggcaggg

SEQ ID NO: 2396801 - RNA, 13 nt, Human
caccuuaggcagg

SEQ ID NO: 2396802 - RNA, 22 nt, Human
caccuuagccugcccuccuuuc

SEQ ID NO: 2396803 - RNA, 13 nt, Human
caccuuagcuggc

SEQ ID NO: 2396804 - RNA, 17 nt, Human
caccuuaccaacuuucu

SEQ ID NO: 2396805 - RNA, 20 nt, Human
caccuguugcuuacaauuuu

SEQ ID NO: 2396806 - RNA, 18 nt, Human
caccuuaccaacuuucug

SEQ ID NO: 2396807 - RNA, 19 nt, Human
caccuuaccaacuuucugu

SEQ ID NO: 2396808 - RNA, 21 nt, Human
caccuuagacagucccugcca

SEQ ID NO: 2396809 - RNA, 23 nt, Human
caccuuagacagucccugccaau

SEQ ID NO: 2396810 - RNA, 19 nt, Human
caccugugaguuuaaagca

SEQ ID NO: 2396811 - RNA, 20 nt, Human
caccugugaguuuaaagcaa

SEQ ID NO: 2396812 - RNA, 19 nt, Human
caccuguuuuuaagcuguu

SEQ ID NO: 2396813 - RNA, 16 nt, Human
caccuguugcuuacaa

SEQ ID NO: 2396814 - RNA, 19 nt, Human
caccuguugcuuacaauuu

SEQ ID NO: 2396815 - RNA, 20 nt, Human
caccuguuuuuaagcuguuu

SEQ ID NO: 2396816 - RNA, 19 nt, Human
caccugugcuucgggcccu

SEQ ID NO: 2396817 - RNA, 23 nt, Human
caccugugcagcgaagcuuagcg

SEQ ID NO: 2396818 - RNA, 11 nt, Human
caccuguuacu

SEQ ID NO: 2396819 - RNA, 14 nt, Human
caccuuagacaguc

SEQ ID NO: 2396820 - RNA, 16 nt, Human
caccuuagacaguccc

SEQ ID NO: 2396821 - RNA, 18 nt, Human
caccuuagacagucccug

SEQ ID NO: 2396822 - RNA, 19 nt, Human
caccuuagacagucccugc

SEQ ID NO: 2396823 - RNA, 22 nt, Human
cacgaacccaccugcugagaga

SEQ ID NO: 2396824 - RNA, 19 nt, Human
cacgaacuuuagcugcauc

SEQ ID NO: 2396825 - RNA, 15 nt, Human
cacgaaguguugcau

SEQ ID NO: 2396826 - RNA, 16 nt, Human
cacgaaguguugcaug

SEQ ID NO: 2396827 - RNA, 18 nt, Human
cacgaacccaccugcuga

SEQ ID NO: 2396828 - RNA, 16 nt, Human
cacgaacccaccugcu

SEQ ID NO: 2396829 - RNA, 14 nt, Human
cacgaacccaccug

SEQ ID NO: 2396830 - RNA, 16 nt, Human
cacgaauauugcugau

SEQ ID NO: 2396831 - RNA, 19 nt, Human
cacgaauauugcugauggu

SEQ ID NO: 2396832 - RNA, 22 nt, Human
cacgaauauugcugauggugca

SEQ ID NO: 2396833 - RNA, 16 nt, Human
cacgacugcccggcag

SEQ ID NO: 2396834 - RNA, 18 nt, Human
cacgaauuugcuggggaa

SEQ ID NO: 2396835 - RNA, 18 nt, Human
cacgaaguguugcaugga

SEQ ID NO: 2396836 - RNA, 22 nt, Human
cacgaauuugcuggggaaucuc

SEQ ID NO: 2396837 - RNA, 17 nt, Human
cacgacugcccggcagg

SEQ ID NO: 2396838 - RNA, 16 nt, Human
cacgacugucuccaug

SEQ ID NO: 2396839 - RNA, 13 nt, Human
cacgacugucucc

SEQ ID NO: 2396840 - RNA, 19 nt, Human
cacgaccucggcucacugc

SEQ ID NO: 2396841 - RNA, 13 nt, Human
caccuugacaggg

SEQ ID NO: 2396842 - RNA, 23 nt, Human
caccuucguuuacuaugccugug

SEQ ID NO: 2396843 - RNA, 22 nt, Human
caccuucguuuacuaugccugu

SEQ ID NO: 2396844 - RNA, 21 nt, Human
caccuucguuuacuaugccug

SEQ ID NO: 2396845 - RNA, 14 nt, Human
caccuuccucacuu

SEQ ID NO: 2396846 - RNA, 20 nt, Human
caccuuccucacuuccauac

SEQ ID NO: 2396847 - RNA, 22 nt, Human
caccuucccagcucucccucug

SEQ ID NO: 2396848 - RNA, 21 nt, Human
caccuucccagcucucccucu

SEQ ID NO: 2396849 - RNA, 19 nt, Human
caccuucccagcucucccu

SEQ ID NO: 2396850 - RNA, 17 nt, Human
caccuucccagcucucc

SEQ ID NO: 2396851 - RNA, 13 nt, Human
caccuucccaugc

SEQ ID NO: 2396852 - RNA, 14 nt, Human
caccuucccaugcc

SEQ ID NO: 2396853 - RNA, 13 nt, Human
caccuuccucacu

SEQ ID NO: 2396854 - RNA, 15 nt, Human
caccuugacagggca

SEQ ID NO: 2396855 - RNA, 16 nt, Human
caccuugacagggcac

SEQ ID NO: 2396856 - RNA, 18 nt, Human
caccuugacagggcacac

SEQ ID NO: 2396857 - RNA, 22 nt, Human
caccuugaagaaccucucacuu

SEQ ID NO: 2396858 - RNA, 17 nt, Human
cacgaaauguuauuuuu

SEQ ID NO: 2396859 - RNA, 20 nt, Human
cacgccuguaaucccagcac

SEQ ID NO: 2396860 - RNA, 21 nt, Human
cacgccuguaaucccagcacu

SEQ ID NO: 2396861 - RNA, 22 nt, Human
cacgccuguaaucccagcacuu

SEQ ID NO: 2396862 - RNA, 12 nt, Human
cacgccugugca

SEQ ID NO: 2396863 - RNA, 15 nt, Human
cacgcgugcacacac

SEQ ID NO: 2396864 - RNA, 16 nt, Human
cacgcgugcacacacc

SEQ ID NO: 2396865 - RNA, 21 nt, Human
cacgcgugcacacaccagagc

SEQ ID NO: 2396866 - RNA, 21 nt, Human
cacgccuguaaucccagcagu

SEQ ID NO: 2396867 - RNA, 20 nt, Human
cacgccuguaaucccagcag

SEQ ID NO: 2396868 - RNA, 22 nt, Human
cacgcuaaucccgauucacccu

SEQ ID NO: 2396869 - RNA, 23 nt, Human
cacgcgugcacacaccagagccc

SEQ ID NO: 2396870 - RNA, 15 nt, Human
cacgcuccccgccug

SEQ ID NO: 2396871 - RNA, 16 nt, Human
cacgcuccccgccugu

SEQ ID NO: 2396872 - RNA, 18 nt, Human
cacgcuccccgccuguuc

SEQ ID NO: 2396873 - RNA, 19 nt, Human
cacgcuccccgccuguucc

SEQ ID NO: 2396874 - RNA, 20 nt, Human
cacgcuccccgccuguuccc

SEQ ID NO: 2396875 - RNA, 21 nt, Human
cacgcuccccgccuguucccc

SEQ ID NO: 2396876 - RNA, 18 nt, Human
cacgcuccucccucugag

SEQ ID NO: 2396877 - RNA, 23 nt, Human
cacgcuccucccucugaggcugu

SEQ ID NO: 2396878 - RNA, 22 nt, Human
cacgccucccacugggguccag

SEQ ID NO: 2396879 - RNA, 17 nt, Human
cacgccugcaaacgcug

SEQ ID NO: 2396880 - RNA, 17 nt, Human
cacgccucccacugggg

SEQ ID NO: 2396881 - RNA, 18 nt, Human
cacgccucccacuggggu

SEQ ID NO: 2396882 - RNA, 13 nt, Human
cacgccucccacu

SEQ ID NO: 2396883 - RNA, 14 nt, Human
cacgccucccacug

SEQ ID NO: 2396884 - RNA, 15 nt, Human
cacgccucccacugg

SEQ ID NO: 2396885 - RNA, 16 nt, Human
cacgccucccacuggg

SEQ ID NO: 2396886 - RNA, 22 nt, Human
cacgccuaugaucccagcacuu

SEQ ID NO: 2396887 - RNA, 21 nt, Human
cacgccuaugaucccagcacu

SEQ ID NO: 2396888 - RNA, 19 nt, Human
cacgccuaugaucccagca

SEQ ID NO: 2396889 - RNA, 18 nt, Human
cacgccuaugaucccagc

SEQ ID NO: 2396890 - RNA, 21 nt, Human
cacgcccuccccuccccugcu

SEQ ID NO: 2396891 - RNA, 16 nt, Human
cacgcccuccccuccc

SEQ ID NO: 2396892 - RNA, 20 nt, Human
cacgcccuccccuccccugc

SEQ ID NO: 2396893 - RNA, 24 nt, Human
cacgcccuccccuccccugcugca

SEQ ID NO: 2396894 - RNA, 20 nt, Human
cacgccuguaauccuagcac

SEQ ID NO: 2396895 - RNA, 19 nt, Human
cacgccuguaauccuagca

SEQ ID NO: 2396896 - RNA, 14 nt, Human
cacgccuguaaucc

SEQ ID NO: 2396897 - RNA, 22 nt, Human
cacgccugcaaacgcugccugc

SEQ ID NO: 2396898 - RNA, 21 nt, Human
cacgccugcaaacgcugccug

SEQ ID NO: 2396899 - RNA, 16 nt, Human
cacgccuguaauccca

SEQ ID NO: 2396900 - RNA, 23 nt, Human
cacgccugcaaacgcugccugcc

SEQ ID NO: 2396901 - RNA, 19 nt, Human
cacgccuguaaucccagca

SEQ ID NO: 2396902 - RNA, 18 nt, Human
cacgccuguaaucccagc

SEQ ID NO: 2396903 - RNA, 17 nt, Human
cacgccuguaaucccag

SEQ ID NO: 2396904 - RNA, 20 nt, Human
cacgcuggaccuugaacugg

SEQ ID NO: 2396905 - RNA, 17 nt, Human
cacgcuggaccuugaac

SEQ ID NO: 2396906 - RNA, 14 nt, Human
cacgcuccuuccuc

SEQ ID NO: 2396907 - RNA, 16 nt, Human
cacggcucacugcagc

SEQ ID NO: 2396908 - RNA, 17 nt, Human
cacggcucacugcagcc

SEQ ID NO: 2396909 - RNA, 19 nt, Human
cacggcucacugcagccuc

SEQ ID NO: 2396910 - RNA, 20 nt, Human
cacggcucacugcagccuca

SEQ ID NO: 2396911 - RNA, 15 nt, Human
cacgggagauuucuu

SEQ ID NO: 2396912 - RNA, 12 nt, Human
cacggcugcuga

SEQ ID NO: 2396913 - RNA, 13 nt, Human
cacggcugcugag

SEQ ID NO: 2396914 - RNA, 20 nt, Human
cacggcucuagguggggcgg

SEQ ID NO: 2396915 - RNA, 15 nt, Human
cacgggguauuuuag

SEQ ID NO: 2396916 - RNA, 15 nt, Human
cacgggggcagcuga

SEQ ID NO: 2396917 - RNA, 22 nt, Human
cacgggggcagcugauacaaau

SEQ ID NO: 2396918 - RNA, 15 nt, Human
cacgggggccaagga

SEQ ID NO: 2396919 - RNA, 14 nt, Human
cacggucuguucuu

SEQ ID NO: 2396920 - RNA, 14 nt, Human
cacgguagugccug

SEQ ID NO: 2396921 - RNA, 21 nt, Human
cacggucgccaccuggcauuc

SEQ ID NO: 2396922 - RNA, 15 nt, Human
cacgguagugccuga

SEQ ID NO: 2396923 - RNA, 15 nt, Human
cacggugccuuuuuu

SEQ ID NO: 2396924 - RNA, 17 nt, Human
cacggugccuuuuuuca

SEQ ID NO: 2396925 - RNA, 16 nt, Human
cacggugggccuugcu

SEQ ID NO: 2396926 - RNA, 14 nt, Human
cacggugggccuug

SEQ ID NO: 2396927 - RNA, 17 nt, Human
cacgguuugaagccugg

SEQ ID NO: 2396928 - RNA, 18 nt, Human
cacgguuugaagccugga

SEQ ID NO: 2396929 - RNA, 22 nt, Human
cacuaaacuuuacccaaaaacu

SEQ ID NO: 2396930 - RNA, 12 nt, Human
cacuaaagcagu

SEQ ID NO: 2396931 - RNA, 17 nt, Human
cacuaaacagacuauuu

SEQ ID NO: 2396932 - RNA, 13 nt, Human
cacuaaacaaaga

SEQ ID NO: 2396933 - RNA, 22 nt, Human
cacguucucacacccaccgucc

SEQ ID NO: 2396934 - RNA, 23 nt, Human
cacguuucuaaaggcuaccuuug

SEQ ID NO: 2396935 - RNA, 14 nt, Human
cacguuucuaaagg

SEQ ID NO: 2396936 - RNA, 12 nt, Human
cacguuucuaaa

SEQ ID NO: 2396937 - RNA, 13 nt, Human
cacguucaccccu

SEQ ID NO: 2396938 - RNA, 19 nt, Human
cacguuccuuacugcagaa

SEQ ID NO: 2396939 - RNA, 18 nt, Human
cacguuaugguguuucuc

SEQ ID NO: 2396940 - RNA, 20 nt, Human
cacguuccuucccccgcaau

SEQ ID NO: 2396941 - RNA, 18 nt, Human
cacguucucacacccacc

SEQ ID NO: 2396942 - RNA, 19 nt, Human
cacguucucacacccaccg

SEQ ID NO: 2396943 - RNA, 22 nt, Human
cacguucuuacuaguuucccuu

SEQ ID NO: 2396944 - RNA, 16 nt, Human
cacgugugugacucag

SEQ ID NO: 2396945 - RNA, 12 nt, Human
cacgugugugac

SEQ ID NO: 2396946 - RNA, 11 nt, Human
cacguguguga

SEQ ID NO: 2396947 - RNA, 13 nt, Human
cacguuauggugu

SEQ ID NO: 2396948 - RNA, 23 nt, Human
cacguguuuuauuccuguauguu

SEQ ID NO: 2396949 - RNA, 22 nt, Human
cacguguuuuauuccuguaugu

SEQ ID NO: 2396950 - RNA, 16 nt, Human
cacguguuugugcugu

SEQ ID NO: 2396951 - RNA, 20 nt, Human
cacguguaacugucagccgg

SEQ ID NO: 2396952 - RNA, 16 nt, Human
cacgugggcucauaug

SEQ ID NO: 2396953 - RNA, 19 nt, Human
cacguguggccuguucuuc

SEQ ID NO: 2396954 - RNA, 15 nt, Human
cacguguccuguagu

SEQ ID NO: 2396955 - RNA, 16 nt, Human
cacguguccuguaguu

SEQ ID NO: 2396956 - RNA, 16 nt, Human
cacgugguccuaaucu

SEQ ID NO: 2396957 - RNA, 19 nt, Human
cacgugguccuaaucuucu

SEQ ID NO: 2396958 - RNA, 17 nt, Human
cacguaguagggucagg

SEQ ID NO: 2396959 - RNA, 23 nt, Human
cacguagcccccaggcugcugga

SEQ ID NO: 2396960 - RNA, 16 nt, Human
cacguacuuaaaugaa

SEQ ID NO: 2396961 - RNA, 20 nt, Human
cacgguuugaagccuggaac

SEQ ID NO: 2396962 - RNA, 19 nt, Human
cacgguuugaagccuggaa

SEQ ID NO: 2396963 - RNA, 15 nt, Human
cacguacaaaaucca

SEQ ID NO: 2396964 - RNA, 19 nt, Human
cacguaguagggucaggcc

SEQ ID NO: 2396965 - RNA, 20 nt, Human
cacguaguagggucaggcca

SEQ ID NO: 2396966 - RNA, 21 nt, Human
cacguaguagggucaggccac

SEQ ID NO: 2396967 - RNA, 23 nt, Human
cacguaguagggucaggccacgg

SEQ ID NO: 2396968 - RNA, 17 nt, Human
cacgucauguuucuuca

SEQ ID NO: 2396969 - RNA, 14 nt, Human
cacgucaugggagg

SEQ ID NO: 2396970 - RNA, 16 nt, Human
cacguccagaauuuuu

SEQ ID NO: 2396971 - RNA, 13 nt, Human
cacgucccccugg

SEQ ID NO: 2396972 - RNA, 17 nt, Human
cacgucaucuaguuuua

SEQ ID NO: 2396973 - RNA, 14 nt, Human
cacguccugucagu

SEQ ID NO: 2396974 - RNA, 15 nt, Human
cacgucccccugggg

SEQ ID NO: 2396975 - RNA, 16 nt, Human
cacgucccccuggggc

SEQ ID NO: 2396976 - RNA, 17 nt, Human
cacgucccccuggggcu

SEQ ID NO: 2396977 - RNA, 20 nt, Human
cacgucccccuggggcuucu

SEQ ID NO: 2396978 - RNA, 18 nt, Human
cacguacacacacauaca

SEQ ID NO: 2396979 - RNA, 19 nt, Human
cacguacacacacauacac

SEQ ID NO: 2396980 - RNA, 14 nt, Human
cacguacacacaca

SEQ ID NO: 2396981 - RNA, 19 nt, Human
cacguaaugaaacuuggau

SEQ ID NO: 2396982 - RNA, 16 nt, Human
cacguaaugaaacuug

SEQ ID NO: 2396983 - RNA, 20 nt, Human
cacguggaggaaugcucccc

SEQ ID NO: 2396984 - RNA, 19 nt, Human
cacgugcuacccccaugcu

SEQ ID NO: 2396985 - RNA, 18 nt, Human
cacguggaggagcagugc

SEQ ID NO: 2396986 - RNA, 20 nt, Human
cacguggaggagcagugcag

SEQ ID NO: 2396987 - RNA, 21 nt, Human
cacguggaggagcagugcagg

SEQ ID NO: 2396988 - RNA, 18 nt, Human
cacguggcauguggccug

SEQ ID NO: 2396989 - RNA, 19 nt, Human
cacguggcauguggccugu

SEQ ID NO: 2396990 - RNA, 20 nt, Human
cacguggcauguggccugug

SEQ ID NO: 2396991 - RNA, 23 nt, Human
cacguggagagcuggugcccgga

SEQ ID NO: 2396992 - RNA, 15 nt, Human
cacguggagagcugg

SEQ ID NO: 2396993 - RNA, 13 nt, Human
cacguggagagcu

SEQ ID NO: 2396994 - RNA, 16 nt, Human
cacgugccaggcccgg

SEQ ID NO: 2396995 - RNA, 15 nt, Human
cacgugggaaccccc

SEQ ID NO: 2396996 - RNA, 22 nt, Human
cacguggcauguggccuguggc

SEQ ID NO: 2396997 - RNA, 21 nt, Human
cacgugggaaccccccuccca

SEQ ID NO: 2396998 - RNA, 20 nt, Human
cacguggccucuugagcagu

SEQ ID NO: 2396999 - RNA, 23 nt, Human
cacguggccucuugagcaguggc

SEQ ID NO: 2397000 - RNA, 12 nt, Human
cacguggccucu

SEQ ID NO: 2397001 - RNA, 13 nt, Human
cacguggccucuu

SEQ ID NO: 2397002 - RNA, 17 nt, Human
cacguggccucuugagc

SEQ ID NO: 2397003 - RNA, 18 nt, Human
cacguggccucuugagca

SEQ ID NO: 2397004 - RNA, 15 nt, Human
cacgugccaggcccg

SEQ ID NO: 2397005 - RNA, 14 nt, Human
cacgugccaggccc

SEQ ID NO: 2397006 - RNA, 13 nt, Human
cacgugccaggcc

SEQ ID NO: 2397007 - RNA, 21 nt, Human
cacgugagaaucccuggcaaa

SEQ ID NO: 2397008 - RNA, 18 nt, Human
cacgugacagugccuggg

SEQ ID NO: 2397009 - RNA, 20 nt, Human
cacgugagaaucccuggcaa

SEQ ID NO: 2397010 - RNA, 16 nt, Human
cacgugcagcucaagg

SEQ ID NO: 2397011 - RNA, 13 nt, Human
cacgugacagccg

SEQ ID NO: 2397012 - RNA, 18 nt, Human
cacgucuuccuucugccu

SEQ ID NO: 2397013 - RNA, 23 nt, Human
cacgucuuccuucugccugagcu

SEQ ID NO: 2397014 - RNA, 15 nt, Human
cacgucugucuucac

SEQ ID NO: 2397015 - RNA, 15 nt, Human
cacgucuuccuucug

SEQ ID NO: 2397016 - RNA, 16 nt, Human
cacgucuuccuucugc

SEQ ID NO: 2397017 - RNA, 14 nt, Human
cacgucugucuuca

SEQ ID NO: 2397018 - RNA, 18 nt, Human
cacgucugacccucucca

SEQ ID NO: 2397019 - RNA, 17 nt, Human
cacgucugacccucucc

SEQ ID NO: 2397020 - RNA, 16 nt, Human
cacgucugacccucuc

SEQ ID NO: 2397021 - RNA, 16 nt, Human
cacguccugucagugc

SEQ ID NO: 2397022 - RNA, 17 nt, Human
cacguccugucagugcc

SEQ ID NO: 2397023 - RNA, 19 nt, Human
cacguccugucagugccgc

SEQ ID NO: 2397024 - RNA, 23 nt, Human
cacguccugucagugccgccgcc

SEQ ID NO: 2397025 - RNA, 23 nt, Human
cacuauuuuuauuuauauuuuug

SEQ ID NO: 2397026 - RNA, 14 nt, Human
cacucaacaugagu

SEQ ID NO: 2397027 - RNA, 14 nt, Human
cacucaagaagcag

SEQ ID NO: 2397028 - RNA, 15 nt, Human
cacucaagaagcagg

SEQ ID NO: 2397029 - RNA, 17 nt, Human
cacucaagaagcaggcu

SEQ ID NO: 2397030 - RNA, 16 nt, Human
cacucaaauuaaucuu

SEQ ID NO: 2397031 - RNA, 19 nt, Human
cacucaaauuaaucuuucu

SEQ ID NO: 2397032 - RNA, 20 nt, Human
cacucaaauuaaucuuucuu

SEQ ID NO: 2397033 - RNA, 20 nt, Human
cacucaaaagcugggcaggu

SEQ ID NO: 2397034 - RNA, 16 nt, Human
cacucaaaucaagaaa

SEQ ID NO: 2397035 - RNA, 15 nt, Human
cacucacacagccag

SEQ ID NO: 2397036 - RNA, 16 nt, Human
cacucacacagccagg

SEQ ID NO: 2397037 - RNA, 18 nt, Human
cacucacacagccaggug

SEQ ID NO: 2397038 - RNA, 22 nt, Human
cacucaaugcagccagaccuau

SEQ ID NO: 2397039 - RNA, 22 nt, Human
cacucacacagccaggugccuu

SEQ ID NO: 2397040 - RNA, 23 nt, Human
cacucacacagccaggugccuug

SEQ ID NO: 2397041 - RNA, 12 nt, Human
cacucacacagg

SEQ ID NO: 2397042 - RNA, 13 nt, Human
cacucacacagga

SEQ ID NO: 2397043 - RNA, 14 nt, Human
cacucacacaggac

SEQ ID NO: 2397044 - RNA, 21 nt, Human
cacucacacaggacccccuuc

SEQ ID NO: 2397045 - RNA, 22 nt, Human
cacucacacaggacccccuucc

SEQ ID NO: 2397046 - RNA, 16 nt, Human
cacucacagaccugga

SEQ ID NO: 2397047 - RNA, 18 nt, Human
cacucaagccaagcagcc

SEQ ID NO: 2397048 - RNA, 13 nt, Human
cacucaagcuugg

SEQ ID NO: 2397049 - RNA, 16 nt, Human
cacucaagccaagcag

SEQ ID NO: 2397050 - RNA, 15 nt, Human
cacucaagccaagca

SEQ ID NO: 2397051 - RNA, 17 nt, Human
cacucaaugcagccaga

SEQ ID NO: 2397052 - RNA, 12 nt, Human
cacucaagccaa

SEQ ID NO: 2397053 - RNA, 23 nt, Human
cacucaagaagcaggcuacacug

SEQ ID NO: 2397054 - RNA, 19 nt, Human
cacucaagaagcaggcuac

SEQ ID NO: 2397055 - RNA, 20 nt, Human
cacucaagaagcaggcuaca

SEQ ID NO: 2397056 - RNA, 19 nt, Human
cacucaaaagcugggcagg

SEQ ID NO: 2397057 - RNA, 18 nt, Human
cacucaaaagcugggcag

SEQ ID NO: 2397058 - RNA, 17 nt, Human
cacucaaaagcugggca

SEQ ID NO: 2397059 - RNA, 15 nt, Human
cacucaaaagcuggg

SEQ ID NO: 2397060 - RNA, 22 nt, Human
cacuauuuuuauuuauauuuuu

SEQ ID NO: 2397061 - RNA, 14 nt, Human
cacuauuuuaugca

SEQ ID NO: 2397062 - RNA, 17 nt, Human
cacuauuuccuuuauaa

SEQ ID NO: 2397063 - RNA, 13 nt, Human
cacuauuuuaugc

SEQ ID NO: 2397064 - RNA, 17 nt, Human
cacuauuuuuauuuaua

SEQ ID NO: 2397065 - RNA, 19 nt, Human
cacuauuuaucugugcaaa

SEQ ID NO: 2397066 - RNA, 15 nt, Human
cacuauggugccaau

SEQ ID NO: 2397067 - RNA, 22 nt, Human
cacuauggugccaauggaaccu

SEQ ID NO: 2397068 - RNA, 22 nt, Human
cacuauuggcugggaguggugg

SEQ ID NO: 2397069 - RNA, 13 nt, Human
cacuauuuccuuu

SEQ ID NO: 2397070 - RNA, 14 nt, Human
cacuauuuccuuua

SEQ ID NO: 2397071 - RNA, 20 nt, Human
cacuauguugcccaggcagg

SEQ ID NO: 2397072 - RNA, 21 nt, Human
cacuauguugcccaggcaggu

SEQ ID NO: 2397073 - RNA, 22 nt, Human
cacucagcacaaggccaucugg

SEQ ID NO: 2397074 - RNA, 15 nt, Human
cacucagcacaaggc

SEQ ID NO: 2397075 - RNA, 13 nt, Human
cacucagcacaag

SEQ ID NO: 2397076 - RNA, 12 nt, Human
cacucagcacaa

SEQ ID NO: 2397077 - RNA, 12 nt, Human
cacucagaccug

SEQ ID NO: 2397078 - RNA, 22 nt, Human
cacucagaagacacugaugggc

SEQ ID NO: 2397079 - RNA, 15 nt, Human
cacucacuccugaga

SEQ ID NO: 2397080 - RNA, 17 nt, Human
cacucacugcggagaac

SEQ ID NO: 2397081 - RNA, 18 nt, Human
cacucagaagacacugau

SEQ ID NO: 2397082 - RNA, 19 nt, Human
cacucagaagacacugaug

SEQ ID NO: 2397083 - RNA, 18 nt, Human
cacucaccaguguccccu

SEQ ID NO: 2397084 - RNA, 19 nt, Human
cacucacagaccuggagcc

SEQ ID NO: 2397085 - RNA, 23 nt, Human
cacucacagaccuggagccccug

SEQ ID NO: 2397086 - RNA, 17 nt, Human
cacucaccgaagccacu

SEQ ID NO: 2397087 - RNA, 22 nt, Human
cacucacccaugugccaaggug

SEQ ID NO: 2397088 - RNA, 14 nt, Human
cacucaccgaagcc

SEQ ID NO: 2397089 - RNA, 21 nt, Human
cacucaccaguguccccucca

SEQ ID NO: 2397090 - RNA, 16 nt, Human
cacucacccaugugcc

SEQ ID NO: 2397091 - RNA, 21 nt, Human
cacucacccaugugccaaggu

SEQ ID NO: 2397092 - RNA, 19 nt, Human
cacucacauuuauucugcu

SEQ ID NO: 2397093 - RNA, 20 nt, Human
cacucacauuuauucugcuc

SEQ ID NO: 2397094 - RNA, 12 nt, Human
cacucagaagac

SEQ ID NO: 2397095 - RNA, 16 nt, Human
cacucacuaggccccc

SEQ ID NO: 2397096 - RNA, 17 nt, Human
cacucacuaggccccca

SEQ ID NO: 2397097 - RNA, 22 nt, Human
cacucacuaggcccccacuugc

SEQ ID NO: 2397098 - RNA, 12 nt, Human
cacucacuccug

SEQ ID NO: 2397099 - RNA, 14 nt, Human
cacucacuccugag

SEQ ID NO: 2397100 - RNA, 16 nt, Human
cacucagaagacacug

SEQ ID NO: 2397101 - RNA, 17 nt, Human
cacucagaagacacuga

SEQ ID NO: 2397102 - RNA, 17 nt, Human
cacuaugaagcuaccuc

SEQ ID NO: 2397103 - RNA, 18 nt, Human
cacuaucugggugcauga

SEQ ID NO: 2397104 - RNA, 14 nt, Human
cacuaugaaucuau

SEQ ID NO: 2397105 - RNA, 13 nt, Human
cacuauggugcca

SEQ ID NO: 2397106 - RNA, 17 nt, Human
cacuaugguauuugagu

SEQ ID NO: 2397107 - RNA, 15 nt, Human
cacuauguugcccag

SEQ ID NO: 2397108 - RNA, 21 nt, Human
cacuaugaagauguuucaaaa

SEQ ID NO: 2397109 - RNA, 11 nt, Human
cacuaucuggg

SEQ ID NO: 2397110 - RNA, 17 nt, Human
cacuaucugggugcaug

SEQ ID NO: 2397111 - RNA, 14 nt, Human
cacuaugaagaugu

SEQ ID NO: 2397112 - RNA, 19 nt, Human
cacuaucccggcugcccuu

SEQ ID NO: 2397113 - RNA, 18 nt, Human
cacuaucccggcugcccu

SEQ ID NO: 2397114 - RNA, 16 nt, Human
cacuauguugcccagg

SEQ ID NO: 2397115 - RNA, 17 nt, Human
cacuauguugcccaggc

SEQ ID NO: 2397116 - RNA, 18 nt, Human
cacuauguugcccaggca

SEQ ID NO: 2397117 - RNA, 19 nt, Human
cacuauguugcccaggcag

SEQ ID NO: 2397118 - RNA, 12 nt, Human
cacuauaaaugg

SEQ ID NO: 2397119 - RNA, 17 nt, Human
cacuaguuuugugccag

SEQ ID NO: 2397120 - RNA, 16 nt, Human
cacuagugcaaaucau

SEQ ID NO: 2397121 - RNA, 12 nt, Human
cacuaguuuugu

SEQ ID NO: 2397122 - RNA, 17 nt, Human
cacuaaguuauaguaua

SEQ ID NO: 2397123 - RNA, 15 nt, Human
cacuagugcaaauca

SEQ ID NO: 2397124 - RNA, 14 nt, Human
cacuauaauguaag

SEQ ID NO: 2397125 - RNA, 14 nt, Human
cacuaguauuucua

SEQ ID NO: 2397126 - RNA, 19 nt, Human
cacuaguauuucuaugaaa

SEQ ID NO: 2397127 - RNA, 18 nt, Human
cacuauaauguaagcucu

SEQ ID NO: 2397128 - RNA, 14 nt, Human
cacuauagccuagg

SEQ ID NO: 2397129 - RNA, 21 nt, Human
cacuauagccuaggugacaga

SEQ ID NO: 2397130 - RNA, 19 nt, Human
cacuauaaaugguguuuuu

SEQ ID NO: 2397131 - RNA, 14 nt, Human
cacuauacagauuc

SEQ ID NO: 2397132 - RNA, 23 nt, Human
cacuauauaggcaucacauuuuu

SEQ ID NO: 2397133 - RNA, 14 nt, Human
cacuauaucuguau

SEQ ID NO: 2397134 - RNA, 19 nt, Human
cacuauaucuguauauaaa

SEQ ID NO: 2397135 - RNA, 13 nt, Human
cacuaaagcagug

SEQ ID NO: 2397136 - RNA, 15 nt, Human
cacuaaaguauguaa

SEQ ID NO: 2397137 - RNA, 16 nt, Human
cacuaaaguauguaaa

SEQ ID NO: 2397138 - RNA, 22 nt, Human
cacuaaaguauguaaaguaugu

SEQ ID NO: 2397139 - RNA, 16 nt, Human
cacuaacaugauuugg

SEQ ID NO: 2397140 - RNA, 21 nt, Human
cacuaaauugacacuuaaaaa

SEQ ID NO: 2397141 - RNA, 14 nt, Human
cacuaaccacgcug

SEQ ID NO: 2397142 - RNA, 15 nt, Human
cacuaaccacgcugg

SEQ ID NO: 2397143 - RNA, 16 nt, Human
cacuaaccacgcugga

SEQ ID NO: 2397144 - RNA, 17 nt, Human
cacuaaggugugcucug

SEQ ID NO: 2397145 - RNA, 21 nt, Human
cacuaagcagaggaggggccg

SEQ ID NO: 2397146 - RNA, 20 nt, Human
cacuaagcagaggaggggcc

SEQ ID NO: 2397147 - RNA, 18 nt, Human
cacuaagcagaggagggg

SEQ ID NO: 2397148 - RNA, 17 nt, Human
cacuaagcagaggaggg

SEQ ID NO: 2397149 - RNA, 16 nt, Human
cacuaagcagaggagg

SEQ ID NO: 2397150 - RNA, 15 nt, Human
cacuaagcagaggag

SEQ ID NO: 2397151 - RNA, 14 nt, Human
cacuaagcagagga

SEQ ID NO: 2397152 - RNA, 13 nt, Human
cacuaagcagagg

SEQ ID NO: 2397153 - RNA, 18 nt, Human
cacuaaggugugcucuga

SEQ ID NO: 2397154 - RNA, 14 nt, Human
cacuaaguuauagu

SEQ ID NO: 2397155 - RNA, 23 nt, Human
cacuaaggggcccggccagccau

SEQ ID NO: 2397156 - RNA, 13 nt, Human
cacuaaggggccc

SEQ ID NO: 2397157 - RNA, 12 nt, Human
cacuaaggggcc

SEQ ID NO: 2397158 - RNA, 19 nt, Human
cacuaacgacuucagggca

SEQ ID NO: 2397159 - RNA, 20 nt, Human
cacuaacguugagccccugg

SEQ ID NO: 2397160 - RNA, 13 nt, Human
cacuaaccugacc

SEQ ID NO: 2397161 - RNA, 14 nt, Human
cacuaaccugaccg

SEQ ID NO: 2397162 - RNA, 18 nt, Human
cacuaaccacgcuggacc

SEQ ID NO: 2397163 - RNA, 20 nt, Human
cacuaacuagagcagcccug

SEQ ID NO: 2397164 - RNA, 11 nt, Human
cacuaacuaga

SEQ ID NO: 2397165 - RNA, 17 nt, Human
cacuaagagagaaugag

SEQ ID NO: 2397166 - RNA, 10 nt, Human
cacuccuggg

SEQ ID NO: 2397167 - RNA, 12 nt, Human
cacuccuggggc

SEQ ID NO: 2397168 - RNA, 11 nt, Human
cacuccugggg

SEQ ID NO: 2397169 - RNA, 11 nt, Human
cacuccuuccu

SEQ ID NO: 2397170 - RNA, 18 nt, Human
cacuccuguuacuuaccu

SEQ ID NO: 2397171 - RNA, 13 nt, Human
cacuccuguacac

SEQ ID NO: 2397172 - RNA, 19 nt, Human
cacuccuggggccucuugg

SEQ ID NO: 2397173 - RNA, 24 nt, Human
cacuccuuccugccaccugcugcu

SEQ ID NO: 2397174 - RNA, 21 nt, Human
cacuccuuccugccaccugcu

SEQ ID NO: 2397175 - RNA, 18 nt, Human
cacuccuuccugccaccu

SEQ ID NO: 2397176 - RNA, 17 nt, Human
cacuccuuccugccacc

SEQ ID NO: 2397177 - RNA, 15 nt, Human
cacuccuuccugcca

SEQ ID NO: 2397178 - RNA, 15 nt, Human
cacucgcccgcccac

SEQ ID NO: 2397179 - RNA, 13 nt, Human
cacucgcuucccc

SEQ ID NO: 2397180 - RNA, 23 nt, Human
cacucgcccgcccacuguccugg

SEQ ID NO: 2397181 - RNA, 16 nt, Human
cacucgcccgcccacu

SEQ ID NO: 2397182 - RNA, 17 nt, Human
cacucgcccgcccacug

SEQ ID NO: 2397183 - RNA, 18 nt, Human
cacucgcccgcccacugu

SEQ ID NO: 2397184 - RNA, 22 nt, Human
cacucgcccgcccacuguccug

SEQ ID NO: 2397185 - RNA, 20 nt, Human
cacucgcuucccccauagcc

SEQ ID NO: 2397186 - RNA, 16 nt, Human
cacucgcuucccccau

SEQ ID NO: 2397187 - RNA, 18 nt, Human
cacucgggaggcugagac

SEQ ID NO: 2397188 - RNA, 22 nt, Human
cacucggcauuucaaaugugcu

SEQ ID NO: 2397189 - RNA, 22 nt, Human
cacucgggaggcugagacagga

SEQ ID NO: 2397190 - RNA, 20 nt, Human
cacucuaaaagguucaggga

SEQ ID NO: 2397191 - RNA, 18 nt, Human
cacucuaaaagguucagg

SEQ ID NO: 2397192 - RNA, 19 nt, Human
cacucuaaaagguucaggg

SEQ ID NO: 2397193 - RNA, 15 nt, Human
cacucuccccacacu

SEQ ID NO: 2397194 - RNA, 14 nt, Human
cacucuccccacac

SEQ ID NO: 2397195 - RNA, 12 nt, Human
cacucuccccac

SEQ ID NO: 2397196 - RNA, 18 nt, Human
cacucucauuccccaggu

SEQ ID NO: 2397197 - RNA, 21 nt, Human
cacucuccccacacuaaccug

SEQ ID NO: 2397198 - RNA, 16 nt, Human
cacucucccccacccc

SEQ ID NO: 2397199 - RNA, 18 nt, Human
cacucucccccacccccu

SEQ ID NO: 2397200 - RNA, 20 nt, Human
cacucucccccacccccucc

SEQ ID NO: 2397201 - RNA, 17 nt, Human
cacucucauuccccagg

SEQ ID NO: 2397202 - RNA, 21 nt, Human
cacucuacccucccacccccu

SEQ ID NO: 2397203 - RNA, 13 nt, Human
cacucuagccugg

SEQ ID NO: 2397204 - RNA, 15 nt, Human
cacucuagccugggc

SEQ ID NO: 2397205 - RNA, 15 nt, Human
cacucuagggcagug

SEQ ID NO: 2397206 - RNA, 19 nt, Human
cacucuagggcaguggagu

SEQ ID NO: 2397207 - RNA, 22 nt, Human
cacucuaggggucaggcuccau

SEQ ID NO: 2397208 - RNA, 17 nt, Human
cacucuaggggucaggc

SEQ ID NO: 2397209 - RNA, 19 nt, Human
cacucuaggggucaggcuc

SEQ ID NO: 2397210 - RNA, 17 nt, Human
cacucuacccucccacc

SEQ ID NO: 2397211 - RNA, 16 nt, Human
cacucuacccucccac

SEQ ID NO: 2397212 - RNA, 15 nt, Human
cacucuacccuccca

SEQ ID NO: 2397213 - RNA, 17 nt, Human
cacucuacccuauacaa

SEQ ID NO: 2397214 - RNA, 19 nt, Human
cacucuacccucccacccc

SEQ ID NO: 2397215 - RNA, 18 nt, Human
cacucuacccucccaccc

SEQ ID NO: 2397216 - RNA, 14 nt, Human
cacucuacuuagca

SEQ ID NO: 2397217 - RNA, 21 nt, Human
cacucuccuugcuacccagaa

SEQ ID NO: 2397218 - RNA, 17 nt, Human
cacucuccuugcuaccc

SEQ ID NO: 2397219 - RNA, 20 nt, Human
cacucuccuugcuacccaga

SEQ ID NO: 2397220 - RNA, 12 nt, Human
cacucuccuugg

SEQ ID NO: 2397221 - RNA, 12 nt, Human
cacucugagacu

SEQ ID NO: 2397222 - RNA, 23 nt, Human
cacucugagacucgcgacaaugc

SEQ ID NO: 2397223 - RNA, 19 nt, Human
cacucugccucugccugca

SEQ ID NO: 2397224 - RNA, 17 nt, Human
cacucugccucugccug

SEQ ID NO: 2397225 - RNA, 15 nt, Human
cacucugccucugcc

SEQ ID NO: 2397226 - RNA, 20 nt, Human
cacucugccucugccugcau

SEQ ID NO: 2397227 - RNA, 15 nt, Human
cacucugcucgccuu

SEQ ID NO: 2397228 - RNA, 18 nt, Human
cacucugcucgccuuagc

SEQ ID NO: 2397229 - RNA, 12 nt, Human
cacucugcucug

SEQ ID NO: 2397230 - RNA, 19 nt, Human
cacucugacuggcacaguc

SEQ ID NO: 2397231 - RNA, 23 nt, Human
cacucucugaagaugaucauuug

SEQ ID NO: 2397232 - RNA, 13 nt, Human
cacucucugaaga

SEQ ID NO: 2397233 - RNA, 14 nt, Human
cacucucugaagau

SEQ ID NO: 2397234 - RNA, 20 nt, Human
cacucucugaagaugaucau

SEQ ID NO: 2397235 - RNA, 21 nt, Human
cacucugcuuugacugagcag

SEQ ID NO: 2397236 - RNA, 19 nt, Human
cacucugcuuugacugagc

SEQ ID NO: 2397237 - RNA, 16 nt, Human
cacucugcuuguuauu

SEQ ID NO: 2397238 - RNA, 21 nt, Human
cacucugcuucucugacuucu

SEQ ID NO: 2397239 - RNA, 16 nt, Human
cacucugcuucucuga

SEQ ID NO: 2397240 - RNA, 17 nt, Human
cacucugcuucucugac

SEQ ID NO: 2397241 - RNA, 18 nt, Human
cacucugcuucucugacu

SEQ ID NO: 2397242 - RNA, 19 nt, Human
cacucugcuucucugacuu

SEQ ID NO: 2397243 - RNA, 15 nt, Human
cacucugcucugccc

SEQ ID NO: 2397244 - RNA, 16 nt, Human
cacucugcucugcccu

SEQ ID NO: 2397245 - RNA, 21 nt, Human
cacucugcucugcccuuguuc

SEQ ID NO: 2397246 - RNA, 14 nt, Human
cacucugcugcuua

SEQ ID NO: 2397247 - RNA, 11 nt, Human
cacucugcugc

SEQ ID NO: 2397248 - RNA, 12 nt, Human
cacucugcugcu

SEQ ID NO: 2397249 - RNA, 12 nt, Human
cacucugcuucu

SEQ ID NO: 2397250 - RNA, 13 nt, Human
cacucugcuucuc

SEQ ID NO: 2397251 - RNA, 14 nt, Human
cacucugcuucucu

SEQ ID NO: 2397252 - RNA, 15 nt, Human
cacucugcuucucug

SEQ ID NO: 2397253 - RNA, 12 nt, Human
cacucuggcagc

SEQ ID NO: 2397254 - RNA, 13 nt, Human
cacucuggcagcu

SEQ ID NO: 2397255 - RNA, 14 nt, Human
cacucuggcagcuc

SEQ ID NO: 2397256 - RNA, 23 nt, Human
cacuccugagaccccuggccucc

SEQ ID NO: 2397257 - RNA, 14 nt, Human
cacuccugccaagg

SEQ ID NO: 2397258 - RNA, 13 nt, Human
cacuccugccaag

SEQ ID NO: 2397259 - RNA, 21 nt, Human
cacuccugagaccccuggccu

SEQ ID NO: 2397260 - RNA, 22 nt, Human
cacuccugagaccccuggccuc

SEQ ID NO: 2397261 - RNA, 14 nt, Human
cacuccuucacaga

SEQ ID NO: 2397262 - RNA, 21 nt, Human
cacuccuucacagaugggugc

SEQ ID NO: 2397263 - RNA, 23 nt, Human
cacuccucugacucagggcuccu

SEQ ID NO: 2397264 - RNA, 21 nt, Human
cacuccucugacucagggcuc

SEQ ID NO: 2397265 - RNA, 20 nt, Human
cacuccucugacucagggcu

SEQ ID NO: 2397266 - RNA, 14 nt, Human
cacuccugagaccc

SEQ ID NO: 2397267 - RNA, 16 nt, Human
cacuccugagaccccu

SEQ ID NO: 2397268 - RNA, 20 nt, Human
cacuccugagaccccuggcc

SEQ ID NO: 2397269 - RNA, 15 nt, Human
cacuccuccaaagga

SEQ ID NO: 2397270 - RNA, 13 nt, Human
cacuccuccuagc

SEQ ID NO: 2397271 - RNA, 18 nt, Human
cacuccuccuagccaccc

SEQ ID NO: 2397272 - RNA, 13 nt, Human
cacuccucugacu

SEQ ID NO: 2397273 - RNA, 12 nt, Human
cacuccucugac

SEQ ID NO: 2397274 - RNA, 17 nt, Human
cacucccuucuaccugc

SEQ ID NO: 2397275 - RNA, 18 nt, Human
cacucccuucuaccugcc

SEQ ID NO: 2397276 - RNA, 19 nt, Human
cacucccuucuaccugcca

SEQ ID NO: 2397277 - RNA, 20 nt, Human
cacucccuucuaccugccac

SEQ ID NO: 2397278 - RNA, 20 nt, Human
cacucccuugggcucccugu

SEQ ID NO: 2397279 - RNA, 16 nt, Human
cacucccuugggcucc

SEQ ID NO: 2397280 - RNA, 13 nt, Human
cacucccuugggc

SEQ ID NO: 2397281 - RNA, 22 nt, Human
cacucccuucuaccugccacuc

SEQ ID NO: 2397282 - RNA, 23 nt, Human
cacucccuucuaccugccacuca

SEQ ID NO: 2397283 - RNA, 19 nt, Human
cacucccuucccauaagcu

SEQ ID NO: 2397284 - RNA, 22 nt, Human
cacucccuucccaugacccagg

SEQ ID NO: 2397285 - RNA, 15 nt, Human
cacucccuccaucaa

SEQ ID NO: 2397286 - RNA, 14 nt, Human
cacucccuccauca

SEQ ID NO: 2397287 - RNA, 17 nt, Human
cacucccugcaaccuga

SEQ ID NO: 2397288 - RNA, 21 nt, Human
cacuccggugugccugcagcc

SEQ ID NO: 2397289 - RNA, 20 nt, Human
cacuccggugugccugcagc

SEQ ID NO: 2397290 - RNA, 19 nt, Human
cacuccggugugccugcag

SEQ ID NO: 2397291 - RNA, 17 nt, Human
cacuccggugugccugc

SEQ ID NO: 2397292 - RNA, 19 nt, Human
cacuccgagaggugggcca

SEQ ID NO: 2397293 - RNA, 21 nt, Human
cacucccuugguggcaagagc

SEQ ID NO: 2397294 - RNA, 22 nt, Human
cacuccggugugccugcagccc

SEQ ID NO: 2397295 - RNA, 20 nt, Human
cacuccggccugaugacaga

SEQ ID NO: 2397296 - RNA, 18 nt, Human
cacuccuacaccuaacuc

SEQ ID NO: 2397297 - RNA, 13 nt, Human
cacuccuaccugg

SEQ ID NO: 2397298 - RNA, 14 nt, Human
cacuccuaccuggu

SEQ ID NO: 2397299 - RNA, 12 nt, Human
cacuccuagaga

SEQ ID NO: 2397300 - RNA, 19 nt, Human
cacuccuagagaacgcagc

SEQ ID NO: 2397301 - RNA, 21 nt, Human
cacuccuagagaacgcagccc

SEQ ID NO: 2397302 - RNA, 22 nt, Human
cacuccuagagaacgcagcccu

SEQ ID NO: 2397303 - RNA, 16 nt, Human
cacucauccccucacu

SEQ ID NO: 2397304 - RNA, 19 nt, Human
cacucagcuuccuacccac

SEQ ID NO: 2397305 - RNA, 12 nt, Human
cacucaugcuga

SEQ ID NO: 2397306 - RNA, 13 nt, Human
cacucaugcugaa

SEQ ID NO: 2397307 - RNA, 14 nt, Human
cacucaugcugaaa

SEQ ID NO: 2397308 - RNA, 15 nt, Human
cacucauugaccuga

SEQ ID NO: 2397309 - RNA, 15 nt, Human
cacucaugcugaaag

SEQ ID NO: 2397310 - RNA, 17 nt, Human
cacucaugcugaaagcc

SEQ ID NO: 2397311 - RNA, 15 nt, Human
cacucauuccuguag

SEQ ID NO: 2397312 - RNA, 22 nt, Human
cacucagcucuuggcuccacug

SEQ ID NO: 2397313 - RNA, 19 nt, Human
cacucaggccaacaagcca

SEQ ID NO: 2397314 - RNA, 20 nt, Human
cacucaggaggcugaggcag

SEQ ID NO: 2397315 - RNA, 19 nt, Human
cacucaggaggcugaggca

SEQ ID NO: 2397316 - RNA, 21 nt, Human
cacucaggaggcugaggcagg

SEQ ID NO: 2397317 - RNA, 16 nt, Human
cacucaguccauagca

SEQ ID NO: 2397318 - RNA, 18 nt, Human
cacucauugaccugaggc

SEQ ID NO: 2397319 - RNA, 19 nt, Human
cacucauugaccugaggcc

SEQ ID NO: 2397320 - RNA, 20 nt, Human
cacucauugaccugaggccc

SEQ ID NO: 2397321 - RNA, 22 nt, Human
cacucauugaccugaggcccuu

SEQ ID NO: 2397322 - RNA, 21 nt, Human
cacucccggcacuccaugcuu

SEQ ID NO: 2397323 - RNA, 13 nt, Human
cacucauuccugu

SEQ ID NO: 2397324 - RNA, 12 nt, Human
cacucccugcaa

SEQ ID NO: 2397325 - RNA, 13 nt, Human
cacucccugcaac

SEQ ID NO: 2397326 - RNA, 16 nt, Human
cacucccugcaaccug

SEQ ID NO: 2397327 - RNA, 23 nt, Human
cacugugacccccagcuccggcc

SEQ ID NO: 2397328 - RNA, 14 nt, Human
cacugugccaugug

SEQ ID NO: 2397329 - RNA, 22 nt, Human
cacugugacccccagcuccggc

SEQ ID NO: 2397330 - RNA, 20 nt, Human
cacugugacccccagcuccg

SEQ ID NO: 2397331 - RNA, 19 nt, Human
cacugugacccccagcucc

SEQ ID NO: 2397332 - RNA, 15 nt, Human
cacugugacccccag

SEQ ID NO: 2397333 - RNA, 14 nt, Human
cacugugaccccca

SEQ ID NO: 2397334 - RNA, 15 nt, Human
cacugugaaggaccc

SEQ ID NO: 2397335 - RNA, 17 nt, Human
cacugugaaggacccuu

SEQ ID NO: 2397336 - RNA, 14 nt, Human
cacugucuugaaga

SEQ ID NO: 2397337 - RNA, 14 nt, Human
cacugucuucuuca

SEQ ID NO: 2397338 - RNA, 23 nt, Human
cacugucugagaguuuaguugua

SEQ ID NO: 2397339 - RNA, 12 nt, Human
cacugucucagu

SEQ ID NO: 2397340 - RNA, 23 nt, Human
cacuguccugggcgcccuggaag

SEQ ID NO: 2397341 - RNA, 19 nt, Human
cacuguccugggcgcccug

SEQ ID NO: 2397342 - RNA, 21 nt, Human
cacuguccugggcgcccugga

SEQ ID NO: 2397343 - RNA, 10 nt, Human
cacugucuga

SEQ ID NO: 2397344 - RNA, 11 nt, Human
cacugucugag

SEQ ID NO: 2397345 - RNA, 13 nt, Human
cacugucugagag

SEQ ID NO: 2397346 - RNA, 18 nt, Human
cacugucugagaguuuag

SEQ ID NO: 2397347 - RNA, 13 nt, Human
cacugugaagaga

SEQ ID NO: 2397348 - RNA, 13 nt, Human
cacugucuuuccu

SEQ ID NO: 2397349 - RNA, 14 nt, Human
cacugugaaggacc

SEQ ID NO: 2397350 - RNA, 13 nt, Human
cacugugaaggac

SEQ ID NO: 2397351 - RNA, 18 nt, Human
cacuguccuccaagccag

SEQ ID NO: 2397352 - RNA, 18 nt, Human
cacugucccucaaaugac

SEQ ID NO: 2397353 - RNA, 11 nt, Human
cacuguccugc

SEQ ID NO: 2397354 - RNA, 17 nt, Human
cacuguccuccaagcca

SEQ ID NO: 2397355 - RNA, 14 nt, Human
cacuguccuccaag

SEQ ID NO: 2397356 - RNA, 18 nt, Human
cacugucccuugccucaa

SEQ ID NO: 2397357 - RNA, 12 nt, Human
cacugucccuug

SEQ ID NO: 2397358 - RNA, 17 nt, Human
cacugucccuugccuca

SEQ ID NO: 2397359 - RNA, 18 nt, Human
cacuguccugggccugca

SEQ ID NO: 2397360 - RNA, 15 nt, Human
cacuguccugggccu

SEQ ID NO: 2397361 - RNA, 13 nt, Human
cacuguccugggc

SEQ ID NO: 2397362 - RNA, 14 nt, Human
cacuguccugggcg

SEQ ID NO: 2397363 - RNA, 15 nt, Human
cacuguccugggcgc

SEQ ID NO: 2397364 - RNA, 16 nt, Human
cacuguccugggcgcc

SEQ ID NO: 2397365 - RNA, 12 nt, Human
cacuguccugcu

SEQ ID NO: 2397366 - RNA, 13 nt, Human
cacuguccugcuc

SEQ ID NO: 2397367 - RNA, 15 nt, Human
cacuguccugcucca

SEQ ID NO: 2397368 - RNA, 16 nt, Human
cacuguccugcuccac

SEQ ID NO: 2397369 - RNA, 20 nt, Human
cacuguccugcuccacagug

SEQ ID NO: 2397370 - RNA, 21 nt, Human
cacuguccugcuccacagugu

SEQ ID NO: 2397371 - RNA, 11 nt, Human
cacuguccugg

SEQ ID NO: 2397372 - RNA, 12 nt, Human
cacuguccuggg

SEQ ID NO: 2397373 - RNA, 22 nt, Human
cacugucacuguuucucugcug

SEQ ID NO: 2397374 - RNA, 13 nt, Human
cacugucacuuug

SEQ ID NO: 2397375 - RNA, 16 nt, Human
cacugucacuuugcuc

SEQ ID NO: 2397376 - RNA, 19 nt, Human
cacugucacuguuucucug

SEQ ID NO: 2397377 - RNA, 18 nt, Human
cacugucacuguuucucu

SEQ ID NO: 2397378 - RNA, 15 nt, Human
cacugucaggaagaa

SEQ ID NO: 2397379 - RNA, 17 nt, Human
cacugucacuuugcucu

SEQ ID NO: 2397380 - RNA, 19 nt, Human
cacugucacuuugcucugg

SEQ ID NO: 2397381 - RNA, 20 nt, Human
cacugucacuuugcucuggg

SEQ ID NO: 2397382 - RNA, 16 nt, Human
cacugucccucaaaug

SEQ ID NO: 2397383 - RNA, 23 nt, Human
cacugucccucaaaugacccaaa

SEQ ID NO: 2397384 - RNA, 16 nt, Human
cacugucacuguuucu

SEQ ID NO: 2397385 - RNA, 17 nt, Human
cacuguauuuguaucuc

SEQ ID NO: 2397386 - RNA, 20 nt, Human
cacugucacccuccaccucu

SEQ ID NO: 2397387 - RNA, 14 nt, Human
cacuguauuuguau

SEQ ID NO: 2397388 - RNA, 16 nt, Human
cacugucacccuccac

SEQ ID NO: 2397389 - RNA, 14 nt, Human
cacugucaagauga

SEQ ID NO: 2397390 - RNA, 14 nt, Human
cacuguaaaaugaa

SEQ ID NO: 2397391 - RNA, 21 nt, Human
cacuggcugagcggaugcauc

SEQ ID NO: 2397392 - RNA, 13 nt, Human
cacuguaaaauga

SEQ ID NO: 2397393 - RNA, 17 nt, Human
cacuguaaaaugaaauu

SEQ ID NO: 2397394 - RNA, 16 nt, Human
cacuguaaaaugaaau

SEQ ID NO: 2397395 - RNA, 22 nt, Human
cacuguaagacucauucccuag

SEQ ID NO: 2397396 - RNA, 21 nt, Human
cacuggcucuccaagugccag

SEQ ID NO: 2397397 - RNA, 22 nt, Human
cacuggcucuccaagugccaga

SEQ ID NO: 2397398 - RNA, 16 nt, Human
cacuggcucuccaagu

SEQ ID NO: 2397399 - RNA, 17 nt, Human
cacuggcucuccaagug

SEQ ID NO: 2397400 - RNA, 18 nt, Human
cacuggcucuccaagugc

SEQ ID NO: 2397401 - RNA, 19 nt, Human
cacuggcucuccaagugcc

SEQ ID NO: 2397402 - RNA, 15 nt, Human
cacuggcucucucca

SEQ ID NO: 2397403 - RNA, 16 nt, Human
cacuggcucucuccag

SEQ ID NO: 2397404 - RNA, 17 nt, Human
cacuggcucucuccagg

SEQ ID NO: 2397405 - RNA, 18 nt, Human
cacuggcucucuccagga

SEQ ID NO: 2397406 - RNA, 22 nt, Human
cacuggccccuagaaucagccu

SEQ ID NO: 2397407 - RNA, 17 nt, Human
cacuggccccugagauc

SEQ ID NO: 2397408 - RNA, 13 nt, Human
cacuggccccuca

SEQ ID NO: 2397409 - RNA, 24 nt, Human
cacuggccccucaaaucguccagc

SEQ ID NO: 2397410 - RNA, 20 nt, Human
cacuggccggagucagugcc

SEQ ID NO: 2397411 - RNA, 17 nt, Human
cacuggccaucuccacc

SEQ ID NO: 2397412 - RNA, 23 nt, Human
cacuggcgcaucauaugcaguga

SEQ ID NO: 2397413 - RNA, 23 nt, Human
cacuggcguagaaguuuuuguac

SEQ ID NO: 2397414 - RNA, 11 nt, Human
cacuggcucuc

SEQ ID NO: 2397415 - RNA, 12 nt, Human
cacuggcucucc

SEQ ID NO: 2397416 - RNA, 14 nt, Human
cacuggcucuccaa

SEQ ID NO: 2397417 - RNA, 15 nt, Human
cacuggcucuccaag

SEQ ID NO: 2397418 - RNA, 21 nt, Human
cacuguagcauuacagugggu

SEQ ID NO: 2397419 - RNA, 18 nt, Human
cacuguagaaugauuuca

SEQ ID NO: 2397420 - RNA, 18 nt, Human
cacuguaaaaugaaauua

SEQ ID NO: 2397421 - RNA, 20 nt, Human
cacuguacaagguaccccuu

SEQ ID NO: 2397422 - RNA, 19 nt, Human
cacuguacuugcucuugau

SEQ ID NO: 2397423 - RNA, 15 nt, Human
cacuguacuugcucu

SEQ ID NO: 2397424 - RNA, 18 nt, Human
cacuguacuugcucuuga

SEQ ID NO: 2397425 - RNA, 23 nt, Human
cacuguauaaauaggagaggaug

SEQ ID NO: 2397426 - RNA, 19 nt, Human
cacuguauaaauaggagag

SEQ ID NO: 2397427 - RNA, 21 nt, Human
cacuguauaaauaggagagga

SEQ ID NO: 2397428 - RNA, 15 nt, Human
cacuguauaaauagg

SEQ ID NO: 2397429 - RNA, 16 nt, Human
cacuguauaaauagga

SEQ ID NO: 2397430 - RNA, 17 nt, Human
cacuguauaaauaggag

SEQ ID NO: 2397431 - RNA, 18 nt, Human
cacuguauaaauaggaga

SEQ ID NO: 2397432 - RNA, 18 nt, Human
cacuguaugcuggacggc

SEQ ID NO: 2397433 - RNA, 16 nt, Human
cacuguaugcuggacg

SEQ ID NO: 2397434 - RNA, 22 nt, Human
cacuguaguaaauggcaauucu

SEQ ID NO: 2397435 - RNA, 13 nt, Human
cacuguauaaaua

SEQ ID NO: 2397436 - RNA, 14 nt, Human
cacuguauaaauag

SEQ ID NO: 2397437 - RNA, 17 nt, Human
cacuguguccuggugcu

SEQ ID NO: 2397438 - RNA, 15 nt, Human
cacuguguauuuaac

SEQ ID NO: 2397439 - RNA, 12 nt, Human
cacuguguccug

SEQ ID NO: 2397440 - RNA, 15 nt, Human
cacuguuaucaaaac

SEQ ID NO: 2397441 - RNA, 23 nt, Human
cacuguuacuuucguacauuggc

SEQ ID NO: 2397442 - RNA, 17 nt, Human
cacuguucccccugugc

SEQ ID NO: 2397443 - RNA, 20 nt, Human
cacuguuccagccugcccuc

SEQ ID NO: 2397444 - RNA, 19 nt, Human
cacuguucccccugugcag

SEQ ID NO: 2397445 - RNA, 14 nt, Human
cacuguucccucug

SEQ ID NO: 2397446 - RNA, 16 nt, Human
cacuguucccucugcu

SEQ ID NO: 2397447 - RNA, 17 nt, Human
cacuguucccucugcuc

SEQ ID NO: 2397448 - RNA, 20 nt, Human
cacuguucccucugcuccug

SEQ ID NO: 2397449 - RNA, 23 nt, Human
cacuguucuauucaucucaagga

SEQ ID NO: 2397450 - RNA, 16 nt, Human
cacugugggacucuuc

SEQ ID NO: 2397451 - RNA, 14 nt, Human
cacuguggugucug

SEQ ID NO: 2397452 - RNA, 12 nt, Human
cacuguguaagc

SEQ ID NO: 2397453 - RNA, 15 nt, Human
cacuguggugucugu

SEQ ID NO: 2397454 - RNA, 22 nt, Human
cacuguggguagacacacauga

SEQ ID NO: 2397455 - RNA, 24 nt, Human
cacuguggguagacacacaugaag

SEQ ID NO: 2397456 - RNA, 13 nt, Human
cacuguucucugc

SEQ ID NO: 2397457 - RNA, 14 nt, Human
cacuguucucugcc

SEQ ID NO: 2397458 - RNA, 15 nt, Human
cacuguucucugccc

SEQ ID NO: 2397459 - RNA, 16 nt, Human
cacuguucucugcccu

SEQ ID NO: 2397460 - RNA, 17 nt, Human
cacuguucucugcccuc

SEQ ID NO: 2397461 - RNA, 19 nt, Human
cacuguucucugcccucca

SEQ ID NO: 2397462 - RNA, 21 nt, Human
cacuguucucugcccuccaag

SEQ ID NO: 2397463 - RNA, 22 nt, Human
cacuguucucugcccuccaaga

SEQ ID NO: 2397464 - RNA, 20 nt, Human
cacugugcacaucugugucu

SEQ ID NO: 2397465 - RNA, 22 nt, Human
cacugugcacaucugugucuug

SEQ ID NO: 2397466 - RNA, 17 nt, Human
cacugugcccagcccgg

SEQ ID NO: 2397467 - RNA, 22 nt, Human
cacugugcccagcccggaccuu

SEQ ID NO: 2397468 - RNA, 18 nt, Human
cacugugccaugugccag

SEQ ID NO: 2397469 - RNA, 15 nt, Human
cacugugccaugugc

SEQ ID NO: 2397470 - RNA, 16 nt, Human
cacugugccaugugcc

SEQ ID NO: 2397471 - RNA, 19 nt, Human
cacugugcuaauaacagug

SEQ ID NO: 2397472 - RNA, 21 nt, Human
cacugugcuaauaacagugca

SEQ ID NO: 2397473 - RNA, 17 nt, Human
cacugugcccuggugga

SEQ ID NO: 2397474 - RNA, 18 nt, Human
cacugugcccugguggag

SEQ ID NO: 2397475 - RNA, 12 nt, Human
cacugugcccug

SEQ ID NO: 2397476 - RNA, 13 nt, Human
cacugugcccugg

SEQ ID NO: 2397477 - RNA, 15 nt, Human
cacugugcccuggug

SEQ ID NO: 2397478 - RNA, 16 nt, Human
cacugugcccuggugg

SEQ ID NO: 2397479 - RNA, 13 nt, Human
cacugugcugagu

SEQ ID NO: 2397480 - RNA, 15 nt, Human
cacugugcugagucu

SEQ ID NO: 2397481 - RNA, 24 nt, Human
cacuguggacuuggucaccagcuc

SEQ ID NO: 2397482 - RNA, 13 nt, Human
cacuguggacuug

SEQ ID NO: 2397483 - RNA, 23 nt, Human
cacuguggacuuggucaccagcu

SEQ ID NO: 2397484 - RNA, 14 nt, Human
cacugugggaaggc

SEQ ID NO: 2397485 - RNA, 17 nt, Human
cacugugggaaggccag

SEQ ID NO: 2397486 - RNA, 20 nt, Human
cacugugggaaggccagcug

SEQ ID NO: 2397487 - RNA, 21 nt, Human
cacugugggaaggccagcugc

SEQ ID NO: 2397488 - RNA, 19 nt, Human
cacuguggguagacacaca

SEQ ID NO: 2397489 - RNA, 22 nt, Human
cacugugcuuucuauuguacag

SEQ ID NO: 2397490 - RNA, 23 nt, Human
cacugugcuuucuauuguacaga

SEQ ID NO: 2397491 - RNA, 17 nt, Human
cacugugcuuucuauug

SEQ ID NO: 2397492 - RNA, 16 nt, Human
cacugugcucagggcu

SEQ ID NO: 2397493 - RNA, 13 nt, Human
cacugugcucagg

SEQ ID NO: 2397494 - RNA, 15 nt, Human
cacugugcucagggc

SEQ ID NO: 2397495 - RNA, 17 nt, Human
cacugugcugagucuga

SEQ ID NO: 2397496 - RNA, 20 nt, Human
cacugugcugagucugaagg

SEQ ID NO: 2397497 - RNA, 21 nt, Human
cacugugcugagucugaaggc

SEQ ID NO: 2397498 - RNA, 22 nt, Human
cacugugcugagucugaaggcu

SEQ ID NO: 2397499 - RNA, 19 nt, Human
cacuucacagagugugcug

SEQ ID NO: 2397500 - RNA, 18 nt, Human
cacuucacuccagccugg

SEQ ID NO: 2397501 - RNA, 17 nt, Human
cacuucagagagcuggu

SEQ ID NO: 2397502 - RNA, 16 nt, Human
cacuucagagagcugg

SEQ ID NO: 2397503 - RNA, 15 nt, Human
cacuucagagagcug

SEQ ID NO: 2397504 - RNA, 13 nt, Human
cacuucagagagc

SEQ ID NO: 2397505 - RNA, 18 nt, Human
cacuucacacacaggcaa

SEQ ID NO: 2397506 - RNA, 13 nt, Human
cacuucacagagu

SEQ ID NO: 2397507 - RNA, 21 nt, Human
cacuucaagugaccaccagga

SEQ ID NO: 2397508 - RNA, 14 nt, Human
cacuucacccugga

SEQ ID NO: 2397509 - RNA, 14 nt, Human
cacuucacagagug

SEQ ID NO: 2397510 - RNA, 15 nt, Human
cacuucacagagugu

SEQ ID NO: 2397511 - RNA, 13 nt, Human
cacuguugaauuu

SEQ ID NO: 2397512 - RNA, 17 nt, Human
cacuguugaaaauuauu

SEQ ID NO: 2397513 - RNA, 18 nt, Human
cacuguugaaaauuauuu

SEQ ID NO: 2397514 - RNA, 19 nt, Human
cacuguucugaaagugacu

SEQ ID NO: 2397515 - RNA, 22 nt, Human
cacuguucccucugcuccugga

SEQ ID NO: 2397516 - RNA, 14 nt, Human
cacuguugaaaauu

SEQ ID NO: 2397517 - RNA, 16 nt, Human
cacuguugaaaauuau

SEQ ID NO: 2397518 - RNA, 17 nt, Human
cacuguugaauuuucuc

SEQ ID NO: 2397519 - RNA, 22 nt, Human
cacuuauuggaacucugcuuga

SEQ ID NO: 2397520 - RNA, 14 nt, Human
cacuuauuucauaa

SEQ ID NO: 2397521 - RNA, 21 nt, Human
cacuguugaaaauuauuuuaa

SEQ ID NO: 2397522 - RNA, 17 nt, Human
cacuuauuucauaaaca

SEQ ID NO: 2397523 - RNA, 18 nt, Human
cacuucaggucaggaguu

SEQ ID NO: 2397524 - RNA, 15 nt, Human
cacuucauaauccag

SEQ ID NO: 2397525 - RNA, 14 nt, Human
cacuucauaaucca

SEQ ID NO: 2397526 - RNA, 22 nt, Human
cacuucauucuugaaagcugug

SEQ ID NO: 2397527 - RNA, 16 nt, Human
cacuucauugagaguu

SEQ ID NO: 2397528 - RNA, 13 nt, Human
cacuucaucuucu

SEQ ID NO: 2397529 - RNA, 15 nt, Human
cacuucaucuucuca

SEQ ID NO: 2397530 - RNA, 18 nt, Human
cacuucaucuucucagcu

SEQ ID NO: 2397531 - RNA, 23 nt, Human
cacuucaggcucuucuccuuuca

SEQ ID NO: 2397532 - RNA, 18 nt, Human
cacuucagagagcuggua

SEQ ID NO: 2397533 - RNA, 22 nt, Human
cacuucaggguucuccucuccc

SEQ ID NO: 2397534 - RNA, 21 nt, Human
cacuucagcugacuuuucugu

SEQ ID NO: 2397535 - RNA, 12 nt, Human
cacuucagcuga

SEQ ID NO: 2397536 - RNA, 14 nt, Human
cacuucaggcucuu

SEQ ID NO: 2397537 - RNA, 15 nt, Human
cacuucaggcucuuc

SEQ ID NO: 2397538 - RNA, 16 nt, Human
cacuucaggcucuucu

SEQ ID NO: 2397539 - RNA, 20 nt, Human
cacuucaggcucuucuccuu

SEQ ID NO: 2397540 - RNA, 16 nt, Human
cacuucugaccacacu

SEQ ID NO: 2397541 - RNA, 19 nt, Human
cacuucugaccacacuucc

SEQ ID NO: 2397542 - RNA, 13 nt, Human
cacuucugaccac

SEQ ID NO: 2397543 - RNA, 22 nt, Human
cacuucugccauauucuguugg

SEQ ID NO: 2397544 - RNA, 18 nt, Human
cacuucugggcuucaucu

SEQ ID NO: 2397545 - RNA, 23 nt, Human
cacuucgggaggucgaggcagga

SEQ ID NO: 2397546 - RNA, 21 nt, Human
cacuucgggaggucgaggcag

SEQ ID NO: 2397547 - RNA, 17 nt, Human
cacuucuaaauagcaau

SEQ ID NO: 2397548 - RNA, 23 nt, Human
cacuucgugggaucugccccucc

SEQ ID NO: 2397549 - RNA, 21 nt, Human
cacuucgcgugcccucgcugc

SEQ ID NO: 2397550 - RNA, 18 nt, Human
cacuucuaaaugaagugc

SEQ ID NO: 2397551 - RNA, 17 nt, Human
cacuucuaaaugaagug

SEQ ID NO: 2397552 - RNA, 16 nt, Human
cacuucccuacaugga

SEQ ID NO: 2397553 - RNA, 18 nt, Human
cacuuccauacagcucua

SEQ ID NO: 2397554 - RNA, 23 nt, Human
cacuucccagguaagcaggagga

SEQ ID NO: 2397555 - RNA, 12 nt, Human
cacuuccccucc

SEQ ID NO: 2397556 - RNA, 13 nt, Human
cacuuccccuccu

SEQ ID NO: 2397557 - RNA, 15 nt, Human
cacuuccccuccuac

SEQ ID NO: 2397558 - RNA, 19 nt, Human
cacuuccaccagccugcac

SEQ ID NO: 2397559 - RNA, 18 nt, Human
cacuuccaccagccugca

SEQ ID NO: 2397560 - RNA, 17 nt, Human
cacuuccaccagccugc

SEQ ID NO: 2397561 - RNA, 16 nt, Human
cacuuccaccagccug

SEQ ID NO: 2397562 - RNA, 15 nt, Human
cacuuccaccagccu

SEQ ID NO: 2397563 - RNA, 14 nt, Human
cacuuccaccagcc

SEQ ID NO: 2397564 - RNA, 22 nt, Human
cacuucauugagaguuuugucu

SEQ ID NO: 2397565 - RNA, 20 nt, Human
cacuuccauaaucuggacuc

SEQ ID NO: 2397566 - RNA, 20 nt, Human
cacuuccaccagccugcacu

SEQ ID NO: 2397567 - RNA, 18 nt, Human
cacuuccuguccagagag

SEQ ID NO: 2397568 - RNA, 24 nt, Human
cacuuccuguuugggccccucucc

SEQ ID NO: 2397569 - RNA, 17 nt, Human
cacuuccuguccagaga

SEQ ID NO: 2397570 - RNA, 14 nt, Human
cacuuccuguccag

SEQ ID NO: 2397571 - RNA, 13 nt, Human
cacuuccugucca

SEQ ID NO: 2397572 - RNA, 12 nt, Human
cacuuccugucc

SEQ ID NO: 2397573 - RNA, 13 nt, Human
cacuuccugccua

SEQ ID NO: 2397574 - RNA, 14 nt, Human
cacuuccugccuaa

SEQ ID NO: 2397575 - RNA, 23 nt, Human
cacuuccuacaagagcagccugu

SEQ ID NO: 2397576 - RNA, 17 nt, Human
cacuuccuacaagagca

SEQ ID NO: 2397577 - RNA, 12 nt, Human
cacuuccugccu

SEQ ID NO: 2397578 - RNA, 11 nt, Human
cacuuccugcc

SEQ ID NO: 2397579 - RNA, 13 nt, Human
cacuucccugggc

SEQ ID NO: 2397580 - RNA, 19 nt, Human
cacuucccugggcaaauga

SEQ ID NO: 2397581 - RNA, 20 nt, Human
cacuucccugacacugcggg

SEQ ID NO: 2397582 - RNA, 21 nt, Human
cacuuccccuccuaccccucc

SEQ ID NO: 2397583 - RNA, 19 nt, Human
cacuucccucaucucuccu

SEQ ID NO: 2397584 - RNA, 14 nt, Human
cacuucccucuguu

SEQ ID NO: 2397585 - RNA, 15 nt, Human
cacuucccucuguuu

SEQ ID NO: 2397586 - RNA, 16 nt, Human
cacuucccucuguuuc

SEQ ID NO: 2397587 - RNA, 17 nt, Human
cacuucccucuguuucu

SEQ ID NO: 2397588 - RNA, 18 nt, Human
cacuucccucuguuucuc

SEQ ID NO: 2397589 - RNA, 15 nt, Human
cacuucccugacacu

SEQ ID NO: 2397590 - RNA, 22 nt, Human
cacuugccgcgucgcccuccca

SEQ ID NO: 2397591 - RNA, 14 nt, Human
cacuugcccacacc

SEQ ID NO: 2397592 - RNA, 12 nt, Human
cacuugccucuu

SEQ ID NO: 2397593 - RNA, 13 nt, Human
cacuugccucuuc

SEQ ID NO: 2397594 - RNA, 21 nt, Human
cacuugccucuuccuugaaga

SEQ ID NO: 2397595 - RNA, 14 nt, Human
cacuugccucuucc

SEQ ID NO: 2397596 - RNA, 17 nt, Human
cacuugccucuuccuug

SEQ ID NO: 2397597 - RNA, 18 nt, Human
cacuugccccuguuaccu

SEQ ID NO: 2397598 - RNA, 14 nt, Human
cacuugauuccuug

SEQ ID NO: 2397599 - RNA, 13 nt, Human
cacuugcaucugu

SEQ ID NO: 2397600 - RNA, 12 nt, Human
cacuugcauuuc

SEQ ID NO: 2397601 - RNA, 24 nt, Human
cacuugcagacucuacagaggcca

SEQ ID NO: 2397602 - RNA, 14 nt, Human
cacuugcagacucu

SEQ ID NO: 2397603 - RNA, 18 nt, Human
cacuugcagacucuacag

SEQ ID NO: 2397604 - RNA, 19 nt, Human
cacuugcagacucuacaga

SEQ ID NO: 2397605 - RNA, 22 nt, Human
cacuugcagacucuacagaggc

SEQ ID NO: 2397606 - RNA, 16 nt, Human
cacuuggccucuggau

SEQ ID NO: 2397607 - RNA, 23 nt, Human
cacuuggcugcauaaauguggua

SEQ ID NO: 2397608 - RNA, 18 nt, Human
cacuuggccaagcaggga

SEQ ID NO: 2397609 - RNA, 20 nt, Human
cacuuggccaagcagggagg

SEQ ID NO: 2397610 - RNA, 19 nt, Human
cacuuggcccaaguggcag

SEQ ID NO: 2397611 - RNA, 22 nt, Human
cacuuggcccaaguggcagagc

SEQ ID NO: 2397612 - RNA, 12 nt, Human
cacuuggagcca

SEQ ID NO: 2397613 - RNA, 17 nt, Human
cacuuggacucuugcuc

SEQ ID NO: 2397614 - RNA, 18 nt, Human
cacuuggacucuugcucu

SEQ ID NO: 2397615 - RNA, 14 nt, Human
cacuuggcagcgcg

SEQ ID NO: 2397616 - RNA, 17 nt, Human
cacuuggcaucagcugg

SEQ ID NO: 2397617 - RNA, 19 nt, Human
cacuuggcaucagcuggcg

SEQ ID NO: 2397618 - RNA, 11 nt, Human
cacuuggccaa

SEQ ID NO: 2397619 - RNA, 19 nt, Human
cacuuucuagccagaggag

SEQ ID NO: 2397620 - RNA, 20 nt, Human
cacuuucuagccagaggaga

SEQ ID NO: 2397621 - RNA, 18 nt, Human
cacuuucuagccagagga

SEQ ID NO: 2397622 - RNA, 15 nt, Human
cacuuggucugugag

SEQ ID NO: 2397623 - RNA, 21 nt, Human
cacuucugugagacccccaca

SEQ ID NO: 2397624 - RNA, 20 nt, Human
cacuucugugagacccccac

SEQ ID NO: 2397625 - RNA, 19 nt, Human
cacuucuuacaauaauucu

SEQ ID NO: 2397626 - RNA, 18 nt, Human
cacuucuggguggggcag

SEQ ID NO: 2397627 - RNA, 20 nt, Human
cacuucugggcuucaucugg

SEQ ID NO: 2397628 - RNA, 19 nt, Human
cacuucuggguggggcagu

SEQ ID NO: 2397629 - RNA, 22 nt, Human
cacuucugugagacccccacac

SEQ ID NO: 2397630 - RNA, 23 nt, Human
cacuucuucuuggucuuauuuau

SEQ ID NO: 2397631 - RNA, 18 nt, Human
cacuucuuguuccccacu

SEQ ID NO: 2397632 - RNA, 16 nt, Human
cacuugacaucaacug

SEQ ID NO: 2397633 - RNA, 23 nt, Human
cacuugaacccgggaggcagagg

SEQ ID NO: 2397634 - RNA, 21 nt, Human
cacuugaacccgggaggcaga

SEQ ID NO: 2397635 - RNA, 20 nt, Human
cacuugaacccgggaggcag

SEQ ID NO: 2397636 - RNA, 20 nt, Human
cacuugagaauuacccuuuu

SEQ ID NO: 2397637 - RNA, 15 nt, Human
cacuucuuuuauaac

SEQ ID NO: 2397638 - RNA, 15 nt, Human
cacuugaauccuagg

SEQ ID NO: 2397639 - RNA, 13 nt, Human
cacuugagaggau

SEQ ID NO: 2397640 - RNA, 17 nt, Human
cacuugagaauuacccu

SEQ ID NO: 2397641 - RNA, 19 nt, Human
cacuugacaucaacugcau

SEQ ID NO: 2397642 - RNA, 13 nt, Human
cacuugaguccag

SEQ ID NO: 2397643 - RNA, 18 nt, Human
cacuugaggucaggaguu

SEQ ID NO: 2397644 - RNA, 19 nt, Human
cacuugaugacccccaacc

SEQ ID NO: 2397645 - RNA, 23 nt, Human
cacuugcacgcccaugugugagu

SEQ ID NO: 2397646 - RNA, 16 nt, Human
cacuugaugugccauu

SEQ ID NO: 2397647 - RNA, 22 nt, Human
cacuugaggucaggaguuccua

SEQ ID NO: 2397648 - RNA, 13 nt, Human
cacuugcagacuc

SEQ ID NO: 2397649 - RNA, 15 nt, Human
cacuggacuccggcc

SEQ ID NO: 2397650 - RNA, 16 nt, Human
cacuggacuccggccc

SEQ ID NO: 2397651 - RNA, 18 nt, Human
cacuggacucaccucccc

SEQ ID NO: 2397652 - RNA, 15 nt, Human
cacuggacucaccuc

SEQ ID NO: 2397653 - RNA, 16 nt, Human
cacuggaccacugggc

SEQ ID NO: 2397654 - RNA, 19 nt, Human
cacuggacuccggcccucc

SEQ ID NO: 2397655 - RNA, 21 nt, Human
cacuggagcaccaggcacgaa

SEQ ID NO: 2397656 - RNA, 20 nt, Human
cacuggagccaucucuuccu

SEQ ID NO: 2397657 - RNA, 17 nt, Human
cacuggagcaccaggca

SEQ ID NO: 2397658 - RNA, 16 nt, Human
cacuggagcaccaggc

SEQ ID NO: 2397659 - RNA, 21 nt, Human
cacugcuuuuggucuguguga

SEQ ID NO: 2397660 - RNA, 15 nt, Human
cacugcuugaggaaa

SEQ ID NO: 2397661 - RNA, 12 nt, Human
cacuggaaaggg

SEQ ID NO: 2397662 - RNA, 15 nt, Human
cacuggaaaggggag

SEQ ID NO: 2397663 - RNA, 17 nt, Human
cacuggaacacuaauga

SEQ ID NO: 2397664 - RNA, 16 nt, Human
cacuggaaaggggaga

SEQ ID NO: 2397665 - RNA, 18 nt, Human
cacuggaaaggggagagc

SEQ ID NO: 2397666 - RNA, 19 nt, Human
cacuggaaaggggagagcc

SEQ ID NO: 2397667 - RNA, 22 nt, Human
cacuggaaaggggagagccugc

SEQ ID NO: 2397668 - RNA, 23 nt, Human
cacuggaaaggggagagccugcu

SEQ ID NO: 2397669 - RNA, 24 nt, Human
cacuggaaaggggagagccugcug

SEQ ID NO: 2397670 - RNA, 13 nt, Human
cacuggaacucag

SEQ ID NO: 2397671 - RNA, 19 nt, Human
cacuggaacucagugugac

SEQ ID NO: 2397672 - RNA, 14 nt, Human
cacuggagcccagg

SEQ ID NO: 2397673 - RNA, 13 nt, Human
cacuggagcccag

SEQ ID NO: 2397674 - RNA, 12 nt, Human
cacuggagccca

SEQ ID NO: 2397675 - RNA, 11 nt, Human
cacuggagccc

SEQ ID NO: 2397676 - RNA, 15 nt, Human
cacuggagcccagga

SEQ ID NO: 2397677 - RNA, 16 nt, Human
cacuggaggagagaag

SEQ ID NO: 2397678 - RNA, 18 nt, Human
cacuggaggagagaagaa

SEQ ID NO: 2397679 - RNA, 19 nt, Human
cacuggaggagagaagaau

SEQ ID NO: 2397680 - RNA, 22 nt, Human
cacuggaggagagaagaaugag

SEQ ID NO: 2397681 - RNA, 18 nt, Human
cacuggagguugaagcca

SEQ ID NO: 2397682 - RNA, 16 nt, Human
cacuggaguccagucu

SEQ ID NO: 2397683 - RNA, 16 nt, Human
cacuggagugcaggga

SEQ ID NO: 2397684 - RNA, 20 nt, Human
cacuggagguugaagccaag

SEQ ID NO: 2397685 - RNA, 21 nt, Human
cacuggagguugaagccaagu

SEQ ID NO: 2397686 - RNA, 17 nt, Human
cacuggagugcagggag

SEQ ID NO: 2397687 - RNA, 18 nt, Human
cacuggagugcagggagg

SEQ ID NO: 2397688 - RNA, 23 nt, Human
cacuggagugcagggaggagagg

SEQ ID NO: 2397689 - RNA, 19 nt, Human
cacuggaugcaaagaaaau

SEQ ID NO: 2397690 - RNA, 20 nt, Human
cacuggagugcagggaggag

SEQ ID NO: 2397691 - RNA, 22 nt, Human
cacuggaguuacauuaauguua

SEQ ID NO: 2397692 - RNA, 23 nt, Human
cacuggaugcaaagaaaaucaga

SEQ ID NO: 2397693 - RNA, 15 nt, Human
cacuggaugcagaaa

SEQ ID NO: 2397694 - RNA, 16 nt, Human
cacuggcaaugaaaaa

SEQ ID NO: 2397695 - RNA, 21 nt, Human
cacuggaugggcugcagcaga

SEQ ID NO: 2397696 - RNA, 14 nt, Human
cacuggcauugucc

SEQ ID NO: 2397697 - RNA, 18 nt, Human
cacuggcauugucccugu

SEQ ID NO: 2397698 - RNA, 19 nt, Human
cacuggcauugucccugug

SEQ ID NO: 2397699 - RNA, 17 nt, Human
cacuggccacaguuguu

SEQ ID NO: 2397700 - RNA, 22 nt, Human
cacuggcauugucccugugccu

SEQ ID NO: 2397701 - RNA, 10 nt, Human
cacuggccac

SEQ ID NO: 2397702 - RNA, 12 nt, Human
cacuggccacca

SEQ ID NO: 2397703 - RNA, 14 nt, Human
cacuggccaccagg

SEQ ID NO: 2397704 - RNA, 15 nt, Human
cacuggccaccaggc

SEQ ID NO: 2397705 - RNA, 16 nt, Human
cacuggccaccaggcu

SEQ ID NO: 2397706 - RNA, 17 nt, Human
cacuggccaccaggcug

SEQ ID NO: 2397707 - RNA, 18 nt, Human
cacuggccaccaggcugg

SEQ ID NO: 2397708 - RNA, 19 nt, Human
cacuggccaccaggcuggc

SEQ ID NO: 2397709 - RNA, 20 nt, Human
cacuggccaccaggcuggcg

SEQ ID NO: 2397710 - RNA, 21 nt, Human
cacuggccaccaggcuggcgc

SEQ ID NO: 2397711 - RNA, 22 nt, Human
cacuggccaccaggcuggcgca

SEQ ID NO: 2397712 - RNA, 24 nt, Human
cacuggccaccaggcuggcgcagc

SEQ ID NO: 2397713 - RNA, 14 nt, Human
cacuggccaucccu

SEQ ID NO: 2397714 - RNA, 12 nt, Human
cacugcuggcug

SEQ ID NO: 2397715 - RNA, 13 nt, Human
cacugcuggcugc

SEQ ID NO: 2397716 - RNA, 14 nt, Human
cacugcuggcugcc

SEQ ID NO: 2397717 - RNA, 15 nt, Human
cacugcuggcugccu

SEQ ID NO: 2397718 - RNA, 16 nt, Human
cacugcuggcugccuu

SEQ ID NO: 2397719 - RNA, 21 nt, Human
cacugcuggcugccuuagaac

SEQ ID NO: 2397720 - RNA, 13 nt, Human
cacugcugggugg

SEQ ID NO: 2397721 - RNA, 14 nt, Human
cacugcuggguggc

SEQ ID NO: 2397722 - RNA, 17 nt, Human
cacugcuggguggccca

SEQ ID NO: 2397723 - RNA, 18 nt, Human
cacugcuggguggcccau

SEQ ID NO: 2397724 - RNA, 19 nt, Human
cacugcuggguggcccauc

SEQ ID NO: 2397725 - RNA, 20 nt, Human
cacugcuggguggcccaucc

SEQ ID NO: 2397726 - RNA, 22 nt, Human
cacugcuggguggcccaucccc

SEQ ID NO: 2397727 - RNA, 23 nt, Human
cacugcuggguggcccauccccc

SEQ ID NO: 2397728 - RNA, 13 nt, Human
cacugcuuaacuu

SEQ ID NO: 2397729 - RNA, 14 nt, Human
cacugcuuccagug

SEQ ID NO: 2397730 - RNA, 15 nt, Human
cacugcuuccaguga

SEQ ID NO: 2397731 - RNA, 16 nt, Human
cacugcuuccagugag

SEQ ID NO: 2397732 - RNA, 17 nt, Human
cacugcugugcugugcc

SEQ ID NO: 2397733 - RNA, 10 nt, Human
cacugcuguc

SEQ ID NO: 2397734 - RNA, 11 nt, Human
cacugcuguca

SEQ ID NO: 2397735 - RNA, 21 nt, Human
cacugcugugcugugcccaag

SEQ ID NO: 2397736 - RNA, 22 nt, Human
cacugcuuccagugaggcucug

SEQ ID NO: 2397737 - RNA, 20 nt, Human
cacugcuuuuggucugugug

SEQ ID NO: 2397738 - RNA, 20 nt, Human
cacugcuugaggaaaacaag

SEQ ID NO: 2397739 - RNA, 14 nt, Human
cacugcuugaggaa

SEQ ID NO: 2397740 - RNA, 13 nt, Human
cacugcuugagga

SEQ ID NO: 2397741 - RNA, 18 nt, Human
cacugcuuccagugaggc

SEQ ID NO: 2397742 - RNA, 19 nt, Human
cacugcuuccagugaggcu

SEQ ID NO: 2397743 - RNA, 20 nt, Human
cacugcuuccagugaggcuc

SEQ ID NO: 2397744 - RNA, 21 nt, Human
cacugcuuccagugaggcucu

SEQ ID NO: 2397745 - RNA, 22 nt, Human
cacugccucgggaaccucacuc

SEQ ID NO: 2397746 - RNA, 23 nt, Human
cacugccucgggaaccucacucu

SEQ ID NO: 2397747 - RNA, 16 nt, Human
cacugccucucccugg

SEQ ID NO: 2397748 - RNA, 20 nt, Human
cacugccucucccuggcccu

SEQ ID NO: 2397749 - RNA, 16 nt, Human
cacugccucuuccucc

SEQ ID NO: 2397750 - RNA, 21 nt, Human
cacugcccgagcuggugcauu

SEQ ID NO: 2397751 - RNA, 16 nt, Human
cacugccuacugcauc

SEQ ID NO: 2397752 - RNA, 15 nt, Human
cacugccuacugcau

SEQ ID NO: 2397753 - RNA, 21 nt, Human
cacugccucgggaaccucacu

SEQ ID NO: 2397754 - RNA, 16 nt, Human
cacugccucagguucc

SEQ ID NO: 2397755 - RNA, 17 nt, Human
cacugccucagguuccu

SEQ ID NO: 2397756 - RNA, 12 nt, Human
cacugccucagg

SEQ ID NO: 2397757 - RNA, 13 nt, Human
cacugccucaggu

SEQ ID NO: 2397758 - RNA, 14 nt, Human
cacugccucagguu

SEQ ID NO: 2397759 - RNA, 15 nt, Human
cacugccucagguuc

SEQ ID NO: 2397760 - RNA, 17 nt, Human
cacugccauggaggcac

SEQ ID NO: 2397761 - RNA, 19 nt, Human
cacugccauggaggcacac

SEQ ID NO: 2397762 - RNA, 22 nt, Human
cacugccauggaggcacacagc

SEQ ID NO: 2397763 - RNA, 20 nt, Human
cacugcccaaagugcuucca

SEQ ID NO: 2397764 - RNA, 21 nt, Human
cacugcccaaagugcuuccaa

SEQ ID NO: 2397765 - RNA, 14 nt, Human
cacugcccaccccc

SEQ ID NO: 2397766 - RNA, 15 nt, Human
cacugcccacccccu

SEQ ID NO: 2397767 - RNA, 16 nt, Human
cacugcccacccccuc

SEQ ID NO: 2397768 - RNA, 19 nt, Human
cacugcccgagcuggugca

SEQ ID NO: 2397769 - RNA, 18 nt, Human
cacugcccgagcuggugc

SEQ ID NO: 2397770 - RNA, 17 nt, Human
cacugcccgagcuggug

SEQ ID NO: 2397771 - RNA, 16 nt, Human
cacugcccgagcuggu

SEQ ID NO: 2397772 - RNA, 15 nt, Human
cacugcccgagcugg

SEQ ID NO: 2397773 - RNA, 21 nt, Human
cacugcccccagcucuucucc

SEQ ID NO: 2397774 - RNA, 18 nt, Human
cacugcccauggacaggc

SEQ ID NO: 2397775 - RNA, 17 nt, Human
cacugcccauggacagg

SEQ ID NO: 2397776 - RNA, 17 nt, Human
cacugcccacccccuca

SEQ ID NO: 2397777 - RNA, 18 nt, Human
cacugcccacccccucaa

SEQ ID NO: 2397778 - RNA, 14 nt, Human
cacugcaccgggcc

SEQ ID NO: 2397779 - RNA, 15 nt, Human
cacugcaccgggcca

SEQ ID NO: 2397780 - RNA, 23 nt, Human
cacugcacagugcaucucagccc

SEQ ID NO: 2397781 - RNA, 22 nt, Human
cacugcacagagcucuccagcu

SEQ ID NO: 2397782 - RNA, 15 nt, Human
cacugcaccaccgag

SEQ ID NO: 2397783 - RNA, 13 nt, Human
cacugcacccccu

SEQ ID NO: 2397784 - RNA, 14 nt, Human
cacugcacccccuc

SEQ ID NO: 2397785 - RNA, 15 nt, Human
cacugcacccccucc

SEQ ID NO: 2397786 - RNA, 16 nt, Human
cacugcacccccuccu

SEQ ID NO: 2397787 - RNA, 18 nt, Human
cacugcacccccuccugc

SEQ ID NO: 2397788 - RNA, 19 nt, Human
cacugcacccccuccugcu

SEQ ID NO: 2397789 - RNA, 20 nt, Human
cacugcacccccuccugcug

SEQ ID NO: 2397790 - RNA, 21 nt, Human
cacugcacccccuccugcugc

SEQ ID NO: 2397791 - RNA, 22 nt, Human
cacugcacccccuccugcugca

SEQ ID NO: 2397792 - RNA, 17 nt, Human
cacugcaccccgucuca

SEQ ID NO: 2397793 - RNA, 16 nt, Human
cacugcaccgggccac

SEQ ID NO: 2397794 - RNA, 18 nt, Human
cacugcaccgggccacag

SEQ ID NO: 2397795 - RNA, 19 nt, Human
cacugcaccgggccacaga

SEQ ID NO: 2397796 - RNA, 18 nt, Human
cacugcacuauagccuag

SEQ ID NO: 2397797 - RNA, 20 nt, Human
cacugccuucgauacaccgg

SEQ ID NO: 2397798 - RNA, 22 nt, Human
cacugccuucgauacaccgggc

SEQ ID NO: 2397799 - RNA, 10 nt, Human
cacugccugc

SEQ ID NO: 2397800 - RNA, 13 nt, Human
cacugccugcaga

SEQ ID NO: 2397801 - RNA, 22 nt, Human
cacugccugcagaggucugugc

SEQ ID NO: 2397802 - RNA, 23 nt, Human
cacugccugcagaggucugugcu

SEQ ID NO: 2397803 - RNA, 22 nt, Human
cacugccugauggaccugucac

SEQ ID NO: 2397804 - RNA, 19 nt, Human
cacugccucucccuggccc

SEQ ID NO: 2397805 - RNA, 18 nt, Human
cacugccucucccuggcc

SEQ ID NO: 2397806 - RNA, 15 nt, Human
cacugccugcccacc

SEQ ID NO: 2397807 - RNA, 14 nt, Human
cacugccugcccac

SEQ ID NO: 2397808 - RNA, 18 nt, Human
cacugcuaagaauauuug

SEQ ID NO: 2397809 - RNA, 20 nt, Human
cacugcggagaaccuugugc

SEQ ID NO: 2397810 - RNA, 21 nt, Human
cacugcggagaaccuugugcc

SEQ ID NO: 2397811 - RNA, 22 nt, Human
cacugcggagaaccuugugccu

SEQ ID NO: 2397812 - RNA, 19 nt, Human
cacugcggggcuuggcuga

SEQ ID NO: 2397813 - RNA, 12 nt, Human
cacugccuuuga

SEQ ID NO: 2397814 - RNA, 20 nt, Human
cacugccuucucaacuccaa

SEQ ID NO: 2397815 - RNA, 18 nt, Human
cacugccuucgcuucuug

SEQ ID NO: 2397816 - RNA, 19 nt, Human
cacugccuucgcuucuugc

SEQ ID NO: 2397817 - RNA, 21 nt, Human
cacugccuucgcuucuugccu

SEQ ID NO: 2397818 - RNA, 23 nt, Human
cacugccuucgcuucuugccucu

SEQ ID NO: 2397819 - RNA, 12 nt, Human
cacugcucuggu

SEQ ID NO: 2397820 - RNA, 16 nt, Human
cacugcugcaaggccu

SEQ ID NO: 2397821 - RNA, 20 nt, Human
cacugcucugaugaagagga

SEQ ID NO: 2397822 - RNA, 15 nt, Human
cacugcugcccagcc

SEQ ID NO: 2397823 - RNA, 17 nt, Human
cacugcugcaaggccuu

SEQ ID NO: 2397824 - RNA, 18 nt, Human
cacugcugcaaggccuuu

SEQ ID NO: 2397825 - RNA, 19 nt, Human
cacugcugcaaggccuuuc

SEQ ID NO: 2397826 - RNA, 16 nt, Human
cacugcugcugccuuu

SEQ ID NO: 2397827 - RNA, 22 nt, Human
cacugcugcaaggccuuucugu

SEQ ID NO: 2397828 - RNA, 23 nt, Human
cacugcugcuucuccauggccac

SEQ ID NO: 2397829 - RNA, 17 nt, Human
cacugcugcccagccuc

SEQ ID NO: 2397830 - RNA, 22 nt, Human
cacugcuaggugggccagcccc

SEQ ID NO: 2397831 - RNA, 17 nt, Human
cacugcuaggugggcca

SEQ ID NO: 2397832 - RNA, 16 nt, Human
cacugcuaggugggcc

SEQ ID NO: 2397833 - RNA, 22 nt, Human
cacugcuaggcgagugccagga

SEQ ID NO: 2397834 - RNA, 20 nt, Human
cacugcggggcuuggcugag

SEQ ID NO: 2397835 - RNA, 21 nt, Human
cacugcggggcuuggcugaga

SEQ ID NO: 2397836 - RNA, 20 nt, Human
cacugcuaggcgagugccag

SEQ ID NO: 2397837 - RNA, 21 nt, Human
cacugcuaggcgagugccagg

SEQ ID NO: 2397838 - RNA, 23 nt, Human
cacugcuaggugggccagccccu

SEQ ID NO: 2397839 - RNA, 19 nt, Human
cacugcucaagaagacaug

SEQ ID NO: 2397840 - RNA, 22 nt, Human
cacugcucaagaagacauggag

SEQ ID NO: 2397841 - RNA, 14 nt, Human
cacugcucccugaa

SEQ ID NO: 2397842 - RNA, 17 nt, Human
cacugcucccugaagcc

SEQ ID NO: 2397843 - RNA, 18 nt, Human
cacugcucccugaagcca

SEQ ID NO: 2397844 - RNA, 19 nt, Human
cacugcucccugaagccag

SEQ ID NO: 2397845 - RNA, 20 nt, Human
cacugcucccugaagccagc

SEQ ID NO: 2397846 - RNA, 21 nt, Human
cacugcucccugaagccagcc

SEQ ID NO: 2397847 - RNA, 22 nt, Human
cacugcucccugaagccagccu

SEQ ID NO: 2397848 - RNA, 23 nt, Human
cacugcucccugaagccagccuu

SEQ ID NO: 2397849 - RNA, 15 nt, Human
cacucugggcuccag

SEQ ID NO: 2397850 - RNA, 14 nt, Human
cacucugggcucca

SEQ ID NO: 2397851 - RNA, 12 nt, Human
cacucuggccuc

SEQ ID NO: 2397852 - RNA, 19 nt, Human
cacucuggcugguuuggaa

SEQ ID NO: 2397853 - RNA, 23 nt, Human
cacucuggcagcucagagagggu

SEQ ID NO: 2397854 - RNA, 20 nt, Human
cacucuggcagcucagagag

SEQ ID NO: 2397855 - RNA, 21 nt, Human
cacucuggcagcucagagagg

SEQ ID NO: 2397856 - RNA, 15 nt, Human
cacucuggcagcuca

SEQ ID NO: 2397857 - RNA, 16 nt, Human
cacucuggcagcucag

SEQ ID NO: 2397858 - RNA, 17 nt, Human
cacucuggcagcucaga

SEQ ID NO: 2397859 - RNA, 19 nt, Human
cacucuggcagcucagaga

SEQ ID NO: 2397860 - RNA, 17 nt, Human
cacucugggcuccagag

SEQ ID NO: 2397861 - RNA, 16 nt, Human
cacucugggcuccaga

SEQ ID NO: 2397862 - RNA, 13 nt, Human
cacucuggccuca

SEQ ID NO: 2397863 - RNA, 15 nt, Human
cacucugucgcccag

SEQ ID NO: 2397864 - RNA, 16 nt, Human
cacucugucgcccagu

SEQ ID NO: 2397865 - RNA, 19 nt, Human
cacucugucgcccagucug

SEQ ID NO: 2397866 - RNA, 23 nt, Human
cacugacauuguuggccaaagcc

SEQ ID NO: 2397867 - RNA, 15 nt, Human
cacugacagccuccc

SEQ ID NO: 2397868 - RNA, 14 nt, Human
cacugacagccucc

SEQ ID NO: 2397869 - RNA, 13 nt, Human
cacugacagccuc

SEQ ID NO: 2397870 - RNA, 17 nt, Human
cacugacagccucccac

SEQ ID NO: 2397871 - RNA, 16 nt, Human
cacugacagccuccca

SEQ ID NO: 2397872 - RNA, 20 nt, Human
cacugacagccucccacccc

SEQ ID NO: 2397873 - RNA, 13 nt, Human
cacugaccagaac

SEQ ID NO: 2397874 - RNA, 17 nt, Human
cacugaccauccacucu

SEQ ID NO: 2397875 - RNA, 16 nt, Human
cacugaccauccacuc

SEQ ID NO: 2397876 - RNA, 15 nt, Human
cacugaccagaacua

SEQ ID NO: 2397877 - RNA, 14 nt, Human
cacugaccagaacu

SEQ ID NO: 2397878 - RNA, 23 nt, Human
cacugaccauccacucuacccuc

SEQ ID NO: 2397879 - RNA, 18 nt, Human
cacugaccugucaugccc

SEQ ID NO: 2397880 - RNA, 19 nt, Human
cacugacuacuggcucuca

SEQ ID NO: 2397881 - RNA, 23 nt, Human
cacugaccugucaugccccccuc

SEQ ID NO: 2397882 - RNA, 22 nt, Human
cacugaccugucaugccccccu

SEQ ID NO: 2397883 - RNA, 15 nt, Human
cacugacuacuggcu

SEQ ID NO: 2397884 - RNA, 20 nt, Human
cacugacuucuaaguaaaac

SEQ ID NO: 2397885 - RNA, 16 nt, Human
cacugacuucuaagua

SEQ ID NO: 2397886 - RNA, 15 nt, Human
cacugacuucuaagu

SEQ ID NO: 2397887 - RNA, 14 nt, Human
cacugacuucuaag

SEQ ID NO: 2397888 - RNA, 17 nt, Human
cacugagaagauuguga

SEQ ID NO: 2397889 - RNA, 16 nt, Human
cacugagaauguaaga

SEQ ID NO: 2397890 - RNA, 18 nt, Human
cacugagaauguaagaac

SEQ ID NO: 2397891 - RNA, 21 nt, Human
cacugacuucuaaguaaaacc

SEQ ID NO: 2397892 - RNA, 12 nt, Human
cacugagacagc

SEQ ID NO: 2397893 - RNA, 13 nt, Human
cacugagacagcc

SEQ ID NO: 2397894 - RNA, 14 nt, Human
cacugagacagccc

SEQ ID NO: 2397895 - RNA, 17 nt, Human
cacugagacagcccggg

SEQ ID NO: 2397896 - RNA, 19 nt, Human
cacugagacagcccgggcu

SEQ ID NO: 2397897 - RNA, 22 nt, Human
cacugagacagcccgggcucug

SEQ ID NO: 2397898 - RNA, 14 nt, Human
cacugagcaaagca

SEQ ID NO: 2397899 - RNA, 23 nt, Human
cacugagauaccagcgaggaggc

SEQ ID NO: 2397900 - RNA, 19 nt, Human
cacugagauaccagcgagg

SEQ ID NO: 2397901 - RNA, 18 nt, Human
cacugagauaccagcgag

SEQ ID NO: 2397902 - RNA, 23 nt, Human
cacugagacagcccgggcucugc

SEQ ID NO: 2397903 - RNA, 21 nt, Human
cacugagaauguaagaacuac

SEQ ID NO: 2397904 - RNA, 19 nt, Human
cacugagaagauugugaau

SEQ ID NO: 2397905 - RNA, 19 nt, Human
cacugagaauguaagaacu

SEQ ID NO: 2397906 - RNA, 20 nt, Human
cacugagaauguaagaacua

SEQ ID NO: 2397907 - RNA, 19 nt, Human
cacugaggcagggaagucc

SEQ ID NO: 2397908 - RNA, 17 nt, Human
cacugaggcagggaagu

SEQ ID NO: 2397909 - RNA, 16 nt, Human
cacugaggcagggaag

SEQ ID NO: 2397910 - RNA, 14 nt, Human
cacugaggcaggga

SEQ ID NO: 2397911 - RNA, 13 nt, Human
cacugaggcaggg

SEQ ID NO: 2397912 - RNA, 13 nt, Human
cacugaggaagaa

SEQ ID NO: 2397913 - RNA, 14 nt, Human
cacugaggaagaac

SEQ ID NO: 2397914 - RNA, 15 nt, Human
cacugaggaagaacg

SEQ ID NO: 2397915 - RNA, 17 nt, Human
cacugaggaagaacggg

SEQ ID NO: 2397916 - RNA, 11 nt, Human
cacugagcccc

SEQ ID NO: 2397917 - RNA, 13 nt, Human
cacugagcccccc

SEQ ID NO: 2397918 - RNA, 14 nt, Human
cacugagccccccc

SEQ ID NO: 2397919 - RNA, 16 nt, Human
cacugagcccccccaa

SEQ ID NO: 2397920 - RNA, 12 nt, Human
cacugagcucca

SEQ ID NO: 2397921 - RNA, 17 nt, Human
cacugagcuccaugugc

SEQ ID NO: 2397922 - RNA, 15 nt, Human
cacugagcugucaug

SEQ ID NO: 2397923 - RNA, 13 nt, Human
cacugagcagagu

SEQ ID NO: 2397924 - RNA, 18 nt, Human
cacugaggcagggaaguc

SEQ ID NO: 2397925 - RNA, 10 nt, Human
cacugagggc

SEQ ID NO: 2397926 - RNA, 14 nt, Human
cacugagggcaguc

SEQ ID NO: 2397927 - RNA, 18 nt, Human
cacugagggccacacuau

SEQ ID NO: 2397928 - RNA, 13 nt, Human
cacugagggccac

SEQ ID NO: 2397929 - RNA, 14 nt, Human
cacugagggccaca

SEQ ID NO: 2397930 - RNA, 19 nt, Human
cacugauauuuuaccucuu

SEQ ID NO: 2397931 - RNA, 20 nt, Human
cacugauauaucaugaguga

SEQ ID NO: 2397932 - RNA, 16 nt, Human
cacugauccagcccug

SEQ ID NO: 2397933 - RNA, 17 nt, Human
cacugaugcugccccuc

SEQ ID NO: 2397934 - RNA, 12 nt, Human
cacugaugcugc

SEQ ID NO: 2397935 - RNA, 15 nt, Human
cacugauccagcccu

SEQ ID NO: 2397936 - RNA, 14 nt, Human
cacugauccagccc

SEQ ID NO: 2397937 - RNA, 19 nt, Human
cacugauggacaaggaggu

SEQ ID NO: 2397938 - RNA, 16 nt, Human
cacugaugcuuagaug

SEQ ID NO: 2397939 - RNA, 15 nt, Human
cacugaugcuuagau

SEQ ID NO: 2397940 - RNA, 19 nt, Human
cacugaugcugccccucau

SEQ ID NO: 2397941 - RNA, 14 nt, Human
cacugaugggcaac

SEQ ID NO: 2397942 - RNA, 18 nt, Human
cacugaugggcaaccccc

SEQ ID NO: 2397943 - RNA, 24 nt, Human
cacugaugggcaacccccagccug

SEQ ID NO: 2397944 - RNA, 21 nt, Human
cacugauuucacaacagauca

SEQ ID NO: 2397945 - RNA, 18 nt, Human
cacugauuucacaacaga

SEQ ID NO: 2397946 - RNA, 19 nt, Human
cacugauuucacaacagau

SEQ ID NO: 2397947 - RNA, 22 nt, Human
cacugauauuuuaccucuuauu

SEQ ID NO: 2397948 - RNA, 13 nt, Human
cacugauuucaca

SEQ ID NO: 2397949 - RNA, 14 nt, Human
cacugauuuggaga

SEQ ID NO: 2397950 - RNA, 16 nt, Human
cacugauuuggagaua

SEQ ID NO: 2397951 - RNA, 13 nt, Human
cacugcaaccucc

SEQ ID NO: 2397952 - RNA, 23 nt, Human
cacugcaaccuccgccucuuggg

SEQ ID NO: 2397953 - RNA, 14 nt, Human
cacugcaaccuccg

SEQ ID NO: 2397954 - RNA, 16 nt, Human
cacugcaaccuccgcc

SEQ ID NO: 2397955 - RNA, 16 nt, Human
cacugcaacuucugcc

SEQ ID NO: 2397956 - RNA, 23 nt, Human
cacugcaaccuucgccaccuggg

SEQ ID NO: 2397957 - RNA, 22 nt, Human
cacugcaaccuucgccaccugg

SEQ ID NO: 2397958 - RNA, 14 nt, Human
cacugcaaccuucg

SEQ ID NO: 2397959 - RNA, 17 nt, Human
cacugcaacuucugccu

SEQ ID NO: 2397960 - RNA, 16 nt, Human
cacugcaagagccuug

SEQ ID NO: 2397961 - RNA, 15 nt, Human
cacugcaagagccuu

SEQ ID NO: 2397962 - RNA, 13 nt, Human
cacugcaagagcc

SEQ ID NO: 2397963 - RNA, 19 nt, Human
cacugcaagagccuuggug

SEQ ID NO: 2397964 - RNA, 18 nt, Human
cacugcaagagccuuggu

SEQ ID NO: 2397965 - RNA, 17 nt, Human
cacugcaagagccuugg

SEQ ID NO: 2397966 - RNA, 20 nt, Human
cacugcaagagccuuggugu

SEQ ID NO: 2397967 - RNA, 18 nt, Human
cacugcacagugcaucuc

SEQ ID NO: 2397968 - RNA, 19 nt, Human
cacugcacagugcaucuca

SEQ ID NO: 2397969 - RNA, 21 nt, Human
cacugcacagugcaucucagc

SEQ ID NO: 2397970 - RNA, 22 nt, Human
cacugcacagugcaucucagcc

SEQ ID NO: 2397971 - RNA, 16 nt, Human
cacugcaauccugucu

SEQ ID NO: 2397972 - RNA, 19 nt, Human
cacugcaauccugucuuuc

SEQ ID NO: 2397973 - RNA, 18 nt, Human
cacugcacacaccucaga

SEQ ID NO: 2397974 - RNA, 19 nt, Human
cacugcacacaccucagag

SEQ ID NO: 2397975 - RNA, 22 nt, Human
cacugcacacaccucagaggcu

SEQ ID NO: 2397976 - RNA, 13 nt, Human
cacugcacagagc

SEQ ID NO: 2397977 - RNA, 14 nt, Human
cacugcacagagcu

SEQ ID NO: 2397978 - RNA, 15 nt, Human
cacugcacagagcuc

SEQ ID NO: 2397979 - RNA, 16 nt, Human
cacugcacagagcucu

SEQ ID NO: 2397980 - RNA, 19 nt, Human
cacugcacagagcucucca

SEQ ID NO: 2397981 - RNA, 21 nt, Human
cacugcacagagcucuccagc

SEQ ID NO: 2397982 - RNA, 14 nt, Human
cacugugcccuggu

SEQ ID NO: 2397983 - RNA, 14 nt, Human immunodeficiency virus 1 [HIV-1]
cauagaacaaaaau

SEQ ID NO: 2397984 - RNA, 16 nt, Human immunodeficiency virus 1 [HIV-1]
uggaacuucugggacg

SEQ ID NO: 2397985 - RNA, 13 nt, Human immunodeficiency virus 1 [HIV-1]
agaucugagccug

SEQ ID NO: 2397986 - RNA, 14 nt, Human immunodeficiency virus 1 [HIV-1]
cacugcuuaagccu

SEQ ID NO: 2397987 - RNA, 13 nt, Human immunodeficiency virus 1 [HIV-1]
cacauuguaacau

SEQ ID NO: 2397988 - RNA, 20 nt, Human immunodeficiency virus 1 [HIV-1]
acugcccauacaaaaggaaa

SEQ ID NO: 2397989 - RNA, 16 nt, Human immunodeficiency virus 1 [HIV-1]
gacaguggcaaugaga

SEQ ID NO: 2397990 - RNA, 21 nt, Human immunodeficiency virus 1 [HIV-1]
caaaugucagcacaguacaau

SEQ ID NO: 2397991 - RNA, 19 nt, Human immunodeficiency virus 1 [HIV-1]
ccaaugcugcuugugccug

SEQ ID NO: 2397992 - RNA, 14 nt, Human immunodeficiency virus 1 [HIV-1]
uuaauaacaccaaa

SEQ ID NO: 2397993 - RNA, 18 nt, Human immunodeficiency virus 1 [HIV-1]
agaaaagaaugaacaaga

SEQ ID NO: 2397994 - RNA, 18 nt, Human immunodeficiency virus 1 [HIV-1]
ucacucccaaagaagaca

SEQ ID NO: 2397995 - RNA, 20 nt, Human immunodeficiency virus 1 [HIV-1]
cuucccugauuagcagaacu

SEQ ID NO: 2397996 - RNA, 14 nt, Human immunodeficiency virus 1 [HIV-1]
gagugggacagaga

SEQ ID NO: 2397997 - RNA, 12 nt, Human immunodeficiency virus 1 [HIV-1]
cacugaaggaag

SEQ ID NO: 2397998 - RNA, 15 nt, Human immunodeficiency virus 1 [HIV-1]
auagaagcagaaguu

SEQ ID NO: 2397999 - RNA, 19 nt, Human immunodeficiency virus 1 [HIV-1]
cugcauacaggagaaagag

SEQ ID NO: 2398000 - RNA, 23 nt, Human immunodeficiency virus 1 [HIV-1]
cgccacauaccuagaagaauaag

SEQ ID NO: 2398001 - RNA, 13 nt, Human immunodeficiency virus 1 [HIV-1]
ugccaagaagaaa

SEQ ID NO: 2398002 - RNA, 18 nt, Human immunodeficiency virus 1 [HIV-1]
accagaucugagccuggg

SEQ ID NO: 2398003 - RNA, 15 nt, Human immunodeficiency virus 1 [HIV-1]
auguggaaaaaugac

SEQ ID NO: 2398004 - RNA, 16 nt, Human immunodeficiency virus 1 [HIV-1]
gauucgggauuagaag

SEQ ID NO: 2398005 - RNA, 14 nt, Human immunodeficiency virus 1 [HIV-1]
gcagcuccaggcaa

SEQ ID NO: 2398006 - RNA, 19 nt, Human immunodeficiency virus 1 [HIV-1]
cuuaagccucaauaaagcu

SEQ ID NO: 2398007 - RNA, 19 nt, Human immunodeficiency virus 1 [HIV-1]
caggaacuaaagaauagug

SEQ ID NO: 2398008 - RNA, 14 nt, Human immunodeficiency virus 1 [HIV-1]
gacuuuccagggag

SEQ ID NO: 2398009 - RNA, 19 nt, Human immunodeficiency virus 1 [HIV-1]
uagcagaaauacagaagca

SEQ ID NO: 2398010 - RNA, 16 nt, Human immunodeficiency virus 1 [HIV-1]
auggugguaauagcaa

SEQ ID NO: 2398011 - RNA, 17 nt, Human immunodeficiency virus 1 [HIV-1]
gaggaggaggagguggg

SEQ ID NO: 2398012 - RNA, 18 nt, Human immunodeficiency virus 1 [HIV-1]
guaaacuccuuagaggaa

SEQ ID NO: 2398013 - RNA, 18 nt, Human immunodeficiency virus 1 [HIV-1]
aacacuuuaaaacagaua

SEQ ID NO: 2398014 - RNA, 21 nt, Human immunodeficiency virus 1 [HIV-1]
ggcaucuccuauggcaggaag

SEQ ID NO: 2398015 - RNA, 19 nt, Human immunodeficiency virus 1 [HIV-1]
uggccauugacagaagaaa

SEQ ID NO: 2398016 - RNA, 16 nt, Human immunodeficiency virus 1 [HIV-1]
acccugugagccugca

SEQ ID NO: 2398017 - RNA, 17 nt, Human immunodeficiency virus 1 [HIV-1]
gaauaguuuuugcugua

SEQ ID NO: 2398018 - RNA, 12 nt, Human immunodeficiency virus 1 [HIV-1]
aaaucucuggaa

SEQ ID NO: 2398019 - RNA, 11 nt, Human immunodeficiency virus 1 [HIV-1]
acauguggaaa

SEQ ID NO: 2398020 - RNA, 15 nt, Human immunodeficiency virus 1 [HIV-1]
uccauuuucagaauu

SEQ ID NO: 2398021 - RNA, 21 nt, Human immunodeficiency virus 1 [HIV-1]
agagcaguuaauaaaaaagga

SEQ ID NO: 2398022 - RNA, 15 nt, Human immunodeficiency virus 1 [HIV-1]
gaaaauauuaagaca

SEQ ID NO: 2398023 - RNA, 15 nt, Human immunodeficiency virus 1 [HIV-1]
cuacacaccagggcc

SEQ ID NO: 2398024 - RNA, 22 nt, Human immunodeficiency virus 1 [HIV-1]
aggaucaacagcuccuggggau

SEQ ID NO: 2398025 - RNA, 19 nt, Human immunodeficiency virus 1 [HIV-1]
gagaaauaucagcacuugu

SEQ ID NO: 2398026 - RNA, 14 nt, Human immunodeficiency virus 1 [HIV-1]
acaauuuuaaaaga

SEQ ID NO: 2398027 - RNA, 20 nt, Human immunodeficiency virus 1 [HIV-1]
cuugugccuggcuagaagca

SEQ ID NO: 2398028 - RNA, 13 nt, Human immunodeficiency virus 1 [HIV-1]
accagcaagaaaa

SEQ ID NO: 2398029 - RNA, 19 nt, Human immunodeficiency virus 1 [HIV-1]
acuugggcaggaguggaag

SEQ ID NO: 2398030 - RNA, 15 nt, Human immunodeficiency virus 1 [HIV-1]
acaagcuuaauacac

SEQ ID NO: 2398031 - RNA, 13 nt, Human immunodeficiency virus 1 [HIV-1]
uuaacauguggaa

SEQ ID NO: 2398032 - RNA, 15 nt, Human immunodeficiency virus 1 [HIV-1]
agagcaguuaauaaa

SEQ ID NO: 2398033 - RNA, 16 nt, Human immunodeficiency virus 1 [HIV-1]
ucucugguuagaccag

SEQ ID NO: 2398034 - RNA, 21 nt, Human immunodeficiency virus 1 [HIV-1]
ccuaaaggaucaacagcuccu

SEQ ID NO: 2398035 - RNA, 14 nt, Human immunodeficiency virus 1 [HIV-1]
gcugcuugugccug

SEQ ID NO: 2398036 - RNA, 22 nt, Human immunodeficiency virus 1 [HIV-1]
acaauuuggaaauaauaaaaca

SEQ ID NO: 2398037 - RNA, 13 nt, Human immunodeficiency virus 1 [HIV-1]
agcagcaggaagc

SEQ ID NO: 2398038 - RNA, 13 nt, Human immunodeficiency virus 1 [HIV-1]
gaggcguggccug

SEQ ID NO: 2398039 - RNA, 22 nt, Human immunodeficiency virus 1 [HIV-1]
agaacaauuuggaaauaauaaa

SEQ ID NO: 2398040 - RNA, 20 nt, Human immunodeficiency virus 1 [HIV-1]
cuuuccagggaggcguggcc

SEQ ID NO: 2398041 - RNA, 23 nt, Human immunodeficiency virus 1 [HIV-1]
auggguaccagcacacaaaggaa

SEQ ID NO: 2398042 - RNA, 14 nt, Human immunodeficiency virus 1 [HIV-1]
ggagagcaagaaau

SEQ ID NO: 2398043 - RNA, 13 nt, Human immunodeficiency virus 1 [HIV-1]
gagacgagcugag

SEQ ID NO: 2398044 - RNA, 12 nt, Human immunodeficiency virus 1 [HIV-1]
cugagccuggga

SEQ ID NO: 2398045 - RNA, 16 nt, Human immunodeficiency virus 1 [HIV-1]
uccagucacaccucag

SEQ ID NO: 2398046 - RNA, 16 nt, Human immunodeficiency virus 1 [HIV-1]
aagaagaaaagcaaag

SEQ ID NO: 2398047 - RNA, 19 nt, Human immunodeficiency virus 1 [HIV-1]
auuugggguugcucuggaa

SEQ ID NO: 2398048 - RNA, 18 nt, Human immunodeficiency virus 1 [HIV-1]
cugagccugggagcucuc

SEQ ID NO: 2398049 - RNA, 13 nt, Human immunodeficiency virus 1 [HIV-1]
aguaaaaacaaua

SEQ ID NO: 2398050 - RNA, 20 nt, Human immunodeficiency virus 1 [HIV-1]
uaaaacaauuaacagaggca

SEQ ID NO: 2398051 - RNA, 20 nt, Human immunodeficiency virus 1 [HIV-1]
aaaacagauagcuagcaaau

SEQ ID NO: 2398052 - RNA, 17 nt, Human immunodeficiency virus 1 [HIV-1]
uugcucaaugccacagc

SEQ ID NO: 2398053 - RNA, 23 nt, Human immunodeficiency virus 1 [HIV-1]
cugaccuuuggauggugcuacaa

SEQ ID NO: 2398054 - RNA, 16 nt, Human immunodeficiency virus 1 [HIV-1]
aauagugcuguuagcu

SEQ ID NO: 2398055 - RNA, 17 nt, Human immunodeficiency virus 1 [HIV-1]
cugggcgggacugggga

SEQ ID NO: 2398056 - RNA, 20 nt, Human immunodeficiency virus 1 [HIV-1]
gccuguacugggucucucug

SEQ ID NO: 2398057 - RNA, 23 nt, Human immunodeficiency virus 1 [HIV-1]
uaaaauuauucauaaugauagua

SEQ ID NO: 2398058 - RNA, 16 nt, Human immunodeficiency virus 1 [HIV-1]
ggagaaaggagagaua

SEQ ID NO: 2398059 - RNA, 19 nt, Human immunodeficiency virus 1 [HIV-1]
acugcccauacaaaaggaa

SEQ ID NO: 2398060 - RNA, 15 nt, Human immunodeficiency virus 1 [HIV-1]
aaggugcagaaagaa

SEQ ID NO: 2398061 - RNA, 20 nt, Human immunodeficiency virus 1 [HIV-1]
uggacaaauuagauguucau

SEQ ID NO: 2398062 - RNA, 15 nt, Human immunodeficiency virus 1 [HIV-1]
cugaggggacagaua

SEQ ID NO: 2398063 - RNA, 18 nt, Human immunodeficiency virus 1 [HIV-1]
ccaccaaggcaaagagaa

SEQ ID NO: 2398064 - RNA, 19 nt, Human immunodeficiency virus 1 [HIV-1]
acucccaaagaagacaaga

SEQ ID NO: 2398065 - RNA, 19 nt, Human immunodeficiency virus 1 [HIV-1]
accuguguggaaggaagca

SEQ ID NO: 2398066 - RNA, 15 nt, Human immunodeficiency virus 1 [HIV-1]
caauaguagcaauag

SEQ ID NO: 2398067 - RNA, 18 nt, Human immunodeficiency virus 1 [HIV-1]
uaaaucucuggaacagau

SEQ ID NO: 2398068 - RNA, 16 nt, Human immunodeficiency virus 1 [HIV-1]
aauggaggaaaaagag

SEQ ID NO: 2398069 - RNA, 15 nt, Human immunodeficiency virus 1 [HIV-1]
uggcgagcccucaga

SEQ ID NO: 2398070 - RNA, 19 nt, Human immunodeficiency virus 1 [HIV-1]
ccgcaggguuaaaaaagaa

SEQ ID NO: 2398071 - RNA, 18 nt, Human immunodeficiency virus 1 [HIV-1]
aucuguggacauaaagcu

SEQ ID NO: 2398072 - RNA, 14 nt, Human immunodeficiency virus 1 [HIV-1]
agcaaaagaaauag

SEQ ID NO: 2398073 - RNA, 23 nt, Human immunodeficiency virus 1 [HIV-1]
ggacuggggaguggcgagcccuc

SEQ ID NO: 2398074 - RNA, 14 nt, Human immunodeficiency virus 1 [HIV-1]
ucccacuaggggau

SEQ ID NO: 2398075 - RNA, 21 nt, Human immunodeficiency virus 1 [HIV-1]
aggugcagaaagaauaugcau

SEQ ID NO: 2398076 - RNA, 20 nt, Human immunodeficiency virus 1 [HIV-1]
agauauccuugaucugugga

SEQ ID NO: 2398077 - RNA, 13 nt, Human immunodeficiency virus 1 [HIV-1]
gaagaauaagaca

SEQ ID NO: 2398078 - RNA, 14 nt, Human immunodeficiency virus 1 [HIV-1]
aucugcggagccug

SEQ ID NO: 2398079 - RNA, 16 nt, Human immunodeficiency virus 1 [HIV-1]
acacauuuagaaggaa

SEQ ID NO: 2398080 - RNA, 18 nt, Human immunodeficiency virus 1 [HIV-1]
ccagggaggcguggccug

SEQ ID NO: 2398081 - RNA, 18 nt, Human immunodeficiency virus 1 [HIV-1]
cugguauagugcagcagc

SEQ ID NO: 2398082 - RNA, 16 nt, Human immunodeficiency virus 1 [HIV-1]
agcaucucgagaccug

SEQ ID NO: 2398083 - RNA, 21 nt, Human immunodeficiency virus 1 [HIV-1]
accagaucugagccugggagc

SEQ ID NO: 2398084 - RNA, 18 nt, Human immunodeficiency virus 1 [HIV-1]
gaagaagguggagagaga

SEQ ID NO: 2398085 - RNA, 14 nt, Human immunodeficiency virus 1 [HIV-1]
cagaaaacagagag

SEQ ID NO: 2398086 - RNA, 18 nt, Human immunodeficiency virus 1 [HIV-1]
acgcagggggugggaagc

SEQ ID NO: 2398087 - RNA, 13 nt, Human immunodeficiency virus 1 [HIV-1]
gaacuucugggac

SEQ ID NO: 2398088 - RNA, 23 nt, Human immunodeficiency virus 1 [HIV-1]
aguuggaguaauaaaucucugga

SEQ ID NO: 2398089 - RNA, 16 nt, Human immunodeficiency virus 1 [HIV-1]
ggcguuacucgacaga

SEQ ID NO: 2398090 - RNA, 22 nt, Human immunodeficiency virus 1 [HIV-1]
gcugacaucgagcuugcuacaa

SEQ ID NO: 2398091 - RNA, 14 nt, Human immunodeficiency virus 1 [HIV-1]
caaauuacaaaaau

SEQ ID NO: 2398092 - RNA, 14 nt, Human immunodeficiency virus 1 [HIV-1]
gaagaagguggaga

SEQ ID NO: 2398093 - RNA, 22 nt, Human immunodeficiency virus 1 [HIV-1]
uauccagagaggaccagggaga

SEQ ID NO: 2398094 - RNA, 12 nt, Human immunodeficiency virus 1 [HIV-1]
aagaacugcuga

SEQ ID NO: 2398095 - RNA, 15 nt, Human immunodeficiency virus 1 [HIV-1]
agggcuuggaaagga

SEQ ID NO: 2398096 - RNA, 15 nt, Human immunodeficiency virus 1 [HIV-1]
uuaucugggacgauc

SEQ ID NO: 2398097 - RNA, 21 nt, Human immunodeficiency virus 1 [HIV-1]
agaauggaggaaaaagagaua

SEQ ID NO: 2398098 - RNA, 18 nt, Human immunodeficiency virus 1 [HIV-1]
gacagcgacgaagagcuc

SEQ ID NO: 2398099 - RNA, 13 nt, Human immunodeficiency virus 1 [HIV-1]
gacuagagcccug

SEQ ID NO: 2398100 - RNA, 14 nt, Human immunodeficiency virus 1 [HIV-1]
auaaaggagagaac

SEQ ID NO: 2398101 - RNA, 15 nt, Human immunodeficiency virus 1 [HIV-1]
gaacaugagaaauau

SEQ ID NO: 2398102 - RNA, 16 nt, Human immunodeficiency virus 1 [HIV-1]
cagacccaccucccaa

SEQ ID NO: 2398103 - RNA, 15 nt, Human immunodeficiency virus 1 [HIV-1]
gcuaccaaugcugcu

SEQ ID NO: 2398104 - RNA, 20 nt, Human immunodeficiency virus 1 [HIV-1]
gagcaagaaauggagccagu

SEQ ID NO: 2398105 - RNA, 20 nt, Human immunodeficiency virus 1 [HIV-1]
cugguauagugcagcagcag

SEQ ID NO: 2398106 - RNA, 18 nt, Human immunodeficiency virus 1 [HIV-1]
aggaagaagcggagacag

SEQ ID NO: 2398107 - RNA, 21 nt, Human immunodeficiency virus 1 [HIV-1]
cacaaguagcaauacagcagc

SEQ ID NO: 2398108 - RNA, 18 nt, Human immunodeficiency virus 1 [HIV-1]
cuggauggagugggacag

SEQ ID NO: 2398109 - RNA, 16 nt, Human immunodeficiency virus 1 [HIV-1]
gguaccuguguggaag

SEQ ID NO: 2398110 - RNA, 21 nt, Human immunodeficiency virus 1 [HIV-1]
aucaaaagacuuaauagcaga

SEQ ID NO: 2398111 - RNA, 14 nt, Human immunodeficiency virus 1 [HIV-1]
agacuagagcccug

SEQ ID NO: 2398112 - RNA, 16 nt, Human immunodeficiency virus 1 [HIV-1]
ccacagagggagccac

SEQ ID NO: 2398113 - RNA, 15 nt, Human immunodeficiency virus 1 [HIV-1]
agcagauaggguggg

SEQ ID NO: 2398114 - RNA, 19 nt, Human immunodeficiency virus 1 [HIV-1]
cuaauagaggaagacaaaa

SEQ ID NO: 2398115 - RNA, 21 nt, Human immunodeficiency virus 1 [HIV-1]
agagaaaaaagagcaguggga

SEQ ID NO: 2398116 - RNA, 17 nt, Human immunodeficiency virus 1 [HIV-1]
ccgaaggaauagaagaa

SEQ ID NO: 2398117 - RNA, 22 nt, Human immunodeficiency virus 1 [HIV-1]
acaccucagguaccuuuaagac

SEQ ID NO: 2398118 - RNA, 22 nt, Human immunodeficiency virus 1 [HIV-1]
uggauauauagaagcagaaguu

SEQ ID NO: 2398119 - RNA, 17 nt, Human immunodeficiency virus 1 [HIV-1]
gcaaucacaaguagcaa

SEQ ID NO: 2398120 - RNA, 16 nt, Human immunodeficiency virus 1 [HIV-1]
augacuuacaaggcag

SEQ ID NO: 2398121 - RNA, 18 nt, Human immunodeficiency virus 1 [HIV-1]
cuacaguauuggagucag

SEQ ID NO: 2398122 - RNA, 22 nt, Human immunodeficiency virus 1 [HIV-1]
gaccagggagagcauuuguuac

SEQ ID NO: 2398123 - RNA, 16 nt, Human immunodeficiency virus 1 [HIV-1]
caguacaaauggcagu

SEQ ID NO: 2398124 - RNA, 15 nt, Human immunodeficiency virus 1 [HIV-1]
gccaugcauggacaa

SEQ ID NO: 2398125 - RNA, 14 nt, Human immunodeficiency virus 1 [HIV-1]
agacuuaauagcag

SEQ ID NO: 2398126 - RNA, 23 nt, Human immunodeficiency virus 1 [HIV-1]
gcaaucacaaguagcaauacagc

SEQ ID NO: 2398127 - RNA, 14 nt, Human immunodeficiency virus 1 [HIV-1]
ggccaauggacaua

SEQ ID NO: 2398128 - RNA, 23 nt, Human immunodeficiency virus 1 [HIV-1]
gaagcagaaguuauuccagcaga

SEQ ID NO: 2398129 - RNA, 15 nt, Human immunodeficiency virus 1 [HIV-1]
ggcccgagagcugca

SEQ ID NO: 2398130 - RNA, 16 nt, Human immunodeficiency virus 1 [HIV-1]
cacuaugggcgcagcc

SEQ ID NO: 2398131 - RNA, 13 nt, Human immunodeficiency virus 1 [HIV-1]
ccaguugagccag

SEQ ID NO: 2398132 - RNA, 13 nt, Human immunodeficiency virus 1 [HIV-1]
aaaggaagggaaa

SEQ ID NO: 2398133 - RNA, 23 nt, Human immunodeficiency virus 1 [HIV-1]
gcauuucaucacguggcccgaga

SEQ ID NO: 2398134 - RNA, 21 nt, Human immunodeficiency virus 1 [HIV-1]
agccugcaugggauggaugac

SEQ ID NO: 2398135 - RNA, 20 nt, Human immunodeficiency virus 1 [HIV-1]
uacccagggauuaaaguaag

SEQ ID NO: 2398136 - RNA, 15 nt, Human immunodeficiency virus 1 [HIV-1]
agaaauuaacaauua

SEQ ID NO: 2398137 - RNA, 16 nt, Human immunodeficiency virus 1 [HIV-1]
uaguagcaaaagaaau

SEQ ID NO: 2398138 - RNA, 20 nt, Human immunodeficiency virus 1 [HIV-1]
caauaguaguagcgggagaa

SEQ ID NO: 2398139 - RNA, 16 nt, Human immunodeficiency virus 1 [HIV-1]
gcaauaauaauagcaa

SEQ ID NO: 2398140 - RNA, 13 nt, Human immunodeficiency virus 1 [HIV-1]
acacccugugagc

SEQ ID NO: 2398141 - RNA, 14 nt, Human immunodeficiency virus 1 [HIV-1]
aaaguaagacagua

SEQ ID NO: 2398142 - RNA, 19 nt, Human immunodeficiency virus 1 [HIV-1]
ugaacaucuuaagacagca

SEQ ID NO: 2398143 - RNA, 16 nt, Human immunodeficiency virus 1 [HIV-1]
aaauuaagagaacaau

SEQ ID NO: 2398144 - RNA, 20 nt, Human immunodeficiency virus 1 [HIV-1]
ucguuucagacccaccuccc

SEQ ID NO: 2398145 - RNA, 16 nt, Human immunodeficiency virus 1 [HIV-1]
uggaagcauccaggaa

SEQ ID NO: 2398146 - RNA, 13 nt, Human immunodeficiency virus 1 [HIV-1]
agacaagcacauu

SEQ ID NO: 2398147 - RNA, 21 nt, Human immunodeficiency virus 1 [HIV-1]
caaaagacuuaauagcagaaa

SEQ ID NO: 2398148 - RNA, 17 nt, Human immunodeficiency virus 1 [HIV-1]
aguacaaggagcuugua

SEQ ID NO: 2398149 - RNA, 13 nt, Human immunodeficiency virus 1 [HIV-1]
ggcgcagccucaa

SEQ ID NO: 2398150 - RNA, 16 nt, Human immunodeficiency virus 1 [HIV-1]
aucagaugcuaaagca

SEQ ID NO: 2398151 - RNA, 19 nt, Human immunodeficiency virus 1 [HIV-1]
cuguagugcuacagaaaaa

SEQ ID NO: 2398152 - RNA, 15 nt, Human immunodeficiency virus 1 [HIV-1]
uaauagcaacaauga

SEQ ID NO: 2398153 - RNA, 23 nt, Human immunodeficiency virus 1 [HIV-1]
acuaaauggagaaaauuaguaga

SEQ ID NO: 2398154 - RNA, 12 nt, Human immunodeficiency virus 1 [HIV-1]
aaacaauacaua

SEQ ID NO: 2398155 - RNA, 16 nt, Human immunodeficiency virus 1 [HIV-1]
aacaccaaaaaagaua

SEQ ID NO: 2398156 - RNA, 20 nt, Human immunodeficiency virus 1 [HIV-1]
gaaauaugagacaagcacau

SEQ ID NO: 2398157 - RNA, 21 nt, Human immunodeficiency virus 1 [HIV-1]
agcaauacagcagcuaccaau

SEQ ID NO: 2398158 - RNA, 16 nt, Human immunodeficiency virus 1 [HIV-1]
auacagcagcuaccaa

SEQ ID NO: 2398159 - RNA, 15 nt, Human immunodeficiency virus 1 [HIV-1]
aaggaucaacagcuc

SEQ ID NO: 2398160 - RNA, 23 nt, Human immunodeficiency virus 1 [HIV-1]
ugauacuaccagcuauaaguuga

SEQ ID NO: 2398161 - RNA, 16 nt, Human immunodeficiency virus 1 [HIV-1]
uggacauaucaaauuu

SEQ ID NO: 2398162 - RNA, 21 nt, Human immunodeficiency virus 1 [HIV-1]
gaggagauaugagggacaauu

SEQ ID NO: 2398163 - RNA, 14 nt, Human immunodeficiency virus 1 [HIV-1]
gaggauuguggaac

SEQ ID NO: 2398164 - RNA, 19 nt, Human immunodeficiency virus 1 [HIV-1]
ucugcggagccugugccuc

SEQ ID NO: 2398165 - RNA, 16 nt, Human immunodeficiency virus 1 [HIV-1]
agagguaaggugcaga

SEQ ID NO: 2398166 - RNA, 16 nt, Human immunodeficiency virus 1 [HIV-1]
gcacccaccaaggcaa

SEQ ID NO: 2398167 - RNA, 15 nt, Human immunodeficiency virus 1 [HIV-1]
cuccauagaauggag

SEQ ID NO: 2398168 - RNA, 22 nt, Human immunodeficiency virus 1 [HIV-1]
guuagaccagaucugagccugg

SEQ ID NO: 2398169 - RNA, 16 nt, Human immunodeficiency virus 1 [HIV-1]
agacauacaaacuaaa

SEQ ID NO: 2398170 - RNA, 14 nt, Human immunodeficiency virus 1 [HIV-1]
uaguauaaacaaug

SEQ ID NO: 2398171 - RNA, 15 nt, Human immunodeficiency virus 1 [HIV-1]
augagacaccaggga

SEQ ID NO: 2398172 - RNA, 17 nt, Human immunodeficiency virus 1 [HIV-1]
gcgcagccucaaugacg

SEQ ID NO: 2398173 - RNA, 14 nt, Human immunodeficiency virus 1 [HIV-1]
agauccugcauaua

SEQ ID NO: 2398174 - RNA, 16 nt, Human immunodeficiency virus 1 [HIV-1]
aucaaauaauagagca

SEQ ID NO: 2398175 - RNA, 16 nt, Human immunodeficiency virus 1 [HIV-1]
gcaucaagcagcucca

SEQ ID NO: 2398176 - RNA, 17 nt, Human immunodeficiency virus 1 [HIV-1]
aggccagacaauuauug

SEQ ID NO: 2398177 - RNA, 14 nt, Human immunodeficiency virus 1 [HIV-1]
caguuagagaaaga

SEQ ID NO: 2398178 - RNA, 13 nt, Human immunodeficiency virus 1 [HIV-1]
auguggaaaaaug

SEQ ID NO: 2398179 - RNA, 12 nt, Human immunodeficiency virus 1 [HIV-1]
aagcagcugcuu

SEQ ID NO: 2398180 - RNA, 16 nt, Human immunodeficiency virus 1 [HIV-1]
ugaacaagaauuauug

SEQ ID NO: 2398181 - RNA, 22 nt, Human immunodeficiency virus 1 [HIV-1]
cacacuaaugauguaaaacaau

SEQ ID NO: 2398182 - RNA, 15 nt, Human immunodeficiency virus 1 [HIV-1]
cagaagacaguggca

SEQ ID NO: 2398183 - RNA, 14 nt, Human immunodeficiency virus 1 [HIV-1]
caagaauuauugga

SEQ ID NO: 2398184 - RNA, 21 nt, Human immunodeficiency virus 1 [HIV-1]
ugacaaguuguaacaccucag

SEQ ID NO: 2398185 - RNA, 18 nt, Human immunodeficiency virus 1 [HIV-1]
aauagacagguuaauuga

SEQ ID NO: 2398186 - RNA, 17 nt, Human immunodeficiency virus 1 [HIV-1]
ggagugggacagagaaa

SEQ ID NO: 2398187 - RNA, 14 nt, Human immunodeficiency virus 1 [HIV-1]
caguugagccagau

SEQ ID NO: 2398188 - RNA, 23 nt, Human immunodeficiency virus 1 [HIV-1]
aucgcaaaaccagcaagaaaaga

SEQ ID NO: 2398189 - RNA, 13 nt, Human immunodeficiency virus 1 [HIV-1]
auagaagcagaag

SEQ ID NO: 2398190 - RNA, 14 nt, Human immunodeficiency virus 1 [HIV-1]
cagaaacagggcag

SEQ ID NO: 2398191 - RNA, 13 nt, Human immunodeficiency virus 1 [HIV-1]
aacuaaagaauag

SEQ ID NO: 2398192 - RNA, 12 nt, Human immunodeficiency virus 1 [HIV-1]
cgagaccuggaa

SEQ ID NO: 2398193 - RNA, 19 nt, Human immunodeficiency virus 1 [HIV-1]
agcaagaaauggagccagu

SEQ ID NO: 2398194 - RNA, 18 nt, Human immunodeficiency virus 1 [HIV-1]
uucugcaacaacugcugu

SEQ ID NO: 2398195 - RNA, 22 nt, Human immunodeficiency virus 1 [HIV-1]
guacaaggagcuuguagagcua

SEQ ID NO: 2398196 - RNA, 13 nt, Human immunodeficiency virus 1 [HIV-1]
gaucugagccugg

SEQ ID NO: 2398197 - RNA, 19 nt, Human immunodeficiency virus 1 [HIV-1]
gaccagaucugagccuggg

SEQ ID NO: 2398198 - RNA, 16 nt, Human immunodeficiency virus 1 [HIV-1]
agcaaauuaagagaac

SEQ ID NO: 2398199 - RNA, 20 nt, Human immunodeficiency virus 1 [HIV-1]
gauccugcauauaagcagcu

SEQ ID NO: 2398200 - RNA, 22 nt, Human immunodeficiency virus 1 [HIV-1]
auuaagacaaagaaaaauagac

SEQ ID NO: 2398201 - RNA, 18 nt, Human immunodeficiency virus 1 [HIV-1]
cagggaaagcuaggggau

SEQ ID NO: 2398202 - RNA, 15 nt, Human immunodeficiency virus 1 [HIV-1]
gauauccacugaccu

SEQ ID NO: 2398203 - RNA, 14 nt, Human immunodeficiency virus 1 [HIV-1]
uggcccgagagcug

SEQ ID NO: 2398204 - RNA, 14 nt, Human immunodeficiency virus 1 [HIV-1]
ggagagaacaccag

SEQ ID NO: 2398205 - RNA, 16 nt, Human immunodeficiency virus 1 [HIV-1]
cugagccagcagcaga

SEQ ID NO: 2398206 - RNA, 17 nt, Human immunodeficiency virus 1 [HIV-1]
aagacaagauauccuug

SEQ ID NO: 2398207 - RNA, 18 nt, Human immunodeficiency virus 1 [HIV-1]
auugggugucgacauagc

SEQ ID NO: 2398208 - RNA, 22 nt, Human immunodeficiency virus 1 [HIV-1]
acacgaccuggauggaguggga

SEQ ID NO: 2398209 - RNA, 16 nt, Human immunodeficiency virus 1 [HIV-1]
agacccaacaacaaua

SEQ ID NO: 2398210 - RNA, 14 nt, Human immunodeficiency virus 1 [HIV-1]
accgcuugagagac

SEQ ID NO: 2398211 - RNA, 19 nt, Human immunodeficiency virus 1 [HIV-1]
uguaacauuaguagagcaa

SEQ ID NO: 2398212 - RNA, 21 nt, Human immunodeficiency virus 1 [HIV-1]
gguuuuccagucacaccucag

SEQ ID NO: 2398213 - RNA, 19 nt, Human immunodeficiency virus 1 [HIV-1]
acgagcugagccagcagca

SEQ ID NO: 2398214 - RNA, 13 nt, Human immunodeficiency virus 1 [HIV-1]
aaagcuugccuug

SEQ ID NO: 2398215 - RNA, 22 nt, Human immunodeficiency virus 1 [HIV-1]
augaggauuagaacauggaaaa

SEQ ID NO: 2398216 - RNA, 16 nt, Human immunodeficiency virus 1 [HIV-1]
gaaagagcagaagaca

SEQ ID NO: 2398217 - RNA, 14 nt, Human immunodeficiency virus 1 [HIV-1]
agggauggaaagga

SEQ ID NO: 2398218 - RNA, 17 nt, Human immunodeficiency virus 1 [HIV-1]
ugagacgagcugagcca

SEQ ID NO: 2398219 - RNA, 14 nt, Human immunodeficiency virus 1 [HIV-1]
acauagcagaauag

SEQ ID NO: 2398220 - RNA, 13 nt, Human immunodeficiency virus 1 [HIV-1]
cugcuauaagaaa

SEQ ID NO: 2398221 - RNA, 21 nt, Human immunodeficiency virus 1 [HIV-1]
ggaguacuucaagaacugcug

SEQ ID NO: 2398222 - RNA, 16 nt, Human immunodeficiency virus 1 [HIV-1]
agcagaugauacagua

SEQ ID NO: 2398223 - RNA, 20 nt, Human immunodeficiency virus 1 [HIV-1]
uacagcagcuaccaaugcug

SEQ ID NO: 2398224 - RNA, 13 nt, Human immunodeficiency virus 1 [HIV-1]
aaagaaaaaagac

SEQ ID NO: 2398225 - RNA, 17 nt, Human immunodeficiency virus 1 [HIV-1]
agccugcaugggaugga

SEQ ID NO: 2398226 - RNA, 22 nt, Human immunodeficiency virus 1 [HIV-1]
cagggagucuccauagaaugga

SEQ ID NO: 2398227 - RNA, 16 nt, Human immunodeficiency virus 1 [HIV-1]
aaacugcuuguaccaa

SEQ ID NO: 2398228 - RNA, 15 nt, Human immunodeficiency virus 1 [HIV-1]
gagagaacaccagcu

SEQ ID NO: 2398229 - RNA, 23 nt, Human immunodeficiency virus 1 [HIV-1]
acaaauuauaaacauguggcaga

SEQ ID NO: 2398230 - RNA, 17 nt, Human immunodeficiency virus 1 [HIV-1]
agaccagaucugagccu

SEQ ID NO: 2398231 - RNA, 15 nt, Human immunodeficiency virus 1 [HIV-1]
gaacaauuuggaaau

SEQ ID NO: 2398232 - RNA, 18 nt, Human immunodeficiency virus 1 [HIV-1]
caccaaggcaaagagaag

SEQ ID NO: 2398233 - RNA, 17 nt, Human immunodeficiency virus 1 [HIV-1]
gccaagaagaaaagcaa

SEQ ID NO: 2398234 - RNA, 13 nt, Human immunodeficiency virus 1 [HIV-1]
gacagguaagaga

SEQ ID NO: 2398235 - RNA, 14 nt, Human immunodeficiency virus 1 [HIV-1]
ugccaccuguagua

SEQ ID NO: 2398236 - RNA, 15 nt, Human immunodeficiency virus 1 [HIV-1]
uagaagaggccaaua

SEQ ID NO: 2398237 - RNA, 16 nt, Human immunodeficiency virus 1 [HIV-1]
cccucagauccugcau

SEQ ID NO: 2398238 - RNA, 21 nt, Human immunodeficiency virus 1 [HIV-1]
gggcgggaaucaagcaggaau

SEQ ID NO: 2398239 - RNA, 23 nt, Human immunodeficiency virus 1 [HIV-1]
cacaaguagcaauacagcagcua

SEQ ID NO: 2398240 - RNA, 22 nt, Human immunodeficiency virus 1 [HIV-1]
gauccuuggcacuuaucuggga

SEQ ID NO: 2398241 - RNA, 17 nt, Human immunodeficiency virus 1 [HIV-1]
agacgagcugagccagc

SEQ ID NO: 2398242 - RNA, 18 nt, Human immunodeficiency virus 1 [HIV-1]
aucuccuauggcaggaag

SEQ ID NO: 2398243 - RNA, 12 nt, Human immunodeficiency virus 1 [HIV-1]
accaguugagcc

SEQ ID NO: 2398244 - RNA, 17 nt, Human immunodeficiency virus 1 [HIV-1]
acucgacagaggagagc

SEQ ID NO: 2398245 - RNA, 18 nt, Human immunodeficiency virus 1 [HIV-1]
cuguaguagcaaaagaaa

SEQ ID NO: 2398246 - RNA, 22 nt, Human immunodeficiency virus 1 [HIV-1]
ccuggaaaaacauggagcaauc

SEQ ID NO: 2398247 - RNA, 17 nt, Human immunodeficiency virus 1 [HIV-1]
cacacgaccuggaugga

SEQ ID NO: 2398248 - RNA, 17 nt, Human immunodeficiency virus 1 [HIV-1]
cguggcccgagagcugc

SEQ ID NO: 2398249 - RNA, 17 nt, Human immunodeficiency virus 1 [HIV-1]
auuacagggacagcaga

SEQ ID NO: 2398250 - RNA, 15 nt, Human immunodeficiency virus 1 [HIV-1]
caguugagccagaua

SEQ ID NO: 2398251 - RNA, 17 nt, Human immunodeficiency virus 1 [HIV-1]
gggaggcguggccuggg

SEQ ID NO: 2398252 - RNA, 14 nt, Human immunodeficiency virus 1 [HIV-1]
ggcuguggaaagau

SEQ ID NO: 2398253 - RNA, 16 nt, Human immunodeficiency virus 1 [HIV-1]
acuacacaccagggcc

SEQ ID NO: 2398254 - RNA, 19 nt, Human immunodeficiency virus 1 [HIV-1]
acgaucugcggagccugug

SEQ ID NO: 2398255 - RNA, 13 nt, Human immunodeficiency virus 1 [HIV-1]
gcauuuguuacaa

SEQ ID NO: 2398256 - RNA, 13 nt, Human immunodeficiency virus 1 [HIV-1]
uuaagacaaagaa

SEQ ID NO: 2398257 - RNA, 17 nt, Human immunodeficiency virus 1 [HIV-1]
uacaaaugucagcacag

SEQ ID NO: 2398258 - RNA, 17 nt, Human immunodeficiency virus 1 [HIV-1]
cuggggacuuuccaggg

SEQ ID NO: 2398259 - RNA, 16 nt, Human immunodeficiency virus 1 [HIV-1]
uggaggaaaaagagau

SEQ ID NO: 2398260 - RNA, 19 nt, Human immunodeficiency virus 1 [HIV-1]
acuuucuauagugaauaga

SEQ ID NO: 2398261 - RNA, 15 nt, Human immunodeficiency virus 1 [HIV-1]
agaagaagagguagu

SEQ ID NO: 2398262 - RNA, 16 nt, Human immunodeficiency virus 1 [HIV-1]
ugccuggcuagaagca

SEQ ID NO: 2398263 - RNA, 19 nt, Human immunodeficiency virus 1 [HIV-1]
cuagaacuggcagaaaaca

SEQ ID NO: 2398264 - RNA, 16 nt, Human immunodeficiency virus 1 [HIV-1]
gacuuuccgcugggga

SEQ ID NO: 2398265 - RNA, 23 nt, Human immunodeficiency virus 1 [HIV-1]
auaaaugucagcuaaaaggagaa

SEQ ID NO: 2398266 - RNA, 22 nt, Human immunodeficiency virus 1 [HIV-1]
gggcaguaguaauacaagauaa

SEQ ID NO: 2398267 - RNA, 12 nt, Human immunodeficiency virus 1 [HIV-1]
gcacauuguaac

SEQ ID NO: 2398268 - RNA, 15 nt, Human immunodeficiency virus 1 [HIV-1]
uguuagcuugcucaa

SEQ ID NO: 2398269 - RNA, 23 nt, Human immunodeficiency virus 1 [HIV-1]
acuguuuaauaguacuugguuua

SEQ ID NO: 2398270 - RNA, 14 nt, Human immunodeficiency virus 1 [HIV-1]
ugcuuaagccucaa

SEQ ID NO: 2398271 - RNA, 21 nt, Human immunodeficiency virus 1 [HIV-1]
aauuaagagaacaauuuggaa

SEQ ID NO: 2398272 - RNA, 23 nt, Human immunodeficiency virus 1 [HIV-1]
agauagaagaggccaauaaagga

SEQ ID NO: 2398273 - RNA, 16 nt, Human immunodeficiency virus 1 [HIV-1]
gcgggaaucaagcagg

SEQ ID NO: 2398274 - RNA, 15 nt, Human immunodeficiency virus 1 [HIV-1]
aaacagggcaggaaa

SEQ ID NO: 2398275 - RNA, 17 nt, Human immunodeficiency virus 1 [HIV-1]
cuaaagaauuacaaaaa

SEQ ID NO: 2398276 - RNA, 24 nt, Human immunodeficiency virus 1 [HIV-1]
acaaauuauaaacauguggcagaa

SEQ ID NO: 2398277 - RNA, 20 nt, Human immunodeficiency virus 1 [HIV-1]
agggacuuuccgcuggggac

SEQ ID NO: 2398278 - RNA, 15 nt, Human immunodeficiency virus 1 [HIV-1]
auaaagaaaaaagac

SEQ ID NO: 2398279 - RNA, 21 nt, Human immunodeficiency virus 1 [HIV-1]
auggcagucuagcagaagaag

SEQ ID NO: 2398280 - RNA, 13 nt, Human immunodeficiency virus 1 [HIV-1]
aacagauuuggaa

SEQ ID NO: 2398281 - RNA, 18 nt, Human immunodeficiency virus 1 [HIV-1]
auaaagaauuaaagaaaa

SEQ ID NO: 2398282 - RNA, 13 nt, Human immunodeficiency virus 1 [HIV-1]
caaguagacagga

SEQ ID NO: 2398283 - RNA, 18 nt, Human immunodeficiency virus 1 [HIV-1]
agcaagaaauggagccag

SEQ ID NO: 2398284 - RNA, 16 nt, Human immunodeficiency virus 1 [HIV-1]
agauccuagacuagag

SEQ ID NO: 2398285 - RNA, 12 nt, Human immunodeficiency virus 1 [HIV-1]
caugacaaaaau

SEQ ID NO: 2398286 - RNA, 18 nt, Human immunodeficiency virus 1 [HIV-1]
aggccaauaaaggagaga

SEQ ID NO: 2398287 - RNA, 11 nt, Human immunodeficiency virus 1 [HIV-1]
uagaaggaaaa

SEQ ID NO: 2398288 - RNA, 13 nt, Human immunodeficiency virus 1 [HIV-1]
gguugcucuggaa

SEQ ID NO: 2398289 - RNA, 16 nt, Human immunodeficiency virus 1 [HIV-1]
guucuugggagcagca

SEQ ID NO: 2398290 - RNA, 20 nt, Human immunodeficiency virus 1 [HIV-1]
gacuuacucuugauuguaac

SEQ ID NO: 2398291 - RNA, 14 nt, Human immunodeficiency virus 1 [HIV-1]
ucuaaaagaaccag

SEQ ID NO: 2398292 - RNA, 18 nt, Human immunodeficiency virus 1 [HIV-1]
aguaaucauagaauauag

SEQ ID NO: 2398293 - RNA, 13 nt, Human immunodeficiency virus 1 [HIV-1]
gaaauggagccag

SEQ ID NO: 2398294 - RNA, 18 nt, Human immunodeficiency virus 1 [HIV-1]
agauggggcagcuaacag

SEQ ID NO: 2398295 - RNA, 20 nt, Human immunodeficiency virus 1 [HIV-1]
gagcagcaucucgagaccug

SEQ ID NO: 2398296 - RNA, 20 nt, Human immunodeficiency virus 1 [HIV-1]
ccacugcuuaagccucaaua

SEQ ID NO: 2398297 - RNA, 13 nt, Human immunodeficiency virus 1 [HIV-1]
gcgagcccucaga

SEQ ID NO: 2398298 - RNA, 22 nt, Human immunodeficiency virus 1 [HIV-1]
uguuucauaacaaaagccuuag

SEQ ID NO: 2398299 - RNA, 18 nt, Human immunodeficiency virus 1 [HIV-1]
acacccugugagccugca

SEQ ID NO: 2398300 - RNA, 18 nt, Human immunodeficiency virus 1 [HIV-1]
gaaaaguuuaguaaaaca

SEQ ID NO: 2398301 - RNA, 13 nt, Human immunodeficiency virus 1 [HIV-1]
aacaacugcuguu

SEQ ID NO: 2398302 - RNA, 14 nt, Human immunodeficiency virus 1 [HIV-1]
uaacagaagaagca

SEQ ID NO: 2398303 - RNA, 20 nt, Human immunodeficiency virus 1 [HIV-1]
caaaaccagcaagaaaagaa

SEQ ID NO: 2398304 - RNA, 17 nt, Human immunodeficiency virus 1 [HIV-1]
cuuaagccucaauaaag

SEQ ID NO: 2398305 - RNA, 14 nt, Human immunodeficiency virus 1 [HIV-1]
aacacugaaggaag

SEQ ID NO: 2398306 - RNA, 18 nt, Human immunodeficiency virus 1 [HIV-1]
uggcacuuaucugggacg

SEQ ID NO: 2398307 - RNA, 16 nt, Human immunodeficiency virus 1 [HIV-1]
cugaccuuuggauggu

SEQ ID NO: 2398308 - RNA, 19 nt, Human immunodeficiency virus 1 [HIV-1]
agguggagagagagacaga

SEQ ID NO: 2398309 - RNA, 13 nt, Human immunodeficiency virus 1 [HIV-1]
cauuguaacauua

SEQ ID NO: 2398310 - RNA, 18 nt, Human immunodeficiency virus 1 [HIV-1]
aauugugggucacagucu

SEQ ID NO: 2398311 - RNA, 20 nt, Human immunodeficiency virus 1 [HIV-1]
agaaugagacgagcugagcc

SEQ ID NO: 2398312 - RNA, 19 nt, Human immunodeficiency virus 1 [HIV-1]
guggauauauagaagcaga

SEQ ID NO: 2398313 - RNA, 18 nt, Human immunodeficiency virus 1 [HIV-1]
uagcaaauuaagagaaca

SEQ ID NO: 2398314 - RNA, 20 nt, Human immunodeficiency virus 1 [HIV-1]
aacagacauacaaacuaaag

SEQ ID NO: 2398315 - RNA, 15 nt, Human immunodeficiency virus 1 [HIV-1]
uaccagcacacaaag

SEQ ID NO: 2398316 - RNA, 20 nt, Human immunodeficiency virus 1 [HIV-1]
caagcagcuccaggcaagaa

SEQ ID NO: 2398317 - RNA, 22 nt, Human immunodeficiency virus 1 [HIV-1]
ugagacaagcacauuguaacau

SEQ ID NO: 2398318 - RNA, 13 nt, Human immunodeficiency virus 1 [HIV-1]
uagaucuuagcca

SEQ ID NO: 2398319 - RNA, 20 nt, Human immunodeficiency virus 1 [HIV-1]
guagacauaauagcaacaga

SEQ ID NO: 2398320 - RNA, 22 nt, Human immunodeficiency virus 1 [HIV-1]
acacaaguagacccugaacuag

SEQ ID NO: 2398321 - RNA, 17 nt, Human immunodeficiency virus 1 [HIV-1]
aaagaaaaaagacagua

SEQ ID NO: 2398322 - RNA, 14 nt, Human immunodeficiency virus 1 [HIV-1]
caccagcuuguuac

SEQ ID NO: 2398323 - RNA, 21 nt, Human immunodeficiency virus 1 [HIV-1]
gaucugcggagccugugccuc

SEQ ID NO: 2398324 - RNA, 10 nt, Human immunodeficiency virus 1 [HIV-1]
gacuggggag

SEQ ID NO: 2398325 - RNA, 15 nt, Human immunodeficiency virus 1 [HIV-1]
ggaggaggagguggg

SEQ ID NO: 2398326 - RNA, 20 nt, Human immunodeficiency virus 1 [HIV-1]
auuugggguugcucuggaaa

SEQ ID NO: 2398327 - RNA, 11 nt, Human immunodeficiency virus 1 [HIV-1]
aucaaaguaag

SEQ ID NO: 2398328 - RNA, 17 nt, Human immunodeficiency virus 1 [HIV-1]
gcagaagacaguggcaa

SEQ ID NO: 2398329 - RNA, 23 nt, Human immunodeficiency virus 1 [HIV-1]
uccaagaauaaguucagaaguac

SEQ ID NO: 2398330 - RNA, 24 nt, Human immunodeficiency virus 1 [HIV-1]
cgccuagcauuucaucacguggcc

SEQ ID NO: 2398331 - RNA, 15 nt, Human immunodeficiency virus 1 [HIV-1]
cagggacagcagaaa

SEQ ID NO: 2398332 - RNA, 14 nt, Human immunodeficiency virus 1 [HIV-1]
aaggaccagcaaag

SEQ ID NO: 2398333 - RNA, 19 nt, Human immunodeficiency virus 1 [HIV-1]
acaggccagacaauuauug

SEQ ID NO: 2398334 - RNA, 16 nt, Human immunodeficiency virus 1 [HIV-1]
gauaauggagaaagga

SEQ ID NO: 2398335 - RNA, 17 nt, Human immunodeficiency virus 1 [HIV-1]
caaauuauaaacaugug

SEQ ID NO: 2398336 - RNA, 14 nt, Human immunodeficiency virus 1 [HIV-1]
gcuuguagagcuau

SEQ ID NO: 2398337 - RNA, 17 nt, Human immunodeficiency virus 1 [HIV-1]
aauagcagaaauacaga

SEQ ID NO: 2398338 - RNA, 16 nt, Human immunodeficiency virus 1 [HIV-1]
ccugugagccugcaug

SEQ ID NO: 2398339 - RNA, 17 nt, Human immunodeficiency virus 1 [HIV-1]
acuaaauggagaaaauu

SEQ ID NO: 2398340 - RNA, 18 nt, Human immunodeficiency virus 1 [HIV-1]
ucuuuaagcaauccucag

SEQ ID NO: 2398341 - RNA, 13 nt, Human immunodeficiency virus 1 [HIV-1]
gagcagcaggaag

SEQ ID NO: 2398342 - RNA, 17 nt, Human immunodeficiency virus 1 [HIV-1]
gcacaguacaauguaca

SEQ ID NO: 2398343 - RNA, 17 nt, Human immunodeficiency virus 1 [HIV-1]
acagauccauucgauua

SEQ ID NO: 2398344 - RNA, 16 nt, Human immunodeficiency virus 1 [HIV-1]
gggugggagcagcauc

SEQ ID NO: 2398345 - RNA, 22 nt, Human immunodeficiency virus 1 [HIV-1]
auggguaccagcacacaaagga

SEQ ID NO: 2398346 - RNA, 22 nt, Human immunodeficiency virus 1 [HIV-1]
agaccagaucugagccugggag

SEQ ID NO: 2398347 - RNA, 13 nt, Human immunodeficiency virus 1 [HIV-1]
caucaagcagcuc

SEQ ID NO: 2398348 - RNA, 20 nt, Human immunodeficiency virus 1 [HIV-1]
agaaguguuagaguggaggu

SEQ ID NO: 2398349 - RNA, 19 nt, Human immunodeficiency virus 1 [HIV-1]
ccugggcgggacuggggag

SEQ ID NO: 2398350 - RNA, 15 nt, Human immunodeficiency virus 1 [HIV-1]
agagaacaccagcuu

SEQ ID NO: 2398351 - RNA, 14 nt, Human immunodeficiency virus 1 [HIV-1]
gcagcagcagaaca

SEQ ID NO: 2398352 - RNA, 16 nt, Human immunodeficiency virus 1 [HIV-1]
agagaggaccagggag

SEQ ID NO: 2398353 - RNA, 18 nt, Human immunodeficiency virus 1 [HIV-1]
ucaaagcaguaaguagua

SEQ ID NO: 2398354 - RNA, 17 nt, Human immunodeficiency virus 1 [HIV-1]
gcacuuaucugggacga

SEQ ID NO: 2398355 - RNA, 21 nt, Human immunodeficiency virus 1 [HIV-1]
auaagacagggcuuggaaagg

SEQ ID NO: 2398356 - RNA, 22 nt, Human immunodeficiency virus 1 [HIV-1]
ccagcuuguuacacccugugag

SEQ ID NO: 2398357 - RNA, 13 nt, Human immunodeficiency virus 1 [HIV-1]
aaaaagagcagug

SEQ ID NO: 2398358 - RNA, 15 nt, Human immunodeficiency virus 1 [HIV-1]
agagcaagaaaugga

SEQ ID NO: 2398359 - RNA, 22 nt, Human immunodeficiency virus 1 [HIV-1]
gggacgaucugcggagccugug

SEQ ID NO: 2398360 - RNA, 16 nt, Human immunodeficiency virus 1 [HIV-1]
auuugccauaaagaaa

SEQ ID NO: 2398361 - RNA, 17 nt, Human immunodeficiency virus 1 [HIV-1]
gcugcuugugccuggcu

SEQ ID NO: 2398362 - RNA, 13 nt, Human immunodeficiency virus 1 [HIV-1]
uacaauaggaaaa

SEQ ID NO: 2398363 - RNA, 20 nt, Human immunodeficiency virus 1 [HIV-1]
gccucaauaaagcuugccuu

SEQ ID NO: 2398364 - RNA, 15 nt, Human immunodeficiency virus 1 [HIV-1]
cuaaagccaugugua

SEQ ID NO: 2398365 - RNA, 16 nt, Human immunodeficiency virus 1 [HIV-1]
gaaaagcaaagaucau

SEQ ID NO: 2398366 - RNA, 21 nt, Human immunodeficiency virus 1 [HIV-1]
gguggagagagagacagagac

SEQ ID NO: 2398367 - RNA, 21 nt, Human immunodeficiency virus 1 [HIV-1]
agacgagcugagccagcagca

SEQ ID NO: 2398368 - RNA, 18 nt, Human immunodeficiency virus 1 [HIV-1]
uaagagaacaauuuggaa

SEQ ID NO: 2398369 - RNA, 19 nt, Human immunodeficiency virus 1 [HIV-1]
auggagugggacagagaaa

SEQ ID NO: 2398370 - RNA, 15 nt, Human immunodeficiency virus 1 [HIV-1]
cuaacugacacaaca

SEQ ID NO: 2398371 - RNA, 14 nt, Human immunodeficiency virus 1 [HIV-1]
agaaagagcagaag

SEQ ID NO: 2398372 - RNA, 18 nt, Human immunodeficiency virus 1 [HIV-1]
ugacaugguagaacagau

SEQ ID NO: 2398373 - RNA, 18 nt, Human immunodeficiency virus 1 [HIV-1]
ccacugcuuaagccucaa

SEQ ID NO: 2398374 - RNA, 16 nt, Human immunodeficiency virus 1 [HIV-1]
aggcguggccugggcg

SEQ ID NO: 2398375 - RNA, 17 nt, Human immunodeficiency virus 1 [HIV-1]
cacaaucacccucccau

SEQ ID NO: 2398376 - RNA, 14 nt, Human immunodeficiency virus 1 [HIV-1]
gagagagacagaga

SEQ ID NO: 2398377 - RNA, 13 nt, Human immunodeficiency virus 1 [HIV-1]
ccugugagccugc

SEQ ID NO: 2398378 - RNA, 15 nt, Human immunodeficiency virus 1 [HIV-1]
guacaguauuaguag

SEQ ID NO: 2398379 - RNA, 14 nt, Human immunodeficiency virus 1 [HIV-1]
gcaccacugcugug

SEQ ID NO: 2398380 - RNA, 17 nt, Human immunodeficiency virus 1 [HIV-1]
ccaggggucagauaucc

SEQ ID NO: 2398381 - RNA, 14 nt, Human immunodeficiency virus 1 [HIV-1]
aggccaauaaagga

SEQ ID NO: 2398382 - RNA, 16 nt, Human immunodeficiency virus 1 [HIV-1]
acaguacaauguacac

SEQ ID NO: 2398383 - RNA, 12 nt, Human immunodeficiency virus 1 [HIV-1]
ucacccucccau

SEQ ID NO: 2398384 - RNA, 15 nt, Human immunodeficiency virus 1 [HIV-1]
gagcauuuguuacaa

SEQ ID NO: 2398385 - RNA, 19 nt, Human immunodeficiency virus 1 [HIV-1]
gacuuaauagcagaaauac

SEQ ID NO: 2398386 - RNA, 20 nt, Human immunodeficiency virus 1 [HIV-1]
auaaacuugauauaauacca

SEQ ID NO: 2398387 - RNA, 14 nt, Human immunodeficiency virus 1 [HIV-1]
caauacagcagcua

SEQ ID NO: 2398388 - RNA, 18 nt, Human immunodeficiency virus 1 [HIV-1]
ccaaagcacuaacagaag

SEQ ID NO: 2398389 - RNA, 13 nt, Human immunodeficiency virus 1 [HIV-1]
gcaccacugcugu

SEQ ID NO: 2398390 - RNA, 21 nt, Human immunodeficiency virus 1 [HIV-1]
cuuaccacaccagacaaaaaa

SEQ ID NO: 2398391 - RNA, 14 nt, Human immunodeficiency virus 1 [HIV-1]
acaugguagaacag

SEQ ID NO: 2398392 - RNA, 19 nt, Human immunodeficiency virus 1 [HIV-1]
acauuguaacauuaguaga

SEQ ID NO: 2398393 - RNA, 17 nt, Human immunodeficiency virus 1 [HIV-1]
aaaaagagcagugggaa

SEQ ID NO: 2398394 - RNA, 13 nt, Human immunodeficiency virus 1 [HIV-1]
agcauccaggaag

SEQ ID NO: 2398395 - RNA, 18 nt, Human immunodeficiency virus 1 [HIV-1]
gcccucagauccugcaua

SEQ ID NO: 2398396 - RNA, 20 nt, Human immunodeficiency virus 1 [HIV-1]
ggggcaucaagcagcuccag

SEQ ID NO: 2398397 - RNA, 13 nt, Human immunodeficiency virus 1 [HIV-1]
ggaaaagcaggau

SEQ ID NO: 2398398 - RNA, 17 nt, Human immunodeficiency virus 1 [HIV-1]
gauaaaaaacugcucuu

SEQ ID NO: 2398399 - RNA, 14 nt, Human immunodeficiency virus 1 [HIV-1]
ucaagcagcuccag

SEQ ID NO: 2398400 - RNA, 22 nt, Human immunodeficiency virus 1 [HIV-1]
gcuugcucaaugccacagccau

SEQ ID NO: 2398401 - RNA, 14 nt, Human immunodeficiency virus 1 [HIV-1]
aggguuauagaagu

SEQ ID NO: 2398402 - RNA, 22 nt, Human immunodeficiency virus 1 [HIV-1]
ucugcauacaggagaaagagac

SEQ ID NO: 2398403 - RNA, 17 nt, Human immunodeficiency virus 1 [HIV-1]
guuagaccagaucugag

SEQ ID NO: 2398404 - RNA, 15 nt, Human immunodeficiency virus 1 [HIV-1]
acagccauagcagua

SEQ ID NO: 2398405 - RNA, 12 nt, Human immunodeficiency virus 1 [HIV-1]
uaacauguggaa

SEQ ID NO: 2398406 - RNA, 21 nt, Human immunodeficiency virus 1 [HIV-1]
aaaauaggaaauaugagacaa

SEQ ID NO: 2398407 - RNA, 18 nt, Human immunodeficiency virus 1 [HIV-1]
aguauugguaaaugugac

SEQ ID NO: 2398408 - RNA, 18 nt, Human immunodeficiency virus 1 [HIV-1]
uggcagaaaguaggaaaa

SEQ ID NO: 2398409 - RNA, 18 nt, Human immunodeficiency virus 1 [HIV-1]
ugauaauggagaaaggag

SEQ ID NO: 2398410 - RNA, 20 nt, Human immunodeficiency virus 1 [HIV-1]
gacaggaugaggauuagaac

SEQ ID NO: 2398411 - RNA, 22 nt, Human immunodeficiency virus 1 [HIV-1]
gacauaauagcaacagacauac

SEQ ID NO: 2398412 - RNA, 17 nt, Human immunodeficiency virus 1 [HIV-1]
uaaaaggagaagccaug

SEQ ID NO: 2398413 - RNA, 20 nt, Human immunodeficiency virus 1 [HIV-1]
uuguuacacccugugagccu

SEQ ID NO: 2398414 - RNA, 15 nt, Human immunodeficiency virus 1 [HIV-1]
accacuaacagaaga

SEQ ID NO: 2398415 - RNA, 21 nt, Human immunodeficiency virus 1 [HIV-1]
uccaaaguagcaugacaaaaa

SEQ ID NO: 2398416 - RNA, 23 nt, Human immunodeficiency virus 1 [HIV-1]
accagcuuguuacacccugugag

SEQ ID NO: 2398417 - RNA, 17 nt, Human immunodeficiency virus 1 [HIV-1]
cauaguaggagcagaaa

SEQ ID NO: 2398418 - RNA, 21 nt, Human immunodeficiency virus 1 [HIV-1]
caguauuugccauaaagaaaa

SEQ ID NO: 2398419 - RNA, 16 nt, Human immunodeficiency virus 1 [HIV-1]
aaagaaaaaaucagua

SEQ ID NO: 2398420 - RNA, 18 nt, Human immunodeficiency virus 1 [HIV-1]
agaaauuuguacagagau

SEQ ID NO: 2398421 - RNA, 15 nt, Human immunodeficiency virus 1 [HIV-1]
aaccagcaagaaaag

SEQ ID NO: 2398422 - RNA, 11 nt, Human immunodeficiency virus 1 [HIV-1]
auaagaaaggc

SEQ ID NO: 2398423 - RNA, 21 nt, Human immunodeficiency virus 1 [HIV-1]
cauaauuggaagaaaucuguu

SEQ ID NO: 2398424 - RNA, 23 nt, Human immunodeficiency virus 1 [HIV-1]
acugcuuaagccucaauaaagcu

SEQ ID NO: 2398425 - RNA, 17 nt, Human immunodeficiency virus 1 [HIV-1]
caucacguggcccgaga

SEQ ID NO: 2398426 - RNA, 11 nt, Human immunodeficiency virus 1 [HIV-1]
uuccagggagg

SEQ ID NO: 2398427 - RNA, 21 nt, Human immunodeficiency virus 1 [HIV-1]
ggugugaauaucaagcaggac

SEQ ID NO: 2398428 - RNA, 23 nt, Human immunodeficiency virus 1 [HIV-1]
ucagaagacugaguuacaagcaa

SEQ ID NO: 2398429 - RNA, 14 nt, Human immunodeficiency virus 1 [HIV-1]
cagaaauacagaag

SEQ ID NO: 2398430 - RNA, 15 nt, Human immunodeficiency virus 1 [HIV-1]
uaguaguagcaauaa

SEQ ID NO: 2398431 - RNA, 14 nt, Human immunodeficiency virus 1 [HIV-1]
cuacaguauuggag

SEQ ID NO: 2398432 - RNA, 19 nt, Human immunodeficiency virus 1 [HIV-1]
caggcccgaaggaauagaa

SEQ ID NO: 2398433 - RNA, 19 nt, Human immunodeficiency virus 1 [HIV-1]
gagcagcaggaagcacuau

SEQ ID NO: 2398434 - RNA, 12 nt, Human immunodeficiency virus 1 [HIV-1]
ugccccucccau

SEQ ID NO: 2398435 - RNA, 12 nt, Human immunodeficiency virus 1 [HIV-1]
agaaagcauagu

SEQ ID NO: 2398436 - RNA, 17 nt, Human immunodeficiency virus 1 [HIV-1]
ggagagagagacagaga

SEQ ID NO: 2398437 - RNA, 11 nt, Human immunodeficiency virus 1 [HIV-1]
cauagcagaau

SEQ ID NO: 2398438 - RNA, 17 nt, Human immunodeficiency virus 1 [HIV-1]
cucccaugcagaauaaa

SEQ ID NO: 2398439 - RNA, 18 nt, Human immunodeficiency virus 1 [HIV-1]
gacgaucugcggagccug

SEQ ID NO: 2398440 - RNA, 22 nt, Human immunodeficiency virus 1 [HIV-1]
ggaaaggugaaggggcaguagu

SEQ ID NO: 2398441 - RNA, 17 nt, Human immunodeficiency virus 1 [HIV-1]
cucucugguuagaccag

SEQ ID NO: 2398442 - RNA, 19 nt, Human immunodeficiency virus 1 [HIV-1]
auaccacuaacagaagaag

SEQ ID NO: 2398443 - RNA, 14 nt, Human immunodeficiency virus 1 [HIV-1]
aaaguaguaaaaau

SEQ ID NO: 2398444 - RNA, 16 nt, Human immunodeficiency virus 1 [HIV-1]
cagauaagauagaaga

SEQ ID NO: 2398445 - RNA, 19 nt, Human immunodeficiency virus 1 [HIV-1]
uacaguauuagaagaaaug

SEQ ID NO: 2398446 - RNA, 14 nt, Human immunodeficiency virus 1 [HIV-1]
aauuuuaacaugug

SEQ ID NO: 2398447 - RNA, 22 nt, Human immunodeficiency virus 1 [HIV-1]
accagaucugagccugggagcu

SEQ ID NO: 2398448 - RNA, 16 nt, Human immunodeficiency virus 1 [HIV-1]
auggagaaaggagaga

SEQ ID NO: 2398449 - RNA, 19 nt, Human immunodeficiency virus 1 [HIV-1]
guagacuguaguccaggaa

SEQ ID NO: 2398450 - RNA, 20 nt, Human immunodeficiency virus 1 [HIV-1]
guagacccugaacuagcaga

SEQ ID NO: 2398451 - RNA, 22 nt, Human immunodeficiency virus 1 [HIV-1]
ggaucuaccacacacaaggcua

SEQ ID NO: 2398452 - RNA, 16 nt, Human immunodeficiency virus 1 [HIV-1]
aauacuuggcacuagc

SEQ ID NO: 2398453 - RNA, 16 nt, Human immunodeficiency virus 1 [HIV-1]
uguagaucuuagccac

SEQ ID NO: 2398454 - RNA, 12 nt, Human immunodeficiency virus 1 [HIV-1]
ggacuuuccagg

SEQ ID NO: 2398455 - RNA, 17 nt, Human immunodeficiency virus 1 [HIV-1]
cacaccagacaaaaaac

SEQ ID NO: 2398456 - RNA, 22 nt, Human immunodeficiency virus 1 [HIV-1]
aaaaguagugugauuggauggc

SEQ ID NO: 2398457 - RNA, 16 nt, Human immunodeficiency virus 1 [HIV-1]
aagcauccaggaaguc

SEQ ID NO: 2398458 - RNA, 16 nt, Human immunodeficiency virus 1 [HIV-1]
agaccagaucugagcc

SEQ ID NO: 2398459 - RNA, 19 nt, Human immunodeficiency virus 1 [HIV-1]
cuuuuaaaauuagcaggaa

SEQ ID NO: 2398460 - RNA, 21 nt, Human immunodeficiency virus 1 [HIV-1]
cugagccugggagcucucugg

SEQ ID NO: 2398461 - RNA, 14 nt, Human immunodeficiency virus 1 [HIV-1]
acccauaguaggag

SEQ ID NO: 2398462 - RNA, 17 nt, Human immunodeficiency virus 1 [HIV-1]
uaaaaaucugaaaacag

SEQ ID NO: 2398463 - RNA, 17 nt, Human immunodeficiency virus 1 [HIV-1]
cagaucugagccuggga

SEQ ID NO: 2398464 - RNA, 13 nt, Human immunodeficiency virus 1 [HIV-1]
cuaauagaaagag

SEQ ID NO: 2398465 - RNA, 22 nt, Human immunodeficiency virus 1 [HIV-1]
acaauuacacaagcuuaauaca

SEQ ID NO: 2398466 - RNA, 19 nt, Human immunodeficiency virus 1 [HIV-1]
agggaaagaaugagacgag

SEQ ID NO: 2398467 - RNA, 16 nt, Human immunodeficiency virus 1 [HIV-1]
agaacaccagcuuguu

SEQ ID NO: 2398468 - RNA, 22 nt, Human immunodeficiency virus 1 [HIV-1]
cagaacuacacaccagggccag

SEQ ID NO: 2398469 - RNA, 13 nt, Human immunodeficiency virus 1 [HIV-1]
auuaaagaaaauu

SEQ ID NO: 2398470 - RNA, 21 nt, Human immunodeficiency virus 1 [HIV-1]
accaaugcugcuugugccugg

SEQ ID NO: 2398471 - RNA, 20 nt, Human immunodeficiency virus 1 [HIV-1]
aaaccauaauaguacagcug

SEQ ID NO: 2398472 - RNA, 18 nt, Human immunodeficiency virus 1 [HIV-1]
cagaacuacacaccaggg

SEQ ID NO: 2398473 - RNA, 12 nt, Human immunodeficiency virus 1 [HIV-1]
uaauaauagcaa

SEQ ID NO: 2398474 - RNA, 15 nt, Human immunodeficiency virus 1 [HIV-1]
ccuugaucuguggau

SEQ ID NO: 2398475 - RNA, 14 nt, Human immunodeficiency virus 1 [HIV-1]
caagagaugguggu

SEQ ID NO: 2398476 - RNA, 15 nt, Human immunodeficiency virus 1 [HIV-1]
aggaggagauaugag

SEQ ID NO: 2398477 - RNA, 16 nt, Human immunodeficiency virus 1 [HIV-1]
ucagcacuuguggaga

SEQ ID NO: 2398478 - RNA, 16 nt, Human immunodeficiency virus 1 [HIV-1]
agaauuauuggaauua

SEQ ID NO: 2398479 - RNA, 19 nt, Human immunodeficiency virus 1 [HIV-1]
agcagcaucucgagaccug

SEQ ID NO: 2398480 - RNA, 12 nt, Human immunodeficiency virus 1 [HIV-1]
auacagcagcua

SEQ ID NO: 2398481 - RNA, 16 nt, Human immunodeficiency virus 1 [HIV-1]
aguggaagccauaaua

SEQ ID NO: 2398482 - RNA, 14 nt, Human immunodeficiency virus 1 [HIV-1]
auggagaaaggaga

SEQ ID NO: 2398483 - RNA, 16 nt, Human immunodeficiency virus 1 [HIV-1]
aguagcaauacagcag

SEQ ID NO: 2398484 - RNA, 15 nt, Human immunodeficiency virus 1 [HIV-1]
cauaccuagaagaau

SEQ ID NO: 2398485 - RNA, 15 nt, Human immunodeficiency virus 1 [HIV-1]
uggggacuuuccagg

SEQ ID NO: 2398486 - RNA, 15 nt, Human immunodeficiency virus 1 [HIV-1]
uucaagaacugcuga

SEQ ID NO: 2398487 - RNA, 21 nt, Human immunodeficiency virus 1 [HIV-1]
uaauaguacagcugaacacau

SEQ ID NO: 2398488 - RNA, 15 nt, Human immunodeficiency virus 1 [HIV-1]
ggacuuuccagggag

SEQ ID NO: 2398489 - RNA, 17 nt, Human immunodeficiency virus 1 [HIV-1]
agaucugagccugggag

SEQ ID NO: 2398490 - RNA, 15 nt, Human immunodeficiency virus 1 [HIV-1]
ggagagagagacaga

SEQ ID NO: 2398491 - RNA, 17 nt, Human immunodeficiency virus 1 [HIV-1]
agauuuacccagggauu

SEQ ID NO: 2398492 - RNA, 21 nt, Human immunodeficiency virus 1 [HIV-1]
augguaccaguuagagaaaga

SEQ ID NO: 2398493 - RNA, 17 nt, Human immunodeficiency virus 1 [HIV-1]
cagucuagcagaagaag

SEQ ID NO: 2398494 - RNA, 20 nt, Human immunodeficiency virus 1 [HIV-1]
gcugcuuuuugccuguacug

SEQ ID NO: 2398495 - RNA, 16 nt, Human immunodeficiency virus 1 [HIV-1]
caagaauaaguucaga

SEQ ID NO: 2398496 - RNA, 23 nt, Human immunodeficiency virus 1 [HIV-1]
guggccugggcgggacuggggag

SEQ ID NO: 2398497 - RNA, 21 nt, Human immunodeficiency virus 1 [HIV-1]
aaguuuguuucauaacaaaag

SEQ ID NO: 2398498 - RNA, 16 nt, Human immunodeficiency virus 1 [HIV-1]
uaacauuaguagagca

SEQ ID NO: 2398499 - RNA, 14 nt, Human immunodeficiency virus 1 [HIV-1]
auagugcagcagca

SEQ ID NO: 2398500 - RNA, 14 nt, Human immunodeficiency virus 1 [HIV-1]
ggaacuucugggac

SEQ ID NO: 2398501 - RNA, 13 nt, Human immunodeficiency virus 1 [HIV-1]
auccuagacuaga

SEQ ID NO: 2398502 - RNA, 18 nt, Human immunodeficiency virus 1 [HIV-1]
gaacccacugcuuaagcc

SEQ ID NO: 2398503 - RNA, 17 nt, Human immunodeficiency virus 1 [HIV-1]
ucaaugacauacagaag

SEQ ID NO: 2398504 - RNA, 22 nt, Human immunodeficiency virus 1 [HIV-1]
agauccugcauauaagcagcug

SEQ ID NO: 2398505 - RNA, 22 nt, Human immunodeficiency virus 1 [HIV-1]
uggcaguauucauccacaauuu

SEQ ID NO: 2398506 - RNA, 17 nt, Human immunodeficiency virus 1 [HIV-1]
agcagaagacaguggca

SEQ ID NO: 2398507 - RNA, 19 nt, Human immunodeficiency virus 1 [HIV-1]
guagcaauacagcagcuac

SEQ ID NO: 2398508 - RNA, 14 nt, Human immunodeficiency virus 1 [HIV-1]
ggaacaagccccag

SEQ ID NO: 2398509 - RNA, 17 nt, Human immunodeficiency virus 1 [HIV-1]
cuaaugauguaaaacaa

SEQ ID NO: 2398510 - RNA, 20 nt, Human immunodeficiency virus 1 [HIV-1]
auaucagcacuuguggagau

SEQ ID NO: 2398511 - RNA, 18 nt, Human immunodeficiency virus 1 [HIV-1]
agaaugauacuaauacca

SEQ ID NO: 2398512 - RNA, 21 nt, Human immunodeficiency virus 1 [HIV-1]
gcagcagauagggugggagca

SEQ ID NO: 2398513 - RNA, 14 nt, Human immunodeficiency virus 1 [HIV-1]
cugacaauggcagc

SEQ ID NO: 2398514 - RNA, 18 nt, Human immunodeficiency virus 1 [HIV-1]
cacccugugagccugcau

SEQ ID NO: 2398515 - RNA, 14 nt, Human immunodeficiency virus 1 [HIV-1]
aauagaggaagaca

SEQ ID NO: 2398516 - RNA, 16 nt, Human immunodeficiency virus 1 [HIV-1]
cuucccugauuagcag

SEQ ID NO: 2398517 - RNA, 16 nt, Human immunodeficiency virus 1 [HIV-1]
caauccucaggagggg

SEQ ID NO: 2398518 - RNA, 21 nt, Human immunodeficiency virus 1 [HIV-1]
agaagguggagagagagacag

SEQ ID NO: 2398519 - RNA, 18 nt, Human immunodeficiency virus 1 [HIV-1]
agccuuuuagaaaacaaa

SEQ ID NO: 2398520 - RNA, 18 nt, Human immunodeficiency virus 1 [HIV-1]
aucuucagaccuggagga

SEQ ID NO: 2398521 - RNA, 16 nt, Human immunodeficiency virus 1 [HIV-1]
ugaguuacaagcaauu

SEQ ID NO: 2398522 - RNA, 10 nt, Human immunodeficiency virus 1 [HIV-1]
gagcagcagg

SEQ ID NO: 2398523 - RNA, 22 nt, Human immunodeficiency virus 1 [HIV-1]
ucagguaccuuuaagaccaaug

SEQ ID NO: 2398524 - RNA, 18 nt, Human immunodeficiency virus 1 [HIV-1]
gaaugaagcuguuagaca

SEQ ID NO: 2398525 - RNA, 21 nt, Human immunodeficiency virus 1 [HIV-1]
ccagaucugagccugggagcu

SEQ ID NO: 2398526 - RNA, 18 nt, Human immunodeficiency virus 1 [HIV-1]
acuaaauuaggaaaagca

SEQ ID NO: 2398527 - RNA, 21 nt, Human immunodeficiency virus 1 [HIV-1]
cuaugaauaaagaauuaaaga

SEQ ID NO: 2398528 - RNA, 21 nt, Human immunodeficiency virus 1 [HIV-1]
caggcccgaaggaauagaaga

SEQ ID NO: 2398529 - RNA, 22 nt, Human immunodeficiency virus 1 [HIV-1]
agccugugccucuucagcuacc

SEQ ID NO: 2398530 - RNA, 18 nt, Human immunodeficiency virus 1 [HIV-1]
caagaaguaguauuggua

SEQ ID NO: 2398531 - RNA, 13 nt, Human immunodeficiency virus 1 [HIV-1]
gaacccacugcuu

SEQ ID NO: 2398532 - RNA, 14 nt, Human immunodeficiency virus 1 [HIV-1]
ugccagaaaaagac

SEQ ID NO: 2398533 - RNA, 14 nt, Human immunodeficiency virus 1 [HIV-1]
gacgagcugagcca

SEQ ID NO: 2398534 - RNA, 18 nt, Human immunodeficiency virus 1 [HIV-1]
aauugauagacuaauaga

SEQ ID NO: 2398535 - RNA, 13 nt, Human immunodeficiency virus 1 [HIV-1]
guagacuguaguc

SEQ ID NO: 2398536 - RNA, 14 nt, Human immunodeficiency virus 1 [HIV-1]
gagaaaggagagau

SEQ ID NO: 2398537 - RNA, 22 nt, Human immunodeficiency virus 1 [HIV-1]
auagacuaauagaaagagcaga

SEQ ID NO: 2398538 - RNA, 16 nt, Human immunodeficiency virus 1 [HIV-1]
agagagaaaaaagagc

SEQ ID NO: 2398539 - RNA, 23 nt, Human immunodeficiency virus 1 [HIV-1]
uaccuaaaggaucaacagcuccu

SEQ ID NO: 2398540 - RNA, 15 nt, Human immunodeficiency virus 1 [HIV-1]
gaacaucuuaagaca

SEQ ID NO: 2398541 - RNA, 13 nt, Human immunodeficiency virus 1 [HIV-1]
aggcaaagagaag

SEQ ID NO: 2398542 - RNA, 23 nt, Human immunodeficiency virus 1 [HIV-1]
acagggagacuaaauuaggaaaa

SEQ ID NO: 2398543 - RNA, 14 nt, Human immunodeficiency virus 1 [HIV-1]
cauagaaaucugug

SEQ ID NO: 2398544 - RNA, 20 nt, Human immunodeficiency virus 1 [HIV-1]
cagucacaccucagguaccu

SEQ ID NO: 2398545 - RNA, 13 nt, Human immunodeficiency virus 1 [HIV-1]
uauaaaauuauuc

SEQ ID NO: 2398546 - RNA, 19 nt, Human immunodeficiency virus 1 [HIV-1]
cagagaggaccagggagag

SEQ ID NO: 2398547 - RNA, 13 nt, Human immunodeficiency virus 1 [HIV-1]
acuuuuuaaaaga

SEQ ID NO: 2398548 - RNA, 21 nt, Human immunodeficiency virus 1 [HIV-1]
agaggccaauaaaggagagaa

SEQ ID NO: 2398549 - RNA, 13 nt, Human immunodeficiency virus 1 [HIV-1]
uuaauuguggagg

SEQ ID NO: 2398550 - RNA, 16 nt, Human immunodeficiency virus 1 [HIV-1]
ccuguguggaaggaag

SEQ ID NO: 2398551 - RNA, 18 nt, Human immunodeficiency virus 1 [HIV-1]
agcugcuuuuugccugua

SEQ ID NO: 2398552 - RNA, 14 nt, Human immunodeficiency virus 1 [HIV-1]
aucaaaguaagaca

SEQ ID NO: 2398553 - RNA, 17 nt, Human immunodeficiency virus 1 [HIV-1]
caguuaauaaaaaagga

SEQ ID NO: 2398554 - RNA, 14 nt, Human immunodeficiency virus 1 [HIV-1]
caggaguggaagcc

SEQ ID NO: 2398555 - RNA, 16 nt, Human immunodeficiency virus 1 [HIV-1]
cugcauacaggagaaa

SEQ ID NO: 2398556 - RNA, 14 nt, Human immunodeficiency virus 1 [HIV-1]
gaugacccggagag

SEQ ID NO: 2398557 - RNA, 20 nt, Human immunodeficiency virus 1 [HIV-1]
ugugagccugcaugggaugg

SEQ ID NO: 2398558 - RNA, 19 nt, Human immunodeficiency virus 1 [HIV-1]
caaaaaacaucagaaagaa

SEQ ID NO: 2398559 - RNA, 21 nt, Human immunodeficiency virus 1 [HIV-1]
agggagucuccauagaaugga

SEQ ID NO: 2398560 - RNA, 18 nt, Human immunodeficiency virus 1 [HIV-1]
gcccgagagcugcauccg

SEQ ID NO: 2398561 - RNA, 14 nt, Human immunodeficiency virus 1 [HIV-1]
ucaagcacaaccag

SEQ ID NO: 2398562 - RNA, 22 nt, Human immunodeficiency virus 1 [HIV-1]
cuguagugcuacagaaaaauug

SEQ ID NO: 2398563 - RNA, 18 nt, Human immunodeficiency virus 1 [HIV-1]
cuaauaccaauaguagua

SEQ ID NO: 2398564 - RNA, 14 nt, Human immunodeficiency virus 1 [HIV-1]
uggagugggacaga

SEQ ID NO: 2398565 - RNA, 17 nt, Human immunodeficiency virus 1 [HIV-1]
aguuaauaaaaaaggaa

SEQ ID NO: 2398566 - RNA, 17 nt, Human immunodeficiency virus 1 [HIV-1]
gcaucaagcagcuccag

SEQ ID NO: 2398567 - RNA, 15 nt, Human immunodeficiency virus 1 [HIV-1]
guaugccccucccau

SEQ ID NO: 2398568 - RNA, 15 nt, Human immunodeficiency virus 1 [HIV-1]
gcauggacaaguaga

SEQ ID NO: 2398569 - RNA, 19 nt, Human immunodeficiency virus 1 [HIV-1]
gagaagaguggugcagaga

SEQ ID NO: 2398570 - RNA, 19 nt, Human immunodeficiency virus 1 [HIV-1]
aggcaucuccuauggcagg

SEQ ID NO: 2398571 - RNA, 17 nt, Human immunodeficiency virus 1 [HIV-1]
gagguaaggugcagaaa

SEQ ID NO: 2398572 - RNA, 19 nt, Human immunodeficiency virus 1 [HIV-1]
cuguuagcuugcucaaugc

SEQ ID NO: 2398573 - RNA, 16 nt, Human immunodeficiency virus 1 [HIV-1]
caaagaagacaagaua

SEQ ID NO: 2398574 - RNA, 23 nt, Human immunodeficiency virus 1 [HIV-1]
gcauuaguagaaauuuguacaga

SEQ ID NO: 2398575 - RNA, 22 nt, Human immunodeficiency virus 1 [HIV-1]
gaaguaguauugguaaauguga

SEQ ID NO: 2398576 - RNA, 21 nt, Human immunodeficiency virus 1 [HIV-1]
gagcuagaacuggcagaaaac

SEQ ID NO: 2398577 - RNA, 19 nt, Human immunodeficiency virus 1 [HIV-1]
acugcuuaagccucaauaa

SEQ ID NO: 2398578 - RNA, 23 nt, Human immunodeficiency virus 1 [HIV-1]
agugccaagaagaaaagcaaaga

SEQ ID NO: 2398579 - RNA, 14 nt, Human immunodeficiency virus 1 [HIV-1]
auaaaaaaggaaaa

SEQ ID NO: 2398580 - RNA, 19 nt, Human immunodeficiency virus 1 [HIV-1]
cuuaccacaccagacaaaa

SEQ ID NO: 2398581 - RNA, 14 nt, Human immunodeficiency virus 1 [HIV-1]
acaaauuauaaaca

SEQ ID NO: 2398582 - RNA, 15 nt, Human immunodeficiency virus 1 [HIV-1]
aaaugucagcuaaaa

SEQ ID NO: 2398583 - RNA, 13 nt, Human immunodeficiency virus 1 [HIV-1]
agauggaauagau

SEQ ID NO: 2398584 - RNA, 16 nt, Human immunodeficiency virus 1 [HIV-1]
cauagcaguagcugag

SEQ ID NO: 2398585 - RNA, 15 nt, Human immunodeficiency virus 1 [HIV-1]
cucccaucaguggac

SEQ ID NO: 2398586 - RNA, 17 nt, Human immunodeficiency virus 1 [HIV-1]
gauggaugacccggaga

SEQ ID NO: 2398587 - RNA, 24 nt, Human immunodeficiency virus 1 [HIV-1]
agucaggaacuaaagaauagugcu

SEQ ID NO: 2398588 - RNA, 23 nt, Human immunodeficiency virus 1 [HIV-1]
cagauccugcauauaagcagcug

SEQ ID NO: 2398589 - RNA, 14 nt, Human immunodeficiency virus 1 [HIV-1]
ggagugggacagag

SEQ ID NO: 2398590 - RNA, 22 nt, Human immunodeficiency virus 1 [HIV-1]
cugcucuuucaauaucagcaca

SEQ ID NO: 2398591 - RNA, 18 nt, Human immunodeficiency virus 1 [HIV-1]
agcaauacagcagcuacc

SEQ ID NO: 2398592 - RNA, 12 nt, Human immunodeficiency virus 1 [HIV-1]
auggagaaagga

SEQ ID NO: 2398593 - RNA, 19 nt, Human immunodeficiency virus 1 [HIV-1]
acuaacagaaguaauacca

SEQ ID NO: 2398594 - RNA, 13 nt, Human immunodeficiency virus 1 [HIV-1]
guucuugggagca

SEQ ID NO: 2398595 - RNA, 14 nt, Human immunodeficiency virus 1 [HIV-1]
ucuaaaauguaaua

SEQ ID NO: 2398596 - RNA, 14 nt, Human immunodeficiency virus 1 [HIV-1]
gcaucaagcagcuc

SEQ ID NO: 2398597 - RNA, 18 nt, Human immunodeficiency virus 1 [HIV-1]
accauaauaguacagcug

SEQ ID NO: 2398598 - RNA, 22 nt, Human immunodeficiency virus 1 [HIV-1]
agaaaggagagauaaaaaacug

SEQ ID NO: 2398599 - RNA, 18 nt, Human immunodeficiency virus 1 [HIV-1]
uaaaaaagaaaaaaucag

SEQ ID NO: 2398600 - RNA, 13 nt, Human immunodeficiency virus 1 [HIV-1]
ggugggagcagca

SEQ ID NO: 2398601 - RNA, 17 nt, Human immunodeficiency virus 1 [HIV-1]
cuuggcacuagcagcau

SEQ ID NO: 2398602 - RNA, 12 nt, Human immunodeficiency virus 1 [HIV-1]
auggaaaaggaa

SEQ ID NO: 2398603 - RNA, 20 nt, Human immunodeficiency virus 1 [HIV-1]
cacuagagcuuuuagaggag

SEQ ID NO: 2398604 - RNA, 16 nt, Human immunodeficiency virus 1 [HIV-1]
gggaggcguggccugg

SEQ ID NO: 2398605 - RNA, 19 nt, Human immunodeficiency virus 1 [HIV-1]
gaacaccagcuuguuacac

SEQ ID NO: 2398606 - RNA, 21 nt, Human immunodeficiency virus 1 [HIV-1]
cucaauaaagcuugccuugag

SEQ ID NO: 2398607 - RNA, 19 nt, Human immunodeficiency virus 1 [HIV-1]
agugcugccagaaaaagac

SEQ ID NO: 2398608 - RNA, 16 nt, Human immunodeficiency virus 1 [HIV-1]
agcaauaauaauagca

SEQ ID NO: 2398609 - RNA, 16 nt, Human immunodeficiency virus 1 [HIV-1]
ccaagaugaacaugag

SEQ ID NO: 2398610 - RNA, 14 nt, Human immunodeficiency virus 1 [HIV-1]
cgggaaucaagcag

SEQ ID NO: 2398611 - RNA, 16 nt, Human immunodeficiency virus 1 [HIV-1]
acaacuguuuaauagu

SEQ ID NO: 2398612 - RNA, 15 nt, Human immunodeficiency virus 1 [HIV-1]
acccacaagaaguag

SEQ ID NO: 2398613 - RNA, 14 nt, Human immunodeficiency virus 1 [HIV-1]
gcuugugccuggcu

SEQ ID NO: 2398614 - RNA, 13 nt, Human immunodeficiency virus 1 [HIV-1]
aauacagcagcua

SEQ ID NO: 2398615 - RNA, 13 nt, Human immunodeficiency virus 1 [HIV-1]
agagaaaaaagag

SEQ ID NO: 2398616 - RNA, 23 nt, Human immunodeficiency virus 1 [HIV-1]
ccaaguuuguuucauaacaaaag

SEQ ID NO: 2398617 - RNA, 17 nt, Human immunodeficiency virus 1 [HIV-1]
auuuagaaggaaaaguu

SEQ ID NO: 2398618 - RNA, 20 nt, Human immunodeficiency virus 1 [HIV-1]
agauaggggggcaacuaaag

SEQ ID NO: 2398619 - RNA, 22 nt, Human immunodeficiency virus 1 [HIV-1]
cgaucugcggagccugugccuc

SEQ ID NO: 2398620 - RNA, 16 nt, Human immunodeficiency virus 1 [HIV-1]
gaagacaguggcaaug

SEQ ID NO: 2398621 - RNA, 13 nt, Human immunodeficiency virus 1 [HIV-1]
gccucaauaaagc

SEQ ID NO: 2398622 - RNA, 15 nt, Human immunodeficiency virus 1 [HIV-1]
aaaauauuaagacaa

SEQ ID NO: 2398623 - RNA, 19 nt, Human immunodeficiency virus 1 [HIV-1]
ccaguauuugccauaaaga

SEQ ID NO: 2398624 - RNA, 13 nt, Human immunodeficiency virus 1 [HIV-1]
cacagagggagcc

SEQ ID NO: 2398625 - RNA, 16 nt, Human immunodeficiency virus 1 [HIV-1]
cucauccaagaauaag

SEQ ID NO: 2398626 - RNA, 11 nt, Human immunodeficiency virus 1 [HIV-1]
agugaauagag

SEQ ID NO: 2398627 - RNA, 19 nt, Human immunodeficiency virus 1 [HIV-1]
agccugggagcucucuggc

SEQ ID NO: 2398628 - RNA, 10 nt, Human immunodeficiency virus 1 [HIV-1]
ccagggaggc

SEQ ID NO: 2398629 - RNA, 12 nt, Human immunodeficiency virus 1 [HIV-1]
caggagaaagag

SEQ ID NO: 2398630 - RNA, 16 nt, Human immunodeficiency virus 1 [HIV-1]
ggaguacuucaagaac

SEQ ID NO: 2398631 - RNA, 18 nt, Human immunodeficiency virus 1 [HIV-1]
accaaaaaagauaaagcc

SEQ ID NO: 2398632 - RNA, 16 nt, Human immunodeficiency virus 1 [HIV-1]
uggcaaguagacagga

SEQ ID NO: 2398633 - RNA, 22 nt, Human immunodeficiency virus 1 [HIV-1]
cacacgaccuggauggaguggg

SEQ ID NO: 2398634 - RNA, 23 nt, Human immunodeficiency virus 1 [HIV-1]
cagcuuguuacacccugugagcc

SEQ ID NO: 2398635 - RNA, 22 nt, Human immunodeficiency virus 1 [HIV-1]
acauggaauuaggccaguagua

SEQ ID NO: 2398636 - RNA, 14 nt, Human immunodeficiency virus 1 [HIV-1]
accuaguauaaaca

SEQ ID NO: 2398637 - RNA, 17 nt, Human immunodeficiency virus 1 [HIV-1]
auauuaagacaaagaaa

SEQ ID NO: 2398638 - RNA, 14 nt, Human immunodeficiency virus 1 [HIV-1]
cuugggagcagcag

SEQ ID NO: 2398639 - RNA, 20 nt, Human immunodeficiency virus 1 [HIV-1]
ggacgaucugcggagccugu

SEQ ID NO: 2398640 - RNA, 17 nt, Human immunodeficiency virus 1 [HIV-1]
auggaaaccaaaaauga

SEQ ID NO: 2398641 - RNA, 16 nt, Human immunodeficiency virus 1 [HIV-1]
cagagauggaaaagga

SEQ ID NO: 2398642 - RNA, 15 nt, Human immunodeficiency virus 1 [HIV-1]
gaguggcgagcccuc

SEQ ID NO: 2398643 - RNA, 14 nt, Human immunodeficiency virus 1 [HIV-1]
acacccugugagcc

SEQ ID NO: 2398644 - RNA, 15 nt, Human immunodeficiency virus 1 [HIV-1]
cuauggcaggaagaa

SEQ ID NO: 2398645 - RNA, 14 nt, Human immunodeficiency virus 1 [HIV-1]
aguauaaacaauga

SEQ ID NO: 2398646 - RNA, 20 nt, Human immunodeficiency virus 1 [HIV-1]
cuuuuaaaauuagcaggaag

SEQ ID NO: 2398647 - RNA, 17 nt, Human immunodeficiency virus 1 [HIV-1]
ugagggacaauuggaga

SEQ ID NO: 2398648 - RNA, 17 nt, Human immunodeficiency virus 1 [HIV-1]
agcaauaauaauagcaa

SEQ ID NO: 2398649 - RNA, 13 nt, Human immunodeficiency virus 1 [HIV-1]
uggguuuuccagu

SEQ ID NO: 2398650 - RNA, 18 nt, Human immunodeficiency virus 1 [HIV-1]
uggcagaaaacagagaga

SEQ ID NO: 2398651 - RNA, 15 nt, Human immunodeficiency virus 1 [HIV-1]
cccgagagcugcauc

SEQ ID NO: 2398652 - RNA, 18 nt, Human immunodeficiency virus 1 [HIV-1]
agguaaggugcagaaaga

SEQ ID NO: 2398653 - RNA, 22 nt, Human immunodeficiency virus 1 [HIV-1]
caaacuaaagaauuacaaaaac

SEQ ID NO: 2398654 - RNA, 18 nt, Human immunodeficiency virus 1 [HIV-1]
gaauccuggcuguggaaa

SEQ ID NO: 2398655 - RNA, 13 nt, Human immunodeficiency virus 1 [HIV-1]
auuuuaaaagaaa

SEQ ID NO: 2398656 - RNA, 16 nt, Human immunodeficiency virus 1 [HIV-1]
aggaggaggagguggg

SEQ ID NO: 2398657 - RNA, 17 nt, Human immunodeficiency virus 1 [HIV-1]
gaaaaggggggacugga

SEQ ID NO: 2398658 - RNA, 21 nt, Human immunodeficiency virus 1 [HIV-1]
gagaacaccagcuuguuacac

SEQ ID NO: 2398659 - RNA, 17 nt, Human immunodeficiency virus 1 [HIV-1]
caaauuaagagaacaau

SEQ ID NO: 2398660 - RNA, 16 nt, Human immunodeficiency virus 1 [HIV-1]
agaagaguggugcaga

SEQ ID NO: 2398661 - RNA, 18 nt, Human immunodeficiency virus 1 [HIV-1]
cuacuguaagggaaagaa

SEQ ID NO: 2398662 - RNA, 21 nt, Human immunodeficiency virus 1 [HIV-1]
ugugccuggcuagaagcacaa

SEQ ID NO: 2398663 - RNA, 18 nt, Human immunodeficiency virus 1 [HIV-1]
uggauggugcuacaagcu

SEQ ID NO: 2398664 - RNA, 17 nt, Human immunodeficiency virus 1 [HIV-1]
cuguagaucuuagccac

SEQ ID NO: 2398665 - RNA, 16 nt, Human immunodeficiency virus 1 [HIV-1]
cuuacaaggcagcugu

SEQ ID NO: 2398666 - RNA, 15 nt, Human immunodeficiency virus 1 [HIV-1]
guacacauuuagaag

SEQ ID NO: 2398667 - RNA, 21 nt, Human immunodeficiency virus 1 [HIV-1]
agcagcaucucgagaccugga

SEQ ID NO: 2398668 - RNA, 15 nt, Human immunodeficiency virus 1 [HIV-1]
gaauaagacagggcu

SEQ ID NO: 2398669 - RNA, 11 nt, Human immunodeficiency virus 1 [HIV-1]
acaaaaacaaa

SEQ ID NO: 2398670 - RNA, 22 nt, Human immunodeficiency virus 1 [HIV-1]
cuaccaaugcugcuugugccug

SEQ ID NO: 2398671 - RNA, 21 nt, Human immunodeficiency virus 1 [HIV-1]
acacccugugagccugcaugg

SEQ ID NO: 2398672 - RNA, 17 nt, Human immunodeficiency virus 1 [HIV-1]
aggaaauaugagacaag

SEQ ID NO: 2398673 - RNA, 15 nt, Human immunodeficiency virus 1 [HIV-1]
ugagccugggagcuc

SEQ ID NO: 2398674 - RNA, 15 nt, Human immunodeficiency virus 1 [HIV-1]
ccauagcaguagcug

SEQ ID NO: 2398675 - RNA, 14 nt, Human immunodeficiency virus 1 [HIV-1]
acugcugacaucga

SEQ ID NO: 2398676 - RNA, 16 nt, Human immunodeficiency virus 1 [HIV-1]
aacacaucuguagaaa

SEQ ID NO: 2398677 - RNA, 21 nt, Human immunodeficiency virus 1 [HIV-1]
agcaguuaauaaaaaaggaaa

SEQ ID NO: 2398678 - RNA, 19 nt, Human immunodeficiency virus 1 [HIV-1]
uuaaacugcccauacaaaa

SEQ ID NO: 2398679 - RNA, 13 nt, Human immunodeficiency virus 1 [HIV-1]
caguaaaaacaau

SEQ ID NO: 2398680 - RNA, 15 nt, Human immunodeficiency virus 1 [HIV-1]
gcugaggggacagau

SEQ ID NO: 2398681 - RNA, 16 nt, Human immunodeficiency virus 1 [HIV-1]
aauacaagaaaaagaa

SEQ ID NO: 2398682 - RNA, 13 nt, Human immunodeficiency virus 1 [HIV-1]
auacuaccagcua

SEQ ID NO: 2398683 - RNA, 20 nt, Human immunodeficiency virus 1 [HIV-1]
aggagagcaagaaauggagc

SEQ ID NO: 2398684 - RNA, 20 nt, Human immunodeficiency virus 1 [HIV-1]
cagggaggcguggccugggc

SEQ ID NO: 2398685 - RNA, 22 nt, Human immunodeficiency virus 1 [HIV-1]
cagacaaaaaacaucagaaaga

SEQ ID NO: 2398686 - RNA, 19 nt, Human immunodeficiency virus 1 [HIV-1]
guagcugaggggacagaua

SEQ ID NO: 2398687 - RNA, 20 nt, Human immunodeficiency virus 1 [HIV-1]
cugacacaacaaaucagaag

SEQ ID NO: 2398688 - RNA, 20 nt, Human immunodeficiency virus 1 [HIV-1]
guuucagacccaccucccaa

SEQ ID NO: 2398689 - RNA, 12 nt, Human immunodeficiency virus 1 [HIV-1]
caccagcaauau

SEQ ID NO: 2398690 - RNA, 18 nt, Human immunodeficiency virus 1 [HIV-1]
cuuguuacacccugugag

SEQ ID NO: 2398691 - RNA, 14 nt, Human immunodeficiency virus 1 [HIV-1]
guggguuuuccagu

SEQ ID NO: 2398692 - RNA, 14 nt, Human immunodeficiency virus 1 [HIV-1]
auguaaaacaauua

SEQ ID NO: 2398693 - RNA, 17 nt, Human immunodeficiency virus 1 [HIV-1]
gaagaagguggagagag

SEQ ID NO: 2398694 - RNA, 22 nt, Human immunodeficiency virus 1 [HIV-1]
gaggccaauaaaggagagaaca

SEQ ID NO: 2398695 - RNA, 13 nt, Human immunodeficiency virus 1 [HIV-1]
gaggaccagggag

SEQ ID NO: 2398696 - RNA, 18 nt, Human immunodeficiency virus 1 [HIV-1]
agagaaaaaagagcagug

SEQ ID NO: 2398697 - RNA, 17 nt, Human immunodeficiency virus 1 [HIV-1]
gccaauaaaggagagaa

SEQ ID NO: 2398698 - RNA, 17 nt, Human immunodeficiency virus 1 [HIV-1]
cagaaauacagaagcag

SEQ ID NO: 2398699 - RNA, 19 nt, Human immunodeficiency virus 1 [HIV-1]
guaucaacucaacugcugu

SEQ ID NO: 2398700 - RNA, 13 nt, Human immunodeficiency virus 1 [HIV-1]
ugagccugggagc

SEQ ID NO: 2398701 - RNA, 20 nt, Human immunodeficiency virus 1 [HIV-1]
ccguauccagagaggaccag

SEQ ID NO: 2398702 - RNA, 12 nt, Human immunodeficiency virus 1 [HIV-1]
cccaccucccaa

SEQ ID NO: 2398703 - RNA, 19 nt, Human immunodeficiency virus 1 [HIV-1]
aaguuuguuucauaacaaa

SEQ ID NO: 2398704 - RNA, 11 nt, Human immunodeficiency virus 1 [HIV-1]
augaacuccau

SEQ ID NO: 2398705 - RNA, 23 nt, Human immunodeficiency virus 1 [HIV-1]
ucuaaaagaaccaguacauggag

SEQ ID NO: 2398706 - RNA, 21 nt, Human immunodeficiency virus 1 [HIV-1]
aaaaccauaauaguacagcug

SEQ ID NO: 2398707 - RNA, 17 nt, Human immunodeficiency virus 1 [HIV-1]
aggaucaacagcuccug

SEQ ID NO: 2398708 - RNA, 15 nt, Human immunodeficiency virus 1 [HIV-1]
cacuuguggagaugg

SEQ ID NO: 2398709 - RNA, 17 nt, Human immunodeficiency virus 1 [HIV-1]
acuagcagcauuaauaa

SEQ ID NO: 2398710 - RNA, 21 nt, Human immunodeficiency virus 1 [HIV-1]
agcuaguaccaguugagccag

SEQ ID NO: 2398711 - RNA, 20 nt, Human immunodeficiency virus 1 [HIV-1]
uuagaccagaucugagccug

SEQ ID NO: 2398712 - RNA, 19 nt, Human immunodeficiency virus 1 [HIV-1]
ugaacacaucuguagaaau

SEQ ID NO: 2398713 - RNA, 15 nt, Human immunodeficiency virus 1 [HIV-1]
auguaauaauaagac

SEQ ID NO: 2398714 - RNA, 14 nt, Human immunodeficiency virus 1 [HIV-1]
cuauagugaauaga

SEQ ID NO: 2398715 - RNA, 14 nt, Human immunodeficiency virus 1 [HIV-1]
gcagauaggguggg

SEQ ID NO: 2398716 - RNA, 17 nt, Human immunodeficiency virus 1 [HIV-1]
gcagcagauaggguggg

SEQ ID NO: 2398717 - RNA, 17 nt, Human immunodeficiency virus 1 [HIV-1]
augucagcuaaaaggag

SEQ ID NO: 2398718 - RNA, 23 nt, Human immunodeficiency virus 1 [HIV-1]
acaccagggauuagauaucagua

SEQ ID NO: 2398719 - RNA, 16 nt, Human immunodeficiency virus 1 [HIV-1]
aucucuggaacagauu

SEQ ID NO: 2398720 - RNA, 16 nt, Human immunodeficiency virus 1 [HIV-1]
gagccugcaugggaug

SEQ ID NO: 2398721 - RNA, 19 nt, Human immunodeficiency virus 1 [HIV-1]
gagcuugcuacaagggacu

SEQ ID NO: 2398722 - RNA, 20 nt, Human immunodeficiency virus 1 [HIV-1]
aaguuuguggaauugguuua

SEQ ID NO: 2398723 - RNA, 21 nt, Human immunodeficiency virus 1 [HIV-1]
aaacaauaaucuuuaagcaau

SEQ ID NO: 2398724 - RNA, 13 nt, Human immunodeficiency virus 1 [HIV-1]
agcacuaacagaa

SEQ ID NO: 2398725 - RNA, 13 nt, Human immunodeficiency virus 1 [HIV-1]
gagccagcagcag

SEQ ID NO: 2398726 - RNA, 23 nt, Human immunodeficiency virus 1 [HIV-1]
auguuacuaauagaggaagacaa

SEQ ID NO: 2398727 - RNA, 22 nt, Human immunodeficiency virus 1 [HIV-1]
gacagagaaauuaacaauuaca

SEQ ID NO: 2398728 - RNA, 16 nt, Human immunodeficiency virus 1 [HIV-1]
uaccaguugagccaga

SEQ ID NO: 2398729 - RNA, 18 nt, Human immunodeficiency virus 1 [HIV-1]
augacccggagagagaag

SEQ ID NO: 2398730 - RNA, 15 nt, Human immunodeficiency virus 1 [HIV-1]
cugagccagcagcag

SEQ ID NO: 2398731 - RNA, 17 nt, Human immunodeficiency virus 1 [HIV-1]
guagcugaggggacaga

SEQ ID NO: 2398732 - RNA, 15 nt, Human immunodeficiency virus 1 [HIV-1]
aggaggggacccaga

SEQ ID NO: 2398733 - RNA, 15 nt, Human immunodeficiency virus 1 [HIV-1]
uagcaauacagcagc

SEQ ID NO: 2398734 - RNA, 14 nt, Human immunodeficiency virus 1 [HIV-1]
accaguuagagaaa

SEQ ID NO: 2398735 - RNA, 16 nt, Human immunodeficiency virus 1 [HIV-1]
aucuuaagacagcagu

SEQ ID NO: 2398736 - RNA, 18 nt, Human immunodeficiency virus 1 [HIV-1]
cagaagaagcagagcuag

SEQ ID NO: 2398737 - RNA, 19 nt, Human immunodeficiency virus 1 [HIV-1]
aaagcauaugauacagagg

SEQ ID NO: 2398738 - RNA, 16 nt, Human immunodeficiency virus 1 [HIV-1]
ggcacuuaucugggac

SEQ ID NO: 2398739 - RNA, 17 nt, Human immunodeficiency virus 1 [HIV-1]
agaaucuaugaauaaag

SEQ ID NO: 2398740 - RNA, 16 nt, Human immunodeficiency virus 1 [HIV-1]
ggcgcagccucaauga

SEQ ID NO: 2398741 - RNA, 20 nt, Human immunodeficiency virus 1 [HIV-1]
gaucugcggagccugugccu

SEQ ID NO: 2398742 - RNA, 18 nt, Human immunodeficiency virus 1 [HIV-1]
augagagugaaggagaaa

SEQ ID NO: 2398743 - RNA, 15 nt, Human immunodeficiency virus 1 [HIV-1]
gaggccaauaaagga

SEQ ID NO: 2398744 - RNA, 20 nt, Human immunodeficiency virus 1 [HIV-1]
agaaaggagagauaaaaaac

SEQ ID NO: 2398745 - RNA, 21 nt, Human immunodeficiency virus 1 [HIV-1]
acagaagaaaaaauaaaagca

SEQ ID NO: 2398746 - RNA, 15 nt, Human immunodeficiency virus 1 [HIV-1]
aaaauuagcaggaag

SEQ ID NO: 2398747 - RNA, 18 nt, Human immunodeficiency virus 1 [HIV-1]
aguaccaguugagccaga

SEQ ID NO: 2398748 - RNA, 18 nt, Human immunodeficiency virus 1 [HIV-1]
uauaaauauaaaguagua

SEQ ID NO: 2398749 - RNA, 15 nt, Human immunodeficiency virus 1 [HIV-1]
gauuagaaguaaaca

SEQ ID NO: 2398750 - RNA, 12 nt, Human immunodeficiency virus 1 [HIV-1]
ugcagagagaaa

SEQ ID NO: 2398751 - RNA, 21 nt, Human immunodeficiency virus 1 [HIV-1]
cuggcuaacuagggaacccac

SEQ ID NO: 2398752 - RNA, 16 nt, Human immunodeficiency virus 1 [HIV-1]
aguacauguaaugcaa

SEQ ID NO: 2398753 - RNA, 18 nt, Human immunodeficiency virus 1 [HIV-1]
ccaaccccgaggggaccc

SEQ ID NO: 2398754 - RNA, 13 nt, Human immunodeficiency virus 1 [HIV-1]
caauaguagcaau

SEQ ID NO: 2398755 - RNA, 23 nt, Human immunodeficiency virus 1 [HIV-1]
ccagaucugagccugggagcucu

SEQ ID NO: 2398756 - RNA, 13 nt, Human immunodeficiency virus 1 [HIV-1]
caugguggacaga

SEQ ID NO: 2398757 - RNA, 22 nt, Human immunodeficiency virus 1 [HIV-1]
auagugcugccagaaaaagaca

SEQ ID NO: 2398758 - RNA, 15 nt, Human immunodeficiency virus 1 [HIV-1]
agacuaauagaaaga

SEQ ID NO: 2398759 - RNA, 17 nt, Human immunodeficiency virus 1 [HIV-1]
guacacauuuagaagga

SEQ ID NO: 2398760 - RNA, 16 nt, Human immunodeficiency virus 1 [HIV-1]
gccaaguuuguuucau

SEQ ID NO: 2398761 - RNA, 20 nt, Human immunodeficiency virus 1 [HIV-1]
accagacaaaaaacaucaga

SEQ ID NO: 2398762 - RNA, 21 nt, Human immunodeficiency virus 1 [HIV-1]
agaacuggcagaaaacagaga

SEQ ID NO: 2398763 - RNA, 20 nt, Human immunodeficiency virus 1 [HIV-1]
aucaaauuuaucaagagcca

SEQ ID NO: 2398764 - RNA, 21 nt, Human immunodeficiency virus 1 [HIV-1]
gguauagugcagcagcagaac

SEQ ID NO: 2398765 - RNA, 14 nt, Human immunodeficiency virus 1 [HIV-1]
aggaccagcaaagc

SEQ ID NO: 2398766 - RNA, 21 nt, Human immunodeficiency virus 1 [HIV-1]
aaagugcacugauuugaagaa

SEQ ID NO: 2398767 - RNA, 20 nt, Human immunodeficiency virus 1 [HIV-1]
uuaacaagagauggugguaa

SEQ ID NO: 2398768 - RNA, 21 nt, Human immunodeficiency virus 1 [HIV-1]
gugacacaaucacccucccau

SEQ ID NO: 2398769 - RNA, 18 nt, Human immunodeficiency virus 1 [HIV-1]
uaguacaaggagcuugua

SEQ ID NO: 2398770 - RNA, 13 nt, Human immunodeficiency virus 1 [HIV-1]
auaagcagcugcu

SEQ ID NO: 2398771 - RNA, 19 nt, Human immunodeficiency virus 1 [HIV-1]
agacccaacaacaauacaa

SEQ ID NO: 2398772 - RNA, 20 nt, Human immunodeficiency virus 1 [HIV-1]
aaacagauagcuagcaaauu

SEQ ID NO: 2398773 - RNA, 17 nt, Human immunodeficiency virus 1 [HIV-1]
ucagacccaccucccaa

SEQ ID NO: 2398774 - RNA, 19 nt, Human immunodeficiency virus 1 [HIV-1]
acgcagggggugggaagcc

SEQ ID NO: 2398775 - RNA, 13 nt, Human immunodeficiency virus 1 [HIV-1]
gugguccauagua

SEQ ID NO: 2398776 - RNA, 13 nt, Human immunodeficiency virus 1 [HIV-1]
ggccauugacaga

SEQ ID NO: 2398777 - RNA, 20 nt, Human immunodeficiency virus 1 [HIV-1]
uacacccugugagccugcau

SEQ ID NO: 2398778 - RNA, 16 nt, Human immunodeficiency virus 1 [HIV-1]
cagucuagcagaagaa

SEQ ID NO: 2398779 - RNA, 13 nt, Human immunodeficiency virus 1 [HIV-1]
agaagaauaagac

SEQ ID NO: 2398780 - RNA, 12 nt, Human immunodeficiency virus 1 [HIV-1]
agcauaugauac

SEQ ID NO: 2398781 - RNA, 22 nt, Human immunodeficiency virus 1 [HIV-1]
aguggcgagcccucagauccug

SEQ ID NO: 2398782 - RNA, 21 nt, Human immunodeficiency virus 1 [HIV-1]
gauggaacaagccccagaaga

SEQ ID NO: 2398783 - RNA, 22 nt, Human immunodeficiency virus 1 [HIV-1]
agacuguaccaguaaaauuaaa

SEQ ID NO: 2398784 - RNA, 19 nt, Human immunodeficiency virus 1 [HIV-1]
aaacagauagcuagcaaau

SEQ ID NO: 2398785 - RNA, 16 nt, Human immunodeficiency virus 1 [HIV-1]
aaaaguuaaacaaugg

SEQ ID NO: 2398786 - RNA, 18 nt, Human immunodeficiency virus 1 [HIV-1]
gacaugguagaacagaug

SEQ ID NO: 2398787 - RNA, 19 nt, Human immunodeficiency virus 1 [HIV-1]
cagcuaccaccgcuugaga

SEQ ID NO: 2398788 - RNA, 19 nt, Human immunodeficiency virus 1 [HIV-1]
cagauagggugggagcagc

SEQ ID NO: 2398789 - RNA, 20 nt, Human immunodeficiency virus 1 [HIV-1]
acagucuggggcaucaagca

SEQ ID NO: 2398790 - RNA, 12 nt, Human immunodeficiency virus 1 [HIV-1]
acaauuggagaa

SEQ ID NO: 2398791 - RNA, 17 nt, Human immunodeficiency virus 1 [HIV-1]
acaacaauacaagaaaa

SEQ ID NO: 2398792 - RNA, 18 nt, Human immunodeficiency virus 1 [HIV-1]
uaaaguaguaaaaauuga

SEQ ID NO: 2398793 - RNA, 14 nt, Human immunodeficiency virus 1 [HIV-1]
gaucaacagcuccu

SEQ ID NO: 2398794 - RNA, 20 nt, Human immunodeficiency virus 1 [HIV-1]
ggaguaauaaaucucuggaa

SEQ ID NO: 2398795 - RNA, 13 nt, Human immunodeficiency virus 1 [HIV-1]
gagcugagccagc

SEQ ID NO: 2398796 - RNA, 21 nt, Human immunodeficiency virus 1 [HIV-1]
cugugguauauaaaauuauuc

SEQ ID NO: 2398797 - RNA, 15 nt, Human immunodeficiency virus 1 [HIV-1]
gagacaccagggauu

SEQ ID NO: 2398798 - RNA, 15 nt, Human immunodeficiency virus 1 [HIV-1]
uagaauauaggaaaa

SEQ ID NO: 2398799 - RNA, 14 nt, Human immunodeficiency virus 1 [HIV-1]
aauuacaaaaacaa

SEQ ID NO: 2398800 - RNA, 23 nt, Human immunodeficiency virus 1 [HIV-1]
agcaguagcugaggggacagaua

SEQ ID NO: 2398801 - RNA, 16 nt, Human immunodeficiency virus 1 [HIV-1]
gccugggagcucucug

SEQ ID NO: 2398802 - RNA, 14 nt, Human immunodeficiency virus 1 [HIV-1]
gcaucucgagaccu

SEQ ID NO: 2398803 - RNA, 17 nt, Human immunodeficiency virus 1 [HIV-1]
cuuuaaaacagauagcu

SEQ ID NO: 2398804 - RNA, 16 nt, Human immunodeficiency virus 1 [HIV-1]
auggcccaaaaguuaa

SEQ ID NO: 2398805 - RNA, 17 nt, Human immunodeficiency virus 1 [HIV-1]
cugcauauaagcagcug

SEQ ID NO: 2398806 - RNA, 18 nt, Human immunodeficiency virus 1 [HIV-1]
gggcaucaagcagcucca

SEQ ID NO: 2398807 - RNA, 15 nt, Human immunodeficiency virus 1 [HIV-1]
auggaggaaaaagag

SEQ ID NO: 2398808 - RNA, 18 nt, Human immunodeficiency virus 1 [HIV-1]
auggaggaaaaagagaua

SEQ ID NO: 2398809 - RNA, 18 nt, Human immunodeficiency virus 1 [HIV-1]
caguauuagaagaaauga

SEQ ID NO: 2398810 - RNA, 15 nt, Human immunodeficiency virus 1 [HIV-1]
uaaaauuaaagccag

SEQ ID NO: 2398811 - RNA, 13 nt, Human immunodeficiency virus 1 [HIV-1]
ugagacaagcaca

SEQ ID NO: 2398812 - RNA, 16 nt, Human immunodeficiency virus 1 [HIV-1]
caaucaaauaauagag

SEQ ID NO: 2398813 - RNA, 21 nt, Human immunodeficiency virus 1 [HIV-1]
ggcgagcccucagauccugca

SEQ ID NO: 2398814 - RNA, 17 nt, Human immunodeficiency virus 1 [HIV-1]
acaauuuuaaaagaaaa

SEQ ID NO: 2398815 - RNA, 15 nt, Human immunodeficiency virus 1 [HIV-1]
cucaggaggggaccc

SEQ ID NO: 2398816 - RNA, 23 nt, Human immunodeficiency virus 1 [HIV-1]
guaguaucaacucaacugcuguu

SEQ ID NO: 2398817 - RNA, 13 nt, Human immunodeficiency virus 1 [HIV-1]
aaaucucuggaac

SEQ ID NO: 2398818 - RNA, 13 nt, Human immunodeficiency virus 1 [HIV-1]
acccggagagaga

SEQ ID NO: 2398819 - RNA, 17 nt, Human immunodeficiency virus 1 [HIV-1]
gaccagaucugagccug

SEQ ID NO: 2398820 - RNA, 15 nt, Human immunodeficiency virus 1 [HIV-1]
gacagccgccuagca

SEQ ID NO: 2398821 - RNA, 20 nt, Human immunodeficiency virus 1 [HIV-1]
gcagaaaguaggaaaagcaa

SEQ ID NO: 2398822 - RNA, 17 nt, Human immunodeficiency virus 1 [HIV-1]
uacacaccagggccagg

SEQ ID NO: 2398823 - RNA, 18 nt, Human immunodeficiency virus 1 [HIV-1]
ugacaauggcagcaauuu

SEQ ID NO: 2398824 - RNA, 17 nt, Human immunodeficiency virus 1 [HIV-1]
agccugggagcucucug

SEQ ID NO: 2398825 - RNA, 15 nt, Human immunodeficiency virus 1 [HIV-1]
auuucacggacaaug

SEQ ID NO: 2398826 - RNA, 15 nt, Human immunodeficiency virus 1 [HIV-1]
cccugauuagcagaa

SEQ ID NO: 2398827 - RNA, 18 nt, Human immunodeficiency virus 1 [HIV-1]
aggagauaugagggacaa

SEQ ID NO: 2398828 - RNA, 19 nt, Human immunodeficiency virus 1 [HIV-1]
agccucaauaaagcuugcc

SEQ ID NO: 2398829 - RNA, 21 nt, Human immunodeficiency virus 1 [HIV-1]
caggauauguuacuaauagag

SEQ ID NO: 2398830 - RNA, 20 nt, Human immunodeficiency virus 1 [HIV-1]
aggaaaauaugcaagaauga

SEQ ID NO: 2398831 - RNA, 20 nt, Human immunodeficiency virus 1 [HIV-1]
agacauaauagcaacagaca

SEQ ID NO: 2398832 - RNA, 20 nt, Human immunodeficiency virus 1 [HIV-1]
ggaacuaaagaauagugcug

SEQ ID NO: 2398833 - RNA, 13 nt, Human immunodeficiency virus 1 [HIV-1]
auuaguagaaauu

SEQ ID NO: 2398834 - RNA, 20 nt, Human immunodeficiency virus 1 [HIV-1]
acuguaagggaaagaaugag

SEQ ID NO: 2398835 - RNA, 15 nt, Human immunodeficiency virus 1 [HIV-1]
gggaggcguggccug

SEQ ID NO: 2398836 - RNA, 15 nt, Human immunodeficiency virus 1 [HIV-1]
guggaacuucuggga

SEQ ID NO: 2398837 - RNA, 21 nt, Human immunodeficiency virus 1 [HIV-1]
gagagaaguguuagaguggag

SEQ ID NO: 2398838 - RNA, 19 nt, Human immunodeficiency virus 1 [HIV-1]
aggggcaguaguaauacaa

SEQ ID NO: 2398839 - RNA, 15 nt, Human immunodeficiency virus 1 [HIV-1]
ccacugcugugccuu

SEQ ID NO: 2398840 - RNA, 17 nt, Human immunodeficiency virus 1 [HIV-1]
accugccaccuguagua

SEQ ID NO: 2398841 - RNA, 13 nt, Human immunodeficiency virus 1 [HIV-1]
caacucacagucu

SEQ ID NO: 2398842 - RNA, 16 nt, Human immunodeficiency virus 1 [HIV-1]
gauuaaaguaaggcaa

SEQ ID NO: 2398843 - RNA, 15 nt, Human immunodeficiency virus 1 [HIV-1]
aucagaacagucaga

SEQ ID NO: 2398844 - RNA, 15 nt, Human immunodeficiency virus 1 [HIV-1]
agcaauacagcagcu

SEQ ID NO: 2398845 - RNA, 23 nt, Human immunodeficiency virus 1 [HIV-1]
agagagaaaaaagagcaguggga

SEQ ID NO: 2398846 - RNA, 19 nt, Human immunodeficiency virus 1 [HIV-1]
acagccauagcaguagcug

SEQ ID NO: 2398847 - RNA, 16 nt, Human immunodeficiency virus 1 [HIV-1]
gacuuacaaggcagcu

SEQ ID NO: 2398848 - RNA, 14 nt, Human immunodeficiency virus 1 [HIV-1]
ucugagccugggag

SEQ ID NO: 2398849 - RNA, 21 nt, Human immunodeficiency virus 1 [HIV-1]
guaauaccacuaacagaagaa

SEQ ID NO: 2398850 - RNA, 23 nt, Human immunodeficiency virus 1 [HIV-1]
gaaaaagaauccguauccagaga

SEQ ID NO: 2398851 - RNA, 21 nt, Human immunodeficiency virus 1 [HIV-1]
uaccaauaguagcaauaguag

SEQ ID NO: 2398852 - RNA, 16 nt, Human immunodeficiency virus 1 [HIV-1]
gacccggagagagaag

SEQ ID NO: 2398853 - RNA, 22 nt, Human immunodeficiency virus 1 [HIV-1]
uauagugcagcagcagaacaau

SEQ ID NO: 2398854 - RNA, 19 nt, Human immunodeficiency virus 1 [HIV-1]
cagauccugcauauaagca

SEQ ID NO: 2398855 - RNA, 13 nt, Human immunodeficiency virus 1 [HIV-1]
agaacaccagcuu

SEQ ID NO: 2398856 - RNA, 19 nt, Human immunodeficiency virus 1 [HIV-1]
agaggccaauaaaggagag

SEQ ID NO: 2398857 - RNA, 17 nt, Human immunodeficiency virus 1 [HIV-1]
aacaagaauuauuggaa

SEQ ID NO: 2398858 - RNA, 12 nt, Human immunodeficiency virus 1 [HIV-1]
gcagaaguuauu

SEQ ID NO: 2398859 - RNA, 19 nt, Human immunodeficiency virus 1 [HIV-1]
uagaacuggcagaaaacag

SEQ ID NO: 2398860 - RNA, 22 nt, Human immunodeficiency virus 1 [HIV-1]
ugauagacuaauagaaagagca

SEQ ID NO: 2398861 - RNA, 15 nt, Human immunodeficiency virus 1 [HIV-1]
auacaagaaaaagaa

SEQ ID NO: 2398862 - RNA, 18 nt, Human immunodeficiency virus 1 [HIV-1]
uagaagaggccaauaaag

SEQ ID NO: 2398863 - RNA, 15 nt, Human immunodeficiency virus 1 [HIV-1]
caucaagcagcucca

SEQ ID NO: 2398864 - RNA, 18 nt, Human immunodeficiency virus 1 [HIV-1]
auuagggauuauggaaaa

SEQ ID NO: 2398865 - RNA, 21 nt, Human immunodeficiency virus 1 [HIV-1]
caggaagucagccuaaaacug

SEQ ID NO: 2398866 - RNA, 13 nt, Human immunodeficiency virus 1 [HIV-1]
cucuucagcuacc

SEQ ID NO: 2398867 - RNA, 11 nt, Human immunodeficiency virus 1 [HIV-1]
gucucucuggu

SEQ ID NO: 2398868 - RNA, 22 nt, Human immunodeficiency virus 1 [HIV-1]
cacaguuuuaauuguggagggg

SEQ ID NO: 2398869 - RNA, 15 nt, Human immunodeficiency virus 1 [HIV-1]
agcuaguaccaguug

SEQ ID NO: 2398870 - RNA, 23 nt, Human immunodeficiency virus 1 [HIV-1]
cuccaggcaagaauccuggcugu

SEQ ID NO: 2398871 - RNA, 16 nt, Human immunodeficiency virus 1 [HIV-1]
uaaagaauuacaaaaa

SEQ ID NO: 2398872 - RNA, 13 nt, Human immunodeficiency virus 1 [HIV-1]
augcaagaaugag

SEQ ID NO: 2398873 - RNA, 21 nt, Human immunodeficiency virus 1 [HIV-1]
ccauccugauaaauggacagu

SEQ ID NO: 2398874 - RNA, 23 nt, Human immunodeficiency virus 1 [HIV-1]
ucccgcaggguuaaaaaagaaaa

SEQ ID NO: 2398875 - RNA, 23 nt, Human immunodeficiency virus 1 [HIV-1]
gauagcuagcaaauuaagagaac

SEQ ID NO: 2398876 - RNA, 14 nt, Human immunodeficiency virus 1 [HIV-1]
gcaaauuaagagaa

SEQ ID NO: 2398877 - RNA, 20 nt, Human immunodeficiency virus 1 [HIV-1]
auauaaaguaguaaaaauug

SEQ ID NO: 2398878 - RNA, 19 nt, Human immunodeficiency virus 1 [HIV-1]
cuauugaggcgcaacagca

SEQ ID NO: 2398879 - RNA, 21 nt, Human immunodeficiency virus 1 [HIV-1]
cuaauagaggaagacaaaaag

SEQ ID NO: 2398880 - RNA, 15 nt, Human immunodeficiency virus 1 [HIV-1]
gcuuaagccucaaua

SEQ ID NO: 2398881 - RNA, 16 nt, Human immunodeficiency virus 1 [HIV-1]
uguaugccccucccau

SEQ ID NO: 2398882 - RNA, 22 nt, Human immunodeficiency virus 1 [HIV-1]
uuaguaguagcaauaauaauag

SEQ ID NO: 2398883 - RNA, 18 nt, Human immunodeficiency virus 1 [HIV-1]
uacuaauaccaauaguag

SEQ ID NO: 2398884 - RNA, 18 nt, Human immunodeficiency virus 1 [HIV-1]
cugcauauaagcagcugc

SEQ ID NO: 2398885 - RNA, 15 nt, Human immunodeficiency virus 1 [HIV-1]
cagggauggaaagga

SEQ ID NO: 2398886 - RNA, 16 nt, Human immunodeficiency virus 1 [HIV-1]
gauacaguauuagaag

SEQ ID NO: 2398887 - RNA, 14 nt, Human immunodeficiency virus 1 [HIV-1]
cugagccagcagca

SEQ ID NO: 2398888 - RNA, 15 nt, Human immunodeficiency virus 1 [HIV-1]
uagacauaauagcaa

SEQ ID NO: 2398889 - RNA, 18 nt, Human immunodeficiency virus 1 [HIV-1]
aaagcuauagguacagua

SEQ ID NO: 2398890 - RNA, 22 nt, Human immunodeficiency virus 1 [HIV-1]
ugguuagaccagaucugagccu

SEQ ID NO: 2398891 - RNA, 22 nt, Human immunodeficiency virus 1 [HIV-1]
uuagaacauggaaaaguuuagu

SEQ ID NO: 2398892 - RNA, 15 nt, Human immunodeficiency virus 1 [HIV-1]
agaacaaaaauagag

SEQ ID NO: 2398893 - RNA, 21 nt, Human immunodeficiency virus 1 [HIV-1]
gcaaucacaaguagcaauaca

SEQ ID NO: 2398894 - RNA, 16 nt, Human immunodeficiency virus 1 [HIV-1]
agcugagccagcagca

SEQ ID NO: 2398895 - RNA, 14 nt, Human immunodeficiency virus 1 [HIV-1]
acaccaaaaaagau

SEQ ID NO: 2398896 - RNA, 15 nt, Human immunodeficiency virus 1 [HIV-1]
uaaagccauguguaa

SEQ ID NO: 2398897 - RNA, 15 nt, Human immunodeficiency virus 1 [HIV-1]
ugacauacagaaguu

SEQ ID NO: 2398898 - RNA, 18 nt, Human immunodeficiency virus 1 [HIV-1]
gcaaaaccagcaagaaaa

SEQ ID NO: 2398899 - RNA, 20 nt, Human immunodeficiency virus 1 [HIV-1]
uaauagcagaaauacagaag

SEQ ID NO: 2398900 - RNA, 20 nt, Human immunodeficiency virus 1 [HIV-1]
gcacaagaggaggaggaggu

SEQ ID NO: 2398901 - RNA, 13 nt, Human immunodeficiency virus 1 [HIV-1]
caaugccacagcc

SEQ ID NO: 2398902 - RNA, 24 nt, Human immunodeficiency virus 1 [HIV-1]
gaagucagccuaaaacugcuugua

SEQ ID NO: 2398903 - RNA, 12 nt, Human immunodeficiency virus 1 [HIV-1]
uggccugggcgg

SEQ ID NO: 2398904 - RNA, 20 nt, Human immunodeficiency virus 1 [HIV-1]
gauauccuugaucuguggau

SEQ ID NO: 2398905 - RNA, 16 nt, Human immunodeficiency virus 1 [HIV-1]
ccaguuagagaaagaa

SEQ ID NO: 2398906 - RNA, 23 nt, Human immunodeficiency virus 1 [HIV-1]
auucgauuagugaacggauccuu

SEQ ID NO: 2398907 - RNA, 15 nt, Human immunodeficiency virus 1 [HIV-1]
uaaccacagaaagca

SEQ ID NO: 2398908 - RNA, 24 nt, Human immunodeficiency virus 1 [HIV-1]
agaucugagccugggagcucucug

SEQ ID NO: 2398909 - RNA, 21 nt, Human immunodeficiency virus 1 [HIV-1]
uacuucaagaacugcugacau

SEQ ID NO: 2398910 - RNA, 21 nt, Human immunodeficiency virus 1 [HIV-1]
aacaugagaaauaucacagua

SEQ ID NO: 2398911 - RNA, 12 nt, Human immunodeficiency virus 1 [HIV-1]
ggagucaggaac

SEQ ID NO: 2398912 - RNA, 20 nt, Human immunodeficiency virus 1 [HIV-1]
agaccagaucugagccuggg

SEQ ID NO: 2398913 - RNA, 19 nt, Human immunodeficiency virus 1 [HIV-1]
auuagaacauggaaaaguu

SEQ ID NO: 2398914 - RNA, 13 nt, Human immunodeficiency virus 1 [HIV-1]
acaccagcuuguu

SEQ ID NO: 2398915 - RNA, 13 nt, Human immunodeficiency virus 1 [HIV-1]
aagacuuaauagc

SEQ ID NO: 2398916 - RNA, 13 nt, Human immunodeficiency virus 1 [HIV-1]
acagauagcuagc

SEQ ID NO: 2398917 - RNA, 16 nt, Human immunodeficiency virus 1 [HIV-1]
guacuucaagaacugc

SEQ ID NO: 2398918 - RNA, 20 nt, Human immunodeficiency virus 1 [HIV-1]
cagaucaaagugaaucagag

SEQ ID NO: 2398919 - RNA, 15 nt, Human immunodeficiency virus 1 [HIV-1]
auggagaaaggagag

SEQ ID NO: 2398920 - RNA, 14 nt, Human immunodeficiency virus 1 [HIV-1]
auggagccaguaga

SEQ ID NO: 2398921 - RNA, 21 nt, Human immunodeficiency virus 1 [HIV-1]
uuagagccuuuuagaaaacaa

SEQ ID NO: 2398922 - RNA, 17 nt, Human immunodeficiency virus 1 [HIV-1]
uaacgaggauuguggaa

SEQ ID NO: 2398923 - RNA, 17 nt, Human immunodeficiency virus 1 [HIV-1]
gggcaaguuuguggaau

SEQ ID NO: 2398924 - RNA, 17 nt, Human immunodeficiency virus 1 [HIV-1]
gacccagaaauuguaac

SEQ ID NO: 2398925 - RNA, 12 nt, Human immunodeficiency virus 1 [HIV-1]
cacaagaaguag

SEQ ID NO: 2398926 - RNA, 21 nt, Human immunodeficiency virus 1 [HIV-1]
ccuuggguucuugggagcagc

SEQ ID NO: 2398927 - RNA, 14 nt, Human immunodeficiency virus 1 [HIV-1]
aguggcgagcccuc

SEQ ID NO: 2398928 - RNA, 11 nt, Human immunodeficiency virus 1 [HIV-1]
gaccaaugacu

SEQ ID NO: 2398929 - RNA, 21 nt, Human immunodeficiency virus 1 [HIV-1]
ugaauugggcaagucagauuu

SEQ ID NO: 2398930 - RNA, 16 nt, Human immunodeficiency virus 1 [HIV-1]
gaaagaauaguagaca

SEQ ID NO: 2398931 - RNA, 18 nt, Human immunodeficiency virus 1 [HIV-1]
gaaaguaggaaaagcaau

SEQ ID NO: 2398932 - RNA, 14 nt, Human immunodeficiency virus 1 [HIV-1]
aaaacaaaauccag

SEQ ID NO: 2398933 - RNA, 15 nt, Human immunodeficiency virus 1 [HIV-1]
caguauuagaagaaa

SEQ ID NO: 2398934 - RNA, 14 nt, Human immunodeficiency virus 1 [HIV-1]
agcagaacuacaca

SEQ ID NO: 2398935 - RNA, 14 nt, Human immunodeficiency virus 1 [HIV-1]
uuggaagaaaucug

SEQ ID NO: 2398936 - RNA, 17 nt, Human immunodeficiency virus 1 [HIV-1]
gugcuuccacagggaug

SEQ ID NO: 2398937 - RNA, 23 nt, Human immunodeficiency virus 1 [HIV-1]
aaacugcccauacaaaaggaaac

SEQ ID NO: 2398938 - RNA, 12 nt, Human immunodeficiency virus 1 [HIV-1]
cuuggaaaggau

SEQ ID NO: 2398939 - RNA, 16 nt, Human immunodeficiency virus 1 [HIV-1]
auuaagacaaagaaaa

SEQ ID NO: 2398940 - RNA, 22 nt, Human immunodeficiency virus 1 [HIV-1]
cagacucugcuauaagaaaggc

SEQ ID NO: 2398941 - RNA, 21 nt, Human immunodeficiency virus 1 [HIV-1]
gguuagaccagaucugagccu

SEQ ID NO: 2398942 - RNA, 16 nt, Human immunodeficiency virus 1 [HIV-1]
agggccacagagggag

SEQ ID NO: 2398943 - RNA, 20 nt, Human immunodeficiency virus 1 [HIV-1]
agccugggagcucucuggcu

SEQ ID NO: 2398944 - RNA, 20 nt, Human immunodeficiency virus 1 [HIV-1]
cuaauagaggaagacaaaaa

SEQ ID NO: 2398945 - RNA, 13 nt, Human immunodeficiency virus 1 [HIV-1]
uagacuaauagaa

SEQ ID NO: 2398946 - RNA, 18 nt, Human immunodeficiency virus 1 [HIV-1]
aguaauaaaucucuggaa

SEQ ID NO: 2398947 - RNA, 22 nt, Human immunodeficiency virus 1 [HIV-1]
acagauaggguuauagaaguag

SEQ ID NO: 2398948 - RNA, 19 nt, Human immunodeficiency virus 1 [HIV-1]
cagagcuagaacuggcaga

SEQ ID NO: 2398949 - RNA, 14 nt, Human immunodeficiency virus 1 [HIV-1]
gacagagacagauc

SEQ ID NO: 2398950 - RNA, 21 nt, Human immunodeficiency virus 1 [HIV-1]
ucaucacguggcccgagagcu

SEQ ID NO: 2398951 - RNA, 18 nt, Human immunodeficiency virus 1 [HIV-1]
caguagcugaggggacag

SEQ ID NO: 2398952 - RNA, 19 nt, Human immunodeficiency virus 1 [HIV-1]
gagaucuucagaccuggag

SEQ ID NO: 2398953 - RNA, 16 nt, Human immunodeficiency virus 1 [HIV-1]
augaguuugccaggaa

SEQ ID NO: 2398954 - RNA, 13 nt, Human immunodeficiency virus 1 [HIV-1]
cguggccugggcg

SEQ ID NO: 2398955 - RNA, 14 nt, Human immunodeficiency virus 1 [HIV-1]
ugaggcgcaacagc

SEQ ID NO: 2398956 - RNA, 22 nt, Human immunodeficiency virus 1 [HIV-1]
ugagacgagcugagccagcagc

SEQ ID NO: 2398957 - RNA, 20 nt, Human immunodeficiency virus 1 [HIV-1]
auaagagguaaggugcagaa

SEQ ID NO: 2398958 - RNA, 23 nt, Human immunodeficiency virus 1 [HIV-1]
caggcccgaaggaauagaagaag

SEQ ID NO: 2398959 - RNA, 22 nt, Human immunodeficiency virus 1 [HIV-1]
uauccacugaccuuuggauggu

SEQ ID NO: 2398960 - RNA, 15 nt, Human immunodeficiency virus 1 [HIV-1]
gcaaauuaagagaac

SEQ ID NO: 2398961 - RNA, 19 nt, Human immunodeficiency virus 1 [HIV-1]
accuggauggagugggaca

SEQ ID NO: 2398962 - RNA, 16 nt, Human immunodeficiency virus 1 [HIV-1]
uggaaucuccuacagu

SEQ ID NO: 2398963 - RNA, 15 nt, Human immunodeficiency virus 1 [HIV-1]
gaagcacaagaggag

SEQ ID NO: 2398964 - RNA, 15 nt, Human immunodeficiency virus 1 [HIV-1]
ccagaucugagccug

SEQ ID NO: 2398965 - RNA, 19 nt, Human immunodeficiency virus 1 [HIV-1]
agauccugcauauaagcag

SEQ ID NO: 2398966 - RNA, 18 nt, Human immunodeficiency virus 1 [HIV-1]
ccugauuagcagaacuac

SEQ ID NO: 2398967 - RNA, 21 nt, Human immunodeficiency virus 1 [HIV-1]
acuuacaaggcagcuguagau

SEQ ID NO: 2398968 - RNA, 23 nt, Human immunodeficiency virus 1 [HIV-1]
agccaguggauauauagaagcag

SEQ ID NO: 2398969 - RNA, 14 nt, Human immunodeficiency virus 1 [HIV-1]
cuguguggaaggaa

SEQ ID NO: 2398970 - RNA, 16 nt, Human immunodeficiency virus 1 [HIV-1]
cagaucugagccuggg

SEQ ID NO: 2398971 - RNA, 22 nt, Human immunodeficiency virus 1 [HIV-1]
gauaaagccaccuuugccuagu

SEQ ID NO: 2398972 - RNA, 19 nt, Human immunodeficiency virus 1 [HIV-1]
cuguacugggucucucugg

SEQ ID NO: 2398973 - RNA, 20 nt, Human immunodeficiency virus 1 [HIV-1]
ugggaagcccucaaauauug

SEQ ID NO: 2398974 - RNA, 20 nt, Human immunodeficiency virus 1 [HIV-1]
uaacaaauuggcugugguau

SEQ ID NO: 2398975 - RNA, 19 nt, Human immunodeficiency virus 1 [HIV-1]
uaauacacuccuuaauuga

SEQ ID NO: 2398976 - RNA, 13 nt, Human immunodeficiency virus 1 [HIV-1]
uccagucacaccu

SEQ ID NO: 2398977 - RNA, 21 nt, Human immunodeficiency virus 1 [HIV-1]
uaaauggcagucuagcagaag

SEQ ID NO: 2398978 - RNA, 15 nt, Human immunodeficiency virus 1 [HIV-1]
cacugaccuuuggau

SEQ ID NO: 2398979 - RNA, 17 nt, Human immunodeficiency virus 1 [HIV-1]
ucuggcuaacuagggaa

SEQ ID NO: 2398980 - RNA, 14 nt, Human immunodeficiency virus 1 [HIV-1]
auaauaaaacaaua

SEQ ID NO: 2398981 - RNA, 18 nt, Human immunodeficiency virus 1 [HIV-1]
caguaaguaguacaugua

SEQ ID NO: 2398982 - RNA, 15 nt, Human immunodeficiency virus 1 [HIV-1]
cauagaauauaggaa

SEQ ID NO: 2398983 - RNA, 15 nt, Human immunodeficiency virus 1 [HIV-1]
gauuagcagaacuac

SEQ ID NO: 2398984 - RNA, 13 nt, Human immunodeficiency virus 1 [HIV-1]
gggcgggacuggg

SEQ ID NO: 2398985 - RNA, 19 nt, Human immunodeficiency virus 1 [HIV-1]
aagaguggugcagagagaa

SEQ ID NO: 2398986 - RNA, 17 nt, Human immunodeficiency virus 1 [HIV-1]
cgggaaucaagcaggaa

SEQ ID NO: 2398987 - RNA, 19 nt, Human immunodeficiency virus 1 [HIV-1]
ugcauccggaguacuucaa

SEQ ID NO: 2398988 - RNA, 14 nt, Human immunodeficiency virus 1 [HIV-1]
gagccagcagcaga

SEQ ID NO: 2398989 - RNA, 20 nt, Human immunodeficiency virus 1 [HIV-1]
auagaggaagacaaaaaguu

SEQ ID NO: 2398990 - RNA, 18 nt, Human immunodeficiency virus 1 [HIV-1]
augagacgagcugagcca

SEQ ID NO: 2398991 - RNA, 21 nt, Human immunodeficiency virus 1 [HIV-1]
agcagcagauagggugggagc

SEQ ID NO: 2398992 - RNA, 18 nt, Human immunodeficiency virus 1 [HIV-1]
uaacacuuuaaaacagau

SEQ ID NO: 2398993 - RNA, 13 nt, Human immunodeficiency virus 1 [HIV-1]
acaggaccaugua

SEQ ID NO: 2398994 - RNA, 16 nt, Human immunodeficiency virus 1 [HIV-1]
aaagcuugccuugagu

SEQ ID NO: 2398995 - RNA, 14 nt, Human immunodeficiency virus 1 [HIV-1]
agagguacauaaug

SEQ ID NO: 2398996 - RNA, 21 nt, Human immunodeficiency virus 1 [HIV-1]
cagaggagagcaagaaaugga

SEQ ID NO: 2398997 - RNA, 19 nt, Human immunodeficiency virus 1 [HIV-1]
ucaaucaaauaauagagca

SEQ ID NO: 2398998 - RNA, 18 nt, Human immunodeficiency virus 1 [HIV-1]
agggcuaauucacuccca

SEQ ID NO: 2398999 - RNA, 14 nt, Human immunodeficiency virus 1 [HIV-1]
uaugccccucccau

SEQ ID NO: 2399000 - RNA, 20 nt, Human immunodeficiency virus 1 [HIV-1]
ccaguggauauauagaagca

SEQ ID NO: 2399001 - RNA, 15 nt, Human immunodeficiency virus 1 [HIV-1]
aaauauuacagggcu

SEQ ID NO: 2399002 - RNA, 19 nt, Human immunodeficiency virus 1 [HIV-1]
uuuagaaggaaaaguuauc

SEQ ID NO: 2399003 - RNA, 19 nt, Human immunodeficiency virus 1 [HIV-1]
gcaacagcaucuguugcaa

SEQ ID NO: 2399004 - RNA, 18 nt, Human immunodeficiency virus 1 [HIV-1]
gcacaagcauaagaggua

SEQ ID NO: 2399005 - RNA, 18 nt, Human immunodeficiency virus 1 [HIV-1]
uggggacuuuccagggag

SEQ ID NO: 2399006 - RNA, 20 nt, Human immunodeficiency virus 1 [HIV-1]
gaacuacacaccagggccag

SEQ ID NO: 2399007 - RNA, 16 nt, Human immunodeficiency virus 1 [HIV-1]
auauguuacuaauaga

SEQ ID NO: 2399008 - RNA, 22 nt, Human immunodeficiency virus 1 [HIV-1]
agaaaauuuuaacauguggaaa

SEQ ID NO: 2399009 - RNA, 13 nt, Human immunodeficiency virus 1 [HIV-1]
uaccuagaagaau

SEQ ID NO: 2399010 - RNA, 20 nt, Human immunodeficiency virus 1 [HIV-1]
cgaagagcucaucagaacag

SEQ ID NO: 2399011 - RNA, 21 nt, Human immunodeficiency virus 1 [HIV-1]
auuaauaacaccaaaaaagau

SEQ ID NO: 2399012 - RNA, 16 nt, Human immunodeficiency virus 1 [HIV-1]
cacuuuaaaacagaua

SEQ ID NO: 2399013 - RNA, 17 nt, Human immunodeficiency virus 1 [HIV-1]
gccucuucagcuaccac

SEQ ID NO: 2399014 - RNA, 16 nt, Human immunodeficiency virus 1 [HIV-1]
augucagcuaaaagga

SEQ ID NO: 2399015 - RNA, 20 nt, Human immunodeficiency virus 1 [HIV-1]
caauggaacaggaccaugua

SEQ ID NO: 2399016 - RNA, 16 nt, Human immunodeficiency virus 1 [HIV-1]
agggagucuccauaga

SEQ ID NO: 2399017 - RNA, 18 nt, Human immunodeficiency virus 1 [HIV-1]
uagaccagaucugagccu

SEQ ID NO: 2399018 - RNA, 22 nt, Human immunodeficiency virus 1 [HIV-1]
auccugcauauaagcagcugcu

SEQ ID NO: 2399019 - RNA, 18 nt, Human immunodeficiency virus 1 [HIV-1]
ccucaggaggggacccag

SEQ ID NO: 2399020 - RNA, 15 nt, Human immunodeficiency virus 1 [HIV-1]
acuuaauaagagaac

SEQ ID NO: 2399021 - RNA, 23 nt, Human immunodeficiency virus 1 [HIV-1]
ugcugacaucgagcuugcuacaa

SEQ ID NO: 2399022 - RNA, 14 nt, Human immunodeficiency virus 1 [HIV-1]
agacauaauagcaa

SEQ ID NO: 2399023 - RNA, 23 nt, Human immunodeficiency virus 1 [HIV-1]
ggggauuugggguugcucuggaa

SEQ ID NO: 2399024 - RNA, 17 nt, Human immunodeficiency virus 1 [HIV-1]
accaccgcuugagagac

SEQ ID NO: 2399025 - RNA, 17 nt, Human immunodeficiency virus 1 [HIV-1]
gacuaauagaaagagca

SEQ ID NO: 2399026 - RNA, 22 nt, Human immunodeficiency virus 1 [HIV-1]
auugguuuaacauaacaaauug

SEQ ID NO: 2399027 - RNA, 16 nt, Human immunodeficiency virus 1 [HIV-1]
ggcaaugagagugaag

SEQ ID NO: 2399028 - RNA, 18 nt, Human immunodeficiency virus 1 [HIV-1]
ugggguaccuguguggaa

SEQ ID NO: 2399029 - RNA, 22 nt, Human immunodeficiency virus 1 [HIV-1]
cuacuucccugauuagcagaac

SEQ ID NO: 2399030 - RNA, 16 nt, Human immunodeficiency virus 1 [HIV-1]
gugaauaucaagcagg

SEQ ID NO: 2399031 - RNA, 16 nt, Human immunodeficiency virus 1 [HIV-1]
gcaggaagaagcggag

SEQ ID NO: 2399032 - RNA, 17 nt, Human immunodeficiency virus 1 [HIV-1]
gccaggggucagauauc

SEQ ID NO: 2399033 - RNA, 21 nt, Human immunodeficiency virus 1 [HIV-1]
gaacaagccccagaagaccaa

SEQ ID NO: 2399034 - RNA, 16 nt, Human immunodeficiency virus 1 [HIV-1]
cuggcuguggaaagau

SEQ ID NO: 2399035 - RNA, 14 nt, Human immunodeficiency virus 1 [HIV-1]
cauguggaaaaaug

SEQ ID NO: 2399036 - RNA, 12 nt, Human immunodeficiency virus 1 [HIV-1]
agcagcaggaag

SEQ ID NO: 2399037 - RNA, 14 nt, Human immunodeficiency virus 1 [HIV-1]
gggaacccacugcu

SEQ ID NO: 2399038 - RNA, 22 nt, Human immunodeficiency virus 1 [HIV-1]
aucccgcaggguuaaaaaagaa

SEQ ID NO: 2399039 - RNA, 13 nt, Human immunodeficiency virus 1 [HIV-1]
uagcagaaauaca

SEQ ID NO: 2399040 - RNA, 19 nt, Human immunodeficiency virus 1 [HIV-1]
cuacuucccugauuagcag

SEQ ID NO: 2399041 - RNA, 18 nt, Human immunodeficiency virus 1 [HIV-1]
agaggccaauaaaggaga

SEQ ID NO: 2399042 - RNA, 18 nt, Human immunodeficiency virus 1 [HIV-1]
agacaguaugaucagaua

SEQ ID NO: 2399043 - RNA, 14 nt, Human immunodeficiency virus 1 [HIV-1]
agauagggugggag

SEQ ID NO: 2399044 - RNA, 16 nt, Human immunodeficiency virus 1 [HIV-1]
aacauguggcagaaag

SEQ ID NO: 2399045 - RNA, 19 nt, Human immunodeficiency virus 1 [HIV-1]
agaaauuguaacgcacagu

SEQ ID NO: 2399046 - RNA, 18 nt, Human immunodeficiency virus 1 [HIV-1]
cuucccugauuagcagaa

SEQ ID NO: 2399047 - RNA, 15 nt, Human immunodeficiency virus 1 [HIV-1]
cagaacuacacacca

SEQ ID NO: 2399048 - RNA, 15 nt, Human immunodeficiency virus 1 [HIV-1]
auguggcagaaagua

SEQ ID NO: 2399049 - RNA, 18 nt, Human immunodeficiency virus 1 [HIV-1]
ggacuuuccgcuggggac

SEQ ID NO: 2399050 - RNA, 19 nt, Human immunodeficiency virus 1 [HIV-1]
cgcaggguuaaaaaagaaa

SEQ ID NO: 2399051 - RNA, 16 nt, Human immunodeficiency virus 1 [HIV-1]
gaugacccggagagag

SEQ ID NO: 2399052 - RNA, 14 nt, Human immunodeficiency virus 1 [HIV-1]
acucgacagaggag

SEQ ID NO: 2399053 - RNA, 15 nt, Human immunodeficiency virus 1 [HIV-1]
cuggcuagaagcaca

SEQ ID NO: 2399054 - RNA, 16 nt, Human immunodeficiency virus 1 [HIV-1]
guggaacuucugggac

SEQ ID NO: 2399055 - RNA, 17 nt, Human immunodeficiency virus 1 [HIV-1]
caaucacaaguagcaau

SEQ ID NO: 2399056 - RNA, 22 nt, Human immunodeficiency virus 1 [HIV-1]
gcacugauuugaagaaugauac

SEQ ID NO: 2399057 - RNA, 18 nt, Human immunodeficiency virus 1 [HIV-1]
gacaaguagacuguaguc

SEQ ID NO: 2399058 - RNA, 18 nt, Human immunodeficiency virus 1 [HIV-1]
acaaguagcaauacagca

SEQ ID NO: 2399059 - RNA, 13 nt, Human immunodeficiency virus 1 [HIV-1]
ccacuaacagaag

SEQ ID NO: 2399060 - RNA, 16 nt, Human immunodeficiency virus 1 [HIV-1]
cuaauagaaagagcag

SEQ ID NO: 2399061 - RNA, 13 nt, Human immunodeficiency virus 1 [HIV-1]
cauagaacaaaaa

SEQ ID NO: 2399062 - RNA, 14 nt, Human immunodeficiency virus 1 [HIV-1]
aggagaaauaucag

SEQ ID NO: 2399063 - RNA, 20 nt, Human immunodeficiency virus 1 [HIV-1]
acuagagcuuuuagaggagc

SEQ ID NO: 2399064 - RNA, 23 nt, Human immunodeficiency virus 1 [HIV-1]
uggcaggaagaagcggagacagc

SEQ ID NO: 2399065 - RNA, 20 nt, Human immunodeficiency virus 1 [HIV-1]
ccaaagaagacaagauaucc

SEQ ID NO: 2399066 - RNA, 15 nt, Human immunodeficiency virus 1 [HIV-1]
cacaaguagcaauac

SEQ ID NO: 2399067 - RNA, 17 nt, Human immunodeficiency virus 1 [HIV-1]
gaaugagacgagcugag

SEQ ID NO: 2399068 - RNA, 13 nt, Human immunodeficiency virus 1 [HIV-1]
gaaaaaagagcag

SEQ ID NO: 2399069 - RNA, 15 nt, Human immunodeficiency virus 1 [HIV-1]
agaccagaucugagc

SEQ ID NO: 2399070 - RNA, 17 nt, Human immunodeficiency virus 1 [HIV-1]
guaccaguugagccaga

SEQ ID NO: 2399071 - RNA, 16 nt, Human immunodeficiency virus 1 [HIV-1]
uaaucauagaauauag

SEQ ID NO: 2399072 - RNA, 13 nt, Human immunodeficiency virus 1 [HIV-1]
acaagaauuauug

SEQ ID NO: 2399073 - RNA, 13 nt, Human immunodeficiency virus 1 [HIV-1]
ucauagaaaucug

SEQ ID NO: 2399074 - RNA, 17 nt, Human immunodeficiency virus 1 [HIV-1]
acgaucugcggagccug

SEQ ID NO: 2399075 - RNA, 20 nt, Human immunodeficiency virus 1 [HIV-1]
gaaaaaauaaaagcauuagu

SEQ ID NO: 2399076 - RNA, 23 nt, Human immunodeficiency virus 1 [HIV-1]
auggccuacuguaagggaaagaa

SEQ ID NO: 2399077 - RNA, 13 nt, Human immunodeficiency virus 1 [HIV-1]
ucagaacagucag

SEQ ID NO: 2399078 - RNA, 18 nt, Human immunodeficiency virus 1 [HIV-1]
ucaagcaggacauaacaa

SEQ ID NO: 2399079 - RNA, 14 nt, Human immunodeficiency virus 1 [HIV-1]
aggaccauguacaa

SEQ ID NO: 2399080 - RNA, 16 nt, Human immunodeficiency virus 1 [HIV-1]
uaauuggagagcaaug

SEQ ID NO: 2399081 - RNA, 17 nt, Human immunodeficiency virus 1 [HIV-1]
guuagcuugcucaaugc

SEQ ID NO: 2399082 - RNA, 13 nt, Human immunodeficiency virus 1 [HIV-1]
gauuagcagaacu

SEQ ID NO: 2399083 - RNA, 16 nt, Human immunodeficiency virus 1 [HIV-1]
cagggcuuggaaagga

SEQ ID NO: 2399084 - RNA, 21 nt, Human immunodeficiency virus 1 [HIV-1]
cucagauccugcauauaagca

SEQ ID NO: 2399085 - RNA, 13 nt, Human immunodeficiency virus 1 [HIV-1]
acccugugagccu

SEQ ID NO: 2399086 - RNA, 23 nt, Human immunodeficiency virus 1 [HIV-1]
auacagcagcuaccaaugcugcu

SEQ ID NO: 2399087 - RNA, 19 nt, Human immunodeficiency virus 1 [HIV-1]
gaagaguggugcagagaga

SEQ ID NO: 2399088 - RNA, 21 nt, Human immunodeficiency virus 1 [HIV-1]
cagauaggguuauagaaguag

SEQ ID NO: 2399089 - RNA, 21 nt, Human immunodeficiency virus 1 [HIV-1]
cagcagauagggugggagcag

SEQ ID NO: 2399090 - RNA, 15 nt, Human immunodeficiency virus 1 [HIV-1]
gaggcguggccuggg

SEQ ID NO: 2399091 - RNA, 22 nt, Human immunodeficiency virus 1 [HIV-1]
cacaaguagcaauacagcagcu

SEQ ID NO: 2399092 - RNA, 22 nt, Human immunodeficiency virus 1 [HIV-1]
cagaaauccacuuuggaaagga

SEQ ID NO: 2399093 - RNA, 14 nt, Human immunodeficiency virus 1 [HIV-1]
ugcaugggauggau

SEQ ID NO: 2399094 - RNA, 15 nt, Human immunodeficiency virus 1 [HIV-1]
auugacagaagaaaa

SEQ ID NO: 2399095 - RNA, 20 nt, Human immunodeficiency virus 1 [HIV-1]
acaucagaaagaaccuccau

SEQ ID NO: 2399096 - RNA, 13 nt, Human immunodeficiency virus 1 [HIV-1]
cgaaggaauagaa

SEQ ID NO: 2399097 - RNA, 12 nt, Human immunodeficiency virus 1 [HIV-1]
cagcagcagaac

SEQ ID NO: 2399098 - RNA, 13 nt, Human immunodeficiency virus 1 [HIV-1]
caaauuaagagaa

SEQ ID NO: 2399099 - RNA, 22 nt, Human immunodeficiency virus 1 [HIV-1]
aaagaauagugcuguuagcuug

SEQ ID NO: 2399100 - RNA, 15 nt, Human immunodeficiency virus 1 [HIV-1]
gaucugagccuggga

SEQ ID NO: 2399101 - RNA, 18 nt, Human immunodeficiency virus 1 [HIV-1]
ccuuuuagaaaacaaaau

SEQ ID NO: 2399102 - RNA, 18 nt, Human immunodeficiency virus 1 [HIV-1]
agguauccuuugagccaa

SEQ ID NO: 2399103 - RNA, 23 nt, Human immunodeficiency virus 1 [HIV-1]
ggaauaacacuuuaaaacagaua

SEQ ID NO: 2399104 - RNA, 17 nt, Human immunodeficiency virus 1 [HIV-1]
augagagugaaggagaa

SEQ ID NO: 2399105 - RNA, 15 nt, Human immunodeficiency virus 1 [HIV-1]
aaauaugcaagaaug

SEQ ID NO: 2399106 - RNA, 18 nt, Human immunodeficiency virus 1 [HIV-1]
cccugugagccugcaugg

SEQ ID NO: 2399107 - RNA, 23 nt, Human immunodeficiency virus 1 [HIV-1]
cauggguaccagcacacaaagga

SEQ ID NO: 2399108 - RNA, 18 nt, Human immunodeficiency virus 1 [HIV-1]
cuauaccaauaguagcaa

SEQ ID NO: 2399109 - RNA, 11 nt, Human immunodeficiency virus 1 [HIV-1]
ugcugugccuu

SEQ ID NO: 2399110 - RNA, 23 nt, Human immunodeficiency virus 1 [HIV-1]
ccuggggauuugggguugcucug

SEQ ID NO: 2399111 - RNA, 22 nt, Human immunodeficiency virus 1 [HIV-1]
aguggcaaugagagugaaggag

SEQ ID NO: 2399112 - RNA, 13 nt, Human immunodeficiency virus 1 [HIV-1]
aagaagguggaga

SEQ ID NO: 2399113 - RNA, 21 nt, Human immunodeficiency virus 1 [HIV-1]
augaauaaagaauuaaagaaa

SEQ ID NO: 2399114 - RNA, 13 nt, Human immunodeficiency virus 1 [HIV-1]
uuaagaccaauga

SEQ ID NO: 2399115 - RNA, 17 nt, Human immunodeficiency virus 2 (HIV-2)
aguaccacggagagaaa

SEQ ID NO: 2399116 - RNA, 14 nt, Human immunodeficiency virus 2 (HIV-2)
ggcagacggcucca

SEQ ID NO: 2399117 - RNA, 15 nt, Human immunodeficiency virus 2 (HIV-2)
gauguagauucugau

SEQ ID NO: 2399118 - RNA, 20 nt, Human immunodeficiency virus 2 (HIV-2)
accggggacagccagccaac

SEQ ID NO: 2399119 - RNA, 20 nt, Human immunodeficiency virus 2 (HIV-2)
uccuugcccagcugcaccga

SEQ ID NO: 2399120 - RNA, 15 nt, Human immunodeficiency virus 2 (HIV-2)
gucuguuaggacccu

SEQ ID NO: 2399121 - RNA, 13 nt, Human immunodeficiency virus 2 (HIV-2)
ucaggcagggagc

SEQ ID NO: 2399122 - RNA, 23 nt, Human immunodeficiency virus 2 (HIV-2)
caacagauccauauccacaagga

SEQ ID NO: 2399123 - RNA, 18 nt, Human immunodeficiency virus 2 (HIV-2)
uggcaggagugggagaaa

SEQ ID NO: 2399124 - RNA, 14 nt, Human immunodeficiency virus 2 (HIV-2)
gauagugcagcaac

SEQ ID NO: 2399125 - RNA, 24 nt, Human immunodeficiency virus 2 (HIV-2)
cggagaggcuggcagaucgagccc

SEQ ID NO: 2399126 - RNA, 22 nt, Human immunodeficiency virus 2 (HIV-2)
auacagugcuugccagacaaug

SEQ ID NO: 2399127 - RNA, 20 nt, Human immunodeficiency virus 2 (HIV-2)
cauaugagcgaaagggcaga

SEQ ID NO: 2399128 - RNA, 17 nt, Human immunodeficiency virus 2 (HIV-2)
auucaauauggagugca

SEQ ID NO: 2399129 - RNA, 18 nt, Human immunodeficiency virus 2 (HIV-2)
ggaagccaugcaggaggu

SEQ ID NO: 2399130 - RNA, 19 nt, Human immunodeficiency virus 2 (HIV-2)
cuaugagguuuagauacug

SEQ ID NO: 2399131 - RNA, 14 nt, Human immunodeficiency virus 2 (HIV-2)
uaguaguacaacaa

SEQ ID NO: 2399132 - RNA, 21 nt, Human immunodeficiency virus 2 (HIV-2)
gcagccuccauaauaaaugaa

SEQ ID NO: 2399133 - RNA, 19 nt, Human immunodeficiency virus 2 (HIV-2)
acagaggcuuuugaugcau

SEQ ID NO: 2399134 - RNA, 14 nt, Human immunodeficiency virus 2 (HIV-2)
uccugauccaccua

SEQ ID NO: 2399135 - RNA, 12 nt, Human immunodeficiency virus 2 (HIV-2)
aacaaggagaag

SEQ ID NO: 2399136 - RNA, 14 nt, Human immunodeficiency virus 2 (HIV-2)
cgguacugggcaga

SEQ ID NO: 2399137 - RNA, 15 nt, Human immunodeficiency virus 2 (HIV-2)
agucgcucugcggag

SEQ ID NO: 2399138 - RNA, 20 nt, Human immunodeficiency virus 2 (HIV-2)
gcaccuacagaucagagaag

SEQ ID NO: 2399139 - RNA, 17 nt, Human immunodeficiency virus 2 (HIV-2)
gcaacagaaagacagaa

SEQ ID NO: 2399140 - RNA, 17 nt, Human immunodeficiency virus 2 (HIV-2)
acaagaaaagaauaugu

SEQ ID NO: 2399141 - RNA, 18 nt, Human immunodeficiency virus 2 (HIV-2)
gccuggguguucccugcu

SEQ ID NO: 2399142 - RNA, 23 nt, Human immunodeficiency virus 2 (HIV-2)
gcacaagucaggauugccagaga

SEQ ID NO: 2399143 - RNA, 13 nt, Human immunodeficiency virus 2 (HIV-2)
aaguaagaagagc

SEQ ID NO: 2399144 - RNA, 19 nt, Human immunodeficiency virus 2 (HIV-2)
ucacucuguacccagaaga

SEQ ID NO: 2399145 - RNA, 19 nt, Human immunodeficiency virus 2 (HIV-2)
ggaaacaguggagaagaga

SEQ ID NO: 2399146 - RNA, 16 nt, Human immunodeficiency virus 2 (HIV-2)
cuuaguacacccagca

SEQ ID NO: 2399147 - RNA, 16 nt, Human immunodeficiency virus 2 (HIV-2)
uauaccuagaaaaaga

SEQ ID NO: 2399148 - RNA, 20 nt, Human immunodeficiency virus 2 (HIV-2)
ucccuuauuuugugcaacua

SEQ ID NO: 2399149 - RNA, 13 nt, Human immunodeficiency virus 2 (HIV-2)
ccuagaaaaagag

SEQ ID NO: 2399150 - RNA, 18 nt, Human immunodeficiency virus 2 (HIV-2)
gacaagugaguauggagc

SEQ ID NO: 2399151 - RNA, 12 nt, Human immunodeficiency virus 2 (HIV-2)
ccuagggaaggg

SEQ ID NO: 2399152 - RNA, 16 nt, Human immunodeficiency virus 2 (HIV-2)
gggacuuagggaguga

SEQ ID NO: 2399153 - RNA, 18 nt, Human immunodeficiency virus 2 (HIV-2)
gcaaugugaguucaauau

SEQ ID NO: 2399154 - RNA, 20 nt, Human immunodeficiency virus 2 (HIV-2)
gacagcaguaucagcaggga

SEQ ID NO: 2399155 - RNA, 18 nt, Human immunodeficiency virus 2 (HIV-2)
aacccagcaacagaaaga

SEQ ID NO: 2399156 - RNA, 22 nt, Human immunodeficiency virus 2 (HIV-2)
gacagcaguaucagcagggaga

SEQ ID NO: 2399157 - RNA, 17 nt, Human immunodeficiency virus 2 (HIV-2)
cgaguggauccaagaag

SEQ ID NO: 2399158 - RNA, 21 nt, Human immunodeficiency virus 2 (HIV-2)
gagacuuacuauccaagaacu

SEQ ID NO: 2399159 - RNA, 13 nt, Human immunodeficiency virus 2 (HIV-2)
agaguacaugaac

SEQ ID NO: 2399160 - RNA, 16 nt, Human immunodeficiency virus 2 (HIV-2)
gacucucaccaguacu

SEQ ID NO: 2399161 - RNA, 18 nt, Human immunodeficiency virus 2 (HIV-2)
uguucccaucucuccuag

SEQ ID NO: 2399162 - RNA, 22 nt, Human immunodeficiency virus 2 (HIV-2)
uguguguucccaucucuccuag

SEQ ID NO: 2399163 - RNA, 12 nt, Human immunodeficiency virus 2 (HIV-2)
agggacagcagu

SEQ ID NO: 2399164 - RNA, 18 nt, Human immunodeficiency virus 2 (HIV-2)
aaaaugacagaccccaga

SEQ ID NO: 2399165 - RNA, 19 nt, Human immunodeficiency virus 2 (HIV-2)
cagucaaaguuuagaagaa

SEQ ID NO: 2399166 - RNA, 14 nt, Human immunodeficiency virus 2 (HIV-2)
caucagaggggaaa

SEQ ID NO: 2399167 - RNA, 14 nt, Human immunodeficiency virus 2 (HIV-2)
gcagaggaagauga

SEQ ID NO: 2399168 - RNA, 12 nt, Human immunodeficiency virus 2 (HIV-2)
aguacacccagc

SEQ ID NO: 2399169 - RNA, 14 nt, Human immunodeficiency virus 2 (HIV-2)
uuacaguaggagga

SEQ ID NO: 2399170 - RNA, 15 nt, Human immunodeficiency virus 2 (HIV-2)
gcagaaguggcagaa

SEQ ID NO: 2399171 - RNA, 14 nt, Human immunodeficiency virus 2 (HIV-2)
ugaaagcaagaggg

SEQ ID NO: 2399172 - RNA, 16 nt, Human immunodeficiency virus 2 (HIV-2)
gagggacaugggagga

SEQ ID NO: 2399173 - RNA, 23 nt, Human immunodeficiency virus 2 (HIV-2)
aauaucagucaaaguuuagaaga

SEQ ID NO: 2399174 - RNA, 15 nt, Human immunodeficiency virus 2 (HIV-2)
agaguuugggcacaa

SEQ ID NO: 2399175 - RNA, 23 nt, Human immunodeficiency virus 2 (HIV-2)
gaacucucacaagaggcagagga

SEQ ID NO: 2399176 - RNA, 18 nt, Human immunodeficiency virus 2 (HIV-2)
auuucaagagagggugca

SEQ ID NO: 2399177 - RNA, 22 nt, Human immunodeficiency virus 2 (HIV-2)
uuauacucaugggccaggagua

SEQ ID NO: 2399178 - RNA, 23 nt, Human immunodeficiency virus 2 (HIV-2)
cuuggguuuucucgcgacagcag

SEQ ID NO: 2399179 - RNA, 17 nt, Human immunodeficiency virus 2 (HIV-2)
gggaaauaaaggaagaa

SEQ ID NO: 2399180 - RNA, 22 nt, Human immunodeficiency virus 2 (HIV-2)
caagucaggauugccagagaaa

SEQ ID NO: 2399181 - RNA, 20 nt, Human immunodeficiency virus 2 (HIV-2)
guacuuggccgguacugggc

SEQ ID NO: 2399182 - RNA, 17 nt, Human immunodeficiency virus 2 (HIV-2)
acagcccauggagaaac

SEQ ID NO: 2399183 - RNA, 23 nt, Human immunodeficiency virus 2 (HIV-2)
cccuagagccaugcacuaacaaa

SEQ ID NO: 2399184 - RNA, 16 nt, Human immunodeficiency virus 2 (HIV-2)
cugaggcugcagggac

SEQ ID NO: 2399185 - RNA, 23 nt, Human immunodeficiency virus 2 (HIV-2)
cugcagggacuuuccagaagggg

SEQ ID NO: 2399186 - RNA, 20 nt, Human immunodeficiency virus 2 (HIV-2)
ucucagccaaucaacacaag

SEQ ID NO: 2399187 - RNA, 15 nt, Human immunodeficiency virus 2 (HIV-2)
gcagaucgagcccug

SEQ ID NO: 2399188 - RNA, 21 nt, Human immunodeficiency virus 2 (HIV-2)
uuuaucgccugacuggaaaaa

SEQ ID NO: 2399189 - RNA, 21 nt, Human immunodeficiency virus 2 (HIV-2)
acagaguuucccccagaagau

SEQ ID NO: 2399190 - RNA, 14 nt, Human immunodeficiency virus 2 (HIV-2)
agaaaagaauaugu

SEQ ID NO: 2399191 - RNA, 19 nt, Human immunodeficiency virus 2 (HIV-2)
ccugagagguucucuccag

SEQ ID NO: 2399192 - RNA, 17 nt, Human immunodeficiency virus 2 (HIV-2)
ugcuggacucucaccag

SEQ ID NO: 2399193 - RNA, 19 nt, Human immunodeficiency virus 2 (HIV-2)
caaaacugaaagcaagagg

SEQ ID NO: 2399194 - RNA, 16 nt, Human immunodeficiency virus 2 (HIV-2)
gcugcaccgaccccua

SEQ ID NO: 2399195 - RNA, 15 nt, Human immunodeficiency virus 2 (HIV-2)
agacauauaccuaga

SEQ ID NO: 2399196 - RNA, 17 nt, Human immunodeficiency virus 2 (HIV-2)
ggaaacaguggagaaga

SEQ ID NO: 2399197 - RNA, 18 nt, Human immunodeficiency virus 2 (HIV-2)
acuuaaccuccuggguca

SEQ ID NO: 2399198 - RNA, 15 nt, Human immunodeficiency virus 2 (HIV-2)
caaucaacacaaggc

SEQ ID NO: 2399199 - RNA, 16 nt, Human immunodeficiency virus 2 (HIV-2)
cuaaugcaaaaagcua

SEQ ID NO: 2399200 - RNA, 14 nt, Human immunodeficiency virus 2 (HIV-2)
uucccaucucuccu

SEQ ID NO: 2399201 - RNA, 17 nt, Human immunodeficiency virus 2 (HIV-2)
cauggagaaacccagca

SEQ ID NO: 2399202 - RNA, 16 nt, Human immunodeficiency virus 2 (HIV-2)
acuacaaauuaauaga

SEQ ID NO: 2399203 - RNA, 18 nt, Human immunodeficiency virus 2 (HIV-2)
uaccacggagagaaauga

SEQ ID NO: 2399204 - RNA, 12 nt, Human immunodeficiency virus 2 (HIV-2)
ucaggcagggag

SEQ ID NO: 2399205 - RNA, 13 nt, Human immunodeficiency virus 2 (HIV-2)
guuugggcacaag

SEQ ID NO: 2399206 - RNA, 18 nt, Human immunodeficiency virus 2 (HIV-2)
gacuggcugagacuuaag

SEQ ID NO: 2399207 - RNA, 14 nt, Human immunodeficiency virus 2 (HIV-2)
caacaagaaaagaa

SEQ ID NO: 2399208 - RNA, 12 nt, Human immunodeficiency virus 2 (HIV-2)
cagcaaucaggg

SEQ ID NO: 2399209 - RNA, 16 nt, Human immunodeficiency virus 2 (HIV-2)
caagcaguagaagaug

SEQ ID NO: 2399210 - RNA, 15 nt, Human immunodeficiency virus 2 (HIV-2)
ucaggcagggagcag

SEQ ID NO: 2399211 - RNA, 14 nt, Human immunodeficiency virus 2 (HIV-2)
auauccauaauaga

SEQ ID NO: 2399212 - RNA, 19 nt, Human immunodeficiency virus 2 (HIV-2)
uggagaaacccagcaacag

SEQ ID NO: 2399213 - RNA, 21 nt, Human immunodeficiency virus 2 (HIV-2)
augcacaaggaugauggaaac

SEQ ID NO: 2399214 - RNA, 17 nt, Human immunodeficiency virus 2 (HIV-2)
cugagagguucucucca

SEQ ID NO: 2399215 - RNA, 15 nt, Human immunodeficiency virus 2 (HIV-2)
caagauaagaaaagg

SEQ ID NO: 2399216 - RNA, 13 nt, Human immunodeficiency virus 2 (HIV-2)
gggccgggaagga

SEQ ID NO: 2399217 - RNA, 14 nt, Human immunodeficiency virus 2 (HIV-2)
ucaaggcaggaagu

SEQ ID NO: 2399218 - RNA, 16 nt, Human immunodeficiency virus 2 (HIV-2)
ggaauaucauaugagc

SEQ ID NO: 2399219 - RNA, 18 nt, Human immunodeficiency virus 2 (HIV-2)
acuagcagguagagccug

SEQ ID NO: 2399220 - RNA, 21 nt, Human immunodeficiency virus 2 (HIV-2)
uauagugaauaacaggaacaa

SEQ ID NO: 2399221 - RNA, 15 nt, Human immunodeficiency virus 2 (HIV-2)
uugcuggggggagga

SEQ ID NO: 2399222 - RNA, 16 nt, Human immunodeficiency virus 2 (HIV-2)
ucccugcuggacucuc

SEQ ID NO: 2399223 - RNA, 21 nt, Human immunodeficiency virus 2 (HIV-2)
cagcaaucagggacuggcuga

SEQ ID NO: 2399224 - RNA, 18 nt, Human immunodeficiency virus 2 (HIV-2)
cagugaggaacaaaagag

SEQ ID NO: 2399225 - RNA, 23 nt, Human immunodeficiency virus 2 (HIV-2)
uggacguagucaagagacaacaa

SEQ ID NO: 2399226 - RNA, 12 nt, Human immunodeficiency virus 2 (HIV-2)
ucccugcuggac

SEQ ID NO: 2399227 - RNA, 15 nt, Human immunodeficiency virus 2 (HIV-2)
gagcauggggagaca

SEQ ID NO: 2399228 - RNA, 20 nt, Human immunodeficiency virus 2 (HIV-2)
gggacagcaguaucagcagg

SEQ ID NO: 2399229 - RNA, 12 nt, Human immunodeficiency virus 2 (HIV-2)
ugggcacaaguc

SEQ ID NO: 2399230 - RNA, 14 nt, Human immunodeficiency virus 2 (HIV-2)
uauaaggacacaug

SEQ ID NO: 2399231 - RNA, 23 nt, Human immunodeficiency virus 2 (HIV-2)
agggauaauaccagauuggcaga

SEQ ID NO: 2399232 - RNA, 20 nt, Human immunodeficiency virus 2 (HIV-2)
aauaugaagggguuagaaca

SEQ ID NO: 2399233 - RNA, 21 nt, Human immunodeficiency virus 2 (HIV-2)
ugcuucaugcacaaggaugau

SEQ ID NO: 2399234 - RNA, 12 nt, Human immunodeficiency virus 2 (HIV-2)
caacgagcccuc

SEQ ID NO: 2399235 - RNA, 16 nt, Human immunodeficiency virus 2 (HIV-2)
cugugagggacagcag

SEQ ID NO: 2399236 - RNA, 22 nt, Human immunodeficiency virus 2 (HIV-2)
ggcuagagaggaccauagaagc

SEQ ID NO: 2399237 - RNA, 17 nt, Human immunodeficiency virus 2 (HIV-2)
caaaaauuaaauagcug

SEQ ID NO: 2399238 - RNA, 15 nt, Human immunodeficiency virus 2 (HIV-2)
ggacuacgagagaga

SEQ ID NO: 2399239 - RNA, 18 nt, Human immunodeficiency virus 2 (HIV-2)
caugaugaugagcauggg

SEQ ID NO: 2399240 - RNA, 12 nt, Human immunodeficiency virus 2 (HIV-2)
aaaaccuccagg

SEQ ID NO: 2399241 - RNA, 17 nt, Human immunodeficiency virus 2 (HIV-2)
gacuacgagagagacuc

SEQ ID NO: 2399242 - RNA, 14 nt, Human immunodeficiency virus 2 (HIV-2)
cugcagaggagaau

SEQ ID NO: 2399243 - RNA, 20 nt, Human immunodeficiency virus 2 (HIV-2)
uggcauaaaguagggaaaaa

SEQ ID NO: 2399244 - RNA, 15 nt, Human immunodeficiency virus 2 (HIV-2)
uauaaucucacaaug

SEQ ID NO: 2399245 - RNA, 21 nt, Human immunodeficiency virus 2 (HIV-2)
cugcagggacuuuccagaagg

SEQ ID NO: 2399246 - RNA, 19 nt, Human immunodeficiency virus 2 (HIV-2)
ugaacagcccauggagaaa

SEQ ID NO: 2399247 - RNA, 23 nt, Human immunodeficiency virus 2 (HIV-2)
accucuauguguggcaaugaauu

SEQ ID NO: 2399248 - RNA, 21 nt, Human immunodeficiency virus 2 (HIV-2)
agaacaagcaguagaagaugu

SEQ ID NO: 2399249 - RNA, 18 nt, Human immunodeficiency virus 2 (HIV-2)
acaaaggaaucaaugaua

SEQ ID NO: 2399250 - RNA, 19 nt, Human immunodeficiency virus 2 (HIV-2)
gaaacccagcaacagaaag

SEQ ID NO: 2399251 - RNA, 14 nt, Human immunodeficiency virus 2 (HIV-2)
aggagaugaugcaa

SEQ ID NO: 2399252 - RNA, 19 nt, Human immunodeficiency virus 2 (HIV-2)
cagggacuuuccagaaggg

SEQ ID NO: 2399253 - RNA, 13 nt, Human immunodeficiency virus 2 (HIV-2)
aaagaauauguau

SEQ ID NO: 2399254 - RNA, 22 nt, Human immunodeficiency virus 2 (HIV-2)
agcugguggggaacgcccucau

SEQ ID NO: 2399255 - RNA, 19 nt, Human immunodeficiency virus 2 (HIV-2)
guuccaagaagaaucaggc

SEQ ID NO: 2399256 - RNA, 24 nt, Human immunodeficiency virus 2 (HIV-2)
agucaggauugccagagaaagaau

SEQ ID NO: 2399257 - RNA, 12 nt, Human immunodeficiency virus 2 (HIV-2)
gaagcuuuccaa

SEQ ID NO: 2399258 - RNA, 20 nt, Human immunodeficiency virus 2 (HIV-2)
gaagaaucaggcagggagca

SEQ ID NO: 2399259 - RNA, 16 nt, Human immunodeficiency virus 2 (HIV-2)
cuguacccagaagagu

SEQ ID NO: 2399260 - RNA, 18 nt, Human immunodeficiency virus 2 (HIV-2)
acaaggaccggggacagc

SEQ ID NO: 2399261 - RNA, 17 nt, Human immunodeficiency virus 2 (HIV-2)
aacagcccauggagaaa

SEQ ID NO: 2399262 - RNA, 21 nt, Human immunodeficiency virus 2 (HIV-2)
caagaguaccacggagagaaa

SEQ ID NO: 2399263 - RNA, 20 nt, Human immunodeficiency virus 2 (HIV-2)
aagaauggaaggcaaaacug

SEQ ID NO: 2399264 - RNA, 23 nt, Human immunodeficiency virus 2 (HIV-2)
cuguaccgauuagaacugggaga

SEQ ID NO: 2399265 - RNA, 22 nt, Human immunodeficiency virus 2 (HIV-2)
cagagacuuacuauccaagaac

SEQ ID NO: 2399266 - RNA, 22 nt, Human immunodeficiency virus 2 (HIV-2)
gcuacuaagaaacagcugaggc

SEQ ID NO: 2399267 - RNA, 19 nt, Human immunodeficiency virus 2 (HIV-2)
auaaaguagggaaaaaugu

SEQ ID NO: 2399268 - RNA, 15 nt, Human immunodeficiency virus 2 (HIV-2)
cugaccgucugggga

SEQ ID NO: 2399269 - RNA, 20 nt, Human immunodeficiency virus 2 (HIV-2)
acuucuaacugcauagaaaa

SEQ ID NO: 2399270 - RNA, 19 nt, Human immunodeficiency virus 2 (HIV-2)
uagaacucucacaagaggc

SEQ ID NO: 2399271 - RNA, 17 nt, Human immunodeficiency virus 2 (HIV-2)
cagaccccagagaaagg

SEQ ID NO: 2399272 - RNA, 17 nt, Human immunodeficiency virus 2 (HIV-2)
cucgcaguuccaagaag

SEQ ID NO: 2399273 - RNA, 21 nt, Human immunodeficiency virus 2 (HIV-2)
uacuuggccgguacugggcag

SEQ ID NO: 2399274 - RNA, 22 nt, Human immunodeficiency virus 2 (HIV-2)
ccuggguguucccugcuggacu

SEQ ID NO: 2399275 - RNA, 23 nt, Human immunodeficiency virus 2 (HIV-2)
ggcacaagucaggauugccagag

SEQ ID NO: 2399276 - RNA, 20 nt, Human immunodeficiency virus 2 (HIV-2)
acaagacccuggucuguuag

SEQ ID NO: 2399277 - RNA, 15 nt, Human immunodeficiency virus 2 (HIV-2)
uccuguuacaccaag

SEQ ID NO: 2399278 - RNA, 13 nt, Human immunodeficiency virus 2 (HIV-2)
gaaaccgggagca

SEQ ID NO: 2399279 - RNA, 16 nt, Human immunodeficiency virus 2 (HIV-2)
acuacgagagagacuc

SEQ ID NO: 2399280 - RNA, 14 nt, Human immunodeficiency virus 2 (HIV-2)
gaaucaggcaggga

SEQ ID NO: 2399281 - RNA, 13 nt, Human immunodeficiency virus 2 (HIV-2)
gcagacggcucca

SEQ ID NO: 2399282 - RNA, 12 nt, Human immunodeficiency virus 2 (HIV-2)
gacaaugaugau

SEQ ID NO: 2399283 - RNA, 16 nt, Human immunodeficiency virus 2 (HIV-2)
aacagaaagacagaaa

SEQ ID NO: 2399284 - RNA, 14 nt, Human immunodeficiency virus 2 (HIV-2)
aaaugugacagagg

SEQ ID NO: 2399285 - RNA, 14 nt, Human immunodeficiency virus 2 (HIV-2)
acuacaaauuaaua

SEQ ID NO: 2399286 - RNA, 21 nt, Human immunodeficiency virus 2 (HIV-2)
auaaauuggcaauagauaugu

SEQ ID NO: 2399287 - RNA, 12 nt, Human immunodeficiency virus 2 (HIV-2)
aaggagaagaac

SEQ ID NO: 2399288 - RNA, 19 nt, Human immunodeficiency virus 2 (HIV-2)
cagcaguaucagcagggag

SEQ ID NO: 2399289 - RNA, 15 nt, Human immunodeficiency virus 2 (HIV-2)
agaucgagcccugag

SEQ ID NO: 2399290 - RNA, 19 nt, Human immunodeficiency virus 2 (HIV-2)
ccugcuggacucucaccag

SEQ ID NO: 2399291 - RNA, 14 nt, Human immunodeficiency virus 2 (HIV-2)
uggucaaggcagga

SEQ ID NO: 2399292 - RNA, 20 nt, Human immunodeficiency virus 2 (HIV-2)
guagcugcuucaugcacaag

SEQ ID NO: 2399293 - RNA, 20 nt, Human immunodeficiency virus 2 (HIV-2)
uacaacaucugcagagacuu

SEQ ID NO: 2399294 - RNA, 16 nt, Human immunodeficiency virus 2 (HIV-2)
acuuagggagugacug

SEQ ID NO: 2399295 - RNA, 14 nt, Human immunodeficiency virus 2 (HIV-2)
uagauucugaugau

SEQ ID NO: 2399296 - RNA, 23 nt, Human immunodeficiency virus 2 (HIV-2)
aggcucagacccggaaguggcau

SEQ ID NO: 2399297 - RNA, 23 nt, Human immunodeficiency virus 2 (HIV-2)
gcgacugaccgucuggggaacga

SEQ ID NO: 2399298 - RNA, 13 nt, Human immunodeficiency virus 2 (HIV-2)
uaaacagggaggc

SEQ ID NO: 2399299 - RNA, 17 nt, Human immunodeficiency virus 2 (HIV-2)
caauaaacuaugugcag

SEQ ID NO: 2399300 - RNA, 16 nt, Human immunodeficiency virus 2 (HIV-2)
guggggaacgcccuca

SEQ ID NO: 2399301 - RNA, 21 nt, Human immunodeficiency virus 2 (HIV-2)
ggagaagagaccauuggagag

SEQ ID NO: 2399302 - RNA, 15 nt, Human immunodeficiency virus 2 (HIV-2)
acagcugaggcugca

SEQ ID NO: 2399303 - RNA, 18 nt, Human immunodeficiency virus 2 (HIV-2)
gacaugggaggagcuggu

SEQ ID NO: 2399304 - RNA, 14 nt, Human immunodeficiency virus 2 (HIV-2)
guaugaggagauga

SEQ ID NO: 2399305 - RNA, 15 nt, Human immunodeficiency virus 2 (HIV-2)
acaucccagauacaa

SEQ ID NO: 2399306 - RNA, 14 nt, Human immunodeficiency virus 2 (HIV-2)
aaacaguggagaag

SEQ ID NO: 2399307 - RNA, 15 nt, Human immunodeficiency virus 2 (HIV-2)
aacagcugaggcugc

SEQ ID NO: 2399308 - RNA, 15 nt, Human immunodeficiency virus 2 (HIV-2)
cagccagccaacgaa

SEQ ID NO: 2399309 - RNA, 13 nt, Human immunodeficiency virus 2 (HIV-2)
gccccgagagcuc

SEQ ID NO: 2399310 - RNA, 14 nt, Human immunodeficiency virus 2 (HIV-2)
cacuagagcagaaa

SEQ ID NO: 2399311 - RNA, 22 nt, Human immunodeficiency virus 2 (HIV-2)
acugcauagaaaacaacacaug

SEQ ID NO: 2399312 - RNA, 17 nt, Human immunodeficiency virus 2 (HIV-2)
cagcaguaucagcaggg

SEQ ID NO: 2399313 - RNA, 15 nt, Human immunodeficiency virus 2 (HIV-2)
caacagcaacagcug

SEQ ID NO: 2399314 - RNA, 16 nt, Human immunodeficiency virus 2 (HIV-2)
uacagugacagaacaa

SEQ ID NO: 2399315 - RNA, 18 nt, Human immunodeficiency virus 2 (HIV-2)
gacuggguaauagaaacu

SEQ ID NO: 2399316 - RNA, 16 nt, Human immunodeficiency virus 2 (HIV-2)
uccugugagggacagc

SEQ ID NO: 2399317 - RNA, 15 nt, Human immunodeficiency virus 2 (HIV-2)
cuucaugcacaagga

SEQ ID NO: 2399318 - RNA, 18 nt, Human immunodeficiency virus 2 (HIV-2)
gagguucucuccagcacu

SEQ ID NO: 2399319 - RNA, 21 nt, Human immunodeficiency virus 2 (HIV-2)
cuccugugagggacagcagua

SEQ ID NO: 2399320 - RNA, 19 nt, Human immunodeficiency virus 2 (HIV-2)
agugcaauuguuaaguaga

SEQ ID NO: 2399321 - RNA, 13 nt, Human immunodeficiency virus 2 (HIV-2)
acuuacuguauaa

SEQ ID NO: 2399322 - RNA, 13 nt, Human immunodeficiency virus 2 (HIV-2)
gaacugggagacu

SEQ ID NO: 2399323 - RNA, 14 nt, Human immunodeficiency virus 2 (HIV-2)
guauaggcagcaaa

SEQ ID NO: 2399324 - RNA, 16 nt, Human immunodeficiency virus 2 (HIV-2)
gccuucugcaccagac

SEQ ID NO: 2399325 - RNA, 12 nt, Human immunodeficiency virus 2 (HIV-2)
ggcauggcagag

SEQ ID NO: 2399326 - RNA, 22 nt, Human immunodeficiency virus 2 (HIV-2)
cagcaaucagggacuggcugag

SEQ ID NO: 2399327 - RNA, 17 nt, Human immunodeficiency virus 2 (HIV-2)
gcaguuccaagaagaau

SEQ ID NO: 2399328 - RNA, 21 nt, Human immunodeficiency virus 2 (HIV-2)
gcuggccuauaacuacaaggc

SEQ ID NO: 2399329 - RNA, 13 nt, Human immunodeficiency virus 2 (HIV-2)
gcagagacuuacu

SEQ ID NO: 2399330 - RNA, 13 nt, Human immunodeficiency virus 2 (HIV-2)
gaccccagagaaa

SEQ ID NO: 2399331 - RNA, 20 nt, Human immunodeficiency virus 2 (HIV-2)
agccaucagaggggaaaagu

SEQ ID NO: 2399332 - RNA, 16 nt, Human immunodeficiency virus 2 (HIV-2)
ggagaggcuggcagau

SEQ ID NO: 2399333 - RNA, 21 nt, Human immunodeficiency virus 2 (HIV-2)
gaagcuaguaucaguagaacu

SEQ ID NO: 2399334 - RNA, 17 nt, Human immunodeficiency virus 2 (HIV-2)
aaagcagauaauuaaua

SEQ ID NO: 2399335 - RNA, 15 nt, Human immunodeficiency virus 2 (HIV-2)
gauucugaugaugau

SEQ ID NO: 2399336 - RNA, 14 nt, Human immunodeficiency virus 2 (HIV-2)
gcugaggcugcagg

SEQ ID NO: 2399337 - RNA, 17 nt, Human immunodeficiency virus 2 (HIV-2)
acugcaauaugggugcg

SEQ ID NO: 2399338 - RNA, 20 nt, Human immunodeficiency virus 2 (HIV-2)
aauauguaugaauuacaaaa

SEQ ID NO: 2399339 - RNA, 18 nt, Human immunodeficiency virus 2 (HIV-2)
acagaaagauuuguauag

SEQ ID NO: 2399340 - RNA, 20 nt, Human immunodeficiency virus 2 (HIV-2)
ccccgguuaucuccaacaga

SEQ ID NO: 2399341 - RNA, 16 nt, Human immunodeficiency virus 2 (HIV-2)
uacuuggucaaggcag

SEQ ID NO: 2399342 - RNA, 11 nt, Human immunodeficiency virus 2 (HIV-2)
caagaaaagaa

SEQ ID NO: 2399343 - RNA, 20 nt, Human immunodeficiency virus 2 (HIV-2)
caggaaacaguggagaagag

SEQ ID NO: 2399344 - RNA, 22 nt, Human immunodeficiency virus 2 (HIV-2)
ccaagcauucgcgaggacuacg

SEQ ID NO: 2399345 - RNA, 12 nt, Human immunodeficiency virus 2 (HIV-2)
cucucagccaau

SEQ ID NO: 2399346 - RNA, 17 nt, Human immunodeficiency virus 2 (HIV-2)
cuucugcaccagacaag

SEQ ID NO: 2399347 - RNA, 14 nt, Human immunodeficiency virus 2 (HIV-2)
gauugccagagaaa

SEQ ID NO: 2399348 - RNA, 22 nt, Human immunodeficiency virus 2 (HIV-2)
agaaacaaguccgcuaccuaga

SEQ ID NO: 2399349 - RNA, 21 nt, Human immunodeficiency virus 2 (HIV-2)
caugcuggccuauaacuacaa

SEQ ID NO: 2399350 - RNA, 17 nt, Human immunodeficiency virus 2 (HIV-2)
uuggucaaggcaggaag

SEQ ID NO: 2399351 - RNA, 17 nt, Human immunodeficiency virus 2 (HIV-2)
gcuaaacaaggagaaga

SEQ ID NO: 2399352 - RNA, 21 nt, Human immunodeficiency virus 2 (HIV-2)
cccuaguaguaguacaacaaa

SEQ ID NO: 2399353 - RNA, 15 nt, Human immunodeficiency virus 2 (HIV-2)
aaggaacagaagaag

SEQ ID NO: 2399354 - RNA, 22 nt, Human immunodeficiency virus 2 (HIV-2)
caugaugaugagcauggggaga

SEQ ID NO: 2399355 - RNA, 20 nt, Human immunodeficiency virus 2 (HIV-2)
ggaauaauacagugacagaa

SEQ ID NO: 2399356 - RNA, 21 nt, Human immunodeficiency virus 2 (HIV-2)
caacaucccagauacaaagga

SEQ ID NO: 2399357 - RNA, 14 nt, Human immunodeficiency virus 2 (HIV-2)
uccugcugcaacua

SEQ ID NO: 2399358 - RNA, 20 nt, Human immunodeficiency virus 2 (HIV-2)
acuaagaaacagcugaggcu

SEQ ID NO: 2399359 - RNA, 19 nt, Human immunodeficiency virus 2 (HIV-2)
gaggacuacgagagagacu

SEQ ID NO: 2399360 - RNA, 18 nt, Human immunodeficiency virus 2 (HIV-2)
cacuagagcagaaaauag

SEQ ID NO: 2399361 - RNA, 14 nt, Human immunodeficiency virus 2 (HIV-2)
aaaagggggacugc

SEQ ID NO: 2399362 - RNA, 16 nt, Human immunodeficiency virus 2 (HIV-2)
aggcagcaaaauaugg

SEQ ID NO: 2399363 - RNA, 21 nt, Human immunodeficiency virus 2 (HIV-2)
gaagccuuaaacagggaggca

SEQ ID NO: 2399364 - RNA, 22 nt, Human immunodeficiency virus 2 (HIV-2)
cacuagcagguagagccugggu

SEQ ID NO: 2399365 - RNA, 18 nt, Human immunodeficiency virus 2 (HIV-2)
aagcaguagaagaugucu

SEQ ID NO: 2399366 - RNA, 17 nt, Human immunodeficiency virus 2 (HIV-2)
gaccauuggagaggccu

SEQ ID NO: 2399367 - RNA, 21 nt, Human immunodeficiency virus 2 (HIV-2)
uagaagccuuaaacagggagg

SEQ ID NO: 2399368 - RNA, 20 nt, Human immunodeficiency virus 2 (HIV-2)
uucccugcuggacucucacc

SEQ ID NO: 2399369 - RNA, 16 nt, Human immunodeficiency virus 2 (HIV-2)
acguagucaagagaca

SEQ ID NO: 2399370 - RNA, 23 nt, Human immunodeficiency virus 2 (HIV-2)
gacacccuugaaggcgccagaga

SEQ ID NO: 2399371 - RNA, 22 nt, Human immunodeficiency virus 2 (HIV-2)
aauuguuaaguagauuuagaaa

SEQ ID NO: 2399372 - RNA, 20 nt, Human immunodeficiency virus 2 (HIV-2)
cccugacgcugucagcccag

SEQ ID NO: 2399373 - RNA, 18 nt, Human immunodeficiency virus 2 (HIV-2)
ggacuacgagagagacuc

SEQ ID NO: 2399374 - RNA, 21 nt, Human immunodeficiency virus 2 (HIV-2)
gcaguuuccauugccagcugu

SEQ ID NO: 2399375 - RNA, 23 nt, Human immunodeficiency virus 2 (HIV-2)
guggcaaugaauuguagcagggu

SEQ ID NO: 2399376 - RNA, 16 nt, Human immunodeficiency virus 2 (HIV-2)
cagaucgagcccugag

SEQ ID NO: 2399377 - RNA, 17 nt, Human immunodeficiency virus 2 (HIV-2)
ucaguagaacucucaca

SEQ ID NO: 2399378 - RNA, 20 nt, Human immunodeficiency virus 2 (HIV-2)
ugacuuaaccuccuggguca

SEQ ID NO: 2399379 - RNA, 18 nt, Human immunodeficiency virus 2 (HIV-2)
ggcagacggcuccacgcu

SEQ ID NO: 2399380 - RNA, 13 nt, Human immunodeficiency virus 2 (HIV-2)
cagauuggcagaa

SEQ ID NO: 2399381 - RNA, 16 nt, Human immunodeficiency virus 2 (HIV-2)
gugggagaaacaaguc

SEQ ID NO: 2399382 - RNA, 15 nt, Human immunodeficiency virus 2 (HIV-2)
gcagggacuuuccag

SEQ ID NO: 2399383 - RNA, 21 nt, Human immunodeficiency virus 2 (HIV-2)
gcccugagagguucucuccag

SEQ ID NO: 2399384 - RNA, 23 nt, Human immunodeficiency virus 2 (HIV-2)
agaagaacuccuugcccagcugc

SEQ ID NO: 2399385 - RNA, 14 nt, Human immunodeficiency virus 2 (HIV-2)
agggguuagaacaa

SEQ ID NO: 2399386 - RNA, 14 nt, Human immunodeficiency virus 2 (HIV-2)
uauaggcagcaaaa

SEQ ID NO: 2399387 - RNA, 20 nt, Human immunodeficiency virus 2 (HIV-2)
augaacagcccauggagaaa

SEQ ID NO: 2399388 - RNA, 13 nt, Human immunodeficiency virus 2 (HIV-2)
agcaguagaagau

SEQ ID NO: 2399389 - RNA, 17 nt, Human immunodeficiency virus 2 (HIV-2)
guggcuagagaggacca

SEQ ID NO: 2399390 - RNA, 20 nt, Human immunodeficiency virus 2 (HIV-2)
ggggaugguuaugggaagca

SEQ ID NO: 2399391 - RNA, 15 nt, Human immunodeficiency virus 2 (HIV-2)
caucugcagagacuu

SEQ ID NO: 2399392 - RNA, 19 nt, Human immunodeficiency virus 2 (HIV-2)
uaaauagcugggauauucu

SEQ ID NO: 2399393 - RNA, 17 nt, Human immunodeficiency virus 2 (HIV-2)
gacagaaagauuuguau

SEQ ID NO: 2399394 - RNA, 21 nt, Human immunodeficiency virus 2 (HIV-2)
ucuaacagcaaucagggacug

SEQ ID NO: 2399395 - RNA, 15 nt, Human immunodeficiency virus 2 (HIV-2)
uucaacaagaaaaga

SEQ ID NO: 2399396 - RNA, 18 nt, Human immunodeficiency virus 2 (HIV-2)
uccugugagggacagcag

SEQ ID NO: 2399397 - RNA, 14 nt, Human immunodeficiency virus 2 (HIV-2)
gaaguggcagaacu

SEQ ID NO: 2399398 - RNA, 21 nt, Human immunodeficiency virus 2 (HIV-2)
uggcauacccgcguggaaaaa

SEQ ID NO: 2399399 - RNA, 18 nt, Human immunodeficiency virus 2 (HIV-2)
cauggcaggagugggaga

SEQ ID NO: 2399400 - RNA, 19 nt, Human immunodeficiency virus 2 (HIV-2)
gcucugcggagaggcuggc

SEQ ID NO: 2399401 - RNA, 14 nt, Human immunodeficiency virus 2 (HIV-2)
aucugcagagacuu

SEQ ID NO: 2399402 - RNA, 14 nt, Human immunodeficiency virus 2 (HIV-2)
uagugcagcaacag

SEQ ID NO: 2399403 - RNA, 13 nt, Human immunodeficiency virus 2 (HIV-2)
aucaaugauacag

SEQ ID NO: 2399404 - RNA, 11 nt, Human immunodeficiency virus 2 (HIV-2)
gaaaaauauga

SEQ ID NO: 2399405 - RNA, 19 nt, Human immunodeficiency virus 2 (HIV-2)
agauuuguauaggcagcaa

SEQ ID NO: 2399406 - RNA, 22 nt, Human immunodeficiency virus 2 (HIV-2)
uaggcagcaaaauauggaugau

SEQ ID NO: 2399407 - RNA, 17 nt, Human immunodeficiency virus 2 (HIV-2)
cacauuuuauaaaagaa

SEQ ID NO: 2399408 - RNA, 16 nt, Human immunodeficiency virus 2 (HIV-2)
ggcaagagucacugcu

SEQ ID NO: 2399409 - RNA, 17 nt, Human immunodeficiency virus 2 (HIV-2)
uguaccgauuagaacug

SEQ ID NO: 2399410 - RNA, 12 nt, Human immunodeficiency virus 2 (HIV-2)
ugcggagaggcu

SEQ ID NO: 2399411 - RNA, 19 nt, Human immunodeficiency virus 2 (HIV-2)
ggagcagaacucgcccucc

SEQ ID NO: 2399412 - RNA, 11 nt, Human immunodeficiency virus 2 (HIV-2)
ucuaacagcaa

SEQ ID NO: 2399413 - RNA, 15 nt, Human immunodeficiency virus 2 (HIV-2)
agaguuucccccaga

SEQ ID NO: 2399414 - RNA, 17 nt, Human immunodeficiency virus 2 (HIV-2)
uggcaauagauauguca

SEQ ID NO: 2399415 - RNA, 22 nt, Human immunodeficiency virus 2 (HIV-2)
cccauggagaaacccagcaaca

SEQ ID NO: 2399416 - RNA, 23 nt, Human immunodeficiency virus 2 (HIV-2)
gcaaugugaguucaauaugaagg

SEQ ID NO: 2399417 - RNA, 19 nt, Human immunodeficiency virus 2 (HIV-2)
uucgaguggcuagagagga

SEQ ID NO: 2399418 - RNA, 17 nt, Human immunodeficiency virus 2 (HIV-2)
aggcagggagcagaacu

SEQ ID NO: 2399419 - RNA, 23 nt, Human immunodeficiency virus 2 (HIV-2)
aaguagcuacuaagaaacagcug

SEQ ID NO: 2399420 - RNA, 21 nt, Human immunodeficiency virus 2 (HIV-2)
ggacagcaguaucagcaggga

SEQ ID NO: 2399421 - RNA, 15 nt, Human immunodeficiency virus 2 (HIV-2)
aggcgccagagagcu

SEQ ID NO: 2399422 - RNA, 19 nt, Human immunodeficiency virus 2 (HIV-2)
aacaagcagacaugaugau

SEQ ID NO: 2399423 - RNA, 19 nt, Human immunodeficiency virus 2 (HIV-2)
guucaucugaguaacaaga

SEQ ID NO: 2399424 - RNA, 14 nt, Human immunodeficiency virus 2 (HIV-2)
acaagaaaagaaua

SEQ ID NO: 2399425 - RNA, 20 nt, Human immunodeficiency virus 2 (HIV-2)
caucugaguaacaagacccu

SEQ ID NO: 2399426 - RNA, 15 nt, Human immunodeficiency virus 2 (HIV-2)
acaagucaggauugc

SEQ ID NO: 2399427 - RNA, 16 nt, Human immunodeficiency virus 2 (HIV-2)
agaagaaucaggcagg

SEQ ID NO: 2399428 - RNA, 19 nt, Human immunodeficiency virus 2 (HIV-2)
ggcaguuugacuccaugcu

SEQ ID NO: 2399429 - RNA, 22 nt, Human immunodeficiency virus 2 (HIV-2)
cuagcagguagagccugggugu

SEQ ID NO: 2399430 - RNA, 14 nt, Human immunodeficiency virus 2 (HIV-2)
ugcagcaacagcaa

SEQ ID NO: 2399431 - RNA, 14 nt, Human immunodeficiency virus 2 (HIV-2)
gacugaucucccag

SEQ ID NO: 2399432 - RNA, 22 nt, Human immunodeficiency virus 2 (HIV-2)
acauggcaggagugggagaaac

SEQ ID NO: 2399433 - RNA, 18 nt, Human immunodeficiency virus 2 (HIV-2)
ugggaauccaaggcagga

SEQ ID NO: 2399434 - RNA, 22 nt, Human immunodeficiency virus 2 (HIV-2)
gcauuguauucagucgcucugc

SEQ ID NO: 2399435 - RNA, 15 nt, Human immunodeficiency virus 2 (HIV-2)
ggcgccagagagcuc

SEQ ID NO: 2399436 - RNA, 19 nt, Human immunodeficiency virus 2 (HIV-2)
gacuuacuauccaagaacu

SEQ ID NO: 2399437 - RNA, 19 nt, Human immunodeficiency virus 2 (HIV-2)
caaaauauggaugauguag

SEQ ID NO: 2399438 - RNA, 19 nt, Human immunodeficiency virus 2 (HIV-2)
ggcagacgaagaaggacuc

SEQ ID NO: 2399439 - RNA, 14 nt, Human immunodeficiency virus 2 (HIV-2)
cuaccuagaggcaa

SEQ ID NO: 2399440 - RNA, 15 nt, Human immunodeficiency virus 2 (HIV-2)
auggagaaacccagc

SEQ ID NO: 2399441 - RNA, 20 nt, Human immunodeficiency virus 2 (HIV-2)
gagacuacaaauuaauagaa

SEQ ID NO: 2399442 - RNA, 19 nt, Human immunodeficiency virus 2 (HIV-2)
agucaaaguuuagaagaag

SEQ ID NO: 2399443 - RNA, 15 nt, Human immunodeficiency virus 2 (HIV-2)
cagaggaagaugagg

SEQ ID NO: 2399444 - RNA, 18 nt, Human immunodeficiency virus 2 (HIV-2)
gcuauacaacaucugcag

SEQ ID NO: 2399445 - RNA, 19 nt, Human immunodeficiency virus 2 (HIV-2)
gcagagacuuacuauccaa

SEQ ID NO: 2399446 - RNA, 14 nt, Human immunodeficiency virus 2 (HIV-2)
cuguacccagaaga

SEQ ID NO: 2399447 - RNA, 15 nt, Human immunodeficiency virus 2 (HIV-2)
uaguacaacaaaaug

SEQ ID NO: 2399448 - RNA, 17 nt, Human immunodeficiency virus 2 (HIV-2)
acuaaaaauagagacac

SEQ ID NO: 2399449 - RNA, 16 nt, Human immunodeficiency virus 2 (HIV-2)
agaauauguaugaauu

SEQ ID NO: 2399450 - RNA, 12 nt, Human immunodeficiency virus 2 (HIV-2)
ucccccuccagg

SEQ ID NO: 2399451 - RNA, 15 nt, Human immunodeficiency virus 2 (HIV-2)
uucucuccagcacua

SEQ ID NO: 2399452 - RNA, 20 nt, Human immunodeficiency virus 2 (HIV-2)
gaugugcguuuagacagguc

SEQ ID NO: 2399453 - RNA, 15 nt, Human immunodeficiency virus 2 (HIV-2)
ucgccuucugcacca

SEQ ID NO: 2399454 - RNA, 19 nt, Human immunodeficiency virus 2 (HIV-2)
cugcggagaggcuggcaga

SEQ ID NO: 2399455 - RNA, 18 nt, Human immunodeficiency virus 2 (HIV-2)
cccuagagccaugcacua

SEQ ID NO: 2399456 - RNA, 17 nt, Human immunodeficiency virus 2 (HIV-2)
guacugggcagacggcu

SEQ ID NO: 2399457 - RNA, 14 nt, Human immunodeficiency virus 2 (HIV-2)
aaggcaaaacugaa

SEQ ID NO: 2399458 - RNA, 21 nt, Human immunodeficiency virus 2 (HIV-2)
cagcuguguuucucgaaaaag

SEQ ID NO: 2399459 - RNA, 14 nt, Human immunodeficiency virus 2 (HIV-2)
acaacaagaaaugu

SEQ ID NO: 2399460 - RNA, 12 nt, Human
aaaacaaagaag

SEQ ID NO: 2399461 - RNA, 15 nt, Human
aaaacaaaaagaaca

SEQ ID NO: 2399462 - RNA, 17 nt, Human
aaaacaaaaagaacaaa

SEQ ID NO: 2399463 - RNA, 16 nt, Human
aaaacaaaaagaacaa

SEQ ID NO: 2399464 - RNA, 14 nt, Human
aaaacaaggaugaa

SEQ ID NO: 2399465 - RNA, 15 nt, Human
aaaacaaaugccaca

SEQ ID NO: 2399466 - RNA, 13 nt, Human
aaaaauuuaagug

SEQ ID NO: 2399467 - RNA, 21 nt, Human
aaaaauuuaagcauuguuugc

SEQ ID NO: 2399468 - RNA, 22 nt, Human
aaaaauuuaagcauuguuugcu

SEQ ID NO: 2399469 - RNA, 23 nt, Human
aaaaauuguuucaaaauaaaaac

SEQ ID NO: 2399470 - RNA, 21 nt, Human
aaaaauuuaaaggguguacuu

SEQ ID NO: 2399471 - RNA, 14 nt, Human
aaaaauuuaagcau

SEQ ID NO: 2399472 - RNA, 15 nt, Human
aaaaauuuaagcauu

SEQ ID NO: 2399473 - RNA, 16 nt, Human
aaaaauuuaagcauug

SEQ ID NO: 2399474 - RNA, 18 nt, Human
aaaaauuuaagcauuguu

SEQ ID NO: 2399475 - RNA, 20 nt, Human
aaaaauuuaagcauuguuug

SEQ ID NO: 2399476 - RNA, 22 nt, Human
aaaaauuuuauaaaauuaagca

SEQ ID NO: 2399477 - RNA, 12 nt, Human
aaaacacagcaa

SEQ ID NO: 2399478 - RNA, 13 nt, Human
aaaacacagcaag

SEQ ID NO: 2399479 - RNA, 18 nt, Human
aaaacacagcaaggguga

SEQ ID NO: 2399480 - RNA, 12 nt, Human
aaaacacauuuu

SEQ ID NO: 2399481 - RNA, 15 nt, Human
aaaacaauauuguuu

SEQ ID NO: 2399482 - RNA, 17 nt, Human
aaaacaauauuguuucu

SEQ ID NO: 2399483 - RNA, 18 nt, Human
aaaacaauauuguuucua

SEQ ID NO: 2399484 - RNA, 19 nt, Human
aaaacaaucauuugcuuuu

SEQ ID NO: 2399485 - RNA, 15 nt, Human
aaaacacaagcaaaa

SEQ ID NO: 2399486 - RNA, 14 nt, Human
aaaacaauuguaau

SEQ ID NO: 2399487 - RNA, 13 nt, Human
aaaacaaugaaga

SEQ ID NO: 2399488 - RNA, 17 nt, Human
aaaacaaggaugaauua

SEQ ID NO: 2399489 - RNA, 16 nt, Human
aaaacaauaaaauuuu

SEQ ID NO: 2399490 - RNA, 22 nt, Human
aaaacaacuauggaucagaaua

SEQ ID NO: 2399491 - RNA, 18 nt, Human
aaaacaacuucuuuguaa

SEQ ID NO: 2399492 - RNA, 13 nt, Human
aaaaacugauuuu

SEQ ID NO: 2399493 - RNA, 14 nt, Human
aaaaacauggccuu

SEQ ID NO: 2399494 - RNA, 14 nt, Human
aaaaaccaaaacug

SEQ ID NO: 2399495 - RNA, 15 nt, Human
aaaaacugauuuuuu

SEQ ID NO: 2399496 - RNA, 12 nt, Human
aaaaacugaaug

SEQ ID NO: 2399497 - RNA, 12 nt, Human
aaaaacuguauu

SEQ ID NO: 2399498 - RNA, 19 nt, Human
aaaaacuucaguaaguacg

SEQ ID NO: 2399499 - RNA, 18 nt, Human
aaaaacuuguaaaugcug

SEQ ID NO: 2399500 - RNA, 12 nt, Human
aaaaacuuguaa

SEQ ID NO: 2399501 - RNA, 17 nt, Human
aaaaagauauauuaaaa

SEQ ID NO: 2399502 - RNA, 13 nt, Human
aaaaagauauauu

SEQ ID NO: 2399503 - RNA, 22 nt, Human
aaaaagauauauuaaaaauaua

SEQ ID NO: 2399504 - RNA, 19 nt, Human
aaaaagaggaaagaaugaa

SEQ ID NO: 2399505 - RNA, 12 nt, Human
aaaaagaggcua

SEQ ID NO: 2399506 - RNA, 18 nt, Human
aaaaagaggaaagaauga

SEQ ID NO: 2399507 - RNA, 19 nt, Human
aaaaagagaaguauuauaa

SEQ ID NO: 2399508 - RNA, 13 nt, Human
aaaaagaccagac

SEQ ID NO: 2399509 - RNA, 14 nt, Human
aaaaagacagggcu

SEQ ID NO: 2399510 - RNA, 19 nt, Human
aaaaauuccuuuguguuuc

SEQ ID NO: 2399511 - RNA, 21 nt, Human
aaaaauuguuaauuuuuccua

SEQ ID NO: 2399512 - RNA, 14 nt, Human
aaaaauugugauca

SEQ ID NO: 2399513 - RNA, 18 nt, Human
aaaaauugguucuuuauu

SEQ ID NO: 2399514 - RNA, 12 nt, Human
aaaaacacagca

SEQ ID NO: 2399515 - RNA, 19 nt, Human
aaaaacagcauugcuuucu

SEQ ID NO: 2399516 - RNA, 20 nt, Human
aaaaacagcauugcuuucug

SEQ ID NO: 2399517 - RNA, 21 nt, Human
aaaaacagcauugcuuucuga

SEQ ID NO: 2399518 - RNA, 19 nt, Human
aaaaacagccucacagaag

SEQ ID NO: 2399519 - RNA, 22 nt, Human
aaaaaauuugagaaagccuuca

SEQ ID NO: 2399520 - RNA, 14 nt, Human
aaaaaauuuaagug

SEQ ID NO: 2399521 - RNA, 16 nt, Human
aaaaaauuuccaguga

SEQ ID NO: 2399522 - RNA, 11 nt, Human
aaaaacaaaaa

SEQ ID NO: 2399523 - RNA, 14 nt, Human
aaaaacacaaaagu

SEQ ID NO: 2399524 - RNA, 11 nt, Human
aaaaaauuggu

SEQ ID NO: 2399525 - RNA, 12 nt, Human
aaaaaauuuaag

SEQ ID NO: 2399526 - RNA, 17 nt, Human
aagugcuguauaaaauc

SEQ ID NO: 2399527 - RNA, 16 nt, Human
aagugcuguauaaaau

SEQ ID NO: 2399528 - RNA, 15 nt, Human
aagugcuguauaaaa

SEQ ID NO: 2399529 - RNA, 13 nt, Human
aagugcuguauaa

SEQ ID NO: 2399530 - RNA, 12 nt, Human
aagugcuguaua

SEQ ID NO: 2399531 - RNA, 22 nt, Human
aagugcuguauaaaaucagcca

SEQ ID NO: 2399532 - RNA, 19 nt, Human
aagugcuguauaaaaucag

SEQ ID NO: 2399533 - RNA, 23 nt, Human
aagugcuguauaaaaucagccaa

SEQ ID NO: 2399534 - RNA, 22 nt, Human
aagugcugggauuacaggugug

SEQ ID NO: 2399535 - RNA, 21 nt, Human
aauaauccuaaacauaugaau

SEQ ID NO: 2399536 - RNA, 16 nt, Human
aauaaucuauuucuau

SEQ ID NO: 2399537 - RNA, 13 nt, Human
aauaaucggccca

SEQ ID NO: 2399538 - RNA, 16 nt, Human
aauaaucggcccacag

SEQ ID NO: 2399539 - RNA, 13 nt, Human
aauaaucuuauua

SEQ ID NO: 2399540 - RNA, 19 nt, Human
aauaaucuuauuagggaga

SEQ ID NO: 2399541 - RNA, 23 nt, Human
aauaaucuuauuagggagaaaau

SEQ ID NO: 2399542 - RNA, 22 nt, Human
aauaaugaauggacucaaacug

SEQ ID NO: 2399543 - RNA, 14 nt, Human
aauaaucuuugggu

SEQ ID NO: 2399544 - RNA, 14 nt, Human
aauaaguuauugca

SEQ ID NO: 2399545 - RNA, 13 nt, Human
aauaaguuauugc

SEQ ID NO: 2399546 - RNA, 18 nt, Human
aauaaguuauugcaguuu

SEQ ID NO: 2399547 - RNA, 21 nt, Human
aauaaguucaaauucuucuga

SEQ ID NO: 2399548 - RNA, 22 nt, Human
aauaaguucaaauucuucugaa

SEQ ID NO: 2399549 - RNA, 20 nt, Human
aauaaucacgcuuuccugaa

SEQ ID NO: 2399550 - RNA, 21 nt, Human
aauaaucacgcuuuccugaau

SEQ ID NO: 2399551 - RNA, 13 nt, Human
aauaaucauugga

SEQ ID NO: 2399552 - RNA, 13 nt, Human
aauaauaaacuuu

SEQ ID NO: 2399553 - RNA, 13 nt, Human
aauaaugguacca

SEQ ID NO: 2399554 - RNA, 19 nt, Human
aauaaugggcuuagagcag

SEQ ID NO: 2399555 - RNA, 20 nt, Human
aauaaugggcuuagagcagu

SEQ ID NO: 2399556 - RNA, 19 nt, Human
aauaauguaagacaaauau

SEQ ID NO: 2399557 - RNA, 12 nt, Human
aauaauguaaga

SEQ ID NO: 2399558 - RNA, 16 nt, Human
aauaaugugaaacugg

SEQ ID NO: 2399559 - RNA, 12 nt, Human
aauaaugucucu

SEQ ID NO: 2399560 - RNA, 11 nt, Human
aauaaugucuc

SEQ ID NO: 2399561 - RNA, 13 nt, Human
aauaaugucucug

SEQ ID NO: 2399562 - RNA, 23 nt, Human
aauaaugguaccagauaaaauua

SEQ ID NO: 2399563 - RNA, 21 nt, Human
aauaaugguaccagauaaaau

SEQ ID NO: 2399564 - RNA, 20 nt, Human
aauaaugguaccagauaaaa

SEQ ID NO: 2399565 - RNA, 17 nt, Human
aauaaugguaccagaua

SEQ ID NO: 2399566 - RNA, 21 nt, Human
aauaauggucccauccaggca

SEQ ID NO: 2399567 - RNA, 20 nt, Human
aauaauggucccauccaggc

SEQ ID NO: 2399568 - RNA, 19 nt, Human
aauaauguacaucuggccu

SEQ ID NO: 2399569 - RNA, 17 nt, Human
aaguguaaagcauucca

SEQ ID NO: 2399570 - RNA, 16 nt, Human
aaguguaaagcauucc

SEQ ID NO: 2399571 - RNA, 14 nt, Human
aaguguaaagcauu

SEQ ID NO: 2399572 - RNA, 13 nt, Human
aaguguaaagcau

SEQ ID NO: 2399573 - RNA, 11 nt, Human
aaguguaaagc

SEQ ID NO: 2399574 - RNA, 17 nt, Human
aaguguaaacaccauag

SEQ ID NO: 2399575 - RNA, 22 nt, Human
aaguguaaaauauuuugaauca

SEQ ID NO: 2399576 - RNA, 19 nt, Human
aaguggugcucaguuguag

SEQ ID NO: 2399577 - RNA, 17 nt, Human
aaguggugcucaguugu

SEQ ID NO: 2399578 - RNA, 15 nt, Human
aaguggugcucaguu

SEQ ID NO: 2399579 - RNA, 13 nt, Human
aaguggugcucag

SEQ ID NO: 2399580 - RNA, 17 nt, Human
aaguggugguaacccug

SEQ ID NO: 2399581 - RNA, 18 nt, Human
aaguggugguaacccugg

SEQ ID NO: 2399582 - RNA, 20 nt, Human
aaguggguuauucuggaguu

SEQ ID NO: 2399583 - RNA, 17 nt, Human
aagugguauagaaaugc

SEQ ID NO: 2399584 - RNA, 13 nt, Human
aagugguauagaa

SEQ ID NO: 2399585 - RNA, 18 nt, Human
aaguguaaagcauuccaa

SEQ ID NO: 2399586 - RNA, 18 nt, Human
aaguugugccuuuuauag

SEQ ID NO: 2399587 - RNA, 22 nt, Human
aaguuguaggcauaaagucagg

SEQ ID NO: 2399588 - RNA, 20 nt, Human
aaguugugccuuuuauagcu

SEQ ID NO: 2399589 - RNA, 19 nt, Human
aaguugugccuuuuauagc

SEQ ID NO: 2399590 - RNA, 15 nt, Human
aaguugugcuuguuu

SEQ ID NO: 2399591 - RNA, 15 nt, Human
aaguuguuaauaaaa

SEQ ID NO: 2399592 - RNA, 12 nt, Human
aaguuguuugag

SEQ ID NO: 2399593 - RNA, 15 nt, Human
aaguuguuucauuga

SEQ ID NO: 2399594 - RNA, 20 nt, Human
aaguuguggugcugacaaag

SEQ ID NO: 2399595 - RNA, 16 nt, Human
aaguuguggugcugac

SEQ ID NO: 2399596 - RNA, 20 nt, Human
aaguuguuacuaacuaaacu

SEQ ID NO: 2399597 - RNA, 17 nt, Human
aaguuguuaacuaaauu

SEQ ID NO: 2399598 - RNA, 23 nt, Human
aaguuguuacuaacuaaacucuc

SEQ ID NO: 2399599 - RNA, 21 nt, Human
aaguuguuacuaacuaaacuc

SEQ ID NO: 2399600 - RNA, 14 nt, Human
aauaaaauugcacu

SEQ ID NO: 2399601 - RNA, 15 nt, Human
aauaaaauuauuuug

SEQ ID NO: 2399602 - RNA, 23 nt, Human
aauaaaauuaaagcugaaaacug

SEQ ID NO: 2399603 - RNA, 17 nt, Human
aauaaaauguugaaaag

SEQ ID NO: 2399604 - RNA, 21 nt, Human
aauaaaaugugauuuuucuga

SEQ ID NO: 2399605 - RNA, 13 nt, Human
aauaaaaugugau

SEQ ID NO: 2399606 - RNA, 14 nt, Human
aauaaaaugugauu

SEQ ID NO: 2399607 - RNA, 19 nt, Human
aauaaaaugaggacauguu

SEQ ID NO: 2399608 - RNA, 19 nt, Human
aauaaacuauuuguaaagu

SEQ ID NO: 2399609 - RNA, 18 nt, Human
aauaaacuggcagcucag

SEQ ID NO: 2399610 - RNA, 18 nt, Human
aauaaacucaaugagcuc

SEQ ID NO: 2399611 - RNA, 17 nt, Human
aauaaacuguguuuacu

SEQ ID NO: 2399612 - RNA, 21 nt, Human
aauaaacuuagaauaaaauug

SEQ ID NO: 2399613 - RNA, 19 nt, Human
aauaaacuuagaauaaaau

SEQ ID NO: 2399614 - RNA, 17 nt, Human
aauaaacuuagaauaaa

SEQ ID NO: 2399615 - RNA, 15 nt, Human
aauaaacucuaaaca

SEQ ID NO: 2399616 - RNA, 17 nt, Human
aauaagugccaggaugg

SEQ ID NO: 2399617 - RNA, 17 nt, Human
aauaagugguuauuucu

SEQ ID NO: 2399618 - RNA, 11 nt, Human
aauaaguuauu

SEQ ID NO: 2399619 - RNA, 22 nt, Human
aauaaguuaacuauuuuauuuu

SEQ ID NO: 2399620 - RNA, 18 nt, Human
aaggugcugacggccagg

SEQ ID NO: 2399621 - RNA, 11 nt, Human
aaggugggagg

SEQ ID NO: 2399622 - RNA, 20 nt, Human
aaggugcuggaggugggagc

SEQ ID NO: 2399623 - RNA, 15 nt, Human
aaggugcuggaggug

SEQ ID NO: 2399624 - RNA, 20 nt, Human
aagguggacuggaaggggcc

SEQ ID NO: 2399625 - RNA, 22 nt, Human
aaggugggccuugcuaccucaa

SEQ ID NO: 2399626 - RNA, 18 nt, Human
aaggugggcugagcccug

SEQ ID NO: 2399627 - RNA, 19 nt, Human
aaggugggcugagcccugg

SEQ ID NO: 2399628 - RNA, 19 nt, Human
aagguggauggccccagca

SEQ ID NO: 2399629 - RNA, 17 nt, Human
aaggugggccuugcuac

SEQ ID NO: 2399630 - RNA, 16 nt, Human
aaggugggcugagccc

SEQ ID NO: 2399631 - RNA, 15 nt, Human
aagguuaauaaagua

SEQ ID NO: 2399632 - RNA, 16 nt, Human
aagguuaauaaaguaa

SEQ ID NO: 2399633 - RNA, 20 nt, Human
aagguuaauguucaucaucc

SEQ ID NO: 2399634 - RNA, 18 nt, Human
aagguucuggugugaacu

SEQ ID NO: 2399635 - RNA, 21 nt, Human
aagguucuucccuuuuacaua

SEQ ID NO: 2399636 - RNA, 22 nt, Human
aagguugacaauaaaugugcuu

SEQ ID NO: 2399637 - RNA, 16 nt, Human
aagguugggcagggug

SEQ ID NO: 2399638 - RNA, 13 nt, Human
aagguuguauugc

SEQ ID NO: 2399639 - RNA, 23 nt, Human
aagguuuaaacuucucugaaggg

SEQ ID NO: 2399640 - RNA, 22 nt, Human
aagguuuaaacuucucugaagg

SEQ ID NO: 2399641 - RNA, 17 nt, Human
aagguuguauugcauau

SEQ ID NO: 2399642 - RNA, 16 nt, Human
aagguuaagcccugag

SEQ ID NO: 2399643 - RNA, 15 nt, Human
aaguacuuuuggcau

SEQ ID NO: 2399644 - RNA, 14 nt, Human
aaguacuuuuggca

SEQ ID NO: 2399645 - RNA, 21 nt, Human
aagguuuacaauuuacaaagu

SEQ ID NO: 2399646 - RNA, 15 nt, Human
aagguuuaggcuggu

SEQ ID NO: 2399647 - RNA, 19 nt, Human
aagguuuaggcugguggcc

SEQ ID NO: 2399648 - RNA, 20 nt, Human
aagguuuaggcugguggccc

SEQ ID NO: 2399649 - RNA, 21 nt, Human
aagguuuaggcugguggccca

SEQ ID NO: 2399650 - RNA, 11 nt, Human
aaguacuucuu

SEQ ID NO: 2399651 - RNA, 12 nt, Human
aaguauauaaug

SEQ ID NO: 2399652 - RNA, 18 nt, Human
aaguauauauauauauua

SEQ ID NO: 2399653 - RNA, 11 nt, Human
aaguaucaugc

SEQ ID NO: 2399654 - RNA, 23 nt, Human
aaguauauaaugguuucaaagau

SEQ ID NO: 2399655 - RNA, 18 nt, Human
aaguauauaaugguuuca

SEQ ID NO: 2399656 - RNA, 11 nt, Human
aaguauauaua

SEQ ID NO: 2399657 - RNA, 16 nt, Human
aaguauauauagaauc

SEQ ID NO: 2399658 - RNA, 13 nt, Human
aaguauauauuua

SEQ ID NO: 2399659 - RNA, 23 nt, Human
aaguccaggcuuuuuuaucaugu

SEQ ID NO: 2399660 - RNA, 12 nt, Human
aaguauguaaag

SEQ ID NO: 2399661 - RNA, 21 nt, Human
aaguauguaaacaggagacag

SEQ ID NO: 2399662 - RNA, 22 nt, Human
aaguauguaaaguauguaaaca

SEQ ID NO: 2399663 - RNA, 13 nt, Human
aaguaugugagug

SEQ ID NO: 2399664 - RNA, 18 nt, Human
aaguauguguaaaaugug

SEQ ID NO: 2399665 - RNA, 18 nt, Human
aaguaugugagugugucc

SEQ ID NO: 2399666 - RNA, 16 nt, Human
aaguaucccuacugua

SEQ ID NO: 2399667 - RNA, 15 nt, Human
aaguaucugacaucu

SEQ ID NO: 2399668 - RNA, 14 nt, Human
aaguaucaugcauu

SEQ ID NO: 2399669 - RNA, 12 nt, Human
aaguaucaugca

SEQ ID NO: 2399670 - RNA, 15 nt, Human
aaguaucaugcauuc

SEQ ID NO: 2399671 - RNA, 23 nt, Human
aaguaugaaucuaugccaaagau

SEQ ID NO: 2399672 - RNA, 16 nt, Human
aaguaugaaucuaugc

SEQ ID NO: 2399673 - RNA, 14 nt, Human
aaguaugaaucuau

SEQ ID NO: 2399674 - RNA, 14 nt, Human
aaguaucuucaugu

SEQ ID NO: 2399675 - RNA, 22 nt, Human
aaguaucugacaucucugcaau

SEQ ID NO: 2399676 - RNA, 18 nt, Human
aaguaucuuuuuucaaaa

SEQ ID NO: 2399677 - RNA, 21 nt, Human
aaguaugagggaaaaugagua

SEQ ID NO: 2399678 - RNA, 17 nt, Human
aaguaugagggaaaaug

SEQ ID NO: 2399679 - RNA, 13 nt, Human
aaguauguaaaca

SEQ ID NO: 2399680 - RNA, 16 nt, Human
aagucuuagauguaua

SEQ ID NO: 2399681 - RNA, 15 nt, Human
aagucuguuuuauga

SEQ ID NO: 2399682 - RNA, 16 nt, Human
aagucuguuuuaugac

SEQ ID NO: 2399683 - RNA, 18 nt, Human
aagucuguuuuaugacuu

SEQ ID NO: 2399684 - RNA, 19 nt, Human
aagucuguuuuaugacuuc

SEQ ID NO: 2399685 - RNA, 23 nt, Human
aagucuuaaaauaacuuauauca

SEQ ID NO: 2399686 - RNA, 18 nt, Human
aagucuuaaaauaacuua

SEQ ID NO: 2399687 - RNA, 17 nt, Human
aagucuuaaaauaacuu

SEQ ID NO: 2399688 - RNA, 20 nt, Human
aagucuguuuuaugacuuca

SEQ ID NO: 2399689 - RNA, 23 nt, Human
aagucuguuuuaugacuucauua

SEQ ID NO: 2399690 - RNA, 19 nt, Human
aagucucuggaauuugaaa

SEQ ID NO: 2399691 - RNA, 16 nt, Human
aagucucugcuggccc

SEQ ID NO: 2399692 - RNA, 21 nt, Human
aagucucugcuggcccagcca

SEQ ID NO: 2399693 - RNA, 23 nt, Human
aaguccagauuuacacugggaga

SEQ ID NO: 2399694 - RNA, 21 nt, Human
aaguccccgaguuuccccaga

SEQ ID NO: 2399695 - RNA, 14 nt, Human
aaguccccaggccc

SEQ ID NO: 2399696 - RNA, 18 nt, Human
aaguccccaggccccagg

SEQ ID NO: 2399697 - RNA, 21 nt, Human
aaguccccaggccccaggaag

SEQ ID NO: 2399698 - RNA, 23 nt, Human
aaguccccaggccccaggaagcc

SEQ ID NO: 2399699 - RNA, 19 nt, Human
aagucccugacucucugug

SEQ ID NO: 2399700 - RNA, 22 nt, Human
aaguccccaggccccaggaagc

SEQ ID NO: 2399701 - RNA, 22 nt, Human
aagucucugaagugaaacugcu

SEQ ID NO: 2399702 - RNA, 15 nt, Human
aagucucugcuggcc

SEQ ID NO: 2399703 - RNA, 19 nt, Human
aagucucugaagugaaacu

SEQ ID NO: 2399704 - RNA, 17 nt, Human
aagucucuagguucuga

SEQ ID NO: 2399705 - RNA, 14 nt, Human
aagucuccuucccc

SEQ ID NO: 2399706 - RNA, 16 nt, Human
aagcuaaaaccugagc

SEQ ID NO: 2399707 - RNA, 12 nt, Human
aagcguggugga

SEQ ID NO: 2399708 - RNA, 21 nt, Human
aagcuaaauccuuuacuguua

SEQ ID NO: 2399709 - RNA, 23 nt, Human
aagcuaaaaccugagcuagaagc

SEQ ID NO: 2399710 - RNA, 11 nt, Human
aagcuaaagag

SEQ ID NO: 2399711 - RNA, 21 nt, Human
aagcugcacccucaggcaggu

SEQ ID NO: 2399712 - RNA, 20 nt, Human
aagcugcacccucaggcagg

SEQ ID NO: 2399713 - RNA, 23 nt, Human
aagcugccuccccucuccuuccu

SEQ ID NO: 2399714 - RNA, 22 nt, Human
aagcugcacccucaggcaggug

SEQ ID NO: 2399715 - RNA, 15 nt, Human
aagcugccugcuuuu

SEQ ID NO: 2399716 - RNA, 12 nt, Human
aagcugccugcu

SEQ ID NO: 2399717 - RNA, 20 nt, Human
aagcugccugcuuuucacug

SEQ ID NO: 2399718 - RNA, 17 nt, Human
aagcugccugcuuuuca

SEQ ID NO: 2399719 - RNA, 15 nt, Human
aagcugccugguaua

SEQ ID NO: 2399720 - RNA, 20 nt, Human
aagcugccugguauauccaa

SEQ ID NO: 2399721 - RNA, 14 nt, Human
aagcugccuguagu

SEQ ID NO: 2399722 - RNA, 16 nt, Human
aaggauuuuaugcuuu

SEQ ID NO: 2399723 - RNA, 20 nt, Human
aaggauuuuaugcuuuaaac

SEQ ID NO: 2399724 - RNA, 21 nt, Human
aaggauuuuaugcuuuaaaca

SEQ ID NO: 2399725 - RNA, 22 nt, Human
aaggauuuuaugcuuuaaacau

SEQ ID NO: 2399726 - RNA, 23 nt, Human
aaggauuuuaugcuuuaaacauu

SEQ ID NO: 2399727 - RNA, 12 nt, Human
aaggauuuuaug

SEQ ID NO: 2399728 - RNA, 13 nt, Human
aaggauuuuaugc

SEQ ID NO: 2399729 - RNA, 14 nt, Human
aaggauugugauau

SEQ ID NO: 2399730 - RNA, 20 nt, Human
aaggacugugacaggcagca

SEQ ID NO: 2399731 - RNA, 17 nt, Human
aaggauugugauauuuu

SEQ ID NO: 2399732 - RNA, 23 nt, Human
aaggacugcgggacuugggucuc

SEQ ID NO: 2399733 - RNA, 17 nt, Human
aaggacugagggacucu

SEQ ID NO: 2399734 - RNA, 13 nt, Human
aaggacugaggga

SEQ ID NO: 2399735 - RNA, 22 nt, Human
aaggacugccgaccgaggcugg

SEQ ID NO: 2399736 - RNA, 18 nt, Human
aaggacuaggguccuggg

SEQ ID NO: 2399737 - RNA, 20 nt, Human
aaggacuaggguccugggga

SEQ ID NO: 2399738 - RNA, 13 nt, Human
aaggacuccaccc

SEQ ID NO: 2399739 - RNA, 12 nt, Human
aaggacucuggg

SEQ ID NO: 2399740 - RNA, 15 nt, Human
aaggacuaggguccu

SEQ ID NO: 2399741 - RNA, 21 nt, Human
aaggacccggaggggccuggc

SEQ ID NO: 2399742 - RNA, 18 nt, Human
aaggacccggaggggccu

SEQ ID NO: 2399743 - RNA, 20 nt, Human
aaggaccacauuuuauauuu

SEQ ID NO: 2399744 - RNA, 13 nt, Human
aaggaccccucac

SEQ ID NO: 2399745 - RNA, 15 nt, Human
aaggaccccucaccu

SEQ ID NO: 2399746 - RNA, 20 nt, Human
aaggaccccucaccuugcaa

SEQ ID NO: 2399747 - RNA, 22 nt, Human
aagcuggccgaggguccuggcu

SEQ ID NO: 2399748 - RNA, 21 nt, Human
aagcuggccgaggguccuggc

SEQ ID NO: 2399749 - RNA, 11 nt, Human
aagcugggcag

SEQ ID NO: 2399750 - RNA, 16 nt, Human
aagcugcucuggaauu

SEQ ID NO: 2399751 - RNA, 22 nt, Human
aagcugccuguaguuaggaaau

SEQ ID NO: 2399752 - RNA, 15 nt, Human
aagcugccuguaguu

SEQ ID NO: 2399753 - RNA, 16 nt, Human
aagcugccuguaguua

SEQ ID NO: 2399754 - RNA, 19 nt, Human
aagcugccuguaguuagga

SEQ ID NO: 2399755 - RNA, 21 nt, Human
aagcugccuguaguuaggaaa

SEQ ID NO: 2399756 - RNA, 18 nt, Human
aaggacauugcggacagc

SEQ ID NO: 2399757 - RNA, 23 nt, Human
aaggaccacauuuuauauuuauu

SEQ ID NO: 2399758 - RNA, 19 nt, Human
aaggaccacauuuuauauu

SEQ ID NO: 2399759 - RNA, 16 nt, Human
aaggaccacauuuuau

SEQ ID NO: 2399760 - RNA, 12 nt, Human
aaggaccaggac

SEQ ID NO: 2399761 - RNA, 13 nt, Human
aaggaccaggacu

SEQ ID NO: 2399762 - RNA, 13 nt, Human
aagcugggcaggu

SEQ ID NO: 2399763 - RNA, 18 nt, Human
aaggcaaggcugucaauu

SEQ ID NO: 2399764 - RNA, 17 nt, Human
aaggcaaggcugucaau

SEQ ID NO: 2399765 - RNA, 16 nt, Human
aaggcaaggcugucaa

SEQ ID NO: 2399766 - RNA, 14 nt, Human
aaggcaaaaaugua

SEQ ID NO: 2399767 - RNA, 22 nt, Human
aaggcaaugccauccucaaaca

SEQ ID NO: 2399768 - RNA, 20 nt, Human
aaggcaaguuucuagcuaga

SEQ ID NO: 2399769 - RNA, 22 nt, Human
aaggcaccuauaaaacagguca

SEQ ID NO: 2399770 - RNA, 16 nt, Human
aagcugccucaaggaa

SEQ ID NO: 2399771 - RNA, 16 nt, Human
aagauuuaccacuugu

SEQ ID NO: 2399772 - RNA, 16 nt, Human
aagaacauagaacucu

SEQ ID NO: 2399773 - RNA, 18 nt, Human
aagaacauccaaggagaa

SEQ ID NO: 2399774 - RNA, 16 nt, Human
aagauugcugaaauuu

SEQ ID NO: 2399775 - RNA, 16 nt, Human
aagauugcuuaaaaua

SEQ ID NO: 2399776 - RNA, 17 nt, Human
aagauuuaucaaaucag

SEQ ID NO: 2399777 - RNA, 14 nt, Human
aagauuuaucaaau

SEQ ID NO: 2399778 - RNA, 16 nt, Human
aagauuuccauauaaa

SEQ ID NO: 2399779 - RNA, 18 nt, Human
aagauuuaucaaaucagu

SEQ ID NO: 2399780 - RNA, 17 nt, Human
aagauuuccaagugcca

SEQ ID NO: 2399781 - RNA, 17 nt, Human
aagauuuggaauaaagu

SEQ ID NO: 2399782 - RNA, 16 nt, Human
aagauuugcuuuaauu

SEQ ID NO: 2399783 - RNA, 23 nt, Human
aagauuugaugcuggagagguua

SEQ ID NO: 2399784 - RNA, 22 nt, Human
aagauuugaugcuggagagguu

SEQ ID NO: 2399785 - RNA, 13 nt, Human
aagauuucuugag

SEQ ID NO: 2399786 - RNA, 16 nt, Human
aagauuuuaaagacau

SEQ ID NO: 2399787 - RNA, 21 nt, Human
aagauuuguuuugucaagugu

SEQ ID NO: 2399788 - RNA, 21 nt, Human
aagaacaaaaaaaucugcaga

SEQ ID NO: 2399789 - RNA, 20 nt, Human
aagaacaaaaaaaucugcag

SEQ ID NO: 2399790 - RNA, 16 nt, Human
aagaaauugcaauaac

SEQ ID NO: 2399791 - RNA, 13 nt, Human
aagaaauugcaau

SEQ ID NO: 2399792 - RNA, 17 nt, Human
aagaaauuuaaaagaca

SEQ ID NO: 2399793 - RNA, 16 nt, Human
aagaaauuugauuucu

SEQ ID NO: 2399794 - RNA, 21 nt, Human
aagaacacccuauauuuugca

SEQ ID NO: 2399795 - RNA, 19 nt, Human
aagaacacccuauauuuug

SEQ ID NO: 2399796 - RNA, 20 nt, Human
aagaacacuuuuaauaaacu

SEQ ID NO: 2399797 - RNA, 16 nt, Human
aagaacacccucuaaa

SEQ ID NO: 2399798 - RNA, 12 nt, Human
aagaacauagaa

SEQ ID NO: 2399799 - RNA, 14 nt, Human
aagaacaagaauuu

SEQ ID NO: 2399800 - RNA, 15 nt, Human
aagaacaauauugac

SEQ ID NO: 2399801 - RNA, 21 nt, Human
aagaacaaagagaaaaaauac

SEQ ID NO: 2399802 - RNA, 21 nt, Human
aagaacaauauugacuuuguc

SEQ ID NO: 2399803 - RNA, 22 nt, Human
aagaaauuaugugccagauuua

SEQ ID NO: 2399804 - RNA, 17 nt, Human
aagaaauuccuguagca

SEQ ID NO: 2399805 - RNA, 14 nt, Human
aagaaauuccugua

SEQ ID NO: 2399806 - RNA, 13 nt, Human
aagaaauuaugug

SEQ ID NO: 2399807 - RNA, 12 nt, Human
aagccagcuuuc

SEQ ID NO: 2399808 - RNA, 14 nt, Human
aagccagcuuuccc

SEQ ID NO: 2399809 - RNA, 15 nt, Human
aagccagcuuucccu

SEQ ID NO: 2399810 - RNA, 17 nt, Human
aagccagcuuucccugc

SEQ ID NO: 2399811 - RNA, 23 nt, Human
aagccagcuuucccugccucuca

SEQ ID NO: 2399812 - RNA, 20 nt, Human
aagccaggaauuucccagga

SEQ ID NO: 2399813 - RNA, 21 nt, Human
aagccaggaauuucccaggac

SEQ ID NO: 2399814 - RNA, 22 nt, Human
aagccaggaauuucccaggacc

SEQ ID NO: 2399815 - RNA, 20 nt, Human
aagccagcguccuccucugu

SEQ ID NO: 2399816 - RNA, 15 nt, Human
aagccagcugccgac

SEQ ID NO: 2399817 - RNA, 21 nt, Human
aagccagcugccgaccagagc

SEQ ID NO: 2399818 - RNA, 23 nt, Human
aagccagcugccgaccagagccc

SEQ ID NO: 2399819 - RNA, 16 nt, Human
aagccagaggcugggu

SEQ ID NO: 2399820 - RNA, 15 nt, Human
aagccagaggcuggg

SEQ ID NO: 2399821 - RNA, 19 nt, Human
aagccagcguccuccucug

SEQ ID NO: 2399822 - RNA, 13 nt, Human
aagccagauuuuc

SEQ ID NO: 2399823 - RNA, 14 nt, Human
aagccagaggcugg

SEQ ID NO: 2399824 - RNA, 11 nt, Human
aagccagacag

SEQ ID NO: 2399825 - RNA, 13 nt, Human
aagccagaagcug

SEQ ID NO: 2399826 - RNA, 14 nt, Human
aagccagaagcuga

SEQ ID NO: 2399827 - RNA, 17 nt, Human
aagccagaagcugagca

SEQ ID NO: 2399828 - RNA, 20 nt, Human
aagccagaagcugagcacca

SEQ ID NO: 2399829 - RNA, 18 nt, Human
aagccacuuaaaauguuc

SEQ ID NO: 2399830 - RNA, 15 nt, Human
aagccagaaccagau

SEQ ID NO: 2399831 - RNA, 12 nt, Human
aagccagaagcu

SEQ ID NO: 2399832 - RNA, 15 nt, Human
aagcaggcuggaggu

SEQ ID NO: 2399833 - RNA, 22 nt, Human
aagcaggcuacacugacacugg

SEQ ID NO: 2399834 - RNA, 16 nt, Human
aagcaggcuacacuga

SEQ ID NO: 2399835 - RNA, 21 nt, Human
aagcaggaggaggugccaaca

SEQ ID NO: 2399836 - RNA, 16 nt, Human
aagcaggaagcucaga

SEQ ID NO: 2399837 - RNA, 17 nt, Human
aagcagcuuuaaacaaa

SEQ ID NO: 2399838 - RNA, 16 nt, Human
aagcagcuuuaaacaa

SEQ ID NO: 2399839 - RNA, 22 nt, Human
aagcaggaaaugaaaaugucuu

SEQ ID NO: 2399840 - RNA, 21 nt, Human
aagcagcuuuaaacaaauuca

SEQ ID NO: 2399841 - RNA, 11 nt, Human
aagcaggaagc

SEQ ID NO: 2399842 - RNA, 12 nt, Human
aagcaggaagcu

SEQ ID NO: 2399843 - RNA, 13 nt, Human
aagcaggaagcuc

SEQ ID NO: 2399844 - RNA, 11 nt, Human
aagcagcucuu

SEQ ID NO: 2399845 - RNA, 17 nt, Human
aagcagcucuugcuaau

SEQ ID NO: 2399846 - RNA, 17 nt, Human
aagcagcucuccccuca

SEQ ID NO: 2399847 - RNA, 13 nt, Human
aagcagagcuucc

SEQ ID NO: 2399848 - RNA, 14 nt, Human
aagcagcucucccc

SEQ ID NO: 2399849 - RNA, 13 nt, Human
aagcagcucuccc

SEQ ID NO: 2399850 - RNA, 21 nt, Human
aagcagaccacugauaaaacc

SEQ ID NO: 2399851 - RNA, 14 nt, Human
aagcagacagcucc

SEQ ID NO: 2399852 - RNA, 15 nt, Human
aagcagacagcucca

SEQ ID NO: 2399853 - RNA, 12 nt, Human
aagcagacagcu

SEQ ID NO: 2399854 - RNA, 17 nt, Human
aagauuuuaaucaaguu

SEQ ID NO: 2399855 - RNA, 18 nt, Human
aagauuuuaaucaaguug

SEQ ID NO: 2399856 - RNA, 13 nt, Human
aagauuuuaaauu

SEQ ID NO: 2399857 - RNA, 14 nt, Human
aagcagaggaagga

SEQ ID NO: 2399858 - RNA, 18 nt, Human
aagccauaauuguucuua

SEQ ID NO: 2399859 - RNA, 14 nt, Human
aagccaucuuggua

SEQ ID NO: 2399860 - RNA, 15 nt, Human
aagccaucuugguaa

SEQ ID NO: 2399861 - RNA, 16 nt, Human
aagccaucuugguaaa

SEQ ID NO: 2399862 - RNA, 13 nt, Human
aauauaagaauaa

SEQ ID NO: 2399863 - RNA, 21 nt, Human
aauauaacuuaaaaauguaaa

SEQ ID NO: 2399864 - RNA, 22 nt, Human
aauauaacugccuuaaaacuuu

SEQ ID NO: 2399865 - RNA, 20 nt, Human
aauauaggaacuuaaauaau

SEQ ID NO: 2399866 - RNA, 21 nt, Human
aauauaggaacuuaaauaaug

SEQ ID NO: 2399867 - RNA, 21 nt, Human
aauauggacacuuaauacuac

SEQ ID NO: 2399868 - RNA, 17 nt, Human
aauauggacucaguuuu

SEQ ID NO: 2399869 - RNA, 17 nt, Human
aauauggacacuuaaua

SEQ ID NO: 2399870 - RNA, 18 nt, Human
aauauauaaaaagaaaag

SEQ ID NO: 2399871 - RNA, 18 nt, Human
aauauaauuuuuuagaga

SEQ ID NO: 2399872 - RNA, 18 nt, Human
aauauaggaacuuaaaua

SEQ ID NO: 2399873 - RNA, 11 nt, Human
aauauaauuau

SEQ ID NO: 2399874 - RNA, 16 nt, Human
aauauaauucuguaaa

SEQ ID NO: 2399875 - RNA, 15 nt, Human
aauauaauucuguaa

SEQ ID NO: 2399876 - RNA, 13 nt, Human
aauauaauucugu

SEQ ID NO: 2399877 - RNA, 14 nt, Human
aauauaauuaucgg

SEQ ID NO: 2399878 - RNA, 22 nt, Human
aauauaagaauaaaauguugaa

SEQ ID NO: 2399879 - RNA, 16 nt, Human
aauauaagaauaaaau

SEQ ID NO: 2399880 - RNA, 18 nt, Human
aauauaaggaaagcaaua

SEQ ID NO: 2399881 - RNA, 19 nt, Human
aauauaaggaaagcaauaa

SEQ ID NO: 2399882 - RNA, 21 nt, Human
aauauaaggaaagcaauaaau

SEQ ID NO: 2399883 - RNA, 16 nt, Human
aauauaaguuucuuug

SEQ ID NO: 2399884 - RNA, 23 nt, Human
aauauaaggaaagcaauaaauga

SEQ ID NO: 2399885 - RNA, 17 nt, Human
aauauaaguuucuuugc

SEQ ID NO: 2399886 - RNA, 14 nt, Human
aauauaauacugua

SEQ ID NO: 2399887 - RNA, 20 nt, Human
aaucaauuacugguccaaaa

SEQ ID NO: 2399888 - RNA, 18 nt, Human
aaucaauuuaaacccauu

SEQ ID NO: 2399889 - RNA, 13 nt, Human
aaucacagaauca

SEQ ID NO: 2399890 - RNA, 22 nt, Human
aaucaauuuaaacccauuuuag

SEQ ID NO: 2399891 - RNA, 20 nt, Human
aaucaauuuaaacccauuuu

SEQ ID NO: 2399892 - RNA, 21 nt, Human
aaucacagcuuguauuuugug

SEQ ID NO: 2399893 - RNA, 19 nt, Human
aaucacagcuuguauuuug

SEQ ID NO: 2399894 - RNA, 16 nt, Human
aaucacauccuggccu

SEQ ID NO: 2399895 - RNA, 13 nt, Human
aaucacauccugg

SEQ ID NO: 2399896 - RNA, 11 nt, Human
aaucacauccu

SEQ ID NO: 2399897 - RNA, 15 nt, Human
aaucacaguuggccu

SEQ ID NO: 2399898 - RNA, 13 nt, Human
aaucacaauacau

SEQ ID NO: 2399899 - RNA, 22 nt, Human
aaucaauuaauuuuuuuauugu

SEQ ID NO: 2399900 - RNA, 15 nt, Human
aaucaagaaacuuaa

SEQ ID NO: 2399901 - RNA, 14 nt, Human
aaucaacugggcug

SEQ ID NO: 2399902 - RNA, 19 nt, Human
aaucaacugggcugaacac

SEQ ID NO: 2399903 - RNA, 14 nt, Human
aaucaacucuaaua

SEQ ID NO: 2399904 - RNA, 16 nt, Human
aauauuauguuaaaac

SEQ ID NO: 2399905 - RNA, 14 nt, Human
aauauuauguguuu

SEQ ID NO: 2399906 - RNA, 15 nt, Human
aauauguauuguaaa

SEQ ID NO: 2399907 - RNA, 14 nt, Human
aauauguauuguaa

SEQ ID NO: 2399908 - RNA, 20 nt, Human
aauauguauuguaaacaugu

SEQ ID NO: 2399909 - RNA, 19 nt, Human
aauaugggcauuguaguua

SEQ ID NO: 2399910 - RNA, 18 nt, Human
aauauggcuauaaauaua

SEQ ID NO: 2399911 - RNA, 15 nt, Human
aauauggcuauaaau

SEQ ID NO: 2399912 - RNA, 13 nt, Human
aauaugggagaaa

SEQ ID NO: 2399913 - RNA, 16 nt, Human
aauaugguugauaguu

SEQ ID NO: 2399914 - RNA, 18 nt, Human
aauaugguguacauucuu

SEQ ID NO: 2399915 - RNA, 21 nt, Human
aaugaugauguggaagaacuu

SEQ ID NO: 2399916 - RNA, 19 nt, Human
aaugaugccaugaggaaca

SEQ ID NO: 2399917 - RNA, 16 nt, Human
aaugaucucuucuuuu

SEQ ID NO: 2399918 - RNA, 20 nt, Human
aaugaugaugggaauugugu

SEQ ID NO: 2399919 - RNA, 17 nt, Human
aaugaucuuuucaaguu

SEQ ID NO: 2399920 - RNA, 14 nt, Human
aauccauacauuug

SEQ ID NO: 2399921 - RNA, 13 nt, Human
aauccauacauuu

SEQ ID NO: 2399922 - RNA, 20 nt, Human
aauccaggcagauccaggac

SEQ ID NO: 2399923 - RNA, 21 nt, Human
aauccaggcagauccaggacu

SEQ ID NO: 2399924 - RNA, 22 nt, Human
aauccaggcagauccaggacua

SEQ ID NO: 2399925 - RNA, 18 nt, Human
aauccaggguggugguga

SEQ ID NO: 2399926 - RNA, 18 nt, Human
aaucccaaauuugauuga

SEQ ID NO: 2399927 - RNA, 13 nt, Human
aaucuccaaaaua

SEQ ID NO: 2399928 - RNA, 14 nt, Human
aaucuccaaaauaa

SEQ ID NO: 2399929 - RNA, 22 nt, Human
aaucugauuuguuuuccucuua

SEQ ID NO: 2399930 - RNA, 11 nt, Human
aaucccaaauu

SEQ ID NO: 2399931 - RNA, 16 nt, Human
aaucccaaauuugauu

SEQ ID NO: 2399932 - RNA, 19 nt, Human
aauccauguuaguuuuuac

SEQ ID NO: 2399933 - RNA, 22 nt, Human
aauccauguuaguuuuuacuuu

SEQ ID NO: 2399934 - RNA, 17 nt, Human
aauccauguuaguuuuu

SEQ ID NO: 2399935 - RNA, 20 nt, Human
aaugauaacuggaaacuuca

SEQ ID NO: 2399936 - RNA, 18 nt, Human
aaugauaaguaaaugcua

SEQ ID NO: 2399937 - RNA, 21 nt, Human
aaugaugauccuaggcauuug

SEQ ID NO: 2399938 - RNA, 21 nt, Human
aaugauaaguaaaugcuaggu

SEQ ID NO: 2399939 - RNA, 20 nt, Human
aaugauaauauuguggugcc

SEQ ID NO: 2399940 - RNA, 22 nt, Human
aaugaucucucugaauccuaag

SEQ ID NO: 2399941 - RNA, 17 nt, Human
aaugauaacuggaaacu

SEQ ID NO: 2399942 - RNA, 11 nt, Human
aaugaagaaag

SEQ ID NO: 2399943 - RNA, 15 nt, Human
aaugaacugaaguuu

SEQ ID NO: 2399944 - RNA, 14 nt, Human
aaugaacugaaguu

SEQ ID NO: 2399945 - RNA, 11 nt, Human
aaugaacugaa

SEQ ID NO: 2399946 - RNA, 18 nt, Human
aaugaaccgcugaauaug

SEQ ID NO: 2399947 - RNA, 22 nt, Human
aaugaacccccaugauguaagu

SEQ ID NO: 2399948 - RNA, 21 nt, Human
aaugaacccccaugauguaag

SEQ ID NO: 2399949 - RNA, 17 nt, Human
aaugaaccccacugggu

SEQ ID NO: 2399950 - RNA, 23 nt, Human
aaugaaccacaucuugcucugcu

SEQ ID NO: 2399951 - RNA, 17 nt, Human
aaugaaccacaucuugc

SEQ ID NO: 2399952 - RNA, 22 nt, Human
aaucuggaccccaucugugaau

SEQ ID NO: 2399953 - RNA, 16 nt, Human
aaugaaccacaucuug

SEQ ID NO: 2399954 - RNA, 23 nt, Human
aaucugcagaaggaaaaaugugu

SEQ ID NO: 2399955 - RNA, 17 nt, Human
aaucugcagaaggaaaa

SEQ ID NO: 2399956 - RNA, 14 nt, Human
aaucugcagaagga

SEQ ID NO: 2399957 - RNA, 23 nt, Human
aaucucauagguugccaauaaua

SEQ ID NO: 2399958 - RNA, 17 nt, Human
aaucucauugcuuacaa

SEQ ID NO: 2399959 - RNA, 22 nt, Human
aaucugcuuuuuaaagaaugcu

SEQ ID NO: 2399960 - RNA, 21 nt, Human
aaucuggaccccaucugugaa

SEQ ID NO: 2399961 - RNA, 18 nt, Human
aauuaguggcacuugcuu

SEQ ID NO: 2399962 - RNA, 21 nt, Human
aauuagugcuaagugugaacu

SEQ ID NO: 2399963 - RNA, 20 nt, Human
aauuaguuuuauaugcuucu

SEQ ID NO: 2399964 - RNA, 17 nt, Human
aauuaguuuuauaugcu

SEQ ID NO: 2399965 - RNA, 14 nt, Human
aauuaguuuuauau

SEQ ID NO: 2399966 - RNA, 22 nt, Human
aauuagugcuaagugugaacug

SEQ ID NO: 2399967 - RNA, 18 nt, Human
aaugucucugugagacuc

SEQ ID NO: 2399968 - RNA, 17 nt, Human
aaugucucugugagacu

SEQ ID NO: 2399969 - RNA, 20 nt, Human
aaugucuaauguauuuuauu

SEQ ID NO: 2399970 - RNA, 19 nt, Human
aaugucuaauguauuuuau

SEQ ID NO: 2399971 - RNA, 14 nt, Human
aaugucuauuaagg

SEQ ID NO: 2399972 - RNA, 16 nt, Human
aaugucuaauguauuu

SEQ ID NO: 2399973 - RNA, 18 nt, Human
aaugucuaaaugcugaaa

SEQ ID NO: 2399974 - RNA, 17 nt, Human
aaugucugagugaaccu

SEQ ID NO: 2399975 - RNA, 20 nt, Human
aaugucucuuuaaugucaca

SEQ ID NO: 2399976 - RNA, 21 nt, Human
aaugucagugugacugaucuc

SEQ ID NO: 2399977 - RNA, 17 nt, Human
aaugucagugugacuga

SEQ ID NO: 2399978 - RNA, 22 nt, Human
aaugucuaguuguaacaccaug

SEQ ID NO: 2399979 - RNA, 16 nt, Human
aaugucaguaugugga

SEQ ID NO: 2399980 - RNA, 22 nt, Human
aaugucaguauguggaagugug

SEQ ID NO: 2399981 - RNA, 13 nt, Human
aaugucaguguga

SEQ ID NO: 2399982 - RNA, 16 nt, Human
aaugucagugugacug

SEQ ID NO: 2399983 - RNA, 15 nt, Human
aaugucagugugacu

SEQ ID NO: 2399984 - RNA, 16 nt, Human
aauggugccuucauuu

SEQ ID NO: 2399985 - RNA, 22 nt, Human
aaugguggggaacuauaaagaa

SEQ ID NO: 2399986 - RNA, 16 nt, Human
aaugguguacauaaug

SEQ ID NO: 2399987 - RNA, 10 nt, Human
aauggugccu

SEQ ID NO: 2399988 - RNA, 13 nt, Human
aaugguguacaua

SEQ ID NO: 2399989 - RNA, 22 nt, Human
aauggugaaaauaaaauaaagc

SEQ ID NO: 2399990 - RNA, 22 nt, Human
aauggucuuucuaaugugugaa

SEQ ID NO: 2399991 - RNA, 15 nt, Human
aauggucgcccagga

SEQ ID NO: 2399992 - RNA, 16 nt, Human
aauggucgcccaggag

SEQ ID NO: 2399993 - RNA, 13 nt, Human
aaugggcagagca

SEQ ID NO: 2399994 - RNA, 15 nt, Human
aaugggcagagcaga

SEQ ID NO: 2399995 - RNA, 17 nt, Human
aaugggcuuagagcagu

SEQ ID NO: 2399996 - RNA, 12 nt, Human
aauggggccaga

SEQ ID NO: 2399997 - RNA, 13 nt, Human
aauggggccagau

SEQ ID NO: 2399998 - RNA, 22 nt, Human
aaugggcaguuacaugcauacu

SEQ ID NO: 2399999 - RNA, 21 nt, Human
aaugggcaguuacaugcauac

SEQ ID NO: 2400000 - RNA, 18 nt, Human
aaugggcaguuacaugca

SEQ ID NO: 2400001 - RNA, 17 nt, Human
aaugggcaguuacaugc

SEQ ID NO: 2400002 - RNA, 22 nt, Human
aaugggaacugccucuuuccug

SEQ ID NO: 2400003 - RNA, 16 nt, Human
aaugguaccagauaaa

SEQ ID NO: 2400004 - RNA, 17 nt, Human
aauggggaucacagaga

SEQ ID NO: 2400005 - RNA, 15 nt, Human
aaugguaccagauaa

SEQ ID NO: 2400006 - RNA, 16 nt, Human
aauggguuuuucccug

SEQ ID NO: 2400007 - RNA, 16 nt, Human
aaugguauaaauuuca

SEQ ID NO: 2400008 - RNA, 17 nt, Human
aaugguaggcauuuccu

SEQ ID NO: 2400009 - RNA, 18 nt, Human
aaugguaggcauuuccua

SEQ ID NO: 2400010 - RNA, 23 nt, Human
aaugguaguaaucacaguuggcc

SEQ ID NO: 2400011 - RNA, 22 nt, Human
aauggcuuauccagcuggugag

SEQ ID NO: 2400012 - RNA, 21 nt, Human
aauggcuuauccagcugguga

SEQ ID NO: 2400013 - RNA, 20 nt, Human
aaugggaaauacuacuccug

SEQ ID NO: 2400014 - RNA, 14 nt, Human
aaugggaaaagaga

SEQ ID NO: 2400015 - RNA, 12 nt, Human
aauuaaaguguc

SEQ ID NO: 2400016 - RNA, 15 nt, Human
aauuaaagcuguuau

SEQ ID NO: 2400017 - RNA, 21 nt, Human
aauuaaaguguccauugacau

SEQ ID NO: 2400018 - RNA, 20 nt, Human
aauuaaaguguccauugaca

SEQ ID NO: 2400019 - RNA, 18 nt, Human
aauuaaaguguccauuga

SEQ ID NO: 2400020 - RNA, 13 nt, Human
aauuaaagugucc

SEQ ID NO: 2400021 - RNA, 11 nt, Human
aauuaaaugua

SEQ ID NO: 2400022 - RNA, 12 nt, Human
aauuaaauguag

SEQ ID NO: 2400023 - RNA, 22 nt, Human
aauuaaauuuugaguucuacau

SEQ ID NO: 2400024 - RNA, 14 nt, Human
aauuaaauuuugag

SEQ ID NO: 2400025 - RNA, 14 nt, Human
aauuaaauuaggaa

SEQ ID NO: 2400026 - RNA, 13 nt, Human
aauguuuuucuau

SEQ ID NO: 2400027 - RNA, 15 nt, Human
aauguuuuucugcca

SEQ ID NO: 2400028 - RNA, 21 nt, Human
aauguuuuucugccagggagc

SEQ ID NO: 2400029 - RNA, 17 nt, Human
aauuaaaaaauuuccag

SEQ ID NO: 2400030 - RNA, 13 nt, Human
aauuaaaacugaa

SEQ ID NO: 2400031 - RNA, 18 nt, Human
aauuaaaacacaacaucu

SEQ ID NO: 2400032 - RNA, 22 nt, Human
aauuaaacggauuauuuuuuca

SEQ ID NO: 2400033 - RNA, 21 nt, Human
aauuaaacggauuauuuuuuc

SEQ ID NO: 2400034 - RNA, 17 nt, Human
aauuaaacggauuauuu

SEQ ID NO: 2400035 - RNA, 16 nt, Human
aauuaaacggauuauu

SEQ ID NO: 2400036 - RNA, 23 nt, Human
aauuaaacggauuauuuuuucag

SEQ ID NO: 2400037 - RNA, 15 nt, Human
aauuaaacggauuau

SEQ ID NO: 2400038 - RNA, 14 nt, Human
aauuaaacggauua

SEQ ID NO: 2400039 - RNA, 13 nt, Human
aauuaaacggauu

SEQ ID NO: 2400040 - RNA, 18 nt, Human
aauuaaaaguugaauuuu

SEQ ID NO: 2400041 - RNA, 12 nt, Human
aauuaaacggau

SEQ ID NO: 2400042 - RNA, 19 nt, Human
aauguuugccucugccucu

SEQ ID NO: 2400043 - RNA, 12 nt, Human
aauguuugcuau

SEQ ID NO: 2400044 - RNA, 23 nt, Human
aauguuugggcagaagggagaag

SEQ ID NO: 2400045 - RNA, 18 nt, Human
aauguuugggcagaaggg

SEQ ID NO: 2400046 - RNA, 18 nt, Human
aauguuugucucauccca

SEQ ID NO: 2400047 - RNA, 13 nt, Human
aauguuuuaaauu

SEQ ID NO: 2400048 - RNA, 14 nt, Human
aauguuuuaaauuc

SEQ ID NO: 2400049 - RNA, 15 nt, Human
aauguuuuaaauucu

SEQ ID NO: 2400050 - RNA, 12 nt, Human
aauguuuugaca

SEQ ID NO: 2400051 - RNA, 22 nt, Human
aauguuuuacugugaaacuggc

SEQ ID NO: 2400052 - RNA, 20 nt, Human
aauguuuuacugugaaacug

SEQ ID NO: 2400053 - RNA, 17 nt, Human
aauguuuuauacuguuu

SEQ ID NO: 2400054 - RNA, 20 nt, Human
aaugucuugaugcaugcacu

SEQ ID NO: 2400055 - RNA, 11 nt, Human
aaugucuugug

SEQ ID NO: 2400056 - RNA, 13 nt, Human
aaugucuuguguu

SEQ ID NO: 2400057 - RNA, 18 nt, Human
aauguuugccucugccuc

SEQ ID NO: 2400058 - RNA, 17 nt, Human
aaugucuguuaacuuaa

SEQ ID NO: 2400059 - RNA, 17 nt, Human
aaugucuucauuucauu

SEQ ID NO: 2400060 - RNA, 13 nt, Human
aaugucugugcua

SEQ ID NO: 2400061 - RNA, 12 nt, Human
aaugucugugcu

SEQ ID NO: 2400062 - RNA, 23 nt, Human
aaugucuguagcuccucaacuca

SEQ ID NO: 2400063 - RNA, 21 nt, Human
aaugucuucauuucauuguau

SEQ ID NO: 2400064 - RNA, 22 nt, Human
aaugucuucuguauucacuuau

SEQ ID NO: 2400065 - RNA, 17 nt, Human
aaauaacaauguuaagg

SEQ ID NO: 2400066 - RNA, 16 nt, Human
aaauaacaauguuaag

SEQ ID NO: 2400067 - RNA, 15 nt, Human
aaauaacaauguuaa

SEQ ID NO: 2400068 - RNA, 14 nt, Human
aaauaacaauguua

SEQ ID NO: 2400069 - RNA, 21 nt, Human
aaauaacaagucgaugaacua

SEQ ID NO: 2400070 - RNA, 14 nt, Human
aaauaacaaugugc

SEQ ID NO: 2400071 - RNA, 17 nt, Human
aaauaacaaugugcucu

SEQ ID NO: 2400072 - RNA, 23 nt, Human
aaauaacaaaucucaagcaaaca

SEQ ID NO: 2400073 - RNA, 19 nt, Human
aaauaaauuugguucuaau

SEQ ID NO: 2400074 - RNA, 17 nt, Human
aaaggcuucucucucac

SEQ ID NO: 2400075 - RNA, 15 nt, Human
aaaggcuucucucuc

SEQ ID NO: 2400076 - RNA, 14 nt, Human
aaagggaaacuauu

SEQ ID NO: 2400077 - RNA, 21 nt, Human
aaagggaacugaacauuccag

SEQ ID NO: 2400078 - RNA, 16 nt, Human
aaagggaacugaacau

SEQ ID NO: 2400079 - RNA, 16 nt, Human
aaagggacugagaaau

SEQ ID NO: 2400080 - RNA, 18 nt, Human
aaagggaaguugugccuu

SEQ ID NO: 2400081 - RNA, 19 nt, Human
aaagucucuggaauuugaa

SEQ ID NO: 2400082 - RNA, 22 nt, Human
aaagucucuggaauuugaaaca

SEQ ID NO: 2400083 - RNA, 20 nt, Human
aaagucucuggaauuugaaa

SEQ ID NO: 2400084 - RNA, 23 nt, Human
aaagucugugugaugaacuuucu

SEQ ID NO: 2400085 - RNA, 22 nt, Human
aaagucugugugaugaacuuuc

SEQ ID NO: 2400086 - RNA, 12 nt, Human
aaagucucuugu

SEQ ID NO: 2400087 - RNA, 11 nt, Human
aaagucugcaa

SEQ ID NO: 2400088 - RNA, 20 nt, Human
aaagucuucacucucugaag

SEQ ID NO: 2400089 - RNA, 12 nt, Human
aaagugaauuug

SEQ ID NO: 2400090 - RNA, 23 nt, Human
aaagugaagcaaaucagaaacuu

SEQ ID NO: 2400091 - RNA, 15 nt, Human
aaagugaauuugaau

SEQ ID NO: 2400092 - RNA, 17 nt, Human
aaagugaauuugaauga

SEQ ID NO: 2400093 - RNA, 19 nt, Human
aaagugaauuugaaugaaa

SEQ ID NO: 2400094 - RNA, 20 nt, Human
aaagugaauuugaaugaaaa

SEQ ID NO: 2400095 - RNA, 13 nt, Human
aaagugaagcaaa

SEQ ID NO: 2400096 - RNA, 20 nt, Human
aaagugaaaguccagaaacu

SEQ ID NO: 2400097 - RNA, 11 nt, Human
aaagugcuggg

SEQ ID NO: 2400098 - RNA, 14 nt, Human
aaagugacacagca

SEQ ID NO: 2400099 - RNA, 13 nt, Human
aaagugacacagc

SEQ ID NO: 2400100 - RNA, 21 nt, Human
aaagugaauuugaaugaaaaa

SEQ ID NO: 2400101 - RNA, 22 nt, Human
aaagugaauuugaaugaaaaau

SEQ ID NO: 2400102 - RNA, 20 nt, Human
aaagugagggccgagugaga

SEQ ID NO: 2400103 - RNA, 18 nt, Human
aaauaaaaggaagccaaa

SEQ ID NO: 2400104 - RNA, 16 nt, Human
aaauaaaagugaucaa

SEQ ID NO: 2400105 - RNA, 14 nt, Human
aaauaaaauaaagc

SEQ ID NO: 2400106 - RNA, 16 nt, Human
aaauaaaaugaccagu

SEQ ID NO: 2400107 - RNA, 15 nt, Human
aaauaaaaugaccag

SEQ ID NO: 2400108 - RNA, 14 nt, Human
aaauaaaaugacca

SEQ ID NO: 2400109 - RNA, 14 nt, Human
aaagugcugggauu

SEQ ID NO: 2400110 - RNA, 12 nt, Human
aaagugcuggga

SEQ ID NO: 2400111 - RNA, 17 nt, Human
aaauaaaaggaagccaa

SEQ ID NO: 2400112 - RNA, 14 nt, Human
aaauaaacucuaaa

SEQ ID NO: 2400113 - RNA, 15 nt, Human
aaauaaaauggauuu

SEQ ID NO: 2400114 - RNA, 22 nt, Human
aaauaaaauuaaagcugaaaac

SEQ ID NO: 2400115 - RNA, 17 nt, Human
aaauaaaauuuguugca

SEQ ID NO: 2400116 - RNA, 16 nt, Human
aaauaaaauuuguugc

SEQ ID NO: 2400117 - RNA, 15 nt, Human
aaauaaaauuuguug

SEQ ID NO: 2400118 - RNA, 13 nt, Human
aaauaaaauuaug

SEQ ID NO: 2400119 - RNA, 12 nt, Human
aaauaacaauga

SEQ ID NO: 2400120 - RNA, 13 nt, Human
aaauaaaggaacc

SEQ ID NO: 2400121 - RNA, 23 nt, Human
aaauaaaggaugugauuguggaa

SEQ ID NO: 2400122 - RNA, 13 nt, Human
aaauaaaguauau

SEQ ID NO: 2400123 - RNA, 20 nt, Human
aaauaaagcuugcaacaaaa

SEQ ID NO: 2400124 - RNA, 12 nt, Human
aaauaaagcccu

SEQ ID NO: 2400125 - RNA, 20 nt, Human
aaauacuguguuucagaagc

SEQ ID NO: 2400126 - RNA, 14 nt, Human
aaauacuguuugag

SEQ ID NO: 2400127 - RNA, 22 nt, Human
aaauacuguuuuuaacaacuau

SEQ ID NO: 2400128 - RNA, 22 nt, Human
aaauacuugucaauauuuaaac

SEQ ID NO: 2400129 - RNA, 21 nt, Human
aaauacuugucaauauuuaaa

SEQ ID NO: 2400130 - RNA, 20 nt, Human
aaauacuugucaauauuuaa

SEQ ID NO: 2400131 - RNA, 15 nt, Human
aaauacuuuaaagga

SEQ ID NO: 2400132 - RNA, 11 nt, Human
aaauacuuguc

SEQ ID NO: 2400133 - RNA, 17 nt, Human
aaauacuuuaaaggaaa

SEQ ID NO: 2400134 - RNA, 16 nt, Human
aaauacuuuaaaggaa

SEQ ID NO: 2400135 - RNA, 14 nt, Human
aaauagaaauaagu

SEQ ID NO: 2400136 - RNA, 16 nt, Human
aaauagaaccacuaug

SEQ ID NO: 2400137 - RNA, 22 nt, Human
aaauagaagaauacaaacauau

SEQ ID NO: 2400138 - RNA, 15 nt, Human
aaauagacaguauau

SEQ ID NO: 2400139 - RNA, 16 nt, Human
aaauagacaguauauu

SEQ ID NO: 2400140 - RNA, 19 nt, Human
aaauagacaguauauuuau

SEQ ID NO: 2400141 - RNA, 14 nt, Human
aaauaguauuugag

SEQ ID NO: 2400142 - RNA, 16 nt, Human
aaauaguaaaaauaaa

SEQ ID NO: 2400143 - RNA, 13 nt, Human
aaauaguaaaaau

SEQ ID NO: 2400144 - RNA, 21 nt, Human
aaauagugcagaaucucauag

SEQ ID NO: 2400145 - RNA, 20 nt, Human
aaauagugcagaaucucaua

SEQ ID NO: 2400146 - RNA, 16 nt, Human
aaauagggucuaacuc

SEQ ID NO: 2400147 - RNA, 13 nt, Human
aaauauaaaauau

SEQ ID NO: 2400148 - RNA, 12 nt, Human
aaauauaaaacu

SEQ ID NO: 2400149 - RNA, 16 nt, Human
aaauauaauucuguaa

SEQ ID NO: 2400150 - RNA, 13 nt, Human
aaauauaauucug

SEQ ID NO: 2400151 - RNA, 12 nt, Human
aaauauaauucu

SEQ ID NO: 2400152 - RNA, 11 nt, Human
aaauauaauuc

SEQ ID NO: 2400153 - RNA, 14 nt, Human
aaauauaagaauaa

SEQ ID NO: 2400154 - RNA, 18 nt, Human
aaauauaauucuguaaau

SEQ ID NO: 2400155 - RNA, 17 nt, Human
aaauauaauucuguaaa

SEQ ID NO: 2400156 - RNA, 19 nt, Human
aaauauaauucuguaaaug

SEQ ID NO: 2400157 - RNA, 22 nt, Human
aaauggacguguuaugacucca

SEQ ID NO: 2400158 - RNA, 21 nt, Human
aaauggacguguuaugacucc

SEQ ID NO: 2400159 - RNA, 20 nt, Human
aaauggacguguuaugacuc

SEQ ID NO: 2400160 - RNA, 18 nt, Human
aaauggaagacacauuga

SEQ ID NO: 2400161 - RNA, 15 nt, Human
aaauggaagacacau

SEQ ID NO: 2400162 - RNA, 21 nt, Human
aaauggaaaggagaggaaaga

SEQ ID NO: 2400163 - RNA, 18 nt, Human
aaaucuuucuuucuuaga

SEQ ID NO: 2400164 - RNA, 16 nt, Human
aaaucuuucuuucuua

SEQ ID NO: 2400165 - RNA, 20 nt, Human
aaaugcuuuuuauuucugca

SEQ ID NO: 2400166 - RNA, 20 nt, Human
aaaucuuucuuucuuagaaa

SEQ ID NO: 2400167 - RNA, 18 nt, Human
aaaugcuuuuuauuucug

SEQ ID NO: 2400168 - RNA, 18 nt, Human
aaauggaagacagcucuu

SEQ ID NO: 2400169 - RNA, 16 nt, Human
aaauggaaaugggcag

SEQ ID NO: 2400170 - RNA, 16 nt, Human
aaauauuuucuggguu

SEQ ID NO: 2400171 - RNA, 20 nt, Human
aaauauuuucauacagcauu

SEQ ID NO: 2400172 - RNA, 21 nt, Human
aaauauuuugaaucaauaaua

SEQ ID NO: 2400173 - RNA, 15 nt, Human
aaauauuuugaauca

SEQ ID NO: 2400174 - RNA, 18 nt, Human
aaaucaaauaugcaaagc

SEQ ID NO: 2400175 - RNA, 19 nt, Human
aaaucaaauaugcaaagca

SEQ ID NO: 2400176 - RNA, 13 nt, Human
aaaucuugaaauu

SEQ ID NO: 2400177 - RNA, 17 nt, Human
aaaucuuggcacagaaa

SEQ ID NO: 2400178 - RNA, 18 nt, Human
aaauggcuuccuggcaau

SEQ ID NO: 2400179 - RNA, 22 nt, Human
aaauggccucauguggcuggaa

SEQ ID NO: 2400180 - RNA, 21 nt, Human
aaauggccucauguggcugga

SEQ ID NO: 2400181 - RNA, 16 nt, Human
aaauggcucagaugcc

SEQ ID NO: 2400182 - RNA, 21 nt, Human
aaauggcgucuggaaguccaa

SEQ ID NO: 2400183 - RNA, 15 nt, Human
aaauggccucaugug

SEQ ID NO: 2400184 - RNA, 11 nt, Human
aaauggccuca

SEQ ID NO: 2400185 - RNA, 22 nt, Human
aaauggccauuugcuuuuucac

SEQ ID NO: 2400186 - RNA, 23 nt, Human
aaauggccauuugcuuuuucacc

SEQ ID NO: 2400187 - RNA, 19 nt, Human
aaauggccauuugcuuuuu

SEQ ID NO: 2400188 - RNA, 17 nt, Human
aaauggcugguuuuuag

SEQ ID NO: 2400189 - RNA, 23 nt, Human
aaauggcugcaucccccccaccu

SEQ ID NO: 2400190 - RNA, 13 nt, Human
aaacacucuugaa

SEQ ID NO: 2400191 - RNA, 21 nt, Human
aaaauugccauauugcacaug

SEQ ID NO: 2400192 - RNA, 19 nt, Human
aaaauugccauauugcaca

SEQ ID NO: 2400193 - RNA, 15 nt, Human
aaaauugcugugccu

SEQ ID NO: 2400194 - RNA, 21 nt, Human
aaaauugcugugccucccaaa

SEQ ID NO: 2400195 - RNA, 17 nt, Human
aaacacucuugaaaaau

SEQ ID NO: 2400196 - RNA, 14 nt, Human
aaacacucuugaaa

SEQ ID NO: 2400197 - RNA, 18 nt, Human
aaacacuguucucugccc

SEQ ID NO: 2400198 - RNA, 13 nt, Human
aaacacugccauc

SEQ ID NO: 2400199 - RNA, 15 nt, Human
aaacacugcaggcau

SEQ ID NO: 2400200 - RNA, 14 nt, Human
aaacacugcaggca

SEQ ID NO: 2400201 - RNA, 21 nt, Human
aaacacucggcauuucaaaug

SEQ ID NO: 2400202 - RNA, 20 nt, Human
aaacacucggcauuucaaau

SEQ ID NO: 2400203 - RNA, 17 nt, Human
aaacacucggcauuuca

SEQ ID NO: 2400204 - RNA, 18 nt, Human
aaaauugccauauugcac

SEQ ID NO: 2400205 - RNA, 17 nt, Human
aaaauugccauauugca

SEQ ID NO: 2400206 - RNA, 16 nt, Human
aaaauugccauauugc

SEQ ID NO: 2400207 - RNA, 14 nt, Human
aaaauugccauauu

SEQ ID NO: 2400208 - RNA, 13 nt, Human
aaaauugccauau

SEQ ID NO: 2400209 - RNA, 14 nt, Human
aaaauucaauugua

SEQ ID NO: 2400210 - RNA, 18 nt, Human
aaaauucacuauuggcug

SEQ ID NO: 2400211 - RNA, 17 nt, Human
aaaauucaauuguaaau

SEQ ID NO: 2400212 - RNA, 13 nt, Human
aaaauucagugga

SEQ ID NO: 2400213 - RNA, 13 nt, Human
aaaacacauuuuu

SEQ ID NO: 2400214 - RNA, 15 nt, Human
aaaacacauuuuucu

SEQ ID NO: 2400215 - RNA, 18 nt, Human
aaaauucaaaaaguguuu

SEQ ID NO: 2400216 - RNA, 17 nt, Human
aaaauucaaaaaguguu

SEQ ID NO: 2400217 - RNA, 16 nt, Human
aaaauucaaaaagugu

SEQ ID NO: 2400218 - RNA, 14 nt, Human
aaaauucaaaaagu

SEQ ID NO: 2400219 - RNA, 20 nt, Human
aaaacacaguguuuuuguaa

SEQ ID NO: 2400220 - RNA, 21 nt, Human
aaaacacaguguuuuuguaaa

SEQ ID NO: 2400221 - RNA, 23 nt, Human
aaaacacagacauucugccaggc

SEQ ID NO: 2400222 - RNA, 20 nt, Human
aaacagaucuccuggcaaag

SEQ ID NO: 2400223 - RNA, 12 nt, Human
aaacagauauaa

SEQ ID NO: 2400224 - RNA, 15 nt, Human
aaacagauauaaaug

SEQ ID NO: 2400225 - RNA, 20 nt, Human
aaacagaggccauggcagaa

SEQ ID NO: 2400226 - RNA, 22 nt, Human
aaacagagacaggcccaagaga

SEQ ID NO: 2400227 - RNA, 16 nt, Human
aaacagagaugugaua

SEQ ID NO: 2400228 - RNA, 15 nt, Human
aaacagauuuuuaca

SEQ ID NO: 2400229 - RNA, 19 nt, Human
aaacagauuuuuacaaaug

SEQ ID NO: 2400230 - RNA, 14 nt, Human
aaacagauuuuuac

SEQ ID NO: 2400231 - RNA, 22 nt, Human
aaacacuguucucugcccucca

SEQ ID NO: 2400232 - RNA, 19 nt, Human
aaacacuguucucugcccu

SEQ ID NO: 2400233 - RNA, 23 nt, Human
aaacacugccaucuuaguuugga

SEQ ID NO: 2400234 - RNA, 12 nt, Human
aaaauugccaua

SEQ ID NO: 2400235 - RNA, 15 nt, Human
aaacagagacaggcc

SEQ ID NO: 2400236 - RNA, 16 nt, Human
aaacagagacaggccc

SEQ ID NO: 2400237 - RNA, 14 nt, Human
aaacagacucaggu

SEQ ID NO: 2400238 - RNA, 20 nt, Human
aaacagacucgauucauauu

SEQ ID NO: 2400239 - RNA, 13 nt, Human
aaagaugaaaaua

SEQ ID NO: 2400240 - RNA, 16 nt, Human
aaagaugaaaauauuu

SEQ ID NO: 2400241 - RNA, 17 nt, Human
aaagaugaaaauauuug

SEQ ID NO: 2400242 - RNA, 23 nt, Human
aaagauauauuaaaaauauaaaa

SEQ ID NO: 2400243 - RNA, 21 nt, Human
aaagaucuguuuugaaggcaa

SEQ ID NO: 2400244 - RNA, 16 nt, Human
aaagaaaacccacccc

SEQ ID NO: 2400245 - RNA, 23 nt, Human
aaagaaaagauaaagaugaucua

SEQ ID NO: 2400246 - RNA, 14 nt, Human
aaagaaaagauaaa

SEQ ID NO: 2400247 - RNA, 12 nt, Human
aaagaaaauaaa

SEQ ID NO: 2400248 - RNA, 13 nt, Human
aaagaaagagaga

SEQ ID NO: 2400249 - RNA, 14 nt, Human
aaagaaagagagaa

SEQ ID NO: 2400250 - RNA, 15 nt, Human
aaagaaagagagaaa

SEQ ID NO: 2400251 - RNA, 16 nt, Human
aaagaaagagagaaaa

SEQ ID NO: 2400252 - RNA, 21 nt, Human
aaagaaaauaaaaaaaagaaa

SEQ ID NO: 2400253 - RNA, 12 nt, Human
aaagaaagagag

SEQ ID NO: 2400254 - RNA, 14 nt, Human
aaagaaagaaggaa

SEQ ID NO: 2400255 - RNA, 20 nt, Human
aaagaaaacuuguauuaugu

SEQ ID NO: 2400256 - RNA, 12 nt, Human
aaagaaaacuug

SEQ ID NO: 2400257 - RNA, 19 nt, Human
aaacugccagcaacgcagg

SEQ ID NO: 2400258 - RNA, 20 nt, Human
aaacugccaguuuuguuucc

SEQ ID NO: 2400259 - RNA, 17 nt, Human
aaacugcauuagaaauu

SEQ ID NO: 2400260 - RNA, 16 nt, Human
aaacugacucuuaaga

SEQ ID NO: 2400261 - RNA, 17 nt, Human
aaacugaagucugaaau

SEQ ID NO: 2400262 - RNA, 16 nt, Human
aaacugaagucugaaa

SEQ ID NO: 2400263 - RNA, 15 nt, Human
aaacugaagucugaa

SEQ ID NO: 2400264 - RNA, 14 nt, Human
aaacugaagccaga

SEQ ID NO: 2400265 - RNA, 14 nt, Human
aaacugccagcaac

SEQ ID NO: 2400266 - RNA, 15 nt, Human
aaacugccagcaacg

SEQ ID NO: 2400267 - RNA, 17 nt, Human
aaacugacucuuaagaa

SEQ ID NO: 2400268 - RNA, 19 nt, Human
aaacugaagucugaaauuu

SEQ ID NO: 2400269 - RNA, 14 nt, Human
aaacugcauuagaa

SEQ ID NO: 2400270 - RNA, 16 nt, Human
aaacugaaugaaaccc

SEQ ID NO: 2400271 - RNA, 14 nt, Human
aaacugaauggaag

SEQ ID NO: 2400272 - RNA, 11 nt, Human
aaagaacaucc

SEQ ID NO: 2400273 - RNA, 15 nt, Human
aaagaacaguaaaca

SEQ ID NO: 2400274 - RNA, 16 nt, Human
aaagaacaaaaaaauc

SEQ ID NO: 2400275 - RNA, 18 nt, Human
aaagaacauggacuugua

SEQ ID NO: 2400276 - RNA, 11 nt, Human
aaagagguuuu

SEQ ID NO: 2400277 - RNA, 15 nt, Human
aaagaaauuaugugc

SEQ ID NO: 2400278 - RNA, 19 nt, Human
aaagaaaugucuauuaagg

SEQ ID NO: 2400279 - RNA, 13 nt, Human
aaagaaauuaugu

SEQ ID NO: 2400280 - RNA, 23 nt, Human
aaagaaaguugcacggcugcuga

SEQ ID NO: 2400281 - RNA, 17 nt, Human
aaagaaagagagaaaau

SEQ ID NO: 2400282 - RNA, 18 nt, Human
aaagaaagagagaaaaua

SEQ ID NO: 2400283 - RNA, 17 nt, Human
aaagaaagccucagaga

SEQ ID NO: 2400284 - RNA, 18 nt, Human
aaagaaagccucagagaa

SEQ ID NO: 2400285 - RNA, 21 nt, Human
aaagaacauggacuuguauau

SEQ ID NO: 2400286 - RNA, 20 nt, Human
aaagaacauggacuuguaua

SEQ ID NO: 2400287 - RNA, 16 nt, Human
aaagagguuuuucuua

SEQ ID NO: 2400288 - RNA, 19 nt, Human
aaagaguaaaggaaaugau

SEQ ID NO: 2400289 - RNA, 22 nt, Human
aaagaacauggacuuguauauu

SEQ ID NO: 2400290 - RNA, 19 nt, Human
aaagagguuuuucuuaaau

SEQ ID NO: 2400291 - RNA, 12 nt, Human
aaagaguacucu

SEQ ID NO: 2400292 - RNA, 17 nt, Human
aaagaguacucuuguuu

SEQ ID NO: 2400293 - RNA, 13 nt, Human
aaagaguagaauu

SEQ ID NO: 2400294 - RNA, 18 nt, Human
aaagaguagaauugcauu

SEQ ID NO: 2400295 - RNA, 23 nt, Human
aaagaguagacauuucucuuacu

SEQ ID NO: 2400296 - RNA, 16 nt, Human
aaagauacgacuuuau

SEQ ID NO: 2400297 - RNA, 20 nt, Human
aaagauacgacuuuauuuuc

SEQ ID NO: 2400298 - RNA, 17 nt, Human
aaagauauaagugcugu

SEQ ID NO: 2400299 - RNA, 16 nt, Human
aaagauauaagugcug

SEQ ID NO: 2400300 - RNA, 15 nt, Human
aaagauauaagugcu

SEQ ID NO: 2400301 - RNA, 22 nt, Human
aaagauacgacuuuauuuucug

SEQ ID NO: 2400302 - RNA, 22 nt, Human
aaagauauaagugcuguauaaa

SEQ ID NO: 2400303 - RNA, 21 nt, Human
aaagauauaagugcuguauaa

SEQ ID NO: 2400304 - RNA, 20 nt, Human
aaagauauaagugcuguaua

SEQ ID NO: 2400305 - RNA, 18 nt, Human
aaagauauaagugcugua

SEQ ID NO: 2400306 - RNA, 21 nt, Human
aaagauauauuaaaaauauaa

SEQ ID NO: 2400307 - RNA, 20 nt, Human
aaagauauauuaaaaauaua

SEQ ID NO: 2400308 - RNA, 20 nt, Human
aaagauaucucaucucuucu

SEQ ID NO: 2400309 - RNA, 19 nt, Human
aaagauauauuaaaaauau

SEQ ID NO: 2400310 - RNA, 17 nt, Human
aaagauauauacacagg

SEQ ID NO: 2400311 - RNA, 12 nt, Human
aaagauauauua

SEQ ID NO: 2400312 - RNA, 12 nt, Human
aacuuuuauaaa

SEQ ID NO: 2400313 - RNA, 15 nt, Human
aacuuuuauaaacuu

SEQ ID NO: 2400314 - RNA, 18 nt, Human
aacuuuggaguccccuca

SEQ ID NO: 2400315 - RNA, 22 nt, Human
aacuuuuaauuaaaugcucauc

SEQ ID NO: 2400316 - RNA, 20 nt, Human
aacuuuguggaugucuuccu

SEQ ID NO: 2400317 - RNA, 19 nt, Human
aacuuuguggaugucuucc

SEQ ID NO: 2400318 - RNA, 19 nt, Human
aacuuugaccucugcagca

SEQ ID NO: 2400319 - RNA, 20 nt, Human
aacuuugaccucugcagcaa

SEQ ID NO: 2400320 - RNA, 21 nt, Human
aacuuugcuugcaguagauuu

SEQ ID NO: 2400321 - RNA, 12 nt, Human
aacuuugcuugc

SEQ ID NO: 2400322 - RNA, 15 nt, Human
aacuuugcugagccu

SEQ ID NO: 2400323 - RNA, 13 nt, Human
aacuuugaccucu

SEQ ID NO: 2400324 - RNA, 15 nt, Human
aacuuucuguaaacu

SEQ ID NO: 2400325 - RNA, 11 nt, Human
aacuuucugua

SEQ ID NO: 2400326 - RNA, 14 nt, Human
aacuuugaccucug

SEQ ID NO: 2400327 - RNA, 17 nt, Human
aacuuugaccucugcag

SEQ ID NO: 2400328 - RNA, 18 nt, Human
aacuuucucuucauacuu

SEQ ID NO: 2400329 - RNA, 16 nt, Human
aacuuuuauaaacuuu

SEQ ID NO: 2400330 - RNA, 19 nt, Human
aacuuuuauaaacuuuacc

SEQ ID NO: 2400331 - RNA, 12 nt, Human
aacuuuucucag

SEQ ID NO: 2400332 - RNA, 18 nt, Human
aacuuuuccccuguccug

SEQ ID NO: 2400333 - RNA, 15 nt, Human
aacuuuuccccuguc

SEQ ID NO: 2400334 - RNA, 15 nt, Human
aacuuuuuaaagagu

SEQ ID NO: 2400335 - RNA, 11 nt, Human
aacuuuuguaa

SEQ ID NO: 2400336 - RNA, 21 nt, Human
aacuuuuguaagacaaagguu

SEQ ID NO: 2400337 - RNA, 14 nt, Human
aacuuuuguaaaua

SEQ ID NO: 2400338 - RNA, 13 nt, Human
aagaaauguaagg

SEQ ID NO: 2400339 - RNA, 14 nt, Human
aagaaauguaaggg

SEQ ID NO: 2400340 - RNA, 14 nt, Human
aagaaaugacacuu

SEQ ID NO: 2400341 - RNA, 23 nt, Human
aagaaaucccuguuuaauauuua

SEQ ID NO: 2400342 - RNA, 22 nt, Human
aacuuuuugguuugcagaugac

SEQ ID NO: 2400343 - RNA, 13 nt, Human
aacuuuuuuccac

SEQ ID NO: 2400344 - RNA, 14 nt, Human
aacuuuuuuuuaag

SEQ ID NO: 2400345 - RNA, 17 nt, Human
aacuuuuuuuugagaau

SEQ ID NO: 2400346 - RNA, 16 nt, Human
aacuuuuuuuugagaa

SEQ ID NO: 2400347 - RNA, 19 nt, Human
aacuuuuuugaaauaauaa

SEQ ID NO: 2400348 - RNA, 20 nt, Human
aacuuuuuuuuaaguuacac

SEQ ID NO: 2400349 - RNA, 19 nt, Human
aacuucaacauuuacaugu

SEQ ID NO: 2400350 - RNA, 14 nt, Human
aacuucaacauuua

SEQ ID NO: 2400351 - RNA, 22 nt, Human
aacuuauuuuuuucugauugua

SEQ ID NO: 2400352 - RNA, 21 nt, Human
aacuuauuuuuuucugauugu

SEQ ID NO: 2400353 - RNA, 20 nt, Human
aacuuauuuuuuucugauug

SEQ ID NO: 2400354 - RNA, 19 nt, Human
aacuuauuuuuuucugauu

SEQ ID NO: 2400355 - RNA, 18 nt, Human
aacuuauuuuuuucugau

SEQ ID NO: 2400356 - RNA, 17 nt, Human
aacuuauuuuuuucuga

SEQ ID NO: 2400357 - RNA, 16 nt, Human
aacuuauuuuuuucug

SEQ ID NO: 2400358 - RNA, 13 nt, Human
aacuuauuugagu

SEQ ID NO: 2400359 - RNA, 19 nt, Human
aacuuauuugagugauuau

SEQ ID NO: 2400360 - RNA, 23 nt, Human
aacuuauucuguagauucugugg

SEQ ID NO: 2400361 - RNA, 13 nt, Human
aacuucacauauu

SEQ ID NO: 2400362 - RNA, 22 nt, Human
aacuucaagugcaugcucucug

SEQ ID NO: 2400363 - RNA, 19 nt, Human
aacugauuuuuuuuuccuu

SEQ ID NO: 2400364 - RNA, 17 nt, Human
aacuuaaaaauguaaau

SEQ ID NO: 2400365 - RNA, 13 nt, Human
aacuuaaaaaugu

SEQ ID NO: 2400366 - RNA, 17 nt, Human
aacugauuuuuuuuucc

SEQ ID NO: 2400367 - RNA, 13 nt, Human
aacugauucauaa

SEQ ID NO: 2400368 - RNA, 21 nt, Human
aacugacaggcagccuggaca

SEQ ID NO: 2400369 - RNA, 14 nt, Human
aacugaccagccuc

SEQ ID NO: 2400370 - RNA, 16 nt, Human
aacuuagcauguguug

SEQ ID NO: 2400371 - RNA, 13 nt, Human
aacuuaaauaaua

SEQ ID NO: 2400372 - RNA, 14 nt, Human
aacuuaaauaauaa

SEQ ID NO: 2400373 - RNA, 19 nt, Human
aacuuagcauguguugaaa

SEQ ID NO: 2400374 - RNA, 16 nt, Human
aacuuagguggcaagc

SEQ ID NO: 2400375 - RNA, 23 nt, Human
aacuuagugcggacaaguuuuaa

SEQ ID NO: 2400376 - RNA, 17 nt, Human
aacuuaaauaaugugaa

SEQ ID NO: 2400377 - RNA, 21 nt, Human
aacuuaaaaauguaaauauuc

SEQ ID NO: 2400378 - RNA, 18 nt, Human
aacuuaaaaauguaaaua

SEQ ID NO: 2400379 - RNA, 13 nt, Human
aacuuaaaauauu

SEQ ID NO: 2400380 - RNA, 14 nt, Human
aacuuaaaauauuu

SEQ ID NO: 2400381 - RNA, 16 nt, Human
aacuuaaaauauuuua

SEQ ID NO: 2400382 - RNA, 15 nt, Human
aacuuaaauaaaugu

SEQ ID NO: 2400383 - RNA, 19 nt, Human
aacuuaaauaaaugucauu

SEQ ID NO: 2400384 - RNA, 15 nt, Human
aacuuauauuguaag

SEQ ID NO: 2400385 - RNA, 19 nt, Human
aacuuauauuguaagaaau

SEQ ID NO: 2400386 - RNA, 20 nt, Human
aacuuauauuguaagaaaua

SEQ ID NO: 2400387 - RNA, 21 nt, Human
aacuuauauuguaagaaauac

SEQ ID NO: 2400388 - RNA, 23 nt, Human
aacuuauaucaucagcauaccuu

SEQ ID NO: 2400389 - RNA, 20 nt, Human
aacuuauauacuauuucccu

SEQ ID NO: 2400390 - RNA, 22 nt, Human
aacuuagugcggacaaguuuua

SEQ ID NO: 2400391 - RNA, 21 nt, Human
aacuuaugaccucuuccuuua

SEQ ID NO: 2400392 - RNA, 19 nt, Human
aacuuauccuaaaacaaau

SEQ ID NO: 2400393 - RNA, 14 nt, Human
aacuuauucuguag

SEQ ID NO: 2400394 - RNA, 13 nt, Human
aacuuauucugua

SEQ ID NO: 2400395 - RNA, 23 nt, Human
aacucagucauuagacuccuccu

SEQ ID NO: 2400396 - RNA, 22 nt, Human
aacucagucauuagacuccucc

SEQ ID NO: 2400397 - RNA, 18 nt, Human
aacucagggacagagcca

SEQ ID NO: 2400398 - RNA, 18 nt, Human
aacucaguuuuaacuaga

SEQ ID NO: 2400399 - RNA, 15 nt, Human
aacucaguuuuaacu

SEQ ID NO: 2400400 - RNA, 17 nt, Human
aacucagggacagagcc

SEQ ID NO: 2400401 - RNA, 16 nt, Human
aacucagggacagagc

SEQ ID NO: 2400402 - RNA, 13 nt, Human
aacucagggacag

SEQ ID NO: 2400403 - RNA, 21 nt, Human
aacucagccaagcacaguggu

SEQ ID NO: 2400404 - RNA, 22 nt, Human
aacucagccucaauaagccuug

SEQ ID NO: 2400405 - RNA, 20 nt, Human
aacucagccaagcacagugg

SEQ ID NO: 2400406 - RNA, 18 nt, Human
aacucagccaagcacagu

SEQ ID NO: 2400407 - RNA, 17 nt, Human
aacucagccaagcacag

SEQ ID NO: 2400408 - RNA, 16 nt, Human
aacucagccaagcaca

SEQ ID NO: 2400409 - RNA, 15 nt, Human
aacucagccaagcac

SEQ ID NO: 2400410 - RNA, 14 nt, Human
aacucagccaagca

SEQ ID NO: 2400411 - RNA, 12 nt, Human
aacucagccaag

SEQ ID NO: 2400412 - RNA, 15 nt, Human
aacucaccuggggcu

SEQ ID NO: 2400413 - RNA, 17 nt, Human
aacucagaucugucuga

SEQ ID NO: 2400414 - RNA, 20 nt, Human
aacucaccuggggcugcugg

SEQ ID NO: 2400415 - RNA, 20 nt, Human
aacucaccugcuggccccuc

SEQ ID NO: 2400416 - RNA, 21 nt, Human
aacucaccugcuggccccuca

SEQ ID NO: 2400417 - RNA, 19 nt, Human
aacugaacucugacaacag

SEQ ID NO: 2400418 - RNA, 20 nt, Human
aacugaacucugacaacaga

SEQ ID NO: 2400419 - RNA, 14 nt, Human
aacugaacucugac

SEQ ID NO: 2400420 - RNA, 18 nt, Human
aacucauaccuuuaaagg

SEQ ID NO: 2400421 - RNA, 16 nt, Human
aacugaacucugacaa

SEQ ID NO: 2400422 - RNA, 23 nt, Human
aacugaacucugacaacagacuu

SEQ ID NO: 2400423 - RNA, 18 nt, Human
aacugaagcagccucucc

SEQ ID NO: 2400424 - RNA, 16 nt, Human
aacucauacugugcug

SEQ ID NO: 2400425 - RNA, 15 nt, Human
aacucaccugccccu

SEQ ID NO: 2400426 - RNA, 17 nt, Human
aacucaccuaauguuua

SEQ ID NO: 2400427 - RNA, 15 nt, Human
aacucaccauguaaa

SEQ ID NO: 2400428 - RNA, 16 nt, Human
aacucaccauguaaaa

SEQ ID NO: 2400429 - RNA, 21 nt, Human
aacucaccauguaaaagaguc

SEQ ID NO: 2400430 - RNA, 16 nt, Human
aacucaccugccccuc

SEQ ID NO: 2400431 - RNA, 21 nt, Human
aacucaccuaauguuuaugag

SEQ ID NO: 2400432 - RNA, 17 nt, Human
aacucaccucucaaggu

SEQ ID NO: 2400433 - RNA, 12 nt, Human
aacucaccugcu

SEQ ID NO: 2400434 - RNA, 16 nt, Human
aacucaccugcuggcc

SEQ ID NO: 2400435 - RNA, 22 nt, Human
aacucaccugcuggccccucac

SEQ ID NO: 2400436 - RNA, 13 nt, Human
aacucaauauuuu

SEQ ID NO: 2400437 - RNA, 12 nt, Human
aacucaauauuu

SEQ ID NO: 2400438 - RNA, 12 nt, Human
aacucaccccag

SEQ ID NO: 2400439 - RNA, 21 nt, Human
aacucaauauuuuccaugaaa

SEQ ID NO: 2400440 - RNA, 20 nt, Human
aacucaauauuuuccaugaa

SEQ ID NO: 2400441 - RNA, 14 nt, Human
aacucaauauuuuc

SEQ ID NO: 2400442 - RNA, 22 nt, Human
aacagcuccuugggaggaagca

SEQ ID NO: 2400443 - RNA, 18 nt, Human
aacagcuccuugggagga

SEQ ID NO: 2400444 - RNA, 15 nt, Human
aacagcuccuuggga

SEQ ID NO: 2400445 - RNA, 14 nt, Human
aacagcuccuuggg

SEQ ID NO: 2400446 - RNA, 13 nt, Human
aacagcucgacuu

SEQ ID NO: 2400447 - RNA, 23 nt, Human
aacagcuccuugggaggaagcag

SEQ ID NO: 2400448 - RNA, 19 nt, Human
aacagcugaggucucuuga

SEQ ID NO: 2400449 - RNA, 21 nt, Human
aacagcugaggucucuugagg

SEQ ID NO: 2400450 - RNA, 20 nt, Human
aacagcugaggucucuugag

SEQ ID NO: 2400451 - RNA, 12 nt, Human
aacaucaauguu

SEQ ID NO: 2400452 - RNA, 13 nt, Human
aacaucaauguuc

SEQ ID NO: 2400453 - RNA, 14 nt, Human
aacaucaauguuca

SEQ ID NO: 2400454 - RNA, 13 nt, Human
aacagcuccuugg

SEQ ID NO: 2400455 - RNA, 10 nt, Human
aacagcuccu

SEQ ID NO: 2400456 - RNA, 14 nt, Human
aacagcucaggauc

SEQ ID NO: 2400457 - RNA, 18 nt, Human
aacagcucaguucuaguc

SEQ ID NO: 2400458 - RNA, 15 nt, Human
aacaucauuagaaca

SEQ ID NO: 2400459 - RNA, 17 nt, Human
aacaugagucaagagca

SEQ ID NO: 2400460 - RNA, 19 nt, Human
aacaugcaauuuugcauuu

SEQ ID NO: 2400461 - RNA, 22 nt, Human
aacaugcaauuuugcauuugaa

SEQ ID NO: 2400462 - RNA, 22 nt, Human
aacauguaauauaaagauguua

SEQ ID NO: 2400463 - RNA, 19 nt, Human
aacauguaauauaaagaug

SEQ ID NO: 2400464 - RNA, 18 nt, Human
aacauguaauauaaagau

SEQ ID NO: 2400465 - RNA, 12 nt, Human
aacauguaauau

SEQ ID NO: 2400466 - RNA, 20 nt, Human
aacaugguuuugaaaugcuu

SEQ ID NO: 2400467 - RNA, 14 nt, Human
aacaugcccuguuc

SEQ ID NO: 2400468 - RNA, 22 nt, Human
aacaugccugccccaaacaaau

SEQ ID NO: 2400469 - RNA, 21 nt, Human
aacaugccugccccaaacaaa

SEQ ID NO: 2400470 - RNA, 13 nt, Human
aacaugauuuggg

SEQ ID NO: 2400471 - RNA, 22 nt, Human
aacaucaucaaggcacugccug

SEQ ID NO: 2400472 - RNA, 14 nt, Human
aacaucauuagaac

SEQ ID NO: 2400473 - RNA, 21 nt, Human
aacaucaucaaggcacugccu

SEQ ID NO: 2400474 - RNA, 16 nt, Human
aacaucaucaaggcac

SEQ ID NO: 2400475 - RNA, 14 nt, Human
aacaucaucaaggc

SEQ ID NO: 2400476 - RNA, 18 nt, Human
aacaucaguuacucugaa

SEQ ID NO: 2400477 - RNA, 19 nt, Human
aacaucaguuacucugaag

SEQ ID NO: 2400478 - RNA, 21 nt, Human
aacaucaguuacucugaaggg

SEQ ID NO: 2400479 - RNA, 13 nt, Human
aacaucacacaca

SEQ ID NO: 2400480 - RNA, 18 nt, Human
aacaucaauguucauugu

SEQ ID NO: 2400481 - RNA, 19 nt, Human
aacaucaauguucauugua

SEQ ID NO: 2400482 - RNA, 17 nt, Human
aacaucacugaaaugcu

SEQ ID NO: 2400483 - RNA, 18 nt, Human
aaccaggagcugcucacu

SEQ ID NO: 2400484 - RNA, 17 nt, Human
aaccaggagcugcucac

SEQ ID NO: 2400485 - RNA, 18 nt, Human
aaccaguccccccacccu

SEQ ID NO: 2400486 - RNA, 22 nt, Human
aaccaguccccccacccucauu

SEQ ID NO: 2400487 - RNA, 17 nt, Human
aacccugcccccaaaua

SEQ ID NO: 2400488 - RNA, 12 nt, Human
aacccugccccu

SEQ ID NO: 2400489 - RNA, 14 nt, Human
aacccugccccugc

SEQ ID NO: 2400490 - RNA, 11 nt, Human
aacccugcccc

SEQ ID NO: 2400491 - RNA, 14 nt, Human
aaccaguguagccu

SEQ ID NO: 2400492 - RNA, 17 nt, Human
aacccugcaaaggacug

SEQ ID NO: 2400493 - RNA, 15 nt, Human
aaccaggagcugcuc

SEQ ID NO: 2400494 - RNA, 15 nt, Human
aaccaggaaauggaa

SEQ ID NO: 2400495 - RNA, 22 nt, Human
aaccagcuguaacacagcugag

SEQ ID NO: 2400496 - RNA, 16 nt, Human
aaccagcuaagaaaag

SEQ ID NO: 2400497 - RNA, 21 nt, Human
aaccagcuaagaaaagauuuu

SEQ ID NO: 2400498 - RNA, 21 nt, Human
aaccagcaucccuugaccagg

SEQ ID NO: 2400499 - RNA, 14 nt, Human
aaccagcuaagaaa

SEQ ID NO: 2400500 - RNA, 22 nt, Human
aaccacucuaucaaguauuaua

SEQ ID NO: 2400501 - RNA, 23 nt, Human
aacauguaauuaaguacuaugua

SEQ ID NO: 2400502 - RNA, 14 nt, Human
aacauguaauuaag

SEQ ID NO: 2400503 - RNA, 21 nt, Human
aacauguaauuaaguacuaug

SEQ ID NO: 2400504 - RNA, 12 nt, Human
aaccagaucauu

SEQ ID NO: 2400505 - RNA, 14 nt, Human
aaccagaucauugu

SEQ ID NO: 2400506 - RNA, 11 nt, Human
aaccacugaau

SEQ ID NO: 2400507 - RNA, 13 nt, Human
aaccacugaaucu

SEQ ID NO: 2400508 - RNA, 14 nt, Human
aaccacugcaacgg

SEQ ID NO: 2400509 - RNA, 17 nt, Human
aaccacugaaucuggac

SEQ ID NO: 2400510 - RNA, 19 nt, Human
aaccacucaaauuaaucuu

SEQ ID NO: 2400511 - RNA, 21 nt, Human
aaccacgucugucuucacagc

SEQ ID NO: 2400512 - RNA, 18 nt, Human
aaccacgucugucuucac

SEQ ID NO: 2400513 - RNA, 12 nt, Human
aacccugugcug

SEQ ID NO: 2400514 - RNA, 14 nt, Human
aacccugugcuggu

SEQ ID NO: 2400515 - RNA, 21 nt, Human
aacccugugcugguguccuga

SEQ ID NO: 2400516 - RNA, 19 nt, Human
aacccugugcugguguccu

SEQ ID NO: 2400517 - RNA, 13 nt, Human
aacccuguuuccu

SEQ ID NO: 2400518 - RNA, 14 nt, Human
aacccuggugacca

SEQ ID NO: 2400519 - RNA, 12 nt, Human
aacccuggagag

SEQ ID NO: 2400520 - RNA, 19 nt, Human
aacccugcguggggacagg

SEQ ID NO: 2400521 - RNA, 17 nt, Human
aacccugcguggggaca

SEQ ID NO: 2400522 - RNA, 16 nt, Human
aacccugcguggggac

SEQ ID NO: 2400523 - RNA, 19 nt, Human
aacccugccccugccccgu

SEQ ID NO: 2400524 - RNA, 15 nt, Human
aacacgcaccugccu

SEQ ID NO: 2400525 - RNA, 13 nt, Human
aacaccuucucug

SEQ ID NO: 2400526 - RNA, 14 nt, Human
aacacgcaccugcc

SEQ ID NO: 2400527 - RNA, 22 nt, Human
aacaacuuaauguucugaauaa

SEQ ID NO: 2400528 - RNA, 21 nt, Human
aacaacuccuagggccacuga

SEQ ID NO: 2400529 - RNA, 15 nt, Human
aacaacucuuugaga

SEQ ID NO: 2400530 - RNA, 16 nt, Human
aacaacuucuuuguaa

SEQ ID NO: 2400531 - RNA, 17 nt, Human
aacaacuucuuuguaau

SEQ ID NO: 2400532 - RNA, 16 nt, Human
aacaaagcuuagcagg

SEQ ID NO: 2400533 - RNA, 14 nt, Human
aacaaagcuuagca

SEQ ID NO: 2400534 - RNA, 19 nt, Human
aacaaagcuuagcaggaga

SEQ ID NO: 2400535 - RNA, 17 nt, Human
aacaaagcuuagcagga

SEQ ID NO: 2400536 - RNA, 16 nt, Human
aacaacuaggcuucag

SEQ ID NO: 2400537 - RNA, 13 nt, Human
aacaaccuggaga

SEQ ID NO: 2400538 - RNA, 19 nt, Human
aacaaagagaaaaaauaca

SEQ ID NO: 2400539 - RNA, 15 nt, Human
aacaaagcacagugu

SEQ ID NO: 2400540 - RNA, 13 nt, Human
aacaaagaagguu

SEQ ID NO: 2400541 - RNA, 17 nt, Human
aacaaagaagacaacau

SEQ ID NO: 2400542 - RNA, 12 nt, Human
aacaaagccaga

SEQ ID NO: 2400543 - RNA, 15 nt, Human
aacaaagcuguugau

SEQ ID NO: 2400544 - RNA, 14 nt, Human
aacaaagccagaag

SEQ ID NO: 2400545 - RNA, 17 nt, Human
aacaaagccagaagcug

SEQ ID NO: 2400546 - RNA, 17 nt, Human
aacaaagcacaguguua

SEQ ID NO: 2400547 - RNA, 16 nt, Human
aacaaagcacaguguu

SEQ ID NO: 2400548 - RNA, 14 nt, Human
aacaaagcagccac

SEQ ID NO: 2400549 - RNA, 15 nt, Human
aacaaagcagccacg

SEQ ID NO: 2400550 - RNA, 11 nt, Human
aacaaagccag

SEQ ID NO: 2400551 - RNA, 15 nt, Human
aacacauuuuguaua

SEQ ID NO: 2400552 - RNA, 14 nt, Human
aacacauuuuguau

SEQ ID NO: 2400553 - RNA, 12 nt, Human
aacaagaauugg

SEQ ID NO: 2400554 - RNA, 21 nt, Human
aacaagaagccacagaccuag

SEQ ID NO: 2400555 - RNA, 19 nt, Human
aacacauuuuucuuaggga

SEQ ID NO: 2400556 - RNA, 22 nt, Human
aacacauuuuguauaauuguau

SEQ ID NO: 2400557 - RNA, 21 nt, Human
aacacauuuuguauaauugua

SEQ ID NO: 2400558 - RNA, 19 nt, Human
aacacauuuuguauaauug

SEQ ID NO: 2400559 - RNA, 16 nt, Human
aacacauuuuguauaa

SEQ ID NO: 2400560 - RNA, 23 nt, Human
aacacauuuuguauaauuguauc

SEQ ID NO: 2400561 - RNA, 15 nt, Human
aacacgagcaggcua

SEQ ID NO: 2400562 - RNA, 19 nt, Human
aacaccugggcuuaagaaa

SEQ ID NO: 2400563 - RNA, 17 nt, Human
aacaccugauguguaca

SEQ ID NO: 2400564 - RNA, 17 nt, Human
aacaccuuccagcuccu

SEQ ID NO: 2400565 - RNA, 15 nt, Human
aacaccugaugugua

SEQ ID NO: 2400566 - RNA, 13 nt, Human
aacaccugaugug

SEQ ID NO: 2400567 - RNA, 18 nt, Human
aacaccaagcacagcagc

SEQ ID NO: 2400568 - RNA, 19 nt, Human
aacaccaagcacagcagcc

SEQ ID NO: 2400569 - RNA, 14 nt, Human
aacaccaagcacag

SEQ ID NO: 2400570 - RNA, 17 nt, Human
aacaccaagcacagcag

SEQ ID NO: 2400571 - RNA, 19 nt, Human
aaauuggaacagaauguuu

SEQ ID NO: 2400572 - RNA, 16 nt, Human
aaauuggaacagaaug

SEQ ID NO: 2400573 - RNA, 15 nt, Human
aaauugggaaaggag

SEQ ID NO: 2400574 - RNA, 20 nt, Human
aaauugggaaaggaguagaa

SEQ ID NO: 2400575 - RNA, 16 nt, Human
aaauugcuugaaagaa

SEQ ID NO: 2400576 - RNA, 14 nt, Human
aaauugcuguguau

SEQ ID NO: 2400577 - RNA, 18 nt, Human
aaauugcuuacuuuggaa

SEQ ID NO: 2400578 - RNA, 13 nt, Human
aaauugcuugaaa

SEQ ID NO: 2400579 - RNA, 22 nt, Human
aaauugcugugccucccaaaau

SEQ ID NO: 2400580 - RNA, 14 nt, Human
aaauugccauauug

SEQ ID NO: 2400581 - RNA, 18 nt, Human
aaauugcauuuccugaca

SEQ ID NO: 2400582 - RNA, 21 nt, Human
aaauugauguguuuauuuaua

SEQ ID NO: 2400583 - RNA, 14 nt, Human
aaauugcaaaucuu

SEQ ID NO: 2400584 - RNA, 19 nt, Human
aaauugcaaaucuugaaau

SEQ ID NO: 2400585 - RNA, 13 nt, Human
aaauugcaaaucu

SEQ ID NO: 2400586 - RNA, 12 nt, Human
aaauugcacaau

SEQ ID NO: 2400587 - RNA, 17 nt, Human
aacaaagaaauuaugug

SEQ ID NO: 2400588 - RNA, 15 nt, Human
aacaaagaaauuaug

SEQ ID NO: 2400589 - RNA, 20 nt, Human
aacaaaaucuccucuuuuag

SEQ ID NO: 2400590 - RNA, 12 nt, Human
aacaaaauagaa

SEQ ID NO: 2400591 - RNA, 13 nt, Human
aacaaaaagaaca

SEQ ID NO: 2400592 - RNA, 13 nt, Human
aacaaaaauuguc

SEQ ID NO: 2400593 - RNA, 11 nt, Human
aacaaaaauaa

SEQ ID NO: 2400594 - RNA, 13 nt, Human
aacaaaaauuagg

SEQ ID NO: 2400595 - RNA, 14 nt, Human
aacaaaaagcuucc

SEQ ID NO: 2400596 - RNA, 16 nt, Human
aacaaaaagcuucccc

SEQ ID NO: 2400597 - RNA, 15 nt, Human
aacaaaagcaagacu

SEQ ID NO: 2400598 - RNA, 14 nt, Human
aacaaaaauuaggu

SEQ ID NO: 2400599 - RNA, 14 nt, Human
acgauuucuguuua

SEQ ID NO: 2400600 - RNA, 17 nt, Human
acgauuucuguuuagau

SEQ ID NO: 2400601 - RNA, 18 nt, Human
acgccacugcacuauagc

SEQ ID NO: 2400602 - RNA, 20 nt, Human
acgccacugcacuccagccu

SEQ ID NO: 2400603 - RNA, 22 nt, Human
acgccacugcacuccagccugg

SEQ ID NO: 2400604 - RNA, 13 nt, Human
acgccaccucgcc

SEQ ID NO: 2400605 - RNA, 12 nt, Human
acgauuucuguu

SEQ ID NO: 2400606 - RNA, 13 nt, Human
acgauuucuguuu

SEQ ID NO: 2400607 - RNA, 19 nt, Human
acgauuuaauucucuugaa

SEQ ID NO: 2400608 - RNA, 17 nt, Human
acgauuuaauucucuug

SEQ ID NO: 2400609 - RNA, 15 nt, Human
acgauuuaauucucu

SEQ ID NO: 2400610 - RNA, 14 nt, Human
acgauuuaauucuc

SEQ ID NO: 2400611 - RNA, 18 nt, Human
acgauuuagaaagaagcc

SEQ ID NO: 2400612 - RNA, 22 nt, Human
acgauguggcccuggccugcug

SEQ ID NO: 2400613 - RNA, 16 nt, Human
acgauguggcccuggc

SEQ ID NO: 2400614 - RNA, 17 nt, Human
acgauguggcccuggcc

SEQ ID NO: 2400615 - RNA, 18 nt, Human
acgauguggcccuggccu

SEQ ID NO: 2400616 - RNA, 19 nt, Human
acgauguggcccuggccug

SEQ ID NO: 2400617 - RNA, 13 nt, Human
acgaugucuucau

SEQ ID NO: 2400618 - RNA, 21 nt, Human
acgauguggaaaaaugagaga

SEQ ID NO: 2400619 - RNA, 14 nt, Human
acgauguggcccug

SEQ ID NO: 2400620 - RNA, 15 nt, Human
acgauggcacccagu

SEQ ID NO: 2400621 - RNA, 14 nt, Human
acgaugaaaaacuu

SEQ ID NO: 2400622 - RNA, 15 nt, Human
acuaaguuuuuaugg

SEQ ID NO: 2400623 - RNA, 22 nt, Human
acuaaguuuuuauggcuuuugu

SEQ ID NO: 2400624 - RNA, 13 nt, Human
acuaagcagagga

SEQ ID NO: 2400625 - RNA, 14 nt, Human
acuaagcagaggag

SEQ ID NO: 2400626 - RNA, 20 nt, Human
acuaagaugacauugcuaag

SEQ ID NO: 2400627 - RNA, 12 nt, Human
acuaagcagagg

SEQ ID NO: 2400628 - RNA, 22 nt, Human
acuaauaaaagcauaaaugcaa

SEQ ID NO: 2400629 - RNA, 15 nt, Human
acguggcugcuucaa

SEQ ID NO: 2400630 - RNA, 14 nt, Human
acguggcugcuuca

SEQ ID NO: 2400631 - RNA, 16 nt, Human
acgugcauugugcuuc

SEQ ID NO: 2400632 - RNA, 15 nt, Human
acgugcauugugcuu

SEQ ID NO: 2400633 - RNA, 14 nt, Human
acgugcauugugcu

SEQ ID NO: 2400634 - RNA, 12 nt, Human
acgugcauugug

SEQ ID NO: 2400635 - RNA, 13 nt, Human
acguggcugcuuc

SEQ ID NO: 2400636 - RNA, 16 nt, Human
acuaagagagaaugag

SEQ ID NO: 2400637 - RNA, 15 nt, Human
acuaagagagaauga

SEQ ID NO: 2400638 - RNA, 11 nt, Human
acguggcugcu

SEQ ID NO: 2400639 - RNA, 19 nt, Human
acuaagaugacauugcuaa

SEQ ID NO: 2400640 - RNA, 18 nt, Human
acuaagaugacauugcua

SEQ ID NO: 2400641 - RNA, 17 nt, Human
acuaagaugacauugcu

SEQ ID NO: 2400642 - RNA, 17 nt, Human
acgcugugcugcccugc

SEQ ID NO: 2400643 - RNA, 16 nt, Human
acgcugugcugcccug

SEQ ID NO: 2400644 - RNA, 15 nt, Human
acgcugugcugcccu

SEQ ID NO: 2400645 - RNA, 21 nt, Human
acgugcaccuguacucaggag

SEQ ID NO: 2400646 - RNA, 23 nt, Human
acgugcaccuguacucaggaggc

SEQ ID NO: 2400647 - RNA, 20 nt, Human
acgugcaauuuguuugugcu

SEQ ID NO: 2400648 - RNA, 19 nt, Human
acgugcaauuuguuugugc

SEQ ID NO: 2400649 - RNA, 14 nt, Human
acgugcaauuuguu

SEQ ID NO: 2400650 - RNA, 22 nt, Human
acgugcaauuuguuugugcuuc

SEQ ID NO: 2400651 - RNA, 21 nt, Human
acgugcaauuuguuugugcuu

SEQ ID NO: 2400652 - RNA, 20 nt, Human
acgugcaccuguacucagga

SEQ ID NO: 2400653 - RNA, 18 nt, Human
acgcugugcugcccugcc

SEQ ID NO: 2400654 - RNA, 22 nt, Human
acgugauucaauucaacacucc

SEQ ID NO: 2400655 - RNA, 23 nt, Human
acgccacugcacuccagccuggg

SEQ ID NO: 2400656 - RNA, 19 nt, Human
acgugauuuugcuguagaa

SEQ ID NO: 2400657 - RNA, 15 nt, Human
accucuucacccccc

SEQ ID NO: 2400658 - RNA, 19 nt, Human
accucuuccggagauguag

SEQ ID NO: 2400659 - RNA, 22 nt, Human
accucuuccccagaaaggagac

SEQ ID NO: 2400660 - RNA, 23 nt, Human
accucuuccccagaaaggagacu

SEQ ID NO: 2400661 - RNA, 17 nt, Human
accucuucucuuccugu

SEQ ID NO: 2400662 - RNA, 16 nt, Human
accucuucucuuccug

SEQ ID NO: 2400663 - RNA, 14 nt, Human
accucuucuggcuc

SEQ ID NO: 2400664 - RNA, 13 nt, Human
accugcccaaccu

SEQ ID NO: 2400665 - RNA, 21 nt, Human
accugcccaaccugcucuccu

SEQ ID NO: 2400666 - RNA, 16 nt, Human
accucuucuggcucaa

SEQ ID NO: 2400667 - RNA, 21 nt, Human
accucuucucuuccuguaaca

SEQ ID NO: 2400668 - RNA, 20 nt, Human
accugcccagaucccagaag

SEQ ID NO: 2400669 - RNA, 17 nt, Human
accugccccaacucucc

SEQ ID NO: 2400670 - RNA, 15 nt, Human
accugcccaucacag

SEQ ID NO: 2400671 - RNA, 22 nt, Human
accugcccagaucccagaagga

SEQ ID NO: 2400672 - RNA, 23 nt, Human
accugccccucaacucuccucca

SEQ ID NO: 2400673 - RNA, 14 nt, Human
accugccccuccuc

SEQ ID NO: 2400674 - RNA, 18 nt, Human
accugccccuccucucug

SEQ ID NO: 2400675 - RNA, 16 nt, Human
accugcccccaaucca

SEQ ID NO: 2400676 - RNA, 13 nt, Human
accugcccccugg

SEQ ID NO: 2400677 - RNA, 15 nt, Human
accugcccccuggug

SEQ ID NO: 2400678 - RNA, 12 nt, Human
accugcccccuu

SEQ ID NO: 2400679 - RNA, 16 nt, Human
accucugcacaagcug

SEQ ID NO: 2400680 - RNA, 18 nt, Human
accucugcacaagcugca

SEQ ID NO: 2400681 - RNA, 21 nt, Human
accucugcacuacugacaugu

SEQ ID NO: 2400682 - RNA, 22 nt, Human
accucuguuguccuccccuugg

SEQ ID NO: 2400683 - RNA, 20 nt, Human
accucuguuguccuccccuu

SEQ ID NO: 2400684 - RNA, 17 nt, Human
accucuguuguccuccc

SEQ ID NO: 2400685 - RNA, 21 nt, Human
accucugcacaagcugcaccc

SEQ ID NO: 2400686 - RNA, 17 nt, Human
accucuucagaggcccu

SEQ ID NO: 2400687 - RNA, 18 nt, Human
accucuucagaggcccuc

SEQ ID NO: 2400688 - RNA, 13 nt, Human
accucuuccccag

SEQ ID NO: 2400689 - RNA, 14 nt, Human
accucuuccccaga

SEQ ID NO: 2400690 - RNA, 15 nt, Human
accucuuagcugagu

SEQ ID NO: 2400691 - RNA, 20 nt, Human
accucuuaacaauuucuguc

SEQ ID NO: 2400692 - RNA, 15 nt, Human
accucuucagaggcc

SEQ ID NO: 2400693 - RNA, 22 nt, Human
accucuuaaagaaaacccaccc

SEQ ID NO: 2400694 - RNA, 21 nt, Human
accucuuaaagaaaacccacc

SEQ ID NO: 2400695 - RNA, 14 nt, Human
accucuuagcugag

SEQ ID NO: 2400696 - RNA, 15 nt, Human
accuugugucuguac

SEQ ID NO: 2400697 - RNA, 13 nt, Human
accuugugucugu

SEQ ID NO: 2400698 - RNA, 20 nt, Human
accuuguggcaagccccugc

SEQ ID NO: 2400699 - RNA, 14 nt, Human
accuugugccuggc

SEQ ID NO: 2400700 - RNA, 12 nt, Human
accuugugucug

SEQ ID NO: 2400701 - RNA, 16 nt, Human
accuuguuacuucuga

SEQ ID NO: 2400702 - RNA, 15 nt, Human
accuuguuacuucug

SEQ ID NO: 2400703 - RNA, 21 nt, Human
accuugugucuguacacgugu

SEQ ID NO: 2400704 - RNA, 18 nt, Human
accuugugucuguacacg

SEQ ID NO: 2400705 - RNA, 17 nt, Human
accuugugccuggcuca

SEQ ID NO: 2400706 - RNA, 14 nt, Human
accuuggcugcagg

SEQ ID NO: 2400707 - RNA, 17 nt, Human
accuuguuacuucugag

SEQ ID NO: 2400708 - RNA, 18 nt, Human
accuuguguguaugugua

SEQ ID NO: 2400709 - RNA, 17 nt, Human
accuuguuauuucucag

SEQ ID NO: 2400710 - RNA, 21 nt, Human
accuuguucacacucucacau

SEQ ID NO: 2400711 - RNA, 16 nt, Human
accuuguucacacucu

SEQ ID NO: 2400712 - RNA, 14 nt, Human
accuuguucacacu

SEQ ID NO: 2400713 - RNA, 22 nt, Human
accuuguuauuucucagacuuu

SEQ ID NO: 2400714 - RNA, 12 nt, Human
accuuuauucug

SEQ ID NO: 2400715 - RNA, 13 nt, Human
accuuuauucugg

SEQ ID NO: 2400716 - RNA, 16 nt, Human
accuuucaauaggaaa

SEQ ID NO: 2400717 - RNA, 20 nt, Human
accuuuauuaaaaucuuaaa

SEQ ID NO: 2400718 - RNA, 18 nt, Human
accuuuauugugaucuau

SEQ ID NO: 2400719 - RNA, 16 nt, Human
accuuuauugugaucu

SEQ ID NO: 2400720 - RNA, 14 nt, Human
accuuuauugugau

SEQ ID NO: 2400721 - RNA, 12 nt, Human
accuuggcucaa

SEQ ID NO: 2400722 - RNA, 17 nt, Human
accuguaugucuccagu

SEQ ID NO: 2400723 - RNA, 19 nt, Human
accugucaaacaaagccag

SEQ ID NO: 2400724 - RNA, 20 nt, Human
accugucaaacaaagccaga

SEQ ID NO: 2400725 - RNA, 24 nt, Human
accugucaaacaaagccagaagcu

SEQ ID NO: 2400726 - RNA, 22 nt, Human
accugucaaugauacagucccu

SEQ ID NO: 2400727 - RNA, 12 nt, Human
accuuggcugca

SEQ ID NO: 2400728 - RNA, 14 nt, Human
accuuggcucaagu

SEQ ID NO: 2400729 - RNA, 20 nt, Human
accugccccuccucucugcc

SEQ ID NO: 2400730 - RNA, 22 nt, Human
accugccccuccucucugcccu

SEQ ID NO: 2400731 - RNA, 20 nt, Human
accuguaaucccagcuacuu

SEQ ID NO: 2400732 - RNA, 17 nt, Human
accugcccccuucuccc

SEQ ID NO: 2400733 - RNA, 15 nt, Human
accugcccccuucuc

SEQ ID NO: 2400734 - RNA, 16 nt, Human
accugcccccuucucc

SEQ ID NO: 2400735 - RNA, 23 nt, Human
accuguauaaguggaggcacuuu

SEQ ID NO: 2400736 - RNA, 21 nt, Human
accuguauaaguggaggcacu

SEQ ID NO: 2400737 - RNA, 17 nt, Human
accuguagucccagcua

SEQ ID NO: 2400738 - RNA, 18 nt, Human
accuguagucccagcuac

SEQ ID NO: 2400739 - RNA, 12 nt, Human
accuguacucag

SEQ ID NO: 2400740 - RNA, 14 nt, Human
accuguagucccag

SEQ ID NO: 2400741 - RNA, 21 nt, Human
accuuucaauaggaaaaacug

SEQ ID NO: 2400742 - RNA, 17 nt, Human
accuuucaauaggaaaa

SEQ ID NO: 2400743 - RNA, 23 nt, Human
accuuucaauaggaaaaacugau

SEQ ID NO: 2400744 - RNA, 15 nt, Human
accuuucacauagag

SEQ ID NO: 2400745 - RNA, 17 nt, Human
accuuucaaauuucaca

SEQ ID NO: 2400746 - RNA, 17 nt, Human
accuuuauuuuagaauu

SEQ ID NO: 2400747 - RNA, 17 nt, Human
accuuucagcugugaac

SEQ ID NO: 2400748 - RNA, 16 nt, Human
accuuucagcugugaa

SEQ ID NO: 2400749 - RNA, 23 nt, Human
accuuucagauaacuguuauuua

SEQ ID NO: 2400750 - RNA, 22 nt, Human
acucccuugguggcaagagccc

SEQ ID NO: 2400751 - RNA, 21 nt, Human
acucccuugguggcaagagcc

SEQ ID NO: 2400752 - RNA, 19 nt, Human
acucccuugguggcaagag

SEQ ID NO: 2400753 - RNA, 14 nt, Human
acucccuugggcuc

SEQ ID NO: 2400754 - RNA, 12 nt, Human
acucccuuucaa

SEQ ID NO: 2400755 - RNA, 13 nt, Human
acucccuuucaac

SEQ ID NO: 2400756 - RNA, 22 nt, Human
acucccuucuaccugccacuca

SEQ ID NO: 2400757 - RNA, 21 nt, Human
acucccuucuaccugccacuc

SEQ ID NO: 2400758 - RNA, 19 nt, Human
acucccggcacuccaugcu

SEQ ID NO: 2400759 - RNA, 18 nt, Human
acucccggcacuccaugc

SEQ ID NO: 2400760 - RNA, 20 nt, Human
acuccccuugagcugagaug

SEQ ID NO: 2400761 - RNA, 15 nt, Human
acuccccuugagcug

SEQ ID NO: 2400762 - RNA, 17 nt, Human
acuccccuugagcugag

SEQ ID NO: 2400763 - RNA, 13 nt, Human
acucuaccucaua

SEQ ID NO: 2400764 - RNA, 22 nt, Human
acucuaccucauaucaguuugc

SEQ ID NO: 2400765 - RNA, 21 nt, Human
acucuacccucuuagaaaaac

SEQ ID NO: 2400766 - RNA, 13 nt, Human
acucuacccucuu

SEQ ID NO: 2400767 - RNA, 18 nt, Human
acucuacccucuuagaaa

SEQ ID NO: 2400768 - RNA, 21 nt, Human
acucugugcccaugggcacug

SEQ ID NO: 2400769 - RNA, 18 nt, Human
acucugugcccaugggca

SEQ ID NO: 2400770 - RNA, 15 nt, Human
acucugugcccaugg

SEQ ID NO: 2400771 - RNA, 13 nt, Human
acucugugcccau

SEQ ID NO: 2400772 - RNA, 24 nt, Human
acucugugcccaugggcacugcug

SEQ ID NO: 2400773 - RNA, 23 nt, Human
acucugugcccaugggcacugcu

SEQ ID NO: 2400774 - RNA, 20 nt, Human
acucugugccugaccuugag

SEQ ID NO: 2400775 - RNA, 12 nt, Human
acucugugccca

SEQ ID NO: 2400776 - RNA, 16 nt, Human
acucugugucaggugg

SEQ ID NO: 2400777 - RNA, 17 nt, Human
acucuguggggccuugg

SEQ ID NO: 2400778 - RNA, 15 nt, Human
acucuguggccaaag

SEQ ID NO: 2400779 - RNA, 16 nt, Human
acucuguggggccuug

SEQ ID NO: 2400780 - RNA, 11 nt, Human
acucuuaaaac

SEQ ID NO: 2400781 - RNA, 18 nt, Human
acucuuaaaacccaagug

SEQ ID NO: 2400782 - RNA, 20 nt, Human
acucuguugcaagugcaaua

SEQ ID NO: 2400783 - RNA, 20 nt, Human
acucuguuccuucacauccu

SEQ ID NO: 2400784 - RNA, 22 nt, Human
acucuguuccuucacauccugu

SEQ ID NO: 2400785 - RNA, 17 nt, Human
acucuguuccuucacau

SEQ ID NO: 2400786 - RNA, 14 nt, Human
acucuguuccuuca

SEQ ID NO: 2400787 - RNA, 14 nt, Human
acucuaucaaguau

SEQ ID NO: 2400788 - RNA, 15 nt, Human
acucuauagacucua

SEQ ID NO: 2400789 - RNA, 16 nt, Human
acucuaucaaguauua

SEQ ID NO: 2400790 - RNA, 18 nt, Human
acucuauagacucuagga

SEQ ID NO: 2400791 - RNA, 19 nt, Human
acucugggaaauaagagag

SEQ ID NO: 2400792 - RNA, 17 nt, Human
acucuggcuuccaggua

SEQ ID NO: 2400793 - RNA, 15 nt, Human
acucuggcuuccagg

SEQ ID NO: 2400794 - RNA, 13 nt, Human
acucugggaaaua

SEQ ID NO: 2400795 - RNA, 14 nt, Human
acucuggcuuccag

SEQ ID NO: 2400796 - RNA, 23 nt, Human
acucuggcugguuuggaaugcuu

SEQ ID NO: 2400797 - RNA, 22 nt, Human
acucuggcugguuuggaaugcu

SEQ ID NO: 2400798 - RNA, 11 nt, Human
acucuggccuc

SEQ ID NO: 2400799 - RNA, 12 nt, Human
acucuggcuggu

SEQ ID NO: 2400800 - RNA, 17 nt, Human
acucugggguuuuuacu

SEQ ID NO: 2400801 - RNA, 17 nt, Human
acucugggcugcuaccc

SEQ ID NO: 2400802 - RNA, 14 nt, Human
acucugggcuccag

SEQ ID NO: 2400803 - RNA, 16 nt, Human
acucugggcuccagag

SEQ ID NO: 2400804 - RNA, 18 nt, Human
acuauaaagguugacaau

SEQ ID NO: 2400805 - RNA, 20 nt, Human
acuauaaagaaguaacaaaa

SEQ ID NO: 2400806 - RNA, 19 nt, Human
acuaguuuaguuaaaugag

SEQ ID NO: 2400807 - RNA, 17 nt, Human
acuaguuuugugccagc

SEQ ID NO: 2400808 - RNA, 15 nt, Human
acucaaaauauuugu

SEQ ID NO: 2400809 - RNA, 18 nt, Human
acucaaaagcugggcagg

SEQ ID NO: 2400810 - RNA, 11 nt, Human
acuauaaugua

SEQ ID NO: 2400811 - RNA, 14 nt, Human
acucaaacugagga

SEQ ID NO: 2400812 - RNA, 21 nt, Human
acucaaacugaggaauuucac

SEQ ID NO: 2400813 - RNA, 19 nt, Human
acucaaaccaaaucacuga

SEQ ID NO: 2400814 - RNA, 20 nt, Human
acucaaaccaaaucacugaa

SEQ ID NO: 2400815 - RNA, 17 nt, Human
acucaaacucuuaaaac

SEQ ID NO: 2400816 - RNA, 16 nt, Human
acucaaacucuuaaaa

SEQ ID NO: 2400817 - RNA, 17 nt, Human
acucaaaauauuuguac

SEQ ID NO: 2400818 - RNA, 19 nt, Human
acucaaaauauuuguacau

SEQ ID NO: 2400819 - RNA, 20 nt, Human
acucaaaauauuuguacaua

SEQ ID NO: 2400820 - RNA, 15 nt, Human
acucagcacaaggcc

SEQ ID NO: 2400821 - RNA, 13 nt, Human
acucagcagcccu

SEQ ID NO: 2400822 - RNA, 16 nt, Human
acucagaucugucuga

SEQ ID NO: 2400823 - RNA, 21 nt, Human
acucagaucacuacugcaguc

SEQ ID NO: 2400824 - RNA, 21 nt, Human
acucagauggaaccgcaggaa

SEQ ID NO: 2400825 - RNA, 22 nt, Human
acucagauggaaccgcaggaag

SEQ ID NO: 2400826 - RNA, 23 nt, Human
acucagauggaaccgcaggaagc

SEQ ID NO: 2400827 - RNA, 22 nt, Human
acucagaugucucuggcgugug

SEQ ID NO: 2400828 - RNA, 14 nt, Human
acucagcagcccuc

SEQ ID NO: 2400829 - RNA, 15 nt, Human
acucagcagcccucc

SEQ ID NO: 2400830 - RNA, 15 nt, Human
acucagcccugaggu

SEQ ID NO: 2400831 - RNA, 12 nt, Human
acucagcccugg

SEQ ID NO: 2400832 - RNA, 13 nt, Human
acucagcccuggg

SEQ ID NO: 2400833 - RNA, 14 nt, Human
acucagcccugggc

SEQ ID NO: 2400834 - RNA, 22 nt, Human
acucagccucaauaagccuugu

SEQ ID NO: 2400835 - RNA, 15 nt, Human
acucagcccugggcc

SEQ ID NO: 2400836 - RNA, 16 nt, Human
acucagcccugggccc

SEQ ID NO: 2400837 - RNA, 22 nt, Human
acucagcccugggccccaccac

SEQ ID NO: 2400838 - RNA, 14 nt, Human
acucaaaucaagaa

SEQ ID NO: 2400839 - RNA, 11 nt, Human
acucagaucca

SEQ ID NO: 2400840 - RNA, 12 nt, Human
acucagauccag

SEQ ID NO: 2400841 - RNA, 14 nt, Human
acucagauccaggg

SEQ ID NO: 2400842 - RNA, 16 nt, Human
acucagauccagggac

SEQ ID NO: 2400843 - RNA, 17 nt, Human
acucagauccagggaca

SEQ ID NO: 2400844 - RNA, 19 nt, Human
acucagauccagggacaga

SEQ ID NO: 2400845 - RNA, 22 nt, Human
acucaaaguuucagagaccauu

SEQ ID NO: 2400846 - RNA, 19 nt, Human
acucaaaguuucagagacc

SEQ ID NO: 2400847 - RNA, 20 nt, Human
acucaaaguuucagagacca

SEQ ID NO: 2400848 - RNA, 23 nt, Human
acucaaacugaggaauuucaccu

SEQ ID NO: 2400849 - RNA, 21 nt, Human
acucaaacugccuuggcuuca

SEQ ID NO: 2400850 - RNA, 23 nt, Human
acucaaacuuuuccccuguccug

SEQ ID NO: 2400851 - RNA, 13 nt, Human
acuccccugcugg

SEQ ID NO: 2400852 - RNA, 12 nt, Human
acuccccuccuu

SEQ ID NO: 2400853 - RNA, 17 nt, Human
acuccccugcugggugu

SEQ ID NO: 2400854 - RNA, 17 nt, Human
acuccccgaagucuuuu

SEQ ID NO: 2400855 - RNA, 11 nt, Human
acuccccucca

SEQ ID NO: 2400856 - RNA, 12 nt, Human
acuccccugcac

SEQ ID NO: 2400857 - RNA, 16 nt, Human
acuccccugcacugga

SEQ ID NO: 2400858 - RNA, 22 nt, Human
acuccccugcacuggaguccag

SEQ ID NO: 2400859 - RNA, 19 nt, Human
acuccccaggccaggccac

SEQ ID NO: 2400860 - RNA, 15 nt, Human
acuccccaggccagg

SEQ ID NO: 2400861 - RNA, 13 nt, Human
acuccccaggcca

SEQ ID NO: 2400862 - RNA, 14 nt, Human
acuccccgaagucu

SEQ ID NO: 2400863 - RNA, 16 nt, Human
acuccccgaagucuuu

SEQ ID NO: 2400864 - RNA, 14 nt, Human
acucccccaggugg

SEQ ID NO: 2400865 - RNA, 12 nt, Human
acuccccaggcc

SEQ ID NO: 2400866 - RNA, 22 nt, Human
acucaguuugucagacuuuaaa

SEQ ID NO: 2400867 - RNA, 13 nt, Human
acucaguuuucuu

SEQ ID NO: 2400868 - RNA, 21 nt, Human
acucauaaaaagccugcaauu

SEQ ID NO: 2400869 - RNA, 22 nt, Human
acucaguuuuaacuagaauuua

SEQ ID NO: 2400870 - RNA, 15 nt, Human
acucaguuuuaacua

SEQ ID NO: 2400871 - RNA, 13 nt, Human
acucagucuuuaa

SEQ ID NO: 2400872 - RNA, 14 nt, Human
acucaguggggagg

SEQ ID NO: 2400873 - RNA, 18 nt, Human
acucagggccaugccugc

SEQ ID NO: 2400874 - RNA, 13 nt, Human
acucaguuuguca

SEQ ID NO: 2400875 - RNA, 14 nt, Human
acucaguuugucag

SEQ ID NO: 2400876 - RNA, 15 nt, Human
acucaguuugucaga

SEQ ID NO: 2400877 - RNA, 19 nt, Human
acucaguuugucagacuuu

SEQ ID NO: 2400878 - RNA, 17 nt, Human
acucagggcagcgccag

SEQ ID NO: 2400879 - RNA, 20 nt, Human
acucagggcagcgccaggcu

SEQ ID NO: 2400880 - RNA, 21 nt, Human
acucagggcagcgccaggcug

SEQ ID NO: 2400881 - RNA, 22 nt, Human
acucagggcagcgccaggcuga

SEQ ID NO: 2400882 - RNA, 13 nt, Human
acucagggcccca

SEQ ID NO: 2400883 - RNA, 14 nt, Human
acucagggccccag

SEQ ID NO: 2400884 - RNA, 20 nt, Human
acucagggacagagccaugc

SEQ ID NO: 2400885 - RNA, 18 nt, Human
acucagggacagagccau

SEQ ID NO: 2400886 - RNA, 17 nt, Human
acucagggacagagcca

SEQ ID NO: 2400887 - RNA, 15 nt, Human
acucagggacagagc

SEQ ID NO: 2400888 - RNA, 13 nt, Human
acucagggacaga

SEQ ID NO: 2400889 - RNA, 23 nt, Human
acucaggcuuucacuauuuccuu

SEQ ID NO: 2400890 - RNA, 15 nt, Human
acucaggcuuucacu

SEQ ID NO: 2400891 - RNA, 17 nt, Human
acucaggcccaaagccu

SEQ ID NO: 2400892 - RNA, 23 nt, Human
acucagccuucagacagagagga

SEQ ID NO: 2400893 - RNA, 11 nt, Human
acucagccuuc

SEQ ID NO: 2400894 - RNA, 19 nt, Human
acucagcuccccagagucc

SEQ ID NO: 2400895 - RNA, 15 nt, Human
acucagcuccccaga

SEQ ID NO: 2400896 - RNA, 14 nt, Human
acucagcuccccag

SEQ ID NO: 2400897 - RNA, 21 nt, Human
acucagcccugggccccacca

SEQ ID NO: 2400898 - RNA, 14 nt, Human
acucagcuccguga

SEQ ID NO: 2400899 - RNA, 22 nt, Human
acucagcucuuggcuccacugg

SEQ ID NO: 2400900 - RNA, 23 nt, Human
acuagccaccaacucuugcaggu

SEQ ID NO: 2400901 - RNA, 16 nt, Human
acuagccaccaacucu

SEQ ID NO: 2400902 - RNA, 15 nt, Human
acuagccaccaacuc

SEQ ID NO: 2400903 - RNA, 14 nt, Human
acuagcuauggugu

SEQ ID NO: 2400904 - RNA, 21 nt, Human
acuagccaugauaacugcaau

SEQ ID NO: 2400905 - RNA, 22 nt, Human
acuagccagacacucugcucug

SEQ ID NO: 2400906 - RNA, 15 nt, Human
acuagcccaaugaaa

SEQ ID NO: 2400907 - RNA, 17 nt, Human
acuagcccaaugaaaug

SEQ ID NO: 2400908 - RNA, 22 nt, Human
acuagccuuuggcucuggagac

SEQ ID NO: 2400909 - RNA, 20 nt, Human
acuagccuuuggcucuggag

SEQ ID NO: 2400910 - RNA, 19 nt, Human
acuagccuuuggcucugga

SEQ ID NO: 2400911 - RNA, 18 nt, Human
acuagccuuuggcucugg

SEQ ID NO: 2400912 - RNA, 17 nt, Human
acuagccuuuggcucug

SEQ ID NO: 2400913 - RNA, 21 nt, Human
acuagccccuguggagacugg

SEQ ID NO: 2400914 - RNA, 15 nt, Human
acuagccucuccagg

SEQ ID NO: 2400915 - RNA, 18 nt, Human
acuaggaaauccauucac

SEQ ID NO: 2400916 - RNA, 16 nt, Human
acuaggacucugaggc

SEQ ID NO: 2400917 - RNA, 18 nt, Human
acuaggagaaccaaaucu

SEQ ID NO: 2400918 - RNA, 17 nt, Human
acuaggacucugaggcu

SEQ ID NO: 2400919 - RNA, 23 nt, Human
acuagcuagaagugggccaggac

SEQ ID NO: 2400920 - RNA, 20 nt, Human
acuaggcccccacuugccuc

SEQ ID NO: 2400921 - RNA, 18 nt, Human
acuagggaucccucaucu

SEQ ID NO: 2400922 - RNA, 19 nt, Human
acuagggaucccucaucug

SEQ ID NO: 2400923 - RNA, 20 nt, Human
acuagggaucccucaucugu

SEQ ID NO: 2400924 - RNA, 18 nt, Human
acuaggcccccacuugcc

SEQ ID NO: 2400925 - RNA, 15 nt, Human
acuaggguccugggg

SEQ ID NO: 2400926 - RNA, 16 nt, Human
acuagggccaagccca

SEQ ID NO: 2400927 - RNA, 21 nt, Human
acuagggauucaggcugcuug

SEQ ID NO: 2400928 - RNA, 16 nt, Human
acuagggauucaggcu

SEQ ID NO: 2400929 - RNA, 17 nt, Human
acuagggauucaggcug

SEQ ID NO: 2400930 - RNA, 18 nt, Human
acuagggauucaggcugc

SEQ ID NO: 2400931 - RNA, 19 nt, Human
acuagggauucaggcugcu

SEQ ID NO: 2400932 - RNA, 15 nt, Human
acuagguaacuucau

SEQ ID NO: 2400933 - RNA, 15 nt, Human
acuaguuacacaucu

SEQ ID NO: 2400934 - RNA, 18 nt, Human
acuaguuacacaucuuca

SEQ ID NO: 2400935 - RNA, 21 nt, Human
acuaguugugaccuuaguguu

SEQ ID NO: 2400936 - RNA, 20 nt, Human
acuaguugugaccuuagugu

SEQ ID NO: 2400937 - RNA, 17 nt, Human
acuaguugugaccuuag

SEQ ID NO: 2400938 - RNA, 22 nt, Human
acuaguuacacaucuucaacag

SEQ ID NO: 2400939 - RNA, 16 nt, Human
acuaggguccugggga

SEQ ID NO: 2400940 - RNA, 14 nt, Human
acuagguaacuuca

SEQ ID NO: 2400941 - RNA, 22 nt, Human
acuaggggauauaggagaggaa

SEQ ID NO: 2400942 - RNA, 17 nt, Human
agaaaggagucugcaca

SEQ ID NO: 2400943 - RNA, 14 nt, Human
agaaaggacucugg

SEQ ID NO: 2400944 - RNA, 11 nt, Human
agaaaggagac

SEQ ID NO: 2400945 - RNA, 15 nt, Human
agaaaggacucuggg

SEQ ID NO: 2400946 - RNA, 23 nt, Human
agaaaggaggggauagagagaga

SEQ ID NO: 2400947 - RNA, 20 nt, Human
agaaaggaggggauagagag

SEQ ID NO: 2400948 - RNA, 18 nt, Human
agaaauaaaaggaagcca

SEQ ID NO: 2400949 - RNA, 19 nt, Human
agaaauaaaaggaagccaa

SEQ ID NO: 2400950 - RNA, 20 nt, Human
agaaauaaaaggaagccaaa

SEQ ID NO: 2400951 - RNA, 15 nt, Human
agaaauaaaguuucu

SEQ ID NO: 2400952 - RNA, 18 nt, Human
agaaauaaaguuucuguu

SEQ ID NO: 2400953 - RNA, 18 nt, Human
agaaauaaaguuugcuua

SEQ ID NO: 2400954 - RNA, 21 nt, Human
agaaauaaaguuggugacaga

SEQ ID NO: 2400955 - RNA, 19 nt, Human
agaaauaaaguuggugaca

SEQ ID NO: 2400956 - RNA, 15 nt, Human
acuuuuauaaacuuu

SEQ ID NO: 2400957 - RNA, 19 nt, Human
acuuuuauaaacuuuaccu

SEQ ID NO: 2400958 - RNA, 14 nt, Human
acuuuuaaacugug

SEQ ID NO: 2400959 - RNA, 15 nt, Human
acuuuuaaacugugu

SEQ ID NO: 2400960 - RNA, 17 nt, Human
acuuuuaaacuguguac

SEQ ID NO: 2400961 - RNA, 22 nt, Human
acuuuuauaaacuuuaccuuuu

SEQ ID NO: 2400962 - RNA, 18 nt, Human
acuuuuccuuugaauccu

SEQ ID NO: 2400963 - RNA, 19 nt, Human
acuuuuccuuugaauccuc

SEQ ID NO: 2400964 - RNA, 15 nt, Human
acuuuucuccaugag

SEQ ID NO: 2400965 - RNA, 19 nt, Human
acuuuuauaauaaaaggaa

SEQ ID NO: 2400966 - RNA, 17 nt, Human
acuuuuccucccucagu

SEQ ID NO: 2400967 - RNA, 23 nt, Human
acuuuuauacucuuucuguauau

SEQ ID NO: 2400968 - RNA, 11 nt, Human
acuuuuauaau

SEQ ID NO: 2400969 - RNA, 12 nt, Human
agaaaauaaaaa

SEQ ID NO: 2400970 - RNA, 16 nt, Human
agaaaauaaaaaaaag

SEQ ID NO: 2400971 - RNA, 17 nt, Human
agaaaauaaaaaaaaga

SEQ ID NO: 2400972 - RNA, 18 nt, Human
agaaaauaaaaaaaagaa

SEQ ID NO: 2400973 - RNA, 19 nt, Human
agaaaauaaaaaaaagaaa

SEQ ID NO: 2400974 - RNA, 20 nt, Human
agaaaauaaaaaaaagaaaa

SEQ ID NO: 2400975 - RNA, 15 nt, Human
agaaaauaaaaaguu

SEQ ID NO: 2400976 - RNA, 16 nt, Human
agaaaauaaaaaguua

SEQ ID NO: 2400977 - RNA, 17 nt, Human
agaaaauaaaaaguuaa

SEQ ID NO: 2400978 - RNA, 18 nt, Human
agaaaauaaaaaguuaaa

SEQ ID NO: 2400979 - RNA, 13 nt, Human
agaaaauaaaaag

SEQ ID NO: 2400980 - RNA, 14 nt, Human
agaaaauaaaaagu

SEQ ID NO: 2400981 - RNA, 21 nt, Human
agaaaauaaaaaaaagaaaaa

SEQ ID NO: 2400982 - RNA, 22 nt, Human
agaaaauaaaaaaaagaaaaaa

SEQ ID NO: 2400983 - RNA, 15 nt, Human
agaaaaguaagcccu

SEQ ID NO: 2400984 - RNA, 16 nt, Human
acuuuucuuaaaccuu

SEQ ID NO: 2400985 - RNA, 24 nt, Human
acuuuucuuaaaccuucaguuaug

SEQ ID NO: 2400986 - RNA, 23 nt, Human
agaaaagggaaguugugccuuuu

SEQ ID NO: 2400987 - RNA, 20 nt, Human
agaaaagggaacugaacauu

SEQ ID NO: 2400988 - RNA, 20 nt, Human
agaaaauggacguguuauga

SEQ ID NO: 2400989 - RNA, 15 nt, Human
agaaaauggacgugu

SEQ ID NO: 2400990 - RNA, 23 nt, Human
agaaaauggaagacagcucuuau

SEQ ID NO: 2400991 - RNA, 23 nt, Human
agaaaauauacuguaaagaaaga

SEQ ID NO: 2400992 - RNA, 22 nt, Human
agaaaauaucugaaaugugaua

SEQ ID NO: 2400993 - RNA, 15 nt, Human
agaaaauauacugua

SEQ ID NO: 2400994 - RNA, 16 nt, Human
agaaaauauacuguaa

SEQ ID NO: 2400995 - RNA, 17 nt, Human
agaaaauauacuguaaa

SEQ ID NO: 2400996 - RNA, 18 nt, Human
agaaaauauacuguaaag

SEQ ID NO: 2400997 - RNA, 19 nt, Human
agaaaauauacuguaaaga

SEQ ID NO: 2400998 - RNA, 20 nt, Human
agaaaauauacuguaaagaa

SEQ ID NO: 2400999 - RNA, 21 nt, Human
agaaaauauacuguaaagaaa

SEQ ID NO: 2401000 - RNA, 22 nt, Human
agaaaauauacuguaaagaaag

SEQ ID NO: 2401001 - RNA, 11 nt, Human
agaaaauauac

SEQ ID NO: 2401002 - RNA, 13 nt, Human
agaaaauauacug

SEQ ID NO: 2401003 - RNA, 14 nt, Human
agaaaauauacugu

SEQ ID NO: 2401004 - RNA, 12 nt, Human
agaaaauauacu

SEQ ID NO: 2401005 - RNA, 14 nt, Human
agaaaauugcugug

SEQ ID NO: 2401006 - RNA, 18 nt, Human
agaaacaacaauuucuac

SEQ ID NO: 2401007 - RNA, 18 nt, Human
agaaaauugcugugccuc

SEQ ID NO: 2401008 - RNA, 16 nt, Human
agaaaauguugagaau

SEQ ID NO: 2401009 - RNA, 17 nt, Human
agaaaauguugagaauc

SEQ ID NO: 2401010 - RNA, 12 nt, Human
agaaaauucaau

SEQ ID NO: 2401011 - RNA, 13 nt, Human
agaaaauucaauu

SEQ ID NO: 2401012 - RNA, 15 nt, Human
agaaaauucaauugu

SEQ ID NO: 2401013 - RNA, 17 nt, Human
agaaaauucaauuguaa

SEQ ID NO: 2401014 - RNA, 18 nt, Human
agaaaauucaauuguaaa

SEQ ID NO: 2401015 - RNA, 23 nt, Human
agaaaauggacguguuaugacuc

SEQ ID NO: 2401016 - RNA, 22 nt, Human
agaaaauggacguguuaugacu

SEQ ID NO: 2401017 - RNA, 19 nt, Human
agaaaauguuauuuaacag

SEQ ID NO: 2401018 - RNA, 16 nt, Human
agaaaauguuauuuaa

SEQ ID NO: 2401019 - RNA, 18 nt, Human
agaaaauguuauuuaaca

SEQ ID NO: 2401020 - RNA, 13 nt, Human
agaaaauguuauu

SEQ ID NO: 2401021 - RNA, 23 nt, Human
agaaaauauuauguguuuccaua

SEQ ID NO: 2401022 - RNA, 15 nt, Human
agaaaauggacacug

SEQ ID NO: 2401023 - RNA, 17 nt, Human
acuuucuacaaugugaa

SEQ ID NO: 2401024 - RNA, 19 nt, Human
acuuucuacaaugugaacu

SEQ ID NO: 2401025 - RNA, 21 nt, Human
acuuucuacaaugugaacuuu

SEQ ID NO: 2401026 - RNA, 23 nt, Human
acuuuguucuggcucuuccaggc

SEQ ID NO: 2401027 - RNA, 19 nt, Human
acuuuguucuuuaggagau

SEQ ID NO: 2401028 - RNA, 12 nt, Human
acuuuuaaacag

SEQ ID NO: 2401029 - RNA, 15 nt, Human
acuuuuaaacaguga

SEQ ID NO: 2401030 - RNA, 13 nt, Human
acuuuuaaacugu

SEQ ID NO: 2401031 - RNA, 20 nt, Human
acuuuguucuuuaggagauu

SEQ ID NO: 2401032 - RNA, 20 nt, Human
acuuuguuucguggggaggu

SEQ ID NO: 2401033 - RNA, 15 nt, Human
acuuucuagauuaag

SEQ ID NO: 2401034 - RNA, 15 nt, Human
acuuuguucuuuagg

SEQ ID NO: 2401035 - RNA, 16 nt, Human
acuuucguacauuggc

SEQ ID NO: 2401036 - RNA, 15 nt, Human
acuuucguacauugg

SEQ ID NO: 2401037 - RNA, 19 nt, Human
acuuuccuuuccccagccc

SEQ ID NO: 2401038 - RNA, 22 nt, Human
acuuuccuuuccccagcccagg

SEQ ID NO: 2401039 - RNA, 18 nt, Human
acuuuccuuuccccagcc

SEQ ID NO: 2401040 - RNA, 17 nt, Human
acuuuccuuuccccagc

SEQ ID NO: 2401041 - RNA, 23 nt, Human
acuuuccuucauucaacccaccu

SEQ ID NO: 2401042 - RNA, 23 nt, Human
acuuucauuuuuuuccaggcugg

SEQ ID NO: 2401043 - RNA, 21 nt, Human
acuuucauuuuuuuccaggcu

SEQ ID NO: 2401044 - RNA, 16 nt, Human
acuuuccacccccucc

SEQ ID NO: 2401045 - RNA, 14 nt, Human
acuuuccugcaacu

SEQ ID NO: 2401046 - RNA, 18 nt, Human
acuuuccacccccucccu

SEQ ID NO: 2401047 - RNA, 19 nt, Human
acuuuccacccccucccug

SEQ ID NO: 2401048 - RNA, 20 nt, Human
acuuuccacccccucccugg

SEQ ID NO: 2401049 - RNA, 18 nt, Human
acuuuagucugcaaaaug

SEQ ID NO: 2401050 - RNA, 17 nt, Human
acuuuagucugcaaaau

SEQ ID NO: 2401051 - RNA, 16 nt, Human
acuuuagucugcaaaa

SEQ ID NO: 2401052 - RNA, 15 nt, Human
acuuuagucugcaaa

SEQ ID NO: 2401053 - RNA, 15 nt, Human
acuuuagggcuguaa

SEQ ID NO: 2401054 - RNA, 22 nt, Human
acuuuagggcuguaaaaugcau

SEQ ID NO: 2401055 - RNA, 23 nt, Human
acuuuagggcuguaaaaugcaug

SEQ ID NO: 2401056 - RNA, 23 nt, Human
acuuuagggaaguacuuuuggca

SEQ ID NO: 2401057 - RNA, 23 nt, Human
acuuucauccugacucugccccc

SEQ ID NO: 2401058 - RNA, 21 nt, Human
acuuucauccugacucugccc

SEQ ID NO: 2401059 - RNA, 19 nt, Human
acuuucauccugacucugc

SEQ ID NO: 2401060 - RNA, 20 nt, Human
acuuucauuuuuuuccaggc

SEQ ID NO: 2401061 - RNA, 17 nt, Human
acuuucauuuuuuucca

SEQ ID NO: 2401062 - RNA, 19 nt, Human
acuuucauuaaagcauuua

SEQ ID NO: 2401063 - RNA, 18 nt, Human
acuuucagugaaagcauc

SEQ ID NO: 2401064 - RNA, 15 nt, Human
acugaagucugaaau

SEQ ID NO: 2401065 - RNA, 20 nt, Human
acugaaggccuggcccacag

SEQ ID NO: 2401066 - RNA, 17 nt, Human
acugaaggccuggccca

SEQ ID NO: 2401067 - RNA, 13 nt, Human
acugaaggagaag

SEQ ID NO: 2401068 - RNA, 14 nt, Human
acugaaggagaagg

SEQ ID NO: 2401069 - RNA, 21 nt, Human
acugaaggagaaggugcccca

SEQ ID NO: 2401070 - RNA, 18 nt, Human
acugaaggaaaaacacaa

SEQ ID NO: 2401071 - RNA, 22 nt, Human
acugaaggaaaaacacaagcaa

SEQ ID NO: 2401072 - RNA, 20 nt, Human
acugaaggaaaaacacaagc

SEQ ID NO: 2401073 - RNA, 23 nt, Human
acugaaggaaaaacacaagcaaa

SEQ ID NO: 2401074 - RNA, 11 nt, Human
acugaaggaga

SEQ ID NO: 2401075 - RNA, 16 nt, Human
acugaagucugaaauu

SEQ ID NO: 2401076 - RNA, 14 nt, Human
acugaagucugaaa

SEQ ID NO: 2401077 - RNA, 13 nt, Human
acugaagucugaa

SEQ ID NO: 2401078 - RNA, 17 nt, Human
acugaagugcuuagugu

SEQ ID NO: 2401079 - RNA, 13 nt, Human
acugaagugcuua

SEQ ID NO: 2401080 - RNA, 19 nt, Human
acugaaguagugugcaguu

SEQ ID NO: 2401081 - RNA, 19 nt, Human
acugaagccugcaggaguu

SEQ ID NO: 2401082 - RNA, 17 nt, Human
acugaagguaaaauuga

SEQ ID NO: 2401083 - RNA, 14 nt, Human
acugccaaccuggg

SEQ ID NO: 2401084 - RNA, 22 nt, Human
acugccacacgucugacccucu

SEQ ID NO: 2401085 - RNA, 21 nt, Human
acugccaaagggaaauaucau

SEQ ID NO: 2401086 - RNA, 17 nt, Human
acugccaaaaugcucua

SEQ ID NO: 2401087 - RNA, 18 nt, Human
acugccaaaaugcucuag

SEQ ID NO: 2401088 - RNA, 19 nt, Human
acugcccccucugcccugc

SEQ ID NO: 2401089 - RNA, 18 nt, Human
acugcccccucugcccug

SEQ ID NO: 2401090 - RNA, 14 nt, Human
acugccagaugcug

SEQ ID NO: 2401091 - RNA, 20 nt, Human
acugcccccucugcccugcg

SEQ ID NO: 2401092 - RNA, 17 nt, Human
acugccccgugcagacu

SEQ ID NO: 2401093 - RNA, 18 nt, Human
acugccccgugcagacug

SEQ ID NO: 2401094 - RNA, 19 nt, Human
acugccccgugcagacugg

SEQ ID NO: 2401095 - RNA, 23 nt, Human
acugccccgugcagacuggaggg

SEQ ID NO: 2401096 - RNA, 14 nt, Human
acugcccgagcugg

SEQ ID NO: 2401097 - RNA, 15 nt, Human
acugcccgagcuggu

SEQ ID NO: 2401098 - RNA, 16 nt, Human
acugcccgagcuggug

SEQ ID NO: 2401099 - RNA, 18 nt, Human
acugcccgagcuggugca

SEQ ID NO: 2401100 - RNA, 14 nt, Human
acuggaagcacagc

SEQ ID NO: 2401101 - RNA, 21 nt, Human
acugcccgagcuggugcauua

SEQ ID NO: 2401102 - RNA, 15 nt, Human
acuggaagcacagcu

SEQ ID NO: 2401103 - RNA, 16 nt, Human
acuggaagcacagcuu

SEQ ID NO: 2401104 - RNA, 19 nt, Human
acugcccgagcuggugcau

SEQ ID NO: 2401105 - RNA, 20 nt, Human
acugcccgagcuggugcauu

SEQ ID NO: 2401106 - RNA, 14 nt, Human
acuggguuccugca

SEQ ID NO: 2401107 - RNA, 13 nt, Human
acuggguugacuu

SEQ ID NO: 2401108 - RNA, 14 nt, Human
acuggguuucuagc

SEQ ID NO: 2401109 - RNA, 16 nt, Human
acuggguucccaugcu

SEQ ID NO: 2401110 - RNA, 20 nt, Human
acuggguugacuuucaggua

SEQ ID NO: 2401111 - RNA, 22 nt, Human
acuggguuuggaccccagcugg

SEQ ID NO: 2401112 - RNA, 21 nt, Human
acuggguuuggaccccagcug

SEQ ID NO: 2401113 - RNA, 20 nt, Human
acuggguuuggaccccagcu

SEQ ID NO: 2401114 - RNA, 19 nt, Human
acuggguuuggaccccagc

SEQ ID NO: 2401115 - RNA, 16 nt, Human
acuggguuuggacccc

SEQ ID NO: 2401116 - RNA, 15 nt, Human
acuggguuucuagcc

SEQ ID NO: 2401117 - RNA, 20 nt, Human
acuggguuucucuguauagu

SEQ ID NO: 2401118 - RNA, 20 nt, Human
acuggguggggugaggacca

SEQ ID NO: 2401119 - RNA, 22 nt, Human
acuggguggggugaggaccacu

SEQ ID NO: 2401120 - RNA, 21 nt, Human
acugggugcccaagcucagaa

SEQ ID NO: 2401121 - RNA, 18 nt, Human
acuggguggggugaggac

SEQ ID NO: 2401122 - RNA, 22 nt, Human
acuggacuugagcuuggcagcu

SEQ ID NO: 2401123 - RNA, 18 nt, Human
acuggacuccggcccucc

SEQ ID NO: 2401124 - RNA, 16 nt, Human
acuggacccuguugcu

SEQ ID NO: 2401125 - RNA, 15 nt, Human
acuggacccuguugc

SEQ ID NO: 2401126 - RNA, 18 nt, Human
acuggacccuguugcuaa

SEQ ID NO: 2401127 - RNA, 17 nt, Human
acuggacccuguugcua

SEQ ID NO: 2401128 - RNA, 20 nt, Human
acuggacccuguugcuaagc

SEQ ID NO: 2401129 - RNA, 19 nt, Human
acuggacccuguugcuaag

SEQ ID NO: 2401130 - RNA, 14 nt, Human
acuggacucaggau

SEQ ID NO: 2401131 - RNA, 20 nt, Human
acuggacucaggaugcccag

SEQ ID NO: 2401132 - RNA, 21 nt, Human
acuggacucaggaugcccagg

SEQ ID NO: 2401133 - RNA, 23 nt, Human
acuggacucaggaugcccagggc

SEQ ID NO: 2401134 - RNA, 14 nt, Human
acuggagaaaaugg

SEQ ID NO: 2401135 - RNA, 19 nt, Human
acuggacuccggcccuccu

SEQ ID NO: 2401136 - RNA, 16 nt, Human
acuggacuccggcccu

SEQ ID NO: 2401137 - RNA, 14 nt, Human
acuggacuccggcc

SEQ ID NO: 2401138 - RNA, 20 nt, Human
acuguccugggcgcccugga

SEQ ID NO: 2401139 - RNA, 19 nt, Human
acuguccugggcgcccugg

SEQ ID NO: 2401140 - RNA, 22 nt, Human
acuguccugggcgcccuggaag

SEQ ID NO: 2401141 - RNA, 23 nt, Human
acuguccugggcgcccuggaagc

SEQ ID NO: 2401142 - RNA, 18 nt, Human
acuguccugggcgcccug

SEQ ID NO: 2401143 - RNA, 13 nt, Human
acuguccugggcg

SEQ ID NO: 2401144 - RNA, 19 nt, Human
acuguccugggccugcaga

SEQ ID NO: 2401145 - RNA, 18 nt, Human
acugucuauuucugcuga

SEQ ID NO: 2401146 - RNA, 17 nt, Human
acugucuauuucugcug

SEQ ID NO: 2401147 - RNA, 16 nt, Human
acugucuauuucugcu

SEQ ID NO: 2401148 - RNA, 13 nt, Human
acugucuauuucu

SEQ ID NO: 2401149 - RNA, 15 nt, Human
acugucucuccugau

SEQ ID NO: 2401150 - RNA, 23 nt, Human
acuggguuuggaccccagcuggg

SEQ ID NO: 2401151 - RNA, 20 nt, Human
acugguggcccgacagccug

SEQ ID NO: 2401152 - RNA, 22 nt, Human
acugguggcccgacagccuggc

SEQ ID NO: 2401153 - RNA, 21 nt, Human
acugguggcccgacagccugg

SEQ ID NO: 2401154 - RNA, 21 nt, Human
acugguguuaucaccgugggc

SEQ ID NO: 2401155 - RNA, 22 nt, Human
acugguguuaucaccgugggcu

SEQ ID NO: 2401156 - RNA, 17 nt, Human
acuguccugggccugca

SEQ ID NO: 2401157 - RNA, 21 nt, Human
acuggugugaccugagggcag

SEQ ID NO: 2401158 - RNA, 16 nt, Human
acuguccugggccugc

SEQ ID NO: 2401159 - RNA, 23 nt, Human
acugguggcccgacagccuggca

SEQ ID NO: 2401160 - RNA, 14 nt, Human
acuggugugaccug

SEQ ID NO: 2401161 - RNA, 17 nt, Human
acuggugugaccugagg

SEQ ID NO: 2401162 - RNA, 20 nt, Human
acuggugggaucugugccca

SEQ ID NO: 2401163 - RNA, 21 nt, Human
acugugcagagucuagaaguu

SEQ ID NO: 2401164 - RNA, 12 nt, Human
acugugcagagu

SEQ ID NO: 2401165 - RNA, 18 nt, Human
acugugcaccaagcagga

SEQ ID NO: 2401166 - RNA, 15 nt, Human
acugugcacaucugu

SEQ ID NO: 2401167 - RNA, 19 nt, Human
acugugcacaucugugucu

SEQ ID NO: 2401168 - RNA, 20 nt, Human
acugugcacaucugugucuu

SEQ ID NO: 2401169 - RNA, 21 nt, Human
acugugcacaucugugucuug

SEQ ID NO: 2401170 - RNA, 20 nt, Human
acugugaugccacacagagu

SEQ ID NO: 2401171 - RNA, 22 nt, Human
acugugaugccacacagagugg

SEQ ID NO: 2401172 - RNA, 13 nt, Human
acugugaugccac

SEQ ID NO: 2401173 - RNA, 12 nt, Human
acugucuucagu

SEQ ID NO: 2401174 - RNA, 16 nt, Human
acugucuucuucaggg

SEQ ID NO: 2401175 - RNA, 12 nt, Human
acugucuuuccu

SEQ ID NO: 2401176 - RNA, 12 nt, Human
acugucuuucag

SEQ ID NO: 2401177 - RNA, 23 nt, Human
acugugaucaggcuauguaugga

SEQ ID NO: 2401178 - RNA, 20 nt, Human
acugucugagaguuuaguug

SEQ ID NO: 2401179 - RNA, 15 nt, Human
acugucugagaguuu

SEQ ID NO: 2401180 - RNA, 23 nt, Human
acugucuauuucugcugaauuuu

SEQ ID NO: 2401181 - RNA, 19 nt, Human
acugucuauuucugcugaa

SEQ ID NO: 2401182 - RNA, 13 nt, Human
acugucugguuuu

SEQ ID NO: 2401183 - RNA, 19 nt, Human
acugucugguuuuaacaau

SEQ ID NO: 2401184 - RNA, 18 nt, Human
acugucugguuuuaacaa

SEQ ID NO: 2401185 - RNA, 17 nt, Human
acugucugguuuuaaca

SEQ ID NO: 2401186 - RNA, 15 nt, Human
acuuguaaauacacc

SEQ ID NO: 2401187 - RNA, 14 nt, Human
acuuguaaauacac

SEQ ID NO: 2401188 - RNA, 16 nt, Human
acuuguaaauacacca

SEQ ID NO: 2401189 - RNA, 13 nt, Human
acuuguaaauaca

SEQ ID NO: 2401190 - RNA, 21 nt, Human
acuucuuuucacauucuuaua

SEQ ID NO: 2401191 - RNA, 19 nt, Human
acuucuuuugcucuuagcu

SEQ ID NO: 2401192 - RNA, 18 nt, Human
acuuguaaaugugguaaa

SEQ ID NO: 2401193 - RNA, 14 nt, Human
acuuguaaaugcug

SEQ ID NO: 2401194 - RNA, 14 nt, Human
acuuguaaguugcu

SEQ ID NO: 2401195 - RNA, 20 nt, Human
acuuguaaaugugguaaaga

SEQ ID NO: 2401196 - RNA, 19 nt, Human
acuuguaaaggaauuuaaa

SEQ ID NO: 2401197 - RNA, 20 nt, Human
acuuguaaaggaauuuaaaa

SEQ ID NO: 2401198 - RNA, 19 nt, Human
acuucuuuucacauucuua

SEQ ID NO: 2401199 - RNA, 18 nt, Human
acuucuuuucacauucuu

SEQ ID NO: 2401200 - RNA, 17 nt, Human
acuucuuuucacauucu

SEQ ID NO: 2401201 - RNA, 15 nt, Human
acuucuuuucacauu

SEQ ID NO: 2401202 - RNA, 14 nt, Human
acuuggucugugag

SEQ ID NO: 2401203 - RNA, 15 nt, Human
acuuggucugugaga

SEQ ID NO: 2401204 - RNA, 18 nt, Human
acuuguaaaggaauuuaa

SEQ ID NO: 2401205 - RNA, 22 nt, Human
acuucugccagcauaauacuug

SEQ ID NO: 2401206 - RNA, 18 nt, Human
acuucugccauauucugu

SEQ ID NO: 2401207 - RNA, 22 nt, Human
acuucacagagugugcuggagg

SEQ ID NO: 2401208 - RNA, 20 nt, Human
acuucacagagugugcugga

SEQ ID NO: 2401209 - RNA, 19 nt, Human
acuucacagagugugcugg

SEQ ID NO: 2401210 - RNA, 18 nt, Human
acuucacagagugugcug

SEQ ID NO: 2401211 - RNA, 15 nt, Human
acuucugaccacacu

SEQ ID NO: 2401212 - RNA, 16 nt, Human
acuucugaccacacuu

SEQ ID NO: 2401213 - RNA, 20 nt, Human
acuucuuugcuuugcccagc

SEQ ID NO: 2401214 - RNA, 18 nt, Human
acuucuuugcuuugccca

SEQ ID NO: 2401215 - RNA, 16 nt, Human
acuucuuugcuuugcc

SEQ ID NO: 2401216 - RNA, 14 nt, Human
acuucuuuucacau

SEQ ID NO: 2401217 - RNA, 12 nt, Human
acuucuuuucac

SEQ ID NO: 2401218 - RNA, 11 nt, Human
acuucuuuuca

SEQ ID NO: 2401219 - RNA, 21 nt, Human
acuucuuugcuuugcccagca

SEQ ID NO: 2401220 - RNA, 15 nt, Human
acuucuuuuauaacu

SEQ ID NO: 2401221 - RNA, 22 nt, Human
acuucuuuuauaacuaguccuu

SEQ ID NO: 2401222 - RNA, 19 nt, Human
acuucugccauauucuguu

SEQ ID NO: 2401223 - RNA, 15 nt, Human
acuuauuuaaacucu

SEQ ID NO: 2401224 - RNA, 13 nt, Human
acuuauuuaaugc

SEQ ID NO: 2401225 - RNA, 17 nt, Human
acuucacacacaggcaa

SEQ ID NO: 2401226 - RNA, 19 nt, Human
acuucacacacaggcaacu

SEQ ID NO: 2401227 - RNA, 16 nt, Human
acuucacacacaggca

SEQ ID NO: 2401228 - RNA, 19 nt, Human
acuucacauauugauuucc

SEQ ID NO: 2401229 - RNA, 13 nt, Human
acuucacacugca

SEQ ID NO: 2401230 - RNA, 14 nt, Human
acuucacacugcaa

SEQ ID NO: 2401231 - RNA, 15 nt, Human
acuucacacugcaag

SEQ ID NO: 2401232 - RNA, 16 nt, Human
acuucacacugcaaga

SEQ ID NO: 2401233 - RNA, 16 nt, Human
acuucacagagugugc

SEQ ID NO: 2401234 - RNA, 12 nt, Human
acuucacagagu

SEQ ID NO: 2401235 - RNA, 19 nt, Human
acuucacacugcaagagcc

SEQ ID NO: 2401236 - RNA, 23 nt, Human
acuucacacugcaagagccuugg

SEQ ID NO: 2401237 - RNA, 23 nt, Human
acuguuuucucucggcuccccau

SEQ ID NO: 2401238 - RNA, 22 nt, Human
acuguuuucucucggcucccca

SEQ ID NO: 2401239 - RNA, 12 nt, Human
acuguuuuuacc

SEQ ID NO: 2401240 - RNA, 21 nt, Human
acuuauuggaacucugcuuga

SEQ ID NO: 2401241 - RNA, 20 nt, Human
acuuauuggaacucugcuug

SEQ ID NO: 2401242 - RNA, 20 nt, Human
acuguuuacaagaaaaaaug

SEQ ID NO: 2401243 - RNA, 15 nt, Human
acuguuguauaaauu

SEQ ID NO: 2401244 - RNA, 19 nt, Human
acuguuguauaaauuuauu

SEQ ID NO: 2401245 - RNA, 19 nt, Human
acuguugugaccugaaguu

SEQ ID NO: 2401246 - RNA, 13 nt, Human
acuguuguauaaa

SEQ ID NO: 2401247 - RNA, 16 nt, Human
acuguugugaccugaa

SEQ ID NO: 2401248 - RNA, 13 nt, Human
acuguuucaaacu

SEQ ID NO: 2401249 - RNA, 15 nt, Human
acuguuugucuucuc

SEQ ID NO: 2401250 - RNA, 21 nt, Human
acuguuugucuucuccccagg

SEQ ID NO: 2401251 - RNA, 20 nt, Human
acuguuugucuucuccccag

SEQ ID NO: 2401252 - RNA, 19 nt, Human
acuguuugucuucucccca

SEQ ID NO: 2401253 - RNA, 18 nt, Human
acuguuugucuucucccc

SEQ ID NO: 2401254 - RNA, 12 nt, Human
acuguuuguuau

SEQ ID NO: 2401255 - RNA, 23 nt, Human
acauguuuuuguuuucuuugaau

SEQ ID NO: 2401256 - RNA, 18 nt, Human
acauguuuagaguugcaa

SEQ ID NO: 2401257 - RNA, 21 nt, Human
acauguuuacuuuucagggca

SEQ ID NO: 2401258 - RNA, 15 nt, Human
acauuaaaacaauau

SEQ ID NO: 2401259 - RNA, 22 nt, Human
acauuaaaacaauauuguuucu

SEQ ID NO: 2401260 - RNA, 20 nt, Human
acauguuuagaguugcaauc

SEQ ID NO: 2401261 - RNA, 17 nt, Human
acauuaaaucuaugaag

SEQ ID NO: 2401262 - RNA, 23 nt, Human
acaugcacagcuaacauggaagu

SEQ ID NO: 2401263 - RNA, 21 nt, Human
acaugcaauuuauuaaaauga

SEQ ID NO: 2401264 - RNA, 18 nt, Human
acaugcacaccucccccu

SEQ ID NO: 2401265 - RNA, 20 nt, Human
acaugcacagcuaacaugga

SEQ ID NO: 2401266 - RNA, 20 nt, Human
acaucgugaaacccugucuc

SEQ ID NO: 2401267 - RNA, 13 nt, Human
acaucuaagccug

SEQ ID NO: 2401268 - RNA, 19 nt, Human
acaugcaaggucauuuuuu

SEQ ID NO: 2401269 - RNA, 21 nt, Human
acauguuuuucuucucccuca

SEQ ID NO: 2401270 - RNA, 20 nt, Human
acauguugggaaacuuggcu

SEQ ID NO: 2401271 - RNA, 15 nt, Human
acauguuauauauuu

SEQ ID NO: 2401272 - RNA, 13 nt, Human
acauguuacaaca

SEQ ID NO: 2401273 - RNA, 19 nt, Human
acauguuacugaccagcaa

SEQ ID NO: 2401274 - RNA, 14 nt, Human
acauguuauauauu

SEQ ID NO: 2401275 - RNA, 17 nt, Human
acauguuacugaccagc

SEQ ID NO: 2401276 - RNA, 16 nt, Human
acauguuacugaccag

SEQ ID NO: 2401277 - RNA, 17 nt, Human
acauguuaaacuuacuu

SEQ ID NO: 2401278 - RNA, 19 nt, Human
acaucagcacgauuucugu

SEQ ID NO: 2401279 - RNA, 15 nt, Human
acauaaauaaaauga

SEQ ID NO: 2401280 - RNA, 21 nt, Human
acauaaaggugguaugugugu

SEQ ID NO: 2401281 - RNA, 20 nt, Human
acaucagcacgauuucuguu

SEQ ID NO: 2401282 - RNA, 21 nt, Human
acaucagcacgauuucuguuu

SEQ ID NO: 2401283 - RNA, 22 nt, Human
acaucagcacgauuucuguuua

SEQ ID NO: 2401284 - RNA, 19 nt, Human
acauaaauaaaaugaccag

SEQ ID NO: 2401285 - RNA, 13 nt, Human
acauaaauuagag

SEQ ID NO: 2401286 - RNA, 16 nt, Human
acauccaagcuuccuu

SEQ ID NO: 2401287 - RNA, 20 nt, Human
acauccauguuuguaaaacu

SEQ ID NO: 2401288 - RNA, 19 nt, Human
acauccauaaagaagcaau

SEQ ID NO: 2401289 - RNA, 17 nt, Human
acauccauaaagaagca

SEQ ID NO: 2401290 - RNA, 15 nt, Human
acauccauaaagaag

SEQ ID NO: 2401291 - RNA, 18 nt, Human
acauccauguuuguaaaa

SEQ ID NO: 2401292 - RNA, 20 nt, Human
acauccauuucaucuauuuc

SEQ ID NO: 2401293 - RNA, 13 nt, Human
acauccauaaaga

SEQ ID NO: 2401294 - RNA, 20 nt, Human
acauccaauauuuucuuuaa

SEQ ID NO: 2401295 - RNA, 23 nt, Human
acauccaaggagaaacagagaca

SEQ ID NO: 2401296 - RNA, 13 nt, Human
acauccaaggaga

SEQ ID NO: 2401297 - RNA, 13 nt, Human
acauccaagcuuc

SEQ ID NO: 2401298 - RNA, 14 nt, Human
acauccaaggagaa

SEQ ID NO: 2401299 - RNA, 22 nt, Human
acauccaaggagaaacagagac

SEQ ID NO: 2401300 - RNA, 21 nt, Human
acauccuuucuauugaaaaau

SEQ ID NO: 2401301 - RNA, 18 nt, Human
acauccuuucuaaacaag

SEQ ID NO: 2401302 - RNA, 17 nt, Human
acauccuuucuaaacaa

SEQ ID NO: 2401303 - RNA, 14 nt, Human
acaucgaaugugua

SEQ ID NO: 2401304 - RNA, 19 nt, Human
acauccuuucuaaacaaga

SEQ ID NO: 2401305 - RNA, 14 nt, Human
acaucgcccuccac

SEQ ID NO: 2401306 - RNA, 16 nt, Human
acaucuaaccucaucu

SEQ ID NO: 2401307 - RNA, 17 nt, Human
acaucuaaccucaucuu

SEQ ID NO: 2401308 - RNA, 17 nt, Human
acaucgugaaacccugu

SEQ ID NO: 2401309 - RNA, 13 nt, Human
acauccuuccuuc

SEQ ID NO: 2401310 - RNA, 23 nt, Human
acauccuguguuucuagggaaau

SEQ ID NO: 2401311 - RNA, 15 nt, Human
acauccuuccuuccc

SEQ ID NO: 2401312 - RNA, 14 nt, Human
acauccuuccuucc

SEQ ID NO: 2401313 - RNA, 13 nt, Human
acauccuuucuaa

SEQ ID NO: 2401314 - RNA, 14 nt, Human
acauccuguguuuc

SEQ ID NO: 2401315 - RNA, 16 nt, Human
acauccuguguuucua

SEQ ID NO: 2401316 - RNA, 23 nt, Human
acagguuauuuuaguuucuguuc

SEQ ID NO: 2401317 - RNA, 22 nt, Human
acagguuauuuuaguuucuguu

SEQ ID NO: 2401318 - RNA, 21 nt, Human
acagguuauuuuaguuucugu

SEQ ID NO: 2401319 - RNA, 14 nt, Human
acagguuauuuuag

SEQ ID NO: 2401320 - RNA, 23 nt, Human
acagguuacaacagauuugugaa

SEQ ID NO: 2401321 - RNA, 22 nt, Human
acagguuacaacagauuuguga

SEQ ID NO: 2401322 - RNA, 21 nt, Human
acagguuacaacagauuugug

SEQ ID NO: 2401323 - RNA, 20 nt, Human
acagguuacaacagauuugu

SEQ ID NO: 2401324 - RNA, 19 nt, Human
acagguuacaacagauuug

SEQ ID NO: 2401325 - RNA, 15 nt, Human
acagguuugggaccc

SEQ ID NO: 2401326 - RNA, 18 nt, Human
acagguuugggaccccug

SEQ ID NO: 2401327 - RNA, 14 nt, Human
acagguuuuauaau

SEQ ID NO: 2401328 - RNA, 23 nt, Human
acauaaacaagaccacguuucua

SEQ ID NO: 2401329 - RNA, 13 nt, Human
acauaaacugacu

SEQ ID NO: 2401330 - RNA, 15 nt, Human
acauaaacugacuuu

SEQ ID NO: 2401331 - RNA, 22 nt, Human
accagcaucccuugaccaggcc

SEQ ID NO: 2401332 - RNA, 23 nt, Human
accaagcugugccacccugggcu

SEQ ID NO: 2401333 - RNA, 20 nt, Human
accaagcugugccacccugg

SEQ ID NO: 2401334 - RNA, 19 nt, Human
accaagcugugccacccug

SEQ ID NO: 2401335 - RNA, 18 nt, Human
accaagcugugccacccu

SEQ ID NO: 2401336 - RNA, 14 nt, Human
accaagcugugcca

SEQ ID NO: 2401337 - RNA, 13 nt, Human
accaagcugugcc

SEQ ID NO: 2401338 - RNA, 14 nt, Human
accacgcccggcua

SEQ ID NO: 2401339 - RNA, 13 nt, Human
accaaggaccccu

SEQ ID NO: 2401340 - RNA, 19 nt, Human
accacgauguggcccuggc

SEQ ID NO: 2401341 - RNA, 20 nt, Human
accacgauguggcccuggcc

SEQ ID NO: 2401342 - RNA, 21 nt, Human
accacgauguggcccuggccu

SEQ ID NO: 2401343 - RNA, 19 nt, Human
accacgcccguccugccug

SEQ ID NO: 2401344 - RNA, 18 nt, Human
accacgcccguccugccu

SEQ ID NO: 2401345 - RNA, 20 nt, Human
accacgcccggcuaauuuuu

SEQ ID NO: 2401346 - RNA, 21 nt, Human
accacgcccguccugccugug

SEQ ID NO: 2401347 - RNA, 20 nt, Human
accacgcccguccugccugu

SEQ ID NO: 2401348 - RNA, 23 nt, Human
accacgcccguccugccuguggc

SEQ ID NO: 2401349 - RNA, 22 nt, Human
accacgauguggcccuggccug

SEQ ID NO: 2401350 - RNA, 19 nt, Human
accaagccuggucagccca

SEQ ID NO: 2401351 - RNA, 20 nt, Human
accaagccuggucagcccaa

SEQ ID NO: 2401352 - RNA, 12 nt, Human
accaacuuucug

SEQ ID NO: 2401353 - RNA, 14 nt, Human
accaacuuucugua

SEQ ID NO: 2401354 - RNA, 15 nt, Human
accaagcuauccugg

SEQ ID NO: 2401355 - RNA, 17 nt, Human
accaagcuauccuggcu

SEQ ID NO: 2401356 - RNA, 13 nt, Human
accaacuuucugu

SEQ ID NO: 2401357 - RNA, 17 nt, Human
accaagcucacaguucc

SEQ ID NO: 2401358 - RNA, 12 nt, Human
accaagcugugc

SEQ ID NO: 2401359 - RNA, 14 nt, Human
accaagcucucugc

SEQ ID NO: 2401360 - RNA, 18 nt, Human
accaagcucacaguuccu

SEQ ID NO: 2401361 - RNA, 19 nt, Human
accaagcucacaguuccuc

SEQ ID NO: 2401362 - RNA, 15 nt, Human
accacguuucuaaag

SEQ ID NO: 2401363 - RNA, 19 nt, Human
accacguuucuaaaggcua

SEQ ID NO: 2401364 - RNA, 14 nt, Human
accacuacauucug

SEQ ID NO: 2401365 - RNA, 23 nt, Human
accacuaaaagaucgcaguuugc

SEQ ID NO: 2401366 - RNA, 13 nt, Human
accagcagccugg

SEQ ID NO: 2401367 - RNA, 14 nt, Human
accagcagccugga

SEQ ID NO: 2401368 - RNA, 17 nt, Human
accagcagccuggaccc

SEQ ID NO: 2401369 - RNA, 18 nt, Human
accagcagcgccuuuccc

SEQ ID NO: 2401370 - RNA, 17 nt, Human
accagcagcgccuuucc

SEQ ID NO: 2401371 - RNA, 17 nt, Human
accacuacaugcagccc

SEQ ID NO: 2401372 - RNA, 18 nt, Human
acauuugcucauggaauu

SEQ ID NO: 2401373 - RNA, 12 nt, Human
acauuuggaaua

SEQ ID NO: 2401374 - RNA, 14 nt, Human
acauuuguauaaaa

SEQ ID NO: 2401375 - RNA, 19 nt, Human
accaacuagacauucuguc

SEQ ID NO: 2401376 - RNA, 17 nt, Human
accaacuagacauucug

SEQ ID NO: 2401377 - RNA, 15 nt, Human
accaacuagacauuc

SEQ ID NO: 2401378 - RNA, 16 nt, Human
accaacuacaaccaag

SEQ ID NO: 2401379 - RNA, 23 nt, Human
accaacugucacucauugcugag

SEQ ID NO: 2401380 - RNA, 14 nt, Human
accaacucuugcag

SEQ ID NO: 2401381 - RNA, 20 nt, Human
accaacuagacauucugucg

SEQ ID NO: 2401382 - RNA, 14 nt, Human
accaacugggccca

SEQ ID NO: 2401383 - RNA, 15 nt, Human
acauuuggaguguuc

SEQ ID NO: 2401384 - RNA, 17 nt, Human
acauuugggagacaugu

SEQ ID NO: 2401385 - RNA, 20 nt, Human
acauuuggaguguuccccuu

SEQ ID NO: 2401386 - RNA, 15 nt, Human
acauuuggaauacuu

SEQ ID NO: 2401387 - RNA, 16 nt, Human
acauuuggaauacuuu

SEQ ID NO: 2401388 - RNA, 17 nt, Human
acauuuggaauacuuuu

SEQ ID NO: 2401389 - RNA, 18 nt, Human
acauuuggaauacuuuuu

SEQ ID NO: 2401390 - RNA, 21 nt, Human
acauuugggagacaugugaca

SEQ ID NO: 2401391 - RNA, 20 nt, Human
acauuugggagacaugugac

SEQ ID NO: 2401392 - RNA, 19 nt, Human
acauuugggagacauguga

SEQ ID NO: 2401393 - RNA, 21 nt, Human
acauuuguagcauccucuuua

SEQ ID NO: 2401394 - RNA, 16 nt, Human
accccuacaugaaaca

SEQ ID NO: 2401395 - RNA, 20 nt, Human
accccucaacaccucugcac

SEQ ID NO: 2401396 - RNA, 17 nt, Human
acccaaggacugaggga

SEQ ID NO: 2401397 - RNA, 22 nt, Human
acccaagcuuggcagccgagcu

SEQ ID NO: 2401398 - RNA, 18 nt, Human
acccaagcuuggcagccg

SEQ ID NO: 2401399 - RNA, 14 nt, Human
acccaagcuuggca

SEQ ID NO: 2401400 - RNA, 13 nt, Human
acccaagcuuggc

SEQ ID NO: 2401401 - RNA, 15 nt, Human
acccaagcuuagaac

SEQ ID NO: 2401402 - RNA, 15 nt, Human
accaucccuuuuuga

SEQ ID NO: 2401403 - RNA, 18 nt, Human
accaucccuuuuugaagu

SEQ ID NO: 2401404 - RNA, 22 nt, Human
accaucccugaaggccccgccc

SEQ ID NO: 2401405 - RNA, 21 nt, Human
accaucccugaaggccccgcc

SEQ ID NO: 2401406 - RNA, 16 nt, Human
accaucccugaaggcc

SEQ ID NO: 2401407 - RNA, 18 nt, Human
accaucccugaaggcccc

SEQ ID NO: 2401408 - RNA, 17 nt, Human
accaucaugucuggcua

SEQ ID NO: 2401409 - RNA, 16 nt, Human
accaucaugucuggcu

SEQ ID NO: 2401410 - RNA, 12 nt, Human
accaucauccua

SEQ ID NO: 2401411 - RNA, 14 nt, Human
accaucaugucugg

SEQ ID NO: 2401412 - RNA, 16 nt, Human
acccaagggccuggcc

SEQ ID NO: 2401413 - RNA, 13 nt, Human
acccaagggccug

SEQ ID NO: 2401414 - RNA, 16 nt, Human
acccaaguccaagcau

SEQ ID NO: 2401415 - RNA, 13 nt, Human
acccaaggacuga

SEQ ID NO: 2401416 - RNA, 16 nt, Human
acccaagugggggcag

SEQ ID NO: 2401417 - RNA, 15 nt, Human
acccaaggaggaaaa

SEQ ID NO: 2401418 - RNA, 18 nt, Human
acccaucuguuuuuugua

SEQ ID NO: 2401419 - RNA, 17 nt, Human
acccaucuguuuuuugu

SEQ ID NO: 2401420 - RNA, 13 nt, Human
acccaucugggcu

SEQ ID NO: 2401421 - RNA, 21 nt, Human
acccaucugcaccccccuggg

SEQ ID NO: 2401422 - RNA, 22 nt, Human
acccaucugcaccccccugggc

SEQ ID NO: 2401423 - RNA, 21 nt, Human
acccauccuaccaaugcaugc

SEQ ID NO: 2401424 - RNA, 20 nt, Human
acccauccuaccaaugcaug

SEQ ID NO: 2401425 - RNA, 17 nt, Human
acccaucgcuguguguu

SEQ ID NO: 2401426 - RNA, 15 nt, Human
acccaucgcugugug

SEQ ID NO: 2401427 - RNA, 13 nt, Human
acccaucugcacc

SEQ ID NO: 2401428 - RNA, 20 nt, Human
acccaucugcaccccccugg

SEQ ID NO: 2401429 - RNA, 15 nt, Human
acccacaagaaauga

SEQ ID NO: 2401430 - RNA, 13 nt, Human
acccaauccaaau

SEQ ID NO: 2401431 - RNA, 14 nt, Human
acccaauccaaaug

SEQ ID NO: 2401432 - RNA, 20 nt, Human
acccaaugcacacaaaacaa

SEQ ID NO: 2401433 - RNA, 13 nt, Human
acccaaugauuca

SEQ ID NO: 2401434 - RNA, 20 nt, Human
acccacaaaaguacaauuua

SEQ ID NO: 2401435 - RNA, 18 nt, Human
acccaugcugcccuguga

SEQ ID NO: 2401436 - RNA, 17 nt, Human
acccaugcugcccugug

SEQ ID NO: 2401437 - RNA, 23 nt, Human
acccaugacuuuauauggaugau

SEQ ID NO: 2401438 - RNA, 17 nt, Human
acccaugaaucaaagac

SEQ ID NO: 2401439 - RNA, 14 nt, Human
acccaugaaucaaa

SEQ ID NO: 2401440 - RNA, 19 nt, Human
acccaugaagacaggacag

SEQ ID NO: 2401441 - RNA, 20 nt, Human
acccaugaagacaggacagu

SEQ ID NO: 2401442 - RNA, 20 nt, Human
acccaugaguuggggucugg

SEQ ID NO: 2401443 - RNA, 21 nt, Human
acccaugaguuggggucuggc

SEQ ID NO: 2401444 - RNA, 13 nt, Human
acccaugaggcaa

SEQ ID NO: 2401445 - RNA, 20 nt, Human
acccaugaggcaaugucagg

SEQ ID NO: 2401446 - RNA, 19 nt, Human
accccaaagagccuggaga

SEQ ID NO: 2401447 - RNA, 15 nt, Human
accccaaagagccug

SEQ ID NO: 2401448 - RNA, 14 nt, Human
accccaaagagccu

SEQ ID NO: 2401449 - RNA, 14 nt, Human
accccaaaccucca

SEQ ID NO: 2401450 - RNA, 23 nt, Human
accccaaacaccuuccagcuccu

SEQ ID NO: 2401451 - RNA, 20 nt, Human
accccaaacaccuuccagcu

SEQ ID NO: 2401452 - RNA, 18 nt, Human
accccaaacaccuuccag

SEQ ID NO: 2401453 - RNA, 16 nt, Human
accccaaacaccuucc

SEQ ID NO: 2401454 - RNA, 20 nt, Human
acccauuuugagugacucga

SEQ ID NO: 2401455 - RNA, 19 nt, Human
acccaugcugcccugugag

SEQ ID NO: 2401456 - RNA, 16 nt, Human
acccaugcugcccugu

SEQ ID NO: 2401457 - RNA, 14 nt, Human
acccauuuucacau

SEQ ID NO: 2401458 - RNA, 18 nt, Human
acccccuuugugcugugg

SEQ ID NO: 2401459 - RNA, 17 nt, Human
acccccuucugggcauc

SEQ ID NO: 2401460 - RNA, 16 nt, Human
acccccuucugggcau

SEQ ID NO: 2401461 - RNA, 15 nt, Human
acccccuucugggca

SEQ ID NO: 2401462 - RNA, 18 nt, Human
accccgaccaccugccca

SEQ ID NO: 2401463 - RNA, 14 nt, Human
accccgccugcccu

SEQ ID NO: 2401464 - RNA, 20 nt, Human
accccgcagacaccuuggac

SEQ ID NO: 2401465 - RNA, 18 nt, Human
accccgcagacaccuugg

SEQ ID NO: 2401466 - RNA, 17 nt, Human
accccgcagacaccuug

SEQ ID NO: 2401467 - RNA, 15 nt, Human
accccgcagacaccu

SEQ ID NO: 2401468 - RNA, 18 nt, Human
accccaaagcuuuccugc

SEQ ID NO: 2401469 - RNA, 17 nt, Human
accccaaagcuuuccug

SEQ ID NO: 2401470 - RNA, 15 nt, Human
accccaaagcuuucc

SEQ ID NO: 2401471 - RNA, 22 nt, Human
accccaaagagccuggagaagc

SEQ ID NO: 2401472 - RNA, 21 nt, Human
accccaaagagccuggagaag

SEQ ID NO: 2401473 - RNA, 15 nt, Human
accccaaagccccuu

SEQ ID NO: 2401474 - RNA, 16 nt, Human
accccaaagccccuug

SEQ ID NO: 2401475 - RNA, 18 nt, Human
accccaaagccccuugcu

SEQ ID NO: 2401476 - RNA, 16 nt, Human
acccccuucucugcuc

SEQ ID NO: 2401477 - RNA, 14 nt, Human
acccccuucucugc

SEQ ID NO: 2401478 - RNA, 17 nt, Human
acccccuucucugcucc

SEQ ID NO: 2401479 - RNA, 18 nt, Human
acccccuucucugcucca

SEQ ID NO: 2401480 - RNA, 19 nt, Human
acccccuucucugcuccac

SEQ ID NO: 2401481 - RNA, 20 nt, Human
acccccuucucugcuccacc

SEQ ID NO: 2401482 - RNA, 14 nt, Human
acccccuucugggc

SEQ ID NO: 2401483 - RNA, 13 nt, Human
acccccuucuggg

SEQ ID NO: 2401484 - RNA, 23 nt, Human
acccccuucucugcuccaccaca

SEQ ID NO: 2401485 - RNA, 23 nt, Human
accccgcucugcaugcggcccag

SEQ ID NO: 2401486 - RNA, 16 nt, Human
accccgcucugcaugc

SEQ ID NO: 2401487 - RNA, 14 nt, Human
accccgcucugcau

SEQ ID NO: 2401488 - RNA, 19 nt, Human
accccgccugcccucaugg

SEQ ID NO: 2401489 - RNA, 15 nt, Human
accccggccaccugc

SEQ ID NO: 2401490 - RNA, 13 nt, Human
accccgggcgggu

SEQ ID NO: 2401491 - RNA, 22 nt, Human
accccgcucugcaugcggccca

SEQ ID NO: 2401492 - RNA, 21 nt, Human
accccgcucugcaugcggccc

SEQ ID NO: 2401493 - RNA, 13 nt, Human
accccgggcucuc

SEQ ID NO: 2401494 - RNA, 15 nt, Human
accccgggcucucug

SEQ ID NO: 2401495 - RNA, 16 nt, Human
accccgggcucucugc

SEQ ID NO: 2401496 - RNA, 17 nt, Human
accccgggcucucugcu

SEQ ID NO: 2401497 - RNA, 18 nt, Human
accccgggcucucugcug

SEQ ID NO: 2401498 - RNA, 21 nt, Human
accccgggcucucugcuguac

SEQ ID NO: 2401499 - RNA, 22 nt, Human
accccuaaagagauacuuugau

SEQ ID NO: 2401500 - RNA, 21 nt, Human
accccguguccccggccucag

SEQ ID NO: 2401501 - RNA, 18 nt, Human
accccggggacccuguga

SEQ ID NO: 2401502 - RNA, 17 nt, Human
accccggggacccugug

SEQ ID NO: 2401503 - RNA, 16 nt, Human
accccggggacccugu

SEQ ID NO: 2401504 - RNA, 15 nt, Human
accccggggacccug

SEQ ID NO: 2401505 - RNA, 20 nt, Human
accccggggugcccacaggc

SEQ ID NO: 2401506 - RNA, 21 nt, Human
accccggggugcccacaggcc

SEQ ID NO: 2401507 - RNA, 23 nt, Human
accccggggugcccacaggccgc

SEQ ID NO: 2401508 - RNA, 22 nt, Human
accccgucugggguucagcccc

SEQ ID NO: 2401509 - RNA, 23 nt, Human
accccgucugggguucagccccu

SEQ ID NO: 2401510 - RNA, 20 nt, Human
accccgucgaggggcucuca

SEQ ID NO: 2401511 - RNA, 19 nt, Human
acaaguccugugaauuucu

SEQ ID NO: 2401512 - RNA, 17 nt, Human
acaaguccugugaauuu

SEQ ID NO: 2401513 - RNA, 16 nt, Human
acaaguccugugaauu

SEQ ID NO: 2401514 - RNA, 15 nt, Human
acaaguccugugaau

SEQ ID NO: 2401515 - RNA, 17 nt, Human
acaagucccuguaauug

SEQ ID NO: 2401516 - RNA, 23 nt, Human
acaagucauagguuaauauuuaa

SEQ ID NO: 2401517 - RNA, 16 nt, Human
acaagucccuguaauu

SEQ ID NO: 2401518 - RNA, 21 nt, Human
acaagucauuuuaacuuuauc

SEQ ID NO: 2401519 - RNA, 23 nt, Human
acaagucauuuuaacuuuaucac

SEQ ID NO: 2401520 - RNA, 23 nt, Human
acaaguaugaauaaagacaccua

SEQ ID NO: 2401521 - RNA, 21 nt, Human
acaaguaugaauaaagacacc

SEQ ID NO: 2401522 - RNA, 12 nt, Human
acaagugccacu

SEQ ID NO: 2401523 - RNA, 18 nt, Human
acaagugaaaaacaucca

SEQ ID NO: 2401524 - RNA, 22 nt, Human
acaagugaguuguugcccuggg

SEQ ID NO: 2401525 - RNA, 14 nt, Human
acaacuucagcagu

SEQ ID NO: 2401526 - RNA, 17 nt, Human
acaacuuuaagaggaca

SEQ ID NO: 2401527 - RNA, 22 nt, Human
acaacuugucuauuaccuguua

SEQ ID NO: 2401528 - RNA, 14 nt, Human
acaacuucuuugua

SEQ ID NO: 2401529 - RNA, 16 nt, Human
acaacuauuuuuccaa

SEQ ID NO: 2401530 - RNA, 17 nt, Human
acaacuauggaucagaa

SEQ ID NO: 2401531 - RNA, 19 nt, Human
acaacuaggcuucagcaua

SEQ ID NO: 2401532 - RNA, 17 nt, Human
acaacuucaauauccaa

SEQ ID NO: 2401533 - RNA, 17 nt, Human
acaacuucaagugcaug

SEQ ID NO: 2401534 - RNA, 18 nt, Human
acaacuucccagugaauu

SEQ ID NO: 2401535 - RNA, 14 nt, Human
acaaaccaugcaaa

SEQ ID NO: 2401536 - RNA, 14 nt, Human
acaaaccagaagca

SEQ ID NO: 2401537 - RNA, 21 nt, Human
acaaaccgagugcaaugaaug

SEQ ID NO: 2401538 - RNA, 12 nt, Human
acaaaccugccu

SEQ ID NO: 2401539 - RNA, 20 nt, Human
acaaaauguaggguuauaau

SEQ ID NO: 2401540 - RNA, 20 nt, Human
aauuuugaguucuacauaag

SEQ ID NO: 2401541 - RNA, 19 nt, Human
aauuuugacacuauaucug

SEQ ID NO: 2401542 - RNA, 21 nt, Human
aauuuucuuuuuaauaaaaag

SEQ ID NO: 2401543 - RNA, 16 nt, Human
aauuuugacacuauau

SEQ ID NO: 2401544 - RNA, 21 nt, Human
aauuuugaauaaauaaaugua

SEQ ID NO: 2401545 - RNA, 21 nt, Human
acaaaccuguuucugcagcca

SEQ ID NO: 2401546 - RNA, 15 nt, Human
acaaacgggcucagc

SEQ ID NO: 2401547 - RNA, 21 nt, Human
acaaagaagacauguuuuaga

SEQ ID NO: 2401548 - RNA, 19 nt, Human
acaaagaagacauguuuua

SEQ ID NO: 2401549 - RNA, 16 nt, Human
acaaagaagacauguu

SEQ ID NO: 2401550 - RNA, 15 nt, Human
acaaagaagacaugu

SEQ ID NO: 2401551 - RNA, 22 nt, Human
acaaagaagacauguuuuagac

SEQ ID NO: 2401552 - RNA, 18 nt, Human
acaaagacaaauucuguu

SEQ ID NO: 2401553 - RNA, 18 nt, Human
acaaacguauguaaaugu

SEQ ID NO: 2401554 - RNA, 18 nt, Human
acaaaccugccuggguuu

SEQ ID NO: 2401555 - RNA, 14 nt, Human
acaaaccugccugg

SEQ ID NO: 2401556 - RNA, 13 nt, Human
acaaagaagacau

SEQ ID NO: 2401557 - RNA, 21 nt, Human
acaaacguauguaaauguaua

SEQ ID NO: 2401558 - RNA, 18 nt, Human
acaaagaagacaacauua

SEQ ID NO: 2401559 - RNA, 13 nt, Human
acaacuauauugu

SEQ ID NO: 2401560 - RNA, 18 nt, Human
acaacuaugauuuggaaa

SEQ ID NO: 2401561 - RNA, 13 nt, Human
acaaagacugagu

SEQ ID NO: 2401562 - RNA, 19 nt, Human
acaaagacaaauucuguuu

SEQ ID NO: 2401563 - RNA, 22 nt, Human
acaaagacaaauucuguuucuu

SEQ ID NO: 2401564 - RNA, 23 nt, Human
aauuuuagugacagcucugccug

SEQ ID NO: 2401565 - RNA, 19 nt, Human
aauuuuaguagagacaggg

SEQ ID NO: 2401566 - RNA, 13 nt, Human
aauuuugaaaaac

SEQ ID NO: 2401567 - RNA, 20 nt, Human
aauuuuauagcucaguuuau

SEQ ID NO: 2401568 - RNA, 16 nt, Human
aauuuuaucucuuauu

SEQ ID NO: 2401569 - RNA, 19 nt, Human
aauuuuaugagggccacgg

SEQ ID NO: 2401570 - RNA, 12 nt, Human
aauuuuaugaau

SEQ ID NO: 2401571 - RNA, 20 nt, Human
aauuuuaucccucaccugua

SEQ ID NO: 2401572 - RNA, 14 nt, Human
aauuuuaucccuca

SEQ ID NO: 2401573 - RNA, 19 nt, Human
aauuuuauagcucaguuua

SEQ ID NO: 2401574 - RNA, 16 nt, Human
aauuauaauauacuau

SEQ ID NO: 2401575 - RNA, 20 nt, Human
aauuauaagaggcugauaau

SEQ ID NO: 2401576 - RNA, 17 nt, Human
aauuauaagaggcugau

SEQ ID NO: 2401577 - RNA, 23 nt, Human
aauuauaacuuaaaauauuuuau

SEQ ID NO: 2401578 - RNA, 17 nt, Human
aauuauaacuuaaaaua

SEQ ID NO: 2401579 - RNA, 19 nt, Human
acaaugugaacuuuauuaa

SEQ ID NO: 2401580 - RNA, 22 nt, Human
acaaugugaacuuuauuaaaua

SEQ ID NO: 2401581 - RNA, 17 nt, Human
acaaugugaacuuuauu

SEQ ID NO: 2401582 - RNA, 12 nt, Human
acaauuuuguac

SEQ ID NO: 2401583 - RNA, 15 nt, Human
acacaaaccugccug

SEQ ID NO: 2401584 - RNA, 15 nt, Human
acaauuuuguacaaa

SEQ ID NO: 2401585 - RNA, 17 nt, Human
acacaaaccugccuggg

SEQ ID NO: 2401586 - RNA, 16 nt, Human
acacaaaccugccugg

SEQ ID NO: 2401587 - RNA, 14 nt, Human
acacaaacuguaaa

SEQ ID NO: 2401588 - RNA, 15 nt, Human
acacaaacuguaaau

SEQ ID NO: 2401589 - RNA, 16 nt, Human
acacaaacuguaaaua

SEQ ID NO: 2401590 - RNA, 18 nt, Human
acacaaacgggcucagca

SEQ ID NO: 2401591 - RNA, 19 nt, Human
acacaaacuguaaauaaaa

SEQ ID NO: 2401592 - RNA, 15 nt, Human
acacaaacguaugua

SEQ ID NO: 2401593 - RNA, 20 nt, Human
acacagaaaauguugagaau

SEQ ID NO: 2401594 - RNA, 21 nt, Human
acaauuugagauguauuucaa

SEQ ID NO: 2401595 - RNA, 23 nt, Human
acaauuuccuuuauauuuaguga

SEQ ID NO: 2401596 - RNA, 20 nt, Human
acaauuuccuuuauauuuag

SEQ ID NO: 2401597 - RNA, 11 nt, Human
acaauuucugu

SEQ ID NO: 2401598 - RNA, 16 nt, Human
acaauuuauuauggca

SEQ ID NO: 2401599 - RNA, 17 nt, Human
acaauuuccuuuauauu

SEQ ID NO: 2401600 - RNA, 16 nt, Human
acaauuuccuuuauau

SEQ ID NO: 2401601 - RNA, 20 nt, Human
acaauuucaaaaaaauaaaa

SEQ ID NO: 2401602 - RNA, 19 nt, Human
acaauuucaaaaaaauaaa

SEQ ID NO: 2401603 - RNA, 15 nt, Human
acaauuuauuauggc

SEQ ID NO: 2401604 - RNA, 16 nt, Human
acaauuaaagcuguua

SEQ ID NO: 2401605 - RNA, 19 nt, Human
acaauuaaagcuguuauuu

SEQ ID NO: 2401606 - RNA, 21 nt, Human
acaauguucaucccaugaugu

SEQ ID NO: 2401607 - RNA, 15 nt, Human
acaauguucauccca

SEQ ID NO: 2401608 - RNA, 22 nt, Human
acaauguuaaggaaacucuuau

SEQ ID NO: 2401609 - RNA, 21 nt, Human
acaauguuaaggaaacucuua

SEQ ID NO: 2401610 - RNA, 20 nt, Human
acaauguuaaggaaacucuu

SEQ ID NO: 2401611 - RNA, 19 nt, Human
acaauguuaaggaaacucu

SEQ ID NO: 2401612 - RNA, 14 nt, Human
acaauguuaaggaa

SEQ ID NO: 2401613 - RNA, 11 nt, Human
acaauguuaag

SEQ ID NO: 2401614 - RNA, 15 nt, Human
acacuaaccacgcug

SEQ ID NO: 2401615 - RNA, 14 nt, Human
acacuaaccacgcu

SEQ ID NO: 2401616 - RNA, 21 nt, Human
acacuaaacagacuauuuaac

SEQ ID NO: 2401617 - RNA, 20 nt, Human
acacuaaacagacuauuuaa

SEQ ID NO: 2401618 - RNA, 15 nt, Human
acacuaaacagacua

SEQ ID NO: 2401619 - RNA, 14 nt, Human
acacuaaaaauaaa

SEQ ID NO: 2401620 - RNA, 18 nt, Human
acacggagcccagcccuc

SEQ ID NO: 2401621 - RNA, 22 nt, Human
acacggagcccagcccucccca

SEQ ID NO: 2401622 - RNA, 15 nt, Human
acacggacacucaaa

SEQ ID NO: 2401623 - RNA, 21 nt, Human
acacagcuaacacacagcucc

SEQ ID NO: 2401624 - RNA, 16 nt, Human
acaccacacccagccu

SEQ ID NO: 2401625 - RNA, 15 nt, Human
acaccacacccagcc

SEQ ID NO: 2401626 - RNA, 14 nt, Human
acaccacacccagc

SEQ ID NO: 2401627 - RNA, 13 nt, Human
acaccacacccag

SEQ ID NO: 2401628 - RNA, 12 nt, Human
acacagcucugu

SEQ ID NO: 2401629 - RNA, 11 nt, Human
acacagcucug

SEQ ID NO: 2401630 - RNA, 17 nt, Human
acacagaaagccuauca

SEQ ID NO: 2401631 - RNA, 21 nt, Human
acacagaaaccuuuuuaaaaa

SEQ ID NO: 2401632 - RNA, 18 nt, Human
acacagaaaccuuuuuaa

SEQ ID NO: 2401633 - RNA, 19 nt, Human
acacagaaaccuuuuuaaa

SEQ ID NO: 2401634 - RNA, 13 nt, Human
acacagaaaccuu

SEQ ID NO: 2401635 - RNA, 23 nt, Human
acacagacauucugccaggcccc

SEQ ID NO: 2401636 - RNA, 23 nt, Human
acacagacugcgauuugucccag

SEQ ID NO: 2401637 - RNA, 23 nt, Human
acacagcuaacacacagcuccca

SEQ ID NO: 2401638 - RNA, 20 nt, Human
acacagcuaacacacagcuc

SEQ ID NO: 2401639 - RNA, 17 nt, Human
acacgcuccuuccucug

SEQ ID NO: 2401640 - RNA, 19 nt, Human
acacgcuccuuccucugag

SEQ ID NO: 2401641 - RNA, 22 nt, Human
acaccagagcagaugcagagag

SEQ ID NO: 2401642 - RNA, 20 nt, Human
acaccagagcagaugcagag

SEQ ID NO: 2401643 - RNA, 19 nt, Human
acaccagagcagaugcaga

SEQ ID NO: 2401644 - RNA, 18 nt, Human
acaccagagcagaugcag

SEQ ID NO: 2401645 - RNA, 16 nt, Human
acacgcuccuuccucu

SEQ ID NO: 2401646 - RNA, 12 nt, Human
acaccagagccc

SEQ ID NO: 2401647 - RNA, 17 nt, Human
acaccacagacacacac

SEQ ID NO: 2401648 - RNA, 16 nt, Human
acaccacagacacaca

SEQ ID NO: 2401649 - RNA, 15 nt, Human
acaccacagacacac

SEQ ID NO: 2401650 - RNA, 14 nt, Human
acaccacagacaca

SEQ ID NO: 2401651 - RNA, 13 nt, Human
acaccacagacac

SEQ ID NO: 2401652 - RNA, 12 nt, Human
acaccacagaca

SEQ ID NO: 2401653 - RNA, 18 nt, Human
acaccacacccagccuca

SEQ ID NO: 2401654 - RNA, 17 nt, Human
acaccacacccagccuc

SEQ ID NO: 2401655 - RNA, 18 nt, Human
acaccaccucacuccugu

SEQ ID NO: 2401656 - RNA, 22 nt, Human
acaccacagacacacacacgca

SEQ ID NO: 2401657 - RNA, 21 nt, Human
acaccacagacacacacacgc

SEQ ID NO: 2401658 - RNA, 18 nt, Human
acaccacagacacacaca

SEQ ID NO: 2401659 - RNA, 14 nt, Human
acaccacuacauuc

SEQ ID NO: 2401660 - RNA, 21 nt, Human
acaccacuacauucuguuaau

SEQ ID NO: 2401661 - RNA, 17 nt, Human
acaccagagcagaugca

SEQ ID NO: 2401662 - RNA, 13 nt, Human
acaccagagcaga

SEQ ID NO: 2401663 - RNA, 14 nt, Human
acaccagacagaca

SEQ ID NO: 2401664 - RNA, 13 nt, Human
acagcucuagaca

SEQ ID NO: 2401665 - RNA, 10 nt, Human
acagcugcuc

SEQ ID NO: 2401666 - RNA, 23 nt, Human
acagcugccugggaucccucauc

SEQ ID NO: 2401667 - RNA, 14 nt, Human
acagcugccuggga

SEQ ID NO: 2401668 - RNA, 20 nt, Human
acagcucugcauacucauua

SEQ ID NO: 2401669 - RNA, 22 nt, Human
acagcuccuugggaggaagcag

SEQ ID NO: 2401670 - RNA, 21 nt, Human
acagcuccuugggaggaagca

SEQ ID NO: 2401671 - RNA, 20 nt, Human
acagcuccuugggaggaagc

SEQ ID NO: 2401672 - RNA, 19 nt, Human
acagcuccuugggaggaag

SEQ ID NO: 2401673 - RNA, 23 nt, Human
acagcuccuugggaggaagcaga

SEQ ID NO: 2401674 - RNA, 17 nt, Human
acagcuccuugggagga

SEQ ID NO: 2401675 - RNA, 15 nt, Human
acagcuccuugggag

SEQ ID NO: 2401676 - RNA, 14 nt, Human
acagcuccuuggga

SEQ ID NO: 2401677 - RNA, 13 nt, Human
acagcuccuuggg

SEQ ID NO: 2401678 - RNA, 14 nt, Human
acagcuccuucugu

SEQ ID NO: 2401679 - RNA, 13 nt, Human
acagcuccuucug

SEQ ID NO: 2401680 - RNA, 12 nt, Human
acagcuccuucu

SEQ ID NO: 2401681 - RNA, 21 nt, Human
acaggugugagccaccacgcc

SEQ ID NO: 2401682 - RNA, 14 nt, Human
acaggucuccucuu

SEQ ID NO: 2401683 - RNA, 22 nt, Human
acaggugugagccaccacgccc

SEQ ID NO: 2401684 - RNA, 18 nt, Human
acagguuacaacagauuu

SEQ ID NO: 2401685 - RNA, 23 nt, Human
acaggugugaaccaccacaccca

SEQ ID NO: 2401686 - RNA, 20 nt, Human
acaggugugaaccaccacac

SEQ ID NO: 2401687 - RNA, 18 nt, Human
acagguaaacuaucuugg

SEQ ID NO: 2401688 - RNA, 15 nt, Human
acagguaauauaaaa

SEQ ID NO: 2401689 - RNA, 19 nt, Human
acagguaacgucuguaagc

SEQ ID NO: 2401690 - RNA, 19 nt, Human
acagggucucuagugcugu

SEQ ID NO: 2401691 - RNA, 17 nt, Human
acaggguagcagguacc

SEQ ID NO: 2401692 - RNA, 21 nt, Human
acagggucucuagugcuguga

SEQ ID NO: 2401693 - RNA, 22 nt, Human
acaggucaauacaguacaggca

SEQ ID NO: 2401694 - RNA, 23 nt, Human
acaggucaauacaguacaggcag

SEQ ID NO: 2401695 - RNA, 16 nt, Human
acaggcaagcaccucc

SEQ ID NO: 2401696 - RNA, 15 nt, Human
acaggcaagcaccuc

SEQ ID NO: 2401697 - RNA, 18 nt, Human
acaggcaagcaccuccug

SEQ ID NO: 2401698 - RNA, 21 nt, Human
acagcugcucaauaaaguaca

SEQ ID NO: 2401699 - RNA, 24 nt, Human
acagggcuggcccagcccugcugg

SEQ ID NO: 2401700 - RNA, 20 nt, Human
acagcugcuccuagagggag

SEQ ID NO: 2401701 - RNA, 20 nt, Human
acaggggaagguggccucug

SEQ ID NO: 2401702 - RNA, 15 nt, Human
acaggggcaggagga

SEQ ID NO: 2401703 - RNA, 15 nt, Human
acagccaugauucuu

SEQ ID NO: 2401704 - RNA, 19 nt, Human
acagccaggugccuuggag

SEQ ID NO: 2401705 - RNA, 17 nt, Human
acagccaggugccuugg

SEQ ID NO: 2401706 - RNA, 16 nt, Human
acagccaggugccuug

SEQ ID NO: 2401707 - RNA, 15 nt, Human
acagccaggugccuu

SEQ ID NO: 2401708 - RNA, 18 nt, Human
acagccaucccagccuug

SEQ ID NO: 2401709 - RNA, 16 nt, Human
acagccaucccagccu

SEQ ID NO: 2401710 - RNA, 15 nt, Human
acagccaucccagcc

SEQ ID NO: 2401711 - RNA, 18 nt, Human
acagcccaaagaaggaaa

SEQ ID NO: 2401712 - RNA, 17 nt, Human
acagcccaaagaaggaa

SEQ ID NO: 2401713 - RNA, 19 nt, Human
acagccaucccagccuugg

SEQ ID NO: 2401714 - RNA, 16 nt, Human
acagcccaaagaagga

SEQ ID NO: 2401715 - RNA, 13 nt, Human
acagccagacugg

SEQ ID NO: 2401716 - RNA, 15 nt, Human
acagccagacuggca

SEQ ID NO: 2401717 - RNA, 16 nt, Human
acagccagacuggcac

SEQ ID NO: 2401718 - RNA, 16 nt, Human
acagccagcaccuggc

SEQ ID NO: 2401719 - RNA, 13 nt, Human
acagccagcaccu

SEQ ID NO: 2401720 - RNA, 20 nt, Human
acagcaugagaggcucugug

SEQ ID NO: 2401721 - RNA, 15 nt, Human
acagcauugcuuucu

SEQ ID NO: 2401722 - RNA, 12 nt, Human
acagcauugcuu

SEQ ID NO: 2401723 - RNA, 13 nt, Human
acagcauugcuuu

SEQ ID NO: 2401724 - RNA, 13 nt, Human
acagcauguguau

SEQ ID NO: 2401725 - RNA, 11 nt, Human
acagcauugcu

SEQ ID NO: 2401726 - RNA, 19 nt, Human
acagccacggccaggccag

SEQ ID NO: 2401727 - RNA, 23 nt, Human
acagccaaaugcauggugcaguu

SEQ ID NO: 2401728 - RNA, 22 nt, Human
acagcaggguagucugguuucu

SEQ ID NO: 2401729 - RNA, 11 nt, Human
acagcaggugu

SEQ ID NO: 2401730 - RNA, 19 nt, Human
acagagucucacuguugcc

SEQ ID NO: 2401731 - RNA, 17 nt, Human
acagagucucacuguug

SEQ ID NO: 2401732 - RNA, 15 nt, Human
acagcaguugaaaag

SEQ ID NO: 2401733 - RNA, 18 nt, Human
acagcaguugaaaagacu

SEQ ID NO: 2401734 - RNA, 21 nt, Human
acagcaucauuuugcauucaa

SEQ ID NO: 2401735 - RNA, 20 nt, Human
acagcaucauuuugcauuca

SEQ ID NO: 2401736 - RNA, 17 nt, Human
acagcaucauuuugcau

SEQ ID NO: 2401737 - RNA, 17 nt, Human
acagcagugucaucaga

SEQ ID NO: 2401738 - RNA, 16 nt, Human
acagcagugucaucag

SEQ ID NO: 2401739 - RNA, 19 nt, Human
acagcaguguuccccaucu

SEQ ID NO: 2401740 - RNA, 13 nt, Human
acagcaguguucc

SEQ ID NO: 2401741 - RNA, 16 nt, Human
acagcaucauuuugca

SEQ ID NO: 2401742 - RNA, 21 nt, Human
acagaggggguggccucccaa

SEQ ID NO: 2401743 - RNA, 22 nt, Human
acagaaucauaugauucugcuu

SEQ ID NO: 2401744 - RNA, 22 nt, Human
acagaauacuguuaaaggaaaa

SEQ ID NO: 2401745 - RNA, 15 nt, Human
acagaauaaugaaug

SEQ ID NO: 2401746 - RNA, 18 nt, Human
acagaagucaugaagccc

SEQ ID NO: 2401747 - RNA, 14 nt, Human
acagagucucacug

SEQ ID NO: 2401748 - RNA, 12 nt, Human
acagagucucac

SEQ ID NO: 2401749 - RNA, 22 nt, Human
acagaggggguggccucccaac

SEQ ID NO: 2401750 - RNA, 21 nt, Human
acagaguaaauagcauucucu

SEQ ID NO: 2401751 - RNA, 23 nt, Human
acagaguaugaacaccugggcuu

SEQ ID NO: 2401752 - RNA, 19 nt, Human
acacugaaguuaacagaga

SEQ ID NO: 2401753 - RNA, 18 nt, Human
acacugaauauuuauauu

SEQ ID NO: 2401754 - RNA, 23 nt, Human
acacugaauauuuauauuucacu

SEQ ID NO: 2401755 - RNA, 22 nt, Human
acacugagaauguaagaacuac

SEQ ID NO: 2401756 - RNA, 20 nt, Human
acacugagaauguaagaacu

SEQ ID NO: 2401757 - RNA, 19 nt, Human
acacugagaauguaagaac

SEQ ID NO: 2401758 - RNA, 17 nt, Human
acacugaccauccacuc

SEQ ID NO: 2401759 - RNA, 15 nt, Human
acacugauccagccc

SEQ ID NO: 2401760 - RNA, 22 nt, Human
acacugacaccuuugcaggcau

SEQ ID NO: 2401761 - RNA, 14 nt, Human
acacugagcuguca

SEQ ID NO: 2401762 - RNA, 14 nt, Human
acacugaggcaggg

SEQ ID NO: 2401763 - RNA, 22 nt, Human
acacugaugcuuagauguucca

SEQ ID NO: 2401764 - RNA, 16 nt, Human
acacugaggcagggaa

SEQ ID NO: 2401765 - RNA, 17 nt, Human
acacugaggcagggaag

SEQ ID NO: 2401766 - RNA, 22 nt, Human
acacugccaucuuaguuuggau

SEQ ID NO: 2401767 - RNA, 21 nt, Human
acacugaagcucuugaagaca

SEQ ID NO: 2401768 - RNA, 22 nt, Human
acagaagcaguugagucgucau

SEQ ID NO: 2401769 - RNA, 15 nt, Human
acagaagcagcucuu

SEQ ID NO: 2401770 - RNA, 15 nt, Human
acagaagccaggagc

SEQ ID NO: 2401771 - RNA, 13 nt, Human
acagaagccagga

SEQ ID NO: 2401772 - RNA, 19 nt, Human
acagaagcaggcuggaggu

SEQ ID NO: 2401773 - RNA, 18 nt, Human
acagaagcaggcuggagg

SEQ ID NO: 2401774 - RNA, 16 nt, Human
acagaagccaggagca

SEQ ID NO: 2401775 - RNA, 17 nt, Human
acagaagucaugaagcc

SEQ ID NO: 2401776 - RNA, 13 nt, Human
acagaagcagcuc

SEQ ID NO: 2401777 - RNA, 14 nt, Human
acagaagcagcucu

SEQ ID NO: 2401778 - RNA, 12 nt, Human
acagaagcagcu

SEQ ID NO: 2401779 - RNA, 20 nt, Human
acagaagaaggcagcaggug

SEQ ID NO: 2401780 - RNA, 17 nt, Human
acagaacagcuucaggu

SEQ ID NO: 2401781 - RNA, 16 nt, Human
acagaacagcuucagg

SEQ ID NO: 2401782 - RNA, 15 nt, Human
acagaacagcuucag

SEQ ID NO: 2401783 - RNA, 14 nt, Human
acagaacagcuuca

SEQ ID NO: 2401784 - RNA, 13 nt, Human
acagaacagcuuc

SEQ ID NO: 2401785 - RNA, 12 nt, Human
acagaacagcuu

SEQ ID NO: 2401786 - RNA, 20 nt, Human
acagaacagcuucagguuau

SEQ ID NO: 2401787 - RNA, 18 nt, Human
acagaacagcuucagguu

SEQ ID NO: 2401788 - RNA, 16 nt, Human
acagaagaaggcagca

SEQ ID NO: 2401789 - RNA, 21 nt, Human
acagaacacauaauucaggaa

SEQ ID NO: 2401790 - RNA, 13 nt, Human
acagaacacuaaa

SEQ ID NO: 2401791 - RNA, 14 nt, Human
acagaacacugucu

SEQ ID NO: 2401792 - RNA, 12 nt, Human
acagaacacugu

SEQ ID NO: 2401793 - RNA, 13 nt, Human
acacugugcccug

SEQ ID NO: 2401794 - RNA, 12 nt, Human
acacugugcccu

SEQ ID NO: 2401795 - RNA, 23 nt, Human
acacugugcccagcccggaccuu

SEQ ID NO: 2401796 - RNA, 22 nt, Human
acacugugcccagcccggaccu

SEQ ID NO: 2401797 - RNA, 20 nt, Human
acacugugcacaucuguguc

SEQ ID NO: 2401798 - RNA, 21 nt, Human
acacugugcacaucugugucu

SEQ ID NO: 2401799 - RNA, 17 nt, Human
acacugugcccuggugg

SEQ ID NO: 2401800 - RNA, 16 nt, Human
acacugugcccuggug

SEQ ID NO: 2401801 - RNA, 15 nt, Human
acacugugcccuggu

SEQ ID NO: 2401802 - RNA, 14 nt, Human
acacugugcccugg

SEQ ID NO: 2401803 - RNA, 18 nt, Human
acacugugcccuggugga

SEQ ID NO: 2401804 - RNA, 18 nt, Human
acacugugcacaucugug

SEQ ID NO: 2401805 - RNA, 22 nt, Human
acacugucugguuucaccgagg

SEQ ID NO: 2401806 - RNA, 21 nt, Human
acacuguauuuguaucucuga

SEQ ID NO: 2401807 - RNA, 23 nt, Human
acacugcuaggugggccagcccc

SEQ ID NO: 2401808 - RNA, 13 nt, Human
acacugucuugaa

SEQ ID NO: 2401809 - RNA, 21 nt, Human
acacugcugcuccagugcagg

SEQ ID NO: 2401810 - RNA, 18 nt, Human
acacugcggggcuuggcu

SEQ ID NO: 2401811 - RNA, 19 nt, Human
acacugcggggcuuggcug

SEQ ID NO: 2401812 - RNA, 18 nt, Human
acacugcuaggugggcca

SEQ ID NO: 2401813 - RNA, 15 nt, Human
auaucaauuuaaaaa

SEQ ID NO: 2401814 - RNA, 17 nt, Human
auaucagaaaagggaag

SEQ ID NO: 2401815 - RNA, 14 nt, Human
auauccaccaccuc

SEQ ID NO: 2401816 - RNA, 14 nt, Human
auaucagaaaaggg

SEQ ID NO: 2401817 - RNA, 18 nt, Human
auaucacuugucaauaaa

SEQ ID NO: 2401818 - RNA, 18 nt, Human
auaucacauguuuucucu

SEQ ID NO: 2401819 - RNA, 17 nt, Human
auaucccuacauguauu

SEQ ID NO: 2401820 - RNA, 16 nt, Human
auaucccuacauguau

SEQ ID NO: 2401821 - RNA, 15 nt, Human
auaucccuacaugua

SEQ ID NO: 2401822 - RNA, 15 nt, Human
auauccccucccagu

SEQ ID NO: 2401823 - RNA, 17 nt, Human
auauccauucuuucuga

SEQ ID NO: 2401824 - RNA, 16 nt, Human
auauccaccaccuccc

SEQ ID NO: 2401825 - RNA, 21 nt, Human
auauccaugaccuaguuuucc

SEQ ID NO: 2401826 - RNA, 12 nt, Human
auauccauguac

SEQ ID NO: 2401827 - RNA, 18 nt, Human
auauccauucuuucugau

SEQ ID NO: 2401828 - RNA, 18 nt, Human
auauccccuauuuaacag

SEQ ID NO: 2401829 - RNA, 14 nt, Human
auauccauguacug

SEQ ID NO: 2401830 - RNA, 15 nt, Human
auauccauguacugu

SEQ ID NO: 2401831 - RNA, 17 nt, Human
auauccauguacuguag

SEQ ID NO: 2401832 - RNA, 18 nt, Human
auauccauguacuguagu

SEQ ID NO: 2401833 - RNA, 20 nt, Human
auauggaacuucuaauauau

SEQ ID NO: 2401834 - RNA, 18 nt, Human
auauggaacuucuaauau

SEQ ID NO: 2401835 - RNA, 19 nt, Human
auauggaacuuacauuguu

SEQ ID NO: 2401836 - RNA, 15 nt, Human
auauggacacuuaau

SEQ ID NO: 2401837 - RNA, 20 nt, Human
auauggacacuuaauacuac

SEQ ID NO: 2401838 - RNA, 18 nt, Human
auauuagaaguguuaacu

SEQ ID NO: 2401839 - RNA, 18 nt, Human
auauggacucaguuuucu

SEQ ID NO: 2401840 - RNA, 14 nt, Human
auaugcuuauacac

SEQ ID NO: 2401841 - RNA, 16 nt, Human
auaugcuuauacacuu

SEQ ID NO: 2401842 - RNA, 23 nt, Human
auaugcuucuguuuuauaauuuu

SEQ ID NO: 2401843 - RNA, 19 nt, Human
auaugcuuauacacuuaca

SEQ ID NO: 2401844 - RNA, 22 nt, Human
auaugccugggcagaaggaaga

SEQ ID NO: 2401845 - RNA, 19 nt, Human
auaugccucuccuuuguau

SEQ ID NO: 2401846 - RNA, 22 nt, Human
auaugccucuccuuuguauauu

SEQ ID NO: 2401847 - RNA, 15 nt, Human
auaugcuuaguaaug

SEQ ID NO: 2401848 - RNA, 13 nt, Human
auaugcuuaguaa

SEQ ID NO: 2401849 - RNA, 14 nt, Human
auaugcuuacugau

SEQ ID NO: 2401850 - RNA, 16 nt, Human
auauccuacuucucca

SEQ ID NO: 2401851 - RNA, 11 nt, Human
auauccucugu

SEQ ID NO: 2401852 - RNA, 13 nt, Human
auauccugagcca

SEQ ID NO: 2401853 - RNA, 14 nt, Human
auauccugagccau

SEQ ID NO: 2401854 - RNA, 14 nt, Human
auauccugccucag

SEQ ID NO: 2401855 - RNA, 13 nt, Human
auauccugccuca

SEQ ID NO: 2401856 - RNA, 12 nt, Human
auauccugccuc

SEQ ID NO: 2401857 - RNA, 11 nt, Human
auauccugccu

SEQ ID NO: 2401858 - RNA, 15 nt, Human
auauccugagccauc

SEQ ID NO: 2401859 - RNA, 16 nt, Human
auauccuuucuaacaa

SEQ ID NO: 2401860 - RNA, 15 nt, Human
auauccuuucuaaca

SEQ ID NO: 2401861 - RNA, 17 nt, Human
auaugcaguuuuccuua

SEQ ID NO: 2401862 - RNA, 23 nt, Human
auauuucagauaaucacaauaca

SEQ ID NO: 2401863 - RNA, 19 nt, Human
auauuuauuuuuuuuaagu

SEQ ID NO: 2401864 - RNA, 13 nt, Human
auauuucaagaca

SEQ ID NO: 2401865 - RNA, 18 nt, Human
auauuuauuuuuuuaagc

SEQ ID NO: 2401866 - RNA, 16 nt, Human
auauucaggaagcuca

SEQ ID NO: 2401867 - RNA, 14 nt, Human
auauucaggaagcu

SEQ ID NO: 2401868 - RNA, 19 nt, Human
auauuuagauuguuaaaau

SEQ ID NO: 2401869 - RNA, 20 nt, Human
auauuauacuaagaaaagau

SEQ ID NO: 2401870 - RNA, 20 nt, Human
auauuagaugugauuuaaua

SEQ ID NO: 2401871 - RNA, 18 nt, Human
auauuagaugugauuuaa

SEQ ID NO: 2401872 - RNA, 17 nt, Human
auauuagaugugauuua

SEQ ID NO: 2401873 - RNA, 16 nt, Human
auauuagaugugauuu

SEQ ID NO: 2401874 - RNA, 15 nt, Human
auauuagaugugauu

SEQ ID NO: 2401875 - RNA, 14 nt, Human
auauuagaugugau

SEQ ID NO: 2401876 - RNA, 13 nt, Human
auauuagauguga

SEQ ID NO: 2401877 - RNA, 15 nt, Human
auauuagcauuuagu

SEQ ID NO: 2401878 - RNA, 22 nt, Human
auauuagcauuuaguccaaugu

SEQ ID NO: 2401879 - RNA, 20 nt, Human
auauuagcuuuacuguuugu

SEQ ID NO: 2401880 - RNA, 21 nt, Human
auauuagcuuuacuguuuguu

SEQ ID NO: 2401881 - RNA, 13 nt, Human
auauucaggaagc

SEQ ID NO: 2401882 - RNA, 22 nt, Human
auauuauaauuuuuuucaauau

SEQ ID NO: 2401883 - RNA, 17 nt, Human
auauuauaacuuaaaaa

SEQ ID NO: 2401884 - RNA, 15 nt, Human
auauuaggaaaauau

SEQ ID NO: 2401885 - RNA, 19 nt, Human
auauuuauuacuguaagaa

SEQ ID NO: 2401886 - RNA, 14 nt, Human
auauuuauuacugu

SEQ ID NO: 2401887 - RNA, 18 nt, Human
auauuuauuuuaauaaug

SEQ ID NO: 2401888 - RNA, 22 nt, Human
auauuuauuacuguaagaaaau

SEQ ID NO: 2401889 - RNA, 21 nt, Human
auauuuauuuucuuucuguaa

SEQ ID NO: 2401890 - RNA, 16 nt, Human
auauuuauuaccucug

SEQ ID NO: 2401891 - RNA, 16 nt, Human
auauuuauaaaaauaa

SEQ ID NO: 2401892 - RNA, 18 nt, Human
auauuuaguguucauaaa

SEQ ID NO: 2401893 - RNA, 14 nt, Human
auauuuauuaccuc

SEQ ID NO: 2401894 - RNA, 11 nt, Human
auauuuauaac

SEQ ID NO: 2401895 - RNA, 13 nt, Human
auauuuauaacuc

SEQ ID NO: 2401896 - RNA, 22 nt, Human
auauuuaguuauaguuucagau

SEQ ID NO: 2401897 - RNA, 21 nt, Human
auauuuaguuauaguuucaga

SEQ ID NO: 2401898 - RNA, 14 nt, Human
auauuuauaaaacu

SEQ ID NO: 2401899 - RNA, 15 nt, Human
auauuuagcaaauaa

SEQ ID NO: 2401900 - RNA, 19 nt, Human
auauuuagcaaauaauuuc

SEQ ID NO: 2401901 - RNA, 16 nt, Human
auauaggaacuuaaau

SEQ ID NO: 2401902 - RNA, 18 nt, Human
auauacauucaaacuuaa

SEQ ID NO: 2401903 - RNA, 14 nt, Human
auauaccauuuauc

SEQ ID NO: 2401904 - RNA, 19 nt, Human
auauaauucuguacauagc

SEQ ID NO: 2401905 - RNA, 17 nt, Human
auauaauucuguacaua

SEQ ID NO: 2401906 - RNA, 22 nt, Human
auauaauucuguacauagccua

SEQ ID NO: 2401907 - RNA, 20 nt, Human
auauaauuuuuuagagagcu

SEQ ID NO: 2401908 - RNA, 23 nt, Human
auauagauuauaacuugucuaaa

SEQ ID NO: 2401909 - RNA, 18 nt, Human
auauagauuauaacuugu

SEQ ID NO: 2401910 - RNA, 15 nt, Human
auauagauuauaacu

SEQ ID NO: 2401911 - RNA, 20 nt, Human
auauacgugaaaauuauuug

SEQ ID NO: 2401912 - RNA, 18 nt, Human
auauacauucuuuaucuu

SEQ ID NO: 2401913 - RNA, 19 nt, Human
auauacucacuuucuagau

SEQ ID NO: 2401914 - RNA, 20 nt, Human
auauagcuguacaaauauaa

SEQ ID NO: 2401915 - RNA, 19 nt, Human
auauagcuguacaaauaua

SEQ ID NO: 2401916 - RNA, 18 nt, Human
auauagcuguacaaauau

SEQ ID NO: 2401917 - RNA, 17 nt, Human
auauagcuguacaaaua

SEQ ID NO: 2401918 - RNA, 15 nt, Human
auauagcuguacaaa

SEQ ID NO: 2401919 - RNA, 14 nt, Human
auauagcuguacaa

SEQ ID NO: 2401920 - RNA, 21 nt, Human
auauagcuauuuuuauggaau

SEQ ID NO: 2401921 - RNA, 16 nt, Human
auauagcccagccagg

SEQ ID NO: 2401922 - RNA, 18 nt, Human
auauaaguguacauaugu

SEQ ID NO: 2401923 - RNA, 15 nt, Human
auauaaguguacaua

SEQ ID NO: 2401924 - RNA, 22 nt, Human
auauaauguuguuauuuaaaga

SEQ ID NO: 2401925 - RNA, 21 nt, Human
auauaauguuguuauuuaaag

SEQ ID NO: 2401926 - RNA, 15 nt, Human
auauaaguguguguu

SEQ ID NO: 2401927 - RNA, 14 nt, Human
auauaauucuguac

SEQ ID NO: 2401928 - RNA, 17 nt, Human
auauaauucuguaaaug

SEQ ID NO: 2401929 - RNA, 16 nt, Human
auauaauucuguaaau

SEQ ID NO: 2401930 - RNA, 14 nt, Human
auauaauucuguaa

SEQ ID NO: 2401931 - RNA, 13 nt, Human
auauaauucugua

SEQ ID NO: 2401932 - RNA, 12 nt, Human
auauaauucugu

SEQ ID NO: 2401933 - RNA, 14 nt, Human
auauaauuaucgga

SEQ ID NO: 2401934 - RNA, 21 nt, Human
auauaauuaucggaagcagug

SEQ ID NO: 2401935 - RNA, 15 nt, Human
auauaagugcuguau

SEQ ID NO: 2401936 - RNA, 13 nt, Human
auauaagugcugu

SEQ ID NO: 2401937 - RNA, 18 nt, Human
auauaagugcuguauaaa

SEQ ID NO: 2401938 - RNA, 17 nt, Human
auauaagugcuguauaa

SEQ ID NO: 2401939 - RNA, 14 nt, Human
auauaaguguacau

SEQ ID NO: 2401940 - RNA, 20 nt, Human
auauaagugcuguauaaaau

SEQ ID NO: 2401941 - RNA, 15 nt, Human
auauaagugauugcu

SEQ ID NO: 2401942 - RNA, 16 nt, Human
auaguaugguggcugg

SEQ ID NO: 2401943 - RNA, 22 nt, Human
auaguauccuccagguuuuuca

SEQ ID NO: 2401944 - RNA, 20 nt, Human
auaguauccuccagguuuuu

SEQ ID NO: 2401945 - RNA, 19 nt, Human
auaguauccuccagguuuu

SEQ ID NO: 2401946 - RNA, 18 nt, Human
auaguauccuccagguuu

SEQ ID NO: 2401947 - RNA, 17 nt, Human
auaguauccuccagguu

SEQ ID NO: 2401948 - RNA, 16 nt, Human
auaguauccuccaggu

SEQ ID NO: 2401949 - RNA, 17 nt, Human
auaguauaucuggacaa

SEQ ID NO: 2401950 - RNA, 15 nt, Human
auaguaugguggcug

SEQ ID NO: 2401951 - RNA, 15 nt, Human
auaguauaucuggac

SEQ ID NO: 2401952 - RNA, 17 nt, Human
auaguagcauacauuua

SEQ ID NO: 2401953 - RNA, 16 nt, Human
auaguauaucuggaca

SEQ ID NO: 2401954 - RNA, 13 nt, Human
auaguaguaugau

SEQ ID NO: 2401955 - RNA, 16 nt, Human
auaguagcauacauuu

SEQ ID NO: 2401956 - RNA, 16 nt, Human
auacuugaaaauuaac

SEQ ID NO: 2401957 - RNA, 15 nt, Human
auacuugaaaauuaa

SEQ ID NO: 2401958 - RNA, 12 nt, Human
auacuucaaaag

SEQ ID NO: 2401959 - RNA, 21 nt, Human
auacuucaugaaauccugggu

SEQ ID NO: 2401960 - RNA, 14 nt, Human
auacuucaaaagua

SEQ ID NO: 2401961 - RNA, 22 nt, Human
auacuucagcucacacaugaga

SEQ ID NO: 2401962 - RNA, 21 nt, Human
auacuucucaaaccuguuuaa

SEQ ID NO: 2401963 - RNA, 19 nt, Human
auaaugugaaacuggauua

SEQ ID NO: 2401964 - RNA, 21 nt, Human
auaaugugaaacuggauuaaa

SEQ ID NO: 2401965 - RNA, 21 nt, Human
auaaguguguggucccaaguu

SEQ ID NO: 2401966 - RNA, 22 nt, Human
auaaguguguguuuuucauaaa

SEQ ID NO: 2401967 - RNA, 19 nt, Human
auaaguguguguuuuucau

SEQ ID NO: 2401968 - RNA, 18 nt, Human
auaaugugaaacuggauu

SEQ ID NO: 2401969 - RNA, 13 nt, Human
auaaugugaaaau

SEQ ID NO: 2401970 - RNA, 16 nt, Human
auaaugugaaaauggu

SEQ ID NO: 2401971 - RNA, 19 nt, Human
auaaugucucugugagacu

SEQ ID NO: 2401972 - RNA, 16 nt, Human
auaaguauuucaaauu

SEQ ID NO: 2401973 - RNA, 18 nt, Human
auaaguauuucaaauugg

SEQ ID NO: 2401974 - RNA, 19 nt, Human
auaaguauuucaaauugga

SEQ ID NO: 2401975 - RNA, 19 nt, Human
auaaguauuuaauucaugu

SEQ ID NO: 2401976 - RNA, 19 nt, Human
auaaguacuguguacagaa

SEQ ID NO: 2401977 - RNA, 18 nt, Human
auaaguacuguguacaga

SEQ ID NO: 2401978 - RNA, 20 nt, Human
auaaguguacauaugugcug

SEQ ID NO: 2401979 - RNA, 19 nt, Human
auaaguguacauaugugcu

SEQ ID NO: 2401980 - RNA, 14 nt, Human
auaaguguauuuuu

SEQ ID NO: 2401981 - RNA, 16 nt, Human
auaaguguauuuuuca

SEQ ID NO: 2401982 - RNA, 14 nt, Human
auaaguguacauau

SEQ ID NO: 2401983 - RNA, 13 nt, Human
auaaguguacaua

SEQ ID NO: 2401984 - RNA, 15 nt, Human
auaaguggugugugu

SEQ ID NO: 2401985 - RNA, 14 nt, Human
auaagucauguucc

SEQ ID NO: 2401986 - RNA, 14 nt, Human
auaagucuaaauaa

SEQ ID NO: 2401987 - RNA, 16 nt, Human
auaagucauguuccuu

SEQ ID NO: 2401988 - RNA, 21 nt, Human
auaaguccuugcaagaaucag

SEQ ID NO: 2401989 - RNA, 23 nt, Human
auaacagaaagccugggugacau

SEQ ID NO: 2401990 - RNA, 23 nt, Human
auaacacuauaaagguugacaau

SEQ ID NO: 2401991 - RNA, 23 nt, Human
auaacagguuauuuuaguuucug

SEQ ID NO: 2401992 - RNA, 22 nt, Human
auaacagguuauuuuaguuucu

SEQ ID NO: 2401993 - RNA, 18 nt, Human
auaacagguuauuuuagu

SEQ ID NO: 2401994 - RNA, 14 nt, Human
auaacagguuauuu

SEQ ID NO: 2401995 - RNA, 16 nt, Human
auaacaguaaaugugc

SEQ ID NO: 2401996 - RNA, 13 nt, Human
auaacagguuauu

SEQ ID NO: 2401997 - RNA, 12 nt, Human
auaacagcacug

SEQ ID NO: 2401998 - RNA, 22 nt, Human
auacuuagcaaaguuuuaccug

SEQ ID NO: 2401999 - RNA, 15 nt, Human
auacuuaucucucug

SEQ ID NO: 2402000 - RNA, 20 nt, Human
auacuuaucucucugugcug

SEQ ID NO: 2402001 - RNA, 18 nt, Human
auacuuaucucucugugc

SEQ ID NO: 2402002 - RNA, 17 nt, Human
auacuuaucucucugug

SEQ ID NO: 2402003 - RNA, 16 nt, Human
auacuuaucucucugu

SEQ ID NO: 2402004 - RNA, 13 nt, Human
auacacacacaca

SEQ ID NO: 2402005 - RNA, 14 nt, Human
auacacacacacac

SEQ ID NO: 2402006 - RNA, 11 nt, Human
auacacacaca

SEQ ID NO: 2402007 - RNA, 15 nt, Human
auacacaaguaaaca

SEQ ID NO: 2402008 - RNA, 18 nt, Human
auacacacacacacacag

SEQ ID NO: 2402009 - RNA, 19 nt, Human
auacacacacacacacagc

SEQ ID NO: 2402010 - RNA, 15 nt, Human
auacacacacacaca

SEQ ID NO: 2402011 - RNA, 20 nt, Human
auacacacacacacacagcc

SEQ ID NO: 2402012 - RNA, 22 nt, Human
auacccccugcaaagcccagcu

SEQ ID NO: 2402013 - RNA, 14 nt, Human
auaauuacuauguc

SEQ ID NO: 2402014 - RNA, 16 nt, Human
auaauuauaauauacu

SEQ ID NO: 2402015 - RNA, 11 nt, Human
auacacaaauu

SEQ ID NO: 2402016 - RNA, 15 nt, Human
auacacaacacacac

SEQ ID NO: 2402017 - RNA, 16 nt, Human
auaccucuuagcugag

SEQ ID NO: 2402018 - RNA, 15 nt, Human
auaccucuuagcuga

SEQ ID NO: 2402019 - RNA, 17 nt, Human
auaccucugugugcucc

SEQ ID NO: 2402020 - RNA, 16 nt, Human
auaccucugugugcuc

SEQ ID NO: 2402021 - RNA, 20 nt, Human
auaccucuuagcugagugga

SEQ ID NO: 2402022 - RNA, 17 nt, Human
auaccucuuagcugagu

SEQ ID NO: 2402023 - RNA, 20 nt, Human
auaccugauuuuuuuuccuu

SEQ ID NO: 2402024 - RNA, 17 nt, Human
auaccugggauacugug

SEQ ID NO: 2402025 - RNA, 13 nt, Human
auaccuaaaagag

SEQ ID NO: 2402026 - RNA, 12 nt, Human
auacccuccccc

SEQ ID NO: 2402027 - RNA, 19 nt, Human
auacccuggccgcccccug

SEQ ID NO: 2402028 - RNA, 15 nt, Human
auaccuacauguauu

SEQ ID NO: 2402029 - RNA, 12 nt, Human
auaccugucccc

SEQ ID NO: 2402030 - RNA, 18 nt, Human
auaccugggcauacuaau

SEQ ID NO: 2402031 - RNA, 11 nt, Human
auaccugcccu

SEQ ID NO: 2402032 - RNA, 20 nt, Human
auaccugggauacugugccc

SEQ ID NO: 2402033 - RNA, 16 nt, Human
aguuacagcugugauu

SEQ ID NO: 2402034 - RNA, 13 nt, Human
aguuacagcugug

SEQ ID NO: 2402035 - RNA, 23 nt, Human
aguuacagcgagaggcagagaaa

SEQ ID NO: 2402036 - RNA, 22 nt, Human
aguuacagcgagaggcagagaa

SEQ ID NO: 2402037 - RNA, 14 nt, Human
aguuaagaguagca

SEQ ID NO: 2402038 - RNA, 22 nt, Human
aguuaagaagcuguuguacauu

SEQ ID NO: 2402039 - RNA, 20 nt, Human
aguuacagccuguuaguaac

SEQ ID NO: 2402040 - RNA, 17 nt, Human
aguuacagcgagaggca

SEQ ID NO: 2402041 - RNA, 22 nt, Human
aguuacagccuguuaguaacau

SEQ ID NO: 2402042 - RNA, 13 nt, Human
aguuaagaccugg

SEQ ID NO: 2402043 - RNA, 16 nt, Human
aguuaagaccuggcag

SEQ ID NO: 2402044 - RNA, 17 nt, Human
aguuaagaccuggcagc

SEQ ID NO: 2402045 - RNA, 18 nt, Human
aguuacagacaaagcgug

SEQ ID NO: 2402046 - RNA, 17 nt, Human
aguuacaugcauacuuc

SEQ ID NO: 2402047 - RNA, 21 nt, Human
aguuacaugcauacuucaaaa

SEQ ID NO: 2402048 - RNA, 20 nt, Human
aguuacaugcauacuucaaa

SEQ ID NO: 2402049 - RNA, 21 nt, Human
aguugaaugacaacagaagcu

SEQ ID NO: 2402050 - RNA, 22 nt, Human
aguuacaugcauacuucaaaag

SEQ ID NO: 2402051 - RNA, 23 nt, Human
aguugaauugaggggauuaauau

SEQ ID NO: 2402052 - RNA, 20 nt, Human
aguugaauggccugccuuga

SEQ ID NO: 2402053 - RNA, 18 nt, Human
aguuguaccgcaauguga

SEQ ID NO: 2402054 - RNA, 19 nt, Human
aguuguaccgcaaugugac

SEQ ID NO: 2402055 - RNA, 17 nt, Human
aguuguagaauguauug

SEQ ID NO: 2402056 - RNA, 16 nt, Human
aguuguagaauguauu

SEQ ID NO: 2402057 - RNA, 13 nt, Human
aguuguagaaugu

SEQ ID NO: 2402058 - RNA, 20 nt, Human
aguuguaucagcacgugugg

SEQ ID NO: 2402059 - RNA, 23 nt, Human
aguuguaucagcacguguggccu

SEQ ID NO: 2402060 - RNA, 21 nt, Human
aguuguagaauguauuguacc

SEQ ID NO: 2402061 - RNA, 20 nt, Human
aguuguagaauguauuguac

SEQ ID NO: 2402062 - RNA, 18 nt, Human
aguuguagaauguauugu

SEQ ID NO: 2402063 - RNA, 21 nt, Human
aguuguaggcgaaucauuugu

SEQ ID NO: 2402064 - RNA, 22 nt, Human
aguuguaggcgaaucauuuguu

SEQ ID NO: 2402065 - RNA, 17 nt, Human
aguuguaucucuuuuga

SEQ ID NO: 2402066 - RNA, 22 nt, Human
aguuguaucucuuuugaaucca

SEQ ID NO: 2402067 - RNA, 14 nt, Human
aguuguaucucuuu

SEQ ID NO: 2402068 - RNA, 15 nt, Human
aguuguaucucuuuu

SEQ ID NO: 2402069 - RNA, 16 nt, Human
aguuguaucucuuuug

SEQ ID NO: 2402070 - RNA, 19 nt, Human
aguugucaagucucugcug

SEQ ID NO: 2402071 - RNA, 13 nt, Human
aguuguuacauuu

SEQ ID NO: 2402072 - RNA, 15 nt, Human
aguuguuacauuuuu

SEQ ID NO: 2402073 - RNA, 16 nt, Human
aguuguuacauuuuua

SEQ ID NO: 2402074 - RNA, 16 nt, Human
aguuguuaauaaaagu

SEQ ID NO: 2402075 - RNA, 23 nt, Human
aguuguuaauaaaaguacauguu

SEQ ID NO: 2402076 - RNA, 21 nt, Human
aguuaagaagcuguuguacau

SEQ ID NO: 2402077 - RNA, 20 nt, Human
aguuaagaagcuguuguaca

SEQ ID NO: 2402078 - RNA, 18 nt, Human
aguuaagaagcuguugua

SEQ ID NO: 2402079 - RNA, 17 nt, Human
aguuaagaagcuguugu

SEQ ID NO: 2402080 - RNA, 19 nt, Human
aguuaagacaugauuuccu

SEQ ID NO: 2402081 - RNA, 20 nt, Human
aguuaagacaugauuuccuu

SEQ ID NO: 2402082 - RNA, 16 nt, Human
aguuaagaagcuguug

SEQ ID NO: 2402083 - RNA, 15 nt, Human
aguuaagaagcuguu

SEQ ID NO: 2402084 - RNA, 12 nt, Human
aguuaagaagcu

SEQ ID NO: 2402085 - RNA, 18 nt, Human
aguuaacuuuaagacuga

SEQ ID NO: 2402086 - RNA, 14 nt, Human
aguuaacuuucaga

SEQ ID NO: 2402087 - RNA, 16 nt, Human
aguuaacuauuuuauu

SEQ ID NO: 2402088 - RNA, 18 nt, Human
agugauuaccagggacug

SEQ ID NO: 2402089 - RNA, 15 nt, Human
agugauuaccaggga

SEQ ID NO: 2402090 - RNA, 19 nt, Human
agugauucucaugccucag

SEQ ID NO: 2402091 - RNA, 18 nt, Human
agugauucucaugccuca

SEQ ID NO: 2402092 - RNA, 16 nt, Human
agugaucacagcagcu

SEQ ID NO: 2402093 - RNA, 15 nt, Human
agugaucacagcagc

SEQ ID NO: 2402094 - RNA, 14 nt, Human
agugaucacagcag

SEQ ID NO: 2402095 - RNA, 20 nt, Human
agugaucaauaaaaugugau

SEQ ID NO: 2402096 - RNA, 16 nt, Human
agugucuuuccacucc

SEQ ID NO: 2402097 - RNA, 23 nt, Human
agugucuuuccacggagccacuc

SEQ ID NO: 2402098 - RNA, 14 nt, Human
agugauuacuguca

SEQ ID NO: 2402099 - RNA, 19 nt, Human
agugucuucacggcaggac

SEQ ID NO: 2402100 - RNA, 13 nt, Human
agugucuuccaua

SEQ ID NO: 2402101 - RNA, 14 nt, Human
agugucuuccauaa

SEQ ID NO: 2402102 - RNA, 13 nt, Human
agugucuuuccac

SEQ ID NO: 2402103 - RNA, 14 nt, Human
agugucuuccugug

SEQ ID NO: 2402104 - RNA, 15 nt, Human
agugucuuccauaau

SEQ ID NO: 2402105 - RNA, 23 nt, Human
agugugaacuggacccuguugcu

SEQ ID NO: 2402106 - RNA, 22 nt, Human
agugugaacuggacccuguugc

SEQ ID NO: 2402107 - RNA, 22 nt, Human
agugugaacaaaagaugcucuu

SEQ ID NO: 2402108 - RNA, 13 nt, Human
agugugaacaaaa

SEQ ID NO: 2402109 - RNA, 14 nt, Human
agugugaacuggac

SEQ ID NO: 2402110 - RNA, 16 nt, Human
agugucuuccuguggg

SEQ ID NO: 2402111 - RNA, 15 nt, Human
agugugaaauagaca

SEQ ID NO: 2402112 - RNA, 23 nt, Human
agugugacaaggauugcuacugu

SEQ ID NO: 2402113 - RNA, 22 nt, Human
agugugaaguuagaauuccuuc

SEQ ID NO: 2402114 - RNA, 21 nt, Human
agugugaaguuagaauuccuu

SEQ ID NO: 2402115 - RNA, 20 nt, Human
agugugaaguuagaauuccu

SEQ ID NO: 2402116 - RNA, 18 nt, Human
agugugaaguuagaauuc

SEQ ID NO: 2402117 - RNA, 15 nt, Human
agugugaaguuagaa

SEQ ID NO: 2402118 - RNA, 14 nt, Human
agugugaaguuaga

SEQ ID NO: 2402119 - RNA, 13 nt, Human
agugugaaguuag

SEQ ID NO: 2402120 - RNA, 12 nt, Human
agugugaaguua

SEQ ID NO: 2402121 - RNA, 20 nt, Human
agugugaagcuuccuuggcu

SEQ ID NO: 2402122 - RNA, 22 nt, Human
agugauauggcagaagacacca

SEQ ID NO: 2402123 - RNA, 21 nt, Human
agugauauggcagaagacacc

SEQ ID NO: 2402124 - RNA, 24 nt, Human
agugauauggcagaagacaccaga

SEQ ID NO: 2402125 - RNA, 19 nt, Human
agugauauggcagaagaca

SEQ ID NO: 2402126 - RNA, 16 nt, Human
agugaucaauaaaaug

SEQ ID NO: 2402127 - RNA, 17 nt, Human
agugaucaauaaaaugu

SEQ ID NO: 2402128 - RNA, 19 nt, Human
agugaucaauaaaauguga

SEQ ID NO: 2402129 - RNA, 13 nt, Human
agugauccuccca

SEQ ID NO: 2402130 - RNA, 17 nt, Human
agugacagacaggcucu

SEQ ID NO: 2402131 - RNA, 16 nt, Human
agugacagacaggcuc

SEQ ID NO: 2402132 - RNA, 21 nt, Human
agugacagaccacaucuuuau

SEQ ID NO: 2402133 - RNA, 23 nt, Human
agugacacuucagagagcuggua

SEQ ID NO: 2402134 - RNA, 18 nt, Human
agugacacagcagcuuca

SEQ ID NO: 2402135 - RNA, 17 nt, Human
agugacacagcagcuuc

SEQ ID NO: 2402136 - RNA, 23 nt, Human
agugacacagcagcuucaccaga

SEQ ID NO: 2402137 - RNA, 15 nt, Human
agugacacuucagag

SEQ ID NO: 2402138 - RNA, 18 nt, Human
agugacacuucagagagc

SEQ ID NO: 2402139 - RNA, 20 nt, Human
agugacacuucagagagcug

SEQ ID NO: 2402140 - RNA, 21 nt, Human
agugacacuucagagagcugg

SEQ ID NO: 2402141 - RNA, 22 nt, Human
agugacacuucagagagcuggu

SEQ ID NO: 2402142 - RNA, 14 nt, Human
agugacaaggcccc

SEQ ID NO: 2402143 - RNA, 15 nt, Human
agugacaaggcccca

SEQ ID NO: 2402144 - RNA, 16 nt, Human
agugacaaggccccag

SEQ ID NO: 2402145 - RNA, 18 nt, Human
agugacaaggccccagag

SEQ ID NO: 2402146 - RNA, 20 nt, Human
agugacaaggccccagagac

SEQ ID NO: 2402147 - RNA, 21 nt, Human
agugacaaggccccagagacu

SEQ ID NO: 2402148 - RNA, 13 nt, Human
agugacacagcag

SEQ ID NO: 2402149 - RNA, 23 nt, Human
agugacaaggccccagagacuca

SEQ ID NO: 2402150 - RNA, 23 nt, Human
agugaauuuuucucuaacucaga

SEQ ID NO: 2402151 - RNA, 20 nt, Human
aguccuggaagccagcuuuc

SEQ ID NO: 2402152 - RNA, 22 nt, Human
aguccuggaagccagcuuuccc

SEQ ID NO: 2402153 - RNA, 23 nt, Human
aguccuggaagccagcuuucccu

SEQ ID NO: 2402154 - RNA, 14 nt, Human
aguccuggaagcca

SEQ ID NO: 2402155 - RNA, 16 nt, Human
aguccugccucagccu

SEQ ID NO: 2402156 - RNA, 13 nt, Human
aguccugccuggc

SEQ ID NO: 2402157 - RNA, 14 nt, Human
aguccugccuggcc

SEQ ID NO: 2402158 - RNA, 15 nt, Human
aguccugccuggcca

SEQ ID NO: 2402159 - RNA, 16 nt, Human
aguccugccuggccag

SEQ ID NO: 2402160 - RNA, 17 nt, Human
aguccugccuggccagg

SEQ ID NO: 2402161 - RNA, 20 nt, Human
aguccugccuggccaggcag

SEQ ID NO: 2402162 - RNA, 21 nt, Human
aguccugccuggccaggcaga

SEQ ID NO: 2402163 - RNA, 20 nt, Human
aguccacucccagugcuugc

SEQ ID NO: 2402164 - RNA, 16 nt, Human
aguccacucccagugc

SEQ ID NO: 2402165 - RNA, 14 nt, Human
aguccacucccagu

SEQ ID NO: 2402166 - RNA, 14 nt, Human
aguccacuuuguuu

SEQ ID NO: 2402167 - RNA, 12 nt, Human
aguccaccugag

SEQ ID NO: 2402168 - RNA, 18 nt, Human
aguccaaugucuuuuuaa

SEQ ID NO: 2402169 - RNA, 17 nt, Human
aguccaccugagcugcc

SEQ ID NO: 2402170 - RNA, 20 nt, Human
agucaagugcguccacgagc

SEQ ID NO: 2402171 - RNA, 17 nt, Human
agucaauauuuuuagau

SEQ ID NO: 2402172 - RNA, 20 nt, Human
agucaagugaaaaaggagga

SEQ ID NO: 2402173 - RNA, 13 nt, Human
agucaaauugugu

SEQ ID NO: 2402174 - RNA, 17 nt, Human
agucaaauugugugaaa

SEQ ID NO: 2402175 - RNA, 15 nt, Human
agucaaauuguguga

SEQ ID NO: 2402176 - RNA, 15 nt, Human
agucaaccugccuga

SEQ ID NO: 2402177 - RNA, 19 nt, Human
agucaagaaaaauuauugu

SEQ ID NO: 2402178 - RNA, 12 nt, Human
agucaagaaaaa

SEQ ID NO: 2402179 - RNA, 14 nt, Human
agucaaccugggca

SEQ ID NO: 2402180 - RNA, 15 nt, Human
agucaaccugggcaa

SEQ ID NO: 2402181 - RNA, 18 nt, Human
agucaaggguaggguggg

SEQ ID NO: 2402182 - RNA, 16 nt, Human
agucaagugaaaaagg

SEQ ID NO: 2402183 - RNA, 15 nt, Human
agucaagcuccuccu

SEQ ID NO: 2402184 - RNA, 16 nt, Human
agucaagcuccuccuc

SEQ ID NO: 2402185 - RNA, 17 nt, Human
agucaagcuccuccucc

SEQ ID NO: 2402186 - RNA, 18 nt, Human
agucaagcuccuccuccc

SEQ ID NO: 2402187 - RNA, 13 nt, Human
agucaagcuccuc

SEQ ID NO: 2402188 - RNA, 14 nt, Human
agucaagcuccucc

SEQ ID NO: 2402189 - RNA, 15 nt, Human
agucaagagcauccu

SEQ ID NO: 2402190 - RNA, 20 nt, Human
agucaagcuccuccucccug

SEQ ID NO: 2402191 - RNA, 22 nt, Human
agucaagcuccuccucccugca

SEQ ID NO: 2402192 - RNA, 16 nt, Human
agucaaggaguggcuu

SEQ ID NO: 2402193 - RNA, 20 nt, Human
agucauuauagaucccccag

SEQ ID NO: 2402194 - RNA, 19 nt, Human
agucauuauagauccccca

SEQ ID NO: 2402195 - RNA, 20 nt, Human
agucauuagacuccuccucc

SEQ ID NO: 2402196 - RNA, 19 nt, Human
agucauuagacuccuccuc

SEQ ID NO: 2402197 - RNA, 18 nt, Human
agucauuagacuccuccu

SEQ ID NO: 2402198 - RNA, 16 nt, Human
agucauuagacuccuc

SEQ ID NO: 2402199 - RNA, 15 nt, Human
agucauuagacuccu

SEQ ID NO: 2402200 - RNA, 14 nt, Human
agucauuagacucc

SEQ ID NO: 2402201 - RNA, 20 nt, Human
agucauuauccuugcuauga

SEQ ID NO: 2402202 - RNA, 18 nt, Human
agucauuauccuugcuau

SEQ ID NO: 2402203 - RNA, 23 nt, Human
agucauuauagaucccccagacu

SEQ ID NO: 2402204 - RNA, 21 nt, Human
agucauuauagaucccccaga

SEQ ID NO: 2402205 - RNA, 22 nt, Human
agucauuaugagaggcaaugau

SEQ ID NO: 2402206 - RNA, 21 nt, Human
aguccaagcauuuagauguau

SEQ ID NO: 2402207 - RNA, 11 nt, Human
aguccaagcug

SEQ ID NO: 2402208 - RNA, 14 nt, Human
aguccaagcuggga

SEQ ID NO: 2402209 - RNA, 18 nt, Human
aguccaaggaaaccacag

SEQ ID NO: 2402210 - RNA, 16 nt, Human
aguccaagcugggaga

SEQ ID NO: 2402211 - RNA, 23 nt, Human
aguccaaggaaaccacagcugcu

SEQ ID NO: 2402212 - RNA, 21 nt, Human
aguccaaggaaaccacagcug

SEQ ID NO: 2402213 - RNA, 14 nt, Human
aguccaauguggca

SEQ ID NO: 2402214 - RNA, 14 nt, Human
aguccacaaaauaa

SEQ ID NO: 2402215 - RNA, 20 nt, Human
aguccaaucucauggagaag

SEQ ID NO: 2402216 - RNA, 17 nt, Human
aguccaaugucuuuuua

SEQ ID NO: 2402217 - RNA, 16 nt, Human
aguccaagcauuuaga

SEQ ID NO: 2402218 - RNA, 22 nt, Human
agucauuggcuuuauccucuuu

SEQ ID NO: 2402219 - RNA, 21 nt, Human
agucauuggcuuuauccucuu

SEQ ID NO: 2402220 - RNA, 20 nt, Human
agucauuggcuuuauccucu

SEQ ID NO: 2402221 - RNA, 18 nt, Human
agucauuggcuuuauccu

SEQ ID NO: 2402222 - RNA, 15 nt, Human
agucauuggcuuuau

SEQ ID NO: 2402223 - RNA, 14 nt, Human
agucauuggcuuua

SEQ ID NO: 2402224 - RNA, 15 nt, Human
agucauuggcugucu

SEQ ID NO: 2402225 - RNA, 17 nt, Human
agucauucguucugugg

SEQ ID NO: 2402226 - RNA, 17 nt, Human
aucuugaagacuuuucu

SEQ ID NO: 2402227 - RNA, 21 nt, Human
aucuugaaauuaagaaggcaa

SEQ ID NO: 2402228 - RNA, 22 nt, Human
aucuugaaauuaagaaggcaaa

SEQ ID NO: 2402229 - RNA, 23 nt, Human
aucuugaaauuaagaaggcaaaa

SEQ ID NO: 2402230 - RNA, 17 nt, Human
aucuugaaaugaaagua

SEQ ID NO: 2402231 - RNA, 21 nt, Human
aucuucuuugcagccugggug

SEQ ID NO: 2402232 - RNA, 14 nt, Human
aucuucuuugcagc

SEQ ID NO: 2402233 - RNA, 12 nt, Human
aucuugaaauua

SEQ ID NO: 2402234 - RNA, 17 nt, Human
aucuucuuuauaauucu

SEQ ID NO: 2402235 - RNA, 21 nt, Human
aucuucucagcucccauuucu

SEQ ID NO: 2402236 - RNA, 16 nt, Human
aucuucucagcuccca

SEQ ID NO: 2402237 - RNA, 15 nt, Human
aucuucucagcuccc

SEQ ID NO: 2402238 - RNA, 14 nt, Human
aucuucucagcucc

SEQ ID NO: 2402239 - RNA, 13 nt, Human
aucuucucagcuc

SEQ ID NO: 2402240 - RNA, 12 nt, Human
aucuucucagcu

SEQ ID NO: 2402241 - RNA, 24 nt, Human
aucuucucagaaggcaaaugacuu

SEQ ID NO: 2402242 - RNA, 15 nt, Human
aucuucuccaggaug

SEQ ID NO: 2402243 - RNA, 22 nt, Human
aucuucucagcucccauuucua

SEQ ID NO: 2402244 - RNA, 15 nt, Human
aucuucuccaucugg

SEQ ID NO: 2402245 - RNA, 19 nt, Human
aucuucuccaucuggcagg

SEQ ID NO: 2402246 - RNA, 14 nt, Human
aucuucucuggcga

SEQ ID NO: 2402247 - RNA, 22 nt, Human
aucuucuccaucuggcagggug

SEQ ID NO: 2402248 - RNA, 14 nt, Human
aucucguuucaaaa

SEQ ID NO: 2402249 - RNA, 23 nt, Human
aucucguuuuucuucuuaagacu

SEQ ID NO: 2402250 - RNA, 22 nt, Human
aucucguuuuucuucuuaagac

SEQ ID NO: 2402251 - RNA, 17 nt, Human
aucucguuucaaaaaca

SEQ ID NO: 2402252 - RNA, 15 nt, Human
aucucguuucaaaaa

SEQ ID NO: 2402253 - RNA, 15 nt, Human
aucucuaauauggca

SEQ ID NO: 2402254 - RNA, 13 nt, Human
aucucuaauaugg

SEQ ID NO: 2402255 - RNA, 18 nt, Human
aucucuaacagcucagga

SEQ ID NO: 2402256 - RNA, 20 nt, Human
aucucuaacagcucaggauc

SEQ ID NO: 2402257 - RNA, 21 nt, Human
aucucuagaauuuuaagugcu

SEQ ID NO: 2402258 - RNA, 15 nt, Human
aucucuagaauuuua

SEQ ID NO: 2402259 - RNA, 16 nt, Human
aucucuagaauuuuaa

SEQ ID NO: 2402260 - RNA, 18 nt, Human
aucucuagaauuuuaagu

SEQ ID NO: 2402261 - RNA, 15 nt, Human
aucucuaauuggaag

SEQ ID NO: 2402262 - RNA, 22 nt, Human
aucucuaauauggcaaaaaugg

SEQ ID NO: 2402263 - RNA, 23 nt, Human
aucucuaauuggaagaaauuccu

SEQ ID NO: 2402264 - RNA, 18 nt, Human
aucucuacuaaaaauaca

SEQ ID NO: 2402265 - RNA, 22 nt, Human
aucucucgugauugauaagaac

SEQ ID NO: 2402266 - RNA, 16 nt, Human
aucucuauuuaauauu

SEQ ID NO: 2402267 - RNA, 15 nt, Human
aucucuauuuaauau

SEQ ID NO: 2402268 - RNA, 14 nt, Human
aucucuauuuaaua

SEQ ID NO: 2402269 - RNA, 13 nt, Human
aucucuauuuaau

SEQ ID NO: 2402270 - RNA, 21 nt, Human
aucucucuacuccuaccucag

SEQ ID NO: 2402271 - RNA, 22 nt, Human
aucucucuacuccuaccucagc

SEQ ID NO: 2402272 - RNA, 11 nt, Human
aucuggaaccu

SEQ ID NO: 2402273 - RNA, 16 nt, Human
aucuggaaccucagcc

SEQ ID NO: 2402274 - RNA, 17 nt, Human
aucuggaaccucagccu

SEQ ID NO: 2402275 - RNA, 18 nt, Human
aucuggaaccucagccug

SEQ ID NO: 2402276 - RNA, 19 nt, Human
aucuggaacccagacucag

SEQ ID NO: 2402277 - RNA, 23 nt, Human
aucuggaacccagacucagacau

SEQ ID NO: 2402278 - RNA, 14 nt, Human
aucugcuggaguuu

SEQ ID NO: 2402279 - RNA, 18 nt, Human
aucugcuggaguuucaug

SEQ ID NO: 2402280 - RNA, 21 nt, Human
aucugcucuccuuccuggagc

SEQ ID NO: 2402281 - RNA, 13 nt, Human
aucugcuccuccc

SEQ ID NO: 2402282 - RNA, 23 nt, Human
aucugcuguccagacagccugua

SEQ ID NO: 2402283 - RNA, 22 nt, Human
aucugcuguccagacagccugu

SEQ ID NO: 2402284 - RNA, 21 nt, Human
aucugcuguccagacagccug

SEQ ID NO: 2402285 - RNA, 18 nt, Human
aucugcuguccagacagc

SEQ ID NO: 2402286 - RNA, 17 nt, Human
aucugcuguccagacag

SEQ ID NO: 2402287 - RNA, 16 nt, Human
aucugcuguccagaca

SEQ ID NO: 2402288 - RNA, 11 nt, Human
aucugcugucc

SEQ ID NO: 2402289 - RNA, 20 nt, Human
aucugcucuccuuccuggag

SEQ ID NO: 2402290 - RNA, 17 nt, Human
aucugcucuccuuccug

SEQ ID NO: 2402291 - RNA, 16 nt, Human
aucugcucuccuuccu

SEQ ID NO: 2402292 - RNA, 15 nt, Human
aucugcucuccuucc

SEQ ID NO: 2402293 - RNA, 23 nt, Human
aucucucugugcuguggaagcaa

SEQ ID NO: 2402294 - RNA, 18 nt, Human
aucucucugugcugugga

SEQ ID NO: 2402295 - RNA, 20 nt, Human
aucugcucagcccuggaggu

SEQ ID NO: 2402296 - RNA, 19 nt, Human
aucugcucagcccuggagg

SEQ ID NO: 2402297 - RNA, 14 nt, Human
aucugcucuccuuc

SEQ ID NO: 2402298 - RNA, 13 nt, Human
aucugcucuccuu

SEQ ID NO: 2402299 - RNA, 14 nt, Human
aucucucugcccaa

SEQ ID NO: 2402300 - RNA, 23 nt, Human
aucucucuacuccuaccucagcc

SEQ ID NO: 2402301 - RNA, 22 nt, Human
aucucucugaauccuaagggcu

SEQ ID NO: 2402302 - RNA, 14 nt, Human
aucucucuggcccu

SEQ ID NO: 2402303 - RNA, 13 nt, Human
aucucucuggccc

SEQ ID NO: 2402304 - RNA, 12 nt, Human
aucucucuggcc

SEQ ID NO: 2402305 - RNA, 20 nt, Human
aucucucgguuccacguccc

SEQ ID NO: 2402306 - RNA, 15 nt, Human
aucucucuucuuuuc

SEQ ID NO: 2402307 - RNA, 13 nt, Human
aucuucuaaaugg

SEQ ID NO: 2402308 - RNA, 19 nt, Human
aucuuccaacucaaacucu

SEQ ID NO: 2402309 - RNA, 14 nt, Human
aucuucaguuuuau

SEQ ID NO: 2402310 - RNA, 20 nt, Human
aucuucaguuuuaucuuuaa

SEQ ID NO: 2402311 - RNA, 22 nt, Human
aucuucaguuuuaucuuuaauc

SEQ ID NO: 2402312 - RNA, 22 nt, Human
aucuucaccagaggaaucacuc

SEQ ID NO: 2402313 - RNA, 21 nt, Human
aucuucaccagaggaaucacu

SEQ ID NO: 2402314 - RNA, 15 nt, Human
aucuucagcuucuuc

SEQ ID NO: 2402315 - RNA, 14 nt, Human
aucuucagcuucuu

SEQ ID NO: 2402316 - RNA, 13 nt, Human
aucuucagcuucu

SEQ ID NO: 2402317 - RNA, 12 nt, Human
aucuucagcuuc

SEQ ID NO: 2402318 - RNA, 18 nt, Human
aucuucagagcagggguc

SEQ ID NO: 2402319 - RNA, 14 nt, Human
aucuucagagcagg

SEQ ID NO: 2402320 - RNA, 13 nt, Human
aucuucacuucua

SEQ ID NO: 2402321 - RNA, 23 nt, Human
aucuucacuucuaaaugcauauc

SEQ ID NO: 2402322 - RNA, 20 nt, Human
aucuuaucauggucucaguc

SEQ ID NO: 2402323 - RNA, 18 nt, Human
aucuuaucauggucucag

SEQ ID NO: 2402324 - RNA, 22 nt, Human
aucuuauaauuuaaaauaugcu

SEQ ID NO: 2402325 - RNA, 22 nt, Human
aucugggcuccuaaccuuccug

SEQ ID NO: 2402326 - RNA, 17 nt, Human
aucugggccagaauuuc

SEQ ID NO: 2402327 - RNA, 19 nt, Human
aucuggaaccucagccugg

SEQ ID NO: 2402328 - RNA, 20 nt, Human
aucuggaaccucagccuggc

SEQ ID NO: 2402329 - RNA, 21 nt, Human
aucuggaaccucagccuggcc

SEQ ID NO: 2402330 - RNA, 22 nt, Human
aucuggaaccucagccuggcca

SEQ ID NO: 2402331 - RNA, 21 nt, Human
aucuggaaucuggagaccagg

SEQ ID NO: 2402332 - RNA, 20 nt, Human
aucuggaaggggaucccacc

SEQ ID NO: 2402333 - RNA, 21 nt, Human
aucuggaagccaaaauguagg

SEQ ID NO: 2402334 - RNA, 19 nt, Human
aucuggaccccaucuguga

SEQ ID NO: 2402335 - RNA, 17 nt, Human
aucugggacccuuuccu

SEQ ID NO: 2402336 - RNA, 20 nt, Human
aucugggacccuuuccuucc

SEQ ID NO: 2402337 - RNA, 22 nt, Human
aucugggacccuuuccuuccuu

SEQ ID NO: 2402338 - RNA, 18 nt, Human
aucugggaguccccuuuu

SEQ ID NO: 2402339 - RNA, 23 nt, Human
aucugggacccuuuccuuccuuc

SEQ ID NO: 2402340 - RNA, 15 nt, Human
aucugggccagaauu

SEQ ID NO: 2402341 - RNA, 22 nt, Human
aucugggauucccaccaagguc

SEQ ID NO: 2402342 - RNA, 20 nt, Human
aucugggaguccccuuuucu

SEQ ID NO: 2402343 - RNA, 18 nt, Human
aucugggcauagaugcag

SEQ ID NO: 2402344 - RNA, 16 nt, Human
augagcuauguauuaa

SEQ ID NO: 2402345 - RNA, 15 nt, Human
augagcuauguauua

SEQ ID NO: 2402346 - RNA, 14 nt, Human
augagcuauguauu

SEQ ID NO: 2402347 - RNA, 22 nt, Human
augacucccuuaaaauagaaau

SEQ ID NO: 2402348 - RNA, 19 nt, Human
augagcuacgccugccucc

SEQ ID NO: 2402349 - RNA, 23 nt, Human
augagcuauuuccauuccagaau

SEQ ID NO: 2402350 - RNA, 22 nt, Human
augagcuauuuccauuccagaa

SEQ ID NO: 2402351 - RNA, 21 nt, Human
augagcuauuuccauuccaga

SEQ ID NO: 2402352 - RNA, 20 nt, Human
augagcuauuuccauuccag

SEQ ID NO: 2402353 - RNA, 13 nt, Human
augagcuccagac

SEQ ID NO: 2402354 - RNA, 13 nt, Human
augagccuggcaa

SEQ ID NO: 2402355 - RNA, 14 nt, Human
augagccuggcaag

SEQ ID NO: 2402356 - RNA, 14 nt, Human
aucuuuuuucaaaa

SEQ ID NO: 2402357 - RNA, 17 nt, Human
augaaaaaauauauauc

SEQ ID NO: 2402358 - RNA, 14 nt, Human
augaaaaaauauau

SEQ ID NO: 2402359 - RNA, 22 nt, Human
augaaaaaauauauaucaaaua

SEQ ID NO: 2402360 - RNA, 17 nt, Human
aucuuuuuucacaaauu

SEQ ID NO: 2402361 - RNA, 14 nt, Human
aucuuuuuucacaa

SEQ ID NO: 2402362 - RNA, 20 nt, Human
aucuuuuuuuuauuccacau

SEQ ID NO: 2402363 - RNA, 13 nt, Human
augaaaacaugua

SEQ ID NO: 2402364 - RNA, 17 nt, Human
augaaacccccacacac

SEQ ID NO: 2402365 - RNA, 18 nt, Human
augaaacccccacacaca

SEQ ID NO: 2402366 - RNA, 18 nt, Human
augaagcuuguguaucca

SEQ ID NO: 2402367 - RNA, 19 nt, Human
augaaacccccacacacac

SEQ ID NO: 2402368 - RNA, 15 nt, Human
augaaacccccacac

SEQ ID NO: 2402369 - RNA, 16 nt, Human
augaaacccccacaca

SEQ ID NO: 2402370 - RNA, 18 nt, Human
augaaacagaaacaaaaa

SEQ ID NO: 2402371 - RNA, 22 nt, Human
augaaacagaaacaaaaacacu

SEQ ID NO: 2402372 - RNA, 19 nt, Human
augaaacaccuucucugga

SEQ ID NO: 2402373 - RNA, 17 nt, Human
augaaacaccuucucug

SEQ ID NO: 2402374 - RNA, 13 nt, Human
augaaacagaaac

SEQ ID NO: 2402375 - RNA, 20 nt, Human
augaaacacucaguuguuca

SEQ ID NO: 2402376 - RNA, 16 nt, Human
augaaacaccuucucu

SEQ ID NO: 2402377 - RNA, 12 nt, Human
augaaacaccuu

SEQ ID NO: 2402378 - RNA, 14 nt, Human
augaaaauuguaug

SEQ ID NO: 2402379 - RNA, 16 nt, Human
augaaaaugucuugug

SEQ ID NO: 2402380 - RNA, 22 nt, Human
augaaaauacaacuuaaauaau

SEQ ID NO: 2402381 - RNA, 13 nt, Human
augaaaauacaac

SEQ ID NO: 2402382 - RNA, 17 nt, Human
augaaaauacaacuuaa

SEQ ID NO: 2402383 - RNA, 12 nt, Human
augaaaacucau

SEQ ID NO: 2402384 - RNA, 19 nt, Human
augaaaacguuuuauugug

SEQ ID NO: 2402385 - RNA, 12 nt, Human
augaaaacuuau

SEQ ID NO: 2402386 - RNA, 21 nt, Human
augaaaaaaggacaauuucaa

SEQ ID NO: 2402387 - RNA, 18 nt, Human
augaaaacguuuuauugu

SEQ ID NO: 2402388 - RNA, 20 nt, Human
augaaaacguuuuauugugu

SEQ ID NO: 2402389 - RNA, 21 nt, Human
augaagcuuuuaugugaaaca

SEQ ID NO: 2402390 - RNA, 20 nt, Human
augaagcuuuuaugugaaac

SEQ ID NO: 2402391 - RNA, 19 nt, Human
augaagcuuuuaugugaaa

SEQ ID NO: 2402392 - RNA, 18 nt, Human
augaagcuuuuaugugaa

SEQ ID NO: 2402393 - RNA, 18 nt, Human
augaccuaguuuuccaug

SEQ ID NO: 2402394 - RNA, 23 nt, Human
augacccugcgaaggggcccugg

SEQ ID NO: 2402395 - RNA, 18 nt, Human
augaccucuuccuuuagg

SEQ ID NO: 2402396 - RNA, 16 nt, Human
augaccucaugcaucu

SEQ ID NO: 2402397 - RNA, 12 nt, Human
augacccagugg

SEQ ID NO: 2402398 - RNA, 23 nt, Human
augaagcuuuauacguguagcua

SEQ ID NO: 2402399 - RNA, 19 nt, Human
augaagcuuguguauccau

SEQ ID NO: 2402400 - RNA, 22 nt, Human
augacccaggcugggcaaggag

SEQ ID NO: 2402401 - RNA, 11 nt, Human
augaccccucc

SEQ ID NO: 2402402 - RNA, 16 nt, Human
augacuccagaauuuc

SEQ ID NO: 2402403 - RNA, 12 nt, Human
augacuccagaa

SEQ ID NO: 2402404 - RNA, 16 nt, Human
augacucggggguggg

SEQ ID NO: 2402405 - RNA, 17 nt, Human
augacuccagaauuucc

SEQ ID NO: 2402406 - RNA, 22 nt, Human
augacuagaggcagggagggga

SEQ ID NO: 2402407 - RNA, 14 nt, Human
augaccuggauaac

SEQ ID NO: 2402408 - RNA, 19 nt, Human
augaccugugaccagcacu

SEQ ID NO: 2402409 - RNA, 21 nt, Human
augaccugugaccagcacugu

SEQ ID NO: 2402410 - RNA, 15 nt, Human
augacuagaggcagg

SEQ ID NO: 2402411 - RNA, 19 nt, Human
augacuagaggcagggagg

SEQ ID NO: 2402412 - RNA, 14 nt, Human
augacucagaauau

SEQ ID NO: 2402413 - RNA, 17 nt, Human
augacucacaugaugca

SEQ ID NO: 2402414 - RNA, 19 nt, Human
augacucaggacauccccc

SEQ ID NO: 2402415 - RNA, 12 nt, Human
aucaccugcccu

SEQ ID NO: 2402416 - RNA, 13 nt, Human
aucaccugcccug

SEQ ID NO: 2402417 - RNA, 12 nt, Human
aucaccuccccu

SEQ ID NO: 2402418 - RNA, 12 nt, Human
aucaccucaggc

SEQ ID NO: 2402419 - RNA, 15 nt, Human
aucaccucaggccag

SEQ ID NO: 2402420 - RNA, 15 nt, Human
aucaccuccccuccu

SEQ ID NO: 2402421 - RNA, 12 nt, Human
aucaccugaggu

SEQ ID NO: 2402422 - RNA, 14 nt, Human
aucagccaauuaug

SEQ ID NO: 2402423 - RNA, 15 nt, Human
aucagccaauuaugu

SEQ ID NO: 2402424 - RNA, 13 nt, Human
aucaccuccccuc

SEQ ID NO: 2402425 - RNA, 14 nt, Human
aucaccucaggcca

SEQ ID NO: 2402426 - RNA, 19 nt, Human
aucagccaauuauguuaaa

SEQ ID NO: 2402427 - RNA, 18 nt, Human
aucagccaauuauguuaa

SEQ ID NO: 2402428 - RNA, 16 nt, Human
aucagccaauuauguu

SEQ ID NO: 2402429 - RNA, 15 nt, Human
aucagccacauucua

SEQ ID NO: 2402430 - RNA, 20 nt, Human
aucagccuaggggucaggga

SEQ ID NO: 2402431 - RNA, 11 nt, Human
aucagccucuu

SEQ ID NO: 2402432 - RNA, 13 nt, Human
aucagccucuuaa

SEQ ID NO: 2402433 - RNA, 20 nt, Human
aucagccugagucuccugug

SEQ ID NO: 2402434 - RNA, 19 nt, Human
aucagccugagucuccugu

SEQ ID NO: 2402435 - RNA, 18 nt, Human
aucagccugagucuccug

SEQ ID NO: 2402436 - RNA, 17 nt, Human
aucagccugagucuccu

SEQ ID NO: 2402437 - RNA, 12 nt, Human
aucagccugagu

SEQ ID NO: 2402438 - RNA, 15 nt, Human
aucagccucuuaaag

SEQ ID NO: 2402439 - RNA, 11 nt, Human
aucagccuggg

SEQ ID NO: 2402440 - RNA, 20 nt, Human
aucagccugggcaaugugau

SEQ ID NO: 2402441 - RNA, 21 nt, Human
aucagccugggcaaugugaua

SEQ ID NO: 2402442 - RNA, 12 nt, Human
aucagcugcuac

SEQ ID NO: 2402443 - RNA, 22 nt, Human
aucagccugagucuccugugcc

SEQ ID NO: 2402444 - RNA, 17 nt, Human
aucagcugcugaaacaa

SEQ ID NO: 2402445 - RNA, 13 nt, Human
aucagcugcuacu

SEQ ID NO: 2402446 - RNA, 23 nt, Human
aucagcugcuacuacuccuguag

SEQ ID NO: 2402447 - RNA, 18 nt, Human
aucaucuauaaagaagaa

SEQ ID NO: 2402448 - RNA, 13 nt, Human
aucaucugccgug

SEQ ID NO: 2402449 - RNA, 16 nt, Human
aucaucugugugaaaa

SEQ ID NO: 2402450 - RNA, 13 nt, Human
aucaucuguguga

SEQ ID NO: 2402451 - RNA, 18 nt, Human
aucaucuguggaacccau

SEQ ID NO: 2402452 - RNA, 19 nt, Human
aucaucugugugaaaaugg

SEQ ID NO: 2402453 - RNA, 18 nt, Human
aucaucugugugaaaaug

SEQ ID NO: 2402454 - RNA, 12 nt, Human
aucauggaguga

SEQ ID NO: 2402455 - RNA, 19 nt, Human
aucauggagguuugaagau

SEQ ID NO: 2402456 - RNA, 20 nt, Human
aucaucuccugccuuccucc

SEQ ID NO: 2402457 - RNA, 23 nt, Human
aucaucuccugccuuccuccugg

SEQ ID NO: 2402458 - RNA, 21 nt, Human
aucaucuauugcuggcaaaga

SEQ ID NO: 2402459 - RNA, 16 nt, Human
aucaugguguaauaag

SEQ ID NO: 2402460 - RNA, 14 nt, Human
aucaugguguaaua

SEQ ID NO: 2402461 - RNA, 15 nt, Human
aucauggcuaucugu

SEQ ID NO: 2402462 - RNA, 21 nt, Human
aucauggauucauuacagcuu

SEQ ID NO: 2402463 - RNA, 20 nt, Human
aucauggauucauuacagcu

SEQ ID NO: 2402464 - RNA, 21 nt, Human
aucaugguguaauaagacaua

SEQ ID NO: 2402465 - RNA, 14 nt, Human
aucauguacauuuc

SEQ ID NO: 2402466 - RNA, 20 nt, Human
aucaugguguaauaagacau

SEQ ID NO: 2402467 - RNA, 19 nt, Human
aucaugguguaauaagaca

SEQ ID NO: 2402468 - RNA, 18 nt, Human
aucaugguguaauaagac

SEQ ID NO: 2402469 - RNA, 17 nt, Human
aucaugguguaauaaga

SEQ ID NO: 2402470 - RNA, 23 nt, Human
aucaugguguaauaagacauaac

SEQ ID NO: 2402471 - RNA, 13 nt, Human
aucauguacauuu

SEQ ID NO: 2402472 - RNA, 18 nt, Human
aucgcaccauucugacuc

SEQ ID NO: 2402473 - RNA, 17 nt, Human
aucgcaccauucugacu

SEQ ID NO: 2402474 - RNA, 20 nt, Human
aucgcaccacuguguauuua

SEQ ID NO: 2402475 - RNA, 13 nt, Human
auccuuucuaaca

SEQ ID NO: 2402476 - RNA, 15 nt, Human
auccuuucuauugaa

SEQ ID NO: 2402477 - RNA, 15 nt, Human
auccuuucuaaacaa

SEQ ID NO: 2402478 - RNA, 14 nt, Human
auccuccucagauc

SEQ ID NO: 2402479 - RNA, 19 nt, Human
auccuuucugccucucaac

SEQ ID NO: 2402480 - RNA, 17 nt, Human
auccuuucugccucuca

SEQ ID NO: 2402481 - RNA, 16 nt, Human
auccuuuuauguuauu

SEQ ID NO: 2402482 - RNA, 13 nt, Human
auccuuuuauguu

SEQ ID NO: 2402483 - RNA, 18 nt, Human
auccuuuuauguuauuua

SEQ ID NO: 2402484 - RNA, 17 nt, Human
auccuuuuauguuauuu

SEQ ID NO: 2402485 - RNA, 15 nt, Human
auccuuuucugcaga

SEQ ID NO: 2402486 - RNA, 13 nt, Human
aucgauggccuug

SEQ ID NO: 2402487 - RNA, 23 nt, Human
aucgaugggggagucugaagcag

SEQ ID NO: 2402488 - RNA, 22 nt, Human
auccuuuuuaaauucaguccua

SEQ ID NO: 2402489 - RNA, 15 nt, Human
aucgaggaaccagag

SEQ ID NO: 2402490 - RNA, 12 nt, Human
aucgauuggcuu

SEQ ID NO: 2402491 - RNA, 11 nt, Human
aucgauuggcu

SEQ ID NO: 2402492 - RNA, 20 nt, Human
aucgauuuuuaaaaauuaaa

SEQ ID NO: 2402493 - RNA, 15 nt, Human
aucgauguuauguaa

SEQ ID NO: 2402494 - RNA, 13 nt, Human
aucgauguuaugu

SEQ ID NO: 2402495 - RNA, 19 nt, Human
auccuuuuauguuauuuau

SEQ ID NO: 2402496 - RNA, 15 nt, Human
auccuuuuucuuuau

SEQ ID NO: 2402497 - RNA, 13 nt, Human
aucgaugcagugc

SEQ ID NO: 2402498 - RNA, 22 nt, Human
auccuccaggugcacaagcucc

SEQ ID NO: 2402499 - RNA, 19 nt, Human
auccuccaggugcacaagc

SEQ ID NO: 2402500 - RNA, 14 nt, Human
auccuccaggugca

SEQ ID NO: 2402501 - RNA, 13 nt, Human
auccuccaggugc

SEQ ID NO: 2402502 - RNA, 23 nt, Human
auccucauacccacccccaccca

SEQ ID NO: 2402503 - RNA, 12 nt, Human
auccucccaggc

SEQ ID NO: 2402504 - RNA, 11 nt, Human
auccuccccuu

SEQ ID NO: 2402505 - RNA, 13 nt, Human
auccuccccuucc

SEQ ID NO: 2402506 - RNA, 15 nt, Human
auccuccccuucccu

SEQ ID NO: 2402507 - RNA, 18 nt, Human
auccuccccuucccugca

SEQ ID NO: 2402508 - RNA, 11 nt, Human
auccuccucag

SEQ ID NO: 2402509 - RNA, 19 nt, Human
auccuccccuucccugcaa

SEQ ID NO: 2402510 - RNA, 15 nt, Human
auccuccguccagcc

SEQ ID NO: 2402511 - RNA, 16 nt, Human
auccuccguccagccg

SEQ ID NO: 2402512 - RNA, 14 nt, Human
auccacccagccca

SEQ ID NO: 2402513 - RNA, 13 nt, Human
auccacccagccc

SEQ ID NO: 2402514 - RNA, 15 nt, Human
auccacccagcccau

SEQ ID NO: 2402515 - RNA, 14 nt, Human
aucccgaaaaucuc

SEQ ID NO: 2402516 - RNA, 14 nt, Human
aucccgagcaccuc

SEQ ID NO: 2402517 - RNA, 17 nt, Human
aucccgagcaccuccac

SEQ ID NO: 2402518 - RNA, 19 nt, Human
aucccgagcaccuccacau

SEQ ID NO: 2402519 - RNA, 20 nt, Human
aucccgauucacccugucca

SEQ ID NO: 2402520 - RNA, 15 nt, Human
aucccgauucacccu

SEQ ID NO: 2402521 - RNA, 16 nt, Human
auccacccaccucagc

SEQ ID NO: 2402522 - RNA, 20 nt, Human
auccacccaccucagccucc

SEQ ID NO: 2402523 - RNA, 18 nt, Human
auccacccaccucagccu

SEQ ID NO: 2402524 - RNA, 22 nt, Human
auccucauacccacccccaccc

SEQ ID NO: 2402525 - RNA, 19 nt, Human
auccucauacccaccccca

SEQ ID NO: 2402526 - RNA, 17 nt, Human
aucccucaccuguagca

SEQ ID NO: 2402527 - RNA, 14 nt, Human
aucccucaccugua

SEQ ID NO: 2402528 - RNA, 18 nt, Human
auccucauacccaccccc

SEQ ID NO: 2402529 - RNA, 15 nt, Human
aucccuacuguaauu

SEQ ID NO: 2402530 - RNA, 14 nt, Human
aucccggcugcccu

SEQ ID NO: 2402531 - RNA, 16 nt, Human
aucccgccaccuaucu

SEQ ID NO: 2402532 - RNA, 22 nt, Human
aucccgccucuucuucuucaga

SEQ ID NO: 2402533 - RNA, 13 nt, Human
aucccucaccugu

SEQ ID NO: 2402534 - RNA, 17 nt, Human
aucccuaugggauucag

SEQ ID NO: 2402535 - RNA, 19 nt, Human
aucccuagucuucaagcag

SEQ ID NO: 2402536 - RNA, 21 nt, Human
aucccuagucuucaagcagau

SEQ ID NO: 2402537 - RNA, 14 nt, Human
aucccuaugcugcc

SEQ ID NO: 2402538 - RNA, 19 nt, Human
aucccuaugcugccuaggc

SEQ ID NO: 2402539 - RNA, 14 nt, Human
aucccuagcuguga

SEQ ID NO: 2402540 - RNA, 22 nt, Human
auguguacaaaaguuucauccu

SEQ ID NO: 2402541 - RNA, 22 nt, Human
auguguaaucaauaaacgauuu

SEQ ID NO: 2402542 - RNA, 16 nt, Human
auguguacgugugugu

SEQ ID NO: 2402543 - RNA, 22 nt, Human
auguguacauggcagaguuugu

SEQ ID NO: 2402544 - RNA, 16 nt, Human
auguguacauggcaga

SEQ ID NO: 2402545 - RNA, 14 nt, Human
auguguacauggca

SEQ ID NO: 2402546 - RNA, 21 nt, Human
auguguacaucccauguaaca

SEQ ID NO: 2402547 - RNA, 19 nt, Human
auguguacaucccauguaa

SEQ ID NO: 2402548 - RNA, 20 nt, Human
auguguauguacguuuguau

SEQ ID NO: 2402549 - RNA, 20 nt, Human
auguguaugggcaaaaaacu

SEQ ID NO: 2402550 - RNA, 18 nt, Human
auguguauuacaaauauu

SEQ ID NO: 2402551 - RNA, 20 nt, Human
auguguauuuccagugcaau

SEQ ID NO: 2402552 - RNA, 17 nt, Human
auguguauuuuauuaca

SEQ ID NO: 2402553 - RNA, 21 nt, Human
augugucacuacucacagucu

SEQ ID NO: 2402554 - RNA, 13 nt, Human
auguguccugguu

SEQ ID NO: 2402555 - RNA, 21 nt, Human
augugucaacuucaacauuua

SEQ ID NO: 2402556 - RNA, 18 nt, Human
auguucugaauaauuucu

SEQ ID NO: 2402557 - RNA, 16 nt, Human
auguucugaauaauuu

SEQ ID NO: 2402558 - RNA, 18 nt, Human
auguucucugaggacacu

SEQ ID NO: 2402559 - RNA, 20 nt, Human
auguuucuuuuguauguaaa

SEQ ID NO: 2402560 - RNA, 19 nt, Human
auguuucuuuuguauguaa

SEQ ID NO: 2402561 - RNA, 18 nt, Human
auguuucuuuuguaugua

SEQ ID NO: 2402562 - RNA, 21 nt, Human
auguuucuuuuguauguaaau

SEQ ID NO: 2402563 - RNA, 18 nt, Human
auguuucuuuguaaugaa

SEQ ID NO: 2402564 - RNA, 18 nt, Human
auguucugacauuaacag

SEQ ID NO: 2402565 - RNA, 19 nt, Human
auguucugacauuaacagu

SEQ ID NO: 2402566 - RNA, 20 nt, Human
auguucugacauuaacaguu

SEQ ID NO: 2402567 - RNA, 20 nt, Human
auguucuuucacccuuuucu

SEQ ID NO: 2402568 - RNA, 22 nt, Human
auguuucuucuagguucuaaaa

SEQ ID NO: 2402569 - RNA, 15 nt, Human
auguucuuaauucuu

SEQ ID NO: 2402570 - RNA, 20 nt, Human
auguucuuaguggauguucu

SEQ ID NO: 2402571 - RNA, 22 nt, Human
auguucugacccugcuucaaau

SEQ ID NO: 2402572 - RNA, 14 nt, Human
auguucugacauua

SEQ ID NO: 2402573 - RNA, 15 nt, Human
auguucugacauuaa

SEQ ID NO: 2402574 - RNA, 16 nt, Human
auguucugacauuaac

SEQ ID NO: 2402575 - RNA, 17 nt, Human
auguucugacauuaaca

SEQ ID NO: 2402576 - RNA, 14 nt, Human
auguucuuaauucu

SEQ ID NO: 2402577 - RNA, 22 nt, Human
auuaaaguguccauugacaugu

SEQ ID NO: 2402578 - RNA, 20 nt, Human
auuaaaguguccauugacau

SEQ ID NO: 2402579 - RNA, 19 nt, Human
auuaaaguguccauugaca

SEQ ID NO: 2402580 - RNA, 17 nt, Human
auuaaaguguccauuga

SEQ ID NO: 2402581 - RNA, 15 nt, Human
auuaaaguguccauu

SEQ ID NO: 2402582 - RNA, 21 nt, Human
auuaaaguucuguaaaauaua

SEQ ID NO: 2402583 - RNA, 19 nt, Human
auuaaaguucuagugaccg

SEQ ID NO: 2402584 - RNA, 12 nt, Human
auuaaaguucua

SEQ ID NO: 2402585 - RNA, 23 nt, Human
auuaaaguguccauugacaugua

SEQ ID NO: 2402586 - RNA, 18 nt, Human
auguuuuaauuccaugaa

SEQ ID NO: 2402587 - RNA, 17 nt, Human
auguuuuaauuccauga

SEQ ID NO: 2402588 - RNA, 16 nt, Human
auguuuuaauuccaug

SEQ ID NO: 2402589 - RNA, 15 nt, Human
auguuuuaauuccau

SEQ ID NO: 2402590 - RNA, 15 nt, Human
auguuuuaacaaaaa

SEQ ID NO: 2402591 - RNA, 16 nt, Human
auguuuuaacaaaaac

SEQ ID NO: 2402592 - RNA, 14 nt, Human
auguuuuaauucca

SEQ ID NO: 2402593 - RNA, 21 nt, Human
auguuuuaaacauagaaaguu

SEQ ID NO: 2402594 - RNA, 18 nt, Human
auguuuguggccucagaa

SEQ ID NO: 2402595 - RNA, 16 nt, Human
auguuugcacuuguga

SEQ ID NO: 2402596 - RNA, 18 nt, Human
auguuuuaagaggcaggg

SEQ ID NO: 2402597 - RNA, 16 nt, Human
auguuuuaagaggcag

SEQ ID NO: 2402598 - RNA, 15 nt, Human
auuaaaugcccagcc

SEQ ID NO: 2402599 - RNA, 14 nt, Human
auuaaaugcccagc

SEQ ID NO: 2402600 - RNA, 14 nt, Human
auuaaauucacaaa

SEQ ID NO: 2402601 - RNA, 16 nt, Human
auuaaauucacaaacu

SEQ ID NO: 2402602 - RNA, 17 nt, Human
auuaaauucacaaacuu

SEQ ID NO: 2402603 - RNA, 18 nt, Human
auuaaauucacaaacuuu

SEQ ID NO: 2402604 - RNA, 13 nt, Human
auuaaauucuugc

SEQ ID NO: 2402605 - RNA, 16 nt, Human
auuaaaugcccagccc

SEQ ID NO: 2402606 - RNA, 13 nt, Human
auuaaauucacaa

SEQ ID NO: 2402607 - RNA, 11 nt, Human
auuaaauuaug

SEQ ID NO: 2402608 - RNA, 16 nt, Human
auguggggccagguca

SEQ ID NO: 2402609 - RNA, 13 nt, Human
auguggggccagg

SEQ ID NO: 2402610 - RNA, 16 nt, Human
augugggggucugugu

SEQ ID NO: 2402611 - RNA, 20 nt, Human
augugggcuaguugggcuuc

SEQ ID NO: 2402612 - RNA, 22 nt, Human
augugguggcacaggcccccuu

SEQ ID NO: 2402613 - RNA, 18 nt, Human
augugguggcacaggccc

SEQ ID NO: 2402614 - RNA, 18 nt, Human
auguggugaggcaggcuu

SEQ ID NO: 2402615 - RNA, 17 nt, Human
augugggggucugugug

SEQ ID NO: 2402616 - RNA, 18 nt, Human
augugggggucugugugu

SEQ ID NO: 2402617 - RNA, 21 nt, Human
augugggguccccaucauccc

SEQ ID NO: 2402618 - RNA, 16 nt, Human
augugggucaaggaau

SEQ ID NO: 2402619 - RNA, 21 nt, Human
auguguaaucaauaaacgauu

SEQ ID NO: 2402620 - RNA, 20 nt, Human
auguguaaucaauaaacgau

SEQ ID NO: 2402621 - RNA, 17 nt, Human
auguguaaucaauaaac

SEQ ID NO: 2402622 - RNA, 16 nt, Human
auguguaaucaauaaa

SEQ ID NO: 2402623 - RNA, 13 nt, Human
augugguuuauag

SEQ ID NO: 2402624 - RNA, 14 nt, Human
auguguaaguauuc

SEQ ID NO: 2402625 - RNA, 13 nt, Human
auguggugccuga

SEQ ID NO: 2402626 - RNA, 15 nt, Human
augugguuacacacu

SEQ ID NO: 2402627 - RNA, 15 nt, Human
auguggugggacagg

SEQ ID NO: 2402628 - RNA, 21 nt, Human
auguggugggacagggaccca

SEQ ID NO: 2402629 - RNA, 19 nt, Human
augugguuuauagagggcc

SEQ ID NO: 2402630 - RNA, 18 nt, Human
augugguuauuucucuga

SEQ ID NO: 2402631 - RNA, 20 nt, Human
augugguugcaaggccgcug

SEQ ID NO: 2402632 - RNA, 15 nt, Human
augugguucuucaaa

SEQ ID NO: 2402633 - RNA, 17 nt, Human
augugguuauuucucug

SEQ ID NO: 2402634 - RNA, 23 nt, Human
augucuugaugcaugcacuguuc

SEQ ID NO: 2402635 - RNA, 13 nt, Human
augucuuggacac

SEQ ID NO: 2402636 - RNA, 20 nt, Human
augucuucuguauucacuua

SEQ ID NO: 2402637 - RNA, 19 nt, Human
augucuucugccuguuaua

SEQ ID NO: 2402638 - RNA, 17 nt, Human
augucuucugccuguua

SEQ ID NO: 2402639 - RNA, 15 nt, Human
augucuucugccugu

SEQ ID NO: 2402640 - RNA, 12 nt, Human
augucuucugcc

SEQ ID NO: 2402641 - RNA, 14 nt, Human
augucuucugccug

SEQ ID NO: 2402642 - RNA, 19 nt, Human
augucuuggacacuguaca

SEQ ID NO: 2402643 - RNA, 16 nt, Human
augucuuggacacugu

SEQ ID NO: 2402644 - RNA, 20 nt, Human
augucuuggacacuguacaa

SEQ ID NO: 2402645 - RNA, 19 nt, Human
augucuuggguaggcggga

SEQ ID NO: 2402646 - RNA, 22 nt, Human
augucuuguacauguguagccu

SEQ ID NO: 2402647 - RNA, 17 nt, Human
augucuuguacaugugu

SEQ ID NO: 2402648 - RNA, 14 nt, Human
augucuuguacaug

SEQ ID NO: 2402649 - RNA, 16 nt, Human
auguaauaaacuuuaa

SEQ ID NO: 2402650 - RNA, 15 nt, Human
auguaauaaacuuua

SEQ ID NO: 2402651 - RNA, 14 nt, Human
auguaauaaacuuu

SEQ ID NO: 2402652 - RNA, 18 nt, Human
auguaaguuuaccuaugu

SEQ ID NO: 2402653 - RNA, 16 nt, Human
auguaaucaauguuuc

SEQ ID NO: 2402654 - RNA, 15 nt, Human
auguaaucaauguuu

SEQ ID NO: 2402655 - RNA, 16 nt, Human
auguaauaaugugaau

SEQ ID NO: 2402656 - RNA, 17 nt, Human
auguaauaacugugaag

SEQ ID NO: 2402657 - RNA, 22 nt, Human
auguaauaagguugaacacuuu

SEQ ID NO: 2402658 - RNA, 19 nt, Human
auguaauaaaaaguauaug

SEQ ID NO: 2402659 - RNA, 14 nt, Human
auguaauaauguga

SEQ ID NO: 2402660 - RNA, 21 nt, Human
auguaagggaaacugccagca

SEQ ID NO: 2402661 - RNA, 22 nt, Human
auguaagggaaacugccagcaa

SEQ ID NO: 2402662 - RNA, 20 nt, Human
auguaagggaaacugccagc

SEQ ID NO: 2402663 - RNA, 17 nt, Human
auguaagcucuacugag

SEQ ID NO: 2402664 - RNA, 14 nt, Human
auggugaaaaugua

SEQ ID NO: 2402665 - RNA, 12 nt, Human
auggugaaaaug

SEQ ID NO: 2402666 - RNA, 17 nt, Human
auggucuucagccucuu

SEQ ID NO: 2402667 - RNA, 15 nt, Human
auggucuucagccuc

SEQ ID NO: 2402668 - RNA, 18 nt, Human
auggucucagaaaccaaa

SEQ ID NO: 2402669 - RNA, 14 nt, Human
auggucucagaaac

SEQ ID NO: 2402670 - RNA, 14 nt, Human
auguaacuuuugua

SEQ ID NO: 2402671 - RNA, 18 nt, Human
auggugagaugcagcugg

SEQ ID NO: 2402672 - RNA, 16 nt, Human
auguaacuuuuguaag

SEQ ID NO: 2402673 - RNA, 21 nt, Human
auggugagagaagccugugcc

SEQ ID NO: 2402674 - RNA, 17 nt, Human
auggugaaauuuauuag

SEQ ID NO: 2402675 - RNA, 23 nt, Human
auggugacuuuugaaaagaggug

SEQ ID NO: 2402676 - RNA, 17 nt, Human
auggugaaaauguacug

SEQ ID NO: 2402677 - RNA, 16 nt, Human
auggugaaaauguacu

SEQ ID NO: 2402678 - RNA, 24 nt, Human
auggugaaaccccgucucuacuaa

SEQ ID NO: 2402679 - RNA, 17 nt, Human
auguaacuuuuguaaga

SEQ ID NO: 2402680 - RNA, 18 nt, Human
auguaacuuuuguaagac

SEQ ID NO: 2402681 - RNA, 20 nt, Human
auguaagagcaccuuccuca

SEQ ID NO: 2402682 - RNA, 23 nt, Human
augucagcaaaaagcaaaaucau

SEQ ID NO: 2402683 - RNA, 22 nt, Human
augucagcaaaaagcaaaauca

SEQ ID NO: 2402684 - RNA, 16 nt, Human
augucagcaaaaagca

SEQ ID NO: 2402685 - RNA, 15 nt, Human
augucagcaaaaagc

SEQ ID NO: 2402686 - RNA, 13 nt, Human
augucagcaaaaa

SEQ ID NO: 2402687 - RNA, 18 nt, Human
augucagauacaauguau

SEQ ID NO: 2402688 - RNA, 16 nt, Human
augucagauacaaugu

SEQ ID NO: 2402689 - RNA, 14 nt, Human
augucagauacaau

SEQ ID NO: 2402690 - RNA, 23 nt, Human
augucagacauccauguuuguaa

SEQ ID NO: 2402691 - RNA, 16 nt, Human
augucagacuggcugg

SEQ ID NO: 2402692 - RNA, 16 nt, Human
augucacugugguccu

SEQ ID NO: 2402693 - RNA, 14 nt, Human
augucacugugguc

SEQ ID NO: 2402694 - RNA, 17 nt, Human
augucacaggcaggucc

SEQ ID NO: 2402695 - RNA, 16 nt, Human
augucacaggcagguc

SEQ ID NO: 2402696 - RNA, 14 nt, Human
augucacaggcagg

SEQ ID NO: 2402697 - RNA, 15 nt, Human
augucacaggcaggu

SEQ ID NO: 2402698 - RNA, 15 nt, Human
auguacaugagaagg

SEQ ID NO: 2402699 - RNA, 14 nt, Human
augucaacuucugg

SEQ ID NO: 2402700 - RNA, 17 nt, Human
augucaacugaccuaaa

SEQ ID NO: 2402701 - RNA, 20 nt, Human
augucaaagagaaaacuuau

SEQ ID NO: 2402702 - RNA, 18 nt, Human
augucaacuucuggcucc

SEQ ID NO: 2402703 - RNA, 17 nt, Human
augucaacuucuggcuc

SEQ ID NO: 2402704 - RNA, 19 nt, Human
augucaacuucuggcuccu

SEQ ID NO: 2402705 - RNA, 16 nt, Human
augucaaucagccuag

SEQ ID NO: 2402706 - RNA, 16 nt, Human
augucaaguaccaaaa

SEQ ID NO: 2402707 - RNA, 23 nt, Human
auguaaucugauggcuucuccag

SEQ ID NO: 2402708 - RNA, 19 nt, Human
auguaaucuugaauuguaa

SEQ ID NO: 2402709 - RNA, 23 nt, Human
auguacagagaacuaacacuauu

SEQ ID NO: 2402710 - RNA, 14 nt, Human
auguacaagaugaa

SEQ ID NO: 2402711 - RNA, 21 nt, Human
auguacagagaacuaacacua

SEQ ID NO: 2402712 - RNA, 20 nt, Human
auguacaguguucuguuuaa

SEQ ID NO: 2402713 - RNA, 17 nt, Human
auguacaguguucuguu

SEQ ID NO: 2402714 - RNA, 14 nt, Human
auguacaguguucu

SEQ ID NO: 2402715 - RNA, 11 nt, Human
auguacagugu

SEQ ID NO: 2402716 - RNA, 17 nt, Human
auguacagucugucaug

SEQ ID NO: 2402717 - RNA, 16 nt, Human
auguacagucugucau

SEQ ID NO: 2402718 - RNA, 15 nt, Human
auguacagucuguca

SEQ ID NO: 2402719 - RNA, 14 nt, Human
auguacagucuguc

SEQ ID NO: 2402720 - RNA, 13 nt, Human
auguacagucugu

SEQ ID NO: 2402721 - RNA, 21 nt, Human
augccuuuguacuuuagggaa

SEQ ID NO: 2402722 - RNA, 20 nt, Human
augccuuugagacaguuucu

SEQ ID NO: 2402723 - RNA, 19 nt, Human
augccuuugagacaguuuc

SEQ ID NO: 2402724 - RNA, 16 nt, Human
augccuuugagacagu

SEQ ID NO: 2402725 - RNA, 15 nt, Human
augccuuugagacag

SEQ ID NO: 2402726 - RNA, 22 nt, Human
augccuuugagacaguuucuua

SEQ ID NO: 2402727 - RNA, 21 nt, Human
augccuuugagacaguuucuu

SEQ ID NO: 2402728 - RNA, 23 nt, Human
augccuuugagacaguuucuuag

SEQ ID NO: 2402729 - RNA, 14 nt, Human
augccuuuuauuuc

SEQ ID NO: 2402730 - RNA, 17 nt, Human
augcaugcacuguuccc

SEQ ID NO: 2402731 - RNA, 20 nt, Human
augcaugcagccacugugcu

SEQ ID NO: 2402732 - RNA, 23 nt, Human
augcauggaaaccugaaaaaaag

SEQ ID NO: 2402733 - RNA, 20 nt, Human
augcauggaaaccugaaaaa

SEQ ID NO: 2402734 - RNA, 12 nt, Human
augcauggaaau

SEQ ID NO: 2402735 - RNA, 12 nt, Human
augcauggaaac

SEQ ID NO: 2402736 - RNA, 23 nt, Human
augcaugaaguaauaugcacaca

SEQ ID NO: 2402737 - RNA, 20 nt, Human
augcaugaaguaauaugcac

SEQ ID NO: 2402738 - RNA, 18 nt, Human
augcacauauggacucug

SEQ ID NO: 2402739 - RNA, 10 nt, Human
augcauuuga

SEQ ID NO: 2402740 - RNA, 12 nt, Human
augcauuugaaa

SEQ ID NO: 2402741 - RNA, 18 nt, Human
augcauuugaaaauuuug

SEQ ID NO: 2402742 - RNA, 15 nt, Human
augcauuguugaggu

SEQ ID NO: 2402743 - RNA, 16 nt, Human
augcauuguugaggug

SEQ ID NO: 2402744 - RNA, 22 nt, Human
augcauuguuguucugcucaau

SEQ ID NO: 2402745 - RNA, 13 nt, Human
augcauuugaggu

SEQ ID NO: 2402746 - RNA, 17 nt, Human
augcauuugaggucaag

SEQ ID NO: 2402747 - RNA, 17 nt, Human
augccugggcagaagga

SEQ ID NO: 2402748 - RNA, 16 nt, Human
augccuggucuuuccu

SEQ ID NO: 2402749 - RNA, 13 nt, Human
augccuggcuucg

SEQ ID NO: 2402750 - RNA, 18 nt, Human
augccuggucuuuccucu

SEQ ID NO: 2402751 - RNA, 23 nt, Human
augccuggauggggcugcaccgg

SEQ ID NO: 2402752 - RNA, 21 nt, Human
augccuggauggggcugcacc

SEQ ID NO: 2402753 - RNA, 14 nt, Human
augccuuugagaca

SEQ ID NO: 2402754 - RNA, 13 nt, Human
augccuuugagac

SEQ ID NO: 2402755 - RNA, 12 nt, Human
augccuuugaga

SEQ ID NO: 2402756 - RNA, 22 nt, Human
augccuuucuaguccuauucua

SEQ ID NO: 2402757 - RNA, 21 nt, Human
augccuuucuaguccuauucu

SEQ ID NO: 2402758 - RNA, 13 nt, Human
augccuuucuagu

SEQ ID NO: 2402759 - RNA, 21 nt, Human
augccuuuaaaucugugauga

SEQ ID NO: 2402760 - RNA, 17 nt, Human
augccugguggcagcug

SEQ ID NO: 2402761 - RNA, 16 nt, Human
augccugguggcagcu

SEQ ID NO: 2402762 - RNA, 15 nt, Human
augccugguggcagc

SEQ ID NO: 2402763 - RNA, 14 nt, Human
augcacagcuaaca

SEQ ID NO: 2402764 - RNA, 23 nt, Human
augcacagaguuguuacauuuuu

SEQ ID NO: 2402765 - RNA, 23 nt, Human
augcacacauuuuuuaaaugcac

SEQ ID NO: 2402766 - RNA, 19 nt, Human
augcaauuuauuaaaauga

SEQ ID NO: 2402767 - RNA, 21 nt, Human
augcacagcuaacauggaagu

SEQ ID NO: 2402768 - RNA, 19 nt, Human
augcacacauuuuuuaaau

SEQ ID NO: 2402769 - RNA, 22 nt, Human
augcacacauuuuuuaaaugca

SEQ ID NO: 2402770 - RNA, 17 nt, Human
augcacacauuuuuuaa

SEQ ID NO: 2402771 - RNA, 19 nt, Human
augcaaugacaucuucaaa

SEQ ID NO: 2402772 - RNA, 14 nt, Human
augcaaugugaagc

SEQ ID NO: 2402773 - RNA, 13 nt, Human
augcaaugugcua

SEQ ID NO: 2402774 - RNA, 16 nt, Human
augcaaugugcuacug

SEQ ID NO: 2402775 - RNA, 17 nt, Human
augcaaugugcuacuga

SEQ ID NO: 2402776 - RNA, 18 nt, Human
augcaaugugcuacugau

SEQ ID NO: 2402777 - RNA, 23 nt, Human
augauguauguugaagccuuugu

SEQ ID NO: 2402778 - RNA, 19 nt, Human
augauguccagaagaauau

SEQ ID NO: 2402779 - RNA, 18 nt, Human
augauguccagaagaaua

SEQ ID NO: 2402780 - RNA, 15 nt, Human
augauguccagaaga

SEQ ID NO: 2402781 - RNA, 14 nt, Human
augauguccagaag

SEQ ID NO: 2402782 - RNA, 16 nt, Human
augauguauuuuugua

SEQ ID NO: 2402783 - RNA, 15 nt, Human
augauguauuuuugu

SEQ ID NO: 2402784 - RNA, 16 nt, Human
augaugugccugggug

SEQ ID NO: 2402785 - RNA, 14 nt, Human
augaugugccuggg

SEQ ID NO: 2402786 - RNA, 23 nt, Human
augauguccagaagaauauucag

SEQ ID NO: 2402787 - RNA, 14 nt, Human
augcaauauguauu

SEQ ID NO: 2402788 - RNA, 19 nt, Human
augcaauauaucuaaauug

SEQ ID NO: 2402789 - RNA, 23 nt, Human
augauguggugccugaggucugu

SEQ ID NO: 2402790 - RNA, 15 nt, Human
augcaauauaucuaa

SEQ ID NO: 2402791 - RNA, 21 nt, Human
augcaauauaucuaaauugaa

SEQ ID NO: 2402792 - RNA, 20 nt, Human
augcaauauaucuaaauuga

SEQ ID NO: 2402793 - RNA, 22 nt, Human
augcaauauaucuaaauugaau

SEQ ID NO: 2402794 - RNA, 13 nt, Human
augcaauauguau

SEQ ID NO: 2402795 - RNA, 16 nt, Human
augaugugugaaaacu

SEQ ID NO: 2402796 - RNA, 20 nt, Human
augauguggugccugagguc

SEQ ID NO: 2402797 - RNA, 23 nt, Human
augauguggaguggggcaguaga

SEQ ID NO: 2402798 - RNA, 19 nt, Human
augauguguacccaaacgu

SEQ ID NO: 2402799 - RNA, 19 nt, Human
augauguggaguggggcag

SEQ ID NO: 2402800 - RNA, 19 nt, Human
augaugugggucaaggaau

SEQ ID NO: 2402801 - RNA, 15 nt, Human
augcuucuuccuuac

SEQ ID NO: 2402802 - RNA, 15 nt, Human
augcuucuucucagg

SEQ ID NO: 2402803 - RNA, 12 nt, Human
augcuucuugga

SEQ ID NO: 2402804 - RNA, 11 nt, Human
augcuugccua

SEQ ID NO: 2402805 - RNA, 16 nt, Human
augcuugccuagggcc

SEQ ID NO: 2402806 - RNA, 20 nt, Human
augcuugccuagggccuggu

SEQ ID NO: 2402807 - RNA, 21 nt, Human
augcuugccuagggccugguc

SEQ ID NO: 2402808 - RNA, 23 nt, Human
augcuugccuagggccuggucca

SEQ ID NO: 2402809 - RNA, 15 nt, Human
augcuugaaaaaugu

SEQ ID NO: 2402810 - RNA, 12 nt, Human
augcuugaaaaa

SEQ ID NO: 2402811 - RNA, 20 nt, Human
auggaaaugggcagagcaga

SEQ ID NO: 2402812 - RNA, 19 nt, Human
auggaaaugggcagagcag

SEQ ID NO: 2402813 - RNA, 20 nt, Human
auggaaauucccuucaucug

SEQ ID NO: 2402814 - RNA, 13 nt, Human
auggaaauguuua

SEQ ID NO: 2402815 - RNA, 17 nt, Human
augcuuuuaaaaaucua

SEQ ID NO: 2402816 - RNA, 22 nt, Human
augcuuugugugauugaaucug

SEQ ID NO: 2402817 - RNA, 16 nt, Human
augcuuugugugauug

SEQ ID NO: 2402818 - RNA, 20 nt, Human
augcuuuucugucucugccu

SEQ ID NO: 2402819 - RNA, 19 nt, Human
augcuuuucugucucugcc

SEQ ID NO: 2402820 - RNA, 22 nt, Human
augcuuuuauauuuuuuuaaaa

SEQ ID NO: 2402821 - RNA, 15 nt, Human
augcuuugugaacaa

SEQ ID NO: 2402822 - RNA, 22 nt, Human
augcuuuuuauuauuauuauuu

SEQ ID NO: 2402823 - RNA, 16 nt, Human
augcuuuuuauuucug

SEQ ID NO: 2402824 - RNA, 19 nt, Human
augcuuuuuauuucugcau

SEQ ID NO: 2402825 - RNA, 23 nt, Human
augcuuuuuauuucugcauaugu

SEQ ID NO: 2402826 - RNA, 14 nt, Human
auggaaaaaaugau

SEQ ID NO: 2402827 - RNA, 22 nt, Human
augcuuuuugaauguuauuugu

SEQ ID NO: 2402828 - RNA, 16 nt, Human
augcuuuuugaauguu

SEQ ID NO: 2402829 - RNA, 23 nt, Human
auggagcccaggcgggagcggug

SEQ ID NO: 2402830 - RNA, 14 nt, Human
auggagcccaggcg

SEQ ID NO: 2402831 - RNA, 13 nt, Human
auggagcccaggc

SEQ ID NO: 2402832 - RNA, 12 nt, Human
auggagcccagg

SEQ ID NO: 2402833 - RNA, 21 nt, Human
auggagccagcucugcauuau

SEQ ID NO: 2402834 - RNA, 23 nt, Human
auggagccagcucccucuauuua

SEQ ID NO: 2402835 - RNA, 22 nt, Human
auggagcucagagagggcaggc

SEQ ID NO: 2402836 - RNA, 14 nt, Human
auggagcucagaga

SEQ ID NO: 2402837 - RNA, 16 nt, Human
auggagccccagcccc

SEQ ID NO: 2402838 - RNA, 16 nt, Human
auggauccuggaggau

SEQ ID NO: 2402839 - RNA, 15 nt, Human
auggagccccagccc

SEQ ID NO: 2402840 - RNA, 12 nt, Human
auggagccccag

SEQ ID NO: 2402841 - RNA, 17 nt, Human
auggagcgcaccugccc

SEQ ID NO: 2402842 - RNA, 23 nt, Human
auggagcgcaccugcccccuggu

SEQ ID NO: 2402843 - RNA, 13 nt, Human
auggaugccaaua

SEQ ID NO: 2402844 - RNA, 22 nt, Human
auggaugccaauauuaaaucug

SEQ ID NO: 2402845 - RNA, 21 nt, Human
auggaugauucagaaauugga

SEQ ID NO: 2402846 - RNA, 23 nt, Human
auggaugccaauauuaaaucugc

SEQ ID NO: 2402847 - RNA, 18 nt, Human
auggaugauucagaaauu

SEQ ID NO: 2402848 - RNA, 13 nt, Human
auggaugauucag

SEQ ID NO: 2402849 - RNA, 13 nt, Human
auggagcuggccg

SEQ ID NO: 2402850 - RNA, 18 nt, Human
auggauucauuacagcuu

SEQ ID NO: 2402851 - RNA, 22 nt, Human
auggauguuuuagccauuguug

SEQ ID NO: 2402852 - RNA, 20 nt, Human
auggaugugggguccccauc

SEQ ID NO: 2402853 - RNA, 17 nt, Human
auggauguggggucccc

SEQ ID NO: 2402854 - RNA, 14 nt, Human
auggauggcuucua

SEQ ID NO: 2402855 - RNA, 12 nt, Human
auggaugugcuu

SEQ ID NO: 2402856 - RNA, 19 nt, Human
auggaugggggaacucaga

SEQ ID NO: 2402857 - RNA, 18 nt, Human
auggcucuaaaaaguuuu

SEQ ID NO: 2402858 - RNA, 21 nt, Human
auggcugaaggaaaccagugc

SEQ ID NO: 2402859 - RNA, 12 nt, Human
auggcucuucau

SEQ ID NO: 2402860 - RNA, 12 nt, Human
auggcuccucuc

SEQ ID NO: 2402861 - RNA, 13 nt, Human
auggcuccucuca

SEQ ID NO: 2402862 - RNA, 23 nt, Human
auggcugccaaugggagcucaug

SEQ ID NO: 2402863 - RNA, 17 nt, Human
augggaagacgaggccc

SEQ ID NO: 2402864 - RNA, 23 nt, Human
auggcugcugaagcugccugcuu

SEQ ID NO: 2402865 - RNA, 22 nt, Human
auggcugcugaagcugccugcu

SEQ ID NO: 2402866 - RNA, 19 nt, Human
auggcugcugaagcugccu

SEQ ID NO: 2402867 - RNA, 14 nt, Human
augggaagacauga

SEQ ID NO: 2402868 - RNA, 14 nt, Human
auggcugcugaagc

SEQ ID NO: 2402869 - RNA, 12 nt, Human
auggcugcugaa

SEQ ID NO: 2402870 - RNA, 22 nt, Human
auggcugaaggaaaccagugca

SEQ ID NO: 2402871 - RNA, 18 nt, Human
auggcugacuuugcucuu

SEQ ID NO: 2402872 - RNA, 15 nt, Human
augggaaugaauguc

SEQ ID NO: 2402873 - RNA, 21 nt, Human
augggaaugaaugucagugug

SEQ ID NO: 2402874 - RNA, 21 nt, Human
augggaaugaagcuuguguau

SEQ ID NO: 2402875 - RNA, 16 nt, Human
augggaaugaagcuug

SEQ ID NO: 2402876 - RNA, 15 nt, Human
augggaaugaagcuu

SEQ ID NO: 2402877 - RNA, 14 nt, Human
augggaaugaagcu

SEQ ID NO: 2402878 - RNA, 18 nt, Human
augggaaucaagauuuaa

SEQ ID NO: 2402879 - RNA, 13 nt, Human
augggaaugaagc

SEQ ID NO: 2402880 - RNA, 20 nt, Human
augggaagacgaggcccucg

SEQ ID NO: 2402881 - RNA, 19 nt, Human
augggaagacgaggcccuc

SEQ ID NO: 2402882 - RNA, 14 nt, Human
augggaaggaggga

SEQ ID NO: 2402883 - RNA, 17 nt, Human
augggaaggagggaggu

SEQ ID NO: 2402884 - RNA, 19 nt, Human
augggaaggagggagguau

SEQ ID NO: 2402885 - RNA, 22 nt, Human
agccuccugaccugaggcuccu

SEQ ID NO: 2402886 - RNA, 19 nt, Human
agccuccugaccugaggcu

SEQ ID NO: 2402887 - RNA, 20 nt, Human
agccgggucugccucuucug

SEQ ID NO: 2402888 - RNA, 21 nt, Human
agccgggucugccucuucugg

SEQ ID NO: 2402889 - RNA, 22 nt, Human
agccgggucugccucuucuggg

SEQ ID NO: 2402890 - RNA, 16 nt, Human
agccgucagccaaaug

SEQ ID NO: 2402891 - RNA, 19 nt, Human
agccucccaaagugcuggg

SEQ ID NO: 2402892 - RNA, 18 nt, Human
agccucccaaagugcugg

SEQ ID NO: 2402893 - RNA, 14 nt, Human
agccggccucucug

SEQ ID NO: 2402894 - RNA, 15 nt, Human
agccggcacaggguc

SEQ ID NO: 2402895 - RNA, 14 nt, Human
agccggcacagggu

SEQ ID NO: 2402896 - RNA, 23 nt, Human
agccggacuuucggaguuggggg

SEQ ID NO: 2402897 - RNA, 22 nt, Human
agccgcugugagccccuggucc

SEQ ID NO: 2402898 - RNA, 16 nt, Human
agccgggucugccucu

SEQ ID NO: 2402899 - RNA, 16 nt, Human
agccggcauggcuggg

SEQ ID NO: 2402900 - RNA, 21 nt, Human
agccggagccuccagcugccc

SEQ ID NO: 2402901 - RNA, 16 nt, Human
agccggcacagggucu

SEQ ID NO: 2402902 - RNA, 20 nt, Human
agccggggaguuucuuuccu

SEQ ID NO: 2402903 - RNA, 21 nt, Human
agccggggaguuucuuuccug

SEQ ID NO: 2402904 - RNA, 21 nt, Human
agccgagaucacgccacugca

SEQ ID NO: 2402905 - RNA, 19 nt, Human
agccgagauugcaccacug

SEQ ID NO: 2402906 - RNA, 16 nt, Human
agccgagccgggccug

SEQ ID NO: 2402907 - RNA, 20 nt, Human
agccgagauugcaccacugc

SEQ ID NO: 2402908 - RNA, 14 nt, Human
agccgcuggggcca

SEQ ID NO: 2402909 - RNA, 21 nt, Human
agccgagccgggccuggggcu

SEQ ID NO: 2402910 - RNA, 18 nt, Human
agccgagccgggccuggg

SEQ ID NO: 2402911 - RNA, 17 nt, Human
agccgagccgggccugg

SEQ ID NO: 2402912 - RNA, 18 nt, Human
agccgauucaccugagca

SEQ ID NO: 2402913 - RNA, 14 nt, Human
agccgcagccuccc

SEQ ID NO: 2402914 - RNA, 22 nt, Human
agccgcuggggccaguuggucc

SEQ ID NO: 2402915 - RNA, 18 nt, Human
agccgcagccucccucug

SEQ ID NO: 2402916 - RNA, 16 nt, Human
agccgcaucuucucca

SEQ ID NO: 2402917 - RNA, 19 nt, Human
agccgcugugagccccugg

SEQ ID NO: 2402918 - RNA, 16 nt, Human
agccgcugugagcccc

SEQ ID NO: 2402919 - RNA, 23 nt, Human
agccgagcucguguauccugggg

SEQ ID NO: 2402920 - RNA, 17 nt, Human
agccucccgaguagcug

SEQ ID NO: 2402921 - RNA, 22 nt, Human
agccucccgaauagcugggacu

SEQ ID NO: 2402922 - RNA, 20 nt, Human
agccucccgaauagcuggga

SEQ ID NO: 2402923 - RNA, 19 nt, Human
agccucccgaauagcuggg

SEQ ID NO: 2402924 - RNA, 16 nt, Human
agccuccccugccagg

SEQ ID NO: 2402925 - RNA, 17 nt, Human
agccuccccugccaggg

SEQ ID NO: 2402926 - RNA, 18 nt, Human
agccuccccugccagggc

SEQ ID NO: 2402927 - RNA, 19 nt, Human
agccuccccugccagggca

SEQ ID NO: 2402928 - RNA, 18 nt, Human
agccucccgaauagcugg

SEQ ID NO: 2402929 - RNA, 20 nt, Human
agccucccaaagugcuggga

SEQ ID NO: 2402930 - RNA, 14 nt, Human
agccuccccugcca

SEQ ID NO: 2402931 - RNA, 15 nt, Human
agccuccccugccag

SEQ ID NO: 2402932 - RNA, 17 nt, Human
agccucccaaagugcug

SEQ ID NO: 2402933 - RNA, 23 nt, Human
agccucccuauuuuuuuucuguu

SEQ ID NO: 2402934 - RNA, 20 nt, Human
agccuccccugccagggcag

SEQ ID NO: 2402935 - RNA, 22 nt, Human
agccuccccugccagggcaggg

SEQ ID NO: 2402936 - RNA, 22 nt, Human
agccucccgaguagcugggacu

SEQ ID NO: 2402937 - RNA, 13 nt, Human
agccucccugaag

SEQ ID NO: 2402938 - RNA, 12 nt, Human
agccucccugaa

SEQ ID NO: 2402939 - RNA, 22 nt, Human
agccucccucugaccugcaggc

SEQ ID NO: 2402940 - RNA, 11 nt, Human
agccucccuga

SEQ ID NO: 2402941 - RNA, 13 nt, Human
agccucccucuga

SEQ ID NO: 2402942 - RNA, 14 nt, Human
agccucccucugac

SEQ ID NO: 2402943 - RNA, 15 nt, Human
agccucccucugacc

SEQ ID NO: 2402944 - RNA, 21 nt, Human
agccucccucugaccugcagg

SEQ ID NO: 2402945 - RNA, 17 nt, Human
agccucccugaagacca

SEQ ID NO: 2402946 - RNA, 14 nt, Human
agccucccugaagc

SEQ ID NO: 2402947 - RNA, 15 nt, Human
agccucccugaagcc

SEQ ID NO: 2402948 - RNA, 16 nt, Human
agccuccuccugacca

SEQ ID NO: 2402949 - RNA, 18 nt, Human
agccuccucuggacggca

SEQ ID NO: 2402950 - RNA, 14 nt, Human
agccuccucuggac

SEQ ID NO: 2402951 - RNA, 13 nt, Human
agccuccucugga

SEQ ID NO: 2402952 - RNA, 12 nt, Human
agccuccucugg

SEQ ID NO: 2402953 - RNA, 11 nt, Human
agccuccucug

SEQ ID NO: 2402954 - RNA, 13 nt, Human
agccuccucucuc

SEQ ID NO: 2402955 - RNA, 19 nt, Human
agccuccuccugaccacgg

SEQ ID NO: 2402956 - RNA, 21 nt, Human
agccuccucugucugcccuuc

SEQ ID NO: 2402957 - RNA, 20 nt, Human
agccuccucugucugcccuu

SEQ ID NO: 2402958 - RNA, 19 nt, Human
agccuccucugucugcccu

SEQ ID NO: 2402959 - RNA, 18 nt, Human
agccuccucugucugccc

SEQ ID NO: 2402960 - RNA, 16 nt, Human
agccuccucugucugc

SEQ ID NO: 2402961 - RNA, 15 nt, Human
agccuccucugucug

SEQ ID NO: 2402962 - RNA, 12 nt, Human
agccuccucugu

SEQ ID NO: 2402963 - RNA, 19 nt, Human
agccuccucuggacggcag

SEQ ID NO: 2402964 - RNA, 18 nt, Human
agccuccugaccugaggc

SEQ ID NO: 2402965 - RNA, 17 nt, Human
agccuccugaccugagg

SEQ ID NO: 2402966 - RNA, 16 nt, Human
agccuccugaccugag

SEQ ID NO: 2402967 - RNA, 14 nt, Human
agccuccugaccug

SEQ ID NO: 2402968 - RNA, 11 nt, Human
agccuccugag

SEQ ID NO: 2402969 - RNA, 17 nt, Human
agcccaaguccaaaugu

SEQ ID NO: 2402970 - RNA, 14 nt, Human
agcccaaguccaaa

SEQ ID NO: 2402971 - RNA, 10 nt, Human
agcccaaguc

SEQ ID NO: 2402972 - RNA, 23 nt, Human
agcccaagguuuaaacuucucug

SEQ ID NO: 2402973 - RNA, 21 nt, Human
agcccaagggaucugguccua

SEQ ID NO: 2402974 - RNA, 22 nt, Human
agcccaagguuuaaacuucucu

SEQ ID NO: 2402975 - RNA, 22 nt, Human
agcccaagggaucugguccuac

SEQ ID NO: 2402976 - RNA, 16 nt, Human
agcccaagggaucugg

SEQ ID NO: 2402977 - RNA, 23 nt, Human
agcccaacagacaccaucuuuug

SEQ ID NO: 2402978 - RNA, 16 nt, Human
agcccaaagcuguugg

SEQ ID NO: 2402979 - RNA, 23 nt, Human
agcccaaagugguauagaaaugc

SEQ ID NO: 2402980 - RNA, 20 nt, Human
agcccaaagugguauagaaa

SEQ ID NO: 2402981 - RNA, 14 nt, Human
agccccaccccagg

SEQ ID NO: 2402982 - RNA, 12 nt, Human
agccccagagca

SEQ ID NO: 2402983 - RNA, 12 nt, Human
agccccagcacu

SEQ ID NO: 2402984 - RNA, 15 nt, Human
agccccagcacuaac

SEQ ID NO: 2402985 - RNA, 14 nt, Human
agccccagcccccu

SEQ ID NO: 2402986 - RNA, 18 nt, Human
agccccagcccccuuugg

SEQ ID NO: 2402987 - RNA, 11 nt, Human
agccccagccc

SEQ ID NO: 2402988 - RNA, 16 nt, Human
agccccagagcagggu

SEQ ID NO: 2402989 - RNA, 12 nt, Human
agccccagcccc

SEQ ID NO: 2402990 - RNA, 23 nt, Human
agccccauaauuuuuuuuuuccu

SEQ ID NO: 2402991 - RNA, 17 nt, Human
agccccaucagcuccag

SEQ ID NO: 2402992 - RNA, 23 nt, Human
agccccagggucuucccuaccuc

SEQ ID NO: 2402993 - RNA, 16 nt, Human
agccccagugcccaca

SEQ ID NO: 2402994 - RNA, 18 nt, Human
agccccaggccucugugu

SEQ ID NO: 2402995 - RNA, 16 nt, Human
agccccaggccucugu

SEQ ID NO: 2402996 - RNA, 15 nt, Human
agccccaggccucug

SEQ ID NO: 2402997 - RNA, 12 nt, Human
agccccaggccu

SEQ ID NO: 2402998 - RNA, 12 nt, Human
agccccagcuga

SEQ ID NO: 2402999 - RNA, 13 nt, Human
agccccaggcagg

SEQ ID NO: 2403000 - RNA, 16 nt, Human
agccccaggcaggcug

SEQ ID NO: 2403001 - RNA, 20 nt, Human
agccccaggcaggcugugcg

SEQ ID NO: 2403002 - RNA, 21 nt, Human
agccccaggccucuguguccu

SEQ ID NO: 2403003 - RNA, 18 nt, Human
agccccagggucuucccu

SEQ ID NO: 2403004 - RNA, 20 nt, Human
agccccagggucuucccuac

SEQ ID NO: 2403005 - RNA, 22 nt, Human
agccccagggucuucccuaccu

SEQ ID NO: 2403006 - RNA, 11 nt, Human
agccccauccu

SEQ ID NO: 2403007 - RNA, 20 nt, Human
agccccaucccaaacccuuc

SEQ ID NO: 2403008 - RNA, 14 nt, Human
agcccuagagccug

SEQ ID NO: 2403009 - RNA, 16 nt, Human
agcccuaaggaucucu

SEQ ID NO: 2403010 - RNA, 21 nt, Human
agcccuaaggaucucucagga

SEQ ID NO: 2403011 - RNA, 20 nt, Human
agccgagaucacgccacugc

SEQ ID NO: 2403012 - RNA, 19 nt, Human
agccgagaucacgccacug

SEQ ID NO: 2403013 - RNA, 21 nt, Human
agcccugaggugaaagggagc

SEQ ID NO: 2403014 - RNA, 22 nt, Human
agcccugaggugaaagggagcu

SEQ ID NO: 2403015 - RNA, 15 nt, Human
agcccugagcuuucu

SEQ ID NO: 2403016 - RNA, 17 nt, Human
agcccuagagccugccu

SEQ ID NO: 2403017 - RNA, 16 nt, Human
agcccuagagccugcc

SEQ ID NO: 2403018 - RNA, 15 nt, Human
agcccuagagccugc

SEQ ID NO: 2403019 - RNA, 22 nt, Human
agcccuagagccugccuggagc

SEQ ID NO: 2403020 - RNA, 20 nt, Human
agcccuagagccugccugga

SEQ ID NO: 2403021 - RNA, 16 nt, Human
agcccuaggguggaga

SEQ ID NO: 2403022 - RNA, 15 nt, Human
agcccuauggaugug

SEQ ID NO: 2403023 - RNA, 14 nt, Human
agcccuauggaugu

SEQ ID NO: 2403024 - RNA, 13 nt, Human
agcccuauggaug

SEQ ID NO: 2403025 - RNA, 12 nt, Human
agcccuauggau

SEQ ID NO: 2403026 - RNA, 17 nt, Human
agcccuaggguggagag

SEQ ID NO: 2403027 - RNA, 20 nt, Human
agcccuaggguggagagcca

SEQ ID NO: 2403028 - RNA, 19 nt, Human
agcccucuuccaucauguc

SEQ ID NO: 2403029 - RNA, 17 nt, Human
agcccucuuccaucaug

SEQ ID NO: 2403030 - RNA, 16 nt, Human
agcccuauggaugugg

SEQ ID NO: 2403031 - RNA, 16 nt, Human
agcccucuuccaucau

SEQ ID NO: 2403032 - RNA, 23 nt, Human
agcccucuuccaucaugucccca

SEQ ID NO: 2403033 - RNA, 13 nt, Human
agcccugacccug

SEQ ID NO: 2403034 - RNA, 17 nt, Human
agcccugacuggugcua

SEQ ID NO: 2403035 - RNA, 21 nt, Human
agcccugacccuguggaagca

SEQ ID NO: 2403036 - RNA, 17 nt, Human
agcccugacccugugga

SEQ ID NO: 2403037 - RNA, 15 nt, Human
agcccugacccugug

SEQ ID NO: 2403038 - RNA, 23 nt, Human
agcaguugaaaagacuccaaaga

SEQ ID NO: 2403039 - RNA, 21 nt, Human
agcaguugaaaagacuccaaa

SEQ ID NO: 2403040 - RNA, 22 nt, Human
agcagugagaaaaagcuccugu

SEQ ID NO: 2403041 - RNA, 21 nt, Human
agcagugagaaaaagcuccug

SEQ ID NO: 2403042 - RNA, 16 nt, Human
agcagugagaaaaagc

SEQ ID NO: 2403043 - RNA, 17 nt, Human
agcagugaaaacaagug

SEQ ID NO: 2403044 - RNA, 21 nt, Human
agcagugaaugauucaguguu

SEQ ID NO: 2403045 - RNA, 22 nt, Human
agcagugaaugauucaguguua

SEQ ID NO: 2403046 - RNA, 23 nt, Human
agcagugaguuacagcgagaggc

SEQ ID NO: 2403047 - RNA, 16 nt, Human
agcagugagucucuuc

SEQ ID NO: 2403048 - RNA, 14 nt, Human
agcagugagccgca

SEQ ID NO: 2403049 - RNA, 22 nt, Human
agcagugagccgcaucuucucc

SEQ ID NO: 2403050 - RNA, 20 nt, Human
agcagugaaugauucagugu

SEQ ID NO: 2403051 - RNA, 21 nt, Human
agcagucuacccaccucagcc

SEQ ID NO: 2403052 - RNA, 21 nt, Human
agcagucgugccuguguccau

SEQ ID NO: 2403053 - RNA, 19 nt, Human
agcagucgugccugugucc

SEQ ID NO: 2403054 - RNA, 23 nt, Human
agcagucuacccaccucagccuc

SEQ ID NO: 2403055 - RNA, 10 nt, Human
agcagccacg

SEQ ID NO: 2403056 - RNA, 13 nt, Human
agcagccacgagg

SEQ ID NO: 2403057 - RNA, 13 nt, Human
agcagccagcucu

SEQ ID NO: 2403058 - RNA, 14 nt, Human
agcagccagcucuc

SEQ ID NO: 2403059 - RNA, 15 nt, Human
agcagccagcucuca

SEQ ID NO: 2403060 - RNA, 19 nt, Human
agcagccaucauaggaagg

SEQ ID NO: 2403061 - RNA, 23 nt, Human
agcagccagcucucagccaacga

SEQ ID NO: 2403062 - RNA, 16 nt, Human
agcagccagcucucag

SEQ ID NO: 2403063 - RNA, 17 nt, Human
agcagccagcucucagc

SEQ ID NO: 2403064 - RNA, 18 nt, Human
agcagccagcucucagcc

SEQ ID NO: 2403065 - RNA, 19 nt, Human
agcagccagcucucagcca

SEQ ID NO: 2403066 - RNA, 21 nt, Human
agcagcccgcugaguggacug

SEQ ID NO: 2403067 - RNA, 20 nt, Human
agcagccaucauaggaaggg

SEQ ID NO: 2403068 - RNA, 18 nt, Human
agcagcccuaaggaucuc

SEQ ID NO: 2403069 - RNA, 14 nt, Human
agcagcccuaagga

SEQ ID NO: 2403070 - RNA, 12 nt, Human
agcagcccuccu

SEQ ID NO: 2403071 - RNA, 13 nt, Human
agcagcccuccuc

SEQ ID NO: 2403072 - RNA, 14 nt, Human
agcagcccuccuca

SEQ ID NO: 2403073 - RNA, 13 nt, Human
agcacuggccugc

SEQ ID NO: 2403074 - RNA, 12 nt, Human
agcacuggccug

SEQ ID NO: 2403075 - RNA, 23 nt, Human
agcacuggagugcagggaggaga

SEQ ID NO: 2403076 - RNA, 22 nt, Human
agcacuggagugcagggaggag

SEQ ID NO: 2403077 - RNA, 20 nt, Human
agcacuggagugcagggagg

SEQ ID NO: 2403078 - RNA, 19 nt, Human
agcacuggagugcagggag

SEQ ID NO: 2403079 - RNA, 17 nt, Human
agcacuggagugcaggg

SEQ ID NO: 2403080 - RNA, 16 nt, Human
agcacuggagugcagg

SEQ ID NO: 2403081 - RNA, 23 nt, Human
agcacugcuaggcgagugccagg

SEQ ID NO: 2403082 - RNA, 22 nt, Human
agcacugcuaggcgagugccag

SEQ ID NO: 2403083 - RNA, 21 nt, Human
agcacugcuaggcgagugcca

SEQ ID NO: 2403084 - RNA, 17 nt, Human
agcacugcuugaggaaa

SEQ ID NO: 2403085 - RNA, 20 nt, Human
agcacuggcucucuccagga

SEQ ID NO: 2403086 - RNA, 19 nt, Human
agcacuggcucucuccagg

SEQ ID NO: 2403087 - RNA, 18 nt, Human
agcacuggcucucuccag

SEQ ID NO: 2403088 - RNA, 17 nt, Human
agcacuggcucucucca

SEQ ID NO: 2403089 - RNA, 14 nt, Human
agcacuggcucucu

SEQ ID NO: 2403090 - RNA, 13 nt, Human
agcacuggcucuc

SEQ ID NO: 2403091 - RNA, 17 nt, Human
agcacuggccugcacgg

SEQ ID NO: 2403092 - RNA, 15 nt, Human
agcacuggccugcac

SEQ ID NO: 2403093 - RNA, 21 nt, Human
agcagccacauuccugaugcu

SEQ ID NO: 2403094 - RNA, 19 nt, Human
agcacuaaggugugcucug

SEQ ID NO: 2403095 - RNA, 16 nt, Human
agcacuaaagcagugg

SEQ ID NO: 2403096 - RNA, 17 nt, Human
agcacuaaagcagugga

SEQ ID NO: 2403097 - RNA, 20 nt, Human
agcacuaaagcaguggacac

SEQ ID NO: 2403098 - RNA, 23 nt, Human
agcacuaaagcaguggacaccag

SEQ ID NO: 2403099 - RNA, 12 nt, Human
agcacugcccaa

SEQ ID NO: 2403100 - RNA, 16 nt, Human
agcacuaacguaaaua

SEQ ID NO: 2403101 - RNA, 13 nt, Human
agcacuaaagcag

SEQ ID NO: 2403102 - RNA, 14 nt, Human
agcacuaaagcagu

SEQ ID NO: 2403103 - RNA, 14 nt, Human
agauguagaggaga

SEQ ID NO: 2403104 - RNA, 21 nt, Human
agaugggagaaucacuugaac

SEQ ID NO: 2403105 - RNA, 22 nt, Human
agauguaauuguuugucuuuaa

SEQ ID NO: 2403106 - RNA, 19 nt, Human
agaugggacugggagggcc

SEQ ID NO: 2403107 - RNA, 15 nt, Human
agaugggacugggag

SEQ ID NO: 2403108 - RNA, 23 nt, Human
agcaguugagucgucaucacuuu

SEQ ID NO: 2403109 - RNA, 13 nt, Human
agcaguuguguca

SEQ ID NO: 2403110 - RNA, 19 nt, Human
agccagauuuuccugaaaa

SEQ ID NO: 2403111 - RNA, 15 nt, Human
agccagauuuuccug

SEQ ID NO: 2403112 - RNA, 17 nt, Human
agccagauccucuuggu

SEQ ID NO: 2403113 - RNA, 22 nt, Human
agccagcaaugauguccagaag

SEQ ID NO: 2403114 - RNA, 23 nt, Human
agccagcaaugauguccagaaga

SEQ ID NO: 2403115 - RNA, 13 nt, Human
agccagcacacag

SEQ ID NO: 2403116 - RNA, 20 nt, Human
agccauuccugguacccagc

SEQ ID NO: 2403117 - RNA, 12 nt, Human
agccauuccugg

SEQ ID NO: 2403118 - RNA, 14 nt, Human
agccauucacugcc

SEQ ID NO: 2403119 - RNA, 24 nt, Human
agccagcaaugauguccagaagaa

SEQ ID NO: 2403120 - RNA, 23 nt, Human
agccauuccugguacccagccau

SEQ ID NO: 2403121 - RNA, 22 nt, Human
agccauuccugguacccagcca

SEQ ID NO: 2403122 - RNA, 17 nt, Human
agccauucugacucaua

SEQ ID NO: 2403123 - RNA, 18 nt, Human
agccauuaccauggagac

SEQ ID NO: 2403124 - RNA, 20 nt, Human
agccauuaccauggagacaa

SEQ ID NO: 2403125 - RNA, 18 nt, Human
agccauuguuggcuuucc

SEQ ID NO: 2403126 - RNA, 17 nt, Human
agccauugucuucggaa

SEQ ID NO: 2403127 - RNA, 12 nt, Human
agccauugucuu

SEQ ID NO: 2403128 - RNA, 22 nt, Human
agccauuggcuauuuaaaacuu

SEQ ID NO: 2403129 - RNA, 21 nt, Human
agccauuggcuauuuaaaacu

SEQ ID NO: 2403130 - RNA, 14 nt, Human
agccauuucuuguu

SEQ ID NO: 2403131 - RNA, 16 nt, Human
agcccaaagaaggaaa

SEQ ID NO: 2403132 - RNA, 14 nt, Human
agcccaaagaagga

SEQ ID NO: 2403133 - RNA, 22 nt, Human
agccagauggacuccagccugc

SEQ ID NO: 2403134 - RNA, 16 nt, Human
agccagauccucuugg

SEQ ID NO: 2403135 - RNA, 15 nt, Human
agccagauccucuug

SEQ ID NO: 2403136 - RNA, 14 nt, Human
agccagauccucuu

SEQ ID NO: 2403137 - RNA, 12 nt, Human
agccagauccuc

SEQ ID NO: 2403138 - RNA, 15 nt, Human
agccagaguuccugc

SEQ ID NO: 2403139 - RNA, 20 nt, Human
agccaagggaaaggggugcu

SEQ ID NO: 2403140 - RNA, 18 nt, Human
agccagaggcuggguuca

SEQ ID NO: 2403141 - RNA, 15 nt, Human
agccagaggcugggu

SEQ ID NO: 2403142 - RNA, 13 nt, Human
agccagaggucug

SEQ ID NO: 2403143 - RNA, 20 nt, Human
agccagaggagagaggaccc

SEQ ID NO: 2403144 - RNA, 14 nt, Human
agccagaggcuggg

SEQ ID NO: 2403145 - RNA, 11 nt, Human
agccagaggcu

SEQ ID NO: 2403146 - RNA, 23 nt, Human
agccaagggaaaggggugcuuuu

SEQ ID NO: 2403147 - RNA, 16 nt, Human
agccaagggaaagggg

SEQ ID NO: 2403148 - RNA, 20 nt, Human
agccaaggccaaaggaagca

SEQ ID NO: 2403149 - RNA, 22 nt, Human
agccaaggccaaaggaagcaca

SEQ ID NO: 2403150 - RNA, 23 nt, Human
agccaaggccaaaggaagcacau

SEQ ID NO: 2403151 - RNA, 23 nt, Human
agccaaggcccugaguuggcagu

SEQ ID NO: 2403152 - RNA, 22 nt, Human
agccaaggccgaagcucuggcu

SEQ ID NO: 2403153 - RNA, 20 nt, Human
agccaaggccgaagcucugg

SEQ ID NO: 2403154 - RNA, 14 nt, Human
agccaagggaaagg

SEQ ID NO: 2403155 - RNA, 23 nt, Human
agcaucuuggggggguggccgcu

SEQ ID NO: 2403156 - RNA, 21 nt, Human
agcaucuuggggggguggccg

SEQ ID NO: 2403157 - RNA, 19 nt, Human
agcaucuuggggggguggc

SEQ ID NO: 2403158 - RNA, 15 nt, Human
agcaucuucuggagu

SEQ ID NO: 2403159 - RNA, 13 nt, Human
agcaugaaaaagc

SEQ ID NO: 2403160 - RNA, 14 nt, Human
agcaugaaaaagca

SEQ ID NO: 2403161 - RNA, 18 nt, Human
agcaucuucacuucuaaa

SEQ ID NO: 2403162 - RNA, 20 nt, Human
agcaucuuccagaaguguga

SEQ ID NO: 2403163 - RNA, 17 nt, Human
agcaucuuccagaagug

SEQ ID NO: 2403164 - RNA, 20 nt, Human
agcaucuucacuucuaaaug

SEQ ID NO: 2403165 - RNA, 23 nt, Human
agcaucuucacuucuaaaugcau

SEQ ID NO: 2403166 - RNA, 23 nt, Human
agcaucuuccagaagugugauug

SEQ ID NO: 2403167 - RNA, 22 nt, Human
agcaucuuccagaagugugauu

SEQ ID NO: 2403168 - RNA, 12 nt, Human
agcaucuucugg

SEQ ID NO: 2403169 - RNA, 23 nt, Human
agccaaagcuaggccuggccaga

SEQ ID NO: 2403170 - RNA, 20 nt, Human
agccaaagcuaggccuggcc

SEQ ID NO: 2403171 - RNA, 19 nt, Human
agccaaagcuaggccuggc

SEQ ID NO: 2403172 - RNA, 12 nt, Human
agcaugccugga

SEQ ID NO: 2403173 - RNA, 14 nt, Human
agcaugcacaaauu

SEQ ID NO: 2403174 - RNA, 13 nt, Human
agcaugaggaacu

SEQ ID NO: 2403175 - RNA, 12 nt, Human
agagccugcugg

SEQ ID NO: 2403176 - RNA, 17 nt, Human
agagccugcugcauggg

SEQ ID NO: 2403177 - RNA, 24 nt, Human
agagccugcuggcacccaccgugg

SEQ ID NO: 2403178 - RNA, 19 nt, Human
agagccugcuggcacccac

SEQ ID NO: 2403179 - RNA, 13 nt, Human
agagccugcuggc

SEQ ID NO: 2403180 - RNA, 15 nt, Human
agagccugcugcaug

SEQ ID NO: 2403181 - RNA, 16 nt, Human
agagccuggagaagcu

SEQ ID NO: 2403182 - RNA, 15 nt, Human
agagccuggagaagc

SEQ ID NO: 2403183 - RNA, 14 nt, Human
agagccuggagaag

SEQ ID NO: 2403184 - RNA, 13 nt, Human
agagccuggagaa

SEQ ID NO: 2403185 - RNA, 17 nt, Human
agagccuggagaagcug

SEQ ID NO: 2403186 - RNA, 18 nt, Human
agagccuggugcugcugc

SEQ ID NO: 2403187 - RNA, 16 nt, Human
agagccuggugcugcu

SEQ ID NO: 2403188 - RNA, 13 nt, Human
agagccccagcug

SEQ ID NO: 2403189 - RNA, 17 nt, Human
agagccccacacggagg

SEQ ID NO: 2403190 - RNA, 22 nt, Human
agagaguccucuggauggcacc

SEQ ID NO: 2403191 - RNA, 16 nt, Human
agagaguccucuggau

SEQ ID NO: 2403192 - RNA, 15 nt, Human
agagccccacacgga

SEQ ID NO: 2403193 - RNA, 17 nt, Human
agagcccgggagcugcu

SEQ ID NO: 2403194 - RNA, 16 nt, Human
agagccccagcugaca

SEQ ID NO: 2403195 - RNA, 15 nt, Human
agagccccagcugac

SEQ ID NO: 2403196 - RNA, 14 nt, Human
agagccccagcuga

SEQ ID NO: 2403197 - RNA, 15 nt, Human
agagaguccucugga

SEQ ID NO: 2403198 - RNA, 23 nt, Human
agagagucccacugccucagguu

SEQ ID NO: 2403199 - RNA, 21 nt, Human
agagagucccacugccucagg

SEQ ID NO: 2403200 - RNA, 20 nt, Human
agagagucccacugccucag

SEQ ID NO: 2403201 - RNA, 18 nt, Human
agagagucccacugccuc

SEQ ID NO: 2403202 - RNA, 15 nt, Human
agagagucccacugc

SEQ ID NO: 2403203 - RNA, 22 nt, Human
agagaguaauggguuucauauu

SEQ ID NO: 2403204 - RNA, 16 nt, Human
agagaguggcuccucc

SEQ ID NO: 2403205 - RNA, 14 nt, Human
agagaguggcuccu

SEQ ID NO: 2403206 - RNA, 23 nt, Human
agagaggguggugaccucugccu

SEQ ID NO: 2403207 - RNA, 14 nt, Human
agagaggagaaaca

SEQ ID NO: 2403208 - RNA, 16 nt, Human
agagaggagaaacaca

SEQ ID NO: 2403209 - RNA, 13 nt, Human
agagaggagagga

SEQ ID NO: 2403210 - RNA, 18 nt, Human
agagaggagaaacacauc

SEQ ID NO: 2403211 - RNA, 15 nt, Human
agagaggagaggaga

SEQ ID NO: 2403212 - RNA, 22 nt, Human
agagaggucaagcccaggagga

SEQ ID NO: 2403213 - RNA, 20 nt, Human
agagagguuauagaguagaa

SEQ ID NO: 2403214 - RNA, 23 nt, Human
agagaggucaagcccaggaggac

SEQ ID NO: 2403215 - RNA, 20 nt, Human
agagaagccccuuccccaug

SEQ ID NO: 2403216 - RNA, 17 nt, Human
agagaagccccuucccc

SEQ ID NO: 2403217 - RNA, 13 nt, Human
agagaagccccuu

SEQ ID NO: 2403218 - RNA, 16 nt, Human
agagaagcaaguggug

SEQ ID NO: 2403219 - RNA, 13 nt, Human
agagaagccugug

SEQ ID NO: 2403220 - RNA, 23 nt, Human
agagaagccccuuccccauggga

SEQ ID NO: 2403221 - RNA, 12 nt, Human
agagaaggagcc

SEQ ID NO: 2403222 - RNA, 13 nt, Human
agagaaggagcca

SEQ ID NO: 2403223 - RNA, 20 nt, Human
agagaagcuaaaaccugagc

SEQ ID NO: 2403224 - RNA, 16 nt, Human
agagagcuucuguugc

SEQ ID NO: 2403225 - RNA, 17 nt, Human
agagagcuguucccaaa

SEQ ID NO: 2403226 - RNA, 15 nt, Human
agagaaggggaggag

SEQ ID NO: 2403227 - RNA, 12 nt, Human
agagaaggcagg

SEQ ID NO: 2403228 - RNA, 13 nt, Human
agagaaggcagga

SEQ ID NO: 2403229 - RNA, 20 nt, Human
agagaaggcaggaaugugug

SEQ ID NO: 2403230 - RNA, 18 nt, Human
agagaaggccucccuagc

SEQ ID NO: 2403231 - RNA, 12 nt, Human
agagaaggggag

SEQ ID NO: 2403232 - RNA, 20 nt, Human
agagagcuucuguugcugcc

SEQ ID NO: 2403233 - RNA, 23 nt, Human
agagagcuucuguugcugccuca

SEQ ID NO: 2403234 - RNA, 18 nt, Human
agagagcuuaaugauaau

SEQ ID NO: 2403235 - RNA, 23 nt, Human
agagaggaaagguuugagaagca

SEQ ID NO: 2403236 - RNA, 14 nt, Human
agagaggaaucaga

SEQ ID NO: 2403237 - RNA, 13 nt, Human
agagaggacagcu

SEQ ID NO: 2403238 - RNA, 17 nt, Human
agagaggaaucagacuu

SEQ ID NO: 2403239 - RNA, 18 nt, Human
agagaggacgugggcggc

SEQ ID NO: 2403240 - RNA, 12 nt, Human
agagaagaggcu

SEQ ID NO: 2403241 - RNA, 18 nt, Human
agagaaaguacuucucca

SEQ ID NO: 2403242 - RNA, 23 nt, Human
agagaaaggggagcccacugucc

SEQ ID NO: 2403243 - RNA, 12 nt, Human
agagaaagggga

SEQ ID NO: 2403244 - RNA, 10 nt, Human
agagaagaga

SEQ ID NO: 2403245 - RNA, 21 nt, Human
agagaagagauugugguuuca

SEQ ID NO: 2403246 - RNA, 13 nt, Human
agagaaagagaga

SEQ ID NO: 2403247 - RNA, 17 nt, Human
agagaaagaagagacag

SEQ ID NO: 2403248 - RNA, 16 nt, Human
agagaaagaagagaca

SEQ ID NO: 2403249 - RNA, 15 nt, Human
agagaaagaagagac

SEQ ID NO: 2403250 - RNA, 17 nt, Human
agacugcauuauauuua

SEQ ID NO: 2403251 - RNA, 22 nt, Human
agagaaagccaggcagguagcc

SEQ ID NO: 2403252 - RNA, 19 nt, Human
agagaaagccaggcaggua

SEQ ID NO: 2403253 - RNA, 17 nt, Human
agagaaagccaggcagg

SEQ ID NO: 2403254 - RNA, 16 nt, Human
agagaaagccaggcag

SEQ ID NO: 2403255 - RNA, 14 nt, Human
agagaaagccaggc

SEQ ID NO: 2403256 - RNA, 13 nt, Human
agagaaagccagg

SEQ ID NO: 2403257 - RNA, 18 nt, Human
agagaaagcacgugucuc

SEQ ID NO: 2403258 - RNA, 19 nt, Human
agagaaaggggagcccacu

SEQ ID NO: 2403259 - RNA, 21 nt, Human
agagaaaggggagcccacugu

SEQ ID NO: 2403260 - RNA, 18 nt, Human
agagaaaggggagcccac

SEQ ID NO: 2403261 - RNA, 23 nt, Human
agacugaguacguugugcauuug

SEQ ID NO: 2403262 - RNA, 13 nt, Human
agacaaugacuua

SEQ ID NO: 2403263 - RNA, 17 nt, Human
agacaaugacuuacugu

SEQ ID NO: 2403264 - RNA, 19 nt, Human
agacaaugacuuacuguac

SEQ ID NO: 2403265 - RNA, 15 nt, Human
agacaauuuauuaug

SEQ ID NO: 2403266 - RNA, 21 nt, Human
agacaauuuauuauggcacau

SEQ ID NO: 2403267 - RNA, 18 nt, Human
agacacaacaacuccuag

SEQ ID NO: 2403268 - RNA, 15 nt, Human
agacacaacaacucc

SEQ ID NO: 2403269 - RNA, 21 nt, Human
agaccaucccugaaggccccg

SEQ ID NO: 2403270 - RNA, 18 nt, Human
agaccaucccugaaggcc

SEQ ID NO: 2403271 - RNA, 17 nt, Human
agaccaucccugaaggc

SEQ ID NO: 2403272 - RNA, 14 nt, Human
agaccaucccugaa

SEQ ID NO: 2403273 - RNA, 20 nt, Human
agaccaguugggagcacugg

SEQ ID NO: 2403274 - RNA, 19 nt, Human
agaccaguugggagcacug

SEQ ID NO: 2403275 - RNA, 18 nt, Human
agaccaguugggagcacu

SEQ ID NO: 2403276 - RNA, 13 nt, Human
agaccaguuggga

SEQ ID NO: 2403277 - RNA, 14 nt, Human
agaccagucuggcc

SEQ ID NO: 2403278 - RNA, 17 nt, Human
agaccaggcaaagcaag

SEQ ID NO: 2403279 - RNA, 16 nt, Human
agaccaccaccucaga

SEQ ID NO: 2403280 - RNA, 13 nt, Human
agaccagcucuuc

SEQ ID NO: 2403281 - RNA, 16 nt, Human
agaccaggcaaagcaa

SEQ ID NO: 2403282 - RNA, 15 nt, Human
agaccagggagccuu

SEQ ID NO: 2403283 - RNA, 13 nt, Human
agaccaucccuga

SEQ ID NO: 2403284 - RNA, 22 nt, Human
agaccaguugggagcacuggag

SEQ ID NO: 2403285 - RNA, 21 nt, Human
agaccaguugggagcacugga

SEQ ID NO: 2403286 - RNA, 13 nt, Human
agaccauaauguu

SEQ ID NO: 2403287 - RNA, 23 nt, Human
agaccaguugggagcacuggagu

SEQ ID NO: 2403288 - RNA, 15 nt, Human
agaccauagugacca

SEQ ID NO: 2403289 - RNA, 17 nt, Human
agacagcccgggcucug

SEQ ID NO: 2403290 - RNA, 14 nt, Human
agacacaacuauuu

SEQ ID NO: 2403291 - RNA, 16 nt, Human
agacagcccgggcucu

SEQ ID NO: 2403292 - RNA, 20 nt, Human
agacagcccgggcucugccu

SEQ ID NO: 2403293 - RNA, 18 nt, Human
agacagcccgggcucugc

SEQ ID NO: 2403294 - RNA, 23 nt, Human
agaccacaucuuuaucuguucuu

SEQ ID NO: 2403295 - RNA, 13 nt, Human
agaccacaucuuu

SEQ ID NO: 2403296 - RNA, 15 nt, Human
agaccaccaccucag

SEQ ID NO: 2403297 - RNA, 16 nt, Human
agaccaccacuucgaa

SEQ ID NO: 2403298 - RNA, 16 nt, Human
agaccacaaaaauuga

SEQ ID NO: 2403299 - RNA, 21 nt, Human
agaccacaaauagugcucgcu

SEQ ID NO: 2403300 - RNA, 14 nt, Human
agaccacaaauagu

SEQ ID NO: 2403301 - RNA, 20 nt, Human
agaccacaggguucaaaaug

SEQ ID NO: 2403302 - RNA, 21 nt, Human
agaccacaggguucaaaaugu

SEQ ID NO: 2403303 - RNA, 14 nt, Human
agaccaaccugacc

SEQ ID NO: 2403304 - RNA, 13 nt, Human
agaccaagcuugu

SEQ ID NO: 2403305 - RNA, 19 nt, Human
agacacaacaacuccuagg

SEQ ID NO: 2403306 - RNA, 17 nt, Human
agaccaagacucugaaa

SEQ ID NO: 2403307 - RNA, 16 nt, Human
agaccaagcuugucca

SEQ ID NO: 2403308 - RNA, 14 nt, Human
agaccaaggcggga

SEQ ID NO: 2403309 - RNA, 17 nt, Human
agaccaaggcgggagca

SEQ ID NO: 2403310 - RNA, 23 nt, Human
agaccaaggcgggagcaucucuu

SEQ ID NO: 2403311 - RNA, 20 nt, Human
agacuagaauucuagugcug

SEQ ID NO: 2403312 - RNA, 20 nt, Human
agacggagucucgcucuguc

SEQ ID NO: 2403313 - RNA, 15 nt, Human
agacggagucucgcu

SEQ ID NO: 2403314 - RNA, 14 nt, Human
agacggauugcauu

SEQ ID NO: 2403315 - RNA, 16 nt, Human
agacggcacccaccca

SEQ ID NO: 2403316 - RNA, 19 nt, Human
agacggagucccaccuugg

SEQ ID NO: 2403317 - RNA, 18 nt, Human
agacgggggcagagaggg

SEQ ID NO: 2403318 - RNA, 14 nt, Human
agacguguuugugu

SEQ ID NO: 2403319 - RNA, 15 nt, Human
agacuaauuuaaaaa

SEQ ID NO: 2403320 - RNA, 19 nt, Human
agacuaauuccugcccugc

SEQ ID NO: 2403321 - RNA, 23 nt, Human
agacuaagcccugucgagacacu

SEQ ID NO: 2403322 - RNA, 14 nt, Human
agacuaauuuaaaa

SEQ ID NO: 2403323 - RNA, 19 nt, Human
agacuagaauucuagugcu

SEQ ID NO: 2403324 - RNA, 17 nt, Human
agacuagaauucuagug

SEQ ID NO: 2403325 - RNA, 14 nt, Human
agacuagaauucua

SEQ ID NO: 2403326 - RNA, 15 nt, Human
agacuaagcccuguc

SEQ ID NO: 2403327 - RNA, 14 nt, Human
agacuaagcccugu

SEQ ID NO: 2403328 - RNA, 13 nt, Human
agacuaagcccug

SEQ ID NO: 2403329 - RNA, 19 nt, Human
agacguguggcaauagugg

SEQ ID NO: 2403330 - RNA, 19 nt, Human
agaucuguccucagccuug

SEQ ID NO: 2403331 - RNA, 23 nt, Human
agaucuguccucagccuugccag

SEQ ID NO: 2403332 - RNA, 21 nt, Human
agaucuguuuugaaggcaaaa

SEQ ID NO: 2403333 - RNA, 14 nt, Human
agaucuguuuugaa

SEQ ID NO: 2403334 - RNA, 19 nt, Human
agaucugugccccaugccu

SEQ ID NO: 2403335 - RNA, 12 nt, Human
agaucugugccc

SEQ ID NO: 2403336 - RNA, 13 nt, Human
agaucugugcccc

SEQ ID NO: 2403337 - RNA, 14 nt, Human
agaucugugcccca

SEQ ID NO: 2403338 - RNA, 16 nt, Human
agaucugugccccaug

SEQ ID NO: 2403339 - RNA, 16 nt, Human
agaugagcuuuucuag

SEQ ID NO: 2403340 - RNA, 13 nt, Human
agaugagcuuuuc

SEQ ID NO: 2403341 - RNA, 18 nt, Human
agaugggaaugagguggg

SEQ ID NO: 2403342 - RNA, 13 nt, Human
agaugggaaugag

SEQ ID NO: 2403343 - RNA, 23 nt, Human
agaugggaaugaagcuuguguau

SEQ ID NO: 2403344 - RNA, 18 nt, Human
agaugggaaugaagcuug

SEQ ID NO: 2403345 - RNA, 17 nt, Human
agaugggaaugaagcuu

SEQ ID NO: 2403346 - RNA, 16 nt, Human
agaugggaaugaagcu

SEQ ID NO: 2403347 - RNA, 15 nt, Human
agaugggaaugaagc

SEQ ID NO: 2403348 - RNA, 14 nt, Human
agaugggaaugaag

SEQ ID NO: 2403349 - RNA, 23 nt, Human
agauggcugugccucugccuguc

SEQ ID NO: 2403350 - RNA, 14 nt, Human
agaugacugagucc

SEQ ID NO: 2403351 - RNA, 15 nt, Human
agaugacugaguccu

SEQ ID NO: 2403352 - RNA, 16 nt, Human
agaucuuaaauuuugu

SEQ ID NO: 2403353 - RNA, 14 nt, Human
agaucuuaaauuuu

SEQ ID NO: 2403354 - RNA, 13 nt, Human
agaucuuaaauuu

SEQ ID NO: 2403355 - RNA, 18 nt, Human
agaucuguuuugaaggca

SEQ ID NO: 2403356 - RNA, 14 nt, Human
agaugaccccuccc

SEQ ID NO: 2403357 - RNA, 16 nt, Human
agauagccaaggccaa

SEQ ID NO: 2403358 - RNA, 15 nt, Human
agauagccaaggcca

SEQ ID NO: 2403359 - RNA, 21 nt, Human
agauaggucagugcaaauacu

SEQ ID NO: 2403360 - RNA, 18 nt, Human
agauagcauugugaacug

SEQ ID NO: 2403361 - RNA, 17 nt, Human
agauagcauugugaacu

SEQ ID NO: 2403362 - RNA, 16 nt, Human
agauagcauugugaac

SEQ ID NO: 2403363 - RNA, 14 nt, Human
agauagcauuguga

SEQ ID NO: 2403364 - RNA, 22 nt, Human
agauagcauugugaacugacag

SEQ ID NO: 2403365 - RNA, 19 nt, Human
agauagcauugugaacuga

SEQ ID NO: 2403366 - RNA, 22 nt, Human
agauaguaucuagcaaucacaa

SEQ ID NO: 2403367 - RNA, 19 nt, Human
agauaguaucuagcaauca

SEQ ID NO: 2403368 - RNA, 15 nt, Human
agauagguaaauacc

SEQ ID NO: 2403369 - RNA, 14 nt, Human
agauaguacauaaa

SEQ ID NO: 2403370 - RNA, 18 nt, Human
agauaguacauaaaggug

SEQ ID NO: 2403371 - RNA, 17 nt, Human
agauaguagcauacauu

SEQ ID NO: 2403372 - RNA, 15 nt, Human
agauaguuacuauau

SEQ ID NO: 2403373 - RNA, 17 nt, Human
agaggagagccagagaa

SEQ ID NO: 2403374 - RNA, 16 nt, Human
agaggagagccagaga

SEQ ID NO: 2403375 - RNA, 15 nt, Human
agaggagagccagag

SEQ ID NO: 2403376 - RNA, 14 nt, Human
agaggagagccaga

SEQ ID NO: 2403377 - RNA, 13 nt, Human
agaggagagccag

SEQ ID NO: 2403378 - RNA, 23 nt, Human
agaggaguucaaugaucuagguu

SEQ ID NO: 2403379 - RNA, 19 nt, Human
agaggaguucaaugaucua

SEQ ID NO: 2403380 - RNA, 18 nt, Human
agaggaguucaaugaucu

SEQ ID NO: 2403381 - RNA, 17 nt, Human
agaggaguucaaugauc

SEQ ID NO: 2403382 - RNA, 16 nt, Human
agaggaguucaaugau

SEQ ID NO: 2403383 - RNA, 15 nt, Human
agaggaguucaauga

SEQ ID NO: 2403384 - RNA, 14 nt, Human
agaggaguucaaug

SEQ ID NO: 2403385 - RNA, 15 nt, Human
agaggagaggagaga

SEQ ID NO: 2403386 - RNA, 12 nt, Human
agaggagaggag

SEQ ID NO: 2403387 - RNA, 23 nt, Human
agaggagagccagagaagugaca

SEQ ID NO: 2403388 - RNA, 21 nt, Human
agaggagagccagagaaguga

SEQ ID NO: 2403389 - RNA, 17 nt, Human
agaggagaggagagagg

SEQ ID NO: 2403390 - RNA, 16 nt, Human
agaggagaggagagag

SEQ ID NO: 2403391 - RNA, 13 nt, Human
agaggagaggggc

SEQ ID NO: 2403392 - RNA, 18 nt, Human
agaggggaaaagagauga

SEQ ID NO: 2403393 - RNA, 17 nt, Human
agagggcuuuaauuuuu

SEQ ID NO: 2403394 - RNA, 13 nt, Human
agagggcuuccuc

SEQ ID NO: 2403395 - RNA, 22 nt, Human
agaggggaacagacuggaagca

SEQ ID NO: 2403396 - RNA, 16 nt, Human
agaggggaagagacuu

SEQ ID NO: 2403397 - RNA, 16 nt, Human
agaggggaagggccag

SEQ ID NO: 2403398 - RNA, 22 nt, Human
agaggggaagaguguacugggg

SEQ ID NO: 2403399 - RNA, 22 nt, Human
agaggggaaaccaguguagccu

SEQ ID NO: 2403400 - RNA, 20 nt, Human
agaggggacaaaacccaccu

SEQ ID NO: 2403401 - RNA, 19 nt, Human
agaggggaauaauagaaga

SEQ ID NO: 2403402 - RNA, 20 nt, Human
agaggggaauaauagaagaa

SEQ ID NO: 2403403 - RNA, 22 nt, Human
agagggcuuccucuagaagcca

SEQ ID NO: 2403404 - RNA, 20 nt, Human
agaggauuuuuuucugagcg

SEQ ID NO: 2403405 - RNA, 19 nt, Human
agaggauuuuuuucugagc

SEQ ID NO: 2403406 - RNA, 16 nt, Human
agaggggaaaagagau

SEQ ID NO: 2403407 - RNA, 22 nt, Human
agaggauggccagugucugucc

SEQ ID NO: 2403408 - RNA, 18 nt, Human
agaggauuuuuuucugag

SEQ ID NO: 2403409 - RNA, 18 nt, Human
agaggaugagagcccaga

SEQ ID NO: 2403410 - RNA, 17 nt, Human
agaggaugagagcccag

SEQ ID NO: 2403411 - RNA, 14 nt, Human
agaggaugagagcc

SEQ ID NO: 2403412 - RNA, 13 nt, Human
agaggaugagagc

SEQ ID NO: 2403413 - RNA, 22 nt, Human
agaggaugaauguaugugcacu

SEQ ID NO: 2403414 - RNA, 21 nt, Human
agaggaugaauguaugugcac

SEQ ID NO: 2403415 - RNA, 20 nt, Human
agaggaugaauguaugugca

SEQ ID NO: 2403416 - RNA, 18 nt, Human
agaggauggccagugucu

SEQ ID NO: 2403417 - RNA, 16 nt, Human
agaggauggccagugu

SEQ ID NO: 2403418 - RNA, 15 nt, Human
agaggauggccagug

SEQ ID NO: 2403419 - RNA, 22 nt, Human
agaggaugagagcccagaggua

SEQ ID NO: 2403420 - RNA, 20 nt, Human
agaggaugagcucuacccag

SEQ ID NO: 2403421 - RNA, 14 nt, Human
agaggauggccagu

SEQ ID NO: 2403422 - RNA, 20 nt, Human
agagguaacagaacagcuuc

SEQ ID NO: 2403423 - RNA, 22 nt, Human
agagguaacagaacagcuucag

SEQ ID NO: 2403424 - RNA, 16 nt, Human
agaguuaacaaugaua

SEQ ID NO: 2403425 - RNA, 23 nt, Human
agaguuaaauagaguauaugcac

SEQ ID NO: 2403426 - RNA, 18 nt, Human
agagguaacagaacagcu

SEQ ID NO: 2403427 - RNA, 17 nt, Human
agagguaacagaacagc

SEQ ID NO: 2403428 - RNA, 16 nt, Human
agagguaacagaacag

SEQ ID NO: 2403429 - RNA, 23 nt, Human
agagguaaaagugugagcaguga

SEQ ID NO: 2403430 - RNA, 22 nt, Human
agagguaaaagugugagcagug

SEQ ID NO: 2403431 - RNA, 20 nt, Human
agagguaaaagugugagcag

SEQ ID NO: 2403432 - RNA, 19 nt, Human
agagguaaaagugugagca

SEQ ID NO: 2403433 - RNA, 18 nt, Human
agagguaaaagugugagc

SEQ ID NO: 2403434 - RNA, 16 nt, Human
agagguaaaaguguga

SEQ ID NO: 2403435 - RNA, 13 nt, Human
agaggguuccugu

SEQ ID NO: 2403436 - RNA, 23 nt, Human
agaggguggugaccucugccuga

SEQ ID NO: 2403437 - RNA, 21 nt, Human
agaggggcugaauagcagaag

SEQ ID NO: 2403438 - RNA, 13 nt, Human
agaggggcugucc

SEQ ID NO: 2403439 - RNA, 15 nt, Human
agaggggcaggcccu

SEQ ID NO: 2403440 - RNA, 19 nt, Human
agaggggcagcccuugcuu

SEQ ID NO: 2403441 - RNA, 18 nt, Human
agaggggcagcccuugcu

SEQ ID NO: 2403442 - RNA, 16 nt, Human
agaggggcagcccuug

SEQ ID NO: 2403443 - RNA, 15 nt, Human
agaggggcagcccuu

SEQ ID NO: 2403444 - RNA, 14 nt, Human
agaggggcagcccu

SEQ ID NO: 2403445 - RNA, 13 nt, Human
agaggggcagccc

SEQ ID NO: 2403446 - RNA, 15 nt, Human
agaggggcagaacag

SEQ ID NO: 2403447 - RNA, 16 nt, Human
agaggggcagaacagc

SEQ ID NO: 2403448 - RNA, 12 nt, Human
agaggggcagcc

SEQ ID NO: 2403449 - RNA, 22 nt, Human
agauacuuggggggcugaggug

SEQ ID NO: 2403450 - RNA, 18 nt, Human
agaguuaagaagcuguug

SEQ ID NO: 2403451 - RNA, 17 nt, Human
agaguuaagaagcuguu

SEQ ID NO: 2403452 - RNA, 16 nt, Human
agaguuaagaagcugu

SEQ ID NO: 2403453 - RNA, 15 nt, Human
agaguuaagaagcug

SEQ ID NO: 2403454 - RNA, 14 nt, Human
agaguuaagaagcu

SEQ ID NO: 2403455 - RNA, 13 nt, Human
agaguuaagaagc

SEQ ID NO: 2403456 - RNA, 12 nt, Human
agaguuaagaag

SEQ ID NO: 2403457 - RNA, 22 nt, Human
agaguuaacaaugauauaugga

SEQ ID NO: 2403458 - RNA, 21 nt, Human
agaguuaagaagcuguuguac

SEQ ID NO: 2403459 - RNA, 20 nt, Human
agaguuaagaagcuguugua

SEQ ID NO: 2403460 - RNA, 20 nt, Human
agaguuaauauauagaaggg

SEQ ID NO: 2403461 - RNA, 13 nt, Human
agauagccaaggc

SEQ ID NO: 2403462 - RNA, 11 nt, Human
agauagaaaua

SEQ ID NO: 2403463 - RNA, 15 nt, Human
agauagaaauaaaua

SEQ ID NO: 2403464 - RNA, 18 nt, Human
agauagaaauaaauagcu

SEQ ID NO: 2403465 - RNA, 22 nt, Human
agauagaaauaaauagcuauau

SEQ ID NO: 2403466 - RNA, 17 nt, Human
aggggccgcugccaccc

SEQ ID NO: 2403467 - RNA, 21 nt, Human
agguaagcaggaggaggugcc

SEQ ID NO: 2403468 - RNA, 16 nt, Human
agguaaggugaaggug

SEQ ID NO: 2403469 - RNA, 19 nt, Human
agguaagcaggaggaggug

SEQ ID NO: 2403470 - RNA, 17 nt, Human
agguaaggaauaccugu

SEQ ID NO: 2403471 - RNA, 18 nt, Human
agguaauauaaaaagcuu

SEQ ID NO: 2403472 - RNA, 17 nt, Human
agguaaucgaccugccu

SEQ ID NO: 2403473 - RNA, 18 nt, Human
agguaaucgaccugccuc

SEQ ID NO: 2403474 - RNA, 19 nt, Human
agguaccuuucacauagag

SEQ ID NO: 2403475 - RNA, 16 nt, Human
agguaccuuucacaua

SEQ ID NO: 2403476 - RNA, 20 nt, Human
aggucccuaauaaagcugug

SEQ ID NO: 2403477 - RNA, 19 nt, Human
aggucccuaauaaagcugu

SEQ ID NO: 2403478 - RNA, 18 nt, Human
aggucccuaauaaagcug

SEQ ID NO: 2403479 - RNA, 23 nt, Human
agguaccagcugcgcuugcuuuu

SEQ ID NO: 2403480 - RNA, 21 nt, Human
agguaccccuuucuggcucuc

SEQ ID NO: 2403481 - RNA, 17 nt, Human
agguaccccuuucuggc

SEQ ID NO: 2403482 - RNA, 17 nt, Human
aggucccuaauaaagcu

SEQ ID NO: 2403483 - RNA, 21 nt, Human
agguaauccaagauauuuuaa

SEQ ID NO: 2403484 - RNA, 16 nt, Human
agguaccagcugcgcu

SEQ ID NO: 2403485 - RNA, 13 nt, Human
agguaccagcugc

SEQ ID NO: 2403486 - RNA, 22 nt, Human
agguaccagcaauauguaaaua

SEQ ID NO: 2403487 - RNA, 21 nt, Human
agguaccacugauuuggagau

SEQ ID NO: 2403488 - RNA, 16 nt, Human
agguuccucugccugc

SEQ ID NO: 2403489 - RNA, 15 nt, Human
agguuccucugccug

SEQ ID NO: 2403490 - RNA, 14 nt, Human
agguuccucugccu

SEQ ID NO: 2403491 - RNA, 16 nt, Human
agguucccucugagaa

SEQ ID NO: 2403492 - RNA, 13 nt, Human
agguuccucugcc

SEQ ID NO: 2403493 - RNA, 20 nt, Human
agguuccucugccugccccg

SEQ ID NO: 2403494 - RNA, 19 nt, Human
agguuccucugccugcccc

SEQ ID NO: 2403495 - RNA, 18 nt, Human
agguuccucugccugccc

SEQ ID NO: 2403496 - RNA, 17 nt, Human
agguuccucugccugcc

SEQ ID NO: 2403497 - RNA, 11 nt, Human
agguucuaaaa

SEQ ID NO: 2403498 - RNA, 16 nt, Human
agguucccagagauga

SEQ ID NO: 2403499 - RNA, 15 nt, Human
agguucccaagcuca

SEQ ID NO: 2403500 - RNA, 16 nt, Human
agguucccaagcucag

SEQ ID NO: 2403501 - RNA, 18 nt, Human
agguuccaacuguauaua

SEQ ID NO: 2403502 - RNA, 17 nt, Human
agguuccaacuguauau

SEQ ID NO: 2403503 - RNA, 14 nt, Human
agguucccaagcuc

SEQ ID NO: 2403504 - RNA, 13 nt, Human
agguucagcuugu

SEQ ID NO: 2403505 - RNA, 16 nt, Human
agguucacgugcagcu

SEQ ID NO: 2403506 - RNA, 13 nt, Human
agguucagccaag

SEQ ID NO: 2403507 - RNA, 16 nt, Human
agguucacuaaagcag

SEQ ID NO: 2403508 - RNA, 17 nt, Human
agguucaugcaaacuuu

SEQ ID NO: 2403509 - RNA, 19 nt, Human
agguucagccaagguuuua

SEQ ID NO: 2403510 - RNA, 15 nt, Human
agguucagccaaggu

SEQ ID NO: 2403511 - RNA, 21 nt, Human
agguucaugccaccauggcca

SEQ ID NO: 2403512 - RNA, 15 nt, Human
agguuacaacagauu

SEQ ID NO: 2403513 - RNA, 16 nt, Human
agguuaauauuuaaga

SEQ ID NO: 2403514 - RNA, 14 nt, Human
agguuacaacagau

SEQ ID NO: 2403515 - RNA, 17 nt, Human
agguucaaagauauuuu

SEQ ID NO: 2403516 - RNA, 22 nt, Human
agguuaauuccaauuauaugag

SEQ ID NO: 2403517 - RNA, 15 nt, Human
agguuaauuccaauu

SEQ ID NO: 2403518 - RNA, 14 nt, Human
agguuaauguucau

SEQ ID NO: 2403519 - RNA, 23 nt, Human
agguggcaucagugucuuuccac

SEQ ID NO: 2403520 - RNA, 13 nt, Human
agguuaauauuua

SEQ ID NO: 2403521 - RNA, 19 nt, Human
agguggcaggaccaggacu

SEQ ID NO: 2403522 - RNA, 15 nt, Human
agguuaauaaaguaa

SEQ ID NO: 2403523 - RNA, 22 nt, Human
agguggcaucagugucuuucca

SEQ ID NO: 2403524 - RNA, 17 nt, Human
agguggcaggaccagga

SEQ ID NO: 2403525 - RNA, 14 nt, Human
agguggcaggacca

SEQ ID NO: 2403526 - RNA, 15 nt, Human
agguggcagcccugu

SEQ ID NO: 2403527 - RNA, 23 nt, Human
agguggcacuuuuucauuugccu

SEQ ID NO: 2403528 - RNA, 19 nt, Human
agguggcacuuuuucauuu

SEQ ID NO: 2403529 - RNA, 18 nt, Human
agguggcacuuuuucauu

SEQ ID NO: 2403530 - RNA, 17 nt, Human
agguggcacuuuuucau

SEQ ID NO: 2403531 - RNA, 13 nt, Human
agguggcagcccu

SEQ ID NO: 2403532 - RNA, 14 nt, Human
agguggcagcccug

SEQ ID NO: 2403533 - RNA, 21 nt, Human
aggugcugcuacccucccugc

SEQ ID NO: 2403534 - RNA, 20 nt, Human
aggugcugcuacccucccug

SEQ ID NO: 2403535 - RNA, 21 nt, Human
aggugcugagcaaagggaaca

SEQ ID NO: 2403536 - RNA, 23 nt, Human
aggugcugcuacccucccugcug

SEQ ID NO: 2403537 - RNA, 22 nt, Human
aggugcugcuacccucccugcu

SEQ ID NO: 2403538 - RNA, 17 nt, Human
aggugcugccauccagg

SEQ ID NO: 2403539 - RNA, 17 nt, Human
aggugcugacggccagg

SEQ ID NO: 2403540 - RNA, 20 nt, Human
aggugcugacggccagggag

SEQ ID NO: 2403541 - RNA, 16 nt, Human
aggugcugacggccag

SEQ ID NO: 2403542 - RNA, 16 nt, Human
aggugcugccauccag

SEQ ID NO: 2403543 - RNA, 16 nt, Human
agguccuucugcugga

SEQ ID NO: 2403544 - RNA, 21 nt, Human
agguccugcagucuggcugag

SEQ ID NO: 2403545 - RNA, 20 nt, Human
agguccugcagucuggcuga

SEQ ID NO: 2403546 - RNA, 12 nt, Human
agguccuugccc

SEQ ID NO: 2403547 - RNA, 17 nt, Human
agguccuugcccuuugu

SEQ ID NO: 2403548 - RNA, 21 nt, Human
aggucgaccccaaagccccuu

SEQ ID NO: 2403549 - RNA, 14 nt, Human
aggucgaggcagga

SEQ ID NO: 2403550 - RNA, 15 nt, Human
agguggaaauaaacu

SEQ ID NO: 2403551 - RNA, 17 nt, Human
aggugcuggagguggga

SEQ ID NO: 2403552 - RNA, 14 nt, Human
aggugcuggaggug

SEQ ID NO: 2403553 - RNA, 23 nt, Human
aggugcuggaggugggagcagga

SEQ ID NO: 2403554 - RNA, 19 nt, Human
aggugcuggaggugggagc

SEQ ID NO: 2403555 - RNA, 12 nt, Human
aggugcugggag

SEQ ID NO: 2403556 - RNA, 13 nt, Human
aggugcugggagg

SEQ ID NO: 2403557 - RNA, 23 nt, Human
aggugcuguuauccauggggaag

SEQ ID NO: 2403558 - RNA, 19 nt, Human
aggugcuuaagcagaagca

SEQ ID NO: 2403559 - RNA, 21 nt, Human
aggugcuucaggauaccauau

SEQ ID NO: 2403560 - RNA, 20 nt, Human
aggugcuuaagcagaagcau

SEQ ID NO: 2403561 - RNA, 15 nt, Human
aggugcugggaggga

SEQ ID NO: 2403562 - RNA, 19 nt, Human
agguggaagaagggagaag

SEQ ID NO: 2403563 - RNA, 18 nt, Human
agguggaagaagggagaa

SEQ ID NO: 2403564 - RNA, 17 nt, Human
agguggaagaagggaga

SEQ ID NO: 2403565 - RNA, 16 nt, Human
agguggaagaagggag

SEQ ID NO: 2403566 - RNA, 16 nt, Human
agguggaagagggcug

SEQ ID NO: 2403567 - RNA, 13 nt, Human
agguggaaaaaca

SEQ ID NO: 2403568 - RNA, 15 nt, Human
agguggaagaaggga

SEQ ID NO: 2403569 - RNA, 18 nt, Human
agguggaaaaacaucuga

SEQ ID NO: 2403570 - RNA, 18 nt, Human
agguggcaaggcugugcu

SEQ ID NO: 2403571 - RNA, 16 nt, Human
agguggcaaggcugug

SEQ ID NO: 2403572 - RNA, 15 nt, Human
agguggcaaggcugu

SEQ ID NO: 2403573 - RNA, 14 nt, Human
agguggcaaggcug

SEQ ID NO: 2403574 - RNA, 15 nt, Human
agguggauggcccca

SEQ ID NO: 2403575 - RNA, 23 nt, Human
agguggauggccccagcacagcu

SEQ ID NO: 2403576 - RNA, 16 nt, Human
agguggauggccccag

SEQ ID NO: 2403577 - RNA, 15 nt, Human
agguggaagcccucc

SEQ ID NO: 2403578 - RNA, 16 nt, Human
agguggaagcccuccu

SEQ ID NO: 2403579 - RNA, 22 nt, Human
agguggaagaagggagaagaaa

SEQ ID NO: 2403580 - RNA, 11 nt, Human
agguggaagcc

SEQ ID NO: 2403581 - RNA, 13 nt, Human
agguggaagcccu

SEQ ID NO: 2403582 - RNA, 14 nt, Human
agguggaagcccuc

SEQ ID NO: 2403583 - RNA, 20 nt, Human
aggcagacacggaucugaga

SEQ ID NO: 2403584 - RNA, 18 nt, Human
aggcagacacggaucuga

SEQ ID NO: 2403585 - RNA, 11 nt, Human
aggcagacacg

SEQ ID NO: 2403586 - RNA, 13 nt, Human
aggcagacagcag

SEQ ID NO: 2403587 - RNA, 14 nt, Human
aggcagacagcagc

SEQ ID NO: 2403588 - RNA, 15 nt, Human
aggcagacagcagcu

SEQ ID NO: 2403589 - RNA, 18 nt, Human
aggcagacagcagcucag

SEQ ID NO: 2403590 - RNA, 19 nt, Human
aggcagacagcagcucagg

SEQ ID NO: 2403591 - RNA, 20 nt, Human
aggcagacagcagcucaggc

SEQ ID NO: 2403592 - RNA, 21 nt, Human
aggcagacagcagcucaggca

SEQ ID NO: 2403593 - RNA, 23 nt, Human
aggcuagugugguguuuccuggc

SEQ ID NO: 2403594 - RNA, 21 nt, Human
aggcuauggggauagaugugu

SEQ ID NO: 2403595 - RNA, 22 nt, Human
aggcuauggggauagaugugug

SEQ ID NO: 2403596 - RNA, 19 nt, Human
aggcuauggggauagaugu

SEQ ID NO: 2403597 - RNA, 22 nt, Human
aggcuauggacagggcaugcca

SEQ ID NO: 2403598 - RNA, 23 nt, Human
aggcuauacuugucuuguucacc

SEQ ID NO: 2403599 - RNA, 14 nt, Human
aggcucuucuccuu

SEQ ID NO: 2403600 - RNA, 15 nt, Human
aggcucuucugacua

SEQ ID NO: 2403601 - RNA, 15 nt, Human
aggcucuuucugggc

SEQ ID NO: 2403602 - RNA, 18 nt, Human
aggcucuuucugggccaa

SEQ ID NO: 2403603 - RNA, 20 nt, Human
aggcucuuucugggccaagu

SEQ ID NO: 2403604 - RNA, 22 nt, Human
aggcucuuuggggucagccagg

SEQ ID NO: 2403605 - RNA, 21 nt, Human
aggcucuuuggggucagccag

SEQ ID NO: 2403606 - RNA, 23 nt, Human
aggcucuuuggggucagccaggg

SEQ ID NO: 2403607 - RNA, 13 nt, Human
aggcugaaagagg

SEQ ID NO: 2403608 - RNA, 20 nt, Human
aggcugaacuuguuuucugg

SEQ ID NO: 2403609 - RNA, 21 nt, Human
aggcugaacuuguuuucuggg

SEQ ID NO: 2403610 - RNA, 18 nt, Human
aggcugaggcuggcacag

SEQ ID NO: 2403611 - RNA, 15 nt, Human
aggcugaccaagaga

SEQ ID NO: 2403612 - RNA, 17 nt, Human
aggcugaccaagagaga

SEQ ID NO: 2403613 - RNA, 14 nt, Human
aggcugaccaagag

SEQ ID NO: 2403614 - RNA, 16 nt, Human
aggcugaaagaggcca

SEQ ID NO: 2403615 - RNA, 17 nt, Human
aggcugaaagaggccaa

SEQ ID NO: 2403616 - RNA, 20 nt, Human
aggcugauaauuccaguggu

SEQ ID NO: 2403617 - RNA, 17 nt, Human
aggcugauaauuccagu

SEQ ID NO: 2403618 - RNA, 19 nt, Human
aggcugagguugcgccacu

SEQ ID NO: 2403619 - RNA, 14 nt, Human
aggcugaggugucu

SEQ ID NO: 2403620 - RNA, 22 nt, Human
aggcugaggggaggaucacugg

SEQ ID NO: 2403621 - RNA, 21 nt, Human
aggcugaugucaauuucugug

SEQ ID NO: 2403622 - RNA, 23 nt, Human
aggcugaugccaaguuguuugag

SEQ ID NO: 2403623 - RNA, 21 nt, Human
aggcugcaagguuuaggcugg

SEQ ID NO: 2403624 - RNA, 17 nt, Human
aggcugcagaaggccaa

SEQ ID NO: 2403625 - RNA, 22 nt, Human
aggcugcaagguuuaggcuggu

SEQ ID NO: 2403626 - RNA, 18 nt, Human
aggcugcagccaggccac

SEQ ID NO: 2403627 - RNA, 20 nt, Human
aggcugcagaaggccaagaa

SEQ ID NO: 2403628 - RNA, 18 nt, Human
aggcugcagaaggccaag

SEQ ID NO: 2403629 - RNA, 15 nt, Human
aggcugcagcgagcu

SEQ ID NO: 2403630 - RNA, 24 nt, Human
aggcugugcucccugguucugaug

SEQ ID NO: 2403631 - RNA, 20 nt, Human
aggcugugcucccugguucu

SEQ ID NO: 2403632 - RNA, 14 nt, Human
aggcugugcucccu

SEQ ID NO: 2403633 - RNA, 13 nt, Human
aggcugugcuccc

SEQ ID NO: 2403634 - RNA, 20 nt, Human
aggcugucuucucaggcucu

SEQ ID NO: 2403635 - RNA, 21 nt, Human
aggcugucuucucaggcucug

SEQ ID NO: 2403636 - RNA, 22 nt, Human
aggcugucuucucaggcucugc

SEQ ID NO: 2403637 - RNA, 23 nt, Human
aggcugucuucucaggcucugcc

SEQ ID NO: 2403638 - RNA, 16 nt, Human
aggcuguggucacagc

SEQ ID NO: 2403639 - RNA, 15 nt, Human
aggcugugggccuca

SEQ ID NO: 2403640 - RNA, 18 nt, Human
aggcugugggccucaagg

SEQ ID NO: 2403641 - RNA, 15 nt, Human
aggcugcccccggcc

SEQ ID NO: 2403642 - RNA, 12 nt, Human
aggcugcccccg

SEQ ID NO: 2403643 - RNA, 21 nt, Human
aggcugcagaaggccaagaau

SEQ ID NO: 2403644 - RNA, 22 nt, Human
aggcugcccccggcccccuggu

SEQ ID NO: 2403645 - RNA, 20 nt, Human
aggcugcccccggcccccug

SEQ ID NO: 2403646 - RNA, 18 nt, Human
aggcugccucucccauca

SEQ ID NO: 2403647 - RNA, 20 nt, Human
agggacagaggggguggccu

SEQ ID NO: 2403648 - RNA, 13 nt, Human
agggacagagggg

SEQ ID NO: 2403649 - RNA, 17 nt, Human
agggacagaggccccag

SEQ ID NO: 2403650 - RNA, 20 nt, Human
agggacagaggccccagccu

SEQ ID NO: 2403651 - RNA, 21 nt, Human
agggacagaggccccagccuc

SEQ ID NO: 2403652 - RNA, 22 nt, Human
agggacagaggccccagccucc

SEQ ID NO: 2403653 - RNA, 12 nt, Human
agggacagaggg

SEQ ID NO: 2403654 - RNA, 19 nt, Human
agggacucugaagccucug

SEQ ID NO: 2403655 - RNA, 14 nt, Human
agggacucugaagc

SEQ ID NO: 2403656 - RNA, 20 nt, Human
agggacucaauuucucccca

SEQ ID NO: 2403657 - RNA, 20 nt, Human
agggacuaugaaugggcaaa

SEQ ID NO: 2403658 - RNA, 17 nt, Human
agggacuaggagcacug

SEQ ID NO: 2403659 - RNA, 20 nt, Human
agggacucaucauuuccauu

SEQ ID NO: 2403660 - RNA, 21 nt, Human
agggacgcuacccgggaaggg

SEQ ID NO: 2403661 - RNA, 17 nt, Human
agggacgcuacccggga

SEQ ID NO: 2403662 - RNA, 18 nt, Human
agggcggcaggggccugg

SEQ ID NO: 2403663 - RNA, 16 nt, Human
agggcggcaggggccu

SEQ ID NO: 2403664 - RNA, 15 nt, Human
agggcggcaggggcc

SEQ ID NO: 2403665 - RNA, 13 nt, Human
agggcggcagggg

SEQ ID NO: 2403666 - RNA, 18 nt, Human
agggccuggccugagcug

SEQ ID NO: 2403667 - RNA, 23 nt, Human
agggcggcaggggccuggagauc

SEQ ID NO: 2403668 - RNA, 19 nt, Human
agggcggcaggggccugga

SEQ ID NO: 2403669 - RNA, 13 nt, Human
agggcggcacuca

SEQ ID NO: 2403670 - RNA, 19 nt, Human
agggcgggaggauguucug

SEQ ID NO: 2403671 - RNA, 21 nt, Human
aggggauagagagagaccacu

SEQ ID NO: 2403672 - RNA, 16 nt, Human
agggcgugacucaccc

SEQ ID NO: 2403673 - RNA, 17 nt, Human
aggggauugaagcccuc

SEQ ID NO: 2403674 - RNA, 18 nt, Human
aggggauuaauaugaaaa

SEQ ID NO: 2403675 - RNA, 19 nt, Human
aggggauguauccaugggg

SEQ ID NO: 2403676 - RNA, 22 nt, Human
aggggauguauccaugggggca

SEQ ID NO: 2403677 - RNA, 18 nt, Human
aggggauauaggagagga

SEQ ID NO: 2403678 - RNA, 17 nt, Human
aggggauauaggagagg

SEQ ID NO: 2403679 - RNA, 15 nt, Human
agggcgugacucacc

SEQ ID NO: 2403680 - RNA, 14 nt, Human
aggggaugggaggu

SEQ ID NO: 2403681 - RNA, 15 nt, Human
aggggccgcugccac

SEQ ID NO: 2403682 - RNA, 16 nt, Human
aggggccgcugccacc

SEQ ID NO: 2403683 - RNA, 22 nt, Human
aggggccgcugccacccaccuc

SEQ ID NO: 2403684 - RNA, 21 nt, Human
aggggcccguugucucccugg

SEQ ID NO: 2403685 - RNA, 20 nt, Human
aggggcccguugucucccug

SEQ ID NO: 2403686 - RNA, 12 nt, Human
aggggcccuggu

SEQ ID NO: 2403687 - RNA, 19 nt, Human
aggggcccgcuugccucgg

SEQ ID NO: 2403688 - RNA, 16 nt, Human
aggggcccgcuugccu

SEQ ID NO: 2403689 - RNA, 14 nt, Human
aggggcagcuucua

SEQ ID NO: 2403690 - RNA, 11 nt, Human
aggggcagcuu

SEQ ID NO: 2403691 - RNA, 15 nt, Human
aggggcagcugacca

SEQ ID NO: 2403692 - RNA, 14 nt, Human
aggggcagcugacc

SEQ ID NO: 2403693 - RNA, 20 nt, Human
aggggcccgcuugccucggc

SEQ ID NO: 2403694 - RNA, 13 nt, Human
aggggcccggcca

SEQ ID NO: 2403695 - RNA, 15 nt, Human
aggggcccggccagc

SEQ ID NO: 2403696 - RNA, 17 nt, Human
aggggcccggccagcca

SEQ ID NO: 2403697 - RNA, 19 nt, Human
aggggcccggccagccaug

SEQ ID NO: 2403698 - RNA, 21 nt, Human
aggggcccggccagccauguc

SEQ ID NO: 2403699 - RNA, 23 nt, Human
aggggcccggccagccaugucug

SEQ ID NO: 2403700 - RNA, 14 nt, Human
aggggcccguggga

SEQ ID NO: 2403701 - RNA, 15 nt, Human
aggggcacagggucu

SEQ ID NO: 2403702 - RNA, 14 nt, Human
aggggcagaacagc

SEQ ID NO: 2403703 - RNA, 19 nt, Human
aggggauugaagcccucca

SEQ ID NO: 2403704 - RNA, 19 nt, Human
aggggcacuucauugagag

SEQ ID NO: 2403705 - RNA, 17 nt, Human
aggggcagaaaaacucu

SEQ ID NO: 2403706 - RNA, 16 nt, Human
aggggcagcccuugcu

SEQ ID NO: 2403707 - RNA, 13 nt, Human
aggggcagcccuu

SEQ ID NO: 2403708 - RNA, 12 nt, Human
aggggcagcccu

SEQ ID NO: 2403709 - RNA, 22 nt, Human
agggcacagaaaauggaagaca

SEQ ID NO: 2403710 - RNA, 21 nt, Human
agggcacaccgggcacucaga

SEQ ID NO: 2403711 - RNA, 20 nt, Human
agggcacaccgggcacucag

SEQ ID NO: 2403712 - RNA, 17 nt, Human
agggccuggccugagcu

SEQ ID NO: 2403713 - RNA, 16 nt, Human
agggccuggccugagc

SEQ ID NO: 2403714 - RNA, 15 nt, Human
agggccuggccugag

SEQ ID NO: 2403715 - RNA, 17 nt, Human
agggcacaccgggcacu

SEQ ID NO: 2403716 - RNA, 14 nt, Human
agggcacacacugu

SEQ ID NO: 2403717 - RNA, 22 nt, Human
agggcaagggccaugcugaagg

SEQ ID NO: 2403718 - RNA, 23 nt, Human
agcuguacaaauauaagaauaaa

SEQ ID NO: 2403719 - RNA, 22 nt, Human
agcuguacaaauauaagaauaa

SEQ ID NO: 2403720 - RNA, 17 nt, Human
agcuguacaaauauaag

SEQ ID NO: 2403721 - RNA, 13 nt, Human
agcuguacaaaua

SEQ ID NO: 2403722 - RNA, 18 nt, Human
agcuguaaggcaugaagg

SEQ ID NO: 2403723 - RNA, 19 nt, Human
agcuguaaggcaugaagga

SEQ ID NO: 2403724 - RNA, 13 nt, Human
agcuguaaggcau

SEQ ID NO: 2403725 - RNA, 17 nt, Human
agcuguaaggcaugaag

SEQ ID NO: 2403726 - RNA, 14 nt, Human
agcuggugcccgga

SEQ ID NO: 2403727 - RNA, 22 nt, Human
agcuguaagaagagacugggaa

SEQ ID NO: 2403728 - RNA, 23 nt, Human
agcuguaagaagagacugggaag

SEQ ID NO: 2403729 - RNA, 14 nt, Human
agcuguaugauucc

SEQ ID NO: 2403730 - RNA, 23 nt, Human
agcuguaguagcccuuucugugu

SEQ ID NO: 2403731 - RNA, 21 nt, Human
agcuguaguagcccuuucugu

SEQ ID NO: 2403732 - RNA, 20 nt, Human
agcuguaguagcccuuucug

SEQ ID NO: 2403733 - RNA, 21 nt, Human
agcuguacuucgucuucuaau

SEQ ID NO: 2403734 - RNA, 19 nt, Human
agcuguacuucgucuucua

SEQ ID NO: 2403735 - RNA, 20 nt, Human
agcuguaggugugcgggacc

SEQ ID NO: 2403736 - RNA, 22 nt, Human
agcuguaguagcccuuucugug

SEQ ID NO: 2403737 - RNA, 18 nt, Human
aggaaaaagcacaagaag

SEQ ID NO: 2403738 - RNA, 15 nt, Human
aggaaaaagcacaag

SEQ ID NO: 2403739 - RNA, 18 nt, Human
agcuuuucccaaaagccc

SEQ ID NO: 2403740 - RNA, 17 nt, Human
aggaaaaagcacaagaa

SEQ ID NO: 2403741 - RNA, 15 nt, Human
aggaaauccagggug

SEQ ID NO: 2403742 - RNA, 17 nt, Human
aggaaauccaggguggu

SEQ ID NO: 2403743 - RNA, 14 nt, Human
aggaaaaaugugua

SEQ ID NO: 2403744 - RNA, 13 nt, Human
aggaaaaaugugu

SEQ ID NO: 2403745 - RNA, 14 nt, Human
aggaaaucucaccc

SEQ ID NO: 2403746 - RNA, 18 nt, Human
aggaaauggaauacugaa

SEQ ID NO: 2403747 - RNA, 22 nt, Human
aggaacguaaucguguccccua

SEQ ID NO: 2403748 - RNA, 16 nt, Human
aggaacgguaaauuuc

SEQ ID NO: 2403749 - RNA, 20 nt, Human
aggaaauggcuguggagugu

SEQ ID NO: 2403750 - RNA, 17 nt, Human
aggaaaugaaugugugu

SEQ ID NO: 2403751 - RNA, 15 nt, Human
aggaaaugaaugugu

SEQ ID NO: 2403752 - RNA, 14 nt, Human
aggaaaugaaugug

SEQ ID NO: 2403753 - RNA, 13 nt, Human
aggaaaugaaugu

SEQ ID NO: 2403754 - RNA, 19 nt, Human
aggaaaugaaaaugucuug

SEQ ID NO: 2403755 - RNA, 16 nt, Human
aggaaaucucacccca

SEQ ID NO: 2403756 - RNA, 15 nt, Human
aggaaaaacugauuu

SEQ ID NO: 2403757 - RNA, 13 nt, Human
aggaaaaacugau

SEQ ID NO: 2403758 - RNA, 15 nt, Human
agcuuuucccuuuuu

SEQ ID NO: 2403759 - RNA, 14 nt, Human
aggaaaaacagguc

SEQ ID NO: 2403760 - RNA, 16 nt, Human
agcuuuucccuucuuu

SEQ ID NO: 2403761 - RNA, 19 nt, Human
agcuuuuauuguauaaacu

SEQ ID NO: 2403762 - RNA, 21 nt, Human
agcuuuuaugugaaacauguu

SEQ ID NO: 2403763 - RNA, 15 nt, Human
agcuuuuauuguaua

SEQ ID NO: 2403764 - RNA, 17 nt, Human
agcuuuuauuguauaaa

SEQ ID NO: 2403765 - RNA, 13 nt, Human
agcuuuucccuuc

SEQ ID NO: 2403766 - RNA, 23 nt, Human
agcuucuguugcugccucaugcu

SEQ ID NO: 2403767 - RNA, 23 nt, Human
agcuucuauuauagccacauccc

SEQ ID NO: 2403768 - RNA, 17 nt, Human
agcuucuauuagccagu

SEQ ID NO: 2403769 - RNA, 16 nt, Human
agcuucuuaaaugaga

SEQ ID NO: 2403770 - RNA, 18 nt, Human
agcuucuuaaaugagaag

SEQ ID NO: 2403771 - RNA, 23 nt, Human
agcuucuuaauauaacugccuua

SEQ ID NO: 2403772 - RNA, 22 nt, Human
agcuucuuaauauaacugccuu

SEQ ID NO: 2403773 - RNA, 21 nt, Human
agcuucuuaauauaacugccu

SEQ ID NO: 2403774 - RNA, 20 nt, Human
agcuucuuaauauaacugcc

SEQ ID NO: 2403775 - RNA, 21 nt, Human
agcuucagaaguuuggcaaua

SEQ ID NO: 2403776 - RNA, 15 nt, Human
agcuucagccaggag

SEQ ID NO: 2403777 - RNA, 19 nt, Human
agcuuccuucugugaaagu

SEQ ID NO: 2403778 - RNA, 16 nt, Human
agcuucauacuucaug

SEQ ID NO: 2403779 - RNA, 17 nt, Human
agcuucauauaccagca

SEQ ID NO: 2403780 - RNA, 23 nt, Human
agcuucagguuaucgaaauaaca

SEQ ID NO: 2403781 - RNA, 13 nt, Human
agcuucagguuau

SEQ ID NO: 2403782 - RNA, 16 nt, Human
agcuucagaaguuugg

SEQ ID NO: 2403783 - RNA, 15 nt, Human
agcuucaguuuccug

SEQ ID NO: 2403784 - RNA, 19 nt, Human
agcuucaguuguuuucccg

SEQ ID NO: 2403785 - RNA, 11 nt, Human
agcuucagguu

SEQ ID NO: 2403786 - RNA, 20 nt, Human
agcuucagccaggagcuggg

SEQ ID NO: 2403787 - RNA, 19 nt, Human
agcuucagccaggagcugg

SEQ ID NO: 2403788 - RNA, 17 nt, Human
agcuucagccaggagcu

SEQ ID NO: 2403789 - RNA, 20 nt, Human
agcuucguuuauuuucaaga

SEQ ID NO: 2403790 - RNA, 18 nt, Human
agcuucuaccaugaacag

SEQ ID NO: 2403791 - RNA, 17 nt, Human
agcuucuaccaugaaca

SEQ ID NO: 2403792 - RNA, 18 nt, Human
agcuucuaucccaggagg

SEQ ID NO: 2403793 - RNA, 17 nt, Human
agcuucuaucccaggag

SEQ ID NO: 2403794 - RNA, 14 nt, Human
agcuucgcgugaga

SEQ ID NO: 2403795 - RNA, 23 nt, Human
agcuuccuuuguuuuuuuuuccu

SEQ ID NO: 2403796 - RNA, 15 nt, Human
agcuuccuuggcuuu

SEQ ID NO: 2403797 - RNA, 14 nt, Human
agcuuccuuggcuu

SEQ ID NO: 2403798 - RNA, 21 nt, Human
agcuucuguugcugccucaug

SEQ ID NO: 2403799 - RNA, 22 nt, Human
agcuucuguugcugccucaugc

SEQ ID NO: 2403800 - RNA, 20 nt, Human
agcuucuguugcugccucau

SEQ ID NO: 2403801 - RNA, 19 nt, Human
agcuucucauccugcaggc

SEQ ID NO: 2403802 - RNA, 21 nt, Human
agcuggucccacucaguccau

SEQ ID NO: 2403803 - RNA, 19 nt, Human
agcuggugcauuacagaga

SEQ ID NO: 2403804 - RNA, 20 nt, Human
agcuggugcauuacagagag

SEQ ID NO: 2403805 - RNA, 21 nt, Human
agcuggugcauuacagagagg

SEQ ID NO: 2403806 - RNA, 22 nt, Human
agcuggugcauuacagagagga

SEQ ID NO: 2403807 - RNA, 18 nt, Human
agcuguaagaagagacug

SEQ ID NO: 2403808 - RNA, 18 nt, Human
agcuggugagugaugcgg

SEQ ID NO: 2403809 - RNA, 20 nt, Human
agcuggguggcacugccaug

SEQ ID NO: 2403810 - RNA, 10 nt, Human
agcuggugca

SEQ ID NO: 2403811 - RNA, 12 nt, Human
agcuggugcauu

SEQ ID NO: 2403812 - RNA, 13 nt, Human
agcuggugcauua

SEQ ID NO: 2403813 - RNA, 14 nt, Human
agcuggugcauuac

SEQ ID NO: 2403814 - RNA, 17 nt, Human
agcuggugcauuacaga

SEQ ID NO: 2403815 - RNA, 18 nt, Human
agcuggugcauuacagag

SEQ ID NO: 2403816 - RNA, 22 nt, Human
agcugggugucaagagggucug

SEQ ID NO: 2403817 - RNA, 17 nt, Human
agcugggugucaagagg

SEQ ID NO: 2403818 - RNA, 16 nt, Human
agcugggucaggcagg

SEQ ID NO: 2403819 - RNA, 17 nt, Human
agcugggucaggcaggg

SEQ ID NO: 2403820 - RNA, 19 nt, Human
agcuggguggcacugccau

SEQ ID NO: 2403821 - RNA, 15 nt, Human
agcugcucuggaaaa

SEQ ID NO: 2403822 - RNA, 18 nt, Human
agcuggguggcacugcca

SEQ ID NO: 2403823 - RNA, 15 nt, Human
agcugggucaggcag

SEQ ID NO: 2403824 - RNA, 16 nt, Human
agcugcucugucuucu

SEQ ID NO: 2403825 - RNA, 14 nt, Human
agcugcucuggaaa

SEQ ID NO: 2403826 - RNA, 17 nt, Human
agcugcuccuagaggga

SEQ ID NO: 2403827 - RNA, 18 nt, Human
agcugcuccuagagggag

SEQ ID NO: 2403828 - RNA, 19 nt, Human
agcugcuccuagagggagg

SEQ ID NO: 2403829 - RNA, 23 nt, Human
agcugcucugaauuaguccuugc

SEQ ID NO: 2403830 - RNA, 14 nt, Human
agcugcucuauugu

SEQ ID NO: 2403831 - RNA, 20 nt, Human
agcugcuccuagagggaggg

SEQ ID NO: 2403832 - RNA, 22 nt, Human
agcugcuccuagagggaggggc

SEQ ID NO: 2403833 - RNA, 15 nt, Human
agcugcuccccuccc

SEQ ID NO: 2403834 - RNA, 13 nt, Human
agcugcuccccuc

SEQ ID NO: 2403835 - RNA, 14 nt, Human
agcugcuccccucc

SEQ ID NO: 2403836 - RNA, 19 nt, Human
agcugcuccccucccuccu

SEQ ID NO: 2403837 - RNA, 21 nt, Human
agcugauacaaauugcagacu

SEQ ID NO: 2403838 - RNA, 13 nt, Human
agcugauccagag

SEQ ID NO: 2403839 - RNA, 13 nt, Human
agcugcuccccag

SEQ ID NO: 2403840 - RNA, 17 nt, Human
agcugcuccccagcagc

SEQ ID NO: 2403841 - RNA, 20 nt, Human
agcugcuccccagcagcgga

SEQ ID NO: 2403842 - RNA, 12 nt, Human
agcugcuccccu

SEQ ID NO: 2403843 - RNA, 21 nt, Human
agcugaggccacacucagcac

SEQ ID NO: 2403844 - RNA, 22 nt, Human
agcugaggccacacucagcaca

SEQ ID NO: 2403845 - RNA, 22 nt, Human
agcugaggggggccgugcccag

SEQ ID NO: 2403846 - RNA, 13 nt, Human
agcugaggggggc

SEQ ID NO: 2403847 - RNA, 23 nt, Human
agcugaggggggccgugcccagg

SEQ ID NO: 2403848 - RNA, 18 nt, Human
agcugaggucucuugagg

SEQ ID NO: 2403849 - RNA, 15 nt, Human
agcugaccucuguug

SEQ ID NO: 2403850 - RNA, 12 nt, Human
agcugaccucug

SEQ ID NO: 2403851 - RNA, 23 nt, Human
agcugacccagccccuugagaaa

SEQ ID NO: 2403852 - RNA, 16 nt, Human
agcugacccagccccu

SEQ ID NO: 2403853 - RNA, 21 nt, Human
agcugaggucucuugagggag

SEQ ID NO: 2403854 - RNA, 23 nt, Human
agcugaggucucuugagggagcu

SEQ ID NO: 2403855 - RNA, 17 nt, Human
agcugaccacaggcagu

SEQ ID NO: 2403856 - RNA, 16 nt, Human
agcugaccacaggcag

SEQ ID NO: 2403857 - RNA, 14 nt, Human
agcugacauggaaa

SEQ ID NO: 2403858 - RNA, 12 nt, Human
agcugacaugga

SEQ ID NO: 2403859 - RNA, 16 nt, Human
agcugacaguccucuc

SEQ ID NO: 2403860 - RNA, 21 nt, Human
agcugacaguccucuccaccu

SEQ ID NO: 2403861 - RNA, 14 nt, Human
agcugacaguccuc

SEQ ID NO: 2403862 - RNA, 13 nt, Human
agcugacaguccu

SEQ ID NO: 2403863 - RNA, 23 nt, Human
agcugacacaaaccugccugggu

SEQ ID NO: 2403864 - RNA, 22 nt, Human
agcugacacaaaccugccuggg

SEQ ID NO: 2403865 - RNA, 21 nt, Human
agcugacacaaaccugccugg

SEQ ID NO: 2403866 - RNA, 20 nt, Human
agcugacacaaaccugccug

SEQ ID NO: 2403867 - RNA, 19 nt, Human
agcugacacaaaccugccu

SEQ ID NO: 2403868 - RNA, 13 nt, Human
agcuccuguccuc

SEQ ID NO: 2403869 - RNA, 12 nt, Human
agcuccuguccu

SEQ ID NO: 2403870 - RNA, 14 nt, Human
agcugacacaaacc

SEQ ID NO: 2403871 - RNA, 23 nt, Human
agcuccuccucccugcaucugac

SEQ ID NO: 2403872 - RNA, 21 nt, Human
agcuccuccucccugcaucug

SEQ ID NO: 2403873 - RNA, 15 nt, Human
agcuccucugggcag

SEQ ID NO: 2403874 - RNA, 17 nt, Human
agcuccucugggcagga

SEQ ID NO: 2403875 - RNA, 19 nt, Human
agcuccucugggcaggacc

SEQ ID NO: 2403876 - RNA, 20 nt, Human
agcuccucugggcaggaccu

SEQ ID NO: 2403877 - RNA, 13 nt, Human
agcuccucuuccu

SEQ ID NO: 2403878 - RNA, 23 nt, Human
agcuccugcuccacagccauccc

SEQ ID NO: 2403879 - RNA, 11 nt, Human
agcuccuguaa

SEQ ID NO: 2403880 - RNA, 22 nt, Human
agcuccuggucuugagaugucu

SEQ ID NO: 2403881 - RNA, 20 nt, Human
agcuccuggucuugagaugu

SEQ ID NO: 2403882 - RNA, 16 nt, Human
agcuccucccuuguuc

SEQ ID NO: 2403883 - RNA, 20 nt, Human
agcuccuccgugcuuccuca

SEQ ID NO: 2403884 - RNA, 20 nt, Human
agcuccucccuuguucucua

SEQ ID NO: 2403885 - RNA, 22 nt, Human
agcuccuccgugcuuccucagu

SEQ ID NO: 2403886 - RNA, 13 nt, Human
agcuccuccuccc

SEQ ID NO: 2403887 - RNA, 14 nt, Human
agcuccuccucccu

SEQ ID NO: 2403888 - RNA, 15 nt, Human
agcuccuccucccug

SEQ ID NO: 2403889 - RNA, 16 nt, Human
agcuccuccucccugc

SEQ ID NO: 2403890 - RNA, 17 nt, Human
agcuccuccucccugca

SEQ ID NO: 2403891 - RNA, 23 nt, Human
agcuccucaacucaccuaauguu

SEQ ID NO: 2403892 - RNA, 16 nt, Human
agcuccucaacucacc

SEQ ID NO: 2403893 - RNA, 21 nt, Human
agcuccucauccagggcucug

SEQ ID NO: 2403894 - RNA, 19 nt, Human
agcuccucauccagggcuc

SEQ ID NO: 2403895 - RNA, 12 nt, Human
agcuccucccac

SEQ ID NO: 2403896 - RNA, 18 nt, Human
agcuccucauccagggcu

SEQ ID NO: 2403897 - RNA, 15 nt, Human
agcuccucauccagg

SEQ ID NO: 2403898 - RNA, 13 nt, Human
aggcacugccuga

SEQ ID NO: 2403899 - RNA, 23 nt, Human
aggcacugagauaccagcgagga

SEQ ID NO: 2403900 - RNA, 21 nt, Human
aggcagacacagggacuugaa

SEQ ID NO: 2403901 - RNA, 15 nt, Human
aggcagacacaggga

SEQ ID NO: 2403902 - RNA, 14 nt, Human
aggcagacacaggg

SEQ ID NO: 2403903 - RNA, 11 nt, Human
aggcagacaca

SEQ ID NO: 2403904 - RNA, 21 nt, Human
aggcagaauccuggcccucug

SEQ ID NO: 2403905 - RNA, 20 nt, Human
aggcagaauccuggcccucu

SEQ ID NO: 2403906 - RNA, 23 nt, Human
aggcagaagaauugaacccagga

SEQ ID NO: 2403907 - RNA, 23 nt, Human
aggcacugggggcagcgggggcc

SEQ ID NO: 2403908 - RNA, 22 nt, Human
aggcagaagaauugaacccagg

SEQ ID NO: 2403909 - RNA, 14 nt, Human
aggcacugccugau

SEQ ID NO: 2403910 - RNA, 22 nt, Human
aggcacugcugcccagccucca

SEQ ID NO: 2403911 - RNA, 16 nt, Human
aggcacugcugcccag

SEQ ID NO: 2403912 - RNA, 14 nt, Human
aggcacugcugccc

SEQ ID NO: 2403913 - RNA, 14 nt, Human
aggauguugaaaaa

SEQ ID NO: 2403914 - RNA, 20 nt, Human
aggauguucugggacacagu

SEQ ID NO: 2403915 - RNA, 17 nt, Human
aggauguugaaaaaguu

SEQ ID NO: 2403916 - RNA, 14 nt, Human
aggagggucaggaa

SEQ ID NO: 2403917 - RNA, 17 nt, Human
aggagggucaggaagga

SEQ ID NO: 2403918 - RNA, 16 nt, Human
aggaggggcuguaaaa

SEQ ID NO: 2403919 - RNA, 20 nt, Human
aggaggggcccguugucucc

SEQ ID NO: 2403920 - RNA, 13 nt, Human
aggaggggccgcu

SEQ ID NO: 2403921 - RNA, 19 nt, Human
aggagaggagagccagaga

SEQ ID NO: 2403922 - RNA, 17 nt, Human
aggaggggauagagaga

SEQ ID NO: 2403923 - RNA, 12 nt, Human
aggauucuuccu

SEQ ID NO: 2403924 - RNA, 13 nt, Human
aggauucuaugag

SEQ ID NO: 2403925 - RNA, 15 nt, Human
aggauucuaugaggc

SEQ ID NO: 2403926 - RNA, 16 nt, Human
aggauucuaugaggca

SEQ ID NO: 2403927 - RNA, 19 nt, Human
aggaacucuggcuuccagg

SEQ ID NO: 2403928 - RNA, 21 nt, Human
aggaacucuggcuuccaggua

SEQ ID NO: 2403929 - RNA, 16 nt, Human
aggaacugcugggcuu

SEQ ID NO: 2403930 - RNA, 15 nt, Human
aggaacuacugagga

SEQ ID NO: 2403931 - RNA, 18 nt, Human
aggaacucuggcuuccag

SEQ ID NO: 2403932 - RNA, 16 nt, Human
aggaacucuggcuucc

SEQ ID NO: 2403933 - RNA, 13 nt, Human
aggaacucuggcu

SEQ ID NO: 2403934 - RNA, 23 nt, Human
aggaacucccagcaacacaagcu

SEQ ID NO: 2403935 - RNA, 14 nt, Human
aggaacucccagca

SEQ ID NO: 2403936 - RNA, 13 nt, Human
aggaacucccagc

SEQ ID NO: 2403937 - RNA, 20 nt, Human
aggaacgguaaauuucugug

SEQ ID NO: 2403938 - RNA, 13 nt, Human
aggaccagcucag

SEQ ID NO: 2403939 - RNA, 14 nt, Human
aggaccagcucagg

SEQ ID NO: 2403940 - RNA, 15 nt, Human
aggaccagcucagga

SEQ ID NO: 2403941 - RNA, 18 nt, Human
aggaccagcucaggacag

SEQ ID NO: 2403942 - RNA, 20 nt, Human
aggaccccuccaugugggcu

SEQ ID NO: 2403943 - RNA, 13 nt, Human
aggacccccuucc

SEQ ID NO: 2403944 - RNA, 16 nt, Human
aggacccccuuccccu

SEQ ID NO: 2403945 - RNA, 15 nt, Human
aggacccccuucccc

SEQ ID NO: 2403946 - RNA, 17 nt, Human
aggacccccuuccccua

SEQ ID NO: 2403947 - RNA, 13 nt, Human
aggaccccucacc

SEQ ID NO: 2403948 - RNA, 19 nt, Human
aggaccaagcaucuugggg

SEQ ID NO: 2403949 - RNA, 17 nt, Human
aggaccaagcaucuugg

SEQ ID NO: 2403950 - RNA, 14 nt, Human
aggacauuucucua

SEQ ID NO: 2403951 - RNA, 12 nt, Human
aggaccagcuca

SEQ ID NO: 2403952 - RNA, 12 nt, Human
aggaccacuccu

SEQ ID NO: 2403953 - RNA, 16 nt, Human
aggaccacuccuguac

SEQ ID NO: 2403954 - RNA, 22 nt, Human
aggaccacuccuguacacugaa

SEQ ID NO: 2403955 - RNA, 14 nt, Human
aggagaagccagga

SEQ ID NO: 2403956 - RNA, 15 nt, Human
aggagaagccaggaa

SEQ ID NO: 2403957 - RNA, 15 nt, Human
aggagagcuagcagc

SEQ ID NO: 2403958 - RNA, 15 nt, Human
aggagaggagagcca

SEQ ID NO: 2403959 - RNA, 14 nt, Human
aggagaggagagcc

SEQ ID NO: 2403960 - RNA, 13 nt, Human
aggagaggagagc

SEQ ID NO: 2403961 - RNA, 18 nt, Human
aggagaggagagaggcag

SEQ ID NO: 2403962 - RNA, 17 nt, Human
aggagaggagagaggca

SEQ ID NO: 2403963 - RNA, 16 nt, Human
aggagaggagagaggc

SEQ ID NO: 2403964 - RNA, 15 nt, Human
aggagaggagagagg

SEQ ID NO: 2403965 - RNA, 14 nt, Human
aggagaggagagag

SEQ ID NO: 2403966 - RNA, 20 nt, Human
aggagaggaaaaguaaggug

SEQ ID NO: 2403967 - RNA, 15 nt, Human
aggagaggaaaagua

SEQ ID NO: 2403968 - RNA, 13 nt, Human
aggagaggagaga

SEQ ID NO: 2403969 - RNA, 12 nt, Human
aggagaggaaag

SEQ ID NO: 2403970 - RNA, 20 nt, Human
aggagagccugcugcauggg

SEQ ID NO: 2403971 - RNA, 14 nt, Human
aggagaggggcaca

SEQ ID NO: 2403972 - RNA, 16 nt, Human
aggagaggggcacagg

SEQ ID NO: 2403973 - RNA, 18 nt, Human
aggagaggggcacagggu

SEQ ID NO: 2403974 - RNA, 17 nt, Human
aggagaggagagccaga

SEQ ID NO: 2403975 - RNA, 16 nt, Human
aggagaggagagccag

SEQ ID NO: 2403976 - RNA, 13 nt, Human
aggagaggggcag

SEQ ID NO: 2403977 - RNA, 18 nt, Human
aggagaggggcagaacag

SEQ ID NO: 2403978 - RNA, 19 nt, Human
aggagaggggcagaacagc

SEQ ID NO: 2403979 - RNA, 16 nt, Human
aggagaaccaaaucug

SEQ ID NO: 2403980 - RNA, 20 nt, Human
aggaccucugaaacccugga

SEQ ID NO: 2403981 - RNA, 22 nt, Human
aggagaaccaaaucuggaagcc

SEQ ID NO: 2403982 - RNA, 19 nt, Human
aggagaaccaaaucuggaa

SEQ ID NO: 2403983 - RNA, 14 nt, Human
aggagaaccacuac

SEQ ID NO: 2403984 - RNA, 15 nt, Human
aggagaaccacuaca

SEQ ID NO: 2403985 - RNA, 12 nt, Human
aggagaagccag

SEQ ID NO: 2403986 - RNA, 13 nt, Human
aggagaagccagg

SEQ ID NO: 2403987 - RNA, 11 nt, Human
aggagaagcca

SEQ ID NO: 2403988 - RNA, 14 nt, Human
aggaccucagguga

SEQ ID NO: 2403989 - RNA, 20 nt, Human
aggaccucaggugagaagca

SEQ ID NO: 2403990 - RNA, 17 nt, Human
aggacccggaggggccu

SEQ ID NO: 2403991 - RNA, 15 nt, Human
aggaccccucaccuu

SEQ ID NO: 2403992 - RNA, 23 nt, Human
aggaccccucaccuugcaacaca

SEQ ID NO: 2403993 - RNA, 18 nt, Human
aggaccucugaaacccug

SEQ ID NO: 2403994 - RNA, 12 nt, Human
ggaggcgcgagc

SEQ ID NO: 2403995 - RNA, 16 nt, Human
ggaggcuccagagggc

SEQ ID NO: 2403996 - RNA, 18 nt, Human
ggaggcuccagagggcac

SEQ ID NO: 2403997 - RNA, 15 nt, Human
ggaggcuccagaggg

SEQ ID NO: 2403998 - RNA, 15 nt, Human
ggaggcucagguccc

SEQ ID NO: 2403999 - RNA, 10 nt, Human
ggaggcugcc

SEQ ID NO: 2404000 - RNA, 12 nt, Human
ggaggcggagag

SEQ ID NO: 2404001 - RNA, 22 nt, Human
ggaggcggacguuccagccggc

SEQ ID NO: 2404002 - RNA, 19 nt, Human
ggaggcggacguuccagcc

SEQ ID NO: 2404003 - RNA, 20 nt, Human
ggaggcggauguugaaguga

SEQ ID NO: 2404004 - RNA, 20 nt, Human
ggaggcggagcuugcaguga

SEQ ID NO: 2404005 - RNA, 21 nt, Human
ggaggcucacccccuucucca

SEQ ID NO: 2404006 - RNA, 20 nt, Human
ggaggcggagaguacaguga

SEQ ID NO: 2404007 - RNA, 20 nt, Human
ggaggcuaaagcccagagac

SEQ ID NO: 2404008 - RNA, 13 nt, Human
ggaggggggaggu

SEQ ID NO: 2404009 - RNA, 14 nt, Human
ggagggggauccga

SEQ ID NO: 2404010 - RNA, 16 nt, Human
ggagggggcuugaagc

SEQ ID NO: 2404011 - RNA, 14 nt, Human
ggaggggggaggug

SEQ ID NO: 2404012 - RNA, 15 nt, Human
ggaggggggagccau

SEQ ID NO: 2404013 - RNA, 12 nt, Human
ggaggggggagc

SEQ ID NO: 2404014 - RNA, 21 nt, Human
ggagggggcuugaagccaaag

SEQ ID NO: 2404015 - RNA, 18 nt, Human
ggagggggcuugaagcca

SEQ ID NO: 2404016 - RNA, 14 nt, Human
ggagggucaggaag

SEQ ID NO: 2404017 - RNA, 21 nt, Human
ggaggcugcccccggcccccu

SEQ ID NO: 2404018 - RNA, 17 nt, Human
ggaggcugcccccggcc

SEQ ID NO: 2404019 - RNA, 13 nt, Human
ggaggcugccccc

SEQ ID NO: 2404020 - RNA, 12 nt, Human
ggaggcugcccc

SEQ ID NO: 2404021 - RNA, 22 nt, Human
ggaggcugcccccggcccccug

SEQ ID NO: 2404022 - RNA, 13 nt, Human
ggaggcuggcagg

SEQ ID NO: 2404023 - RNA, 16 nt, Human
ggaggcuggcuggggc

SEQ ID NO: 2404024 - RNA, 15 nt, Human
ggaggcuggcugggg

SEQ ID NO: 2404025 - RNA, 15 nt, Human
ggaggcuuccugcgu

SEQ ID NO: 2404026 - RNA, 16 nt, Human
ggaggcuugggaccgc

SEQ ID NO: 2404027 - RNA, 16 nt, Human
ggaggcuugucagagc

SEQ ID NO: 2404028 - RNA, 17 nt, Human
ggaggcuugucagagcu

SEQ ID NO: 2404029 - RNA, 18 nt, Human
ggaggcuugucagagcug

SEQ ID NO: 2404030 - RNA, 19 nt, Human
ggaggcuugucagagcugg

SEQ ID NO: 2404031 - RNA, 20 nt, Human
ggaggcuugucagagcuggg

SEQ ID NO: 2404032 - RNA, 22 nt, Human
ggaggcuugucagagcugggag

SEQ ID NO: 2404033 - RNA, 22 nt, Human
ggagguaaggaauaccuguccc

SEQ ID NO: 2404034 - RNA, 19 nt, Human
ggagggugggagagcccag

SEQ ID NO: 2404035 - RNA, 15 nt, Human
ggagguggcagcccu

SEQ ID NO: 2404036 - RNA, 17 nt, Human
ggagguggcagcccugu

SEQ ID NO: 2404037 - RNA, 21 nt, Human
ggagggugacgggggugaacu

SEQ ID NO: 2404038 - RNA, 21 nt, Human
ggagggucccaagcugggccc

SEQ ID NO: 2404039 - RNA, 15 nt, Human
ggaggguggcaggug

SEQ ID NO: 2404040 - RNA, 20 nt, Human
ggagggucccaagcugggcc

SEQ ID NO: 2404041 - RNA, 14 nt, Human
ggagggucccaagc

SEQ ID NO: 2404042 - RNA, 15 nt, Human
ggagggucaggaagg

SEQ ID NO: 2404043 - RNA, 16 nt, Human
ggagggucaggaagga

SEQ ID NO: 2404044 - RNA, 23 nt, Human
ggaggugggauccuccaggugca

SEQ ID NO: 2404045 - RNA, 22 nt, Human
ggaggugggauccuccaggugc

SEQ ID NO: 2404046 - RNA, 19 nt, Human
ggaggugggagcaggagau

SEQ ID NO: 2404047 - RNA, 16 nt, Human
ggaggugggagcagga

SEQ ID NO: 2404048 - RNA, 17 nt, Human
ggagguggggaugagaa

SEQ ID NO: 2404049 - RNA, 18 nt, Human
ggagguggcuauggccac

SEQ ID NO: 2404050 - RNA, 13 nt, Human
ggagguggcuggg

SEQ ID NO: 2404051 - RNA, 15 nt, Human
ggaggugucaggcug

SEQ ID NO: 2404052 - RNA, 14 nt, Human
ggaggugucaggcu

SEQ ID NO: 2404053 - RNA, 15 nt, Human
ggaguggccacagaa

SEQ ID NO: 2404054 - RNA, 12 nt, Human
ggagugggccca

SEQ ID NO: 2404055 - RNA, 16 nt, Human
ggaguggccacagaaa

SEQ ID NO: 2404056 - RNA, 22 nt, Human
ggagugggcccaaugcacuuug

SEQ ID NO: 2404057 - RNA, 12 nt, Human
ggagugggacag

SEQ ID NO: 2404058 - RNA, 18 nt, Human
ggagugggacagagucug

SEQ ID NO: 2404059 - RNA, 15 nt, Human
ggaguggggcaguag

SEQ ID NO: 2404060 - RNA, 12 nt, Human
ggaguuaucuaa

SEQ ID NO: 2404061 - RNA, 13 nt, Human
ggaguucaaugau

SEQ ID NO: 2404062 - RNA, 12 nt, Human
ggaguucaauga

SEQ ID NO: 2404063 - RNA, 23 nt, Human
ggaguuaagaccuggcagcucug

SEQ ID NO: 2404064 - RNA, 22 nt, Human
ggaguuacauuaauguuaauuc

SEQ ID NO: 2404065 - RNA, 15 nt, Human
ggaguuagaggccag

SEQ ID NO: 2404066 - RNA, 16 nt, Human
ggaguuagaggccagc

SEQ ID NO: 2404067 - RNA, 18 nt, Human
ggaguuagaggccagccu

SEQ ID NO: 2404068 - RNA, 19 nt, Human
ggaguuagaggccagccug

SEQ ID NO: 2404069 - RNA, 21 nt, Human
ggaguuagaggccagccuggc

SEQ ID NO: 2404070 - RNA, 16 nt, Human
ggaguuaagaccuggc

SEQ ID NO: 2404071 - RNA, 18 nt, Human
ggaguuaagaccuggcag

SEQ ID NO: 2404072 - RNA, 15 nt, Human
ggaguuaagaccugg

SEQ ID NO: 2404073 - RNA, 12 nt, Human
ggaguguucccc

SEQ ID NO: 2404074 - RNA, 20 nt, Human
ggaguguuccccuuccacug

SEQ ID NO: 2404075 - RNA, 18 nt, Human
ggaguguguauuguuccc

SEQ ID NO: 2404076 - RNA, 19 nt, Human
ggaguguguauuguuccca

SEQ ID NO: 2404077 - RNA, 11 nt, Human
ggaguguguaa

SEQ ID NO: 2404078 - RNA, 22 nt, Human
ggaguguguaauuuaaaauugu

SEQ ID NO: 2404079 - RNA, 22 nt, Human
ggaguguggcugaggaggccuc

SEQ ID NO: 2404080 - RNA, 16 nt, Human
ggaguguguauuguuc

SEQ ID NO: 2404081 - RNA, 17 nt, Human
ggaguguguauuguucc

SEQ ID NO: 2404082 - RNA, 16 nt, Human
ggaguggggcaguaga

SEQ ID NO: 2404083 - RNA, 17 nt, Human
ggagugggacagagucu

SEQ ID NO: 2404084 - RNA, 20 nt, Human
ggaguguaugacugcacaug

SEQ ID NO: 2404085 - RNA, 16 nt, Human
ggauuuaauuugauau

SEQ ID NO: 2404086 - RNA, 21 nt, Human
ggauuuaacagucauuuaaaa

SEQ ID NO: 2404087 - RNA, 22 nt, Human
ggauuuaacagaaauguacagc

SEQ ID NO: 2404088 - RNA, 16 nt, Human
ggauuuaacagaaaug

SEQ ID NO: 2404089 - RNA, 17 nt, Human
ggauuuaacagaaaugu

SEQ ID NO: 2404090 - RNA, 20 nt, Human
ggauuguccccgacccuugc

SEQ ID NO: 2404091 - RNA, 16 nt, Human
ggauuguccccgaccc

SEQ ID NO: 2404092 - RNA, 12 nt, Human
ggauuuaacaga

SEQ ID NO: 2404093 - RNA, 15 nt, Human
ggauuguuccuguca

SEQ ID NO: 2404094 - RNA, 13 nt, Human
ggauuguccccga

SEQ ID NO: 2404095 - RNA, 14 nt, Human
ggauuguaguccca

SEQ ID NO: 2404096 - RNA, 13 nt, Human
ggauggugcccug

SEQ ID NO: 2404097 - RNA, 20 nt, Human
ggaugguccuggggcucugu

SEQ ID NO: 2404098 - RNA, 22 nt, Human
ggaugguccuggggcucugugc

SEQ ID NO: 2404099 - RNA, 23 nt, Human
ggaugguacuagggggaagugac

SEQ ID NO: 2404100 - RNA, 14 nt, Human
ggaugguccugggg

SEQ ID NO: 2404101 - RNA, 16 nt, Human
ggaugguccuggggcu

SEQ ID NO: 2404102 - RNA, 15 nt, Human
ggaugggggaacuca

SEQ ID NO: 2404103 - RNA, 17 nt, Human
ggaugggggaacucaga

SEQ ID NO: 2404104 - RNA, 17 nt, Human
ggaugaaauuuucuaga

SEQ ID NO: 2404105 - RNA, 18 nt, Human
ggaugaaauaacuccuuc

SEQ ID NO: 2404106 - RNA, 16 nt, Human
ggaucuuuguggccaa

SEQ ID NO: 2404107 - RNA, 17 nt, Human
ggaucuuuguggccaag

SEQ ID NO: 2404108 - RNA, 21 nt, Human
ggaugggggaacucagaucca

SEQ ID NO: 2404109 - RNA, 22 nt, Human
ggaugggggaacucagauccag

SEQ ID NO: 2404110 - RNA, 22 nt, Human
ggaugggggcuggccucuggcu

SEQ ID NO: 2404111 - RNA, 20 nt, Human
ggaugggggaaauggugccu

SEQ ID NO: 2404112 - RNA, 23 nt, Human
ggaugggggaacucagauccagg

SEQ ID NO: 2404113 - RNA, 14 nt, Human
ggaugaaaaaauaa

SEQ ID NO: 2404114 - RNA, 22 nt, Human
ggaucuuuggacagaagcagcu

SEQ ID NO: 2404115 - RNA, 22 nt, Human
ggaucuugcauucccagugguc

SEQ ID NO: 2404116 - RNA, 17 nt, Human
ggaucuugcauucccag

SEQ ID NO: 2404117 - RNA, 15 nt, Human
ggaucuuuguggcca

SEQ ID NO: 2404118 - RNA, 23 nt, Human
ggauccugagccagauuucacuc

SEQ ID NO: 2404119 - RNA, 20 nt, Human
ggauccugagccagauuuca

SEQ ID NO: 2404120 - RNA, 19 nt, Human
ggauccugagccagauuuc

SEQ ID NO: 2404121 - RNA, 18 nt, Human
ggauccugagccagauuu

SEQ ID NO: 2404122 - RNA, 16 nt, Human
ggauccugagccagau

SEQ ID NO: 2404123 - RNA, 15 nt, Human
ggauccugagccaga

SEQ ID NO: 2404124 - RNA, 16 nt, Human
ggaguucaucuugaau

SEQ ID NO: 2404125 - RNA, 17 nt, Human
ggaguucaaugaucuag

SEQ ID NO: 2404126 - RNA, 16 nt, Human
ggaguucaaugaucua

SEQ ID NO: 2404127 - RNA, 15 nt, Human
ggaguucaaugaucu

SEQ ID NO: 2404128 - RNA, 14 nt, Human
ggaguucaaugauc

SEQ ID NO: 2404129 - RNA, 20 nt, Human
ggaguucaguggugugaucu

SEQ ID NO: 2404130 - RNA, 20 nt, Human
ggaguucaaugaucuagguu

SEQ ID NO: 2404131 - RNA, 18 nt, Human
ggaucucuugagccuggg

SEQ ID NO: 2404132 - RNA, 21 nt, Human
ggaucuccaaggaccagguua

SEQ ID NO: 2404133 - RNA, 14 nt, Human
ggaucuccaaggac

SEQ ID NO: 2404134 - RNA, 13 nt, Human
ggaucuccaagga

SEQ ID NO: 2404135 - RNA, 13 nt, Human
ggaucucaggggc

SEQ ID NO: 2404136 - RNA, 13 nt, Human
ggaucucucagga

SEQ ID NO: 2404137 - RNA, 16 nt, Human
ggaucucucaggagca

SEQ ID NO: 2404138 - RNA, 14 nt, Human
ggaucuccccacuc

SEQ ID NO: 2404139 - RNA, 16 nt, Human
ggaucuugcauuccca

SEQ ID NO: 2404140 - RNA, 21 nt, Human
ggaucuuuggacagaagcagc

SEQ ID NO: 2404141 - RNA, 22 nt, Human
ggaucucucaggagcacaggca

SEQ ID NO: 2404142 - RNA, 21 nt, Human
ggaucucucaggagcacaggc

SEQ ID NO: 2404143 - RNA, 19 nt, Human
ggaguuccaugaagaccac

SEQ ID NO: 2404144 - RNA, 15 nt, Human
ggaguuccaugaaga

SEQ ID NO: 2404145 - RNA, 14 nt, Human
ggaguuccaugaag

SEQ ID NO: 2404146 - RNA, 19 nt, Human
ggaucggaggcuugucaga

SEQ ID NO: 2404147 - RNA, 23 nt, Human
ggaucggaggcuugucagagcug

SEQ ID NO: 2404148 - RNA, 12 nt, Human
ggaucuaccagc

SEQ ID NO: 2404149 - RNA, 13 nt, Human
ggaucuaccagca

SEQ ID NO: 2404150 - RNA, 18 nt, Human
ggaucuaccagcauaaau

SEQ ID NO: 2404151 - RNA, 10 nt, Human
ggaucucagg

SEQ ID NO: 2404152 - RNA, 17 nt, Human
ggaucucauuggacccu

SEQ ID NO: 2404153 - RNA, 24 nt, Human
ggaucucauuggacccuuccaugg

SEQ ID NO: 2404154 - RNA, 18 nt, Human
ggcaaaacuuuggcacug

SEQ ID NO: 2404155 - RNA, 23 nt, Human
ggcaaaaggaucuuuguggccaa

SEQ ID NO: 2404156 - RNA, 12 nt, Human
ggcaaaacucua

SEQ ID NO: 2404157 - RNA, 15 nt, Human
ggcaaaaaaauuaaa

SEQ ID NO: 2404158 - RNA, 18 nt, Human
ggauuuauaaaugcuauu

SEQ ID NO: 2404159 - RNA, 16 nt, Human
ggauuuauaaaugcua

SEQ ID NO: 2404160 - RNA, 14 nt, Human
ggauuuauuuuucc

SEQ ID NO: 2404161 - RNA, 20 nt, Human
ggauuucaugauuucauuuc

SEQ ID NO: 2404162 - RNA, 14 nt, Human
ggauuucguggguc

SEQ ID NO: 2404163 - RNA, 19 nt, Human
ggauuuccagccagggcug

SEQ ID NO: 2404164 - RNA, 23 nt, Human
ggauuuccugcuuugggaagccg

SEQ ID NO: 2404165 - RNA, 13 nt, Human
ggauuugaagcaa

SEQ ID NO: 2404166 - RNA, 13 nt, Human
ggauuucucccag

SEQ ID NO: 2404167 - RNA, 15 nt, Human
ggcaaaaaggcagga

SEQ ID NO: 2404168 - RNA, 16 nt, Human
ggauuuuugucuugug

SEQ ID NO: 2404169 - RNA, 14 nt, Human
ggauuuuugucuug

SEQ ID NO: 2404170 - RNA, 21 nt, Human
ggcacacacugugcuuucuau

SEQ ID NO: 2404171 - RNA, 13 nt, Human
ggcacacacugug

SEQ ID NO: 2404172 - RNA, 18 nt, Human
ggcacaccgggcacucag

SEQ ID NO: 2404173 - RNA, 21 nt, Human
ggcacacaccuguagucccag

SEQ ID NO: 2404174 - RNA, 22 nt, Human
ggcacugcuggguggcccaucc

SEQ ID NO: 2404175 - RNA, 21 nt, Human
ggcacugcuggguggcccauc

SEQ ID NO: 2404176 - RNA, 20 nt, Human
ggcacugcuggguggcccau

SEQ ID NO: 2404177 - RNA, 19 nt, Human
ggcacugcuggguggccca

SEQ ID NO: 2404178 - RNA, 16 nt, Human
ggcacugcuggguggc

SEQ ID NO: 2404179 - RNA, 15 nt, Human
ggcacugcugggugg

SEQ ID NO: 2404180 - RNA, 14 nt, Human
ggcacugcugggug

SEQ ID NO: 2404181 - RNA, 12 nt, Human
ggcacugcuggg

SEQ ID NO: 2404182 - RNA, 16 nt, Human
ggcacugcuuccagug

SEQ ID NO: 2404183 - RNA, 21 nt, Human
ggcacauuuccccagaccuga

SEQ ID NO: 2404184 - RNA, 16 nt, Human
ggcaccaaagccacca

SEQ ID NO: 2404185 - RNA, 22 nt, Human
ggcaccacugcacuccagccug

SEQ ID NO: 2404186 - RNA, 18 nt, Human
ggcacauuuaagagacag

SEQ ID NO: 2404187 - RNA, 19 nt, Human
ggcacaugcugagucuccc

SEQ ID NO: 2404188 - RNA, 16 nt, Human
ggcacauuuccccaga

SEQ ID NO: 2404189 - RNA, 20 nt, Human
ggcacauuuccccagaccug

SEQ ID NO: 2404190 - RNA, 18 nt, Human
ggcacaucagcacgauuu

SEQ ID NO: 2404191 - RNA, 21 nt, Human
ggcacauccuaugcaauauau

SEQ ID NO: 2404192 - RNA, 18 nt, Human
ggcacauccuaugcaaua

SEQ ID NO: 2404193 - RNA, 14 nt, Human
ggcacauggaggag

SEQ ID NO: 2404194 - RNA, 19 nt, Human
ggcacacgccucccacugg

SEQ ID NO: 2404195 - RNA, 18 nt, Human
ggcacacgccucccacug

SEQ ID NO: 2404196 - RNA, 17 nt, Human
ggcacacgccucccacu

SEQ ID NO: 2404197 - RNA, 15 nt, Human
ggcacacgccuccca

SEQ ID NO: 2404198 - RNA, 12 nt, Human
ggcacacgccuc

SEQ ID NO: 2404199 - RNA, 21 nt, Human
ggcagccccauucugccugcc

SEQ ID NO: 2404200 - RNA, 20 nt, Human
ggcagccccauucugccugc

SEQ ID NO: 2404201 - RNA, 16 nt, Human
ggcagccccauucugc

SEQ ID NO: 2404202 - RNA, 16 nt, Human
ggcagccucuucaaaa

SEQ ID NO: 2404203 - RNA, 11 nt, Human
ggcagccugga

SEQ ID NO: 2404204 - RNA, 22 nt, Human
ggcagccccauucugccugccc

SEQ ID NO: 2404205 - RNA, 13 nt, Human
ggcagccaggcca

SEQ ID NO: 2404206 - RNA, 20 nt, Human
ggcacugcuuccagugaggc

SEQ ID NO: 2404207 - RNA, 16 nt, Human
ggcacugcugugcugu

SEQ ID NO: 2404208 - RNA, 14 nt, Human
ggcacugcugugcu

SEQ ID NO: 2404209 - RNA, 22 nt, Human
ggcagcagugugaggccagggc

SEQ ID NO: 2404210 - RNA, 19 nt, Human
ggcagccaaacccaugagg

SEQ ID NO: 2404211 - RNA, 20 nt, Human
ggcagccaaacccaugaggc

SEQ ID NO: 2404212 - RNA, 16 nt, Human
ggcagccaaacccaug

SEQ ID NO: 2404213 - RNA, 18 nt, Human
ggcagccaaacccaugag

SEQ ID NO: 2404214 - RNA, 17 nt, Human
ggcagcauagcaagaca

SEQ ID NO: 2404215 - RNA, 19 nt, Human
ggcagcauagcaagacaca

SEQ ID NO: 2404216 - RNA, 20 nt, Human
ggcagccuggacauagagag

SEQ ID NO: 2404217 - RNA, 15 nt, Human
ggcagcgccaagcaa

SEQ ID NO: 2404218 - RNA, 18 nt, Human
ggcaggaggaucacuuga

SEQ ID NO: 2404219 - RNA, 23 nt, Human
ggcagcgccaagcaaccuggguc

SEQ ID NO: 2404220 - RNA, 18 nt, Human
ggcagcgccaagcaaccu

SEQ ID NO: 2404221 - RNA, 14 nt, Human
ggcagcgccaggcu

SEQ ID NO: 2404222 - RNA, 24 nt, Human
ggcaggaggauugcuugagcccag

SEQ ID NO: 2404223 - RNA, 16 nt, Human
ggcaggauggccuggc

SEQ ID NO: 2404224 - RNA, 15 nt, Human
ggcaggauggccugg

SEQ ID NO: 2404225 - RNA, 19 nt, Human
ggcaggauggccuggccag

SEQ ID NO: 2404226 - RNA, 13 nt, Human
ggcaggcacagca

SEQ ID NO: 2404227 - RNA, 16 nt, Human
ggcaggcacagcacag

SEQ ID NO: 2404228 - RNA, 14 nt, Human
ggcaggagggcccu

SEQ ID NO: 2404229 - RNA, 15 nt, Human
ggcaggaugacccug

SEQ ID NO: 2404230 - RNA, 22 nt, Human
ggcaggcugucuggccaggccu

SEQ ID NO: 2404231 - RNA, 18 nt, Human
ggcagggaaaggcucuga

SEQ ID NO: 2404232 - RNA, 14 nt, Human
ggcagggaccacac

SEQ ID NO: 2404233 - RNA, 23 nt, Human
ggcagggaaggggaggcagccgg

SEQ ID NO: 2404234 - RNA, 19 nt, Human
ggcagggagggccugggcc

SEQ ID NO: 2404235 - RNA, 20 nt, Human
ggcagggagggccugggccc

SEQ ID NO: 2404236 - RNA, 15 nt, Human
ggcagggauuugagg

SEQ ID NO: 2404237 - RNA, 13 nt, Human
ggcagggagggga

SEQ ID NO: 2404238 - RNA, 17 nt, Human
ggcagggagggccuggg

SEQ ID NO: 2404239 - RNA, 18 nt, Human
ggcagggagggccugggc

SEQ ID NO: 2404240 - RNA, 10 nt, Human
ggcagggagg

SEQ ID NO: 2404241 - RNA, 22 nt, Human
ggcagggagcggccggccagcc

SEQ ID NO: 2404242 - RNA, 19 nt, Human
ggcagggccuagcugcuac

SEQ ID NO: 2404243 - RNA, 16 nt, Human
ggcagggccccaggca

SEQ ID NO: 2404244 - RNA, 17 nt, Human
ggcagggccagggggug

SEQ ID NO: 2404245 - RNA, 15 nt, Human
ggcagggcaucuccu

SEQ ID NO: 2404246 - RNA, 18 nt, Human
ggcagggccaacccuucu

SEQ ID NO: 2404247 - RNA, 17 nt, Human
ggcaggggccuggagau

SEQ ID NO: 2404248 - RNA, 16 nt, Human
ggcaggggccuggaga

SEQ ID NO: 2404249 - RNA, 14 nt, Human
ggcaggggccugga

SEQ ID NO: 2404250 - RNA, 21 nt, Human
ggcaucacaugcucaaugacu

SEQ ID NO: 2404251 - RNA, 18 nt, Human
ggcaucaccuuaggcagg

SEQ ID NO: 2404252 - RNA, 20 nt, Human
ggcaucaccuuaggcaggga

SEQ ID NO: 2404253 - RNA, 18 nt, Human
ggcaucagucccuaugua

SEQ ID NO: 2404254 - RNA, 16 nt, Human
ggcaucagcuggcguc

SEQ ID NO: 2404255 - RNA, 13 nt, Human
ggcaucagcuggc

SEQ ID NO: 2404256 - RNA, 23 nt, Human
ggcaucaccuuaggcagggaagu

SEQ ID NO: 2404257 - RNA, 22 nt, Human
ggcaucacagggcagagccggg

SEQ ID NO: 2404258 - RNA, 23 nt, Human
ggcaucacagggcagagccggga

SEQ ID NO: 2404259 - RNA, 21 nt, Human
ggcaucgcaccauucugacuc

SEQ ID NO: 2404260 - RNA, 18 nt, Human
ggcaucgcaccauucuga

SEQ ID NO: 2404261 - RNA, 20 nt, Human
ggcaucgcaauguaagacuc

SEQ ID NO: 2404262 - RNA, 16 nt, Human
ggcauccuucugccuu

SEQ ID NO: 2404263 - RNA, 23 nt, Human
ggcaucaugcaucuuacugaagg

SEQ ID NO: 2404264 - RNA, 14 nt, Human
ggcauuugcugaau

SEQ ID NO: 2404265 - RNA, 22 nt, Human
ggcaucuagagcuugaugccag

SEQ ID NO: 2404266 - RNA, 21 nt, Human
ggcaucuagagcuugaugcca

SEQ ID NO: 2404267 - RNA, 19 nt, Human
ggcauccuucugccuuuuu

SEQ ID NO: 2404268 - RNA, 15 nt, Human
ggcaucuccaggaag

SEQ ID NO: 2404269 - RNA, 14 nt, Human
ggcaucuccaggaa

SEQ ID NO: 2404270 - RNA, 13 nt, Human
ggcaucuccagga

SEQ ID NO: 2404271 - RNA, 12 nt, Human
ggcaucuccagg

SEQ ID NO: 2404272 - RNA, 11 nt, Human
ggcauuuccua

SEQ ID NO: 2404273 - RNA, 16 nt, Human
ggcaucuccaggaagg

SEQ ID NO: 2404274 - RNA, 14 nt, Human
ggcaucuccugugc

SEQ ID NO: 2404275 - RNA, 16 nt, Human
ggccaaaggaagcaca

SEQ ID NO: 2404276 - RNA, 14 nt, Human
ggccaaaggaagca

SEQ ID NO: 2404277 - RNA, 17 nt, Human
ggcauuuguuugaacug

SEQ ID NO: 2404278 - RNA, 13 nt, Human
ggccaaaggaagc

SEQ ID NO: 2404279 - RNA, 23 nt, Human
ggccaacuugagggcccagagca

SEQ ID NO: 2404280 - RNA, 22 nt, Human
ggccaacuugagggcccagagc

SEQ ID NO: 2404281 - RNA, 21 nt, Human
ggccaacuugagggcccagag

SEQ ID NO: 2404282 - RNA, 23 nt, Human
ggccaagacuuggcaacagaagc

SEQ ID NO: 2404283 - RNA, 15 nt, Human
ggccaagacuuggca

SEQ ID NO: 2404284 - RNA, 13 nt, Human
ggccaagaggcug

SEQ ID NO: 2404285 - RNA, 19 nt, Human
ggccaaaggaagcacaugc

SEQ ID NO: 2404286 - RNA, 23 nt, Human
ggccaacccuucuccucuuguaa

SEQ ID NO: 2404287 - RNA, 18 nt, Human
ggccagagacacaagccu

SEQ ID NO: 2404288 - RNA, 21 nt, Human
ggccagaggcccccagcccag

SEQ ID NO: 2404289 - RNA, 19 nt, Human
ggccagaggcccccagccc

SEQ ID NO: 2404290 - RNA, 18 nt, Human
ggccagagagccuggugc

SEQ ID NO: 2404291 - RNA, 21 nt, Human
ggccagagagccuggugcugc

SEQ ID NO: 2404292 - RNA, 19 nt, Human
ggccagagggagugacaga

SEQ ID NO: 2404293 - RNA, 17 nt, Human
ggccagagggagugaca

SEQ ID NO: 2404294 - RNA, 14 nt, Human
ggccaagcagggag

SEQ ID NO: 2404295 - RNA, 11 nt, Human
ggccaaggacu

SEQ ID NO: 2404296 - RNA, 13 nt, Human
ggccaaggacugc

SEQ ID NO: 2404297 - RNA, 15 nt, Human
ggccaaggacugccg

SEQ ID NO: 2404298 - RNA, 17 nt, Human
ggccaaggacugccgac

SEQ ID NO: 2404299 - RNA, 17 nt, Human
ggccagagacacaagcc

SEQ ID NO: 2404300 - RNA, 18 nt, Human
ggccagacaugccacaag

SEQ ID NO: 2404301 - RNA, 12 nt, Human
ggcaggggcgga

SEQ ID NO: 2404302 - RNA, 16 nt, Human
ggcaggggugggggug

SEQ ID NO: 2404303 - RNA, 14 nt, Human
ggcagggguggggg

SEQ ID NO: 2404304 - RNA, 13 nt, Human
ggcaggggugggg

SEQ ID NO: 2404305 - RNA, 12 nt, Human
ggccucccaccc

SEQ ID NO: 2404306 - RNA, 11 nt, Human
ggccucccacc

SEQ ID NO: 2404307 - RNA, 15 nt, Human
ggccucccacaguga

SEQ ID NO: 2404308 - RNA, 14 nt, Human
ggccucccacagug

SEQ ID NO: 2404309 - RNA, 13 nt, Human
ggccucccacagu

SEQ ID NO: 2404310 - RNA, 11 nt, Human
ggccucccaca

SEQ ID NO: 2404311 - RNA, 17 nt, Human
ggccucccacagacuca

SEQ ID NO: 2404312 - RNA, 16 nt, Human
ggccagaugcaccagc

SEQ ID NO: 2404313 - RNA, 15 nt, Human
ggccagaugcaccag

SEQ ID NO: 2404314 - RNA, 22 nt, Human
ggccagaggcccccagcccagg

SEQ ID NO: 2404315 - RNA, 11 nt, Human
ggccagaggcu

SEQ ID NO: 2404316 - RNA, 17 nt, Human
ggccagauccagccugg

SEQ ID NO: 2404317 - RNA, 18 nt, Human
ggccagauccagccuggg

SEQ ID NO: 2404318 - RNA, 16 nt, Human
ggccccagcccacccu

SEQ ID NO: 2404319 - RNA, 15 nt, Human
ggccccagcccaccc

SEQ ID NO: 2404320 - RNA, 14 nt, Human
ggccccagcccacc

SEQ ID NO: 2404321 - RNA, 13 nt, Human
ggccccagcccac

SEQ ID NO: 2404322 - RNA, 12 nt, Human
ggccccagccca

SEQ ID NO: 2404323 - RNA, 21 nt, Human
ggccccagccagaguuccugc

SEQ ID NO: 2404324 - RNA, 13 nt, Human
ggccccagccaga

SEQ ID NO: 2404325 - RNA, 12 nt, Human
ggccccagccag

SEQ ID NO: 2404326 - RNA, 23 nt, Human
ggccccagcccacccuccugucu

SEQ ID NO: 2404327 - RNA, 11 nt, Human
ggccccagccu

SEQ ID NO: 2404328 - RNA, 19 nt, Human
ggccccagcccacccuccu

SEQ ID NO: 2404329 - RNA, 13 nt, Human
ggccccagccucc

SEQ ID NO: 2404330 - RNA, 18 nt, Human
ggccccagcacagcuuga

SEQ ID NO: 2404331 - RNA, 15 nt, Human
ggccccagcacagcu

SEQ ID NO: 2404332 - RNA, 13 nt, Human
ggccccagcacua

SEQ ID NO: 2404333 - RNA, 16 nt, Human
ggccccagcacuaaag

SEQ ID NO: 2404334 - RNA, 11 nt, Human
ggccccagcca

SEQ ID NO: 2404335 - RNA, 21 nt, Human
ggccccagcacuaaagcagug

SEQ ID NO: 2404336 - RNA, 19 nt, Human
ggccccugccucucugcag

SEQ ID NO: 2404337 - RNA, 18 nt, Human
ggccccugccucucugca

SEQ ID NO: 2404338 - RNA, 17 nt, Human
ggccccugccucucugc

SEQ ID NO: 2404339 - RNA, 15 nt, Human
ggccccagccuggcc

SEQ ID NO: 2404340 - RNA, 14 nt, Human
ggccccagccuggc

SEQ ID NO: 2404341 - RNA, 13 nt, Human
ggccccagccugg

SEQ ID NO: 2404342 - RNA, 12 nt, Human
ggccccagccug

SEQ ID NO: 2404343 - RNA, 13 nt, Human
ggccccugccucu

SEQ ID NO: 2404344 - RNA, 24 nt, Human
ggcccguugucucccuggcccuca

SEQ ID NO: 2404345 - RNA, 23 nt, Human
ggcccguugucucccuggcccuc

SEQ ID NO: 2404346 - RNA, 22 nt, Human
ggcccguugucucccuggcccu

SEQ ID NO: 2404347 - RNA, 21 nt, Human
ggcccguugucucccuggccc

SEQ ID NO: 2404348 - RNA, 20 nt, Human
ggcccguugucucccuggcc

SEQ ID NO: 2404349 - RNA, 19 nt, Human
ggcccguugucucccuggc

SEQ ID NO: 2404350 - RNA, 18 nt, Human
ggcccguugucucccugg

SEQ ID NO: 2404351 - RNA, 19 nt, Human
ggcccucaaggccucccac

SEQ ID NO: 2404352 - RNA, 18 nt, Human
ggcccucaaggccuccca

SEQ ID NO: 2404353 - RNA, 16 nt, Human
ggcccucaaggccucc

SEQ ID NO: 2404354 - RNA, 22 nt, Human
ggcccuaccagcgcccgcuggg

SEQ ID NO: 2404355 - RNA, 21 nt, Human
ggcccuaccagcgcccgcugg

SEQ ID NO: 2404356 - RNA, 16 nt, Human
ggcccuaccagcgccc

SEQ ID NO: 2404357 - RNA, 21 nt, Human
ggccccugccucucugcaggu

SEQ ID NO: 2404358 - RNA, 15 nt, Human
ggcccgucauguucc

SEQ ID NO: 2404359 - RNA, 17 nt, Human
ggcccguugucucccug

SEQ ID NO: 2404360 - RNA, 22 nt, Human
ggcccguugaggaugaggccgc

SEQ ID NO: 2404361 - RNA, 20 nt, Human
ggcccguugaggaugaggcc

SEQ ID NO: 2404362 - RNA, 16 nt, Human
ggcccguugaggauga

SEQ ID NO: 2404363 - RNA, 17 nt, Human
ggccccagccuggccca

SEQ ID NO: 2404364 - RNA, 16 nt, Human
ggccccagccuggccc

SEQ ID NO: 2404365 - RNA, 13 nt, Human
ggcccgugacaga

SEQ ID NO: 2404366 - RNA, 22 nt, Human
ggccgcgccaaauaaugucucu

SEQ ID NO: 2404367 - RNA, 14 nt, Human
ggccgccucacccc

SEQ ID NO: 2404368 - RNA, 14 nt, Human
ggccgccgccucuu

SEQ ID NO: 2404369 - RNA, 13 nt, Human
ggccgccucaccc

SEQ ID NO: 2404370 - RNA, 12 nt, Human
ggccgccucacc

SEQ ID NO: 2404371 - RNA, 22 nt, Human
ggccgcccccugccccccagcc

SEQ ID NO: 2404372 - RNA, 19 nt, Human
ggccgcccccugcccccca

SEQ ID NO: 2404373 - RNA, 18 nt, Human
ggccgcccccugcccccc

SEQ ID NO: 2404374 - RNA, 16 nt, Human
ggccgcccccugcccc

SEQ ID NO: 2404375 - RNA, 23 nt, Human
ggcccucaaggccucccacagug

SEQ ID NO: 2404376 - RNA, 20 nt, Human
ggcccucaaggccucccaca

SEQ ID NO: 2404377 - RNA, 15 nt, Human
ggcccucaccccugc

SEQ ID NO: 2404378 - RNA, 18 nt, Human
ggcccucaccccugcccu

SEQ ID NO: 2404379 - RNA, 20 nt, Human
ggcccucaccccugcccugg

SEQ ID NO: 2404380 - RNA, 21 nt, Human
ggcccucaccccugcccuggg

SEQ ID NO: 2404381 - RNA, 20 nt, Human
ggccucagucucccuucucc

SEQ ID NO: 2404382 - RNA, 11 nt, Human
ggccucagucu

SEQ ID NO: 2404383 - RNA, 17 nt, Human
ggccucagguuugccug

SEQ ID NO: 2404384 - RNA, 17 nt, Human
ggccucagcugccucac

SEQ ID NO: 2404385 - RNA, 22 nt, Human
ggccucagcugccucacuuccu

SEQ ID NO: 2404386 - RNA, 21 nt, Human
ggccgcuagaggccugaggau

SEQ ID NO: 2404387 - RNA, 20 nt, Human
ggccgcuagaggccugagga

SEQ ID NO: 2404388 - RNA, 19 nt, Human
ggccgcuagaggccugagg

SEQ ID NO: 2404389 - RNA, 18 nt, Human
ggccgcuagaggccugag

SEQ ID NO: 2404390 - RNA, 17 nt, Human
ggccgcuagaggccuga

SEQ ID NO: 2404391 - RNA, 15 nt, Human
ggccgcuagaggccu

SEQ ID NO: 2404392 - RNA, 14 nt, Human
ggccgcuagaggcc

SEQ ID NO: 2404393 - RNA, 13 nt, Human
ggccgcuagaggc

SEQ ID NO: 2404394 - RNA, 19 nt, Human
ggccgcuagaugggcaugg

SEQ ID NO: 2404395 - RNA, 16 nt, Human
ggccgcuagaugggca

SEQ ID NO: 2404396 - RNA, 13 nt, Human
ggccucagcugcc

SEQ ID NO: 2404397 - RNA, 15 nt, Human
ggccucagcugccuc

SEQ ID NO: 2404398 - RNA, 16 nt, Human
ggccucagcugccuca

SEQ ID NO: 2404399 - RNA, 19 nt, Human
ggccucccaacucacccca

SEQ ID NO: 2404400 - RNA, 18 nt, Human
ggccucccaacucacccc

SEQ ID NO: 2404401 - RNA, 17 nt, Human
ggccucccaacucaccc

SEQ ID NO: 2404402 - RNA, 13 nt, Human
ggccucagugcca

SEQ ID NO: 2404403 - RNA, 22 nt, Human
ggccucccaacucaccccagcc

SEQ ID NO: 2404404 - RNA, 20 nt, Human
ggccucccaacucaccccag

SEQ ID NO: 2404405 - RNA, 23 nt, Human
ggccucccaacucaccccagccc

SEQ ID NO: 2404406 - RNA, 14 nt, Human
ggccucauguggcu

SEQ ID NO: 2404407 - RNA, 20 nt, Human
ggccucaguggacuuuccac

SEQ ID NO: 2404408 - RNA, 22 nt, Human
ggccucaguggacuuuccaccc

SEQ ID NO: 2404409 - RNA, 14 nt, Human
ggccucccacagac

SEQ ID NO: 2404410 - RNA, 16 nt, Human
ggccucccacagacuc

SEQ ID NO: 2404411 - RNA, 21 nt, Human
ggccugcacggugggccuugc

SEQ ID NO: 2404412 - RNA, 19 nt, Human
ggccugcacggugggccuu

SEQ ID NO: 2404413 - RNA, 17 nt, Human
ggccugcacggugggcc

SEQ ID NO: 2404414 - RNA, 14 nt, Human
ggccugcacaguga

SEQ ID NO: 2404415 - RNA, 20 nt, Human
ggccugcaggaccugccugu

SEQ ID NO: 2404416 - RNA, 21 nt, Human
ggccugcaggaccugccugua

SEQ ID NO: 2404417 - RNA, 17 nt, Human
ggccugcaggaccugcc

SEQ ID NO: 2404418 - RNA, 13 nt, Human
ggccugcacuaau

SEQ ID NO: 2404419 - RNA, 17 nt, Human
ggccugcccucagggau

SEQ ID NO: 2404420 - RNA, 16 nt, Human
ggccugcccucaggga

SEQ ID NO: 2404421 - RNA, 13 nt, Human
ggccugccagacg

SEQ ID NO: 2404422 - RNA, 16 nt, Human
ggccugcaagggagug

SEQ ID NO: 2404423 - RNA, 22 nt, Human
ggccugaugcucccuccccugc

SEQ ID NO: 2404424 - RNA, 23 nt, Human
ggccugaugcucccuccccugcc

SEQ ID NO: 2404425 - RNA, 15 nt, Human
ggccugaugcucccu

SEQ ID NO: 2404426 - RNA, 17 nt, Human
ggccugaugcucccucc

SEQ ID NO: 2404427 - RNA, 18 nt, Human
ggccugaugcucccuccc

SEQ ID NO: 2404428 - RNA, 20 nt, Human
ggccugaugcucccuccccu

SEQ ID NO: 2404429 - RNA, 14 nt, Human
ggccugaugcuccc

SEQ ID NO: 2404430 - RNA, 13 nt, Human
ggccugcuccaga

SEQ ID NO: 2404431 - RNA, 14 nt, Human
ggccugcuccagac

SEQ ID NO: 2404432 - RNA, 15 nt, Human
ggccugcuccagacc

SEQ ID NO: 2404433 - RNA, 16 nt, Human
ggccugcuccagaccu

SEQ ID NO: 2404434 - RNA, 17 nt, Human
ggccugcuccagaccug

SEQ ID NO: 2404435 - RNA, 18 nt, Human
ggccugcucccagcagcc

SEQ ID NO: 2404436 - RNA, 17 nt, Human
ggccugcucccagcagc

SEQ ID NO: 2404437 - RNA, 18 nt, Human
ggccugcuccagaccuga

SEQ ID NO: 2404438 - RNA, 20 nt, Human
ggccugccuccagggcugga

SEQ ID NO: 2404439 - RNA, 19 nt, Human
ggccugccuccagggcugg

SEQ ID NO: 2404440 - RNA, 18 nt, Human
ggccugccuccagggcug

SEQ ID NO: 2404441 - RNA, 11 nt, Human
ggccugccugu

SEQ ID NO: 2404442 - RNA, 18 nt, Human
ggccugccuugaagccac

SEQ ID NO: 2404443 - RNA, 22 nt, Human
ggccuggauucauuuccugccc

SEQ ID NO: 2404444 - RNA, 20 nt, Human
ggccuggauucauuuccugc

SEQ ID NO: 2404445 - RNA, 19 nt, Human
ggccuggauucauuuccug

SEQ ID NO: 2404446 - RNA, 17 nt, Human
ggccuggauucauuucc

SEQ ID NO: 2404447 - RNA, 16 nt, Human
ggccuggauucauuuc

SEQ ID NO: 2404448 - RNA, 21 nt, Human
ggccuggaucuccccacucua

SEQ ID NO: 2404449 - RNA, 19 nt, Human
ggccuggaggugggguugg

SEQ ID NO: 2404450 - RNA, 21 nt, Human
ggccuggagcaggccuugcgc

SEQ ID NO: 2404451 - RNA, 19 nt, Human
ggccuggagcaggccuugc

SEQ ID NO: 2404452 - RNA, 16 nt, Human
ggccuggagcaggccu

SEQ ID NO: 2404453 - RNA, 15 nt, Human
ggccuggagcaggcc

SEQ ID NO: 2404454 - RNA, 20 nt, Human
ggccuggagauccuccugca

SEQ ID NO: 2404455 - RNA, 17 nt, Human
ggccugcugggcucucc

SEQ ID NO: 2404456 - RNA, 19 nt, Human
ggccugcugggcucuccac

SEQ ID NO: 2404457 - RNA, 17 nt, Human
ggccuucagggagugag

SEQ ID NO: 2404458 - RNA, 17 nt, Human
ggccuggccaccucucu

SEQ ID NO: 2404459 - RNA, 16 nt, Human
ggccuggccaccucuc

SEQ ID NO: 2404460 - RNA, 14 nt, Human
ggccuggccaccuc

SEQ ID NO: 2404461 - RNA, 17 nt, Human
ggccuggcacaucagaa

SEQ ID NO: 2404462 - RNA, 21 nt, Human
ggccuguuuuagaagguucuc

SEQ ID NO: 2404463 - RNA, 16 nt, Human
ggccuggccagaugca

SEQ ID NO: 2404464 - RNA, 15 nt, Human
ggccuggccagaugc

SEQ ID NO: 2404465 - RNA, 12 nt, Human
ggccuggccaga

SEQ ID NO: 2404466 - RNA, 15 nt, Human
ggccuggcagccgug

SEQ ID NO: 2404467 - RNA, 14 nt, Human
ggccuggcagccgu

SEQ ID NO: 2404468 - RNA, 22 nt, Human
ggccuggcacagugucugggcu

SEQ ID NO: 2404469 - RNA, 12 nt, Human
ggccuggcacag

SEQ ID NO: 2404470 - RNA, 13 nt, Human
ggcuaccuuugua

SEQ ID NO: 2404471 - RNA, 12 nt, Human
ggcuacacaggg

SEQ ID NO: 2404472 - RNA, 23 nt, Human
ggcuacaauuuucucccaggaag

SEQ ID NO: 2404473 - RNA, 13 nt, Human
ggcuaauuuuugu

SEQ ID NO: 2404474 - RNA, 22 nt, Human
ggcuacaccuuagccugcccuc

SEQ ID NO: 2404475 - RNA, 15 nt, Human
ggcuacacagggaug

SEQ ID NO: 2404476 - RNA, 23 nt, Human
ggcuacaccuuagccugcccucc

SEQ ID NO: 2404477 - RNA, 23 nt, Human
ggcuaauucccagagugugaaac

SEQ ID NO: 2404478 - RNA, 19 nt, Human
ggcuaauucccagagugug

SEQ ID NO: 2404479 - RNA, 18 nt, Human
ggcuaauuuuuguuuugu

SEQ ID NO: 2404480 - RNA, 20 nt, Human
ggcuaagagcuagcgcugcc

SEQ ID NO: 2404481 - RNA, 14 nt, Human
ggcuaacuggaagc

SEQ ID NO: 2404482 - RNA, 19 nt, Human
ggcuaagaguguccuagga

SEQ ID NO: 2404483 - RNA, 15 nt, Human
ggcuaauuaaauaaa

SEQ ID NO: 2404484 - RNA, 22 nt, Human
ggcuaaggcguggagcugccug

SEQ ID NO: 2404485 - RNA, 19 nt, Human
ggcuaaggcguggagcugc

SEQ ID NO: 2404486 - RNA, 20 nt, Human
ggcuaagugauccucccacc

SEQ ID NO: 2404487 - RNA, 16 nt, Human
ggcuaauguacugcau

SEQ ID NO: 2404488 - RNA, 14 nt, Human
ggcuaccuuuguau

SEQ ID NO: 2404489 - RNA, 16 nt, Human
ggcuacucagcagccc

SEQ ID NO: 2404490 - RNA, 15 nt, Human
ggcuacucagcagcc

SEQ ID NO: 2404491 - RNA, 19 nt, Human
ggcuacccugagcugaggc

SEQ ID NO: 2404492 - RNA, 12 nt, Human
ggcuacccuccc

SEQ ID NO: 2404493 - RNA, 15 nt, Human
ggcuacugcagcuuu

SEQ ID NO: 2404494 - RNA, 19 nt, Human
ggcuacucuccucggcccc

SEQ ID NO: 2404495 - RNA, 17 nt, Human
ggcuacucagcagcccu

SEQ ID NO: 2404496 - RNA, 18 nt, Human
ggcuacucagcagcccuc

SEQ ID NO: 2404497 - RNA, 20 nt, Human
ggcuacucagcagcccuccu

SEQ ID NO: 2404498 - RNA, 21 nt, Human
ggcuacucagcagcccuccuc

SEQ ID NO: 2404499 - RNA, 13 nt, Human
ggcuagaaucugg

SEQ ID NO: 2404500 - RNA, 18 nt, Human
ggcuagaauauccuacuu

SEQ ID NO: 2404501 - RNA, 15 nt, Human
ggcuagaacuggaga

SEQ ID NO: 2404502 - RNA, 22 nt, Human
ggcuagaaccuguagagcuaga

SEQ ID NO: 2404503 - RNA, 14 nt, Human
ggcuagaaccuggc

SEQ ID NO: 2404504 - RNA, 18 nt, Human
ggcuagaaccuggagggc

SEQ ID NO: 2404505 - RNA, 16 nt, Human
ggcuagaaccuggagg

SEQ ID NO: 2404506 - RNA, 22 nt, Human
ggcuagaaccuggagagcuaga

SEQ ID NO: 2404507 - RNA, 16 nt, Human
ggcuagaaccuggaga

SEQ ID NO: 2404508 - RNA, 21 nt, Human
ggcuagaaccuagaagggcua

SEQ ID NO: 2404509 - RNA, 21 nt, Human
ggcuagaaccaagaagggcua

SEQ ID NO: 2404510 - RNA, 23 nt, Human
ggcuacugcagcuuuacaugcaa

SEQ ID NO: 2404511 - RNA, 18 nt, Human
ggcuacugcagcuuuaca

SEQ ID NO: 2404512 - RNA, 16 nt, Human
ggcuagagguucaaag

SEQ ID NO: 2404513 - RNA, 19 nt, Human
ggcucacuauggugccaau

SEQ ID NO: 2404514 - RNA, 22 nt, Human
ggcuagaaucuggagagcuaga

SEQ ID NO: 2404515 - RNA, 20 nt, Human
ggcuagaggccagccccacc

SEQ ID NO: 2404516 - RNA, 16 nt, Human
ggcuagaggccagccc

SEQ ID NO: 2404517 - RNA, 16 nt, Human
ggcuagaaucuggaga

SEQ ID NO: 2404518 - RNA, 14 nt, Human
ggcuagaaucugga

SEQ ID NO: 2404519 - RNA, 18 nt, Human
ggcuagaggccagcccca

SEQ ID NO: 2404520 - RNA, 15 nt, Human
ggcgaggcagaggac

SEQ ID NO: 2404521 - RNA, 13 nt, Human
ggcgaggcagagg

SEQ ID NO: 2404522 - RNA, 12 nt, Human
ggcgaggcagag

SEQ ID NO: 2404523 - RNA, 11 nt, Human
ggcgaggcaga

SEQ ID NO: 2404524 - RNA, 21 nt, Human
ggcgagcccuguggaugagcc

SEQ ID NO: 2404525 - RNA, 15 nt, Human
ggcgagaggaggggc

SEQ ID NO: 2404526 - RNA, 14 nt, Human
ggcgagaggagggg

SEQ ID NO: 2404527 - RNA, 14 nt, Human
ggccuuccugcccu

SEQ ID NO: 2404528 - RNA, 13 nt, Human
ggccuuccugccc

SEQ ID NO: 2404529 - RNA, 16 nt, Human
ggccuuccccagccuc

SEQ ID NO: 2404530 - RNA, 18 nt, Human
ggcgaucacaacgugcau

SEQ ID NO: 2404531 - RNA, 15 nt, Human
ggcgagugccaggac

SEQ ID NO: 2404532 - RNA, 15 nt, Human
ggcgagucacugccu

SEQ ID NO: 2404533 - RNA, 19 nt, Human
ggcgaggcagaggacagau

SEQ ID NO: 2404534 - RNA, 21 nt, Human
ggcgaggggaggguggcaggu

SEQ ID NO: 2404535 - RNA, 16 nt, Human
ggcgagucacugccuc

SEQ ID NO: 2404536 - RNA, 20 nt, Human
ggcgaucacaacgugcauug

SEQ ID NO: 2404537 - RNA, 17 nt, Human
ggcgauccaccugucuc

SEQ ID NO: 2404538 - RNA, 18 nt, Human
ggcgauccaccugucuca

SEQ ID NO: 2404539 - RNA, 22 nt, Human
ggcgauccaccugucucagccu

SEQ ID NO: 2404540 - RNA, 18 nt, Human
ggccuucggccuccaucc

SEQ ID NO: 2404541 - RNA, 22 nt, Human
ggccuucggccuccauccugag

SEQ ID NO: 2404542 - RNA, 16 nt, Human
ggccuucggccuccau

SEQ ID NO: 2404543 - RNA, 15 nt, Human
ggccuuccccagccu

SEQ ID NO: 2404544 - RNA, 17 nt, Human
ggccuuccccagccucu

SEQ ID NO: 2404545 - RNA, 20 nt, Human
ggcuaagcuucacuguaaaa

SEQ ID NO: 2404546 - RNA, 17 nt, Human
ggcuaacuauauuugcu

SEQ ID NO: 2404547 - RNA, 19 nt, Human
ggcuaagagcuagcgcugc

SEQ ID NO: 2404548 - RNA, 15 nt, Human
ggcuaacuggaagca

SEQ ID NO: 2404549 - RNA, 21 nt, Human
ggcuaaacauccaauauuuuc

SEQ ID NO: 2404550 - RNA, 11 nt, Human
ggcguuucuuu

SEQ ID NO: 2404551 - RNA, 17 nt, Human
ggcgugacucacccaag

SEQ ID NO: 2404552 - RNA, 17 nt, Human
ggcgugagaccugcccc

SEQ ID NO: 2404553 - RNA, 18 nt, Human
ggcgugagaccugccccu

SEQ ID NO: 2404554 - RNA, 12 nt, Human
ggcgugaucucg

SEQ ID NO: 2404555 - RNA, 15 nt, Human
ggcgugaggauggga

SEQ ID NO: 2404556 - RNA, 22 nt, Human
ggcgcaagccuguaaucccagc

SEQ ID NO: 2404557 - RNA, 15 nt, Human
ggcgugacucaccca

SEQ ID NO: 2404558 - RNA, 14 nt, Human
ggcgugagaccugc

SEQ ID NO: 2404559 - RNA, 16 nt, Human
ggcgugagaccugccc

SEQ ID NO: 2404560 - RNA, 21 nt, Human
ggcgucuguucccccuucaca

SEQ ID NO: 2404561 - RNA, 14 nt, Human
ggcgcaagccugua

SEQ ID NO: 2404562 - RNA, 16 nt, Human
ggcgagugccaggacu

SEQ ID NO: 2404563 - RNA, 21 nt, Human
ggcgaucgcggcggagcuggc

SEQ ID NO: 2404564 - RNA, 20 nt, Human
ggcuggccucccaaaugagc

SEQ ID NO: 2404565 - RNA, 19 nt, Human
ggcuggccucuggcucuca

SEQ ID NO: 2404566 - RNA, 21 nt, Human
ggcuggccuaggagauaucug

SEQ ID NO: 2404567 - RNA, 15 nt, Human
ggcuggccuggcccc

SEQ ID NO: 2404568 - RNA, 14 nt, Human
ggcuggccuggccc

SEQ ID NO: 2404569 - RNA, 13 nt, Human
ggcuggccuggcc

SEQ ID NO: 2404570 - RNA, 19 nt, Human
ggcuggccagccccacagc

SEQ ID NO: 2404571 - RNA, 22 nt, Human
ggcuggccaguccaggcugccg

SEQ ID NO: 2404572 - RNA, 17 nt, Human
ggcuggcccugcccugg

SEQ ID NO: 2404573 - RNA, 10 nt, Human
aaaaaaagag

SEQ ID NO: 2404574 - RNA, 14 nt, Human
aaaaaaagaucugu

SEQ ID NO: 2404575 - RNA, 13 nt, Human
aaaaaaagacaag

SEQ ID NO: 2404576 - RNA, 11 nt, Human
aaaaaaagaca

SEQ ID NO: 2404577 - RNA, 10 nt, Human
aaaaaaagaa

SEQ ID NO: 2404578 - RNA, 9 nt, Human
aaaaaaaga

SEQ ID NO: 2404579 - RNA, 11 nt, Human
aaaaaaagaaa

SEQ ID NO: 2404580 - RNA, 12 nt, Human
aaaaaaaguauu

SEQ ID NO: 2404581 - RNA, 14 nt, Human
aaaaaaaguauuau

SEQ ID NO: 2404582 - RNA, 11 nt, Human
aaaaaaaguua

SEQ ID NO: 2404583 - RNA, 13 nt, Human
aaaaaaauacuug

SEQ ID NO: 2404584 - RNA, 12 nt, Human
aaaaaaauaaua

SEQ ID NO: 2404585 - RNA, 14 nt, Human
aaaaaaaucugcag

SEQ ID NO: 2404586 - RNA, 12 nt, Human
aaaaaaaugaca

SEQ ID NO: 2404587 - RNA, 12 nt, Human
aaaaaaaugacu

SEQ ID NO: 2404588 - RNA, 11 nt, Human
aaaaaaaugcc

SEQ ID NO: 2404589 - RNA, 13 nt, Human
aaaaaaaugcuga

SEQ ID NO: 2404590 - RNA, 13 nt, Human
aaaaaaaugacua

SEQ ID NO: 2404591 - RNA, 11 nt, Human
aaaaaaauuua

SEQ ID NO: 2404592 - RNA, 22 nt, Human
aaaaaacugcugacuguuuucu

SEQ ID NO: 2404593 - RNA, 21 nt, Human
aaaaagcauguacaguguucu

SEQ ID NO: 2404594 - RNA, 18 nt, Human
aaaaagcauguacagugu

SEQ ID NO: 2404595 - RNA, 17 nt, Human
aaaaagcauguacagug

SEQ ID NO: 2404596 - RNA, 15 nt, Human
aaaaagcauguacag

SEQ ID NO: 2404597 - RNA, 14 nt, Human
aaaaagcauguaca

SEQ ID NO: 2404598 - RNA, 12 nt, Human
aaaaagcaugua

SEQ ID NO: 2404599 - RNA, 15 nt, Human
aaaaagcacaagaag

SEQ ID NO: 2404600 - RNA, 14 nt, Human
aaaaagcacaagaa

SEQ ID NO: 2404601 - RNA, 13 nt, Human
aaaaagcacaaga

SEQ ID NO: 2404602 - RNA, 13 nt, Human
aaaaagauuuguu

SEQ ID NO: 2404603 - RNA, 21 nt, Human
aaaaagcagcuaccagguguu

SEQ ID NO: 2404604 - RNA, 13 nt, Human
aaaaagcagcuac

SEQ ID NO: 2404605 - RNA, 19 nt, Human
aaaaaacucgaggacugua

SEQ ID NO: 2404606 - RNA, 11 nt, Human
aaaaaaauuug

SEQ ID NO: 2404607 - RNA, 9 nt, Human
aaaaaagaa

SEQ ID NO: 2404608 - RNA, 15 nt, Human
aaaaaacagaggcca

SEQ ID NO: 2404609 - RNA, 23 nt, Human
aaaaagauuuucagaaaauauua

SEQ ID NO: 2404610 - RNA, 20 nt, Human
aaaaagauguucagucauuu

SEQ ID NO: 2404611 - RNA, 13 nt, Human
aaaaauacaaaaa

SEQ ID NO: 2404612 - RNA, 14 nt, Human
aaaaauaaaacauu

SEQ ID NO: 2404613 - RNA, 23 nt, Human
aaaaaguuuugcccuuuuuaagg

SEQ ID NO: 2404614 - RNA, 17 nt, Human
aaaaaguuuuauuuuuc

SEQ ID NO: 2404615 - RNA, 21 nt, Human
aaaaauaaaaacugacuccuu

SEQ ID NO: 2404616 - RNA, 14 nt, Human
aaaaauacaugcau

SEQ ID NO: 2404617 - RNA, 14 nt, Human
aaaaauacauuuua

SEQ ID NO: 2404618 - RNA, 19 nt, Human
aaaaauaaucuauuucuau

SEQ ID NO: 2404619 - RNA, 10 nt, Human
aaaaauacuu

SEQ ID NO: 2404620 - RNA, 15 nt, Human
aaaaauacauuuuau

SEQ ID NO: 2404621 - RNA, 11 nt, Human
aaaaauacugc

SEQ ID NO: 2404622 - RNA, 20 nt, Human
ggcuggguuggcgcacccuc

SEQ ID NO: 2404623 - RNA, 19 nt, Human
ggcuggguuggcgcacccu

SEQ ID NO: 2404624 - RNA, 16 nt, Human
ggcuggguuggcgcac

SEQ ID NO: 2404625 - RNA, 15 nt, Human
aaaaauacuugucaa

SEQ ID NO: 2404626 - RNA, 22 nt, Human
aaaaauacuugucaauauuuaa

SEQ ID NO: 2404627 - RNA, 16 nt, Human
ggcugguagcucaggu

SEQ ID NO: 2404628 - RNA, 15 nt, Human
ggcugguagcucagg

SEQ ID NO: 2404629 - RNA, 19 nt, Human
ggcugguaacaguucaugu

SEQ ID NO: 2404630 - RNA, 21 nt, Human
ggcugguagcucaggugggcg

SEQ ID NO: 2404631 - RNA, 17 nt, Human
ggcugguagcucaggug

SEQ ID NO: 2404632 - RNA, 22 nt, Human
ggcuggguucuacccaggugcu

SEQ ID NO: 2404633 - RNA, 14 nt, Human
ggcuggguuggagg

SEQ ID NO: 2404634 - RNA, 16 nt, Human
aaaaaguuuuaguuuu

SEQ ID NO: 2404635 - RNA, 13 nt, Human
aaaaaguuuguuu

SEQ ID NO: 2404636 - RNA, 14 nt, Human
aaaaauaaaaaaca

SEQ ID NO: 2404637 - RNA, 19 nt, Human
aaaaaggcauauugcuuuu

SEQ ID NO: 2404638 - RNA, 17 nt, Human
aaaaaggcauuguuuga

SEQ ID NO: 2404639 - RNA, 17 nt, Human
aaaaaguuuacaagugu

SEQ ID NO: 2404640 - RNA, 19 nt, Human
aaaaaguuugguucugugu

SEQ ID NO: 2404641 - RNA, 18 nt, Human
aaaaaguuugccagaagu

SEQ ID NO: 2404642 - RNA, 14 nt, Human
aaaaaguuuccaua

SEQ ID NO: 2404643 - RNA, 17 nt, Human
aaaaaguuugccagaag

SEQ ID NO: 2404644 - RNA, 21 nt, Human
aaaaaggaugcacagaguugu

SEQ ID NO: 2404645 - RNA, 12 nt, Human
aaaaaggcagga

SEQ ID NO: 2404646 - RNA, 20 nt, Human
aaaaagcauguacaguguuc

SEQ ID NO: 2404647 - RNA, 17 nt, Human
aaaaagccuccagucca

SEQ ID NO: 2404648 - RNA, 20 nt, Human
aaaaagccugcaauuucaua

SEQ ID NO: 2404649 - RNA, 14 nt, Human
aaaaaggaggaaga

SEQ ID NO: 2404650 - RNA, 15 nt, Human
ggcucacugcagccu

SEQ ID NO: 2404651 - RNA, 14 nt, Human
ggcucacugcagcc

SEQ ID NO: 2404652 - RNA, 13 nt, Human
ggcucacugcagc

SEQ ID NO: 2404653 - RNA, 15 nt, Human
ggcucuuuccuugcu

SEQ ID NO: 2404654 - RNA, 14 nt, Human
ggcucuuuccuugc

SEQ ID NO: 2404655 - RNA, 13 nt, Human
ggcucuuuccuug

SEQ ID NO: 2404656 - RNA, 23 nt, Human
ggcucuugugcuggauggagccc

SEQ ID NO: 2404657 - RNA, 20 nt, Human
ggcucuugugcuggauggag

SEQ ID NO: 2404658 - RNA, 14 nt, Human
ggcucuucugacua

SEQ ID NO: 2404659 - RNA, 21 nt, Human
ggcucuugauaccccccucug

SEQ ID NO: 2404660 - RNA, 20 nt, Human
ggcucuugauaccccccucu

SEQ ID NO: 2404661 - RNA, 19 nt, Human
ggcucuugauaccccccuc

SEQ ID NO: 2404662 - RNA, 20 nt, Human
ggcucuugaacugagcuugg

SEQ ID NO: 2404663 - RNA, 18 nt, Human
ggcucuugaacugagcuu

SEQ ID NO: 2404664 - RNA, 19 nt, Human
ggcucuugaacugagcuug

SEQ ID NO: 2404665 - RNA, 23 nt, Human
ggcucuucuccuuucacaaccuu

SEQ ID NO: 2404666 - RNA, 19 nt, Human
ggcucuacaacugaguccu

SEQ ID NO: 2404667 - RNA, 13 nt, Human
ggcucuucugacu

SEQ ID NO: 2404668 - RNA, 18 nt, Human
ggcucuuccaggcuggga

SEQ ID NO: 2404669 - RNA, 17 nt, Human
ggcucuuccaggcuggg

SEQ ID NO: 2404670 - RNA, 15 nt, Human
ggcucuuccaggcug

SEQ ID NO: 2404671 - RNA, 18 nt, Human
ggcucuacaacugagucc

SEQ ID NO: 2404672 - RNA, 14 nt, Human
ggcucuuccaggcu

SEQ ID NO: 2404673 - RNA, 17 nt, Human
ggcucccugacugggag

SEQ ID NO: 2404674 - RNA, 18 nt, Human
ggcucccugacugggagu

SEQ ID NO: 2404675 - RNA, 11 nt, Human
ggcucccugga

SEQ ID NO: 2404676 - RNA, 20 nt, Human
ggcucccuguaaccucuuca

SEQ ID NO: 2404677 - RNA, 13 nt, Human
ggcucccuuccca

SEQ ID NO: 2404678 - RNA, 18 nt, Human
ggcucguugacuggcugu

SEQ ID NO: 2404679 - RNA, 17 nt, Human
ggcucgccaugccgggg

SEQ ID NO: 2404680 - RNA, 16 nt, Human
ggcucgccaugccggg

SEQ ID NO: 2404681 - RNA, 22 nt, Human
ggcucgauuuuguaucugcagg

SEQ ID NO: 2404682 - RNA, 20 nt, Human
ggcucgauuuuguaucugca

SEQ ID NO: 2404683 - RNA, 21 nt, Human
ggcucccuucaucuccaggga

SEQ ID NO: 2404684 - RNA, 21 nt, Human
ggcucccuguaaccucuucag

SEQ ID NO: 2404685 - RNA, 16 nt, Human
ggcucggaggcugccc

SEQ ID NO: 2404686 - RNA, 22 nt, Human
ggcucgccucaggaaugggcug

SEQ ID NO: 2404687 - RNA, 23 nt, Human
ggcucgccucaggaaugggcugu

SEQ ID NO: 2404688 - RNA, 17 nt, Human
ggcucggaggcugcccc

SEQ ID NO: 2404689 - RNA, 22 nt, Human
ggcucgucggggggacagcucc

SEQ ID NO: 2404690 - RNA, 24 nt, Human
ggcugacuagaagggccaguccug

SEQ ID NO: 2404691 - RNA, 19 nt, Human
ggcugacuagaagggccag

SEQ ID NO: 2404692 - RNA, 22 nt, Human
ggcugacuagaagggccagucc

SEQ ID NO: 2404693 - RNA, 20 nt, Human
ggcugaccuuccucgcagag

SEQ ID NO: 2404694 - RNA, 22 nt, Human
ggcugaccccaaagagccugga

SEQ ID NO: 2404695 - RNA, 22 nt, Human
ggcugacggugcagucugggug

SEQ ID NO: 2404696 - RNA, 23 nt, Human
ggcugaccuuccucgcagagagg

SEQ ID NO: 2404697 - RNA, 21 nt, Human
ggcugaccuugaacuccuggg

SEQ ID NO: 2404698 - RNA, 22 nt, Human
ggcugaccacagcacagccaac

SEQ ID NO: 2404699 - RNA, 17 nt, Human
ggcugacccagucccug

SEQ ID NO: 2404700 - RNA, 18 nt, Human
ggcugacccagucccugg

SEQ ID NO: 2404701 - RNA, 19 nt, Human
ggcugacccagucccuggg

SEQ ID NO: 2404702 - RNA, 20 nt, Human
ggcugaccccaaagagccug

SEQ ID NO: 2404703 - RNA, 19 nt, Human
ggcugaccccaaagagccu

SEQ ID NO: 2404704 - RNA, 18 nt, Human
ggcugaccccaaagagcc

SEQ ID NO: 2404705 - RNA, 22 nt, Human
ggcugacccagucccuggggga

SEQ ID NO: 2404706 - RNA, 24 nt, Human
ggcugaaagaacauggacuuguau

SEQ ID NO: 2404707 - RNA, 22 nt, Human
ggcucuuuggggucagccaggg

SEQ ID NO: 2404708 - RNA, 17 nt, Human
ggcucuuuccuugcuca

SEQ ID NO: 2404709 - RNA, 16 nt, Human
ggcucuuuccuugcuc

SEQ ID NO: 2404710 - RNA, 15 nt, Human
ggcugaccaugcuca

SEQ ID NO: 2404711 - RNA, 17 nt, Human
ggcugcccgcucccagu

SEQ ID NO: 2404712 - RNA, 16 nt, Human
ggcugcccgcucccag

SEQ ID NO: 2404713 - RNA, 14 nt, Human
ggcugcccgcuccc

SEQ ID NO: 2404714 - RNA, 13 nt, Human
ggcugcccgcucc

SEQ ID NO: 2404715 - RNA, 21 nt, Human
ggcugcccgcucccagugucu

SEQ ID NO: 2404716 - RNA, 18 nt, Human
ggcugcccgcucccagug

SEQ ID NO: 2404717 - RNA, 22 nt, Human
ggcugcccgcucccagugucuu

SEQ ID NO: 2404718 - RNA, 18 nt, Human
ggcugagacaggagaauc

SEQ ID NO: 2404719 - RNA, 15 nt, Human
ggcugagacaggaga

SEQ ID NO: 2404720 - RNA, 17 nt, Human
ggcugagaacccugcgu

SEQ ID NO: 2404721 - RNA, 14 nt, Human
ggcugagaacacug

SEQ ID NO: 2404722 - RNA, 21 nt, Human
ggcugagacugcgggaugguc

SEQ ID NO: 2404723 - RNA, 12 nt, Human
ggcugcccugcc

SEQ ID NO: 2404724 - RNA, 17 nt, Human
ggcugcccuggcccuga

SEQ ID NO: 2404725 - RNA, 16 nt, Human
ggcugcccuggcccug

SEQ ID NO: 2404726 - RNA, 15 nt, Human
ggcugcccuggcccu

SEQ ID NO: 2404727 - RNA, 14 nt, Human
ggcugcccuggccc

SEQ ID NO: 2404728 - RNA, 13 nt, Human
ggcugcccugcca

SEQ ID NO: 2404729 - RNA, 11 nt, Human
ggcugcccugg

SEQ ID NO: 2404730 - RNA, 12 nt, Human
ggcugcccuggc

SEQ ID NO: 2404731 - RNA, 23 nt, Human
ggcugccguggggccgccgccuc

SEQ ID NO: 2404732 - RNA, 16 nt, Human
ggcugccguggggccg

SEQ ID NO: 2404733 - RNA, 21 nt, Human
ggcugccggguucuagucucc

SEQ ID NO: 2404734 - RNA, 14 nt, Human
ggcugcccuuucug

SEQ ID NO: 2404735 - RNA, 18 nt, Human
ggcugcccuuucugggca

SEQ ID NO: 2404736 - RNA, 10 nt, Human
ggcugcccuu

SEQ ID NO: 2404737 - RNA, 11 nt, Human
ggcugcccuuu

SEQ ID NO: 2404738 - RNA, 22 nt, Human
ggcugcccuggcccugaggugu

SEQ ID NO: 2404739 - RNA, 21 nt, Human
ggcugcccuggcccugaggug

SEQ ID NO: 2404740 - RNA, 20 nt, Human
ggcugcccuggcccugaggu

SEQ ID NO: 2404741 - RNA, 19 nt, Human
ggcugcccuggcccugagg

SEQ ID NO: 2404742 - RNA, 12 nt, Human
ggcugcccuggu

SEQ ID NO: 2404743 - RNA, 18 nt, Human
ggcuggccagccccacag

SEQ ID NO: 2404744 - RNA, 17 nt, Human
ggcuggccagccccaca

SEQ ID NO: 2404745 - RNA, 15 nt, Human
ggcuggccagcccca

SEQ ID NO: 2404746 - RNA, 14 nt, Human
ggcuggccagcccc

SEQ ID NO: 2404747 - RNA, 13 nt, Human
ggcuggccagccc

SEQ ID NO: 2404748 - RNA, 12 nt, Human
ggcuggccagcc

SEQ ID NO: 2404749 - RNA, 11 nt, Human
ggcuggccagc

SEQ ID NO: 2404750 - RNA, 23 nt, Human
ggcuggccacugcacagagcucu

SEQ ID NO: 2404751 - RNA, 21 nt, Human
ggcuggccaguccaggcugcc

SEQ ID NO: 2404752 - RNA, 20 nt, Human
ggcuggccaguccaggcugc

SEQ ID NO: 2404753 - RNA, 20 nt, Human
ggcuggccagccccacagcc

SEQ ID NO: 2404754 - RNA, 16 nt, Human
ggcuggccaguccagg

SEQ ID NO: 2404755 - RNA, 17 nt, Human
ggcugccuccacuccca

SEQ ID NO: 2404756 - RNA, 16 nt, Human
ggcugccuccacuccc

SEQ ID NO: 2404757 - RNA, 12 nt, Human
ggcugccuccac

SEQ ID NO: 2404758 - RNA, 19 nt, Human
ggcugccuccacucccacu

SEQ ID NO: 2404759 - RNA, 14 nt, Human
ggcuggcagguaug

SEQ ID NO: 2404760 - RNA, 21 nt, Human
ggcuggccacugcacagagcu

SEQ ID NO: 2404761 - RNA, 19 nt, Human
ggcuggccacugcacagag

SEQ ID NO: 2404762 - RNA, 17 nt, Human
ggcuggccacugcacag

SEQ ID NO: 2404763 - RNA, 14 nt, Human
ggcuggccacugca

SEQ ID NO: 2404764 - RNA, 13 nt, Human
ggcuggccacugc

SEQ ID NO: 2404765 - RNA, 17 nt, Human
aaaauaauuuuuauauu

SEQ ID NO: 2404766 - RNA, 16 nt, Human
aaaauaauuuuuauau

SEQ ID NO: 2404767 - RNA, 14 nt, Human
aaaauacacacuca

SEQ ID NO: 2404768 - RNA, 17 nt, Human
aaaauacauaagaccau

SEQ ID NO: 2404769 - RNA, 12 nt, Human
aaaauacauuuu

SEQ ID NO: 2404770 - RNA, 13 nt, Human
aaaauacauuuua

SEQ ID NO: 2404771 - RNA, 21 nt, Human
aaaauacaguuugucacauga

SEQ ID NO: 2404772 - RNA, 13 nt, Human
aaaauaccaagga

SEQ ID NO: 2404773 - RNA, 20 nt, Human
aaaauacugccagaugcuga

SEQ ID NO: 2404774 - RNA, 19 nt, Human
aaaauacugccagaugcug

SEQ ID NO: 2404775 - RNA, 18 nt, Human
aaaauacugccagaugcu

SEQ ID NO: 2404776 - RNA, 15 nt, Human
aaaauacugccagau

SEQ ID NO: 2404777 - RNA, 14 nt, Human
aaaauacugccaga

SEQ ID NO: 2404778 - RNA, 14 nt, Human
aaaauacauuuuau

SEQ ID NO: 2404779 - RNA, 19 nt, Human
aaaauaaccggauauauac

SEQ ID NO: 2404780 - RNA, 15 nt, Human
aaaauaacuuauauc

SEQ ID NO: 2404781 - RNA, 14 nt, Human
aaaauaagaaaaga

SEQ ID NO: 2404782 - RNA, 15 nt, Human
aaaauaagaaaagau

SEQ ID NO: 2404783 - RNA, 12 nt, Human
aaaauaagaaaa

SEQ ID NO: 2404784 - RNA, 16 nt, Human
aaaauaacuucaagca

SEQ ID NO: 2404785 - RNA, 16 nt, Human
aaaauaagaauagaaa

SEQ ID NO: 2404786 - RNA, 22 nt, Human
aaaauaagaaaagauguagauu

SEQ ID NO: 2404787 - RNA, 13 nt, Human
aaaauaauaauaa

SEQ ID NO: 2404788 - RNA, 11 nt, Human
aaaauaauuuu

SEQ ID NO: 2404789 - RNA, 19 nt, Human
aaaauaauuuuaaacaaag

SEQ ID NO: 2404790 - RNA, 20 nt, Human
aaaauaauuuuaaacaaagg

SEQ ID NO: 2404791 - RNA, 22 nt, Human
aaaauaauugauuucaagaccu

SEQ ID NO: 2404792 - RNA, 16 nt, Human
aaaauaauugauuuca

SEQ ID NO: 2404793 - RNA, 23 nt, Human
aaaauaaucuauuucuaugagaa

SEQ ID NO: 2404794 - RNA, 21 nt, Human
aaaauaaucuauuucuaugag

SEQ ID NO: 2404795 - RNA, 14 nt, Human
aaaauaauucuaaa

SEQ ID NO: 2404796 - RNA, 13 nt, Human
aaaauaauucuaa

SEQ ID NO: 2404797 - RNA, 17 nt, Human
aaaaggcauuguuugag

SEQ ID NO: 2404798 - RNA, 16 nt, Human
aaaaggcaaaugugua

SEQ ID NO: 2404799 - RNA, 14 nt, Human
aaaaggcauuguuu

SEQ ID NO: 2404800 - RNA, 14 nt, Human
aaaaggccaaaccu

SEQ ID NO: 2404801 - RNA, 15 nt, Human
aaaaggccaaaccuc

SEQ ID NO: 2404802 - RNA, 19 nt, Human
aaaaggccaaaccucuguu

SEQ ID NO: 2404803 - RNA, 22 nt, Human
aaaaggccaaaccucuguucag

SEQ ID NO: 2404804 - RNA, 23 nt, Human
aaaaggccaaaccucuguucagu

SEQ ID NO: 2404805 - RNA, 11 nt, Human
aaaaggcagga

SEQ ID NO: 2404806 - RNA, 19 nt, Human
aaaaggaucuuuguggcca

SEQ ID NO: 2404807 - RNA, 20 nt, Human
aaaaggaucuuuguggccaa

SEQ ID NO: 2404808 - RNA, 18 nt, Human
aaaaggauuuuuaucuuu

SEQ ID NO: 2404809 - RNA, 23 nt, Human
aaaaggaucuuuguggccaagga

SEQ ID NO: 2404810 - RNA, 17 nt, Human
aaaagguuaauaaagua

SEQ ID NO: 2404811 - RNA, 19 nt, Human
aaaagguucacuaaagcag

SEQ ID NO: 2404812 - RNA, 22 nt, Human
aaaaggugccugugaggcaggg

SEQ ID NO: 2404813 - RNA, 20 nt, Human
aaaauaacccuuugguuuuu

SEQ ID NO: 2404814 - RNA, 15 nt, Human
aaaagguauuaaauu

SEQ ID NO: 2404815 - RNA, 20 nt, Human
aaaaggugccugugaggcag

SEQ ID NO: 2404816 - RNA, 16 nt, Human
aaaagguuaauaaagu

SEQ ID NO: 2404817 - RNA, 14 nt, Human
aaaaggaugcacag

SEQ ID NO: 2404818 - RNA, 15 nt, Human
aaaaggaugcacaga

SEQ ID NO: 2404819 - RNA, 19 nt, Human
aaaaggaugcacagaguug

SEQ ID NO: 2404820 - RNA, 22 nt, Human
aaaaggaugcacagaguuguua

SEQ ID NO: 2404821 - RNA, 23 nt, Human
ggcugguccagggcuagugacuu

SEQ ID NO: 2404822 - RNA, 13 nt, Human
ggcugguccaggg

SEQ ID NO: 2404823 - RNA, 16 nt, Human
aaaaggacaauuucaa

SEQ ID NO: 2404824 - RNA, 16 nt, Human
aaaaggacaccuuuua

SEQ ID NO: 2404825 - RNA, 13 nt, Human
aaaaggaugcaca

SEQ ID NO: 2404826 - RNA, 22 nt, Human
aaaaggagccaauuuaaagaaa

SEQ ID NO: 2404827 - RNA, 15 nt, Human
aaaauauuccugcau

SEQ ID NO: 2404828 - RNA, 22 nt, Human
aaaauaugaccacacuccagcu

SEQ ID NO: 2404829 - RNA, 14 nt, Human
aaaauaucuuuuga

SEQ ID NO: 2404830 - RNA, 17 nt, Human
aaaauaucuuuugaccu

SEQ ID NO: 2404831 - RNA, 13 nt, Human
aaaauaugauauu

SEQ ID NO: 2404832 - RNA, 16 nt, Human
aaaauauauuuaauga

SEQ ID NO: 2404833 - RNA, 18 nt, Human
aaaauaucugaaauguga

SEQ ID NO: 2404834 - RNA, 9 nt, Human
aaaauacuu

SEQ ID NO: 2404835 - RNA, 21 nt, Human
aaaauacuugucaauauuuaa

SEQ ID NO: 2404836 - RNA, 15 nt, Human
aaaauauauuuaaug

SEQ ID NO: 2404837 - RNA, 13 nt, Human
aaaauagacacuc

SEQ ID NO: 2404838 - RNA, 15 nt, Human
aaaauagaagcugua

SEQ ID NO: 2404839 - RNA, 14 nt, Human
aaaauagaagaaua

SEQ ID NO: 2404840 - RNA, 20 nt, Human
aaaauauuuucauacagcau

SEQ ID NO: 2404841 - RNA, 13 nt, Human
aaaauauuuucau

SEQ ID NO: 2404842 - RNA, 12 nt, Human
aaaauauuuuga

SEQ ID NO: 2404843 - RNA, 17 nt, Human
aaaaucucaauauuuca

SEQ ID NO: 2404844 - RNA, 16 nt, Human
aaaauauuuuccugcc

SEQ ID NO: 2404845 - RNA, 13 nt, Human
aaaauauuuuaua

SEQ ID NO: 2404846 - RNA, 17 nt, Human
aaaauauuuuauaauuu

SEQ ID NO: 2404847 - RNA, 12 nt, Human
aaaauauuuuca

SEQ ID NO: 2404848 - RNA, 18 nt, Human
aaaauauuuuauaauuuu

SEQ ID NO: 2404849 - RNA, 21 nt, Human
aaaauauuuauaaaacuucuc

SEQ ID NO: 2404850 - RNA, 11 nt, Human
aaaauauuuau

SEQ ID NO: 2404851 - RNA, 13 nt, Human
aaaauauuuauaa

SEQ ID NO: 2404852 - RNA, 15 nt, Human
aaaauauuuguacau

SEQ ID NO: 2404853 - RNA, 14 nt, Human
aaaauauuuaaagg

SEQ ID NO: 2404854 - RNA, 16 nt, Human
aaaauauggaacuucu

SEQ ID NO: 2404855 - RNA, 11 nt, Human
aaaauaugcau

SEQ ID NO: 2404856 - RNA, 12 nt, Human
aaaaugagaaau

SEQ ID NO: 2404857 - RNA, 11 nt, Human
aaaaugagaaa

SEQ ID NO: 2404858 - RNA, 12 nt, Human
aaaaucugucca

SEQ ID NO: 2404859 - RNA, 13 nt, Human
aaaaugacagaug

SEQ ID NO: 2404860 - RNA, 15 nt, Human
aaaaugacagauguu

SEQ ID NO: 2404861 - RNA, 17 nt, Human
aaaaugacagauguuga

SEQ ID NO: 2404862 - RNA, 14 nt, Human
aaaaugacauccca

SEQ ID NO: 2404863 - RNA, 19 nt, Human
aaaaugaccaguaauugug

SEQ ID NO: 2404864 - RNA, 18 nt, Human
aaaaugacagauguugaa

SEQ ID NO: 2404865 - RNA, 21 nt, Human
aaaaugacuaaaaauauuaua

SEQ ID NO: 2404866 - RNA, 23 nt, Human
aaaaucugaaaaugugaauaaaa

SEQ ID NO: 2404867 - RNA, 19 nt, Human
aaaaucugcagaaggaaaa

SEQ ID NO: 2404868 - RNA, 20 nt, Human
aaaaucugucacguagaacu

SEQ ID NO: 2404869 - RNA, 15 nt, Human
aaaaucugcuaggga

SEQ ID NO: 2404870 - RNA, 13 nt, Human
aaaaucugaaaau

SEQ ID NO: 2404871 - RNA, 13 nt, Human
aaaauauuuugaa

SEQ ID NO: 2404872 - RNA, 14 nt, Human
aaaaugcaaauccu

SEQ ID NO: 2404873 - RNA, 18 nt, Human
aaaaugcaaauccuaugu

SEQ ID NO: 2404874 - RNA, 20 nt, Human
aaaaugauuguaaaauagcu

SEQ ID NO: 2404875 - RNA, 14 nt, Human
aaaaugauuuuauc

SEQ ID NO: 2404876 - RNA, 19 nt, Human
aaaaugauuguaaaauagc

SEQ ID NO: 2404877 - RNA, 16 nt, Human
aaaaugauuguaaaau

SEQ ID NO: 2404878 - RNA, 16 nt, Human
aaaaugauguucauuu

SEQ ID NO: 2404879 - RNA, 23 nt, Human
aaaaugauguguacccaaacgug

SEQ ID NO: 2404880 - RNA, 23 nt, Human
aaaaugagagggcaguguuuccu

SEQ ID NO: 2404881 - RNA, 20 nt, Human
aaaaugaccaguaauuguga

SEQ ID NO: 2404882 - RNA, 22 nt, Human
aaaaugagacuaugcguuuuua

SEQ ID NO: 2404883 - RNA, 18 nt, Human
aaaaugcagcagggaugc

SEQ ID NO: 2404884 - RNA, 14 nt, Human
aaaaugcauuguau

SEQ ID NO: 2404885 - RNA, 20 nt, Human
aaaaugcaaauccuauguga

SEQ ID NO: 2404886 - RNA, 22 nt, Human
aaaaugcaaauccuaugugauu

SEQ ID NO: 2404887 - RNA, 14 nt, Human
aaaaugcacguagc

SEQ ID NO: 2404888 - RNA, 14 nt, Human
aaaaugcacauagc

SEQ ID NO: 2404889 - RNA, 18 nt, Human
aaaaugcaacaacaugua

SEQ ID NO: 2404890 - RNA, 21 nt, Human
aaaaugcuguauuagucacag

SEQ ID NO: 2404891 - RNA, 23 nt, Human
aaaaugcuguauuagucacagag

SEQ ID NO: 2404892 - RNA, 18 nt, Human
aaaaugcuuuuuauuucu

SEQ ID NO: 2404893 - RNA, 19 nt, Human
aaaaugcuuuuuauuucug

SEQ ID NO: 2404894 - RNA, 13 nt, Human
aaaaugcuuuuua

SEQ ID NO: 2404895 - RNA, 17 nt, Human
aaaaugccaagacauga

SEQ ID NO: 2404896 - RNA, 22 nt, Human
gggccacuucuggguggggcag

SEQ ID NO: 2404897 - RNA, 16 nt, Human
gggccagacaugccac

SEQ ID NO: 2404898 - RNA, 20 nt, Human
aaaauggaagacagcucuua

SEQ ID NO: 2404899 - RNA, 12 nt, Human
aaaauggaaaga

SEQ ID NO: 2404900 - RNA, 22 nt, Human
aaaaugcuuuuuauuucugcau

SEQ ID NO: 2404901 - RNA, 14 nt, Human
aaaauggaaagaau

SEQ ID NO: 2404902 - RNA, 13 nt, Human
aaaauggaaagaa

SEQ ID NO: 2404903 - RNA, 12 nt, Human
gggcuagaaucu

SEQ ID NO: 2404904 - RNA, 16 nt, Human
gggcuagaaccuggca

SEQ ID NO: 2404905 - RNA, 11 nt, Human
gggcucagccu

SEQ ID NO: 2404906 - RNA, 12 nt, Human
gggcucagccug

SEQ ID NO: 2404907 - RNA, 13 nt, Human
gggcucagccugg

SEQ ID NO: 2404908 - RNA, 19 nt, Human
gggcucagcggggacagcu

SEQ ID NO: 2404909 - RNA, 17 nt, Human
gggcucagcggggacag

SEQ ID NO: 2404910 - RNA, 18 nt, Human
gggcuaguugggcuuccu

SEQ ID NO: 2404911 - RNA, 22 nt, Human
gggcucagcaaaagaugcuucu

SEQ ID NO: 2404912 - RNA, 17 nt, Human
gggcuagaaccuggagg

SEQ ID NO: 2404913 - RNA, 17 nt, Human
gggcuagaaccuggaga

SEQ ID NO: 2404914 - RNA, 15 nt, Human
gggcuagaaccugga

SEQ ID NO: 2404915 - RNA, 14 nt, Human
gggcuagaaccugg

SEQ ID NO: 2404916 - RNA, 20 nt, Human
gggcuaggaaauccagggug

SEQ ID NO: 2404917 - RNA, 15 nt, Human
gggcuaguugggcuu

SEQ ID NO: 2404918 - RNA, 13 nt, Human
gggcuccagacac

SEQ ID NO: 2404919 - RNA, 10 nt, Human
gggcuccaga

SEQ ID NO: 2404920 - RNA, 17 nt, Human
gggcucagggaccacag

SEQ ID NO: 2404921 - RNA, 13 nt, Human
gggcucaggaaaa

SEQ ID NO: 2404922 - RNA, 16 nt, Human
gggcucagccuggugg

SEQ ID NO: 2404923 - RNA, 20 nt, Human
gggcucagccuggugggccu

SEQ ID NO: 2404924 - RNA, 21 nt, Human
gggcucagcggggacagcucc

SEQ ID NO: 2404925 - RNA, 19 nt, Human
gggcugcaccggcuggccu

SEQ ID NO: 2404926 - RNA, 17 nt, Human
gggcugcaccggcuggc

SEQ ID NO: 2404927 - RNA, 20 nt, Human
gggcucagggaccacagcaa

SEQ ID NO: 2404928 - RNA, 13 nt, Human
gggcucccgcccg

SEQ ID NO: 2404929 - RNA, 21 nt, Human
gggcugcaccggcuggccugg

SEQ ID NO: 2404930 - RNA, 20 nt, Human
gggcugcaccggcuggccug

SEQ ID NO: 2404931 - RNA, 21 nt, Human
gggcugccugggcuguuggca

SEQ ID NO: 2404932 - RNA, 19 nt, Human
gggcugccugggcuguugg

SEQ ID NO: 2404933 - RNA, 15 nt, Human
gggcugccugggcug

SEQ ID NO: 2404934 - RNA, 14 nt, Human
gggcugccugggcu

SEQ ID NO: 2404935 - RNA, 13 nt, Human
gggcugccugggc

SEQ ID NO: 2404936 - RNA, 12 nt, Human
gggcugccuggg

SEQ ID NO: 2404937 - RNA, 12 nt, Human
gggcucccugac

SEQ ID NO: 2404938 - RNA, 21 nt, Human
gggcugcccuggugcugccac

SEQ ID NO: 2404939 - RNA, 15 nt, Human
gggcugggcagagga

SEQ ID NO: 2404940 - RNA, 17 nt, Human
gggcugcuuccuccugg

SEQ ID NO: 2404941 - RNA, 12 nt, Human
gggcugcuuccu

SEQ ID NO: 2404942 - RNA, 12 nt, Human
gggcugggcaga

SEQ ID NO: 2404943 - RNA, 12 nt, Human
gggcugcuguga

SEQ ID NO: 2404944 - RNA, 17 nt, Human
gggcugcugaccuccac

SEQ ID NO: 2404945 - RNA, 15 nt, Human
gggcugcuccuccag

SEQ ID NO: 2404946 - RNA, 16 nt, Human
gggcugcuccuccagg

SEQ ID NO: 2404947 - RNA, 18 nt, Human
gggcugcuccuccagggc

SEQ ID NO: 2404948 - RNA, 19 nt, Human
gggcugcuccuccagggcc

SEQ ID NO: 2404949 - RNA, 11 nt, Human
gggcugcuccu

SEQ ID NO: 2404950 - RNA, 14 nt, Human
gggcugcuccucau

SEQ ID NO: 2404951 - RNA, 19 nt, Human
aaaauggccauuugcuuuu

SEQ ID NO: 2404952 - RNA, 22 nt, Human
gggcugggugcgaccccaucug

SEQ ID NO: 2404953 - RNA, 23 nt, Human
aaaauggccauuugcuuuuucac

SEQ ID NO: 2404954 - RNA, 17 nt, Human
gggcuggguucuaccca

SEQ ID NO: 2404955 - RNA, 14 nt, Human
gggcugggcagcua

SEQ ID NO: 2404956 - RNA, 14 nt, Human
gggcugggcagcug

SEQ ID NO: 2404957 - RNA, 13 nt, Human
gggcugggcagcu

SEQ ID NO: 2404958 - RNA, 16 nt, Human
aaaaugguuuaaaugg

SEQ ID NO: 2404959 - RNA, 18 nt, Human
aaaaugguuuaaaugguc

SEQ ID NO: 2404960 - RNA, 14 nt, Human
aaaauggugccuga

SEQ ID NO: 2404961 - RNA, 22 nt, Human
aaaaugggacuucuuuucacau

SEQ ID NO: 2404962 - RNA, 21 nt, Human
aaaaugggacuucuuuucaca

SEQ ID NO: 2404963 - RNA, 19 nt, Human
aaaaugggacuucuuuuca

SEQ ID NO: 2404964 - RNA, 15 nt, Human
aaaaugggacuucuu

SEQ ID NO: 2404965 - RNA, 24 nt, Human
gggccugcaggaccugccuguagc

SEQ ID NO: 2404966 - RNA, 21 nt, Human
gggccugcaggaccugccugu

SEQ ID NO: 2404967 - RNA, 18 nt, Human
gggccucuuaugggcugg

SEQ ID NO: 2404968 - RNA, 22 nt, Human
gggccucgguguggagaagcgg

SEQ ID NO: 2404969 - RNA, 23 nt, Human
gggccucugguuuggggcgaggc

SEQ ID NO: 2404970 - RNA, 16 nt, Human
gggccucgggaccuca

SEQ ID NO: 2404971 - RNA, 14 nt, Human
gggccucgggaccu

SEQ ID NO: 2404972 - RNA, 17 nt, Human
gggccucggagccucau

SEQ ID NO: 2404973 - RNA, 14 nt, Human
gggccucagugcca

SEQ ID NO: 2404974 - RNA, 13 nt, Human
gggccucagugcc

SEQ ID NO: 2404975 - RNA, 15 nt, Human
gggccucagugccac

SEQ ID NO: 2404976 - RNA, 20 nt, Human
gggccucaaaggcccgcucu

SEQ ID NO: 2404977 - RNA, 20 nt, Human
gggccguaccccacccucag

SEQ ID NO: 2404978 - RNA, 20 nt, Human
gggccucaccgagugggggc

SEQ ID NO: 2404979 - RNA, 16 nt, Human
gggccucaaggacuug

SEQ ID NO: 2404980 - RNA, 15 nt, Human
gggccucggagccuc

SEQ ID NO: 2404981 - RNA, 22 nt, Human
gggcuacccugagcugaggcag

SEQ ID NO: 2404982 - RNA, 20 nt, Human
gggcuacugcagcuuuacau

SEQ ID NO: 2404983 - RNA, 21 nt, Human
gggcuacccugagcugaggca

SEQ ID NO: 2404984 - RNA, 19 nt, Human
gggcguggucacugcuguc

SEQ ID NO: 2404985 - RNA, 13 nt, Human
gggcguggagggc

SEQ ID NO: 2404986 - RNA, 17 nt, Human
gggcgucuguucccccu

SEQ ID NO: 2404987 - RNA, 16 nt, Human
gggcgugacucaccca

SEQ ID NO: 2404988 - RNA, 18 nt, Human
gggcgugagaccugcccc

SEQ ID NO: 2404989 - RNA, 19 nt, Human
gggcgugagaccugccccu

SEQ ID NO: 2404990 - RNA, 21 nt, Human
gggcggugagaggggaacaga

SEQ ID NO: 2404991 - RNA, 14 nt, Human
gggccugcuccaga

SEQ ID NO: 2404992 - RNA, 15 nt, Human
gggccugcuccagac

SEQ ID NO: 2404993 - RNA, 17 nt, Human
gggccugcuccagaccu

SEQ ID NO: 2404994 - RNA, 18 nt, Human
gggccugcuccagaccug

SEQ ID NO: 2404995 - RNA, 13 nt, Human
gggccugcuccag

SEQ ID NO: 2404996 - RNA, 20 nt, Human
gggccaugcugaggccuggg

SEQ ID NO: 2404997 - RNA, 19 nt, Human
gggccaugcugaggccugg

SEQ ID NO: 2404998 - RNA, 23 nt, Human
gggccaggcaggugccuggacau

SEQ ID NO: 2404999 - RNA, 20 nt, Human
gggccaggcaggugccugga

SEQ ID NO: 2405000 - RNA, 13 nt, Human
gggccaggcaggu

SEQ ID NO: 2405001 - RNA, 12 nt, Human
gggccaggcagg

SEQ ID NO: 2405002 - RNA, 11 nt, Human
gggccaggcag

SEQ ID NO: 2405003 - RNA, 20 nt, Human
gggccagaguauuggucucc

SEQ ID NO: 2405004 - RNA, 18 nt, Human
gggccagauccagccugg

SEQ ID NO: 2405005 - RNA, 14 nt, Human
gggccaggagccuc

SEQ ID NO: 2405006 - RNA, 13 nt, Human
gggccaggagccu

SEQ ID NO: 2405007 - RNA, 13 nt, Human
gggccagauccag

SEQ ID NO: 2405008 - RNA, 14 nt, Human
gggccagauccagc

SEQ ID NO: 2405009 - RNA, 16 nt, Human
gggccagauccagccu

SEQ ID NO: 2405010 - RNA, 17 nt, Human
gggccagauccagccug

SEQ ID NO: 2405011 - RNA, 12 nt, Human
gggccaggagcc

SEQ ID NO: 2405012 - RNA, 11 nt, Human
gggccagagcc

SEQ ID NO: 2405013 - RNA, 12 nt, Human
gggccagagcca

SEQ ID NO: 2405014 - RNA, 13 nt, Human
gggccagagccag

SEQ ID NO: 2405015 - RNA, 14 nt, Human
gggccagagccagg

SEQ ID NO: 2405016 - RNA, 22 nt, Human
gggccagaggaacuguccagag

SEQ ID NO: 2405017 - RNA, 15 nt, Human
gggccagagccaggg

SEQ ID NO: 2405018 - RNA, 12 nt, Human
gggccagaggcu

SEQ ID NO: 2405019 - RNA, 23 nt, Human
gggccagaggaacuguccagaga

SEQ ID NO: 2405020 - RNA, 21 nt, Human
gggccaugcugaggccugggc

SEQ ID NO: 2405021 - RNA, 23 nt, Human
gggccaugcugaggccugggccg

SEQ ID NO: 2405022 - RNA, 16 nt, Human
gggccauucuccacag

SEQ ID NO: 2405023 - RNA, 18 nt, Human
gggccauucuccacagca

SEQ ID NO: 2405024 - RNA, 18 nt, Human
gggcccaagacagaugcc

SEQ ID NO: 2405025 - RNA, 16 nt, Human
gggcccaacccugucu

SEQ ID NO: 2405026 - RNA, 14 nt, Human
gggcccaacccugu

SEQ ID NO: 2405027 - RNA, 13 nt, Human
gggcccaaaggcc

SEQ ID NO: 2405028 - RNA, 12 nt, Human
gggccgcugcca

SEQ ID NO: 2405029 - RNA, 13 nt, Human
gggccgcugccac

SEQ ID NO: 2405030 - RNA, 14 nt, Human
gggccgcugccacc

SEQ ID NO: 2405031 - RNA, 15 nt, Human
gggccgcugccaccc

SEQ ID NO: 2405032 - RNA, 21 nt, Human
gggccgcugccacccaccucc

SEQ ID NO: 2405033 - RNA, 19 nt, Human
gggccgccgguuugaguga

SEQ ID NO: 2405034 - RNA, 17 nt, Human
gggccgccgccucuuuc

SEQ ID NO: 2405035 - RNA, 18 nt, Human
gggccguaccccacccuc

SEQ ID NO: 2405036 - RNA, 16 nt, Human
gggccguaccccaccc

SEQ ID NO: 2405037 - RNA, 15 nt, Human
gggccguaccccacc

SEQ ID NO: 2405038 - RNA, 15 nt, Human
gggccggccaggugg

SEQ ID NO: 2405039 - RNA, 14 nt, Human
gggccggccaggug

SEQ ID NO: 2405040 - RNA, 21 nt, Human
gggccggccaggugggcgggc

SEQ ID NO: 2405041 - RNA, 21 nt, Human
gguaacagaacagcuucaggu

SEQ ID NO: 2405042 - RNA, 16 nt, Human
gguaacuugcaccucu

SEQ ID NO: 2405043 - RNA, 23 nt, Human
gguaagaagccgggaacagacaa

SEQ ID NO: 2405044 - RNA, 20 nt, Human
gguaaggaauaccugucccc

SEQ ID NO: 2405045 - RNA, 16 nt, Human
gguaggaacugcuggg

SEQ ID NO: 2405046 - RNA, 20 nt, Human
gguaagcacuuaaugaauga

SEQ ID NO: 2405047 - RNA, 13 nt, Human
gguaaggugccuu

SEQ ID NO: 2405048 - RNA, 14 nt, Human
gguaggcagagccu

SEQ ID NO: 2405049 - RNA, 19 nt, Human
gguaggagguuuggauggg

SEQ ID NO: 2405050 - RNA, 18 nt, Human
gguaggaacugcugggcu

SEQ ID NO: 2405051 - RNA, 15 nt, Human
gguaggaggaugggc

SEQ ID NO: 2405052 - RNA, 19 nt, Human
gguaaguuguuaagagugg

SEQ ID NO: 2405053 - RNA, 19 nt, Human
gguagguucagccaagguu

SEQ ID NO: 2405054 - RNA, 18 nt, Human
gguagguucagccaaggu

SEQ ID NO: 2405055 - RNA, 20 nt, Human
gguauaaugguugacugggu

SEQ ID NO: 2405056 - RNA, 16 nt, Human
gguauauccaaaagcu

SEQ ID NO: 2405057 - RNA, 22 nt, Human
gguauaucauuauaacugaagg

SEQ ID NO: 2405058 - RNA, 14 nt, Human
gguaucaggugcug

SEQ ID NO: 2405059 - RNA, 13 nt, Human
gguauauucauuu

SEQ ID NO: 2405060 - RNA, 15 nt, Human
gguaucaagaaaguc

SEQ ID NO: 2405061 - RNA, 20 nt, Human
gguaggguaagugagagagg

SEQ ID NO: 2405062 - RNA, 11 nt, Human
gguaggguggg

SEQ ID NO: 2405063 - RNA, 23 nt, Human
gguagggugggccuucagggagu

SEQ ID NO: 2405064 - RNA, 17 nt, Human
gguagguucagccaagg

SEQ ID NO: 2405065 - RNA, 16 nt, Human
gguagguucagccaag

SEQ ID NO: 2405066 - RNA, 19 nt, Human
gguagguggcacacugggu

SEQ ID NO: 2405067 - RNA, 13 nt, Human
gguagguggcaca

SEQ ID NO: 2405068 - RNA, 15 nt, Human
gguagguucagccaa

SEQ ID NO: 2405069 - RNA, 13 nt, Human
gguauagaaaugc

SEQ ID NO: 2405070 - RNA, 22 nt, Human
aaacuugauguguuaucucuua

SEQ ID NO: 2405071 - RNA, 21 nt, Human
aaacuuuagaguagcaugaga

SEQ ID NO: 2405072 - RNA, 21 nt, Human
aaacuucccuuucugcuugug

SEQ ID NO: 2405073 - RNA, 17 nt, Human
aaacuuccccaucuucu

SEQ ID NO: 2405074 - RNA, 23 nt, Human
aaacuucccgucccauauccugc

SEQ ID NO: 2405075 - RNA, 23 nt, Human
aaacuuccaugaggccaaacguu

SEQ ID NO: 2405076 - RNA, 19 nt, Human
aaacuucucugaagggagg

SEQ ID NO: 2405077 - RNA, 18 nt, Human
aaacuucucugaagggag

SEQ ID NO: 2405078 - RNA, 16 nt, Human
gguccagcucuggagg

SEQ ID NO: 2405079 - RNA, 15 nt, Human
gguccagcucuggag

SEQ ID NO: 2405080 - RNA, 14 nt, Human
gguccagcucugga

SEQ ID NO: 2405081 - RNA, 13 nt, Human
gguccagcucugg

SEQ ID NO: 2405082 - RNA, 23 nt, Human
gguccagcccuggcugaaggacu

SEQ ID NO: 2405083 - RNA, 22 nt, Human
gguccagcccuggcugaaggac

SEQ ID NO: 2405084 - RNA, 21 nt, Human
gguccagcccuggcugaagga

SEQ ID NO: 2405085 - RNA, 20 nt, Human
gguccagcccuggcugaagg

SEQ ID NO: 2405086 - RNA, 12 nt, Human
gguccagcucug

SEQ ID NO: 2405087 - RNA, 11 nt, Human
gguccagcucu

SEQ ID NO: 2405088 - RNA, 22 nt, Human
gguccagcucuggaggggaggg

SEQ ID NO: 2405089 - RNA, 17 nt, Human
gguccagcuugcucuuc

SEQ ID NO: 2405090 - RNA, 18 nt, Human
gguccagcuugcucuuca

SEQ ID NO: 2405091 - RNA, 23 nt, Human
aaacuuccagugcaacacugaag

SEQ ID NO: 2405092 - RNA, 22 nt, Human
aaacuuccagugcaacacugaa

SEQ ID NO: 2405093 - RNA, 11 nt, Human
gguccaggaga

SEQ ID NO: 2405094 - RNA, 19 nt, Human
gguaucauuuucugcauuu

SEQ ID NO: 2405095 - RNA, 18 nt, Human
gguauccccccaucuugc

SEQ ID NO: 2405096 - RNA, 19 nt, Human
gguaucaggugcugccauc

SEQ ID NO: 2405097 - RNA, 14 nt, Human
gguaucuccaggau

SEQ ID NO: 2405098 - RNA, 13 nt, Human
gguaucuccagga

SEQ ID NO: 2405099 - RNA, 12 nt, Human
gguaucuccagg

SEQ ID NO: 2405100 - RNA, 23 nt, Human
gguaucuccaggauugaagagca

SEQ ID NO: 2405101 - RNA, 16 nt, Human
gguaucuccaggauug

SEQ ID NO: 2405102 - RNA, 16 nt, Human
gguaucuguucuuuaa

SEQ ID NO: 2405103 - RNA, 14 nt, Human
ggucagugcaaaua

SEQ ID NO: 2405104 - RNA, 16 nt, Human
ggucagucugguggga

SEQ ID NO: 2405105 - RNA, 19 nt, Human
ggucagugaggcccaggga

SEQ ID NO: 2405106 - RNA, 24 nt, Human
ggucaguguccaaagcagggucug

SEQ ID NO: 2405107 - RNA, 21 nt, Human
ggucauacuaucuacucuccu

SEQ ID NO: 2405108 - RNA, 16 nt, Human
ggucauagcagugcuu

SEQ ID NO: 2405109 - RNA, 23 nt, Human
ggucauagcccagaucagcuccu

SEQ ID NO: 2405110 - RNA, 22 nt, Human
ggucauacuaucuacucuccuc

SEQ ID NO: 2405111 - RNA, 19 nt, Human
gguccagcccuggcugaag

SEQ ID NO: 2405112 - RNA, 17 nt, Human
gguccagcccuggcuga

SEQ ID NO: 2405113 - RNA, 16 nt, Human
gguaaagacuggcuuu

SEQ ID NO: 2405114 - RNA, 15 nt, Human
gguaaagacuggcuu

SEQ ID NO: 2405115 - RNA, 16 nt, Human
gguaaacacgccugca

SEQ ID NO: 2405116 - RNA, 13 nt, Human
gguaaaauacuuc

SEQ ID NO: 2405117 - RNA, 23 nt, Human
gguaaaagugugagcagugaguu

SEQ ID NO: 2405118 - RNA, 18 nt, Human
gguaacagaacagcuuca

SEQ ID NO: 2405119 - RNA, 16 nt, Human
gguaacagaacagcuu

SEQ ID NO: 2405120 - RNA, 15 nt, Human
gguaacagaacagcu

SEQ ID NO: 2405121 - RNA, 14 nt, Human
gguaacagaacagc

SEQ ID NO: 2405122 - RNA, 22 nt, Human
gguaaauuuccccaacagugug

SEQ ID NO: 2405123 - RNA, 20 nt, Human
gguaaauuuccccaacagug

SEQ ID NO: 2405124 - RNA, 13 nt, Human
gguaaauuucugu

SEQ ID NO: 2405125 - RNA, 22 nt, Human
gguaaaucagacuaugaaguuu

SEQ ID NO: 2405126 - RNA, 13 nt, Human
gguaaaugaugug

SEQ ID NO: 2405127 - RNA, 15 nt, Human
gguaaauuaagacau

SEQ ID NO: 2405128 - RNA, 20 nt, Human
gguaaauaccaaguauuuau

SEQ ID NO: 2405129 - RNA, 18 nt, Human
gguaaauuuccccaacag

SEQ ID NO: 2405130 - RNA, 20 nt, Human
ggguuuugccauguuggcca

SEQ ID NO: 2405131 - RNA, 16 nt, Human
ggguuuuccacccugg

SEQ ID NO: 2405132 - RNA, 17 nt, Human
ggguuuuccacccugga

SEQ ID NO: 2405133 - RNA, 18 nt, Human
ggguuuuguauucucuga

SEQ ID NO: 2405134 - RNA, 12 nt, Human
ggguuuucuuaa

SEQ ID NO: 2405135 - RNA, 23 nt, Human
ggguuuugccauguuggccaggc

SEQ ID NO: 2405136 - RNA, 14 nt, Human
ggguggugcuggga

SEQ ID NO: 2405137 - RNA, 12 nt, Human
ggguggugcugg

SEQ ID NO: 2405138 - RNA, 13 nt, Human
gggugguggggag

SEQ ID NO: 2405139 - RNA, 18 nt, Human
ggguggugcugggacuga

SEQ ID NO: 2405140 - RNA, 12 nt, Human
ggguggugggga

SEQ ID NO: 2405141 - RNA, 15 nt, Human
gggugguggugauag

SEQ ID NO: 2405142 - RNA, 19 nt, Human
gggugguggggaggggcgc

SEQ ID NO: 2405143 - RNA, 18 nt, Human
ggguguaacaggucuccu

SEQ ID NO: 2405144 - RNA, 19 nt, Human
ggguguaacaggucuccuc

SEQ ID NO: 2405145 - RNA, 23 nt, Human
ggguguauuuauuuuccucccca

SEQ ID NO: 2405146 - RNA, 19 nt, Human
aaacuuaaucuaaauggaa

SEQ ID NO: 2405147 - RNA, 18 nt, Human
aaacuuagaauaaaauug

SEQ ID NO: 2405148 - RNA, 17 nt, Human
aaacuuagaauaaaauu

SEQ ID NO: 2405149 - RNA, 22 nt, Human
aaacuuagaauaaaauuguaaa

SEQ ID NO: 2405150 - RNA, 14 nt, Human
aaacuuacacacaa

SEQ ID NO: 2405151 - RNA, 22 nt, Human
aaacuuauuuuuuucugauugu

SEQ ID NO: 2405152 - RNA, 20 nt, Human
aaacuuauuuuuuucugauu

SEQ ID NO: 2405153 - RNA, 19 nt, Human
aaacuuauuuuuuucugau

SEQ ID NO: 2405154 - RNA, 13 nt, Human
aaacuuauuuuuu

SEQ ID NO: 2405155 - RNA, 14 nt, Human
aaacuuauuugagu

SEQ ID NO: 2405156 - RNA, 12 nt, Human
aaacuuauuuga

SEQ ID NO: 2405157 - RNA, 10 nt, Human
aaacuuauuu

SEQ ID NO: 2405158 - RNA, 21 nt, Human
aaacuuagugcggacaaguuu

SEQ ID NO: 2405159 - RNA, 18 nt, Human
gggugggacacccuguga

SEQ ID NO: 2405160 - RNA, 15 nt, Human
gggugggacacccug

SEQ ID NO: 2405161 - RNA, 16 nt, Human
ggguggcuagucagag

SEQ ID NO: 2405162 - RNA, 18 nt, Human
ggguggcuagucagagag

SEQ ID NO: 2405163 - RNA, 11 nt, Human
ggguggccucg

SEQ ID NO: 2405164 - RNA, 23 nt, Human
aaacuuauuuuuuucugauugua

SEQ ID NO: 2405165 - RNA, 18 nt, Human
aaacuaaaucucuaauau

SEQ ID NO: 2405166 - RNA, 17 nt, Human
aaacuaaaucucuaaua

SEQ ID NO: 2405167 - RNA, 13 nt, Human
aaacuaaaucucu

SEQ ID NO: 2405168 - RNA, 23 nt, Human
aaacuaaauagcauguauugugu

SEQ ID NO: 2405169 - RNA, 17 nt, Human
aaacuaaauagcaugua

SEQ ID NO: 2405170 - RNA, 16 nt, Human
aaacuaaauagcaugu

SEQ ID NO: 2405171 - RNA, 19 nt, Human
aaacuguuaauaguucagg

SEQ ID NO: 2405172 - RNA, 20 nt, Human
aaacuguucccaccugcugg

SEQ ID NO: 2405173 - RNA, 22 nt, Human
aaacuguugccagagauggagg

SEQ ID NO: 2405174 - RNA, 17 nt, Human
aaacuuaacauauuuac

SEQ ID NO: 2405175 - RNA, 16 nt, Human
aaacuguugccagaga

SEQ ID NO: 2405176 - RNA, 21 nt, Human
aaacuguucccaccugcugga

SEQ ID NO: 2405177 - RNA, 20 nt, Human
aaacguggcuuuuagacaga

SEQ ID NO: 2405178 - RNA, 16 nt, Human
aaacguuuuauugugu

SEQ ID NO: 2405179 - RNA, 17 nt, Human
aaacguguugccuugaa

SEQ ID NO: 2405180 - RNA, 21 nt, Human
aaacguuuuauuguguuuuua

SEQ ID NO: 2405181 - RNA, 21 nt, Human
aaacguggcugcuucaaggau

SEQ ID NO: 2405182 - RNA, 20 nt, Human
aaacgcauggaguguguauu

SEQ ID NO: 2405183 - RNA, 22 nt, Human
aaacgcuaaagagcccuugccu

SEQ ID NO: 2405184 - RNA, 21 nt, Human
aaacgauuuaauucucuugaa

SEQ ID NO: 2405185 - RNA, 21 nt, Human
ggggcccgcuugccucggcuc

SEQ ID NO: 2405186 - RNA, 20 nt, Human
ggggcccgcuugccucggcu

SEQ ID NO: 2405187 - RNA, 13 nt, Human
ggggcccggccag

SEQ ID NO: 2405188 - RNA, 20 nt, Human
ggggcccguugucucccugg

SEQ ID NO: 2405189 - RNA, 19 nt, Human
ggggcccguugucucccug

SEQ ID NO: 2405190 - RNA, 23 nt, Human
ggggcccgcuugccucggcuccu

SEQ ID NO: 2405191 - RNA, 15 nt, Human
ggggcccggccagcc

SEQ ID NO: 2405192 - RNA, 17 nt, Human
gggggaucacagccucu

SEQ ID NO: 2405193 - RNA, 23 nt, Human
ggggcccguugucucccuggccc

SEQ ID NO: 2405194 - RNA, 22 nt, Human
ggggcccguugucucccuggcc

SEQ ID NO: 2405195 - RNA, 21 nt, Human
ggggcccguugucucccuggc

SEQ ID NO: 2405196 - RNA, 15 nt, Human
ggggcccugccuccu

SEQ ID NO: 2405197 - RNA, 23 nt, Human
gggggcacaugcugagucuccca

SEQ ID NO: 2405198 - RNA, 23 nt, Human
gggggcaagaagaucacgcuccc

SEQ ID NO: 2405199 - RNA, 11 nt, Human
gggggcagagg

SEQ ID NO: 2405200 - RNA, 12 nt, Human
gggggcagaggg

SEQ ID NO: 2405201 - RNA, 13 nt, Human
gggggcagagggc

SEQ ID NO: 2405202 - RNA, 11 nt, Human
gggggcuggga

SEQ ID NO: 2405203 - RNA, 13 nt, Human
gggggcuggccua

SEQ ID NO: 2405204 - RNA, 12 nt, Human
gggggcuggccu

SEQ ID NO: 2405205 - RNA, 20 nt, Human
gggggcugccuggcccccag

SEQ ID NO: 2405206 - RNA, 14 nt, Human
gggggcagggcaug

SEQ ID NO: 2405207 - RNA, 15 nt, Human
gggggccaacaccag

SEQ ID NO: 2405208 - RNA, 17 nt, Human
gggggccaccuccccag

SEQ ID NO: 2405209 - RNA, 13 nt, Human
ggggguggccucc

SEQ ID NO: 2405210 - RNA, 18 nt, Human
ggggguuuuuacuccagu

SEQ ID NO: 2405211 - RNA, 13 nt, Human
ggggguggccgcu

SEQ ID NO: 2405212 - RNA, 18 nt, Human
ggggguugcggggggagg

SEQ ID NO: 2405213 - RNA, 22 nt, Human
gggguaaaauuccuuagcuuag

SEQ ID NO: 2405214 - RNA, 15 nt, Human
gggggcugggcagag

SEQ ID NO: 2405215 - RNA, 23 nt, Human
ggggguggccgcugaguggcagg

SEQ ID NO: 2405216 - RNA, 22 nt, Human
gggggcuucauacacaugagau

SEQ ID NO: 2405217 - RNA, 21 nt, Human
gggggcuggugccagccuucc

SEQ ID NO: 2405218 - RNA, 19 nt, Human
gggggcuggugccagccuu

SEQ ID NO: 2405219 - RNA, 14 nt, Human
gggggcuggugcca

SEQ ID NO: 2405220 - RNA, 13 nt, Human
gggggcuggugcc

SEQ ID NO: 2405221 - RNA, 21 nt, Human
ggggucacucuggcagcucag

SEQ ID NO: 2405222 - RNA, 22 nt, Human
gggguauuuaccacagcagcug

SEQ ID NO: 2405223 - RNA, 17 nt, Human
gggguaggcagagccuu

SEQ ID NO: 2405224 - RNA, 15 nt, Human
gggguagcagcugga

SEQ ID NO: 2405225 - RNA, 24 nt, Human
ggggguuuuuacuccaguggugaa

SEQ ID NO: 2405226 - RNA, 18 nt, Human
gggguagcuagaggaacc

SEQ ID NO: 2405227 - RNA, 19 nt, Human
gggguagcuagaggaacca

SEQ ID NO: 2405228 - RNA, 15 nt, Human
ggggucaggcuccau

SEQ ID NO: 2405229 - RNA, 22 nt, Human
ggggucagggaccaaggacccc

SEQ ID NO: 2405230 - RNA, 18 nt, Human
gggguauuuuaggcaggg

SEQ ID NO: 2405231 - RNA, 22 nt, Human
ggggucacucaauucugcagua

SEQ ID NO: 2405232 - RNA, 18 nt, Human
ggggucaugcccuccucu

SEQ ID NO: 2405233 - RNA, 19 nt, Human
ggggucaugcccuccucuc

SEQ ID NO: 2405234 - RNA, 18 nt, Human
gggguccacccagcaaag

SEQ ID NO: 2405235 - RNA, 21 nt, Human
ggggucaugcccuccucuccc

SEQ ID NO: 2405236 - RNA, 17 nt, Human
gggguccagggagcagg

SEQ ID NO: 2405237 - RNA, 18 nt, Human
aaaauguauguguaagua

SEQ ID NO: 2405238 - RNA, 20 nt, Human
aaaauguaaauauucuauau

SEQ ID NO: 2405239 - RNA, 11 nt, Human
aaaauguaaau

SEQ ID NO: 2405240 - RNA, 19 nt, Human
aaaauguaaaggagucaaa

SEQ ID NO: 2405241 - RNA, 13 nt, Human
ggggaccagagcu

SEQ ID NO: 2405242 - RNA, 12 nt, Human
ggggaccagagc

SEQ ID NO: 2405243 - RNA, 22 nt, Human
aaaaugucaaagagaaaacuua

SEQ ID NO: 2405244 - RNA, 12 nt, Human
aaaaugucugua

SEQ ID NO: 2405245 - RNA, 15 nt, Human
ggggacagggcuggc

SEQ ID NO: 2405246 - RNA, 14 nt, Human
ggggaccagagcug

SEQ ID NO: 2405247 - RNA, 19 nt, Human
ggggccaguuggucccccu

SEQ ID NO: 2405248 - RNA, 22 nt, Human
ggggccaugagcuccagacccc

SEQ ID NO: 2405249 - RNA, 14 nt, Human
ggggccaugaggcc

SEQ ID NO: 2405250 - RNA, 24 nt, Human
ggggacagggcuggcccagcccug

SEQ ID NO: 2405251 - RNA, 22 nt, Human
ggggacagggcuggcccagccc

SEQ ID NO: 2405252 - RNA, 19 nt, Human
ggggacagggcuggcccag

SEQ ID NO: 2405253 - RNA, 16 nt, Human
ggggacagggcuggcc

SEQ ID NO: 2405254 - RNA, 20 nt, Human
ggggccaugagcuccagacc

SEQ ID NO: 2405255 - RNA, 21 nt, Human
ggggccaugagcuccagaccc

SEQ ID NO: 2405256 - RNA, 19 nt, Human
ggggccccagucagccucu

SEQ ID NO: 2405257 - RNA, 10 nt, Human
ggggccccuu

SEQ ID NO: 2405258 - RNA, 21 nt, Human
ggggccccuuuuuacuccccu

SEQ ID NO: 2405259 - RNA, 22 nt, Human
ggggccccuuuuuacuccccuu

SEQ ID NO: 2405260 - RNA, 16 nt, Human
ggggcccgccuggcag

SEQ ID NO: 2405261 - RNA, 15 nt, Human
ggggcccgcuugccu

SEQ ID NO: 2405262 - RNA, 21 nt, Human
ggggcccgccuggcagaacug

SEQ ID NO: 2405263 - RNA, 23 nt, Human
ggggcccgccuggcagaacugag

SEQ ID NO: 2405264 - RNA, 19 nt, Human
ggggcccaaggcggccccu

SEQ ID NO: 2405265 - RNA, 16 nt, Human
ggggccaugaggccuc

SEQ ID NO: 2405266 - RNA, 18 nt, Human
ggggccccagucagccuc

SEQ ID NO: 2405267 - RNA, 16 nt, Human
ggggccccagucagcc

SEQ ID NO: 2405268 - RNA, 14 nt, Human
ggggccccagggcu

SEQ ID NO: 2405269 - RNA, 22 nt, Human
ggggcccaaggcggccccuccc

SEQ ID NO: 2405270 - RNA, 17 nt, Human
ggggcccaugaaagagg

SEQ ID NO: 2405271 - RNA, 19 nt, Human
aaaccaccagaagcccaga

SEQ ID NO: 2405272 - RNA, 23 nt, Human
aaaccaccagugcccaaagucug

SEQ ID NO: 2405273 - RNA, 16 nt, Human
aaaccacuagaacucu

SEQ ID NO: 2405274 - RNA, 12 nt, Human
aaaccagaagca

SEQ ID NO: 2405275 - RNA, 15 nt, Human
aaaccaccagaagcc

SEQ ID NO: 2405276 - RNA, 18 nt, Human
aaaccaccagaagcccag

SEQ ID NO: 2405277 - RNA, 21 nt, Human
aaacauuuuguggucauuaag

SEQ ID NO: 2405278 - RNA, 21 nt, Human
aaaccugggauucaggaaugu

SEQ ID NO: 2405279 - RNA, 18 nt, Human
aaaccugggauucaggaa

SEQ ID NO: 2405280 - RNA, 15 nt, Human
aaaccuggaugucac

SEQ ID NO: 2405281 - RNA, 17 nt, Human
aaaccugcccugccuga

SEQ ID NO: 2405282 - RNA, 16 nt, Human
aaaccugcccugccug

SEQ ID NO: 2405283 - RNA, 14 nt, Human
aaaccugcccugcc

SEQ ID NO: 2405284 - RNA, 12 nt, Human
aaaccugcccug

SEQ ID NO: 2405285 - RNA, 16 nt, Human
aaaccugccuggguuu

SEQ ID NO: 2405286 - RNA, 12 nt, Human
aaaccugccugg

SEQ ID NO: 2405287 - RNA, 14 nt, Human
aaaccugauguuaa

SEQ ID NO: 2405288 - RNA, 19 nt, Human
aaaccugauguuaaaauuc

SEQ ID NO: 2405289 - RNA, 22 nt, Human
aaaccugugucucugagaguag

SEQ ID NO: 2405290 - RNA, 19 nt, Human
aaaccuguuuaaauauuuc

SEQ ID NO: 2405291 - RNA, 16 nt, Human
aaaccuguuuaaauau

SEQ ID NO: 2405292 - RNA, 18 nt, Human
aaaccugucaaugauaca

SEQ ID NO: 2405293 - RNA, 17 nt, Human
aaaccuucacuuaggaa

SEQ ID NO: 2405294 - RNA, 19 nt, Human
aaaccuuauuuuuucccaa

SEQ ID NO: 2405295 - RNA, 18 nt, Human
aaaccuuauuguaccucu

SEQ ID NO: 2405296 - RNA, 21 nt, Human
aaaccuguuuaaauauuucaa

SEQ ID NO: 2405297 - RNA, 17 nt, Human
aaaccuuauuguaccuc

SEQ ID NO: 2405298 - RNA, 16 nt, Human
aaaccuuauuguaccu

SEQ ID NO: 2405299 - RNA, 19 nt, Human
aaacgauuuaauucucuug

SEQ ID NO: 2405300 - RNA, 18 nt, Human
aaacgauuuaauucucuu

SEQ ID NO: 2405301 - RNA, 19 nt, Human
aaacgcaaagggcugaaag

SEQ ID NO: 2405302 - RNA, 17 nt, Human
aaacgauuuaauucucu

SEQ ID NO: 2405303 - RNA, 16 nt, Human
aaacgauuuaauucuc

SEQ ID NO: 2405304 - RNA, 15 nt, Human
aaacgauuuaauucu

SEQ ID NO: 2405305 - RNA, 19 nt, Human
aaacgagucaauccccuca

SEQ ID NO: 2405306 - RNA, 23 nt, Human
aaaccuuuuuuaagauuuuucuc

SEQ ID NO: 2405307 - RNA, 22 nt, Human
aaaccuuuuuuaagauuuuucu

SEQ ID NO: 2405308 - RNA, 21 nt, Human
aaaccuuuuuuaagauuuuuc

SEQ ID NO: 2405309 - RNA, 20 nt, Human
aaaccuuuuuuaagauuuuu

SEQ ID NO: 2405310 - RNA, 19 nt, Human
aaaccuuuuuuaagauuuu

SEQ ID NO: 2405311 - RNA, 18 nt, Human
aaaccuuuuuuaagauuu

SEQ ID NO: 2405312 - RNA, 16 nt, Human
aaaccuuuagggcagc

SEQ ID NO: 2405313 - RNA, 22 nt, Human
aaaccuugguguaguugaacug

SEQ ID NO: 2405314 - RNA, 14 nt, Human
aaaccuugguguag

SEQ ID NO: 2405315 - RNA, 20 nt, Human
aaaccuuauuuuuucccaaa

SEQ ID NO: 2405316 - RNA, 14 nt, Human
aaaccuugccuuuc

SEQ ID NO: 2405317 - RNA, 20 nt, Human
gggucacucuggcagcucag

SEQ ID NO: 2405318 - RNA, 14 nt, Human
gggucacucuggca

SEQ ID NO: 2405319 - RNA, 19 nt, Human
gggguccuggagcagacca

SEQ ID NO: 2405320 - RNA, 13 nt, Human
ggggucccagugg

SEQ ID NO: 2405321 - RNA, 23 nt, Human
gggguccccaucaucccagcugc

SEQ ID NO: 2405322 - RNA, 11 nt, Human
gggguccuggc

SEQ ID NO: 2405323 - RNA, 13 nt, Human
gggguccuggcca

SEQ ID NO: 2405324 - RNA, 15 nt, Human
gggguccuguggcag

SEQ ID NO: 2405325 - RNA, 14 nt, Human
gggguccuggccau

SEQ ID NO: 2405326 - RNA, 19 nt, Human
gggguccuguggcaggcag

SEQ ID NO: 2405327 - RNA, 12 nt, Human
gggucaggcucc

SEQ ID NO: 2405328 - RNA, 18 nt, Human
gggucagggaccaaggac

SEQ ID NO: 2405329 - RNA, 22 nt, Human
gggucacucuggcagcucagag

SEQ ID NO: 2405330 - RNA, 12 nt, Human
gggucaaggaau

SEQ ID NO: 2405331 - RNA, 21 nt, Human
gggucaucuguaccucugccu

SEQ ID NO: 2405332 - RNA, 21 nt, Human
gggucagucuggugggaggac

SEQ ID NO: 2405333 - RNA, 18 nt, Human
gggucauucauggccugg

SEQ ID NO: 2405334 - RNA, 14 nt, Human
gggucaugcccucc

SEQ ID NO: 2405335 - RNA, 16 nt, Human
gggucaugcccuccuc

SEQ ID NO: 2405336 - RNA, 13 nt, Human
ggguccuggccau

SEQ ID NO: 2405337 - RNA, 15 nt, Human
ggguccuggccaucc

SEQ ID NO: 2405338 - RNA, 16 nt, Human
ggguccuggccauccc

SEQ ID NO: 2405339 - RNA, 17 nt, Human
ggguccuggccauccca

SEQ ID NO: 2405340 - RNA, 13 nt, Human
ggguccuggcucc

SEQ ID NO: 2405341 - RNA, 20 nt, Human
ggguccacccagcaaagagu

SEQ ID NO: 2405342 - RNA, 13 nt, Human
ggguccaaauaaa

SEQ ID NO: 2405343 - RNA, 12 nt, Human
ggguccaaauaa

SEQ ID NO: 2405344 - RNA, 21 nt, Human
gggucaugcccuccucuccca

SEQ ID NO: 2405345 - RNA, 16 nt, Human
gggucccugcuguguu

SEQ ID NO: 2405346 - RNA, 20 nt, Human
aaacauuuuaaauggacaga

SEQ ID NO: 2405347 - RNA, 15 nt, Human
aaacauuuuaaaugg

SEQ ID NO: 2405348 - RNA, 23 nt, Human
ggguccuucccucuccccaagac

SEQ ID NO: 2405349 - RNA, 19 nt, Human
ggguccuguggcaggcagc

SEQ ID NO: 2405350 - RNA, 18 nt, Human
ggguccuguggcaggcag

SEQ ID NO: 2405351 - RNA, 18 nt, Human
ggguccuggcuccugagg

SEQ ID NO: 2405352 - RNA, 23 nt, Human
ggguccuguggcaggcagcgcca

SEQ ID NO: 2405353 - RNA, 20 nt, Human
ggguccuguggcaggcagcg

SEQ ID NO: 2405354 - RNA, 16 nt, Human
ggguccuucccucucc

SEQ ID NO: 2405355 - RNA, 18 nt, Human
ggguccuucccucucccc

SEQ ID NO: 2405356 - RNA, 19 nt, Human
aaacauuuugucauauaag

SEQ ID NO: 2405357 - RNA, 13 nt, Human
aaacauuuucaca

SEQ ID NO: 2405358 - RNA, 14 nt, Human
aaacauuuucacac

SEQ ID NO: 2405359 - RNA, 16 nt, Human
aaacauuuucacacaa

SEQ ID NO: 2405360 - RNA, 22 nt, Human
aaacauuuucacacaauacaau

SEQ ID NO: 2405361 - RNA, 15 nt, Human
guaauuugugauaca

SEQ ID NO: 2405362 - RNA, 21 nt, Human
guaauuuguaucugaaggaga

SEQ ID NO: 2405363 - RNA, 15 nt, Human
guaauuuguaucuga

SEQ ID NO: 2405364 - RNA, 14 nt, Human
guaauuuguaucug

SEQ ID NO: 2405365 - RNA, 13 nt, Human
guaauuuguaucu

SEQ ID NO: 2405366 - RNA, 17 nt, Human
guaaucgaccugccucg

SEQ ID NO: 2405367 - RNA, 17 nt, Human
guaauuugugauacaau

SEQ ID NO: 2405368 - RNA, 20 nt, Human
guaauuugugauacaaugcu

SEQ ID NO: 2405369 - RNA, 14 nt, Human
guaaucaauguuuc

SEQ ID NO: 2405370 - RNA, 16 nt, Human
guaaucccagcuacuu

SEQ ID NO: 2405371 - RNA, 18 nt, Human
guaaucccgccaccuauc

SEQ ID NO: 2405372 - RNA, 20 nt, Human
guaaucccagcuacuuggga

SEQ ID NO: 2405373 - RNA, 20 nt, Human
guaaucauuucuugggcccu

SEQ ID NO: 2405374 - RNA, 22 nt, Human
guaauccucaagaaauaaaagg

SEQ ID NO: 2405375 - RNA, 15 nt, Human
guaaucgaccugccu

SEQ ID NO: 2405376 - RNA, 23 nt, Human
guaauccuagcacuuugggaggc

SEQ ID NO: 2405377 - RNA, 17 nt, Human
guacaaggcgaucccau

SEQ ID NO: 2405378 - RNA, 22 nt, Human
guacaauaaguguuuuuguauu

SEQ ID NO: 2405379 - RNA, 12 nt, Human
guacaauauuua

SEQ ID NO: 2405380 - RNA, 13 nt, Human
guacaauauuuaa

SEQ ID NO: 2405381 - RNA, 22 nt, Human
guacaaauauaagaauaaaaug

SEQ ID NO: 2405382 - RNA, 22 nt, Human
guacaaccuguucugcuuuccu

SEQ ID NO: 2405383 - RNA, 23 nt, Human
guacaaauauaagaauaaaaugu

SEQ ID NO: 2405384 - RNA, 20 nt, Human
guacaaauauaagaauaaaa

SEQ ID NO: 2405385 - RNA, 17 nt, Human
guacaaauauaagaaua

SEQ ID NO: 2405386 - RNA, 13 nt, Human
guacaaauauaag

SEQ ID NO: 2405387 - RNA, 20 nt, Human
guacaaauaaagucccaggu

SEQ ID NO: 2405388 - RNA, 21 nt, Human
guaauuuuuuuaucgucacug

SEQ ID NO: 2405389 - RNA, 19 nt, Human
guacaaaaaaaaaguuuua

SEQ ID NO: 2405390 - RNA, 16 nt, Human
guaauuuuuuucuuau

SEQ ID NO: 2405391 - RNA, 20 nt, Human
guacaaaaaaaaaguuuuau

SEQ ID NO: 2405392 - RNA, 12 nt, Human
guacaaaauaaa

SEQ ID NO: 2405393 - RNA, 14 nt, Human
guacaaaauaaaca

SEQ ID NO: 2405394 - RNA, 16 nt, Human
guacaaaauaaacaaa

SEQ ID NO: 2405395 - RNA, 20 nt, Human
guacaaaauccagcuaugaa

SEQ ID NO: 2405396 - RNA, 20 nt, Human
guaauauugacuuguauauu

SEQ ID NO: 2405397 - RNA, 19 nt, Human
guaauauugacuuguauau

SEQ ID NO: 2405398 - RNA, 19 nt, Human
guaauagaaaacugaaaau

SEQ ID NO: 2405399 - RNA, 16 nt, Human
guaauauugacuugua

SEQ ID NO: 2405400 - RNA, 15 nt, Human
guaauagagcaaaau

SEQ ID NO: 2405401 - RNA, 15 nt, Human
guaauagaaaacuga

SEQ ID NO: 2405402 - RNA, 19 nt, Human
guaauagagcaaaauugau

SEQ ID NO: 2405403 - RNA, 17 nt, Human
guaaucaauaaacgauu

SEQ ID NO: 2405404 - RNA, 13 nt, Human
guaaucaauaaac

SEQ ID NO: 2405405 - RNA, 20 nt, Human
guaaucaauaaacgauuuaa

SEQ ID NO: 2405406 - RNA, 18 nt, Human
guaaucaauaaacgauuu

SEQ ID NO: 2405407 - RNA, 18 nt, Human
guaauauuuauauauuua

SEQ ID NO: 2405408 - RNA, 16 nt, Human
guaauaaacuguguuu

SEQ ID NO: 2405409 - RNA, 23 nt, Human
guaauaagacauaacguuuuucc

SEQ ID NO: 2405410 - RNA, 19 nt, Human
guaauaaugcuaaagaaaa

SEQ ID NO: 2405411 - RNA, 16 nt, Human
guaauaaugugaauca

SEQ ID NO: 2405412 - RNA, 17 nt, Human
guaauaaugugaaucau

SEQ ID NO: 2405413 - RNA, 17 nt, Human
guaacguugcuguggga

SEQ ID NO: 2405414 - RNA, 21 nt, Human
guaagugugaguaagagcugg

SEQ ID NO: 2405415 - RNA, 17 nt, Human
guaacuaggcucagaga

SEQ ID NO: 2405416 - RNA, 20 nt, Human
guaagugugaguaagagcug

SEQ ID NO: 2405417 - RNA, 14 nt, Human
guaaguuucaggug

SEQ ID NO: 2405418 - RNA, 13 nt, Human
guaaguuucaggu

SEQ ID NO: 2405419 - RNA, 19 nt, Human
guaaguuuaugucuaaaga

SEQ ID NO: 2405420 - RNA, 22 nt, Human
guaaguuucaggugacauguga

SEQ ID NO: 2405421 - RNA, 16 nt, Human
guaaguuucaggugac

SEQ ID NO: 2405422 - RNA, 21 nt, Human
guaaguuuaaaggauguuggu

SEQ ID NO: 2405423 - RNA, 21 nt, Human
guaaguuccuacuaggcaaaa

SEQ ID NO: 2405424 - RNA, 14 nt, Human
guaaguuccuacua

SEQ ID NO: 2405425 - RNA, 23 nt, Human
guaaguugaauggccugccuuga

SEQ ID NO: 2405426 - RNA, 18 nt, Human
guaaccucuucagaggcc

SEQ ID NO: 2405427 - RNA, 20 nt, Human
guaaccucuucagaggcccu

SEQ ID NO: 2405428 - RNA, 17 nt, Human
guaaccucagcucuggg

SEQ ID NO: 2405429 - RNA, 15 nt, Human
guaaccucagcucug

SEQ ID NO: 2405430 - RNA, 12 nt, Human
guaaccucagcu

SEQ ID NO: 2405431 - RNA, 21 nt, Human
guaacccuggugguugcuguu

SEQ ID NO: 2405432 - RNA, 20 nt, Human
guaaccagccagauccucuu

SEQ ID NO: 2405433 - RNA, 13 nt, Human
guaaccagccaga

SEQ ID NO: 2405434 - RNA, 12 nt, Human
guaaccagccag

SEQ ID NO: 2405435 - RNA, 18 nt, Human
guaacccaacucuccugg

SEQ ID NO: 2405436 - RNA, 17 nt, Human
guaacccaacucuccug

SEQ ID NO: 2405437 - RNA, 23 nt, Human
guaacccagauuuugcuguauau

SEQ ID NO: 2405438 - RNA, 14 nt, Human
guaacccugguggu

SEQ ID NO: 2405439 - RNA, 17 nt, Human
guaacgcgucuuccuga

SEQ ID NO: 2405440 - RNA, 15 nt, Human
guaacguugcugugg

SEQ ID NO: 2405441 - RNA, 16 nt, Human
guaacgcgucuuccug

SEQ ID NO: 2405442 - RNA, 18 nt, Human
guaaccucagcucuggga

SEQ ID NO: 2405443 - RNA, 17 nt, Human
guaacauccuuucuauu

SEQ ID NO: 2405444 - RNA, 13 nt, Human
guaacauccuuuc

SEQ ID NO: 2405445 - RNA, 11 nt, Human
guaacauccuu

SEQ ID NO: 2405446 - RNA, 15 nt, Human
guaacaucagggacc

SEQ ID NO: 2405447 - RNA, 22 nt, Human
guaacauguuuacuuuucaggg

SEQ ID NO: 2405448 - RNA, 23 nt, Human
guaacauguguuaaguauuuuca

SEQ ID NO: 2405449 - RNA, 11 nt, Human
guaaccagcca

SEQ ID NO: 2405450 - RNA, 23 nt, Human
guaacauuggguccugggucuuu

SEQ ID NO: 2405451 - RNA, 18 nt, Human
guaacauuggguccuggg

SEQ ID NO: 2405452 - RNA, 12 nt, Human
guaacauguuua

SEQ ID NO: 2405453 - RNA, 21 nt, Human
guaacagcuccuugggaggaa

SEQ ID NO: 2405454 - RNA, 18 nt, Human
guaacagcuccuugggag

SEQ ID NO: 2405455 - RNA, 17 nt, Human
guaacagcuccuuggga

SEQ ID NO: 2405456 - RNA, 16 nt, Human
guaacagcuccuuggg

SEQ ID NO: 2405457 - RNA, 20 nt, Human
guaacaggaaaauuuuaaaa

SEQ ID NO: 2405458 - RNA, 22 nt, Human
guaacaguucauguuugcuuca

SEQ ID NO: 2405459 - RNA, 23 nt, Human
guaacagcuccuugggaggaagc

SEQ ID NO: 2405460 - RNA, 16 nt, Human
guaacagcugaggucu

SEQ ID NO: 2405461 - RNA, 21 nt, Human
guaacagaacagcuucagguu

SEQ ID NO: 2405462 - RNA, 18 nt, Human
guaacagaacagcuucag

SEQ ID NO: 2405463 - RNA, 15 nt, Human
guaacagaacagcuu

SEQ ID NO: 2405464 - RNA, 16 nt, Human
guaacaagccacccca

SEQ ID NO: 2405465 - RNA, 13 nt, Human
guaacagcuccuu

SEQ ID NO: 2405466 - RNA, 12 nt, Human
guaacagcuccu

SEQ ID NO: 2405467 - RNA, 16 nt, Human
guaacagacauuguuu

SEQ ID NO: 2405468 - RNA, 15 nt, Human
guaacagacauuguu

SEQ ID NO: 2405469 - RNA, 14 nt, Human
guaacagacauugu

SEQ ID NO: 2405470 - RNA, 13 nt, Human
guaacagacauug

SEQ ID NO: 2405471 - RNA, 12 nt, Human
guaacagacauu

SEQ ID NO: 2405472 - RNA, 22 nt, Human
guaacagaacagcuucagguua

SEQ ID NO: 2405473 - RNA, 19 nt, Human
guaacaggaaaauuuuaaa

SEQ ID NO: 2405474 - RNA, 16 nt, Human
guaaacucaaaauauu

SEQ ID NO: 2405475 - RNA, 23 nt, Human
guaaacucaaaauauuuguacau

SEQ ID NO: 2405476 - RNA, 12 nt, Human
guaaacuccugu

SEQ ID NO: 2405477 - RNA, 22 nt, Human
guaaacuaucuuggugaauuuu

SEQ ID NO: 2405478 - RNA, 15 nt, Human
guaaacuauuuaucu

SEQ ID NO: 2405479 - RNA, 21 nt, Human
guaaacucaaaacuuaacaua

SEQ ID NO: 2405480 - RNA, 15 nt, Human
guaaacucaaaacuu

SEQ ID NO: 2405481 - RNA, 16 nt, Human
guaaacuauuuaucug

SEQ ID NO: 2405482 - RNA, 21 nt, Human
guaaacuauuuaucuguguuu

SEQ ID NO: 2405483 - RNA, 15 nt, Human
guaaagcuagaaaug

SEQ ID NO: 2405484 - RNA, 20 nt, Human
guaaagcuaaaaugauuuua

SEQ ID NO: 2405485 - RNA, 16 nt, Human
guaaagcuagaaauga

SEQ ID NO: 2405486 - RNA, 18 nt, Human
guaaauuuuguaugaaaa

SEQ ID NO: 2405487 - RNA, 23 nt, Human
guaaauuuccccaacagugugaa

SEQ ID NO: 2405488 - RNA, 21 nt, Human
guaaauuuccccaacagugug

SEQ ID NO: 2405489 - RNA, 22 nt, Human
guaaaguaucaggauacuauau

SEQ ID NO: 2405490 - RNA, 21 nt, Human
guaaaguauguaaacaggaga

SEQ ID NO: 2405491 - RNA, 16 nt, Human
guaaaguauguaaaca

SEQ ID NO: 2405492 - RNA, 20 nt, Human
guaaauuuccccaacagugu

SEQ ID NO: 2405493 - RNA, 16 nt, Human
aaaguuaacagauuuu

SEQ ID NO: 2405494 - RNA, 22 nt, Human
aaaguuaaacauugaaguaaug

SEQ ID NO: 2405495 - RNA, 16 nt, Human
aaaguuaaacauugaa

SEQ ID NO: 2405496 - RNA, 22 nt, Human
aaauaaugugaaacuggauuaa

SEQ ID NO: 2405497 - RNA, 14 nt, Human
aaauaaugugaaac

SEQ ID NO: 2405498 - RNA, 17 nt, Human
aaaguuacaaauugcuu

SEQ ID NO: 2405499 - RNA, 16 nt, Human
aaaguguccauugaca

SEQ ID NO: 2405500 - RNA, 20 nt, Human
aaaguguuuauuuuucauau

SEQ ID NO: 2405501 - RNA, 18 nt, Human
aaaguguuuauuuuucau

SEQ ID NO: 2405502 - RNA, 17 nt, Human
aaaguguuuauuuuuca

SEQ ID NO: 2405503 - RNA, 19 nt, Human
aaaguguuggcuaaugaag

SEQ ID NO: 2405504 - RNA, 13 nt, Human
aaaguguuugccu

SEQ ID NO: 2405505 - RNA, 21 nt, Human
aaaguguuuauuuuucauauu

SEQ ID NO: 2405506 - RNA, 15 nt, Human
aaaguguuucuguua

SEQ ID NO: 2405507 - RNA, 22 nt, Human
aaaguguauuuuuuuacuaaua

SEQ ID NO: 2405508 - RNA, 14 nt, Human
aaauaauucuaaag

SEQ ID NO: 2405509 - RNA, 13 nt, Human
aaauaauucuaaa

SEQ ID NO: 2405510 - RNA, 15 nt, Human
aaauaauucuaaagg

SEQ ID NO: 2405511 - RNA, 18 nt, Human
guaaaauugccauauugc

SEQ ID NO: 2405512 - RNA, 16 nt, Human
guaaaauugccauauu

SEQ ID NO: 2405513 - RNA, 15 nt, Human
guaaaauugccauau

SEQ ID NO: 2405514 - RNA, 14 nt, Human
guaaaauugccaua

SEQ ID NO: 2405515 - RNA, 15 nt, Human
guaaaauguugaaua

SEQ ID NO: 2405516 - RNA, 16 nt, Human
guaaaauguugaauaa

SEQ ID NO: 2405517 - RNA, 16 nt, Human
guaaaauugaaaggca

SEQ ID NO: 2405518 - RNA, 20 nt, Human
guaaaauugccauauugcac

SEQ ID NO: 2405519 - RNA, 19 nt, Human
guaaaauugccauauugca

SEQ ID NO: 2405520 - RNA, 21 nt, Human
guaaaauugccauauugcaca

SEQ ID NO: 2405521 - RNA, 15 nt, Human
guaaaauuguauaga

SEQ ID NO: 2405522 - RNA, 22 nt, Human
guaaacacgccugcaaacgcug

SEQ ID NO: 2405523 - RNA, 23 nt, Human
guaaacaaaauuuaguuuuuguu

SEQ ID NO: 2405524 - RNA, 17 nt, Human
guaaacaaaauuuaguu

SEQ ID NO: 2405525 - RNA, 13 nt, Human
guaaaccuuuuau

SEQ ID NO: 2405526 - RNA, 20 nt, Human
guaaacgcugucccuaguaa

SEQ ID NO: 2405527 - RNA, 16 nt, Human
guaaacgcugucccua

SEQ ID NO: 2405528 - RNA, 22 nt, Human
aaauaucacuugucaauaaaau

SEQ ID NO: 2405529 - RNA, 15 nt, Human
aaauaucagacuagu

SEQ ID NO: 2405530 - RNA, 18 nt, Human
aaauaucaguuacucagc

SEQ ID NO: 2405531 - RNA, 20 nt, Human
aaauaucaguuacucagccc

SEQ ID NO: 2405532 - RNA, 18 nt, Human
aaauaucauuuauuuuuu

SEQ ID NO: 2405533 - RNA, 22 nt, Human
aaauauauuuuaagacgaaaca

SEQ ID NO: 2405534 - RNA, 16 nt, Human
aaauauauuuuaagac

SEQ ID NO: 2405535 - RNA, 15 nt, Human
aaauauauuuaauga

SEQ ID NO: 2405536 - RNA, 22 nt, Human
aaauauauuuaagauaauuaua

SEQ ID NO: 2405537 - RNA, 22 nt, Human
aaauauauaucuaaauuuagaa

SEQ ID NO: 2405538 - RNA, 15 nt, Human
aaauauauauauccu

SEQ ID NO: 2405539 - RNA, 20 nt, Human
aaauauauauauauauaaaa

SEQ ID NO: 2405540 - RNA, 19 nt, Human
aaauauauauauauauaaa

SEQ ID NO: 2405541 - RNA, 12 nt, Human
aaauauauauau

SEQ ID NO: 2405542 - RNA, 20 nt, Human
aaauauauauaaauauauau

SEQ ID NO: 2405543 - RNA, 19 nt, Human
aaauauauauaaauauaua

SEQ ID NO: 2405544 - RNA, 17 nt, Human
aaauauauauaaauaua

SEQ ID NO: 2405545 - RNA, 14 nt, Human
aaauauauaucaaa

SEQ ID NO: 2405546 - RNA, 18 nt, Human
aaauauaugcuaagucuu

SEQ ID NO: 2405547 - RNA, 23 nt, Human
aaauauaugauuaacuaauuuua

SEQ ID NO: 2405548 - RNA, 23 nt, Human
aaauauauauguguguguauguu

SEQ ID NO: 2405549 - RNA, 14 nt, Human
aaauauauuuaaug

SEQ ID NO: 2405550 - RNA, 21 nt, Human
aaauauauuuaagauaauuau

SEQ ID NO: 2405551 - RNA, 20 nt, Human
aaauauauuuaagauaauua

SEQ ID NO: 2405552 - RNA, 12 nt, Human
aaauauauuuaa

SEQ ID NO: 2405553 - RNA, 21 nt, Human
guacaaugacuuuauugcauc

SEQ ID NO: 2405554 - RNA, 20 nt, Human
guacaaugacuuuauugcau

SEQ ID NO: 2405555 - RNA, 14 nt, Human
guacaauauuuaaa

SEQ ID NO: 2405556 - RNA, 18 nt, Human
guacaauauuuaaaauuu

SEQ ID NO: 2405557 - RNA, 14 nt, Human
guacaaucucaaau

SEQ ID NO: 2405558 - RNA, 19 nt, Human
aaauaccagccaguaaaug

SEQ ID NO: 2405559 - RNA, 16 nt, Human
guacacacacauacac

SEQ ID NO: 2405560 - RNA, 20 nt, Human
aaauaccagccaguaaaugg

SEQ ID NO: 2405561 - RNA, 21 nt, Human
aaauaccagccaguaaauggg

SEQ ID NO: 2405562 - RNA, 21 nt, Human
aaauaccaugccauuuaaagc

SEQ ID NO: 2405563 - RNA, 18 nt, Human
aaauaccagugaaccaaa

SEQ ID NO: 2405564 - RNA, 21 nt, Human
aaauaccagugaaccaaagag

SEQ ID NO: 2405565 - RNA, 17 nt, Human
aaauaccagugugguuu

SEQ ID NO: 2405566 - RNA, 21 nt, Human
aaauauauauaaauauauaua

SEQ ID NO: 2405567 - RNA, 14 nt, Human
aaauauauauaaau

SEQ ID NO: 2405568 - RNA, 16 nt, Human
aaauauauauaaaccu

SEQ ID NO: 2405569 - RNA, 14 nt, Human
aaauauauauaaac

SEQ ID NO: 2405570 - RNA, 17 nt, Human
aaauauauaaauauaua

SEQ ID NO: 2405571 - RNA, 18 nt, Human
aaauauauaaauauauau

SEQ ID NO: 2405572 - RNA, 10 nt, Human
aaauauauau

SEQ ID NO: 2405573 - RNA, 16 nt, Human
aaauauauaaauauau

SEQ ID NO: 2405574 - RNA, 15 nt, Human
aaauauauaaauaua

SEQ ID NO: 2405575 - RNA, 14 nt, Human
aaauauauaaauau

SEQ ID NO: 2405576 - RNA, 12 nt, Human
aaauauauaaau

SEQ ID NO: 2405577 - RNA, 21 nt, Human
aaauauauaaaaagaaaagau

SEQ ID NO: 2405578 - RNA, 9 nt, Human
aaauauaua

SEQ ID NO: 2405579 - RNA, 21 nt, Human
aaauauagcuguacaaauaua

SEQ ID NO: 2405580 - RNA, 15 nt, Human
aaauauaggaacuua

SEQ ID NO: 2405581 - RNA, 19 nt, Human
aaauaccccaucauucaug

SEQ ID NO: 2405582 - RNA, 18 nt, Human
aaauaccccaucauucau

SEQ ID NO: 2405583 - RNA, 18 nt, Human
aaauauagaucaguuaua

SEQ ID NO: 2405584 - RNA, 20 nt, Human
aaauauagcuguacaaauau

SEQ ID NO: 2405585 - RNA, 17 nt, Human
aaauauagcuguacaaa

SEQ ID NO: 2405586 - RNA, 16 nt, Human
aaauauagcuguacaa

SEQ ID NO: 2405587 - RNA, 18 nt, Human
aaauaccucuuagcugag

SEQ ID NO: 2405588 - RNA, 12 nt, Human
aaauaucugaaa

SEQ ID NO: 2405589 - RNA, 14 nt, Human
aaauaucugaaaau

SEQ ID NO: 2405590 - RNA, 17 nt, Human
aaauaucugaaaaugua

SEQ ID NO: 2405591 - RNA, 18 nt, Human
aaauaucugaaaauguau

SEQ ID NO: 2405592 - RNA, 19 nt, Human
aaauaucugaaaauguaug

SEQ ID NO: 2405593 - RNA, 21 nt, Human
aaauaucugaaaauguaugug

SEQ ID NO: 2405594 - RNA, 22 nt, Human
aaauaucugaaaauguaugugu

SEQ ID NO: 2405595 - RNA, 23 nt, Human
aaauaucugaaaauguaugugua

SEQ ID NO: 2405596 - RNA, 13 nt, Human
aaauaugcaaagc

SEQ ID NO: 2405597 - RNA, 15 nt, Human
aaauaugcaaagcac

SEQ ID NO: 2405598 - RNA, 16 nt, Human
aaauaugcaaagcacu

SEQ ID NO: 2405599 - RNA, 17 nt, Human
aaauaugcaaagcacug

SEQ ID NO: 2405600 - RNA, 17 nt, Human
aaauaucuuuugaccug

SEQ ID NO: 2405601 - RNA, 22 nt, Human
aaauaucuguauuuaauuuuga

SEQ ID NO: 2405602 - RNA, 20 nt, Human
aaauaugaagacauaaaccc

SEQ ID NO: 2405603 - RNA, 17 nt, Human
aaauaugaagaacugag

SEQ ID NO: 2405604 - RNA, 23 nt, Human
aaauaugagugguuauugaaaau

SEQ ID NO: 2405605 - RNA, 12 nt, Human
aaauaugaaugc

SEQ ID NO: 2405606 - RNA, 12 nt, Human
aaauaugaagcu

SEQ ID NO: 2405607 - RNA, 16 nt, Human
aaauaucuuuugaccu

SEQ ID NO: 2405608 - RNA, 19 nt, Human
aaauaugauuuuauuugac

SEQ ID NO: 2405609 - RNA, 19 nt, Human
aaauaugauauugcauaug

SEQ ID NO: 2405610 - RNA, 15 nt, Human
aaauaucuugaaagg

SEQ ID NO: 2405611 - RNA, 15 nt, Human
aaauaucuguauuua

SEQ ID NO: 2405612 - RNA, 13 nt, Human
aaauaucuguauu

SEQ ID NO: 2405613 - RNA, 12 nt, Human
aaauaucuguau

SEQ ID NO: 2405614 - RNA, 16 nt, Human
aaauauguccuggggu

SEQ ID NO: 2405615 - RNA, 20 nt, Human
aaauauguuagcaaagaguu

SEQ ID NO: 2405616 - RNA, 21 nt, Human
aaauauguuuuuuagaucaaa

SEQ ID NO: 2405617 - RNA, 19 nt, Human
aaauauguuuuuuagauca

SEQ ID NO: 2405618 - RNA, 16 nt, Human
aaauauguugaugaaa

SEQ ID NO: 2405619 - RNA, 19 nt, Human
aaauauguugaugaaaaau

SEQ ID NO: 2405620 - RNA, 15 nt, Human
aaauauggacacuua

SEQ ID NO: 2405621 - RNA, 16 nt, Human
aaauauggacacuuaa

SEQ ID NO: 2405622 - RNA, 19 nt, Human
aaauauggcuauaaauaua

SEQ ID NO: 2405623 - RNA, 20 nt, Human
aaauauggacacuuaauacu

SEQ ID NO: 2405624 - RNA, 12 nt, Human
aaauauguacaa

SEQ ID NO: 2405625 - RNA, 16 nt, Human
aaauaugccuuuuuga

SEQ ID NO: 2405626 - RNA, 23 nt, Human
aaauaugccucuccuuuguauau

SEQ ID NO: 2405627 - RNA, 22 nt, Human
aaauaugccucuccuuuguaua

SEQ ID NO: 2405628 - RNA, 13 nt, Human
aaauauggaacuu

SEQ ID NO: 2405629 - RNA, 16 nt, Human
aaauauggaacuuaca

SEQ ID NO: 2405630 - RNA, 20 nt, Human
aaauauggaacuucuaauau

SEQ ID NO: 2405631 - RNA, 19 nt, Human
aaauauggaacuucuaaua

SEQ ID NO: 2405632 - RNA, 18 nt, Human
aaauauggaacuucuaau

SEQ ID NO: 2405633 - RNA, 17 nt, Human
aaauauggaacuucuaa

SEQ ID NO: 2405634 - RNA, 17 nt, Human
aaauauggaacuuacau

SEQ ID NO: 2405635 - RNA, 18 nt, Human
aaauauggaacuuacauu

SEQ ID NO: 2405636 - RNA, 16 nt, Human
aaauauggaacuucua

SEQ ID NO: 2405637 - RNA, 21 nt, Human
aaauauggaacuuacauuguu

SEQ ID NO: 2405638 - RNA, 14 nt, Human
aaauaugcagugau

SEQ ID NO: 2405639 - RNA, 20 nt, Human
aaauaugauuuuauuugaca

SEQ ID NO: 2405640 - RNA, 10 nt, Human
aaauaugcaa

SEQ ID NO: 2405641 - RNA, 21 nt, Human
aaauaugccucuccuuuguau

SEQ ID NO: 2405642 - RNA, 20 nt, Human
aaauaugccucuccuuugua

SEQ ID NO: 2405643 - RNA, 14 nt, Human
aaauaugccucucc

SEQ ID NO: 2405644 - RNA, 13 nt, Human
aaauaugccucuc

SEQ ID NO: 2405645 - RNA, 22 nt, Human
aaauaugcagugauauggcaga

SEQ ID NO: 2405646 - RNA, 18 nt, Human
aaauaugcagugauaugg

SEQ ID NO: 2405647 - RNA, 23 nt, Human
aaauaugcagugauauggcagaa

SEQ ID NO: 2405648 - RNA, 12 nt, Human
aaauaugcaucu

SEQ ID NO: 2405649 - RNA, 19 nt, Human
aaaucagccugcuccagcu

SEQ ID NO: 2405650 - RNA, 21 nt, Human
aaaucagccugcuccagcugu

SEQ ID NO: 2405651 - RNA, 20 nt, Human
aaauauuguguugugaaugu

SEQ ID NO: 2405652 - RNA, 23 nt, Human
aaaucagccugcuccagcuguuc

SEQ ID NO: 2405653 - RNA, 13 nt, Human
aaauauucuauau

SEQ ID NO: 2405654 - RNA, 20 nt, Human
aaauauuccugcauuuguga

SEQ ID NO: 2405655 - RNA, 23 nt, Human
aaauauguuuuuuagaucaaaua

SEQ ID NO: 2405656 - RNA, 19 nt, Human
aaauauuaagaaagacuau

SEQ ID NO: 2405657 - RNA, 18 nt, Human
aaauauucuauuuucauu

SEQ ID NO: 2405658 - RNA, 20 nt, Human
aaauauucuauaugaauuua

SEQ ID NO: 2405659 - RNA, 18 nt, Human
aaauauucuauaugaauu

SEQ ID NO: 2405660 - RNA, 14 nt, Human
aaauauucuauaug

SEQ ID NO: 2405661 - RNA, 22 nt, Human
aaauauucuauuuucauuuucu

SEQ ID NO: 2405662 - RNA, 13 nt, Human
aaauauugcuggg

SEQ ID NO: 2405663 - RNA, 23 nt, Human
gguggacuuagaaagcaggggcu

SEQ ID NO: 2405664 - RNA, 20 nt, Human
gguggacuuagaaagcaggg

SEQ ID NO: 2405665 - RNA, 19 nt, Human
gguggacuuagaaagcagg

SEQ ID NO: 2405666 - RNA, 16 nt, Human
gguggagaaagcacug

SEQ ID NO: 2405667 - RNA, 21 nt, Human
gguggacuuagaaagcagggg

SEQ ID NO: 2405668 - RNA, 21 nt, Human
gguggagaaagcacugaccug

SEQ ID NO: 2405669 - RNA, 18 nt, Human
gguggacuuagaaagcag

SEQ ID NO: 2405670 - RNA, 17 nt, Human
gguggacuuagaaagca

SEQ ID NO: 2405671 - RNA, 15 nt, Human
gguggacucgccugu

SEQ ID NO: 2405672 - RNA, 14 nt, Human
gguggacccaggga

SEQ ID NO: 2405673 - RNA, 14 nt, Human
gguggcaccagcag

SEQ ID NO: 2405674 - RNA, 20 nt, Human
gguggcaccagcagccugga

SEQ ID NO: 2405675 - RNA, 16 nt, Human
aaagcagaacagugau

SEQ ID NO: 2405676 - RNA, 22 nt, Human
aaagcacuuggacucuugcucu

SEQ ID NO: 2405677 - RNA, 21 nt, Human
aaagcacuuggacucuugcuc

SEQ ID NO: 2405678 - RNA, 16 nt, Human
gguggcacuuuuucau

SEQ ID NO: 2405679 - RNA, 19 nt, Human
aaagcacuuggacucuugc

SEQ ID NO: 2405680 - RNA, 22 nt, Human
aaagcagauaccucacccugcu

SEQ ID NO: 2405681 - RNA, 13 nt, Human
gguggcacugcca

SEQ ID NO: 2405682 - RNA, 20 nt, Human
gguggcacugagccccccca

SEQ ID NO: 2405683 - RNA, 16 nt, Human
gguggcacugagcccc

SEQ ID NO: 2405684 - RNA, 15 nt, Human
gguggcacugagccc

SEQ ID NO: 2405685 - RNA, 23 nt, Human
gguggcaccagcgaagggagugc

SEQ ID NO: 2405686 - RNA, 18 nt, Human
gguggcacaggcccccuu

SEQ ID NO: 2405687 - RNA, 12 nt, Human
gguggagaagcc

SEQ ID NO: 2405688 - RNA, 11 nt, Human
gguggagaagc

SEQ ID NO: 2405689 - RNA, 18 nt, Human
gguggcagcccuguaggg

SEQ ID NO: 2405690 - RNA, 15 nt, Human
gguggcagcccugua

SEQ ID NO: 2405691 - RNA, 12 nt, Human
aaacuuuaugcu

SEQ ID NO: 2405692 - RNA, 19 nt, Human
aaacuuuaugcuaagugaa

SEQ ID NO: 2405693 - RNA, 17 nt, Human
ggugcugccucuaccug

SEQ ID NO: 2405694 - RNA, 19 nt, Human
ggugcugcuacccucccug

SEQ ID NO: 2405695 - RNA, 17 nt, Human
ggugcugcuacccuccc

SEQ ID NO: 2405696 - RNA, 16 nt, Human
ggugcugcuacccucc

SEQ ID NO: 2405697 - RNA, 13 nt, Human
ggugcugcuaccc

SEQ ID NO: 2405698 - RNA, 22 nt, Human
ggugcugcuacccucccugcug

SEQ ID NO: 2405699 - RNA, 20 nt, Human
ggugcugcuacccucccugc

SEQ ID NO: 2405700 - RNA, 23 nt, Human
ggugcugcuacccucccugcugu

SEQ ID NO: 2405701 - RNA, 14 nt, Human
ggugcugcuucccu

SEQ ID NO: 2405702 - RNA, 19 nt, Human
ggugcugggacugagccag

SEQ ID NO: 2405703 - RNA, 14 nt, Human
ggugcugggacuga

SEQ ID NO: 2405704 - RNA, 12 nt, Human
ggugcugggacu

SEQ ID NO: 2405705 - RNA, 22 nt, Human
ggugcuggaggugggagcagga

SEQ ID NO: 2405706 - RNA, 24 nt, Human
ggugcugggacugagccaguccca

SEQ ID NO: 2405707 - RNA, 20 nt, Human
ggugcugggacugagccagu

SEQ ID NO: 2405708 - RNA, 21 nt, Human
ggugcugcuucccucugccug

SEQ ID NO: 2405709 - RNA, 21 nt, Human
ggugcuggaggugggagcagg

SEQ ID NO: 2405710 - RNA, 16 nt, Human
ggugcuggagguggga

SEQ ID NO: 2405711 - RNA, 16 nt, Human
ggugcuggauauuuuc

SEQ ID NO: 2405712 - RNA, 15 nt, Human
ggugcugggaggagg

SEQ ID NO: 2405713 - RNA, 14 nt, Human
gguggacaguccug

SEQ ID NO: 2405714 - RNA, 15 nt, Human
gguggacaguccugg

SEQ ID NO: 2405715 - RNA, 16 nt, Human
gguggacaguccuggg

SEQ ID NO: 2405716 - RNA, 17 nt, Human
gguggacaguccuggga

SEQ ID NO: 2405717 - RNA, 18 nt, Human
gguggacaguccugggag

SEQ ID NO: 2405718 - RNA, 15 nt, Human
gguggacauggcccc

SEQ ID NO: 2405719 - RNA, 13 nt, Human
gguggacacacaa

SEQ ID NO: 2405720 - RNA, 12 nt, Human
gguggacccagg

SEQ ID NO: 2405721 - RNA, 20 nt, Human
aaagcaggggaguaugcaaa

SEQ ID NO: 2405722 - RNA, 18 nt, Human
aaagcagcccuuggccag

SEQ ID NO: 2405723 - RNA, 12 nt, Human
aaagcagccacg

SEQ ID NO: 2405724 - RNA, 15 nt, Human
aaagcagccacgagg

SEQ ID NO: 2405725 - RNA, 13 nt, Human
aaagcagcaucug

SEQ ID NO: 2405726 - RNA, 13 nt, Human
aaagcagaaaaua

SEQ ID NO: 2405727 - RNA, 22 nt, Human
aaagcaggggcuacaagaggga

SEQ ID NO: 2405728 - RNA, 21 nt, Human
aaagcaggggcuacaagaggg

SEQ ID NO: 2405729 - RNA, 18 nt, Human
aaagcaggggcuacaaga

SEQ ID NO: 2405730 - RNA, 21 nt, Human
aaagcaggggaguaugcaaaa

SEQ ID NO: 2405731 - RNA, 17 nt, Human
aaagcagguggcaucuc

SEQ ID NO: 2405732 - RNA, 22 nt, Human
aaagcaguagaaauaauaugca

SEQ ID NO: 2405733 - RNA, 17 nt, Human
aaagcaguaacugacaa

SEQ ID NO: 2405734 - RNA, 16 nt, Human
aaagcuaggccuggcc

SEQ ID NO: 2405735 - RNA, 14 nt, Human
aaagcuaggccugg

SEQ ID NO: 2405736 - RNA, 13 nt, Human
aaagcagugcaug

SEQ ID NO: 2405737 - RNA, 13 nt, Human
aaagcuagaaaug

SEQ ID NO: 2405738 - RNA, 14 nt, Human
aaagcuagaaauga

SEQ ID NO: 2405739 - RNA, 13 nt, Human
aaagcugccagcc

SEQ ID NO: 2405740 - RNA, 12 nt, Human
aaagcugccagc

SEQ ID NO: 2405741 - RNA, 14 nt, Human
aaagcuguguggca

SEQ ID NO: 2405742 - RNA, 23 nt, Human
aaagcuguggccagcuuguuauu

SEQ ID NO: 2405743 - RNA, 22 nt, Human
aaagcugccagccgagauagcc

SEQ ID NO: 2405744 - RNA, 20 nt, Human
aaagcugaucugguuugacu

SEQ ID NO: 2405745 - RNA, 19 nt, Human
gguggggaccucaggccug

SEQ ID NO: 2405746 - RNA, 18 nt, Human
ggugggcugagcccuggc

SEQ ID NO: 2405747 - RNA, 15 nt, Human
ggugggcugagcccu

SEQ ID NO: 2405748 - RNA, 17 nt, Human
ggugggcugagcccugg

SEQ ID NO: 2405749 - RNA, 13 nt, Human
ggugggagcagga

SEQ ID NO: 2405750 - RNA, 15 nt, Human
ggugggccuugcugg

SEQ ID NO: 2405751 - RNA, 15 nt, Human
ggugggagagcccag

SEQ ID NO: 2405752 - RNA, 16 nt, Human
ggugggagagcccagc

SEQ ID NO: 2405753 - RNA, 21 nt, Human
ggugggcguggucacugcugu

SEQ ID NO: 2405754 - RNA, 20 nt, Human
ggugggcgggcagcacagca

SEQ ID NO: 2405755 - RNA, 20 nt, Human
ggugggcggcacagccuucu

SEQ ID NO: 2405756 - RNA, 16 nt, Human
ggugggagcaggagau

SEQ ID NO: 2405757 - RNA, 16 nt, Human
ggugggcucugugcag

SEQ ID NO: 2405758 - RNA, 13 nt, Human
ggugggcucugug

SEQ ID NO: 2405759 - RNA, 13 nt, Human
ggugggcugagcc

SEQ ID NO: 2405760 - RNA, 16 nt, Human
ggugggacacccugug

SEQ ID NO: 2405761 - RNA, 13 nt, Human
ggugggacacccu

SEQ ID NO: 2405762 - RNA, 17 nt, Human
ggugggacacccuguga

SEQ ID NO: 2405763 - RNA, 20 nt, Human
ggugggaggaucucuugagc

SEQ ID NO: 2405764 - RNA, 23 nt, Human
aaaguaaagcuaaaaugauuuua

SEQ ID NO: 2405765 - RNA, 13 nt, Human
aaaguaaagcuaa

SEQ ID NO: 2405766 - RNA, 22 nt, Human
ggugggaaaugguaugagcuga

SEQ ID NO: 2405767 - RNA, 21 nt, Human
ggugggaaccaugaagacagg

SEQ ID NO: 2405768 - RNA, 12 nt, Human
gguggcuggguu

SEQ ID NO: 2405769 - RNA, 18 nt, Human
gguggcuggguuggaggg

SEQ ID NO: 2405770 - RNA, 21 nt, Human
aaaguaaaaacaaagaaauua

SEQ ID NO: 2405771 - RNA, 18 nt, Human
aaagguuuuauuuuguaa

SEQ ID NO: 2405772 - RNA, 12 nt, Human
aaaguaaagcua

SEQ ID NO: 2405773 - RNA, 16 nt, Human
aaagguuuuauuuugu

SEQ ID NO: 2405774 - RNA, 17 nt, Human
aaagguuuuauuuugua

SEQ ID NO: 2405775 - RNA, 14 nt, Human
aaagguuuuccucu

SEQ ID NO: 2405776 - RNA, 13 nt, Human
aaagcuuauuaaa

SEQ ID NO: 2405777 - RNA, 15 nt, Human
aaagcuuagcaggag

SEQ ID NO: 2405778 - RNA, 16 nt, Human
aaagcuguugauggua

SEQ ID NO: 2405779 - RNA, 20 nt, Human
aaagggcccagagagggugg

SEQ ID NO: 2405780 - RNA, 23 nt, Human
aaagggcccacagugacuuuugc

SEQ ID NO: 2405781 - RNA, 19 nt, Human
aaagggauuacccaagcaa

SEQ ID NO: 2405782 - RNA, 16 nt, Human
aaagggcucuuuagcc

SEQ ID NO: 2405783 - RNA, 20 nt, Human
aaagggcagggcaucuccug

SEQ ID NO: 2405784 - RNA, 22 nt, Human
aaagggcuguuauaaucuuuca

SEQ ID NO: 2405785 - RNA, 20 nt, Human
aaagggcuguuauaaucuuu

SEQ ID NO: 2405786 - RNA, 14 nt, Human
aaaggggagagccu

SEQ ID NO: 2405787 - RNA, 19 nt, Human
aaaggggagagccugcugg

SEQ ID NO: 2405788 - RNA, 16 nt, Human
aaaggggagagccugc

SEQ ID NO: 2405789 - RNA, 18 nt, Human
aaaggggcagaaaaacuc

SEQ ID NO: 2405790 - RNA, 23 nt, Human
aaagggggucccagugggagggg

SEQ ID NO: 2405791 - RNA, 21 nt, Human
aaagggggucccagugggagg

SEQ ID NO: 2405792 - RNA, 20 nt, Human
aaagggggucccagugggag

SEQ ID NO: 2405793 - RNA, 16 nt, Human
aaagggggucccagug

SEQ ID NO: 2405794 - RNA, 20 nt, Human
aaaggugaguuugagcugcc

SEQ ID NO: 2405795 - RNA, 24 nt, Human
aaaggugaaggaauauauggcaga

SEQ ID NO: 2405796 - RNA, 22 nt, Human
aaaggugaccuugcaacuucau

SEQ ID NO: 2405797 - RNA, 22 nt, Human
aaaggugaguuugagcugccuu

SEQ ID NO: 2405798 - RNA, 21 nt, Human
aaaggugaguuugagcugccu

SEQ ID NO: 2405799 - RNA, 23 nt, Human
aaaggugaguuugagcugccuuc

SEQ ID NO: 2405800 - RNA, 24 nt, Human
aaaggggucggcugaccaugcuca

SEQ ID NO: 2405801 - RNA, 23 nt, Human
aaaggggucggcugaccaugcuc

SEQ ID NO: 2405802 - RNA, 21 nt, Human
aaaggugaaggaauauauggc

SEQ ID NO: 2405803 - RNA, 16 nt, Human
aaaggugaaggaauau

SEQ ID NO: 2405804 - RNA, 15 nt, Human
aaaggugaaggaaua

SEQ ID NO: 2405805 - RNA, 18 nt, Human
aaaggggucccauagagg

SEQ ID NO: 2405806 - RNA, 17 nt, Human
aaaggugguaugugugu

SEQ ID NO: 2405807 - RNA, 19 nt, Human
aaaggugguaugugugugu

SEQ ID NO: 2405808 - RNA, 21 nt, Human
aaaggugguauguguguguau

SEQ ID NO: 2405809 - RNA, 18 nt, Human
aaagguggugaggcaaua

SEQ ID NO: 2405810 - RNA, 12 nt, Human
aaaggugucuuc

SEQ ID NO: 2405811 - RNA, 22 nt, Human
aaaggugguauguguguguaug

SEQ ID NO: 2405812 - RNA, 14 nt, Human
aaaggugauaucca

SEQ ID NO: 2405813 - RNA, 21 nt, Human
aaaggugccugugaggcaggg

SEQ ID NO: 2405814 - RNA, 19 nt, Human
aaagguggacuggaagggg

SEQ ID NO: 2405815 - RNA, 18 nt, Human
aaagguucaugcaaacuu

SEQ ID NO: 2405816 - RNA, 18 nt, Human
aaaggugucuuccuccca

SEQ ID NO: 2405817 - RNA, 16 nt, Human
aaaggugucuuccucc

SEQ ID NO: 2405818 - RNA, 14 nt, Human
aaagguguuguccc

SEQ ID NO: 2405819 - RNA, 18 nt, Human
aaagguguugucccuucu

SEQ ID NO: 2405820 - RNA, 17 nt, Human
aaagguucacuaaagca

SEQ ID NO: 2405821 - RNA, 20 nt, Human
gguuuguaaauuaacuuuua

SEQ ID NO: 2405822 - RNA, 13 nt, Human
gguuuguauauug

SEQ ID NO: 2405823 - RNA, 15 nt, Human
gguuuggucugggac

SEQ ID NO: 2405824 - RNA, 17 nt, Human
gguuucguuucuguaua

SEQ ID NO: 2405825 - RNA, 19 nt, Human
gguuuggggagcagagaca

SEQ ID NO: 2405826 - RNA, 22 nt, Human
gguuuguuuagaagaagugugu

SEQ ID NO: 2405827 - RNA, 19 nt, Human
gguuuguguuugaguuuua

SEQ ID NO: 2405828 - RNA, 17 nt, Human
gguuuuaaguuguuugc

SEQ ID NO: 2405829 - RNA, 16 nt, Human
gguuuuaaagugauua

SEQ ID NO: 2405830 - RNA, 12 nt, Human
gguuuuaaugua

SEQ ID NO: 2405831 - RNA, 16 nt, Human
gguuuuauacugaagg

SEQ ID NO: 2405832 - RNA, 20 nt, Human
gguuuuauuuuguaauuauu

SEQ ID NO: 2405833 - RNA, 19 nt, Human
aaaguaagcccuugaagau

SEQ ID NO: 2405834 - RNA, 19 nt, Human
aaaguaaguaccacucagg

SEQ ID NO: 2405835 - RNA, 19 nt, Human
gguuuuauuguuuaaaauc

SEQ ID NO: 2405836 - RNA, 21 nt, Human
gguuuuaggucucuuccccuc

SEQ ID NO: 2405837 - RNA, 17 nt, Human
gguuuuauaaggcugau

SEQ ID NO: 2405838 - RNA, 15 nt, Human
gguuuuauauuuuua

SEQ ID NO: 2405839 - RNA, 15 nt, Human
gguuucagaaaugug

SEQ ID NO: 2405840 - RNA, 17 nt, Human
gguuucauauuucuuau

SEQ ID NO: 2405841 - RNA, 17 nt, Human
gguuucauacucuagau

SEQ ID NO: 2405842 - RNA, 12 nt, Human
gguuuccaaagg

SEQ ID NO: 2405843 - RNA, 12 nt, Human
gguuuccugccc

SEQ ID NO: 2405844 - RNA, 13 nt, Human
gguuuccugcccu

SEQ ID NO: 2405845 - RNA, 15 nt, Human
gguuuccugcccugg

SEQ ID NO: 2405846 - RNA, 16 nt, Human
gguuucuaaagcugcc

SEQ ID NO: 2405847 - RNA, 16 nt, Human
gguuuccugcccuggg

SEQ ID NO: 2405848 - RNA, 19 nt, Human
gguuuccugcccugggagg

SEQ ID NO: 2405849 - RNA, 22 nt, Human
gguuucuaaagcugccagccga

SEQ ID NO: 2405850 - RNA, 15 nt, Human
gguuucgagaagcug

SEQ ID NO: 2405851 - RNA, 14 nt, Human
gguuugggaccccu

SEQ ID NO: 2405852 - RNA, 21 nt, Human
aaaguaucccuacuguaauuu

SEQ ID NO: 2405853 - RNA, 20 nt, Human
aaaguagaagucuuagaugu

SEQ ID NO: 2405854 - RNA, 22 nt, Human
aaaguagaagucuuagauguau

SEQ ID NO: 2405855 - RNA, 19 nt, Human
aaaguacacuguuucaaac

SEQ ID NO: 2405856 - RNA, 18 nt, Human
aaaguacacuguuucaaa

SEQ ID NO: 2405857 - RNA, 14 nt, Human
aaaguaaggugcag

SEQ ID NO: 2405858 - RNA, 17 nt, Human
aaaguauguuagugcaa

SEQ ID NO: 2405859 - RNA, 17 nt, Human
aaagugggcuugauucu

SEQ ID NO: 2405860 - RNA, 20 nt, Human
aaaguauguaaaguauguaa

SEQ ID NO: 2405861 - RNA, 19 nt, Human
aaaguauguaaaguaugua

SEQ ID NO: 2405862 - RNA, 19 nt, Human
aaaguaugguauugaaacu

SEQ ID NO: 2405863 - RNA, 14 nt, Human
aaaguagauuaaga

SEQ ID NO: 2405864 - RNA, 12 nt, Human
aaaguaugaauc

SEQ ID NO: 2405865 - RNA, 21 nt, Human
aaaguauccugcuucugauau

SEQ ID NO: 2405866 - RNA, 14 nt, Human
aaaguguauuuuuu

SEQ ID NO: 2405867 - RNA, 21 nt, Human
aaaguguauuuuuuuacuaau

SEQ ID NO: 2405868 - RNA, 20 nt, Human
aaagugguauagaaaugcug

SEQ ID NO: 2405869 - RNA, 17 nt, Human
aaagugguauagaaaug

SEQ ID NO: 2405870 - RNA, 21 nt, Human
aaaguggguuauucuggaguu

SEQ ID NO: 2405871 - RNA, 16 nt, Human
aaagugguauagaaau

SEQ ID NO: 2405872 - RNA, 15 nt, Human
gguuccagccugcca

SEQ ID NO: 2405873 - RNA, 16 nt, Human
gguuccagccugccac

SEQ ID NO: 2405874 - RNA, 17 nt, Human
gguguuuuaaaaaaucu

SEQ ID NO: 2405875 - RNA, 14 nt, Human
gguuccagccugcc

SEQ ID NO: 2405876 - RNA, 18 nt, Human
gguuccaugccugagggu

SEQ ID NO: 2405877 - RNA, 16 nt, Human
gguuccaugccugagg

SEQ ID NO: 2405878 - RNA, 13 nt, Human
gguucccaagcuc

SEQ ID NO: 2405879 - RNA, 15 nt, Human
gguuccaugccugag

SEQ ID NO: 2405880 - RNA, 14 nt, Human
gguuccaugccuga

SEQ ID NO: 2405881 - RNA, 13 nt, Human
gguuccaugccug

SEQ ID NO: 2405882 - RNA, 17 nt, Human
gguucccauuugcuccu

SEQ ID NO: 2405883 - RNA, 17 nt, Human
gguguuuccuggcacug

SEQ ID NO: 2405884 - RNA, 19 nt, Human
gguguuuccuggcacugcu

SEQ ID NO: 2405885 - RNA, 23 nt, Human
gguguuucucccucucacugucu

SEQ ID NO: 2405886 - RNA, 22 nt, Human
gguguuucucccucucacuguc

SEQ ID NO: 2405887 - RNA, 21 nt, Human
gguguuucuagcacuggccug

SEQ ID NO: 2405888 - RNA, 18 nt, Human
gguguuucuagcacuggc

SEQ ID NO: 2405889 - RNA, 17 nt, Human
gguguuguaugccuuua

SEQ ID NO: 2405890 - RNA, 15 nt, Human
gguguuguaugccuu

SEQ ID NO: 2405891 - RNA, 13 nt, Human
gguguuuauacag

SEQ ID NO: 2405892 - RNA, 22 nt, Human
gguucccuuuuuuggcugcuga

SEQ ID NO: 2405893 - RNA, 21 nt, Human
gguuccgcuuggagcagaggg

SEQ ID NO: 2405894 - RNA, 22 nt, Human
gguuccgcuuggagcagagggg

SEQ ID NO: 2405895 - RNA, 15 nt, Human
gguuccgcuuggagc

SEQ ID NO: 2405896 - RNA, 14 nt, Human
gguucccccagccc

SEQ ID NO: 2405897 - RNA, 15 nt, Human
gguucccccagcccu

SEQ ID NO: 2405898 - RNA, 23 nt, Human
gguucccuuugacgccaucccag

SEQ ID NO: 2405899 - RNA, 16 nt, Human
gguucccaagcucaga

SEQ ID NO: 2405900 - RNA, 12 nt, Human
gguuccccaccg

SEQ ID NO: 2405901 - RNA, 13 nt, Human
gguucccccagcc

SEQ ID NO: 2405902 - RNA, 16 nt, Human
gguucuauuuggaauu

SEQ ID NO: 2405903 - RNA, 13 nt, Human
gguucuauuugga

SEQ ID NO: 2405904 - RNA, 23 nt, Human
gguucuagucuccuuugcacuga

SEQ ID NO: 2405905 - RNA, 23 nt, Human
gguucguggaaagggugcugcuu

SEQ ID NO: 2405906 - RNA, 20 nt, Human
gguucggauuugggguggau

SEQ ID NO: 2405907 - RNA, 23 nt, Human
gguuccgcuuggagcagaggggc

SEQ ID NO: 2405908 - RNA, 21 nt, Human
gguuccggaauccuguccuca

SEQ ID NO: 2405909 - RNA, 14 nt, Human
ggugggcuucccag

SEQ ID NO: 2405910 - RNA, 20 nt, Human
ggugggcuucccaguggcug

SEQ ID NO: 2405911 - RNA, 13 nt, Human
gguggggaauguu

SEQ ID NO: 2405912 - RNA, 16 nt, Human
gguggggcgggaaagc

SEQ ID NO: 2405913 - RNA, 17 nt, Human
gguggggcgggaaagcc

SEQ ID NO: 2405914 - RNA, 13 nt, Human
gguggggcugcuc

SEQ ID NO: 2405915 - RNA, 17 nt, Human
gguggggcugcuccucc

SEQ ID NO: 2405916 - RNA, 18 nt, Human
gguggggcugcuccucca

SEQ ID NO: 2405917 - RNA, 22 nt, Human
gguggggcugcuccuccagggc

SEQ ID NO: 2405918 - RNA, 16 nt, Human
gguggggggcuucaua

SEQ ID NO: 2405919 - RNA, 18 nt, Human
gguggggggcuucauaca

SEQ ID NO: 2405920 - RNA, 13 nt, Human
ggugggggccucg

SEQ ID NO: 2405921 - RNA, 14 nt, Human
gguguggagaagcg

SEQ ID NO: 2405922 - RNA, 23 nt, Human
gguguggagaagcggcuggcagc

SEQ ID NO: 2405923 - RNA, 20 nt, Human
gguggggggaucacaagguc

SEQ ID NO: 2405924 - RNA, 12 nt, Human
gguguggagaag

SEQ ID NO: 2405925 - RNA, 18 nt, Human
gguguggcccugccaucu

SEQ ID NO: 2405926 - RNA, 15 nt, Human
gguguggcccugcca

SEQ ID NO: 2405927 - RNA, 16 nt, Human
gguguggagccgaggc

SEQ ID NO: 2405928 - RNA, 12 nt, Human
gguguggcuccu

SEQ ID NO: 2405929 - RNA, 19 nt, Human
gguguggcccugccaucuu

SEQ ID NO: 2405930 - RNA, 11 nt, Human
gguguggggga

SEQ ID NO: 2405931 - RNA, 13 nt, Human
ggugugggggaag

SEQ ID NO: 2405932 - RNA, 12 nt, Human
ggugugucugcu

SEQ ID NO: 2405933 - RNA, 23 nt, Human
ggugugucccccucuguccaggc

SEQ ID NO: 2405934 - RNA, 15 nt, Human
gguguggugcagugu

SEQ ID NO: 2405935 - RNA, 17 nt, Human
gguguggugcaguguga

SEQ ID NO: 2405936 - RNA, 19 nt, Human
gguguguuccaacugcccc

SEQ ID NO: 2405937 - RNA, 18 nt, Human
gguguguuccaacugccc

SEQ ID NO: 2405938 - RNA, 18 nt, Human
gguguguggagaugcaga

SEQ ID NO: 2405939 - RNA, 14 nt, Human
gguguguguagcca

SEQ ID NO: 2405940 - RNA, 21 nt, Human
gguguuaucaccgugggcucc

SEQ ID NO: 2405941 - RNA, 23 nt, Human
gguguuccgaaaccaaagaagaa

SEQ ID NO: 2405942 - RNA, 22 nt, Human
gguguugccaaauauguccugg

SEQ ID NO: 2405943 - RNA, 21 nt, Human
gguguugccaaauauguccug

SEQ ID NO: 2405944 - RNA, 17 nt, Human
gguguugacaugugcuu

SEQ ID NO: 2405945 - RNA, 16 nt, Human
gcugagaggagagaga

SEQ ID NO: 2405946 - RNA, 22 nt, Human
gcugagaggcagacuucccuga

SEQ ID NO: 2405947 - RNA, 13 nt, Human
gcugagaggggcu

SEQ ID NO: 2405948 - RNA, 21 nt, Human
gcugagccccuaccccacacc

SEQ ID NO: 2405949 - RNA, 20 nt, Human
gcugagccccuaccccacac

SEQ ID NO: 2405950 - RNA, 17 nt, Human
gcugagccccuacccca

SEQ ID NO: 2405951 - RNA, 14 nt, Human
gcugagccccuacc

SEQ ID NO: 2405952 - RNA, 17 nt, Human
gcugagcaccaggggau

SEQ ID NO: 2405953 - RNA, 22 nt, Human
gcugaggccggaugcgguggcu

SEQ ID NO: 2405954 - RNA, 18 nt, Human
gcugagggugagugggug

SEQ ID NO: 2405955 - RNA, 19 nt, Human
gcugaggccacacucagca

SEQ ID NO: 2405956 - RNA, 21 nt, Human
gcugaggccacacucagcaca

SEQ ID NO: 2405957 - RNA, 23 nt, Human
gcugagggugagugggugaauaa

SEQ ID NO: 2405958 - RNA, 14 nt, Human
gcugaggugggagg

SEQ ID NO: 2405959 - RNA, 22 nt, Human
gcugaggccccuucuagguggc

SEQ ID NO: 2405960 - RNA, 17 nt, Human
gcugaggucucuugagg

SEQ ID NO: 2405961 - RNA, 23 nt, Human
gcugaggcagcagugugaggcca

SEQ ID NO: 2405962 - RNA, 16 nt, Human
gcugaggcagaagaau

SEQ ID NO: 2405963 - RNA, 15 nt, Human
gcugaggcaggagga

SEQ ID NO: 2405964 - RNA, 13 nt, Human
gcugaggcagcag

SEQ ID NO: 2405965 - RNA, 13 nt, Human
gcugaggcagaag

SEQ ID NO: 2405966 - RNA, 15 nt, Human
gcugaggcagaagaa

SEQ ID NO: 2405967 - RNA, 15 nt, Human
gcugaggcaauucua

SEQ ID NO: 2405968 - RNA, 13 nt, Human
gcugagccccugu

SEQ ID NO: 2405969 - RNA, 15 nt, Human
gcugagccccugucu

SEQ ID NO: 2405970 - RNA, 22 nt, Human
gcugagccccugucuagagagg

SEQ ID NO: 2405971 - RNA, 23 nt, Human
gcugagccccugucuagagaggg

SEQ ID NO: 2405972 - RNA, 11 nt, Human
gcugagcccug

SEQ ID NO: 2405973 - RNA, 12 nt, Human
gcugagcccugg

SEQ ID NO: 2405974 - RNA, 16 nt, Human
gcugaggagugaggaa

SEQ ID NO: 2405975 - RNA, 21 nt, Human
gcugaggaggccuccaucuca

SEQ ID NO: 2405976 - RNA, 18 nt, Human
gcugaggagugaggaaua

SEQ ID NO: 2405977 - RNA, 18 nt, Human
gcugaggauuucaagccu

SEQ ID NO: 2405978 - RNA, 19 nt, Human
gcugaggauuucaagccug

SEQ ID NO: 2405979 - RNA, 20 nt, Human
gcugaggauuucaagccugc

SEQ ID NO: 2405980 - RNA, 14 nt, Human
gcugaggcaauucu

SEQ ID NO: 2405981 - RNA, 23 nt, Human
gcugcagaggggcaggcccugca

SEQ ID NO: 2405982 - RNA, 22 nt, Human
gcugcagaggggcaggcccugc

SEQ ID NO: 2405983 - RNA, 20 nt, Human
gcugcaccaacccagccgcu

SEQ ID NO: 2405984 - RNA, 21 nt, Human
gcugcagaggggcaggcccug

SEQ ID NO: 2405985 - RNA, 13 nt, Human
gcugcaccggcug

SEQ ID NO: 2405986 - RNA, 18 nt, Human
gcugcacccucaggcagg

SEQ ID NO: 2405987 - RNA, 19 nt, Human
gcugcacccucaggcaggu

SEQ ID NO: 2405988 - RNA, 19 nt, Human
gcugcaccaacccagccgc

SEQ ID NO: 2405989 - RNA, 18 nt, Human
gcugcaccaacccagccg

SEQ ID NO: 2405990 - RNA, 17 nt, Human
gcugcaccaacccagcc

SEQ ID NO: 2405991 - RNA, 16 nt, Human
gcugcaccaacccagc

SEQ ID NO: 2405992 - RNA, 13 nt, Human
gcugcaccaaccc

SEQ ID NO: 2405993 - RNA, 23 nt, Human
gcugcacagggcagcugggccca

SEQ ID NO: 2405994 - RNA, 21 nt, Human
gcugcacagggcagcugggcc

SEQ ID NO: 2405995 - RNA, 20 nt, Human
gcugcacagggcagcugggc

SEQ ID NO: 2405996 - RNA, 19 nt, Human
gcugcacagggcagcuggg

SEQ ID NO: 2405997 - RNA, 18 nt, Human
gcugcacagggcagcugg

SEQ ID NO: 2405998 - RNA, 17 nt, Human
gcugcacagggcagcug

SEQ ID NO: 2405999 - RNA, 22 nt, Human
gcugcaagguggcuccagcacc

SEQ ID NO: 2406000 - RNA, 19 nt, Human
gcugcaaggccuuucugug

SEQ ID NO: 2406001 - RNA, 23 nt, Human
gcugcaagguggcuccagcacca

SEQ ID NO: 2406002 - RNA, 12 nt, Human
gcugcaagguuu

SEQ ID NO: 2406003 - RNA, 19 nt, Human
gcugcaagguuuaggcugg

SEQ ID NO: 2406004 - RNA, 21 nt, Human
gcugcaagguuuaggcuggug

SEQ ID NO: 2406005 - RNA, 20 nt, Human
gcugcaagugacaucucuuu

SEQ ID NO: 2406006 - RNA, 16 nt, Human
gcugcaaggccuuucu

SEQ ID NO: 2406007 - RNA, 14 nt, Human
gcugcaaggccuuu

SEQ ID NO: 2406008 - RNA, 14 nt, Human
gcugccuccacucc

SEQ ID NO: 2406009 - RNA, 12 nt, Human
gcugccuccacu

SEQ ID NO: 2406010 - RNA, 14 nt, Human
gcugccucauuuag

SEQ ID NO: 2406011 - RNA, 21 nt, Human
gcugccucauuuagagaggaa

SEQ ID NO: 2406012 - RNA, 13 nt, Human
gcugccucaugcu

SEQ ID NO: 2406013 - RNA, 18 nt, Human
gcugccuccacucccacu

SEQ ID NO: 2406014 - RNA, 17 nt, Human
gcugccuccacucccac

SEQ ID NO: 2406015 - RNA, 16 nt, Human
gcugccuccacuccca

SEQ ID NO: 2406016 - RNA, 15 nt, Human
gcugccuccacuccc

SEQ ID NO: 2406017 - RNA, 21 nt, Human
gcugccuccacucccacuucc

SEQ ID NO: 2406018 - RNA, 20 nt, Human
gcugccuccacucccacuuc

SEQ ID NO: 2406019 - RNA, 13 nt, Human
gcugccuccccaa

SEQ ID NO: 2406020 - RNA, 21 nt, Human
gcugccuccccucuccuuccu

SEQ ID NO: 2406021 - RNA, 21 nt, Human
gcugccuccccaacccugccc

SEQ ID NO: 2406022 - RNA, 23 nt, Human
gcugccuccccaacccugccccu

SEQ ID NO: 2406023 - RNA, 15 nt, Human
gcugccuccccaacc

SEQ ID NO: 2406024 - RNA, 17 nt, Human
gcugccuccccaacccu

SEQ ID NO: 2406025 - RNA, 19 nt, Human
gcugccuccccaacccugc

SEQ ID NO: 2406026 - RNA, 20 nt, Human
gcugccuccccaacccugcc

SEQ ID NO: 2406027 - RNA, 20 nt, Human
gcugccugggaucccucauc

SEQ ID NO: 2406028 - RNA, 13 nt, Human
gcugccucuucug

SEQ ID NO: 2406029 - RNA, 21 nt, Human
gcugccucuaccugacacucc

SEQ ID NO: 2406030 - RNA, 18 nt, Human
gcugccucucgguggcca

SEQ ID NO: 2406031 - RNA, 16 nt, Human
gcugccucucccauca

SEQ ID NO: 2406032 - RNA, 13 nt, Human
gcugccuguucag

SEQ ID NO: 2406033 - RNA, 12 nt, Human
gcugccuguuca

SEQ ID NO: 2406034 - RNA, 23 nt, Human
gcugcucuugaacuccugaccuc

SEQ ID NO: 2406035 - RNA, 13 nt, Human
gcugccugugugg

SEQ ID NO: 2406036 - RNA, 12 nt, Human
gcugcucuggaa

SEQ ID NO: 2406037 - RNA, 20 nt, Human
gcugccuguaguuaggaaau

SEQ ID NO: 2406038 - RNA, 17 nt, Human
gcugccuguucagcucc

SEQ ID NO: 2406039 - RNA, 21 nt, Human
gcugccugggaucccucaucc

SEQ ID NO: 2406040 - RNA, 13 nt, Human
gcugccugggcug

SEQ ID NO: 2406041 - RNA, 12 nt, Human
gcugccugggcu

SEQ ID NO: 2406042 - RNA, 13 nt, Human
gcugccugcccac

SEQ ID NO: 2406043 - RNA, 19 nt, Human
gcugccugggcuguuggca

SEQ ID NO: 2406044 - RNA, 18 nt, Human
gcugccugggcuguuggc

SEQ ID NO: 2406045 - RNA, 16 nt, Human
gcugccugggcuguug

SEQ ID NO: 2406046 - RNA, 14 nt, Human
gcugccugggcugu

SEQ ID NO: 2406047 - RNA, 23 nt, Human
gcugccugggcuguuggcacuca

SEQ ID NO: 2406048 - RNA, 22 nt, Human
gcugccugggcuguuggcacuc

SEQ ID NO: 2406049 - RNA, 12 nt, Human
gcugccuguagu

SEQ ID NO: 2406050 - RNA, 13 nt, Human
gcugccuguaguu

SEQ ID NO: 2406051 - RNA, 15 nt, Human
gcugccuguaguuag

SEQ ID NO: 2406052 - RNA, 16 nt, Human
gcugccuguaguuagg

SEQ ID NO: 2406053 - RNA, 19 nt, Human
gcugccuguaguuaggaaa

SEQ ID NO: 2406054 - RNA, 12 nt, Human
gcugccucacuu

SEQ ID NO: 2406055 - RNA, 19 nt, Human
gcugcccuccaucccgaca

SEQ ID NO: 2406056 - RNA, 21 nt, Human
gcugcccuccaucccgacaug

SEQ ID NO: 2406057 - RNA, 14 nt, Human
gcugcccuccaucc

SEQ ID NO: 2406058 - RNA, 16 nt, Human
gcugcccuaggcuccg

SEQ ID NO: 2406059 - RNA, 15 nt, Human
gcugcccuccauccc

SEQ ID NO: 2406060 - RNA, 15 nt, Human
gcugcccuaggcucc

SEQ ID NO: 2406061 - RNA, 21 nt, Human
gcugcccgucuucagccuagc

SEQ ID NO: 2406062 - RNA, 19 nt, Human
gcugcccggcgcccucugu

SEQ ID NO: 2406063 - RNA, 18 nt, Human
gcugcccggcgcccucug

SEQ ID NO: 2406064 - RNA, 17 nt, Human
gcugcccggcgcccucu

SEQ ID NO: 2406065 - RNA, 20 nt, Human
gcugcccgcucccagugucu

SEQ ID NO: 2406066 - RNA, 19 nt, Human
gcugcccgcucccaguguc

SEQ ID NO: 2406067 - RNA, 16 nt, Human
gcugcccgcucccagu

SEQ ID NO: 2406068 - RNA, 15 nt, Human
gcugcccgcucccag

SEQ ID NO: 2406069 - RNA, 14 nt, Human
gcugcccgcuccca

SEQ ID NO: 2406070 - RNA, 23 nt, Human
gcugcccggcgcccucuguccug

SEQ ID NO: 2406071 - RNA, 20 nt, Human
gcugcccggcgcccucuguc

SEQ ID NO: 2406072 - RNA, 16 nt, Human
gcugcccgucuucagc

SEQ ID NO: 2406073 - RNA, 19 nt, Human
gcugcccgucuucagccua

SEQ ID NO: 2406074 - RNA, 20 nt, Human
gcugcccgucuucagccuag

SEQ ID NO: 2406075 - RNA, 19 nt, Human
gcugccccuggcagccccu

SEQ ID NO: 2406076 - RNA, 18 nt, Human
gcugccccuggcagcccc

SEQ ID NO: 2406077 - RNA, 20 nt, Human
gcugccccuggcagccccug

SEQ ID NO: 2406078 - RNA, 12 nt, Human
gcugcccgcucc

SEQ ID NO: 2406079 - RNA, 13 nt, Human
gcugcccgcuccc

SEQ ID NO: 2406080 - RNA, 17 nt, Human
gcugccccuggcucuga

SEQ ID NO: 2406081 - RNA, 21 nt, Human
gcugcagcagcgguggccucu

SEQ ID NO: 2406082 - RNA, 20 nt, Human
gcugcagcagcgguggccuc

SEQ ID NO: 2406083 - RNA, 12 nt, Human
gcugcagcagcg

SEQ ID NO: 2406084 - RNA, 18 nt, Human
gcugcagcagaggcacug

SEQ ID NO: 2406085 - RNA, 15 nt, Human
gcugcagccaggcca

SEQ ID NO: 2406086 - RNA, 16 nt, Human
gcugcagcagaggcac

SEQ ID NO: 2406087 - RNA, 14 nt, Human
gcugcagcagaggc

SEQ ID NO: 2406088 - RNA, 21 nt, Human
gcugcagauuugggcuggaac

SEQ ID NO: 2406089 - RNA, 18 nt, Human
gcugcagauuugggcugg

SEQ ID NO: 2406090 - RNA, 17 nt, Human
gcugcagauuugggcug

SEQ ID NO: 2406091 - RNA, 15 nt, Human
gcugcccccaccccg

SEQ ID NO: 2406092 - RNA, 22 nt, Human
gcugcagcauguugcugaggag

SEQ ID NO: 2406093 - RNA, 12 nt, Human
gcugcagcaugu

SEQ ID NO: 2406094 - RNA, 23 nt, Human
gcugcagccaggccacuggcccc

SEQ ID NO: 2406095 - RNA, 22 nt, Human
gcugccccucaucucucugccc

SEQ ID NO: 2406096 - RNA, 23 nt, Human
gcugcccccggcccccuggucuc

SEQ ID NO: 2406097 - RNA, 20 nt, Human
gcugcccccggcccccuggu

SEQ ID NO: 2406098 - RNA, 20 nt, Human
gcugcccccaccccggggac

SEQ ID NO: 2406099 - RNA, 19 nt, Human
gcugcccccggcccccugg

SEQ ID NO: 2406100 - RNA, 18 nt, Human
gcugcccccggcccccug

SEQ ID NO: 2406101 - RNA, 14 nt, Human
gcugcccccggccc

SEQ ID NO: 2406102 - RNA, 19 nt, Human
gcugguaggcuccugccag

SEQ ID NO: 2406103 - RNA, 19 nt, Human
gcugguaggcauuccagcu

SEQ ID NO: 2406104 - RNA, 13 nt, Human
gcugguaguuagu

SEQ ID NO: 2406105 - RNA, 16 nt, Human
gcuggguuggugcaca

SEQ ID NO: 2406106 - RNA, 19 nt, Human
gcugguagcucaggugggc

SEQ ID NO: 2406107 - RNA, 16 nt, Human
gcugguagcucaggug

SEQ ID NO: 2406108 - RNA, 15 nt, Human
gcugguagcucaggu

SEQ ID NO: 2406109 - RNA, 14 nt, Human
gcugguagcucagg

SEQ ID NO: 2406110 - RNA, 13 nt, Human
gcugguagcucag

SEQ ID NO: 2406111 - RNA, 21 nt, Human
gcugguagagauggaggagga

SEQ ID NO: 2406112 - RNA, 23 nt, Human
gcugguagagauggaggaggagg

SEQ ID NO: 2406113 - RNA, 17 nt, Human
gcuggguucuacccagg

SEQ ID NO: 2406114 - RNA, 18 nt, Human
gcuggguucuacccaggu

SEQ ID NO: 2406115 - RNA, 23 nt, Human
gcugggguggggaccucaggccu

SEQ ID NO: 2406116 - RNA, 22 nt, Human
gcugggguggggaccucaggcc

SEQ ID NO: 2406117 - RNA, 21 nt, Human
gcuggguucuacccaggugcu

SEQ ID NO: 2406118 - RNA, 20 nt, Human
gcuggguucuacccaggugc

SEQ ID NO: 2406119 - RNA, 17 nt, Human
gcuggguuggugcacag

SEQ ID NO: 2406120 - RNA, 13 nt, Human
gcugguaacaguu

SEQ ID NO: 2406121 - RNA, 15 nt, Human
gcugguaaacuauuu

SEQ ID NO: 2406122 - RNA, 14 nt, Human
gcugguaaacuauu

SEQ ID NO: 2406123 - RNA, 22 nt, Human
gcugguaacaguucauguuugc

SEQ ID NO: 2406124 - RNA, 16 nt, Human
gcugguaacaguucau

SEQ ID NO: 2406125 - RNA, 23 nt, Human
gcugguaauuuguaucugaagga

SEQ ID NO: 2406126 - RNA, 14 nt, Human
gcugguagagaugg

SEQ ID NO: 2406127 - RNA, 15 nt, Human
gcugguagagaugga

SEQ ID NO: 2406128 - RNA, 17 nt, Human
gcugguagagauggagg

SEQ ID NO: 2406129 - RNA, 18 nt, Human
gcugguagagauggagga

SEQ ID NO: 2406130 - RNA, 19 nt, Human
gcugggguggggaccucag

SEQ ID NO: 2406131 - RNA, 17 nt, Human
gcugggguggggaccuc

SEQ ID NO: 2406132 - RNA, 24 nt, Human
gcugggccccagcccacccuccug

SEQ ID NO: 2406133 - RNA, 20 nt, Human
gcugggccccugccucucug

SEQ ID NO: 2406134 - RNA, 18 nt, Human
gcugggccccugccucuc

SEQ ID NO: 2406135 - RNA, 14 nt, Human
gcugggccccugcc

SEQ ID NO: 2406136 - RNA, 13 nt, Human
gcugggccccugc

SEQ ID NO: 2406137 - RNA, 12 nt, Human
gcugggccccug

SEQ ID NO: 2406138 - RNA, 21 nt, Human
gcugggccccagcccacccuc

SEQ ID NO: 2406139 - RNA, 20 nt, Human
gcugggccccagcccacccu

SEQ ID NO: 2406140 - RNA, 19 nt, Human
gcugggccccagcccaccc

SEQ ID NO: 2406141 - RNA, 17 nt, Human
gcugggccccagcccac

SEQ ID NO: 2406142 - RNA, 16 nt, Human
gcugggccccagccca

SEQ ID NO: 2406143 - RNA, 15 nt, Human
gcugggccccagccc

SEQ ID NO: 2406144 - RNA, 14 nt, Human
gcugggccccagcc

SEQ ID NO: 2406145 - RNA, 23 nt, Human
gcuggcuguuggcugggggccuc

SEQ ID NO: 2406146 - RNA, 20 nt, Human
gcuggcuguuggcugggggc

SEQ ID NO: 2406147 - RNA, 15 nt, Human
gcugggaacugcaga

SEQ ID NO: 2406148 - RNA, 23 nt, Human
gcugggaacucaccuggggcugc

SEQ ID NO: 2406149 - RNA, 21 nt, Human
gcugggaacucaccuggggcu

SEQ ID NO: 2406150 - RNA, 18 nt, Human
gcugggaacucaccuggg

SEQ ID NO: 2406151 - RNA, 16 nt, Human
gcugggaacucaccug

SEQ ID NO: 2406152 - RNA, 19 nt, Human
gcuggcugcccagaccccu

SEQ ID NO: 2406153 - RNA, 14 nt, Human
gcugggcaguuuuu

SEQ ID NO: 2406154 - RNA, 19 nt, Human
gcugggaacugcagaccug

SEQ ID NO: 2406155 - RNA, 20 nt, Human
gcugggaauaagugccagga

SEQ ID NO: 2406156 - RNA, 14 nt, Human
gcugggcagguugg

SEQ ID NO: 2406157 - RNA, 19 nt, Human
gcugggcaguuuuucugua

SEQ ID NO: 2406158 - RNA, 20 nt, Human
gcugggcccaacccugucug

SEQ ID NO: 2406159 - RNA, 19 nt, Human
gcugggcccaacccugucu

SEQ ID NO: 2406160 - RNA, 14 nt, Human
gcugggcccagaag

SEQ ID NO: 2406161 - RNA, 13 nt, Human
gcugggccccagc

SEQ ID NO: 2406162 - RNA, 11 nt, Human
gcuggcugccu

SEQ ID NO: 2406163 - RNA, 13 nt, Human
gcuggcugcagug

SEQ ID NO: 2406164 - RNA, 14 nt, Human
gcuggcugcaguga

SEQ ID NO: 2406165 - RNA, 20 nt, Human
gcuggcugccuuagaaccuu

SEQ ID NO: 2406166 - RNA, 14 nt, Human
gcuggcugccuuag

SEQ ID NO: 2406167 - RNA, 19 nt, Human
gcuggcuguuggcuggggg

SEQ ID NO: 2406168 - RNA, 18 nt, Human
gcuggcuguuggcugggg

SEQ ID NO: 2406169 - RNA, 13 nt, Human
gcuggcucugagc

SEQ ID NO: 2406170 - RNA, 21 nt, Human
gcuggagacuccuaggcagga

SEQ ID NO: 2406171 - RNA, 20 nt, Human
gcuggcggcuacucagcagc

SEQ ID NO: 2406172 - RNA, 16 nt, Human
gcuggcucugagcgcc

SEQ ID NO: 2406173 - RNA, 13 nt, Human
gcuggcucuucug

SEQ ID NO: 2406174 - RNA, 18 nt, Human
gcuggcucuucugcccaa

SEQ ID NO: 2406175 - RNA, 16 nt, Human
gcuggcucuucugccc

SEQ ID NO: 2406176 - RNA, 14 nt, Human
gcuggcucuucugc

SEQ ID NO: 2406177 - RNA, 21 nt, Human
gcuggcggcuacucagcagcc

SEQ ID NO: 2406178 - RNA, 18 nt, Human
gcuggcgugcaguggugc

SEQ ID NO: 2406179 - RNA, 15 nt, Human
gcuggcgugcagugg

SEQ ID NO: 2406180 - RNA, 20 nt, Human
gcuggagaccaugcagagcg

SEQ ID NO: 2406181 - RNA, 17 nt, Human
gcuggagaccaugcaga

SEQ ID NO: 2406182 - RNA, 15 nt, Human
gcuggagaccaugca

SEQ ID NO: 2406183 - RNA, 16 nt, Human
gcuggagaagcucacc

SEQ ID NO: 2406184 - RNA, 12 nt, Human
gcuggagaagcu

SEQ ID NO: 2406185 - RNA, 21 nt, Human
gcuggagaagagaggagagga

SEQ ID NO: 2406186 - RNA, 20 nt, Human
gcuggagaagagaggagagg

SEQ ID NO: 2406187 - RNA, 18 nt, Human
gcuggagaagagaggaga

SEQ ID NO: 2406188 - RNA, 17 nt, Human
gcuggagaagagaggag

SEQ ID NO: 2406189 - RNA, 16 nt, Human
gcuggagaagagagga

SEQ ID NO: 2406190 - RNA, 15 nt, Human
gcuggagaagagagg

SEQ ID NO: 2406191 - RNA, 14 nt, Human
gcuggagaagagag

SEQ ID NO: 2406192 - RNA, 13 nt, Human
gcuggagaagaga

SEQ ID NO: 2406193 - RNA, 12 nt, Human
gcuggagaagag

SEQ ID NO: 2406194 - RNA, 13 nt, Human
gcuggagacuccu

SEQ ID NO: 2406195 - RNA, 18 nt, Human
gcuggagacgggugggcg

SEQ ID NO: 2406196 - RNA, 22 nt, Human
gcuggagaccaugcagagcgcc

SEQ ID NO: 2406197 - RNA, 21 nt, Human
gcuggagaccaugcagagcgc

SEQ ID NO: 2406198 - RNA, 20 nt, Human
gcuggagacuccuaggcagg

SEQ ID NO: 2406199 - RNA, 18 nt, Human
gcuggagacuccuaggca

SEQ ID NO: 2406200 - RNA, 14 nt, Human
gcuggcgugcagug

SEQ ID NO: 2406201 - RNA, 13 nt, Human
gcuggacuuggag

SEQ ID NO: 2406202 - RNA, 20 nt, Human
gcugcugaagcugccugcuu

SEQ ID NO: 2406203 - RNA, 16 nt, Human
gcugcugaagcugccu

SEQ ID NO: 2406204 - RNA, 13 nt, Human
gcugcugaagcug

SEQ ID NO: 2406205 - RNA, 15 nt, Human
gcugcugaagaugaa

SEQ ID NO: 2406206 - RNA, 23 nt, Human
gcugcugaagcugccugcuuuuc

SEQ ID NO: 2406207 - RNA, 12 nt, Human
gcugcugaaggc

SEQ ID NO: 2406208 - RNA, 13 nt, Human
gcugcugaaacaa

SEQ ID NO: 2406209 - RNA, 18 nt, Human
gcugcucuggaauuugca

SEQ ID NO: 2406210 - RNA, 14 nt, Human
gcugcucuggaaaa

SEQ ID NO: 2406211 - RNA, 19 nt, Human
gcuguaucccaugagccuc

SEQ ID NO: 2406212 - RNA, 17 nt, Human
gcuguaucccaugagcc

SEQ ID NO: 2406213 - RNA, 18 nt, Human
gcuguauaaaaucagcca

SEQ ID NO: 2406214 - RNA, 14 nt, Human
gcuguauaaaauca

SEQ ID NO: 2406215 - RNA, 21 nt, Human
gcuguaguagcccuuucugug

SEQ ID NO: 2406216 - RNA, 20 nt, Human
gcuguaguccucauaaaaag

SEQ ID NO: 2406217 - RNA, 20 nt, Human
gcuguaguagcccuuucugu

SEQ ID NO: 2406218 - RNA, 13 nt, Human
gcuguaggugugc

SEQ ID NO: 2406219 - RNA, 20 nt, Human
gcuguaggacucgcagucag

SEQ ID NO: 2406220 - RNA, 18 nt, Human
gcuguauuuuaaaagaau

SEQ ID NO: 2406221 - RNA, 20 nt, Human
gcuguauuuuaaaagaauga

SEQ ID NO: 2406222 - RNA, 21 nt, Human
gcuguauuuuaaaagaaugau

SEQ ID NO: 2406223 - RNA, 22 nt, Human
gcuguauaaaaucagccaauua

SEQ ID NO: 2406224 - RNA, 20 nt, Human
gcuguauaaaaucagccaau

SEQ ID NO: 2406225 - RNA, 14 nt, Human
gcugugagccuugg

SEQ ID NO: 2406226 - RNA, 17 nt, Human
gcugugaggcuguccug

SEQ ID NO: 2406227 - RNA, 16 nt, Human
gcugugaggcuguccu

SEQ ID NO: 2406228 - RNA, 15 nt, Human
gcugugaggcugucc

SEQ ID NO: 2406229 - RNA, 14 nt, Human
gcugugaggcuguc

SEQ ID NO: 2406230 - RNA, 22 nt, Human
gcugugaggccccuggacaagc

SEQ ID NO: 2406231 - RNA, 18 nt, Human
gcugugaggccccuggac

SEQ ID NO: 2406232 - RNA, 16 nt, Human
gcugugaggccccugg

SEQ ID NO: 2406233 - RNA, 17 nt, Human
gcugugagccuuggcug

SEQ ID NO: 2406234 - RNA, 13 nt, Human
gcugugaggcugu

SEQ ID NO: 2406235 - RNA, 12 nt, Human
gcugugaggcug

SEQ ID NO: 2406236 - RNA, 18 nt, Human
gcugugaggcuguccugu

SEQ ID NO: 2406237 - RNA, 18 nt, Human
gcugugaguguaagugug

SEQ ID NO: 2406238 - RNA, 22 nt, Human
gcugugaguguaagugugagua

SEQ ID NO: 2406239 - RNA, 21 nt, Human
gcuguuuaaauguuuuucuau

SEQ ID NO: 2406240 - RNA, 20 nt, Human
gcuguuggcugggggccuca

SEQ ID NO: 2406241 - RNA, 16 nt, Human
gcuguuggcugggggc

SEQ ID NO: 2406242 - RNA, 16 nt, Human
gcugugcugcccugcc

SEQ ID NO: 2406243 - RNA, 15 nt, Human
gcugugcugcccugc

SEQ ID NO: 2406244 - RNA, 17 nt, Human
gcugugcugcccugccc

SEQ ID NO: 2406245 - RNA, 15 nt, Human
gcuguuggcuggggg

SEQ ID NO: 2406246 - RNA, 16 nt, Human
gcugugcucuggacag

SEQ ID NO: 2406247 - RNA, 15 nt, Human
gcugugcucuggaca

SEQ ID NO: 2406248 - RNA, 14 nt, Human
gcugugcugcccug

SEQ ID NO: 2406249 - RNA, 18 nt, Human
gcugugcggaucucugga

SEQ ID NO: 2406250 - RNA, 18 nt, Human
gcugugcucuggacaggc

SEQ ID NO: 2406251 - RNA, 13 nt, Human
gcugugcucugga

SEQ ID NO: 2406252 - RNA, 16 nt, Human
gcugugcggaucucug

SEQ ID NO: 2406253 - RNA, 14 nt, Human
gcugugcuaugaau

SEQ ID NO: 2406254 - RNA, 15 nt, Human
gcugugcuaugaauu

SEQ ID NO: 2406255 - RNA, 16 nt, Human
gcugugcuaugaauuu

SEQ ID NO: 2406256 - RNA, 15 nt, Human
gcugugccucugccu

SEQ ID NO: 2406257 - RNA, 14 nt, Human
gcugugccucugcc

SEQ ID NO: 2406258 - RNA, 16 nt, Human
gcugugccucugccug

SEQ ID NO: 2406259 - RNA, 21 nt, Human
gcugugcgcugacaaccaccg

SEQ ID NO: 2406260 - RNA, 21 nt, Human
ggaagccagcaggcucucagg

SEQ ID NO: 2406261 - RNA, 23 nt, Human
ggaagccagcaggcucucaggcc

SEQ ID NO: 2406262 - RNA, 22 nt, Human
ggaagccagcaggcucucaggc

SEQ ID NO: 2406263 - RNA, 18 nt, Human
ggaagccgcuggggccag

SEQ ID NO: 2406264 - RNA, 20 nt, Human
ggaagccggaggguguuuau

SEQ ID NO: 2406265 - RNA, 16 nt, Human
ggaagccagcuuuccc

SEQ ID NO: 2406266 - RNA, 19 nt, Human
ggaaaucaggguuaguauu

SEQ ID NO: 2406267 - RNA, 23 nt, Human
ggaaaucaccgaaaacguggcug

SEQ ID NO: 2406268 - RNA, 16 nt, Human
ggaaauccaggguggu

SEQ ID NO: 2406269 - RNA, 20 nt, Human
ggaaaggccagcuggcagca

SEQ ID NO: 2406270 - RNA, 22 nt, Human
ggaaaggccagcuggcagcaga

SEQ ID NO: 2406271 - RNA, 12 nt, Human
ggaaaggcucag

SEQ ID NO: 2406272 - RNA, 18 nt, Human
ggaaaucucaccccaucc

SEQ ID NO: 2406273 - RNA, 19 nt, Human
ggacaugcgguagccagca

SEQ ID NO: 2406274 - RNA, 21 nt, Human
ggacaugcgguagccagcaca

SEQ ID NO: 2406275 - RNA, 19 nt, Human
ggacaugcugaagccaaag

SEQ ID NO: 2406276 - RNA, 16 nt, Human
ggacaugcugaagcca

SEQ ID NO: 2406277 - RNA, 15 nt, Human
ggacaucucuuugaa

SEQ ID NO: 2406278 - RNA, 16 nt, Human
ggacaugcgguagcca

SEQ ID NO: 2406279 - RNA, 16 nt, Human
ggacauccuccuccca

SEQ ID NO: 2406280 - RNA, 14 nt, Human
ggacauccucuucu

SEQ ID NO: 2406281 - RNA, 13 nt, Human
ggacauggacaag

SEQ ID NO: 2406282 - RNA, 14 nt, Human
ggacauauucauuu

SEQ ID NO: 2406283 - RNA, 13 nt, Human
ggacauccuccuc

SEQ ID NO: 2406284 - RNA, 22 nt, Human
ggacauagagagggagaagaag

SEQ ID NO: 2406285 - RNA, 14 nt, Human
ggacaucagcuggu

SEQ ID NO: 2406286 - RNA, 20 nt, Human
ggacauccccccgccaaaag

SEQ ID NO: 2406287 - RNA, 19 nt, Human
ggacauaaugggguccugg

SEQ ID NO: 2406288 - RNA, 23 nt, Human
ggacauaaugggguccuggccau

SEQ ID NO: 2406289 - RNA, 20 nt, Human
ggacauagagagggagaaga

SEQ ID NO: 2406290 - RNA, 15 nt, Human
ggacauagagaggga

SEQ ID NO: 2406291 - RNA, 18 nt, Human
ggacauagcgaauacaaa

SEQ ID NO: 2406292 - RNA, 22 nt, Human
ggacaguugcuuuucagcaugg

SEQ ID NO: 2406293 - RNA, 14 nt, Human
ggacagugcuucag

SEQ ID NO: 2406294 - RNA, 19 nt, Human
ggacaguccugggagaacc

SEQ ID NO: 2406295 - RNA, 16 nt, Human
ggacagugcuucagcc

SEQ ID NO: 2406296 - RNA, 17 nt, Human
ggacagugcuucagccu

SEQ ID NO: 2406297 - RNA, 13 nt, Human
ggacaguccuggg

SEQ ID NO: 2406298 - RNA, 14 nt, Human
ggacaguccuggga

SEQ ID NO: 2406299 - RNA, 15 nt, Human
ggacaguccugggag

SEQ ID NO: 2406300 - RNA, 16 nt, Human
ggacaguccugggaga

SEQ ID NO: 2406301 - RNA, 18 nt, Human
ggacagugcuucagccug

SEQ ID NO: 2406302 - RNA, 19 nt, Human
ggacagugcuucagccuga

SEQ ID NO: 2406303 - RNA, 20 nt, Human
ggacagugcuucagccugag

SEQ ID NO: 2406304 - RNA, 21 nt, Human
ggacagugcuucagccugagg

SEQ ID NO: 2406305 - RNA, 22 nt, Human
ggacagugcuucagccugaggc

SEQ ID NO: 2406306 - RNA, 23 nt, Human
ggacagugcuucagccugaggcu

SEQ ID NO: 2406307 - RNA, 18 nt, Human
ggacagucaccucaugga

SEQ ID NO: 2406308 - RNA, 17 nt, Human
ggacagucaccucaugg

SEQ ID NO: 2406309 - RNA, 21 nt, Human
ggacagucaccucauggaauu

SEQ ID NO: 2406310 - RNA, 19 nt, Human
ggacaguauuuguggggag

SEQ ID NO: 2406311 - RNA, 14 nt, Human
ggacagggucccug

SEQ ID NO: 2406312 - RNA, 18 nt, Human
ggacagggcuggcccagc

SEQ ID NO: 2406313 - RNA, 16 nt, Human
ggacagggcuggccca

SEQ ID NO: 2406314 - RNA, 15 nt, Human
ggacagggcuggccc

SEQ ID NO: 2406315 - RNA, 22 nt, Human
ggacagggaugagcauggagcu

SEQ ID NO: 2406316 - RNA, 22 nt, Human
ggacagggcauggccagguggc

SEQ ID NO: 2406317 - RNA, 15 nt, Human
ggacaggcuggcucc

SEQ ID NO: 2406318 - RNA, 23 nt, Human
ggacaggcuggcuccagaugcag

SEQ ID NO: 2406319 - RNA, 15 nt, Human
ggacagggcauggcc

SEQ ID NO: 2406320 - RNA, 23 nt, Human
ggacagggcuggcccagcccugc

SEQ ID NO: 2406321 - RNA, 22 nt, Human
ggacagggcuggcccagcccug

SEQ ID NO: 2406322 - RNA, 21 nt, Human
ggacagggcuggcccagcccu

SEQ ID NO: 2406323 - RNA, 20 nt, Human
ggacagggcuggcccagccc

SEQ ID NO: 2406324 - RNA, 17 nt, Human
ggacaggggcaggagga

SEQ ID NO: 2406325 - RNA, 18 nt, Human
ggacaguauuugugggga

SEQ ID NO: 2406326 - RNA, 20 nt, Human
ggacaggugugccgacagaa

SEQ ID NO: 2406327 - RNA, 17 nt, Human
ggacagggaggugaccc

SEQ ID NO: 2406328 - RNA, 13 nt, Human
ggacaggcuggcu

SEQ ID NO: 2406329 - RNA, 22 nt, Human
ggacaggcccggcgcgguggcu

SEQ ID NO: 2406330 - RNA, 14 nt, Human
ggacaccugcccug

SEQ ID NO: 2406331 - RNA, 15 nt, Human
ggacaccugcccugc

SEQ ID NO: 2406332 - RNA, 23 nt, Human
ggacaggcauguucucugaggac

SEQ ID NO: 2406333 - RNA, 21 nt, Human
ggacaccccuuauccaggacu

SEQ ID NO: 2406334 - RNA, 11 nt, Human
ggacaggcccg

SEQ ID NO: 2406335 - RNA, 23 nt, Human
ggacacccugugauggggcccug

SEQ ID NO: 2406336 - RNA, 13 nt, Human
ggacacccuguga

SEQ ID NO: 2406337 - RNA, 15 nt, Human
ggacaccgggccagu

SEQ ID NO: 2406338 - RNA, 20 nt, Human
ggacaccccuuauccaggac

SEQ ID NO: 2406339 - RNA, 19 nt, Human
ggacaccccuuauccagga

SEQ ID NO: 2406340 - RNA, 15 nt, Human
ggacacccccucgcu

SEQ ID NO: 2406341 - RNA, 17 nt, Human
ggaauaugggagaaaua

SEQ ID NO: 2406342 - RNA, 13 nt, Human
ggaauaguuuuuu

SEQ ID NO: 2406343 - RNA, 13 nt, Human
ggaauaugagcuu

SEQ ID NO: 2406344 - RNA, 14 nt, Human
ggaauauuugaauc

SEQ ID NO: 2406345 - RNA, 13 nt, Human
ggaauauuugaau

SEQ ID NO: 2406346 - RNA, 11 nt, Human
ggaauauuuga

SEQ ID NO: 2406347 - RNA, 22 nt, Human
ggaauauuccccuaucucuaga

SEQ ID NO: 2406348 - RNA, 16 nt, Human
ggaauauauaaccagu

SEQ ID NO: 2406349 - RNA, 16 nt, Human
ggaauaguugagcccc

SEQ ID NO: 2406350 - RNA, 22 nt, Human
ggaauaguauccuccagguuuu

SEQ ID NO: 2406351 - RNA, 21 nt, Human
ggaauaguauccuccagguuu

SEQ ID NO: 2406352 - RNA, 20 nt, Human
ggaauaguauccuccagguu

SEQ ID NO: 2406353 - RNA, 20 nt, Human
ggaauaguugagccccaagu

SEQ ID NO: 2406354 - RNA, 17 nt, Human
ggaauaguugagcccca

SEQ ID NO: 2406355 - RNA, 23 nt, Human
ggaauauaaggaaagcaauaaau

SEQ ID NO: 2406356 - RNA, 19 nt, Human
ggaauaccugucccccuga

SEQ ID NO: 2406357 - RNA, 16 nt, Human
ggaauaccuguccccc

SEQ ID NO: 2406358 - RNA, 12 nt, Human
ggaauacuuuuu

SEQ ID NO: 2406359 - RNA, 18 nt, Human
ggaauacuagggagaagg

SEQ ID NO: 2406360 - RNA, 12 nt, Human
ggaauacagugu

SEQ ID NO: 2406361 - RNA, 17 nt, Human
ggaauacuuuuuguuau

SEQ ID NO: 2406362 - RNA, 19 nt, Human
ggaauaguauccuccaggu

SEQ ID NO: 2406363 - RNA, 18 nt, Human
ggaauaguauccuccagg

SEQ ID NO: 2406364 - RNA, 17 nt, Human
ggaauaguauccuccag

SEQ ID NO: 2406365 - RNA, 21 nt, Human
ggaagcucagggccuggcuca

SEQ ID NO: 2406366 - RNA, 22 nt, Human
ggaagcucagggccuggcucag

SEQ ID NO: 2406367 - RNA, 20 nt, Human
ggaagcgcgagggccucaaa

SEQ ID NO: 2406368 - RNA, 20 nt, Human
ggaagcggagguugcaggga

SEQ ID NO: 2406369 - RNA, 15 nt, Human
ggaauaccugucccc

SEQ ID NO: 2406370 - RNA, 15 nt, Human
ggaauacaauguaau

SEQ ID NO: 2406371 - RNA, 13 nt, Human
ggaauaauuauuu

SEQ ID NO: 2406372 - RNA, 21 nt, Human
ggaauaauuauuuauuuaaua

SEQ ID NO: 2406373 - RNA, 22 nt, Human
ggaauaaugggcuuagagcagu

SEQ ID NO: 2406374 - RNA, 15 nt, Human
ggaauaauagaagaa

SEQ ID NO: 2406375 - RNA, 17 nt, Human
ggaagcucagggccugg

SEQ ID NO: 2406376 - RNA, 16 nt, Human
ggaagcucagggccug

SEQ ID NO: 2406377 - RNA, 20 nt, Human
ggaagccgugcucgccccag

SEQ ID NO: 2406378 - RNA, 20 nt, Human
ggaagccggcggcccaagcc

SEQ ID NO: 2406379 - RNA, 16 nt, Human
ggaagccggcggccca

SEQ ID NO: 2406380 - RNA, 16 nt, Human
ggaagccgugcccugc

SEQ ID NO: 2406381 - RNA, 14 nt, Human
ggaagccugcaguc

SEQ ID NO: 2406382 - RNA, 23 nt, Human
ggaagcgaugaauuuggagacuc

SEQ ID NO: 2406383 - RNA, 19 nt, Human
ggaaugaaugucaguguga

SEQ ID NO: 2406384 - RNA, 16 nt, Human
ggaaugaagcuugugu

SEQ ID NO: 2406385 - RNA, 15 nt, Human
ggaaugaagcuugug

SEQ ID NO: 2406386 - RNA, 12 nt, Human
ggaaugaagcuu

SEQ ID NO: 2406387 - RNA, 15 nt, Human
ggaaucacucuugug

SEQ ID NO: 2406388 - RNA, 18 nt, Human
ggaaugaagcaaugcuuc

SEQ ID NO: 2406389 - RNA, 23 nt, Human
ggaaucaagagcugcccuccuug

SEQ ID NO: 2406390 - RNA, 19 nt, Human
ggaaucaagagcugcccuc

SEQ ID NO: 2406391 - RNA, 17 nt, Human
ggaaucaagagcugccc

SEQ ID NO: 2406392 - RNA, 12 nt, Human
ggaaucaagauu

SEQ ID NO: 2406393 - RNA, 22 nt, Human
ggaaucaagaugucagacuggc

SEQ ID NO: 2406394 - RNA, 20 nt, Human
ggaauauuugaaucuugucu

SEQ ID NO: 2406395 - RNA, 15 nt, Human
ggaauauuugaaucu

SEQ ID NO: 2406396 - RNA, 16 nt, Human
ggaaucaagagcugcc

SEQ ID NO: 2406397 - RNA, 12 nt, Human
ggacacagcucu

SEQ ID NO: 2406398 - RNA, 13 nt, Human
ggacacacaaggu

SEQ ID NO: 2406399 - RNA, 20 nt, Human
ggaaugaggcuugcugagag

SEQ ID NO: 2406400 - RNA, 21 nt, Human
ggacacacaaggugcaaauca

SEQ ID NO: 2406401 - RNA, 21 nt, Human
ggaaugaggugggagguggaa

SEQ ID NO: 2406402 - RNA, 16 nt, Human
ggacaauucaugaacu

SEQ ID NO: 2406403 - RNA, 21 nt, Human
ggaaugaggcuugcugagagg

SEQ ID NO: 2406404 - RNA, 18 nt, Human
ggaaugaagcuuguguau

SEQ ID NO: 2406405 - RNA, 19 nt, Human
ggacaccagccaggcucug

SEQ ID NO: 2406406 - RNA, 18 nt, Human
ggacaccagccaggcucu

SEQ ID NO: 2406407 - RNA, 17 nt, Human
ggacaccagccaggcuc

SEQ ID NO: 2406408 - RNA, 16 nt, Human
ggacaccagccaggcu

SEQ ID NO: 2406409 - RNA, 14 nt, Human
ggacaccagccagg

SEQ ID NO: 2406410 - RNA, 13 nt, Human
ggacaccagccag

SEQ ID NO: 2406411 - RNA, 22 nt, Human
ggacaccacacccagccucagu

SEQ ID NO: 2406412 - RNA, 21 nt, Human
ggacaccacacccagccucag

SEQ ID NO: 2406413 - RNA, 20 nt, Human
ggacaccacacccagccuca

SEQ ID NO: 2406414 - RNA, 19 nt, Human
ggacaccacacccagccuc

SEQ ID NO: 2406415 - RNA, 18 nt, Human
ggacaccacacccagccu

SEQ ID NO: 2406416 - RNA, 17 nt, Human
ggacaccacacccagcc

SEQ ID NO: 2406417 - RNA, 22 nt, Human
ggacacauucaacccuggagag

SEQ ID NO: 2406418 - RNA, 21 nt, Human
ggacacauucaacccuggaga

SEQ ID NO: 2406419 - RNA, 12 nt, Human
ggacacccugug

SEQ ID NO: 2406420 - RNA, 22 nt, Human
ggacaccagccaggcucugugc

SEQ ID NO: 2406421 - RNA, 20 nt, Human
ggacaccagccaggcucugu

SEQ ID NO: 2406422 - RNA, 13 nt, Human
ggacaccaggagu

SEQ ID NO: 2406423 - RNA, 16 nt, Human
ggacacagaugaaaca

SEQ ID NO: 2406424 - RNA, 12 nt, Human
ggacacacuaau

SEQ ID NO: 2406425 - RNA, 13 nt, Human
ggacacagcucuu

SEQ ID NO: 2406426 - RNA, 21 nt, Human
gcuuuucccuuuuuuuaagua

SEQ ID NO: 2406427 - RNA, 22 nt, Human
gcuuuuccucaaagggagagag

SEQ ID NO: 2406428 - RNA, 15 nt, Human
gcuuuuccucccuug

SEQ ID NO: 2406429 - RNA, 22 nt, Human
gcuuuuccuauuuguuuucaug

SEQ ID NO: 2406430 - RNA, 22 nt, Human
gcuuuuccccggucccuugaga

SEQ ID NO: 2406431 - RNA, 20 nt, Human
gcuuuucccuuuuuuuaagu

SEQ ID NO: 2406432 - RNA, 16 nt, Human
gcuuuucccaaaagcc

SEQ ID NO: 2406433 - RNA, 18 nt, Human
gcuuuuccccggucccuu

SEQ ID NO: 2406434 - RNA, 19 nt, Human
gcuuuucccuaagccaagg

SEQ ID NO: 2406435 - RNA, 13 nt, Human
gcuuuugaaaucu

SEQ ID NO: 2406436 - RNA, 17 nt, Human
gcuuuucuuucuaccaa

SEQ ID NO: 2406437 - RNA, 14 nt, Human
gcuuuucuguauuu

SEQ ID NO: 2406438 - RNA, 22 nt, Human
gcuuuucugcccuggcugcugc

SEQ ID NO: 2406439 - RNA, 19 nt, Human
gcuuuucugcccuggcugc

SEQ ID NO: 2406440 - RNA, 18 nt, Human
gcuuuucugcccuggcug

SEQ ID NO: 2406441 - RNA, 17 nt, Human
gcuuuucugcccuggcu

SEQ ID NO: 2406442 - RNA, 22 nt, Human
gcuuuugcuggucacugccaug

SEQ ID NO: 2406443 - RNA, 21 nt, Human
gcuuuugcuggucacugccau

SEQ ID NO: 2406444 - RNA, 19 nt, Human
gcuuuugcuggucacugcc

SEQ ID NO: 2406445 - RNA, 18 nt, Human
gcuuuucugucucugccu

SEQ ID NO: 2406446 - RNA, 18 nt, Human
gcuuuucuguauuuuauu

SEQ ID NO: 2406447 - RNA, 15 nt, Human
gcuuuugcuggucac

SEQ ID NO: 2406448 - RNA, 17 nt, Human
ggaaagaguaggaagac

SEQ ID NO: 2406449 - RNA, 16 nt, Human
ggaaagaguaggaaga

SEQ ID NO: 2406450 - RNA, 19 nt, Human
ggaaagcaaaggagauugg

SEQ ID NO: 2406451 - RNA, 15 nt, Human
ggaaagcaauaaaug

SEQ ID NO: 2406452 - RNA, 14 nt, Human
ggaaagaggcucug

SEQ ID NO: 2406453 - RNA, 20 nt, Human
ggaaagacuuuuccaacccu

SEQ ID NO: 2406454 - RNA, 18 nt, Human
ggaaacuguugccagaga

SEQ ID NO: 2406455 - RNA, 12 nt, Human
ggaaacugaaug

SEQ ID NO: 2406456 - RNA, 17 nt, Human
ggaaacuguugccagag

SEQ ID NO: 2406457 - RNA, 15 nt, Human
ggaaagaaaguugca

SEQ ID NO: 2406458 - RNA, 16 nt, Human
ggaaagaaagaaggaa

SEQ ID NO: 2406459 - RNA, 22 nt, Human
ggaaagacauccauaaagaagc

SEQ ID NO: 2406460 - RNA, 15 nt, Human
ggaaagaagagccgg

SEQ ID NO: 2406461 - RNA, 18 nt, Human
ggaaagaagagccggagc

SEQ ID NO: 2406462 - RNA, 14 nt, Human
ggaaagcagcucaa

SEQ ID NO: 2406463 - RNA, 11 nt, Human
ggaaagcaggu

SEQ ID NO: 2406464 - RNA, 19 nt, Human
ggaaagcagguggcaucuc

SEQ ID NO: 2406465 - RNA, 22 nt, Human
ggaaagcagcucaaaggcacag

SEQ ID NO: 2406466 - RNA, 17 nt, Human
ggaaagcacaggugggc

SEQ ID NO: 2406467 - RNA, 16 nt, Human
ggaaagcacagguggg

SEQ ID NO: 2406468 - RNA, 15 nt, Human
ggaaagcagcucaaa

SEQ ID NO: 2406469 - RNA, 19 nt, Human
ggaaagcagcucaaaggca

SEQ ID NO: 2406470 - RNA, 23 nt, Human
ggaaagccaccucucccucaaca

SEQ ID NO: 2406471 - RNA, 20 nt, Human
ggaaagccaccucucccuca

SEQ ID NO: 2406472 - RNA, 21 nt, Human
ggaaagcagguggcaucucua

SEQ ID NO: 2406473 - RNA, 18 nt, Human
ggaaagccaccucucccu

SEQ ID NO: 2406474 - RNA, 18 nt, Human
ggaaagcaucaccucagg

SEQ ID NO: 2406475 - RNA, 19 nt, Human
ggaaagcaucaccucaggc

SEQ ID NO: 2406476 - RNA, 19 nt, Human
ggaaagccagugacuccag

SEQ ID NO: 2406477 - RNA, 18 nt, Human
ggaaagccagugacucca

SEQ ID NO: 2406478 - RNA, 21 nt, Human
ggaaagccagugacuccagga

SEQ ID NO: 2406479 - RNA, 13 nt, Human
ggaaagccucugc

SEQ ID NO: 2406480 - RNA, 24 nt, Human
ggaaaggaagugggacuggcacua

SEQ ID NO: 2406481 - RNA, 18 nt, Human
ggaaagcuccuagcagag

SEQ ID NO: 2406482 - RNA, 23 nt, Human
ggaaagcucagcuacugauuuuu

SEQ ID NO: 2406483 - RNA, 14 nt, Human
ggaaagccucugcu

SEQ ID NO: 2406484 - RNA, 16 nt, Human
ggaaagccucugcugc

SEQ ID NO: 2406485 - RNA, 15 nt, Human
ggaaaggccagcugg

SEQ ID NO: 2406486 - RNA, 18 nt, Human
ggaaaggccagcuggcag

SEQ ID NO: 2406487 - RNA, 20 nt, Human
ggaaaggcaaaugcccaagg

SEQ ID NO: 2406488 - RNA, 18 nt, Human
ggaaaggcaaaugcccaa

SEQ ID NO: 2406489 - RNA, 16 nt, Human
ggaaaggauauuuucu

SEQ ID NO: 2406490 - RNA, 15 nt, Human
ggaaaggagaggaaa

SEQ ID NO: 2406491 - RNA, 12 nt, Human
ggaaaggaauug

SEQ ID NO: 2406492 - RNA, 21 nt, Human
ggaaaggaguagaaaaagcag

SEQ ID NO: 2406493 - RNA, 21 nt, Human
ggaaaccacagcugcuggaga

SEQ ID NO: 2406494 - RNA, 19 nt, Human
ggaaaccacagcugcugga

SEQ ID NO: 2406495 - RNA, 18 nt, Human
ggaaaccacagcugcugg

SEQ ID NO: 2406496 - RNA, 21 nt, Human
ggaaacuaggugcauauuuau

SEQ ID NO: 2406497 - RNA, 21 nt, Human
ggaaacuccacaucugccuua

SEQ ID NO: 2406498 - RNA, 20 nt, Human
ggaaacuccacaucugccuu

SEQ ID NO: 2406499 - RNA, 22 nt, Human
ggaaacucaccugcuggccccu

SEQ ID NO: 2406500 - RNA, 18 nt, Human
ggaaacuccacaucugcc

SEQ ID NO: 2406501 - RNA, 21 nt, Human
ggaaacucaccugcuggcccc

SEQ ID NO: 2406502 - RNA, 13 nt, Human
ggaaacugccagc

SEQ ID NO: 2406503 - RNA, 18 nt, Human
ggaaacuggguuccugca

SEQ ID NO: 2406504 - RNA, 17 nt, Human
ggaaacucuuaucucag

SEQ ID NO: 2406505 - RNA, 17 nt, Human
ggaaacuggaugagguc

SEQ ID NO: 2406506 - RNA, 15 nt, Human
ggaaacccagcucug

SEQ ID NO: 2406507 - RNA, 16 nt, Human
ggaaaccacagcugcu

SEQ ID NO: 2406508 - RNA, 15 nt, Human
ggaaaccacagcugc

SEQ ID NO: 2406509 - RNA, 15 nt, Human
ggaaaaaagagaagu

SEQ ID NO: 2406510 - RNA, 15 nt, Human
ggaaacaggaccaca

SEQ ID NO: 2406511 - RNA, 20 nt, Human
ggaaacagcuaaugggacac

SEQ ID NO: 2406512 - RNA, 14 nt, Human
ggaaaaaaaugacu

SEQ ID NO: 2406513 - RNA, 19 nt, Human
ggaaaaaaaucguccaggg

SEQ ID NO: 2406514 - RNA, 13 nt, Human
ggaaacagaggcu

SEQ ID NO: 2406515 - RNA, 16 nt, Human
ggaaaaaauaacaaug

SEQ ID NO: 2406516 - RNA, 24 nt, Human
gcuuuuuuuuucucuuucucuccu

SEQ ID NO: 2406517 - RNA, 15 nt, Human
gcuuuuuuuuucucu

SEQ ID NO: 2406518 - RNA, 13 nt, Human
gcuuuugugcauu

SEQ ID NO: 2406519 - RNA, 19 nt, Human
gcuuuugugcauuaucuag

SEQ ID NO: 2406520 - RNA, 15 nt, Human
gcuuuuuaauauuga

SEQ ID NO: 2406521 - RNA, 18 nt, Human
gcuuugccagcugcugcu

SEQ ID NO: 2406522 - RNA, 15 nt, Human
gcuuugccagcugcu

SEQ ID NO: 2406523 - RNA, 14 nt, Human
gcuuugccagcugc

SEQ ID NO: 2406524 - RNA, 21 nt, Human
gcuuugcauuuuaaaaaugaa

SEQ ID NO: 2406525 - RNA, 19 nt, Human
gcuuugccagcugcugcug

SEQ ID NO: 2406526 - RNA, 20 nt, Human
gcuuugcccaacaccagccc

SEQ ID NO: 2406527 - RNA, 23 nt, Human
gcuuugcccaacaccagccccug

SEQ ID NO: 2406528 - RNA, 22 nt, Human
gcuuugcccaacaccagccccu

SEQ ID NO: 2406529 - RNA, 12 nt, Human
gcuuugcccagc

SEQ ID NO: 2406530 - RNA, 15 nt, Human
gcuuugcugcuacag

SEQ ID NO: 2406531 - RNA, 12 nt, Human
gcuuugcugcua

SEQ ID NO: 2406532 - RNA, 13 nt, Human
gcuuugcucugcc

SEQ ID NO: 2406533 - RNA, 16 nt, Human
gcuuugcugcuacagg

SEQ ID NO: 2406534 - RNA, 12 nt, Human
gcuuugcugcug

SEQ ID NO: 2406535 - RNA, 18 nt, Human
gcuuugcugcugaaggcu

SEQ ID NO: 2406536 - RNA, 19 nt, Human
gcuuugcugcugaaggcuc

SEQ ID NO: 2406537 - RNA, 16 nt, Human
gcuuugcuaccaaagc

SEQ ID NO: 2406538 - RNA, 12 nt, Human
gcuuugcucugc

SEQ ID NO: 2406539 - RNA, 22 nt, Human
gcuuugccuuccacgcugucuc

SEQ ID NO: 2406540 - RNA, 13 nt, Human
gcuuugccuucca

SEQ ID NO: 2406541 - RNA, 18 nt, Human
gcuuugccuuccacgcug

SEQ ID NO: 2406542 - RNA, 24 nt, Human
gcuuugccuuccacgcugucucca

SEQ ID NO: 2406543 - RNA, 19 nt, Human
gcuuugcuuucugcucagc

SEQ ID NO: 2406544 - RNA, 18 nt, Human
gcuuugcuuucugcucag

SEQ ID NO: 2406545 - RNA, 21 nt, Human
gcuuugcuuaugguaauaaaa

SEQ ID NO: 2406546 - RNA, 16 nt, Human
gcuuggggaccagagc

SEQ ID NO: 2406547 - RNA, 23 nt, Human
gcuugggcuucauccuccucaga

SEQ ID NO: 2406548 - RNA, 19 nt, Human
gcuugaccgugaggccaga

SEQ ID NO: 2406549 - RNA, 18 nt, Human
gcuugaccgugaggccag

SEQ ID NO: 2406550 - RNA, 17 nt, Human
gcuugaccgugaggcca

SEQ ID NO: 2406551 - RNA, 23 nt, Human
gcuucuucagagacuccugcagg

SEQ ID NO: 2406552 - RNA, 16 nt, Human
gcuugaccgugaggcc

SEQ ID NO: 2406553 - RNA, 21 nt, Human
gcuucuucagagacuccugca

SEQ ID NO: 2406554 - RNA, 19 nt, Human
gcuucuucagagacuccug

SEQ ID NO: 2406555 - RNA, 16 nt, Human
gcuuaacuucacauau

SEQ ID NO: 2406556 - RNA, 16 nt, Human
gcuguuuauuuuauau

SEQ ID NO: 2406557 - RNA, 13 nt, Human
gcuguuuccauag

SEQ ID NO: 2406558 - RNA, 13 nt, Human
gcuguuugaggau

SEQ ID NO: 2406559 - RNA, 11 nt, Human
gcuguuuccuu

SEQ ID NO: 2406560 - RNA, 15 nt, Human
gcuguuuacuaggga

SEQ ID NO: 2406561 - RNA, 14 nt, Human
gcuguuuauggccu

SEQ ID NO: 2406562 - RNA, 15 nt, Human
gcuguuuauggccuc

SEQ ID NO: 2406563 - RNA, 16 nt, Human
gcuguuuauggccuca

SEQ ID NO: 2406564 - RNA, 23 nt, Human
gcuguuuauggccucagcugccu

SEQ ID NO: 2406565 - RNA, 17 nt, Human
gcuguuuauggccucag

SEQ ID NO: 2406566 - RNA, 22 nt, Human
gcuguuuauggccucagcugcc

SEQ ID NO: 2406567 - RNA, 17 nt, Human
gcuuaacuucacauauu

SEQ ID NO: 2406568 - RNA, 15 nt, Human
gcuuaagcagaagca

SEQ ID NO: 2406569 - RNA, 20 nt, Human
gcuuaagaaaucuaguauuu

SEQ ID NO: 2406570 - RNA, 16 nt, Human
gcuucuucagagacuc

SEQ ID NO: 2406571 - RNA, 16 nt, Human
gcuuaagcagaagcau

SEQ ID NO: 2406572 - RNA, 21 nt, Human
gcuuggggaccagagcugcca

SEQ ID NO: 2406573 - RNA, 20 nt, Human
gcuuggggaccagagcugcc

SEQ ID NO: 2406574 - RNA, 18 nt, Human
gcuuggggaccagagcug

SEQ ID NO: 2406575 - RNA, 17 nt, Human
gcuuggggaccagagcu

SEQ ID NO: 2406576 - RNA, 12 nt, Human
gcuuuccugccc

SEQ ID NO: 2406577 - RNA, 11 nt, Human
gcuuuccugcc

SEQ ID NO: 2406578 - RNA, 12 nt, Human
gcuuuccugaau

SEQ ID NO: 2406579 - RNA, 22 nt, Human
gcuuuccugaauccaaacuaau

SEQ ID NO: 2406580 - RNA, 17 nt, Human
gcuuuccugccccaggc

SEQ ID NO: 2406581 - RNA, 14 nt, Human
gcuuuccugcccca

SEQ ID NO: 2406582 - RNA, 19 nt, Human
gcuuuccugccccaggccu

SEQ ID NO: 2406583 - RNA, 22 nt, Human
gcuuggggaccagagcugccac

SEQ ID NO: 2406584 - RNA, 11 nt, Human
gcuuuccugaa

SEQ ID NO: 2406585 - RNA, 23 nt, Human
gcuugggcuuccauuugugugug

SEQ ID NO: 2406586 - RNA, 22 nt, Human
gcuuucuacccagcgagcccug

SEQ ID NO: 2406587 - RNA, 19 nt, Human
gcuuucuacccagcgagcc

SEQ ID NO: 2406588 - RNA, 16 nt, Human
gcuuucgaacugcuag

SEQ ID NO: 2406589 - RNA, 13 nt, Human
gcuuucuacccag

SEQ ID NO: 2406590 - RNA, 17 nt, Human
gcuuuccuuuuuuaaaa

SEQ ID NO: 2406591 - RNA, 19 nt, Human
gcuuucgucuccagccccu

SEQ ID NO: 2406592 - RNA, 23 nt, Human
gcuuuccuuuuuuaaaaaugcaa

SEQ ID NO: 2406593 - RNA, 18 nt, Human
gcuuugauuaauccagaa

SEQ ID NO: 2406594 - RNA, 12 nt, Human
gcuuugauucau

SEQ ID NO: 2406595 - RNA, 23 nt, Human
gcuuucuacccagcgagcccugg

SEQ ID NO: 2406596 - RNA, 18 nt, Human
gcuuugcauguuccacua

SEQ ID NO: 2406597 - RNA, 17 nt, Human
gcuuugcauguuccacu

SEQ ID NO: 2406598 - RNA, 12 nt, Human
gcuuugcaguga

SEQ ID NO: 2406599 - RNA, 23 nt, Human
gcuuugcauguuccacuaacccc

SEQ ID NO: 2406600 - RNA, 20 nt, Human
gcuuugcauguuccacuaac

SEQ ID NO: 2406601 - RNA, 20 nt, Human
gcuuugcauuccuacaaaga

SEQ ID NO: 2406602 - RNA, 22 nt, Human
gcuuugcauuccuacaaagaug

SEQ ID NO: 2406603 - RNA, 15 nt, Human
gcuuugauucauagu

SEQ ID NO: 2406604 - RNA, 20 nt, Human
gcuuugauucauaguaacuu

SEQ ID NO: 2406605 - RNA, 21 nt, Human
gcuuugauuaauccagaauaa

SEQ ID NO: 2406606 - RNA, 18 nt, Human
gcuaagugaaaaggucau

SEQ ID NO: 2406607 - RNA, 17 nt, Human
gcuaaguauuucccagc

SEQ ID NO: 2406608 - RNA, 13 nt, Human
gcuaagugaaaag

SEQ ID NO: 2406609 - RNA, 21 nt, Human
gcuaaggcguggagcugccug

SEQ ID NO: 2406610 - RNA, 20 nt, Human
gcuaaggcguggagcugccu

SEQ ID NO: 2406611 - RNA, 22 nt, Human
gcuaaggcguggagcugccuga

SEQ ID NO: 2406612 - RNA, 22 nt, Human
gcuaagugauccucccaccuca

SEQ ID NO: 2406613 - RNA, 18 nt, Human
gcuaagugauccucccac

SEQ ID NO: 2406614 - RNA, 21 nt, Human
gcuaggaauuguguuuauaau

SEQ ID NO: 2406615 - RNA, 12 nt, Human
gcuaggaaugaa

SEQ ID NO: 2406616 - RNA, 13 nt, Human
gcuaggaaugaaa

SEQ ID NO: 2406617 - RNA, 18 nt, Human
gcuaggaaugaaauccug

SEQ ID NO: 2406618 - RNA, 20 nt, Human
gcuaggaccccuccaugugg

SEQ ID NO: 2406619 - RNA, 21 nt, Human
gcuaggcgagugccaggacuc

SEQ ID NO: 2406620 - RNA, 17 nt, Human
gcuagggaaacuucccg

SEQ ID NO: 2406621 - RNA, 22 nt, Human
gcuaggaccccuccaugugggc

SEQ ID NO: 2406622 - RNA, 17 nt, Human
gcuauuagccaggauca

SEQ ID NO: 2406623 - RNA, 13 nt, Human
gcuauuagccagg

SEQ ID NO: 2406624 - RNA, 15 nt, Human
gcuauuacugucugg

SEQ ID NO: 2406625 - RNA, 23 nt, Human
gcuauuacuaaggaguaaucugu

SEQ ID NO: 2406626 - RNA, 19 nt, Human
gcuauuagccaggaucaug

SEQ ID NO: 2406627 - RNA, 18 nt, Human
gcuauuagccaggaucau

SEQ ID NO: 2406628 - RNA, 17 nt, Human
gcuauuauuuucacugu

SEQ ID NO: 2406629 - RNA, 18 nt, Human
gcuauuauuuucacugua

SEQ ID NO: 2406630 - RNA, 21 nt, Human
gcuauuauuuucacuguagaa

SEQ ID NO: 2406631 - RNA, 18 nt, Human
gcuauucaguaauaacuc

SEQ ID NO: 2406632 - RNA, 18 nt, Human
gcuauuuccauuccagaa

SEQ ID NO: 2406633 - RNA, 21 nt, Human
gcuauuagccaggaucauggu

SEQ ID NO: 2406634 - RNA, 23 nt, Human
gcucaaaauuugaagaaugaaca

SEQ ID NO: 2406635 - RNA, 12 nt, Human
gcucaaaggcac

SEQ ID NO: 2406636 - RNA, 14 nt, Human
gcucaaaggcacag

SEQ ID NO: 2406637 - RNA, 16 nt, Human
gcucaaaggcacagug

SEQ ID NO: 2406638 - RNA, 22 nt, Human
gcucaaaucuauucagacaagc

SEQ ID NO: 2406639 - RNA, 20 nt, Human
gcucaaaucuauucagacaa

SEQ ID NO: 2406640 - RNA, 18 nt, Human
gcucaaaucuauucagac

SEQ ID NO: 2406641 - RNA, 17 nt, Human
gcucaaaucuauucaga

SEQ ID NO: 2406642 - RNA, 14 nt, Human
gcucaaaucuauuc

SEQ ID NO: 2406643 - RNA, 21 nt, Human
gcucaaaggcacagugaaggc

SEQ ID NO: 2406644 - RNA, 20 nt, Human
gcuaggugggccagccccuc

SEQ ID NO: 2406645 - RNA, 21 nt, Human
gcuaggugggccagccccucc

SEQ ID NO: 2406646 - RNA, 17 nt, Human
gcuaggugggccagccc

SEQ ID NO: 2406647 - RNA, 18 nt, Human
gcuaggugggccagcccc

SEQ ID NO: 2406648 - RNA, 19 nt, Human
gcuaggugggccagccccu

SEQ ID NO: 2406649 - RNA, 15 nt, Human
gcuaggguggcccuu

SEQ ID NO: 2406650 - RNA, 14 nt, Human
gcuaggugggccag

SEQ ID NO: 2406651 - RNA, 14 nt, Human
gcuaggggagcagg

SEQ ID NO: 2406652 - RNA, 18 nt, Human
gcuagggaaacuucccgu

SEQ ID NO: 2406653 - RNA, 14 nt, Human
gcuaggguggcccu

SEQ ID NO: 2406654 - RNA, 16 nt, Human
gcuaguugggcuuccu

SEQ ID NO: 2406655 - RNA, 14 nt, Human
gcuaguugggcuuc

SEQ ID NO: 2406656 - RNA, 19 nt, Human
gcuauguuuugacauuuuu

SEQ ID NO: 2406657 - RNA, 20 nt, Human
gcuaggcgagugccaggacu

SEQ ID NO: 2406658 - RNA, 20 nt, Human
gcucagggccuggcucaggu

SEQ ID NO: 2406659 - RNA, 18 nt, Human
gcucagaggcgcacugug

SEQ ID NO: 2406660 - RNA, 19 nt, Human
gcucagaggcgcacuguga

SEQ ID NO: 2406661 - RNA, 20 nt, Human
gcucagaggcgcacugugac

SEQ ID NO: 2406662 - RNA, 21 nt, Human
gcucagaggcgcacugugacc

SEQ ID NO: 2406663 - RNA, 16 nt, Human
gcucagagcaguguuu

SEQ ID NO: 2406664 - RNA, 22 nt, Human
gcucagaauccaagugaacacu

SEQ ID NO: 2406665 - RNA, 18 nt, Human
gcucagaauccaagugaa

SEQ ID NO: 2406666 - RNA, 15 nt, Human
gcucagaauccaagu

SEQ ID NO: 2406667 - RNA, 18 nt, Human
gcucagaaguuucuucuu

SEQ ID NO: 2406668 - RNA, 21 nt, Human
gcucagaaggcucuucugacu

SEQ ID NO: 2406669 - RNA, 23 nt, Human
gcucacugccaggccagccuccg

SEQ ID NO: 2406670 - RNA, 19 nt, Human
gcucaagcaggaaguucaa

SEQ ID NO: 2406671 - RNA, 21 nt, Human
gcucacugccaggccagccuc

SEQ ID NO: 2406672 - RNA, 23 nt, Human
gcucaagcagcgaccgcccccuc

SEQ ID NO: 2406673 - RNA, 22 nt, Human
gcucaagcagcgaccgcccccu

SEQ ID NO: 2406674 - RNA, 21 nt, Human
gcucaagcagcgaccgccccc

SEQ ID NO: 2406675 - RNA, 15 nt, Human
gcucaagcagcgacc

SEQ ID NO: 2406676 - RNA, 21 nt, Human
gcucaagaagacauggagacu

SEQ ID NO: 2406677 - RNA, 12 nt, Human
gcucaaccuaac

SEQ ID NO: 2406678 - RNA, 23 nt, Human
gcucaaaucuauucagacaagca

SEQ ID NO: 2406679 - RNA, 15 nt, Human
gcucacuucugggcu

SEQ ID NO: 2406680 - RNA, 23 nt, Human
gcucacuucugggcuucaucugg

SEQ ID NO: 2406681 - RNA, 18 nt, Human
gcucacuguggugucugu

SEQ ID NO: 2406682 - RNA, 19 nt, Human
gcucacuguggugucugug

SEQ ID NO: 2406683 - RNA, 21 nt, Human
gcucacugcuaagaauauuug

SEQ ID NO: 2406684 - RNA, 17 nt, Human
gcucacuguggugucug

SEQ ID NO: 2406685 - RNA, 22 nt, Human
gcucacugccaggccagccucc

SEQ ID NO: 2406686 - RNA, 22 nt, Human
gcucaggagcccugggaggcuc

SEQ ID NO: 2406687 - RNA, 23 nt, Human
gcucaggagcccugggaggcucu

SEQ ID NO: 2406688 - RNA, 18 nt, Human
gcucagagaugugcaccc

SEQ ID NO: 2406689 - RNA, 13 nt, Human
gcucaggaggcuu

SEQ ID NO: 2406690 - RNA, 15 nt, Human
gcucaggaggcuugg

SEQ ID NO: 2406691 - RNA, 19 nt, Human
gcucagggccuggcucagg

SEQ ID NO: 2406692 - RNA, 18 nt, Human
gcucagggccuggcucag

SEQ ID NO: 2406693 - RNA, 13 nt, Human
gcucaggaguuug

SEQ ID NO: 2406694 - RNA, 16 nt, Human
gcucaggaggcuugga

SEQ ID NO: 2406695 - RNA, 17 nt, Human
gcucaggaggcuuggaa

SEQ ID NO: 2406696 - RNA, 13 nt, Human
gcggauggccgga

SEQ ID NO: 2406697 - RNA, 20 nt, Human
gcggaucucuggagugagcu

SEQ ID NO: 2406698 - RNA, 17 nt, Human
gcggcagcagccaucau

SEQ ID NO: 2406699 - RNA, 12 nt, Human
gcggcacagccu

SEQ ID NO: 2406700 - RNA, 14 nt, Human
gcggcagcagccau

SEQ ID NO: 2406701 - RNA, 12 nt, Human
gcggcagagagg

SEQ ID NO: 2406702 - RNA, 22 nt, Human
gcggcugagagccccagcugac

SEQ ID NO: 2406703 - RNA, 21 nt, Human
gcggcugagagccccagcuga

SEQ ID NO: 2406704 - RNA, 18 nt, Human
gcggcugagagccccagc

SEQ ID NO: 2406705 - RNA, 16 nt, Human
gcggcugagagcccca

SEQ ID NO: 2406706 - RNA, 12 nt, Human
gcggcugagagc

SEQ ID NO: 2406707 - RNA, 15 nt, Human
gcggcuggacuugga

SEQ ID NO: 2406708 - RNA, 23 nt, Human
gcggcugagagccccagcugaca

SEQ ID NO: 2406709 - RNA, 22 nt, Human
gcggcugagucaugaucucccu

SEQ ID NO: 2406710 - RNA, 17 nt, Human
gcggcugcugugugccu

SEQ ID NO: 2406711 - RNA, 23 nt, Human
gcggcugagucaugaucucccug

SEQ ID NO: 2406712 - RNA, 21 nt, Human
gcggcuacucagcagcccucc

SEQ ID NO: 2406713 - RNA, 22 nt, Human
gcggcuacucagcagcccuccu

SEQ ID NO: 2406714 - RNA, 13 nt, Human
gcggcuacucagc

SEQ ID NO: 2406715 - RNA, 19 nt, Human
gcggcuacucagcagcccu

SEQ ID NO: 2406716 - RNA, 20 nt, Human
gcggcuacucagcagcccuc

SEQ ID NO: 2406717 - RNA, 16 nt, Human
gcggcaggggccugga

SEQ ID NO: 2406718 - RNA, 15 nt, Human
gcggcaggggccugg

SEQ ID NO: 2406719 - RNA, 19 nt, Human
gcggcaggggccuggagau

SEQ ID NO: 2406720 - RNA, 16 nt, Human
gcggcauuaaagccau

SEQ ID NO: 2406721 - RNA, 21 nt, Human
gcggccagccccggcccuggg

SEQ ID NO: 2406722 - RNA, 19 nt, Human
gcggccagccccggcccug

SEQ ID NO: 2406723 - RNA, 18 nt, Human
gcggccagccccggcccu

SEQ ID NO: 2406724 - RNA, 17 nt, Human
gcggccagccccggccc

SEQ ID NO: 2406725 - RNA, 13 nt, Human
gcggccagccccg

SEQ ID NO: 2406726 - RNA, 11 nt, Human
gcggccagccc

SEQ ID NO: 2406727 - RNA, 16 nt, Human
gcggccuuuggcuuca

SEQ ID NO: 2406728 - RNA, 20 nt, Human
gcggccagccccggcccugg

SEQ ID NO: 2406729 - RNA, 16 nt, Human
gcggcggagcuggccc

SEQ ID NO: 2406730 - RNA, 20 nt, Human
gcggcggagcuggccccgcc

SEQ ID NO: 2406731 - RNA, 18 nt, Human
gcggcggagcuggccccg

SEQ ID NO: 2406732 - RNA, 15 nt, Human
gcguggagcugccug

SEQ ID NO: 2406733 - RNA, 12 nt, Human
gcguggagcugc

SEQ ID NO: 2406734 - RNA, 18 nt, Human
gcguggacucugcacaug

SEQ ID NO: 2406735 - RNA, 17 nt, Human
gcguggacucugcacau

SEQ ID NO: 2406736 - RNA, 15 nt, Human
gcguguuugcacguu

SEQ ID NO: 2406737 - RNA, 14 nt, Human
gcguguuugcacgu

SEQ ID NO: 2406738 - RNA, 22 nt, Human
gcguuaaaggcucgauuuugua

SEQ ID NO: 2406739 - RNA, 18 nt, Human
gcguggagggcguggagg

SEQ ID NO: 2406740 - RNA, 16 nt, Human
gcguggagcugccuga

SEQ ID NO: 2406741 - RNA, 18 nt, Human
gcguuccaugaugcuggg

SEQ ID NO: 2406742 - RNA, 17 nt, Human
gcguuccaugaugcugg

SEQ ID NO: 2406743 - RNA, 22 nt, Human
gcguuauuggucggcagccuuc

SEQ ID NO: 2406744 - RNA, 18 nt, Human
gcguuagaaugaggagga

SEQ ID NO: 2406745 - RNA, 16 nt, Human
gcguuacuaauuggcc

SEQ ID NO: 2406746 - RNA, 22 nt, Human
gcguuagaaugaggaggaagga

SEQ ID NO: 2406747 - RNA, 18 nt, Human
gcuaaggcguggagcugc

SEQ ID NO: 2406748 - RNA, 17 nt, Human
gcuaaggcguggagcug

SEQ ID NO: 2406749 - RNA, 16 nt, Human
gcuaaggcguggagcu

SEQ ID NO: 2406750 - RNA, 16 nt, Human
gcggcuggacuuggag

SEQ ID NO: 2406751 - RNA, 15 nt, Human
gcggcuggcagccca

SEQ ID NO: 2406752 - RNA, 22 nt, Human
gcggcugugcagccuguccugg

SEQ ID NO: 2406753 - RNA, 17 nt, Human
gcgggaaagccagugac

SEQ ID NO: 2406754 - RNA, 23 nt, Human
gcgggaaaagcagcccuuggcca

SEQ ID NO: 2406755 - RNA, 14 nt, Human
gcgggaaaagcagc

SEQ ID NO: 2406756 - RNA, 13 nt, Human
gcgggaaggaggg

SEQ ID NO: 2406757 - RNA, 14 nt, Human
gcgggaaggagggu

SEQ ID NO: 2406758 - RNA, 21 nt, Human
gcgggagccaugcgcccccuc

SEQ ID NO: 2406759 - RNA, 21 nt, Human
gcgggacgucccugcccaugu

SEQ ID NO: 2406760 - RNA, 23 nt, Human
gcgggacgagacccuacaggaga

SEQ ID NO: 2406761 - RNA, 15 nt, Human
gcgggaccuguggcu

SEQ ID NO: 2406762 - RNA, 14 nt, Human
gcgggaccuguggc

SEQ ID NO: 2406763 - RNA, 19 nt, Human
gcgggaccgguacagaaag

SEQ ID NO: 2406764 - RNA, 20 nt, Human
gcgggaccgguacagaaagg

SEQ ID NO: 2406765 - RNA, 14 nt, Human
gcgggacccaggca

SEQ ID NO: 2406766 - RNA, 19 nt, Human
gcgggaauggcagcugcca

SEQ ID NO: 2406767 - RNA, 14 nt, Human
gcguggacaggugu

SEQ ID NO: 2406768 - RNA, 19 nt, Human
gcgugcuccagccuggcuc

SEQ ID NO: 2406769 - RNA, 18 nt, Human
gcgugcuccagccuggcu

SEQ ID NO: 2406770 - RNA, 21 nt, Human
gcgugcucaguucagaaucac

SEQ ID NO: 2406771 - RNA, 14 nt, Human
gcguggacucugca

SEQ ID NO: 2406772 - RNA, 13 nt, Human
gcguggacucugc

SEQ ID NO: 2406773 - RNA, 21 nt, Human
gcgggagcgguggcccugucc

SEQ ID NO: 2406774 - RNA, 18 nt, Human
gcgggagcgguggcccug

SEQ ID NO: 2406775 - RNA, 23 nt, Human
gccuugaccauucuccaccugcc

SEQ ID NO: 2406776 - RNA, 22 nt, Human
gccuugaauauccccucccagu

SEQ ID NO: 2406777 - RNA, 21 nt, Human
gccuugaauauccccucccag

SEQ ID NO: 2406778 - RNA, 17 nt, Human
gcgauucuucugcuuca

SEQ ID NO: 2406779 - RNA, 23 nt, Human
gccuugcagcacucacacaggac

SEQ ID NO: 2406780 - RNA, 21 nt, Human
gccuugcagcacucacacagg

SEQ ID NO: 2406781 - RNA, 12 nt, Human
gccuugccagag

SEQ ID NO: 2406782 - RNA, 22 nt, Human
gcgauucuucugcuucagccuc

SEQ ID NO: 2406783 - RNA, 22 nt, Human
gccuugaccauucuccaccugc

SEQ ID NO: 2406784 - RNA, 21 nt, Human
gccuugaccauucuccaccug

SEQ ID NO: 2406785 - RNA, 16 nt, Human
gccuugaccauucucc

SEQ ID NO: 2406786 - RNA, 23 nt, Human
gccuugaacuuugaccucugcag

SEQ ID NO: 2406787 - RNA, 19 nt, Human
gccuugaaccacuucccuc

SEQ ID NO: 2406788 - RNA, 14 nt, Human
gccuugaagccacu

SEQ ID NO: 2406789 - RNA, 17 nt, Human
gccuugaauauccccuc

SEQ ID NO: 2406790 - RNA, 22 nt, Human
gccuucuuugcuugccucucug

SEQ ID NO: 2406791 - RNA, 15 nt, Human
gccuugaagccacug

SEQ ID NO: 2406792 - RNA, 23 nt, Human
gcgauucuucugcuucagccucc

SEQ ID NO: 2406793 - RNA, 12 nt, Human
gcgcaagccugu

SEQ ID NO: 2406794 - RNA, 13 nt, Human
gcgcaagccugua

SEQ ID NO: 2406795 - RNA, 20 nt, Human
gcgcagcauauucaggaagc

SEQ ID NO: 2406796 - RNA, 21 nt, Human
gcgcagcauauucaggaagcu

SEQ ID NO: 2406797 - RNA, 14 nt, Human
gcgcaggcuggccc

SEQ ID NO: 2406798 - RNA, 21 nt, Human
gcgcaagccuguaaucccagc

SEQ ID NO: 2406799 - RNA, 22 nt, Human
gcgcaagccuguaaucccagcu

SEQ ID NO: 2406800 - RNA, 15 nt, Human
gcgcaggcuggcccu

SEQ ID NO: 2406801 - RNA, 16 nt, Human
gcgcaggcuggcccug

SEQ ID NO: 2406802 - RNA, 22 nt, Human
gccuggcucccacaggcagcuu

SEQ ID NO: 2406803 - RNA, 21 nt, Human
gccuggcucccacaggcagcu

SEQ ID NO: 2406804 - RNA, 23 nt, Human
gccuggcucccacaggcagcuuu

SEQ ID NO: 2406805 - RNA, 20 nt, Human
gccuggcucccacaggcagc

SEQ ID NO: 2406806 - RNA, 19 nt, Human
gccuggcucccacaggcag

SEQ ID NO: 2406807 - RNA, 23 nt, Human
gccuggcuccaaacccucgaggc

SEQ ID NO: 2406808 - RNA, 21 nt, Human
gccuggcucuugugcuggaug

SEQ ID NO: 2406809 - RNA, 19 nt, Human
gccuggcucuugugcugga

SEQ ID NO: 2406810 - RNA, 10 nt, Human
gccuggcucu

SEQ ID NO: 2406811 - RNA, 16 nt, Human
gccuggcuccguccag

SEQ ID NO: 2406812 - RNA, 22 nt, Human
gccucuguccccuucucucauc

SEQ ID NO: 2406813 - RNA, 21 nt, Human
gccucuguccccuucucucau

SEQ ID NO: 2406814 - RNA, 20 nt, Human
gccucuguccccuucucuca

SEQ ID NO: 2406815 - RNA, 19 nt, Human
gccucuguccccuucucuc

SEQ ID NO: 2406816 - RNA, 18 nt, Human
gccucuguccccuucucu

SEQ ID NO: 2406817 - RNA, 15 nt, Human
gccucuguccccuuc

SEQ ID NO: 2406818 - RNA, 23 nt, Human
gccucugguuuggggcgaggcag

SEQ ID NO: 2406819 - RNA, 20 nt, Human
gccucugucacugcaggcac

SEQ ID NO: 2406820 - RNA, 17 nt, Human
gccucuggucugggugc

SEQ ID NO: 2406821 - RNA, 13 nt, Human
gccucugggucag

SEQ ID NO: 2406822 - RNA, 22 nt, Human
gccucugggucagugguccaca

SEQ ID NO: 2406823 - RNA, 12 nt, Human
gccucuggguca

SEQ ID NO: 2406824 - RNA, 20 nt, Human
gccuccugcccaguccccca

SEQ ID NO: 2406825 - RNA, 23 nt, Human
gccugggaucccucauccucaua

SEQ ID NO: 2406826 - RNA, 16 nt, Human
gccuggcuucuccuuu

SEQ ID NO: 2406827 - RNA, 13 nt, Human
gccuggcuucucc

SEQ ID NO: 2406828 - RNA, 11 nt, Human
gccugggcaga

SEQ ID NO: 2406829 - RNA, 16 nt, Human
gccugggcaacagagc

SEQ ID NO: 2406830 - RNA, 19 nt, Human
gccugggcaacagagcaag

SEQ ID NO: 2406831 - RNA, 20 nt, Human
gccugggcaacagagcaaga

SEQ ID NO: 2406832 - RNA, 20 nt, Human
gccugggcaacacagcgaga

SEQ ID NO: 2406833 - RNA, 12 nt, Human
gccugggcaaga

SEQ ID NO: 2406834 - RNA, 14 nt, Human
gccugugcugcccg

SEQ ID NO: 2406835 - RNA, 15 nt, Human
gccugugcugcccgu

SEQ ID NO: 2406836 - RNA, 19 nt, Human
gccugugccucugggacug

SEQ ID NO: 2406837 - RNA, 19 nt, Human
gccuguggaaucuggagug

SEQ ID NO: 2406838 - RNA, 22 nt, Human
gccuguggcaucuuugccuugg

SEQ ID NO: 2406839 - RNA, 24 nt, Human
gccuguggaaucuggagugagggg

SEQ ID NO: 2406840 - RNA, 16 nt, Human
gccugugcugcccguc

SEQ ID NO: 2406841 - RNA, 23 nt, Human
gccugugcugcccgucuucagcc

SEQ ID NO: 2406842 - RNA, 17 nt, Human
gccuguucagcuccagc

SEQ ID NO: 2406843 - RNA, 16 nt, Human
gccuguucagcuccag

SEQ ID NO: 2406844 - RNA, 16 nt, Human
gccuguggccuguguc

SEQ ID NO: 2406845 - RNA, 14 nt, Human
gccuguggccugug

SEQ ID NO: 2406846 - RNA, 14 nt, Human
gccuguucagcucc

SEQ ID NO: 2406847 - RNA, 15 nt, Human
gccuguucagcucca

SEQ ID NO: 2406848 - RNA, 17 nt, Human
gccuucucaugauccaa

SEQ ID NO: 2406849 - RNA, 15 nt, Human
gccuucuaaaggugu

SEQ ID NO: 2406850 - RNA, 19 nt, Human
gccuucgucuuucccaugg

SEQ ID NO: 2406851 - RNA, 17 nt, Human
gccuguggccugugucc

SEQ ID NO: 2406852 - RNA, 16 nt, Human
gccuucucugaaggac

SEQ ID NO: 2406853 - RNA, 15 nt, Human
gccuucucugaagga

SEQ ID NO: 2406854 - RNA, 19 nt, Human
gccuucuuugcuugccucu

SEQ ID NO: 2406855 - RNA, 18 nt, Human
gccuucuuugcuugccuc

SEQ ID NO: 2406856 - RNA, 22 nt, Human
gccuucuuuugauuauguuuuu

SEQ ID NO: 2406857 - RNA, 18 nt, Human
gccuugaaccacuucccu

SEQ ID NO: 2406858 - RNA, 14 nt, Human
gccuugaacuuuga

SEQ ID NO: 2406859 - RNA, 15 nt, Human
gccuucuuuugauua

SEQ ID NO: 2406860 - RNA, 15 nt, Human
gccuucuuugcuugc

SEQ ID NO: 2406861 - RNA, 21 nt, Human
gccuucuucuuuuugcuguug

SEQ ID NO: 2406862 - RNA, 20 nt, Human
gccuucuucuuuuugcuguu

SEQ ID NO: 2406863 - RNA, 18 nt, Human
gccuucuucuuuuugcug

SEQ ID NO: 2406864 - RNA, 17 nt, Human
gccuucuucuuuuugcu

SEQ ID NO: 2406865 - RNA, 11 nt, Human
gccuucuucuu

SEQ ID NO: 2406866 - RNA, 22 nt, Human
gccuucuuccaucccaggacac

SEQ ID NO: 2406867 - RNA, 20 nt, Human
gccuucuuccaucccaggac

SEQ ID NO: 2406868 - RNA, 22 nt, Human
gccuucuucggggaacuccugg

SEQ ID NO: 2406869 - RNA, 23 nt, Human
gccuucuucggggaacuccugga

SEQ ID NO: 2406870 - RNA, 19 nt, Human
gccuucuggauucuuggcc

SEQ ID NO: 2406871 - RNA, 19 nt, Human
gccuucugaggacauucca

SEQ ID NO: 2406872 - RNA, 16 nt, Human
gccuucucuguucauu

SEQ ID NO: 2406873 - RNA, 14 nt, Human
gccuucuccucccc

SEQ ID NO: 2406874 - RNA, 13 nt, Human
gccuucuccuccc

SEQ ID NO: 2406875 - RNA, 23 nt, Human
gccuucucccccccggggcuggg

SEQ ID NO: 2406876 - RNA, 17 nt, Human
gccuucucccccccggg

SEQ ID NO: 2406877 - RNA, 14 nt, Human
gccuucucuguuca

SEQ ID NO: 2406878 - RNA, 16 nt, Human
gccuucuguccuggug

SEQ ID NO: 2406879 - RNA, 21 nt, Human
gccuucuggauucuuggcccg

SEQ ID NO: 2406880 - RNA, 18 nt, Human
gccuucuuauucucacuc

SEQ ID NO: 2406881 - RNA, 18 nt, Human
gccuucuguccugguguc

SEQ ID NO: 2406882 - RNA, 19 nt, Human
gccuucuuauucucacucc

SEQ ID NO: 2406883 - RNA, 17 nt, Human
gccuucuuccaucccag

SEQ ID NO: 2406884 - RNA, 14 nt, Human
gccuucuuccaucc

SEQ ID NO: 2406885 - RNA, 17 nt, Human
gccuucuucacccagcu

SEQ ID NO: 2406886 - RNA, 20 nt, Human
gccuucuuauucucacucca

SEQ ID NO: 2406887 - RNA, 21 nt, Human
gccuucuuauucucacuccac

SEQ ID NO: 2406888 - RNA, 15 nt, Human
gccuucuucacccag

SEQ ID NO: 2406889 - RNA, 23 nt, Human
gccuucuuauucucacuccacca

SEQ ID NO: 2406890 - RNA, 17 nt, Human
gccccuggcagccccug

SEQ ID NO: 2406891 - RNA, 16 nt, Human
gccccuggcagccccu

SEQ ID NO: 2406892 - RNA, 13 nt, Human
gcccgucucagug

SEQ ID NO: 2406893 - RNA, 18 nt, Human
gcccguccugccuguggc

SEQ ID NO: 2406894 - RNA, 17 nt, Human
gcccguccugccugugg

SEQ ID NO: 2406895 - RNA, 16 nt, Human
gcccguccugccugug

SEQ ID NO: 2406896 - RNA, 15 nt, Human
gcccguccugccugu

SEQ ID NO: 2406897 - RNA, 13 nt, Human
gcccgugacagac

SEQ ID NO: 2406898 - RNA, 17 nt, Human
gcccgucucucucccau

SEQ ID NO: 2406899 - RNA, 17 nt, Human
gcccgucuucagccuag

SEQ ID NO: 2406900 - RNA, 18 nt, Human
gcccgucuucagccuagc

SEQ ID NO: 2406901 - RNA, 19 nt, Human
gcccgucucucucccaugg

SEQ ID NO: 2406902 - RNA, 13 nt, Human
gcccgucucucuc

SEQ ID NO: 2406903 - RNA, 14 nt, Human
gcccguccugccug

SEQ ID NO: 2406904 - RNA, 14 nt, Human
gcccgucucagugu

SEQ ID NO: 2406905 - RNA, 16 nt, Human
gcccgucucucuccca

SEQ ID NO: 2406906 - RNA, 15 nt, Human
gcccgucucucuccc

SEQ ID NO: 2406907 - RNA, 14 nt, Human
gcccgucuucagcc

SEQ ID NO: 2406908 - RNA, 15 nt, Human
gcccgucuucagccu

SEQ ID NO: 2406909 - RNA, 16 nt, Human
gcccgucuucagccua

SEQ ID NO: 2406910 - RNA, 21 nt, Human
gcccugccacucacuaggccc

SEQ ID NO: 2406911 - RNA, 20 nt, Human
gcccugccacucacuaggcc

SEQ ID NO: 2406912 - RNA, 19 nt, Human
gcccugccacucacuaggc

SEQ ID NO: 2406913 - RNA, 13 nt, Human
gcccugccacuca

SEQ ID NO: 2406914 - RNA, 12 nt, Human
gcccugccacuc

SEQ ID NO: 2406915 - RNA, 11 nt, Human
gcccugccacu

SEQ ID NO: 2406916 - RNA, 22 nt, Human
gcccuuaccugccaggaagcca

SEQ ID NO: 2406917 - RNA, 21 nt, Human
gcccuuaccugccaggaagcc

SEQ ID NO: 2406918 - RNA, 17 nt, Human
gcccugugggcccccaa

SEQ ID NO: 2406919 - RNA, 16 nt, Human
gcccugugggccccca

SEQ ID NO: 2406920 - RNA, 13 nt, Human
gcccuuaccuucc

SEQ ID NO: 2406921 - RNA, 17 nt, Human
gcccuuauuuucaagaa

SEQ ID NO: 2406922 - RNA, 18 nt, Human
gcccuuauuuucaagaaa

SEQ ID NO: 2406923 - RNA, 20 nt, Human
gcccuuauuuucaagaaacu

SEQ ID NO: 2406924 - RNA, 19 nt, Human
gcccuuaucugugcucagg

SEQ ID NO: 2406925 - RNA, 20 nt, Human
gcccuuaucugugcucagga

SEQ ID NO: 2406926 - RNA, 23 nt, Human
gcccuuaccugccaggaagccag

SEQ ID NO: 2406927 - RNA, 14 nt, Human
gcccuuaccuuccc

SEQ ID NO: 2406928 - RNA, 22 nt, Human
gcccuguggaugagcccucaga

SEQ ID NO: 2406929 - RNA, 23 nt, Human
gcccugccugagggccccucugc

SEQ ID NO: 2406930 - RNA, 22 nt, Human
gcccugccugagggccccucug

SEQ ID NO: 2406931 - RNA, 20 nt, Human
gcccugccugagggccccuc

SEQ ID NO: 2406932 - RNA, 19 nt, Human
gcccugccugagggccccu

SEQ ID NO: 2406933 - RNA, 19 nt, Human
gcccugccaucuucccagc

SEQ ID NO: 2406934 - RNA, 18 nt, Human
gcccugccaucuucccag

SEQ ID NO: 2406935 - RNA, 15 nt, Human
gcccugcccaccugg

SEQ ID NO: 2406936 - RNA, 14 nt, Human
gcccugcccaccug

SEQ ID NO: 2406937 - RNA, 16 nt, Human
gcccugcuccucccug

SEQ ID NO: 2406938 - RNA, 15 nt, Human
gcccugcuccucccu

SEQ ID NO: 2406939 - RNA, 14 nt, Human
gcccugcuccuccc

SEQ ID NO: 2406940 - RNA, 18 nt, Human
gcccugcgguagauggga

SEQ ID NO: 2406941 - RNA, 15 nt, Human
gcccugcggccccgu

SEQ ID NO: 2406942 - RNA, 20 nt, Human
gcccugcgggucacaggagg

SEQ ID NO: 2406943 - RNA, 21 nt, Human
gcccugcuccucccuggcugc

SEQ ID NO: 2406944 - RNA, 19 nt, Human
gcccugcuccucccuggcu

SEQ ID NO: 2406945 - RNA, 18 nt, Human
gcccugcuccucccuggc

SEQ ID NO: 2406946 - RNA, 17 nt, Human
gcccugcuccucccugg

SEQ ID NO: 2406947 - RNA, 23 nt, Human
gcccugcuccucccuggcugccc

SEQ ID NO: 2406948 - RNA, 22 nt, Human
gcccugcuccucccuggcugcc

SEQ ID NO: 2406949 - RNA, 16 nt, Human
gcccuguggaagggac

SEQ ID NO: 2406950 - RNA, 21 nt, Human
gcccuguggaugagcccucag

SEQ ID NO: 2406951 - RNA, 17 nt, Human
gcccuguggaagggacu

SEQ ID NO: 2406952 - RNA, 23 nt, Human
gcccuguggaagggacuaggagc

SEQ ID NO: 2406953 - RNA, 16 nt, Human
gccggagucagugcca

SEQ ID NO: 2406954 - RNA, 15 nt, Human
gccggagucagugcc

SEQ ID NO: 2406955 - RNA, 19 nt, Human
gccggaguccacucccagu

SEQ ID NO: 2406956 - RNA, 16 nt, Human
gccggaguccacuccc

SEQ ID NO: 2406957 - RNA, 18 nt, Human
gccggcaaccccaguucu

SEQ ID NO: 2406958 - RNA, 11 nt, Human
gccggcaaccc

SEQ ID NO: 2406959 - RNA, 21 nt, Human
gccggcaaaacuuuggcacug

SEQ ID NO: 2406960 - RNA, 16 nt, Human
gccggaugugcuuuuc

SEQ ID NO: 2406961 - RNA, 15 nt, Human
gccggaugugcuuuu

SEQ ID NO: 2406962 - RNA, 21 nt, Human
gccggaguccacucccagugc

SEQ ID NO: 2406963 - RNA, 15 nt, Human
gccgcuccaggggug

SEQ ID NO: 2406964 - RNA, 22 nt, Human
gccgcuccugucugccagccag

SEQ ID NO: 2406965 - RNA, 20 nt, Human
gccgcuccugucugccagcc

SEQ ID NO: 2406966 - RNA, 21 nt, Human
gccgcuccugucugccagcca

SEQ ID NO: 2406967 - RNA, 12 nt, Human
gccgcuccaggg

SEQ ID NO: 2406968 - RNA, 15 nt, Human
gccgcuccugucugc

SEQ ID NO: 2406969 - RNA, 19 nt, Human
gccgcuccugucugccagc

SEQ ID NO: 2406970 - RNA, 23 nt, Human
gccggcaaccccaguucugcucc

SEQ ID NO: 2406971 - RNA, 21 nt, Human
gccggcaaccccaguucugcu

SEQ ID NO: 2406972 - RNA, 20 nt, Human
gccggcaaccccaguucugc

SEQ ID NO: 2406973 - RNA, 19 nt, Human
gccggcaaccccaguucug

SEQ ID NO: 2406974 - RNA, 13 nt, Human
gccggcacagggu

SEQ ID NO: 2406975 - RNA, 21 nt, Human
gccggcacagggucugcucuu

SEQ ID NO: 2406976 - RNA, 22 nt, Human
gccggcacccacaagugccacu

SEQ ID NO: 2406977 - RNA, 16 nt, Human
gccuacaggagugagc

SEQ ID NO: 2406978 - RNA, 14 nt, Human
gccuaaucccuggg

SEQ ID NO: 2406979 - RNA, 16 nt, Human
gccuaaucccugggca

SEQ ID NO: 2406980 - RNA, 23 nt, Human
gccuaaucccugggcauugcuuu

SEQ ID NO: 2406981 - RNA, 21 nt, Human
gcccuuccaugucgccucugc

SEQ ID NO: 2406982 - RNA, 12 nt, Human
gcccuuccaugu

SEQ ID NO: 2406983 - RNA, 20 nt, Human
gcccuucacugccuuugcuc

SEQ ID NO: 2406984 - RNA, 19 nt, Human
gcccuucacugccuuugcu

SEQ ID NO: 2406985 - RNA, 21 nt, Human
gcccuucaccccaguggccac

SEQ ID NO: 2406986 - RNA, 15 nt, Human
gcccuucaccccagu

SEQ ID NO: 2406987 - RNA, 16 nt, Human
gcccuucacaguguuu

SEQ ID NO: 2406988 - RNA, 18 nt, Human
gcccuucccugucccucu

SEQ ID NO: 2406989 - RNA, 16 nt, Human
gcccuucccugucccu

SEQ ID NO: 2406990 - RNA, 15 nt, Human
gcccuucccuguccc

SEQ ID NO: 2406991 - RNA, 12 nt, Human
gcccuuccucuc

SEQ ID NO: 2406992 - RNA, 13 nt, Human
gcccuucccuguc

SEQ ID NO: 2406993 - RNA, 12 nt, Human
gcccuucccugu

SEQ ID NO: 2406994 - RNA, 16 nt, Human
gcccuucccacuggag

SEQ ID NO: 2406995 - RNA, 12 nt, Human
gcccuucccacu

SEQ ID NO: 2406996 - RNA, 22 nt, Human
gcccuuccaugucgccucugca

SEQ ID NO: 2406997 - RNA, 17 nt, Human
gccgcuagaggccugag

SEQ ID NO: 2406998 - RNA, 16 nt, Human
gccgcuagaggccuga

SEQ ID NO: 2406999 - RNA, 15 nt, Human
gccgcuagaggccug

SEQ ID NO: 2407000 - RNA, 13 nt, Human
gccgcuagaggcc

SEQ ID NO: 2407001 - RNA, 23 nt, Human
gccgcuagaugggcauggggugg

SEQ ID NO: 2407002 - RNA, 18 nt, Human
gccgcuagaugggcaugg

SEQ ID NO: 2407003 - RNA, 19 nt, Human
gccgcuagaggccugagga

SEQ ID NO: 2407004 - RNA, 18 nt, Human
gccgcuagaggccugagg

SEQ ID NO: 2407005 - RNA, 15 nt, Human
gcccuuccucuccac

SEQ ID NO: 2407006 - RNA, 14 nt, Human
gcccuuccucucca

SEQ ID NO: 2407007 - RNA, 23 nt, Human
gcccuuccucuccacccucccag

SEQ ID NO: 2407008 - RNA, 22 nt, Human
gcccuuccucuccacccuccca

SEQ ID NO: 2407009 - RNA, 13 nt, Human
gcccuuccucucc

SEQ ID NO: 2407010 - RNA, 17 nt, Human
gcccuucccugucccuc

SEQ ID NO: 2407011 - RNA, 17 nt, Human
gccgcgucgcccuccca

SEQ ID NO: 2407012 - RNA, 17 nt, Human
gccuacaggagugagca

SEQ ID NO: 2407013 - RNA, 23 nt, Human
gccuacagcuuugaucccugaca

SEQ ID NO: 2407014 - RNA, 22 nt, Human
gccuacagcuuugaucccugac

SEQ ID NO: 2407015 - RNA, 22 nt, Human
gccuaaucccugggcauugcuu

SEQ ID NO: 2407016 - RNA, 17 nt, Human
gccuagauccacacaca

SEQ ID NO: 2407017 - RNA, 20 nt, Human
gccuagauccacacacagag

SEQ ID NO: 2407018 - RNA, 23 nt, Human
gccuagauccacacacagaggaa

SEQ ID NO: 2407019 - RNA, 12 nt, Human
gccuagcauacg

SEQ ID NO: 2407020 - RNA, 19 nt, Human
gccuagcauacguacacau

SEQ ID NO: 2407021 - RNA, 22 nt, Human
gccucauguccacugguucuuc

SEQ ID NO: 2407022 - RNA, 14 nt, Human
gccucauguggcug

SEQ ID NO: 2407023 - RNA, 13 nt, Human
gccucauguggcu

SEQ ID NO: 2407024 - RNA, 22 nt, Human
gccucauccgaggcagggucag

SEQ ID NO: 2407025 - RNA, 19 nt, Human
gccucaugcuaagacucag

SEQ ID NO: 2407026 - RNA, 22 nt, Human
gccuccuuugugaggaagccgc

SEQ ID NO: 2407027 - RNA, 13 nt, Human
gccucgaacuggc

SEQ ID NO: 2407028 - RNA, 16 nt, Human
gccucgaacuggcugc

SEQ ID NO: 2407029 - RNA, 17 nt, Human
gccuccugcccaguccc

SEQ ID NO: 2407030 - RNA, 15 nt, Human
gccuccugcccaguc

SEQ ID NO: 2407031 - RNA, 16 nt, Human
gccucgaaacacagaa

SEQ ID NO: 2407032 - RNA, 14 nt, Human
gccucugggacugg

SEQ ID NO: 2407033 - RNA, 12 nt, Human
gccuccugccca

SEQ ID NO: 2407034 - RNA, 23 nt, Human
gccuccugaguagcugggacuac

SEQ ID NO: 2407035 - RNA, 21 nt, Human
gccuccugaccugaggcuccu

SEQ ID NO: 2407036 - RNA, 17 nt, Human
gccuccugaccugaggc

SEQ ID NO: 2407037 - RNA, 16 nt, Human
gccuccugaccugagg

SEQ ID NO: 2407038 - RNA, 19 nt, Human
gccuccucugucugcccuu

SEQ ID NO: 2407039 - RNA, 17 nt, Human
gccuccucugucugccc

SEQ ID NO: 2407040 - RNA, 20 nt, Human
gccuccucuggacggcaggc

SEQ ID NO: 2407041 - RNA, 19 nt, Human
gccuccugaguagcuggga

SEQ ID NO: 2407042 - RNA, 23 nt, Human
gccuccucucucaguuuuuauau

SEQ ID NO: 2407043 - RNA, 17 nt, Human
gccuccucuggacggca

SEQ ID NO: 2407044 - RNA, 21 nt, Human
gccuccucugucugcccuuca

SEQ ID NO: 2407045 - RNA, 13 nt, Human
gccuccucugucc

SEQ ID NO: 2407046 - RNA, 16 nt, Human
gccuccucuguccagg

SEQ ID NO: 2407047 - RNA, 18 nt, Human
gccuccacucccacuucc

SEQ ID NO: 2407048 - RNA, 16 nt, Human
gccuccacucccacuu

SEQ ID NO: 2407049 - RNA, 15 nt, Human
gccuccacucccacu

SEQ ID NO: 2407050 - RNA, 14 nt, Human
gccuccacucccac

SEQ ID NO: 2407051 - RNA, 22 nt, Human
gccuccacucccacuucccuga

SEQ ID NO: 2407052 - RNA, 21 nt, Human
gccuccacucccacuucccug

SEQ ID NO: 2407053 - RNA, 12 nt, Human
gccuccagaacu

SEQ ID NO: 2407054 - RNA, 13 nt, Human
gccuccauccuga

SEQ ID NO: 2407055 - RNA, 14 nt, Human
gccuccauccugag

SEQ ID NO: 2407056 - RNA, 15 nt, Human
gccuccauccugagg

SEQ ID NO: 2407057 - RNA, 16 nt, Human
gccuccaccaccacug

SEQ ID NO: 2407058 - RNA, 15 nt, Human
gccuccaccaccacu

SEQ ID NO: 2407059 - RNA, 14 nt, Human
gccuccaccaccac

SEQ ID NO: 2407060 - RNA, 12 nt, Human
gccuccaccacc

SEQ ID NO: 2407061 - RNA, 16 nt, Human
gccucauguggcugga

SEQ ID NO: 2407062 - RNA, 15 nt, Human
gccucauguggcugg

SEQ ID NO: 2407063 - RNA, 17 nt, Human
gccucauguggcuggaa

SEQ ID NO: 2407064 - RNA, 22 nt, Human
gccucaucuauaacaugcauuu

SEQ ID NO: 2407065 - RNA, 23 nt, Human
gccuccaccaccacuggccacca

SEQ ID NO: 2407066 - RNA, 21 nt, Human
gccuccaccaccacuggccac

SEQ ID NO: 2407067 - RNA, 20 nt, Human
gccuccaccaccacuggcca

SEQ ID NO: 2407068 - RNA, 18 nt, Human
gccuccaccaccacuggc

SEQ ID NO: 2407069 - RNA, 15 nt, Human
gccuccacccucuga

SEQ ID NO: 2407070 - RNA, 14 nt, Human
gccuccacccucug

SEQ ID NO: 2407071 - RNA, 12 nt, Human
gccuccacccuc

SEQ ID NO: 2407072 - RNA, 18 nt, Human
gccuccaccccccagaac

SEQ ID NO: 2407073 - RNA, 19 nt, Human
gccuccacccucugagcuu

SEQ ID NO: 2407074 - RNA, 18 nt, Human
gccuccacccucugagcu

SEQ ID NO: 2407075 - RNA, 17 nt, Human
gccuccacccucugagc

SEQ ID NO: 2407076 - RNA, 16 nt, Human
gccuccacccucugag

SEQ ID NO: 2407077 - RNA, 22 nt, Human
gccuccacccucugagcuuugc

SEQ ID NO: 2407078 - RNA, 12 nt, Human
gccuccaccgcu

SEQ ID NO: 2407079 - RNA, 12 nt, Human
gccuccacuccc

SEQ ID NO: 2407080 - RNA, 18 nt, Human
gccuccaccgcugccuaa

SEQ ID NO: 2407081 - RNA, 20 nt, Human
gccccaaaacucuccucugc

SEQ ID NO: 2407082 - RNA, 11 nt, Human
gccccaaaagg

SEQ ID NO: 2407083 - RNA, 21 nt, Human
gccccaaaacucuccucugcu

SEQ ID NO: 2407084 - RNA, 17 nt, Human
gccccaaacaaauaugc

SEQ ID NO: 2407085 - RNA, 19 nt, Human
gccccaaacaaauaugcaa

SEQ ID NO: 2407086 - RNA, 18 nt, Human
gccccaaacaaauaugca

SEQ ID NO: 2407087 - RNA, 20 nt, Human
gccccaaaggaaaaagcaca

SEQ ID NO: 2407088 - RNA, 14 nt, Human
gccccaaaggaaaa

SEQ ID NO: 2407089 - RNA, 20 nt, Human
gccccaaacgggcugcccug

SEQ ID NO: 2407090 - RNA, 13 nt, Human
gccccaaccugcu

SEQ ID NO: 2407091 - RNA, 19 nt, Human
gccccaacccccagcaccc

SEQ ID NO: 2407092 - RNA, 17 nt, Human
gccccaacccccagcac

SEQ ID NO: 2407093 - RNA, 16 nt, Human
gccccaacccccagca

SEQ ID NO: 2407094 - RNA, 14 nt, Human
gccccaacccccag

SEQ ID NO: 2407095 - RNA, 15 nt, Human
gccccaaccugcuga

SEQ ID NO: 2407096 - RNA, 14 nt, Human
gccccaaccugcug

SEQ ID NO: 2407097 - RNA, 14 nt, Human
gccccaacuccugg

SEQ ID NO: 2407098 - RNA, 15 nt, Human
gccccaacuccugga

SEQ ID NO: 2407099 - RNA, 16 nt, Human
gccccaacuccuggaa

SEQ ID NO: 2407100 - RNA, 17 nt, Human
gccccaacuccuggaag

SEQ ID NO: 2407101 - RNA, 13 nt, Human
gccccacagccca

SEQ ID NO: 2407102 - RNA, 23 nt, Human
gccccacagcccacguccuguca

SEQ ID NO: 2407103 - RNA, 17 nt, Human
gccccacagcccacguc

SEQ ID NO: 2407104 - RNA, 14 nt, Human
gccccacagcccac

SEQ ID NO: 2407105 - RNA, 18 nt, Human
gccccacagcccacgucc

SEQ ID NO: 2407106 - RNA, 11 nt, Human
gccccaccacc

SEQ ID NO: 2407107 - RNA, 13 nt, Human
gccccaccaccua

SEQ ID NO: 2407108 - RNA, 14 nt, Human
gccccaccaccuag

SEQ ID NO: 2407109 - RNA, 15 nt, Human
gccccaccaccuagg

SEQ ID NO: 2407110 - RNA, 18 nt, Human
gccccaccaccuaggcca

SEQ ID NO: 2407111 - RNA, 20 nt, Human
gccccaccaccuaggccacu

SEQ ID NO: 2407112 - RNA, 23 nt, Human
gccccaccaccuaggccacuccu

SEQ ID NO: 2407113 - RNA, 13 nt, Human
gccccacccagau

SEQ ID NO: 2407114 - RNA, 12 nt, Human
gccccacccaga

SEQ ID NO: 2407115 - RNA, 11 nt, Human
gccccacccag

SEQ ID NO: 2407116 - RNA, 16 nt, Human
gcccccacuugccucu

SEQ ID NO: 2407117 - RNA, 14 nt, Human
gcccccacuugccu

SEQ ID NO: 2407118 - RNA, 12 nt, Human
gccccacccagg

SEQ ID NO: 2407119 - RNA, 15 nt, Human
gccccacccaggagg

SEQ ID NO: 2407120 - RNA, 21 nt, Human
gcccccacuugccucuuccuu

SEQ ID NO: 2407121 - RNA, 17 nt, Human
gcccccacuugccucuu

SEQ ID NO: 2407122 - RNA, 22 nt, Human
gccccacccagaugggggaaag

SEQ ID NO: 2407123 - RNA, 12 nt, Human
gcccccagacgc

SEQ ID NO: 2407124 - RNA, 22 nt, Human
gcccccagcccagggcuccugc

SEQ ID NO: 2407125 - RNA, 21 nt, Human
gcccccagcccagggcuccug

SEQ ID NO: 2407126 - RNA, 18 nt, Human
gcccccagcccagggcuc

SEQ ID NO: 2407127 - RNA, 17 nt, Human
gcccccagcccagggcu

SEQ ID NO: 2407128 - RNA, 18 nt, Human
gcccccagagcgccccuc

SEQ ID NO: 2407129 - RNA, 21 nt, Human
gcccccagccccggggugagu

SEQ ID NO: 2407130 - RNA, 20 nt, Human
gcccccagccccggggugag

SEQ ID NO: 2407131 - RNA, 15 nt, Human
gcccccagcuaagaa

SEQ ID NO: 2407132 - RNA, 16 nt, Human
gcccccaggacugggc

SEQ ID NO: 2407133 - RNA, 15 nt, Human
gcccccaggacuggg

SEQ ID NO: 2407134 - RNA, 14 nt, Human
gcccccaggacugg

SEQ ID NO: 2407135 - RNA, 13 nt, Human
gcccccaggacug

SEQ ID NO: 2407136 - RNA, 15 nt, Human
gcccccucugcccug

SEQ ID NO: 2407137 - RNA, 16 nt, Human
gcccccucugcccugc

SEQ ID NO: 2407138 - RNA, 21 nt, Human
gcccccagcuaagaaccugga

SEQ ID NO: 2407139 - RNA, 22 nt, Human
gcccccagcuaagaaccuggaa

SEQ ID NO: 2407140 - RNA, 13 nt, Human
gcccccagcuggc

SEQ ID NO: 2407141 - RNA, 12 nt, Human
gcccccagcugg

SEQ ID NO: 2407142 - RNA, 23 nt, Human
gcccccagcuaagaaccuggaac

SEQ ID NO: 2407143 - RNA, 12 nt, Human
gcccccaggacu

SEQ ID NO: 2407144 - RNA, 15 nt, Human
gcccccagcuggccc

SEQ ID NO: 2407145 - RNA, 14 nt, Human
gcccccagcuggcc

SEQ ID NO: 2407146 - RNA, 18 nt, Human
gcccccagcuguggguac

SEQ ID NO: 2407147 - RNA, 15 nt, Human
gccccuggcagcccc

SEQ ID NO: 2407148 - RNA, 12 nt, Human
gccccuggcagc

SEQ ID NO: 2407149 - RNA, 16 nt, Human
gccccugcugguucag

SEQ ID NO: 2407150 - RNA, 15 nt, Human
gccccugcugguuca

SEQ ID NO: 2407151 - RNA, 18 nt, Human
gcccccugaaacuuauuu

SEQ ID NO: 2407152 - RNA, 17 nt, Human
gcccccucugcccugcg

SEQ ID NO: 2407153 - RNA, 12 nt, Human
gccccugcuggu

SEQ ID NO: 2407154 - RNA, 11 nt, Human
gcccccugccc

SEQ ID NO: 2407155 - RNA, 22 nt, Human
gcccaggccccugccacccugg

SEQ ID NO: 2407156 - RNA, 18 nt, Human
gcccaggccccugccacc

SEQ ID NO: 2407157 - RNA, 23 nt, Human
gcccaggccaucuuccagguggg

SEQ ID NO: 2407158 - RNA, 21 nt, Human
gcccaggccccugccacccug

SEQ ID NO: 2407159 - RNA, 20 nt, Human
gcccaggccccugccacccu

SEQ ID NO: 2407160 - RNA, 12 nt, Human
gcccaggccccu

SEQ ID NO: 2407161 - RNA, 11 nt, Human
gcccaggcccc

SEQ ID NO: 2407162 - RNA, 22 nt, Human
gcccaggccaucuuccaggugg

SEQ ID NO: 2407163 - RNA, 19 nt, Human
gcccaggccaucuuccagg

SEQ ID NO: 2407164 - RNA, 18 nt, Human
gcccaggccaucuuccag

SEQ ID NO: 2407165 - RNA, 13 nt, Human
gcccaggccaucu

SEQ ID NO: 2407166 - RNA, 14 nt, Human
gcccaggcaggcca

SEQ ID NO: 2407167 - RNA, 14 nt, Human
gcccaggagagaga

SEQ ID NO: 2407168 - RNA, 13 nt, Human
gcccaggagagag

SEQ ID NO: 2407169 - RNA, 12 nt, Human
gcccaggagaga

SEQ ID NO: 2407170 - RNA, 23 nt, Human
gcccaggacggggccggccaggu

SEQ ID NO: 2407171 - RNA, 10 nt, Human
gcccaggaga

SEQ ID NO: 2407172 - RNA, 11 nt, Human
gcccaggagac

SEQ ID NO: 2407173 - RNA, 20 nt, Human
gcccaggagagagaaagcca

SEQ ID NO: 2407174 - RNA, 17 nt, Human
gcccaggagagagaaag

SEQ ID NO: 2407175 - RNA, 16 nt, Human
gcccaggagagagaaa

SEQ ID NO: 2407176 - RNA, 15 nt, Human
gcccaggagagagaa

SEQ ID NO: 2407177 - RNA, 23 nt, Human
gcccaggagagagaaagccaggc

SEQ ID NO: 2407178 - RNA, 22 nt, Human
gcccaggagagagaaagccagg

SEQ ID NO: 2407179 - RNA, 21 nt, Human
gcccaggacggggccggccag

SEQ ID NO: 2407180 - RNA, 20 nt, Human
gcccaggacggggccggcca

SEQ ID NO: 2407181 - RNA, 19 nt, Human
gcccaggacggggccggcc

SEQ ID NO: 2407182 - RNA, 18 nt, Human
gcccaggacggggccggc

SEQ ID NO: 2407183 - RNA, 18 nt, Human
gcccaggaccaucauccu

SEQ ID NO: 2407184 - RNA, 19 nt, Human
gcccaggaccagcuggggc

SEQ ID NO: 2407185 - RNA, 18 nt, Human
gcccaggaccagcugggg

SEQ ID NO: 2407186 - RNA, 17 nt, Human
gcccaggaccagcuggg

SEQ ID NO: 2407187 - RNA, 16 nt, Human
gcccaggaccagcugg

SEQ ID NO: 2407188 - RNA, 15 nt, Human
gcccaggaccagcug

SEQ ID NO: 2407189 - RNA, 14 nt, Human
gcccaggaccagcu

SEQ ID NO: 2407190 - RNA, 13 nt, Human
gcccaggaccagc

SEQ ID NO: 2407191 - RNA, 15 nt, Human
gcccaggagagccag

SEQ ID NO: 2407192 - RNA, 11 nt, Human
gcccaggcagg

SEQ ID NO: 2407193 - RNA, 15 nt, Human
gcccaggauggcuuu

SEQ ID NO: 2407194 - RNA, 23 nt, Human
gcccaggaaaggcuccaggagca

SEQ ID NO: 2407195 - RNA, 22 nt, Human
gcccaggaaaggcuccaggagc

SEQ ID NO: 2407196 - RNA, 24 nt, Human
gcccaggaaaggcuccaggagcag

SEQ ID NO: 2407197 - RNA, 17 nt, Human
gcccacuguccugggcc

SEQ ID NO: 2407198 - RNA, 18 nt, Human
gcccacuguccugggccu

SEQ ID NO: 2407199 - RNA, 21 nt, Human
gcccacuguccugggccugca

SEQ ID NO: 2407200 - RNA, 23 nt, Human
gcccacuguccugggccugcaga

SEQ ID NO: 2407201 - RNA, 21 nt, Human
gcccacuguccugggcgcccu

SEQ ID NO: 2407202 - RNA, 19 nt, Human
gcccacuguccugggcgcc

SEQ ID NO: 2407203 - RNA, 23 nt, Human
gcccacuguccugggcgcccugg

SEQ ID NO: 2407204 - RNA, 17 nt, Human
gcccacuguccugggcg

SEQ ID NO: 2407205 - RNA, 16 nt, Human
gcccacuguccugggc

SEQ ID NO: 2407206 - RNA, 24 nt, Human
gcccacuguccugggccugcagaa

SEQ ID NO: 2407207 - RNA, 23 nt, Human
gcccacuucaggguucuccucuc

SEQ ID NO: 2407208 - RNA, 13 nt, Human
gcccacuucaggg

SEQ ID NO: 2407209 - RNA, 13 nt, Human
gcccacuucugcc

SEQ ID NO: 2407210 - RNA, 14 nt, Human
gcccacuguccugg

SEQ ID NO: 2407211 - RNA, 13 nt, Human
gcccacuguccug

SEQ ID NO: 2407212 - RNA, 15 nt, Human
gcccacuguccuggg

SEQ ID NO: 2407213 - RNA, 20 nt, Human
gcccacugcccacccccuca

SEQ ID NO: 2407214 - RNA, 19 nt, Human
gcccacugcccacccccuc

SEQ ID NO: 2407215 - RNA, 23 nt, Human
gcccacugcccacccccucaagc

SEQ ID NO: 2407216 - RNA, 22 nt, Human
gcccacuguacuugcucuugau

SEQ ID NO: 2407217 - RNA, 20 nt, Human
gcccacuguacuugcucuug

SEQ ID NO: 2407218 - RNA, 15 nt, Human
gcccacuguacuugc

SEQ ID NO: 2407219 - RNA, 21 nt, Human
gcccacgcuggagugcaguga

SEQ ID NO: 2407220 - RNA, 19 nt, Human
gcccacgcuggagugcagu

SEQ ID NO: 2407221 - RNA, 22 nt, Human
gccauugucuucggaaaccuug

SEQ ID NO: 2407222 - RNA, 21 nt, Human
gccauugucuucggaaaccuu

SEQ ID NO: 2407223 - RNA, 20 nt, Human
gccauuggcuauuuaaaacu

SEQ ID NO: 2407224 - RNA, 23 nt, Human
gcccacgcuggagugcagugagc

SEQ ID NO: 2407225 - RNA, 21 nt, Human
gcccacgcccccacuggugac

SEQ ID NO: 2407226 - RNA, 17 nt, Human
gcccacgcccccacugg

SEQ ID NO: 2407227 - RNA, 16 nt, Human
gcccacgcccccacug

SEQ ID NO: 2407228 - RNA, 15 nt, Human
gcccacgcccccacu

SEQ ID NO: 2407229 - RNA, 17 nt, Human
gccauugacuucuuccc

SEQ ID NO: 2407230 - RNA, 14 nt, Human
gccauugcacucca

SEQ ID NO: 2407231 - RNA, 15 nt, Human
gccauugcacuccag

SEQ ID NO: 2407232 - RNA, 18 nt, Human
gccauugcacuccagccu

SEQ ID NO: 2407233 - RNA, 19 nt, Human
gccauugcacuccagccug

SEQ ID NO: 2407234 - RNA, 21 nt, Human
gccauugcacuccagccuggg

SEQ ID NO: 2407235 - RNA, 17 nt, Human
gccauugccaccaggag

SEQ ID NO: 2407236 - RNA, 18 nt, Human
gccauugccaccaggaga

SEQ ID NO: 2407237 - RNA, 19 nt, Human
gccauugccaccaggagaa

SEQ ID NO: 2407238 - RNA, 22 nt, Human
gccauuaucccugaaucccccu

SEQ ID NO: 2407239 - RNA, 18 nt, Human
gccauuaccauggagaca

SEQ ID NO: 2407240 - RNA, 13 nt, Human
gcauuuagaugua

SEQ ID NO: 2407241 - RNA, 19 nt, Human
gcauuuaggccaugggaca

SEQ ID NO: 2407242 - RNA, 12 nt, Human
gcauuuagaugu

SEQ ID NO: 2407243 - RNA, 18 nt, Human
gcauuuacuuuguguuca

SEQ ID NO: 2407244 - RNA, 13 nt, Human
gccauuaccaugg

SEQ ID NO: 2407245 - RNA, 16 nt, Human
gccauuaccauggaga

SEQ ID NO: 2407246 - RNA, 17 nt, Human
gcauuuacuuugaauuu

SEQ ID NO: 2407247 - RNA, 19 nt, Human
gcauuuaauguagccaugg

SEQ ID NO: 2407248 - RNA, 16 nt, Human
gcauuuaauguagcca

SEQ ID NO: 2407249 - RNA, 20 nt, Human
gcacucagaagacacugaug

SEQ ID NO: 2407250 - RNA, 19 nt, Human
gcaagugagagcugggugu

SEQ ID NO: 2407251 - RNA, 18 nt, Human
gcaagugagagcugggug

SEQ ID NO: 2407252 - RNA, 19 nt, Human
gcacuuuguucuggcucuu

SEQ ID NO: 2407253 - RNA, 18 nt, Human
gcacuuuguucuggcucu

SEQ ID NO: 2407254 - RNA, 15 nt, Human
gcacuccccugcugg

SEQ ID NO: 2407255 - RNA, 12 nt, Human
gcacuccccugc

SEQ ID NO: 2407256 - RNA, 14 nt, Human
gcacuccccugcug

SEQ ID NO: 2407257 - RNA, 13 nt, Human
gcacuccccugcu

SEQ ID NO: 2407258 - RNA, 14 nt, Human
gcacuccagccugg

SEQ ID NO: 2407259 - RNA, 15 nt, Human
gcagaaaacauuguu

SEQ ID NO: 2407260 - RNA, 14 nt, Human
gcagaaaacauugu

SEQ ID NO: 2407261 - RNA, 13 nt, Human
gcagaaaacauug

SEQ ID NO: 2407262 - RNA, 12 nt, Human
gcagaaaacauu

SEQ ID NO: 2407263 - RNA, 18 nt, Human
gcagaaaaaugucauuga

SEQ ID NO: 2407264 - RNA, 15 nt, Human
gcagaaaagcaccug

SEQ ID NO: 2407265 - RNA, 16 nt, Human
gcagaaaagcaccugc

SEQ ID NO: 2407266 - RNA, 17 nt, Human
gcagaaaagcaccugcc

SEQ ID NO: 2407267 - RNA, 18 nt, Human
gcagaaaagcaccugccg

SEQ ID NO: 2407268 - RNA, 22 nt, Human
gcacuuuguucuggcucuucca

SEQ ID NO: 2407269 - RNA, 20 nt, Human
gcacuuuuucauuugccuau

SEQ ID NO: 2407270 - RNA, 14 nt, Human
gcacuuuuucauuu

SEQ ID NO: 2407271 - RNA, 20 nt, Human
gcacuuuuuaauucaccaaa

SEQ ID NO: 2407272 - RNA, 16 nt, Human
gcacuuuuuaauucac

SEQ ID NO: 2407273 - RNA, 12 nt, Human
gcacuccagccu

SEQ ID NO: 2407274 - RNA, 12 nt, Human
gcagaacaguga

SEQ ID NO: 2407275 - RNA, 13 nt, Human
gcagaacagugau

SEQ ID NO: 2407276 - RNA, 21 nt, Human
gcagaaaagcaccugccgacc

SEQ ID NO: 2407277 - RNA, 22 nt, Human
gcagaaaaucuuuuacuagugu

SEQ ID NO: 2407278 - RNA, 20 nt, Human
gcagaaaagcaccugccgac

SEQ ID NO: 2407279 - RNA, 14 nt, Human
gcagaaaauugcac

SEQ ID NO: 2407280 - RNA, 16 nt, Human
gcagaaaauugccuaa

SEQ ID NO: 2407281 - RNA, 23 nt, Human
gcagaaagcaaaugugaccugug

SEQ ID NO: 2407282 - RNA, 20 nt, Human
gcagaaagcaaaauuauguu

SEQ ID NO: 2407283 - RNA, 18 nt, Human
gcagaacagugauuacca

SEQ ID NO: 2407284 - RNA, 22 nt, Human
gcagaacagugauuaccaggga

SEQ ID NO: 2407285 - RNA, 19 nt, Human
gcagaacuaaacucauuua

SEQ ID NO: 2407286 - RNA, 21 nt, Human
gcagaacuaaacucauuuaua

SEQ ID NO: 2407287 - RNA, 14 nt, Human
gcagaacugagcuc

SEQ ID NO: 2407288 - RNA, 16 nt, Human
gcagaacugagcuccu

SEQ ID NO: 2407289 - RNA, 13 nt, Human
gcagaacggagcc

SEQ ID NO: 2407290 - RNA, 24 nt, Human
gcagaacggagccccaggccucug

SEQ ID NO: 2407291 - RNA, 21 nt, Human
gcagaacguauugguccagcu

SEQ ID NO: 2407292 - RNA, 23 nt, Human
gcagaacagccgcuccugucugc

SEQ ID NO: 2407293 - RNA, 23 nt, Human
gcagagcuggcucugagcgccuc

SEQ ID NO: 2407294 - RNA, 17 nt, Human
gcagagcuggcucugag

SEQ ID NO: 2407295 - RNA, 15 nt, Human
gcagagcuggcucug

SEQ ID NO: 2407296 - RNA, 14 nt, Human
gcagagcuggcucu

SEQ ID NO: 2407297 - RNA, 13 nt, Human
gcagagcuggcuc

SEQ ID NO: 2407298 - RNA, 12 nt, Human
gcagagcuggcu

SEQ ID NO: 2407299 - RNA, 17 nt, Human
gcagagcugcgggcugg

SEQ ID NO: 2407300 - RNA, 19 nt, Human
gcagagcugcgggcugggu

SEQ ID NO: 2407301 - RNA, 18 nt, Human
gcagaacugagcuccucu

SEQ ID NO: 2407302 - RNA, 20 nt, Human
gcagaggaaagcaaaggaga

SEQ ID NO: 2407303 - RNA, 18 nt, Human
gcagaggaaagcaaagga

SEQ ID NO: 2407304 - RNA, 14 nt, Human
gcagaggaaagcaa

SEQ ID NO: 2407305 - RNA, 13 nt, Human
gcagaggaaagca

SEQ ID NO: 2407306 - RNA, 11 nt, Human
gcagaggacag

SEQ ID NO: 2407307 - RNA, 17 nt, Human
gcagagcuuggacugga

SEQ ID NO: 2407308 - RNA, 16 nt, Human
gcagagcuucuuccag

SEQ ID NO: 2407309 - RNA, 22 nt, Human
gcagagcuucuuccaggugccc

SEQ ID NO: 2407310 - RNA, 21 nt, Human
gcagaggaaagcaaaggagau

SEQ ID NO: 2407311 - RNA, 12 nt, Human
gcagaggagggg

SEQ ID NO: 2407312 - RNA, 14 nt, Human
gcagaggaggggcc

SEQ ID NO: 2407313 - RNA, 21 nt, Human
gcagaggaggggccgcugcca

SEQ ID NO: 2407314 - RNA, 12 nt, Human
gcagaggccaga

SEQ ID NO: 2407315 - RNA, 12 nt, Human
gcagaggcacug

SEQ ID NO: 2407316 - RNA, 15 nt, Human
gcagaggaggggccg

SEQ ID NO: 2407317 - RNA, 12 nt, Human
gcagaggcagcg

SEQ ID NO: 2407318 - RNA, 23 nt, Human
gcagcauauucaggaagcucagg

SEQ ID NO: 2407319 - RNA, 19 nt, Human
gcagcauauucaggaagcu

SEQ ID NO: 2407320 - RNA, 18 nt, Human
gcagcauauucaggaagc

SEQ ID NO: 2407321 - RNA, 17 nt, Human
gcagcauauucaggaag

SEQ ID NO: 2407322 - RNA, 12 nt, Human
gcagccaaggga

SEQ ID NO: 2407323 - RNA, 23 nt, Human
gcagccaaggccgaagcucuggc

SEQ ID NO: 2407324 - RNA, 22 nt, Human
gcagcauguugcugaggaguga

SEQ ID NO: 2407325 - RNA, 13 nt, Human
gcagccaagcucc

SEQ ID NO: 2407326 - RNA, 17 nt, Human
gcagccaagcuccuugg

SEQ ID NO: 2407327 - RNA, 22 nt, Human
gcagccaaggccgaagcucugg

SEQ ID NO: 2407328 - RNA, 21 nt, Human
gcagccaaggccgaagcucug

SEQ ID NO: 2407329 - RNA, 12 nt, Human
gcagccaaggcc

SEQ ID NO: 2407330 - RNA, 20 nt, Human
gcagccaagcuccuugggag

SEQ ID NO: 2407331 - RNA, 15 nt, Human
gcagcaucugcuaau

SEQ ID NO: 2407332 - RNA, 15 nt, Human
gcagcaucuucaaac

SEQ ID NO: 2407333 - RNA, 19 nt, Human
gcagcaucuucacuucuaa

SEQ ID NO: 2407334 - RNA, 21 nt, Human
gcagccaaacccaugaggcaa

SEQ ID NO: 2407335 - RNA, 20 nt, Human
gcagcauguugcugaggagu

SEQ ID NO: 2407336 - RNA, 21 nt, Human
gcagcaucuucaaacauguac

SEQ ID NO: 2407337 - RNA, 17 nt, Human
gcagcaugaccugugac

SEQ ID NO: 2407338 - RNA, 15 nt, Human
gcagcagugugaggc

SEQ ID NO: 2407339 - RNA, 19 nt, Human
gcagcagugugaggccagg

SEQ ID NO: 2407340 - RNA, 20 nt, Human
gcagcagugugaggccaggg

SEQ ID NO: 2407341 - RNA, 21 nt, Human
gcagcagugugaggccagggc

SEQ ID NO: 2407342 - RNA, 22 nt, Human
gcagcagugugaggccagggca

SEQ ID NO: 2407343 - RNA, 23 nt, Human
gcagcagugugaggccagggcag

SEQ ID NO: 2407344 - RNA, 12 nt, Human
gcagcauaaagg

SEQ ID NO: 2407345 - RNA, 15 nt, Human
gcagcauaaaggccu

SEQ ID NO: 2407346 - RNA, 14 nt, Human
gcagcauaugagga

SEQ ID NO: 2407347 - RNA, 11 nt, Human
gcagaggggca

SEQ ID NO: 2407348 - RNA, 16 nt, Human
gcagcagugaaaacaa

SEQ ID NO: 2407349 - RNA, 15 nt, Human
gcagcagugaaaaca

SEQ ID NO: 2407350 - RNA, 14 nt, Human
gcagcagugaaaac

SEQ ID NO: 2407351 - RNA, 20 nt, Human
gcagcagguggcagaauggg

SEQ ID NO: 2407352 - RNA, 21 nt, Human
gcagcagugaaaacaagugcu

SEQ ID NO: 2407353 - RNA, 18 nt, Human
gcagcagugaaaacaagu

SEQ ID NO: 2407354 - RNA, 17 nt, Human
gcagcagugagucucuu

SEQ ID NO: 2407355 - RNA, 21 nt, Human
gcagcagugagucucuucaga

SEQ ID NO: 2407356 - RNA, 14 nt, Human
gcagagggcacaga

SEQ ID NO: 2407357 - RNA, 22 nt, Human
gcagaggcuggaggcagggccu

SEQ ID NO: 2407358 - RNA, 16 nt, Human
gcagagggcagaggcu

SEQ ID NO: 2407359 - RNA, 18 nt, Human
gcagagggcagaggcugg

SEQ ID NO: 2407360 - RNA, 19 nt, Human
gcagagggcagaggcugga

SEQ ID NO: 2407361 - RNA, 15 nt, Human
gcagaggccagaggc

SEQ ID NO: 2407362 - RNA, 11 nt, Human
gcagaggcugg

SEQ ID NO: 2407363 - RNA, 19 nt, Human
gcagaggcuggaggcaggg

SEQ ID NO: 2407364 - RNA, 21 nt, Human
gcagaggcuggaggcagggcc

SEQ ID NO: 2407365 - RNA, 18 nt, Human
gcagcccaccccucaaca

SEQ ID NO: 2407366 - RNA, 20 nt, Human
gcagccaggccacuggcccc

SEQ ID NO: 2407367 - RNA, 15 nt, Human
gcagccagcucucag

SEQ ID NO: 2407368 - RNA, 16 nt, Human
gcagccagcucucagc

SEQ ID NO: 2407369 - RNA, 17 nt, Human
gcagccagcucucagcc

SEQ ID NO: 2407370 - RNA, 18 nt, Human
gcagccagcucucagcca

SEQ ID NO: 2407371 - RNA, 12 nt, Human
gcagccaggcug

SEQ ID NO: 2407372 - RNA, 13 nt, Human
gcagccaggcugc

SEQ ID NO: 2407373 - RNA, 14 nt, Human
gcagccaggcugcc

SEQ ID NO: 2407374 - RNA, 17 nt, Human
gcagccaggcugccaag

SEQ ID NO: 2407375 - RNA, 15 nt, Human
gcagccacauuccug

SEQ ID NO: 2407376 - RNA, 13 nt, Human
gcagccagcccag

SEQ ID NO: 2407377 - RNA, 15 nt, Human
gcagccagcccagcc

SEQ ID NO: 2407378 - RNA, 16 nt, Human
gcagccagcccagccc

SEQ ID NO: 2407379 - RNA, 17 nt, Human
gcagccagcccagccca

SEQ ID NO: 2407380 - RNA, 13 nt, Human
gcagccagcucuc

SEQ ID NO: 2407381 - RNA, 21 nt, Human
gcagccagcccagcccagcug

SEQ ID NO: 2407382 - RNA, 23 nt, Human
gcagccagcccagcccagcuggu

SEQ ID NO: 2407383 - RNA, 21 nt, Human
gcagcucaucucugucccacu

SEQ ID NO: 2407384 - RNA, 19 nt, Human
gcagcucaucucuguccca

SEQ ID NO: 2407385 - RNA, 21 nt, Human
gcagcucuccagucaggaggc

SEQ ID NO: 2407386 - RNA, 15 nt, Human
gcagcucuccaguca

SEQ ID NO: 2407387 - RNA, 14 nt, Human
gcagcucuccaguc

SEQ ID NO: 2407388 - RNA, 14 nt, Human
gcagcucaucucug

SEQ ID NO: 2407389 - RNA, 22 nt, Human
gcagugagaaaaagcuccuguc

SEQ ID NO: 2407390 - RNA, 23 nt, Human
gcagugagaaaaagcuccugucc

SEQ ID NO: 2407391 - RNA, 21 nt, Human
gcagugagaaaaagcuccugu

SEQ ID NO: 2407392 - RNA, 21 nt, Human
gcagugaauugugaccaaguu

SEQ ID NO: 2407393 - RNA, 20 nt, Human
gcagugaaugauucaguguu

SEQ ID NO: 2407394 - RNA, 18 nt, Human
gcagugaaagacaagcug

SEQ ID NO: 2407395 - RNA, 14 nt, Human
gcagugaauuguga

SEQ ID NO: 2407396 - RNA, 18 nt, Human
gcagugacgugcaccugu

SEQ ID NO: 2407397 - RNA, 20 nt, Human
gcagugagaaaaagcuccug

SEQ ID NO: 2407398 - RNA, 19 nt, Human
gcagugaguuacagcgaga

SEQ ID NO: 2407399 - RNA, 21 nt, Human
gcagugagugagccuggcucu

SEQ ID NO: 2407400 - RNA, 20 nt, Human
gcagugagugagccuggcuc

SEQ ID NO: 2407401 - RNA, 19 nt, Human
gcagugagugagccuggcu

SEQ ID NO: 2407402 - RNA, 18 nt, Human
gcagugagugagccuggc

SEQ ID NO: 2407403 - RNA, 17 nt, Human
gcagugagugagccugg

SEQ ID NO: 2407404 - RNA, 15 nt, Human
gcagugagugagccu

SEQ ID NO: 2407405 - RNA, 18 nt, Human
gcagugagucucuucaga

SEQ ID NO: 2407406 - RNA, 14 nt, Human
gcagugagcggaga

SEQ ID NO: 2407407 - RNA, 21 nt, Human
gcagugagccgcaucuucucc

SEQ ID NO: 2407408 - RNA, 14 nt, Human
gcagugagcugaga

SEQ ID NO: 2407409 - RNA, 20 nt, Human
gcagugagccaagauugcgc

SEQ ID NO: 2407410 - RNA, 17 nt, Human
gcagucugauccaggag

SEQ ID NO: 2407411 - RNA, 18 nt, Human
gcagucucggguggcuag

SEQ ID NO: 2407412 - RNA, 21 nt, Human
gcagugaaaacaagugcuggc

SEQ ID NO: 2407413 - RNA, 12 nt, Human
gcagucuggagg

SEQ ID NO: 2407414 - RNA, 13 nt, Human
gcagucuggaggg

SEQ ID NO: 2407415 - RNA, 14 nt, Human
gcagucuggagggg

SEQ ID NO: 2407416 - RNA, 15 nt, Human
gcagucuggaggggc

SEQ ID NO: 2407417 - RNA, 19 nt, Human
gcagucuggcugagcccug

SEQ ID NO: 2407418 - RNA, 16 nt, Human
gcagucuggaggggca

SEQ ID NO: 2407419 - RNA, 21 nt, Human
gcagcugauguuggaagagaa

SEQ ID NO: 2407420 - RNA, 16 nt, Human
gcagcugauacaaauu

SEQ ID NO: 2407421 - RNA, 14 nt, Human
gcagcugccagaga

SEQ ID NO: 2407422 - RNA, 15 nt, Human
gcagcugccagagaa

SEQ ID NO: 2407423 - RNA, 14 nt, Human
gcagcugauuuuaa

SEQ ID NO: 2407424 - RNA, 15 nt, Human
gcagcugauuuuaac

SEQ ID NO: 2407425 - RNA, 17 nt, Human
gcagcugauuuuaacaa

SEQ ID NO: 2407426 - RNA, 18 nt, Human
gcagcugauuuuaacaau

SEQ ID NO: 2407427 - RNA, 19 nt, Human
gcagucgugccugugucca

SEQ ID NO: 2407428 - RNA, 18 nt, Human
gcagucgugccugugucc

SEQ ID NO: 2407429 - RNA, 17 nt, Human
gcagucgugccuguguc

SEQ ID NO: 2407430 - RNA, 16 nt, Human
gcagucgugccugugu

SEQ ID NO: 2407431 - RNA, 20 nt, Human
gcagucuauauguuuguaua

SEQ ID NO: 2407432 - RNA, 16 nt, Human
gcagucuacccaccuc

SEQ ID NO: 2407433 - RNA, 23 nt, Human
gcagcucuugcuaaucagugucu

SEQ ID NO: 2407434 - RNA, 14 nt, Human
gcagcugaccucug

SEQ ID NO: 2407435 - RNA, 22 nt, Human
gcagcugaaauaugcuggcugg

SEQ ID NO: 2407436 - RNA, 19 nt, Human
gcagcugaaauaugcuggc

SEQ ID NO: 2407437 - RNA, 22 nt, Human
gcagcucuugcuaaucaguguc

SEQ ID NO: 2407438 - RNA, 13 nt, Human
gcagcucuugcua

SEQ ID NO: 2407439 - RNA, 18 nt, Human
gcagcugaaauaugcugg

SEQ ID NO: 2407440 - RNA, 23 nt, Human
gcagcucuugcccuucccugucc

SEQ ID NO: 2407441 - RNA, 20 nt, Human
gcagcucuugcccuucccug

SEQ ID NO: 2407442 - RNA, 19 nt, Human
gcagcucuugcccuucccu

SEQ ID NO: 2407443 - RNA, 18 nt, Human
gcagcucuugcccuuccc

SEQ ID NO: 2407444 - RNA, 17 nt, Human
gcagcucuugcccuucc

SEQ ID NO: 2407445 - RNA, 16 nt, Human
gcagcucuugcccuuc

SEQ ID NO: 2407446 - RNA, 15 nt, Human
gcagcucuugcccuu

SEQ ID NO: 2407447 - RNA, 14 nt, Human
gcagcucuugcccu

SEQ ID NO: 2407448 - RNA, 20 nt, Human
gcagcucuggacagccccac

SEQ ID NO: 2407449 - RNA, 12 nt, Human
gcagcucucccc

SEQ ID NO: 2407450 - RNA, 13 nt, Human
gcagugaugucac

SEQ ID NO: 2407451 - RNA, 21 nt, Human
gcagugauauggcagaagaca

SEQ ID NO: 2407452 - RNA, 19 nt, Human
gcagugauauggcagaaga

SEQ ID NO: 2407453 - RNA, 16 nt, Human
gcagugauauggcaga

SEQ ID NO: 2407454 - RNA, 20 nt, Human
gcagugaguuacagcgagag

SEQ ID NO: 2407455 - RNA, 22 nt, Human
gcagugauauggcagaagacac

SEQ ID NO: 2407456 - RNA, 21 nt, Human
gcagugaugcuggaugcuccu

SEQ ID NO: 2407457 - RNA, 22 nt, Human
gcaguuguugcccacagcugua

SEQ ID NO: 2407458 - RNA, 14 nt, Human
gcaguuggccagag

SEQ ID NO: 2407459 - RNA, 22 nt, Human
gcaguuggccagagagccuggu

SEQ ID NO: 2407460 - RNA, 16 nt, Human
gcauacguacacauuu

SEQ ID NO: 2407461 - RNA, 17 nt, Human
gcauacguacacauuuu

SEQ ID NO: 2407462 - RNA, 15 nt, Human
gcauacguacacauu

SEQ ID NO: 2407463 - RNA, 13 nt, Human
gcaguugugucag

SEQ ID NO: 2407464 - RNA, 14 nt, Human
gcaguuuaucauuc

SEQ ID NO: 2407465 - RNA, 18 nt, Human
gcauacguacacauuuua

SEQ ID NO: 2407466 - RNA, 18 nt, Human
gcaucccugaggagccag

SEQ ID NO: 2407467 - RNA, 20 nt, Human
gcauccccuuggcugugagg

SEQ ID NO: 2407468 - RNA, 21 nt, Human
gcauccccuuggcugugaggc

SEQ ID NO: 2407469 - RNA, 19 nt, Human
gcauccccuuggcugugag

SEQ ID NO: 2407470 - RNA, 13 nt, Human
gcaucccagggga

SEQ ID NO: 2407471 - RNA, 14 nt, Human
gcaucccaggggac

SEQ ID NO: 2407472 - RNA, 15 nt, Human
gcaucccaggggacc

SEQ ID NO: 2407473 - RNA, 16 nt, Human
gcaucccaggggacca

SEQ ID NO: 2407474 - RNA, 19 nt, Human
gcaucccaggggaccacac

SEQ ID NO: 2407475 - RNA, 21 nt, Human
gcaucccaggggaccacaccu

SEQ ID NO: 2407476 - RNA, 14 nt, Human
gcaucccaguggcc

SEQ ID NO: 2407477 - RNA, 15 nt, Human
gcaucccaguggccu

SEQ ID NO: 2407478 - RNA, 16 nt, Human
gcaucccaguggccuc

SEQ ID NO: 2407479 - RNA, 17 nt, Human
gcaucccaguggccuca

SEQ ID NO: 2407480 - RNA, 23 nt, Human
gcaucccaguggccucaacccuc

SEQ ID NO: 2407481 - RNA, 20 nt, Human
gcaucccaguggccucaacc

SEQ ID NO: 2407482 - RNA, 18 nt, Human
gcaucccuugaccaggcc

SEQ ID NO: 2407483 - RNA, 20 nt, Human
gcaucccuugaccaggccug

SEQ ID NO: 2407484 - RNA, 22 nt, Human
gcaucccuugaccaggccuggg

SEQ ID NO: 2407485 - RNA, 17 nt, Human
gcauccguaguucccug

SEQ ID NO: 2407486 - RNA, 18 nt, Human
gcauccuccacaauagca

SEQ ID NO: 2407487 - RNA, 19 nt, Human
gcauccuccaagaaucuau

SEQ ID NO: 2407488 - RNA, 15 nt, Human
gcauccuccaagaau

SEQ ID NO: 2407489 - RNA, 14 nt, Human
gcauccuccaagaa

SEQ ID NO: 2407490 - RNA, 18 nt, Human
gcauccguaguucccuga

SEQ ID NO: 2407491 - RNA, 19 nt, Human
gcauccguaguucccugaa

SEQ ID NO: 2407492 - RNA, 23 nt, Human
gcauccuagucucuaucauuaaa

SEQ ID NO: 2407493 - RNA, 11 nt, Human
gcauccuaguc

SEQ ID NO: 2407494 - RNA, 17 nt, Human
gcauccaguaucuugaa

SEQ ID NO: 2407495 - RNA, 14 nt, Human
gcauccaguaucuu

SEQ ID NO: 2407496 - RNA, 17 nt, Human
gcauccauguguggacu

SEQ ID NO: 2407497 - RNA, 12 nt, Human
gcauccauuccu

SEQ ID NO: 2407498 - RNA, 14 nt, Human
gcauccauuccuca

SEQ ID NO: 2407499 - RNA, 15 nt, Human
gcauccauuccucag

SEQ ID NO: 2407500 - RNA, 16 nt, Human
gcauccauuccucagg

SEQ ID NO: 2407501 - RNA, 18 nt, Human
gcauccauuccucaggga

SEQ ID NO: 2407502 - RNA, 21 nt, Human
gcauccauuccucagggacag

SEQ ID NO: 2407503 - RNA, 18 nt, Human
gcauccaguaucuugaag

SEQ ID NO: 2407504 - RNA, 20 nt, Human
gcaucuagcaugucgucaaa

SEQ ID NO: 2407505 - RNA, 21 nt, Human
gcaucuagaggcuuccuucau

SEQ ID NO: 2407506 - RNA, 13 nt, Human
gcaucguggagac

SEQ ID NO: 2407507 - RNA, 22 nt, Human
gcaucuagaggcuuccuucauu

SEQ ID NO: 2407508 - RNA, 23 nt, Human
gcaucuagaggcuuccuucauuu

SEQ ID NO: 2407509 - RNA, 17 nt, Human
gcauggcccuggggucc

SEQ ID NO: 2407510 - RNA, 16 nt, Human
gcauggcccugggguc

SEQ ID NO: 2407511 - RNA, 17 nt, Human
gcauggcuccagaaaug

SEQ ID NO: 2407512 - RNA, 22 nt, Human
gcauggcccuggggucccacga

SEQ ID NO: 2407513 - RNA, 19 nt, Human
gcauggcuccagaaauguc

SEQ ID NO: 2407514 - RNA, 18 nt, Human
gcauggcuccagaaaugu

SEQ ID NO: 2407515 - RNA, 13 nt, Human
gcauggcuccagu

SEQ ID NO: 2407516 - RNA, 14 nt, Human
gcauggcuccaguc

SEQ ID NO: 2407517 - RNA, 23 nt, Human
gcauccugccuuagagccaggca

SEQ ID NO: 2407518 - RNA, 21 nt, Human
gcauccugccuuagagccagg

SEQ ID NO: 2407519 - RNA, 17 nt, Human
gcauccuccgccucccg

SEQ ID NO: 2407520 - RNA, 13 nt, Human
gcauccuggcacc

SEQ ID NO: 2407521 - RNA, 21 nt, Human
gcauggcugccaaugggagcu

SEQ ID NO: 2407522 - RNA, 19 nt, Human
gcaugggaaagccaccucu

SEQ ID NO: 2407523 - RNA, 18 nt, Human
gcaugggaaagccaccuc

SEQ ID NO: 2407524 - RNA, 15 nt, Human
gcauggcuccagucu

SEQ ID NO: 2407525 - RNA, 21 nt, Human
gcauggcuccagucugcugcc

SEQ ID NO: 2407526 - RNA, 15 nt, Human
gcauggcugugagga

SEQ ID NO: 2407527 - RNA, 22 nt, Human
gcauggcuccagucugcugccc

SEQ ID NO: 2407528 - RNA, 18 nt, Human
gcauggucacacacugau

SEQ ID NO: 2407529 - RNA, 15 nt, Human
gcauggucacacacu

SEQ ID NO: 2407530 - RNA, 19 nt, Human
gcauggggugggccucugg

SEQ ID NO: 2407531 - RNA, 21 nt, Human
gcaugggugaagggagagcca

SEQ ID NO: 2407532 - RNA, 18 nt, Human
gcauggggugggccucug

SEQ ID NO: 2407533 - RNA, 15 nt, Human
gcauggggugggccu

SEQ ID NO: 2407534 - RNA, 20 nt, Human
gcaugggaaagccaccucuc

SEQ ID NO: 2407535 - RNA, 16 nt, Human
gcauggugccccagga

SEQ ID NO: 2407536 - RNA, 17 nt, Human
gcauggugccccaggac

SEQ ID NO: 2407537 - RNA, 18 nt, Human
gcauggugccccaggacc

SEQ ID NO: 2407538 - RNA, 19 nt, Human
gcauggugccccaggacca

SEQ ID NO: 2407539 - RNA, 13 nt, Human
gcauggugcaguu

SEQ ID NO: 2407540 - RNA, 15 nt, Human
gcauggugccccagg

SEQ ID NO: 2407541 - RNA, 19 nt, Human
gcaugguggcgcaagccug

SEQ ID NO: 2407542 - RNA, 20 nt, Human
gcauggugccccaggaccag

SEQ ID NO: 2407543 - RNA, 21 nt, Human
gcauggugccccaggaccagc

SEQ ID NO: 2407544 - RNA, 23 nt, Human
gcauggugccccaggaccagcuc

SEQ ID NO: 2407545 - RNA, 15 nt, Human
gcaugguggcaccag

SEQ ID NO: 2407546 - RNA, 15 nt, Human
gcauugugggaaggg

SEQ ID NO: 2407547 - RNA, 13 nt, Human
gcauugugggaag

SEQ ID NO: 2407548 - RNA, 17 nt, Human
gcauguggccuguggcc

SEQ ID NO: 2407549 - RNA, 12 nt, Human
gcauguggccug

SEQ ID NO: 2407550 - RNA, 20 nt, Human
gcauguacaguguucuguuu

SEQ ID NO: 2407551 - RNA, 13 nt, Human
gcauguacagugu

SEQ ID NO: 2407552 - RNA, 21 nt, Human
gcaugugaugagaggaaauca

SEQ ID NO: 2407553 - RNA, 11 nt, Human
gcauguacagu

SEQ ID NO: 2407554 - RNA, 18 nt, Human
gcaugugaugagaggaaa

SEQ ID NO: 2407555 - RNA, 19 nt, Human
gcaugugaugagaggaaau

SEQ ID NO: 2407556 - RNA, 17 nt, Human
gcauguaaacacgccug

SEQ ID NO: 2407557 - RNA, 19 nt, Human
gcauguaaacacgccugca

SEQ ID NO: 2407558 - RNA, 15 nt, Human
gcauguaaacacgcc

SEQ ID NO: 2407559 - RNA, 18 nt, Human
gcauugugggaaggggag

SEQ ID NO: 2407560 - RNA, 16 nt, Human
gcauugugggaagggg

SEQ ID NO: 2407561 - RNA, 16 nt, Human
gcauuuaaaagauaca

SEQ ID NO: 2407562 - RNA, 17 nt, Human
gcauuuaaaagauacag

SEQ ID NO: 2407563 - RNA, 18 nt, Human
gcauuuaaaagauacagu

SEQ ID NO: 2407564 - RNA, 22 nt, Human
gcauuuaaaagauacaguuacu

SEQ ID NO: 2407565 - RNA, 15 nt, Human
gcauuuacuuugugu

SEQ ID NO: 2407566 - RNA, 16 nt, Human
gcauguggccuguggc

SEQ ID NO: 2407567 - RNA, 12 nt, Human
gcauguguauuu

SEQ ID NO: 2407568 - RNA, 20 nt, Human
gcauguguauuuccagugca

SEQ ID NO: 2407569 - RNA, 13 nt, Human
gauggaaugaugg

SEQ ID NO: 2407570 - RNA, 18 nt, Human
gauggaaccgcaggaagc

SEQ ID NO: 2407571 - RNA, 19 nt, Human
gauggaaccgcaggaagcu

SEQ ID NO: 2407572 - RNA, 20 nt, Human
gauggaaccgcaggaagcug

SEQ ID NO: 2407573 - RNA, 22 nt, Human
gauggaaccgcaggaagcugcu

SEQ ID NO: 2407574 - RNA, 15 nt, Human
gauggaagcuuccag

SEQ ID NO: 2407575 - RNA, 21 nt, Human
gauggaaguugcagugagcug

SEQ ID NO: 2407576 - RNA, 18 nt, Human
gauuuuuuuuuccuucag

SEQ ID NO: 2407577 - RNA, 17 nt, Human
gauuuuuuuuuccuuca

SEQ ID NO: 2407578 - RNA, 12 nt, Human
gauuucacucuc

SEQ ID NO: 2407579 - RNA, 16 nt, Human
gauuuuuuuuuccuuc

SEQ ID NO: 2407580 - RNA, 15 nt, Human
gauuuaauucucuug

SEQ ID NO: 2407581 - RNA, 13 nt, Human
gauuuaauucucu

SEQ ID NO: 2407582 - RNA, 12 nt, Human
gauuuaauucuc

SEQ ID NO: 2407583 - RNA, 23 nt, Human
gauuuaauuugauaucacagucu

SEQ ID NO: 2407584 - RNA, 19 nt, Human
gauuuaauuugauaucaca

SEQ ID NO: 2407585 - RNA, 19 nt, Human
gauuuacagccucacuuga

SEQ ID NO: 2407586 - RNA, 16 nt, Human
gauuuacacugggaga

SEQ ID NO: 2407587 - RNA, 11 nt, Human
gauuucacucu

SEQ ID NO: 2407588 - RNA, 18 nt, Human
gauuuauuucaucauauu

SEQ ID NO: 2407589 - RNA, 22 nt, Human
gauuuauuucaucauauuauac

SEQ ID NO: 2407590 - RNA, 13 nt, Human
gcaaaaagcaaaa

SEQ ID NO: 2407591 - RNA, 17 nt, Human
gcaaaagaugcuucuca

SEQ ID NO: 2407592 - RNA, 20 nt, Human
gcaaaaggaucuuuguggcc

SEQ ID NO: 2407593 - RNA, 21 nt, Human
gcaaaaggaucuuuguggcca

SEQ ID NO: 2407594 - RNA, 14 nt, Human
gcaaaaauauuuau

SEQ ID NO: 2407595 - RNA, 23 nt, Human
gcaaaaauauuuauaaaacuucu

SEQ ID NO: 2407596 - RNA, 22 nt, Human
gcaaaagaugcuucucacugcc

SEQ ID NO: 2407597 - RNA, 14 nt, Human
gcaaaaaggcagga

SEQ ID NO: 2407598 - RNA, 21 nt, Human
gauuuuuuuuuccuucagugc

SEQ ID NO: 2407599 - RNA, 15 nt, Human
gauuucaagccugcc

SEQ ID NO: 2407600 - RNA, 17 nt, Human
gauuuaacagaaaugua

SEQ ID NO: 2407601 - RNA, 18 nt, Human
gauuuaacagaaauguac

SEQ ID NO: 2407602 - RNA, 16 nt, Human
gauuuaacagaaaugu

SEQ ID NO: 2407603 - RNA, 20 nt, Human
gauucuucugcuucagccuc

SEQ ID NO: 2407604 - RNA, 21 nt, Human
gauuuaauuaaucaugaaugu

SEQ ID NO: 2407605 - RNA, 22 nt, Human
gauuuaauaguguuaaucaauu

SEQ ID NO: 2407606 - RNA, 21 nt, Human
gauuuaauaguguuaaucaau

SEQ ID NO: 2407607 - RNA, 23 nt, Human
gauuuaauaguguuaaucaauuu

SEQ ID NO: 2407608 - RNA, 20 nt, Human
gauuuaauaguguuaaucaa

SEQ ID NO: 2407609 - RNA, 19 nt, Human
gauuuaauaguguuaauca

SEQ ID NO: 2407610 - RNA, 18 nt, Human
gauuuaauaguguuaauc

SEQ ID NO: 2407611 - RNA, 17 nt, Human
gauuuaauaguguuaau

SEQ ID NO: 2407612 - RNA, 16 nt, Human
gauuuaauaguguuaa

SEQ ID NO: 2407613 - RNA, 15 nt, Human
gauuuaauaguguua

SEQ ID NO: 2407614 - RNA, 23 nt, Human
gauuuaauaaaauaauucuaaag

SEQ ID NO: 2407615 - RNA, 14 nt, Human
gauuuaauaguguu

SEQ ID NO: 2407616 - RNA, 19 nt, Human
gauuuaacagaaauguaca

SEQ ID NO: 2407617 - RNA, 22 nt, Human
gauuuaauaaaauaauucuaaa

SEQ ID NO: 2407618 - RNA, 19 nt, Human
gauuuaauaaaauaauucu

SEQ ID NO: 2407619 - RNA, 15 nt, Human
gauucuucugcuuca

SEQ ID NO: 2407620 - RNA, 13 nt, Human
gauucuucugcuu

SEQ ID NO: 2407621 - RNA, 12 nt, Human
gauucuucugcu

SEQ ID NO: 2407622 - RNA, 15 nt, Human
gcaagugagagcugg

SEQ ID NO: 2407623 - RNA, 16 nt, Human
gcaagugagagcuggg

SEQ ID NO: 2407624 - RNA, 24 nt, Human
gcaaccccaguucugcuccucucc

SEQ ID NO: 2407625 - RNA, 22 nt, Human
gcaaccccaguucugcuccucu

SEQ ID NO: 2407626 - RNA, 21 nt, Human
gcaaccccaguucugcuccuc

SEQ ID NO: 2407627 - RNA, 16 nt, Human
gcaaccucuuggccug

SEQ ID NO: 2407628 - RNA, 23 nt, Human
gcaaccucuuggccugaucagac

SEQ ID NO: 2407629 - RNA, 20 nt, Human
gcaaccuccgccucuugggu

SEQ ID NO: 2407630 - RNA, 20 nt, Human
gcaaccuucgccaccugggu

SEQ ID NO: 2407631 - RNA, 19 nt, Human
gcaaccuggguccaaauaa

SEQ ID NO: 2407632 - RNA, 18 nt, Human
gcaaccuggguccaaaua

SEQ ID NO: 2407633 - RNA, 14 nt, Human
gcaaccugggucca

SEQ ID NO: 2407634 - RNA, 20 nt, Human
gcaaccccaguucugcuccu

SEQ ID NO: 2407635 - RNA, 19 nt, Human
gcaaccccaguucugcucc

SEQ ID NO: 2407636 - RNA, 18 nt, Human
gcaaccccaguucugcuc

SEQ ID NO: 2407637 - RNA, 16 nt, Human
gcaaccccaguucugc

SEQ ID NO: 2407638 - RNA, 19 nt, Human
gcaaccuccgccucuuggg

SEQ ID NO: 2407639 - RNA, 16 nt, Human
gcaacccccagccugc

SEQ ID NO: 2407640 - RNA, 15 nt, Human
gcaacccccagccug

SEQ ID NO: 2407641 - RNA, 14 nt, Human
gcaacccacgugua

SEQ ID NO: 2407642 - RNA, 20 nt, Human
gcaacccaaggacugaggga

SEQ ID NO: 2407643 - RNA, 19 nt, Human
gcaaccccaggcugaagca

SEQ ID NO: 2407644 - RNA, 16 nt, Human
gcaacccaaggacuga

SEQ ID NO: 2407645 - RNA, 14 nt, Human
gcaacccccagccu

SEQ ID NO: 2407646 - RNA, 14 nt, Human
gcaaccacuaagaa

SEQ ID NO: 2407647 - RNA, 20 nt, Human
gcaaccacaggcagcauuua

SEQ ID NO: 2407648 - RNA, 18 nt, Human
gcaaccaguuggcuaggg

SEQ ID NO: 2407649 - RNA, 16 nt, Human
gcaaccaguuggcuag

SEQ ID NO: 2407650 - RNA, 14 nt, Human
gcaaccaguuggcu

SEQ ID NO: 2407651 - RNA, 19 nt, Human
gcaacagcaaaucacgacc

SEQ ID NO: 2407652 - RNA, 22 nt, Human
gcaacagaucuggaaccucagc

SEQ ID NO: 2407653 - RNA, 16 nt, Human
gcaaaauucccaggga

SEQ ID NO: 2407654 - RNA, 13 nt, Human
gcaacaggcuggg

SEQ ID NO: 2407655 - RNA, 15 nt, Human
gcaacaggcugggcu

SEQ ID NO: 2407656 - RNA, 14 nt, Human
gcaacaggcugggc

SEQ ID NO: 2407657 - RNA, 13 nt, Human
gcaaaaugugaau

SEQ ID NO: 2407658 - RNA, 17 nt, Human
gcaaaaugaggaaugua

SEQ ID NO: 2407659 - RNA, 23 nt, Human
gcaaaaucauuuuauaugucaaa

SEQ ID NO: 2407660 - RNA, 20 nt, Human
gcaaaaucauggaaugguua

SEQ ID NO: 2407661 - RNA, 13 nt, Human
gcaaaaucaugga

SEQ ID NO: 2407662 - RNA, 20 nt, Human
gcaaaauaauuuuaaacaaa

SEQ ID NO: 2407663 - RNA, 13 nt, Human
gcaaaauagcauu

SEQ ID NO: 2407664 - RNA, 13 nt, Human
gcaaaauaauuuu

SEQ ID NO: 2407665 - RNA, 15 nt, Human
gcaaaauaauuuuaa

SEQ ID NO: 2407666 - RNA, 19 nt, Human
gcaaaaguucugacuugac

SEQ ID NO: 2407667 - RNA, 18 nt, Human
gcaaaaguucugacuuga

SEQ ID NO: 2407668 - RNA, 17 nt, Human
gcaaaagggugucugag

SEQ ID NO: 2407669 - RNA, 23 nt, Human
gcaaaaggaucuuuguggccaag

SEQ ID NO: 2407670 - RNA, 21 nt, Human
gcaaaagguucacuaaagcag

SEQ ID NO: 2407671 - RNA, 20 nt, Human
gcaaaagguucacuaaagca

SEQ ID NO: 2407672 - RNA, 19 nt, Human
gcaacaggcugggcuucag

SEQ ID NO: 2407673 - RNA, 16 nt, Human
gcaacaggcugggcuu

SEQ ID NO: 2407674 - RNA, 17 nt, Human
gcaacagcauaacaagg

SEQ ID NO: 2407675 - RNA, 20 nt, Human
gcaacagcacuggcucucuc

SEQ ID NO: 2407676 - RNA, 18 nt, Human
gcaacagcacuggcucuc

SEQ ID NO: 2407677 - RNA, 13 nt, Human
gcaacagcacugg

SEQ ID NO: 2407678 - RNA, 21 nt, Human
gcaacaggaaucaagagcugc

SEQ ID NO: 2407679 - RNA, 18 nt, Human
gcaacaggaaucaagagc

SEQ ID NO: 2407680 - RNA, 22 nt, Human
gcaacaggguauggacuaucug

SEQ ID NO: 2407681 - RNA, 13 nt, Human
gcaacauccaaaa

SEQ ID NO: 2407682 - RNA, 17 nt, Human
gcaacauccaaaauagu

SEQ ID NO: 2407683 - RNA, 13 nt, Human
gcaacagguuuua

SEQ ID NO: 2407684 - RNA, 20 nt, Human
gcaacagguuuuauaauuuu

SEQ ID NO: 2407685 - RNA, 17 nt, Human
gcaacaguagcauagga

SEQ ID NO: 2407686 - RNA, 18 nt, Human
gcaaccaccaccaaccac

SEQ ID NO: 2407687 - RNA, 16 nt, Human
gcaaccaccaccaacc

SEQ ID NO: 2407688 - RNA, 13 nt, Human
gcaaccaccacca

SEQ ID NO: 2407689 - RNA, 18 nt, Human
gcaacaucuagcaaaugu

SEQ ID NO: 2407690 - RNA, 20 nt, Human
gaugaucagcuguuugucau

SEQ ID NO: 2407691 - RNA, 22 nt, Human
gaugauccaugaguuugcccug

SEQ ID NO: 2407692 - RNA, 23 nt, Human
gaugauccaugaguuugcccugg

SEQ ID NO: 2407693 - RNA, 19 nt, Human
gaugaucagcuguuuguca

SEQ ID NO: 2407694 - RNA, 22 nt, Human
gaugauuggaggggggaggugg

SEQ ID NO: 2407695 - RNA, 16 nt, Human
gaugauccggauuuaa

SEQ ID NO: 2407696 - RNA, 21 nt, Human
gaugauccggauuuaauuuga

SEQ ID NO: 2407697 - RNA, 17 nt, Human
gaugauuuaaaagggaa

SEQ ID NO: 2407698 - RNA, 13 nt, Human
gaugauccuaggc

SEQ ID NO: 2407699 - RNA, 14 nt, Human
gaugauccuaggca

SEQ ID NO: 2407700 - RNA, 20 nt, Human
gaugcuucuucagagacucc

SEQ ID NO: 2407701 - RNA, 17 nt, Human
gaugcuucuucagagac

SEQ ID NO: 2407702 - RNA, 21 nt, Human
gaugcuucuucagagacuccu

SEQ ID NO: 2407703 - RNA, 14 nt, Human
gaugauuuuuguca

SEQ ID NO: 2407704 - RNA, 22 nt, Human
gaugauuucuugaaaagggugu

SEQ ID NO: 2407705 - RNA, 15 nt, Human
gaugcuucugggaga

SEQ ID NO: 2407706 - RNA, 24 nt, Human
gaugcuugccuagggccuggucca

SEQ ID NO: 2407707 - RNA, 17 nt, Human
gauggaacacggccaca

SEQ ID NO: 2407708 - RNA, 21 nt, Human
gauggaacaggcucagaucuc

SEQ ID NO: 2407709 - RNA, 20 nt, Human
gauggaacccuuuuggcccc

SEQ ID NO: 2407710 - RNA, 22 nt, Human
gauggaacccuuuuggcccccg

SEQ ID NO: 2407711 - RNA, 17 nt, Human
gauggaaccgcaggaag

SEQ ID NO: 2407712 - RNA, 17 nt, Human
gauggaaaaggaagacu

SEQ ID NO: 2407713 - RNA, 15 nt, Human
gauggaaaaggaaga

SEQ ID NO: 2407714 - RNA, 18 nt, Human
gaugauacauccaaagca

SEQ ID NO: 2407715 - RNA, 22 nt, Human
gauggaaaaaccacccccaaau

SEQ ID NO: 2407716 - RNA, 20 nt, Human
gaucugcagggggugugucu

SEQ ID NO: 2407717 - RNA, 13 nt, Human
gaucugccccucc

SEQ ID NO: 2407718 - RNA, 12 nt, Human
gaucuggaaccc

SEQ ID NO: 2407719 - RNA, 14 nt, Human
gaucuggaacccag

SEQ ID NO: 2407720 - RNA, 20 nt, Human
gaucugccccucccugcuuc

SEQ ID NO: 2407721 - RNA, 14 nt, Human
gaucugccccuccc

SEQ ID NO: 2407722 - RNA, 15 nt, Human
gaucuggaacccaga

SEQ ID NO: 2407723 - RNA, 16 nt, Human
gaucuggaacccagac

SEQ ID NO: 2407724 - RNA, 17 nt, Human
gaucuggaacccagacu

SEQ ID NO: 2407725 - RNA, 18 nt, Human
gaucuggaacccagacuc

SEQ ID NO: 2407726 - RNA, 20 nt, Human
gaucuggaacccagacucag

SEQ ID NO: 2407727 - RNA, 12 nt, Human
gaucuggaaccu

SEQ ID NO: 2407728 - RNA, 16 nt, Human
gaucuggaaccucagc

SEQ ID NO: 2407729 - RNA, 17 nt, Human
gaucuggaaccucagcc

SEQ ID NO: 2407730 - RNA, 18 nt, Human
gaucuggaaccucagccu

SEQ ID NO: 2407731 - RNA, 19 nt, Human
gaucuggaaccucagccug

SEQ ID NO: 2407732 - RNA, 20 nt, Human
gaucuggaaccucagccugg

SEQ ID NO: 2407733 - RNA, 23 nt, Human
gaucccaggggcccaaggcggcc

SEQ ID NO: 2407734 - RNA, 24 nt, Human
gaucccaucuugauaagaccacca

SEQ ID NO: 2407735 - RNA, 16 nt, Human
gaucucucaggagcac

SEQ ID NO: 2407736 - RNA, 14 nt, Human
gaucucucaggagc

SEQ ID NO: 2407737 - RNA, 13 nt, Human
gaucucucaggag

SEQ ID NO: 2407738 - RNA, 12 nt, Human
gaucucucagga

SEQ ID NO: 2407739 - RNA, 15 nt, Human
gaucucuaacuucac

SEQ ID NO: 2407740 - RNA, 22 nt, Human
gaucccaccccauuuucugugg

SEQ ID NO: 2407741 - RNA, 17 nt, Human
gauccagccucuccccu

SEQ ID NO: 2407742 - RNA, 17 nt, Human
gaucccagcucacguca

SEQ ID NO: 2407743 - RNA, 19 nt, Human
gaucccagcucacgucaca

SEQ ID NO: 2407744 - RNA, 14 nt, Human
gauccagagcacag

SEQ ID NO: 2407745 - RNA, 12 nt, Human
gauccagccugg

SEQ ID NO: 2407746 - RNA, 23 nt, Human
gauccagcccugaguuccuagcc

SEQ ID NO: 2407747 - RNA, 14 nt, Human
gauccaccugucuc

SEQ ID NO: 2407748 - RNA, 18 nt, Human
gauccaccugucucagcc

SEQ ID NO: 2407749 - RNA, 19 nt, Human
gauccaccugucucagccu

SEQ ID NO: 2407750 - RNA, 24 nt, Human
gaucucucaggagcacaggcagcu

SEQ ID NO: 2407751 - RNA, 22 nt, Human
gaucucucaggagcacaggcag

SEQ ID NO: 2407752 - RNA, 21 nt, Human
gaucucucaggagcacaggca

SEQ ID NO: 2407753 - RNA, 20 nt, Human
gaucucucaggagcacaggc

SEQ ID NO: 2407754 - RNA, 19 nt, Human
gaucucucaggagcacagg

SEQ ID NO: 2407755 - RNA, 18 nt, Human
gaucucucaggagcacag

SEQ ID NO: 2407756 - RNA, 17 nt, Human
gaucucucaggagcaca

SEQ ID NO: 2407757 - RNA, 23 nt, Human
gaucucucaggagcacaggcagc

SEQ ID NO: 2407758 - RNA, 12 nt, Human
gaucucugcagg

SEQ ID NO: 2407759 - RNA, 18 nt, Human
gaucucuugagccuggga

SEQ ID NO: 2407760 - RNA, 23 nt, Human
gaucucugcaggaaauggcugug

SEQ ID NO: 2407761 - RNA, 15 nt, Human
gaucugagucccagg

SEQ ID NO: 2407762 - RNA, 17 nt, Human
gaucugaugcaagcaag

SEQ ID NO: 2407763 - RNA, 18 nt, Human
gaucugagaaucuuuauu

SEQ ID NO: 2407764 - RNA, 15 nt, Human
gaucugagaaucuuu

SEQ ID NO: 2407765 - RNA, 21 nt, Human
gaucugacaugauuccuuccu

SEQ ID NO: 2407766 - RNA, 22 nt, Human
gaucugacaugauuccuuccug

SEQ ID NO: 2407767 - RNA, 14 nt, Human
gaucugagaaucuu

SEQ ID NO: 2407768 - RNA, 19 nt, Human
gaucucuugagccugggag

SEQ ID NO: 2407769 - RNA, 17 nt, Human
gaucugacaugauuccu

SEQ ID NO: 2407770 - RNA, 19 nt, Human
gaucugacaugauuccuuc

SEQ ID NO: 2407771 - RNA, 12 nt, Human
gaucugaacaga

SEQ ID NO: 2407772 - RNA, 19 nt, Human
gaucugaacagaaauacca

SEQ ID NO: 2407773 - RNA, 19 nt, Human
gauacagucccuaaagaaa

SEQ ID NO: 2407774 - RNA, 18 nt, Human
gauacagucccuaaagaa

SEQ ID NO: 2407775 - RNA, 18 nt, Human
gauacauaugagugugga

SEQ ID NO: 2407776 - RNA, 20 nt, Human
gauacauaugaguguggaag

SEQ ID NO: 2407777 - RNA, 17 nt, Human
gauacauccaaagcaga

SEQ ID NO: 2407778 - RNA, 20 nt, Human
gauacauccaaagcagacag

SEQ ID NO: 2407779 - RNA, 21 nt, Human
gauacauccaaagcagacagc

SEQ ID NO: 2407780 - RNA, 23 nt, Human
gauacauccaaagcagacagcuc

SEQ ID NO: 2407781 - RNA, 21 nt, Human
gauacauacaccagcauuccu

SEQ ID NO: 2407782 - RNA, 12 nt, Human
gauacaugugcc

SEQ ID NO: 2407783 - RNA, 13 nt, Human
gauaccagcugga

SEQ ID NO: 2407784 - RNA, 22 nt, Human
gauaccagcgaggaggcuccag

SEQ ID NO: 2407785 - RNA, 15 nt, Human
gauaccagcgaggag

SEQ ID NO: 2407786 - RNA, 19 nt, Human
gauacaguuacucagaauu

SEQ ID NO: 2407787 - RNA, 23 nt, Human
gauacaguuacucagaauucucu

SEQ ID NO: 2407788 - RNA, 16 nt, Human
gauacaguuacucaga

SEQ ID NO: 2407789 - RNA, 21 nt, Human
gauacugcagggccaggacug

SEQ ID NO: 2407790 - RNA, 18 nt, Human
gauacugcagggccagga

SEQ ID NO: 2407791 - RNA, 15 nt, Human
gauacugcccggggc

SEQ ID NO: 2407792 - RNA, 18 nt, Human
gauaccauauacagcuca

SEQ ID NO: 2407793 - RNA, 12 nt, Human
gauaccagcccc

SEQ ID NO: 2407794 - RNA, 17 nt, Human
gauaccagguugaaaga

SEQ ID NO: 2407795 - RNA, 20 nt, Human
gauaccagguugaaagaccu

SEQ ID NO: 2407796 - RNA, 13 nt, Human
gauacucugucag

SEQ ID NO: 2407797 - RNA, 17 nt, Human
gauacucugucagaugg

SEQ ID NO: 2407798 - RNA, 20 nt, Human
gauacugcgacuuucugccu

SEQ ID NO: 2407799 - RNA, 19 nt, Human
gauacugcgacuuucugcc

SEQ ID NO: 2407800 - RNA, 18 nt, Human
gauacugcgacuuucugc

SEQ ID NO: 2407801 - RNA, 17 nt, Human
gauacugcgacuuucug

SEQ ID NO: 2407802 - RNA, 23 nt, Human
gauacugcgacuuucugccugga

SEQ ID NO: 2407803 - RNA, 21 nt, Human
gauacugcgacuuucugccug

SEQ ID NO: 2407804 - RNA, 23 nt, Human
gauacugcuacuguaauuuuaua

SEQ ID NO: 2407805 - RNA, 14 nt, Human
gauacuggaaguuu

SEQ ID NO: 2407806 - RNA, 17 nt, Human
gauacuguaucaugaca

SEQ ID NO: 2407807 - RNA, 21 nt, Human
gauacuguaucaugacaaaga

SEQ ID NO: 2407808 - RNA, 20 nt, Human
gauacuggaaguuuugcauu

SEQ ID NO: 2407809 - RNA, 16 nt, Human
gauacuggaaguuuug

SEQ ID NO: 2407810 - RNA, 19 nt, Human
gauacuggaaguuuugcau

SEQ ID NO: 2407811 - RNA, 16 nt, Human
gauacuguaacacuuu

SEQ ID NO: 2407812 - RNA, 17 nt, Human
gauacugucucuuucau

SEQ ID NO: 2407813 - RNA, 19 nt, Human
gauccaagcuggucccacu

SEQ ID NO: 2407814 - RNA, 17 nt, Human
gauccaagcugguccca

SEQ ID NO: 2407815 - RNA, 16 nt, Human
gauccaagcugguccc

SEQ ID NO: 2407816 - RNA, 12 nt, Human
gauccaagcugg

SEQ ID NO: 2407817 - RNA, 19 nt, Human
gauccaacuaaugccuuac

SEQ ID NO: 2407818 - RNA, 20 nt, Human
gauccaacuaaugccuuacu

SEQ ID NO: 2407819 - RNA, 23 nt, Human
gauccaaaagaagcccccagcua

SEQ ID NO: 2407820 - RNA, 16 nt, Human
gauccaaaagaagccc

SEQ ID NO: 2407821 - RNA, 19 nt, Human
gauccaaaagaagccccca

SEQ ID NO: 2407822 - RNA, 20 nt, Human
gauccaaaagaagcccccag

SEQ ID NO: 2407823 - RNA, 22 nt, Human
gauccaaaagaagcccccagcu

SEQ ID NO: 2407824 - RNA, 23 nt, Human
gaucauuuucuuaucuucugcaa

SEQ ID NO: 2407825 - RNA, 13 nt, Human
gauccaaaagaag

SEQ ID NO: 2407826 - RNA, 20 nt, Human
gaucaacaucuuuucuugcc

SEQ ID NO: 2407827 - RNA, 17 nt, Human
gaucaacaucuuuucuu

SEQ ID NO: 2407828 - RNA, 16 nt, Human
gaucaacaucuuuucu

SEQ ID NO: 2407829 - RNA, 14 nt, Human
gaucaacaucuuuu

SEQ ID NO: 2407830 - RNA, 23 nt, Human
gaucaaauucauuuuuuucacug

SEQ ID NO: 2407831 - RNA, 19 nt, Human
gauccacccaccucagccu

SEQ ID NO: 2407832 - RNA, 18 nt, Human
gauccacccaccucagcc

SEQ ID NO: 2407833 - RNA, 21 nt, Human
gauccaagcuggucccacuca

SEQ ID NO: 2407834 - RNA, 18 nt, Human
gaucaaccagcuaagaaa

SEQ ID NO: 2407835 - RNA, 19 nt, Human
gauccaaguuuacucaacc

SEQ ID NO: 2407836 - RNA, 14 nt, Human
gauccacacacaga

SEQ ID NO: 2407837 - RNA, 15 nt, Human
gauccacacacagag

SEQ ID NO: 2407838 - RNA, 21 nt, Human
gauccacccaccucagccucc

SEQ ID NO: 2407839 - RNA, 20 nt, Human
gauccacccaccucagccuc

SEQ ID NO: 2407840 - RNA, 22 nt, Human
gauccacccaccucagccuccc

SEQ ID NO: 2407841 - RNA, 18 nt, Human
gauccacacacagaggaa

SEQ ID NO: 2407842 - RNA, 16 nt, Human
gauccacacacagagg

SEQ ID NO: 2407843 - RNA, 17 nt, Human
gauccacacacagagga

SEQ ID NO: 2407844 - RNA, 19 nt, Human
gauccacacacagaggaag

SEQ ID NO: 2407845 - RNA, 15 nt, Human
gauauuuucugugcc

SEQ ID NO: 2407846 - RNA, 21 nt, Human
gauauuuucugugccugaaua

SEQ ID NO: 2407847 - RNA, 23 nt, Human
gauauuuucaacgcagcccugcu

SEQ ID NO: 2407848 - RNA, 22 nt, Human
gauauuuucaacgcagcccugc

SEQ ID NO: 2407849 - RNA, 21 nt, Human
gauauuuucaacgcagcccug

SEQ ID NO: 2407850 - RNA, 17 nt, Human
gauauuuuuuucuuuuc

SEQ ID NO: 2407851 - RNA, 15 nt, Human
gauauuuugcuuugu

SEQ ID NO: 2407852 - RNA, 20 nt, Human
gaucaaaagguuaauaaagu

SEQ ID NO: 2407853 - RNA, 20 nt, Human
gaucaaaauaaaaagugaca

SEQ ID NO: 2407854 - RNA, 17 nt, Human
gaucaaaauaaaaagug

SEQ ID NO: 2407855 - RNA, 20 nt, Human
gauauuuucuuccaagcaaa

SEQ ID NO: 2407856 - RNA, 23 nt, Human
gaucaaaagguuaauaaaguaau

SEQ ID NO: 2407857 - RNA, 22 nt, Human
gaucaaaauaaaaagugacaca

SEQ ID NO: 2407858 - RNA, 22 nt, Human
gaucaaaccccgaccaccugcc

SEQ ID NO: 2407859 - RNA, 19 nt, Human
gaucaaauacuuuaaagga

SEQ ID NO: 2407860 - RNA, 17 nt, Human
gaucaaauacuuuaaag

SEQ ID NO: 2407861 - RNA, 16 nt, Human
gaucaaauacuuuaaa

SEQ ID NO: 2407862 - RNA, 14 nt, Human
gaucaaauacuuua

SEQ ID NO: 2407863 - RNA, 17 nt, Human
gaucaaaggcacacagc

SEQ ID NO: 2407864 - RNA, 14 nt, Human
gauagaaauaaaua

SEQ ID NO: 2407865 - RNA, 16 nt, Human
gauagaaauaaauagc

SEQ ID NO: 2407866 - RNA, 20 nt, Human
gauagaaauaaauagcuaua

SEQ ID NO: 2407867 - RNA, 14 nt, Human
gauagaagaacugc

SEQ ID NO: 2407868 - RNA, 16 nt, Human
gauagaagaacugcaa

SEQ ID NO: 2407869 - RNA, 22 nt, Human
gauacuguaacacuuuacaaug

SEQ ID NO: 2407870 - RNA, 17 nt, Human
gauacuugaaaauuaac

SEQ ID NO: 2407871 - RNA, 18 nt, Human
gauacuuugauauuuuca

SEQ ID NO: 2407872 - RNA, 13 nt, Human
gauacuuuacaug

SEQ ID NO: 2407873 - RNA, 23 nt, Human
gauauuucuauuuccuggaaugg

SEQ ID NO: 2407874 - RNA, 19 nt, Human
gauauuuauggggggagaa

SEQ ID NO: 2407875 - RNA, 17 nt, Human
gauauugugaaguacau

SEQ ID NO: 2407876 - RNA, 13 nt, Human
gauauuuauauau

SEQ ID NO: 2407877 - RNA, 16 nt, Human
gauauugugaaguaca

SEQ ID NO: 2407878 - RNA, 16 nt, Human
gauauuuauauauauu

SEQ ID NO: 2407879 - RNA, 23 nt, Human
gauauuuauauuuuuauuuuauu

SEQ ID NO: 2407880 - RNA, 19 nt, Human
gauauuuucaacgcagccc

SEQ ID NO: 2407881 - RNA, 12 nt, Human
gauauuuucaaa

SEQ ID NO: 2407882 - RNA, 18 nt, Human
gauauuuucaaauuguau

SEQ ID NO: 2407883 - RNA, 19 nt, Human
gauauuuucaaauuguauc

SEQ ID NO: 2407884 - RNA, 20 nt, Human
gauauuuucaaauuguaucu

SEQ ID NO: 2407885 - RNA, 22 nt, Human
gauauuucccuccccuggggac

SEQ ID NO: 2407886 - RNA, 21 nt, Human
gauauuuuaccucuuauugca

SEQ ID NO: 2407887 - RNA, 24 nt, Human
gaauauugcugauggugcaaugac

SEQ ID NO: 2407888 - RNA, 22 nt, Human
gaauauugcuuuggucauauga

SEQ ID NO: 2407889 - RNA, 23 nt, Human
gaauauugcugauggugcaauga

SEQ ID NO: 2407890 - RNA, 22 nt, Human
gaauauugcugauggugcaaug

SEQ ID NO: 2407891 - RNA, 13 nt, Human
gaauauugcugau

SEQ ID NO: 2407892 - RNA, 12 nt, Human
gaauauugcuga

SEQ ID NO: 2407893 - RNA, 11 nt, Human
gaauauugcug

SEQ ID NO: 2407894 - RNA, 18 nt, Human
gaauauucccaagcccau

SEQ ID NO: 2407895 - RNA, 18 nt, Human
gaauaugggagaaauagu

SEQ ID NO: 2407896 - RNA, 12 nt, Human
gaauauucagga

SEQ ID NO: 2407897 - RNA, 15 nt, Human
gaauauucaggacuu

SEQ ID NO: 2407898 - RNA, 18 nt, Human
gaauaugauuaguaaaga

SEQ ID NO: 2407899 - RNA, 16 nt, Human
gaauauccaugaccua

SEQ ID NO: 2407900 - RNA, 17 nt, Human
gaauauccccucccagu

SEQ ID NO: 2407901 - RNA, 22 nt, Human
gaauauccccucccagucaccu

SEQ ID NO: 2407902 - RNA, 14 nt, Human
gaauaucugggauu

SEQ ID NO: 2407903 - RNA, 19 nt, Human
gaauaugacggaagaacau

SEQ ID NO: 2407904 - RNA, 19 nt, Human
gaauaugagcuuuauguaa

SEQ ID NO: 2407905 - RNA, 22 nt, Human
gaauaugaacggugagcauugu

SEQ ID NO: 2407906 - RNA, 14 nt, Human
gaauaugacagcug

SEQ ID NO: 2407907 - RNA, 15 nt, Human
gaauaugacggaaga

SEQ ID NO: 2407908 - RNA, 17 nt, Human
gaauaugacggaagaac

SEQ ID NO: 2407909 - RNA, 17 nt, Human
gaauaugggagaaauag

SEQ ID NO: 2407910 - RNA, 19 nt, Human
gaauaugauuaguaaagaa

SEQ ID NO: 2407911 - RNA, 22 nt, Human
gaauauauggcagaguuguaaa

SEQ ID NO: 2407912 - RNA, 21 nt, Human
gaauauauggcagaguuguaa

SEQ ID NO: 2407913 - RNA, 20 nt, Human
gaauauauggcagaguugua

SEQ ID NO: 2407914 - RNA, 15 nt, Human
gaauauauggcagag

SEQ ID NO: 2407915 - RNA, 23 nt, Human
gaauauauggcagaguuguaaau

SEQ ID NO: 2407916 - RNA, 11 nt, Human
gaauauauuau

SEQ ID NO: 2407917 - RNA, 12 nt, Human
gaauauauuaua

SEQ ID NO: 2407918 - RNA, 15 nt, Human
gaauauauaaccagu

SEQ ID NO: 2407919 - RNA, 21 nt, Human
gaauauaccccuuaguguuug

SEQ ID NO: 2407920 - RNA, 22 nt, Human
gaauauacagcaggugcucaau

SEQ ID NO: 2407921 - RNA, 14 nt, Human
gaaugaauggcuaa

SEQ ID NO: 2407922 - RNA, 23 nt, Human
gacacagcagcuucaccagagca

SEQ ID NO: 2407923 - RNA, 22 nt, Human
gacacagcagcuucaccagagc

SEQ ID NO: 2407924 - RNA, 21 nt, Human
gacacagcucuucuccaggcu

SEQ ID NO: 2407925 - RNA, 20 nt, Human
gacacagcucuucuccaggc

SEQ ID NO: 2407926 - RNA, 19 nt, Human
gacacagcucuucuccagg

SEQ ID NO: 2407927 - RNA, 21 nt, Human
gacacagcagcuucaccagag

SEQ ID NO: 2407928 - RNA, 20 nt, Human
gacacagcagcuucaccaga

SEQ ID NO: 2407929 - RNA, 19 nt, Human
gacacagcagcuucaccag

SEQ ID NO: 2407930 - RNA, 18 nt, Human
gacacagcagcuucacca

SEQ ID NO: 2407931 - RNA, 15 nt, Human
gacacagcagcuuca

SEQ ID NO: 2407932 - RNA, 11 nt, Human
gacacagcagc

SEQ ID NO: 2407933 - RNA, 15 nt, Human
gacacagaugaaaca

SEQ ID NO: 2407934 - RNA, 12 nt, Human
gacacagcucuu

SEQ ID NO: 2407935 - RNA, 20 nt, Human
gacaaauacucauguguaug

SEQ ID NO: 2407936 - RNA, 15 nt, Human
gacaaaucaaagcag

SEQ ID NO: 2407937 - RNA, 19 nt, Human
gacacagaaaauguugaga

SEQ ID NO: 2407938 - RNA, 21 nt, Human
gacacagaaaauguugagaau

SEQ ID NO: 2407939 - RNA, 15 nt, Human
gacaaagucaagcca

SEQ ID NO: 2407940 - RNA, 19 nt, Human
gacaaauacucauguguau

SEQ ID NO: 2407941 - RNA, 18 nt, Human
gacaaauacucaugugua

SEQ ID NO: 2407942 - RNA, 17 nt, Human
gacaaauacucaugugu

SEQ ID NO: 2407943 - RNA, 18 nt, Human
gacaaagguuuuccucuu

SEQ ID NO: 2407944 - RNA, 23 nt, Human
gacaaaguuacugauucacugca

SEQ ID NO: 2407945 - RNA, 13 nt, Human
gaauuauuuuaaa

SEQ ID NO: 2407946 - RNA, 16 nt, Human
gaauuauuuuaaaaga

SEQ ID NO: 2407947 - RNA, 18 nt, Human
gaauuauuuuaaaagaua

SEQ ID NO: 2407948 - RNA, 16 nt, Human
gaauucaaacuggggc

SEQ ID NO: 2407949 - RNA, 18 nt, Human
gaauucaaacuggggccu

SEQ ID NO: 2407950 - RNA, 21 nt, Human
gaauucaaacuggggccucca

SEQ ID NO: 2407951 - RNA, 22 nt, Human
gaauucaaacuggggccuccag

SEQ ID NO: 2407952 - RNA, 20 nt, Human
gaauuuuuuucaucuucucu

SEQ ID NO: 2407953 - RNA, 16 nt, Human
gaauuuuuuucaucuu

SEQ ID NO: 2407954 - RNA, 22 nt, Human
gaauuaccuuagauuagcucug

SEQ ID NO: 2407955 - RNA, 18 nt, Human
gaauuagaaacauaaaua

SEQ ID NO: 2407956 - RNA, 16 nt, Human
gaauuaguccuugcuu

SEQ ID NO: 2407957 - RNA, 22 nt, Human
gaauuuuuuucaucuucucugg

SEQ ID NO: 2407958 - RNA, 22 nt, Human
gaauuuuuuuuuccuagcccuc

SEQ ID NO: 2407959 - RNA, 16 nt, Human
gacaaaaacagccuca

SEQ ID NO: 2407960 - RNA, 17 nt, Human
gacaaaaacagccucac

SEQ ID NO: 2407961 - RNA, 18 nt, Human
gacaaaaacagccucaca

SEQ ID NO: 2407962 - RNA, 20 nt, Human
gacaaaaacagccucacaga

SEQ ID NO: 2407963 - RNA, 19 nt, Human
gacaaacaccucccaggag

SEQ ID NO: 2407964 - RNA, 17 nt, Human
gacaaacaccucccagg

SEQ ID NO: 2407965 - RNA, 22 nt, Human
gacaaacaccucccaggagaca

SEQ ID NO: 2407966 - RNA, 14 nt, Human
gacaaacagcucag

SEQ ID NO: 2407967 - RNA, 15 nt, Human
gacaaaccagaagca

SEQ ID NO: 2407968 - RNA, 13 nt, Human
gacaaaggcaagc

SEQ ID NO: 2407969 - RNA, 17 nt, Human
gacaaaggacauuuguu

SEQ ID NO: 2407970 - RNA, 23 nt, Human
gacaaagcuuggaagagccugca

SEQ ID NO: 2407971 - RNA, 23 nt, Human
gacaaagaugauuuaaaagggaa

SEQ ID NO: 2407972 - RNA, 20 nt, Human
gacaaagccaaacucugcca

SEQ ID NO: 2407973 - RNA, 20 nt, Human
gacaaacugccaguuuuguu

SEQ ID NO: 2407974 - RNA, 17 nt, Human
gacaaacugccaguuuu

SEQ ID NO: 2407975 - RNA, 19 nt, Human
gacaaacugcauauguacu

SEQ ID NO: 2407976 - RNA, 14 nt, Human
gacaaagacaaauu

SEQ ID NO: 2407977 - RNA, 21 nt, Human
gacaaagacaaauucuguuuc

SEQ ID NO: 2407978 - RNA, 22 nt, Human
gacaaagaugauuuaaaaggga

SEQ ID NO: 2407979 - RNA, 15 nt, Human
gaaugaauggcuaag

SEQ ID NO: 2407980 - RNA, 20 nt, Human
gaaugaauggcuaagcaaaa

SEQ ID NO: 2407981 - RNA, 16 nt, Human
gaaugaucucuucuuu

SEQ ID NO: 2407982 - RNA, 22 nt, Human
gaaugaggugggagguggaaga

SEQ ID NO: 2407983 - RNA, 15 nt, Human
gaaugaggugggagg

SEQ ID NO: 2407984 - RNA, 14 nt, Human
gaaugauuaugaau

SEQ ID NO: 2407985 - RNA, 14 nt, Human
gaaugauuaauuaa

SEQ ID NO: 2407986 - RNA, 14 nt, Human
gaaugaugccauga

SEQ ID NO: 2407987 - RNA, 20 nt, Human
gaaugaugauccuaggcauu

SEQ ID NO: 2407988 - RNA, 22 nt, Human
gaaugauuaugaauuacauuug

SEQ ID NO: 2407989 - RNA, 17 nt, Human
gaaugaucucuucuuuu

SEQ ID NO: 2407990 - RNA, 18 nt, Human
gaaugaucuuucuuuccu

SEQ ID NO: 2407991 - RNA, 15 nt, Human
gaaugauucaguguu

SEQ ID NO: 2407992 - RNA, 18 nt, Human
gaaugcacaaacagaggc

SEQ ID NO: 2407993 - RNA, 13 nt, Human
gaaugaugaagcu

SEQ ID NO: 2407994 - RNA, 23 nt, Human
gaaugauucuaauuuuuaagcaa

SEQ ID NO: 2407995 - RNA, 14 nt, Human
gaaugauuucaugc

SEQ ID NO: 2407996 - RNA, 16 nt, Human
gaaugauuuccaaaga

SEQ ID NO: 2407997 - RNA, 20 nt, Human
gaaugauuuccaaagagaaa

SEQ ID NO: 2407998 - RNA, 17 nt, Human
gaauguuugccucugcc

SEQ ID NO: 2407999 - RNA, 16 nt, Human
gaauguuugccucugc

SEQ ID NO: 2408000 - RNA, 19 nt, Human
gaaugcacaaacagaggcc

SEQ ID NO: 2408001 - RNA, 15 nt, Human
gaauguuugccucug

SEQ ID NO: 2408002 - RNA, 16 nt, Human
gaaugauuuuuagaug

SEQ ID NO: 2408003 - RNA, 14 nt, Human
gaaugauuuuuaga

SEQ ID NO: 2408004 - RNA, 22 nt, Human
gaaugauuuccaaagagaaaaa

SEQ ID NO: 2408005 - RNA, 19 nt, Human
gaauguuugccucugccuc

SEQ ID NO: 2408006 - RNA, 18 nt, Human
gaauguuugccucugccu

SEQ ID NO: 2408007 - RNA, 14 nt, Human
gaauguuugucuca

SEQ ID NO: 2408008 - RNA, 15 nt, Human
gaauguuuuaaauuc

SEQ ID NO: 2408009 - RNA, 16 nt, Human
gaauguuuuaaauucu

SEQ ID NO: 2408010 - RNA, 14 nt, Human
gaauuaacacauga

SEQ ID NO: 2408011 - RNA, 15 nt, Human
gaauuaacacaugau

SEQ ID NO: 2408012 - RNA, 22 nt, Human
gaauuaaaguggaccaauaggg

SEQ ID NO: 2408013 - RNA, 12 nt, Human
gaauuaaauaaa

SEQ ID NO: 2408014 - RNA, 20 nt, Human
gaauuaaauaaacccuuccu

SEQ ID NO: 2408015 - RNA, 20 nt, Human
gaauuaaauuaggaauaaau

SEQ ID NO: 2408016 - RNA, 21 nt, Human
gaauuaaauuaggaauaaaua

SEQ ID NO: 2408017 - RNA, 18 nt, Human
gaauuacauuuguauaaa

SEQ ID NO: 2408018 - RNA, 15 nt, Human
gaauuacauuuguau

SEQ ID NO: 2408019 - RNA, 20 nt, Human
gaauuacauuuguauaaaau

SEQ ID NO: 2408020 - RNA, 22 nt, Human
gaauuacauguaaaacauuauc

SEQ ID NO: 2408021 - RNA, 13 nt, Human
gaauuacauuugu

SEQ ID NO: 2408022 - RNA, 21 nt, Human
gaauuaaucaucuauaaagaa

SEQ ID NO: 2408023 - RNA, 15 nt, Human
gaauuaauagcuuuu

SEQ ID NO: 2408024 - RNA, 22 nt, Human
gaauuaauaucccuacauguau

SEQ ID NO: 2408025 - RNA, 21 nt, Human
gaauuacauguaaaacauuau

SEQ ID NO: 2408026 - RNA, 19 nt, Human
gaauuaaugacagagccag

SEQ ID NO: 2408027 - RNA, 13 nt, Human
gaauuaaauuuaa

SEQ ID NO: 2408028 - RNA, 15 nt, Human
gaauuaaccuggugc

SEQ ID NO: 2408029 - RNA, 16 nt, Human
gaauuaaccuggugcu

SEQ ID NO: 2408030 - RNA, 18 nt, Human
gaauuaaccuggugcugg

SEQ ID NO: 2408031 - RNA, 19 nt, Human
gaauuaaccuggugcugga

SEQ ID NO: 2408032 - RNA, 22 nt, Human
gaauuaaccuggugcuggauau

SEQ ID NO: 2408033 - RNA, 17 nt, Human
gaauuaacuccauucca

SEQ ID NO: 2408034 - RNA, 20 nt, Human
gaauuaaguuaucuuuaaaa

SEQ ID NO: 2408035 - RNA, 15 nt, Human
gaauuaaguuaucuu

SEQ ID NO: 2408036 - RNA, 21 nt, Human
gaauuaauaucccuacaugua

SEQ ID NO: 2408037 - RNA, 21 nt, Human
gaauuaaguuagggaauggca

SEQ ID NO: 2408038 - RNA, 18 nt, Human
gaauuaaguuagggaaug

SEQ ID NO: 2408039 - RNA, 23 nt, Human
gacauuugggagacaugugacau

SEQ ID NO: 2408040 - RNA, 22 nt, Human
gacauuugggagacaugugaca

SEQ ID NO: 2408041 - RNA, 23 nt, Human
gacauugcuuuacugucaaaaua

SEQ ID NO: 2408042 - RNA, 15 nt, Human
gacauuuugccaaaa

SEQ ID NO: 2408043 - RNA, 15 nt, Human
gacauuuucuucaga

SEQ ID NO: 2408044 - RNA, 18 nt, Human
gacauugcuaagaugcuc

SEQ ID NO: 2408045 - RNA, 12 nt, Human
gacauugcuaag

SEQ ID NO: 2408046 - RNA, 23 nt, Human
gacauuggcaccuaauccaggca

SEQ ID NO: 2408047 - RNA, 23 nt, Human
gacauguuuugauaaaguaguaa

SEQ ID NO: 2408048 - RNA, 20 nt, Human
gacauguuuugauaaaguag

SEQ ID NO: 2408049 - RNA, 14 nt, Human
gacauguuuuuguu

SEQ ID NO: 2408050 - RNA, 14 nt, Human
gacauugcguuuga

SEQ ID NO: 2408051 - RNA, 21 nt, Human
gacauugcguuugaccuuuua

SEQ ID NO: 2408052 - RNA, 23 nt, Human
gacauugcggacagccacggcca

SEQ ID NO: 2408053 - RNA, 17 nt, Human
gacauugcggacagcca

SEQ ID NO: 2408054 - RNA, 18 nt, Human
gacagucaccucauggaa

SEQ ID NO: 2408055 - RNA, 11 nt, Human
gacagcucuua

SEQ ID NO: 2408056 - RNA, 16 nt, Human
gacaguccagccugga

SEQ ID NO: 2408057 - RNA, 15 nt, Human
gacaguccagccugg

SEQ ID NO: 2408058 - RNA, 12 nt, Human
gacagucccugc

SEQ ID NO: 2408059 - RNA, 10 nt, Human
gacagcucuu

SEQ ID NO: 2408060 - RNA, 19 nt, Human
gacagccccagagcagggu

SEQ ID NO: 2408061 - RNA, 18 nt, Human
gacagccccagagcaggg

SEQ ID NO: 2408062 - RNA, 20 nt, Human
gacagccccagagcagggug

SEQ ID NO: 2408063 - RNA, 15 nt, Human
gacagcucugccugu

SEQ ID NO: 2408064 - RNA, 12 nt, Human
gacagcucugca

SEQ ID NO: 2408065 - RNA, 19 nt, Human
gacagcuccuucuguccua

SEQ ID NO: 2408066 - RNA, 20 nt, Human
gacagucccugccaauggac

SEQ ID NO: 2408067 - RNA, 16 nt, Human
gacagucccugccaau

SEQ ID NO: 2408068 - RNA, 15 nt, Human
gacagucccugccaa

SEQ ID NO: 2408069 - RNA, 14 nt, Human
gacagucccugcca

SEQ ID NO: 2408070 - RNA, 16 nt, Human
gacauguuuugauaaa

SEQ ID NO: 2408071 - RNA, 14 nt, Human
gacauguuuugaua

SEQ ID NO: 2408072 - RNA, 17 nt, Human
gacauguuuuccgugaa

SEQ ID NO: 2408073 - RNA, 18 nt, Human
gacauguuauauauuuuu

SEQ ID NO: 2408074 - RNA, 15 nt, Human
gacauguuauauauu

SEQ ID NO: 2408075 - RNA, 23 nt, Human
gacauguuuuagacaaauacuca

SEQ ID NO: 2408076 - RNA, 17 nt, Human
gacauguggggccaggu

SEQ ID NO: 2408077 - RNA, 14 nt, Human
gacaugugguggga

SEQ ID NO: 2408078 - RNA, 16 nt, Human
gacauguggugggaca

SEQ ID NO: 2408079 - RNA, 22 nt, Human
gacauguggugggacagggacc

SEQ ID NO: 2408080 - RNA, 23 nt, Human
gacaugugaaaccuuuuuuaaga

SEQ ID NO: 2408081 - RNA, 12 nt, Human
gacaugugacau

SEQ ID NO: 2408082 - RNA, 19 nt, Human
gacaguccagccuggagau

SEQ ID NO: 2408083 - RNA, 17 nt, Human
gacaguccagccuggag

SEQ ID NO: 2408084 - RNA, 15 nt, Human
gacaguccucuccac

SEQ ID NO: 2408085 - RNA, 20 nt, Human
gacaugugacauuuauauau

SEQ ID NO: 2408086 - RNA, 16 nt, Human
gacaugugacauuuau

SEQ ID NO: 2408087 - RNA, 13 nt, Human
gacauguggaaag

SEQ ID NO: 2408088 - RNA, 18 nt, Human
gacauguggaaagugaau

SEQ ID NO: 2408089 - RNA, 19 nt, Human
gacauguggaaagugaauu

SEQ ID NO: 2408090 - RNA, 23 nt, Human
gacauguggaaagugaauuugaa

SEQ ID NO: 2408091 - RNA, 17 nt, Human
gacagccccagagcagg

SEQ ID NO: 2408092 - RNA, 16 nt, Human
gacagccccagagcag

SEQ ID NO: 2408093 - RNA, 14 nt, Human
gacagccccagagc

SEQ ID NO: 2408094 - RNA, 14 nt, Human
gacagccccacccu

SEQ ID NO: 2408095 - RNA, 15 nt, Human
gacagccccacccug

SEQ ID NO: 2408096 - RNA, 14 nt, Human
gacagcccgggcuc

SEQ ID NO: 2408097 - RNA, 20 nt, Human
gacacuuugaaauguguuuc

SEQ ID NO: 2408098 - RNA, 19 nt, Human
gacacuuugaaauguguuu

SEQ ID NO: 2408099 - RNA, 18 nt, Human
gacacuuugaaauguguu

SEQ ID NO: 2408100 - RNA, 15 nt, Human
gacacuuugaaaugu

SEQ ID NO: 2408101 - RNA, 22 nt, Human
gacacuuugaaauguguuucug

SEQ ID NO: 2408102 - RNA, 21 nt, Human
gacacuuugaaauguguuucu

SEQ ID NO: 2408103 - RNA, 23 nt, Human
gacacuuuaauuaccaaccuguu

SEQ ID NO: 2408104 - RNA, 23 nt, Human
gacacuugccuucuucacccagc

SEQ ID NO: 2408105 - RNA, 14 nt, Human
gacacuugucccca

SEQ ID NO: 2408106 - RNA, 15 nt, Human
gacacuuccugccua

SEQ ID NO: 2408107 - RNA, 14 nt, Human
gacacuuccugccu

SEQ ID NO: 2408108 - RNA, 22 nt, Human
gacacuugccuucuucacccag

SEQ ID NO: 2408109 - RNA, 15 nt, Human
gacacuugccuucuu

SEQ ID NO: 2408110 - RNA, 18 nt, Human
gacagcuccuucuguccu

SEQ ID NO: 2408111 - RNA, 17 nt, Human
gacagcuccuucugucc

SEQ ID NO: 2408112 - RNA, 16 nt, Human
gacagcccgggcucug

SEQ ID NO: 2408113 - RNA, 16 nt, Human
gacagcuccuucuguc

SEQ ID NO: 2408114 - RNA, 20 nt, Human
gacacugcggggcuuggcug

SEQ ID NO: 2408115 - RNA, 19 nt, Human
gacacugcggggcuuggcu

SEQ ID NO: 2408116 - RNA, 14 nt, Human
gacacuggccccuc

SEQ ID NO: 2408117 - RNA, 13 nt, Human
gacacuggccccu

SEQ ID NO: 2408118 - RNA, 22 nt, Human
gacacugcggggcuuggcugag

SEQ ID NO: 2408119 - RNA, 12 nt, Human
gacacuggcaug

SEQ ID NO: 2408120 - RNA, 16 nt, Human
gacacugcggggcuug

SEQ ID NO: 2408121 - RNA, 20 nt, Human
gacacuucccucuguuucuc

SEQ ID NO: 2408122 - RNA, 19 nt, Human
gacacuucccucuguuucu

SEQ ID NO: 2408123 - RNA, 18 nt, Human
gacacuucccucuguuuc

SEQ ID NO: 2408124 - RNA, 17 nt, Human
gacacuucccucuguuu

SEQ ID NO: 2408125 - RNA, 13 nt, Human
gacacuuccugcc

SEQ ID NO: 2408126 - RNA, 12 nt, Human
gacacuuccugc

SEQ ID NO: 2408127 - RNA, 21 nt, Human
gacacuucccucuguuucucu

SEQ ID NO: 2408128 - RNA, 15 nt, Human
gacacuucagagagc

SEQ ID NO: 2408129 - RNA, 17 nt, Human
gacacuucagagagcug

SEQ ID NO: 2408130 - RNA, 18 nt, Human
gacacuucagagagcugg

SEQ ID NO: 2408131 - RNA, 19 nt, Human
gacacuucagagagcuggu

SEQ ID NO: 2408132 - RNA, 20 nt, Human
gacacuucagagagcuggua

SEQ ID NO: 2408133 - RNA, 23 nt, Human
gacacuucagagagcugguaguu

SEQ ID NO: 2408134 - RNA, 15 nt, Human
gacacuggccccuca

SEQ ID NO: 2408135 - RNA, 17 nt, Human
gacacuggcugccagcu

SEQ ID NO: 2408136 - RNA, 23 nt, Human
gacacuggcucauauuccugcag

SEQ ID NO: 2408137 - RNA, 19 nt, Human
gacacugguuuacacuuua

SEQ ID NO: 2408138 - RNA, 23 nt, Human
gacacugguuuacacuuuaugcc

SEQ ID NO: 2408139 - RNA, 20 nt, Human
gacacugguauuccugccuc

SEQ ID NO: 2408140 - RNA, 22 nt, Human
gacacuggcugccagcuauuuu

SEQ ID NO: 2408141 - RNA, 19 nt, Human
gacacugguauuccugccu

SEQ ID NO: 2408142 - RNA, 14 nt, Human
gacgcucucuggcc

SEQ ID NO: 2408143 - RNA, 23 nt, Human
gacgcuacccgggaagggggcug

SEQ ID NO: 2408144 - RNA, 22 nt, Human
gacgccugcccuccccagagca

SEQ ID NO: 2408145 - RNA, 20 nt, Human
gacgccugcccuccccagag

SEQ ID NO: 2408146 - RNA, 23 nt, Human
gacgccugcccuccccagagcac

SEQ ID NO: 2408147 - RNA, 22 nt, Human
gacgcuacccgggaagggggcu

SEQ ID NO: 2408148 - RNA, 17 nt, Human
gacgcugugcugcccug

SEQ ID NO: 2408149 - RNA, 16 nt, Human
gacgcugugcugcccu

SEQ ID NO: 2408150 - RNA, 18 nt, Human
gacgcugugcugcccugc

SEQ ID NO: 2408151 - RNA, 17 nt, Human
gacgcucccugcuccac

SEQ ID NO: 2408152 - RNA, 15 nt, Human
gacgcugugcugccc

SEQ ID NO: 2408153 - RNA, 21 nt, Human
gacgccaucccagccccaaug

SEQ ID NO: 2408154 - RNA, 14 nt, Human
gacgccacccagca

SEQ ID NO: 2408155 - RNA, 13 nt, Human
gacgccacccagc

SEQ ID NO: 2408156 - RNA, 15 nt, Human
gacgccaucccagcc

SEQ ID NO: 2408157 - RNA, 13 nt, Human
gacgccugagcuc

SEQ ID NO: 2408158 - RNA, 22 nt, Human
gacgccggggacagaggccugc

SEQ ID NO: 2408159 - RNA, 13 nt, Human
gacgccugaggaa

SEQ ID NO: 2408160 - RNA, 18 nt, Human
gacgccugcccuccccag

SEQ ID NO: 2408161 - RNA, 17 nt, Human
gacgccugagcucacuc

SEQ ID NO: 2408162 - RNA, 14 nt, Human
gacgccugaggaac

SEQ ID NO: 2408163 - RNA, 21 nt, Human
gacgccggggacagaggccug

SEQ ID NO: 2408164 - RNA, 19 nt, Human
gacgccaucccagccccaa

SEQ ID NO: 2408165 - RNA, 13 nt, Human
gacgccaucccag

SEQ ID NO: 2408166 - RNA, 12 nt, Human
gacgccauccca

SEQ ID NO: 2408167 - RNA, 13 nt, Human
gaccucugccuga

SEQ ID NO: 2408168 - RNA, 12 nt, Human
gacgccacccag

SEQ ID NO: 2408169 - RNA, 16 nt, Human
gacgccaccauuccug

SEQ ID NO: 2408170 - RNA, 15 nt, Human
gacgccaccauuccu

SEQ ID NO: 2408171 - RNA, 14 nt, Human
gacgccaccauucc

SEQ ID NO: 2408172 - RNA, 13 nt, Human
gaccucguccucc

SEQ ID NO: 2408173 - RNA, 21 nt, Human
gaccucgagcagaugaugcca

SEQ ID NO: 2408174 - RNA, 14 nt, Human
gaccuccugccucc

SEQ ID NO: 2408175 - RNA, 12 nt, Human
gaccuccugccu

SEQ ID NO: 2408176 - RNA, 16 nt, Human
gaccuccccagccccu

SEQ ID NO: 2408177 - RNA, 14 nt, Human
gaccuccccagccc

SEQ ID NO: 2408178 - RNA, 13 nt, Human
gaccuccccagcc

SEQ ID NO: 2408179 - RNA, 17 nt, Human
gaccuccuaacaaguag

SEQ ID NO: 2408180 - RNA, 16 nt, Human
gaccucugcagcaaua

SEQ ID NO: 2408181 - RNA, 18 nt, Human
gaccucugcagcaauaaa

SEQ ID NO: 2408182 - RNA, 22 nt, Human
gaccucugcagcaauaaagcag

SEQ ID NO: 2408183 - RNA, 23 nt, Human
gaccucccagcccuauggaugug

SEQ ID NO: 2408184 - RNA, 22 nt, Human
gaccucccagcccuauggaugu

SEQ ID NO: 2408185 - RNA, 21 nt, Human
gaccucccagcccuauggaug

SEQ ID NO: 2408186 - RNA, 15 nt, Human
gaccucccagcccua

SEQ ID NO: 2408187 - RNA, 14 nt, Human
gaccucccagcccu

SEQ ID NO: 2408188 - RNA, 16 nt, Human
gaccuccccugaggcu

SEQ ID NO: 2408189 - RNA, 21 nt, Human
gaccucaugcaucuccaccug

SEQ ID NO: 2408190 - RNA, 17 nt, Human
gaccucaugcaucucca

SEQ ID NO: 2408191 - RNA, 23 nt, Human
gaccucaucaggaugaacccagg

SEQ ID NO: 2408192 - RNA, 19 nt, Human
gaccucaucaggaugaacc

SEQ ID NO: 2408193 - RNA, 22 nt, Human
gaccucaugcaucuccaccugc

SEQ ID NO: 2408194 - RNA, 13 nt, Human
gaccucaucagga

SEQ ID NO: 2408195 - RNA, 10 nt, Human
gaccucauca

SEQ ID NO: 2408196 - RNA, 21 nt, Human
gaccucaguuuuaucauuuuc

SEQ ID NO: 2408197 - RNA, 20 nt, Human
gaccucaguuuuaucauuuu

SEQ ID NO: 2408198 - RNA, 16 nt, Human
gacccucugccaccag

SEQ ID NO: 2408199 - RNA, 15 nt, Human
gacccucugccacca

SEQ ID NO: 2408200 - RNA, 20 nt, Human
gacccucugccaccagagac

SEQ ID NO: 2408201 - RNA, 16 nt, Human
gacccugaaggggcca

SEQ ID NO: 2408202 - RNA, 14 nt, Human
gaccucaggccugg

SEQ ID NO: 2408203 - RNA, 15 nt, Human
gacccucuccacccc

SEQ ID NO: 2408204 - RNA, 16 nt, Human
gacccucuccacccca

SEQ ID NO: 2408205 - RNA, 15 nt, Human
gacccucugaauggu

SEQ ID NO: 2408206 - RNA, 17 nt, Human
gacccucuccaccccau

SEQ ID NO: 2408207 - RNA, 23 nt, Human
gacccucugaaugguccaggguu

SEQ ID NO: 2408208 - RNA, 20 nt, Human
gacccucugaaugguccagg

SEQ ID NO: 2408209 - RNA, 14 nt, Human
gacccucugccacc

SEQ ID NO: 2408210 - RNA, 21 nt, Human
gaccucaggugauccacccac

SEQ ID NO: 2408211 - RNA, 20 nt, Human
gaccucaggugauccaccca

SEQ ID NO: 2408212 - RNA, 19 nt, Human
gaccucaggugauccaccc

SEQ ID NO: 2408213 - RNA, 21 nt, Human
gaccucaggugagaagcagag

SEQ ID NO: 2408214 - RNA, 19 nt, Human
gaccucaggccugggggcu

SEQ ID NO: 2408215 - RNA, 22 nt, Human
gaccucagguaaucgaccugcc

SEQ ID NO: 2408216 - RNA, 23 nt, Human
gaccucagguaaucgaccugccu

SEQ ID NO: 2408217 - RNA, 18 nt, Human
gaccucaggugagaagca

SEQ ID NO: 2408218 - RNA, 19 nt, Human
gaccucaggugagaagcag

SEQ ID NO: 2408219 - RNA, 22 nt, Human
gacccggagcuaacacuggccc

SEQ ID NO: 2408220 - RNA, 20 nt, Human
gaccccucuggccaggaugg

SEQ ID NO: 2408221 - RNA, 16 nt, Human
gaccccucuggccagg

SEQ ID NO: 2408222 - RNA, 18 nt, Human
gaccccucuggccaggau

SEQ ID NO: 2408223 - RNA, 17 nt, Human
gacccggaggggccugg

SEQ ID NO: 2408224 - RNA, 14 nt, Human
gacccggaggccac

SEQ ID NO: 2408225 - RNA, 13 nt, Human
gacccggaggcca

SEQ ID NO: 2408226 - RNA, 11 nt, Human
gacccggaggc

SEQ ID NO: 2408227 - RNA, 23 nt, Human
gacccggagcuaacacuggcccc

SEQ ID NO: 2408228 - RNA, 16 nt, Human
gaccccuccucccuuu

SEQ ID NO: 2408229 - RNA, 12 nt, Human
gaccccuccucc

SEQ ID NO: 2408230 - RNA, 23 nt, Human
gaccccuccucacuggccauccc

SEQ ID NO: 2408231 - RNA, 19 nt, Human
gaccccuccucacuggcca

SEQ ID NO: 2408232 - RNA, 17 nt, Human
gaccccuccucacuggc

SEQ ID NO: 2408233 - RNA, 16 nt, Human
gaccccugagcuugca

SEQ ID NO: 2408234 - RNA, 14 nt, Human
gaccccuccucccu

SEQ ID NO: 2408235 - RNA, 13 nt, Human
gaccccuccuccc

SEQ ID NO: 2408236 - RNA, 13 nt, Human
gaccccucuggcc

SEQ ID NO: 2408237 - RNA, 15 nt, Human
gaccccucuggccag

SEQ ID NO: 2408238 - RNA, 17 nt, Human
gacccggaggccacaug

SEQ ID NO: 2408239 - RNA, 15 nt, Human
gacccggaggccaca

SEQ ID NO: 2408240 - RNA, 23 nt, Human
gacccggaggccacaugaguccc

SEQ ID NO: 2408241 - RNA, 20 nt, Human
gacccggaggggccuggcag

SEQ ID NO: 2408242 - RNA, 19 nt, Human
gacccggaggggccuggca

SEQ ID NO: 2408243 - RNA, 18 nt, Human
gacccggaggggccuggc

SEQ ID NO: 2408244 - RNA, 15 nt, Human
gaccccuccucacug

SEQ ID NO: 2408245 - RNA, 14 nt, Human
gaccccuccucacu

SEQ ID NO: 2408246 - RNA, 13 nt, Human
gaccccuccucac

SEQ ID NO: 2408247 - RNA, 12 nt, Human
gaccccuccuca

SEQ ID NO: 2408248 - RNA, 11 nt, Human
gaccccuccuc

SEQ ID NO: 2408249 - RNA, 12 nt, Human
gagcuggagccu

SEQ ID NO: 2408250 - RNA, 20 nt, Human
gagcuggagccuggugcccu

SEQ ID NO: 2408251 - RNA, 15 nt, Human
gagcuggagccuggu

SEQ ID NO: 2408252 - RNA, 14 nt, Human
gagcuggagccugg

SEQ ID NO: 2408253 - RNA, 13 nt, Human
gagcccuggcagg

SEQ ID NO: 2408254 - RNA, 23 nt, Human
gagcccuggcaggaugacccugc

SEQ ID NO: 2408255 - RNA, 14 nt, Human
gagcccugguggca

SEQ ID NO: 2408256 - RNA, 13 nt, Human
gagcccugguggc

SEQ ID NO: 2408257 - RNA, 20 nt, Human
gagcuguucacagccagacu

SEQ ID NO: 2408258 - RNA, 12 nt, Human
gagcuggcucug

SEQ ID NO: 2408259 - RNA, 16 nt, Human
gagcuggcgucugucu

SEQ ID NO: 2408260 - RNA, 20 nt, Human
gagcuggccgugggccuggg

SEQ ID NO: 2408261 - RNA, 19 nt, Human
gagcuggccgugggccugg

SEQ ID NO: 2408262 - RNA, 17 nt, Human
gagcuggccgugggccu

SEQ ID NO: 2408263 - RNA, 20 nt, Human
gagcuggcaaagguggcucu

SEQ ID NO: 2408264 - RNA, 23 nt, Human
gagcuggccgcgccaaauaaugu

SEQ ID NO: 2408265 - RNA, 17 nt, Human
gagcuggccccgccgcc

SEQ ID NO: 2408266 - RNA, 16 nt, Human
gagcuggccccgccgc

SEQ ID NO: 2408267 - RNA, 14 nt, Human
gagcuggccccgcc

SEQ ID NO: 2408268 - RNA, 13 nt, Human
gagcuggccccgc

SEQ ID NO: 2408269 - RNA, 16 nt, Human
gagcuguugccucagu

SEQ ID NO: 2408270 - RNA, 18 nt, Human
gagcuguuuauggccuca

SEQ ID NO: 2408271 - RNA, 22 nt, Human
gagcuguucacagccagacugg

SEQ ID NO: 2408272 - RNA, 17 nt, Human
gagcuguuuacuaggga

SEQ ID NO: 2408273 - RNA, 16 nt, Human
gagcuguuuauggccu

SEQ ID NO: 2408274 - RNA, 17 nt, Human
gagcuguuuauggccuc

SEQ ID NO: 2408275 - RNA, 13 nt, Human
gagcaggggcagg

SEQ ID NO: 2408276 - RNA, 21 nt, Human
gagcagggcucagcggggaca

SEQ ID NO: 2408277 - RNA, 14 nt, Human
gagcagucaggaaa

SEQ ID NO: 2408278 - RNA, 16 nt, Human
gagcaggguguuggga

SEQ ID NO: 2408279 - RNA, 16 nt, Human
gagcagggugcugugg

SEQ ID NO: 2408280 - RNA, 16 nt, Human
gagcaguaucaugaag

SEQ ID NO: 2408281 - RNA, 20 nt, Human
gagcagggguccuuggugug

SEQ ID NO: 2408282 - RNA, 15 nt, Human
gagcaggggcgugga

SEQ ID NO: 2408283 - RNA, 16 nt, Human
gagcaggggcagggug

SEQ ID NO: 2408284 - RNA, 14 nt, Human
gagcaucaggccag

SEQ ID NO: 2408285 - RNA, 17 nt, Human
gagcaguaucaugaagc

SEQ ID NO: 2408286 - RNA, 16 nt, Human
gagcaguccugccuca

SEQ ID NO: 2408287 - RNA, 20 nt, Human
gagcaguccugccucagccu

SEQ ID NO: 2408288 - RNA, 21 nt, Human
gagcaugccuggauggggcug

SEQ ID NO: 2408289 - RNA, 13 nt, Human
gagcaucugacuc

SEQ ID NO: 2408290 - RNA, 13 nt, Human
gagcaugccugga

SEQ ID NO: 2408291 - RNA, 19 nt, Human
gagcaucucuugaggccag

SEQ ID NO: 2408292 - RNA, 20 nt, Human
gagcaucucuugaggccagg

SEQ ID NO: 2408293 - RNA, 22 nt, Human
gagcaucucuugaggccaggag

SEQ ID NO: 2408294 - RNA, 23 nt, Human
gagcaucucuugaggccaggagu

SEQ ID NO: 2408295 - RNA, 16 nt, Human
gagcaucaggccaggc

SEQ ID NO: 2408296 - RNA, 15 nt, Human
gagcaucaggccagg

SEQ ID NO: 2408297 - RNA, 13 nt, Human
gagcaucaggcca

SEQ ID NO: 2408298 - RNA, 14 nt, Human
gagcauccaccucc

SEQ ID NO: 2408299 - RNA, 18 nt, Human
gagcauccaccuccuucu

SEQ ID NO: 2408300 - RNA, 17 nt, Human
gagcauccaccuccuuc

SEQ ID NO: 2408301 - RNA, 18 nt, Human
gagcaucucuugaggcca

SEQ ID NO: 2408302 - RNA, 20 nt, Human
gagcccugggaggcucugga

SEQ ID NO: 2408303 - RNA, 19 nt, Human
gagcccugggaggcucugg

SEQ ID NO: 2408304 - RNA, 18 nt, Human
gagcccugggaggcucug

SEQ ID NO: 2408305 - RNA, 16 nt, Human
gagcccugggaggcuc

SEQ ID NO: 2408306 - RNA, 21 nt, Human
gagccccuuccuugcucugca

SEQ ID NO: 2408307 - RNA, 19 nt, Human
gagccccuuccuugcucug

SEQ ID NO: 2408308 - RNA, 17 nt, Human
gagccccuucugcucag

SEQ ID NO: 2408309 - RNA, 20 nt, Human
gagccccuucugcucagcuc

SEQ ID NO: 2408310 - RNA, 21 nt, Human
gagccccuucugcucagcucu

SEQ ID NO: 2408311 - RNA, 14 nt, Human
gagccccugguccu

SEQ ID NO: 2408312 - RNA, 13 nt, Human
gagccccuggucc

SEQ ID NO: 2408313 - RNA, 20 nt, Human
gagccccugguccugagggu

SEQ ID NO: 2408314 - RNA, 20 nt, Human
gagccccugucuagagaggg

SEQ ID NO: 2408315 - RNA, 13 nt, Human
gagccccuuccuu

SEQ ID NO: 2408316 - RNA, 11 nt, Human
gagccccuucc

SEQ ID NO: 2408317 - RNA, 21 nt, Human
gagccccugucuagagaggga

SEQ ID NO: 2408318 - RNA, 22 nt, Human
gagccccugucuagagagggag

SEQ ID NO: 2408319 - RNA, 15 nt, Human
gagcccucagaaccc

SEQ ID NO: 2408320 - RNA, 12 nt, Human
gagcccugggag

SEQ ID NO: 2408321 - RNA, 17 nt, Human
gagccccgaggccuucu

SEQ ID NO: 2408322 - RNA, 22 nt, Human
gagccccgcagaccuccccagc

SEQ ID NO: 2408323 - RNA, 18 nt, Human
gagccccgcagaccuccc

SEQ ID NO: 2408324 - RNA, 13 nt, Human
gagccccgcagac

SEQ ID NO: 2408325 - RNA, 12 nt, Human
gagccccugguc

SEQ ID NO: 2408326 - RNA, 19 nt, Human
gagccccuggguggguggu

SEQ ID NO: 2408327 - RNA, 14 nt, Human
gagccccugggugg

SEQ ID NO: 2408328 - RNA, 13 nt, Human
gagccccugggug

SEQ ID NO: 2408329 - RNA, 12 nt, Human
gagccccugggu

SEQ ID NO: 2408330 - RNA, 20 nt, Human
gagccccuaccccacaccag

SEQ ID NO: 2408331 - RNA, 17 nt, Human
gagccccuaccccacac

SEQ ID NO: 2408332 - RNA, 15 nt, Human
gagccccuaccccac

SEQ ID NO: 2408333 - RNA, 23 nt, Human
gagccccgcagaccuccccagcc

SEQ ID NO: 2408334 - RNA, 14 nt, Human
gagccccgaggccu

SEQ ID NO: 2408335 - RNA, 13 nt, Human
gagccccgaggcc

SEQ ID NO: 2408336 - RNA, 22 nt, Human
gagccccacacuggggugccgc

SEQ ID NO: 2408337 - RNA, 17 nt, Human
gagccccaaguccugaa

SEQ ID NO: 2408338 - RNA, 15 nt, Human
gagccccaaguccug

SEQ ID NO: 2408339 - RNA, 13 nt, Human
gagccccaagucc

SEQ ID NO: 2408340 - RNA, 11 nt, Human
gagccccaagu

SEQ ID NO: 2408341 - RNA, 21 nt, Human
gagccccaaguccugaagagg

SEQ ID NO: 2408342 - RNA, 14 nt, Human
gagccccacacgga

SEQ ID NO: 2408343 - RNA, 12 nt, Human
gagccccacacu

SEQ ID NO: 2408344 - RNA, 16 nt, Human
gagccccacacggagg

SEQ ID NO: 2408345 - RNA, 15 nt, Human
gaggggcagcccuug

SEQ ID NO: 2408346 - RNA, 14 nt, Human
gaggggcagcccuu

SEQ ID NO: 2408347 - RNA, 18 nt, Human
gaggggcagaacagccgc

SEQ ID NO: 2408348 - RNA, 13 nt, Human
gaggggcagcccu

SEQ ID NO: 2408349 - RNA, 20 nt, Human
gagggccguaccccacccuc

SEQ ID NO: 2408350 - RNA, 18 nt, Human
gagggccguaccccaccc

SEQ ID NO: 2408351 - RNA, 22 nt, Human
gagggccucaaaggcccgcucu

SEQ ID NO: 2408352 - RNA, 15 nt, Human
gagggccugaggucu

SEQ ID NO: 2408353 - RNA, 21 nt, Human
gagggccguaccccacccuca

SEQ ID NO: 2408354 - RNA, 22 nt, Human
gagggccugaggucuggcugcu

SEQ ID NO: 2408355 - RNA, 12 nt, Human
gagggccugggc

SEQ ID NO: 2408356 - RNA, 22 nt, Human
gaggggacuauuuaugaaggca

SEQ ID NO: 2408357 - RNA, 11 nt, Human
gaggggagggg

SEQ ID NO: 2408358 - RNA, 21 nt, Human
gaggggaggaucacuggagcc

SEQ ID NO: 2408359 - RNA, 12 nt, Human
gaggggagaagc

SEQ ID NO: 2408360 - RNA, 21 nt, Human
gaggggacgcugguagagaug

SEQ ID NO: 2408361 - RNA, 21 nt, Human
gagggccugcaagggagugag

SEQ ID NO: 2408362 - RNA, 17 nt, Human
gagggccugcaagggag

SEQ ID NO: 2408363 - RNA, 14 nt, Human
gagggccugcaagg

SEQ ID NO: 2408364 - RNA, 17 nt, Human
gagggccguaccccacc

SEQ ID NO: 2408365 - RNA, 16 nt, Human
gagggccgagugagag

SEQ ID NO: 2408366 - RNA, 22 nt, Human
gagggcccugguguuucuagca

SEQ ID NO: 2408367 - RNA, 12 nt, Human
gagggcccuggu

SEQ ID NO: 2408368 - RNA, 17 nt, Human
gagggcccugagcugag

SEQ ID NO: 2408369 - RNA, 22 nt, Human
gagggccccucugcccagcuug

SEQ ID NO: 2408370 - RNA, 15 nt, Human
gagggcccuaccuga

SEQ ID NO: 2408371 - RNA, 15 nt, Human
gaggcuccacuuggu

SEQ ID NO: 2408372 - RNA, 12 nt, Human
gaggcuccacuu

SEQ ID NO: 2408373 - RNA, 21 nt, Human
gaggcauuuguuugaacugau

SEQ ID NO: 2408374 - RNA, 21 nt, Human
gaggcaugugaugagaggaaa

SEQ ID NO: 2408375 - RNA, 20 nt, Human
gaggcaugugaugagaggaa

SEQ ID NO: 2408376 - RNA, 22 nt, Human
gaggcaugugaugagaggaaau

SEQ ID NO: 2408377 - RNA, 19 nt, Human
gaggcauuuguuugaacug

SEQ ID NO: 2408378 - RNA, 17 nt, Human
gaggcuccacuuggucu

SEQ ID NO: 2408379 - RNA, 18 nt, Human
gaggcugagaugggagaa

SEQ ID NO: 2408380 - RNA, 20 nt, Human
gaggcucuggagcccacugu

SEQ ID NO: 2408381 - RNA, 20 nt, Human
gaggcugaaagaggccaaug

SEQ ID NO: 2408382 - RNA, 16 nt, Human
gaggcugaggcaagag

SEQ ID NO: 2408383 - RNA, 14 nt, Human
gaggcugagacagg

SEQ ID NO: 2408384 - RNA, 12 nt, Human
gaggccaaggug

SEQ ID NO: 2408385 - RNA, 16 nt, Human
gaggcucuuucugggc

SEQ ID NO: 2408386 - RNA, 12 nt, Human
gaggcugaggca

SEQ ID NO: 2408387 - RNA, 13 nt, Human
gaggcugaggcag

SEQ ID NO: 2408388 - RNA, 14 nt, Human
gagggcccagagca

SEQ ID NO: 2408389 - RNA, 13 nt, Human
gagggcccagagc

SEQ ID NO: 2408390 - RNA, 16 nt, Human
gaggcugagacaggag

SEQ ID NO: 2408391 - RNA, 16 nt, Human
gagggccacgggucug

SEQ ID NO: 2408392 - RNA, 20 nt, Human
gagggccccucugcccagcu

SEQ ID NO: 2408393 - RNA, 18 nt, Human
gagggccccucugcccag

SEQ ID NO: 2408394 - RNA, 17 nt, Human
gagggccccucugccca

SEQ ID NO: 2408395 - RNA, 16 nt, Human
gagggccccucugccc

SEQ ID NO: 2408396 - RNA, 15 nt, Human
gagggccccucugcc

SEQ ID NO: 2408397 - RNA, 12 nt, Human
gagggccccucu

SEQ ID NO: 2408398 - RNA, 11 nt, Human
gagggccccuc

SEQ ID NO: 2408399 - RNA, 22 nt, Human
gagggcccagagcaggaagcau

SEQ ID NO: 2408400 - RNA, 20 nt, Human
gagggcccagagcaggaagc

SEQ ID NO: 2408401 - RNA, 18 nt, Human
gagggcccagagcaggaa

SEQ ID NO: 2408402 - RNA, 16 nt, Human
gagggcccagagcagg

SEQ ID NO: 2408403 - RNA, 15 nt, Human
gagggcccagagcag

SEQ ID NO: 2408404 - RNA, 13 nt, Human
gagggcccaggca

SEQ ID NO: 2408405 - RNA, 16 nt, Human
gagggcccaggcaggc

SEQ ID NO: 2408406 - RNA, 22 nt, Human
gaggacaguauuuguggggagg

SEQ ID NO: 2408407 - RNA, 21 nt, Human
gaggacauguuuuuguuuucu

SEQ ID NO: 2408408 - RNA, 20 nt, Human
gaggacauaaugggguccug

SEQ ID NO: 2408409 - RNA, 18 nt, Human
gaggacaugauggagcgc

SEQ ID NO: 2408410 - RNA, 21 nt, Human
gaggacgcucucuggccuucg

SEQ ID NO: 2408411 - RNA, 20 nt, Human
gaggacgcucucuggccuuc

SEQ ID NO: 2408412 - RNA, 16 nt, Human
gaggacccagacccag

SEQ ID NO: 2408413 - RNA, 14 nt, Human
gaggacccagaccc

SEQ ID NO: 2408414 - RNA, 19 nt, Human
gaggaccagggcagggcca

SEQ ID NO: 2408415 - RNA, 13 nt, Human
gaggacccagacc

SEQ ID NO: 2408416 - RNA, 13 nt, Human
gaggaccacuccu

SEQ ID NO: 2408417 - RNA, 22 nt, Human
gaggaccacuccuguacacuga

SEQ ID NO: 2408418 - RNA, 18 nt, Human
gaggacucacuugcccac

SEQ ID NO: 2408419 - RNA, 18 nt, Human
gaggacuagaaccuggag

SEQ ID NO: 2408420 - RNA, 16 nt, Human
gaggacuagaaccugg

SEQ ID NO: 2408421 - RNA, 18 nt, Human
gaggacuguauuugugac

SEQ ID NO: 2408422 - RNA, 13 nt, Human
gaggacuguauuu

SEQ ID NO: 2408423 - RNA, 21 nt, Human
gaggacuguagggagggcggc

SEQ ID NO: 2408424 - RNA, 20 nt, Human
gaggacuguagggagggcgg

SEQ ID NO: 2408425 - RNA, 23 nt, Human
gaggacugccccgugcagacugg

SEQ ID NO: 2408426 - RNA, 22 nt, Human
gaggacgugggcggcagagagg

SEQ ID NO: 2408427 - RNA, 20 nt, Human
gaggacgugggcggcagaga

SEQ ID NO: 2408428 - RNA, 18 nt, Human
gaggacgugggcggcaga

SEQ ID NO: 2408429 - RNA, 16 nt, Human
gaggacgugggcggca

SEQ ID NO: 2408430 - RNA, 16 nt, Human
gaggacggugcaaccc

SEQ ID NO: 2408431 - RNA, 20 nt, Human
gaggacggugcaacccaagg

SEQ ID NO: 2408432 - RNA, 17 nt, Human
gaggacggugcaaccca

SEQ ID NO: 2408433 - RNA, 15 nt, Human
gaggacgugggcggc

SEQ ID NO: 2408434 - RNA, 23 nt, Human
gaggacuuuucuuuguggcuucc

SEQ ID NO: 2408435 - RNA, 20 nt, Human
gaggacuuuucuuuguggcu

SEQ ID NO: 2408436 - RNA, 16 nt, Human
gaggacuuuucuuugu

SEQ ID NO: 2408437 - RNA, 16 nt, Human
gaggacuugugucucu

SEQ ID NO: 2408438 - RNA, 17 nt, Human
gaggacuugugucucug

SEQ ID NO: 2408439 - RNA, 14 nt, Human
gaggacuugugucu

SEQ ID NO: 2408440 - RNA, 23 nt, Human
gaggacuguugacauccaagcuu

SEQ ID NO: 2408441 - RNA, 15 nt, Human
gaggagagaggaccc

SEQ ID NO: 2408442 - RNA, 14 nt, Human
gaggagagaggacc

SEQ ID NO: 2408443 - RNA, 11 nt, Human
gaggagagagg

SEQ ID NO: 2408444 - RNA, 21 nt, Human
gaggagagagcagcuucugcc

SEQ ID NO: 2408445 - RNA, 20 nt, Human
gaggagagagcagcuucugc

SEQ ID NO: 2408446 - RNA, 21 nt, Human
gaggagagaagaaugagccua

SEQ ID NO: 2408447 - RNA, 15 nt, Human
gaggagagaagaaug

SEQ ID NO: 2408448 - RNA, 14 nt, Human
gaggagagaagaau

SEQ ID NO: 2408449 - RNA, 13 nt, Human
gaggagagaagaa

SEQ ID NO: 2408450 - RNA, 12 nt, Human
gaggagagaaga

SEQ ID NO: 2408451 - RNA, 12 nt, Human
gaggagagagga

SEQ ID NO: 2408452 - RNA, 12 nt, Human
gaggagaaacug

SEQ ID NO: 2408453 - RNA, 14 nt, Human
gaggagaaacugga

SEQ ID NO: 2408454 - RNA, 18 nt, Human
gaggacuugugucucugu

SEQ ID NO: 2408455 - RNA, 22 nt, Human
gaggacuugugucucugugcuu

SEQ ID NO: 2408456 - RNA, 13 nt, Human
gaggagaaacaca

SEQ ID NO: 2408457 - RNA, 9 nt, Human
gaggagaaa

SEQ ID NO: 2408458 - RNA, 12 nt, Human
gaggagaagaau

SEQ ID NO: 2408459 - RNA, 20 nt, Human
gaggagaagaauuuucagac

SEQ ID NO: 2408460 - RNA, 22 nt, Human
gaggagacuagauuuaugaaua

SEQ ID NO: 2408461 - RNA, 15 nt, Human
gaggagacauuggcu

SEQ ID NO: 2408462 - RNA, 22 nt, Human
gaggagaagaauuuucagaccc

SEQ ID NO: 2408463 - RNA, 17 nt, Human
gaggagagucccagagc

SEQ ID NO: 2408464 - RNA, 15 nt, Human
gaggagagucccaga

SEQ ID NO: 2408465 - RNA, 14 nt, Human
gaggagagucccag

SEQ ID NO: 2408466 - RNA, 20 nt, Human
gaggagaggggaagggccag

SEQ ID NO: 2408467 - RNA, 16 nt, Human
gaggagcaaaggcuga

SEQ ID NO: 2408468 - RNA, 17 nt, Human
gaggagaugcuccuugg

SEQ ID NO: 2408469 - RNA, 18 nt, Human
gaggcagggucucacucu

SEQ ID NO: 2408470 - RNA, 13 nt, Human
gaggagagccaga

SEQ ID NO: 2408471 - RNA, 16 nt, Human
gaggagagaggcagag

SEQ ID NO: 2408472 - RNA, 17 nt, Human
gaggagagaggcagaga

SEQ ID NO: 2408473 - RNA, 15 nt, Human
gaggagagaggcaga

SEQ ID NO: 2408474 - RNA, 14 nt, Human
gaggagagaggcag

SEQ ID NO: 2408475 - RNA, 13 nt, Human
gaggagagaggca

SEQ ID NO: 2408476 - RNA, 12 nt, Human
gaggagagaggc

SEQ ID NO: 2408477 - RNA, 17 nt, Human
gaggagaggagagaggc

SEQ ID NO: 2408478 - RNA, 16 nt, Human
gaggagaggagagagg

SEQ ID NO: 2408479 - RNA, 14 nt, Human
gaggagaggagaga

SEQ ID NO: 2408480 - RNA, 23 nt, Human
gaggagagccagagaagugacag

SEQ ID NO: 2408481 - RNA, 22 nt, Human
gaggagagccagagaagugaca

SEQ ID NO: 2408482 - RNA, 17 nt, Human
gaggagagccagagaag

SEQ ID NO: 2408483 - RNA, 13 nt, Human
gaggagaggagag

SEQ ID NO: 2408484 - RNA, 20 nt, Human
gaggcagggucucacucugu

SEQ ID NO: 2408485 - RNA, 19 nt, Human
gaggcagggucucacucug

SEQ ID NO: 2408486 - RNA, 18 nt, Human
gaggcauggcccuggggu

SEQ ID NO: 2408487 - RNA, 17 nt, Human
gaggcauggcccugggg

SEQ ID NO: 2408488 - RNA, 15 nt, Human
gaggcauggcccugg

SEQ ID NO: 2408489 - RNA, 14 nt, Human
gaggcauggcccug

SEQ ID NO: 2408490 - RNA, 13 nt, Human
gaggcauggcccu

SEQ ID NO: 2408491 - RNA, 17 nt, Human
gaggcaucgcaauguaa

SEQ ID NO: 2408492 - RNA, 15 nt, Human
gaggagcagugcagg

SEQ ID NO: 2408493 - RNA, 22 nt, Human
gaggcagggucucacucugucg

SEQ ID NO: 2408494 - RNA, 14 nt, Human
gagaaggagagaaa

SEQ ID NO: 2408495 - RNA, 12 nt, Human
gagaaggagaga

SEQ ID NO: 2408496 - RNA, 11 nt, Human
gagaaggagcc

SEQ ID NO: 2408497 - RNA, 23 nt, Human
gagaaggacccggaggggccugg

SEQ ID NO: 2408498 - RNA, 15 nt, Human
gagaaggggaggagg

SEQ ID NO: 2408499 - RNA, 23 nt, Human
gagaaggcaggaauguguggcag

SEQ ID NO: 2408500 - RNA, 15 nt, Human
gagaagggauggagg

SEQ ID NO: 2408501 - RNA, 11 nt, Human
gagaaggcagc

SEQ ID NO: 2408502 - RNA, 15 nt, Human
gagaaggagagaaag

SEQ ID NO: 2408503 - RNA, 17 nt, Human
gagaaggaucuagaaug

SEQ ID NO: 2408504 - RNA, 16 nt, Human
gagaaggcagccacca

SEQ ID NO: 2408505 - RNA, 12 nt, Human
gagaaggcagcc

SEQ ID NO: 2408506 - RNA, 12 nt, Human
gagaaggcagga

SEQ ID NO: 2408507 - RNA, 13 nt, Human
gagaaggcaggaa

SEQ ID NO: 2408508 - RNA, 16 nt, Human
gagaaguauacauaag

SEQ ID NO: 2408509 - RNA, 23 nt, Human
gagaagguggguuuucaucaaga

SEQ ID NO: 2408510 - RNA, 15 nt, Human
gagaagguccuuaau

SEQ ID NO: 2408511 - RNA, 15 nt, Human
gagaagugccccugc

SEQ ID NO: 2408512 - RNA, 16 nt, Human
gagaagugccccugcu

SEQ ID NO: 2408513 - RNA, 17 nt, Human
gagaagugccccugcug

SEQ ID NO: 2408514 - RNA, 20 nt, Human
gagaagugccccugcugccu

SEQ ID NO: 2408515 - RNA, 22 nt, Human
gagaagugccccugcugccucc

SEQ ID NO: 2408516 - RNA, 15 nt, Human
gagaccgagugaacc

SEQ ID NO: 2408517 - RNA, 14 nt, Human
gagaccgagugaac

SEQ ID NO: 2408518 - RNA, 16 nt, Human
gagaccgagccucugu

SEQ ID NO: 2408519 - RNA, 13 nt, Human
gagaaucuuuauu

SEQ ID NO: 2408520 - RNA, 19 nt, Human
gagaaucuuuauugagaaa

SEQ ID NO: 2408521 - RNA, 21 nt, Human
gagacccugucucaaaaaaag

SEQ ID NO: 2408522 - RNA, 23 nt, Human
gagaaugaaagggcccagagagg

SEQ ID NO: 2408523 - RNA, 15 nt, Human
gagaaugaaagggcc

SEQ ID NO: 2408524 - RNA, 15 nt, Human
gagaaucuauauuua

SEQ ID NO: 2408525 - RNA, 22 nt, Human
gagaaucuauauuuaacaagau

SEQ ID NO: 2408526 - RNA, 21 nt, Human
gagaaucuacccccagaucca

SEQ ID NO: 2408527 - RNA, 20 nt, Human
gagaaucccacuuucuauag

SEQ ID NO: 2408528 - RNA, 19 nt, Human
gagaauauuuuaaguauug

SEQ ID NO: 2408529 - RNA, 14 nt, Human
gagaauauauacau

SEQ ID NO: 2408530 - RNA, 21 nt, Human
gagaauauuuuaaguauugca

SEQ ID NO: 2408531 - RNA, 12 nt, Human
gagaauauauac

SEQ ID NO: 2408532 - RNA, 20 nt, Human
gagaauaagagagucauaaa

SEQ ID NO: 2408533 - RNA, 23 nt, Human
gagaauauuagcuuuacuguuug

SEQ ID NO: 2408534 - RNA, 22 nt, Human
gagaauaagagaaagaaaauga

SEQ ID NO: 2408535 - RNA, 16 nt, Human
gagaaguuuuguuuuu

SEQ ID NO: 2408536 - RNA, 18 nt, Human
gagaauaagagaaagaaa

SEQ ID NO: 2408537 - RNA, 18 nt, Human
gagaauaggcagccccca

SEQ ID NO: 2408538 - RNA, 19 nt, Human
gagaaguuuuguacagaga

SEQ ID NO: 2408539 - RNA, 18 nt, Human
gagaaguuuuguacagag

SEQ ID NO: 2408540 - RNA, 17 nt, Human
gagaaguuuuguacaga

SEQ ID NO: 2408541 - RNA, 21 nt, Human
gagaaguuucuggcccuggcu

SEQ ID NO: 2408542 - RNA, 17 nt, Human
gagaaguuucuggcccu

SEQ ID NO: 2408543 - RNA, 16 nt, Human
gagaaguuucuggccc

SEQ ID NO: 2408544 - RNA, 23 nt, Human
gagaagugccccugcugccuccc

SEQ ID NO: 2408545 - RNA, 18 nt, Human
gagacgggggcagagagg

SEQ ID NO: 2408546 - RNA, 16 nt, Human
gagacgggaccgggcc

SEQ ID NO: 2408547 - RNA, 19 nt, Human
gagaccuggcacuggaugc

SEQ ID NO: 2408548 - RNA, 19 nt, Human
gagacggagucccaccuug

SEQ ID NO: 2408549 - RNA, 16 nt, Human
gagacggagucccacc

SEQ ID NO: 2408550 - RNA, 15 nt, Human
gagaccguccucacc

SEQ ID NO: 2408551 - RNA, 14 nt, Human
gagaccguccucac

SEQ ID NO: 2408552 - RNA, 13 nt, Human
gagaccguccuca

SEQ ID NO: 2408553 - RNA, 20 nt, Human
gagaccgggguauccugggg

SEQ ID NO: 2408554 - RNA, 17 nt, Human
gagaccuaccucagguu

SEQ ID NO: 2408555 - RNA, 16 nt, Human
gagaccuaccucaggu

SEQ ID NO: 2408556 - RNA, 14 nt, Human
gagaccuaccucag

SEQ ID NO: 2408557 - RNA, 22 nt, Human
gagaccguccucaccccugucc

SEQ ID NO: 2408558 - RNA, 16 nt, Human
gagaccguccucaccc

SEQ ID NO: 2408559 - RNA, 14 nt, Human
gagacggaguccca

SEQ ID NO: 2408560 - RNA, 23 nt, Human
gagaccuaccucagguugcuggu

SEQ ID NO: 2408561 - RNA, 13 nt, Human
gagaccugccccu

SEQ ID NO: 2408562 - RNA, 21 nt, Human
gagaccuaccucagguugcug

SEQ ID NO: 2408563 - RNA, 18 nt, Human
gagaccuaccucagguug

SEQ ID NO: 2408564 - RNA, 20 nt, Human
gacuuuuccaacccucauca

SEQ ID NO: 2408565 - RNA, 16 nt, Human
gacuuuuugcauuuaa

SEQ ID NO: 2408566 - RNA, 11 nt, Human
gagaaaaacaa

SEQ ID NO: 2408567 - RNA, 19 nt, Human
gacuuuuuuuuuuuauaau

SEQ ID NO: 2408568 - RNA, 15 nt, Human
gagaaaacagaccua

SEQ ID NO: 2408569 - RNA, 19 nt, Human
gagaaaaagcuccuguccu

SEQ ID NO: 2408570 - RNA, 17 nt, Human
gagaaaaagcuccuguc

SEQ ID NO: 2408571 - RNA, 22 nt, Human
gacuuuuuauggcacuaguauu

SEQ ID NO: 2408572 - RNA, 19 nt, Human
gacuuuuccaacccucauc

SEQ ID NO: 2408573 - RNA, 14 nt, Human
gacuuuuccaaccc

SEQ ID NO: 2408574 - RNA, 18 nt, Human
gacuuuuauuuccaguga

SEQ ID NO: 2408575 - RNA, 12 nt, Human
gacuuuguucac

SEQ ID NO: 2408576 - RNA, 21 nt, Human
gagauugugccccugcacucc

SEQ ID NO: 2408577 - RNA, 14 nt, Human
gagauuggaaggaa

SEQ ID NO: 2408578 - RNA, 23 nt, Human
gagauuguuguuugccauacuuu

SEQ ID NO: 2408579 - RNA, 21 nt, Human
gagauugugccacuucacucc

SEQ ID NO: 2408580 - RNA, 17 nt, Human
gagauuggacggccuga

SEQ ID NO: 2408581 - RNA, 21 nt, Human
gagauguuuuuaaaaguuuca

SEQ ID NO: 2408582 - RNA, 19 nt, Human
gagauguuuuuaaaaguuu

SEQ ID NO: 2408583 - RNA, 18 nt, Human
gagauguuuuuaaaaguu

SEQ ID NO: 2408584 - RNA, 17 nt, Human
gagauguuuuuaaaagu

SEQ ID NO: 2408585 - RNA, 14 nt, Human
gagauguuuuuaaa

SEQ ID NO: 2408586 - RNA, 14 nt, Human
gagauguuuuagag

SEQ ID NO: 2408587 - RNA, 16 nt, Human
gagauuagagggaggu

SEQ ID NO: 2408588 - RNA, 15 nt, Human
gagauuaccuccuga

SEQ ID NO: 2408589 - RNA, 15 nt, Human
gagauuauguucuuu

SEQ ID NO: 2408590 - RNA, 14 nt, Human
gagauucagacugu

SEQ ID NO: 2408591 - RNA, 14 nt, Human
gagaugugcaccca

SEQ ID NO: 2408592 - RNA, 22 nt, Human
gagaugucuucguacaguucuu

SEQ ID NO: 2408593 - RNA, 16 nt, Human
gagaugcuggagaaga

SEQ ID NO: 2408594 - RNA, 15 nt, Human
gagaugcuggagaag

SEQ ID NO: 2408595 - RNA, 20 nt, Human
gagaugcuagaacucccuuu

SEQ ID NO: 2408596 - RNA, 16 nt, Human
gagaugcuagaacucc

SEQ ID NO: 2408597 - RNA, 14 nt, Human
gagagggagagaga

SEQ ID NO: 2408598 - RNA, 18 nt, Human
gagagggaggcaagcccu

SEQ ID NO: 2408599 - RNA, 20 nt, Human
gagaugccuccaccgcugcc

SEQ ID NO: 2408600 - RNA, 22 nt, Human
gagaugccuccaccgcugccua

SEQ ID NO: 2408601 - RNA, 23 nt, Human
gagaugccuccaccgcugccuaa

SEQ ID NO: 2408602 - RNA, 20 nt, Human
gagagcugggugucaagagg

SEQ ID NO: 2408603 - RNA, 16 nt, Human
gagagcuggagccugg

SEQ ID NO: 2408604 - RNA, 14 nt, Human
gagagcuggagccu

SEQ ID NO: 2408605 - RNA, 21 nt, Human
gagagcuggagccuggugccc

SEQ ID NO: 2408606 - RNA, 14 nt, Human
gagagcuggggaag

SEQ ID NO: 2408607 - RNA, 13 nt, Human
gagagcuggugcc

SEQ ID NO: 2408608 - RNA, 14 nt, Human
gagagcuggugccc

SEQ ID NO: 2408609 - RNA, 12 nt, Human
gagaggaaauca

SEQ ID NO: 2408610 - RNA, 22 nt, Human
gagagcuucuguugcugccuca

SEQ ID NO: 2408611 - RNA, 17 nt, Human
gagagcuggugcccgga

SEQ ID NO: 2408612 - RNA, 23 nt, Human
gagagcuggggaagcuucuuaaa

SEQ ID NO: 2408613 - RNA, 18 nt, Human
gagagcuguucccaaauu

SEQ ID NO: 2408614 - RNA, 15 nt, Human
gagaggacccccuga

SEQ ID NO: 2408615 - RNA, 16 nt, Human
gagagcuuaaugauaa

SEQ ID NO: 2408616 - RNA, 20 nt, Human
gagaggaaaaguaaggugca

SEQ ID NO: 2408617 - RNA, 23 nt, Human
gagagcuuucuguccuuuuggca

SEQ ID NO: 2408618 - RNA, 21 nt, Human
gagaggaaauauugcuggggu

SEQ ID NO: 2408619 - RNA, 20 nt, Human
gagaggaaauauugcugggg

SEQ ID NO: 2408620 - RNA, 19 nt, Human
gagaggaaugccuguguga

SEQ ID NO: 2408621 - RNA, 15 nt, Human
gagaggagagaggca

SEQ ID NO: 2408622 - RNA, 12 nt, Human
gagaggagagag

SEQ ID NO: 2408623 - RNA, 11 nt, Human
gagaggagaga

SEQ ID NO: 2408624 - RNA, 20 nt, Human
gagaggacuguagggagggc

SEQ ID NO: 2408625 - RNA, 14 nt, Human
gagaggagaaacac

SEQ ID NO: 2408626 - RNA, 15 nt, Human
gagaggagaaacaca

SEQ ID NO: 2408627 - RNA, 18 nt, Human
gagaggacagcuugagcc

SEQ ID NO: 2408628 - RNA, 15 nt, Human
gagaggacagcuuga

SEQ ID NO: 2408629 - RNA, 10 nt, Human
gagaggacag

SEQ ID NO: 2408630 - RNA, 17 nt, Human
gagaggacgugggcggc

SEQ ID NO: 2408631 - RNA, 16 nt, Human
gagaggacgugggcgg

SEQ ID NO: 2408632 - RNA, 18 nt, Human
gagaggagaggagagagg

SEQ ID NO: 2408633 - RNA, 19 nt, Human
gagaggagagccagagaag

SEQ ID NO: 2408634 - RNA, 16 nt, Human
gagaggagagccagag

SEQ ID NO: 2408635 - RNA, 15 nt, Human
gagaggagagccaga

SEQ ID NO: 2408636 - RNA, 13 nt, Human
gagaggagagcca

SEQ ID NO: 2408637 - RNA, 19 nt, Human
gagaggagagaggcagaga

SEQ ID NO: 2408638 - RNA, 18 nt, Human
gagaggagagaggcagag

SEQ ID NO: 2408639 - RNA, 16 nt, Human
gagaggaguucaauga

SEQ ID NO: 2408640 - RNA, 15 nt, Human
gagaggaguucaaug

SEQ ID NO: 2408641 - RNA, 13 nt, Human
gagaggaggcaac

SEQ ID NO: 2408642 - RNA, 13 nt, Human
gagaggaguucaa

SEQ ID NO: 2408643 - RNA, 22 nt, Human
gagaggagcgggaccuguggcu

SEQ ID NO: 2408644 - RNA, 21 nt, Human
gagaggagcgggaccuguggc

SEQ ID NO: 2408645 - RNA, 19 nt, Human
gagaggagcgggaccugug

SEQ ID NO: 2408646 - RNA, 16 nt, Human
gagaggaugagagccc

SEQ ID NO: 2408647 - RNA, 14 nt, Human
gagaggaugagagc

SEQ ID NO: 2408648 - RNA, 21 nt, Human
gagaggaugaauguaugugca

SEQ ID NO: 2408649 - RNA, 14 nt, Human
gagaggaugaaugu

SEQ ID NO: 2408650 - RNA, 12 nt, Human
gagaggaugaau

SEQ ID NO: 2408651 - RNA, 19 nt, Human
gagaggaguucaaugaucu

SEQ ID NO: 2408652 - RNA, 18 nt, Human
gagaggaguucaaugauc

SEQ ID NO: 2408653 - RNA, 17 nt, Human
gagaggaguucaaugau

SEQ ID NO: 2408654 - RNA, 21 nt, Human
gagaggaugagagcccagagg

SEQ ID NO: 2408655 - RNA, 19 nt, Human
gagaggaugagagcccaga

SEQ ID NO: 2408656 - RNA, 18 nt, Human
gagaggaugagagcccag

SEQ ID NO: 2408657 - RNA, 15 nt, Human
gagaggcaauggcca

SEQ ID NO: 2408658 - RNA, 14 nt, Human
gagaggcaaugauu

SEQ ID NO: 2408659 - RNA, 18 nt, Human
gagaggccuuuuggaaug

SEQ ID NO: 2408660 - RNA, 12 nt, Human
gagaggcuggga

SEQ ID NO: 2408661 - RNA, 23 nt, Human
gagagggagaagaagucagagag

SEQ ID NO: 2408662 - RNA, 15 nt, Human
gagagggagaagaag

SEQ ID NO: 2408663 - RNA, 14 nt, Human
gagagggagaagaa

SEQ ID NO: 2408664 - RNA, 10 nt, Human
gagagggaga

SEQ ID NO: 2408665 - RNA, 20 nt, Human
gagaggcccucuggaguggc

SEQ ID NO: 2408666 - RNA, 23 nt, Human
gagaggcccucuggaguggccac

SEQ ID NO: 2408667 - RNA, 15 nt, Human
gagaggccuuuugga

SEQ ID NO: 2408668 - RNA, 21 nt, Human
gagaggccaggugcagguugg

SEQ ID NO: 2408669 - RNA, 14 nt, Human
gagaggccaggugc

SEQ ID NO: 2408670 - RNA, 16 nt, Human
gagaggcccucuggag

SEQ ID NO: 2408671 - RNA, 12 nt, Human
gagaggccauga

SEQ ID NO: 2408672 - RNA, 20 nt, Human
gagaggaugagagcccagag

SEQ ID NO: 2408673 - RNA, 16 nt, Human
gagagccuuccagggg

SEQ ID NO: 2408674 - RNA, 15 nt, Human
gagagccuuccaggg

SEQ ID NO: 2408675 - RNA, 14 nt, Human
gagacuccugcagg

SEQ ID NO: 2408676 - RNA, 13 nt, Human
gagacuccugcag

SEQ ID NO: 2408677 - RNA, 15 nt, Human
gagacguguacauag

SEQ ID NO: 2408678 - RNA, 18 nt, Human
gagacgggugggcggcug

SEQ ID NO: 2408679 - RNA, 15 nt, Human
gagacggucgagcag

SEQ ID NO: 2408680 - RNA, 15 nt, Human
gagacucagagggag

SEQ ID NO: 2408681 - RNA, 14 nt, Human
gagacucagacagg

SEQ ID NO: 2408682 - RNA, 18 nt, Human
gagacuccgucucaagga

SEQ ID NO: 2408683 - RNA, 16 nt, Human
gagacuccaugagaag

SEQ ID NO: 2408684 - RNA, 16 nt, Human
gagacguguacauagu

SEQ ID NO: 2408685 - RNA, 17 nt, Human
gagacucagggccccag

SEQ ID NO: 2408686 - RNA, 21 nt, Human
gagacucagggccccagcacu

SEQ ID NO: 2408687 - RNA, 19 nt, Human
gagagcuagaaccuggagg

SEQ ID NO: 2408688 - RNA, 20 nt, Human
gagagcuagaaccuggagag

SEQ ID NO: 2408689 - RNA, 13 nt, Human
gagagcuggagcc

SEQ ID NO: 2408690 - RNA, 13 nt, Human
gagagcugggugu

SEQ ID NO: 2408691 - RNA, 15 nt, Human
gagagcuagcagcag

SEQ ID NO: 2408692 - RNA, 21 nt, Human
gagagcuagcagcagggaggg

SEQ ID NO: 2408693 - RNA, 20 nt, Human
gagagccuuccagggguggg

SEQ ID NO: 2408694 - RNA, 18 nt, Human
gagagccuuccaggggug

SEQ ID NO: 2408695 - RNA, 19 nt, Human
gagagcuagaaccuggaga

SEQ ID NO: 2408696 - RNA, 18 nt, Human
gagagcuagaaccuggag

SEQ ID NO: 2408697 - RNA, 16 nt, Human
gagagcuagaaccugg

SEQ ID NO: 2408698 - RNA, 17 nt, Human
gagagcuagaaccuaga

SEQ ID NO: 2408699 - RNA, 20 nt, Human
gagagcuagaacccggcagg

SEQ ID NO: 2408700 - RNA, 19 nt, Human
gagagcuagaacccggcag

SEQ ID NO: 2408701 - RNA, 23 nt, Human
gagagcgugcuccagccuggcuc

SEQ ID NO: 2408702 - RNA, 22 nt, Human
gagagcgugcuccagccuggcu

SEQ ID NO: 2408703 - RNA, 21 nt, Human
gagagcgugcuccagccuggc

SEQ ID NO: 2408704 - RNA, 21 nt, Human
gagagcggucucaggcuggug

SEQ ID NO: 2408705 - RNA, 14 nt, Human
gagagcggucucag

SEQ ID NO: 2408706 - RNA, 22 nt, Human
gagagcgccugccccucccaga

SEQ ID NO: 2408707 - RNA, 16 nt, Human
gagagcgccugccccu

SEQ ID NO: 2408708 - RNA, 16 nt, Human
gagacuccuaggcagg

SEQ ID NO: 2408709 - RNA, 17 nt, Human
cuucugacccaugcugc

SEQ ID NO: 2408710 - RNA, 16 nt, Human
cuucugacccaugcug

SEQ ID NO: 2408711 - RNA, 18 nt, Human
cuucugacccaugcugcc

SEQ ID NO: 2408712 - RNA, 23 nt, Human
cuucugaacuuggcgcugccccu

SEQ ID NO: 2408713 - RNA, 15 nt, Human
cuucuuacaugcauu

SEQ ID NO: 2408714 - RNA, 14 nt, Human
cuucuuacaugcau

SEQ ID NO: 2408715 - RNA, 13 nt, Human
cuucuuauacauu

SEQ ID NO: 2408716 - RNA, 16 nt, Human
cuucuuauacauuuga

SEQ ID NO: 2408717 - RNA, 19 nt, Human
cuucuuauggaauugauuu

SEQ ID NO: 2408718 - RNA, 23 nt, Human
cuucuuauggaauugauuugcau

SEQ ID NO: 2408719 - RNA, 22 nt, Human
cuucuuauggaauugauuugca

SEQ ID NO: 2408720 - RNA, 14 nt, Human
cuucuuauucucac

SEQ ID NO: 2408721 - RNA, 13 nt, Human
cuucuucucaggc

SEQ ID NO: 2408722 - RNA, 21 nt, Human
cuucuucggggaacuccugga

SEQ ID NO: 2408723 - RNA, 22 nt, Human
cuucuugaacacucaugcugaa

SEQ ID NO: 2408724 - RNA, 21 nt, Human
cuucuugaacacucaugcuga

SEQ ID NO: 2408725 - RNA, 12 nt, Human
cuucuugaaggu

SEQ ID NO: 2408726 - RNA, 20 nt, Human
cuucuugaacacucaugcug

SEQ ID NO: 2408727 - RNA, 19 nt, Human
cuucuugaacacucaugcu

SEQ ID NO: 2408728 - RNA, 22 nt, Human
cuucuugaaauuuuaaccuaug

SEQ ID NO: 2408729 - RNA, 17 nt, Human
cuucuucuuuuugcugu

SEQ ID NO: 2408730 - RNA, 21 nt, Human
cuucuucuuuugagcaacuuu

SEQ ID NO: 2408731 - RNA, 18 nt, Human
cuucuucuuuuugcuguu

SEQ ID NO: 2408732 - RNA, 13 nt, Human
cuucuucuucaga

SEQ ID NO: 2408733 - RNA, 15 nt, Human
cuucuucuuucuaca

SEQ ID NO: 2408734 - RNA, 14 nt, Human
cuucuucuucagaa

SEQ ID NO: 2408735 - RNA, 18 nt, Human
cuucuucuccuaugugua

SEQ ID NO: 2408736 - RNA, 19 nt, Human
cuucuucuccuauguguaa

SEQ ID NO: 2408737 - RNA, 12 nt, Human
cuucuucuccua

SEQ ID NO: 2408738 - RNA, 13 nt, Human
cuucuucuccccc

SEQ ID NO: 2408739 - RNA, 12 nt, Human
cuucuucucccc

SEQ ID NO: 2408740 - RNA, 12 nt, Human
cuuccucccucc

SEQ ID NO: 2408741 - RNA, 13 nt, Human
cuuccucccuccc

SEQ ID NO: 2408742 - RNA, 14 nt, Human
cuuccucccucccu

SEQ ID NO: 2408743 - RNA, 18 nt, Human
cuuccucccucccucuuu

SEQ ID NO: 2408744 - RNA, 21 nt, Human
cuucuaauauuuauugcuuua

SEQ ID NO: 2408745 - RNA, 20 nt, Human
cuucuaauauuuauugcuuu

SEQ ID NO: 2408746 - RNA, 17 nt, Human
cuucuaauauuuauugc

SEQ ID NO: 2408747 - RNA, 22 nt, Human
cuuccucugcagcugaccucug

SEQ ID NO: 2408748 - RNA, 20 nt, Human
cuuccucugcagcugaccuc

SEQ ID NO: 2408749 - RNA, 13 nt, Human
cuuccucugcuga

SEQ ID NO: 2408750 - RNA, 12 nt, Human
cuuccucugcug

SEQ ID NO: 2408751 - RNA, 19 nt, Human
cuuccucugcagcugaccu

SEQ ID NO: 2408752 - RNA, 14 nt, Human
cuuccucugcagcu

SEQ ID NO: 2408753 - RNA, 15 nt, Human
cuuccucccucauuc

SEQ ID NO: 2408754 - RNA, 11 nt, Human
cuuccucugcu

SEQ ID NO: 2408755 - RNA, 21 nt, Human
cuuccucuccacugccuucga

SEQ ID NO: 2408756 - RNA, 19 nt, Human
cuuccucuccacugccuuc

SEQ ID NO: 2408757 - RNA, 17 nt, Human
cuuccucuccacugccu

SEQ ID NO: 2408758 - RNA, 16 nt, Human
cuuccucuccacugcc

SEQ ID NO: 2408759 - RNA, 22 nt, Human
cuucugaacuuggcgcugcccc

SEQ ID NO: 2408760 - RNA, 15 nt, Human
cuucugacccaugcu

SEQ ID NO: 2408761 - RNA, 17 nt, Human
cuucugaacucaaacug

SEQ ID NO: 2408762 - RNA, 18 nt, Human
cuucugaacucaaacuga

SEQ ID NO: 2408763 - RNA, 22 nt, Human
cuucugaacucaaacugaggaa

SEQ ID NO: 2408764 - RNA, 19 nt, Human
cuucugaacuuggcgcugc

SEQ ID NO: 2408765 - RNA, 20 nt, Human
cuucucuggagccaagucca

SEQ ID NO: 2408766 - RNA, 19 nt, Human
cuucucuggaaagggggga

SEQ ID NO: 2408767 - RNA, 12 nt, Human
cuucucugcugc

SEQ ID NO: 2408768 - RNA, 21 nt, Human
cuucucugcuccaccacaucc

SEQ ID NO: 2408769 - RNA, 22 nt, Human
cuucucugcuccaccacauccu

SEQ ID NO: 2408770 - RNA, 22 nt, Human
cuucucuggagccaaguccaga

SEQ ID NO: 2408771 - RNA, 21 nt, Human
cuucucuggagccaaguccag

SEQ ID NO: 2408772 - RNA, 16 nt, Human
cuucuaguuucccaca

SEQ ID NO: 2408773 - RNA, 11 nt, Human
cuucucugcuc

SEQ ID NO: 2408774 - RNA, 12 nt, Human
cuucucugcucc

SEQ ID NO: 2408775 - RNA, 13 nt, Human
cuucucugcucca

SEQ ID NO: 2408776 - RNA, 14 nt, Human
cuucucugcuccac

SEQ ID NO: 2408777 - RNA, 15 nt, Human
cuucucugcuccacc

SEQ ID NO: 2408778 - RNA, 16 nt, Human
cuucucugcuccacca

SEQ ID NO: 2408779 - RNA, 17 nt, Human
cuucuaccucuuggcug

SEQ ID NO: 2408780 - RNA, 17 nt, Human
cuucuaccaugaacaga

SEQ ID NO: 2408781 - RNA, 23 nt, Human
cuucuaccugccacucacacagc

SEQ ID NO: 2408782 - RNA, 14 nt, Human
cuucuaccugccac

SEQ ID NO: 2408783 - RNA, 13 nt, Human
cuucuaccugcca

SEQ ID NO: 2408784 - RNA, 12 nt, Human
cuucuaccugcc

SEQ ID NO: 2408785 - RNA, 17 nt, Human
cuucuaccuuaaaaugu

SEQ ID NO: 2408786 - RNA, 17 nt, Human
cuucuaccugccacuca

SEQ ID NO: 2408787 - RNA, 16 nt, Human
cuucuaccugccacuc

SEQ ID NO: 2408788 - RNA, 15 nt, Human
cuucuaccugccacu

SEQ ID NO: 2408789 - RNA, 18 nt, Human
cuucuacugagccuucag

SEQ ID NO: 2408790 - RNA, 22 nt, Human
cuucucugacuucugccuggag

SEQ ID NO: 2408791 - RNA, 19 nt, Human
cuucuauuauagccacauc

SEQ ID NO: 2408792 - RNA, 18 nt, Human
cuucuauuagccagucuu

SEQ ID NO: 2408793 - RNA, 23 nt, Human
cuucuauggacugguuguugcca

SEQ ID NO: 2408794 - RNA, 15 nt, Human
cuucuaucccaggag

SEQ ID NO: 2408795 - RNA, 19 nt, Human
cuucccaaaggacuccacc

SEQ ID NO: 2408796 - RNA, 18 nt, Human
cuucccaaaggacuccac

SEQ ID NO: 2408797 - RNA, 21 nt, Human
cuucccaaaggacuccaccca

SEQ ID NO: 2408798 - RNA, 14 nt, Human
cuucccaaaggacu

SEQ ID NO: 2408799 - RNA, 14 nt, Human
cuuccauuugcaag

SEQ ID NO: 2408800 - RNA, 16 nt, Human
cuuccauuugugugug

SEQ ID NO: 2408801 - RNA, 13 nt, Human
cuuccauuugcaa

SEQ ID NO: 2408802 - RNA, 17 nt, Human
cuuccaugagaacagca

SEQ ID NO: 2408803 - RNA, 12 nt, Human
cuuccauuuaua

SEQ ID NO: 2408804 - RNA, 22 nt, Human
cuuccaucuuuccugauggcag

SEQ ID NO: 2408805 - RNA, 18 nt, Human
cuuccaucuuuccugaug

SEQ ID NO: 2408806 - RNA, 18 nt, Human
cuuccauguggagaaagg

SEQ ID NO: 2408807 - RNA, 15 nt, Human
cuuccauguggagaa

SEQ ID NO: 2408808 - RNA, 18 nt, Human
cuuacaguuuuaaauucu

SEQ ID NO: 2408809 - RNA, 23 nt, Human
cuuacagugagggcuauacaugg

SEQ ID NO: 2408810 - RNA, 23 nt, Human
cuuacaguaggagcccagcucug

SEQ ID NO: 2408811 - RNA, 16 nt, Human
cuuacaguaggagccc

SEQ ID NO: 2408812 - RNA, 23 nt, Human
cuuacagcuggguggcacugcca

SEQ ID NO: 2408813 - RNA, 22 nt, Human
cuuaaagaaagucgaauuaaua

SEQ ID NO: 2408814 - RNA, 22 nt, Human
cuuacagcuggguggcacugcc

SEQ ID NO: 2408815 - RNA, 22 nt, Human
cuuacauaauuuuuuauucaag

SEQ ID NO: 2408816 - RNA, 12 nt, Human
cuuacaugauuc

SEQ ID NO: 2408817 - RNA, 16 nt, Human
cuuacauaauuuuuua

SEQ ID NO: 2408818 - RNA, 18 nt, Human
cuuacaugcauuacugca

SEQ ID NO: 2408819 - RNA, 19 nt, Human
cuuacaugcauuacugcau

SEQ ID NO: 2408820 - RNA, 14 nt, Human
cuuacauguuuucu

SEQ ID NO: 2408821 - RNA, 21 nt, Human
cuuacauguuuucuuugcuuu

SEQ ID NO: 2408822 - RNA, 22 nt, Human
cuuccaucccaggacaccacac

SEQ ID NO: 2408823 - RNA, 15 nt, Human
cuuccaucucgccac

SEQ ID NO: 2408824 - RNA, 17 nt, Human
cuuccaucccuaccccc

SEQ ID NO: 2408825 - RNA, 19 nt, Human
cuuccaucccuacccccua

SEQ ID NO: 2408826 - RNA, 12 nt, Human
cuuccaucccua

SEQ ID NO: 2408827 - RNA, 14 nt, Human
cuuccaucccuacc

SEQ ID NO: 2408828 - RNA, 15 nt, Human
cuuccaucccuaccc

SEQ ID NO: 2408829 - RNA, 16 nt, Human
cuuccaucccuacccc

SEQ ID NO: 2408830 - RNA, 17 nt, Human
cuuccaucccaggacac

SEQ ID NO: 2408831 - RNA, 14 nt, Human
cuuccaucccagga

SEQ ID NO: 2408832 - RNA, 14 nt, Human
cuuccaucccagag

SEQ ID NO: 2408833 - RNA, 14 nt, Human
cuuccaucaugucc

SEQ ID NO: 2408834 - RNA, 17 nt, Human
cuuccaucaugucccca

SEQ ID NO: 2408835 - RNA, 13 nt, Human
cuuccaucauguc

SEQ ID NO: 2408836 - RNA, 12 nt, Human
cuuccaucaugu

SEQ ID NO: 2408837 - RNA, 20 nt, Human
cuuacauuagcaguuugcuu

SEQ ID NO: 2408838 - RNA, 21 nt, Human
cuuccauaugaccucaugcau

SEQ ID NO: 2408839 - RNA, 14 nt, Human
cuuacaugcauuug

SEQ ID NO: 2408840 - RNA, 17 nt, Human
cuuucaauaggaaaaac

SEQ ID NO: 2408841 - RNA, 18 nt, Human
cuuucaauaggaaaaacu

SEQ ID NO: 2408842 - RNA, 16 nt, Human
cuuucacaaccuucug

SEQ ID NO: 2408843 - RNA, 14 nt, Human
cuuucacacuucca

SEQ ID NO: 2408844 - RNA, 15 nt, Human
cuuucacacuuccac

SEQ ID NO: 2408845 - RNA, 14 nt, Human
cuuucacagcuccu

SEQ ID NO: 2408846 - RNA, 13 nt, Human
cuuucacagcucc

SEQ ID NO: 2408847 - RNA, 16 nt, Human
cuuucacacuuccacc

SEQ ID NO: 2408848 - RNA, 19 nt, Human
cuuucacacuuccaccagc

SEQ ID NO: 2408849 - RNA, 20 nt, Human
cuuucacacuuccaccagcc

SEQ ID NO: 2408850 - RNA, 21 nt, Human
cuuucacacuuccaccagccu

SEQ ID NO: 2408851 - RNA, 18 nt, Human
cuuucacagcuccuccca

SEQ ID NO: 2408852 - RNA, 15 nt, Human
cuuucacagcuccuc

SEQ ID NO: 2408853 - RNA, 23 nt, Human
cuuucacacuuccaccagccugc

SEQ ID NO: 2408854 - RNA, 16 nt, Human
cuuucaccccagggcc

SEQ ID NO: 2408855 - RNA, 21 nt, Human
cuuucaccccagggccugagc

SEQ ID NO: 2408856 - RNA, 15 nt, Human
cuuucaccccagggc

SEQ ID NO: 2408857 - RNA, 17 nt, Human
cuuucacauagagauca

SEQ ID NO: 2408858 - RNA, 16 nt, Human
cuuucacauagauguc

SEQ ID NO: 2408859 - RNA, 20 nt, Human
cuuuaaugucacaggcaggu

SEQ ID NO: 2408860 - RNA, 19 nt, Human
cuuuaaugucacaggcagg

SEQ ID NO: 2408861 - RNA, 18 nt, Human
cuuuaaugucacaggcag

SEQ ID NO: 2408862 - RNA, 17 nt, Human
cuuuaaugucacaggca

SEQ ID NO: 2408863 - RNA, 15 nt, Human
cuuucaauaggaaaa

SEQ ID NO: 2408864 - RNA, 14 nt, Human
cuuucaauaggaaa

SEQ ID NO: 2408865 - RNA, 23 nt, Human
cuuuaaugcaucuagauuaugga

SEQ ID NO: 2408866 - RNA, 12 nt, Human
cuuuaaugcuuu

SEQ ID NO: 2408867 - RNA, 22 nt, Human
cuuuaaugucacaggcaggucc

SEQ ID NO: 2408868 - RNA, 22 nt, Human
cuugucuuuggacccugaggcc

SEQ ID NO: 2408869 - RNA, 21 nt, Human
cuugucuuuggacccugaggc

SEQ ID NO: 2408870 - RNA, 19 nt, Human
cuuuaacuuaauugcuaug

SEQ ID NO: 2408871 - RNA, 14 nt, Human
cuuuaagacauacu

SEQ ID NO: 2408872 - RNA, 18 nt, Human
cuuuaagcagcucuugcu

SEQ ID NO: 2408873 - RNA, 17 nt, Human
cuuuaagcagcucuugc

SEQ ID NO: 2408874 - RNA, 16 nt, Human
cuuuaagcagcucuug

SEQ ID NO: 2408875 - RNA, 14 nt, Human
cuuuaagcagcucu

SEQ ID NO: 2408876 - RNA, 20 nt, Human
cuuuaagcacuacauaaacu

SEQ ID NO: 2408877 - RNA, 19 nt, Human
cuuuaagcacuacauaaac

SEQ ID NO: 2408878 - RNA, 14 nt, Human
cuuuaagaggacau

SEQ ID NO: 2408879 - RNA, 15 nt, Human
cuuuaagacugagca

SEQ ID NO: 2408880 - RNA, 23 nt, Human
cuuuaagacauacuccuuccauc

SEQ ID NO: 2408881 - RNA, 21 nt, Human
cuuuaagcagcucuugcuaau

SEQ ID NO: 2408882 - RNA, 12 nt, Human
cuuuaaggaaaa

SEQ ID NO: 2408883 - RNA, 19 nt, Human
cuuuaagcagcucuugcua

SEQ ID NO: 2408884 - RNA, 13 nt, Human
cuuuaaugcaucu

SEQ ID NO: 2408885 - RNA, 14 nt, Human
cuuuaaugcaucua

SEQ ID NO: 2408886 - RNA, 12 nt, Human
cuuuaaugcauc

SEQ ID NO: 2408887 - RNA, 15 nt, Human
cuugguccugcugca

SEQ ID NO: 2408888 - RNA, 20 nt, Human
cuugguccugcugcaguugc

SEQ ID NO: 2408889 - RNA, 18 nt, Human
cuugguccugcugcaguu

SEQ ID NO: 2408890 - RNA, 17 nt, Human
cuugguccugcugcagu

SEQ ID NO: 2408891 - RNA, 16 nt, Human
cuugguccugcugcag

SEQ ID NO: 2408892 - RNA, 17 nt, Human
cuugguuccagccugcc

SEQ ID NO: 2408893 - RNA, 19 nt, Human
cuugguuccagccugccac

SEQ ID NO: 2408894 - RNA, 16 nt, Human
cuugguucccauuugc

SEQ ID NO: 2408895 - RNA, 22 nt, Human
cuugguucauaaaugaauuuua

SEQ ID NO: 2408896 - RNA, 17 nt, Human
cuugguucauaaaugaa

SEQ ID NO: 2408897 - RNA, 13 nt, Human
cuugguuccccca

SEQ ID NO: 2408898 - RNA, 20 nt, Human
cuugguuccagccugccacu

SEQ ID NO: 2408899 - RNA, 20 nt, Human
cuugguucccauuugcuccu

SEQ ID NO: 2408900 - RNA, 23 nt, Human
cuuggucucagugucaaugcagc

SEQ ID NO: 2408901 - RNA, 22 nt, Human
cuugguccugcugcaguugcca

SEQ ID NO: 2408902 - RNA, 16 nt, Human
cuugguucauaaauga

SEQ ID NO: 2408903 - RNA, 21 nt, Human
cuugguuauuuguuuaccacu

SEQ ID NO: 2408904 - RNA, 14 nt, Human
cuugguucauaaau

SEQ ID NO: 2408905 - RNA, 19 nt, Human
cuuggugugacccucugaa

SEQ ID NO: 2408906 - RNA, 20 nt, Human
cuuggucugauuucaggaua

SEQ ID NO: 2408907 - RNA, 13 nt, Human
cuugucuguagau

SEQ ID NO: 2408908 - RNA, 23 nt, Human
cuugucugauuggcucacccaag

SEQ ID NO: 2408909 - RNA, 12 nt, Human
cuugucugagau

SEQ ID NO: 2408910 - RNA, 14 nt, Human
cuugucucugggcu

SEQ ID NO: 2408911 - RNA, 13 nt, Human
cuugucucugggc

SEQ ID NO: 2408912 - RNA, 20 nt, Human
cuugucuuuggacccugagg

SEQ ID NO: 2408913 - RNA, 14 nt, Human
cuugucuuguucac

SEQ ID NO: 2408914 - RNA, 16 nt, Human
cuugguucccccacug

SEQ ID NO: 2408915 - RNA, 19 nt, Human
cuugguucccccacugauc

SEQ ID NO: 2408916 - RNA, 17 nt, Human
cuugguucccuugugug

SEQ ID NO: 2408917 - RNA, 14 nt, Human
cuugguuggcuggc

SEQ ID NO: 2408918 - RNA, 16 nt, Human
cuugguugaggaaaca

SEQ ID NO: 2408919 - RNA, 14 nt, Human
cuugguugaggaaa

SEQ ID NO: 2408920 - RNA, 15 nt, Human
cuugguugaggaaac

SEQ ID NO: 2408921 - RNA, 20 nt, Human
cuugucucccagcucagggc

SEQ ID NO: 2408922 - RNA, 17 nt, Human
cuugccucaaugccagu

SEQ ID NO: 2408923 - RNA, 22 nt, Human
cuuggcgcugccccuggcagcc

SEQ ID NO: 2408924 - RNA, 21 nt, Human
cuuggcgcugccccuggcagc

SEQ ID NO: 2408925 - RNA, 18 nt, Human
cuuggcggcagcagccau

SEQ ID NO: 2408926 - RNA, 17 nt, Human
cuuggcggcagcagcca

SEQ ID NO: 2408927 - RNA, 15 nt, Human
cuuggcggcagcagc

SEQ ID NO: 2408928 - RNA, 14 nt, Human
cuuggcggcagcag

SEQ ID NO: 2408929 - RNA, 23 nt, Human
cuuggcgcugccccuggcagccc

SEQ ID NO: 2408930 - RNA, 18 nt, Human
cuuggcccgcacagagcu

SEQ ID NO: 2408931 - RNA, 14 nt, Human
cuugccucucuguu

SEQ ID NO: 2408932 - RNA, 20 nt, Human
cuuggauuguccccgacccu

SEQ ID NO: 2408933 - RNA, 18 nt, Human
cuuggauuguccccgacc

SEQ ID NO: 2408934 - RNA, 17 nt, Human
cuugccucuguccccuu

SEQ ID NO: 2408935 - RNA, 13 nt, Human
cuugccucucugu

SEQ ID NO: 2408936 - RNA, 23 nt, Human
cuugccucggcuccugcugcacc

SEQ ID NO: 2408937 - RNA, 22 nt, Human
cuugccucggcuccugcugcac

SEQ ID NO: 2408938 - RNA, 21 nt, Human
cuugccucggcuccugcugca

SEQ ID NO: 2408939 - RNA, 20 nt, Human
cuugccucggcuccugcugc

SEQ ID NO: 2408940 - RNA, 19 nt, Human
cuugccucggcuccugcug

SEQ ID NO: 2408941 - RNA, 18 nt, Human
cuugccucggcuccugcu

SEQ ID NO: 2408942 - RNA, 17 nt, Human
cuugccucggcuccugc

SEQ ID NO: 2408943 - RNA, 15 nt, Human
cuuggauuguccccg

SEQ ID NO: 2408944 - RNA, 14 nt, Human
cuugccuccccauu

SEQ ID NO: 2408945 - RNA, 16 nt, Human
cuugcccuugcccuga

SEQ ID NO: 2408946 - RNA, 12 nt, Human
cuugccucccca

SEQ ID NO: 2408947 - RNA, 13 nt, Human
cuugccuccugga

SEQ ID NO: 2408948 - RNA, 12 nt, Human
cuugccuccugg

SEQ ID NO: 2408949 - RNA, 20 nt, Human
cuugccuccccauuucccau

SEQ ID NO: 2408950 - RNA, 16 nt, Human
cuugccucggcuccug

SEQ ID NO: 2408951 - RNA, 15 nt, Human
cuugccucggcuccu

SEQ ID NO: 2408952 - RNA, 12 nt, Human
cuugccuccugu

SEQ ID NO: 2408953 - RNA, 15 nt, Human
cuugccuccugugua

SEQ ID NO: 2408954 - RNA, 21 nt, Human
cuugauggcuccgaacacccu

SEQ ID NO: 2408955 - RNA, 15 nt, Human
cuugauguguuaucu

SEQ ID NO: 2408956 - RNA, 22 nt, Human
cuugauguggugaggcaggcuu

SEQ ID NO: 2408957 - RNA, 12 nt, Human
cuugaugugccu

SEQ ID NO: 2408958 - RNA, 22 nt, Human
cuugaugugccauuuuaaaaaa

SEQ ID NO: 2408959 - RNA, 15 nt, Human
cuugaugugccauuu

SEQ ID NO: 2408960 - RNA, 13 nt, Human
cuugaugccuggc

SEQ ID NO: 2408961 - RNA, 17 nt, Human
cuugauucugcaguaaa

SEQ ID NO: 2408962 - RNA, 20 nt, Human
cuugauucugcaguaaaucu

SEQ ID NO: 2408963 - RNA, 13 nt, Human
cuugauucugcag

SEQ ID NO: 2408964 - RNA, 19 nt, Human
cuugauucauaaugacuua

SEQ ID NO: 2408965 - RNA, 21 nt, Human
cuugauucugcaguaaaucuu

SEQ ID NO: 2408966 - RNA, 22 nt, Human
cuugauucugcaguaaaucuuu

SEQ ID NO: 2408967 - RNA, 17 nt, Human
cuugcccuugcccugac

SEQ ID NO: 2408968 - RNA, 15 nt, Human
cuugcccuugcccug

SEQ ID NO: 2408969 - RNA, 23 nt, Human
cuugcccuucccugucccucuaa

SEQ ID NO: 2408970 - RNA, 18 nt, Human
cuugccgucuaccugagg

SEQ ID NO: 2408971 - RNA, 23 nt, Human
cuugccgaaccaggagcugcuca

SEQ ID NO: 2408972 - RNA, 18 nt, Human
cuugccgcgucgcccucc

SEQ ID NO: 2408973 - RNA, 21 nt, Human
cuugccgcgucgcccucccag

SEQ ID NO: 2408974 - RNA, 19 nt, Human
cuugccgucuaccugaggg

SEQ ID NO: 2408975 - RNA, 18 nt, Human
cuugccucaaugccagua

SEQ ID NO: 2408976 - RNA, 23 nt, Human
cuugccgcgucgcccucccaggc

SEQ ID NO: 2408977 - RNA, 19 nt, Human
cuuuuauuguauaaacuau

SEQ ID NO: 2408978 - RNA, 13 nt, Human
cuuuuauuguaua

SEQ ID NO: 2408979 - RNA, 16 nt, Human
cuuuuauuguauaaac

SEQ ID NO: 2408980 - RNA, 18 nt, Human
cuuuuaugugaaacaugu

SEQ ID NO: 2408981 - RNA, 19 nt, Human
cuuuuaugugaaacauguu

SEQ ID NO: 2408982 - RNA, 20 nt, Human
cuuuuauguuauuuauauau

SEQ ID NO: 2408983 - RNA, 16 nt, Human
cuuuuauuaaugcacu

SEQ ID NO: 2408984 - RNA, 14 nt, Human
cuuuuauuaaugca

SEQ ID NO: 2408985 - RNA, 17 nt, Human
cuuuuauucauuugagu

SEQ ID NO: 2408986 - RNA, 18 nt, Human
cuuuuauguuauuuauau

SEQ ID NO: 2408987 - RNA, 19 nt, Human
cuuuuauuaaugcacuuuc

SEQ ID NO: 2408988 - RNA, 17 nt, Human
cuuuuauugacacagaa

SEQ ID NO: 2408989 - RNA, 18 nt, Human
cuuuuauugacacagaaa

SEQ ID NO: 2408990 - RNA, 14 nt, Human
gaaacaaaaacacu

SEQ ID NO: 2408991 - RNA, 19 nt, Human
gaaacaaaaacacuaaaaa

SEQ ID NO: 2408992 - RNA, 23 nt, Human
gaaacaaaaacacuaaaaauaaa

SEQ ID NO: 2408993 - RNA, 18 nt, Human
gaaaauuuugauguuuua

SEQ ID NO: 2408994 - RNA, 14 nt, Human
gaaaauuuuaaaaa

SEQ ID NO: 2408995 - RNA, 12 nt, Human
gaaacaaagaag

SEQ ID NO: 2408996 - RNA, 15 nt, Human
gaaaacuuauuugag

SEQ ID NO: 2408997 - RNA, 14 nt, Human
gaaaacuuauuuga

SEQ ID NO: 2408998 - RNA, 23 nt, Human
gaaaacuuaugaccucuuccuuu

SEQ ID NO: 2408999 - RNA, 18 nt, Human
gaaaacugaaaaucuaau

SEQ ID NO: 2409000 - RNA, 20 nt, Human
gaaaacugaaaaucuaauau

SEQ ID NO: 2409001 - RNA, 16 nt, Human
gaaaacugacagagga

SEQ ID NO: 2409002 - RNA, 19 nt, Human
gaaaacugcaacuuguaaa

SEQ ID NO: 2409003 - RNA, 21 nt, Human
gaaaaaauguuggauuuauaa

SEQ ID NO: 2409004 - RNA, 18 nt, Human
gaaaaaauguuggauuua

SEQ ID NO: 2409005 - RNA, 14 nt, Human
gaaaaaauguugga

SEQ ID NO: 2409006 - RNA, 19 nt, Human
gaaaaaaugauguucauuu

SEQ ID NO: 2409007 - RNA, 20 nt, Human
gaaaacuccuuuagcaggug

SEQ ID NO: 2409008 - RNA, 17 nt, Human
gaaaacucauuacuuuu

SEQ ID NO: 2409009 - RNA, 16 nt, Human
gaaaacugaaaaucua

SEQ ID NO: 2409010 - RNA, 20 nt, Human
gaaaagacuccaaagaaaug

SEQ ID NO: 2409011 - RNA, 18 nt, Human
gaaaagacuccaaagaaa

SEQ ID NO: 2409012 - RNA, 21 nt, Human
gaaaagacuccaaagaaaugu

SEQ ID NO: 2409013 - RNA, 16 nt, Human
gaaaacuuauuugagu

SEQ ID NO: 2409014 - RNA, 16 nt, Human
gaaaacuucuuuuaaa

SEQ ID NO: 2409015 - RNA, 15 nt, Human
gaaaagagauauuuu

SEQ ID NO: 2409016 - RNA, 19 nt, Human
gaaaagagauauuuuaaaa

SEQ ID NO: 2409017 - RNA, 16 nt, Human
gaaaagcaccugccga

SEQ ID NO: 2409018 - RNA, 19 nt, Human
gaaaagcagcccuuggcca

SEQ ID NO: 2409019 - RNA, 17 nt, Human
gaaaagcaccugccgac

SEQ ID NO: 2409020 - RNA, 14 nt, Human
gaaaagcagcucuc

SEQ ID NO: 2409021 - RNA, 17 nt, Human
gaaaagcagcucucccc

SEQ ID NO: 2409022 - RNA, 20 nt, Human
gaaaagcagcccuuggccag

SEQ ID NO: 2409023 - RNA, 21 nt, Human
gaaaagccucugugucacugg

SEQ ID NO: 2409024 - RNA, 14 nt, Human
gaaaagccucugug

SEQ ID NO: 2409025 - RNA, 13 nt, Human
gaaaagccucugu

SEQ ID NO: 2409026 - RNA, 18 nt, Human
gaaaagcggacaucagcu

SEQ ID NO: 2409027 - RNA, 22 nt, Human
gaaaauuaggauuucaugauuu

SEQ ID NO: 2409028 - RNA, 18 nt, Human
gaaaauuaggauuucaug

SEQ ID NO: 2409029 - RNA, 20 nt, Human
gaaaauguuuuucugccagg

SEQ ID NO: 2409030 - RNA, 13 nt, Human
gaaaauuaacacu

SEQ ID NO: 2409031 - RNA, 15 nt, Human
gaaaauuaacacugc

SEQ ID NO: 2409032 - RNA, 14 nt, Human
gaaaauuaacauga

SEQ ID NO: 2409033 - RNA, 21 nt, Human
gaaaauguugagaaucccaaa

SEQ ID NO: 2409034 - RNA, 15 nt, Human
gaaaagccucugugu

SEQ ID NO: 2409035 - RNA, 20 nt, Human
gaaaagcggacaucagcugg

SEQ ID NO: 2409036 - RNA, 18 nt, Human
cuuuugccguuauuaaaa

SEQ ID NO: 2409037 - RNA, 11 nt, Human
cuuuugcuuuu

SEQ ID NO: 2409038 - RNA, 14 nt, Human
cuuuugcuuuauuc

SEQ ID NO: 2409039 - RNA, 22 nt, Human
cuuuugcucuuagcugucugcu

SEQ ID NO: 2409040 - RNA, 23 nt, Human
cuuuuguauguaaaugugcauuc

SEQ ID NO: 2409041 - RNA, 21 nt, Human
cuuuuguauguaaaugugcau

SEQ ID NO: 2409042 - RNA, 20 nt, Human
cuuuuguauguaaaugugca

SEQ ID NO: 2409043 - RNA, 18 nt, Human
cuuuuguauguaaaugug

SEQ ID NO: 2409044 - RNA, 17 nt, Human
cuuuuguauguaaaugu

SEQ ID NO: 2409045 - RNA, 16 nt, Human
cuuuuguauguaaaug

SEQ ID NO: 2409046 - RNA, 15 nt, Human
cuuuuguauguaaau

SEQ ID NO: 2409047 - RNA, 13 nt, Human
cuuuuguauguaa

SEQ ID NO: 2409048 - RNA, 14 nt, Human
cuuuuguauaguug

SEQ ID NO: 2409049 - RNA, 14 nt, Human
cuuuugucccagaa

SEQ ID NO: 2409050 - RNA, 17 nt, Human
cuuuugucuaugggacu

SEQ ID NO: 2409051 - RNA, 16 nt, Human
cuuuuggucuguguga

SEQ ID NO: 2409052 - RNA, 15 nt, Human
cuuuuggucugugug

SEQ ID NO: 2409053 - RNA, 15 nt, Human
cuuuugcuuuuggca

SEQ ID NO: 2409054 - RNA, 17 nt, Human
cuuuugcuuuuggcaaa

SEQ ID NO: 2409055 - RNA, 21 nt, Human
cuuuugguaaagacuggcuuu

SEQ ID NO: 2409056 - RNA, 20 nt, Human
cuuuugguaaagacuggcuu

SEQ ID NO: 2409057 - RNA, 14 nt, Human
cuuuuuuuucuuua

SEQ ID NO: 2409058 - RNA, 15 nt, Human
cuuuuuuuucuuuaa

SEQ ID NO: 2409059 - RNA, 18 nt, Human
cuuuuuuuuaaugugcug

SEQ ID NO: 2409060 - RNA, 17 nt, Human
cuuuuuuuuaaugugcu

SEQ ID NO: 2409061 - RNA, 21 nt, Human
cuuuuuuuuccccccuagaaa

SEQ ID NO: 2409062 - RNA, 14 nt, Human
cuuuuuuuuaaguu

SEQ ID NO: 2409063 - RNA, 14 nt, Human
cuuuugugcauuau

SEQ ID NO: 2409064 - RNA, 18 nt, Human
cuuuugugcauuaucuag

SEQ ID NO: 2409065 - RNA, 23 nt, Human
cuuuuguguacaguguguaaagu

SEQ ID NO: 2409066 - RNA, 14 nt, Human
cuuuuguguacagu

SEQ ID NO: 2409067 - RNA, 15 nt, Human
gaaaaaaaaagaaaa

SEQ ID NO: 2409068 - RNA, 16 nt, Human
gaaaaaaaaagaaaaa

SEQ ID NO: 2409069 - RNA, 17 nt, Human
gaaaaaaaaagaaaaaa

SEQ ID NO: 2409070 - RNA, 18 nt, Human
gaaaaaaaaagaaaaaag

SEQ ID NO: 2409071 - RNA, 15 nt, Human
gaaaaaauacauuuu

SEQ ID NO: 2409072 - RNA, 17 nt, Human
gaaaaaauacauuuuau

SEQ ID NO: 2409073 - RNA, 10 nt, Human
gaaaaaauac

SEQ ID NO: 2409074 - RNA, 21 nt, Human
gaaaaaauaauugauuucaag

SEQ ID NO: 2409075 - RNA, 13 nt, Human
gaaaaaauacauu

SEQ ID NO: 2409076 - RNA, 14 nt, Human
gaaaaaauacauuu

SEQ ID NO: 2409077 - RNA, 14 nt, Human
gaaaaaauauauau

SEQ ID NO: 2409078 - RNA, 19 nt, Human
gaaaaaauauuuuccugcc

SEQ ID NO: 2409079 - RNA, 18 nt, Human
gaaaaaaaaaaugcugaa

SEQ ID NO: 2409080 - RNA, 19 nt, Human
gaaaaaaaaaaugcugaac

SEQ ID NO: 2409081 - RNA, 20 nt, Human
gaaaaaaaaaaugcugaaca

SEQ ID NO: 2409082 - RNA, 12 nt, Human
gaaaaaaaaaga

SEQ ID NO: 2409083 - RNA, 13 nt, Human
gaaaaaaaaagaa

SEQ ID NO: 2409084 - RNA, 21 nt, Human
cuuuuuuuuuuuuuuugacaa

SEQ ID NO: 2409085 - RNA, 15 nt, Human
cuuuuuuuuguaugu

SEQ ID NO: 2409086 - RNA, 18 nt, Human
gaacaaggcaaggcuguc

SEQ ID NO: 2409087 - RNA, 17 nt, Human
gaacaaggcaaggcugu

SEQ ID NO: 2409088 - RNA, 15 nt, Human
gaacaaggcaaggcu

SEQ ID NO: 2409089 - RNA, 14 nt, Human
gaacaaggcaaggc

SEQ ID NO: 2409090 - RNA, 21 nt, Human
gaacaaggcaaggcugucaau

SEQ ID NO: 2409091 - RNA, 23 nt, Human
gaaacuucagcgguuuauauaag

SEQ ID NO: 2409092 - RNA, 17 nt, Human
gaaacuuauuuuuuucu

SEQ ID NO: 2409093 - RNA, 12 nt, Human
gaaacuuauuuu

SEQ ID NO: 2409094 - RNA, 11 nt, Human
gaaacuuauuu

SEQ ID NO: 2409095 - RNA, 20 nt, Human
gaaacuuauuuuuuucugau

SEQ ID NO: 2409096 - RNA, 19 nt, Human
gaaacuuauuuuuuucuga

SEQ ID NO: 2409097 - RNA, 21 nt, Human
gaaacuuauuuuuuucugauu

SEQ ID NO: 2409098 - RNA, 14 nt, Human
gaaacuuacacaca

SEQ ID NO: 2409099 - RNA, 15 nt, Human
gaaacuuacacacaa

SEQ ID NO: 2409100 - RNA, 15 nt, Human
gaaacuguugccaga

SEQ ID NO: 2409101 - RNA, 17 nt, Human
gaaacuguugccagaga

SEQ ID NO: 2409102 - RNA, 21 nt, Human
gaaacuguugccagagaugga

SEQ ID NO: 2409103 - RNA, 23 nt, Human
gaaacuguugccagagauggagg

SEQ ID NO: 2409104 - RNA, 20 nt, Human
gaaacuguucccaccugcug

SEQ ID NO: 2409105 - RNA, 18 nt, Human
gaaacuguagucucagga

SEQ ID NO: 2409106 - RNA, 21 nt, Human
gaaacuguucccaccugcugg

SEQ ID NO: 2409107 - RNA, 22 nt, Human
gaaacuguucccaccugcugga

SEQ ID NO: 2409108 - RNA, 12 nt, Human
gaaacuuggcuc

SEQ ID NO: 2409109 - RNA, 11 nt, Human
gaaacuuggau

SEQ ID NO: 2409110 - RNA, 18 nt, Human
gaaagaaguggggacaga

SEQ ID NO: 2409111 - RNA, 11 nt, Human
gaaagaagaga

SEQ ID NO: 2409112 - RNA, 19 nt, Human
gaaagaagagccggagccu

SEQ ID NO: 2409113 - RNA, 15 nt, Human
gaaagaagagacagg

SEQ ID NO: 2409114 - RNA, 11 nt, Human
gaaagaaggaa

SEQ ID NO: 2409115 - RNA, 16 nt, Human
gaaagacagagcuggg

SEQ ID NO: 2409116 - RNA, 14 nt, Human
gaaagacagagcug

SEQ ID NO: 2409117 - RNA, 19 nt, Human
gaaagaaugaaagaguaaa

SEQ ID NO: 2409118 - RNA, 16 nt, Human
gaaagaaugaaagagu

SEQ ID NO: 2409119 - RNA, 16 nt, Human
gaaagaaggcaaaguc

SEQ ID NO: 2409120 - RNA, 18 nt, Human
gaaaggcuccaggagcag

SEQ ID NO: 2409121 - RNA, 17 nt, Human
gaaaggcuccaggagca

SEQ ID NO: 2409122 - RNA, 19 nt, Human
gaaaggcuccaggagcagc

SEQ ID NO: 2409123 - RNA, 15 nt, Human
gaaagguucugcccg

SEQ ID NO: 2409124 - RNA, 14 nt, Human
gaaagguucugccc

SEQ ID NO: 2409125 - RNA, 14 nt, Human
gaaagguuuacauu

SEQ ID NO: 2409126 - RNA, 18 nt, Human
gaaagacuaucuaaaugu

SEQ ID NO: 2409127 - RNA, 21 nt, Human
gaaagacggauugcauuagaa

SEQ ID NO: 2409128 - RNA, 16 nt, Human
gaaaggcuccaggagc

SEQ ID NO: 2409129 - RNA, 23 nt, Human
gaaagacauccauaaagaagcaa

SEQ ID NO: 2409130 - RNA, 21 nt, Human
gaaagacauccauaaagaagc

SEQ ID NO: 2409131 - RNA, 22 nt, Human
gaaagacauccauaaagaagca

SEQ ID NO: 2409132 - RNA, 16 nt, Human
gaaagaccauuuuucc

SEQ ID NO: 2409133 - RNA, 17 nt, Human
gaaagacagcuucucau

SEQ ID NO: 2409134 - RNA, 16 nt, Human
gaaagacagcuucuca

SEQ ID NO: 2409135 - RNA, 16 nt, Human
gaaaucaaauaugcaa

SEQ ID NO: 2409136 - RNA, 19 nt, Human
gaaaucaaagagagaaaau

SEQ ID NO: 2409137 - RNA, 21 nt, Human
gaaaucaaauaugcaaagcac

SEQ ID NO: 2409138 - RNA, 17 nt, Human
gaaaucaaauaugcaaa

SEQ ID NO: 2409139 - RNA, 19 nt, Human
gaaauauuuauuuuuuuaa

SEQ ID NO: 2409140 - RNA, 21 nt, Human
gaaaguacuucuccacccugc

SEQ ID NO: 2409141 - RNA, 20 nt, Human
gaaagguuugagaagcacug

SEQ ID NO: 2409142 - RNA, 16 nt, Human
gaaagguuuacauugu

SEQ ID NO: 2409143 - RNA, 17 nt, Human
gaaaugaaagcagggac

SEQ ID NO: 2409144 - RNA, 17 nt, Human
gaaaucaccgaaaacgu

SEQ ID NO: 2409145 - RNA, 23 nt, Human
gaaaucaaauaugcaaagcacug

SEQ ID NO: 2409146 - RNA, 16 nt, Human
gaaaucacagaaucau

SEQ ID NO: 2409147 - RNA, 15 nt, Human
gaaaucacagaauca

SEQ ID NO: 2409148 - RNA, 13 nt, Human
gaaaugaauaauu

SEQ ID NO: 2409149 - RNA, 18 nt, Human
gaaauuuuuauuaaauua

SEQ ID NO: 2409150 - RNA, 18 nt, Human
gaaaugaaagcagggacu

SEQ ID NO: 2409151 - RNA, 17 nt, Human
gaacaaauuuacagaga

SEQ ID NO: 2409152 - RNA, 18 nt, Human
gaacaaauuuacagagac

SEQ ID NO: 2409153 - RNA, 22 nt, Human
gaaauuuuucagaugcuucugg

SEQ ID NO: 2409154 - RNA, 17 nt, Human
gaaauuuuucagaugcu

SEQ ID NO: 2409155 - RNA, 20 nt, Human
gaaauuuuucagaugcuucu

SEQ ID NO: 2409156 - RNA, 14 nt, Human
gaaaugaauaauuu

SEQ ID NO: 2409157 - RNA, 18 nt, Human
gaaaugaauaauuuccca

SEQ ID NO: 2409158 - RNA, 17 nt, Human
gaaauuuuuauuuuucu

SEQ ID NO: 2409159 - RNA, 19 nt, Human
gaaauuuuuauuaaauuau

SEQ ID NO: 2409160 - RNA, 23 nt, Human
gaacaaauuuacagagacagaaa

SEQ ID NO: 2409161 - RNA, 15 nt, Human
gaacaacuacuguga

SEQ ID NO: 2409162 - RNA, 19 nt, Human
gaacaacuaggcuucagca

SEQ ID NO: 2409163 - RNA, 21 nt, Human
gaacaacuaggcuucagcaua

SEQ ID NO: 2409164 - RNA, 13 nt, Human
gaacaagccuaaa

SEQ ID NO: 2409165 - RNA, 16 nt, Human
gaacaagcauucuccu

SEQ ID NO: 2409166 - RNA, 16 nt, Human
cugcuucaaggauccu

SEQ ID NO: 2409167 - RNA, 14 nt, Human
cugcuucaaggauc

SEQ ID NO: 2409168 - RNA, 19 nt, Human
cugcuucaaggauccugag

SEQ ID NO: 2409169 - RNA, 20 nt, Human
cugcuucaaggauccugagc

SEQ ID NO: 2409170 - RNA, 20 nt, Human
cugcuuccaccucaccccac

SEQ ID NO: 2409171 - RNA, 19 nt, Human
cugcuuccaccucacccca

SEQ ID NO: 2409172 - RNA, 18 nt, Human
cugcuuccaccucacccc

SEQ ID NO: 2409173 - RNA, 17 nt, Human
cugcuuccaccucaccc

SEQ ID NO: 2409174 - RNA, 16 nt, Human
cugcuuccaccucacc

SEQ ID NO: 2409175 - RNA, 21 nt, Human
cugcuucaugcucagcccuga

SEQ ID NO: 2409176 - RNA, 24 nt, Human
cugcuuccaauuuucuggaauaca

SEQ ID NO: 2409177 - RNA, 14 nt, Human
cugcuuccagugag

SEQ ID NO: 2409178 - RNA, 15 nt, Human
cugcuucaugacauu

SEQ ID NO: 2409179 - RNA, 12 nt, Human
cugcuucagugg

SEQ ID NO: 2409180 - RNA, 21 nt, Human
cugcuucaguguauggaaaua

SEQ ID NO: 2409181 - RNA, 19 nt, Human
cugcuucaguguauggaaa

SEQ ID NO: 2409182 - RNA, 23 nt, Human
cugcuucagccucccgaguagcu

SEQ ID NO: 2409183 - RNA, 14 nt, Human
cuggaaaagaggag

SEQ ID NO: 2409184 - RNA, 22 nt, Human
cugcuuccaccucaccccacuu

SEQ ID NO: 2409185 - RNA, 23 nt, Human
cuggaaaaguauguuagugcaaa

SEQ ID NO: 2409186 - RNA, 18 nt, Human
cuggaaaaugugacccag

SEQ ID NO: 2409187 - RNA, 19 nt, Human
cuggaaaagggucuuggga

SEQ ID NO: 2409188 - RNA, 15 nt, Human
cuggaaaagaggagu

SEQ ID NO: 2409189 - RNA, 22 nt, Human
cuggaaaagggucuugggaaau

SEQ ID NO: 2409190 - RNA, 20 nt, Human
cuggaaaauuccuauugauu

SEQ ID NO: 2409191 - RNA, 16 nt, Human
cuggaaaccacagucc

SEQ ID NO: 2409192 - RNA, 22 nt, Human
cuggaguuacauuaauguuaau

SEQ ID NO: 2409193 - RNA, 16 nt, Human
cuggaguuacauuaau

SEQ ID NO: 2409194 - RNA, 22 nt, Human
cuggaguguggcugaggaggcc

SEQ ID NO: 2409195 - RNA, 21 nt, Human
cuggaguguggcugaggaggc

SEQ ID NO: 2409196 - RNA, 20 nt, Human
cuggaguguggcugaggagg

SEQ ID NO: 2409197 - RNA, 19 nt, Human
cuggaguguggcugaggag

SEQ ID NO: 2409198 - RNA, 18 nt, Human
cuggaguguggcugagga

SEQ ID NO: 2409199 - RNA, 17 nt, Human
cuggauccaucaggcca

SEQ ID NO: 2409200 - RNA, 13 nt, Human
cuggaucaguccu

SEQ ID NO: 2409201 - RNA, 17 nt, Human
cuggaucaguccuuuga

SEQ ID NO: 2409202 - RNA, 20 nt, Human
cuggaucaguccuuugauca

SEQ ID NO: 2409203 - RNA, 21 nt, Human
cuggaucaguccuuugaucag

SEQ ID NO: 2409204 - RNA, 15 nt, Human
cuggagaagagagga

SEQ ID NO: 2409205 - RNA, 14 nt, Human
cuggagaagagagg

SEQ ID NO: 2409206 - RNA, 12 nt, Human
cuggagaagaga

SEQ ID NO: 2409207 - RNA, 23 nt, Human
cuggagaacuagaaccuggaggg

SEQ ID NO: 2409208 - RNA, 22 nt, Human
cuggagaacuagaaccuggagg

SEQ ID NO: 2409209 - RNA, 19 nt, Human
cuggagaacuagaaccugg

SEQ ID NO: 2409210 - RNA, 19 nt, Human
cuggagaagacccuccccg

SEQ ID NO: 2409211 - RNA, 24 nt, Human
cuggaguggccacuaagcagagga

SEQ ID NO: 2409212 - RNA, 13 nt, Human
cuggaguggccac

SEQ ID NO: 2409213 - RNA, 14 nt, Human
cuggaguggccacu

SEQ ID NO: 2409214 - RNA, 19 nt, Human
cuggagugguguucagcca

SEQ ID NO: 2409215 - RNA, 23 nt, Human
cuggaguggccacuaagcagagg

SEQ ID NO: 2409216 - RNA, 13 nt, Human
cuggagaacuaga

SEQ ID NO: 2409217 - RNA, 23 nt, Human
cuggaaaggggggagcuggggaa

SEQ ID NO: 2409218 - RNA, 15 nt, Human
cuggagaacuagaga

SEQ ID NO: 2409219 - RNA, 14 nt, Human
cuggagaacuagag

SEQ ID NO: 2409220 - RNA, 23 nt, Human
cuggaaaggggagagccugcugg

SEQ ID NO: 2409221 - RNA, 22 nt, Human
cuggaaaggggagagccugcug

SEQ ID NO: 2409222 - RNA, 21 nt, Human
cuggaaaggggagagccugcu

SEQ ID NO: 2409223 - RNA, 20 nt, Human
cuggaaaggggagagccugc

SEQ ID NO: 2409224 - RNA, 20 nt, Human
cuggaaaggggggagcuggg

SEQ ID NO: 2409225 - RNA, 19 nt, Human
cuggaaaggggggagcugg

SEQ ID NO: 2409226 - RNA, 20 nt, Human
cuggacuccucuguccaggc

SEQ ID NO: 2409227 - RNA, 19 nt, Human
cuggaaaggggagagccug

SEQ ID NO: 2409228 - RNA, 18 nt, Human
cuggaaaggggagagccu

SEQ ID NO: 2409229 - RNA, 17 nt, Human
cuggaaaggggagagcc

SEQ ID NO: 2409230 - RNA, 16 nt, Human
cuggaaaggggagagc

SEQ ID NO: 2409231 - RNA, 15 nt, Human
cuggaaaggggagag

SEQ ID NO: 2409232 - RNA, 13 nt, Human
cuggaaaggggag

SEQ ID NO: 2409233 - RNA, 23 nt, Human
cuggaaaggcucagucucaggag

SEQ ID NO: 2409234 - RNA, 13 nt, Human
cuggaaaggcuca

SEQ ID NO: 2409235 - RNA, 14 nt, Human
cuggaaaggcucag

SEQ ID NO: 2409236 - RNA, 15 nt, Human
cuggaaaggcucagu

SEQ ID NO: 2409237 - RNA, 17 nt, Human
cuggaaaggcucagucu

SEQ ID NO: 2409238 - RNA, 20 nt, Human
cuggaaaggcucagucucag

SEQ ID NO: 2409239 - RNA, 21 nt, Human
cuggaaaggcucagucucagg

SEQ ID NO: 2409240 - RNA, 22 nt, Human
cuggaaaggcucagucucagga

SEQ ID NO: 2409241 - RNA, 18 nt, Human
cuggacucucagucucug

SEQ ID NO: 2409242 - RNA, 19 nt, Human
cuggacucucagucucuga

SEQ ID NO: 2409243 - RNA, 20 nt, Human
cuggacucucagucucugag

SEQ ID NO: 2409244 - RNA, 21 nt, Human
cuggacucucagucucugagc

SEQ ID NO: 2409245 - RNA, 21 nt, Human
cuggagaaaauggacguguua

SEQ ID NO: 2409246 - RNA, 14 nt, Human
cuggacucucaguc

SEQ ID NO: 2409247 - RNA, 17 nt, Human
cuggacucucagucucu

SEQ ID NO: 2409248 - RNA, 23 nt, Human
cuggacuccucuguccaggcacu

SEQ ID NO: 2409249 - RNA, 22 nt, Human
cuggacuccucuguccaggcac

SEQ ID NO: 2409250 - RNA, 17 nt, Human
cuggaugcagccucaca

SEQ ID NO: 2409251 - RNA, 16 nt, Human
cuggaugcagccucac

SEQ ID NO: 2409252 - RNA, 20 nt, Human
cuggaucuccauucucucag

SEQ ID NO: 2409253 - RNA, 19 nt, Human
cuggauccuagccuuaucc

SEQ ID NO: 2409254 - RNA, 15 nt, Human
cuggauccugaaaua

SEQ ID NO: 2409255 - RNA, 19 nt, Human
cuggauccaucaggccacu

SEQ ID NO: 2409256 - RNA, 23 nt, Human
cuggauccuagccuuauccucug

SEQ ID NO: 2409257 - RNA, 15 nt, Human
cuggaugcagccuca

SEQ ID NO: 2409258 - RNA, 18 nt, Human
cuggaugcagccucacag

SEQ ID NO: 2409259 - RNA, 22 nt, Human
cuggcagaguugaagacagagc

SEQ ID NO: 2409260 - RNA, 23 nt, Human
cuggcagccccuguucuggcaga

SEQ ID NO: 2409261 - RNA, 13 nt, Human
cuggcagccgugc

SEQ ID NO: 2409262 - RNA, 21 nt, Human
cuggcagaguugaagacagag

SEQ ID NO: 2409263 - RNA, 20 nt, Human
cuggcagaguugaagacaga

SEQ ID NO: 2409264 - RNA, 15 nt, Human
cuggcucuuccaggc

SEQ ID NO: 2409265 - RNA, 14 nt, Human
cuggcucuuccagg

SEQ ID NO: 2409266 - RNA, 13 nt, Human
cuggcucuuccag

SEQ ID NO: 2409267 - RNA, 14 nt, Human
cuggcucccucuug

SEQ ID NO: 2409268 - RNA, 17 nt, Human
cugggacuacaggugug

SEQ ID NO: 2409269 - RNA, 21 nt, Human
cugggacuacaggcacccacc

SEQ ID NO: 2409270 - RNA, 17 nt, Human
cugggacuacaggcacc

SEQ ID NO: 2409271 - RNA, 18 nt, Human
cuggccggcaaccccagu

SEQ ID NO: 2409272 - RNA, 23 nt, Human
cuggccggagucagugccagguc

SEQ ID NO: 2409273 - RNA, 18 nt, Human
cuggccggagucagugcc

SEQ ID NO: 2409274 - RNA, 22 nt, Human
cuggccggagcaaacucugcug

SEQ ID NO: 2409275 - RNA, 21 nt, Human
cuggccggagcaaacucugcu

SEQ ID NO: 2409276 - RNA, 18 nt, Human
cuggcucccacaggcccu

SEQ ID NO: 2409277 - RNA, 19 nt, Human
cuggcucccacaggcccuu

SEQ ID NO: 2409278 - RNA, 22 nt, Human
cuggcucccacaggcccuuccu

SEQ ID NO: 2409279 - RNA, 19 nt, Human
cuggccgccucacccccuc

SEQ ID NO: 2409280 - RNA, 18 nt, Human
cuggccgccucacccccu

SEQ ID NO: 2409281 - RNA, 16 nt, Human
cuggccgccucacccc

SEQ ID NO: 2409282 - RNA, 14 nt, Human
cuggccgccucacc

SEQ ID NO: 2409283 - RNA, 18 nt, Human
cuggccgcgccaaauaau

SEQ ID NO: 2409284 - RNA, 22 nt, Human
cuggccgcccccugccccccag

SEQ ID NO: 2409285 - RNA, 14 nt, Human
cuggccgcccccug

SEQ ID NO: 2409286 - RNA, 13 nt, Human
cuggccgcccccu

SEQ ID NO: 2409287 - RNA, 16 nt, Human
cuggccgaguccaagc

SEQ ID NO: 2409288 - RNA, 17 nt, Human
cuggccgaguccaagcu

SEQ ID NO: 2409289 - RNA, 18 nt, Human
cuggccgaguccaagcug

SEQ ID NO: 2409290 - RNA, 20 nt, Human
cuggccgaguccaagcuggg

SEQ ID NO: 2409291 - RNA, 23 nt, Human
cuggccgaguccaagcugggaga

SEQ ID NO: 2409292 - RNA, 16 nt, Human
cuggcccucaguuucc

SEQ ID NO: 2409293 - RNA, 19 nt, Human
cuggcccucaccccugccc

SEQ ID NO: 2409294 - RNA, 21 nt, Human
cuggcccucaccccugcccug

SEQ ID NO: 2409295 - RNA, 22 nt, Human
cuggcccucaccccugcccugg

SEQ ID NO: 2409296 - RNA, 23 nt, Human
cuggcccucaccccugcccuggg

SEQ ID NO: 2409297 - RNA, 19 nt, Human
cuggcagcucagagagggu

SEQ ID NO: 2409298 - RNA, 17 nt, Human
cuggcagcucagagagg

SEQ ID NO: 2409299 - RNA, 16 nt, Human
cuggcagcucagagag

SEQ ID NO: 2409300 - RNA, 18 nt, Human
cuggcagccgugccuuca

SEQ ID NO: 2409301 - RNA, 17 nt, Human
cuggcagccgugccuuc

SEQ ID NO: 2409302 - RNA, 16 nt, Human
cuggcccucaaggccu

SEQ ID NO: 2409303 - RNA, 23 nt, Human
cuggcccuaugcuuccggccucc

SEQ ID NO: 2409304 - RNA, 21 nt, Human
cuggcccucaaggccucccac

SEQ ID NO: 2409305 - RNA, 19 nt, Human
cuggcccucaaggccuccc

SEQ ID NO: 2409306 - RNA, 18 nt, Human
cuggcccucaaggccucc

SEQ ID NO: 2409307 - RNA, 17 nt, Human
cuggcccucaaggccuc

SEQ ID NO: 2409308 - RNA, 23 nt, Human
cuggcccucaaggccucccacag

SEQ ID NO: 2409309 - RNA, 22 nt, Human
cuggcccucaaggccucccaca

SEQ ID NO: 2409310 - RNA, 24 nt, Human
cuggcccucaaggccucccacagu

SEQ ID NO: 2409311 - RNA, 17 nt, Human
cuggcccucaccccugc

SEQ ID NO: 2409312 - RNA, 23 nt, Human
cuggcccgugacagacuccugag

SEQ ID NO: 2409313 - RNA, 19 nt, Human
cuggcccgugacagacucc

SEQ ID NO: 2409314 - RNA, 18 nt, Human
cuggcccgugacagacuc

SEQ ID NO: 2409315 - RNA, 16 nt, Human
cuggcccgugacagac

SEQ ID NO: 2409316 - RNA, 21 nt, Human
cuggcccgucauguuccucaa

SEQ ID NO: 2409317 - RNA, 15 nt, Human
cuggcccgugacaga

SEQ ID NO: 2409318 - RNA, 22 nt, Human
cuggcccgucauguuccucaaa

SEQ ID NO: 2409319 - RNA, 12 nt, Human
cuggcagcucuc

SEQ ID NO: 2409320 - RNA, 12 nt, Human
cugccuccugcc

SEQ ID NO: 2409321 - RNA, 13 nt, Human
cugccuccugccu

SEQ ID NO: 2409322 - RNA, 14 nt, Human
cugccuccuuugug

SEQ ID NO: 2409323 - RNA, 17 nt, Human
cugccuccugccugccc

SEQ ID NO: 2409324 - RNA, 16 nt, Human
cugccuccugccugcc

SEQ ID NO: 2409325 - RNA, 15 nt, Human
cugccuccugccugc

SEQ ID NO: 2409326 - RNA, 19 nt, Human
cugccuccugccugccccu

SEQ ID NO: 2409327 - RNA, 21 nt, Human
cugccuccuuugugaggaagc

SEQ ID NO: 2409328 - RNA, 17 nt, Human
cugccuccuuugugagg

SEQ ID NO: 2409329 - RNA, 23 nt, Human
cugccuccuuugugaggaagccg

SEQ ID NO: 2409330 - RNA, 14 nt, Human
cugccucgaacugg

SEQ ID NO: 2409331 - RNA, 13 nt, Human
cugccugucuguc

SEQ ID NO: 2409332 - RNA, 19 nt, Human
cugccugucccucucaggc

SEQ ID NO: 2409333 - RNA, 20 nt, Human
cugccugucccucucaggca

SEQ ID NO: 2409334 - RNA, 23 nt, Human
cugccugucccucucaggcaugc

SEQ ID NO: 2409335 - RNA, 12 nt, Human
cugccugucucc

SEQ ID NO: 2409336 - RNA, 16 nt, Human
cugccugucccucuca

SEQ ID NO: 2409337 - RNA, 18 nt, Human
cugccugucccucucagg

SEQ ID NO: 2409338 - RNA, 22 nt, Human
cugccuguaguuaggaaauaaa

SEQ ID NO: 2409339 - RNA, 17 nt, Human
cugccuguaguuaggaa

SEQ ID NO: 2409340 - RNA, 16 nt, Human
cugccuguaguuagga

SEQ ID NO: 2409341 - RNA, 18 nt, Human
cugccuguaguuaggaaa

SEQ ID NO: 2409342 - RNA, 19 nt, Human
cugccuguaguuaggaaau

SEQ ID NO: 2409343 - RNA, 20 nt, Human
cugccuguaguuaggaaaua

SEQ ID NO: 2409344 - RNA, 21 nt, Human
cugccuguaguuaggaaauaa

SEQ ID NO: 2409345 - RNA, 20 nt, Human
cugccucgaacuggcugcaa

SEQ ID NO: 2409346 - RNA, 15 nt, Human
cugccucgaaacaca

SEQ ID NO: 2409347 - RNA, 18 nt, Human
cugccucgaaacacagaa

SEQ ID NO: 2409348 - RNA, 19 nt, Human
cugccucgaacuggcugca

SEQ ID NO: 2409349 - RNA, 19 nt, Human
cugccucgaaacacagaaa

SEQ ID NO: 2409350 - RNA, 17 nt, Human
cugccucgggaaccuca

SEQ ID NO: 2409351 - RNA, 22 nt, Human
cugccucucaucaacugaauga

SEQ ID NO: 2409352 - RNA, 18 nt, Human
cugcugagggaccagcca

SEQ ID NO: 2409353 - RNA, 17 nt, Human
cugcugagggaccagcc

SEQ ID NO: 2409354 - RNA, 15 nt, Human
cugcugagagaccca

SEQ ID NO: 2409355 - RNA, 16 nt, Human
cugcugagagacccaa

SEQ ID NO: 2409356 - RNA, 21 nt, Human
cugcugagagacccaaggagg

SEQ ID NO: 2409357 - RNA, 22 nt, Human
cugcugagagacccaaggagga

SEQ ID NO: 2409358 - RNA, 23 nt, Human
cugcucaagaagacauggagacu

SEQ ID NO: 2409359 - RNA, 20 nt, Human
cugcucaagaagacauggag

SEQ ID NO: 2409360 - RNA, 17 nt, Human
cugcuaucaaagagguu

SEQ ID NO: 2409361 - RNA, 16 nt, Human
cugcuauccugccaaa

SEQ ID NO: 2409362 - RNA, 18 nt, Human
cugcugaaggcucgagca

SEQ ID NO: 2409363 - RNA, 23 nt, Human
cugcugaaggcucgagcaugccu

SEQ ID NO: 2409364 - RNA, 24 nt, Human
cugcugaaggcucgagcaugccug

SEQ ID NO: 2409365 - RNA, 15 nt, Human
cugcugaauuuucac

SEQ ID NO: 2409366 - RNA, 14 nt, Human
cugcugaauuuuca

SEQ ID NO: 2409367 - RNA, 17 nt, Human
cugcugaauuuucacau

SEQ ID NO: 2409368 - RNA, 15 nt, Human
cugcucaauacaucu

SEQ ID NO: 2409369 - RNA, 16 nt, Human
cugcugaauaauaaac

SEQ ID NO: 2409370 - RNA, 22 nt, Human
cugcugaaugauuuccaaagag

SEQ ID NO: 2409371 - RNA, 23 nt, Human
cugcugaaugauuuccaaagaga

SEQ ID NO: 2409372 - RNA, 15 nt, Human
cugccugucugucuc

SEQ ID NO: 2409373 - RNA, 19 nt, Human
cugccuguucccauucuug

SEQ ID NO: 2409374 - RNA, 15 nt, Human
cugccuguucccauu

SEQ ID NO: 2409375 - RNA, 15 nt, Human
cugccugucugaagc

SEQ ID NO: 2409376 - RNA, 13 nt, Human
cugccugucuccu

SEQ ID NO: 2409377 - RNA, 23 nt, Human
cugccuguucagcuccagcucac

SEQ ID NO: 2409378 - RNA, 20 nt, Human
cugccuguucagcuccagcu

SEQ ID NO: 2409379 - RNA, 17 nt, Human
cugcuacuggcaaaagg

SEQ ID NO: 2409380 - RNA, 18 nt, Human
cugcuacuguaauuuuau

SEQ ID NO: 2409381 - RNA, 14 nt, Human
cugcuagcacuugg

SEQ ID NO: 2409382 - RNA, 21 nt, Human
cugcuagcacuuggagccaag

SEQ ID NO: 2409383 - RNA, 16 nt, Human
cugcuagagccagcaa

SEQ ID NO: 2409384 - RNA, 18 nt, Human
cugcuaccucacuggggu

SEQ ID NO: 2409385 - RNA, 20 nt, Human
cugcuacguuccuauuguca

SEQ ID NO: 2409386 - RNA, 21 nt, Human
cugcuacguuccuauugucau

SEQ ID NO: 2409387 - RNA, 17 nt, Human
cugcuacucuguuccuu

SEQ ID NO: 2409388 - RNA, 18 nt, Human
cugcuacucuguuccuuc

SEQ ID NO: 2409389 - RNA, 22 nt, Human
cugcuacucuguuccuucacau

SEQ ID NO: 2409390 - RNA, 14 nt, Human
cugcccccugcugg

SEQ ID NO: 2409391 - RNA, 20 nt, Human
cugcccccugaaacuuauuu

SEQ ID NO: 2409392 - RNA, 18 nt, Human
cugcccccugaaacuuau

SEQ ID NO: 2409393 - RNA, 17 nt, Human
cugcccccugaaacuua

SEQ ID NO: 2409394 - RNA, 16 nt, Human
cugcccccugaaacuu

SEQ ID NO: 2409395 - RNA, 19 nt, Human
cugcccccugcuggcucuu

SEQ ID NO: 2409396 - RNA, 17 nt, Human
cugcccccugcuggcuc

SEQ ID NO: 2409397 - RNA, 15 nt, Human
cugcccccugcuggc

SEQ ID NO: 2409398 - RNA, 12 nt, Human
cugcccccuggu

SEQ ID NO: 2409399 - RNA, 13 nt, Human
cugcccccuggug

SEQ ID NO: 2409400 - RNA, 14 nt, Human
cugcccccuggugg

SEQ ID NO: 2409401 - RNA, 22 nt, Human
cugcccccugguggacaguccu

SEQ ID NO: 2409402 - RNA, 14 nt, Human
cugcccccuucucc

SEQ ID NO: 2409403 - RNA, 16 nt, Human
cugcccccuucuccca

SEQ ID NO: 2409404 - RNA, 17 nt, Human
cugcccccuucucccac

SEQ ID NO: 2409405 - RNA, 18 nt, Human
cugcccccuucucccaca

SEQ ID NO: 2409406 - RNA, 15 nt, Human
cugcccuggugcugc

SEQ ID NO: 2409407 - RNA, 23 nt, Human
cugcccugguccagggaagcugg

SEQ ID NO: 2409408 - RNA, 14 nt, Human
cugcccuggugcug

SEQ ID NO: 2409409 - RNA, 13 nt, Human
cugcccuggugcu

SEQ ID NO: 2409410 - RNA, 12 nt, Human
cugcccuggugc

SEQ ID NO: 2409411 - RNA, 20 nt, Human
cugcccugguccagggaagc

SEQ ID NO: 2409412 - RNA, 21 nt, Human
cugcccugguccagggaagcu

SEQ ID NO: 2409413 - RNA, 19 nt, Human
cugcccccuucucccacac

SEQ ID NO: 2409414 - RNA, 20 nt, Human
cugcccccuucucccacacu

SEQ ID NO: 2409415 - RNA, 24 nt, Human
cugcccugggauguccacagaugc

SEQ ID NO: 2409416 - RNA, 14 nt, Human
cugcccugguccag

SEQ ID NO: 2409417 - RNA, 15 nt, Human
cugcccugguccagg

SEQ ID NO: 2409418 - RNA, 24 nt, Human
cugcccugugaguacuacaguccu

SEQ ID NO: 2409419 - RNA, 21 nt, Human
cugcccugguuuccugcccug

SEQ ID NO: 2409420 - RNA, 18 nt, Human
cugcccugguuuccugcc

SEQ ID NO: 2409421 - RNA, 19 nt, Human
cugcccugguuuccugccc

SEQ ID NO: 2409422 - RNA, 17 nt, Human
cugcccugguuuccugc

SEQ ID NO: 2409423 - RNA, 23 nt, Human
cugcccuggugcugccacacuuc

SEQ ID NO: 2409424 - RNA, 19 nt, Human
cugcccuuaccugccagga

SEQ ID NO: 2409425 - RNA, 20 nt, Human
cugcccugguuuccugcccu

SEQ ID NO: 2409426 - RNA, 12 nt, Human
cugcccuguggg

SEQ ID NO: 2409427 - RNA, 11 nt, Human
cugcccugugg

SEQ ID NO: 2409428 - RNA, 23 nt, Human
cugcccuuaccugccaggaagcc

SEQ ID NO: 2409429 - RNA, 22 nt, Human
cugcccuuaccugccaggaagc

SEQ ID NO: 2409430 - RNA, 17 nt, Human
cugcccuucaccccagu

SEQ ID NO: 2409431 - RNA, 16 nt, Human
cugcccuucaccccag

SEQ ID NO: 2409432 - RNA, 21 nt, Human
cugcccuucaccccaguggcc

SEQ ID NO: 2409433 - RNA, 12 nt, Human
cuguucagcugg

SEQ ID NO: 2409434 - RNA, 22 nt, Human
cuguucagcuccagcucaccag

SEQ ID NO: 2409435 - RNA, 19 nt, Human
cuguucagcuccagcucac

SEQ ID NO: 2409436 - RNA, 18 nt, Human
cuguucagcuccagcuca

SEQ ID NO: 2409437 - RNA, 16 nt, Human
cuguucagcuccagcu

SEQ ID NO: 2409438 - RNA, 19 nt, Human
cuguuaugcugugacacau

SEQ ID NO: 2409439 - RNA, 12 nt, Human
cuguucacagcc

SEQ ID NO: 2409440 - RNA, 19 nt, Human
cuguucacagccagacugg

SEQ ID NO: 2409441 - RNA, 22 nt, Human
cuguuauauaaaugguuaaaag

SEQ ID NO: 2409442 - RNA, 19 nt, Human
cuguuaucaaaacuuucuu

SEQ ID NO: 2409443 - RNA, 19 nt, Human
cuguuaucccugccugguc

SEQ ID NO: 2409444 - RNA, 13 nt, Human
cuguucacucuac

SEQ ID NO: 2409445 - RNA, 15 nt, Human
cuguucagcuccagc

SEQ ID NO: 2409446 - RNA, 22 nt, Human
cuguucacagccagacuggcac

SEQ ID NO: 2409447 - RNA, 12 nt, Human
cuguucacccac

SEQ ID NO: 2409448 - RNA, 14 nt, Human
cuguucacccacag

SEQ ID NO: 2409449 - RNA, 18 nt, Human
cuguucacccacagggcu

SEQ ID NO: 2409450 - RNA, 14 nt, Human
cuguuaugcuguga

SEQ ID NO: 2409451 - RNA, 13 nt, Human
cuguuauccaugg

SEQ ID NO: 2409452 - RNA, 19 nt, Human
cugugcucuggacaggcau

SEQ ID NO: 2409453 - RNA, 18 nt, Human
cugugcucuggacaggca

SEQ ID NO: 2409454 - RNA, 14 nt, Human
cugugagcccagcu

SEQ ID NO: 2409455 - RNA, 19 nt, Human
cugugagcaucacaguuuu

SEQ ID NO: 2409456 - RNA, 21 nt, Human
cugugagauuuugcuuuucca

SEQ ID NO: 2409457 - RNA, 19 nt, Human
cuguguauuccaagacaug

SEQ ID NO: 2409458 - RNA, 15 nt, Human
cuguguauuccaaga

SEQ ID NO: 2409459 - RNA, 16 nt, Human
cuguguauucauugaa

SEQ ID NO: 2409460 - RNA, 15 nt, Human
cuguguauuugcuuu

SEQ ID NO: 2409461 - RNA, 14 nt, Human
cuguguauuugcuu

SEQ ID NO: 2409462 - RNA, 16 nt, Human
cuguguauuugcuuuu

SEQ ID NO: 2409463 - RNA, 22 nt, Human
cugugucagguggggcagcuug

SEQ ID NO: 2409464 - RNA, 21 nt, Human
cuguguccaugcgcucagggc

SEQ ID NO: 2409465 - RNA, 19 nt, Human
cuguguccaugcgcucagg

SEQ ID NO: 2409466 - RNA, 18 nt, Human
cuguguccaugcgcucag

SEQ ID NO: 2409467 - RNA, 13 nt, Human
cuguguccaugcg

SEQ ID NO: 2409468 - RNA, 13 nt, Human
cuguguagcuggg

SEQ ID NO: 2409469 - RNA, 17 nt, Human
cugugucccaugaccca

SEQ ID NO: 2409470 - RNA, 15 nt, Human
cugugucccaugacc

SEQ ID NO: 2409471 - RNA, 13 nt, Human
cugugucccauga

SEQ ID NO: 2409472 - RNA, 23 nt, Human
cuguguccaugcgcucagggcca

SEQ ID NO: 2409473 - RNA, 22 nt, Human
cuguguccaugcgcucagggcc

SEQ ID NO: 2409474 - RNA, 17 nt, Human
cuguuacugucuucagu

SEQ ID NO: 2409475 - RNA, 14 nt, Human
cuguuauauaaaug

SEQ ID NO: 2409476 - RNA, 15 nt, Human
cuguuauauaaaugg

SEQ ID NO: 2409477 - RNA, 13 nt, Human
cuguuauauaaau

SEQ ID NO: 2409478 - RNA, 15 nt, Human
cuguuagcagacagg

SEQ ID NO: 2409479 - RNA, 17 nt, Human
cuguuagccauguggcu

SEQ ID NO: 2409480 - RNA, 15 nt, Human
cuguuagcuguuauu

SEQ ID NO: 2409481 - RNA, 16 nt, Human
cuguuagcuguuauuu

SEQ ID NO: 2409482 - RNA, 21 nt, Human
cuguuacuugaaauaccagug

SEQ ID NO: 2409483 - RNA, 18 nt, Human
cuguuacuugaaauacca

SEQ ID NO: 2409484 - RNA, 19 nt, Human
cuguuacuuaccuaaacag

SEQ ID NO: 2409485 - RNA, 15 nt, Human
cuguuacuuaccuaa

SEQ ID NO: 2409486 - RNA, 13 nt, Human
cuguuagcagaca

SEQ ID NO: 2409487 - RNA, 23 nt, Human
cugugaaguuuacauuguaaaua

SEQ ID NO: 2409488 - RNA, 18 nt, Human
cugugaaguuuacauugu

SEQ ID NO: 2409489 - RNA, 13 nt, Human
cugugaacugaac

SEQ ID NO: 2409490 - RNA, 15 nt, Human
cugugaacugaacuc

SEQ ID NO: 2409491 - RNA, 16 nt, Human
cugugaacugaacucu

SEQ ID NO: 2409492 - RNA, 18 nt, Human
cugugaacgauuuagaaa

SEQ ID NO: 2409493 - RNA, 15 nt, Human
cugugcucuggacag

SEQ ID NO: 2409494 - RNA, 17 nt, Human
cugugcucuggacaggc

SEQ ID NO: 2409495 - RNA, 23 nt, Human
cugugagaugcuagaacucccuu

SEQ ID NO: 2409496 - RNA, 13 nt, Human
cugugagauuuug

SEQ ID NO: 2409497 - RNA, 17 nt, Human
cugugacaggcagcaga

SEQ ID NO: 2409498 - RNA, 16 nt, Human
cugugacaggcagcag

SEQ ID NO: 2409499 - RNA, 16 nt, Human
cugugagcaucacagu

SEQ ID NO: 2409500 - RNA, 15 nt, Human
cugugagcaagaagu

SEQ ID NO: 2409501 - RNA, 21 nt, Human
cugugaaugccacugccuucg

SEQ ID NO: 2409502 - RNA, 20 nt, Human
cugugaaugccacugccuuc

SEQ ID NO: 2409503 - RNA, 14 nt, Human
cugugaauucagau

SEQ ID NO: 2409504 - RNA, 15 nt, Human
cugugaauucagauu

SEQ ID NO: 2409505 - RNA, 16 nt, Human
cugugaaugccacugc

SEQ ID NO: 2409506 - RNA, 15 nt, Human
cugugaaugccacug

SEQ ID NO: 2409507 - RNA, 18 nt, Human
cugugaaucaccuagggg

SEQ ID NO: 2409508 - RNA, 22 nt, Human
cugugaacgauuuagaaagaag

SEQ ID NO: 2409509 - RNA, 18 nt, Human
cugugacaggcagcagag

SEQ ID NO: 2409510 - RNA, 21 nt, Human
cugugagaugcuagaacuccc

SEQ ID NO: 2409511 - RNA, 15 nt, Human
cugugacaggcagca

SEQ ID NO: 2409512 - RNA, 19 nt, Human
cugugaauuuguguaagga

SEQ ID NO: 2409513 - RNA, 15 nt, Human
cuguuguccuccccu

SEQ ID NO: 2409514 - RNA, 14 nt, Human
cuguuguccucccc

SEQ ID NO: 2409515 - RNA, 20 nt, Human
cuguuguccuccccuugggc

SEQ ID NO: 2409516 - RNA, 19 nt, Human
cuguugugaccugaaguuc

SEQ ID NO: 2409517 - RNA, 21 nt, Human
cuguuguguauagaugcaaga

SEQ ID NO: 2409518 - RNA, 20 nt, Human
cuguugugaccugaaguuca

SEQ ID NO: 2409519 - RNA, 22 nt, Human
cuguuguguacguggagaggga

SEQ ID NO: 2409520 - RNA, 15 nt, Human
cuguuggccagugug

SEQ ID NO: 2409521 - RNA, 15 nt, Human
cuguugucauugcug

SEQ ID NO: 2409522 - RNA, 22 nt, Human
cuguuggcagugagugagccug

SEQ ID NO: 2409523 - RNA, 21 nt, Human
cuguuggcagugagugagccu

SEQ ID NO: 2409524 - RNA, 14 nt, Human
cuguuggcagugag

SEQ ID NO: 2409525 - RNA, 16 nt, Human
cuguuguccuauggga

SEQ ID NO: 2409526 - RNA, 17 nt, Human
cuguugucauugcuguu

SEQ ID NO: 2409527 - RNA, 17 nt, Human
cuguugucccucugcua

SEQ ID NO: 2409528 - RNA, 22 nt, Human
cuguugcucaaaucuauucaga

SEQ ID NO: 2409529 - RNA, 21 nt, Human
cuguugcucaaaucuauucag

SEQ ID NO: 2409530 - RNA, 15 nt, Human
cuguugcugaauagg

SEQ ID NO: 2409531 - RNA, 16 nt, Human
cuguugcugaauaggc

SEQ ID NO: 2409532 - RNA, 23 nt, Human
cuguuggcacucacagaccugga

SEQ ID NO: 2409533 - RNA, 22 nt, Human
cuguuggcacucacagaccugg

SEQ ID NO: 2409534 - RNA, 21 nt, Human
cuguuggcacucacagaccug

SEQ ID NO: 2409535 - RNA, 18 nt, Human
cuguuggcacucacagac

SEQ ID NO: 2409536 - RNA, 19 nt, Human
cuguuggcaggcuggccag

SEQ ID NO: 2409537 - RNA, 18 nt, Human
cuguuggcaggcuggcca

SEQ ID NO: 2409538 - RNA, 16 nt, Human
cuguuggcaggcuggc

SEQ ID NO: 2409539 - RNA, 15 nt, Human
cuguuggcaggcugg

SEQ ID NO: 2409540 - RNA, 12 nt, Human
cuguuggccagu

SEQ ID NO: 2409541 - RNA, 11 nt, Human
cuguugcucaa

SEQ ID NO: 2409542 - RNA, 18 nt, Human
cuguugcguaacuggcug

SEQ ID NO: 2409543 - RNA, 23 nt, Human
cuguugcuaagccccagcaagca

SEQ ID NO: 2409544 - RNA, 22 nt, Human
cuguugcuaagccccagcaagc

SEQ ID NO: 2409545 - RNA, 21 nt, Human
cuguugcuaagccccagcaag

SEQ ID NO: 2409546 - RNA, 23 nt, Human
cuguugcguaacuggcuguguuc

SEQ ID NO: 2409547 - RNA, 12 nt, Human
cuguugcuaagc

SEQ ID NO: 2409548 - RNA, 12 nt, Human
cuguugccucau

SEQ ID NO: 2409549 - RNA, 14 nt, Human
cuguugccucaucu

SEQ ID NO: 2409550 - RNA, 18 nt, Human
cuguugcccaggcuggcg

SEQ ID NO: 2409551 - RNA, 19 nt, Human
cuuaaaauaacuuauauca

SEQ ID NO: 2409552 - RNA, 13 nt, Human
cuuaaaauaacuu

SEQ ID NO: 2409553 - RNA, 17 nt, Human
cuguuguuguuaaugaa

SEQ ID NO: 2409554 - RNA, 22 nt, Human
cuguuguuguuaaugaaaaugu

SEQ ID NO: 2409555 - RNA, 14 nt, Human
cuuaaaaccaaaga

SEQ ID NO: 2409556 - RNA, 21 nt, Human
cuuaaaaccaaagagggcuuc

SEQ ID NO: 2409557 - RNA, 15 nt, Human
cuuaaaaccaaagag

SEQ ID NO: 2409558 - RNA, 13 nt, Human
cuuaaaaaugguu

SEQ ID NO: 2409559 - RNA, 20 nt, Human
cuuaaaaaugguuuaaaugg

SEQ ID NO: 2409560 - RNA, 12 nt, Human
cuuaaaaauggu

SEQ ID NO: 2409561 - RNA, 13 nt, Human
cuguuguuguuaa

SEQ ID NO: 2409562 - RNA, 17 nt, Human
cuguuguuauggaaacu

SEQ ID NO: 2409563 - RNA, 13 nt, Human
cuuaaauaaugug

SEQ ID NO: 2409564 - RNA, 14 nt, Human
cuuaaauaauguga

SEQ ID NO: 2409565 - RNA, 16 nt, Human
cuuaaauaaugugaaa

SEQ ID NO: 2409566 - RNA, 19 nt, Human
cuuaaauaaugugaaacug

SEQ ID NO: 2409567 - RNA, 23 nt, Human
cuuaaaccuucaguuaugauuuu

SEQ ID NO: 2409568 - RNA, 15 nt, Human
cuuaaaccuucaguu

SEQ ID NO: 2409569 - RNA, 14 nt, Human
cuuaaaccugggag

SEQ ID NO: 2409570 - RNA, 21 nt, Human
cuuaaagaaagucgaauuaau

SEQ ID NO: 2409571 - RNA, 12 nt, Human
cuuaaagaaagu

SEQ ID NO: 2409572 - RNA, 18 nt, Human
cuuaaagaaaacccaccc

SEQ ID NO: 2409573 - RNA, 14 nt, Human
cuuaaacugugugg

SEQ ID NO: 2409574 - RNA, 15 nt, Human
cuuaaacugugugga

SEQ ID NO: 2409575 - RNA, 23 nt, Human
cuuaaacuguguggacugugaug

SEQ ID NO: 2409576 - RNA, 18 nt, Human
cuuaaaauagaaauaagu

SEQ ID NO: 2409577 - RNA, 22 nt, Human
cuuaaaauagcaacacucuaua

SEQ ID NO: 2409578 - RNA, 13 nt, Human
cuuaaaauagaaa

SEQ ID NO: 2409579 - RNA, 22 nt, Human
cuuaaacagggcaucuccagga

SEQ ID NO: 2409580 - RNA, 14 nt, Human
cuuaaacagggcau

SEQ ID NO: 2409581 - RNA, 14 nt, Human
cuuaaacaaaugua

SEQ ID NO: 2409582 - RNA, 23 nt, Human
cuggugaccccuuuucagcuucu

SEQ ID NO: 2409583 - RNA, 14 nt, Human
cuggucuguaggga

SEQ ID NO: 2409584 - RNA, 16 nt, Human
cuggucugggugcccc

SEQ ID NO: 2409585 - RNA, 22 nt, Human
cuggucuguagaagagggauaa

SEQ ID NO: 2409586 - RNA, 22 nt, Human
cuggugacaugucuuuucuugc

SEQ ID NO: 2409587 - RNA, 22 nt, Human
cuggugaccuuccaagagccug

SEQ ID NO: 2409588 - RNA, 23 nt, Human
cuggugaccuuccaagagccuga

SEQ ID NO: 2409589 - RNA, 21 nt, Human
cuggucucgaacuccugaccu

SEQ ID NO: 2409590 - RNA, 18 nt, Human
cuggucucuaggcugggg

SEQ ID NO: 2409591 - RNA, 17 nt, Human
cuggucucuaggcuggg

SEQ ID NO: 2409592 - RNA, 14 nt, Human
cuggucucuccuug

SEQ ID NO: 2409593 - RNA, 16 nt, Human
cuggucucuaggcugg

SEQ ID NO: 2409594 - RNA, 14 nt, Human
cuggucucuaggcu

SEQ ID NO: 2409595 - RNA, 18 nt, Human
cuggucuuauuuguaaag

SEQ ID NO: 2409596 - RNA, 20 nt, Human
cuggucucuaggcuggggaa

SEQ ID NO: 2409597 - RNA, 12 nt, Human
cuggucucuggu

SEQ ID NO: 2409598 - RNA, 12 nt, Human
cuggucugaggg

SEQ ID NO: 2409599 - RNA, 20 nt, Human
cugguuuuguaagaugcugg

SEQ ID NO: 2409600 - RNA, 19 nt, Human
cugguuuuguaagaugcug

SEQ ID NO: 2409601 - RNA, 15 nt, Human
cugguuuuguaagau

SEQ ID NO: 2409602 - RNA, 13 nt, Human
cugguuuuguaag

SEQ ID NO: 2409603 - RNA, 14 nt, Human
cugguuuugcuauu

SEQ ID NO: 2409604 - RNA, 13 nt, Human
cugguuuugcuau

SEQ ID NO: 2409605 - RNA, 20 nt, Human
cugguuuucuggaugguucc

SEQ ID NO: 2409606 - RNA, 13 nt, Human
cugguuuuaacaa

SEQ ID NO: 2409607 - RNA, 18 nt, Human
cugguuuuccuaaaugca

SEQ ID NO: 2409608 - RNA, 15 nt, Human
cugguuuuuguagcc

SEQ ID NO: 2409609 - RNA, 20 nt, Human
cugguuuuuaaccauugucu

SEQ ID NO: 2409610 - RNA, 22 nt, Human
cugguuuuguaagaugcugggu

SEQ ID NO: 2409611 - RNA, 21 nt, Human
cugguuuuguaagaugcuggg

SEQ ID NO: 2409612 - RNA, 16 nt, Human
cugguuuuucaguuuu

SEQ ID NO: 2409613 - RNA, 15 nt, Human
cugguuuuucaguuu

SEQ ID NO: 2409614 - RNA, 14 nt, Human
cugguuuuucaguu

SEQ ID NO: 2409615 - RNA, 20 nt, Human
cuguacuugcucuugaugcc

SEQ ID NO: 2409616 - RNA, 19 nt, Human
cuguacuugcucuugaugc

SEQ ID NO: 2409617 - RNA, 16 nt, Human
cuguacuugcucuuga

SEQ ID NO: 2409618 - RNA, 17 nt, Human
cuguacuucacugucag

SEQ ID NO: 2409619 - RNA, 14 nt, Human
cuguacuucacugu

SEQ ID NO: 2409620 - RNA, 20 nt, Human
cuguacuucaaguuaaagug

SEQ ID NO: 2409621 - RNA, 22 nt, Human
cuguacuucacugucaggaaga

SEQ ID NO: 2409622 - RNA, 17 nt, Human
cuguacuugaugacaga

SEQ ID NO: 2409623 - RNA, 13 nt, Human
cuguagauucugu

SEQ ID NO: 2409624 - RNA, 20 nt, Human
cuguagauucuguggaacaa

SEQ ID NO: 2409625 - RNA, 15 nt, Human
cuguagauucugugg

SEQ ID NO: 2409626 - RNA, 16 nt, Human
cuguagcacuuacugg

SEQ ID NO: 2409627 - RNA, 12 nt, Human
cuguagcaucuu

SEQ ID NO: 2409628 - RNA, 21 nt, Human
cuguagcagugagaaaaagcu

SEQ ID NO: 2409629 - RNA, 20 nt, Human
cuguagcagugagaaaaagc

SEQ ID NO: 2409630 - RNA, 15 nt, Human
cuguagagugggagc

SEQ ID NO: 2409631 - RNA, 21 nt, Human
cuguaacacagcugagagacu

SEQ ID NO: 2409632 - RNA, 15 nt, Human
cuguaacacagcuga

SEQ ID NO: 2409633 - RNA, 22 nt, Human
cuguaacacaagccacagaagc

SEQ ID NO: 2409634 - RNA, 21 nt, Human
cuguaacacaagccacagaag

SEQ ID NO: 2409635 - RNA, 20 nt, Human
cuguaagaaaauaucacuug

SEQ ID NO: 2409636 - RNA, 21 nt, Human
cuguaagacucauucccuaga

SEQ ID NO: 2409637 - RNA, 23 nt, Human
cuguaagaagagacugggaagau

SEQ ID NO: 2409638 - RNA, 17 nt, Human
cuguaagaagagacugg

SEQ ID NO: 2409639 - RNA, 20 nt, Human
cuguaagaagagacugggaa

SEQ ID NO: 2409640 - RNA, 22 nt, Human
cuguaagaagagacugggaaga

SEQ ID NO: 2409641 - RNA, 19 nt, Human
cuguaaaaaaaaaaaaguu

SEQ ID NO: 2409642 - RNA, 21 nt, Human
cuguaaaaagagagaaaacuu

SEQ ID NO: 2409643 - RNA, 23 nt, Human
cuguaaagagaccuaccucaggu

SEQ ID NO: 2409644 - RNA, 15 nt, Human
cuguaaaaacugugg

SEQ ID NO: 2409645 - RNA, 17 nt, Human
cuguaaaugguguacau

SEQ ID NO: 2409646 - RNA, 21 nt, Human
cuguaaaugguguacauaaug

SEQ ID NO: 2409647 - RNA, 18 nt, Human
cuguaaaugguguacaua

SEQ ID NO: 2409648 - RNA, 20 nt, Human
cuguaacacaagccacagaa

SEQ ID NO: 2409649 - RNA, 19 nt, Human
cuguaacacaagccacaga

SEQ ID NO: 2409650 - RNA, 18 nt, Human
cuguaacacaagccacag

SEQ ID NO: 2409651 - RNA, 17 nt, Human
cuguaacacaagccaca

SEQ ID NO: 2409652 - RNA, 23 nt, Human
cuguaaaugguguacauaaugua

SEQ ID NO: 2409653 - RNA, 16 nt, Human
cugucaggagagcagc

SEQ ID NO: 2409654 - RNA, 18 nt, Human
cugucaggaagaaaucac

SEQ ID NO: 2409655 - RNA, 17 nt, Human
cugucaggaagaaauca

SEQ ID NO: 2409656 - RNA, 14 nt, Human
cugucaggaagaaa

SEQ ID NO: 2409657 - RNA, 13 nt, Human
cugucaggaagaa

SEQ ID NO: 2409658 - RNA, 13 nt, Human
cugucagucacag

SEQ ID NO: 2409659 - RNA, 14 nt, Human
cugucagucacagc

SEQ ID NO: 2409660 - RNA, 15 nt, Human
cugucagucacagcc

SEQ ID NO: 2409661 - RNA, 17 nt, Human
cugucagucacagccac

SEQ ID NO: 2409662 - RNA, 16 nt, Human
cugucaguaugacauu

SEQ ID NO: 2409663 - RNA, 18 nt, Human
cuguagcuuguucccugu

SEQ ID NO: 2409664 - RNA, 13 nt, Human
cuguagccuucug

SEQ ID NO: 2409665 - RNA, 20 nt, Human
cuguagcccacucugcucgc

SEQ ID NO: 2409666 - RNA, 21 nt, Human
cuguagcccacucugcucgcc

SEQ ID NO: 2409667 - RNA, 16 nt, Human
cuguagcccacucugc

SEQ ID NO: 2409668 - RNA, 18 nt, Human
cuguagcauuacaguggg

SEQ ID NO: 2409669 - RNA, 18 nt, Human
cuguagcaucuucuggag

SEQ ID NO: 2409670 - RNA, 17 nt, Human
cuguagcaucuucugga

SEQ ID NO: 2409671 - RNA, 16 nt, Human
cuguagcaucuucugg

SEQ ID NO: 2409672 - RNA, 15 nt, Human
cuguagcaucuucug

SEQ ID NO: 2409673 - RNA, 20 nt, Human
cuguagcaucuucuggaguc

SEQ ID NO: 2409674 - RNA, 19 nt, Human
cuguagcaucuucuggagu

SEQ ID NO: 2409675 - RNA, 17 nt, Human
cuguagcauuacagugg

SEQ ID NO: 2409676 - RNA, 23 nt, Human
cugucauucccaccacccugagg

SEQ ID NO: 2409677 - RNA, 20 nt, Human
cuguccugggagugagcugg

SEQ ID NO: 2409678 - RNA, 14 nt, Human
cuguccugggagug

SEQ ID NO: 2409679 - RNA, 13 nt, Human
cuguccugggagu

SEQ ID NO: 2409680 - RNA, 17 nt, Human
cugucaugccccccuca

SEQ ID NO: 2409681 - RNA, 13 nt, Human
cugucaugccccc

SEQ ID NO: 2409682 - RNA, 20 nt, Human
cugucaugaacauguuccug

SEQ ID NO: 2409683 - RNA, 19 nt, Human
cugucaugaacauguuccu

SEQ ID NO: 2409684 - RNA, 16 nt, Human
cugucauucagaaaaa

SEQ ID NO: 2409685 - RNA, 18 nt, Human
cugucaugccccccucaa

SEQ ID NO: 2409686 - RNA, 14 nt, Human
cugucauuugagca

SEQ ID NO: 2409687 - RNA, 21 nt, Human
cugucaucugugcacugccca

SEQ ID NO: 2409688 - RNA, 15 nt, Human
cugucaugaacaugu

SEQ ID NO: 2409689 - RNA, 14 nt, Human
cugucagugccgcc

SEQ ID NO: 2409690 - RNA, 15 nt, Human
cugucaucugugcac

SEQ ID NO: 2409691 - RNA, 14 nt, Human
cugucaucugugca

SEQ ID NO: 2409692 - RNA, 18 nt, Human
cugucagugcagcccgug

SEQ ID NO: 2409693 - RNA, 19 nt, Human
cugucagugcagcccgugu

SEQ ID NO: 2409694 - RNA, 18 nt, Human
cugucagucacagccacc

SEQ ID NO: 2409695 - RNA, 15 nt, Human
cugucagugcagccc

SEQ ID NO: 2409696 - RNA, 17 nt, Human
cuguccuucagauggaa

SEQ ID NO: 2409697 - RNA, 16 nt, Human
cuguccuugcacacuc

SEQ ID NO: 2409698 - RNA, 23 nt, Human
cuguccuucucucaccuccuaaa

SEQ ID NO: 2409699 - RNA, 20 nt, Human
cuguccuucucucaccuccu

SEQ ID NO: 2409700 - RNA, 18 nt, Human
cuguccuguguagugauu

SEQ ID NO: 2409701 - RNA, 12 nt, Human
cuguccuuaccc

SEQ ID NO: 2409702 - RNA, 17 nt, Human
cuguccuuacccaucug

SEQ ID NO: 2409703 - RNA, 19 nt, Human
cuguccuuacccaucugca

SEQ ID NO: 2409704 - RNA, 16 nt, Human
cuguccuucagaugga

SEQ ID NO: 2409705 - RNA, 14 nt, Human
cuguccuucagaug

SEQ ID NO: 2409706 - RNA, 15 nt, Human
cuguccuucucucac

SEQ ID NO: 2409707 - RNA, 13 nt, Human
cugucuaacugcu

SEQ ID NO: 2409708 - RNA, 17 nt, Human
cugucuaaccugugacc

SEQ ID NO: 2409709 - RNA, 16 nt, Human
cugucuaaccugugac

SEQ ID NO: 2409710 - RNA, 22 nt, Human
cugucuaaugaaaccugugucu

SEQ ID NO: 2409711 - RNA, 15 nt, Human
cugucuaaccuguga

SEQ ID NO: 2409712 - RNA, 13 nt, Human
cugucuaaaaaac

SEQ ID NO: 2409713 - RNA, 12 nt, Human
auuucuguuuag

SEQ ID NO: 2409714 - RNA, 17 nt, Human
auuucuccucccuuccu

SEQ ID NO: 2409715 - RNA, 14 nt, Human
auuucuccucccuu

SEQ ID NO: 2409716 - RNA, 12 nt, Human
auuucuccuccc

SEQ ID NO: 2409717 - RNA, 12 nt, Human
auuucuccccag

SEQ ID NO: 2409718 - RNA, 19 nt, Human
auuucuccucccuuccuuu

SEQ ID NO: 2409719 - RNA, 14 nt, Human
auuucuguuuagau

SEQ ID NO: 2409720 - RNA, 16 nt, Human
auuucuguuuagauaa

SEQ ID NO: 2409721 - RNA, 11 nt, Human
auuucuguguu

SEQ ID NO: 2409722 - RNA, 15 nt, Human
auuucuccuuugaua

SEQ ID NO: 2409723 - RNA, 15 nt, Human
auuucuguguugcca

SEQ ID NO: 2409724 - RNA, 23 nt, Human
auuucuguguugccaagcuccaa

SEQ ID NO: 2409725 - RNA, 14 nt, Human
auuucucauguuuu

SEQ ID NO: 2409726 - RNA, 16 nt, Human
auuucucagacuuugg

SEQ ID NO: 2409727 - RNA, 21 nt, Human
auuucucagacuuuggaaaau

SEQ ID NO: 2409728 - RNA, 15 nt, Human
auuucuccauacgca

SEQ ID NO: 2409729 - RNA, 20 nt, Human
auuucuccuccaugggagaa

SEQ ID NO: 2409730 - RNA, 18 nt, Human
auuucucagacuuuggaa

SEQ ID NO: 2409731 - RNA, 11 nt, Human
auuucucccag

SEQ ID NO: 2409732 - RNA, 20 nt, Human
auuucuaugaaauauuaugu

SEQ ID NO: 2409733 - RNA, 14 nt, Human
auuucucacugaga

SEQ ID NO: 2409734 - RNA, 20 nt, Human
auuucucaacaaagcacagu

SEQ ID NO: 2409735 - RNA, 22 nt, Human
auuucucaacaaagcacagugu

SEQ ID NO: 2409736 - RNA, 12 nt, Human
auuucuauuuuu

SEQ ID NO: 2409737 - RNA, 20 nt, Human
auuucaucuauuucugagaa

SEQ ID NO: 2409738 - RNA, 19 nt, Human
auuucucaacaaagcacag

SEQ ID NO: 2409739 - RNA, 18 nt, Human
auuucuauuuuuguagaa

SEQ ID NO: 2409740 - RNA, 18 nt, Human
auuucuaugaaauauuau

SEQ ID NO: 2409741 - RNA, 15 nt, Human
auuucuaugaaauau

SEQ ID NO: 2409742 - RNA, 17 nt, Human
auuucaucugcucuccu

SEQ ID NO: 2409743 - RNA, 16 nt, Human
auuucaucugcucucc

SEQ ID NO: 2409744 - RNA, 15 nt, Human
auuucaucugcucuc

SEQ ID NO: 2409745 - RNA, 14 nt, Human
auuucaucugcucu

SEQ ID NO: 2409746 - RNA, 14 nt, Human
auuucaucuauuuu

SEQ ID NO: 2409747 - RNA, 11 nt, Human
auuucaucugc

SEQ ID NO: 2409748 - RNA, 18 nt, Human
auuucaucuauuucugag

SEQ ID NO: 2409749 - RNA, 19 nt, Human
auuucaucuauuucugaga

SEQ ID NO: 2409750 - RNA, 15 nt, Human
auuuaauauuuugca

SEQ ID NO: 2409751 - RNA, 14 nt, Human
auuuaaugaaagac

SEQ ID NO: 2409752 - RNA, 22 nt, Human
auuuaaugauaaguaaaugcua

SEQ ID NO: 2409753 - RNA, 18 nt, Human
auuuaaucuuuuuuaugu

SEQ ID NO: 2409754 - RNA, 14 nt, Human
auuuaauguagcca

SEQ ID NO: 2409755 - RNA, 21 nt, Human
auuuaauggccggcuggaaau

SEQ ID NO: 2409756 - RNA, 16 nt, Human
auuuaauguagccaug

SEQ ID NO: 2409757 - RNA, 14 nt, Human
auuuaauguuuuca

SEQ ID NO: 2409758 - RNA, 19 nt, Human
auuuaauuaaucaugaaug

SEQ ID NO: 2409759 - RNA, 13 nt, Human
auuuaauuaaaaa

SEQ ID NO: 2409760 - RNA, 23 nt, Human
auuuauaaucacuuuuuuccaca

SEQ ID NO: 2409761 - RNA, 18 nt, Human
auuuauacaaauuagaaa

SEQ ID NO: 2409762 - RNA, 16 nt, Human
auuuaauuagugcuaa

SEQ ID NO: 2409763 - RNA, 15 nt, Human
auuuaauuagugcua

SEQ ID NO: 2409764 - RNA, 14 nt, Human
auuuauaauguuug

SEQ ID NO: 2409765 - RNA, 13 nt, Human
auuuaauauuuau

SEQ ID NO: 2409766 - RNA, 19 nt, Human
auuuaauauagcuauuuuu

SEQ ID NO: 2409767 - RNA, 14 nt, Human
auuuaauauagcua

SEQ ID NO: 2409768 - RNA, 16 nt, Human
auuuaauauagcuauu

SEQ ID NO: 2409769 - RNA, 17 nt, Human
auuuaauauagcuauuu

SEQ ID NO: 2409770 - RNA, 22 nt, Human
auuucaaguuccaaguugcuaa

SEQ ID NO: 2409771 - RNA, 23 nt, Human
auuucaaguuccaaguugcuaau

SEQ ID NO: 2409772 - RNA, 11 nt, Human
auuucaaguuc

SEQ ID NO: 2409773 - RNA, 16 nt, Human
auuucaaguuccaagu

SEQ ID NO: 2409774 - RNA, 16 nt, Human
auuucagagaggccuu

SEQ ID NO: 2409775 - RNA, 23 nt, Human
auuucagacucccauuccugaag

SEQ ID NO: 2409776 - RNA, 15 nt, Human
auuucaauucucaaa

SEQ ID NO: 2409777 - RNA, 14 nt, Human
auuucaauucucaa

SEQ ID NO: 2409778 - RNA, 18 nt, Human
auuucagacucccauucc

SEQ ID NO: 2409779 - RNA, 22 nt, Human
auuucagagaggccuuuuggaa

SEQ ID NO: 2409780 - RNA, 18 nt, Human
auuucaucauauuauaca

SEQ ID NO: 2409781 - RNA, 20 nt, Human
auuucaucauauuauacaga

SEQ ID NO: 2409782 - RNA, 13 nt, Human
auuucaucuauuu

SEQ ID NO: 2409783 - RNA, 14 nt, Human
auuucaucuauuuc

SEQ ID NO: 2409784 - RNA, 15 nt, Human
auuucaucuauuucu

SEQ ID NO: 2409785 - RNA, 16 nt, Human
auuucaucuauuucug

SEQ ID NO: 2409786 - RNA, 18 nt, Human
auuucagauucccagagc

SEQ ID NO: 2409787 - RNA, 15 nt, Human
auuucagauuuguga

SEQ ID NO: 2409788 - RNA, 20 nt, Human
auuucaagagauuuaauuaa

SEQ ID NO: 2409789 - RNA, 19 nt, Human
auuucaagagauuuaauua

SEQ ID NO: 2409790 - RNA, 21 nt, Human
auuucaagacauuaaaucuau

SEQ ID NO: 2409791 - RNA, 17 nt, Human
auuuaucagugacagag

SEQ ID NO: 2409792 - RNA, 15 nt, Human
auuucaagagauuua

SEQ ID NO: 2409793 - RNA, 15 nt, Human
auuucaagaccuucu

SEQ ID NO: 2409794 - RNA, 18 nt, Human
auuuaucaaucaguauaa

SEQ ID NO: 2409795 - RNA, 17 nt, Human
auuuaucaaucaguaua

SEQ ID NO: 2409796 - RNA, 17 nt, Human
auuuaucaaaucaguca

SEQ ID NO: 2409797 - RNA, 14 nt, Human
auuuaucaaaucag

SEQ ID NO: 2409798 - RNA, 13 nt, Human
auuuaucaaauca

SEQ ID NO: 2409799 - RNA, 12 nt, Human
auuuaucaaauc

SEQ ID NO: 2409800 - RNA, 16 nt, Human
auuuaucacacuucug

SEQ ID NO: 2409801 - RNA, 14 nt, Human
auuuaucagugaca

SEQ ID NO: 2409802 - RNA, 15 nt, Human
auuuaucagugacag

SEQ ID NO: 2409803 - RNA, 19 nt, Human
auuuauauuuuuaaaauau

SEQ ID NO: 2409804 - RNA, 13 nt, Human
auuuauauuucac

SEQ ID NO: 2409805 - RNA, 18 nt, Human
auuuauauuuuuauuuua

SEQ ID NO: 2409806 - RNA, 13 nt, Human
auuuauauuuuug

SEQ ID NO: 2409807 - RNA, 14 nt, Human
auuuauaguuugua

SEQ ID NO: 2409808 - RNA, 12 nt, Human
auuuauaguuug

SEQ ID NO: 2409809 - RNA, 14 nt, Human
auuuauacuauuua

SEQ ID NO: 2409810 - RNA, 20 nt, Human
auuuauacucuuuuuucaug

SEQ ID NO: 2409811 - RNA, 14 nt, Human
auuuauacaaauua

SEQ ID NO: 2409812 - RNA, 17 nt, Human
auuuauacuguauauau

SEQ ID NO: 2409813 - RNA, 19 nt, Human
auuguuucaaaauaaaaac

SEQ ID NO: 2409814 - RNA, 19 nt, Human
auuguuuauuuaucaguga

SEQ ID NO: 2409815 - RNA, 21 nt, Human
auuguuuauuuaucagugaca

SEQ ID NO: 2409816 - RNA, 14 nt, Human
auuguuuauucuuu

SEQ ID NO: 2409817 - RNA, 15 nt, Human
auuguuuauuuauca

SEQ ID NO: 2409818 - RNA, 17 nt, Human
auuguuuauuuaucagu

SEQ ID NO: 2409819 - RNA, 18 nt, Human
auuguuuauuuaucagug

SEQ ID NO: 2409820 - RNA, 19 nt, Human
auuguuuaaaaucauuucu

SEQ ID NO: 2409821 - RNA, 16 nt, Human
auuguuuaaagcaacu

SEQ ID NO: 2409822 - RNA, 22 nt, Human
auuguuuaaagcaacugucuau

SEQ ID NO: 2409823 - RNA, 20 nt, Human
auuguuuaaagcaacugucu

SEQ ID NO: 2409824 - RNA, 21 nt, Human
auuguuuaaguguuguaaaua

SEQ ID NO: 2409825 - RNA, 21 nt, Human
auuguucccagugacacuuca

SEQ ID NO: 2409826 - RNA, 13 nt, Human
auuguuccuguca

SEQ ID NO: 2409827 - RNA, 19 nt, Human
auuguucuuaguuugcagu

SEQ ID NO: 2409828 - RNA, 24 nt, Human
auuguuccagcaguuuucaaguca

SEQ ID NO: 2409829 - RNA, 16 nt, Human
auuguucccagugaca

SEQ ID NO: 2409830 - RNA, 19 nt, Human
auuguucccagugacacuu

SEQ ID NO: 2409831 - RNA, 19 nt, Human
auuguacaguuuguuuaca

SEQ ID NO: 2409832 - RNA, 18 nt, Human
auuguacaguuuguuuac

SEQ ID NO: 2409833 - RNA, 21 nt, Human
auuguacaguuuguuuacaca

SEQ ID NO: 2409834 - RNA, 22 nt, Human
auuguuccaagacauugucaau

SEQ ID NO: 2409835 - RNA, 21 nt, Human
auuguaauaaugcuaaagaaa

SEQ ID NO: 2409836 - RNA, 17 nt, Human
auuguacaguuuguuua

SEQ ID NO: 2409837 - RNA, 16 nt, Human
auuguacaguuuguuu

SEQ ID NO: 2409838 - RNA, 14 nt, Human
auuguacaguuugu

SEQ ID NO: 2409839 - RNA, 20 nt, Human
auuguacagcuguuuaagau

SEQ ID NO: 2409840 - RNA, 21 nt, Human
auuguuccaagacauugucaa

SEQ ID NO: 2409841 - RNA, 17 nt, Human
auuguacagcuguuuaa

SEQ ID NO: 2409842 - RNA, 16 nt, Human
auuguacagcuguuua

SEQ ID NO: 2409843 - RNA, 14 nt, Human
auuguacagcuguu

SEQ ID NO: 2409844 - RNA, 14 nt, Human
auuguacacuuuuu

SEQ ID NO: 2409845 - RNA, 12 nt, Human
auuguacacuuu

SEQ ID NO: 2409846 - RNA, 19 nt, Human
auuguacacaccuuauauu

SEQ ID NO: 2409847 - RNA, 14 nt, Human
auuguaaaugugcu

SEQ ID NO: 2409848 - RNA, 15 nt, Human
auuguaaaugugcuu

SEQ ID NO: 2409849 - RNA, 16 nt, Human
auuguaaauauguuuu

SEQ ID NO: 2409850 - RNA, 22 nt, Human
auuguaaaauagcuuguauagu

SEQ ID NO: 2409851 - RNA, 21 nt, Human
auuguaaaauagcuuguauag

SEQ ID NO: 2409852 - RNA, 19 nt, Human
auuguaaaauagcuuguau

SEQ ID NO: 2409853 - RNA, 15 nt, Human
auuguaaaauagcuu

SEQ ID NO: 2409854 - RNA, 17 nt, Human
auuguaaaugugcuuuu

SEQ ID NO: 2409855 - RNA, 15 nt, Human
auuguaaggaaugau

SEQ ID NO: 2409856 - RNA, 16 nt, Human
auuguaaauugaauca

SEQ ID NO: 2409857 - RNA, 17 nt, Human
auuguaaauugaaucag

SEQ ID NO: 2409858 - RNA, 18 nt, Human
auuguaagcaugcacaaa

SEQ ID NO: 2409859 - RNA, 16 nt, Human
auuguaaggaaugauu

SEQ ID NO: 2409860 - RNA, 19 nt, Human
auugauccagaaagaaaac

SEQ ID NO: 2409861 - RNA, 18 nt, Human
auugauccagaaagaaaa

SEQ ID NO: 2409862 - RNA, 22 nt, Human
auugauccagaaagaaaacuug

SEQ ID NO: 2409863 - RNA, 23 nt, Human
auugaucggagccuccucucuca

SEQ ID NO: 2409864 - RNA, 21 nt, Human
auugaucauuuuccccccacu

SEQ ID NO: 2409865 - RNA, 19 nt, Human
auugaucauuuucccccca

SEQ ID NO: 2409866 - RNA, 20 nt, Human
auugaucauuuuccccccac

SEQ ID NO: 2409867 - RNA, 13 nt, Human
auuguaaaauggu

SEQ ID NO: 2409868 - RNA, 19 nt, Human
auugaucggagccuccucu

SEQ ID NO: 2409869 - RNA, 18 nt, Human
auugaugggauuugguca

SEQ ID NO: 2409870 - RNA, 21 nt, Human
auuguaaaaccugucaaugau

SEQ ID NO: 2409871 - RNA, 17 nt, Human
auuguaaaacugaggca

SEQ ID NO: 2409872 - RNA, 20 nt, Human
auuguaaaaccugucaauga

SEQ ID NO: 2409873 - RNA, 17 nt, Human
auucacaaacuuuuaua

SEQ ID NO: 2409874 - RNA, 18 nt, Human
auucaauuguaaauugaa

SEQ ID NO: 2409875 - RNA, 22 nt, Human
auucaagaaaacaacuucaaua

SEQ ID NO: 2409876 - RNA, 19 nt, Human
auucaagaaaaguaagccc

SEQ ID NO: 2409877 - RNA, 16 nt, Human
auucaacccuggagag

SEQ ID NO: 2409878 - RNA, 15 nt, Human
auucaacccuggaga

SEQ ID NO: 2409879 - RNA, 13 nt, Human
auucaacuaaaaa

SEQ ID NO: 2409880 - RNA, 14 nt, Human
auucaacuaaaaaa

SEQ ID NO: 2409881 - RNA, 14 nt, Human
auucaacucagacu

SEQ ID NO: 2409882 - RNA, 23 nt, Human
auucaacuaaaaaaaaaaaagua

SEQ ID NO: 2409883 - RNA, 11 nt, Human
auuauguuaaa

SEQ ID NO: 2409884 - RNA, 18 nt, Human
auucacaagacccaaaag

SEQ ID NO: 2409885 - RNA, 22 nt, Human
auucacaaacuuuuauacucuu

SEQ ID NO: 2409886 - RNA, 14 nt, Human
auucacaaacuuuu

SEQ ID NO: 2409887 - RNA, 13 nt, Human
auucacaaacuuu

SEQ ID NO: 2409888 - RNA, 21 nt, Human
auucaauuguaaauugaauca

SEQ ID NO: 2409889 - RNA, 22 nt, Human
auucaauuguaaauugaaucag

SEQ ID NO: 2409890 - RNA, 19 nt, Human
auucaauuuauucaagaaa

SEQ ID NO: 2409891 - RNA, 18 nt, Human
auuaaauuuugaguucua

SEQ ID NO: 2409892 - RNA, 20 nt, Human
auuaaauucuugcaaaguau

SEQ ID NO: 2409893 - RNA, 14 nt, Human
auuaaauucuugca

SEQ ID NO: 2409894 - RNA, 18 nt, Human
auuaaauucuugcaaagu

SEQ ID NO: 2409895 - RNA, 21 nt, Human
auuauguguguuuuaaaauga

SEQ ID NO: 2409896 - RNA, 20 nt, Human
auuauguguguuuuaaaaug

SEQ ID NO: 2409897 - RNA, 15 nt, Human
auuauguguguuuua

SEQ ID NO: 2409898 - RNA, 20 nt, Human
auuaaauuuugaguucuaca

SEQ ID NO: 2409899 - RNA, 15 nt, Human
auuaaauuuaauuag

SEQ ID NO: 2409900 - RNA, 23 nt, Human
auuaugugccagauuuaugcaua

SEQ ID NO: 2409901 - RNA, 19 nt, Human
auucaucaaauggaagaca

SEQ ID NO: 2409902 - RNA, 20 nt, Human
auucauauuuucuuucaaaa

SEQ ID NO: 2409903 - RNA, 16 nt, Human
auucaucccaacuguc

SEQ ID NO: 2409904 - RNA, 16 nt, Human
auucauauuuucuuuc

SEQ ID NO: 2409905 - RNA, 20 nt, Human
auucauauuuacuucuuaua

SEQ ID NO: 2409906 - RNA, 18 nt, Human
auucauauuuacuucuua

SEQ ID NO: 2409907 - RNA, 19 nt, Human
auucauauuuacuucuuau

SEQ ID NO: 2409908 - RNA, 21 nt, Human
auucauuuuaacaucugagaa

SEQ ID NO: 2409909 - RNA, 19 nt, Human
auucauuugaguuauuuua

SEQ ID NO: 2409910 - RNA, 13 nt, Human
auucauuuuuaau

SEQ ID NO: 2409911 - RNA, 20 nt, Human
auuccaaagaguagaauugc

SEQ ID NO: 2409912 - RNA, 22 nt, Human
auuccucugggaauguuacauu

SEQ ID NO: 2409913 - RNA, 13 nt, Human
auuccucugggaa

SEQ ID NO: 2409914 - RNA, 20 nt, Human
auuccucuacuaacaaucag

SEQ ID NO: 2409915 - RNA, 12 nt, Human
auuccucuggga

SEQ ID NO: 2409916 - RNA, 16 nt, Human
auucaugcuacugcca

SEQ ID NO: 2409917 - RNA, 13 nt, Human
auucaugccuggc

SEQ ID NO: 2409918 - RNA, 14 nt, Human
auucaugccuggcu

SEQ ID NO: 2409919 - RNA, 21 nt, Human
auucaugcuacugccaaccug

SEQ ID NO: 2409920 - RNA, 22 nt, Human
auucauuucaaagggagagaga

SEQ ID NO: 2409921 - RNA, 14 nt, Human
auucauuuccugcc

SEQ ID NO: 2409922 - RNA, 13 nt, Human
auucauuuccugc

SEQ ID NO: 2409923 - RNA, 12 nt, Human
auucauuuccug

SEQ ID NO: 2409924 - RNA, 15 nt, Human
auucauuuccugccc

SEQ ID NO: 2409925 - RNA, 18 nt, Human
auucauuuuaacaucuga

SEQ ID NO: 2409926 - RNA, 15 nt, Human
auucaucuuuuguau

SEQ ID NO: 2409927 - RNA, 17 nt, Human
auucaucuuguguuuua

SEQ ID NO: 2409928 - RNA, 20 nt, Human
auucaucuguuuuucuuuuu

SEQ ID NO: 2409929 - RNA, 17 nt, Human
auucaugaacuucgcau

SEQ ID NO: 2409930 - RNA, 13 nt, Human
auucaugaacuuc

SEQ ID NO: 2409931 - RNA, 22 nt, Human
auucaucucucuuuaauauaaa

SEQ ID NO: 2409932 - RNA, 17 nt, Human
auucaucccaacugucu

SEQ ID NO: 2409933 - RNA, 17 nt, Human
auucaucucucuuuaau

SEQ ID NO: 2409934 - RNA, 21 nt, Human
auugagaaagagcacuuaaga

SEQ ID NO: 2409935 - RNA, 18 nt, Human
auugagaaagagcacuua

SEQ ID NO: 2409936 - RNA, 17 nt, Human
auugagaaagagcacuu

SEQ ID NO: 2409937 - RNA, 12 nt, Human
auugagaaagag

SEQ ID NO: 2409938 - RNA, 16 nt, Human
auugagaaagaaacua

SEQ ID NO: 2409939 - RNA, 18 nt, Human
auugacuuuuuauggcac

SEQ ID NO: 2409940 - RNA, 13 nt, Human
auugagaaggaga

SEQ ID NO: 2409941 - RNA, 22 nt, Human
auugagaacugcauauguuucg

SEQ ID NO: 2409942 - RNA, 14 nt, Human
auugagaacugcau

SEQ ID NO: 2409943 - RNA, 18 nt, Human
auugagaacugcauaugu

SEQ ID NO: 2409944 - RNA, 16 nt, Human
auugagaaggagagaa

SEQ ID NO: 2409945 - RNA, 15 nt, Human
auugagaaggagaga

SEQ ID NO: 2409946 - RNA, 14 nt, Human
auugagaaggagag

SEQ ID NO: 2409947 - RNA, 22 nt, Human
auugagaaagagcacuuaagag

SEQ ID NO: 2409948 - RNA, 17 nt, Human
auugagaaggagagaaa

SEQ ID NO: 2409949 - RNA, 20 nt, Human
auugagaaguuuuguacaga

SEQ ID NO: 2409950 - RNA, 13 nt, Human
auugagaauuuua

SEQ ID NO: 2409951 - RNA, 15 nt, Human
auugagcucucucau

SEQ ID NO: 2409952 - RNA, 20 nt, Human
auugagaguuuugucuugaa

SEQ ID NO: 2409953 - RNA, 16 nt, Human
auugagaguuuugucu

SEQ ID NO: 2409954 - RNA, 19 nt, Human
auugagauuagagggaggu

SEQ ID NO: 2409955 - RNA, 14 nt, Human
auugagaguuuugu

SEQ ID NO: 2409956 - RNA, 20 nt, Human
auugagaguaacuuaaguua

SEQ ID NO: 2409957 - RNA, 17 nt, Human
auugagaauuuuaaauu

SEQ ID NO: 2409958 - RNA, 21 nt, Human
auugagaauuuuaaauuauaa

SEQ ID NO: 2409959 - RNA, 22 nt, Human
auugagagaauggaaaacagac

SEQ ID NO: 2409960 - RNA, 17 nt, Human
auugauccagaaagaaa

SEQ ID NO: 2409961 - RNA, 16 nt, Human
auugauccagaaagaa

SEQ ID NO: 2409962 - RNA, 18 nt, Human
auugaucauuuucccccc

SEQ ID NO: 2409963 - RNA, 17 nt, Human
auugaucaaauucauuu

SEQ ID NO: 2409964 - RNA, 15 nt, Human
auugaucaaauucau

SEQ ID NO: 2409965 - RNA, 22 nt, Human
auucuuuccugaggcugggcuc

SEQ ID NO: 2409966 - RNA, 17 nt, Human
auucuuuccugaggcug

SEQ ID NO: 2409967 - RNA, 22 nt, Human
auucuuggcccgcacagagcug

SEQ ID NO: 2409968 - RNA, 17 nt, Human
auucuugguugaggaaa

SEQ ID NO: 2409969 - RNA, 18 nt, Human
auucuugguugaggaaac

SEQ ID NO: 2409970 - RNA, 20 nt, Human
auucuugguuggcuggccuu

SEQ ID NO: 2409971 - RNA, 17 nt, Human
auucuugguuggcuggc

SEQ ID NO: 2409972 - RNA, 21 nt, Human
auucuuggcccgcacagagcu

SEQ ID NO: 2409973 - RNA, 14 nt, Human
auucuuugauguua

SEQ ID NO: 2409974 - RNA, 13 nt, Human
auucuuugauguu

SEQ ID NO: 2409975 - RNA, 15 nt, Human
auucuuucuguauug

SEQ ID NO: 2409976 - RNA, 15 nt, Human
auucuuucugauaac

SEQ ID NO: 2409977 - RNA, 19 nt, Human
auucuuugaccuguuggga

SEQ ID NO: 2409978 - RNA, 14 nt, Human
auucuugucaaaaa

SEQ ID NO: 2409979 - RNA, 12 nt, Human
auucuuguauau

SEQ ID NO: 2409980 - RNA, 17 nt, Human
auucuugccaaauauaa

SEQ ID NO: 2409981 - RNA, 14 nt, Human
auucugauuacaca

SEQ ID NO: 2409982 - RNA, 13 nt, Human
auucugauuccac

SEQ ID NO: 2409983 - RNA, 15 nt, Human
auucugauuacacaa

SEQ ID NO: 2409984 - RNA, 13 nt, Human
auucugagagcug

SEQ ID NO: 2409985 - RNA, 14 nt, Human
auucugagagcugu

SEQ ID NO: 2409986 - RNA, 20 nt, Human
auucugacucgguuucucca

SEQ ID NO: 2409987 - RNA, 18 nt, Human
auucugacucgguuucuc

SEQ ID NO: 2409988 - RNA, 16 nt, Human
auucucuccuguaccu

SEQ ID NO: 2409989 - RNA, 14 nt, Human
auuccugcagccug

SEQ ID NO: 2409990 - RNA, 15 nt, Human
auuccugcagccugg

SEQ ID NO: 2409991 - RNA, 10 nt, Human
auucucucuc

SEQ ID NO: 2409992 - RNA, 11 nt, Human
auucucugagc

SEQ ID NO: 2409993 - RNA, 16 nt, Human
auucucucuccugucc

SEQ ID NO: 2409994 - RNA, 17 nt, Human
auucucucuccugucca

SEQ ID NO: 2409995 - RNA, 15 nt, Human
auucucucuccugua

SEQ ID NO: 2409996 - RNA, 12 nt, Human
auucucucuccu

SEQ ID NO: 2409997 - RNA, 15 nt, Human
auucucucuccuguc

SEQ ID NO: 2409998 - RNA, 19 nt, Human
auucucuccuguaccucuu

SEQ ID NO: 2409999 - RNA, 21 nt, Human
auucucuccuguaccucuuga

SEQ ID NO: 2410000 - RNA, 21 nt, Human
auuccugaugcuucuucagag

SEQ ID NO: 2410001 - RNA, 19 nt, Human
auuccugauaugauuuaaa

SEQ ID NO: 2410002 - RNA, 16 nt, Human
auuccugauaugauuu

SEQ ID NO: 2410003 - RNA, 22 nt, Human
auuccugauaugauuuaaaaca

SEQ ID NO: 2410004 - RNA, 20 nt, Human
auuccugauaugauuuaaaa

SEQ ID NO: 2410005 - RNA, 23 nt, Human
auuccugauaugauuuaaaacau

SEQ ID NO: 2410006 - RNA, 13 nt, Human
auuccugcagccu

SEQ ID NO: 2410007 - RNA, 17 nt, Human
auuccugacccaggccg

SEQ ID NO: 2410008 - RNA, 16 nt, Human
auuccugacccaggcc

SEQ ID NO: 2410009 - RNA, 15 nt, Human
auuccugacccaggc

SEQ ID NO: 2410010 - RNA, 14 nt, Human
auuccugacccagg

SEQ ID NO: 2410011 - RNA, 22 nt, Human
auuccugacccaggccgcagcu

SEQ ID NO: 2410012 - RNA, 21 nt, Human
auuccugacccaggccgcagc

SEQ ID NO: 2410013 - RNA, 16 nt, Human
auuccugaagaaccag

SEQ ID NO: 2410014 - RNA, 19 nt, Human
auuccugaagaaccagucc

SEQ ID NO: 2410015 - RNA, 12 nt, Human
auuccugaccca

SEQ ID NO: 2410016 - RNA, 11 nt, Human
auuccugaccc

SEQ ID NO: 2410017 - RNA, 17 nt, Human
auuccugaaugaaauau

SEQ ID NO: 2410018 - RNA, 19 nt, Human
auuccugaaugaaauauca

SEQ ID NO: 2410019 - RNA, 15 nt, Human
auuccugaagaacca

SEQ ID NO: 2410020 - RNA, 13 nt, Human
auuccugaaagaa

SEQ ID NO: 2410021 - RNA, 13 nt, Human
auuccucuuugcu

SEQ ID NO: 2410022 - RNA, 14 nt, Human
auuccucuuugcuu

SEQ ID NO: 2410023 - RNA, 15 nt, Human
auuccucuuugcuuu

SEQ ID NO: 2410024 - RNA, 16 nt, Human
auuccucuuugcuuug

SEQ ID NO: 2410025 - RNA, 17 nt, Human
auuccucuuugcuuugc

SEQ ID NO: 2410026 - RNA, 18 nt, Human
auuccucuuugcuuugcu

SEQ ID NO: 2410027 - RNA, 17 nt, Human
auuuuuaaaguauauau

SEQ ID NO: 2410028 - RNA, 19 nt, Human
auuuuuaaauguaaaacau

SEQ ID NO: 2410029 - RNA, 19 nt, Human
auuuuuaagauaauaauau

SEQ ID NO: 2410030 - RNA, 18 nt, Human
auuuuuaagauaauaaua

SEQ ID NO: 2410031 - RNA, 22 nt, Human
auuuuuaagauaauaauauaug

SEQ ID NO: 2410032 - RNA, 20 nt, Human
auuuuuaagauaauaauaua

SEQ ID NO: 2410033 - RNA, 21 nt, Human
auuuuuaagcaaaauauuauu

SEQ ID NO: 2410034 - RNA, 23 nt, Human
auuuugagugacucgaggguugg

SEQ ID NO: 2410035 - RNA, 14 nt, Human
auuuugagugacuc

SEQ ID NO: 2410036 - RNA, 13 nt, Human
auuuugagugacu

SEQ ID NO: 2410037 - RNA, 21 nt, Human
auuuugaguaucucggaccuu

SEQ ID NO: 2410038 - RNA, 21 nt, Human
auuuugagcugaaaugcugca

SEQ ID NO: 2410039 - RNA, 14 nt, Human
auuuugaggcuuuc

SEQ ID NO: 2410040 - RNA, 18 nt, Human
auuuugauccaagcuggu

SEQ ID NO: 2410041 - RNA, 14 nt, Human
auuuucuuucaaaa

SEQ ID NO: 2410042 - RNA, 18 nt, Human
auuuucuuuaaugcuuuu

SEQ ID NO: 2410043 - RNA, 19 nt, Human
auuuucuuuaaugcuuuua

SEQ ID NO: 2410044 - RNA, 16 nt, Human
auuuucuuucuguaac

SEQ ID NO: 2410045 - RNA, 21 nt, Human
auuuucuuucucuacuuugag

SEQ ID NO: 2410046 - RNA, 15 nt, Human
auuuucuuugaaauu

SEQ ID NO: 2410047 - RNA, 20 nt, Human
auuuucuuuucuuucaacuu

SEQ ID NO: 2410048 - RNA, 23 nt, Human
auuuucuuuguguagcuuugcuc

SEQ ID NO: 2410049 - RNA, 16 nt, Human
auuuucuuuuguaaau

SEQ ID NO: 2410050 - RNA, 17 nt, Human
auuuucuuuuguaaaug

SEQ ID NO: 2410051 - RNA, 22 nt, Human
auuuugagaaagucuuauuuau

SEQ ID NO: 2410052 - RNA, 17 nt, Human
auuuugaccuacucuca

SEQ ID NO: 2410053 - RNA, 18 nt, Human
auuuugaccuacucucau

SEQ ID NO: 2410054 - RNA, 19 nt, Human
auuuucuuuuguaaauguu

SEQ ID NO: 2410055 - RNA, 13 nt, Human
auuuucuuuucuu

SEQ ID NO: 2410056 - RNA, 19 nt, Human
auuuugacacuauaucugu

SEQ ID NO: 2410057 - RNA, 18 nt, Human
auuuugacacuauaucug

SEQ ID NO: 2410058 - RNA, 19 nt, Human
auuuucuuuaaaagaaugg

SEQ ID NO: 2410059 - RNA, 15 nt, Human
auuuucuuuaaaaga

SEQ ID NO: 2410060 - RNA, 12 nt, Human
auuuucuuuaau

SEQ ID NO: 2410061 - RNA, 15 nt, Human
auuuucuuuaaugcu

SEQ ID NO: 2410062 - RNA, 19 nt, Human
auuuuaucuuucgcacagc

SEQ ID NO: 2410063 - RNA, 13 nt, Human
auuuucuuuaaaa

SEQ ID NO: 2410064 - RNA, 21 nt, Human
auuuucuucaugcaaugacau

SEQ ID NO: 2410065 - RNA, 22 nt, Human
auuuuaucuuugauucuccuuc

SEQ ID NO: 2410066 - RNA, 21 nt, Human
auuuucuuccaagcaaaggug

SEQ ID NO: 2410067 - RNA, 21 nt, Human
auuuuaucuuugauucuccuu

SEQ ID NO: 2410068 - RNA, 20 nt, Human
auuuuaucuuugauucuccu

SEQ ID NO: 2410069 - RNA, 15 nt, Human
auuuuaucuuugauu

SEQ ID NO: 2410070 - RNA, 13 nt, Human
auuuuaucuuuga

SEQ ID NO: 2410071 - RNA, 15 nt, Human
auuuuaucugugaau

SEQ ID NO: 2410072 - RNA, 14 nt, Human
auuuuaucugugaa

SEQ ID NO: 2410073 - RNA, 13 nt, Human
auuuuaucuguga

SEQ ID NO: 2410074 - RNA, 20 nt, Human
auuuuaucccucaccuguag

SEQ ID NO: 2410075 - RNA, 15 nt, Human
auuuuaucucuuauu

SEQ ID NO: 2410076 - RNA, 13 nt, Human
auuuguuugaacu

SEQ ID NO: 2410077 - RNA, 16 nt, Human
auuuuauaaaucgcuu

SEQ ID NO: 2410078 - RNA, 17 nt, Human
auuuuauaaaucgcuuu

SEQ ID NO: 2410079 - RNA, 15 nt, Human
auuuuauaaaucgcu

SEQ ID NO: 2410080 - RNA, 14 nt, Human
auuuguuugaacug

SEQ ID NO: 2410081 - RNA, 16 nt, Human
auuuguuugaacugau

SEQ ID NO: 2410082 - RNA, 19 nt, Human
auuuuauauuagaaguguu

SEQ ID NO: 2410083 - RNA, 20 nt, Human
auuuuauauuagaaguguua

SEQ ID NO: 2410084 - RNA, 18 nt, Human
auuuuauauuaaaauaag

SEQ ID NO: 2410085 - RNA, 16 nt, Human
auuuuauaugucaaag

SEQ ID NO: 2410086 - RNA, 15 nt, Human
auuuuauaugucaaa

SEQ ID NO: 2410087 - RNA, 12 nt, Human
auuuuauaauuu

SEQ ID NO: 2410088 - RNA, 23 nt, Human
auuuuauaugcuuacugauauau

SEQ ID NO: 2410089 - RNA, 15 nt, Human
auuuuauacauuaac

SEQ ID NO: 2410090 - RNA, 20 nt, Human
auuuuauaaaucgcuuuuga

SEQ ID NO: 2410091 - RNA, 21 nt, Human
auuuuauaaaucgcuuuugau

SEQ ID NO: 2410092 - RNA, 23 nt, Human
auuuuauaaaucgcuuuugauaa

SEQ ID NO: 2410093 - RNA, 18 nt, Human
auuuuauaugcuuacuga

SEQ ID NO: 2410094 - RNA, 20 nt, Human
caaagaucaaaauaaaaagu

SEQ ID NO: 2410095 - RNA, 18 nt, Human
caaagaucaaaauaaaaa

SEQ ID NO: 2410096 - RNA, 17 nt, Human
caaagaucaaaauaaaa

SEQ ID NO: 2410097 - RNA, 16 nt, Human
caaagaucaaaauaaa

SEQ ID NO: 2410098 - RNA, 15 nt, Human
caaagaucaaaauaa

SEQ ID NO: 2410099 - RNA, 14 nt, Human
caaagaucaaaaua

SEQ ID NO: 2410100 - RNA, 15 nt, Human
caaaccaccagaagc

SEQ ID NO: 2410101 - RNA, 16 nt, Human
caaaccaccagaagcc

SEQ ID NO: 2410102 - RNA, 20 nt, Human
caaaccaccagaagcccaga

SEQ ID NO: 2410103 - RNA, 22 nt, Human
caaaccaccagaagcccagaau

SEQ ID NO: 2410104 - RNA, 14 nt, Human
caaaaguggccucu

SEQ ID NO: 2410105 - RNA, 16 nt, Human
caaaaguggccucuuu

SEQ ID NO: 2410106 - RNA, 17 nt, Human
caaaaguggccucuuug

SEQ ID NO: 2410107 - RNA, 18 nt, Human
caaaaguggccucuuugu

SEQ ID NO: 2410108 - RNA, 19 nt, Human
caaaagucaaaaggugccu

SEQ ID NO: 2410109 - RNA, 20 nt, Human
caaaaguauuuuccuguaaa

SEQ ID NO: 2410110 - RNA, 17 nt, Human
caaaccaaaucacugaa

SEQ ID NO: 2410111 - RNA, 20 nt, Human
caaaaguggccucuuugucu

SEQ ID NO: 2410112 - RNA, 14 nt, Human
caaaccacacugga

SEQ ID NO: 2410113 - RNA, 19 nt, Human
caaaaguauuuuccuguaa

SEQ ID NO: 2410114 - RNA, 17 nt, Human
caaaaguauuuuccugu

SEQ ID NO: 2410115 - RNA, 16 nt, Human
caaaaguauuuuccug

SEQ ID NO: 2410116 - RNA, 15 nt, Human
caaaaguauuuuccu

SEQ ID NO: 2410117 - RNA, 14 nt, Human
caaaaguauuuucc

SEQ ID NO: 2410118 - RNA, 13 nt, Human
caaaaguauuuuc

SEQ ID NO: 2410119 - RNA, 15 nt, Human
caaaagcugggcagg

SEQ ID NO: 2410120 - RNA, 20 nt, Human
caaaagguucacuaaagcag

SEQ ID NO: 2410121 - RNA, 14 nt, Human
caaaagcugcucag

SEQ ID NO: 2410122 - RNA, 15 nt, Human
caaaccacacuggac

SEQ ID NO: 2410123 - RNA, 16 nt, Human
auuuuuuuuuccuuca

SEQ ID NO: 2410124 - RNA, 13 nt, Human
auuuuuuuuuccu

SEQ ID NO: 2410125 - RNA, 12 nt, Human
auuuuuuuuucc

SEQ ID NO: 2410126 - RNA, 17 nt, Human
auuuuuacauucugaau

SEQ ID NO: 2410127 - RNA, 20 nt, Human
auuuuuaccuuuuuccuucc

SEQ ID NO: 2410128 - RNA, 23 nt, Human
auuuuuaauggggguagcagcug

SEQ ID NO: 2410129 - RNA, 15 nt, Human
auuuuuaaugggggu

SEQ ID NO: 2410130 - RNA, 12 nt, Human
auuuuuaauggg

SEQ ID NO: 2410131 - RNA, 11 nt, Human
auuuuuaaugg

SEQ ID NO: 2410132 - RNA, 17 nt, Human
auuuuuaaucaugaaau

SEQ ID NO: 2410133 - RNA, 16 nt, Human
auuuuuaaucaugaaa

SEQ ID NO: 2410134 - RNA, 14 nt, Human
auuuuuaaggacuu

SEQ ID NO: 2410135 - RNA, 13 nt, Human
auuuuuaagugcu

SEQ ID NO: 2410136 - RNA, 16 nt, Human
auuuuuacauucugaa

SEQ ID NO: 2410137 - RNA, 14 nt, Human
auuuuuacaauaaa

SEQ ID NO: 2410138 - RNA, 13 nt, Human
auuuuuacaauaa

SEQ ID NO: 2410139 - RNA, 19 nt, Human
auuuuuacaauaaauaauc

SEQ ID NO: 2410140 - RNA, 18 nt, Human
caaaaaaauauauuuaau

SEQ ID NO: 2410141 - RNA, 23 nt, Human
caaaaaaauacugccagaugcug

SEQ ID NO: 2410142 - RNA, 15 nt, Human
caaaaaaauacugcc

SEQ ID NO: 2410143 - RNA, 13 nt, Human
caaaaaaauacug

SEQ ID NO: 2410144 - RNA, 20 nt, Human
caaaagcccauucauuccau

SEQ ID NO: 2410145 - RNA, 22 nt, Human
caaaagcccauucauuccauuc

SEQ ID NO: 2410146 - RNA, 12 nt, Human
caaaagcugcuc

SEQ ID NO: 2410147 - RNA, 20 nt, Human
caaaaaaaaaguuuuauuuu

SEQ ID NO: 2410148 - RNA, 19 nt, Human
caaaaaaaaaguuuuauuu

SEQ ID NO: 2410149 - RNA, 17 nt, Human
caaaaaaaaaguuuuau

SEQ ID NO: 2410150 - RNA, 16 nt, Human
caaaaaaaaaguuuua

SEQ ID NO: 2410151 - RNA, 22 nt, Human
caaaaaaaaaguuuuauuuuuc

SEQ ID NO: 2410152 - RNA, 16 nt, Human
caaaaaaacacuaguu

SEQ ID NO: 2410153 - RNA, 13 nt, Human
caaaaaaacacua

SEQ ID NO: 2410154 - RNA, 17 nt, Human
auuuuuuuuuccuucag

SEQ ID NO: 2410155 - RNA, 19 nt, Human
caaaaaaaaaaaaaugcac

SEQ ID NO: 2410156 - RNA, 19 nt, Human
auuuuuaccguuucuuccc

SEQ ID NO: 2410157 - RNA, 22 nt, Human
caaaaaaaaaaaaaagcaucua

SEQ ID NO: 2410158 - RNA, 17 nt, Human
auuuuuuuuuccuagcc

SEQ ID NO: 2410159 - RNA, 21 nt, Human
auuuuuacuagaacacagaaa

SEQ ID NO: 2410160 - RNA, 21 nt, Human
caacuaucucauuuccaagca

SEQ ID NO: 2410161 - RNA, 23 nt, Human
caaccccacacgcuccucccucu

SEQ ID NO: 2410162 - RNA, 17 nt, Human
caacuaugauuuggaaa

SEQ ID NO: 2410163 - RNA, 20 nt, Human
caacuauuuuuccaaaauaa

SEQ ID NO: 2410164 - RNA, 22 nt, Human
caacuaugauuuggaaaauaaa

SEQ ID NO: 2410165 - RNA, 19 nt, Human
caacuaugauuuggaaaau

SEQ ID NO: 2410166 - RNA, 18 nt, Human
caacuaugauuuggaaaa

SEQ ID NO: 2410167 - RNA, 17 nt, Human
caacccccagccugcua

SEQ ID NO: 2410168 - RNA, 16 nt, Human
caacccccagccugcu

SEQ ID NO: 2410169 - RNA, 15 nt, Human
caacccccagccugc

SEQ ID NO: 2410170 - RNA, 15 nt, Human
caaccccaacuccag

SEQ ID NO: 2410171 - RNA, 12 nt, Human
caaccccagccg

SEQ ID NO: 2410172 - RNA, 15 nt, Human
caacccauuagccau

SEQ ID NO: 2410173 - RNA, 22 nt, Human
caacccaggagcauccaccucc

SEQ ID NO: 2410174 - RNA, 22 nt, Human
caacccaugaugagcuccucuu

SEQ ID NO: 2410175 - RNA, 18 nt, Human
caacccagccgcugcccg

SEQ ID NO: 2410176 - RNA, 17 nt, Human
caacccagccgcugccc

SEQ ID NO: 2410177 - RNA, 16 nt, Human
caacccagccgcugcc

SEQ ID NO: 2410178 - RNA, 14 nt, Human
caacccagccgcug

SEQ ID NO: 2410179 - RNA, 22 nt, Human
caacccaaggacugagggacuc

SEQ ID NO: 2410180 - RNA, 19 nt, Human
caacccaaggacugaggga

SEQ ID NO: 2410181 - RNA, 11 nt, Human
caacccagccg

SEQ ID NO: 2410182 - RNA, 15 nt, Human
caacccaaggacuga

SEQ ID NO: 2410183 - RNA, 19 nt, Human
caacccaaauguucaucaa

SEQ ID NO: 2410184 - RNA, 14 nt, Human
caaccauuccccau

SEQ ID NO: 2410185 - RNA, 22 nt, Human
caaccacuggucuguagggauu

SEQ ID NO: 2410186 - RNA, 14 nt, Human
caaccacuggucug

SEQ ID NO: 2410187 - RNA, 21 nt, Human
caaccacuaagaauucaaacu

SEQ ID NO: 2410188 - RNA, 22 nt, Human
caaccaccgcuccccagcccag

SEQ ID NO: 2410189 - RNA, 23 nt, Human
caaccacuggucuguagggauuu

SEQ ID NO: 2410190 - RNA, 14 nt, Human
caaccacuguaaaa

SEQ ID NO: 2410191 - RNA, 17 nt, Human
caaccacuguaaaauga

SEQ ID NO: 2410192 - RNA, 21 nt, Human
caaccacuguaaaaugaaauu

SEQ ID NO: 2410193 - RNA, 13 nt, Human
caaccauuccaga

SEQ ID NO: 2410194 - RNA, 14 nt, Human
caaccauuccagac

SEQ ID NO: 2410195 - RNA, 16 nt, Human
caaccauuccagacug

SEQ ID NO: 2410196 - RNA, 22 nt, Human
caaccauuccagacugcuucca

SEQ ID NO: 2410197 - RNA, 19 nt, Human
caaccacuguaaaaugaaa

SEQ ID NO: 2410198 - RNA, 18 nt, Human
caagaauaaucacgcuuu

SEQ ID NO: 2410199 - RNA, 17 nt, Human
caagaauaaucacgcuu

SEQ ID NO: 2410200 - RNA, 15 nt, Human
caagaaguuuaagga

SEQ ID NO: 2410201 - RNA, 22 nt, Human
caagaaggguuuuccacccugg

SEQ ID NO: 2410202 - RNA, 23 nt, Human
caagaagggcuagaaccuggagg

SEQ ID NO: 2410203 - RNA, 22 nt, Human
caacuaugauaugguaaaaguu

SEQ ID NO: 2410204 - RNA, 14 nt, Human
caagaagugauuag

SEQ ID NO: 2410205 - RNA, 23 nt, Human
caagaaggguuuuccacccugga

SEQ ID NO: 2410206 - RNA, 19 nt, Human
caagaagucaaaguaaaac

SEQ ID NO: 2410207 - RNA, 15 nt, Human
caacucaccccagcc

SEQ ID NO: 2410208 - RNA, 13 nt, Human
caacucaccccag

SEQ ID NO: 2410209 - RNA, 16 nt, Human
caacucaccccagccc

SEQ ID NO: 2410210 - RNA, 19 nt, Human
caagacccuugugguccca

SEQ ID NO: 2410211 - RNA, 18 nt, Human
caagacccuugugguccc

SEQ ID NO: 2410212 - RNA, 22 nt, Human
caagacccuuguggucccaccc

SEQ ID NO: 2410213 - RNA, 14 nt, Human
caagauuaaaugua

SEQ ID NO: 2410214 - RNA, 15 nt, Human
caagacacaucccua

SEQ ID NO: 2410215 - RNA, 17 nt, Human
caagacagaagcugaag

SEQ ID NO: 2410216 - RNA, 13 nt, Human
caagacacugugg

SEQ ID NO: 2410217 - RNA, 13 nt, Human
caagacagaugcc

SEQ ID NO: 2410218 - RNA, 18 nt, Human
caagacagaagcugaagu

SEQ ID NO: 2410219 - RNA, 22 nt, Human
caagacagaugccccagagcug

SEQ ID NO: 2410220 - RNA, 16 nt, Human
caagacagaugcccca

SEQ ID NO: 2410221 - RNA, 21 nt, Human
caagacagaugccccagagcu

SEQ ID NO: 2410222 - RNA, 13 nt, Human
caagacacaguga

SEQ ID NO: 2410223 - RNA, 22 nt, Human
caagaauuugaucguuccaguu

SEQ ID NO: 2410224 - RNA, 22 nt, Human
caagaauuucuugguaagaagc

SEQ ID NO: 2410225 - RNA, 23 nt, Human
caagaauuucuugguaagaagcc

SEQ ID NO: 2410226 - RNA, 18 nt, Human
caaccacugcgaccacaa

SEQ ID NO: 2410227 - RNA, 16 nt, Human
caaccaccuuucagau

SEQ ID NO: 2410228 - RNA, 20 nt, Human
caaccaccgcuccccagccc

SEQ ID NO: 2410229 - RNA, 21 nt, Human
caaccaccgcuccccagccca

SEQ ID NO: 2410230 - RNA, 19 nt, Human
caaccaccgcuccccagcc

SEQ ID NO: 2410231 - RNA, 17 nt, Human
caaccaccgcuccccag

SEQ ID NO: 2410232 - RNA, 22 nt, Human
caacaccucugcacaagcugca

SEQ ID NO: 2410233 - RNA, 20 nt, Human
caacaccuuguuucccucuc

SEQ ID NO: 2410234 - RNA, 15 nt, Human
caacacgagcaggcu

SEQ ID NO: 2410235 - RNA, 20 nt, Human
caaauccuugugggaaaaga

SEQ ID NO: 2410236 - RNA, 13 nt, Human
caaaucauagcug

SEQ ID NO: 2410237 - RNA, 22 nt, Human
caaaucaguuacuaagaagaaa

SEQ ID NO: 2410238 - RNA, 21 nt, Human
caaaucaguuacuaagaagaa

SEQ ID NO: 2410239 - RNA, 20 nt, Human
caaaucaguuacuaagaaga

SEQ ID NO: 2410240 - RNA, 14 nt, Human
caaaucaguuacua

SEQ ID NO: 2410241 - RNA, 23 nt, Human
caaaucagucagugcaaauguca

SEQ ID NO: 2410242 - RNA, 13 nt, Human
caaaucagucagu

SEQ ID NO: 2410243 - RNA, 22 nt, Human
caaauccagccugcugccugcu

SEQ ID NO: 2410244 - RNA, 23 nt, Human
caaaguauuuuuuuaucuuggga

SEQ ID NO: 2410245 - RNA, 22 nt, Human
caaaguauuuuuuuaucuuggg

SEQ ID NO: 2410246 - RNA, 16 nt, Human
caaagucaagccacau

SEQ ID NO: 2410247 - RNA, 17 nt, Human
caaaucagcugcuacua

SEQ ID NO: 2410248 - RNA, 21 nt, Human
caaaguacacuguuucaaacu

SEQ ID NO: 2410249 - RNA, 16 nt, Human
caaaguacacuguuuc

SEQ ID NO: 2410250 - RNA, 20 nt, Human
caaaguacacuguuucaaac

SEQ ID NO: 2410251 - RNA, 15 nt, Human
caaagaucacuuguu

SEQ ID NO: 2410252 - RNA, 12 nt, Human
caaagaucacuu

SEQ ID NO: 2410253 - RNA, 20 nt, Human
caaagaucuguccucagccu

SEQ ID NO: 2410254 - RNA, 21 nt, Human
caaagaucuguccucagccuu

SEQ ID NO: 2410255 - RNA, 13 nt, Human
caaagaugcagcc

SEQ ID NO: 2410256 - RNA, 14 nt, Human
caaagaugcagccg

SEQ ID NO: 2410257 - RNA, 21 nt, Human
caaaguaaaacuugcugccug

SEQ ID NO: 2410258 - RNA, 23 nt, Human
caaaugcagggauugcugccacu

SEQ ID NO: 2410259 - RNA, 21 nt, Human
caaauuuugaugccaagaaag

SEQ ID NO: 2410260 - RNA, 22 nt, Human
caaaugcagggauugcugccac

SEQ ID NO: 2410261 - RNA, 20 nt, Human
caaaugcagggauugcugcc

SEQ ID NO: 2410262 - RNA, 19 nt, Human
caaaugcagggauugcugc

SEQ ID NO: 2410263 - RNA, 13 nt, Human
caaaugcagcuuu

SEQ ID NO: 2410264 - RNA, 22 nt, Human
caaaugagggucuugguuccag

SEQ ID NO: 2410265 - RNA, 13 nt, Human
caaaugagccaug

SEQ ID NO: 2410266 - RNA, 22 nt, Human
caaaucuauucagacaagcaac

SEQ ID NO: 2410267 - RNA, 20 nt, Human
caaaucuauucagacaagca

SEQ ID NO: 2410268 - RNA, 16 nt, Human
caaaucuauucagaca

SEQ ID NO: 2410269 - RNA, 21 nt, Human
caaaucugcuuuuuaaagaau

SEQ ID NO: 2410270 - RNA, 21 nt, Human
caaaucguccagcgaccuucc

SEQ ID NO: 2410271 - RNA, 19 nt, Human
caaaucguccagcgaccuu

SEQ ID NO: 2410272 - RNA, 14 nt, Human
caaaucuauucaga

SEQ ID NO: 2410273 - RNA, 13 nt, Human
caaaucuauucag

SEQ ID NO: 2410274 - RNA, 23 nt, Human
caacaaaccuguuucugcagcca

SEQ ID NO: 2410275 - RNA, 17 nt, Human
caacaaaaagcuucccc

SEQ ID NO: 2410276 - RNA, 16 nt, Human
caacaaaaagcuuccc

SEQ ID NO: 2410277 - RNA, 15 nt, Human
caaauuuuggccaaa

SEQ ID NO: 2410278 - RNA, 13 nt, Human
caaauuuuggcca

SEQ ID NO: 2410279 - RNA, 14 nt, Human
caacaauuuaugaa

SEQ ID NO: 2410280 - RNA, 16 nt, Human
caacaauuuaugaauu

SEQ ID NO: 2410281 - RNA, 17 nt, Human
caacaauuuaugaauug

SEQ ID NO: 2410282 - RNA, 18 nt, Human
caacaauuuaugaauuga

SEQ ID NO: 2410283 - RNA, 13 nt, Human
caacaauuucuac

SEQ ID NO: 2410284 - RNA, 18 nt, Human
caacaauuucuacuuuga

SEQ ID NO: 2410285 - RNA, 19 nt, Human
caacaauuucuacuuugaa

SEQ ID NO: 2410286 - RNA, 20 nt, Human
caacaauuucuacuuugaag

SEQ ID NO: 2410287 - RNA, 23 nt, Human
caaguaauucugcugucucagcc

SEQ ID NO: 2410288 - RNA, 16 nt, Human
caaguaauucugcugu

SEQ ID NO: 2410289 - RNA, 22 nt, Human
caaguaauccaccugccucggc

SEQ ID NO: 2410290 - RNA, 20 nt, Human
caagauuagaagcugaaaac

SEQ ID NO: 2410291 - RNA, 17 nt, Human
caagauucacaccugac

SEQ ID NO: 2410292 - RNA, 12 nt, Human
caagauuagaag

SEQ ID NO: 2410293 - RNA, 19 nt, Human
caagauucacaccugacuc

SEQ ID NO: 2410294 - RNA, 18 nt, Human
caagauucacaccugacu

SEQ ID NO: 2410295 - RNA, 13 nt, Human
caagauucccaga

SEQ ID NO: 2410296 - RNA, 14 nt, Human
caagauucccagag

SEQ ID NO: 2410297 - RNA, 15 nt, Human
caagauucccagaga

SEQ ID NO: 2410298 - RNA, 16 nt, Human
caagauucccagagac

SEQ ID NO: 2410299 - RNA, 17 nt, Human
caagauucccagagaca

SEQ ID NO: 2410300 - RNA, 18 nt, Human
caagauucccagagacag

SEQ ID NO: 2410301 - RNA, 19 nt, Human
caagauucccagagacagg

SEQ ID NO: 2410302 - RNA, 23 nt, Human
caagauucccagagacaggaaaa

SEQ ID NO: 2410303 - RNA, 11 nt, Human
caaguaauugu

SEQ ID NO: 2410304 - RNA, 23 nt, Human
caaguaauugugaaaaaguuaaa

SEQ ID NO: 2410305 - RNA, 16 nt, Human
caaguacugcuguaaa

SEQ ID NO: 2410306 - RNA, 20 nt, Human
caaguacauggcuagcuuuu

SEQ ID NO: 2410307 - RNA, 13 nt, Human
caaguacugcugu

SEQ ID NO: 2410308 - RNA, 14 nt, Human
caaguacugcugua

SEQ ID NO: 2410309 - RNA, 14 nt, Human
caaguauuagaaua

SEQ ID NO: 2410310 - RNA, 20 nt, Human
caaguauuagaauaccacag

SEQ ID NO: 2410311 - RNA, 23 nt, Human
caaguauuagggguaauauauug

SEQ ID NO: 2410312 - RNA, 20 nt, Human
caaguauuagggguaauaua

SEQ ID NO: 2410313 - RNA, 22 nt, Human
caaguaugugggcagauuuuca

SEQ ID NO: 2410314 - RNA, 17 nt, Human
caaguauguuuuagcau

SEQ ID NO: 2410315 - RNA, 19 nt, Human
caaguucuagagaagaggc

SEQ ID NO: 2410316 - RNA, 18 nt, Human
caaguucuagagaagagg

SEQ ID NO: 2410317 - RNA, 16 nt, Human
caaguucuagagaaga

SEQ ID NO: 2410318 - RNA, 13 nt, Human
caaguucuagaga

SEQ ID NO: 2410319 - RNA, 23 nt, Human
caaguucuagagaagaggcuggu

SEQ ID NO: 2410320 - RNA, 21 nt, Human
caaguucuagagaagaggcug

SEQ ID NO: 2410321 - RNA, 15 nt, Human
caaguugaauugagg

SEQ ID NO: 2410322 - RNA, 13 nt, Human
caaguugugcuug

SEQ ID NO: 2410323 - RNA, 17 nt, Human
caaguuguggugcugac

SEQ ID NO: 2410324 - RNA, 17 nt, Human
caaguugugcuuguuua

SEQ ID NO: 2410325 - RNA, 15 nt, Human
caaguugcuaauaca

SEQ ID NO: 2410326 - RNA, 13 nt, Human
caaguuuugugua

SEQ ID NO: 2410327 - RNA, 21 nt, Human
caaguuguggugcugacaaag

SEQ ID NO: 2410328 - RNA, 20 nt, Human
caaguuguggugcugacaaa

SEQ ID NO: 2410329 - RNA, 12 nt, Human
caauaaagagau

SEQ ID NO: 2410330 - RNA, 13 nt, Human
caauaaagaagag

SEQ ID NO: 2410331 - RNA, 22 nt, Human
caauaaagaguuagaaugaaaa

SEQ ID NO: 2410332 - RNA, 13 nt, Human
caauaaaccaggu

SEQ ID NO: 2410333 - RNA, 18 nt, Human
caauaaaauuuuuuuuca

SEQ ID NO: 2410334 - RNA, 23 nt, Human
caauaaaccagguuuagacagua

SEQ ID NO: 2410335 - RNA, 19 nt, Human
caauaaaauuuuuuuucau

SEQ ID NO: 2410336 - RNA, 17 nt, Human
caauaaaccucuuuucu

SEQ ID NO: 2410337 - RNA, 18 nt, Human
caauaaacgauuuaauuc

SEQ ID NO: 2410338 - RNA, 17 nt, Human
caauaaacgauuuaauu

SEQ ID NO: 2410339 - RNA, 16 nt, Human
caauaaacgauuuaau

SEQ ID NO: 2410340 - RNA, 12 nt, Human
caauaaacgauu

SEQ ID NO: 2410341 - RNA, 21 nt, Human
caauaaacgauuuaauucucu

SEQ ID NO: 2410342 - RNA, 19 nt, Human
caauaaacgauuuaauucu

SEQ ID NO: 2410343 - RNA, 22 nt, Human
caauaaaauuuuuuuucauguu

SEQ ID NO: 2410344 - RNA, 22 nt, Human
caauaaaaauggcucagaugcc

SEQ ID NO: 2410345 - RNA, 17 nt, Human
caauaaaaauggcucag

SEQ ID NO: 2410346 - RNA, 13 nt, Human
caauaaaaauguu

SEQ ID NO: 2410347 - RNA, 14 nt, Human
caauaaaaaucaua

SEQ ID NO: 2410348 - RNA, 16 nt, Human
caauaaaaauggcuca

SEQ ID NO: 2410349 - RNA, 23 nt, Human
caaugcuguauuuuaaaagaaug

SEQ ID NO: 2410350 - RNA, 14 nt, Human
caaugcuguauuuu

SEQ ID NO: 2410351 - RNA, 23 nt, Human
caaugcuggcuguuggcuggggg

SEQ ID NO: 2410352 - RNA, 22 nt, Human
caaugcuggcuguuggcugggg

SEQ ID NO: 2410353 - RNA, 21 nt, Human
caauauuucagauaaucacaa

SEQ ID NO: 2410354 - RNA, 20 nt, Human
caauauuucagauaaucaca

SEQ ID NO: 2410355 - RNA, 12 nt, Human
caauauuucaga

SEQ ID NO: 2410356 - RNA, 19 nt, Human
caauauuuauuauuuucac

SEQ ID NO: 2410357 - RNA, 17 nt, Human
caauggaaccuccuuuc

SEQ ID NO: 2410358 - RNA, 16 nt, Human
caauggaaccuccuuu

SEQ ID NO: 2410359 - RNA, 14 nt, Human
caauggaaccuccu

SEQ ID NO: 2410360 - RNA, 17 nt, Human
caauggaaacugaaugc

SEQ ID NO: 2410361 - RNA, 16 nt, Human
caauggaaacugaaug

SEQ ID NO: 2410362 - RNA, 15 nt, Human
caauggaaacugaau

SEQ ID NO: 2410363 - RNA, 13 nt, Human
caauggaaacuga

SEQ ID NO: 2410364 - RNA, 17 nt, Human
caauucuccugccucag

SEQ ID NO: 2410365 - RNA, 16 nt, Human
caauucuccugccuca

SEQ ID NO: 2410366 - RNA, 22 nt, Human
caaugcugugcccuaaagugua

SEQ ID NO: 2410367 - RNA, 21 nt, Human
caaugcuuugccccugagaca

SEQ ID NO: 2410368 - RNA, 17 nt, Human
caauucuucccuaucuu

SEQ ID NO: 2410369 - RNA, 24 nt, Human
caauuguugacaguucugaagaau

SEQ ID NO: 2410370 - RNA, 23 nt, Human
caauuguugacaguucugaagaa

SEQ ID NO: 2410371 - RNA, 21 nt, Human
caauuguugacaguucugaag

SEQ ID NO: 2410372 - RNA, 14 nt, Human
caauuguugacagu

SEQ ID NO: 2410373 - RNA, 19 nt, Human
caauucuccugccucagcc

SEQ ID NO: 2410374 - RNA, 17 nt, Human
caauucucuuuaguucu

SEQ ID NO: 2410375 - RNA, 19 nt, Human
caauucuuacaaacaugug

SEQ ID NO: 2410376 - RNA, 18 nt, Human
caauucuuacaaacaugu

SEQ ID NO: 2410377 - RNA, 22 nt, Human
caauucuguuuuagguuaaaaa

SEQ ID NO: 2410378 - RNA, 14 nt, Human
caauucuguuuuag

SEQ ID NO: 2410379 - RNA, 17 nt, Human
caauucuuacaaacaug

SEQ ID NO: 2410380 - RNA, 15 nt, Human
cacaagccacagaag

SEQ ID NO: 2410381 - RNA, 12 nt, Human
cacaagccacag

SEQ ID NO: 2410382 - RNA, 17 nt, Human
cacaagccacagaagcc

SEQ ID NO: 2410383 - RNA, 14 nt, Human
cacaagccuucggc

SEQ ID NO: 2410384 - RNA, 16 nt, Human
cacaagacccuugugg

SEQ ID NO: 2410385 - RNA, 14 nt, Human
cacaagacccuugu

SEQ ID NO: 2410386 - RNA, 12 nt, Human
caauuuaaaaaa

SEQ ID NO: 2410387 - RNA, 18 nt, Human
caauuuaaacccauuuua

SEQ ID NO: 2410388 - RNA, 16 nt, Human
caauuuaaacccauuu

SEQ ID NO: 2410389 - RNA, 15 nt, Human
caauuuaaacccauu

SEQ ID NO: 2410390 - RNA, 22 nt, Human
caauuguuugggguugaaaauu

SEQ ID NO: 2410391 - RNA, 15 nt, Human
cacaagauucccaga

SEQ ID NO: 2410392 - RNA, 16 nt, Human
cacaagauucccagag

SEQ ID NO: 2410393 - RNA, 17 nt, Human
cacaagauucccagaga

SEQ ID NO: 2410394 - RNA, 18 nt, Human
cacaagauucccagagac

SEQ ID NO: 2410395 - RNA, 19 nt, Human
cacaagauucccagagaca

SEQ ID NO: 2410396 - RNA, 22 nt, Human
cacaagcaaaaaaaaaaaaaag

SEQ ID NO: 2410397 - RNA, 22 nt, Human
cacaagauucccagagacagga

SEQ ID NO: 2410398 - RNA, 16 nt, Human
cacaagacugcacauc

SEQ ID NO: 2410399 - RNA, 22 nt, Human
caauuuaaacccauuuuaguca

SEQ ID NO: 2410400 - RNA, 20 nt, Human
caauuuaaacccauuuuagu

SEQ ID NO: 2410401 - RNA, 23 nt, Human
cacccaggagccccgaggccuuc

SEQ ID NO: 2410402 - RNA, 20 nt, Human
cacccaggagccccgaggcc

SEQ ID NO: 2410403 - RNA, 19 nt, Human
cacccagcccacuucugcc

SEQ ID NO: 2410404 - RNA, 22 nt, Human
caccaggcuggcgcagccaagg

SEQ ID NO: 2410405 - RNA, 20 nt, Human
caccaggcuggcgcagccaa

SEQ ID NO: 2410406 - RNA, 19 nt, Human
caccaggcuggcgcagcca

SEQ ID NO: 2410407 - RNA, 18 nt, Human
caccaggcuggcgcagcc

SEQ ID NO: 2410408 - RNA, 23 nt, Human
caccaggcuggcgcagccaaggc

SEQ ID NO: 2410409 - RNA, 12 nt, Human
cacccagcccau

SEQ ID NO: 2410410 - RNA, 13 nt, Human
cacccagcccauu

SEQ ID NO: 2410411 - RNA, 24 nt, Human
cacccaggagccccgaggccuucu

SEQ ID NO: 2410412 - RNA, 15 nt, Human
cacccagcccauucu

SEQ ID NO: 2410413 - RNA, 11 nt, Human
cacccaggagg

SEQ ID NO: 2410414 - RNA, 21 nt, Human
caccagcccuuagcagggaaa

SEQ ID NO: 2410415 - RNA, 15 nt, Human
caccagcagccugga

SEQ ID NO: 2410416 - RNA, 15 nt, Human
caccagcuccucccu

SEQ ID NO: 2410417 - RNA, 12 nt, Human
caccagcuccuc

SEQ ID NO: 2410418 - RNA, 21 nt, Human
caccagcguuugaggggcugg

SEQ ID NO: 2410419 - RNA, 19 nt, Human
caccagcguuugaggggcu

SEQ ID NO: 2410420 - RNA, 14 nt, Human
caccagcauuccuu

SEQ ID NO: 2410421 - RNA, 14 nt, Human
caccagccugcacu

SEQ ID NO: 2410422 - RNA, 20 nt, Human
caccagccuuucucccaggc

SEQ ID NO: 2410423 - RNA, 22 nt, Human
caccagccuuucucccaggcca

SEQ ID NO: 2410424 - RNA, 15 nt, Human
caccagcauuccuuu

SEQ ID NO: 2410425 - RNA, 13 nt, Human
caccagccugcac

SEQ ID NO: 2410426 - RNA, 23 nt, Human
caccaacauacucccaucuguga

SEQ ID NO: 2410427 - RNA, 14 nt, Human
caccagcagccugg

SEQ ID NO: 2410428 - RNA, 12 nt, Human
caccagcagccu

SEQ ID NO: 2410429 - RNA, 14 nt, Human
caccaggccaccuc

SEQ ID NO: 2410430 - RNA, 13 nt, Human
caccaggccaccu

SEQ ID NO: 2410431 - RNA, 19 nt, Human
caccagcuucuccaggcuc

SEQ ID NO: 2410432 - RNA, 19 nt, Human
caccaggccaccuccccag

SEQ ID NO: 2410433 - RNA, 15 nt, Human
caccaggccaccucc

SEQ ID NO: 2410434 - RNA, 22 nt, Human
caccaggccaccuccccagcau

SEQ ID NO: 2410435 - RNA, 15 nt, Human
caccagcugccucuu

SEQ ID NO: 2410436 - RNA, 14 nt, Human
caccagcugccucu

SEQ ID NO: 2410437 - RNA, 17 nt, Human
caccagcuccucccuug

SEQ ID NO: 2410438 - RNA, 12 nt, Human
caccagcugccu

SEQ ID NO: 2410439 - RNA, 17 nt, Human
caccagcuucuccaggc

SEQ ID NO: 2410440 - RNA, 16 nt, Human
caccagcuucuccagg

SEQ ID NO: 2410441 - RNA, 22 nt, Human
caccagcuguucugucccuugg

SEQ ID NO: 2410442 - RNA, 17 nt, Human
caccagcugccucuucu

SEQ ID NO: 2410443 - RNA, 16 nt, Human
caccagcugccucuuc

SEQ ID NO: 2410444 - RNA, 21 nt, Human
caccaggccguccucccgggc

SEQ ID NO: 2410445 - RNA, 16 nt, Human
caccaggccguccucc

SEQ ID NO: 2410446 - RNA, 17 nt, Human
caccaggcuggcgcagc

SEQ ID NO: 2410447 - RNA, 16 nt, Human
caccaggcuggcgcag

SEQ ID NO: 2410448 - RNA, 15 nt, Human
caccaggcuggcgca

SEQ ID NO: 2410449 - RNA, 13 nt, Human
caccaggcuggcg

SEQ ID NO: 2410450 - RNA, 21 nt, Human
caccaggcugcucagggcugg

SEQ ID NO: 2410451 - RNA, 14 nt, Human
caccaggcugcuca

SEQ ID NO: 2410452 - RNA, 17 nt, Human
cacccagcccacuucug

SEQ ID NO: 2410453 - RNA, 16 nt, Human
cacccagcccacuucu

SEQ ID NO: 2410454 - RNA, 13 nt, Human
cacauuuuucuua

SEQ ID NO: 2410455 - RNA, 14 nt, Human
cacauuuuucuuag

SEQ ID NO: 2410456 - RNA, 17 nt, Human
cacauuuuuuaaaugca

SEQ ID NO: 2410457 - RNA, 21 nt, Human
cacauuuuuuaaaugcaccug

SEQ ID NO: 2410458 - RNA, 21 nt, Human
caccaacauacucccaucugu

SEQ ID NO: 2410459 - RNA, 20 nt, Human
caccaacauacucccaucug

SEQ ID NO: 2410460 - RNA, 17 nt, Human
caccaacauacucccau

SEQ ID NO: 2410461 - RNA, 18 nt, Human
cacauuuuucagauauaa

SEQ ID NO: 2410462 - RNA, 18 nt, Human
cacaucuugcucugcuga

SEQ ID NO: 2410463 - RNA, 19 nt, Human
cacaucuugcucugcugac

SEQ ID NO: 2410464 - RNA, 17 nt, Human
cacaucuaagccugaag

SEQ ID NO: 2410465 - RNA, 18 nt, Human
cacauuuccccagaccug

SEQ ID NO: 2410466 - RNA, 17 nt, Human
cacauuuggaauacuuu

SEQ ID NO: 2410467 - RNA, 19 nt, Human
cacauuuggaauacuuuuu

SEQ ID NO: 2410468 - RNA, 16 nt, Human
cacauuuggaauacuu

SEQ ID NO: 2410469 - RNA, 17 nt, Human
cacauuugauucugugu

SEQ ID NO: 2410470 - RNA, 15 nt, Human
cacauuuuauuuuau

SEQ ID NO: 2410471 - RNA, 18 nt, Human
cacauuuuccuuuucaaa

SEQ ID NO: 2410472 - RNA, 21 nt, Human
cacauuuuguauaauuguauc

SEQ ID NO: 2410473 - RNA, 16 nt, Human
cacauuuuguauaauu

SEQ ID NO: 2410474 - RNA, 15 nt, Human
cacauuuuguauaau

SEQ ID NO: 2410475 - RNA, 13 nt, Human
cacauuuuguaua

SEQ ID NO: 2410476 - RNA, 12 nt, Human
cacauuuuguau

SEQ ID NO: 2410477 - RNA, 22 nt, Human
cacauuuuguauaauuguaucg

SEQ ID NO: 2410478 - RNA, 14 nt, Human
cacauuuuucagau

SEQ ID NO: 2410479 - RNA, 20 nt, Human
cacaucagcacgauuucugu

SEQ ID NO: 2410480 - RNA, 21 nt, Human
cacaucagcacgauuucuguu

SEQ ID NO: 2410481 - RNA, 17 nt, Human
cacaucuugcucugcug

SEQ ID NO: 2410482 - RNA, 16 nt, Human
cacaucuugcucugcu

SEQ ID NO: 2410483 - RNA, 17 nt, Human
cacaucuaaccucaucu

SEQ ID NO: 2410484 - RNA, 13 nt, Human
cacaucuaagccu

SEQ ID NO: 2410485 - RNA, 14 nt, Human
cacaucuaagccug

SEQ ID NO: 2410486 - RNA, 15 nt, Human
cacauccuuucuaaa

SEQ ID NO: 2410487 - RNA, 22 nt, Human
cacauccuccacguucugcuca

SEQ ID NO: 2410488 - RNA, 14 nt, Human
cacauccuccgucc

SEQ ID NO: 2410489 - RNA, 18 nt, Human
cacauccuccguccagcc

SEQ ID NO: 2410490 - RNA, 17 nt, Human
cacauccuguguuucua

SEQ ID NO: 2410491 - RNA, 19 nt, Human
cacauccuaugcaauauau

SEQ ID NO: 2410492 - RNA, 22 nt, Human
cacaucagcacgauuucuguuu

SEQ ID NO: 2410493 - RNA, 22 nt, Human
cacaucccaggcuucacccuga

SEQ ID NO: 2410494 - RNA, 12 nt, Human
cacaucccaggc

SEQ ID NO: 2410495 - RNA, 24 nt, Human
cacaucagcuccacuuucagugaa

SEQ ID NO: 2410496 - RNA, 13 nt, Human
cacaguagucuug

SEQ ID NO: 2410497 - RNA, 19 nt, Human
cacaguauuacuucugcua

SEQ ID NO: 2410498 - RNA, 18 nt, Human
cacaguauuacuucugcu

SEQ ID NO: 2410499 - RNA, 14 nt, Human
cacaggucuuuccu

SEQ ID NO: 2410500 - RNA, 16 nt, Human
cacaguagucuugaug

SEQ ID NO: 2410501 - RNA, 16 nt, Human
cacaguauuacuucug

SEQ ID NO: 2410502 - RNA, 14 nt, Human
cacagaagccagga

SEQ ID NO: 2410503 - RNA, 18 nt, Human
cacagaagccaggagcaa

SEQ ID NO: 2410504 - RNA, 16 nt, Human
cacagaagccaggagc

SEQ ID NO: 2410505 - RNA, 23 nt, Human
cacagaagccaggagcaaauguu

SEQ ID NO: 2410506 - RNA, 22 nt, Human
cacagacacacacacgcacgca

SEQ ID NO: 2410507 - RNA, 20 nt, Human
cacagacacacacacgcacg

SEQ ID NO: 2410508 - RNA, 18 nt, Human
cacagacacacacacgca

SEQ ID NO: 2410509 - RNA, 17 nt, Human
cacagacacacacacgc

SEQ ID NO: 2410510 - RNA, 14 nt, Human
cacagacacacaca

SEQ ID NO: 2410511 - RNA, 13 nt, Human
cacagacacacac

SEQ ID NO: 2410512 - RNA, 12 nt, Human
cacagacacaca

SEQ ID NO: 2410513 - RNA, 19 nt, Human
cacagaaucauaugauucu

SEQ ID NO: 2410514 - RNA, 21 nt, Human
cacagacccugcccugugggc

SEQ ID NO: 2410515 - RNA, 20 nt, Human
cacagacccugcccuguggg

SEQ ID NO: 2410516 - RNA, 19 nt, Human
cacagacccugcccugugg

SEQ ID NO: 2410517 - RNA, 16 nt, Human
cacagcuaacauggaa

SEQ ID NO: 2410518 - RNA, 15 nt, Human
cacagcuaacaugga

SEQ ID NO: 2410519 - RNA, 16 nt, Human
cacagcggccccugca

SEQ ID NO: 2410520 - RNA, 14 nt, Human
cacagcggccccug

SEQ ID NO: 2410521 - RNA, 21 nt, Human
cacagcggagguguggagccg

SEQ ID NO: 2410522 - RNA, 20 nt, Human
cacagcggggccccagggcu

SEQ ID NO: 2410523 - RNA, 14 nt, Human
cacagcucuguguu

SEQ ID NO: 2410524 - RNA, 10 nt, Human
cacagcucuu

SEQ ID NO: 2410525 - RNA, 23 nt, Human
cacagcucuguccugggagugag

SEQ ID NO: 2410526 - RNA, 20 nt, Human
cacagcucuguccugggagu

SEQ ID NO: 2410527 - RNA, 19 nt, Human
cacagcucccaccccaccc

SEQ ID NO: 2410528 - RNA, 22 nt, Human
cacagcucccaccccacccccu

SEQ ID NO: 2410529 - RNA, 14 nt, Human
cacagcucccaccc

SEQ ID NO: 2410530 - RNA, 15 nt, Human
cacagcucccacccc

SEQ ID NO: 2410531 - RNA, 16 nt, Human
cacagcucccacccca

SEQ ID NO: 2410532 - RNA, 17 nt, Human
cacagcucccaccccac

SEQ ID NO: 2410533 - RNA, 12 nt, Human
cacagcuaugaa

SEQ ID NO: 2410534 - RNA, 22 nt, Human
cacagcuaugaaggcuguacac

SEQ ID NO: 2410535 - RNA, 22 nt, Human
cacagcuaacauggaaguacua

SEQ ID NO: 2410536 - RNA, 21 nt, Human
cacagcuaacaauugugaagu

SEQ ID NO: 2410537 - RNA, 20 nt, Human
cacagcuaacaauugugaag

SEQ ID NO: 2410538 - RNA, 19 nt, Human
cacagcguccuguccacac

SEQ ID NO: 2410539 - RNA, 21 nt, Human
cacagcuaacacacagcuccc

SEQ ID NO: 2410540 - RNA, 20 nt, Human
cacagcuaacacacagcucc

SEQ ID NO: 2410541 - RNA, 15 nt, Human
cacagcuaccucuuc

SEQ ID NO: 2410542 - RNA, 21 nt, Human
cacagggccuuuggcaggugc

SEQ ID NO: 2410543 - RNA, 20 nt, Human
cacagggcaugccccggcca

SEQ ID NO: 2410544 - RNA, 23 nt, Human
cacagggcaugccccggccaccu

SEQ ID NO: 2410545 - RNA, 14 nt, Human
cacagggccccaga

SEQ ID NO: 2410546 - RNA, 19 nt, Human
cacagggccccagaaggca

SEQ ID NO: 2410547 - RNA, 22 nt, Human
cacagggccccagaaggcaggg

SEQ ID NO: 2410548 - RNA, 19 nt, Human
cacagggcagcugggccca

SEQ ID NO: 2410549 - RNA, 18 nt, Human
cacagggcagcugggccc

SEQ ID NO: 2410550 - RNA, 17 nt, Human
cacagggcagcugggcc

SEQ ID NO: 2410551 - RNA, 16 nt, Human
cacagggcagcugggc

SEQ ID NO: 2410552 - RNA, 22 nt, Human
cacagggcagcugggcccaacc

SEQ ID NO: 2410553 - RNA, 21 nt, Human
cacagggcagcugggcccaac

SEQ ID NO: 2410554 - RNA, 15 nt, Human
cacagggauccgacu

SEQ ID NO: 2410555 - RNA, 13 nt, Human
cacagggcagagc

SEQ ID NO: 2410556 - RNA, 14 nt, Human
cacagggcagagcc

SEQ ID NO: 2410557 - RNA, 17 nt, Human
cacagggcagagccggg

SEQ ID NO: 2410558 - RNA, 19 nt, Human
cacagggucugcucuuucu

SEQ ID NO: 2410559 - RNA, 17 nt, Human
cacagggucugcucuuu

SEQ ID NO: 2410560 - RNA, 16 nt, Human
cacagggucugcucuu

SEQ ID NO: 2410561 - RNA, 13 nt, Human
cacagggcgagac

SEQ ID NO: 2410562 - RNA, 23 nt, Human
cacagggucugcucuuucucugc

SEQ ID NO: 2410563 - RNA, 21 nt, Human
cacaggguucaaaaugucugu

SEQ ID NO: 2410564 - RNA, 14 nt, Human
cacaggguugggcc

SEQ ID NO: 2410565 - RNA, 16 nt, Human
cacaggguugggccca

SEQ ID NO: 2410566 - RNA, 18 nt, Human
cacaggguugggcccaga

SEQ ID NO: 2410567 - RNA, 22 nt, Human
cacaggguugggcccagaucug

SEQ ID NO: 2410568 - RNA, 23 nt, Human
cacaggguugggcccagaucugg

SEQ ID NO: 2410569 - RNA, 23 nt, Human
cacagguaugaccuucuaggaag

SEQ ID NO: 2410570 - RNA, 19 nt, Human
caccuuguuggagccugca

SEQ ID NO: 2410571 - RNA, 14 nt, Human
caccuuguuggagc

SEQ ID NO: 2410572 - RNA, 21 nt, Human
caccuugugucuguacacgug

SEQ ID NO: 2410573 - RNA, 17 nt, Human
caccuugugucuguaca

SEQ ID NO: 2410574 - RNA, 15 nt, Human
caccuugugucugua

SEQ ID NO: 2410575 - RNA, 14 nt, Human
caccuuguggcaag

SEQ ID NO: 2410576 - RNA, 20 nt, Human
caccuuggggcuugacuuuu

SEQ ID NO: 2410577 - RNA, 14 nt, Human
caccuuugaagaag

SEQ ID NO: 2410578 - RNA, 21 nt, Human
caccuuguuggagccugcagg

SEQ ID NO: 2410579 - RNA, 14 nt, Human
caccuuuaaagugu

SEQ ID NO: 2410580 - RNA, 12 nt, Human
caccuuuauuaa

SEQ ID NO: 2410581 - RNA, 14 nt, Human
caccuuuauuaaaa

SEQ ID NO: 2410582 - RNA, 15 nt, Human
caccuuuauuaaaau

SEQ ID NO: 2410583 - RNA, 15 nt, Human
caccuuuguccccac

SEQ ID NO: 2410584 - RNA, 14 nt, Human
caccuuugucccca

SEQ ID NO: 2410585 - RNA, 17 nt, Human
caccuuuguccccaccg

SEQ ID NO: 2410586 - RNA, 15 nt, Human
caccuuugcaggcau

SEQ ID NO: 2410587 - RNA, 17 nt, Human
caccuuuauuaaaaucu

SEQ ID NO: 2410588 - RNA, 18 nt, Human
caccuuuauuaaaaucuu

SEQ ID NO: 2410589 - RNA, 18 nt, Human
caccuuggggcuugacuu

SEQ ID NO: 2410590 - RNA, 22 nt, Human
caccuuggacauccuccuccca

SEQ ID NO: 2410591 - RNA, 17 nt, Human
caccuuggcaccagaca

SEQ ID NO: 2410592 - RNA, 13 nt, Human
caccuuggcucaa

SEQ ID NO: 2410593 - RNA, 21 nt, Human
caccuuggacauccuccuccc

SEQ ID NO: 2410594 - RNA, 18 nt, Human
caccuuggacauccuccu

SEQ ID NO: 2410595 - RNA, 17 nt, Human
caccuuggacauccucc

SEQ ID NO: 2410596 - RNA, 16 nt, Human
caccuuggacauccuc

SEQ ID NO: 2410597 - RNA, 14 nt, Human
caccuugcggggau

SEQ ID NO: 2410598 - RNA, 18 nt, Human
caccuugcaacacacaga

SEQ ID NO: 2410599 - RNA, 21 nt, Human
caccuugcaacacacagacac

SEQ ID NO: 2410600 - RNA, 17 nt, Human
caccugccagggacaga

SEQ ID NO: 2410601 - RNA, 19 nt, Human
caccuugacagggcacacc

SEQ ID NO: 2410602 - RNA, 17 nt, Human
caccugccauuugcacc

SEQ ID NO: 2410603 - RNA, 16 nt, Human
caccuugcaacacaca

SEQ ID NO: 2410604 - RNA, 17 nt, Human
caccuugcaacacacag

SEQ ID NO: 2410605 - RNA, 14 nt, Human
caccguucugugca

SEQ ID NO: 2410606 - RNA, 15 nt, Human
caccguucugugcac

SEQ ID NO: 2410607 - RNA, 18 nt, Human
caccguguaaaccaaagc

SEQ ID NO: 2410608 - RNA, 21 nt, Human
caccguuggggauuggggaag

SEQ ID NO: 2410609 - RNA, 13 nt, Human
caccguucugugc

SEQ ID NO: 2410610 - RNA, 16 nt, Human
caccguguaaaccaaa

SEQ ID NO: 2410611 - RNA, 21 nt, Human
caccuacaugagguacugaga

SEQ ID NO: 2410612 - RNA, 19 nt, Human
caccuaaucaggcugaggu

SEQ ID NO: 2410613 - RNA, 23 nt, Human
caccuacaguguacagucuugua

SEQ ID NO: 2410614 - RNA, 18 nt, Human
caccuaagggacauguuu

SEQ ID NO: 2410615 - RNA, 13 nt, Human
caccuaagggaca

SEQ ID NO: 2410616 - RNA, 19 nt, Human
caccuaagggacauguuuu

SEQ ID NO: 2410617 - RNA, 18 nt, Human
caccuaccaucagggaca

SEQ ID NO: 2410618 - RNA, 17 nt, Human
caccuaccaucagggac

SEQ ID NO: 2410619 - RNA, 22 nt, Human
caccuaccaucagggacaggau

SEQ ID NO: 2410620 - RNA, 20 nt, Human
caccuaccaccacgcccggc

SEQ ID NO: 2410621 - RNA, 21 nt, Human
caccuaucucgugggagagcc

SEQ ID NO: 2410622 - RNA, 19 nt, Human
caccuaugucauuucauuu

SEQ ID NO: 2410623 - RNA, 21 nt, Human
caccuacuacaucgcccucca

SEQ ID NO: 2410624 - RNA, 20 nt, Human
caccuacuacaucgcccucc

SEQ ID NO: 2410625 - RNA, 17 nt, Human
caccuaugugccaacug

SEQ ID NO: 2410626 - RNA, 14 nt, Human
caccuaugugccaa

SEQ ID NO: 2410627 - RNA, 12 nt, Human
caccuaugugcc

SEQ ID NO: 2410628 - RNA, 20 nt, Human
caccuaugucauuucauuuc

SEQ ID NO: 2410629 - RNA, 23 nt, Human
caccuaugucauuucauuuccua

SEQ ID NO: 2410630 - RNA, 21 nt, Human
caccuaugugccaacuguugu

SEQ ID NO: 2410631 - RNA, 13 nt, Human
caccuauuuccau

SEQ ID NO: 2410632 - RNA, 16 nt, Human
caccugccagggacag

SEQ ID NO: 2410633 - RNA, 14 nt, Human
caccugccagggac

SEQ ID NO: 2410634 - RNA, 23 nt, Human
caccucaaaauaccaugccauuu

SEQ ID NO: 2410635 - RNA, 13 nt, Human
caccugccaggga

SEQ ID NO: 2410636 - RNA, 21 nt, Human
caccucacagaaaugagauca

SEQ ID NO: 2410637 - RNA, 19 nt, Human
cacugaagaaaccuucaga

SEQ ID NO: 2410638 - RNA, 20 nt, Human
cacugaacuuugcugagccu

SEQ ID NO: 2410639 - RNA, 18 nt, Human
cacugaaaacaucuggaa

SEQ ID NO: 2410640 - RNA, 15 nt, Human
cacugaaaacaucug

SEQ ID NO: 2410641 - RNA, 16 nt, Human
cacugaaaacaucugg

SEQ ID NO: 2410642 - RNA, 16 nt, Human
cacugaaauauacaca

SEQ ID NO: 2410643 - RNA, 20 nt, Human
cacugaaauauacacacagc

SEQ ID NO: 2410644 - RNA, 17 nt, Human
cacucuuggagccugca

SEQ ID NO: 2410645 - RNA, 19 nt, Human
cacucuuggagccugcaga

SEQ ID NO: 2410646 - RNA, 23 nt, Human
cacugaaaaaucuaagugauaua

SEQ ID NO: 2410647 - RNA, 20 nt, Human
cacugaaaaaucuaagugau

SEQ ID NO: 2410648 - RNA, 22 nt, Human
cacuaggcccccacuugccucu

SEQ ID NO: 2410649 - RNA, 21 nt, Human
cacuaggcccccacuugccuc

SEQ ID NO: 2410650 - RNA, 13 nt, Human
cacucccacuucc

SEQ ID NO: 2410651 - RNA, 14 nt, Human
cacucccacuuccc

SEQ ID NO: 2410652 - RNA, 15 nt, Human
cacucccacuucccu

SEQ ID NO: 2410653 - RNA, 15 nt, Human
cacuccccaccuuca

SEQ ID NO: 2410654 - RNA, 13 nt, Human
cacucccagugcu

SEQ ID NO: 2410655 - RNA, 15 nt, Human
cacucccaggcagcc

SEQ ID NO: 2410656 - RNA, 14 nt, Human
cacucccaggcagc

SEQ ID NO: 2410657 - RNA, 13 nt, Human
cacucccaggcag

SEQ ID NO: 2410658 - RNA, 14 nt, Human
cacuccccaccuuc

SEQ ID NO: 2410659 - RNA, 15 nt, Human
cacuacugacaugug

SEQ ID NO: 2410660 - RNA, 13 nt, Human
cacuacucugugc

SEQ ID NO: 2410661 - RNA, 20 nt, Human
cacuacuccucugcagugcc

SEQ ID NO: 2410662 - RNA, 13 nt, Human
cacuacugacaug

SEQ ID NO: 2410663 - RNA, 14 nt, Human
cacuacucugugcc

SEQ ID NO: 2410664 - RNA, 23 nt, Human
cacuagcccaaugaaaugaauua

SEQ ID NO: 2410665 - RNA, 14 nt, Human
cacuagccucucca

SEQ ID NO: 2410666 - RNA, 16 nt, Human
cacuagccucuccagg

SEQ ID NO: 2410667 - RNA, 17 nt, Human
cacuagccucuccagga

SEQ ID NO: 2410668 - RNA, 22 nt, Human
cacuagccuuuggcucuggaga

SEQ ID NO: 2410669 - RNA, 21 nt, Human
cacuagccuuuggcucuggag

SEQ ID NO: 2410670 - RNA, 16 nt, Human
cacuaggacucugagg

SEQ ID NO: 2410671 - RNA, 20 nt, Human
cacuagccuuuggcucugga

SEQ ID NO: 2410672 - RNA, 18 nt, Human
cacuagccuuuggcucug

SEQ ID NO: 2410673 - RNA, 17 nt, Human
cacuagccuuuggcucu

SEQ ID NO: 2410674 - RNA, 21 nt, Human
cacuagccucuccaggaaugc

SEQ ID NO: 2410675 - RNA, 20 nt, Human
cacuaggcccccacuugccu

SEQ ID NO: 2410676 - RNA, 17 nt, Human
cacuaggcccccacuug

SEQ ID NO: 2410677 - RNA, 17 nt, Human
cacuaggacucugaggc

SEQ ID NO: 2410678 - RNA, 18 nt, Human
cacuaggacucugaggcu

SEQ ID NO: 2410679 - RNA, 19 nt, Human
cacucuuauugcccacgcu

SEQ ID NO: 2410680 - RNA, 18 nt, Human
cacucuuauugcccacgc

SEQ ID NO: 2410681 - RNA, 17 nt, Human
cacucuuauugcccacg

SEQ ID NO: 2410682 - RNA, 18 nt, Human
cacuccccgaagucuuuu

SEQ ID NO: 2410683 - RNA, 19 nt, Human
cacuccccgaagucuuuug

SEQ ID NO: 2410684 - RNA, 17 nt, Human
cacucuugaaaaaugca

SEQ ID NO: 2410685 - RNA, 11 nt, Human
cacucuuccag

SEQ ID NO: 2410686 - RNA, 11 nt, Human
cacucuuccaa

SEQ ID NO: 2410687 - RNA, 15 nt, Human
cacucuuggagccug

SEQ ID NO: 2410688 - RNA, 16 nt, Human
cacucuuggagccugc

SEQ ID NO: 2410689 - RNA, 14 nt, Human
cacucuuggagccu

SEQ ID NO: 2410690 - RNA, 14 nt, Human
cacucuuccugagu

SEQ ID NO: 2410691 - RNA, 21 nt, Human
cacucuuccagaaucccaaga

SEQ ID NO: 2410692 - RNA, 17 nt, Human
cacucuuccugcaagga

SEQ ID NO: 2410693 - RNA, 19 nt, Human
cacggagcccagcccuccc

SEQ ID NO: 2410694 - RNA, 20 nt, Human
cacggagggugacgggggug

SEQ ID NO: 2410695 - RNA, 23 nt, Human
cacggagucguggggugugcugg

SEQ ID NO: 2410696 - RNA, 21 nt, Human
cacggaggcaucugcacccuc

SEQ ID NO: 2410697 - RNA, 14 nt, Human
cacggaucugagaa

SEQ ID NO: 2410698 - RNA, 13 nt, Human
cacggaucugaga

SEQ ID NO: 2410699 - RNA, 20 nt, Human
cacggauccauguagcagga

SEQ ID NO: 2410700 - RNA, 23 nt, Human
cacggauccauguagcaggacug

SEQ ID NO: 2410701 - RNA, 16 nt, Human
cacggccaggccagag

SEQ ID NO: 2410702 - RNA, 15 nt, Human
cacggccaggccaga

SEQ ID NO: 2410703 - RNA, 18 nt, Human
cacggaucugagaaucuu

SEQ ID NO: 2410704 - RNA, 14 nt, Human
cacggccaggccag

SEQ ID NO: 2410705 - RNA, 17 nt, Human
cacuaccuccucaggga

SEQ ID NO: 2410706 - RNA, 16 nt, Human
cacuaccuccucaggg

SEQ ID NO: 2410707 - RNA, 15 nt, Human
cacuaccuccucagg

SEQ ID NO: 2410708 - RNA, 20 nt, Human
cacuaccuccucagggaugg

SEQ ID NO: 2410709 - RNA, 18 nt, Human
cacuaccuccucagggau

SEQ ID NO: 2410710 - RNA, 19 nt, Human
cacuacuccucugcagugc

SEQ ID NO: 2410711 - RNA, 18 nt, Human
cacuacuccucugcagug

SEQ ID NO: 2410712 - RNA, 15 nt, Human
cacuacuccucugca

SEQ ID NO: 2410713 - RNA, 14 nt, Human
cacuacuccucugc

SEQ ID NO: 2410714 - RNA, 17 nt, Human
cacuacucacagucucu

SEQ ID NO: 2410715 - RNA, 23 nt, Human
cacuacggaauaguuggcuagga

SEQ ID NO: 2410716 - RNA, 17 nt, Human
cacuaauuugauguuua

SEQ ID NO: 2410717 - RNA, 22 nt, Human
cacuaaguuauaguauaucugg

SEQ ID NO: 2410718 - RNA, 20 nt, Human
cacggcaggacaacgaggaa

SEQ ID NO: 2410719 - RNA, 15 nt, Human
cacuaauacaccagg

SEQ ID NO: 2410720 - RNA, 17 nt, Human
cagaaauguguuaucac

SEQ ID NO: 2410721 - RNA, 21 nt, Human
cagaaauuggaacagaauguu

SEQ ID NO: 2410722 - RNA, 20 nt, Human
cagaaauuggaacagaaugu

SEQ ID NO: 2410723 - RNA, 11 nt, Human
cagaaauugga

SEQ ID NO: 2410724 - RNA, 23 nt, Human
cagaaauuagaaaccuuaauaug

SEQ ID NO: 2410725 - RNA, 16 nt, Human
cagaaauuagccgggc

SEQ ID NO: 2410726 - RNA, 22 nt, Human
cagaagugugauugggaauaaa

SEQ ID NO: 2410727 - RNA, 13 nt, Human
cagaagugugauu

SEQ ID NO: 2410728 - RNA, 16 nt, Human
cagaaguggagcuggg

SEQ ID NO: 2410729 - RNA, 15 nt, Human
cagaaguggagcugg

SEQ ID NO: 2410730 - RNA, 11 nt, Human
cagaaguguga

SEQ ID NO: 2410731 - RNA, 14 nt, Human
cagaaguggagcug

SEQ ID NO: 2410732 - RNA, 13 nt, Human
cagaaguggagcu

SEQ ID NO: 2410733 - RNA, 21 nt, Human
cagaagugagcuuugcugcua

SEQ ID NO: 2410734 - RNA, 20 nt, Human
cagaagugagcuuugcugcu

SEQ ID NO: 2410735 - RNA, 22 nt, Human
cagaagugagcuuugcugcuac

SEQ ID NO: 2410736 - RNA, 18 nt, Human
cagaagugagcuuugcug

SEQ ID NO: 2410737 - RNA, 17 nt, Human
cagaagugagcuuugcu

SEQ ID NO: 2410738 - RNA, 14 nt, Human
cagaacagcagagg

SEQ ID NO: 2410739 - RNA, 19 nt, Human
cagaaauuuuuauuuuucu

SEQ ID NO: 2410740 - RNA, 18 nt, Human
cagaaauuuuuauuuuuc

SEQ ID NO: 2410741 - RNA, 21 nt, Human
cagaacaagguucccucugag

SEQ ID NO: 2410742 - RNA, 18 nt, Human
cagaacacacuccaucag

SEQ ID NO: 2410743 - RNA, 22 nt, Human
cagaaauuuaauucauguuucu

SEQ ID NO: 2410744 - RNA, 15 nt, Human
cagaaauuuuuauuu

SEQ ID NO: 2410745 - RNA, 14 nt, Human
cagaaauuuuuauu

SEQ ID NO: 2410746 - RNA, 23 nt, Human
cagaaauuuaauucauguuucuu

SEQ ID NO: 2410747 - RNA, 15 nt, Human
cagaacacauaauuc

SEQ ID NO: 2410748 - RNA, 15 nt, Human
cagaacacuaaccug

SEQ ID NO: 2410749 - RNA, 13 nt, Human
cagaacacuaacc

SEQ ID NO: 2410750 - RNA, 21 nt, Human
cagaacagcagagguucuuuu

SEQ ID NO: 2410751 - RNA, 18 nt, Human
cagaagucaugaagccca

SEQ ID NO: 2410752 - RNA, 19 nt, Human
cagaagucaugaagcccaa

SEQ ID NO: 2410753 - RNA, 21 nt, Human
cagaacacuaaccugaccgug

SEQ ID NO: 2410754 - RNA, 12 nt, Human
cagaacagcaga

SEQ ID NO: 2410755 - RNA, 11 nt, Human
cagaacacugu

SEQ ID NO: 2410756 - RNA, 21 nt, Human
cagaaguuucugccgcagccc

SEQ ID NO: 2410757 - RNA, 20 nt, Human
cagaaguuucugccgcagcc

SEQ ID NO: 2410758 - RNA, 22 nt, Human
cagaaguuucugccgcagcccu

SEQ ID NO: 2410759 - RNA, 19 nt, Human
cagaauaaagcaauuuucc

SEQ ID NO: 2410760 - RNA, 18 nt, Human
cagaauaaagcaauuuuc

SEQ ID NO: 2410761 - RNA, 17 nt, Human
cagaauaaagcaauuuu

SEQ ID NO: 2410762 - RNA, 16 nt, Human
cagaauaaagcaauuu

SEQ ID NO: 2410763 - RNA, 15 nt, Human
cagaauaaagcaauu

SEQ ID NO: 2410764 - RNA, 14 nt, Human
cagaauaaagcaau

SEQ ID NO: 2410765 - RNA, 13 nt, Human
cagaauaaagcaa

SEQ ID NO: 2410766 - RNA, 12 nt, Human
cagaauaaagca

SEQ ID NO: 2410767 - RNA, 21 nt, Human
cagaauaaacuggcagcucag

SEQ ID NO: 2410768 - RNA, 16 nt, Human
cagaaguuuggcaaua

SEQ ID NO: 2410769 - RNA, 11 nt, Human
cagaauaaagc

SEQ ID NO: 2410770 - RNA, 19 nt, Human
cagaaguuugucaagucaa

SEQ ID NO: 2410771 - RNA, 20 nt, Human
cagaauaaguuauugcaguu

SEQ ID NO: 2410772 - RNA, 19 nt, Human
cagaauaaguuauugcagu

SEQ ID NO: 2410773 - RNA, 18 nt, Human
cagaauaaguuauugcag

SEQ ID NO: 2410774 - RNA, 17 nt, Human
cagaauaaguuauugca

SEQ ID NO: 2410775 - RNA, 23 nt, Human
cagaauaaagcaauuuuccuuga

SEQ ID NO: 2410776 - RNA, 22 nt, Human
cagaauaaagcaauuuuccuug

SEQ ID NO: 2410777 - RNA, 21 nt, Human
cagaauaaagcaauuuuccuu

SEQ ID NO: 2410778 - RNA, 20 nt, Human
cagaauaaagcaauuuuccu

SEQ ID NO: 2410779 - RNA, 15 nt, Human
cagaauaaguuauug

SEQ ID NO: 2410780 - RNA, 22 nt, Human
cagaauaaaguucugaguguuu

SEQ ID NO: 2410781 - RNA, 13 nt, Human
cagaauauugcuu

SEQ ID NO: 2410782 - RNA, 22 nt, Human
cagaauauuagugaccucagcu

SEQ ID NO: 2410783 - RNA, 12 nt, Human
cagaauaucugg

SEQ ID NO: 2410784 - RNA, 16 nt, Human
cagaauacuuuucucu

SEQ ID NO: 2410785 - RNA, 21 nt, Human
cagaauagccacauuuggaau

SEQ ID NO: 2410786 - RNA, 22 nt, Human
cagaauagccacauuuggaaua

SEQ ID NO: 2410787 - RNA, 15 nt, Human
cagaauagccacauu

SEQ ID NO: 2410788 - RNA, 21 nt, Human
cagaauagcaaggugcucaca

SEQ ID NO: 2410789 - RNA, 23 nt, Human
cagaauaaguuauugcaguuuau

SEQ ID NO: 2410790 - RNA, 21 nt, Human
cagaauaaguuauugcaguuu

SEQ ID NO: 2410791 - RNA, 17 nt, Human
cagaauaaucuuugggu

SEQ ID NO: 2410792 - RNA, 22 nt, Human
cagaauacuguuaaaggaaaaa

SEQ ID NO: 2410793 - RNA, 14 nt, Human
cagaauaaugaaug

SEQ ID NO: 2410794 - RNA, 23 nt, Human
cagaauaaugaauggacucaaac

SEQ ID NO: 2410795 - RNA, 23 nt, Human
cagaauacaguaagcugcucuau

SEQ ID NO: 2410796 - RNA, 20 nt, Human
cacuuacuguuucugucagg

SEQ ID NO: 2410797 - RNA, 18 nt, Human
cacuuacuguuucuguca

SEQ ID NO: 2410798 - RNA, 16 nt, Human
cacuuacuguuucugu

SEQ ID NO: 2410799 - RNA, 15 nt, Human
cacuuacuguuucug

SEQ ID NO: 2410800 - RNA, 16 nt, Human
cacuuacuugcuuauu

SEQ ID NO: 2410801 - RNA, 17 nt, Human
cacuuacuuacccucac

SEQ ID NO: 2410802 - RNA, 19 nt, Human
cacuuagaaauugcauuuc

SEQ ID NO: 2410803 - RNA, 17 nt, Human
cacuuagaaauugcauu

SEQ ID NO: 2410804 - RNA, 15 nt, Human
cacuuacugguagga

SEQ ID NO: 2410805 - RNA, 21 nt, Human
cacuuacugguaggaccaagc

SEQ ID NO: 2410806 - RNA, 18 nt, Human
cacuuacuguuguccuau

SEQ ID NO: 2410807 - RNA, 22 nt, Human
cacuuaccuucaauaaaguauc

SEQ ID NO: 2410808 - RNA, 12 nt, Human
cacuguuucucu

SEQ ID NO: 2410809 - RNA, 14 nt, Human
cacuguuucucugc

SEQ ID NO: 2410810 - RNA, 18 nt, Human
cacuguuucucugcuguu

SEQ ID NO: 2410811 - RNA, 19 nt, Human
cacuguuucaaacuuuacu

SEQ ID NO: 2410812 - RNA, 11 nt, Human
cacuguuuaag

SEQ ID NO: 2410813 - RNA, 22 nt, Human
cacuggugacugcgaucuucag

SEQ ID NO: 2410814 - RNA, 17 nt, Human
cacuguuuacaagaaaa

SEQ ID NO: 2410815 - RNA, 18 nt, Human
cacuguuuacaagaaaaa

SEQ ID NO: 2410816 - RNA, 17 nt, Human
cacuguugcccaggcug

SEQ ID NO: 2410817 - RNA, 24 nt, Human
cacuugugccaacacucaagaagc

SEQ ID NO: 2410818 - RNA, 18 nt, Human
cacuugugccaacacuca

SEQ ID NO: 2410819 - RNA, 22 nt, Human
cacuugugcacccucuauccca

SEQ ID NO: 2410820 - RNA, 17 nt, Human
cacuugugauuauuuau

SEQ ID NO: 2410821 - RNA, 23 nt, Human
cacuuguccccaaauccgaaccu

SEQ ID NO: 2410822 - RNA, 12 nt, Human
cacuugucccca

SEQ ID NO: 2410823 - RNA, 20 nt, Human
cacuuguccccaaauccgaa

SEQ ID NO: 2410824 - RNA, 22 nt, Human
cacuugucccacuaucugggug

SEQ ID NO: 2410825 - RNA, 20 nt, Human
cacuugucccacuaucuggg

SEQ ID NO: 2410826 - RNA, 19 nt, Human
cacuugucccacuaucugg

SEQ ID NO: 2410827 - RNA, 17 nt, Human
cacuuggucugugagau

SEQ ID NO: 2410828 - RNA, 20 nt, Human
cacuuggucugugagaugcu

SEQ ID NO: 2410829 - RNA, 20 nt, Human
cacuuagaaauugcauuucc

SEQ ID NO: 2410830 - RNA, 20 nt, Human
cacuuggugauauguccuau

SEQ ID NO: 2410831 - RNA, 16 nt, Human
cacuugguuggguccu

SEQ ID NO: 2410832 - RNA, 19 nt, Human
cacuugguuggguccucac

SEQ ID NO: 2410833 - RNA, 23 nt, Human
cacuuguccagcugagcgccagg

SEQ ID NO: 2410834 - RNA, 12 nt, Human
cacuuguacaaa

SEQ ID NO: 2410835 - RNA, 20 nt, Human
cacuugguuggguccucaca

SEQ ID NO: 2410836 - RNA, 21 nt, Human
cacuugguuggguccucacau

SEQ ID NO: 2410837 - RNA, 23 nt, Human
cacuggggauugggccccugcca

SEQ ID NO: 2410838 - RNA, 14 nt, Human
cacuggggcacuug

SEQ ID NO: 2410839 - RNA, 22 nt, Human
cacuggggagcccgucucagug

SEQ ID NO: 2410840 - RNA, 17 nt, Human
cacuggugacaugucuu

SEQ ID NO: 2410841 - RNA, 16 nt, Human
cacuguugcccaggcu

SEQ ID NO: 2410842 - RNA, 15 nt, Human
cacuguugcccaggc

SEQ ID NO: 2410843 - RNA, 21 nt, Human
cacugguggcccgacagccug

SEQ ID NO: 2410844 - RNA, 13 nt, Human
cacugguggcccg

SEQ ID NO: 2410845 - RNA, 22 nt, Human
cacugguggcccgacagccugg

SEQ ID NO: 2410846 - RNA, 14 nt, Human
cacuguugcccagg

SEQ ID NO: 2410847 - RNA, 20 nt, Human
cacugggcuuggggaccaga

SEQ ID NO: 2410848 - RNA, 22 nt, Human
cacugggcuuggggaccagagc

SEQ ID NO: 2410849 - RNA, 15 nt, Human
cacuggggauugggc

SEQ ID NO: 2410850 - RNA, 16 nt, Human
cacuggggauugggcc

SEQ ID NO: 2410851 - RNA, 17 nt, Human
cacuggggauugggccc

SEQ ID NO: 2410852 - RNA, 18 nt, Human
cacuggggauugggcccc

SEQ ID NO: 2410853 - RNA, 23 nt, Human
cacugggcuuggggaccagagcu

SEQ ID NO: 2410854 - RNA, 21 nt, Human
cacuggggagcccgucucagu

SEQ ID NO: 2410855 - RNA, 21 nt, Human
cacuggggaaauaacagcugu

SEQ ID NO: 2410856 - RNA, 21 nt, Human
cacuuuaugccggaugugcuu

SEQ ID NO: 2410857 - RNA, 22 nt, Human
cacuugugccaacacucaagaa

SEQ ID NO: 2410858 - RNA, 22 nt, Human
cacuuuaugccggaugugcuuu

SEQ ID NO: 2410859 - RNA, 17 nt, Human
cacuuucacauagaugu

SEQ ID NO: 2410860 - RNA, 15 nt, Human
cacuuuccuccuggc

SEQ ID NO: 2410861 - RNA, 19 nt, Human
cacuuucagugaaagcauc

SEQ ID NO: 2410862 - RNA, 18 nt, Human
cacuuucagugaaagcau

SEQ ID NO: 2410863 - RNA, 17 nt, Human
cacuuucagugaaagca

SEQ ID NO: 2410864 - RNA, 21 nt, Human
cagcggggacagcuccuucug

SEQ ID NO: 2410865 - RNA, 12 nt, Human
cagcgccuuucc

SEQ ID NO: 2410866 - RNA, 18 nt, Human
cagcggggccccagggcu

SEQ ID NO: 2410867 - RNA, 19 nt, Human
cagcggggacagcuccuuc

SEQ ID NO: 2410868 - RNA, 18 nt, Human
cagcggggacagcuccuu

SEQ ID NO: 2410869 - RNA, 15 nt, Human
cagcgcccuuccucu

SEQ ID NO: 2410870 - RNA, 14 nt, Human
cagcgcccuuccuc

SEQ ID NO: 2410871 - RNA, 13 nt, Human
cagcgcccuuccu

SEQ ID NO: 2410872 - RNA, 12 nt, Human
cagcgcccuucc

SEQ ID NO: 2410873 - RNA, 19 nt, Human
cagcgcccgcugggcugag

SEQ ID NO: 2410874 - RNA, 17 nt, Human
cagcgcccgcugggcug

SEQ ID NO: 2410875 - RNA, 16 nt, Human
cagcgcccgcugggcu

SEQ ID NO: 2410876 - RNA, 18 nt, Human
cagcgcccuuccucucca

SEQ ID NO: 2410877 - RNA, 16 nt, Human
cagcgcccuuccucuc

SEQ ID NO: 2410878 - RNA, 20 nt, Human
cagcgcccuuccucuccacc

SEQ ID NO: 2410879 - RNA, 22 nt, Human
cagcgccuaguggggucucccu

SEQ ID NO: 2410880 - RNA, 23 nt, Human
cagcgccuaguggggucucccuc

SEQ ID NO: 2410881 - RNA, 20 nt, Human
cagcgccaggcugaccacag

SEQ ID NO: 2410882 - RNA, 21 nt, Human
cagcgccaggcugaccacagc

SEQ ID NO: 2410883 - RNA, 14 nt, Human
cagcgcccgcuggg

SEQ ID NO: 2410884 - RNA, 22 nt, Human
cagcgccaggcugaccacagca

SEQ ID NO: 2410885 - RNA, 18 nt, Human
cagcgccaggcugaccac

SEQ ID NO: 2410886 - RNA, 19 nt, Human
cagcgccaggcugaccaca

SEQ ID NO: 2410887 - RNA, 12 nt, Human
cagcgccaggcu

SEQ ID NO: 2410888 - RNA, 12 nt, Human
cagccugcucca

SEQ ID NO: 2410889 - RNA, 19 nt, Human
cagccugcuaauuccccag

SEQ ID NO: 2410890 - RNA, 21 nt, Human
cagccucugaccccuccucac

SEQ ID NO: 2410891 - RNA, 20 nt, Human
cagccucugaccccuccuca

SEQ ID NO: 2410892 - RNA, 19 nt, Human
cagccucugaccccuccuc

SEQ ID NO: 2410893 - RNA, 18 nt, Human
cagccucugaccccuccu

SEQ ID NO: 2410894 - RNA, 17 nt, Human
cagccucugaccccucc

SEQ ID NO: 2410895 - RNA, 16 nt, Human
cagccucugaccccuc

SEQ ID NO: 2410896 - RNA, 15 nt, Human
cagccucugaccccu

SEQ ID NO: 2410897 - RNA, 14 nt, Human
cagccucugacccc

SEQ ID NO: 2410898 - RNA, 13 nt, Human
cagccucuggcau

SEQ ID NO: 2410899 - RNA, 19 nt, Human
cagccucugagccccuggg

SEQ ID NO: 2410900 - RNA, 21 nt, Human
cagccucugagccccugggac

SEQ ID NO: 2410901 - RNA, 23 nt, Human
cagccucugaccccuccucacug

SEQ ID NO: 2410902 - RNA, 22 nt, Human
cagccucugaccccuccucacu

SEQ ID NO: 2410903 - RNA, 23 nt, Human
cagccucugacuuaagcugccuc

SEQ ID NO: 2410904 - RNA, 18 nt, Human
cagccucugagccccugg

SEQ ID NO: 2410905 - RNA, 17 nt, Human
cagccucugaaaaccaa

SEQ ID NO: 2410906 - RNA, 13 nt, Human
cagccgcugcccg

SEQ ID NO: 2410907 - RNA, 12 nt, Human
cagccgcugccc

SEQ ID NO: 2410908 - RNA, 20 nt, Human
cagccgcugagcgaggagau

SEQ ID NO: 2410909 - RNA, 15 nt, Human
cagccgcugcccggc

SEQ ID NO: 2410910 - RNA, 13 nt, Human
cagccucugaccc

SEQ ID NO: 2410911 - RNA, 21 nt, Human
cagccgcucggaggccccaaa

SEQ ID NO: 2410912 - RNA, 20 nt, Human
cagccgcucggaggccccaa

SEQ ID NO: 2410913 - RNA, 19 nt, Human
cagccgcucggaggcccca

SEQ ID NO: 2410914 - RNA, 23 nt, Human
cagccgcucggaggccccaaagg

SEQ ID NO: 2410915 - RNA, 19 nt, Human
cagccgcugagcgaggaga

SEQ ID NO: 2410916 - RNA, 20 nt, Human
cagccgcuccugucugccag

SEQ ID NO: 2410917 - RNA, 21 nt, Human
cagccgcuccugucugccagc

SEQ ID NO: 2410918 - RNA, 22 nt, Human
cagccgcuccugucugccagcc

SEQ ID NO: 2410919 - RNA, 23 nt, Human
cagccgcuccugucugccagcca

SEQ ID NO: 2410920 - RNA, 19 nt, Human
cagccgagauagccaaggc

SEQ ID NO: 2410921 - RNA, 20 nt, Human
cagcccuuugggaggcugag

SEQ ID NO: 2410922 - RNA, 23 nt, Human
cagcccuuugggaggcugaggcg

SEQ ID NO: 2410923 - RNA, 14 nt, Human
cagcccuuggccag

SEQ ID NO: 2410924 - RNA, 19 nt, Human
cagcccuuugggaggcuga

SEQ ID NO: 2410925 - RNA, 14 nt, Human
cagccgcuccuguc

SEQ ID NO: 2410926 - RNA, 16 nt, Human
cagccgcuccugucug

SEQ ID NO: 2410927 - RNA, 17 nt, Human
cagccgcuccugucugc

SEQ ID NO: 2410928 - RNA, 18 nt, Human
cagccgcuccugucugcc

SEQ ID NO: 2410929 - RNA, 19 nt, Human
cagccgcuccugucugcca

SEQ ID NO: 2410930 - RNA, 13 nt, Human
cagcccuuggcca

SEQ ID NO: 2410931 - RNA, 12 nt, Human
cagcccuuggcc

SEQ ID NO: 2410932 - RNA, 15 nt, Human
cagcccuugcuuguu

SEQ ID NO: 2410933 - RNA, 14 nt, Human
cagcccuugcuugu

SEQ ID NO: 2410934 - RNA, 13 nt, Human
cagcccuugcuug

SEQ ID NO: 2410935 - RNA, 12 nt, Human
cagcccuugcuu

SEQ ID NO: 2410936 - RNA, 11 nt, Human
cagcccuugcu

SEQ ID NO: 2410937 - RNA, 20 nt, Human
cagcccuugagcuccccaaa

SEQ ID NO: 2410938 - RNA, 16 nt, Human
caggaaaagcugcuga

SEQ ID NO: 2410939 - RNA, 15 nt, Human
caggaaaagcugcug

SEQ ID NO: 2410940 - RNA, 18 nt, Human
caggaaaagcugcugaca

SEQ ID NO: 2410941 - RNA, 19 nt, Human
caggaaaagccucuguguc

SEQ ID NO: 2410942 - RNA, 18 nt, Human
caggaaaagccucugugu

SEQ ID NO: 2410943 - RNA, 17 nt, Human
caggaaaagccucugug

SEQ ID NO: 2410944 - RNA, 23 nt, Human
caggaaaacugacagaggagggc

SEQ ID NO: 2410945 - RNA, 20 nt, Human
cagcucccaccccacccccu

SEQ ID NO: 2410946 - RNA, 17 nt, Human
cagcucccccugucccc

SEQ ID NO: 2410947 - RNA, 16 nt, Human
cagcucccccuguccc

SEQ ID NO: 2410948 - RNA, 15 nt, Human
cagcucccccugucc

SEQ ID NO: 2410949 - RNA, 14 nt, Human
cagcucccccuguc

SEQ ID NO: 2410950 - RNA, 13 nt, Human
cagcucccccugu

SEQ ID NO: 2410951 - RNA, 10 nt, Human
cagcuccccc

SEQ ID NO: 2410952 - RNA, 12 nt, Human
cagcucccccgg

SEQ ID NO: 2410953 - RNA, 22 nt, Human
cagcucccccgacggugggcau

SEQ ID NO: 2410954 - RNA, 24 nt, Human
cagcuccccagaguccucuaugaa

SEQ ID NO: 2410955 - RNA, 15 nt, Human
cagcuccccagaguc

SEQ ID NO: 2410956 - RNA, 13 nt, Human
cagcuccccagag

SEQ ID NO: 2410957 - RNA, 13 nt, Human
cagcuccccaaga

SEQ ID NO: 2410958 - RNA, 20 nt, Human
cagcucccauuucuacucuu

SEQ ID NO: 2410959 - RNA, 19 nt, Human
cagcucccauuucuacucu

SEQ ID NO: 2410960 - RNA, 17 nt, Human
cagcucccauuucuacu

SEQ ID NO: 2410961 - RNA, 14 nt, Human
cagcucccauuucu

SEQ ID NO: 2410962 - RNA, 23 nt, Human
cagcucccauaaccgcugauucu

SEQ ID NO: 2410963 - RNA, 22 nt, Human
cagcucccaccccacccccuuc

SEQ ID NO: 2410964 - RNA, 23 nt, Human
cagcucccaccccacccccuuca

SEQ ID NO: 2410965 - RNA, 21 nt, Human
cagcuccccucggagaagagc

SEQ ID NO: 2410966 - RNA, 22 nt, Human
cagcuccccucggagaagagcu

SEQ ID NO: 2410967 - RNA, 20 nt, Human
cagcucccuaggagaccaag

SEQ ID NO: 2410968 - RNA, 18 nt, Human
cagcucccuaggagacca

SEQ ID NO: 2410969 - RNA, 19 nt, Human
cagcucccuaggagaccaa

SEQ ID NO: 2410970 - RNA, 18 nt, Human
cagcucccccuguccccu

SEQ ID NO: 2410971 - RNA, 15 nt, Human
cagcucccuaggaga

SEQ ID NO: 2410972 - RNA, 19 nt, Human
cagcuccucauccagggcu

SEQ ID NO: 2410973 - RNA, 15 nt, Human
cagcuccucauccag

SEQ ID NO: 2410974 - RNA, 19 nt, Human
cagcuccuaacccuuauca

SEQ ID NO: 2410975 - RNA, 13 nt, Human
cagcuccuaaccc

SEQ ID NO: 2410976 - RNA, 21 nt, Human
cagcuccucccuuguucucua

SEQ ID NO: 2410977 - RNA, 20 nt, Human
cagcuccucauccagggcuc

SEQ ID NO: 2410978 - RNA, 14 nt, Human
cagcuccucccaca

SEQ ID NO: 2410979 - RNA, 16 nt, Human
cagcuccggccugucc

SEQ ID NO: 2410980 - RNA, 21 nt, Human
cagcuccggccuguccuccaa

SEQ ID NO: 2410981 - RNA, 15 nt, Human
cagcucccuucucug

SEQ ID NO: 2410982 - RNA, 14 nt, Human
cagcucccuucucu

SEQ ID NO: 2410983 - RNA, 14 nt, Human
cagcucccucugcc

SEQ ID NO: 2410984 - RNA, 15 nt, Human
cagcucccucugccu

SEQ ID NO: 2410985 - RNA, 16 nt, Human
cagcucccucugccug

SEQ ID NO: 2410986 - RNA, 20 nt, Human
cagcugugcucuggacaggc

SEQ ID NO: 2410987 - RNA, 19 nt, Human
cagcugugcucuggacagg

SEQ ID NO: 2410988 - RNA, 24 nt, Human
cagcugugcucuggacaggcaugu

SEQ ID NO: 2410989 - RNA, 19 nt, Human
cagcuguucagcugguuga

SEQ ID NO: 2410990 - RNA, 15 nt, Human
cagcuuaaaguaacc

SEQ ID NO: 2410991 - RNA, 21 nt, Human
cagcuguuuuaguuaaauuuc

SEQ ID NO: 2410992 - RNA, 21 nt, Human
cagcuguuuaaauguuuuucu

SEQ ID NO: 2410993 - RNA, 14 nt, Human
cagcuguuuaagau

SEQ ID NO: 2410994 - RNA, 14 nt, Human
cagcuguuugucau

SEQ ID NO: 2410995 - RNA, 20 nt, Human
cagcuguuuuaguuaaauuu

SEQ ID NO: 2410996 - RNA, 15 nt, Human
cagcuguuugucaua

SEQ ID NO: 2410997 - RNA, 20 nt, Human
cagcuguucugucccuugga

SEQ ID NO: 2410998 - RNA, 21 nt, Human
cagcuguuuaugcauagauaa

SEQ ID NO: 2410999 - RNA, 14 nt, Human
cagcugccugggau

SEQ ID NO: 2411000 - RNA, 13 nt, Human
cagcugccuggga

SEQ ID NO: 2411001 - RNA, 12 nt, Human
cagcugccuggg

SEQ ID NO: 2411002 - RNA, 12 nt, Human
cagcugccugca

SEQ ID NO: 2411003 - RNA, 15 nt, Human
cagcugauuuuaaca

SEQ ID NO: 2411004 - RNA, 17 nt, Human
cagcugauuuuaacaau

SEQ ID NO: 2411005 - RNA, 18 nt, Human
cagcugauguuggaagag

SEQ ID NO: 2411006 - RNA, 20 nt, Human
cagcugaugaguuacagccu

SEQ ID NO: 2411007 - RNA, 20 nt, Human
cagcugauguuggaagagaa

SEQ ID NO: 2411008 - RNA, 12 nt, Human
cagcugauuuua

SEQ ID NO: 2411009 - RNA, 14 nt, Human
cagcugaugaguua

SEQ ID NO: 2411010 - RNA, 23 nt, Human
cagcugauacaaauugcagacug

SEQ ID NO: 2411011 - RNA, 15 nt, Human
cagcugauacaaauu

SEQ ID NO: 2411012 - RNA, 19 nt, Human
cagcugagggugagugggu

SEQ ID NO: 2411013 - RNA, 19 nt, Human
cagcuccuccgugcuuccu

SEQ ID NO: 2411014 - RNA, 22 nt, Human
cagcuccucccuuguucucuaa

SEQ ID NO: 2411015 - RNA, 22 nt, Human
cagcuccuccgugcuuccucag

SEQ ID NO: 2411016 - RNA, 19 nt, Human
cagcugaggucucuugagg

SEQ ID NO: 2411017 - RNA, 20 nt, Human
cagcugaggucucuugaggg

SEQ ID NO: 2411018 - RNA, 19 nt, Human
cagauucuuuccugaggcu

SEQ ID NO: 2411019 - RNA, 18 nt, Human
cagauucuuuccugaggc

SEQ ID NO: 2411020 - RNA, 17 nt, Human
cagauucuuuccugagg

SEQ ID NO: 2411021 - RNA, 15 nt, Human
cagauucuuuccuga

SEQ ID NO: 2411022 - RNA, 19 nt, Human
cagauccccaagccuggca

SEQ ID NO: 2411023 - RNA, 15 nt, Human
cagauccccaagccu

SEQ ID NO: 2411024 - RNA, 13 nt, Human
cagauccucuugg

SEQ ID NO: 2411025 - RNA, 16 nt, Human
cagauccucacaacca

SEQ ID NO: 2411026 - RNA, 20 nt, Human
cagaucagcuccuaacccuu

SEQ ID NO: 2411027 - RNA, 16 nt, Human
cagaucaguguaccau

SEQ ID NO: 2411028 - RNA, 15 nt, Human
cagaucauccagaag

SEQ ID NO: 2411029 - RNA, 12 nt, Human
cagauccuggaa

SEQ ID NO: 2411030 - RNA, 14 nt, Human
cagauccucuuggu

SEQ ID NO: 2411031 - RNA, 23 nt, Human
cagaggggguggccucccaacuc

SEQ ID NO: 2411032 - RNA, 22 nt, Human
cagaggggguggccucccaacu

SEQ ID NO: 2411033 - RNA, 21 nt, Human
cagaaucaaagcaaugcauuu

SEQ ID NO: 2411034 - RNA, 20 nt, Human
cagaaucaaagcaaugcauu

SEQ ID NO: 2411035 - RNA, 15 nt, Human
cagaaucaaagcaau

SEQ ID NO: 2411036 - RNA, 13 nt, Human
cagaaucaaagca

SEQ ID NO: 2411037 - RNA, 15 nt, Human
cagaauaucugggau

SEQ ID NO: 2411038 - RNA, 19 nt, Human
cagaaucauaugauucugc

SEQ ID NO: 2411039 - RNA, 16 nt, Human
cagaaucauaugauuc

SEQ ID NO: 2411040 - RNA, 23 nt, Human
cagaaucaaagcaaugcauuuug

SEQ ID NO: 2411041 - RNA, 19 nt, Human
cagaauccaagugaacacu

SEQ ID NO: 2411042 - RNA, 19 nt, Human
cagagguaacagaacagcu

SEQ ID NO: 2411043 - RNA, 18 nt, Human
cagagguaacagaacagc

SEQ ID NO: 2411044 - RNA, 17 nt, Human
cagagguaacagaacag

SEQ ID NO: 2411045 - RNA, 16 nt, Human
cagagguaacagaaca

SEQ ID NO: 2411046 - RNA, 15 nt, Human
cagagguaacagaac

SEQ ID NO: 2411047 - RNA, 14 nt, Human
cagagguaacagaa

SEQ ID NO: 2411048 - RNA, 13 nt, Human
cagagguaacaga

SEQ ID NO: 2411049 - RNA, 21 nt, Human
cagagguaaaagugugagcag

SEQ ID NO: 2411050 - RNA, 20 nt, Human
cagagguaaaagugugagca

SEQ ID NO: 2411051 - RNA, 18 nt, Human
cagagguaaaagugugag

SEQ ID NO: 2411052 - RNA, 15 nt, Human
cagaauccuggcccu

SEQ ID NO: 2411053 - RNA, 21 nt, Human
cagaaucauaugauucugcuu

SEQ ID NO: 2411054 - RNA, 21 nt, Human
cagaauccuggcccucugugu

SEQ ID NO: 2411055 - RNA, 16 nt, Human
cagaauccuggcccuc

SEQ ID NO: 2411056 - RNA, 20 nt, Human
cagagggguaggcagagccu

SEQ ID NO: 2411057 - RNA, 15 nt, Human
cagagggguaggcag

SEQ ID NO: 2411058 - RNA, 21 nt, Human
cagagggguaggcagagccuu

SEQ ID NO: 2411059 - RNA, 23 nt, Human
cagagggguggguuccucuuccc

SEQ ID NO: 2411060 - RNA, 19 nt, Human
cagaucaagcugugagaca

SEQ ID NO: 2411061 - RNA, 17 nt, Human
cagaucaagcugugaga

SEQ ID NO: 2411062 - RNA, 18 nt, Human
cagaucaauggcgcagug

SEQ ID NO: 2411063 - RNA, 22 nt, Human
cagaucacagcuucagccagga

SEQ ID NO: 2411064 - RNA, 18 nt, Human
cagaucacagcuucagcc

SEQ ID NO: 2411065 - RNA, 16 nt, Human
cagaucacuacugcag

SEQ ID NO: 2411066 - RNA, 21 nt, Human
cagaucaccagcccggccugc

SEQ ID NO: 2411067 - RNA, 23 nt, Human
cagaucaauggcgcagugccucu

SEQ ID NO: 2411068 - RNA, 22 nt, Human
cagaucaccagcccggccugcu

SEQ ID NO: 2411069 - RNA, 13 nt, Human
cagaucacuacug

SEQ ID NO: 2411070 - RNA, 21 nt, Human
cagaguaauccaagcaaaugu

SEQ ID NO: 2411071 - RNA, 15 nt, Human
cagaucaagcuguga

SEQ ID NO: 2411072 - RNA, 20 nt, Human
cagauauuuuuucagaaaua

SEQ ID NO: 2411073 - RNA, 23 nt, Human
cagagguaacagaacagcuucag

SEQ ID NO: 2411074 - RNA, 17 nt, Human
cagagguugcagugugg

SEQ ID NO: 2411075 - RNA, 17 nt, Human
cagagguugcagugagc

SEQ ID NO: 2411076 - RNA, 16 nt, Human
cagagguugcagugag

SEQ ID NO: 2411077 - RNA, 15 nt, Human
cagagguccacaaca

SEQ ID NO: 2411078 - RNA, 20 nt, Human
cagagguccacaacacacag

SEQ ID NO: 2411079 - RNA, 22 nt, Human
cagagguaacagaacagcuuca

SEQ ID NO: 2411080 - RNA, 20 nt, Human
cagagguaacagaacagcuu

SEQ ID NO: 2411081 - RNA, 18 nt, Human
cagagguagggcugccac

SEQ ID NO: 2411082 - RNA, 21 nt, Human
cagcaguguuccccaucuggg

SEQ ID NO: 2411083 - RNA, 19 nt, Human
cagcaguguuccccaucug

SEQ ID NO: 2411084 - RNA, 17 nt, Human
cagcaguguuccccauc

SEQ ID NO: 2411085 - RNA, 14 nt, Human
cagcaguguucccc

SEQ ID NO: 2411086 - RNA, 23 nt, Human
cagcaguguuccccaucuggguc

SEQ ID NO: 2411087 - RNA, 22 nt, Human
cagcaguguuccccaucugggu

SEQ ID NO: 2411088 - RNA, 23 nt, Human
cagcaguugaaugacaacagaag

SEQ ID NO: 2411089 - RNA, 19 nt, Human
cagcagugugaggccaggg

SEQ ID NO: 2411090 - RNA, 20 nt, Human
cagcagugugaggccagggc

SEQ ID NO: 2411091 - RNA, 13 nt, Human
cagcaguguuccc

SEQ ID NO: 2411092 - RNA, 12 nt, Human
cagcaguguucc

SEQ ID NO: 2411093 - RNA, 22 nt, Human
cagcagugugaggccagggcag

SEQ ID NO: 2411094 - RNA, 16 nt, Human
cagcagugucaucaga

SEQ ID NO: 2411095 - RNA, 16 nt, Human
cagcagugcagccggg

SEQ ID NO: 2411096 - RNA, 17 nt, Human
cagcagugugaggccag

SEQ ID NO: 2411097 - RNA, 19 nt, Human
cagcagugagucucuucag

SEQ ID NO: 2411098 - RNA, 21 nt, Human
cagcagugagucucuucagaa

SEQ ID NO: 2411099 - RNA, 13 nt, Human
cagcauaauacuu

SEQ ID NO: 2411100 - RNA, 20 nt, Human
cagcaguuuucaagucaaau

SEQ ID NO: 2411101 - RNA, 17 nt, Human
cagcaguuugggagguc

SEQ ID NO: 2411102 - RNA, 18 nt, Human
cagcauaaaggccuuuuu

SEQ ID NO: 2411103 - RNA, 15 nt, Human
cagcauaaaggccuu

SEQ ID NO: 2411104 - RNA, 14 nt, Human
cagcauaaaggccu

SEQ ID NO: 2411105 - RNA, 19 nt, Human
cagcauaccuuuauuguga

SEQ ID NO: 2411106 - RNA, 16 nt, Human
cagcauaccugcuggu

SEQ ID NO: 2411107 - RNA, 22 nt, Human
cagcauaacaagguccaagaua

SEQ ID NO: 2411108 - RNA, 16 nt, Human
cagcacgauuucuguu

SEQ ID NO: 2411109 - RNA, 18 nt, Human
cagcacgauuucuguuua

SEQ ID NO: 2411110 - RNA, 19 nt, Human
cagcacgauuucuguuuag

SEQ ID NO: 2411111 - RNA, 20 nt, Human
cagcacgauuucuguuuaga

SEQ ID NO: 2411112 - RNA, 22 nt, Human
cagauucuuuccugaggcuggg

SEQ ID NO: 2411113 - RNA, 20 nt, Human
cagauucuuuccugaggcug

SEQ ID NO: 2411114 - RNA, 22 nt, Human
cagauugaguuuucuucuguga

SEQ ID NO: 2411115 - RNA, 12 nt, Human
cagauugaaaag

SEQ ID NO: 2411116 - RNA, 14 nt, Human
cagauugaaaagga

SEQ ID NO: 2411117 - RNA, 17 nt, Human
cagauugcaacaggcug

SEQ ID NO: 2411118 - RNA, 12 nt, Human
cagccagcucuc

SEQ ID NO: 2411119 - RNA, 15 nt, Human
cagccagcucucagc

SEQ ID NO: 2411120 - RNA, 16 nt, Human
cagccagcucucagcc

SEQ ID NO: 2411121 - RNA, 21 nt, Human
cagccagcucucagccaacga

SEQ ID NO: 2411122 - RNA, 17 nt, Human
cagccagcucucagcca

SEQ ID NO: 2411123 - RNA, 18 nt, Human
cagccagcucucagccaa

SEQ ID NO: 2411124 - RNA, 23 nt, Human
cagcaucauuuugcauucaaauu

SEQ ID NO: 2411125 - RNA, 22 nt, Human
cagcaucauuuugcauucaaau

SEQ ID NO: 2411126 - RNA, 18 nt, Human
cagcaucccuugaccagg

SEQ ID NO: 2411127 - RNA, 23 nt, Human
cagcaucccuugaccaggccugg

SEQ ID NO: 2411128 - RNA, 22 nt, Human
cagcaucccuugaccaggccug

SEQ ID NO: 2411129 - RNA, 19 nt, Human
cagcaucccuugaccaggc

SEQ ID NO: 2411130 - RNA, 20 nt, Human
cagcaucauuuugcauucaa

SEQ ID NO: 2411131 - RNA, 19 nt, Human
cagcaucauuuugcauuca

SEQ ID NO: 2411132 - RNA, 23 nt, Human
cagcaucaggguuaagaagacuu

SEQ ID NO: 2411133 - RNA, 13 nt, Human
cagcaucaggguu

SEQ ID NO: 2411134 - RNA, 20 nt, Human
cagcaucauggagguuugaa

SEQ ID NO: 2411135 - RNA, 16 nt, Human
cagccaggugccuugg

SEQ ID NO: 2411136 - RNA, 15 nt, Human
cagccaggugccuug

SEQ ID NO: 2411137 - RNA, 12 nt, Human
cagccagggcca

SEQ ID NO: 2411138 - RNA, 11 nt, Human
cagccagggcc

SEQ ID NO: 2411139 - RNA, 15 nt, Human
cagccagggccaggg

SEQ ID NO: 2411140 - RNA, 14 nt, Human
cagccaggugccuu

SEQ ID NO: 2411141 - RNA, 13 nt, Human
cagccaggugccu

SEQ ID NO: 2411142 - RNA, 16 nt, Human
cagccagggcugcuag

SEQ ID NO: 2411143 - RNA, 15 nt, Human
cagccagggcugcua

SEQ ID NO: 2411144 - RNA, 23 nt, Human
cagccagggcugcuagacggagg

SEQ ID NO: 2411145 - RNA, 12 nt, Human
cagccagggcug

SEQ ID NO: 2411146 - RNA, 13 nt, Human
cagccagggcugc

SEQ ID NO: 2411147 - RNA, 14 nt, Human
caggcacagcacag

SEQ ID NO: 2411148 - RNA, 16 nt, Human
caggcacagcacaggg

SEQ ID NO: 2411149 - RNA, 19 nt, Human
caggcacacgccaccucgc

SEQ ID NO: 2411150 - RNA, 15 nt, Human
caggcacacuucuuc

SEQ ID NO: 2411151 - RNA, 23 nt, Human
caggcacacacugugcuuucuau

SEQ ID NO: 2411152 - RNA, 15 nt, Human
caggcacacacugug

SEQ ID NO: 2411153 - RNA, 14 nt, Human
caggcacacacugu

SEQ ID NO: 2411154 - RNA, 14 nt, Human
caggcacaaaauga

SEQ ID NO: 2411155 - RNA, 19 nt, Human
caggcagacacggaucuga

SEQ ID NO: 2411156 - RNA, 16 nt, Human
caggcagacacggauc

SEQ ID NO: 2411157 - RNA, 14 nt, Human
caggcagacacgga

SEQ ID NO: 2411158 - RNA, 12 nt, Human
caggcagacacg

SEQ ID NO: 2411159 - RNA, 11 nt, Human
caggcagacac

SEQ ID NO: 2411160 - RNA, 10 nt, Human
caggcagaca

SEQ ID NO: 2411161 - RNA, 22 nt, Human
caggcagacacggaucugagaa

SEQ ID NO: 2411162 - RNA, 14 nt, Human
caggcagagaauca

SEQ ID NO: 2411163 - RNA, 15 nt, Human
caggcagagaaucau

SEQ ID NO: 2411164 - RNA, 23 nt, Human
caggcagagaaucauacuuagca

SEQ ID NO: 2411165 - RNA, 15 nt, Human
caggccagagggagu

SEQ ID NO: 2411166 - RNA, 13 nt, Human
caggccagaggga

SEQ ID NO: 2411167 - RNA, 18 nt, Human
caggcagauacaggaaaa

SEQ ID NO: 2411168 - RNA, 13 nt, Human
caggcagauccag

SEQ ID NO: 2411169 - RNA, 15 nt, Human
caggccacuugauga

SEQ ID NO: 2411170 - RNA, 23 nt, Human
caggccagcugcuugggcuucau

SEQ ID NO: 2411171 - RNA, 21 nt, Human
caggccagcugcuugggcuuc

SEQ ID NO: 2411172 - RNA, 19 nt, Human
caggccagcugcuugggcu

SEQ ID NO: 2411173 - RNA, 17 nt, Human
caggccagcugcuuggg

SEQ ID NO: 2411174 - RNA, 18 nt, Human
caggccaggcccucugcc

SEQ ID NO: 2411175 - RNA, 17 nt, Human
caggccaggcccucugc

SEQ ID NO: 2411176 - RNA, 19 nt, Human
caggccaggcccucugccc

SEQ ID NO: 2411177 - RNA, 20 nt, Human
caggccaggcccucugccca

SEQ ID NO: 2411178 - RNA, 16 nt, Human
caggccagagggagug

SEQ ID NO: 2411179 - RNA, 17 nt, Human
caggccacggcagccua

SEQ ID NO: 2411180 - RNA, 16 nt, Human
caggcuggcuccagau

SEQ ID NO: 2411181 - RNA, 20 nt, Human
caggcuggcuccagaugcag

SEQ ID NO: 2411182 - RNA, 17 nt, Human
caggcuggcuccagaug

SEQ ID NO: 2411183 - RNA, 18 nt, Human
caggcuggcuccagaugc

SEQ ID NO: 2411184 - RNA, 14 nt, Human
caggcugggagagc

SEQ ID NO: 2411185 - RNA, 12 nt, Human
caggcugggaga

SEQ ID NO: 2411186 - RNA, 15 nt, Human
caggcugggagagcc

SEQ ID NO: 2411187 - RNA, 20 nt, Human
caggcugggcuucaguggca

SEQ ID NO: 2411188 - RNA, 22 nt, Human
caggcugggcuucaguggcagc

SEQ ID NO: 2411189 - RNA, 21 nt, Human
caggcugggcuucaguggcag

SEQ ID NO: 2411190 - RNA, 16 nt, Human
cagggagccuccugcc

SEQ ID NO: 2411191 - RNA, 15 nt, Human
cagggagccuccugc

SEQ ID NO: 2411192 - RNA, 22 nt, Human
cagggagccuuugguucuggcc

SEQ ID NO: 2411193 - RNA, 18 nt, Human
cagggagccuccugccca

SEQ ID NO: 2411194 - RNA, 13 nt, Human
cagggagcggaaa

SEQ ID NO: 2411195 - RNA, 16 nt, Human
cagggagcggaaagca

SEQ ID NO: 2411196 - RNA, 17 nt, Human
cagggagcggaaagcag

SEQ ID NO: 2411197 - RNA, 14 nt, Human
cagggagccuccug

SEQ ID NO: 2411198 - RNA, 13 nt, Human
cagggagccuccu

SEQ ID NO: 2411199 - RNA, 12 nt, Human
cagggagccucc

SEQ ID NO: 2411200 - RNA, 20 nt, Human
cagggagcauuuuccuccau

SEQ ID NO: 2411201 - RNA, 13 nt, Human
cagggcucaggau

SEQ ID NO: 2411202 - RNA, 12 nt, Human
cagggcucagga

SEQ ID NO: 2411203 - RNA, 21 nt, Human
cagggcucugccccagaggcc

SEQ ID NO: 2411204 - RNA, 16 nt, Human
cagggcugaggccucu

SEQ ID NO: 2411205 - RNA, 18 nt, Human
cagggcugcuagacggag

SEQ ID NO: 2411206 - RNA, 14 nt, Human
cagggcugcuagac

SEQ ID NO: 2411207 - RNA, 15 nt, Human
cagggcuggacugag

SEQ ID NO: 2411208 - RNA, 14 nt, Human
cagggcuggacuga

SEQ ID NO: 2411209 - RNA, 18 nt, Human
cagggcugaggccucuca

SEQ ID NO: 2411210 - RNA, 21 nt, Human
cagggcugacacguccacccc

SEQ ID NO: 2411211 - RNA, 18 nt, Human
caggggaaagaugagcuu

SEQ ID NO: 2411212 - RNA, 16 nt, Human
caggggaaaaugaagg

SEQ ID NO: 2411213 - RNA, 23 nt, Human
caggggaaagaugagcuuuucua

SEQ ID NO: 2411214 - RNA, 14 nt, Human
caggggaaaaugaa

SEQ ID NO: 2411215 - RNA, 18 nt, Human
cagggcuggacugaggcc

SEQ ID NO: 2411216 - RNA, 20 nt, Human
caggggaaaaucagccugcu

SEQ ID NO: 2411217 - RNA, 17 nt, Human
cagggcuggacugaggc

SEQ ID NO: 2411218 - RNA, 16 nt, Human
cagggcuggacugagg

SEQ ID NO: 2411219 - RNA, 19 nt, Human
caggggaaaaucagccugc

SEQ ID NO: 2411220 - RNA, 23 nt, Human
cagggcucagcggggacagcucc

SEQ ID NO: 2411221 - RNA, 21 nt, Human
cagggcucagcggggacagcu

SEQ ID NO: 2411222 - RNA, 13 nt, Human
cagggaugcccug

SEQ ID NO: 2411223 - RNA, 14 nt, Human
cagggaugcccugg

SEQ ID NO: 2411224 - RNA, 16 nt, Human
cagggaugcccuggag

SEQ ID NO: 2411225 - RNA, 20 nt, Human
cagggaugcccuggaggugg

SEQ ID NO: 2411226 - RNA, 21 nt, Human
cagggaugcccuggagguggc

SEQ ID NO: 2411227 - RNA, 22 nt, Human
cagggaugcccuggagguggcu

SEQ ID NO: 2411228 - RNA, 19 nt, Human
cagggauggccguuggcca

SEQ ID NO: 2411229 - RNA, 23 nt, Human
cagggaugcccuggagguggcug

SEQ ID NO: 2411230 - RNA, 16 nt, Human
cagggaugguguucaa

SEQ ID NO: 2411231 - RNA, 20 nt, Human
cagggauggccguuggccac

SEQ ID NO: 2411232 - RNA, 17 nt, Human
cagggagcggccggcca

SEQ ID NO: 2411233 - RNA, 19 nt, Human
cagggagcggccggccagc

SEQ ID NO: 2411234 - RNA, 15 nt, Human
cagggagcggccggc

SEQ ID NO: 2411235 - RNA, 18 nt, Human
cagggagcggaaagcagc

SEQ ID NO: 2411236 - RNA, 19 nt, Human
cagggagcggaaagcagcu

SEQ ID NO: 2411237 - RNA, 21 nt, Human
cagggagcggccggccagccc

SEQ ID NO: 2411238 - RNA, 23 nt, Human
cagggagcggccggccagccccu

SEQ ID NO: 2411239 - RNA, 22 nt, Human
cagggagcggaaagcagcucaa

SEQ ID NO: 2411240 - RNA, 21 nt, Human
cagggaugagcauggagcugg

SEQ ID NO: 2411241 - RNA, 20 nt, Human
cagggaugagcauggagcug

SEQ ID NO: 2411242 - RNA, 19 nt, Human
cagggaugagcauggagcu

SEQ ID NO: 2411243 - RNA, 16 nt, Human
cagggaugagcaugga

SEQ ID NO: 2411244 - RNA, 23 nt, Human
cagggaugagcauggagcuggcc

SEQ ID NO: 2411245 - RNA, 22 nt, Human
cagggaugagcauggagcuggc

SEQ ID NO: 2411246 - RNA, 23 nt, Human
cagggaugccaucugugggcacg

SEQ ID NO: 2411247 - RNA, 12 nt, Human
cagggaugagca

SEQ ID NO: 2411248 - RNA, 19 nt, Human
cagggaucuugcauuccca

SEQ ID NO: 2411249 - RNA, 17 nt, Human
cagggaucuugcauucc

SEQ ID NO: 2411250 - RNA, 20 nt, Human
cagggcucugccccagaggc

SEQ ID NO: 2411251 - RNA, 12 nt, Human
cagugcaucuca

SEQ ID NO: 2411252 - RNA, 17 nt, Human
cagucuggaaugcagug

SEQ ID NO: 2411253 - RNA, 15 nt, Human
cagucuggaaugcag

SEQ ID NO: 2411254 - RNA, 18 nt, Human
cagucugcugcccuccau

SEQ ID NO: 2411255 - RNA, 21 nt, Human
cagucugcugcccuccauccc

SEQ ID NO: 2411256 - RNA, 22 nt, Human
cagucugcugcccuccaucccg

SEQ ID NO: 2411257 - RNA, 14 nt, Human
cagugcaugcuguc

SEQ ID NO: 2411258 - RNA, 13 nt, Human
cagugcaugcugu

SEQ ID NO: 2411259 - RNA, 18 nt, Human
cagugcaucucagcccac

SEQ ID NO: 2411260 - RNA, 17 nt, Human
cagugcaucucagccca

SEQ ID NO: 2411261 - RNA, 16 nt, Human
cagugcaucucagccc

SEQ ID NO: 2411262 - RNA, 15 nt, Human
cagugcaucucagcc

SEQ ID NO: 2411263 - RNA, 20 nt, Human
cagucucugagggcuuccuu

SEQ ID NO: 2411264 - RNA, 12 nt, Human
cagucucugagc

SEQ ID NO: 2411265 - RNA, 14 nt, Human
cagucucugagcag

SEQ ID NO: 2411266 - RNA, 16 nt, Human
cagucucugagggcuu

SEQ ID NO: 2411267 - RNA, 15 nt, Human
cagucucugagggcu

SEQ ID NO: 2411268 - RNA, 15 nt, Human
cagucucuuuaaucu

SEQ ID NO: 2411269 - RNA, 19 nt, Human
cagucucuuuaaucuucag

SEQ ID NO: 2411270 - RNA, 20 nt, Human
cagucucuuuaaucuucagu

SEQ ID NO: 2411271 - RNA, 22 nt, Human
cagucucuuuaaucuucaguuu

SEQ ID NO: 2411272 - RNA, 20 nt, Human
cagucugacuguuuccauca

SEQ ID NO: 2411273 - RNA, 13 nt, Human
cagucugcugccc

SEQ ID NO: 2411274 - RNA, 12 nt, Human
cagucugacccu

SEQ ID NO: 2411275 - RNA, 14 nt, Human
cagucugcugcccu

SEQ ID NO: 2411276 - RNA, 15 nt, Human
cagucugcugcccuc

SEQ ID NO: 2411277 - RNA, 18 nt, Human
cagugcauauuccuuucu

SEQ ID NO: 2411278 - RNA, 14 nt, Human
cagugcauauuccu

SEQ ID NO: 2411279 - RNA, 12 nt, Human
cagugggaggcg

SEQ ID NO: 2411280 - RNA, 23 nt, Human
cagugggagcugccuguucagcu

SEQ ID NO: 2411281 - RNA, 20 nt, Human
cagugggagcugccuguuca

SEQ ID NO: 2411282 - RNA, 17 nt, Human
cagugcccacaggauca

SEQ ID NO: 2411283 - RNA, 17 nt, Human
cagugcaugcugucccu

SEQ ID NO: 2411284 - RNA, 16 nt, Human
cagugcaugcuguccc

SEQ ID NO: 2411285 - RNA, 15 nt, Human
cagugcccacaggau

SEQ ID NO: 2411286 - RNA, 13 nt, Human
cagugcccacagg

SEQ ID NO: 2411287 - RNA, 18 nt, Human
cagugggaggggcaggcu

SEQ ID NO: 2411288 - RNA, 17 nt, Human
cagugggaggggcaggc

SEQ ID NO: 2411289 - RNA, 16 nt, Human
cagugggaggggcagg

SEQ ID NO: 2411290 - RNA, 15 nt, Human
cagugggaggggcag

SEQ ID NO: 2411291 - RNA, 14 nt, Human
cagugggaggggca

SEQ ID NO: 2411292 - RNA, 12 nt, Human
cagugggagggg

SEQ ID NO: 2411293 - RNA, 11 nt, Human
cagugggaggg

SEQ ID NO: 2411294 - RNA, 13 nt, Human
cagugggaggcgc

SEQ ID NO: 2411295 - RNA, 20 nt, Human
cagugggaggggcaggcuga

SEQ ID NO: 2411296 - RNA, 19 nt, Human
cagugggaggggcaggcug

SEQ ID NO: 2411297 - RNA, 21 nt, Human
cagugggaggggcaggcugac

SEQ ID NO: 2411298 - RNA, 14 nt, Human
cagugggccuggcc

SEQ ID NO: 2411299 - RNA, 15 nt, Human
cagugggccuggcca

SEQ ID NO: 2411300 - RNA, 21 nt, Human
cagugggccuggccagcaggu

SEQ ID NO: 2411301 - RNA, 18 nt, Human
caguggugguuuucuguu

SEQ ID NO: 2411302 - RNA, 21 nt, Human
caguggugcgaucuggguuca

SEQ ID NO: 2411303 - RNA, 20 nt, Human
caguggggaggggcuguggg

SEQ ID NO: 2411304 - RNA, 15 nt, Human
caguggggcagucau

SEQ ID NO: 2411305 - RNA, 20 nt, Human
caguggugcgaucuggguuc

SEQ ID NO: 2411306 - RNA, 23 nt, Human
cagucacguggaggagcagugca

SEQ ID NO: 2411307 - RNA, 18 nt, Human
cagucacguggaggagca

SEQ ID NO: 2411308 - RNA, 16 nt, Human
cagucaccucauggaa

SEQ ID NO: 2411309 - RNA, 15 nt, Human
cagucacauuccaag

SEQ ID NO: 2411310 - RNA, 19 nt, Human
cagucaccucauggaauug

SEQ ID NO: 2411311 - RNA, 12 nt, Human
cagucaccccag

SEQ ID NO: 2411312 - RNA, 17 nt, Human
cagucaccccaggacuc

SEQ ID NO: 2411313 - RNA, 17 nt, Human
cagucaccugcccagau

SEQ ID NO: 2411314 - RNA, 16 nt, Human
caguaaauaaauuguu

SEQ ID NO: 2411315 - RNA, 15 nt, Human
caguaaauaaauugu

SEQ ID NO: 2411316 - RNA, 14 nt, Human
caguaaauaaauug

SEQ ID NO: 2411317 - RNA, 14 nt, Human
caguaaacuuuuaa

SEQ ID NO: 2411318 - RNA, 15 nt, Human
caguaaagcacuugc

SEQ ID NO: 2411319 - RNA, 12 nt, Human
cagucacagcca

SEQ ID NO: 2411320 - RNA, 13 nt, Human
cagucacagccac

SEQ ID NO: 2411321 - RNA, 14 nt, Human
cagucacagccacc

SEQ ID NO: 2411322 - RNA, 16 nt, Human
cagucacagccacccc

SEQ ID NO: 2411323 - RNA, 15 nt, Human
cagucaauauuuuua

SEQ ID NO: 2411324 - RNA, 17 nt, Human
cagucaaggaguggcuu

SEQ ID NO: 2411325 - RNA, 17 nt, Human
caguaaauaaauuguuu

SEQ ID NO: 2411326 - RNA, 19 nt, Human
caggugccaguuauggcua

SEQ ID NO: 2411327 - RNA, 21 nt, Human
caggugcacaagcuccaagcu

SEQ ID NO: 2411328 - RNA, 22 nt, Human
caggugcccagcuauaccugug

SEQ ID NO: 2411329 - RNA, 15 nt, Human
caggugcaguggcuc

SEQ ID NO: 2411330 - RNA, 22 nt, Human
caggugcacaagcuccaagcuc

SEQ ID NO: 2411331 - RNA, 20 nt, Human
caggugcccaucccuggaag

SEQ ID NO: 2411332 - RNA, 17 nt, Human
caggugcccaucccugg

SEQ ID NO: 2411333 - RNA, 23 nt, Human
caggugcccagcuauaccugugc

SEQ ID NO: 2411334 - RNA, 11 nt, Human
caggugccucc

SEQ ID NO: 2411335 - RNA, 23 nt, Human
cagguugucugaagucacugcac

SEQ ID NO: 2411336 - RNA, 14 nt, Human
caggugccuuggag

SEQ ID NO: 2411337 - RNA, 18 nt, Human
cagguuguaguaaagaaa

SEQ ID NO: 2411338 - RNA, 13 nt, Human
caggugccuugga

SEQ ID NO: 2411339 - RNA, 15 nt, Human
caggugccuggacau

SEQ ID NO: 2411340 - RNA, 12 nt, Human
caggugccugga

SEQ ID NO: 2411341 - RNA, 21 nt, Human
caggugccuccaggugugcac

SEQ ID NO: 2411342 - RNA, 22 nt, Human
cagguugucugaagucacugca

SEQ ID NO: 2411343 - RNA, 19 nt, Human
caggugccuccaggugugc

SEQ ID NO: 2411344 - RNA, 18 nt, Human
caggugccuccaggugug

SEQ ID NO: 2411345 - RNA, 17 nt, Human
caggugccuccaggugu

SEQ ID NO: 2411346 - RNA, 16 nt, Human
caggugccuccaggug

SEQ ID NO: 2411347 - RNA, 15 nt, Human
caggugccuccaggu

SEQ ID NO: 2411348 - RNA, 14 nt, Human
caggugccuccagg

SEQ ID NO: 2411349 - RNA, 13 nt, Human
caggugccuccag

SEQ ID NO: 2411350 - RNA, 12 nt, Human
caggugccucca

SEQ ID NO: 2411351 - RNA, 21 nt, Human
cagguuggugggggccucggu

SEQ ID NO: 2411352 - RNA, 23 nt, Human
caguaaagaacaucccuccuggg

SEQ ID NO: 2411353 - RNA, 10 nt, Human
caguaaacau

SEQ ID NO: 2411354 - RNA, 16 nt, Human
caguaaacagaggagu

SEQ ID NO: 2411355 - RNA, 18 nt, Human
caguaaaauugccauauu

SEQ ID NO: 2411356 - RNA, 16 nt, Human
cagguuuuucaauuaa

SEQ ID NO: 2411357 - RNA, 15 nt, Human
cagguuuuucaauua

SEQ ID NO: 2411358 - RNA, 14 nt, Human
cagguuuuucaauu

SEQ ID NO: 2411359 - RNA, 21 nt, Human
caguaaaauugccauauugca

SEQ ID NO: 2411360 - RNA, 20 nt, Human
caguaaaauugccauauugc

SEQ ID NO: 2411361 - RNA, 12 nt, Human
cagguuuuucaa

SEQ ID NO: 2411362 - RNA, 13 nt, Human
cagguuuuucaau

SEQ ID NO: 2411363 - RNA, 15 nt, Human
cagguuuuguaaaga

SEQ ID NO: 2411364 - RNA, 12 nt, Human
cagguuuuccug

SEQ ID NO: 2411365 - RNA, 14 nt, Human
cagguuuaagcugu

SEQ ID NO: 2411366 - RNA, 16 nt, Human
cagguuuuccugaaga

SEQ ID NO: 2411367 - RNA, 19 nt, Human
cagguuuucugggugucca

SEQ ID NO: 2411368 - RNA, 14 nt, Human
cagguuuguuacau

SEQ ID NO: 2411369 - RNA, 13 nt, Human
cagguuuguuaca

SEQ ID NO: 2411370 - RNA, 19 nt, Human
cagguuguaguaaagaaau

SEQ ID NO: 2411371 - RNA, 21 nt, Human
caggugauccacccaccucag

SEQ ID NO: 2411372 - RNA, 20 nt, Human
caggugcacaagcuccaagc

SEQ ID NO: 2411373 - RNA, 19 nt, Human
caggugcacaagcuccaag

SEQ ID NO: 2411374 - RNA, 18 nt, Human
caggugcacaagcuccaa

SEQ ID NO: 2411375 - RNA, 17 nt, Human
caggugcacaagcucca

SEQ ID NO: 2411376 - RNA, 23 nt, Human
caggugauccacccaccucagcc

SEQ ID NO: 2411377 - RNA, 22 nt, Human
caggugauccacccaccucagc

SEQ ID NO: 2411378 - RNA, 15 nt, Human
caggugcacaagcuc

SEQ ID NO: 2411379 - RNA, 17 nt, Human
cauguuacugaccagca

SEQ ID NO: 2411380 - RNA, 14 nt, Human
cauguuaggaaaau

SEQ ID NO: 2411381 - RNA, 18 nt, Human
cauguuaggaaaauuuca

SEQ ID NO: 2411382 - RNA, 19 nt, Human
cauguuaggaaaauuucac

SEQ ID NO: 2411383 - RNA, 14 nt, Human
cauguccuguaaag

SEQ ID NO: 2411384 - RNA, 15 nt, Human
cauguccuguaaagg

SEQ ID NO: 2411385 - RNA, 23 nt, Human
caugucccuaccgagucucuucu

SEQ ID NO: 2411386 - RNA, 17 nt, Human
caugucccuacaccccu

SEQ ID NO: 2411387 - RNA, 18 nt, Human
cauguauuuguuugcaua

SEQ ID NO: 2411388 - RNA, 19 nt, Human
caugucaaacgugaaaaug

SEQ ID NO: 2411389 - RNA, 14 nt, Human
caugucaaacguga

SEQ ID NO: 2411390 - RNA, 21 nt, Human
cauguccccaaaccugcaagg

SEQ ID NO: 2411391 - RNA, 22 nt, Human
caugucccuaccgagucucuuc

SEQ ID NO: 2411392 - RNA, 16 nt, Human
caugucccuaccgagu

SEQ ID NO: 2411393 - RNA, 15 nt, Human
cauguuggccaggcu

SEQ ID NO: 2411394 - RNA, 14 nt, Human
cauguuggccaggc

SEQ ID NO: 2411395 - RNA, 22 nt, Human
cauguuauauauuuuuuguagg

SEQ ID NO: 2411396 - RNA, 14 nt, Human
cauguuauauauuu

SEQ ID NO: 2411397 - RNA, 13 nt, Human
cauguuauauauu

SEQ ID NO: 2411398 - RNA, 21 nt, Human
cauguugggaaacuuggcucg

SEQ ID NO: 2411399 - RNA, 20 nt, Human
cauguugggaaacuuggcuc

SEQ ID NO: 2411400 - RNA, 19 nt, Human
cauguugggaaacuuggcu

SEQ ID NO: 2411401 - RNA, 15 nt, Human
cauguugggaaacuu

SEQ ID NO: 2411402 - RNA, 22 nt, Human
cauguuggucaaaagcuggauu

SEQ ID NO: 2411403 - RNA, 20 nt, Human
cauguuauauauuuuuugua

SEQ ID NO: 2411404 - RNA, 16 nt, Human
cauguuggccaggcug

SEQ ID NO: 2411405 - RNA, 20 nt, Human
cauguauuuaucucuauuua

SEQ ID NO: 2411406 - RNA, 23 nt, Human
cauguauuuaucucuauuuaaua

SEQ ID NO: 2411407 - RNA, 15 nt, Human
cauguauuuaucucu

SEQ ID NO: 2411408 - RNA, 23 nt, Human
cauguauugugucuuuugcauga

SEQ ID NO: 2411409 - RNA, 21 nt, Human
cauguauugugucuuuugcau

SEQ ID NO: 2411410 - RNA, 20 nt, Human
cauguauugugucuuuugca

SEQ ID NO: 2411411 - RNA, 15 nt, Human
cauguauugugucuu

SEQ ID NO: 2411412 - RNA, 14 nt, Human
cauguauugugucu

SEQ ID NO: 2411413 - RNA, 15 nt, Human
cauguagcugaguuu

SEQ ID NO: 2411414 - RNA, 19 nt, Human
cauguauuggccuggaggu

SEQ ID NO: 2411415 - RNA, 14 nt, Human
cauguagcugaguu

SEQ ID NO: 2411416 - RNA, 15 nt, Human
cauguagaagcugca

SEQ ID NO: 2411417 - RNA, 18 nt, Human
cauguaggaaguaggaag

SEQ ID NO: 2411418 - RNA, 18 nt, Human
cauguagcccccuggccu

SEQ ID NO: 2411419 - RNA, 20 nt, Human
cauguagcccccuggccucu

SEQ ID NO: 2411420 - RNA, 21 nt, Human
cauguagcccccuggccucug

SEQ ID NO: 2411421 - RNA, 22 nt, Human
cauguagcccccuggccucugu

SEQ ID NO: 2411422 - RNA, 13 nt, Human
cauguagcccccu

SEQ ID NO: 2411423 - RNA, 17 nt, Human
cauguagcccccuggcc

SEQ ID NO: 2411424 - RNA, 14 nt, Human
cauguagcaggacu

SEQ ID NO: 2411425 - RNA, 20 nt, Human
cauguagcaggacugaauug

SEQ ID NO: 2411426 - RNA, 20 nt, Human
cauguagaaaauuuguuauu

SEQ ID NO: 2411427 - RNA, 19 nt, Human
cauguagaagcugcaucuu

SEQ ID NO: 2411428 - RNA, 13 nt, Human
cauguagaagcug

SEQ ID NO: 2411429 - RNA, 17 nt, Human
cauuauagaucccccag

SEQ ID NO: 2411430 - RNA, 20 nt, Human
cauuauaacugaaggagaag

SEQ ID NO: 2411431 - RNA, 18 nt, Human
cauuauaacugaaggaga

SEQ ID NO: 2411432 - RNA, 13 nt, Human
cauuauaaacgug

SEQ ID NO: 2411433 - RNA, 19 nt, Human
cauguuuacuuuucagggc

SEQ ID NO: 2411434 - RNA, 21 nt, Human
cauguuuacuuuucagggcau

SEQ ID NO: 2411435 - RNA, 16 nt, Human
cauucgguguggugca

SEQ ID NO: 2411436 - RNA, 14 nt, Human
cauucguucugugg

SEQ ID NO: 2411437 - RNA, 16 nt, Human
cauucuacacagagca

SEQ ID NO: 2411438 - RNA, 22 nt, Human
cauucuacacagagcaggacug

SEQ ID NO: 2411439 - RNA, 19 nt, Human
cauucuacacagagcagga

SEQ ID NO: 2411440 - RNA, 17 nt, Human
cauucuacacagagcag

SEQ ID NO: 2411441 - RNA, 15 nt, Human
cauucuacugaaaag

SEQ ID NO: 2411442 - RNA, 14 nt, Human
cauucuccacagca

SEQ ID NO: 2411443 - RNA, 18 nt, Human
cauucuccacagcaaccc

SEQ ID NO: 2411444 - RNA, 15 nt, Human
cauucuccacagcaa

SEQ ID NO: 2411445 - RNA, 17 nt, Human
cauucuccacagcaacc

SEQ ID NO: 2411446 - RNA, 16 nt, Human
cauucuccaccugcca

SEQ ID NO: 2411447 - RNA, 14 nt, Human
cauucuccaccugc

SEQ ID NO: 2411448 - RNA, 13 nt, Human
cauucuccaccug

SEQ ID NO: 2411449 - RNA, 23 nt, Human
cauucuagguaggggcccacuuc

SEQ ID NO: 2411450 - RNA, 17 nt, Human
caugggaaugaauguca

SEQ ID NO: 2411451 - RNA, 16 nt, Human
caugggaaugaauguc

SEQ ID NO: 2411452 - RNA, 15 nt, Human
caugggaaugaaugu

SEQ ID NO: 2411453 - RNA, 14 nt, Human
caugggaaugaaug

SEQ ID NO: 2411454 - RNA, 16 nt, Human
cauggcuaagcuuuau

SEQ ID NO: 2411455 - RNA, 17 nt, Human
caugcuggguucugcac

SEQ ID NO: 2411456 - RNA, 16 nt, Human
caugcuggguucugca

SEQ ID NO: 2411457 - RNA, 18 nt, Human
caugcuggguucugcaca

SEQ ID NO: 2411458 - RNA, 15 nt, Human
cauggcuaagcuuua

SEQ ID NO: 2411459 - RNA, 12 nt, Human
cauggcuaucug

SEQ ID NO: 2411460 - RNA, 22 nt, Human
cauggcuauaaacaauuacaug

SEQ ID NO: 2411461 - RNA, 11 nt, Human
cauggcugaac

SEQ ID NO: 2411462 - RNA, 20 nt, Human
cauggcuccagucugcugcc

SEQ ID NO: 2411463 - RNA, 22 nt, Human
cauggcuccagucugcugcccu

SEQ ID NO: 2411464 - RNA, 17 nt, Human
cauggcucccccuccac

SEQ ID NO: 2411465 - RNA, 17 nt, Human
cauggcuccagaaaugu

SEQ ID NO: 2411466 - RNA, 13 nt, Human
cauggcuccaguc

SEQ ID NO: 2411467 - RNA, 14 nt, Human
cauggcuccagucu

SEQ ID NO: 2411468 - RNA, 15 nt, Human
cauggcuccagucug

SEQ ID NO: 2411469 - RNA, 14 nt, Human
caugcuaauuauau

SEQ ID NO: 2411470 - RNA, 22 nt, Human
caugcuaauauaaguuucuuug

SEQ ID NO: 2411471 - RNA, 20 nt, Human
caugcuccuggcccacugca

SEQ ID NO: 2411472 - RNA, 13 nt, Human
caugcucucugca

SEQ ID NO: 2411473 - RNA, 16 nt, Human
caugcuaucucugugu

SEQ ID NO: 2411474 - RNA, 20 nt, Human
caugcugaagccaaagccaa

SEQ ID NO: 2411475 - RNA, 16 nt, Human
caugcugaagccaaag

SEQ ID NO: 2411476 - RNA, 13 nt, Human
caugcugaaggga

SEQ ID NO: 2411477 - RNA, 15 nt, Human
caugcugaagccaaa

SEQ ID NO: 2411478 - RNA, 17 nt, Human
caugcucuuagaaaauu

SEQ ID NO: 2411479 - RNA, 16 nt, Human
caugcucuuagaaaau

SEQ ID NO: 2411480 - RNA, 21 nt, Human
caugcucucugcagccagccc

SEQ ID NO: 2411481 - RNA, 14 nt, Human
caugcucucugcag

SEQ ID NO: 2411482 - RNA, 15 nt, Human
caugcucucugcagc

SEQ ID NO: 2411483 - RNA, 16 nt, Human
caugcucucugcagcc

SEQ ID NO: 2411484 - RNA, 19 nt, Human
caugcucucugcagccagc

SEQ ID NO: 2411485 - RNA, 20 nt, Human
caugcucucugcagccagcc

SEQ ID NO: 2411486 - RNA, 23 nt, Human
caugcucucugcagccagcccag

SEQ ID NO: 2411487 - RNA, 12 nt, Human
caugcuggagcc

SEQ ID NO: 2411488 - RNA, 19 nt, Human
caugcugaagggaccuuga

SEQ ID NO: 2411489 - RNA, 18 nt, Human
caugcugaagggaccuug

SEQ ID NO: 2411490 - RNA, 21 nt, Human
caugcugacuuucauuucuug

SEQ ID NO: 2411491 - RNA, 22 nt, Human
caugcuggaggugacaucucuu

SEQ ID NO: 2411492 - RNA, 19 nt, Human
caugcuggagccuguguaa

SEQ ID NO: 2411493 - RNA, 17 nt, Human
caugcuggagccugugu

SEQ ID NO: 2411494 - RNA, 16 nt, Human
caugcuggagccugug

SEQ ID NO: 2411495 - RNA, 15 nt, Human
caugcuggagccugu

SEQ ID NO: 2411496 - RNA, 14 nt, Human
caugcuggagccug

SEQ ID NO: 2411497 - RNA, 13 nt, Human
caugcuggagccu

SEQ ID NO: 2411498 - RNA, 20 nt, Human
caugcuggggcaagucccug

SEQ ID NO: 2411499 - RNA, 23 nt, Human
caugcugggaagacgccugagcu

SEQ ID NO: 2411500 - RNA, 22 nt, Human
caugcuggagccuguguaacag

SEQ ID NO: 2411501 - RNA, 20 nt, Human
caugcugggaagacgccuga

SEQ ID NO: 2411502 - RNA, 20 nt, Human
caugauggugcugaccucug

SEQ ID NO: 2411503 - RNA, 20 nt, Human
caugauggcaacagaucugg

SEQ ID NO: 2411504 - RNA, 14 nt, Human
caugauguuuagaa

SEQ ID NO: 2411505 - RNA, 12 nt, Human
caugauguggag

SEQ ID NO: 2411506 - RNA, 20 nt, Human
caugauguagugccucuuuc

SEQ ID NO: 2411507 - RNA, 23 nt, Human
caugaugguuauuuucuuuucuu

SEQ ID NO: 2411508 - RNA, 22 nt, Human
caugaugguuauuuucuuuucu

SEQ ID NO: 2411509 - RNA, 22 nt, Human
caugauguuaaccagaauaaag

SEQ ID NO: 2411510 - RNA, 20 nt, Human
caugauguggaguggggcag

SEQ ID NO: 2411511 - RNA, 19 nt, Human
caugauguuaaccagaaua

SEQ ID NO: 2411512 - RNA, 24 nt, Human
caugauuuugaaaucaugaagaua

SEQ ID NO: 2411513 - RNA, 18 nt, Human
caugauuuccuugaaugu

SEQ ID NO: 2411514 - RNA, 14 nt, Human
caugcuacacacug

SEQ ID NO: 2411515 - RNA, 20 nt, Human
caugcuacacacugcauguu

SEQ ID NO: 2411516 - RNA, 23 nt, Human
caugcuacacacugcauguuugu

SEQ ID NO: 2411517 - RNA, 12 nt, Human
caugauuuccuu

SEQ ID NO: 2411518 - RNA, 14 nt, Human
caugauuuccuuga

SEQ ID NO: 2411519 - RNA, 16 nt, Human
caugauuuccuugaau

SEQ ID NO: 2411520 - RNA, 17 nt, Human
caugauuuccuugaaug

SEQ ID NO: 2411521 - RNA, 13 nt, Human
caugauguuuucc

SEQ ID NO: 2411522 - RNA, 16 nt, Human
caucuggaaucuggag

SEQ ID NO: 2411523 - RNA, 21 nt, Human
caucuggaaucuggagaccag

SEQ ID NO: 2411524 - RNA, 19 nt, Human
caucuggaaccaucagaaa

SEQ ID NO: 2411525 - RNA, 12 nt, Human
caucuggaacca

SEQ ID NO: 2411526 - RNA, 17 nt, Human
caucuggaaccaucaga

SEQ ID NO: 2411527 - RNA, 22 nt, Human
caucugcuuacaauucccugcu

SEQ ID NO: 2411528 - RNA, 20 nt, Human
caucugcuuacaauucccug

SEQ ID NO: 2411529 - RNA, 14 nt, Human
caucugugaauaag

SEQ ID NO: 2411530 - RNA, 13 nt, Human
caucugugaauaa

SEQ ID NO: 2411531 - RNA, 21 nt, Human
caucuggaaggggaucccacc

SEQ ID NO: 2411532 - RNA, 15 nt, Human
caucugugauucccu

SEQ ID NO: 2411533 - RNA, 17 nt, Human
caucugugcacugccca

SEQ ID NO: 2411534 - RNA, 18 nt, Human
caucugugcacugcccau

SEQ ID NO: 2411535 - RNA, 21 nt, Human
caucugugcacugcccaugga

SEQ ID NO: 2411536 - RNA, 15 nt, Human
caucugugcacgcag

SEQ ID NO: 2411537 - RNA, 17 nt, Human
caucugugggcacgcug

SEQ ID NO: 2411538 - RNA, 11 nt, Human
caucuguuuuu

SEQ ID NO: 2411539 - RNA, 20 nt, Human
caucuguuguuuuguuuuaa

SEQ ID NO: 2411540 - RNA, 19 nt, Human
caucuguguuucaaguggg

SEQ ID NO: 2411541 - RNA, 12 nt, Human
caucuguuguuu

SEQ ID NO: 2411542 - RNA, 17 nt, Human
caucuguguuucaagug

SEQ ID NO: 2411543 - RNA, 12 nt, Human
caucuguucugg

SEQ ID NO: 2411544 - RNA, 11 nt, Human
caucugugucu

SEQ ID NO: 2411545 - RNA, 13 nt, Human
caucugugucuug

SEQ ID NO: 2411546 - RNA, 14 nt, Human
caucugugucuugu

SEQ ID NO: 2411547 - RNA, 15 nt, Human
caucugugugaaaau

SEQ ID NO: 2411548 - RNA, 20 nt, Human
caucugcucuccuuccugga

SEQ ID NO: 2411549 - RNA, 18 nt, Human
caucugcucuccuuccug

SEQ ID NO: 2411550 - RNA, 20 nt, Human
caucgugaaacccugucucu

SEQ ID NO: 2411551 - RNA, 16 nt, Human
caucugcucuccuucc

SEQ ID NO: 2411552 - RNA, 19 nt, Human
caucugcugguccguggga

SEQ ID NO: 2411553 - RNA, 14 nt, Human
caucugcugguccg

SEQ ID NO: 2411554 - RNA, 22 nt, Human
caucggugaaacuaacagauaa

SEQ ID NO: 2411555 - RNA, 13 nt, Human
caucgggcugagg

SEQ ID NO: 2411556 - RNA, 21 nt, Human
caucggugaaacuaacagaua

SEQ ID NO: 2411557 - RNA, 21 nt, Human
caucguauaacacaauaugaa

SEQ ID NO: 2411558 - RNA, 22 nt, Human
cauccuggcacccggccccugc

SEQ ID NO: 2411559 - RNA, 19 nt, Human
caucgcaccauucugacuc

SEQ ID NO: 2411560 - RNA, 18 nt, Human
caucgcaccauucugacu

SEQ ID NO: 2411561 - RNA, 23 nt, Human
cauccugccuuagagccaggcac

SEQ ID NO: 2411562 - RNA, 16 nt, Human
caucgcaccauucuga

SEQ ID NO: 2411563 - RNA, 16 nt, Human
caucgccgggacucca

SEQ ID NO: 2411564 - RNA, 22 nt, Human
cauccugccuuagagccaggca

SEQ ID NO: 2411565 - RNA, 15 nt, Human
cauccuggcacccgg

SEQ ID NO: 2411566 - RNA, 21 nt, Human
caucccguguucuccuuuucc

SEQ ID NO: 2411567 - RNA, 17 nt, Human
caucccguguucuccuu

SEQ ID NO: 2411568 - RNA, 12 nt, Human
caucccuacccc

SEQ ID NO: 2411569 - RNA, 18 nt, Human
caucccuaaugcugcaga

SEQ ID NO: 2411570 - RNA, 21 nt, Human
cauccugccuuagagccaggc

SEQ ID NO: 2411571 - RNA, 17 nt, Human
caucccgagcaccucca

SEQ ID NO: 2411572 - RNA, 21 nt, Human
caucccgggacgcagcaggag

SEQ ID NO: 2411573 - RNA, 16 nt, Human
caucccguguucuccu

SEQ ID NO: 2411574 - RNA, 14 nt, Human
caucccguguucuc

SEQ ID NO: 2411575 - RNA, 12 nt, Human
caucacuucccu

SEQ ID NO: 2411576 - RNA, 14 nt, Human
caucacuucccuac

SEQ ID NO: 2411577 - RNA, 14 nt, Human
caucacuuguacaa

SEQ ID NO: 2411578 - RNA, 15 nt, Human
caucacuuguacaaa

SEQ ID NO: 2411579 - RNA, 23 nt, Human
caucacuugaauccuagggccug

SEQ ID NO: 2411580 - RNA, 20 nt, Human
caucacuugaauccuagggc

SEQ ID NO: 2411581 - RNA, 21 nt, Human
cauccccuguagagugggagc

SEQ ID NO: 2411582 - RNA, 23 nt, Human
caucccgacauggacccggagcu

SEQ ID NO: 2411583 - RNA, 19 nt, Human
caucacuggagcaccaggc

SEQ ID NO: 2411584 - RNA, 13 nt, Human
cauauucugucug

SEQ ID NO: 2411585 - RNA, 22 nt, Human
cauauuccugcagccuggaggc

SEQ ID NO: 2411586 - RNA, 19 nt, Human
caguggugguuuucuguuc

SEQ ID NO: 2411587 - RNA, 20 nt, Human
caguggugguuuucuguucu

SEQ ID NO: 2411588 - RNA, 21 nt, Human
caguggugguuuucuguucuu

SEQ ID NO: 2411589 - RNA, 22 nt, Human
caguggugguuuucuguucuuu

SEQ ID NO: 2411590 - RNA, 20 nt, Human
cauauggacucugcacauga

SEQ ID NO: 2411591 - RNA, 17 nt, Human
cauauggacucugcaca

SEQ ID NO: 2411592 - RNA, 15 nt, Human
cauauggacucugca

SEQ ID NO: 2411593 - RNA, 23 nt, Human
cauauggauuuucuauuguuacu

SEQ ID NO: 2411594 - RNA, 20 nt, Human
cauauggauuuucuauuguu

SEQ ID NO: 2411595 - RNA, 18 nt, Human
cauauggauuuucuauug

SEQ ID NO: 2411596 - RNA, 18 nt, Human
cauauggacucugcacau

SEQ ID NO: 2411597 - RNA, 23 nt, Human
cauaugcuguauauccuuucuaa

SEQ ID NO: 2411598 - RNA, 16 nt, Human
cagugguggcagggcc

SEQ ID NO: 2411599 - RNA, 14 nt, Human
cagugguggcaggg

SEQ ID NO: 2411600 - RNA, 12 nt, Human
cagugguggcag

SEQ ID NO: 2411601 - RNA, 19 nt, Human
cagugguggcagggccuag

SEQ ID NO: 2411602 - RNA, 18 nt, Human
cauauucuguuggccagu

SEQ ID NO: 2411603 - RNA, 17 nt, Human
cauauucuguuggccag

SEQ ID NO: 2411604 - RNA, 16 nt, Human
cauauuaccacagaca

SEQ ID NO: 2411605 - RNA, 16 nt, Human
cauauuccauauuuau

SEQ ID NO: 2411606 - RNA, 23 nt, Human
cauauucauguaaacaaaauuua

SEQ ID NO: 2411607 - RNA, 17 nt, Human
cauauuccauauuuauu

SEQ ID NO: 2411608 - RNA, 17 nt, Human
cauauuccugcagccug

SEQ ID NO: 2411609 - RNA, 18 nt, Human
cauauuccugcagccugg

SEQ ID NO: 2411610 - RNA, 21 nt, Human
cauauuccugcagccuggagg

SEQ ID NO: 2411611 - RNA, 20 nt, Human
cauauggcccagugucaagu

SEQ ID NO: 2411612 - RNA, 16 nt, Human
cauauggcccaguguc

SEQ ID NO: 2411613 - RNA, 15 nt, Human
cauauggcccagugu

SEQ ID NO: 2411614 - RNA, 16 nt, Human
cauauguugcucaguc

SEQ ID NO: 2411615 - RNA, 15 nt, Human
cauauguugcucagu

SEQ ID NO: 2411616 - RNA, 19 nt, Human
cauauguugaauacuuuuu

SEQ ID NO: 2411617 - RNA, 22 nt, Human
cauauguuucgcugauauaugu

SEQ ID NO: 2411618 - RNA, 19 nt, Human
ccacgcccccacuggugac

SEQ ID NO: 2411619 - RNA, 18 nt, Human
ccacgcccccacugguga

SEQ ID NO: 2411620 - RNA, 18 nt, Human
ccacgcccguccugccug

SEQ ID NO: 2411621 - RNA, 17 nt, Human
ccacgcccguccugccu

SEQ ID NO: 2411622 - RNA, 15 nt, Human
ccacgcccguccugc

SEQ ID NO: 2411623 - RNA, 15 nt, Human
ccacgacugucucca

SEQ ID NO: 2411624 - RNA, 13 nt, Human
ccacgcccggcua

SEQ ID NO: 2411625 - RNA, 13 nt, Human
ccacgcccccacu

SEQ ID NO: 2411626 - RNA, 14 nt, Human
ccaccuuuucagcg

SEQ ID NO: 2411627 - RNA, 19 nt, Human
ccacgaauuugcuggggaa

SEQ ID NO: 2411628 - RNA, 15 nt, Human
ccacgaauuugcugg

SEQ ID NO: 2411629 - RNA, 23 nt, Human
ccacgaauuugcuggggaaucuc

SEQ ID NO: 2411630 - RNA, 14 nt, Human
ccacgacugucucc

SEQ ID NO: 2411631 - RNA, 17 nt, Human
ccacgcccccacuggug

SEQ ID NO: 2411632 - RNA, 16 nt, Human
ccacgcccccacuggu

SEQ ID NO: 2411633 - RNA, 13 nt, Human
ccaccgccuccua

SEQ ID NO: 2411634 - RNA, 17 nt, Human
ccaccgcccagagaccc

SEQ ID NO: 2411635 - RNA, 17 nt, Human
ccaccgccauggcuucc

SEQ ID NO: 2411636 - RNA, 14 nt, Human
ccaccgccauggcu

SEQ ID NO: 2411637 - RNA, 13 nt, Human
ccaccgccauggc

SEQ ID NO: 2411638 - RNA, 18 nt, Human
ccaccgcaugcccccucg

SEQ ID NO: 2411639 - RNA, 13 nt, Human
ccaccgcccagag

SEQ ID NO: 2411640 - RNA, 23 nt, Human
ccaccuuucagauaacuguuauu

SEQ ID NO: 2411641 - RNA, 18 nt, Human
ccaccgccauggcuucca

SEQ ID NO: 2411642 - RNA, 20 nt, Human
ccaccuuuauuaaaaucuua

SEQ ID NO: 2411643 - RNA, 21 nt, Human
ccaccuuugaagaaguaagga

SEQ ID NO: 2411644 - RNA, 17 nt, Human
ccaccgcaugcccccuc

SEQ ID NO: 2411645 - RNA, 16 nt, Human
ccaccgcaugcccccu

SEQ ID NO: 2411646 - RNA, 13 nt, Human
ccaccgcaugccc

SEQ ID NO: 2411647 - RNA, 23 nt, Human
ccaccgaaguggacuggccccug

SEQ ID NO: 2411648 - RNA, 19 nt, Human
ccaccgcagacaggaccag

SEQ ID NO: 2411649 - RNA, 22 nt, Human
ccaccgcagacaggaccaggga

SEQ ID NO: 2411650 - RNA, 13 nt, Human
ccaccgcagacag

SEQ ID NO: 2411651 - RNA, 18 nt, Human
ccaccgaagccgccugug

SEQ ID NO: 2411652 - RNA, 15 nt, Human
ccacccuuugggggg

SEQ ID NO: 2411653 - RNA, 22 nt, Human
ccaccgaaguggacuggccccu

SEQ ID NO: 2411654 - RNA, 23 nt, Human
ccacccuuuggggggggcccgcc

SEQ ID NO: 2411655 - RNA, 22 nt, Human
ccacgcccguccugccuguggc

SEQ ID NO: 2411656 - RNA, 21 nt, Human
ccacgcccguccugccugugg

SEQ ID NO: 2411657 - RNA, 20 nt, Human
ccacgcccguccugccugug

SEQ ID NO: 2411658 - RNA, 19 nt, Human
ccacgcccguccugccugu

SEQ ID NO: 2411659 - RNA, 17 nt, Human
ccacgcccuccccuccc

SEQ ID NO: 2411660 - RNA, 15 nt, Human
ccacgcccuccccuc

SEQ ID NO: 2411661 - RNA, 23 nt, Human
ccacgcccguccugccuguggcg

SEQ ID NO: 2411662 - RNA, 14 nt, Human
ccacgcccuccccu

SEQ ID NO: 2411663 - RNA, 12 nt, Human
ccacagcaguug

SEQ ID NO: 2411664 - RNA, 14 nt, Human
ccacagcacagcca

SEQ ID NO: 2411665 - RNA, 19 nt, Human
ccacagcaaggcaccugca

SEQ ID NO: 2411666 - RNA, 17 nt, Human
ccacagcaaggcaccug

SEQ ID NO: 2411667 - RNA, 19 nt, Human
ccacagcaaccccaggcug

SEQ ID NO: 2411668 - RNA, 20 nt, Human
ccacagcaaccccaggcuga

SEQ ID NO: 2411669 - RNA, 18 nt, Human
ccacagaugccuccaccc

SEQ ID NO: 2411670 - RNA, 23 nt, Human
ccacagcgcuggccgggaccccg

SEQ ID NO: 2411671 - RNA, 13 nt, Human
ccacagcucccac

SEQ ID NO: 2411672 - RNA, 15 nt, Human
ccacagcucccaccc

SEQ ID NO: 2411673 - RNA, 16 nt, Human
ccacagcucccacccc

SEQ ID NO: 2411674 - RNA, 17 nt, Human
ccacagcucccacccca

SEQ ID NO: 2411675 - RNA, 22 nt, Human
ccacagccagcaccuggcaucg

SEQ ID NO: 2411676 - RNA, 19 nt, Human
ccacagccagcaccuggca

SEQ ID NO: 2411677 - RNA, 18 nt, Human
ccacagccagcaccuggc

SEQ ID NO: 2411678 - RNA, 17 nt, Human
ccacagccagcaccugg

SEQ ID NO: 2411679 - RNA, 16 nt, Human
ccacagccuccccugc

SEQ ID NO: 2411680 - RNA, 19 nt, Human
ccacagccuccccugccag

SEQ ID NO: 2411681 - RNA, 20 nt, Human
ccacagccuccccugccagg

SEQ ID NO: 2411682 - RNA, 17 nt, Human
ccacagcaguugaaaag

SEQ ID NO: 2411683 - RNA, 18 nt, Human
ccacagcaguugaaaaga

SEQ ID NO: 2411684 - RNA, 23 nt, Human
ccacagcaguugaaaagacucca

SEQ ID NO: 2411685 - RNA, 20 nt, Human
ccacagcaaggcaccugcag

SEQ ID NO: 2411686 - RNA, 14 nt, Human
ccacagcagcugaa

SEQ ID NO: 2411687 - RNA, 15 nt, Human
ccacagccagcaccu

SEQ ID NO: 2411688 - RNA, 20 nt, Human
ccacagcaucauuuugcauu

SEQ ID NO: 2411689 - RNA, 12 nt, Human
ccacagcaggug

SEQ ID NO: 2411690 - RNA, 20 nt, Human
ccacccuuggaggcugucuu

SEQ ID NO: 2411691 - RNA, 19 nt, Human
ccacccuuggccugucuca

SEQ ID NO: 2411692 - RNA, 16 nt, Human
ccacccuuggccuguc

SEQ ID NO: 2411693 - RNA, 17 nt, Human
ccacccuuggccugucu

SEQ ID NO: 2411694 - RNA, 12 nt, Human
ccacccuuggcc

SEQ ID NO: 2411695 - RNA, 13 nt, Human
ccacccuuggccu

SEQ ID NO: 2411696 - RNA, 14 nt, Human
ccacccuuggccug

SEQ ID NO: 2411697 - RNA, 15 nt, Human
ccacccuuggccugu

SEQ ID NO: 2411698 - RNA, 19 nt, Human
ccacccugucccccagcuc

SEQ ID NO: 2411699 - RNA, 18 nt, Human
ccacccugucccccagcu

SEQ ID NO: 2411700 - RNA, 16 nt, Human
ccacccugucccccag

SEQ ID NO: 2411701 - RNA, 14 nt, Human
ccacccuguccccc

SEQ ID NO: 2411702 - RNA, 22 nt, Human
ccacccugucccccagcucugg

SEQ ID NO: 2411703 - RNA, 21 nt, Human
ccacccugucccccagcucug

SEQ ID NO: 2411704 - RNA, 12 nt, Human
ccacccuguguu

SEQ ID NO: 2411705 - RNA, 13 nt, Human
ccacccuugccca

SEQ ID NO: 2411706 - RNA, 12 nt, Human
ccacccuugccc

SEQ ID NO: 2411707 - RNA, 14 nt, Human
ccacccuuccccuc

SEQ ID NO: 2411708 - RNA, 23 nt, Human
ccacccugggcucugugggcugc

SEQ ID NO: 2411709 - RNA, 20 nt, Human
ccacccugggcucugugggc

SEQ ID NO: 2411710 - RNA, 18 nt, Human
ccacccugggcucugugg

SEQ ID NO: 2411711 - RNA, 17 nt, Human
ccacccugggcucugug

SEQ ID NO: 2411712 - RNA, 16 nt, Human
ccacccugggcucugg

SEQ ID NO: 2411713 - RNA, 15 nt, Human
ccacccugggcucug

SEQ ID NO: 2411714 - RNA, 13 nt, Human
ccacccugggcuc

SEQ ID NO: 2411715 - RNA, 12 nt, Human
ccacccugggcu

SEQ ID NO: 2411716 - RNA, 22 nt, Human
ccacccugggcccugggcugga

SEQ ID NO: 2411717 - RNA, 20 nt, Human
ccacccugggcccugggcug

SEQ ID NO: 2411718 - RNA, 17 nt, Human
ccacccugggcccuggg

SEQ ID NO: 2411719 - RNA, 16 nt, Human
ccacccugggcccugg

SEQ ID NO: 2411720 - RNA, 15 nt, Human
ccaccaucaagccac

SEQ ID NO: 2411721 - RNA, 18 nt, Human
ccaccauauucagugcug

SEQ ID NO: 2411722 - RNA, 22 nt, Human
ccaccauauucagugcuguggc

SEQ ID NO: 2411723 - RNA, 15 nt, Human
ccacccugggcccug

SEQ ID NO: 2411724 - RNA, 23 nt, Human
ccaccauauucagugcuguggcc

SEQ ID NO: 2411725 - RNA, 19 nt, Human
ccacagcucccaccccacc

SEQ ID NO: 2411726 - RNA, 17 nt, Human
ccaccacacccagccca

SEQ ID NO: 2411727 - RNA, 20 nt, Human
ccaccacagccagcaccugg

SEQ ID NO: 2411728 - RNA, 18 nt, Human
ccaccacagccagcaccu

SEQ ID NO: 2411729 - RNA, 15 nt, Human
ccaccacagccagca

SEQ ID NO: 2411730 - RNA, 14 nt, Human
ccaccacagccagc

SEQ ID NO: 2411731 - RNA, 21 nt, Human
ccaccacacugauccagcccu

SEQ ID NO: 2411732 - RNA, 17 nt, Human
ccaccacaccgcagaag

SEQ ID NO: 2411733 - RNA, 14 nt, Human
ccaccaucaagcca

SEQ ID NO: 2411734 - RNA, 13 nt, Human
ccaccaucaagcc

SEQ ID NO: 2411735 - RNA, 15 nt, Human
ccaccaccacuggcc

SEQ ID NO: 2411736 - RNA, 14 nt, Human
ccaccaccacuggc

SEQ ID NO: 2411737 - RNA, 17 nt, Human
ccaccaccaauugccaa

SEQ ID NO: 2411738 - RNA, 21 nt, Human
ccaccacagccagcaccuggc

SEQ ID NO: 2411739 - RNA, 11 nt, Human
ccaccacccaa

SEQ ID NO: 2411740 - RNA, 15 nt, Human
ccaccaccagaaagc

SEQ ID NO: 2411741 - RNA, 16 nt, Human
ccaccaccacuggcca

SEQ ID NO: 2411742 - RNA, 17 nt, Human
ccacucccugcaaccug

SEQ ID NO: 2411743 - RNA, 14 nt, Human
ccacucucauuccc

SEQ ID NO: 2411744 - RNA, 16 nt, Human
ccacucucauucccca

SEQ ID NO: 2411745 - RNA, 17 nt, Human
ccacucucauuccccag

SEQ ID NO: 2411746 - RNA, 18 nt, Human
ccacucucauuccccagg

SEQ ID NO: 2411747 - RNA, 19 nt, Human
ccacucucauuccccaggu

SEQ ID NO: 2411748 - RNA, 12 nt, Human
ccacucucccca

SEQ ID NO: 2411749 - RNA, 13 nt, Human
ccacucuccccac

SEQ ID NO: 2411750 - RNA, 14 nt, Human
ccacucuccccaca

SEQ ID NO: 2411751 - RNA, 15 nt, Human
ccacucuccccacac

SEQ ID NO: 2411752 - RNA, 16 nt, Human
ccacucuccccacacu

SEQ ID NO: 2411753 - RNA, 22 nt, Human
ccacucuaggggucaggcucca

SEQ ID NO: 2411754 - RNA, 21 nt, Human
ccacucuaggggucaggcucc

SEQ ID NO: 2411755 - RNA, 23 nt, Human
ccacucuaggggucaggcuccau

SEQ ID NO: 2411756 - RNA, 19 nt, Human
ccacucuagggcaguggag

SEQ ID NO: 2411757 - RNA, 21 nt, Human
ccacucuacccucccaccccc

SEQ ID NO: 2411758 - RNA, 19 nt, Human
ccacucuacccucccaccc

SEQ ID NO: 2411759 - RNA, 20 nt, Human
ccacucuacccucccacccc

SEQ ID NO: 2411760 - RNA, 23 nt, Human
ccacuccgagaggugggccaguc

SEQ ID NO: 2411761 - RNA, 19 nt, Human
ccacuccgagaggugggcc

SEQ ID NO: 2411762 - RNA, 17 nt, Human
ccacuccgagagguggg

SEQ ID NO: 2411763 - RNA, 16 nt, Human
ccacuccgagaggugg

SEQ ID NO: 2411764 - RNA, 14 nt, Human
ccacuccuccuagc

SEQ ID NO: 2411765 - RNA, 12 nt, Human
ccacuccucuga

SEQ ID NO: 2411766 - RNA, 18 nt, Human
ccacucuacccucccacc

SEQ ID NO: 2411767 - RNA, 20 nt, Human
ccacuccgagaggugggcca

SEQ ID NO: 2411768 - RNA, 12 nt, Human
ccacuccuccaa

SEQ ID NO: 2411769 - RNA, 16 nt, Human
ccacuccuccaaagga

SEQ ID NO: 2411770 - RNA, 19 nt, Human
ccaaaagauugcugaaauu

SEQ ID NO: 2411771 - RNA, 22 nt, Human
ccaaaagauugcugaaauuuua

SEQ ID NO: 2411772 - RNA, 16 nt, Human
ccaaaagauugcugaa

SEQ ID NO: 2411773 - RNA, 22 nt, Human
ccaaaagaagcccccagcuaag

SEQ ID NO: 2411774 - RNA, 21 nt, Human
ccaaaacucuccucugcugcu

SEQ ID NO: 2411775 - RNA, 11 nt, Human
ccaaaacugug

SEQ ID NO: 2411776 - RNA, 16 nt, Human
ccaaaacugugcagag

SEQ ID NO: 2411777 - RNA, 20 nt, Human
ccaaaacucuccucugcugc

SEQ ID NO: 2411778 - RNA, 22 nt, Human
cauuuuuuuuaagaaaaaggau

SEQ ID NO: 2411779 - RNA, 17 nt, Human
cauuuguauaaaauaau

SEQ ID NO: 2411780 - RNA, 20 nt, Human
cauuuguauaaaauaauuuu

SEQ ID NO: 2411781 - RNA, 19 nt, Human
cauuuguauaaaauaauuu

SEQ ID NO: 2411782 - RNA, 20 nt, Human
cauuuuuuuaauuuauuauu

SEQ ID NO: 2411783 - RNA, 17 nt, Human
cauuuuuuuaauuuauu

SEQ ID NO: 2411784 - RNA, 17 nt, Human
cauuuuuuuccaggcug

SEQ ID NO: 2411785 - RNA, 15 nt, Human
cauuuuuuuccaggc

SEQ ID NO: 2411786 - RNA, 18 nt, Human
cauuuuuuuccaggcugg

SEQ ID NO: 2411787 - RNA, 13 nt, Human
cauuuuuucaguc

SEQ ID NO: 2411788 - RNA, 22 nt, Human
cauuugugugugugcaagugug

SEQ ID NO: 2411789 - RNA, 18 nt, Human
cauuuuuuaaggaaacaa

SEQ ID NO: 2411790 - RNA, 14 nt, Human
cauuugugucaaug

SEQ ID NO: 2411791 - RNA, 15 nt, Human
cauuugugucaaugg

SEQ ID NO: 2411792 - RNA, 13 nt, Human
cauuugugugugu

SEQ ID NO: 2411793 - RNA, 19 nt, Human
cauuugugugugugcaagu

SEQ ID NO: 2411794 - RNA, 15 nt, Human
cauuugugaggccca

SEQ ID NO: 2411795 - RNA, 12 nt, Human
cauuugugaggc

SEQ ID NO: 2411796 - RNA, 11 nt, Human
cauuugugagg

SEQ ID NO: 2411797 - RNA, 18 nt, Human
ccaaugucugccacacaa

SEQ ID NO: 2411798 - RNA, 11 nt, Human
ccaaugucugc

SEQ ID NO: 2411799 - RNA, 21 nt, Human
ccaauguauugauaagagggc

SEQ ID NO: 2411800 - RNA, 17 nt, Human
ccaauguaggagcugcc

SEQ ID NO: 2411801 - RNA, 20 nt, Human
ccaauguaggagcugccuug

SEQ ID NO: 2411802 - RNA, 12 nt, Human
ccaaugucuuga

SEQ ID NO: 2411803 - RNA, 19 nt, Human
ccaaugugaacagcggcug

SEQ ID NO: 2411804 - RNA, 20 nt, Human
ccaauggguuuuucccugua

SEQ ID NO: 2411805 - RNA, 15 nt, Human
ccaauguaggagcug

SEQ ID NO: 2411806 - RNA, 17 nt, Human
ccaaugggagcucaugg

SEQ ID NO: 2411807 - RNA, 23 nt, Human
ccaaugaaauacacaaguaaaca

SEQ ID NO: 2411808 - RNA, 18 nt, Human
ccaacucaccccagcccc

SEQ ID NO: 2411809 - RNA, 17 nt, Human
ccaacucaccccagccc

SEQ ID NO: 2411810 - RNA, 16 nt, Human
ccaacucaccccagcc

SEQ ID NO: 2411811 - RNA, 12 nt, Human
ccaacucuccug

SEQ ID NO: 2411812 - RNA, 14 nt, Human
ccaacucuagcugg

SEQ ID NO: 2411813 - RNA, 21 nt, Human
ccaacucuagcuggggguggg

SEQ ID NO: 2411814 - RNA, 15 nt, Human
ccaacuccuggaagc

SEQ ID NO: 2411815 - RNA, 19 nt, Human
ccaacuccuggaagcugug

SEQ ID NO: 2411816 - RNA, 22 nt, Human
ccaacuccuggaagcugugucc

SEQ ID NO: 2411817 - RNA, 14 nt, Human
ccaacugcugcuuu

SEQ ID NO: 2411818 - RNA, 13 nt, Human
ccaacugcugcuu

SEQ ID NO: 2411819 - RNA, 12 nt, Human
ccaacugcugcu

SEQ ID NO: 2411820 - RNA, 16 nt, Human
ccaacugggcccaaga

SEQ ID NO: 2411821 - RNA, 13 nt, Human
ccaacuguauaua

SEQ ID NO: 2411822 - RNA, 18 nt, Human
ccaacuguguucauuaga

SEQ ID NO: 2411823 - RNA, 17 nt, Human
ccaacugggcccaagac

SEQ ID NO: 2411824 - RNA, 17 nt, Human
ccaaauguucaucaaug

SEQ ID NO: 2411825 - RNA, 14 nt, Human
ccaacucaccccag

SEQ ID NO: 2411826 - RNA, 23 nt, Human
ccaaauggaaaugggcagagcag

SEQ ID NO: 2411827 - RNA, 18 nt, Human
ccaaauguaauugaauaa

SEQ ID NO: 2411828 - RNA, 22 nt, Human
ccaaauguaauugaauaaaguu

SEQ ID NO: 2411829 - RNA, 13 nt, Human
ccaagcucugcuc

SEQ ID NO: 2411830 - RNA, 17 nt, Human
ccaagcucugcuccucu

SEQ ID NO: 2411831 - RNA, 12 nt, Human
ccaagcucugcu

SEQ ID NO: 2411832 - RNA, 14 nt, Human
ccaagcuccuuggg

SEQ ID NO: 2411833 - RNA, 15 nt, Human
ccaagcuccuuggga

SEQ ID NO: 2411834 - RNA, 17 nt, Human
ccaagcuccuugggagg

SEQ ID NO: 2411835 - RNA, 19 nt, Human
ccaagcuccuugggaggcc

SEQ ID NO: 2411836 - RNA, 23 nt, Human
ccaagcugccuccccucuccuuc

SEQ ID NO: 2411837 - RNA, 18 nt, Human
ccaagcucugcuccucuc

SEQ ID NO: 2411838 - RNA, 15 nt, Human
ccaagcucucugcau

SEQ ID NO: 2411839 - RNA, 14 nt, Human
ccaagcucucugca

SEQ ID NO: 2411840 - RNA, 18 nt, Human
ccaagcucuagugggaag

SEQ ID NO: 2411841 - RNA, 22 nt, Human
ccaagcuccuugggaggcccca

SEQ ID NO: 2411842 - RNA, 12 nt, Human
ccaaugaaauga

SEQ ID NO: 2411843 - RNA, 14 nt, Human
ccaaucauuuuaau

SEQ ID NO: 2411844 - RNA, 12 nt, Human
ccaaucauuuua

SEQ ID NO: 2411845 - RNA, 22 nt, Human
ccaauauuuucuuuaaugcuuu

SEQ ID NO: 2411846 - RNA, 17 nt, Human
ccaauauuuaccagacc

SEQ ID NO: 2411847 - RNA, 20 nt, Human
ccaauauuuucuuuaaugcu

SEQ ID NO: 2411848 - RNA, 14 nt, Human
ccaauauuuguaga

SEQ ID NO: 2411849 - RNA, 18 nt, Human
ccaauauuucucagacau

SEQ ID NO: 2411850 - RNA, 14 nt, Human
ccaaugcacuuugu

SEQ ID NO: 2411851 - RNA, 19 nt, Human
ccaaugaggucugaaaugg

SEQ ID NO: 2411852 - RNA, 15 nt, Human
ccaaugauggucacc

SEQ ID NO: 2411853 - RNA, 22 nt, Human
ccaaucauuuuaauuauuauuc

SEQ ID NO: 2411854 - RNA, 17 nt, Human
ccucccaccucagccuc

SEQ ID NO: 2411855 - RNA, 15 nt, Human
ccucccaccucagcc

SEQ ID NO: 2411856 - RNA, 19 nt, Human
ccuccaaccuggggggcag

SEQ ID NO: 2411857 - RNA, 12 nt, Human
ccucccaccccc

SEQ ID NO: 2411858 - RNA, 16 nt, Human
ccucccacccaccgcc

SEQ ID NO: 2411859 - RNA, 13 nt, Human
ccucccaccccca

SEQ ID NO: 2411860 - RNA, 17 nt, Human
ccucccacccccaucuc

SEQ ID NO: 2411861 - RNA, 13 nt, Human
ccucccacccccu

SEQ ID NO: 2411862 - RNA, 15 nt, Human
ccuccaaaagcacuu

SEQ ID NO: 2411863 - RNA, 19 nt, Human
ccuccaaaacuccugcccc

SEQ ID NO: 2411864 - RNA, 17 nt, Human
ccuccaaaggcccccua

SEQ ID NO: 2411865 - RNA, 16 nt, Human
ccuccaaaggcccccu

SEQ ID NO: 2411866 - RNA, 19 nt, Human
ccuccaacaccaagcacag

SEQ ID NO: 2411867 - RNA, 23 nt, Human
ccucauuuuugaauacaggcaua

SEQ ID NO: 2411868 - RNA, 22 nt, Human
ccucauggccccucugaccugc

SEQ ID NO: 2411869 - RNA, 18 nt, Human
ccucauggccccucugac

SEQ ID NO: 2411870 - RNA, 21 nt, Human
ccucauguacauacccuggcc

SEQ ID NO: 2411871 - RNA, 19 nt, Human
ccucaugguggguucaggg

SEQ ID NO: 2411872 - RNA, 15 nt, Human
ccucccauggcaccu

SEQ ID NO: 2411873 - RNA, 16 nt, Human
ccuccccaacccugcc

SEQ ID NO: 2411874 - RNA, 21 nt, Human
ccuccccaacccugccccugc

SEQ ID NO: 2411875 - RNA, 21 nt, Human
ccucccaucugggaguccccu

SEQ ID NO: 2411876 - RNA, 16 nt, Human
ccucccaucugggagu

SEQ ID NO: 2411877 - RNA, 13 nt, Human
ccucccaucuggg

SEQ ID NO: 2411878 - RNA, 17 nt, Human
ccucccauccccuggac

SEQ ID NO: 2411879 - RNA, 20 nt, Human
ccuccccaaaucaauacacu

SEQ ID NO: 2411880 - RNA, 16 nt, Human
ccucccaucucacaca

SEQ ID NO: 2411881 - RNA, 13 nt, Human
ccucccaucucac

SEQ ID NO: 2411882 - RNA, 14 nt, Human
ccucccauccccug

SEQ ID NO: 2411883 - RNA, 21 nt, Human
ccucccacccgaugcugcuuu

SEQ ID NO: 2411884 - RNA, 19 nt, Human
ccucccacccgaugcugcu

SEQ ID NO: 2411885 - RNA, 12 nt, Human
ccucccacccga

SEQ ID NO: 2411886 - RNA, 20 nt, Human
ccucccacccccuucucugc

SEQ ID NO: 2411887 - RNA, 21 nt, Human
ccucccacccccuucucugcu

SEQ ID NO: 2411888 - RNA, 20 nt, Human
ccucaaaaagauuuccccau

SEQ ID NO: 2411889 - RNA, 20 nt, Human
ccuauuuuuuuucuguuaua

SEQ ID NO: 2411890 - RNA, 18 nt, Human
ccucaaaccuccucuucu

SEQ ID NO: 2411891 - RNA, 16 nt, Human
ccucaaaccuccucuu

SEQ ID NO: 2411892 - RNA, 15 nt, Human
ccucaaaccuccucu

SEQ ID NO: 2411893 - RNA, 13 nt, Human
ccucaaaccuccu

SEQ ID NO: 2411894 - RNA, 22 nt, Human
ccucaaacaguagguuggcagu

SEQ ID NO: 2411895 - RNA, 21 nt, Human
ccucaaacacugcaggcauca

SEQ ID NO: 2411896 - RNA, 18 nt, Human
ccucaaacacugcaggca

SEQ ID NO: 2411897 - RNA, 17 nt, Human
ccucaaacacugcaggc

SEQ ID NO: 2411898 - RNA, 15 nt, Human
ccucaaacacugcag

SEQ ID NO: 2411899 - RNA, 13 nt, Human
ccucaaacacugc

SEQ ID NO: 2411900 - RNA, 16 nt, Human
ccucaaaagcacccuu

SEQ ID NO: 2411901 - RNA, 20 nt, Human
ccucagccuggccagacaca

SEQ ID NO: 2411902 - RNA, 21 nt, Human
ccucagccuggccagacacag

SEQ ID NO: 2411903 - RNA, 16 nt, Human
ccucaaaggcccgcuc

SEQ ID NO: 2411904 - RNA, 19 nt, Human
ccucagccuggccagacac

SEQ ID NO: 2411905 - RNA, 22 nt, Human
ccucagccuggccagacacagg

SEQ ID NO: 2411906 - RNA, 11 nt, Human
ccucagccugu

SEQ ID NO: 2411907 - RNA, 12 nt, Human
ccucagccugug

SEQ ID NO: 2411908 - RNA, 22 nt, Human
ccucagccuuccccuugcccag

SEQ ID NO: 2411909 - RNA, 16 nt, Human
ccucagccugugcugc

SEQ ID NO: 2411910 - RNA, 16 nt, Human
ccucauggccccucug

SEQ ID NO: 2411911 - RNA, 15 nt, Human
ccucauggccccucu

SEQ ID NO: 2411912 - RNA, 23 nt, Human
ccucauggaauuggagcucgugg

SEQ ID NO: 2411913 - RNA, 18 nt, Human
ccucaggacaaugucuga

SEQ ID NO: 2411914 - RNA, 17 nt, Human
ccucaggaaugggcugu

SEQ ID NO: 2411915 - RNA, 16 nt, Human
ccucaggaaugggcug

SEQ ID NO: 2411916 - RNA, 18 nt, Human
ccucaggacugcaacagg

SEQ ID NO: 2411917 - RNA, 13 nt, Human
ccucaggacugca

SEQ ID NO: 2411918 - RNA, 17 nt, Human
ccucagccuugccagag

SEQ ID NO: 2411919 - RNA, 18 nt, Human
ccucagccuugccagaga

SEQ ID NO: 2411920 - RNA, 19 nt, Human
ccucagccuugccagagau

SEQ ID NO: 2411921 - RNA, 20 nt, Human
ccucagccuugccagagauc

SEQ ID NO: 2411922 - RNA, 14 nt, Human
ccucagcugcuucu

SEQ ID NO: 2411923 - RNA, 20 nt, Human
ccucagcugccucacuuccu

SEQ ID NO: 2411924 - RNA, 21 nt, Human
ccucagccuugccagagaucc

SEQ ID NO: 2411925 - RNA, 19 nt, Human
ccucagcugccucacuucc

SEQ ID NO: 2411926 - RNA, 17 nt, Human
ccggcgucagccuccag

SEQ ID NO: 2411927 - RNA, 16 nt, Human
ccggcgucagccucca

SEQ ID NO: 2411928 - RNA, 15 nt, Human
ccggcgucagccucc

SEQ ID NO: 2411929 - RNA, 14 nt, Human
ccggcgucagccuc

SEQ ID NO: 2411930 - RNA, 13 nt, Human
ccggcgucagccu

SEQ ID NO: 2411931 - RNA, 16 nt, Human
ccggcgggcgggccgg

SEQ ID NO: 2411932 - RNA, 19 nt, Human
ccggcggcccaagcccgac

SEQ ID NO: 2411933 - RNA, 21 nt, Human
ccggcgcuugccacuagggcu

SEQ ID NO: 2411934 - RNA, 22 nt, Human
ccggcgucagccuccagccucu

SEQ ID NO: 2411935 - RNA, 21 nt, Human
ccggcgucagccuccagccuc

SEQ ID NO: 2411936 - RNA, 20 nt, Human
ccggcgucagccuccagccu

SEQ ID NO: 2411937 - RNA, 19 nt, Human
ccggcgucagccuccagcc

SEQ ID NO: 2411938 - RNA, 23 nt, Human
ccggcgucagccuccagccucug

SEQ ID NO: 2411939 - RNA, 16 nt, Human
ccggccugcucccagc

SEQ ID NO: 2411940 - RNA, 20 nt, Human
ccggccugcucccagcagcc

SEQ ID NO: 2411941 - RNA, 15 nt, Human
ccggcgagcccugug

SEQ ID NO: 2411942 - RNA, 21 nt, Human
ccggcgcccucuguccugacu

SEQ ID NO: 2411943 - RNA, 19 nt, Human
ccggcgcccucuguccuga

SEQ ID NO: 2411944 - RNA, 18 nt, Human
ccggcgcccucuguccug

SEQ ID NO: 2411945 - RNA, 17 nt, Human
ccggcgcccucuguccu

SEQ ID NO: 2411946 - RNA, 15 nt, Human
ccggcgcccucuguc

SEQ ID NO: 2411947 - RNA, 14 nt, Human
ccggcgcccucugu

SEQ ID NO: 2411948 - RNA, 17 nt, Human
ccggcgagcccugugga

SEQ ID NO: 2411949 - RNA, 21 nt, Human
ccggccugaugacagagcgag

SEQ ID NO: 2411950 - RNA, 22 nt, Human
ccggccucucuggccucccacc

SEQ ID NO: 2411951 - RNA, 21 nt, Human
ccggccucucuggccucccac

SEQ ID NO: 2411952 - RNA, 20 nt, Human
ccggccucucuggccuccca

SEQ ID NO: 2411953 - RNA, 19 nt, Human
ccggccccggccccagcca

SEQ ID NO: 2411954 - RNA, 18 nt, Human
ccggccucucuggccucc

SEQ ID NO: 2411955 - RNA, 14 nt, Human
ccggccccugcugg

SEQ ID NO: 2411956 - RNA, 17 nt, Human
ccggccccagccagagu

SEQ ID NO: 2411957 - RNA, 16 nt, Human
ccggccccggccccag

SEQ ID NO: 2411958 - RNA, 20 nt, Human
ccggcccccuggucucuggu

SEQ ID NO: 2411959 - RNA, 19 nt, Human
ccggcccccuggucucugg

SEQ ID NO: 2411960 - RNA, 15 nt, Human
ccggcccccuggucu

SEQ ID NO: 2411961 - RNA, 13 nt, Human
ccggcccccuggu

SEQ ID NO: 2411962 - RNA, 18 nt, Human
ccggccccagccagaguu

SEQ ID NO: 2411963 - RNA, 17 nt, Human
ccggcccccagagcgcc

SEQ ID NO: 2411964 - RNA, 13 nt, Human
ccggccccugcug

SEQ ID NO: 2411965 - RNA, 15 nt, Human
cccuucgcuccugug

SEQ ID NO: 2411966 - RNA, 14 nt, Human
cccuucgcuccugu

SEQ ID NO: 2411967 - RNA, 21 nt, Human
cccuucucuccagccccugga

SEQ ID NO: 2411968 - RNA, 19 nt, Human
cccuuccuuuucccugcuu

SEQ ID NO: 2411969 - RNA, 21 nt, Human
cccugugacauggugccugag

SEQ ID NO: 2411970 - RNA, 20 nt, Human
cccugugacauggugccuga

SEQ ID NO: 2411971 - RNA, 19 nt, Human
cccugugacauggugccug

SEQ ID NO: 2411972 - RNA, 22 nt, Human
cccuuccuuuucccugcuucca

SEQ ID NO: 2411973 - RNA, 21 nt, Human
cccuuccuuuucccugcuucc

SEQ ID NO: 2411974 - RNA, 22 nt, Human
cccuucucuccagccccuggau

SEQ ID NO: 2411975 - RNA, 13 nt, Human
cccuucucugcuc

SEQ ID NO: 2411976 - RNA, 14 nt, Human
cccuucucugcucc

SEQ ID NO: 2411977 - RNA, 15 nt, Human
cccuucucugcucca

SEQ ID NO: 2411978 - RNA, 16 nt, Human
cccuucucugcuccac

SEQ ID NO: 2411979 - RNA, 17 nt, Human
cccuucucugcuccacc

SEQ ID NO: 2411980 - RNA, 20 nt, Human
cccuucucugcuccaccaca

SEQ ID NO: 2411981 - RNA, 23 nt, Human
cccuucucugcuccaccacaucc

SEQ ID NO: 2411982 - RNA, 22 nt, Human
ccgcagcucuugcccuucccug

SEQ ID NO: 2411983 - RNA, 20 nt, Human
ccgcagcucuugcccuuccc

SEQ ID NO: 2411984 - RNA, 18 nt, Human
ccgcagcucuugcccuuc

SEQ ID NO: 2411985 - RNA, 17 nt, Human
ccgcagcucuugcccuu

SEQ ID NO: 2411986 - RNA, 14 nt, Human
ccgcagcucuugcc

SEQ ID NO: 2411987 - RNA, 14 nt, Human
ccgcagccucccuc

SEQ ID NO: 2411988 - RNA, 21 nt, Human
ccgcauccuagucucuaucau

SEQ ID NO: 2411989 - RNA, 12 nt, Human
ccgcaucuucuc

SEQ ID NO: 2411990 - RNA, 15 nt, Human
ccgcaucuucuccau

SEQ ID NO: 2411991 - RNA, 16 nt, Human
ccgcaucuucuccauc

SEQ ID NO: 2411992 - RNA, 19 nt, Human
ccgcaucuucuccaucugg

SEQ ID NO: 2411993 - RNA, 20 nt, Human
ccgcaucuucuccaucuggc

SEQ ID NO: 2411994 - RNA, 22 nt, Human
ccgcaucuucuccaucuggcag

SEQ ID NO: 2411995 - RNA, 23 nt, Human
ccgcaugcccccucgugccaguc

SEQ ID NO: 2411996 - RNA, 22 nt, Human
ccgcaugcccccucgugccagu

SEQ ID NO: 2411997 - RNA, 21 nt, Human
ccgcaugcccccucgugccag

SEQ ID NO: 2411998 - RNA, 19 nt, Human
ccgcaugcccccucgugcc

SEQ ID NO: 2411999 - RNA, 18 nt, Human
ccgcaugcccccucgugc

SEQ ID NO: 2412000 - RNA, 13 nt, Human
ccgcaugcccccu

SEQ ID NO: 2412001 - RNA, 12 nt, Human
ccgcaugccccc

SEQ ID NO: 2412002 - RNA, 17 nt, Human
ccgcaugcggcccagga

SEQ ID NO: 2412003 - RNA, 16 nt, Human
ccgcaugcggcccagg

SEQ ID NO: 2412004 - RNA, 14 nt, Human
ccgcauucccugag

SEQ ID NO: 2412005 - RNA, 13 nt, Human
ccgcauucccuga

SEQ ID NO: 2412006 - RNA, 22 nt, Human
ccgcagucgucgcacagucucu

SEQ ID NO: 2412007 - RNA, 15 nt, Human
ccgcagugugcacua

SEQ ID NO: 2412008 - RNA, 21 nt, Human
ccgcagucgucgcacagucuc

SEQ ID NO: 2412009 - RNA, 19 nt, Human
ccgcagucgucgcacaguc

SEQ ID NO: 2412010 - RNA, 19 nt, Human
ccgcaggaagcugcuccgu

SEQ ID NO: 2412011 - RNA, 12 nt, Human
ccgcaggaagcu

SEQ ID NO: 2412012 - RNA, 13 nt, Human
ccgcaggaagcug

SEQ ID NO: 2412013 - RNA, 14 nt, Human
ccgcaggaagcugc

SEQ ID NO: 2412014 - RNA, 15 nt, Human
ccgcaggaagcugcu

SEQ ID NO: 2412015 - RNA, 23 nt, Human
ccgcaggauuugggcucuuggaa

SEQ ID NO: 2412016 - RNA, 23 nt, Human
ccgcagugugcacuaaggggccc

SEQ ID NO: 2412017 - RNA, 22 nt, Human
ccgcagugugcacuaaggggcc

SEQ ID NO: 2412018 - RNA, 17 nt, Human
ccgcaguuccugucccu

SEQ ID NO: 2412019 - RNA, 16 nt, Human
ccgcauccuagucucu

SEQ ID NO: 2412020 - RNA, 12 nt, Human
cccugucuagag

SEQ ID NO: 2412021 - RNA, 13 nt, Human
cccugucuaauga

SEQ ID NO: 2412022 - RNA, 16 nt, Human
cccugucuaaugaaac

SEQ ID NO: 2412023 - RNA, 20 nt, Human
cccugucucaaaaaaagaaa

SEQ ID NO: 2412024 - RNA, 23 nt, Human
cccugucucaaaaaaagaaaaag

SEQ ID NO: 2412025 - RNA, 19 nt, Human
cccugugauggggcccugc

SEQ ID NO: 2412026 - RNA, 18 nt, Human
cccugugauggggcccug

SEQ ID NO: 2412027 - RNA, 20 nt, Human
cccugugauggggcccugcc

SEQ ID NO: 2412028 - RNA, 13 nt, Human
cccuucgcuccug

SEQ ID NO: 2412029 - RNA, 18 nt, Human
cccugugacauggugccu

SEQ ID NO: 2412030 - RNA, 17 nt, Human
cccugugacauggugcc

SEQ ID NO: 2412031 - RNA, 23 nt, Human
cccugucuguagagggcccuggu

SEQ ID NO: 2412032 - RNA, 22 nt, Human
cccugucuguagagggcccugg

SEQ ID NO: 2412033 - RNA, 13 nt, Human
cccugucuugucc

SEQ ID NO: 2412034 - RNA, 17 nt, Human
cccugugauggggcccu

SEQ ID NO: 2412035 - RNA, 16 nt, Human
cccugucuagagaggg

SEQ ID NO: 2412036 - RNA, 17 nt, Human
cccugucuagagaggga

SEQ ID NO: 2412037 - RNA, 14 nt, Human
cccugucucuacua

SEQ ID NO: 2412038 - RNA, 20 nt, Human
cccugucuagagagggaggc

SEQ ID NO: 2412039 - RNA, 23 nt, Human
cccugucugaaggacacuuccug

SEQ ID NO: 2412040 - RNA, 23 nt, Human
cccugucucuacuaaaaaugcaa

SEQ ID NO: 2412041 - RNA, 21 nt, Human
cccugucuguagagggcccug

SEQ ID NO: 2412042 - RNA, 20 nt, Human
cccugucuguagagggcccu

SEQ ID NO: 2412043 - RNA, 16 nt, Human
cccugucugccagggc

SEQ ID NO: 2412044 - RNA, 22 nt, Human
ccuggccgcccccugcccccca

SEQ ID NO: 2412045 - RNA, 21 nt, Human
ccuggccgcccccugcccccc

SEQ ID NO: 2412046 - RNA, 23 nt, Human
ccuggccggcaaccccaguucug

SEQ ID NO: 2412047 - RNA, 21 nt, Human
ccuggccggcaaccccaguuc

SEQ ID NO: 2412048 - RNA, 19 nt, Human
ccuggccggcaaccccagu

SEQ ID NO: 2412049 - RNA, 22 nt, Human
ccuggccggcaaccccaguucu

SEQ ID NO: 2412050 - RNA, 21 nt, Human
ccuggccucugcacuccccug

SEQ ID NO: 2412051 - RNA, 20 nt, Human
ccuggccucugcacuccccu

SEQ ID NO: 2412052 - RNA, 22 nt, Human
ccuggccuagcauacguacaca

SEQ ID NO: 2412053 - RNA, 13 nt, Human
ccuggccucugug

SEQ ID NO: 2412054 - RNA, 22 nt, Human
ccuggccucugcacuccccugc

SEQ ID NO: 2412055 - RNA, 20 nt, Human
ccugggccccaguuguauuu

SEQ ID NO: 2412056 - RNA, 23 nt, Human
ccugggccccaccaccuaggcca

SEQ ID NO: 2412057 - RNA, 11 nt, Human
ccugggcccuc

SEQ ID NO: 2412058 - RNA, 14 nt, Human
ccugggcccucucu

SEQ ID NO: 2412059 - RNA, 22 nt, Human
ccugggccccucaucugcucag

SEQ ID NO: 2412060 - RNA, 21 nt, Human
ccugggccccaccaccuaggc

SEQ ID NO: 2412061 - RNA, 12 nt, Human
ccugggggcucu

SEQ ID NO: 2412062 - RNA, 13 nt, Human
ccugggggcucuc

SEQ ID NO: 2412063 - RNA, 14 nt, Human
ccugggggcucuca

SEQ ID NO: 2412064 - RNA, 21 nt, Human
ccugguggcagugggagcugc

SEQ ID NO: 2412065 - RNA, 16 nt, Human
ccugggggaagcccug

SEQ ID NO: 2412066 - RNA, 17 nt, Human
ccugggggaagcccugg

SEQ ID NO: 2412067 - RNA, 19 nt, Human
ccugggggaagcccuggau

SEQ ID NO: 2412068 - RNA, 19 nt, Human
ccugggggcagggagagga

SEQ ID NO: 2412069 - RNA, 18 nt, Human
ccugggggaagcccugga

SEQ ID NO: 2412070 - RNA, 21 nt, Human
ccuggggcuucuccugaccca

SEQ ID NO: 2412071 - RNA, 18 nt, Human
ccuggggcuucuccugac

SEQ ID NO: 2412072 - RNA, 17 nt, Human
ccuggggcuucuccuga

SEQ ID NO: 2412073 - RNA, 19 nt, Human
ccuggggcuggccucccaa

SEQ ID NO: 2412074 - RNA, 12 nt, Human
ccuggggccucg

SEQ ID NO: 2412075 - RNA, 22 nt, Human
ccuggggccucggagccucauc

SEQ ID NO: 2412076 - RNA, 21 nt, Human
ccuggggccuggaccugccuc

SEQ ID NO: 2412077 - RNA, 19 nt, Human
ccuggggccuggaccugcc

SEQ ID NO: 2412078 - RNA, 18 nt, Human
ccuggggccuggaccugc

SEQ ID NO: 2412079 - RNA, 17 nt, Human
ccuggggccuggaccug

SEQ ID NO: 2412080 - RNA, 16 nt, Human
ccuggggccuggaccu

SEQ ID NO: 2412081 - RNA, 13 nt, Human
ccuggggccucuu

SEQ ID NO: 2412082 - RNA, 19 nt, Human
ccugggcccugggcuggaa

SEQ ID NO: 2412083 - RNA, 18 nt, Human
ccugggcccugggcugga

SEQ ID NO: 2412084 - RNA, 16 nt, Human
ccugggcccugggcug

SEQ ID NO: 2412085 - RNA, 15 nt, Human
ccugggcccugggcu

SEQ ID NO: 2412086 - RNA, 14 nt, Human
ccugggcccugggc

SEQ ID NO: 2412087 - RNA, 15 nt, Human
ccugggcccucucug

SEQ ID NO: 2412088 - RNA, 18 nt, Human
ccugggcccucucugcuc

SEQ ID NO: 2412089 - RNA, 13 nt, Human
ccugggccgcugc

SEQ ID NO: 2412090 - RNA, 17 nt, Human
ccugggccgcugccacg

SEQ ID NO: 2412091 - RNA, 16 nt, Human
ccugggccgcugccac

SEQ ID NO: 2412092 - RNA, 12 nt, Human
ccugggccugca

SEQ ID NO: 2412093 - RNA, 23 nt, Human
ccuggggcagucaccugcccaga

SEQ ID NO: 2412094 - RNA, 20 nt, Human
ccugucgagacacuugccuu

SEQ ID NO: 2412095 - RNA, 18 nt, Human
ccugucgagacacuugcc

SEQ ID NO: 2412096 - RNA, 18 nt, Human
ccuguccugggcuggugg

SEQ ID NO: 2412097 - RNA, 16 nt, Human
ccuguccugggcuggu

SEQ ID NO: 2412098 - RNA, 15 nt, Human
ccuguccugggcugg

SEQ ID NO: 2412099 - RNA, 19 nt, Human
ccuguccugccuaaggcug

SEQ ID NO: 2412100 - RNA, 17 nt, Human
ccugucgagacacuugc

SEQ ID NO: 2412101 - RNA, 15 nt, Human
ccugucgagacacuu

SEQ ID NO: 2412102 - RNA, 14 nt, Human
ccugucgagacacu

SEQ ID NO: 2412103 - RNA, 12 nt, Human
ccuguccuugca

SEQ ID NO: 2412104 - RNA, 21 nt, Human
ccuguccuucucucaccuccu

SEQ ID NO: 2412105 - RNA, 15 nt, Human
ccuguaaucacagcu

SEQ ID NO: 2412106 - RNA, 16 nt, Human
ccuguaauaaauauga

SEQ ID NO: 2412107 - RNA, 15 nt, Human
ccuguaauaaauaug

SEQ ID NO: 2412108 - RNA, 20 nt, Human
ccuguaaucauauaauaaau

SEQ ID NO: 2412109 - RNA, 22 nt, Human
ccuguaauaaauaugagugcca

SEQ ID NO: 2412110 - RNA, 13 nt, Human
ccuguaaucccag

SEQ ID NO: 2412111 - RNA, 15 nt, Human
ccuguaaucccagca

SEQ ID NO: 2412112 - RNA, 22 nt, Human
ccuguccugauggucagcuccc

SEQ ID NO: 2412113 - RNA, 13 nt, Human
ccuguccugaugg

SEQ ID NO: 2412114 - RNA, 23 nt, Human
ccuguccugauggucagcucccu

SEQ ID NO: 2412115 - RNA, 17 nt, Human
ccuguccugccuaaggc

SEQ ID NO: 2412116 - RNA, 16 nt, Human
ccuguaaucccagcac

SEQ ID NO: 2412117 - RNA, 17 nt, Human
ccuguaaucccagcacu

SEQ ID NO: 2412118 - RNA, 14 nt, Human
ccuguaaucccagc

SEQ ID NO: 2412119 - RNA, 19 nt, Human
ccuguccugaccugucuca

SEQ ID NO: 2412120 - RNA, 16 nt, Human
ccugggggcucucaug

SEQ ID NO: 2412121 - RNA, 14 nt, Human
ccuggugggccaac

SEQ ID NO: 2412122 - RNA, 17 nt, Human
ccugguggccucugccc

SEQ ID NO: 2412123 - RNA, 16 nt, Human
ccugguucucaucuuu

SEQ ID NO: 2412124 - RNA, 15 nt, Human
ccugguucucaucuu

SEQ ID NO: 2412125 - RNA, 13 nt, Human
ccugguucucauc

SEQ ID NO: 2412126 - RNA, 14 nt, Human
ccugguucucaucu

SEQ ID NO: 2412127 - RNA, 23 nt, Human
ccuggugggccaacaaagaacac

SEQ ID NO: 2412128 - RNA, 14 nt, Human
ccuggugggccucc

SEQ ID NO: 2412129 - RNA, 18 nt, Human
ccuggugggccuccucug

SEQ ID NO: 2412130 - RNA, 20 nt, Human
ccuggugggccuccucuguc

SEQ ID NO: 2412131 - RNA, 13 nt, Human
ccugguuuccugc

SEQ ID NO: 2412132 - RNA, 14 nt, Human
ccugguuuccugcc

SEQ ID NO: 2412133 - RNA, 21 nt, Human
ccugguucugaugaugugccu

SEQ ID NO: 2412134 - RNA, 15 nt, Human
ccugguucugaugau

SEQ ID NO: 2412135 - RNA, 17 nt, Human
ccugguuucacuggccc

SEQ ID NO: 2412136 - RNA, 18 nt, Human
ccugguuucacuggccca

SEQ ID NO: 2412137 - RNA, 15 nt, Human
ccugguuuccugccc

SEQ ID NO: 2412138 - RNA, 14 nt, Human
ccuguaauaaauau

SEQ ID NO: 2412139 - RNA, 13 nt, Human
ccuguaauaaaua

SEQ ID NO: 2412140 - RNA, 12 nt, Human
ccuguaauaaau

SEQ ID NO: 2412141 - RNA, 18 nt, Human
ccuguaacuugagaguag

SEQ ID NO: 2412142 - RNA, 21 nt, Human
ccugugacauggugccugaga

SEQ ID NO: 2412143 - RNA, 19 nt, Human
ccugugacauggugccuga

SEQ ID NO: 2412144 - RNA, 18 nt, Human
ccugugacauggugccug

SEQ ID NO: 2412145 - RNA, 17 nt, Human
ccugugacauggugccu

SEQ ID NO: 2412146 - RNA, 22 nt, Human
ccugugaaugccacugccuucg

SEQ ID NO: 2412147 - RNA, 21 nt, Human
ccugugaaugccacugccuuc

SEQ ID NO: 2412148 - RNA, 19 nt, Human
ccugugaaugccacugccu

SEQ ID NO: 2412149 - RNA, 17 nt, Human
ccugugaaugccacugc

SEQ ID NO: 2412150 - RNA, 16 nt, Human
ccugugaaugccacug

SEQ ID NO: 2412151 - RNA, 18 nt, Human
ccugugaaguaaggaugu

SEQ ID NO: 2412152 - RNA, 16 nt, Human
ccugugaacugaacuc

SEQ ID NO: 2412153 - RNA, 17 nt, Human
ccugugaacugaacucu

SEQ ID NO: 2412154 - RNA, 22 nt, Human
ccugugaaagacucaaugagcu

SEQ ID NO: 2412155 - RNA, 19 nt, Human
ccugugaaauaguucaaag

SEQ ID NO: 2412156 - RNA, 17 nt, Human
ccugugaccagcacugu

SEQ ID NO: 2412157 - RNA, 23 nt, Human
ccugugacauggugccugagagg

SEQ ID NO: 2412158 - RNA, 22 nt, Human
ccugugacauggugccugagag

SEQ ID NO: 2412159 - RNA, 19 nt, Human
ccugugaccagucugaccc

SEQ ID NO: 2412160 - RNA, 16 nt, Human
ccugugaccagcacug

SEQ ID NO: 2412161 - RNA, 15 nt, Human
ccugucuaaugaaac

SEQ ID NO: 2412162 - RNA, 17 nt, Human
ccugucggccugguguu

SEQ ID NO: 2412163 - RNA, 13 nt, Human
ccugucggccugg

SEQ ID NO: 2412164 - RNA, 22 nt, Human
ccugucuaaugaaaccuguguc

SEQ ID NO: 2412165 - RNA, 14 nt, Human
ccugucuagagagg

SEQ ID NO: 2412166 - RNA, 16 nt, Human
ccugucuagagaggga

SEQ ID NO: 2412167 - RNA, 20 nt, Human
ccugucugaaggacacuucc

SEQ ID NO: 2412168 - RNA, 22 nt, Human
ccugucucuuccauaugaccuc

SEQ ID NO: 2412169 - RNA, 21 nt, Human
ccugucugaaggacacuuccu

SEQ ID NO: 2412170 - RNA, 14 nt, Human
ccugucugccagcc

SEQ ID NO: 2412171 - RNA, 15 nt, Human
ccugucugccagcca

SEQ ID NO: 2412172 - RNA, 16 nt, Human
ccugucugccagccag

SEQ ID NO: 2412173 - RNA, 17 nt, Human
ccugucugccagccagc

SEQ ID NO: 2412174 - RNA, 19 nt, Human
ccugucugccagccagcag

SEQ ID NO: 2412175 - RNA, 20 nt, Human
ccugucugccagccagcagc

SEQ ID NO: 2412176 - RNA, 14 nt, Human
ccugucucuuccau

SEQ ID NO: 2412177 - RNA, 13 nt, Human
ccugucucuucca

SEQ ID NO: 2412178 - RNA, 13 nt, Human
ccugucucugccc

SEQ ID NO: 2412179 - RNA, 17 nt, Human
ccugucuagagagggag

SEQ ID NO: 2412180 - RNA, 17 nt, Human
ccugucucauccccagg

SEQ ID NO: 2412181 - RNA, 13 nt, Human
ccugucucagccu

SEQ ID NO: 2412182 - RNA, 14 nt, Human
ccugucucagccuc

SEQ ID NO: 2412183 - RNA, 15 nt, Human
ccugucucagccucc

SEQ ID NO: 2412184 - RNA, 16 nt, Human
ccugucucagccuccc

SEQ ID NO: 2412185 - RNA, 22 nt, Human
ccugucuuugggagaaaacguc

SEQ ID NO: 2412186 - RNA, 14 nt, Human
ccugucuuuaagga

SEQ ID NO: 2412187 - RNA, 17 nt, Human
ccugucuuuaaggaaaa

SEQ ID NO: 2412188 - RNA, 18 nt, Human
ccugucuucccaggguag

SEQ ID NO: 2412189 - RNA, 16 nt, Human
ccugucuucccagggu

SEQ ID NO: 2412190 - RNA, 15 nt, Human
ccugucuucccaggg

SEQ ID NO: 2412191 - RNA, 22 nt, Human
ccugucuuccugcauucaccca

SEQ ID NO: 2412192 - RNA, 15 nt, Human
ccugucuuccugcau

SEQ ID NO: 2412193 - RNA, 19 nt, Human
ccugucuuccugcauucac

SEQ ID NO: 2412194 - RNA, 21 nt, Human
ccugucugucucuccaucugu

SEQ ID NO: 2412195 - RNA, 19 nt, Human
ccugucugucucuccaucu

SEQ ID NO: 2412196 - RNA, 18 nt, Human
ccugucugucucuccauc

SEQ ID NO: 2412197 - RNA, 17 nt, Human
ccugucugucucuccau

SEQ ID NO: 2412198 - RNA, 14 nt, Human
ccugucuucccagg

SEQ ID NO: 2412199 - RNA, 17 nt, Human
ccugucuguuacacugg

SEQ ID NO: 2412200 - RNA, 23 nt, Human
ccugucuguagagggcccuggug

SEQ ID NO: 2412201 - RNA, 22 nt, Human
ccugucuguagagggcccuggu

SEQ ID NO: 2412202 - RNA, 21 nt, Human
ccugucuguagagggcccugg

SEQ ID NO: 2412203 - RNA, 20 nt, Human
ccugucuguagagggcccug

SEQ ID NO: 2412204 - RNA, 21 nt, Human
ccugucugccagccagcagcc

SEQ ID NO: 2412205 - RNA, 23 nt, Human
ccugucugccagccagcagccag

SEQ ID NO: 2412206 - RNA, 15 nt, Human
ccugucugccagggc

SEQ ID NO: 2412207 - RNA, 11 nt, Human
ccucuuucccu

SEQ ID NO: 2412208 - RNA, 23 nt, Human
ccucuuucaagcagucgugccug

SEQ ID NO: 2412209 - RNA, 19 nt, Human
ccucuuuagaguuagacug

SEQ ID NO: 2412210 - RNA, 18 nt, Human
ccugcacuugcagacucu

SEQ ID NO: 2412211 - RNA, 22 nt, Human
ccugcagaggucugugcugagg

SEQ ID NO: 2412212 - RNA, 21 nt, Human
ccugcagaggucugugcugag

SEQ ID NO: 2412213 - RNA, 20 nt, Human
ccugcagaggucugugcuga

SEQ ID NO: 2412214 - RNA, 19 nt, Human
ccugcagaggucugugcug

SEQ ID NO: 2412215 - RNA, 14 nt, Human
ccugagucuccugu

SEQ ID NO: 2412216 - RNA, 18 nt, Human
ccugcagaggucugugcu

SEQ ID NO: 2412217 - RNA, 15 nt, Human
ccugagucuccugug

SEQ ID NO: 2412218 - RNA, 19 nt, Human
ccugcagaggggaaaccag

SEQ ID NO: 2412219 - RNA, 17 nt, Human
ccugcacuugcagacuc

SEQ ID NO: 2412220 - RNA, 16 nt, Human
ccugcacuugcagacu

SEQ ID NO: 2412221 - RNA, 21 nt, Human
ccugagucguacagaaagcug

SEQ ID NO: 2412222 - RNA, 22 nt, Human
ccugagucguacagaaagcugc

SEQ ID NO: 2412223 - RNA, 19 nt, Human
ccugagucguacagaaagc

SEQ ID NO: 2412224 - RNA, 23 nt, Human
ccugagucacccuaccugugccu

SEQ ID NO: 2412225 - RNA, 23 nt, Human
ccugaguccaagaggguccuuua

SEQ ID NO: 2412226 - RNA, 15 nt, Human
ccugagucaccagga

SEQ ID NO: 2412227 - RNA, 13 nt, Human
ccugacccaggcc

SEQ ID NO: 2412228 - RNA, 16 nt, Human
ccugacccaggccgca

SEQ ID NO: 2412229 - RNA, 15 nt, Human
ccugacccaggccgc

SEQ ID NO: 2412230 - RNA, 14 nt, Human
ccugacccaggccg

SEQ ID NO: 2412231 - RNA, 21 nt, Human
ccugaguagcugggauuacag

SEQ ID NO: 2412232 - RNA, 18 nt, Human
ccugacccaggccgcagc

SEQ ID NO: 2412233 - RNA, 13 nt, Human
ccugagucaccag

SEQ ID NO: 2412234 - RNA, 14 nt, Human
ccugagucaccagg

SEQ ID NO: 2412235 - RNA, 15 nt, Human
ccugagucacccaug

SEQ ID NO: 2412236 - RNA, 18 nt, Human
ccugagucacccaugaag

SEQ ID NO: 2412237 - RNA, 20 nt, Human
ccugaccaacaguuccuuca

SEQ ID NO: 2412238 - RNA, 13 nt, Human
ccucuuucccucc

SEQ ID NO: 2412239 - RNA, 21 nt, Human
ccugaccacccuccccucucu

SEQ ID NO: 2412240 - RNA, 20 nt, Human
ccugaccacccuccccucuc

SEQ ID NO: 2412241 - RNA, 18 nt, Human
ccugaccacccuccccuc

SEQ ID NO: 2412242 - RNA, 17 nt, Human
ccugaccacccuccccu

SEQ ID NO: 2412243 - RNA, 23 nt, Human
ccugaccacccuccccucucuug

SEQ ID NO: 2412244 - RNA, 20 nt, Human
ccugaccacgcuuucuagcu

SEQ ID NO: 2412245 - RNA, 15 nt, Human
ccugaccacccuccc

SEQ ID NO: 2412246 - RNA, 14 nt, Human
ccugaccacccucc

SEQ ID NO: 2412247 - RNA, 13 nt, Human
ccugaccacccuc

SEQ ID NO: 2412248 - RNA, 12 nt, Human
ccugaccacccu

SEQ ID NO: 2412249 - RNA, 13 nt, Human
ccucuuucaucca

SEQ ID NO: 2412250 - RNA, 15 nt, Human
ccucuuucauccacu

SEQ ID NO: 2412251 - RNA, 19 nt, Human
ccugaccaacauggagaaa

SEQ ID NO: 2412252 - RNA, 19 nt, Human
ccugcagccuccuccugac

SEQ ID NO: 2412253 - RNA, 22 nt, Human
ccugcagccccgcgccuccuuc

SEQ ID NO: 2412254 - RNA, 18 nt, Human
ccugcagccuccuccuga

SEQ ID NO: 2412255 - RNA, 15 nt, Human
ccugcagccuccucc

SEQ ID NO: 2412256 - RNA, 19 nt, Human
ccugccccagcccaagucc

SEQ ID NO: 2412257 - RNA, 18 nt, Human
ccugccccagcccaaguc

SEQ ID NO: 2412258 - RNA, 17 nt, Human
ccugccccagcccaagu

SEQ ID NO: 2412259 - RNA, 15 nt, Human
ccugccccagcccaa

SEQ ID NO: 2412260 - RNA, 14 nt, Human
ccugccccaggccu

SEQ ID NO: 2412261 - RNA, 18 nt, Human
ccugccccaggccugaaa

SEQ ID NO: 2412262 - RNA, 16 nt, Human
ccugccccaggccuga

SEQ ID NO: 2412263 - RNA, 17 nt, Human
ccugccccagggcuccc

SEQ ID NO: 2412264 - RNA, 19 nt, Human
ccugccuccacccucugag

SEQ ID NO: 2412265 - RNA, 18 nt, Human
ccugccuccacccucuga

SEQ ID NO: 2412266 - RNA, 16 nt, Human
ccugcccccaauccau

SEQ ID NO: 2412267 - RNA, 12 nt, Human
ccugccuccagg

SEQ ID NO: 2412268 - RNA, 20 nt, Human
ccugccuccacccucugagc

SEQ ID NO: 2412269 - RNA, 14 nt, Human
ccugccuccaggaa

SEQ ID NO: 2412270 - RNA, 15 nt, Human
ccugcccccaaucca

SEQ ID NO: 2412271 - RNA, 15 nt, Human
ccugcccccaaauaa

SEQ ID NO: 2412272 - RNA, 16 nt, Human
ccugccuccacccucu

SEQ ID NO: 2412273 - RNA, 18 nt, Human
ccugcccagaucccagaa

SEQ ID NO: 2412274 - RNA, 12 nt, Human
ccugcccaggag

SEQ ID NO: 2412275 - RNA, 20 nt, Human
ccugcccaggagagccagcc

SEQ ID NO: 2412276 - RNA, 22 nt, Human
ccugcccaggagagccagcccu

SEQ ID NO: 2412277 - RNA, 23 nt, Human
ccugcccaggagagccagcccuc

SEQ ID NO: 2412278 - RNA, 14 nt, Human
ccugcccaccuguc

SEQ ID NO: 2412279 - RNA, 22 nt, Human
ccugcccacccguggagauggg

SEQ ID NO: 2412280 - RNA, 13 nt, Human
ccugcccaccugu

SEQ ID NO: 2412281 - RNA, 14 nt, Human
ccugccccagccca

SEQ ID NO: 2412282 - RNA, 13 nt, Human
ccugccccagccc

SEQ ID NO: 2412283 - RNA, 12 nt, Human
ccugccccagcc

SEQ ID NO: 2412284 - RNA, 21 nt, Human
ccugccccaacucuccccuga

SEQ ID NO: 2412285 - RNA, 24 nt, Human
ccugccccaacucuccccugaccu

SEQ ID NO: 2412286 - RNA, 20 nt, Human
ccugccccaaucccuuuauu

SEQ ID NO: 2412287 - RNA, 13 nt, Human
ccugcccaggccc

SEQ ID NO: 2412288 - RNA, 12 nt, Human
ccugcccaccug

SEQ ID NO: 2412289 - RNA, 20 nt, Human
ccugcccaccuggccucugc

SEQ ID NO: 2412290 - RNA, 14 nt, Human
ccugcccaccuggc

SEQ ID NO: 2412291 - RNA, 13 nt, Human
ccugcccaccugg

SEQ ID NO: 2412292 - RNA, 12 nt, Human
ccugcccacccg

SEQ ID NO: 2412293 - RNA, 13 nt, Human
ccugcccacccgu

SEQ ID NO: 2412294 - RNA, 20 nt, Human
ccugcugcugacccagccug

SEQ ID NO: 2412295 - RNA, 18 nt, Human
ccugcugcugacccagcc

SEQ ID NO: 2412296 - RNA, 20 nt, Human
ccugcugcaguugccaguca

SEQ ID NO: 2412297 - RNA, 21 nt, Human
ccugcugcaguugccagucac

SEQ ID NO: 2412298 - RNA, 23 nt, Human
ccugcugccgccucccagccugg

SEQ ID NO: 2412299 - RNA, 22 nt, Human
ccugcugccgccucccagccug

SEQ ID NO: 2412300 - RNA, 13 nt, Human
ccugcugccuccc

SEQ ID NO: 2412301 - RNA, 15 nt, Human
ccugcugccucccca

SEQ ID NO: 2412302 - RNA, 16 nt, Human
ccugcugccuccccaa

SEQ ID NO: 2412303 - RNA, 17 nt, Human
ccugcugccuccccaac

SEQ ID NO: 2412304 - RNA, 21 nt, Human
ccugcugccuccccaacccug

SEQ ID NO: 2412305 - RNA, 19 nt, Human
ccugcugccuccccaaccc

SEQ ID NO: 2412306 - RNA, 20 nt, Human
ccugcugccuccccaacccu

SEQ ID NO: 2412307 - RNA, 23 nt, Human
ccugcugccuccccaacccugcc

SEQ ID NO: 2412308 - RNA, 19 nt, Human
ccugcugcaguugccaguc

SEQ ID NO: 2412309 - RNA, 17 nt, Human
ccugcugcaguugccag

SEQ ID NO: 2412310 - RNA, 23 nt, Human
ccugccucgaacuggcugcaaag

SEQ ID NO: 2412311 - RNA, 21 nt, Human
ccugccucgaacuggcugcaa

SEQ ID NO: 2412312 - RNA, 12 nt, Human
ccugccuccugc

SEQ ID NO: 2412313 - RNA, 16 nt, Human
ccugccucccuucaug

SEQ ID NO: 2412314 - RNA, 15 nt, Human
ccugccuccccugug

SEQ ID NO: 2412315 - RNA, 17 nt, Human
ccugccuccccugugca

SEQ ID NO: 2412316 - RNA, 19 nt, Human
ccugccucgaacuggcugc

SEQ ID NO: 2412317 - RNA, 17 nt, Human
ccugccuccagggcugg

SEQ ID NO: 2412318 - RNA, 16 nt, Human
ccugccuccagggcug

SEQ ID NO: 2412319 - RNA, 15 nt, Human
ccugccuccagggcu

SEQ ID NO: 2412320 - RNA, 15 nt, Human
ccugccuccaggaac

SEQ ID NO: 2412321 - RNA, 20 nt, Human
ccugccuccaggaaccacac

SEQ ID NO: 2412322 - RNA, 21 nt, Human
ccugccuccagggcuggacug

SEQ ID NO: 2412323 - RNA, 20 nt, Human
ccugccuccagggcuggacu

SEQ ID NO: 2412324 - RNA, 23 nt, Human
ccugccuccagggcuggacugag

SEQ ID NO: 2412325 - RNA, 15 nt, Human
cccagcacugaggaa

SEQ ID NO: 2412326 - RNA, 14 nt, Human
cccagcacugagga

SEQ ID NO: 2412327 - RNA, 12 nt, Human
cccagcccaccc

SEQ ID NO: 2412328 - RNA, 13 nt, Human
cccagcccaaguc

SEQ ID NO: 2412329 - RNA, 14 nt, Human
cccagcccaagucc

SEQ ID NO: 2412330 - RNA, 12 nt, Human
cccagcccaagu

SEQ ID NO: 2412331 - RNA, 15 nt, Human
cccagcaggugggga

SEQ ID NO: 2412332 - RNA, 19 nt, Human
cccagccauuaccauggag

SEQ ID NO: 2412333 - RNA, 20 nt, Human
cccagccauuaccauggaga

SEQ ID NO: 2412334 - RNA, 22 nt, Human
cccagccauuaccauggagaca

SEQ ID NO: 2412335 - RNA, 16 nt, Human
cccagcccaaagcugu

SEQ ID NO: 2412336 - RNA, 15 nt, Human
cccagcccacccucc

SEQ ID NO: 2412337 - RNA, 14 nt, Human
cccagcccacccuc

SEQ ID NO: 2412338 - RNA, 13 nt, Human
cccagcccacccu

SEQ ID NO: 2412339 - RNA, 18 nt, Human
cccagcugugagccuugg

SEQ ID NO: 2412340 - RNA, 14 nt, Human
cccagcccacuucu

SEQ ID NO: 2412341 - RNA, 22 nt, Human
cccagcagcccuaaggaucucu

SEQ ID NO: 2412342 - RNA, 17 nt, Human
cccagcagcccuaagga

SEQ ID NO: 2412343 - RNA, 21 nt, Human
cccagcacuuugggaggccua

SEQ ID NO: 2412344 - RNA, 18 nt, Human
cccagcagggccacuccc

SEQ ID NO: 2412345 - RNA, 13 nt, Human
cccagcagggccu

SEQ ID NO: 2412346 - RNA, 22 nt, Human
cccagcagggucuuuucaucug

SEQ ID NO: 2412347 - RNA, 19 nt, Human
cccagcagggccucaaagu

SEQ ID NO: 2412348 - RNA, 16 nt, Human
cccagcagguggggag

SEQ ID NO: 2412349 - RNA, 16 nt, Human
cccagcacuuggagag

SEQ ID NO: 2412350 - RNA, 18 nt, Human
cccagcacuuguguuguc

SEQ ID NO: 2412351 - RNA, 21 nt, Human
cccagcacugcuugaggaaaa

SEQ ID NO: 2412352 - RNA, 24 nt, Human
cccagcacugaggaagaacggggc

SEQ ID NO: 2412353 - RNA, 20 nt, Human
cccagcacuuugggaggccu

SEQ ID NO: 2412354 - RNA, 22 nt, Human
cccagcacuuugggaggccaag

SEQ ID NO: 2412355 - RNA, 20 nt, Human
cccagcacuuugggaggcca

SEQ ID NO: 2412356 - RNA, 12 nt, Human
cccagcacuuug

SEQ ID NO: 2412357 - RNA, 17 nt, Human
cccagcacuuugggagg

SEQ ID NO: 2412358 - RNA, 15 nt, Human
cccagcacuuuggga

SEQ ID NO: 2412359 - RNA, 15 nt, Human
cccaggcuuagucac

SEQ ID NO: 2412360 - RNA, 12 nt, Human
cccaggcugggc

SEQ ID NO: 2412361 - RNA, 16 nt, Human
cccaggcuggucucaa

SEQ ID NO: 2412362 - RNA, 15 nt, Human
cccagggcuacccuc

SEQ ID NO: 2412363 - RNA, 19 nt, Human
cccaggcugggcaaggagg

SEQ ID NO: 2412364 - RNA, 13 nt, Human
cccaggcugggca

SEQ ID NO: 2412365 - RNA, 20 nt, Human
cccaggcuuagucacugaga

SEQ ID NO: 2412366 - RNA, 21 nt, Human
cccagggcuacccucccccag

SEQ ID NO: 2412367 - RNA, 14 nt, Human
cccagggcucagcc

SEQ ID NO: 2412368 - RNA, 15 nt, Human
cccagggcucagccu

SEQ ID NO: 2412369 - RNA, 16 nt, Human
cccagggcucagccug

SEQ ID NO: 2412370 - RNA, 21 nt, Human
cccaggcuggcgugcaguggu

SEQ ID NO: 2412371 - RNA, 20 nt, Human
cccaggacaccacacccagc

SEQ ID NO: 2412372 - RNA, 19 nt, Human
cccaggacaccacacccag

SEQ ID NO: 2412373 - RNA, 22 nt, Human
cccaggaaugccaaggagacau

SEQ ID NO: 2412374 - RNA, 22 nt, Human
cccaggaaaggcuccaggagca

SEQ ID NO: 2412375 - RNA, 21 nt, Human
cccaggaaaggcuccaggagc

SEQ ID NO: 2412376 - RNA, 23 nt, Human
cccaggaaaggcuccaggagcag

SEQ ID NO: 2412377 - RNA, 11 nt, Human
cccaggaacaa

SEQ ID NO: 2412378 - RNA, 19 nt, Human
cccagcugugagccuuggc

SEQ ID NO: 2412379 - RNA, 18 nt, Human
cccagcccacccuccugu

SEQ ID NO: 2412380 - RNA, 16 nt, Human
cccagcccacccuccu

SEQ ID NO: 2412381 - RNA, 15 nt, Human
cccaggaacugggcc

SEQ ID NO: 2412382 - RNA, 12 nt, Human
cccaggaagccg

SEQ ID NO: 2412383 - RNA, 23 nt, Human
cccagcugugcucuggacaggca

SEQ ID NO: 2412384 - RNA, 21 nt, Human
cccagcugugcucuggacagg

SEQ ID NO: 2412385 - RNA, 19 nt, Human
cccaggaaaggcuccagga

SEQ ID NO: 2412386 - RNA, 11 nt, Human
cccagcuguuu

SEQ ID NO: 2412387 - RNA, 14 nt, Human
ccauuucuauuuau

SEQ ID NO: 2412388 - RNA, 13 nt, Human
ccauuucuauuua

SEQ ID NO: 2412389 - RNA, 12 nt, Human
ccauuucuauuu

SEQ ID NO: 2412390 - RNA, 22 nt, Human
ccauuucuacucuuaaguuucu

SEQ ID NO: 2412391 - RNA, 23 nt, Human
ccauuucuagaacaucccugcca

SEQ ID NO: 2412392 - RNA, 14 nt, Human
ccauuucucacuga

SEQ ID NO: 2412393 - RNA, 13 nt, Human
ccauuucucacug

SEQ ID NO: 2412394 - RNA, 17 nt, Human
ccauuucuauuuauuua

SEQ ID NO: 2412395 - RNA, 12 nt, Human
ccauuucucaug

SEQ ID NO: 2412396 - RNA, 16 nt, Human
ccauuucucacugaga

SEQ ID NO: 2412397 - RNA, 22 nt, Human
cccauucugccugcccaggccc

SEQ ID NO: 2412398 - RNA, 21 nt, Human
cccauucugccugcccaggcc

SEQ ID NO: 2412399 - RNA, 20 nt, Human
cccauucugccugcccaggc

SEQ ID NO: 2412400 - RNA, 21 nt, Human
ccccauccucuguacagagcc

SEQ ID NO: 2412401 - RNA, 19 nt, Human
ccccauccucuguacagag

SEQ ID NO: 2412402 - RNA, 22 nt, Human
ccccauccucuguacagagccc

SEQ ID NO: 2412403 - RNA, 19 nt, Human
ccccaucuggguccuugca

SEQ ID NO: 2412404 - RNA, 14 nt, Human
ccccaucugggucc

SEQ ID NO: 2412405 - RNA, 12 nt, Human
ccccaucuguga

SEQ ID NO: 2412406 - RNA, 17 nt, Human
ccccauccucuguacag

SEQ ID NO: 2412407 - RNA, 20 nt, Human
cccauuucuagaacaucccu

SEQ ID NO: 2412408 - RNA, 19 nt, Human
cccauuucuauuuauuuac

SEQ ID NO: 2412409 - RNA, 20 nt, Human
ccccagcaagugagagcugg

SEQ ID NO: 2412410 - RNA, 19 nt, Human
ccccagcaagugagagcug

SEQ ID NO: 2412411 - RNA, 17 nt, Human
ccccagcaagugagagc

SEQ ID NO: 2412412 - RNA, 23 nt, Human
ccccagauugcaacaggcugggc

SEQ ID NO: 2412413 - RNA, 22 nt, Human
ccccagauugcaacaggcuggg

SEQ ID NO: 2412414 - RNA, 21 nt, Human
ccccagauugcaacaggcugg

SEQ ID NO: 2412415 - RNA, 20 nt, Human
cccauuuaaauuuuuuuccu

SEQ ID NO: 2412416 - RNA, 15 nt, Human
cccauuuauccaccu

SEQ ID NO: 2412417 - RNA, 12 nt, Human
cccauuucagcu

SEQ ID NO: 2412418 - RNA, 13 nt, Human
cccauuucagcug

SEQ ID NO: 2412419 - RNA, 18 nt, Human
cccauuuauccaccucca

SEQ ID NO: 2412420 - RNA, 19 nt, Human
cccauuuauccaccuccau

SEQ ID NO: 2412421 - RNA, 17 nt, Human
cccauuucuauuuauuu

SEQ ID NO: 2412422 - RNA, 16 nt, Human
cccauuucuauuuauu

SEQ ID NO: 2412423 - RNA, 22 nt, Human
cccauuucuacucuuaaguuuc

SEQ ID NO: 2412424 - RNA, 12 nt, Human
cccauuucuacu

SEQ ID NO: 2412425 - RNA, 15 nt, Human
cccauuucuauuuau

SEQ ID NO: 2412426 - RNA, 17 nt, Human
cccauuucccaucugca

SEQ ID NO: 2412427 - RNA, 16 nt, Human
cccauuucccaucugc

SEQ ID NO: 2412428 - RNA, 15 nt, Human
cccauuucccaucug

SEQ ID NO: 2412429 - RNA, 14 nt, Human
cccauuucccaucu

SEQ ID NO: 2412430 - RNA, 19 nt, Human
cccauuucccaucugcacc

SEQ ID NO: 2412431 - RNA, 18 nt, Human
cccauuucuaaaggccuc

SEQ ID NO: 2412432 - RNA, 21 nt, Human
cccauuucuaaaggccucuuc

SEQ ID NO: 2412433 - RNA, 23 nt, Human
cccaguuugcagaaaagcaccug

SEQ ID NO: 2412434 - RNA, 23 nt, Human
cccauaauuuuuuuuuuccuuuu

SEQ ID NO: 2412435 - RNA, 22 nt, Human
cccauaauuuuuuuuuuccuuu

SEQ ID NO: 2412436 - RNA, 19 nt, Human
cccauaauuuucuucaugc

SEQ ID NO: 2412437 - RNA, 17 nt, Human
cccaguuucugccucug

SEQ ID NO: 2412438 - RNA, 16 nt, Human
cccaguuucugccucu

SEQ ID NO: 2412439 - RNA, 14 nt, Human
cccaguuucugccu

SEQ ID NO: 2412440 - RNA, 20 nt, Human
cccaguuucugccucugagg

SEQ ID NO: 2412441 - RNA, 15 nt, Human
cccaguuugcagaaa

SEQ ID NO: 2412442 - RNA, 16 nt, Human
cccaguuugcagaaaa

SEQ ID NO: 2412443 - RNA, 22 nt, Human
cccaguuugcagaaaagcaccu

SEQ ID NO: 2412444 - RNA, 15 nt, Human
cccagggcuccugca

SEQ ID NO: 2412445 - RNA, 14 nt, Human
cccagggcuccugc

SEQ ID NO: 2412446 - RNA, 20 nt, Human
cccagggcucagccuggugg

SEQ ID NO: 2412447 - RNA, 17 nt, Human
cccagggcucagccugg

SEQ ID NO: 2412448 - RNA, 18 nt, Human
cccagggcucagccuggu

SEQ ID NO: 2412449 - RNA, 13 nt, Human
cccaguuguauuu

SEQ ID NO: 2412450 - RNA, 17 nt, Human
cccaggggaaaaugaag

SEQ ID NO: 2412451 - RNA, 17 nt, Human
ccccuucgcuccugugu

SEQ ID NO: 2412452 - RNA, 15 nt, Human
ccccuucgcuccugu

SEQ ID NO: 2412453 - RNA, 14 nt, Human
ccccuucgcuccug

SEQ ID NO: 2412454 - RNA, 22 nt, Human
ccccuuccugucccaccucuuc

SEQ ID NO: 2412455 - RNA, 12 nt, Human
ccccuuccuguc

SEQ ID NO: 2412456 - RNA, 21 nt, Human
ccccuucuacauuucuuagac

SEQ ID NO: 2412457 - RNA, 19 nt, Human
ccccuucgcuccugugucu

SEQ ID NO: 2412458 - RNA, 15 nt, Human
ccccuucucaucacu

SEQ ID NO: 2412459 - RNA, 16 nt, Human
ccccuucucagaaucu

SEQ ID NO: 2412460 - RNA, 14 nt, Human
ccccuucucagaau

SEQ ID NO: 2412461 - RNA, 22 nt, Human
ccccuucuagguggcaaggcug

SEQ ID NO: 2412462 - RNA, 20 nt, Human
ccccuuccuugcucugcacc

SEQ ID NO: 2412463 - RNA, 19 nt, Human
ccccuuccuugcucugcac

SEQ ID NO: 2412464 - RNA, 16 nt, Human
ccccuucucucaucuc

SEQ ID NO: 2412465 - RNA, 13 nt, Human
ccccuucucucau

SEQ ID NO: 2412466 - RNA, 16 nt, Human
ccccuucucccacacu

SEQ ID NO: 2412467 - RNA, 12 nt, Human
ccccuucuccca

SEQ ID NO: 2412468 - RNA, 13 nt, Human
ccccuucucccac

SEQ ID NO: 2412469 - RNA, 15 nt, Human
ccccugcaaagccca

SEQ ID NO: 2412470 - RNA, 21 nt, Human
ccccugagcaaugucugugcu

SEQ ID NO: 2412471 - RNA, 19 nt, Human
ccccugagcaaugucugug

SEQ ID NO: 2412472 - RNA, 18 nt, Human
ccccugagcaaugucugu

SEQ ID NO: 2412473 - RNA, 20 nt, Human
ccccugaccugugagcccag

SEQ ID NO: 2412474 - RNA, 21 nt, Human
ccccugagacaaauggaggcc

SEQ ID NO: 2412475 - RNA, 15 nt, Human
ccccugaccugugag

SEQ ID NO: 2412476 - RNA, 18 nt, Human
ccccugcacuccagccug

SEQ ID NO: 2412477 - RNA, 16 nt, Human
ccccugcaaagcccag

SEQ ID NO: 2412478 - RNA, 12 nt, Human
ccccugauuaca

SEQ ID NO: 2412479 - RNA, 22 nt, Human
ccccugcacuggaguccagucu

SEQ ID NO: 2412480 - RNA, 14 nt, Human
ccccauucugccug

SEQ ID NO: 2412481 - RNA, 13 nt, Human
ccccauucugccu

SEQ ID NO: 2412482 - RNA, 15 nt, Human
ccccauucugccugc

SEQ ID NO: 2412483 - RNA, 15 nt, Human
ccccaugauguaagu

SEQ ID NO: 2412484 - RNA, 13 nt, Human
ccccaucugugaa

SEQ ID NO: 2412485 - RNA, 14 nt, Human
ccccaucugugaau

SEQ ID NO: 2412486 - RNA, 14 nt, Human
ccccaucuugcuuc

SEQ ID NO: 2412487 - RNA, 12 nt, Human
ccccaucuugcu

SEQ ID NO: 2412488 - RNA, 19 nt, Human
ccccaugcacugugaagga

SEQ ID NO: 2412489 - RNA, 23 nt, Human
ccccaugcacugugaaggacccu

SEQ ID NO: 2412490 - RNA, 13 nt, Human
ccccaugcacugu

SEQ ID NO: 2412491 - RNA, 23 nt, Human
ccccauuccugggaaauauuccc

SEQ ID NO: 2412492 - RNA, 13 nt, Human
ccccaugccaaag

SEQ ID NO: 2412493 - RNA, 22 nt, Human
ccccaugccaaagcuagggugg

SEQ ID NO: 2412494 - RNA, 21 nt, Human
cccucagaacccuuggcuugc

SEQ ID NO: 2412495 - RNA, 22 nt, Human
cccucagaacccuuggcuugcc

SEQ ID NO: 2412496 - RNA, 23 nt, Human
cccucagaacccuuggcuugccc

SEQ ID NO: 2412497 - RNA, 20 nt, Human
cccucagaaacacuggggcu

SEQ ID NO: 2412498 - RNA, 17 nt, Human
cccucagaacccuuggc

SEQ ID NO: 2412499 - RNA, 18 nt, Human
cccucagaacccuuggcu

SEQ ID NO: 2412500 - RNA, 17 nt, Human
cccucagaaacacuggg

SEQ ID NO: 2412501 - RNA, 15 nt, Human
cccucagcaccccuu

SEQ ID NO: 2412502 - RNA, 14 nt, Human
cccucagcaccccu

SEQ ID NO: 2412503 - RNA, 13 nt, Human
cccucagagccac

SEQ ID NO: 2412504 - RNA, 15 nt, Human
cccucagagugcaag

SEQ ID NO: 2412505 - RNA, 19 nt, Human
ccccuucugcucagcucug

SEQ ID NO: 2412506 - RNA, 20 nt, Human
ccccuucugcucagcucugg

SEQ ID NO: 2412507 - RNA, 22 nt, Human
ccccuucugggcaucuguucug

SEQ ID NO: 2412508 - RNA, 14 nt, Human
ccccuucugggcau

SEQ ID NO: 2412509 - RNA, 21 nt, Human
ccccuucugcucagcucuggg

SEQ ID NO: 2412510 - RNA, 23 nt, Human
ccccuucugggcaucuguucugg

SEQ ID NO: 2412511 - RNA, 14 nt, Human
ccccuugccacccc

SEQ ID NO: 2412512 - RNA, 20 nt, Human
ccccuugccaccccacccuc

SEQ ID NO: 2412513 - RNA, 16 nt, Human
ccccuucugacccaug

SEQ ID NO: 2412514 - RNA, 14 nt, Human
ccccuucucuccuc

SEQ ID NO: 2412515 - RNA, 14 nt, Human
ccccuucugcucag

SEQ ID NO: 2412516 - RNA, 17 nt, Human
ccccuucugacccaugc

SEQ ID NO: 2412517 - RNA, 12 nt, Human
cccgggaagggg

SEQ ID NO: 2412518 - RNA, 22 nt, Human
cccuauccuacuuccccuuccu

SEQ ID NO: 2412519 - RNA, 17 nt, Human
cccggcugguuuuguaa

SEQ ID NO: 2412520 - RNA, 23 nt, Human
cccggcugguuuuguaagaugcu

SEQ ID NO: 2412521 - RNA, 12 nt, Human
cccggcugcccu

SEQ ID NO: 2412522 - RNA, 13 nt, Human
cccggcugcccuu

SEQ ID NO: 2412523 - RNA, 12 nt, Human
cccggcugcgga

SEQ ID NO: 2412524 - RNA, 23 nt, Human
cccuaucuaacccucccauggca

SEQ ID NO: 2412525 - RNA, 17 nt, Human
cccuaucuaacccuccc

SEQ ID NO: 2412526 - RNA, 14 nt, Human
cccuaucuuugcca

SEQ ID NO: 2412527 - RNA, 16 nt, Human
cccuaucuuugccacc

SEQ ID NO: 2412528 - RNA, 19 nt, Human
cccuaucuuugccacccuc

SEQ ID NO: 2412529 - RNA, 20 nt, Human
cccucaacucuccuccagag

SEQ ID NO: 2412530 - RNA, 16 nt, Human
cccuauggggaugguc

SEQ ID NO: 2412531 - RNA, 18 nt, Human
cccuauggggauggucca

SEQ ID NO: 2412532 - RNA, 21 nt, Human
cccuaucuuugccacccucau

SEQ ID NO: 2412533 - RNA, 13 nt, Human
cccuaugcugccu

SEQ ID NO: 2412534 - RNA, 16 nt, Human
cccuauggaugugggg

SEQ ID NO: 2412535 - RNA, 17 nt, Human
cccuauggaagcauauu

SEQ ID NO: 2412536 - RNA, 14 nt, Human
cccucacuggauga

SEQ ID NO: 2412537 - RNA, 18 nt, Human
cccucacugaaugccuca

SEQ ID NO: 2412538 - RNA, 16 nt, Human
cccucacucuggccuc

SEQ ID NO: 2412539 - RNA, 14 nt, Human
cccucacucuggcc

SEQ ID NO: 2412540 - RNA, 13 nt, Human
cccucacagccuc

SEQ ID NO: 2412541 - RNA, 12 nt, Human
cccucacagccu

SEQ ID NO: 2412542 - RNA, 10 nt, Human
cccucacacu

SEQ ID NO: 2412543 - RNA, 12 nt, Human
cccucacacugg

SEQ ID NO: 2412544 - RNA, 13 nt, Human
cccucacacuggg

SEQ ID NO: 2412545 - RNA, 14 nt, Human
cccucacacuggga

SEQ ID NO: 2412546 - RNA, 21 nt, Human
cccucaaggccucccacagug

SEQ ID NO: 2412547 - RNA, 20 nt, Human
cccucaaggccucccacagu

SEQ ID NO: 2412548 - RNA, 19 nt, Human
cccucaaggccucccacag

SEQ ID NO: 2412549 - RNA, 18 nt, Human
cccucaaggccucccaca

SEQ ID NO: 2412550 - RNA, 22 nt, Human
cccucaaggccucccacaguga

SEQ ID NO: 2412551 - RNA, 19 nt, Human
cccucaauucccccuggcc

SEQ ID NO: 2412552 - RNA, 17 nt, Human
cccucaaggccucccac

SEQ ID NO: 2412553 - RNA, 21 nt, Human
cccucaagccaauccccuccu

SEQ ID NO: 2412554 - RNA, 16 nt, Human
cccucaaggccuccca

SEQ ID NO: 2412555 - RNA, 20 nt, Human
cccucaagccaauccccucc

SEQ ID NO: 2412556 - RNA, 17 nt, Human
cccucaagaggaaguga

SEQ ID NO: 2412557 - RNA, 14 nt, Human
ccauacauuugugu

SEQ ID NO: 2412558 - RNA, 13 nt, Human
ccauacauuugug

SEQ ID NO: 2412559 - RNA, 22 nt, Human
ccauaaccgcugauucucaggg

SEQ ID NO: 2412560 - RNA, 23 nt, Human
ccauaauuuucuucaugcaauga

SEQ ID NO: 2412561 - RNA, 17 nt, Human
ccauaaccgcugauucu

SEQ ID NO: 2412562 - RNA, 16 nt, Human
ccauaaccgcugauuc

SEQ ID NO: 2412563 - RNA, 20 nt, Human
ccauaauuuuuuuuuuccuu

SEQ ID NO: 2412564 - RNA, 23 nt, Human
ccaucccaaacccuucagugcca

SEQ ID NO: 2412565 - RNA, 13 nt, Human
ccauacagcucua

SEQ ID NO: 2412566 - RNA, 12 nt, Human
ccaucccacacc

SEQ ID NO: 2412567 - RNA, 14 nt, Human
ccaucccacacccu

SEQ ID NO: 2412568 - RNA, 12 nt, Human
ccaucccagccc

SEQ ID NO: 2412569 - RNA, 18 nt, Human
ccauccccauccuccagc

SEQ ID NO: 2412570 - RNA, 21 nt, Human
ccaucccagagggugggcuuc

SEQ ID NO: 2412571 - RNA, 17 nt, Human
ccauccccauccuccag

SEQ ID NO: 2412572 - RNA, 16 nt, Human
ccaucccacacccugg

SEQ ID NO: 2412573 - RNA, 20 nt, Human
ccaucccacugcucccccaa

SEQ ID NO: 2412574 - RNA, 17 nt, Human
ccaucccacugcucccc

SEQ ID NO: 2412575 - RNA, 15 nt, Human
ccauaacagccaaca

SEQ ID NO: 2412576 - RNA, 13 nt, Human
ccauaacagccaa

SEQ ID NO: 2412577 - RNA, 13 nt, Human
ccauaaagaagca

SEQ ID NO: 2412578 - RNA, 20 nt, Human
ccauaaagaagauguuuaac

SEQ ID NO: 2412579 - RNA, 19 nt, Human
ccauaaagaagauguuuaa

SEQ ID NO: 2412580 - RNA, 16 nt, Human
ccauaaacuucauggu

SEQ ID NO: 2412581 - RNA, 14 nt, Human
ccauaaacuucaug

SEQ ID NO: 2412582 - RNA, 22 nt, Human
ccauaaacacccaugaaucaaa

SEQ ID NO: 2412583 - RNA, 20 nt, Human
ccauaaaacauuaagaaaau

SEQ ID NO: 2412584 - RNA, 19 nt, Human
ccauaaaacauuaagaaaa

SEQ ID NO: 2412585 - RNA, 12 nt, Human
ccauaaaacauu

SEQ ID NO: 2412586 - RNA, 14 nt, Human
ccauaaaaagcuga

SEQ ID NO: 2412587 - RNA, 13 nt, Human
ccauaaaaagcug

SEQ ID NO: 2412588 - RNA, 23 nt, Human
ccaguuugcagaaaagcaccugc

SEQ ID NO: 2412589 - RNA, 14 nt, Human
ccaguuugcagaaa

SEQ ID NO: 2412590 - RNA, 15 nt, Human
ccaugaguccccugu

SEQ ID NO: 2412591 - RNA, 14 nt, Human
ccaugaguccccug

SEQ ID NO: 2412592 - RNA, 16 nt, Human
ccaugaguccccuguu

SEQ ID NO: 2412593 - RNA, 13 nt, Human
ccaugggccuccu

SEQ ID NO: 2412594 - RNA, 13 nt, Human
ccaugaguccccu

SEQ ID NO: 2412595 - RNA, 19 nt, Human
ccaugagccucagcauccu

SEQ ID NO: 2412596 - RNA, 18 nt, Human
ccaugagccucagcaucc

SEQ ID NO: 2412597 - RNA, 14 nt, Human
ccaugagccucagc

SEQ ID NO: 2412598 - RNA, 16 nt, Human
ccauccccuguagagu

SEQ ID NO: 2412599 - RNA, 22 nt, Human
ccauccccuguagagugggagc

SEQ ID NO: 2412600 - RNA, 13 nt, Human
ccaucccccugcc

SEQ ID NO: 2412601 - RNA, 12 nt, Human
ccaucccccugc

SEQ ID NO: 2412602 - RNA, 22 nt, Human
ccauccccccucaccaggggca

SEQ ID NO: 2412603 - RNA, 21 nt, Human
ccauccccccucaccaggggc

SEQ ID NO: 2412604 - RNA, 20 nt, Human
ccauccccccucaccagggg

SEQ ID NO: 2412605 - RNA, 19 nt, Human
ccauccccccucaccaggg

SEQ ID NO: 2412606 - RNA, 14 nt, Human
ccauccccccucac

SEQ ID NO: 2412607 - RNA, 22 nt, Human
ccauccccauccuccagcuucu

SEQ ID NO: 2412608 - RNA, 15 nt, Human
ccaucccccugcccu

SEQ ID NO: 2412609 - RNA, 14 nt, Human
ccaucccccugccc

SEQ ID NO: 2412610 - RNA, 19 nt, Human
ccaucccccugcccucgug

SEQ ID NO: 2412611 - RNA, 14 nt, Human
ccauccccgcagug

SEQ ID NO: 2412612 - RNA, 13 nt, Human
ccauccccuggac

SEQ ID NO: 2412613 - RNA, 17 nt, Human
ccauccccgcagugugc

SEQ ID NO: 2412614 - RNA, 17 nt, Human
ccaucccugccugguca

SEQ ID NO: 2412615 - RNA, 19 nt, Human
ccaucccuuuuugaagugu

SEQ ID NO: 2412616 - RNA, 14 nt, Human
ccaucccugccugg

SEQ ID NO: 2412617 - RNA, 13 nt, Human
ccaucccugccug

SEQ ID NO: 2412618 - RNA, 12 nt, Human
ccaucccugccu

SEQ ID NO: 2412619 - RNA, 15 nt, Human
ccauccccuggacug

SEQ ID NO: 2412620 - RNA, 16 nt, Human
ccaucccugccugguc

SEQ ID NO: 2412621 - RNA, 15 nt, Human
ccaucccugccuggu

SEQ ID NO: 2412622 - RNA, 19 nt, Human
ccauccggcccccagagcg

SEQ ID NO: 2412623 - RNA, 16 nt, Human
ccauccgccagggccc

SEQ ID NO: 2412624 - RNA, 15 nt, Human
ccauccgccagggcc

SEQ ID NO: 2412625 - RNA, 21 nt, Human
ccauccuaaucauccaaugcu

SEQ ID NO: 2412626 - RNA, 22 nt, Human
ccauccuaaucauccaaugcuc

SEQ ID NO: 2412627 - RNA, 15 nt, Human
ccauccuaccaaugc

SEQ ID NO: 2412628 - RNA, 23 nt, Human
ccauccuaaucauccaaugcuca

SEQ ID NO: 2412629 - RNA, 20 nt, Human
ccauccuaccaaugcaugca

SEQ ID NO: 2412630 - RNA, 19 nt, Human
ccauccuaccaaugcaugc

SEQ ID NO: 2412631 - RNA, 15 nt, Human
ccaugggccuccugu

SEQ ID NO: 2412632 - RNA, 14 nt, Human
ccaugggccuccug

SEQ ID NO: 2412633 - RNA, 12 nt, Human
ccauucuuucug

SEQ ID NO: 2412634 - RNA, 13 nt, Human
ccauucuuucuga

SEQ ID NO: 2412635 - RNA, 17 nt, Human
ccauucuuucugauaac

SEQ ID NO: 2412636 - RNA, 22 nt, Human
ccauucuuuuguaauuuaaaug

SEQ ID NO: 2412637 - RNA, 18 nt, Human
ccauucuuuuguaauuua

SEQ ID NO: 2412638 - RNA, 16 nt, Human
ccauucuuuuguaauu

SEQ ID NO: 2412639 - RNA, 15 nt, Human
ccauucuuuuguaau

SEQ ID NO: 2412640 - RNA, 18 nt, Human
ccauuucuacucucccau

SEQ ID NO: 2412641 - RNA, 13 nt, Human
ccauuucuacucu

SEQ ID NO: 2412642 - RNA, 13 nt, Human
ccauuuccugaga

SEQ ID NO: 2412643 - RNA, 19 nt, Human
ccauuucuaaaggccucuu

SEQ ID NO: 2412644 - RNA, 21 nt, Human
ccauuucuaaaggccucuucc

SEQ ID NO: 2412645 - RNA, 16 nt, Human
ccauuuagguuucuga

SEQ ID NO: 2412646 - RNA, 21 nt, Human
ccauuuagguuucugaguucc

SEQ ID NO: 2412647 - RNA, 18 nt, Human
ccauuucccaucugcacc

SEQ ID NO: 2412648 - RNA, 14 nt, Human
ccauuuauccaccu

SEQ ID NO: 2412649 - RNA, 18 nt, Human
ccauuuauacaaauuaga

SEQ ID NO: 2412650 - RNA, 14 nt, Human
ccauuuagccacca

SEQ ID NO: 2412651 - RNA, 19 nt, Human
ccauuuaguucuuuguuau

SEQ ID NO: 2412652 - RNA, 19 nt, Human
ccauuuaaauuuuuuuccu

SEQ ID NO: 2412653 - RNA, 16 nt, Human
ccauugacauguacag

SEQ ID NO: 2412654 - RNA, 15 nt, Human
ccauugacauguaca

SEQ ID NO: 2412655 - RNA, 17 nt, Human
ccauugacauguacaga

SEQ ID NO: 2412656 - RNA, 22 nt, Human
ccauuuaaagcuuauuaaaacu

SEQ ID NO: 2412657 - RNA, 13 nt, Human
ccauugaauucuu

SEQ ID NO: 2412658 - RNA, 22 nt, Human
ccauugaauucuugguugagga

SEQ ID NO: 2412659 - RNA, 15 nt, Human
ccaggagggcacugg

SEQ ID NO: 2412660 - RNA, 14 nt, Human
ccagucaaccuggg

SEQ ID NO: 2412661 - RNA, 19 nt, Human
ccagggggacuagccccug

SEQ ID NO: 2412662 - RNA, 18 nt, Human
ccagggggacuagccccu

SEQ ID NO: 2412663 - RNA, 17 nt, Human
ccagggggacuagcccc

SEQ ID NO: 2412664 - RNA, 19 nt, Human
ccaggggcuggcuucagga

SEQ ID NO: 2412665 - RNA, 21 nt, Human
ccaggggcuggcuucaggagg

SEQ ID NO: 2412666 - RNA, 14 nt, Human
ccaggggcuggcuu

SEQ ID NO: 2412667 - RNA, 23 nt, Human
ccagggggacuagccccugugga

SEQ ID NO: 2412668 - RNA, 20 nt, Human
ccagggggacuagccccugu

SEQ ID NO: 2412669 - RNA, 22 nt, Human
ccagggggccagucccugaggc

SEQ ID NO: 2412670 - RNA, 21 nt, Human
ccagucaccccggccaccugc

SEQ ID NO: 2412671 - RNA, 20 nt, Human
ccagucaccccggccaccug

SEQ ID NO: 2412672 - RNA, 13 nt, Human
ccagucaccccgg

SEQ ID NO: 2412673 - RNA, 12 nt, Human
ccagucaccccg

SEQ ID NO: 2412674 - RNA, 15 nt, Human
ccaguccccccaccc

SEQ ID NO: 2412675 - RNA, 23 nt, Human
ccagucccccaaccccagccgcu

SEQ ID NO: 2412676 - RNA, 21 nt, Human
ccagucccccaaccccagccg

SEQ ID NO: 2412677 - RNA, 20 nt, Human
ccagucccccaaccccagcc

SEQ ID NO: 2412678 - RNA, 16 nt, Human
ccagucccccaacccc

SEQ ID NO: 2412679 - RNA, 15 nt, Human
ccagucccccaaccc

SEQ ID NO: 2412680 - RNA, 17 nt, Human
ccaguccccccacccuc

SEQ ID NO: 2412681 - RNA, 14 nt, Human
ccagucccccugcc

SEQ ID NO: 2412682 - RNA, 22 nt, Human
ccaguccccaccccugccccca

SEQ ID NO: 2412683 - RNA, 21 nt, Human
ccaguccccaccccugccccc

SEQ ID NO: 2412684 - RNA, 19 nt, Human
ccaguccccaccccugccc

SEQ ID NO: 2412685 - RNA, 18 nt, Human
ccaguccccaccccugcc

SEQ ID NO: 2412686 - RNA, 17 nt, Human
ccaguccccaccccugc

SEQ ID NO: 2412687 - RNA, 16 nt, Human
ccaguccccaccccug

SEQ ID NO: 2412688 - RNA, 15 nt, Human
ccaguccccaccccu

SEQ ID NO: 2412689 - RNA, 14 nt, Human
ccagucccaggggc

SEQ ID NO: 2412690 - RNA, 23 nt, Human
ccagucagccucucucccagucu

SEQ ID NO: 2412691 - RNA, 22 nt, Human
ccagucagccucucucccaguc

SEQ ID NO: 2412692 - RNA, 20 nt, Human
ccagucagccucucucccag

SEQ ID NO: 2412693 - RNA, 19 nt, Human
ccagucagccucucuccca

SEQ ID NO: 2412694 - RNA, 18 nt, Human
ccagucagccucucuccc

SEQ ID NO: 2412695 - RNA, 17 nt, Human
ccagucagccucucucc

SEQ ID NO: 2412696 - RNA, 15 nt, Human
ccagucagccucucu

SEQ ID NO: 2412697 - RNA, 14 nt, Human
ccagucagccucuc

SEQ ID NO: 2412698 - RNA, 13 nt, Human
ccagucagccucu

SEQ ID NO: 2412699 - RNA, 12 nt, Human
ccagucagccuc

SEQ ID NO: 2412700 - RNA, 21 nt, Human
ccaggcugggagagccuucca

SEQ ID NO: 2412701 - RNA, 18 nt, Human
ccaggcugggagagccuu

SEQ ID NO: 2412702 - RNA, 17 nt, Human
ccaggcugggagagccu

SEQ ID NO: 2412703 - RNA, 15 nt, Human
ccaggcugggagagc

SEQ ID NO: 2412704 - RNA, 23 nt, Human
ccaggggcugcuuccuccuggaa

SEQ ID NO: 2412705 - RNA, 22 nt, Human
ccaggggcugcuuccuccugga

SEQ ID NO: 2412706 - RNA, 21 nt, Human
ccaggggcugcuuccuccugg

SEQ ID NO: 2412707 - RNA, 20 nt, Human
ccaggggcugcuuccuccug

SEQ ID NO: 2412708 - RNA, 22 nt, Human
ccaggcugggagagccuuccag

SEQ ID NO: 2412709 - RNA, 22 nt, Human
ccaggggccccuccagcuugug

SEQ ID NO: 2412710 - RNA, 15 nt, Human
ccaggcacacacugu

SEQ ID NO: 2412711 - RNA, 20 nt, Human
ccaggagggcacuggagcug

SEQ ID NO: 2412712 - RNA, 17 nt, Human
ccaggagggcacuggag

SEQ ID NO: 2412713 - RNA, 16 nt, Human
ccaggagggcacugga

SEQ ID NO: 2412714 - RNA, 22 nt, Human
ccaggagguggcuauggccacc

SEQ ID NO: 2412715 - RNA, 19 nt, Human
ccaggagggcacuggagcu

SEQ ID NO: 2412716 - RNA, 18 nt, Human
ccaggaggucgaccccaa

SEQ ID NO: 2412717 - RNA, 22 nt, Human
ccaggauguacaaggacagccc

SEQ ID NO: 2412718 - RNA, 23 nt, Human
ccaggauggcccuucccacugga

SEQ ID NO: 2412719 - RNA, 20 nt, Human
ccaggaguucgaggcugcag

SEQ ID NO: 2412720 - RNA, 21 nt, Human
ccaggaguguggccacguggg

SEQ ID NO: 2412721 - RNA, 14 nt, Human
ccaggcugggagag

SEQ ID NO: 2412722 - RNA, 13 nt, Human
ccaggcugggaga

SEQ ID NO: 2412723 - RNA, 12 nt, Human
ccaggcaaauca

SEQ ID NO: 2412724 - RNA, 20 nt, Human
ccaggauuuuaacaaaagca

SEQ ID NO: 2412725 - RNA, 19 nt, Human
ccaggcaaaucaguuacua

SEQ ID NO: 2412726 - RNA, 17 nt, Human
ccaggcaacuugggaac

SEQ ID NO: 2412727 - RNA, 23 nt, Human
ccaggauuuuaacaaaagcaaga

SEQ ID NO: 2412728 - RNA, 18 nt, Human
ccaggauugaagagcauu

SEQ ID NO: 2412729 - RNA, 17 nt, Human
ccaggauugaagagcau

SEQ ID NO: 2412730 - RNA, 16 nt, Human
ccaggauugaagagca

SEQ ID NO: 2412731 - RNA, 19 nt, Human
ccagcagagcaccuuagac

SEQ ID NO: 2412732 - RNA, 23 nt, Human
ccagcagagcaccuuagacaguc

SEQ ID NO: 2412733 - RNA, 15 nt, Human
ccagcagaucccagc

SEQ ID NO: 2412734 - RNA, 16 nt, Human
ccagcagaucccagcu

SEQ ID NO: 2412735 - RNA, 17 nt, Human
ccagcagaucccagcuc

SEQ ID NO: 2412736 - RNA, 18 nt, Human
ccagcagaucccagcuca

SEQ ID NO: 2412737 - RNA, 21 nt, Human
ccacucugcuuugacugagca

SEQ ID NO: 2412738 - RNA, 20 nt, Human
ccacucugcuucucugacuu

SEQ ID NO: 2412739 - RNA, 19 nt, Human
ccacucugcuucucugacu

SEQ ID NO: 2412740 - RNA, 17 nt, Human
ccacucugcuucucuga

SEQ ID NO: 2412741 - RNA, 14 nt, Human
ccacucugcuucuc

SEQ ID NO: 2412742 - RNA, 13 nt, Human
ccacucugcuucu

SEQ ID NO: 2412743 - RNA, 21 nt, Human
ccacucugcucgccuuagcac

SEQ ID NO: 2412744 - RNA, 23 nt, Human
ccacucuccuugcuacccagaaa

SEQ ID NO: 2412745 - RNA, 14 nt, Human
ccacucugccucug

SEQ ID NO: 2412746 - RNA, 16 nt, Human
ccacucugccucugcc

SEQ ID NO: 2412747 - RNA, 21 nt, Human
ccacucuccuugcuacccaga

SEQ ID NO: 2412748 - RNA, 12 nt, Human
ccacucuccuug

SEQ ID NO: 2412749 - RNA, 20 nt, Human
ccacucucccccacccccuc

SEQ ID NO: 2412750 - RNA, 17 nt, Human
ccacucuccccacacua

SEQ ID NO: 2412751 - RNA, 23 nt, Human
ccaggaaaggcuccaggagcagc

SEQ ID NO: 2412752 - RNA, 22 nt, Human
ccaggaaaggcuccaggagcag

SEQ ID NO: 2412753 - RNA, 21 nt, Human
ccaggaaaggcuccaggagca

SEQ ID NO: 2412754 - RNA, 18 nt, Human
ccagcuugaaaccuucac

SEQ ID NO: 2412755 - RNA, 23 nt, Human
ccagcuucugguacucuccuaga

SEQ ID NO: 2412756 - RNA, 22 nt, Human
ccagcuucugguacucuccuag

SEQ ID NO: 2412757 - RNA, 21 nt, Human
ccagcuucugguacucuccua

SEQ ID NO: 2412758 - RNA, 18 nt, Human
ccagcuucuccaggcucu

SEQ ID NO: 2412759 - RNA, 17 nt, Human
ccagcuucuccaggcuc

SEQ ID NO: 2412760 - RNA, 16 nt, Human
ccagcuucuccaggcu

SEQ ID NO: 2412761 - RNA, 15 nt, Human
ccagcuucuccaggc

SEQ ID NO: 2412762 - RNA, 14 nt, Human
ccagcuucuccagg

SEQ ID NO: 2412763 - RNA, 16 nt, Human
ccagcuuaucucaggg

SEQ ID NO: 2412764 - RNA, 22 nt, Human
ccagcucagucccaucagagag

SEQ ID NO: 2412765 - RNA, 21 nt, Human
ccaggaacaaucgauggccuu

SEQ ID NO: 2412766 - RNA, 16 nt, Human
ccaggaaaugugcaca

SEQ ID NO: 2412767 - RNA, 22 nt, Human
ccaggaacacccgacuccucaa

SEQ ID NO: 2412768 - RNA, 19 nt, Human
ccagcagccuggacccugu

SEQ ID NO: 2412769 - RNA, 20 nt, Human
ccagcagccuggacccugug

SEQ ID NO: 2412770 - RNA, 15 nt, Human
ccagcagccuggacc

SEQ ID NO: 2412771 - RNA, 14 nt, Human
ccagcagccuggac

SEQ ID NO: 2412772 - RNA, 12 nt, Human
ccagccccugua

SEQ ID NO: 2412773 - RNA, 19 nt, Human
ccagccccuguauggcacu

SEQ ID NO: 2412774 - RNA, 21 nt, Human
ccagccccuggccccaggacc

SEQ ID NO: 2412775 - RNA, 23 nt, Human
ccagccccuggccccaggaccug

SEQ ID NO: 2412776 - RNA, 10 nt, Human
ccagccccuu

SEQ ID NO: 2412777 - RNA, 21 nt, Human
ccagccccuggaugcagccuc

SEQ ID NO: 2412778 - RNA, 13 nt, Human
ccagccccuggcc

SEQ ID NO: 2412779 - RNA, 19 nt, Human
ccagcagaucccagcucac

SEQ ID NO: 2412780 - RNA, 21 nt, Human
ccagcagaucccagcucacgu

SEQ ID NO: 2412781 - RNA, 19 nt, Human
ccagcguccuccucuguga

SEQ ID NO: 2412782 - RNA, 21 nt, Human
ccagccccuucucagaaucua

SEQ ID NO: 2412783 - RNA, 16 nt, Human
ccagccccuucucaga

SEQ ID NO: 2412784 - RNA, 17 nt, Human
ccagcguuugaggggcu

SEQ ID NO: 2412785 - RNA, 22 nt, Human
ccagcguuugaggggcuggccu

SEQ ID NO: 2412786 - RNA, 13 nt, Human
ccagcuaagaacc

SEQ ID NO: 2412787 - RNA, 14 nt, Human
ccagcuaagaaccu

SEQ ID NO: 2412788 - RNA, 15 nt, Human
ccagcuaagaaccug

SEQ ID NO: 2412789 - RNA, 23 nt, Human
ccagcuaaucuguagggcuggac

SEQ ID NO: 2412790 - RNA, 22 nt, Human
ccagcuaaucuguagggcugga

SEQ ID NO: 2412791 - RNA, 21 nt, Human
ccagcuaaucuguagggcugg

SEQ ID NO: 2412792 - RNA, 20 nt, Human
ccagcuaaucuguagggcug

SEQ ID NO: 2412793 - RNA, 17 nt, Human
ccagcuaaucuguaggg

SEQ ID NO: 2412794 - RNA, 17 nt, Human
ccagcuaagaaccugga

SEQ ID NO: 2412795 - RNA, 18 nt, Human
ccagcuaagaaccuggaa

SEQ ID NO: 2412796 - RNA, 19 nt, Human
ccagcuaagaaccuggaac

SEQ ID NO: 2412797 - RNA, 21 nt, Human
ccagcuaaggacauuucccag

SEQ ID NO: 2412798 - RNA, 23 nt, Human
ccagcuaaggacauuucccaggg

SEQ ID NO: 2412799 - RNA, 23 nt, Human
ccagcucaggacagaugccacac

SEQ ID NO: 2412800 - RNA, 20 nt, Human
ccagcucaggacagaugcca

SEQ ID NO: 2412801 - RNA, 15 nt, Human
ccagcucagucccau

SEQ ID NO: 2412802 - RNA, 13 nt, Human
ccagcucaggaca

SEQ ID NO: 2412803 - RNA, 19 nt, Human
ccagcucaggacagaugcc

SEQ ID NO: 2412804 - RNA, 15 nt, Human
ccagcucacgucaca

SEQ ID NO: 2412805 - RNA, 19 nt, Human
ccagcucaccccuggagga

SEQ ID NO: 2412806 - RNA, 14 nt, Human
ccagcucaccccug

SEQ ID NO: 2412807 - RNA, 14 nt, Human
ccagcucacgucac

SEQ ID NO: 2412808 - RNA, 13 nt, Human
ccagcucagaggg

SEQ ID NO: 2412809 - RNA, 23 nt, Human
ccagcucaccccccacacucacu

SEQ ID NO: 2412810 - RNA, 19 nt, Human
ccagcucaccccccacacu

SEQ ID NO: 2412811 - RNA, 17 nt, Human
ccagcucaccccccaca

SEQ ID NO: 2412812 - RNA, 13 nt, Human
ccagcucaccccc

SEQ ID NO: 2412813 - RNA, 12 nt, Human
ccagcucacccc

SEQ ID NO: 2412814 - RNA, 14 nt, Human
cguaaaauuaagaa

SEQ ID NO: 2412815 - RNA, 18 nt, Human
cgguguggugcaguguga

SEQ ID NO: 2412816 - RNA, 23 nt, Human
cgguguuuaagacauuuuuggaa

SEQ ID NO: 2412817 - RNA, 11 nt, Human
cgguuucucca

SEQ ID NO: 2412818 - RNA, 15 nt, Human
cgguuugaagccugg

SEQ ID NO: 2412819 - RNA, 21 nt, Human
cgguuuggggagcagagacac

SEQ ID NO: 2412820 - RNA, 16 nt, Human
cgguuuuacugcagcu

SEQ ID NO: 2412821 - RNA, 16 nt, Human
cgugaguccuggcaug

SEQ ID NO: 2412822 - RNA, 17 nt, Human
cgugaggccagagacac

SEQ ID NO: 2412823 - RNA, 17 nt, Human
cgugaguccuggcaugg

SEQ ID NO: 2412824 - RNA, 16 nt, Human
cgugaggccagagaca

SEQ ID NO: 2412825 - RNA, 21 nt, Human
cgugguggaagaggggacagg

SEQ ID NO: 2412826 - RNA, 18 nt, Human
cgugguguuauuuaaaga

SEQ ID NO: 2412827 - RNA, 19 nt, Human
cgugguguuauuuaaagaa

SEQ ID NO: 2412828 - RNA, 15 nt, Human
cguguaaaccaaagc

SEQ ID NO: 2412829 - RNA, 12 nt, Human
cguguaaaccaa

SEQ ID NO: 2412830 - RNA, 16 nt, Human
cgugugcgugcaugug

SEQ ID NO: 2412831 - RNA, 21 nt, Human
cguguggcaauagugggcccu

SEQ ID NO: 2412832 - RNA, 20 nt, Human
cguguaaccauggacccaau

SEQ ID NO: 2412833 - RNA, 14 nt, Human
cgugcacacaccag

SEQ ID NO: 2412834 - RNA, 17 nt, Human
cgugaugccucccuguu

SEQ ID NO: 2412835 - RNA, 23 nt, Human
cgugauguaggguaaggugccuu

SEQ ID NO: 2412836 - RNA, 20 nt, Human
cgugcaauuuguuugugcuu

SEQ ID NO: 2412837 - RNA, 18 nt, Human
cgugauuuugcuguagaa

SEQ ID NO: 2412838 - RNA, 22 nt, Human
cgugaucucggcucacugcaac

SEQ ID NO: 2412839 - RNA, 13 nt, Human
cgugaucuuggcu

SEQ ID NO: 2412840 - RNA, 18 nt, Human
cgugauccacccaccucg

SEQ ID NO: 2412841 - RNA, 22 nt, Human
cgugaucaaagccacacucugg

SEQ ID NO: 2412842 - RNA, 15 nt, Human
cgcugccagcucugu

SEQ ID NO: 2412843 - RNA, 19 nt, Human
cgcugccagcucuguauca

SEQ ID NO: 2412844 - RNA, 16 nt, Human
cgcugccacccaccuc

SEQ ID NO: 2412845 - RNA, 17 nt, Human
cgcugccacccaccucc

SEQ ID NO: 2412846 - RNA, 20 nt, Human
cgcugccacccaccucccug

SEQ ID NO: 2412847 - RNA, 18 nt, Human
cgcugcccaggggagccc

SEQ ID NO: 2412848 - RNA, 21 nt, Human
cgcugaugcugggcugggugc

SEQ ID NO: 2412849 - RNA, 19 nt, Human
cgcugaugcugggcugggu

SEQ ID NO: 2412850 - RNA, 14 nt, Human
cgcugauucucagg

SEQ ID NO: 2412851 - RNA, 23 nt, Human
cgcugauucucagggucucugcu

SEQ ID NO: 2412852 - RNA, 16 nt, Human
cgcugauucucagggu

SEQ ID NO: 2412853 - RNA, 19 nt, Human
cgcugcaaccuguugauag

SEQ ID NO: 2412854 - RNA, 17 nt, Human
cgcugaugcugggcugg

SEQ ID NO: 2412855 - RNA, 16 nt, Human
cgcugaugcugggcug

SEQ ID NO: 2412856 - RNA, 14 nt, Human
cgcugaugcugggc

SEQ ID NO: 2412857 - RNA, 13 nt, Human
cgcugaugcuggg

SEQ ID NO: 2412858 - RNA, 12 nt, Human
cgcugaugcugg

SEQ ID NO: 2412859 - RNA, 13 nt, Human
cgcugauauaugu

SEQ ID NO: 2412860 - RNA, 15 nt, Human
cgccuguagucccag

SEQ ID NO: 2412861 - RNA, 17 nt, Human
cgccuguaaucccagcu

SEQ ID NO: 2412862 - RNA, 18 nt, Human
cgccuguaaucccagcac

SEQ ID NO: 2412863 - RNA, 18 nt, Human
cgccuguaaucccagcag

SEQ ID NO: 2412864 - RNA, 20 nt, Human
cgccuguaaucccagcuacu

SEQ ID NO: 2412865 - RNA, 16 nt, Human
cgccuguaaucccagc

SEQ ID NO: 2412866 - RNA, 17 nt, Human
cgccuguaaucccagca

SEQ ID NO: 2412867 - RNA, 20 nt, Human
cgccuguaaucccagcacuu

SEQ ID NO: 2412868 - RNA, 19 nt, Human
cggagcuaacacuggcccc

SEQ ID NO: 2412869 - RNA, 21 nt, Human
cggagcuaacacuggccccua

SEQ ID NO: 2412870 - RNA, 20 nt, Human
cggagcuaacacuggccccu

SEQ ID NO: 2412871 - RNA, 16 nt, Human
cggagucccaccuugg

SEQ ID NO: 2412872 - RNA, 21 nt, Human
cggagcuggccccgccgccug

SEQ ID NO: 2412873 - RNA, 16 nt, Human
cggagcuggccccgcc

SEQ ID NO: 2412874 - RNA, 13 nt, Human
cggagcuggcccc

SEQ ID NO: 2412875 - RNA, 17 nt, Human
cggcuccccaugugucc

SEQ ID NO: 2412876 - RNA, 15 nt, Human
cggcuccccaugugu

SEQ ID NO: 2412877 - RNA, 20 nt, Human
cggcuccccauguguccugg

SEQ ID NO: 2412878 - RNA, 14 nt, Human
cggcucccuggagc

SEQ ID NO: 2412879 - RNA, 17 nt, Human
cgggcaugggcacuccc

SEQ ID NO: 2412880 - RNA, 14 nt, Human
cgggccacagagaa

SEQ ID NO: 2412881 - RNA, 12 nt, Human
cgggccacagag

SEQ ID NO: 2412882 - RNA, 16 nt, Human
cggcuccaggcuccuu

SEQ ID NO: 2412883 - RNA, 15 nt, Human
cggcuccaggcuccu

SEQ ID NO: 2412884 - RNA, 14 nt, Human
cggcuccaggcucc

SEQ ID NO: 2412885 - RNA, 13 nt, Human
cggcuccaggcuc

SEQ ID NO: 2412886 - RNA, 14 nt, Human
cggcucacugcagc

SEQ ID NO: 2412887 - RNA, 15 nt, Human
cggcucacugcagcc

SEQ ID NO: 2412888 - RNA, 20 nt, Human
cggagucccaccuuggcugc

SEQ ID NO: 2412889 - RNA, 18 nt, Human
cggagucccaccuuggcu

SEQ ID NO: 2412890 - RNA, 17 nt, Human
cggcucacugcagccuc

SEQ ID NO: 2412891 - RNA, 16 nt, Human
cggcucacugcagccu

SEQ ID NO: 2412892 - RNA, 12 nt, Human
cggcuccaggcu

SEQ ID NO: 2412893 - RNA, 14 nt, Human
cggaggccccaaag

SEQ ID NO: 2412894 - RNA, 21 nt, Human
cggaggccacaugagucccag

SEQ ID NO: 2412895 - RNA, 19 nt, Human
cggaggccacaugaguccc

SEQ ID NO: 2412896 - RNA, 16 nt, Human
cggaggccacaugagu

SEQ ID NO: 2412897 - RNA, 13 nt, Human
cgguguggagaag

SEQ ID NO: 2412898 - RNA, 15 nt, Human
cggggacagcuccuu

SEQ ID NO: 2412899 - RNA, 18 nt, Human
cgguguggagaagcggcu

SEQ ID NO: 2412900 - RNA, 20 nt, Human
cgguguggugcagugugaaa

SEQ ID NO: 2412901 - RNA, 21 nt, Human
cggggacagaggccugcccgg

SEQ ID NO: 2412902 - RNA, 16 nt, Human
cggugugggcuguguc

SEQ ID NO: 2412903 - RNA, 17 nt, Human
cgggcucugccucccau

SEQ ID NO: 2412904 - RNA, 16 nt, Human
cggggaacuccuggaa

SEQ ID NO: 2412905 - RNA, 17 nt, Human
cgggcgugguggcgggc

SEQ ID NO: 2412906 - RNA, 14 nt, Human
cgggcugcccugcc

SEQ ID NO: 2412907 - RNA, 18 nt, Human
cggggacagaggccugcc

SEQ ID NO: 2412908 - RNA, 17 nt, Human
cggggacagaggccugc

SEQ ID NO: 2412909 - RNA, 16 nt, Human
cggggacagaggccug

SEQ ID NO: 2412910 - RNA, 14 nt, Human
cggggacagaggcc

SEQ ID NO: 2412911 - RNA, 14 nt, Human
cggggacagcuccu

SEQ ID NO: 2412912 - RNA, 16 nt, Human
cgggcucugccuccca

SEQ ID NO: 2412913 - RNA, 14 nt, Human
cgggcucugccucc

SEQ ID NO: 2412914 - RNA, 15 nt, Human
cgggcucagcaaaag

SEQ ID NO: 2412915 - RNA, 21 nt, Human
cgggcggucagggguucgaga

SEQ ID NO: 2412916 - RNA, 16 nt, Human
cgggcgcggccagccc

SEQ ID NO: 2412917 - RNA, 13 nt, Human
cgggcucugccuc

SEQ ID NO: 2412918 - RNA, 17 nt, Human
cgggccacagagaaagu

SEQ ID NO: 2412919 - RNA, 21 nt, Human
cgggcaugguggcgcaagccu

SEQ ID NO: 2412920 - RNA, 12 nt, Human
cgggccaaggac

SEQ ID NO: 2412921 - RNA, 14 nt, Human
cgggccaaggacug

SEQ ID NO: 2412922 - RNA, 20 nt, Human
cgggccaaggacugccgacc

SEQ ID NO: 2412923 - RNA, 11 nt, Human
cgggcucagca

SEQ ID NO: 2412924 - RNA, 17 nt, Human
cgggcgagucacugccu

SEQ ID NO: 2412925 - RNA, 19 nt, Human
cgggcgagucacugccucu

SEQ ID NO: 2412926 - RNA, 23 nt, Human
cgggcgccuguagucccagccac

SEQ ID NO: 2412927 - RNA, 20 nt, Human
cgacccuugccgucuaccug

SEQ ID NO: 2412928 - RNA, 19 nt, Human
cgacccuugccgucuaccu

SEQ ID NO: 2412929 - RNA, 15 nt, Human
cgacgcgucuccugu

SEQ ID NO: 2412930 - RNA, 22 nt, Human
cgacggugggcauuugugaggc

SEQ ID NO: 2412931 - RNA, 12 nt, Human
cgaccuuuaccu

SEQ ID NO: 2412932 - RNA, 19 nt, Human
cgaccgaggcuggagcugg

SEQ ID NO: 2412933 - RNA, 15 nt, Human
cgaccgaggcuggag

SEQ ID NO: 2412934 - RNA, 14 nt, Human
cgacuaauuucaaa

SEQ ID NO: 2412935 - RNA, 11 nt, Human
cgacucaggau

SEQ ID NO: 2412936 - RNA, 13 nt, Human
cgacucagccuca

SEQ ID NO: 2412937 - RNA, 13 nt, Human
cgacucugaccuc

SEQ ID NO: 2412938 - RNA, 19 nt, Human
cgacuccguuggccacucc

SEQ ID NO: 2412939 - RNA, 16 nt, Human
cgacuccguuggccac

SEQ ID NO: 2412940 - RNA, 20 nt, Human
cgacucuauagacucuagga

SEQ ID NO: 2412941 - RNA, 18 nt, Human
cgacucuauagacucuag

SEQ ID NO: 2412942 - RNA, 20 nt, Human
cgacugcacagcggccccug

SEQ ID NO: 2412943 - RNA, 15 nt, Human
cgacuggguuuaugu

SEQ ID NO: 2412944 - RNA, 17 nt, Human
cgacugcccggcagggu

SEQ ID NO: 2412945 - RNA, 16 nt, Human
cgacugcacagcggcc

SEQ ID NO: 2412946 - RNA, 17 nt, Human
cgacugccaucuuggac

SEQ ID NO: 2412947 - RNA, 18 nt, Human
ccuuuuuauuugcaugug

SEQ ID NO: 2412948 - RNA, 17 nt, Human
ccuuuuuauuugcaugu

SEQ ID NO: 2412949 - RNA, 22 nt, Human
ccuuuuugaaguguaggcagac

SEQ ID NO: 2412950 - RNA, 13 nt, Human
ccuuuuugaagug

SEQ ID NO: 2412951 - RNA, 23 nt, Human
ccuuuuugguacuuauuacugcu

SEQ ID NO: 2412952 - RNA, 21 nt, Human
ccuuuuugguacuuauuacug

SEQ ID NO: 2412953 - RNA, 22 nt, Human
ccuuuuucauauguugcucagu

SEQ ID NO: 2412954 - RNA, 15 nt, Human
ccuuuuuacuccccu

SEQ ID NO: 2412955 - RNA, 23 nt, Human
ccuuuuuacuccccuugagcuga

SEQ ID NO: 2412956 - RNA, 21 nt, Human
ccuuuuuuaagauuuuucuca

SEQ ID NO: 2412957 - RNA, 22 nt, Human
cgaauuaauagcuuuuauugua

SEQ ID NO: 2412958 - RNA, 16 nt, Human
cgaauuuuaaaagaug

SEQ ID NO: 2412959 - RNA, 21 nt, Human
ccuuuuuuagaguugauacua

SEQ ID NO: 2412960 - RNA, 13 nt, Human
ccuuuuuuaaaaa

SEQ ID NO: 2412961 - RNA, 16 nt, Human
ccuuuuuuaaaaaugc

SEQ ID NO: 2412962 - RNA, 20 nt, Human
ccuuuuuuaagauuuuucuc

SEQ ID NO: 2412963 - RNA, 19 nt, Human
ccuuuuuuaagauuuuucu

SEQ ID NO: 2412964 - RNA, 18 nt, Human
ccuuuuuuaagauuuuuc

SEQ ID NO: 2412965 - RNA, 14 nt, Human
ccuuuuuuaagauu

SEQ ID NO: 2412966 - RNA, 13 nt, Human
ccuuuuuuaagau

SEQ ID NO: 2412967 - RNA, 17 nt, Human
ccuuuuuuaaaaaugca

SEQ ID NO: 2412968 - RNA, 13 nt, Human
cgacaaugcaaac

SEQ ID NO: 2412969 - RNA, 12 nt, Human
cgacaagugcug

SEQ ID NO: 2412970 - RNA, 18 nt, Human
cgacaaccgaugcuccag

SEQ ID NO: 2412971 - RNA, 21 nt, Human
cgacaaccgaugcuccagcca

SEQ ID NO: 2412972 - RNA, 12 nt, Human
cgacaaugcaaa

SEQ ID NO: 2412973 - RNA, 15 nt, Human
cgacaaccgaugcuc

SEQ ID NO: 2412974 - RNA, 17 nt, Human
cgaauuuuucagaugau

SEQ ID NO: 2412975 - RNA, 18 nt, Human
cgaccccaucugcccagg

SEQ ID NO: 2412976 - RNA, 19 nt, Human
cgaccccaucugcccagga

SEQ ID NO: 2412977 - RNA, 19 nt, Human
cgaccccgucacagccuca

SEQ ID NO: 2412978 - RNA, 14 nt, Human
cgacagccuggcac

SEQ ID NO: 2412979 - RNA, 22 nt, Human
cgacagagggaagaaaagagcu

SEQ ID NO: 2412980 - RNA, 17 nt, Human
cgaccccaucugcccag

SEQ ID NO: 2412981 - RNA, 13 nt, Human
cgacagccuggca

SEQ ID NO: 2412982 - RNA, 12 nt, Human
cgacagccuggc

SEQ ID NO: 2412983 - RNA, 16 nt, Human
cgacagagcgagacuu

SEQ ID NO: 2412984 - RNA, 15 nt, Human
cgacagcccccucug

SEQ ID NO: 2412985 - RNA, 22 nt, Human
ccuugcuggacggggacugggg

SEQ ID NO: 2412986 - RNA, 18 nt, Human
ccuugcuuaugacaucac

SEQ ID NO: 2412987 - RNA, 14 nt, Human
ccuuuaagagaaau

SEQ ID NO: 2412988 - RNA, 22 nt, Human
ccuugcuugcugccuucuggau

SEQ ID NO: 2412989 - RNA, 13 nt, Human
ccuugcucugcac

SEQ ID NO: 2412990 - RNA, 19 nt, Human
ccuugcucucccucuucuc

SEQ ID NO: 2412991 - RNA, 21 nt, Human
ccuugcugguuuucuggaugg

SEQ ID NO: 2412992 - RNA, 17 nt, Human
ccuugcuggaaaaccca

SEQ ID NO: 2412993 - RNA, 17 nt, Human
ccuugcucugcaggcac

SEQ ID NO: 2412994 - RNA, 16 nt, Human
ccuugcuguccuaggc

SEQ ID NO: 2412995 - RNA, 22 nt, Human
ccuugcccugaccucccagccc

SEQ ID NO: 2412996 - RNA, 19 nt, Human
ccuugcccugaccucccag

SEQ ID NO: 2412997 - RNA, 16 nt, Human
ccuugcccugaccucc

SEQ ID NO: 2412998 - RNA, 15 nt, Human
ccuugcccugaccuc

SEQ ID NO: 2412999 - RNA, 14 nt, Human
ccuugcccugaccu

SEQ ID NO: 2413000 - RNA, 13 nt, Human
ccuugcccugacc

SEQ ID NO: 2413001 - RNA, 12 nt, Human
ccuugcccugac

SEQ ID NO: 2413002 - RNA, 16 nt, Human
ccuugccgucuaccug

SEQ ID NO: 2413003 - RNA, 17 nt, Human
ccuugcccuugcccuga

SEQ ID NO: 2413004 - RNA, 16 nt, Human
ccuugcccuugcccug

SEQ ID NO: 2413005 - RNA, 15 nt, Human
ccuugcccuugcccu

SEQ ID NO: 2413006 - RNA, 23 nt, Human
ccuugcccugaccucccagcccu

SEQ ID NO: 2413007 - RNA, 20 nt, Human
ccuugcucuccccugcccug

SEQ ID NO: 2413008 - RNA, 18 nt, Human
ccuugcucucccucuucu

SEQ ID NO: 2413009 - RNA, 17 nt, Human
ccuugcucucccucuuc

SEQ ID NO: 2413010 - RNA, 15 nt, Human
ccuugcucucccucu

SEQ ID NO: 2413011 - RNA, 14 nt, Human
ccuugcucucccuc

SEQ ID NO: 2413012 - RNA, 13 nt, Human
ccuugcucucccu

SEQ ID NO: 2413013 - RNA, 18 nt, Human
ccuugcccuugcccugac

SEQ ID NO: 2413014 - RNA, 22 nt, Human
ccuugcucuccccugcccugcu

SEQ ID NO: 2413015 - RNA, 22 nt, Human
ccuugcccagggcucagccugg

SEQ ID NO: 2413016 - RNA, 18 nt, Human
ccuugcccggauucuggg

SEQ ID NO: 2413017 - RNA, 19 nt, Human
ccuugcccggauucuggga

SEQ ID NO: 2413018 - RNA, 21 nt, Human
ccuugcccagggcucagccug

SEQ ID NO: 2413019 - RNA, 19 nt, Human
ccuuucauuuacuguggcu

SEQ ID NO: 2413020 - RNA, 18 nt, Human
ccuuucauuuacuguggc

SEQ ID NO: 2413021 - RNA, 22 nt, Human
ccuuucauuuacuguggcuucu

SEQ ID NO: 2413022 - RNA, 16 nt, Human
ccuuuccaaggcuucu

SEQ ID NO: 2413023 - RNA, 12 nt, Human
ccuuucagcugu

SEQ ID NO: 2413024 - RNA, 15 nt, Human
ccuuucagcugugaa

SEQ ID NO: 2413025 - RNA, 12 nt, Human
ccuuucagggaa

SEQ ID NO: 2413026 - RNA, 16 nt, Human
ccuuucauuuacugug

SEQ ID NO: 2413027 - RNA, 14 nt, Human
ccuuucauuuacug

SEQ ID NO: 2413028 - RNA, 12 nt, Human
ccuuucauauuu

SEQ ID NO: 2413029 - RNA, 20 nt, Human
ccuuucagggaauuucagga

SEQ ID NO: 2413030 - RNA, 23 nt, Human
ccuuuugaggagccccagcuacc

SEQ ID NO: 2413031 - RNA, 21 nt, Human
ccuuuugaggagccccagcua

SEQ ID NO: 2413032 - RNA, 16 nt, Human
ccuuuugaggagcccc

SEQ ID NO: 2413033 - RNA, 15 nt, Human
ccuuuugagugccuu

SEQ ID NO: 2413034 - RNA, 17 nt, Human
ccuuuugagugccuuac

SEQ ID NO: 2413035 - RNA, 15 nt, Human
ccuuuugcaccccuc

SEQ ID NO: 2413036 - RNA, 14 nt, Human
ccuuuugcaccccu

SEQ ID NO: 2413037 - RNA, 12 nt, Human
ccuuuugcaccc

SEQ ID NO: 2413038 - RNA, 14 nt, Human
ccuuuuuacucccc

SEQ ID NO: 2413039 - RNA, 16 nt, Human
ccuuuugcaccccucc

SEQ ID NO: 2413040 - RNA, 19 nt, Human
ccuuucaccccagggccug

SEQ ID NO: 2413041 - RNA, 21 nt, Human
ccuuucaccccagggccugag

SEQ ID NO: 2413042 - RNA, 19 nt, Human
ccuuucagaugucuucugc

SEQ ID NO: 2413043 - RNA, 17 nt, Human
ccuuucagaugucuucu

SEQ ID NO: 2413044 - RNA, 14 nt, Human
ccuuucagaugucu

SEQ ID NO: 2413045 - RNA, 13 nt, Human
ccuuucagauguc

SEQ ID NO: 2413046 - RNA, 21 nt, Human
ccuuucagaugucuucugccu

SEQ ID NO: 2413047 - RNA, 20 nt, Human
ccuuucagaugucuucugcc

SEQ ID NO: 2413048 - RNA, 22 nt, Human
ccuuucagaugucuucugccug

SEQ ID NO: 2413049 - RNA, 15 nt, Human
ccuuucacaaccuuc

SEQ ID NO: 2413050 - RNA, 17 nt, Human
ccuuucaccccagggcc

SEQ ID NO: 2413051 - RNA, 21 nt, Human
ccuuucacaaaauuuuauucc

SEQ ID NO: 2413052 - RNA, 22 nt, Human
ccuuucacaaaauuuuauuccu

SEQ ID NO: 2413053 - RNA, 21 nt, Human
ccuuucaauaggaaaaacuga

SEQ ID NO: 2413054 - RNA, 18 nt, Human
ccuuuacucauagcacuu

SEQ ID NO: 2413055 - RNA, 15 nt, Human
ccuuuacuugaccuc

SEQ ID NO: 2413056 - RNA, 23 nt, Human
ccuuuacacauucggcucccugg

SEQ ID NO: 2413057 - RNA, 21 nt, Human
ccuuuacacauucggcucccu

SEQ ID NO: 2413058 - RNA, 19 nt, Human
ccuuuacacucaggcuuuc

SEQ ID NO: 2413059 - RNA, 13 nt, Human
ccuuuaaugcauc

SEQ ID NO: 2413060 - RNA, 19 nt, Human
ccuuuacggacacccccuc

SEQ ID NO: 2413061 - RNA, 14 nt, Human
ccuuuacggacacc

SEQ ID NO: 2413062 - RNA, 13 nt, Human
cgccuccaggcca

SEQ ID NO: 2413063 - RNA, 15 nt, Human
cgccucaguaagacg

SEQ ID NO: 2413064 - RNA, 19 nt, Human
cgccucaggaaugggcugu

SEQ ID NO: 2413065 - RNA, 17 nt, Human
cgccucaggaaugggcu

SEQ ID NO: 2413066 - RNA, 16 nt, Human
cgccuaugaucccagc

SEQ ID NO: 2413067 - RNA, 17 nt, Human
cgccucaaugugguugc

SEQ ID NO: 2413068 - RNA, 22 nt, Human
cgccucaaugugguugcaaggc

SEQ ID NO: 2413069 - RNA, 15 nt, Human
cgccagauggggccu

SEQ ID NO: 2413070 - RNA, 18 nt, Human
cgccagauggggccucug

SEQ ID NO: 2413071 - RNA, 20 nt, Human
cgccuaguggggucucccuc

SEQ ID NO: 2413072 - RNA, 21 nt, Human
cgccuaguggggucucccucu

SEQ ID NO: 2413073 - RNA, 21 nt, Human
cgccacuacacuccagccuga

SEQ ID NO: 2413074 - RNA, 19 nt, Human
cgccaaauaaugucucugu

SEQ ID NO: 2413075 - RNA, 20 nt, Human
cgcauucucauggagaaguu

SEQ ID NO: 2413076 - RNA, 14 nt, Human
cgcauucucaugga

SEQ ID NO: 2413077 - RNA, 17 nt, Human
cgccaaauaaugucucu

SEQ ID NO: 2413078 - RNA, 22 nt, Human
cgccacuacacuccagccugag

SEQ ID NO: 2413079 - RNA, 15 nt, Human
cgccacuccugaacc

SEQ ID NO: 2413080 - RNA, 21 nt, Human
cgccaacaacuucuccauccu

SEQ ID NO: 2413081 - RNA, 15 nt, Human
cgccacucgcuuccc

SEQ ID NO: 2413082 - RNA, 20 nt, Human
cgccacugcacuccggccug

SEQ ID NO: 2413083 - RNA, 23 nt, Human
cgccacucgcuucccccauagcc

SEQ ID NO: 2413084 - RNA, 21 nt, Human
cgccacugcacuccagccugg

SEQ ID NO: 2413085 - RNA, 22 nt, Human
cgccacugcacuccagccuggg

SEQ ID NO: 2413086 - RNA, 23 nt, Human
cgccacugcacuccagccugggc

SEQ ID NO: 2413087 - RNA, 19 nt, Human
cgccuggcugcagccugcg

SEQ ID NO: 2413088 - RNA, 11 nt, Human
cgccuggcaga

SEQ ID NO: 2413089 - RNA, 12 nt, Human
cgccuggccuga

SEQ ID NO: 2413090 - RNA, 20 nt, Human
cgccuggcagaacugagcuc

SEQ ID NO: 2413091 - RNA, 16 nt, Human
cgccugagcucacucg

SEQ ID NO: 2413092 - RNA, 20 nt, Human
cgccugaggaacccuuacag

SEQ ID NO: 2413093 - RNA, 18 nt, Human
cgccugcaaacgcugccu

SEQ ID NO: 2413094 - RNA, 23 nt, Human
cgccugacaaccacuggucugua

SEQ ID NO: 2413095 - RNA, 21 nt, Human
cgccugacaaccacuggucug

SEQ ID NO: 2413096 - RNA, 20 nt, Human
cgccugacaaccacuggucu

SEQ ID NO: 2413097 - RNA, 15 nt, Human
cgccucuuucaagca

SEQ ID NO: 2413098 - RNA, 13 nt, Human
cgccucugcauuc

SEQ ID NO: 2413099 - RNA, 13 nt, Human
cgccucugcuggc

SEQ ID NO: 2413100 - RNA, 19 nt, Human
cgccucuucuucuucagaa

SEQ ID NO: 2413101 - RNA, 14 nt, Human
cgccucccacuggg

SEQ ID NO: 2413102 - RNA, 18 nt, Human
cgccuccauccaaggcca

SEQ ID NO: 2413103 - RNA, 16 nt, Human
cgccuccauccaaggc

SEQ ID NO: 2413104 - RNA, 21 nt, Human
cgccuccauuuuuguuguuau

SEQ ID NO: 2413105 - RNA, 13 nt, Human
cgccucccacugg

SEQ ID NO: 2413106 - RNA, 15 nt, Human
cgauauacucuagau

SEQ ID NO: 2413107 - RNA, 18 nt, Human
cgaucacaacgugcauug

SEQ ID NO: 2413108 - RNA, 20 nt, Human
cgagucauucguucugugga

SEQ ID NO: 2413109 - RNA, 13 nt, Human
cgaguccaagcug

SEQ ID NO: 2413110 - RNA, 14 nt, Human
cgaguccaagcugg

SEQ ID NO: 2413111 - RNA, 15 nt, Human
cgaguccaagcuggg

SEQ ID NO: 2413112 - RNA, 14 nt, Human
cgauagugguggug

SEQ ID NO: 2413113 - RNA, 18 nt, Human
cgagucauucguucugug

SEQ ID NO: 2413114 - RNA, 19 nt, Human
cgagucauucguucugugg

SEQ ID NO: 2413115 - RNA, 22 nt, Human
cgagucacugccucucccuggc

SEQ ID NO: 2413116 - RNA, 15 nt, Human
cgagucacugccucu

SEQ ID NO: 2413117 - RNA, 18 nt, Human
cgagucacugccucuccc

SEQ ID NO: 2413118 - RNA, 21 nt, Human
cgaguauguguuugugugugu

SEQ ID NO: 2413119 - RNA, 13 nt, Human
cgaguauguguuu

SEQ ID NO: 2413120 - RNA, 20 nt, Human
cgagucaaaacucaaaugcu

SEQ ID NO: 2413121 - RNA, 16 nt, Human
cgagucaauccccuca

SEQ ID NO: 2413122 - RNA, 20 nt, Human
cgagucaauccccucauuca

SEQ ID NO: 2413123 - RNA, 12 nt, Human
cgagucacugcc

SEQ ID NO: 2413124 - RNA, 14 nt, Human
cgagucacugccuc

SEQ ID NO: 2413125 - RNA, 13 nt, Human
cgcaggcuggccc

SEQ ID NO: 2413126 - RNA, 18 nt, Human
cgcaggcgggaaaagcag

SEQ ID NO: 2413127 - RNA, 18 nt, Human
cgcaugcccccucgugcc

SEQ ID NO: 2413128 - RNA, 16 nt, Human
cgcaugcccccucgug

SEQ ID NO: 2413129 - RNA, 14 nt, Human
cgcaugcccccucg

SEQ ID NO: 2413130 - RNA, 13 nt, Human
cgcaugcccccuc

SEQ ID NO: 2413131 - RNA, 21 nt, Human
cgcaugcccccucgugccagu

SEQ ID NO: 2413132 - RNA, 20 nt, Human
cgcaugcccccucgugccag

SEQ ID NO: 2413133 - RNA, 22 nt, Human
cgcaugcccccucgugccaguc

SEQ ID NO: 2413134 - RNA, 15 nt, Human
cgcaugcccucaauc

SEQ ID NO: 2413135 - RNA, 16 nt, Human
cgcauggucacacacu

SEQ ID NO: 2413136 - RNA, 18 nt, Human
cgcauggaguguguauug

SEQ ID NO: 2413137 - RNA, 22 nt, Human
cgcauggaguguguauuguucc

SEQ ID NO: 2413138 - RNA, 16 nt, Human
cgcaugcggcccagga

SEQ ID NO: 2413139 - RNA, 14 nt, Human
cgcaugcggcccag

SEQ ID NO: 2413140 - RNA, 19 nt, Human
cgcauggucacacacugau

SEQ ID NO: 2413141 - RNA, 12 nt, Human
cgcauucccuga

SEQ ID NO: 2413142 - RNA, 13 nt, Human
cgcauucucaugg

SEQ ID NO: 2413143 - RNA, 23 nt, Human
cgcauggaguguguauuguuccc

SEQ ID NO: 2413144 - RNA, 13 nt, Human
cgcauucccugag

SEQ ID NO: 2413145 - RNA, 18 nt, Human
cgcaggcccccaggugcc

SEQ ID NO: 2413146 - RNA, 22 nt, Human
cgcaggauucuuccucccuccc

SEQ ID NO: 2413147 - RNA, 23 nt, Human
cgaucacaacgugcauugugcuu

SEQ ID NO: 2413148 - RNA, 22 nt, Human
cgaucacaacgugcauugugcu

SEQ ID NO: 2413149 - RNA, 15 nt, Human
cgauccaccugucuc

SEQ ID NO: 2413150 - RNA, 24 nt, Human
cgaucacaacgugcauugugcuuc

SEQ ID NO: 2413151 - RNA, 13 nt, Human
cgcaggaagcugc

SEQ ID NO: 2413152 - RNA, 15 nt, Human
cgcaggaagcugcuc

SEQ ID NO: 2413153 - RNA, 13 nt, Human
cuacucagaagcc

SEQ ID NO: 2413154 - RNA, 16 nt, Human
cuacucagaagccuga

SEQ ID NO: 2413155 - RNA, 17 nt, Human
cuacucagaagccugag

SEQ ID NO: 2413156 - RNA, 19 nt, Human
cuacucagaagccugaggc

SEQ ID NO: 2413157 - RNA, 21 nt, Human
cuacucagaagccugaggcug

SEQ ID NO: 2413158 - RNA, 19 nt, Human
cuacguuccuauugucauu

SEQ ID NO: 2413159 - RNA, 16 nt, Human
cuacguuaagggaagg

SEQ ID NO: 2413160 - RNA, 18 nt, Human
cuacgugugauuuuucug

SEQ ID NO: 2413161 - RNA, 14 nt, Human
cuacgugugauuuu

SEQ ID NO: 2413162 - RNA, 17 nt, Human
cuacguuaccaggcagg

SEQ ID NO: 2413163 - RNA, 17 nt, Human
cuacguacaugugaggc

SEQ ID NO: 2413164 - RNA, 13 nt, Human
cuacgugugauuu

SEQ ID NO: 2413165 - RNA, 22 nt, Human
cuacgcugaagauggcauccug

SEQ ID NO: 2413166 - RNA, 13 nt, Human
cuacgccugccuc

SEQ ID NO: 2413167 - RNA, 21 nt, Human
cuacgcucuccuuucuuucua

SEQ ID NO: 2413168 - RNA, 17 nt, Human
cuaccuuuguauucucu

SEQ ID NO: 2413169 - RNA, 15 nt, Human
cuacgccaaucaagg

SEQ ID NO: 2413170 - RNA, 14 nt, Human
cuacgccugcaugu

SEQ ID NO: 2413171 - RNA, 14 nt, Human
cuacgcucuccuuu

SEQ ID NO: 2413172 - RNA, 20 nt, Human
cuaccuguucagugucccgg

SEQ ID NO: 2413173 - RNA, 16 nt, Human
cuaccuguucaguguc

SEQ ID NO: 2413174 - RNA, 22 nt, Human
cuaccuguucagugucccgggc

SEQ ID NO: 2413175 - RNA, 21 nt, Human
cuaccuguucagugucccggg

SEQ ID NO: 2413176 - RNA, 19 nt, Human
cuaccuuaaaauguaaaac

SEQ ID NO: 2413177 - RNA, 15 nt, Human
cuaccugcucuccaa

SEQ ID NO: 2413178 - RNA, 13 nt, Human
cuaccugugccug

SEQ ID NO: 2413179 - RNA, 12 nt, Human
cuaccugugccu

SEQ ID NO: 2413180 - RNA, 20 nt, Human
cuacaugagguacugagagu

SEQ ID NO: 2413181 - RNA, 18 nt, Human
cuacaugagguacugaga

SEQ ID NO: 2413182 - RNA, 15 nt, Human
cuacaucuucugccu

SEQ ID NO: 2413183 - RNA, 14 nt, Human
cuacaucuucugcc

SEQ ID NO: 2413184 - RNA, 16 nt, Human
cuacaucuucugccuu

SEQ ID NO: 2413185 - RNA, 10 nt, Human
cuacaugaaa

SEQ ID NO: 2413186 - RNA, 23 nt, Human
cuacauacuuucauccugacucu

SEQ ID NO: 2413187 - RNA, 15 nt, Human
cuacaucgcccucca

SEQ ID NO: 2413188 - RNA, 17 nt, Human
cuacaucgcccuccaca

SEQ ID NO: 2413189 - RNA, 16 nt, Human
cuaccugccacucaca

SEQ ID NO: 2413190 - RNA, 15 nt, Human
cuaccugccacucac

SEQ ID NO: 2413191 - RNA, 14 nt, Human
cuaccugccacuca

SEQ ID NO: 2413192 - RNA, 22 nt, Human
cuaccugccacucacacagcca

SEQ ID NO: 2413193 - RNA, 19 nt, Human
cuaccugccacucacacag

SEQ ID NO: 2413194 - RNA, 12 nt, Human
cuaccugcucuc

SEQ ID NO: 2413195 - RNA, 19 nt, Human
cuaccugcucuccaagucu

SEQ ID NO: 2413196 - RNA, 16 nt, Human
cuaccuggucucuccu

SEQ ID NO: 2413197 - RNA, 13 nt, Human
cuacaugaaacag

SEQ ID NO: 2413198 - RNA, 22 nt, Human
cuacaugaucuagagccaguua

SEQ ID NO: 2413199 - RNA, 18 nt, Human
cuacaucuuuuuucacaa

SEQ ID NO: 2413200 - RNA, 14 nt, Human
cuacaugcagccca

SEQ ID NO: 2413201 - RNA, 15 nt, Human
cuacaugcagcccau

SEQ ID NO: 2413202 - RNA, 17 nt, Human
cuacaugcagcccaugc

SEQ ID NO: 2413203 - RNA, 21 nt, Human
cuacaugcagcccaugcccac

SEQ ID NO: 2413204 - RNA, 23 nt, Human
cuacaugcagcccaugcccaccu

SEQ ID NO: 2413205 - RNA, 16 nt, Human
cuacagugguuuuaua

SEQ ID NO: 2413206 - RNA, 14 nt, Human
cuacagugguuuua

SEQ ID NO: 2413207 - RNA, 15 nt, Human
cuaauuucuccuccc

SEQ ID NO: 2413208 - RNA, 14 nt, Human
cuaauuucuccucc

SEQ ID NO: 2413209 - RNA, 20 nt, Human
cuacaguccucccaucucac

SEQ ID NO: 2413210 - RNA, 19 nt, Human
cuacaguugaaaaacagcu

SEQ ID NO: 2413211 - RNA, 21 nt, Human
cuacaguugaaaaacagcuga

SEQ ID NO: 2413212 - RNA, 18 nt, Human
cuacauacuauggaauuu

SEQ ID NO: 2413213 - RNA, 22 nt, Human
cuacaguuggaaauccauccag

SEQ ID NO: 2413214 - RNA, 21 nt, Human
cuacaguuggaaauccaucca

SEQ ID NO: 2413215 - RNA, 20 nt, Human
cuacaguuguuuuuugaaaa

SEQ ID NO: 2413216 - RNA, 22 nt, Human
cuacaguuguuuuuugaaaaca

SEQ ID NO: 2413217 - RNA, 22 nt, Human
cuacaguugaaaaacagcugag

SEQ ID NO: 2413218 - RNA, 20 nt, Human
cuacaguuggaaauccaucc

SEQ ID NO: 2413219 - RNA, 21 nt, Human
cuacagugguuuuauacugaa

SEQ ID NO: 2413220 - RNA, 13 nt, Human
cuacaguguacag

SEQ ID NO: 2413221 - RNA, 16 nt, Human
cuacaaaaacacagca

SEQ ID NO: 2413222 - RNA, 17 nt, Human
cuacaaaaacacagcaa

SEQ ID NO: 2413223 - RNA, 18 nt, Human
cuacaaaaacacagcaag

SEQ ID NO: 2413224 - RNA, 19 nt, Human
cuacaguccucccaucuca

SEQ ID NO: 2413225 - RNA, 15 nt, Human
cuacaaaaacacagc

SEQ ID NO: 2413226 - RNA, 18 nt, Human
cuaauuucaaaaugcuuu

SEQ ID NO: 2413227 - RNA, 19 nt, Human
cuaauuucaaaaugcuuuu

SEQ ID NO: 2413228 - RNA, 22 nt, Human
cuaauuucaaaaugcuuuuuau

SEQ ID NO: 2413229 - RNA, 14 nt, Human
cuaauuuauuuugu

SEQ ID NO: 2413230 - RNA, 21 nt, Human
cuaauuucaaaaauauaacuu

SEQ ID NO: 2413231 - RNA, 19 nt, Human
cuaauuucaaaaauauaac

SEQ ID NO: 2413232 - RNA, 17 nt, Human
cuaauuucaaaaugcuu

SEQ ID NO: 2413233 - RNA, 23 nt, Human
cuaauuuauccugaaauuucaga

SEQ ID NO: 2413234 - RNA, 21 nt, Human
cuaauuuaucuugucucuggg

SEQ ID NO: 2413235 - RNA, 21 nt, Human
cuaauuuauccugaaauuuca

SEQ ID NO: 2413236 - RNA, 20 nt, Human
cuaaguaaaaccacagcagu

SEQ ID NO: 2413237 - RNA, 11 nt, Human
cgugugugugu

SEQ ID NO: 2413238 - RNA, 23 nt, Human
cguguguggguggauauaaauau

SEQ ID NO: 2413239 - RNA, 22 nt, Human
cguguguggguggauauaaaua

SEQ ID NO: 2413240 - RNA, 12 nt, Human
cgugugugugcg

SEQ ID NO: 2413241 - RNA, 22 nt, Human
cguguguagaguuaagaagcug

SEQ ID NO: 2413242 - RNA, 15 nt, Human
cguguguagaguuaa

SEQ ID NO: 2413243 - RNA, 12 nt, Human
cguguguagagu

SEQ ID NO: 2413244 - RNA, 19 nt, Human
cguguguacacgggacuga

SEQ ID NO: 2413245 - RNA, 22 nt, Human
cguguggcaauagugggcccuc

SEQ ID NO: 2413246 - RNA, 20 nt, Human
cguguggcucacguguguga

SEQ ID NO: 2413247 - RNA, 18 nt, Human
cguguguagaguuaagaa

SEQ ID NO: 2413248 - RNA, 17 nt, Human
cguguguccaugugugu

SEQ ID NO: 2413249 - RNA, 21 nt, Human
cguguguggguggauauaaau

SEQ ID NO: 2413250 - RNA, 22 nt, Human
cgugugugcaagugucugugug

SEQ ID NO: 2413251 - RNA, 22 nt, Human
cuaaguaaaaccacagcaguug

SEQ ID NO: 2413252 - RNA, 23 nt, Human
cuaaguaaaaccacagcaguuga

SEQ ID NO: 2413253 - RNA, 23 nt, Human
cuaagugauccucccaccucagc

SEQ ID NO: 2413254 - RNA, 20 nt, Human
cuaaguuuuuauggcuuuug

SEQ ID NO: 2413255 - RNA, 14 nt, Human
cuaagugugaacug

SEQ ID NO: 2413256 - RNA, 21 nt, Human
cuaagugguacuaacuuuccu

SEQ ID NO: 2413257 - RNA, 16 nt, Human
cuaaguuauaguauau

SEQ ID NO: 2413258 - RNA, 20 nt, Human
cuaaguuauaguauaucugg

SEQ ID NO: 2413259 - RNA, 23 nt, Human
cuaaguuuuuauggcuuuugugc

SEQ ID NO: 2413260 - RNA, 21 nt, Human
cuaauucuuugaccuguuggg

SEQ ID NO: 2413261 - RNA, 22 nt, Human
cuaauucuuugaccuguuggga

SEQ ID NO: 2413262 - RNA, 21 nt, Human
cuagcauacguacacauuuua

SEQ ID NO: 2413263 - RNA, 23 nt, Human
cuagcauacguacacauuuuauu

SEQ ID NO: 2413264 - RNA, 13 nt, Human
cuagcaucccuga

SEQ ID NO: 2413265 - RNA, 21 nt, Human
cuagcauaugaguuucauagc

SEQ ID NO: 2413266 - RNA, 18 nt, Human
cuagcauaucugccuuua

SEQ ID NO: 2413267 - RNA, 17 nt, Human
cuagcauaucugccuuu

SEQ ID NO: 2413268 - RNA, 15 nt, Human
cuagcauaucugccu

SEQ ID NO: 2413269 - RNA, 14 nt, Human
cuagcauaucugcc

SEQ ID NO: 2413270 - RNA, 21 nt, Human
cuagaauuugauuauuaacau

SEQ ID NO: 2413271 - RNA, 19 nt, Human
cuagaauuuuaagugcuuu

SEQ ID NO: 2413272 - RNA, 13 nt, Human
cuagacaacccug

SEQ ID NO: 2413273 - RNA, 15 nt, Human
cuagacaacccugca

SEQ ID NO: 2413274 - RNA, 16 nt, Human
cuagacaacccugcaa

SEQ ID NO: 2413275 - RNA, 14 nt, Human
cuagaauuucuuua

SEQ ID NO: 2413276 - RNA, 15 nt, Human
cuagaauuuauucaa

SEQ ID NO: 2413277 - RNA, 23 nt, Human
cuagaauuuauucaauuccucug

SEQ ID NO: 2413278 - RNA, 22 nt, Human
cuagaauuuauucaauuccucu

SEQ ID NO: 2413279 - RNA, 19 nt, Human
cuagaagugggccaggaca

SEQ ID NO: 2413280 - RNA, 20 nt, Human
cuagaagugggccaggacag

SEQ ID NO: 2413281 - RNA, 15 nt, Human
cuagaaguuacugaa

SEQ ID NO: 2413282 - RNA, 21 nt, Human
cuagaagugggccaggacagg

SEQ ID NO: 2413283 - RNA, 19 nt, Human
cuagaaggccacaugucac

SEQ ID NO: 2413284 - RNA, 14 nt, Human
cuagaaggccacau

SEQ ID NO: 2413285 - RNA, 13 nt, Human
cuagaaggccaca

SEQ ID NO: 2413286 - RNA, 21 nt, Human
cuagaagccaagggaaagggg

SEQ ID NO: 2413287 - RNA, 20 nt, Human
cuagaagccaagggaaaggg

SEQ ID NO: 2413288 - RNA, 16 nt, Human
cuagaagccaagggaa

SEQ ID NO: 2413289 - RNA, 13 nt, Human
cuagaagccaagg

SEQ ID NO: 2413290 - RNA, 12 nt, Human
cuagaagccaag

SEQ ID NO: 2413291 - RNA, 22 nt, Human
cuagaagggcuagaaccuggag

SEQ ID NO: 2413292 - RNA, 21 nt, Human
cuagaagggcuagaaccugga

SEQ ID NO: 2413293 - RNA, 17 nt, Human
cuagaagugggccagga

SEQ ID NO: 2413294 - RNA, 20 nt, Human
cuagaagggccaguccugcc

SEQ ID NO: 2413295 - RNA, 23 nt, Human
cuagaagggccaguccugccugg

SEQ ID NO: 2413296 - RNA, 21 nt, Human
cuagaagaugaauacaaacaa

SEQ ID NO: 2413297 - RNA, 18 nt, Human
cuagaaccuggagggcug

SEQ ID NO: 2413298 - RNA, 16 nt, Human
cuagaaccuggagggc

SEQ ID NO: 2413299 - RNA, 14 nt, Human
cuagaaccuggagg

SEQ ID NO: 2413300 - RNA, 15 nt, Human
cuagaaccuggagag

SEQ ID NO: 2413301 - RNA, 14 nt, Human
cuagaaccuggaga

SEQ ID NO: 2413302 - RNA, 18 nt, Human
cuagaaccuggaagggcu

SEQ ID NO: 2413303 - RNA, 18 nt, Human
cuagaaccuagaagggcu

SEQ ID NO: 2413304 - RNA, 22 nt, Human
cuagaagauuuugaaauuuuua

SEQ ID NO: 2413305 - RNA, 12 nt, Human
cuagaacucccu

SEQ ID NO: 2413306 - RNA, 13 nt, Human
cuagaacucccuu

SEQ ID NO: 2413307 - RNA, 17 nt, Human
cuagaaccuagaagggc

SEQ ID NO: 2413308 - RNA, 18 nt, Human
cuagaacaucccugccag

SEQ ID NO: 2413309 - RNA, 15 nt, Human
cuacucagcagcccu

SEQ ID NO: 2413310 - RNA, 16 nt, Human
cuacucagcagcccuc

SEQ ID NO: 2413311 - RNA, 17 nt, Human
cuacucagcagcccucc

SEQ ID NO: 2413312 - RNA, 18 nt, Human
cuacucagcagcccuccu

SEQ ID NO: 2413313 - RNA, 19 nt, Human
cuacucagcagcccuccuc

SEQ ID NO: 2413314 - RNA, 20 nt, Human
cuacucagcagcccuccuca

SEQ ID NO: 2413315 - RNA, 21 nt, Human
cuacucagcagcccuccucac

SEQ ID NO: 2413316 - RNA, 22 nt, Human
cuacucagcagcccuccucacc

SEQ ID NO: 2413317 - RNA, 13 nt, Human
cuacucaggaggc

SEQ ID NO: 2413318 - RNA, 15 nt, Human
cuacucaggaggcug

SEQ ID NO: 2413319 - RNA, 16 nt, Human
cuacucaggaggcuga

SEQ ID NO: 2413320 - RNA, 23 nt, Human
cuacucaggaggcugaggcagaa

SEQ ID NO: 2413321 - RNA, 14 nt, Human
cuaucauuaaaguu

SEQ ID NO: 2413322 - RNA, 13 nt, Human
cuaucauuaaagu

SEQ ID NO: 2413323 - RNA, 16 nt, Human
cuaucauuaaaguucu

SEQ ID NO: 2413324 - RNA, 15 nt, Human
cuaucauuaaaguuc

SEQ ID NO: 2413325 - RNA, 17 nt, Human
cuaucauuaaaguucua

SEQ ID NO: 2413326 - RNA, 18 nt, Human
cuaucaugucaaacguga

SEQ ID NO: 2413327 - RNA, 23 nt, Human
cuaucauuuuuguacaguuugcu

SEQ ID NO: 2413328 - RNA, 18 nt, Human
cuaucauuuuuguacagu

SEQ ID NO: 2413329 - RNA, 17 nt, Human
cuaucauuuuuguacag

SEQ ID NO: 2413330 - RNA, 16 nt, Human
cuaucauuuuuguaca

SEQ ID NO: 2413331 - RNA, 15 nt, Human
cuaucauuuuuguac

SEQ ID NO: 2413332 - RNA, 21 nt, Human
cuaucauuuaauaauauacuu

SEQ ID NO: 2413333 - RNA, 17 nt, Human
cuaucauuuaauaauau

SEQ ID NO: 2413334 - RNA, 15 nt, Human
cuaucauuuaauaau

SEQ ID NO: 2413335 - RNA, 13 nt, Human
cuaucauuuaaua

SEQ ID NO: 2413336 - RNA, 23 nt, Human
cuauccacagagagucccacugc

SEQ ID NO: 2413337 - RNA, 19 nt, Human
cuauccacagagaguccca

SEQ ID NO: 2413338 - RNA, 17 nt, Human
cuauccacagagagucc

SEQ ID NO: 2413339 - RNA, 15 nt, Human
cuauccacagagagu

SEQ ID NO: 2413340 - RNA, 13 nt, Human
cuauccacagaga

SEQ ID NO: 2413341 - RNA, 22 nt, Human
cuaucauuuuuguacaguuugc

SEQ ID NO: 2413342 - RNA, 18 nt, Human
cuaucguaaaauuaagaa

SEQ ID NO: 2413343 - RNA, 17 nt, Human
cuaucuaacccucccau

SEQ ID NO: 2413344 - RNA, 17 nt, Human
cuaucguaaaauuaaga

SEQ ID NO: 2413345 - RNA, 14 nt, Human
cuaucuaaauguug

SEQ ID NO: 2413346 - RNA, 15 nt, Human
cuaucucccccagcc

SEQ ID NO: 2413347 - RNA, 16 nt, Human
cuaucuaacccuccca

SEQ ID NO: 2413348 - RNA, 15 nt, Human
cuaucuacucuccuc

SEQ ID NO: 2413349 - RNA, 16 nt, Human
cuaucuacucuccuca

SEQ ID NO: 2413350 - RNA, 17 nt, Human
cuaucuacucuccucau

SEQ ID NO: 2413351 - RNA, 22 nt, Human
cuaguuuucaguuuguauauac

SEQ ID NO: 2413352 - RNA, 18 nt, Human
cuaguuuucuccucccag

SEQ ID NO: 2413353 - RNA, 19 nt, Human
cuaguuuucuccucccagg

SEQ ID NO: 2413354 - RNA, 20 nt, Human
cuaguuuucaguuuguauau

SEQ ID NO: 2413355 - RNA, 19 nt, Human
cuaguuuucaguuuguaua

SEQ ID NO: 2413356 - RNA, 23 nt, Human
cuaguuuuaaaaaaauaaaacau

SEQ ID NO: 2413357 - RNA, 16 nt, Human
cuaguuuucuccuccc

SEQ ID NO: 2413358 - RNA, 17 nt, Human
cuaguuuucuccuccca

SEQ ID NO: 2413359 - RNA, 22 nt, Human
cuaguuugauuaaauucuugca

SEQ ID NO: 2413360 - RNA, 13 nt, Human
cuaguuugcauuc

SEQ ID NO: 2413361 - RNA, 21 nt, Human
cuaguuugauuaaauucuugc

SEQ ID NO: 2413362 - RNA, 23 nt, Human
cuaguuguuugauucagacagcu

SEQ ID NO: 2413363 - RNA, 22 nt, Human
cuaguuguuugauucagacagc

SEQ ID NO: 2413364 - RNA, 13 nt, Human
cuaguuugauuaa

SEQ ID NO: 2413365 - RNA, 23 nt, Human
cuagccagacacucugcucugcc

SEQ ID NO: 2413366 - RNA, 22 nt, Human
cuagccagacacucugcucugc

SEQ ID NO: 2413367 - RNA, 19 nt, Human
cuagccagacacucugcuc

SEQ ID NO: 2413368 - RNA, 15 nt, Human
cuagccagacacucu

SEQ ID NO: 2413369 - RNA, 15 nt, Human
cuagccagaggagag

SEQ ID NO: 2413370 - RNA, 13 nt, Human
cuagccagaggag

SEQ ID NO: 2413371 - RNA, 12 nt, Human
cuagccagagga

SEQ ID NO: 2413372 - RNA, 19 nt, Human
cuagccaccgccuccuaca

SEQ ID NO: 2413373 - RNA, 16 nt, Human
cuagcaucucaugagu

SEQ ID NO: 2413374 - RNA, 17 nt, Human
cuaucucccccagcccc

SEQ ID NO: 2413375 - RNA, 16 nt, Human
cuaucucccccagccc

SEQ ID NO: 2413376 - RNA, 15 nt, Human
cuauuaaaggaauaa

SEQ ID NO: 2413377 - RNA, 18 nt, Human
cuaucucccccagcccca

SEQ ID NO: 2413378 - RNA, 23 nt, Human
cuauuaagauuuccaagugccaa

SEQ ID NO: 2413379 - RNA, 19 nt, Human
cuauuaaggugauauauuu

SEQ ID NO: 2413380 - RNA, 23 nt, Human
cuauuaaggugauauauuuaaaa

SEQ ID NO: 2413381 - RNA, 21 nt, Human
cuauuaaggugauauauuuaa

SEQ ID NO: 2413382 - RNA, 23 nt, Human
cuauuaagaggcagaaaauugca

SEQ ID NO: 2413383 - RNA, 17 nt, Human
cuauuaagauuuccaag

SEQ ID NO: 2413384 - RNA, 16 nt, Human
cuauuaagauuuccaa

SEQ ID NO: 2413385 - RNA, 12 nt, Human
cuauuuuuguag

SEQ ID NO: 2413386 - RNA, 13 nt, Human
cuauuuuuguaga

SEQ ID NO: 2413387 - RNA, 14 nt, Human
cuauuuuuguagaa

SEQ ID NO: 2413388 - RNA, 22 nt, Human
cuauuuuugucuuauauauauu

SEQ ID NO: 2413389 - RNA, 18 nt, Human
cuauuuuuuauuuuacuu

SEQ ID NO: 2413390 - RNA, 15 nt, Human
cuauuuuuguagaag

SEQ ID NO: 2413391 - RNA, 23 nt, Human
cucaaaauaccaugccauuuaaa

SEQ ID NO: 2413392 - RNA, 18 nt, Human
cucaaaagcugggcaggu

SEQ ID NO: 2413393 - RNA, 17 nt, Human
cucaaaaaaagaaaaag

SEQ ID NO: 2413394 - RNA, 21 nt, Human
cucaaaaaaaaaaaaaugcac

SEQ ID NO: 2413395 - RNA, 21 nt, Human
cuauuuuuuuucuguuauaua

SEQ ID NO: 2413396 - RNA, 20 nt, Human
cuauuuuuuuucuguuauau

SEQ ID NO: 2413397 - RNA, 16 nt, Human
cucaaacacugcaggc

SEQ ID NO: 2413398 - RNA, 14 nt, Human
cucaaacacugcag

SEQ ID NO: 2413399 - RNA, 18 nt, Human
cucaaaccaaaucacuga

SEQ ID NO: 2413400 - RNA, 19 nt, Human
cucaaaccaaaucacugaa

SEQ ID NO: 2413401 - RNA, 22 nt, Human
cucaaaccaaaucacugaacuu

SEQ ID NO: 2413402 - RNA, 13 nt, Human
cucaaacacugca

SEQ ID NO: 2413403 - RNA, 12 nt, Human
cucaaacacugc

SEQ ID NO: 2413404 - RNA, 21 nt, Human
cucaaacacaguuacacuugu

SEQ ID NO: 2413405 - RNA, 15 nt, Human
cucaaacacaguuac

SEQ ID NO: 2413406 - RNA, 16 nt, Human
cucaaacaacacuggu

SEQ ID NO: 2413407 - RNA, 17 nt, Human
cucaaacaacacuggug

SEQ ID NO: 2413408 - RNA, 18 nt, Human
cucaaaauauuuguacau

SEQ ID NO: 2413409 - RNA, 16 nt, Human
cucaaaaugacagcca

SEQ ID NO: 2413410 - RNA, 20 nt, Human
cucaaaacuuaacauauuua

SEQ ID NO: 2413411 - RNA, 16 nt, Human
cucaaaacuuaacaua

SEQ ID NO: 2413412 - RNA, 20 nt, Human
cuauuuuuuauuuuacuuuu

SEQ ID NO: 2413413 - RNA, 13 nt, Human
cucaaaauauuug

SEQ ID NO: 2413414 - RNA, 20 nt, Human
cucaaaagcacccuugacgu

SEQ ID NO: 2413415 - RNA, 22 nt, Human
cucacaaaccaugcaaaugcua

SEQ ID NO: 2413416 - RNA, 11 nt, Human
cucacaaaaga

SEQ ID NO: 2413417 - RNA, 23 nt, Human
cucaauuuuaucccucaccugua

SEQ ID NO: 2413418 - RNA, 12 nt, Human
cucaauuuuugg

SEQ ID NO: 2413419 - RNA, 21 nt, Human
cucaauuuuugguugaauaaa

SEQ ID NO: 2413420 - RNA, 14 nt, Human
cucaauucuucccu

SEQ ID NO: 2413421 - RNA, 19 nt, Human
cucaauucuucccuaucuu

SEQ ID NO: 2413422 - RNA, 16 nt, Human
cucaauuucuccccag

SEQ ID NO: 2413423 - RNA, 15 nt, Human
cucaauuucucccca

SEQ ID NO: 2413424 - RNA, 13 nt, Human
cucaauuucuccc

SEQ ID NO: 2413425 - RNA, 15 nt, Human
cucaaugcacugaca

SEQ ID NO: 2413426 - RNA, 13 nt, Human
cucaaugcacuga

SEQ ID NO: 2413427 - RNA, 13 nt, Human
cucaauggacugg

SEQ ID NO: 2413428 - RNA, 15 nt, Human
cucaaugcucauaac

SEQ ID NO: 2413429 - RNA, 16 nt, Human
cucaaugcagccagac

SEQ ID NO: 2413430 - RNA, 13 nt, Human
cucaaugcucaua

SEQ ID NO: 2413431 - RNA, 12 nt, Human
cucaaugcucau

SEQ ID NO: 2413432 - RNA, 12 nt, Human
cucaaugagcuc

SEQ ID NO: 2413433 - RNA, 16 nt, Human
cucaaugagcucuucc

SEQ ID NO: 2413434 - RNA, 13 nt, Human
cucaaacguggcu

SEQ ID NO: 2413435 - RNA, 21 nt, Human
cucaaaccuguuuaaauauuu

SEQ ID NO: 2413436 - RNA, 18 nt, Human
cucaaaccuguuuaaaua

SEQ ID NO: 2413437 - RNA, 15 nt, Human
cucaaacguggcuuu

SEQ ID NO: 2413438 - RNA, 15 nt, Human
cucaaaccuguuuaa

SEQ ID NO: 2413439 - RNA, 15 nt, Human
cucaaaccuccucuu

SEQ ID NO: 2413440 - RNA, 14 nt, Human
cucaaaccuccucu

SEQ ID NO: 2413441 - RNA, 18 nt, Human
cucaaacacugcaggcau

SEQ ID NO: 2413442 - RNA, 13 nt, Human
cucaaaccuccuc

SEQ ID NO: 2413443 - RNA, 20 nt, Human
cucaaacucuugaccucagg

SEQ ID NO: 2413444 - RNA, 13 nt, Human
cucaaacuccuga

SEQ ID NO: 2413445 - RNA, 14 nt, Human
cucaaacuccugac

SEQ ID NO: 2413446 - RNA, 14 nt, Human
cucaauaagccuug

SEQ ID NO: 2413447 - RNA, 16 nt, Human
cucaauaaaugauucu

SEQ ID NO: 2413448 - RNA, 14 nt, Human
cucaauaaaguaca

SEQ ID NO: 2413449 - RNA, 15 nt, Human
cucaauaagccuugu

SEQ ID NO: 2413450 - RNA, 16 nt, Human
cucaauauuccugaau

SEQ ID NO: 2413451 - RNA, 15 nt, Human
cucaauaugcuuaca

SEQ ID NO: 2413452 - RNA, 18 nt, Human
cucaauauuccugaauga

SEQ ID NO: 2413453 - RNA, 11 nt, Human
cucaauauuuu

SEQ ID NO: 2413454 - RNA, 13 nt, Human
cucccccaucucu

SEQ ID NO: 2413455 - RNA, 17 nt, Human
cucccccauccuccccu

SEQ ID NO: 2413456 - RNA, 13 nt, Human
cuccccccacugc

SEQ ID NO: 2413457 - RNA, 14 nt, Human
cuccccccacugca

SEQ ID NO: 2413458 - RNA, 13 nt, Human
cucccccccaugc

SEQ ID NO: 2413459 - RNA, 15 nt, Human
cuccccccacugcag

SEQ ID NO: 2413460 - RNA, 16 nt, Human
cuccccccacugcagg

SEQ ID NO: 2413461 - RNA, 22 nt, Human
cucccccagccccauccucugu

SEQ ID NO: 2413462 - RNA, 15 nt, Human
cucccccauccuccc

SEQ ID NO: 2413463 - RNA, 12 nt, Human
cucccccauccu

SEQ ID NO: 2413464 - RNA, 11 nt, Human
cucccccaucc

SEQ ID NO: 2413465 - RNA, 20 nt, Human
cucccccagccccauccucu

SEQ ID NO: 2413466 - RNA, 15 nt, Human
cucccccagccccau

SEQ ID NO: 2413467 - RNA, 21 nt, Human
cucccccaacccccaccccac

SEQ ID NO: 2413468 - RNA, 23 nt, Human
cucccccaacccccaccccacac

SEQ ID NO: 2413469 - RNA, 14 nt, Human
cucccccacccccu

SEQ ID NO: 2413470 - RNA, 19 nt, Human
cucccccacccccucccca

SEQ ID NO: 2413471 - RNA, 23 nt, Human
cuccucuucaacugaccagccuc

SEQ ID NO: 2413472 - RNA, 18 nt, Human
cuccucuucaacugacca

SEQ ID NO: 2413473 - RNA, 23 nt, Human
cuccucugugaccaaugucuuga

SEQ ID NO: 2413474 - RNA, 22 nt, Human
cuccucugugaccaaugucuug

SEQ ID NO: 2413475 - RNA, 19 nt, Human
cuccucuuaaaaaauaaaa

SEQ ID NO: 2413476 - RNA, 20 nt, Human
cuccucuuaaaaaauaaaaa

SEQ ID NO: 2413477 - RNA, 10 nt, Human
cuccuggagg

SEQ ID NO: 2413478 - RNA, 12 nt, Human
cuccuggagccu

SEQ ID NO: 2413479 - RNA, 22 nt, Human
cuccuggacugccuugaauauc

SEQ ID NO: 2413480 - RNA, 14 nt, Human
cuccuggacugccu

SEQ ID NO: 2413481 - RNA, 12 nt, Human
cuccuggacucc

SEQ ID NO: 2413482 - RNA, 15 nt, Human
cuccuggacuccugc

SEQ ID NO: 2413483 - RNA, 21 nt, Human
cuccucuuaaaaaauaaaaac

SEQ ID NO: 2413484 - RNA, 23 nt, Human
cuccucuuaaaaaauaaaaacug

SEQ ID NO: 2413485 - RNA, 13 nt, Human
cuccucugugacc

SEQ ID NO: 2413486 - RNA, 12 nt, Human
cuccucugugaa

SEQ ID NO: 2413487 - RNA, 18 nt, Human
cuccucugugaagcauuc

SEQ ID NO: 2413488 - RNA, 16 nt, Human
cuccucugucugcccu

SEQ ID NO: 2413489 - RNA, 20 nt, Human
cuccucuccuggaggauugc

SEQ ID NO: 2413490 - RNA, 12 nt, Human
cuccucucugcc

SEQ ID NO: 2413491 - RNA, 16 nt, Human
cuccuggcccacugca

SEQ ID NO: 2413492 - RNA, 18 nt, Human
cuccuggcccacugcauc

SEQ ID NO: 2413493 - RNA, 19 nt, Human
cuccuggagccuuugaaua

SEQ ID NO: 2413494 - RNA, 16 nt, Human
cuccugggaucugcuc

SEQ ID NO: 2413495 - RNA, 15 nt, Human
cuccugggaucugcu

SEQ ID NO: 2413496 - RNA, 17 nt, Human
cuccugggaucugcucg

SEQ ID NO: 2413497 - RNA, 22 nt, Human
cuccugggccccucaucugcuc

SEQ ID NO: 2413498 - RNA, 12 nt, Human
cuccuacagccc

SEQ ID NO: 2413499 - RNA, 16 nt, Human
cuccuacaccuaacuc

SEQ ID NO: 2413500 - RNA, 20 nt, Human
cuccuacccaccgcccuugc

SEQ ID NO: 2413501 - RNA, 12 nt, Human
cuccuaagagag

SEQ ID NO: 2413502 - RNA, 16 nt, Human
cuccucuccuggagga

SEQ ID NO: 2413503 - RNA, 15 nt, Human
cuccucuccuggagg

SEQ ID NO: 2413504 - RNA, 14 nt, Human
cuccucuccuggag

SEQ ID NO: 2413505 - RNA, 13 nt, Human
cuccucuccugga

SEQ ID NO: 2413506 - RNA, 13 nt, Human
cuccucucugccc

SEQ ID NO: 2413507 - RNA, 14 nt, Human
cuccucucugcccu

SEQ ID NO: 2413508 - RNA, 15 nt, Human
cuccucucugcccua

SEQ ID NO: 2413509 - RNA, 18 nt, Human
cuccucugcugcuggcug

SEQ ID NO: 2413510 - RNA, 16 nt, Human
cuccucugcugcuggc

SEQ ID NO: 2413511 - RNA, 19 nt, Human
cuccucucugcccuaaugc

SEQ ID NO: 2413512 - RNA, 21 nt, Human
cuccguuagcuccuguggccc

SEQ ID NO: 2413513 - RNA, 18 nt, Human
cuccguuagcuccugugg

SEQ ID NO: 2413514 - RNA, 17 nt, Human
cuccguuagcuccugug

SEQ ID NO: 2413515 - RNA, 20 nt, Human
cuccguuggccacuccgaga

SEQ ID NO: 2413516 - RNA, 12 nt, Human
cuccguuggcca

SEQ ID NO: 2413517 - RNA, 22 nt, Human
cuccguuagcuccuguggcccc

SEQ ID NO: 2413518 - RNA, 17 nt, Human
cuccuaaaguagacuuc

SEQ ID NO: 2413519 - RNA, 22 nt, Human
cuccuggggguucuuucuuccu

SEQ ID NO: 2413520 - RNA, 20 nt, Human
cuccuggggguucuuucuuc

SEQ ID NO: 2413521 - RNA, 12 nt, Human
cuccugggcccu

SEQ ID NO: 2413522 - RNA, 14 nt, Human
cuccugggcccucu

SEQ ID NO: 2413523 - RNA, 18 nt, Human
cuccuggggguucuuucu

SEQ ID NO: 2413524 - RNA, 14 nt, Human
cuccuggggguucu

SEQ ID NO: 2413525 - RNA, 23 nt, Human
cuccuggggguucuuucuuccuc

SEQ ID NO: 2413526 - RNA, 21 nt, Human
cuccuggguuuuguauucucu

SEQ ID NO: 2413527 - RNA, 22 nt, Human
cuccuggguugagcuguugccu

SEQ ID NO: 2413528 - RNA, 16 nt, Human
cuccuggguugagcug

SEQ ID NO: 2413529 - RNA, 15 nt, Human
cuccuggguugagcu

SEQ ID NO: 2413530 - RNA, 14 nt, Human
cucgaacuggcugc

SEQ ID NO: 2413531 - RNA, 13 nt, Human
cucgaacuggcug

SEQ ID NO: 2413532 - RNA, 15 nt, Human
cucgaacuggcugca

SEQ ID NO: 2413533 - RNA, 16 nt, Human
cucucagcucagcgcc

SEQ ID NO: 2413534 - RNA, 21 nt, Human
cucucacuaaacuuuacccaa

SEQ ID NO: 2413535 - RNA, 12 nt, Human
cucucagcucca

SEQ ID NO: 2413536 - RNA, 15 nt, Human
cucucacuaaacuuu

SEQ ID NO: 2413537 - RNA, 15 nt, Human
cucucagcuccaggu

SEQ ID NO: 2413538 - RNA, 13 nt, Human
cucucagcuccag

SEQ ID NO: 2413539 - RNA, 17 nt, Human
cucucagcucagcgcca

SEQ ID NO: 2413540 - RNA, 19 nt, Human
cucucaggagcacaggcag

SEQ ID NO: 2413541 - RNA, 18 nt, Human
cucucaggagcacaggca

SEQ ID NO: 2413542 - RNA, 17 nt, Human
cucucaggagcacaggc

SEQ ID NO: 2413543 - RNA, 16 nt, Human
cucucaggagcacagg

SEQ ID NO: 2413544 - RNA, 15 nt, Human
cucucaggagcacag

SEQ ID NO: 2413545 - RNA, 13 nt, Human
cucucaggagcac

SEQ ID NO: 2413546 - RNA, 17 nt, Human
cucucaggaccaaagcu

SEQ ID NO: 2413547 - RNA, 16 nt, Human
cucucaggcaugccug

SEQ ID NO: 2413548 - RNA, 21 nt, Human
cucucaggagcacaggcagcu

SEQ ID NO: 2413549 - RNA, 20 nt, Human
cucucaggagcacaggcagc

SEQ ID NO: 2413550 - RNA, 14 nt, Human
cucucaggaucaag

SEQ ID NO: 2413551 - RNA, 13 nt, Human
cucucaauuuuug

SEQ ID NO: 2413552 - RNA, 14 nt, Human
cucucaauuuuugg

SEQ ID NO: 2413553 - RNA, 19 nt, Human
cucucaauuuuugguugaa

SEQ ID NO: 2413554 - RNA, 22 nt, Human
cucucaauuuuugguugaauaa

SEQ ID NO: 2413555 - RNA, 16 nt, Human
cucucaccuguacucu

SEQ ID NO: 2413556 - RNA, 12 nt, Human
cucucaccuccu

SEQ ID NO: 2413557 - RNA, 14 nt, Human
cucucacauuacug

SEQ ID NO: 2413558 - RNA, 13 nt, Human
cucucacauuacu

SEQ ID NO: 2413559 - RNA, 22 nt, Human
cucucacauguuuagaguugca

SEQ ID NO: 2413560 - RNA, 23 nt, Human
cucuaucauuuaauaauauacuu

SEQ ID NO: 2413561 - RNA, 21 nt, Human
cucuaucauuuaauaauauac

SEQ ID NO: 2413562 - RNA, 15 nt, Human
cucuaucauuuaaua

SEQ ID NO: 2413563 - RNA, 14 nt, Human
cucuaucauuuaau

SEQ ID NO: 2413564 - RNA, 18 nt, Human
cucuaucauuaaaguucu

SEQ ID NO: 2413565 - RNA, 16 nt, Human
cucuaucauuaaaguu

SEQ ID NO: 2413566 - RNA, 15 nt, Human
cucuaucauuaaagu

SEQ ID NO: 2413567 - RNA, 13 nt, Human
cucuaucauuaaa

SEQ ID NO: 2413568 - RNA, 15 nt, Human
cucuaucaccaagga

SEQ ID NO: 2413569 - RNA, 15 nt, Human
cucuauagcaccagg

SEQ ID NO: 2413570 - RNA, 11 nt, Human
cucuauauuua

SEQ ID NO: 2413571 - RNA, 22 nt, Human
cucuauauuuagauuguuaaaa

SEQ ID NO: 2413572 - RNA, 20 nt, Human
cucuaaaagauccuuuuuaa

SEQ ID NO: 2413573 - RNA, 13 nt, Human
cucuaaaagaucc

SEQ ID NO: 2413574 - RNA, 17 nt, Human
cucuaaaagguucaggg

SEQ ID NO: 2413575 - RNA, 16 nt, Human
cucuaaaagguucagg

SEQ ID NO: 2413576 - RNA, 18 nt, Human
cucuaaaagguucaggga

SEQ ID NO: 2413577 - RNA, 17 nt, Human
cucuaaaauagccacuu

SEQ ID NO: 2413578 - RNA, 19 nt, Human
cucguuucaaaaacacagu

SEQ ID NO: 2413579 - RNA, 21 nt, Human
cucguuuuucuucuuaagacu

SEQ ID NO: 2413580 - RNA, 23 nt, Human
cucguugacuggcuguguguugg

SEQ ID NO: 2413581 - RNA, 18 nt, Human
cucuaaagcaauaauggu

SEQ ID NO: 2413582 - RNA, 21 nt, Human
cucuaaagaguuuauuuuaag

SEQ ID NO: 2413583 - RNA, 17 nt, Human
cucgugguaggacugua

SEQ ID NO: 2413584 - RNA, 20 nt, Human
cucguguauccuggggcucc

SEQ ID NO: 2413585 - RNA, 19 nt, Human
cucguguauccuggggcuc

SEQ ID NO: 2413586 - RNA, 18 nt, Human
cucguguauccuggggcu

SEQ ID NO: 2413587 - RNA, 17 nt, Human
cucguguauccuggggc

SEQ ID NO: 2413588 - RNA, 16 nt, Human
cucguguauccugggg

SEQ ID NO: 2413589 - RNA, 15 nt, Human
cucguguauccuggg

SEQ ID NO: 2413590 - RNA, 14 nt, Human
cucguguauccugg

SEQ ID NO: 2413591 - RNA, 16 nt, Human
cucgugguccccaaca

SEQ ID NO: 2413592 - RNA, 21 nt, Human
cucgugguaggacuguagaaa

SEQ ID NO: 2413593 - RNA, 14 nt, Human
cucguuaauuugua

SEQ ID NO: 2413594 - RNA, 20 nt, Human
cucguugacuggcugugugu

SEQ ID NO: 2413595 - RNA, 20 nt, Human
cuccacuuucuagccagagg

SEQ ID NO: 2413596 - RNA, 19 nt, Human
cuccacuuucuagccagag

SEQ ID NO: 2413597 - RNA, 16 nt, Human
cuccacuuucuagcca

SEQ ID NO: 2413598 - RNA, 23 nt, Human
cuccacuuggucugugagaugcu

SEQ ID NO: 2413599 - RNA, 18 nt, Human
cuccacugucacccucca

SEQ ID NO: 2413600 - RNA, 13 nt, Human
cuccacugucacc

SEQ ID NO: 2413601 - RNA, 21 nt, Human
cuccacuucuuguuccccacu

SEQ ID NO: 2413602 - RNA, 16 nt, Human
cuccagggccacgugc

SEQ ID NO: 2413603 - RNA, 21 nt, Human
cucccaccucugugaccucag

SEQ ID NO: 2413604 - RNA, 20 nt, Human
cucccaccucugugaccuca

SEQ ID NO: 2413605 - RNA, 19 nt, Human
cucccaccucugugaccuc

SEQ ID NO: 2413606 - RNA, 18 nt, Human
cucccaccucugugaccu

SEQ ID NO: 2413607 - RNA, 17 nt, Human
cucccaccucugugacc

SEQ ID NO: 2413608 - RNA, 15 nt, Human
cucccaccucuguga

SEQ ID NO: 2413609 - RNA, 14 nt, Human
cucccaccucugug

SEQ ID NO: 2413610 - RNA, 13 nt, Human
cucccaccucugu

SEQ ID NO: 2413611 - RNA, 12 nt, Human
cucccaccucug

SEQ ID NO: 2413612 - RNA, 23 nt, Human
cucccaccucccccucccccuuc

SEQ ID NO: 2413613 - RNA, 23 nt, Human
cucccacccccuucucugcucca

SEQ ID NO: 2413614 - RNA, 15 nt, Human
cucccacgugggaga

SEQ ID NO: 2413615 - RNA, 14 nt, Human
cucccacgugggag

SEQ ID NO: 2413616 - RNA, 22 nt, Human
cucccacagugacucgggcucc

SEQ ID NO: 2413617 - RNA, 19 nt, Human
cuccccaugauguuuagaa

SEQ ID NO: 2413618 - RNA, 12 nt, Human
cuccccauggag

SEQ ID NO: 2413619 - RNA, 17 nt, Human
cuccccauggagccagc

SEQ ID NO: 2413620 - RNA, 14 nt, Human
cuccccaugugucc

SEQ ID NO: 2413621 - RNA, 21 nt, Human
cuccccauuucccaucugcac

SEQ ID NO: 2413622 - RNA, 20 nt, Human
cuccccauuucccaucugca

SEQ ID NO: 2413623 - RNA, 22 nt, Human
cuccccauuucccaucugcacc

SEQ ID NO: 2413624 - RNA, 19 nt, Human
cuccccauuucccaucugc

SEQ ID NO: 2413625 - RNA, 18 nt, Human
cuccccauuucccaucug

SEQ ID NO: 2413626 - RNA, 17 nt, Human
cuccccauuucccaucu

SEQ ID NO: 2413627 - RNA, 16 nt, Human
cuccccauuagcuuuc

SEQ ID NO: 2413628 - RNA, 20 nt, Human
cuccccauguguccugguuc

SEQ ID NO: 2413629 - RNA, 18 nt, Human
cuccccauguguccuggu

SEQ ID NO: 2413630 - RNA, 21 nt, Human
cuccccauguguccugguucc

SEQ ID NO: 2413631 - RNA, 21 nt, Human
cuccccauuagagucagccuu

SEQ ID NO: 2413632 - RNA, 20 nt, Human
cuccagggcuggacugaggc

SEQ ID NO: 2413633 - RNA, 19 nt, Human
cuccagggcuggacugagg

SEQ ID NO: 2413634 - RNA, 18 nt, Human
cuccagggcuggacugag

SEQ ID NO: 2413635 - RNA, 17 nt, Human
cuccagggcuggacuga

SEQ ID NO: 2413636 - RNA, 18 nt, Human
cuccaggggcugcuuccu

SEQ ID NO: 2413637 - RNA, 15 nt, Human
cuccaggggcugcuu

SEQ ID NO: 2413638 - RNA, 14 nt, Human
cuccaggggcugcu

SEQ ID NO: 2413639 - RNA, 21 nt, Human
cuccagggcuggacugaggcc

SEQ ID NO: 2413640 - RNA, 16 nt, Human
cuccagggcuggacug

SEQ ID NO: 2413641 - RNA, 15 nt, Human
cuccagggcuggacu

SEQ ID NO: 2413642 - RNA, 14 nt, Human
cuccagggcuggac

SEQ ID NO: 2413643 - RNA, 13 nt, Human
cuccagggcugga

SEQ ID NO: 2413644 - RNA, 12 nt, Human
cuccagggcugg

SEQ ID NO: 2413645 - RNA, 18 nt, Human
cuccagggccacgugcca

SEQ ID NO: 2413646 - RNA, 19 nt, Human
cuccagggccacgugccag

SEQ ID NO: 2413647 - RNA, 23 nt, Human
cuccagggccacgugccaggccc

SEQ ID NO: 2413648 - RNA, 21 nt, Human
cuccaggggcugcuuccuccu

SEQ ID NO: 2413649 - RNA, 13 nt, Human
cucccaccacagc

SEQ ID NO: 2413650 - RNA, 14 nt, Human
cucccaccacagca

SEQ ID NO: 2413651 - RNA, 14 nt, Human
cucccaccaggcua

SEQ ID NO: 2413652 - RNA, 19 nt, Human
cucccaccacagcaggugu

SEQ ID NO: 2413653 - RNA, 17 nt, Human
cucccacccaccgccac

SEQ ID NO: 2413654 - RNA, 14 nt, Human
cucccacccaccgc

SEQ ID NO: 2413655 - RNA, 13 nt, Human
cucccacccaccg

SEQ ID NO: 2413656 - RNA, 12 nt, Human
cucccaccccac

SEQ ID NO: 2413657 - RNA, 13 nt, Human
cucccaccccacc

SEQ ID NO: 2413658 - RNA, 19 nt, Human
cucccaccccacccccuuc

SEQ ID NO: 2413659 - RNA, 22 nt, Human
cucccaccccacccccuucagu

SEQ ID NO: 2413660 - RNA, 23 nt, Human
cucccaccccacccccuucagug

SEQ ID NO: 2413661 - RNA, 15 nt, Human
cucccacccccaucu

SEQ ID NO: 2413662 - RNA, 19 nt, Human
cucccacccccaucucucc

SEQ ID NO: 2413663 - RNA, 20 nt, Human
cucccacccccaucucuccc

SEQ ID NO: 2413664 - RNA, 22 nt, Human
cucccacccccaucucucccuc

SEQ ID NO: 2413665 - RNA, 18 nt, Human
cucccacccccuucucug

SEQ ID NO: 2413666 - RNA, 22 nt, Human
cucccacccccuucucugcucc

SEQ ID NO: 2413667 - RNA, 20 nt, Human
cucaucugcugguccguggg

SEQ ID NO: 2413668 - RNA, 16 nt, Human
cucaucugcugguccg

SEQ ID NO: 2413669 - RNA, 15 nt, Human
cucaucugcuggucc

SEQ ID NO: 2413670 - RNA, 14 nt, Human
cucaucugcugguc

SEQ ID NO: 2413671 - RNA, 18 nt, Human
cucaucugggggagugga

SEQ ID NO: 2413672 - RNA, 13 nt, Human
cucaucugcuggu

SEQ ID NO: 2413673 - RNA, 15 nt, Human
cucagucucccuccc

SEQ ID NO: 2413674 - RNA, 16 nt, Human
cucagucucccucccu

SEQ ID NO: 2413675 - RNA, 17 nt, Human
cucagucucccucccuu

SEQ ID NO: 2413676 - RNA, 13 nt, Human
cucagucucccuu

SEQ ID NO: 2413677 - RNA, 16 nt, Human
cucagucucaggagca

SEQ ID NO: 2413678 - RNA, 23 nt, Human
cucaugcccacccccugcccugc

SEQ ID NO: 2413679 - RNA, 22 nt, Human
cucaugcccacccccugcccug

SEQ ID NO: 2413680 - RNA, 21 nt, Human
cucaugcccacccccugcccu

SEQ ID NO: 2413681 - RNA, 20 nt, Human
cucaugcccacccccugccc

SEQ ID NO: 2413682 - RNA, 22 nt, Human
cucaugcccccuuucagauguc

SEQ ID NO: 2413683 - RNA, 17 nt, Human
cucaugcccccuuucag

SEQ ID NO: 2413684 - RNA, 14 nt, Human
cucaugccccuggc

SEQ ID NO: 2413685 - RNA, 19 nt, Human
cucaugcccacccccugcc

SEQ ID NO: 2413686 - RNA, 17 nt, Human
cucaugcccacccccug

SEQ ID NO: 2413687 - RNA, 16 nt, Human
cucaugcccacccccu

SEQ ID NO: 2413688 - RNA, 13 nt, Human
cucaugcccaccc

SEQ ID NO: 2413689 - RNA, 22 nt, Human
cucaugcaucuccaccugcucc

SEQ ID NO: 2413690 - RNA, 12 nt, Human
cucaucugucac

SEQ ID NO: 2413691 - RNA, 14 nt, Human
cucaucugucacca

SEQ ID NO: 2413692 - RNA, 13 nt, Human
cucaucugucccu

SEQ ID NO: 2413693 - RNA, 15 nt, Human
cucaucugucccucc

SEQ ID NO: 2413694 - RNA, 17 nt, Human
cucaucugucccuccgg

SEQ ID NO: 2413695 - RNA, 18 nt, Human
cucaucugucccuccggg

SEQ ID NO: 2413696 - RNA, 13 nt, Human
cucaucuuacugu

SEQ ID NO: 2413697 - RNA, 19 nt, Human
cucaucugggggaguggaa

SEQ ID NO: 2413698 - RNA, 12 nt, Human
cucaucugugau

SEQ ID NO: 2413699 - RNA, 20 nt, Human
cucaguaaguaucuggagga

SEQ ID NO: 2413700 - RNA, 21 nt, Human
cucaguaagacgacaaggaaa

SEQ ID NO: 2413701 - RNA, 21 nt, Human
cucaguaaguaucuggaggaa

SEQ ID NO: 2413702 - RNA, 12 nt, Human
cucaguacuuug

SEQ ID NO: 2413703 - RNA, 17 nt, Human
cucaguacuuuggaggc

SEQ ID NO: 2413704 - RNA, 18 nt, Human
cucaguacuuuggaggcc

SEQ ID NO: 2413705 - RNA, 19 nt, Human
cucaguacuuuggaggccc

SEQ ID NO: 2413706 - RNA, 20 nt, Human
cucaguacuuuggaggcccc

SEQ ID NO: 2413707 - RNA, 21 nt, Human
cucaguacuuuggaggccccu

SEQ ID NO: 2413708 - RNA, 13 nt, Human
cucagucucccuc

SEQ ID NO: 2413709 - RNA, 14 nt, Human
cucagucucaggag

SEQ ID NO: 2413710 - RNA, 15 nt, Human
cucagucucaggagc

SEQ ID NO: 2413711 - RNA, 23 nt, Human
cucaguacuuuggaggccccuau

SEQ ID NO: 2413712 - RNA, 21 nt, Human
cucaguccuccccucacagcc

SEQ ID NO: 2413713 - RNA, 23 nt, Human
cucaguccuccccucacagccuc

SEQ ID NO: 2413714 - RNA, 22 nt, Human
cucaguccuccccucacagccu

SEQ ID NO: 2413715 - RNA, 13 nt, Human
cucagucucagga

SEQ ID NO: 2413716 - RNA, 19 nt, Human
cucaguaagacgacaagga

SEQ ID NO: 2413717 - RNA, 16 nt, Human
cucaguaaagcacuug

SEQ ID NO: 2413718 - RNA, 20 nt, Human
cucagguuugccugagggcg

SEQ ID NO: 2413719 - RNA, 14 nt, Human
cucaguaaaaugaa

SEQ ID NO: 2413720 - RNA, 22 nt, Human
cucagguugucugaagucacug

SEQ ID NO: 2413721 - RNA, 16 nt, Human
cuccacuuggucugug

SEQ ID NO: 2413722 - RNA, 17 nt, Human
cuccacuuggucuguga

SEQ ID NO: 2413723 - RNA, 21 nt, Human
cuccacuuggucugugagaug

SEQ ID NO: 2413724 - RNA, 22 nt, Human
cuccacuuggucugugagaugc

SEQ ID NO: 2413725 - RNA, 13 nt, Human
cuccacuuggucu

SEQ ID NO: 2413726 - RNA, 15 nt, Human
cuccacuuggucugu

SEQ ID NO: 2413727 - RNA, 16 nt, Human
cuccacugucacauug

SEQ ID NO: 2413728 - RNA, 13 nt, Human
cuccacugucaca

SEQ ID NO: 2413729 - RNA, 12 nt, Human
cuccacugucac

SEQ ID NO: 2413730 - RNA, 11 nt, Human
cuccacuguca

SEQ ID NO: 2413731 - RNA, 9 nt, Human
cuccacugu

SEQ ID NO: 2413732 - RNA, 23 nt, Human
cuccacuggccggagucagugcc

SEQ ID NO: 2413733 - RNA, 16 nt, Human
cuccacuggauggagg

SEQ ID NO: 2413734 - RNA, 16 nt, Human
cuccaagcucccaggc

SEQ ID NO: 2413735 - RNA, 15 nt, Human
cuccaagcucccagg

SEQ ID NO: 2413736 - RNA, 14 nt, Human
cuccaagcucccag

SEQ ID NO: 2413737 - RNA, 13 nt, Human
cuccaagcuccca

SEQ ID NO: 2413738 - RNA, 18 nt, Human
cuccaagccccaucuucu

SEQ ID NO: 2413739 - RNA, 17 nt, Human
cuccaagccccaucuuc

SEQ ID NO: 2413740 - RNA, 14 nt, Human
cuccaagcuccauc

SEQ ID NO: 2413741 - RNA, 19 nt, Human
cuccaagcuccaucuccac

SEQ ID NO: 2413742 - RNA, 18 nt, Human
cuccaagcuccaucucca

SEQ ID NO: 2413743 - RNA, 23 nt, Human
cuccaagcccaguucagcuuggg

SEQ ID NO: 2413744 - RNA, 15 nt, Human
cuccaagccccaucu

SEQ ID NO: 2413745 - RNA, 13 nt, Human
cuccaagccagcg

SEQ ID NO: 2413746 - RNA, 24 nt, Human
cuccaagcaggacauggacaagga

SEQ ID NO: 2413747 - RNA, 22 nt, Human
cuccaagcaggacauggacaag

SEQ ID NO: 2413748 - RNA, 14 nt, Human
cuccaagcaggaca

SEQ ID NO: 2413749 - RNA, 13 nt, Human
cuccaagcaggac

SEQ ID NO: 2413750 - RNA, 22 nt, Human
cuccaagaccuucuccuucacc

SEQ ID NO: 2413751 - RNA, 21 nt, Human
cuccaagaccuguugguucca

SEQ ID NO: 2413752 - RNA, 20 nt, Human
cuccaagaaugcugaaacca

SEQ ID NO: 2413753 - RNA, 17 nt, Human
cuccaagaaugcugaaa

SEQ ID NO: 2413754 - RNA, 15 nt, Human
cuccaagaccuucuc

SEQ ID NO: 2413755 - RNA, 21 nt, Human
cuccaagaccuucuccuucac

SEQ ID NO: 2413756 - RNA, 15 nt, Human
cucauguggcuggaa

SEQ ID NO: 2413757 - RNA, 14 nt, Human
cucauguggcugga

SEQ ID NO: 2413758 - RNA, 13 nt, Human
cucauguggcugg

SEQ ID NO: 2413759 - RNA, 12 nt, Human
cucauguggcug

SEQ ID NO: 2413760 - RNA, 16 nt, Human
cucaugugauccuuuu

SEQ ID NO: 2413761 - RNA, 14 nt, Human
cucaugugauccuu

SEQ ID NO: 2413762 - RNA, 12 nt, Human
cucaugugaucc

SEQ ID NO: 2413763 - RNA, 23 nt, Human
cucaugcccccuuucagaugucu

SEQ ID NO: 2413764 - RNA, 16 nt, Human
cucaugccccuggcug

SEQ ID NO: 2413765 - RNA, 17 nt, Human
cucaugccccuggcugg

SEQ ID NO: 2413766 - RNA, 12 nt, Human
cucaugccucag

SEQ ID NO: 2413767 - RNA, 16 nt, Human
cucaugccucagccuc

SEQ ID NO: 2413768 - RNA, 16 nt, Human
cuccaagaaugcugaa

SEQ ID NO: 2413769 - RNA, 15 nt, Human
cuccaagaaugcuga

SEQ ID NO: 2413770 - RNA, 14 nt, Human
cuccaagaaugcug

SEQ ID NO: 2413771 - RNA, 18 nt, Human
cuccaacuggauuauaaa

SEQ ID NO: 2413772 - RNA, 18 nt, Human
cuccaaccuggggggcag

SEQ ID NO: 2413773 - RNA, 19 nt, Human
cucaugugugcucuucuuc

SEQ ID NO: 2413774 - RNA, 14 nt, Human
cuccaaccuggaca

SEQ ID NO: 2413775 - RNA, 21 nt, Human
cuccaaccugcaaagaucugu

SEQ ID NO: 2413776 - RNA, 13 nt, Human
cuccaaccugcaa

SEQ ID NO: 2413777 - RNA, 18 nt, Human
cucaugugugcucuucuu

SEQ ID NO: 2413778 - RNA, 12 nt, Human
cucauguguaug

SEQ ID NO: 2413779 - RNA, 16 nt, Human
cucauguucugcuuuc

SEQ ID NO: 2413780 - RNA, 16 nt, Human
cucaugugugcaacag

SEQ ID NO: 2413781 - RNA, 9 nt, Human
cucaugugu

SEQ ID NO: 2413782 - RNA, 15 nt, Human
cucauguucugcuuu

SEQ ID NO: 2413783 - RNA, 17 nt, Human
cugagucaccaggaaug

SEQ ID NO: 2413784 - RNA, 21 nt, Human
cugaguaucuccucgcaagcu

SEQ ID NO: 2413785 - RNA, 22 nt, Human
cugaguaucuccucgcaagcug

SEQ ID NO: 2413786 - RNA, 20 nt, Human
cugaguauguuaagcucuuu

SEQ ID NO: 2413787 - RNA, 14 nt, Human
cugagucaccagga

SEQ ID NO: 2413788 - RNA, 15 nt, Human
cugagucaccaggaa

SEQ ID NO: 2413789 - RNA, 15 nt, Human
cugaguagcugggau

SEQ ID NO: 2413790 - RNA, 20 nt, Human
cugaguagcugggauuacag

SEQ ID NO: 2413791 - RNA, 14 nt, Human
cugaguagcuggga

SEQ ID NO: 2413792 - RNA, 20 nt, Human
cugaguagcuggauuacagg

SEQ ID NO: 2413793 - RNA, 14 nt, Human
cugaggaauccaga

SEQ ID NO: 2413794 - RNA, 15 nt, Human
cugagcuuugcaugu

SEQ ID NO: 2413795 - RNA, 12 nt, Human
cugagcuuugca

SEQ ID NO: 2413796 - RNA, 16 nt, Human
cugaggaaaggccagc

SEQ ID NO: 2413797 - RNA, 17 nt, Human
cugaggaaaggccagcu

SEQ ID NO: 2413798 - RNA, 18 nt, Human
cugaggaaaggccagcug

SEQ ID NO: 2413799 - RNA, 19 nt, Human
cugaggaaaggccagcugg

SEQ ID NO: 2413800 - RNA, 20 nt, Human
cugaggaaaggccagcuggc

SEQ ID NO: 2413801 - RNA, 22 nt, Human
cugaggaaaggccagcuggcag

SEQ ID NO: 2413802 - RNA, 20 nt, Human
cugaggaauccagacccggc

SEQ ID NO: 2413803 - RNA, 17 nt, Human
cugaggaauccagaccc

SEQ ID NO: 2413804 - RNA, 20 nt, Human
cugaggacacuaaccacgcu

SEQ ID NO: 2413805 - RNA, 21 nt, Human
cugaggaauccagacccggcu

SEQ ID NO: 2413806 - RNA, 13 nt, Human
cugaggacagcug

SEQ ID NO: 2413807 - RNA, 16 nt, Human
cugaggaauuuucuuu

SEQ ID NO: 2413808 - RNA, 23 nt, Human
cugaggacacuaaccacgcugga

SEQ ID NO: 2413809 - RNA, 21 nt, Human
cugagauaugaacauauuguu

SEQ ID NO: 2413810 - RNA, 23 nt, Human
cugagauaugaacauauuguuga

SEQ ID NO: 2413811 - RNA, 21 nt, Human
cugagaucaaaacgguuuuac

SEQ ID NO: 2413812 - RNA, 17 nt, Human
cugagaucucugcagga

SEQ ID NO: 2413813 - RNA, 18 nt, Human
cugagaucucugcaggaa

SEQ ID NO: 2413814 - RNA, 16 nt, Human
cugagaucucugcagg

SEQ ID NO: 2413815 - RNA, 14 nt, Human
cugagaucgugccg

SEQ ID NO: 2413816 - RNA, 23 nt, Human
cugagauggaacccuuuuggccc

SEQ ID NO: 2413817 - RNA, 14 nt, Human
cugagcuuucugcu

SEQ ID NO: 2413818 - RNA, 15 nt, Human
cugagcuuucugcua

SEQ ID NO: 2413819 - RNA, 15 nt, Human
cugaggaaaggccag

SEQ ID NO: 2413820 - RNA, 22 nt, Human
cugaggugccugucccaccccc

SEQ ID NO: 2413821 - RNA, 19 nt, Human
cugaggugccugucccacc

SEQ ID NO: 2413822 - RNA, 17 nt, Human
cugaggugccuguccca

SEQ ID NO: 2413823 - RNA, 16 nt, Human
cugaggucuggcugcu

SEQ ID NO: 2413824 - RNA, 19 nt, Human
cugaggugaaagggagcua

SEQ ID NO: 2413825 - RNA, 14 nt, Human
cugaggucuggcug

SEQ ID NO: 2413826 - RNA, 13 nt, Human
cugaggucuggcu

SEQ ID NO: 2413827 - RNA, 17 nt, Human
cugaggugaaagggagc

SEQ ID NO: 2413828 - RNA, 17 nt, Human
cugaggucuagaaauag

SEQ ID NO: 2413829 - RNA, 19 nt, Human
cugaggucucgcugaugcu

SEQ ID NO: 2413830 - RNA, 16 nt, Human
cugaggucucuugagg

SEQ ID NO: 2413831 - RNA, 19 nt, Human
cugaggucucuugagggag

SEQ ID NO: 2413832 - RNA, 21 nt, Human
cugaggucucuugagggagcu

SEQ ID NO: 2413833 - RNA, 19 nt, Human
cugaggaggccuccaucuc

SEQ ID NO: 2413834 - RNA, 16 nt, Human
cugaggaggccuccau

SEQ ID NO: 2413835 - RNA, 15 nt, Human
cugaggaggccucca

SEQ ID NO: 2413836 - RNA, 14 nt, Human
cugaggaggccucc

SEQ ID NO: 2413837 - RNA, 11 nt, Human
cugaggagaaa

SEQ ID NO: 2413838 - RNA, 13 nt, Human
cugaggaggccuc

SEQ ID NO: 2413839 - RNA, 16 nt, Human
cugaggacagcugucc

SEQ ID NO: 2413840 - RNA, 15 nt, Human
cugaggacagcuguc

SEQ ID NO: 2413841 - RNA, 14 nt, Human
cugaggacagcugu

SEQ ID NO: 2413842 - RNA, 14 nt, Human
cugaggaccagcca

SEQ ID NO: 2413843 - RNA, 17 nt, Human
cugaggacauuccaaga

SEQ ID NO: 2413844 - RNA, 17 nt, Human
cugaggacagcuguccu

SEQ ID NO: 2413845 - RNA, 22 nt, Human
cugaggacuuaaaauauuccug

SEQ ID NO: 2413846 - RNA, 18 nt, Human
cugaguacguugugcauu

SEQ ID NO: 2413847 - RNA, 17 nt, Human
cugaguacguugugcau

SEQ ID NO: 2413848 - RNA, 19 nt, Human
cugaguacguugugcauuu

SEQ ID NO: 2413849 - RNA, 20 nt, Human
cugaguacguugugcauuug

SEQ ID NO: 2413850 - RNA, 21 nt, Human
cugaguacguugugcauuugg

SEQ ID NO: 2413851 - RNA, 12 nt, Human
cugaggugggag

SEQ ID NO: 2413852 - RNA, 19 nt, Human
cugaguagaaaggccuuua

SEQ ID NO: 2413853 - RNA, 14 nt, Human
cugaguagaaaggc

SEQ ID NO: 2413854 - RNA, 12 nt, Human
cugaguagaaag

SEQ ID NO: 2413855 - RNA, 20 nt, Human
cugaguagaaaggccuuuaa

SEQ ID NO: 2413856 - RNA, 19 nt, Human
cugaguagcuggauuacag

SEQ ID NO: 2413857 - RNA, 22 nt, Human
cugacaaccaccgcuccccagc

SEQ ID NO: 2413858 - RNA, 20 nt, Human
cugacaaccacuggucugua

SEQ ID NO: 2413859 - RNA, 18 nt, Human
cugacaaccacuggucug

SEQ ID NO: 2413860 - RNA, 13 nt, Human
cugacaacuugaa

SEQ ID NO: 2413861 - RNA, 15 nt, Human
cugacaacagacuuc

SEQ ID NO: 2413862 - RNA, 18 nt, Human
cugacaacagacuucuga

SEQ ID NO: 2413863 - RNA, 19 nt, Human
cugacaacagacuucugaa

SEQ ID NO: 2413864 - RNA, 21 nt, Human
cugacaaccaccgcuccccag

SEQ ID NO: 2413865 - RNA, 20 nt, Human
cugacaaccaccgcucccca

SEQ ID NO: 2413866 - RNA, 13 nt, Human
cugagaggcaggc

SEQ ID NO: 2413867 - RNA, 12 nt, Human
cugagaggcagg

SEQ ID NO: 2413868 - RNA, 12 nt, Human
cugagaggccac

SEQ ID NO: 2413869 - RNA, 15 nt, Human
cugagaggcaggcau

SEQ ID NO: 2413870 - RNA, 14 nt, Human
cugagaggcaggca

SEQ ID NO: 2413871 - RNA, 17 nt, Human
cugagaggcaggcauag

SEQ ID NO: 2413872 - RNA, 22 nt, Human
cugagaggacuuuucuuugugg

SEQ ID NO: 2413873 - RNA, 21 nt, Human
cugagaggacuuuucuuugug

SEQ ID NO: 2413874 - RNA, 13 nt, Human
cugagagucugca

SEQ ID NO: 2413875 - RNA, 15 nt, Human
cugagaguuuaguug

SEQ ID NO: 2413876 - RNA, 14 nt, Human
cugagaguuuaguu

SEQ ID NO: 2413877 - RNA, 15 nt, Human
cugagauaugaacau

SEQ ID NO: 2413878 - RNA, 16 nt, Human
cugagauaugaacaua

SEQ ID NO: 2413879 - RNA, 12 nt, Human
cugagauaugaa

SEQ ID NO: 2413880 - RNA, 18 nt, Human
cugagauaccagcgagga

SEQ ID NO: 2413881 - RNA, 17 nt, Human
cugagaguagagucacu

SEQ ID NO: 2413882 - RNA, 19 nt, Human
cugagaguauuuaggcaga

SEQ ID NO: 2413883 - RNA, 20 nt, Human
cugagaguauuuaggcagau

SEQ ID NO: 2413884 - RNA, 16 nt, Human
cugagagccccagcug

SEQ ID NO: 2413885 - RNA, 15 nt, Human
cugagagccccagcu

SEQ ID NO: 2413886 - RNA, 17 nt, Human
cugagagccccagcuga

SEQ ID NO: 2413887 - RNA, 14 nt, Human
cugagagccccagc

SEQ ID NO: 2413888 - RNA, 13 nt, Human
cugagagccccag

SEQ ID NO: 2413889 - RNA, 14 nt, Human
cugagagaguggca

SEQ ID NO: 2413890 - RNA, 24 nt, Human
cugagagaguggcauuggcagcag

SEQ ID NO: 2413891 - RNA, 22 nt, Human
cugagacucgcgacaaugcaaa

SEQ ID NO: 2413892 - RNA, 21 nt, Human
cugagacucucuuaggagcag

SEQ ID NO: 2413893 - RNA, 17 nt, Human
cugagacucucuuagga

SEQ ID NO: 2413894 - RNA, 21 nt, Human
cugagacuuucagugcacugu

SEQ ID NO: 2413895 - RNA, 14 nt, Human
cugagacugcggga

SEQ ID NO: 2413896 - RNA, 14 nt, Human
cugagagaaaauaa

SEQ ID NO: 2413897 - RNA, 12 nt, Human
cugagagaaaua

SEQ ID NO: 2413898 - RNA, 15 nt, Human
cugagagacccaagg

SEQ ID NO: 2413899 - RNA, 17 nt, Human
cugagagacccaaggag

SEQ ID NO: 2413900 - RNA, 19 nt, Human
cugagagacccaaggagga

SEQ ID NO: 2413901 - RNA, 18 nt, Human
cugagagacuuuuaauca

SEQ ID NO: 2413902 - RNA, 16 nt, Human
cugagagacuuuuaau

SEQ ID NO: 2413903 - RNA, 13 nt, Human
cugagagacuuuu

SEQ ID NO: 2413904 - RNA, 20 nt, Human
cugagagacccaaggaggaa

SEQ ID NO: 2413905 - RNA, 22 nt, Human
cugacccaugcugcccugugag

SEQ ID NO: 2413906 - RNA, 21 nt, Human
cugacccaugcugcccuguga

SEQ ID NO: 2413907 - RNA, 22 nt, Human
cugaccccaaacaccuuccagc

SEQ ID NO: 2413908 - RNA, 21 nt, Human
cugaccccaaacaccuuccag

SEQ ID NO: 2413909 - RNA, 20 nt, Human
cugaccccaaacaccuucca

SEQ ID NO: 2413910 - RNA, 21 nt, Human
cugaccugaggcuccugugcu

SEQ ID NO: 2413911 - RNA, 13 nt, Human
cugaccugaggcu

SEQ ID NO: 2413912 - RNA, 21 nt, Human
cugaccccagugguauccugu

SEQ ID NO: 2413913 - RNA, 23 nt, Human
cugaccccaaagagccuggagaa

SEQ ID NO: 2413914 - RNA, 20 nt, Human
cugaccccaaagagccugga

SEQ ID NO: 2413915 - RNA, 14 nt, Human
cugaccugcacugg

SEQ ID NO: 2413916 - RNA, 12 nt, Human
cugaccugcagg

SEQ ID NO: 2413917 - RNA, 13 nt, Human
cugaccugcaggc

SEQ ID NO: 2413918 - RNA, 23 nt, Human
cugagaccaguugggagcacugg

SEQ ID NO: 2413919 - RNA, 15 nt, Human
cugagacaggagaau

SEQ ID NO: 2413920 - RNA, 13 nt, Human
cugagacaggaga

SEQ ID NO: 2413921 - RNA, 14 nt, Human
cugagaccaguugg

SEQ ID NO: 2413922 - RNA, 19 nt, Human
cugagaccccuggccuccg

SEQ ID NO: 2413923 - RNA, 17 nt, Human
cugagaccccuggccuc

SEQ ID NO: 2413924 - RNA, 16 nt, Human
cugagaccccuggccu

SEQ ID NO: 2413925 - RNA, 15 nt, Human
cugagaccccuggcc

SEQ ID NO: 2413926 - RNA, 13 nt, Human
cugagaccccugg

SEQ ID NO: 2413927 - RNA, 22 nt, Human
cugagaccaguugggagcacug

SEQ ID NO: 2413928 - RNA, 19 nt, Human
cugagaccaguugggagca

SEQ ID NO: 2413929 - RNA, 21 nt, Human
cugagaccccuggccuccggc

SEQ ID NO: 2413930 - RNA, 20 nt, Human
cugagaccccuggccuccgg

SEQ ID NO: 2413931 - RNA, 20 nt, Human
cugagaccugacaagcacug

SEQ ID NO: 2413932 - RNA, 21 nt, Human
cugagacucgcgacaaugcaa

SEQ ID NO: 2413933 - RNA, 23 nt, Human
cugagacagcccgggcucugccu

SEQ ID NO: 2413934 - RNA, 20 nt, Human
cugaccugucaugccccccu

SEQ ID NO: 2413935 - RNA, 19 nt, Human
cugaccugucaugcccccc

SEQ ID NO: 2413936 - RNA, 18 nt, Human
cugaccugucaugccccc

SEQ ID NO: 2413937 - RNA, 17 nt, Human
cugaccugucaugcccc

SEQ ID NO: 2413938 - RNA, 15 nt, Human
cugaccugucaugcc

SEQ ID NO: 2413939 - RNA, 23 nt, Human
cucuucaggaagaaaggagucug

SEQ ID NO: 2413940 - RNA, 17 nt, Human
cucuucaggccucccuc

SEQ ID NO: 2413941 - RNA, 13 nt, Human
cucuucagaggcc

SEQ ID NO: 2413942 - RNA, 21 nt, Human
cucuucagaaagugugcuuua

SEQ ID NO: 2413943 - RNA, 17 nt, Human
cucuucagaggcccucg

SEQ ID NO: 2413944 - RNA, 13 nt, Human
cucuucaggccuc

SEQ ID NO: 2413945 - RNA, 14 nt, Human
cucuucaggccucc

SEQ ID NO: 2413946 - RNA, 15 nt, Human
cucuucaggccuccc

SEQ ID NO: 2413947 - RNA, 16 nt, Human
cucuucaggccucccu

SEQ ID NO: 2413948 - RNA, 17 nt, Human
cucuucaacugaccagc

SEQ ID NO: 2413949 - RNA, 16 nt, Human
cucuucaacugaccag

SEQ ID NO: 2413950 - RNA, 17 nt, Human
cucuucaaauuagaaga

SEQ ID NO: 2413951 - RNA, 18 nt, Human
cucuucaaggacuuucug

SEQ ID NO: 2413952 - RNA, 20 nt, Human
cucuucaacugaccagccuc

SEQ ID NO: 2413953 - RNA, 17 nt, Human
cucuuagcuccccucca

SEQ ID NO: 2413954 - RNA, 15 nt, Human
cucuuagcuccccuc

SEQ ID NO: 2413955 - RNA, 18 nt, Human
cucuuagcuccccuccaa

SEQ ID NO: 2413956 - RNA, 12 nt, Human
cucuuauuugcu

SEQ ID NO: 2413957 - RNA, 15 nt, Human
cucuuauuuuacaau

SEQ ID NO: 2413958 - RNA, 18 nt, Human
cucuucagaucucuaacu

SEQ ID NO: 2413959 - RNA, 19 nt, Human
cucuucagaucucuaacuu

SEQ ID NO: 2413960 - RNA, 14 nt, Human
cucuucaaucucuu

SEQ ID NO: 2413961 - RNA, 18 nt, Human
cucuucaccccccacuca

SEQ ID NO: 2413962 - RNA, 17 nt, Human
cucuucaccccccacuc

SEQ ID NO: 2413963 - RNA, 16 nt, Human
cucuucaccccccacu

SEQ ID NO: 2413964 - RNA, 11 nt, Human
cucuucagaaa

SEQ ID NO: 2413965 - RNA, 18 nt, Human
cucuuagcagcuuccaga

SEQ ID NO: 2413966 - RNA, 17 nt, Human
cucuuagcagcuuccag

SEQ ID NO: 2413967 - RNA, 19 nt, Human
cucuuagcagcuuccagau

SEQ ID NO: 2413968 - RNA, 21 nt, Human
cucuuagcauuuuaauuagau

SEQ ID NO: 2413969 - RNA, 13 nt, Human
cucuuauugccca

SEQ ID NO: 2413970 - RNA, 22 nt, Human
cucuuagaugcaguucugaaga

SEQ ID NO: 2413971 - RNA, 14 nt, Human
cucuuagauggauu

SEQ ID NO: 2413972 - RNA, 21 nt, Human
cucuguccagggcccugagcu

SEQ ID NO: 2413973 - RNA, 20 nt, Human
cucuuauugcccacgcugga

SEQ ID NO: 2413974 - RNA, 19 nt, Human
cucuuauugcccacgcugg

SEQ ID NO: 2413975 - RNA, 15 nt, Human
cucuuauugcccacg

SEQ ID NO: 2413976 - RNA, 14 nt, Human
cucuuauugcccac

SEQ ID NO: 2413977 - RNA, 23 nt, Human
cucuggugagucuuggcggcagc

SEQ ID NO: 2413978 - RNA, 22 nt, Human
cucuggugagucuuggcggcag

SEQ ID NO: 2413979 - RNA, 21 nt, Human
cucuggugagucuuggcggca

SEQ ID NO: 2413980 - RNA, 20 nt, Human
cucuggugacaccagccuuu

SEQ ID NO: 2413981 - RNA, 20 nt, Human
cucuggucuucuuuggguaa

SEQ ID NO: 2413982 - RNA, 16 nt, Human
cucuggugacaccagc

SEQ ID NO: 2413983 - RNA, 18 nt, Human
cucuggugacaccagccu

SEQ ID NO: 2413984 - RNA, 19 nt, Human
cucuggugacaccagccuu

SEQ ID NO: 2413985 - RNA, 16 nt, Human
cucuggucgcuccugc

SEQ ID NO: 2413986 - RNA, 18 nt, Human
cucuggucgcuccugccc

SEQ ID NO: 2413987 - RNA, 17 nt, Human
cucuggucgcuccugcc

SEQ ID NO: 2413988 - RNA, 20 nt, Human
cucuggucgcuccugcccac

SEQ ID NO: 2413989 - RNA, 22 nt, Human
cucuggucugggugccccgucc

SEQ ID NO: 2413990 - RNA, 12 nt, Human
cucuguccaggc

SEQ ID NO: 2413991 - RNA, 20 nt, Human
cucugucagucacagccacc

SEQ ID NO: 2413992 - RNA, 13 nt, Human
cucugucagaugg

SEQ ID NO: 2413993 - RNA, 14 nt, Human
cucuguccaggcac

SEQ ID NO: 2413994 - RNA, 19 nt, Human
cucuguccaggcacugaga

SEQ ID NO: 2413995 - RNA, 14 nt, Human
cucuguccagggcc

SEQ ID NO: 2413996 - RNA, 20 nt, Human
cucuguccagggcccugagc

SEQ ID NO: 2413997 - RNA, 14 nt, Human
cucugucagucaca

SEQ ID NO: 2413998 - RNA, 16 nt, Human
cucugucagucacagc

SEQ ID NO: 2413999 - RNA, 17 nt, Human
cucugucagucacagcc

SEQ ID NO: 2414000 - RNA, 19 nt, Human
cucugucagucacagccac

SEQ ID NO: 2414001 - RNA, 18 nt, Human
cucugucacugcaggcac

SEQ ID NO: 2414002 - RNA, 23 nt, Human
cucugucagaugggaagacauga

SEQ ID NO: 2414003 - RNA, 16 nt, Human
cucugcugacagacac

SEQ ID NO: 2414004 - RNA, 14 nt, Human
cucugcugacagac

SEQ ID NO: 2414005 - RNA, 13 nt, Human
cucugcuccccag

SEQ ID NO: 2414006 - RNA, 13 nt, Human
cucugcucugcgu

SEQ ID NO: 2414007 - RNA, 13 nt, Human
cucugcugacaga

SEQ ID NO: 2414008 - RNA, 20 nt, Human
cucugggucagugguccaca

SEQ ID NO: 2414009 - RNA, 17 nt, Human
cucugggucaguggucc

SEQ ID NO: 2414010 - RNA, 20 nt, Human
cucuggggucccccaucccc

SEQ ID NO: 2414011 - RNA, 14 nt, Human
cucugcugaagguu

SEQ ID NO: 2414012 - RNA, 14 nt, Human
cucugguccauaga

SEQ ID NO: 2414013 - RNA, 17 nt, Human
cucugguaauauugacu

SEQ ID NO: 2414014 - RNA, 17 nt, Human
cucugcaggucccuaau

SEQ ID NO: 2414015 - RNA, 16 nt, Human
cucugcaggucccuaa

SEQ ID NO: 2414016 - RNA, 15 nt, Human
cucugcaggucccua

SEQ ID NO: 2414017 - RNA, 14 nt, Human
cucugcaggucccu

SEQ ID NO: 2414018 - RNA, 20 nt, Human
cucugcuccucuccccagca

SEQ ID NO: 2414019 - RNA, 18 nt, Human
cucugcuccucuccccag

SEQ ID NO: 2414020 - RNA, 13 nt, Human
cucugcuccucuc

SEQ ID NO: 2414021 - RNA, 19 nt, Human
cucugcuccaccacauccu

SEQ ID NO: 2414022 - RNA, 20 nt, Human
cucugcacuccccugcuggg

SEQ ID NO: 2414023 - RNA, 17 nt, Human
cucucccgguucuucca

SEQ ID NO: 2414024 - RNA, 23 nt, Human
cucucccggagguugggugggcc

SEQ ID NO: 2414025 - RNA, 18 nt, Human
cucugcacuccccugcug

SEQ ID NO: 2414026 - RNA, 21 nt, Human
cucugcacuccccugcugggu

SEQ ID NO: 2414027 - RNA, 13 nt, Human
cucugcagguccc

SEQ ID NO: 2414028 - RNA, 15 nt, Human
cucuccccugaccug

SEQ ID NO: 2414029 - RNA, 17 nt, Human
cucuccccugaccugug

SEQ ID NO: 2414030 - RNA, 21 nt, Human
cucuccccucagagugcaagc

SEQ ID NO: 2414031 - RNA, 18 nt, Human
cucucaggcaugccugug

SEQ ID NO: 2414032 - RNA, 19 nt, Human
cucucaggcaugccugugu

SEQ ID NO: 2414033 - RNA, 20 nt, Human
cucucaggcaugccugugug

SEQ ID NO: 2414034 - RNA, 21 nt, Human
cucuccccuggaacugucucu

SEQ ID NO: 2414035 - RNA, 15 nt, Human
cucuccccugcccug

SEQ ID NO: 2414036 - RNA, 16 nt, Human
cucuccccugcccugc

SEQ ID NO: 2414037 - RNA, 17 nt, Human
cucuccccugcccugcu

SEQ ID NO: 2414038 - RNA, 18 nt, Human
cucuccccugcccugcug

SEQ ID NO: 2414039 - RNA, 23 nt, Human
cucuugagccuugaacuuugacc

SEQ ID NO: 2414040 - RNA, 18 nt, Human
cucuugagccuugaacuu

SEQ ID NO: 2414041 - RNA, 16 nt, Human
cucuugagccuugaac

SEQ ID NO: 2414042 - RNA, 17 nt, Human
cucuugagccuugaacu

SEQ ID NO: 2414043 - RNA, 15 nt, Human
cugaaacaacaaaua

SEQ ID NO: 2414044 - RNA, 19 nt, Human
cucuuuuuguaccugguga

SEQ ID NO: 2414045 - RNA, 21 nt, Human
cucuuuuugggcuccuuuuuc

SEQ ID NO: 2414046 - RNA, 17 nt, Human
cucuuuuugggcuccuu

SEQ ID NO: 2414047 - RNA, 22 nt, Human
cugaaaauugaugggauuuggu

SEQ ID NO: 2414048 - RNA, 15 nt, Human
cugaaacaacuugga

SEQ ID NO: 2414049 - RNA, 16 nt, Human
cugaaacaacuuggaa

SEQ ID NO: 2414050 - RNA, 13 nt, Human
cugaaacaggaga

SEQ ID NO: 2414051 - RNA, 16 nt, Human
cugaaacccuggacca

SEQ ID NO: 2414052 - RNA, 20 nt, Human
cugaaacaacuuggaaagau

SEQ ID NO: 2414053 - RNA, 14 nt, Human
cugaaaccaguguu

SEQ ID NO: 2414054 - RNA, 14 nt, Human
cugaaacaggagag

SEQ ID NO: 2414055 - RNA, 13 nt, Human
cugaaacuucccu

SEQ ID NO: 2414056 - RNA, 22 nt, Human
cugaaacuuauuuuuuucugau

SEQ ID NO: 2414057 - RNA, 17 nt, Human
cugaaacuuacacacaa

SEQ ID NO: 2414058 - RNA, 23 nt, Human
cugaaacuuauuuuuuucugauu

SEQ ID NO: 2414059 - RNA, 14 nt, Human
cugaaagaaacagu

SEQ ID NO: 2414060 - RNA, 15 nt, Human
cugaaagaaacaguu

SEQ ID NO: 2414061 - RNA, 16 nt, Human
cugaaagaaacaguua

SEQ ID NO: 2414062 - RNA, 19 nt, Human
cugaaagaaacaguuaacu

SEQ ID NO: 2414063 - RNA, 20 nt, Human
cugaaagaaacaguuaacuu

SEQ ID NO: 2414064 - RNA, 21 nt, Human
cugaaagaaacaguuaacuuu

SEQ ID NO: 2414065 - RNA, 21 nt, Human
cucuugaugccuggcggggug

SEQ ID NO: 2414066 - RNA, 16 nt, Human
cucuugaugccuggcg

SEQ ID NO: 2414067 - RNA, 15 nt, Human
cucuugaugccuggc

SEQ ID NO: 2414068 - RNA, 13 nt, Human
cucuugaugccug

SEQ ID NO: 2414069 - RNA, 21 nt, Human
cucuuuugcuuuauuccagaa

SEQ ID NO: 2414070 - RNA, 13 nt, Human
cucuuuucucuuu

SEQ ID NO: 2414071 - RNA, 20 nt, Human
cucuuuugaauccaugcuug

SEQ ID NO: 2414072 - RNA, 18 nt, Human
cucuuuuuagggccaggc

SEQ ID NO: 2414073 - RNA, 18 nt, Human
cucuuuucuuuagagcau

SEQ ID NO: 2414074 - RNA, 11 nt, Human
cucuuuuuaag

SEQ ID NO: 2414075 - RNA, 22 nt, Human
cucuuuuuagggccaggcaggu

SEQ ID NO: 2414076 - RNA, 20 nt, Human
cucuuuuuagggccaggcag

SEQ ID NO: 2414077 - RNA, 16 nt, Human
cucuuuuuggaggugc

SEQ ID NO: 2414078 - RNA, 23 nt, Human
cucuugauaccccccucugucuu

SEQ ID NO: 2414079 - RNA, 21 nt, Human
cucuugauuauccauauugag

SEQ ID NO: 2414080 - RNA, 14 nt, Human
cucuuuucucugug

SEQ ID NO: 2414081 - RNA, 21 nt, Human
cugaaggccccgcccaggcuu

SEQ ID NO: 2414082 - RNA, 13 nt, Human
cugaaggccuggc

SEQ ID NO: 2414083 - RNA, 17 nt, Human
cugaaggcuggguucug

SEQ ID NO: 2414084 - RNA, 19 nt, Human
cugaaggccccgcccaggc

SEQ ID NO: 2414085 - RNA, 21 nt, Human
cugaaggagccccauuccugg

SEQ ID NO: 2414086 - RNA, 21 nt, Human
cugaaggagauuuuccuuccu

SEQ ID NO: 2414087 - RNA, 18 nt, Human
cugaaggccccgcccagg

SEQ ID NO: 2414088 - RNA, 23 nt, Human
cugacaacacucauugaccugag

SEQ ID NO: 2414089 - RNA, 22 nt, Human
cugacaacacucauugaccuga

SEQ ID NO: 2414090 - RNA, 21 nt, Human
cugaaggccuggcccacagca

SEQ ID NO: 2414091 - RNA, 18 nt, Human
cugacaaaaaguuuccau

SEQ ID NO: 2414092 - RNA, 12 nt, Human
cugaagcugagg

SEQ ID NO: 2414093 - RNA, 20 nt, Human
cugaagcugacgaacuucca

SEQ ID NO: 2414094 - RNA, 23 nt, Human
cugaagccuuugcauuuuggaga

SEQ ID NO: 2414095 - RNA, 23 nt, Human
cugaaggacauugcggacagcca

SEQ ID NO: 2414096 - RNA, 20 nt, Human
cugaaggagauuuuccuucc

SEQ ID NO: 2414097 - RNA, 18 nt, Human
cugaaggagauuuuccuu

SEQ ID NO: 2414098 - RNA, 16 nt, Human
cugaaggagauuuucc

SEQ ID NO: 2414099 - RNA, 12 nt, Human
cugaaggagauu

SEQ ID NO: 2414100 - RNA, 12 nt, Human
cugaaggagccc

SEQ ID NO: 2414101 - RNA, 13 nt, Human
cugaaggagcccc

SEQ ID NO: 2414102 - RNA, 15 nt, Human
cugaaggacugugac

SEQ ID NO: 2414103 - RNA, 14 nt, Human
cugaaggacuguga

SEQ ID NO: 2414104 - RNA, 13 nt, Human
cugaaggacugug

SEQ ID NO: 2414105 - RNA, 12 nt, Human
cugaaggacugu

SEQ ID NO: 2414106 - RNA, 22 nt, Human
cugaaggacugugacaggcagc

SEQ ID NO: 2414107 - RNA, 21 nt, Human
cugaaggacugugacaggcag

SEQ ID NO: 2414108 - RNA, 23 nt, Human
cugaaggacugugacaggcagca

SEQ ID NO: 2414109 - RNA, 12 nt, Human
cugaaggagaag

SEQ ID NO: 2414110 - RNA, 22 nt, Human
cugaagcuaucguaaaauuaag

SEQ ID NO: 2414111 - RNA, 21 nt, Human
cugaagcuaucguaaaauuaa

SEQ ID NO: 2414112 - RNA, 15 nt, Human
cugaaagacaauaua

SEQ ID NO: 2414113 - RNA, 12 nt, Human
cugaagccucug

SEQ ID NO: 2414114 - RNA, 15 nt, Human
cugaagccucuggga

SEQ ID NO: 2414115 - RNA, 14 nt, Human
cugaagccucuggg

SEQ ID NO: 2414116 - RNA, 13 nt, Human
cugaagccucugg

SEQ ID NO: 2414117 - RNA, 19 nt, Human
cugaaagaacauggacuug

SEQ ID NO: 2414118 - RNA, 13 nt, Human
cugaagccugcag

SEQ ID NO: 2414119 - RNA, 15 nt, Human
cugaagccugcagga

SEQ ID NO: 2414120 - RNA, 19 nt, Human
cugaagccuuucuuuugga

SEQ ID NO: 2414121 - RNA, 22 nt, Human
aagaucaaaagcuuauucaucu

SEQ ID NO: 2414122 - RNA, 13 nt, Human
aagauauuuuucc

SEQ ID NO: 2414123 - RNA, 23 nt, Human
aagaucaaaagguuaauaaagua

SEQ ID NO: 2414124 - RNA, 17 nt, Human
aagauauuuuuaucuuu

SEQ ID NO: 2414125 - RNA, 19 nt, Human
aagauauuuuuaucuuuau

SEQ ID NO: 2414126 - RNA, 17 nt, Human
aagauauuuuucaugau

SEQ ID NO: 2414127 - RNA, 15 nt, Human
aagauauuuuucaug

SEQ ID NO: 2414128 - RNA, 20 nt, Human
aagaucaaaagguuaauaaa

SEQ ID NO: 2414129 - RNA, 21 nt, Human
aagauuuuucucaaaguuuug

SEQ ID NO: 2414130 - RNA, 20 nt, Human
aagauuuuucucaaaguuuu

SEQ ID NO: 2414131 - RNA, 19 nt, Human
aagauuuuucucaaaguuu

SEQ ID NO: 2414132 - RNA, 22 nt, Human
aagauggcccagcuccccaaga

SEQ ID NO: 2414133 - RNA, 15 nt, Human
aagauuuuucucaaa

SEQ ID NO: 2414134 - RNA, 16 nt, Human
aagauggcugugccuc

SEQ ID NO: 2414135 - RNA, 17 nt, Human
aagauggcugacuuugc

SEQ ID NO: 2414136 - RNA, 15 nt, Human
aagauggaugugcuu

SEQ ID NO: 2414137 - RNA, 14 nt, Human
aagauggauucuca

SEQ ID NO: 2414138 - RNA, 16 nt, Human
aagauggauucucaga

SEQ ID NO: 2414139 - RNA, 17 nt, Human
aagauggauucucagau

SEQ ID NO: 2414140 - RNA, 21 nt, Human
aagauggauucucagauauuu

SEQ ID NO: 2414141 - RNA, 21 nt, Human
aagauggauugguguaaaagg

SEQ ID NO: 2414142 - RNA, 21 nt, Human
aagauggcccagcuccccaag

SEQ ID NO: 2414143 - RNA, 18 nt, Human
aagauggcauccugugaa

SEQ ID NO: 2414144 - RNA, 23 nt, Human
aagauggcacuuauaaccaaagc

SEQ ID NO: 2414145 - RNA, 13 nt, Human
guguauguggggg

SEQ ID NO: 2414146 - RNA, 21 nt, Human
guguaugugggggucugugug

SEQ ID NO: 2414147 - RNA, 17 nt, Human
aagcaacccaaauguuc

SEQ ID NO: 2414148 - RNA, 14 nt, Human
aagcaacagguuuu

SEQ ID NO: 2414149 - RNA, 14 nt, Human
aagcaaauugauga

SEQ ID NO: 2414150 - RNA, 20 nt, Human
aagcaaaugugaaucauuuu

SEQ ID NO: 2414151 - RNA, 14 nt, Human
aagcaaaauauuau

SEQ ID NO: 2414152 - RNA, 13 nt, Human
aagcaaaauauua

SEQ ID NO: 2414153 - RNA, 23 nt, Human
aagcaaaaucauuuuauauguca

SEQ ID NO: 2414154 - RNA, 17 nt, Human
aagcaaaaucauggaau

SEQ ID NO: 2414155 - RNA, 18 nt, Human
aagcaaaugugaccugug

SEQ ID NO: 2414156 - RNA, 22 nt, Human
gugucuuaauuaaaagaauauu

SEQ ID NO: 2414157 - RNA, 22 nt, Human
gugucuguacacguguccugua

SEQ ID NO: 2414158 - RNA, 21 nt, Human
gugucuguacacguguccugu

SEQ ID NO: 2414159 - RNA, 16 nt, Human
gugucuguacacgugu

SEQ ID NO: 2414160 - RNA, 13 nt, Human
gugucuguacacg

SEQ ID NO: 2414161 - RNA, 19 nt, Human
gugucagguggggcagcuu

SEQ ID NO: 2414162 - RNA, 12 nt, Human
gugucugggcug

SEQ ID NO: 2414163 - RNA, 12 nt, Human
gugucuguacac

SEQ ID NO: 2414164 - RNA, 23 nt, Human
gugucacuacucacagucucuuu

SEQ ID NO: 2414165 - RNA, 22 nt, Human
gugugaacuggacccuguugcu

SEQ ID NO: 2414166 - RNA, 17 nt, Human
gugugaacuggacccug

SEQ ID NO: 2414167 - RNA, 13 nt, Human
gugugaagguccu

SEQ ID NO: 2414168 - RNA, 21 nt, Human
gugugaaaggaagcuccacug

SEQ ID NO: 2414169 - RNA, 19 nt, Human
gugucuuaauuauuauuug

SEQ ID NO: 2414170 - RNA, 15 nt, Human
gugucuuaauuauua

SEQ ID NO: 2414171 - RNA, 14 nt, Human
gugugaacuggacc

SEQ ID NO: 2414172 - RNA, 18 nt, Human
gugugaaagucagaugcc

SEQ ID NO: 2414173 - RNA, 23 nt, Human
gugugaaccaccacacccagccc

SEQ ID NO: 2414174 - RNA, 14 nt, Human
gugucuuaauuauu

SEQ ID NO: 2414175 - RNA, 13 nt, Human
gugucugggcuga

SEQ ID NO: 2414176 - RNA, 13 nt, Human
gugucuguauuua

SEQ ID NO: 2414177 - RNA, 14 nt, Human
gugucuguauuuau

SEQ ID NO: 2414178 - RNA, 18 nt, Human
gugucagguggggcagcu

SEQ ID NO: 2414179 - RNA, 14 nt, Human
gugucagguggggc

SEQ ID NO: 2414180 - RNA, 23 nt, Human
gugucaaguugugcuuguuuaca

SEQ ID NO: 2414181 - RNA, 18 nt, Human
gugucaaguugugcuugu

SEQ ID NO: 2414182 - RNA, 14 nt, Human
gugucaccugugcu

SEQ ID NO: 2414183 - RNA, 22 nt, Human
gugucaccugaagacucauucu

SEQ ID NO: 2414184 - RNA, 13 nt, Human
guguauuccaaga

SEQ ID NO: 2414185 - RNA, 20 nt, Human
guguauuccaagacaugucu

SEQ ID NO: 2414186 - RNA, 16 nt, Human
guguauuaaaaaaaac

SEQ ID NO: 2414187 - RNA, 18 nt, Human
guguaugugcgugugugc

SEQ ID NO: 2414188 - RNA, 22 nt, Human
guguauguuugcacacuugugu

SEQ ID NO: 2414189 - RNA, 18 nt, Human
guguauguuugcacacuu

SEQ ID NO: 2414190 - RNA, 14 nt, Human
gugucaccugaaga

SEQ ID NO: 2414191 - RNA, 19 nt, Human
guguauucuaguuuuguca

SEQ ID NO: 2414192 - RNA, 17 nt, Human
guguauuuaacagggag

SEQ ID NO: 2414193 - RNA, 16 nt, Human
gugucaaguugugcuu

SEQ ID NO: 2414194 - RNA, 12 nt, Human
guguauuguucc

SEQ ID NO: 2414195 - RNA, 18 nt, Human
guguauuuaacagggagg

SEQ ID NO: 2414196 - RNA, 22 nt, Human
aagagggagggagggcuccaga

SEQ ID NO: 2414197 - RNA, 21 nt, Human
aagagggagggagggcuccag

SEQ ID NO: 2414198 - RNA, 22 nt, Human
aagagggaauccccgaaggugc

SEQ ID NO: 2414199 - RNA, 23 nt, Human
aagagggaagaaagagaaggagc

SEQ ID NO: 2414200 - RNA, 13 nt, Human
aagaggcugguuc

SEQ ID NO: 2414201 - RNA, 17 nt, Human
aagaggcuggugcugug

SEQ ID NO: 2414202 - RNA, 23 nt, Human
aagaggcccugucuguaccuaac

SEQ ID NO: 2414203 - RNA, 16 nt, Human
aagagggacgccuggg

SEQ ID NO: 2414204 - RNA, 17 nt, Human
aagagggacgccugggg

SEQ ID NO: 2414205 - RNA, 18 nt, Human
aagagggagauggagacu

SEQ ID NO: 2414206 - RNA, 19 nt, Human
aagagggagagguggagca

SEQ ID NO: 2414207 - RNA, 17 nt, Human
aagagggagaagcauga

SEQ ID NO: 2414208 - RNA, 18 nt, Human
aagagggagaagcaugaa

SEQ ID NO: 2414209 - RNA, 16 nt, Human
aagaggcagaaaauug

SEQ ID NO: 2414210 - RNA, 19 nt, Human
aagaggcagaaaauugcac

SEQ ID NO: 2414211 - RNA, 14 nt, Human
aagaggcgggccag

SEQ ID NO: 2414212 - RNA, 15 nt, Human
aagaggccaaugccc

SEQ ID NO: 2414213 - RNA, 14 nt, Human
aagaggcagggucu

SEQ ID NO: 2414214 - RNA, 15 nt, Human
aagaggcaccugucc

SEQ ID NO: 2414215 - RNA, 18 nt, Human
aagaggcaccugucccag

SEQ ID NO: 2414216 - RNA, 11 nt, Human
aagaggcaggg

SEQ ID NO: 2414217 - RNA, 16 nt, Human
aagaggugacugggcc

SEQ ID NO: 2414218 - RNA, 16 nt, Human
aagaggugugcaagag

SEQ ID NO: 2414219 - RNA, 18 nt, Human
aagaggugugcaagagag

SEQ ID NO: 2414220 - RNA, 19 nt, Human
aagagguagaaaagauugg

SEQ ID NO: 2414221 - RNA, 21 nt, Human
aagagguauuuaucuuuacuu

SEQ ID NO: 2414222 - RNA, 22 nt, Human
aagagggucugaggaauccaga

SEQ ID NO: 2414223 - RNA, 17 nt, Human
aagauauaagugcugua

SEQ ID NO: 2414224 - RNA, 16 nt, Human
aagauauaagugcugu

SEQ ID NO: 2414225 - RNA, 20 nt, Human
aagauauaacuauugcccag

SEQ ID NO: 2414226 - RNA, 15 nt, Human
aagauauaagugcug

SEQ ID NO: 2414227 - RNA, 13 nt, Human
aagauaggcucug

SEQ ID NO: 2414228 - RNA, 14 nt, Human
aagauaggcucugc

SEQ ID NO: 2414229 - RNA, 15 nt, Human
aagauaggcucugca

SEQ ID NO: 2414230 - RNA, 16 nt, Human
aagauaggcucugcac

SEQ ID NO: 2414231 - RNA, 17 nt, Human
aagauaggcucugcaca

SEQ ID NO: 2414232 - RNA, 18 nt, Human
aagauaggcucugcacag

SEQ ID NO: 2414233 - RNA, 15 nt, Human
aagauagcagggcau

SEQ ID NO: 2414234 - RNA, 17 nt, Human
aagauagcuucacccca

SEQ ID NO: 2414235 - RNA, 19 nt, Human
guguaaauaguuacuccag

SEQ ID NO: 2414236 - RNA, 15 nt, Human
guguaacagcuccuu

SEQ ID NO: 2414237 - RNA, 14 nt, Human
guguaacagcuccu

SEQ ID NO: 2414238 - RNA, 13 nt, Human
guguaacagcucc

SEQ ID NO: 2414239 - RNA, 23 nt, Human
guguaacagcuccuugggaggaa

SEQ ID NO: 2414240 - RNA, 12 nt, Human
guguaacagcug

SEQ ID NO: 2414241 - RNA, 15 nt, Human
guguaacagcugagg

SEQ ID NO: 2414242 - RNA, 21 nt, Human
guguaacagcugaggucucuu

SEQ ID NO: 2414243 - RNA, 23 nt, Human
guguaacugucagccgggcccug

SEQ ID NO: 2414244 - RNA, 18 nt, Human
guguaacuggcaguuuuc

SEQ ID NO: 2414245 - RNA, 17 nt, Human
guguaacaggucuccuc

SEQ ID NO: 2414246 - RNA, 19 nt, Human
guguaacaggucuccucuu

SEQ ID NO: 2414247 - RNA, 19 nt, Human
guguaaaguuagucuacuc

SEQ ID NO: 2414248 - RNA, 16 nt, Human
guguaaaguuagucua

SEQ ID NO: 2414249 - RNA, 13 nt, Human
guguaaaguuagu

SEQ ID NO: 2414250 - RNA, 21 nt, Human
guguaaagcauuccaacaaag

SEQ ID NO: 2414251 - RNA, 12 nt, Human
guguaaagcauu

SEQ ID NO: 2414252 - RNA, 22 nt, Human
guguaaaccaaagcccuaaaau

SEQ ID NO: 2414253 - RNA, 15 nt, Human
guguaaaccaaagcc

SEQ ID NO: 2414254 - RNA, 15 nt, Human
guguaaaaugugaag

SEQ ID NO: 2414255 - RNA, 19 nt, Human
guguaaaauauuuugaauc

SEQ ID NO: 2414256 - RNA, 18 nt, Human
guguaaaauauuuugaau

SEQ ID NO: 2414257 - RNA, 17 nt, Human
guguaaaauauuuugaa

SEQ ID NO: 2414258 - RNA, 23 nt, Human
guguaaaacgagaauccacccau

SEQ ID NO: 2414259 - RNA, 20 nt, Human
gugguugcuguuuuccuccc

SEQ ID NO: 2414260 - RNA, 19 nt, Human
gugguugcuguuuuccucc

SEQ ID NO: 2414261 - RNA, 22 nt, Human
gugguucacucuuggagccugc

SEQ ID NO: 2414262 - RNA, 23 nt, Human
gugguucacucuuggagccugca

SEQ ID NO: 2414263 - RNA, 23 nt, Human
gugcugcuacccucccugcuguc

SEQ ID NO: 2414264 - RNA, 22 nt, Human
gugcugcuacccucccugcugu

SEQ ID NO: 2414265 - RNA, 14 nt, Human
gugcugcugcugcu

SEQ ID NO: 2414266 - RNA, 15 nt, Human
gugguuucagaaaug

SEQ ID NO: 2414267 - RNA, 18 nt, Human
gugguugcuguuuuccuc

SEQ ID NO: 2414268 - RNA, 18 nt, Human
gugguuccccaccgaagu

SEQ ID NO: 2414269 - RNA, 13 nt, Human
gugcugcugaaga

SEQ ID NO: 2414270 - RNA, 20 nt, Human
gugcucucugccacuggaag

SEQ ID NO: 2414271 - RNA, 13 nt, Human
gugcucucugcca

SEQ ID NO: 2414272 - RNA, 23 nt, Human
gugcugcccugcccaccuggccu

SEQ ID NO: 2414273 - RNA, 21 nt, Human
gugcugcuacccucccugcug

SEQ ID NO: 2414274 - RNA, 19 nt, Human
gugcugcuacccucccugc

SEQ ID NO: 2414275 - RNA, 18 nt, Human
gugcugcuacccucccug

SEQ ID NO: 2414276 - RNA, 17 nt, Human
gugcugcuacccucccu

SEQ ID NO: 2414277 - RNA, 15 nt, Human
gugcugcuacccucc

SEQ ID NO: 2414278 - RNA, 11 nt, Human
gugcugccucu

SEQ ID NO: 2414279 - RNA, 12 nt, Human
gugcugccucua

SEQ ID NO: 2414280 - RNA, 19 nt, Human
gugcugccucuaccugaca

SEQ ID NO: 2414281 - RNA, 16 nt, Human
aagcacuaaacaaaga

SEQ ID NO: 2414282 - RNA, 17 nt, Human
aagcaccuccugccucg

SEQ ID NO: 2414283 - RNA, 14 nt, Human
aagcaccccaugcc

SEQ ID NO: 2414284 - RNA, 19 nt, Human
aagcaccgccuccaaaugc

SEQ ID NO: 2414285 - RNA, 12 nt, Human
aagcacccuuga

SEQ ID NO: 2414286 - RNA, 12 nt, Human
aagcaccugccg

SEQ ID NO: 2414287 - RNA, 13 nt, Human
aagcaccugccga

SEQ ID NO: 2414288 - RNA, 17 nt, Human
aagcaccugccgaccuc

SEQ ID NO: 2414289 - RNA, 16 nt, Human
aagcacugacuucuaa

SEQ ID NO: 2414290 - RNA, 17 nt, Human
aagcacugacuucuaag

SEQ ID NO: 2414291 - RNA, 19 nt, Human
aagcaccuuagcuggcauu

SEQ ID NO: 2414292 - RNA, 15 nt, Human
aagcacgaaauguua

SEQ ID NO: 2414293 - RNA, 16 nt, Human
aagcaccuuagcuggc

SEQ ID NO: 2414294 - RNA, 20 nt, Human
aagcaccugccgaccucguc

SEQ ID NO: 2414295 - RNA, 17 nt, Human
aagcacuacauaaacug

SEQ ID NO: 2414296 - RNA, 23 nt, Human
aagcacuacauaaacugacuuua

SEQ ID NO: 2414297 - RNA, 16 nt, Human
aagcaccuccugccuc

SEQ ID NO: 2414298 - RNA, 15 nt, Human
aagcaccuccugccu

SEQ ID NO: 2414299 - RNA, 14 nt, Human
aagcaccuccugcc

SEQ ID NO: 2414300 - RNA, 13 nt, Human
aagcaccuccugc

SEQ ID NO: 2414301 - RNA, 16 nt, Human
aagcaccaaaauaaga

SEQ ID NO: 2414302 - RNA, 17 nt, Human
aagcaccaaaauaagaa

SEQ ID NO: 2414303 - RNA, 19 nt, Human
aagcaccaaaauaagaaaa

SEQ ID NO: 2414304 - RNA, 21 nt, Human
aagcaccaaaauaagaaaaga

SEQ ID NO: 2414305 - RNA, 19 nt, Human
aagcaccagcuucuccagg

SEQ ID NO: 2414306 - RNA, 14 nt, Human
aagcaccaagcuca

SEQ ID NO: 2414307 - RNA, 22 nt, Human
aagcaccaaaauaagaaaagau

SEQ ID NO: 2414308 - RNA, 21 nt, Human
aagcaccagcuucuccaggcu

SEQ ID NO: 2414309 - RNA, 20 nt, Human
aagcaccagcuucuccaggc

SEQ ID NO: 2414310 - RNA, 21 nt, Human
aagcacaugccucucucaggc

SEQ ID NO: 2414311 - RNA, 17 nt, Human
aagcacaguuugaacaa

SEQ ID NO: 2414312 - RNA, 16 nt, Human
aagcacaguuugaaca

SEQ ID NO: 2414313 - RNA, 16 nt, Human
aagcacauauugagca

SEQ ID NO: 2414314 - RNA, 16 nt, Human
aagcacauguuuauuu

SEQ ID NO: 2414315 - RNA, 18 nt, Human
aagcacaguuugaacaaa

SEQ ID NO: 2414316 - RNA, 16 nt, Human
aagcacaucugcauuu

SEQ ID NO: 2414317 - RNA, 20 nt, Human
aagcacaugccucucucagg

SEQ ID NO: 2414318 - RNA, 19 nt, Human
aagcacaugccucucucag

SEQ ID NO: 2414319 - RNA, 16 nt, Human
aagcacaugccucucu

SEQ ID NO: 2414320 - RNA, 15 nt, Human
aagcacaugccucuc

SEQ ID NO: 2414321 - RNA, 15 nt, Human
aagcacaguuugaac

SEQ ID NO: 2414322 - RNA, 14 nt, Human
aagcacaguuugaa

SEQ ID NO: 2414323 - RNA, 20 nt, Human
aagcacaguguuaaaugaaa

SEQ ID NO: 2414324 - RNA, 18 nt, Human
aagcacaguguuaaauga

SEQ ID NO: 2414325 - RNA, 13 nt, Human
aagcacaguguua

SEQ ID NO: 2414326 - RNA, 24 nt, Human
aagcacagugguggcagggccuag

SEQ ID NO: 2414327 - RNA, 23 nt, Human
aagcacagugguggcagggccua

SEQ ID NO: 2414328 - RNA, 20 nt, Human
aagcacagugguggcagggc

SEQ ID NO: 2414329 - RNA, 14 nt, Human
aagcacaugccucu

SEQ ID NO: 2414330 - RNA, 11 nt, Human
aagcacagcag

SEQ ID NO: 2414331 - RNA, 16 nt, Human
aagcacagcagccugg

SEQ ID NO: 2414332 - RNA, 19 nt, Human
aagcacagugguggcaggg

SEQ ID NO: 2414333 - RNA, 18 nt, Human
aagcacagugguggcagg

SEQ ID NO: 2414334 - RNA, 14 nt, Human
aagcacaguggugg

SEQ ID NO: 2414335 - RNA, 13 nt, Human
aagcacaguggug

SEQ ID NO: 2414336 - RNA, 20 nt, Human
aagcacagucugaugacaca

SEQ ID NO: 2414337 - RNA, 12 nt, Human
aagcacaguggu

SEQ ID NO: 2414338 - RNA, 15 nt, Human
aagcacagugccugc

SEQ ID NO: 2414339 - RNA, 12 nt, Human
guguuucuguau

SEQ ID NO: 2414340 - RNA, 15 nt, Human
guguuucuguuauua

SEQ ID NO: 2414341 - RNA, 13 nt, Human
guguuucugugca

SEQ ID NO: 2414342 - RNA, 22 nt, Human
guguuucucccucucacugucu

SEQ ID NO: 2414343 - RNA, 16 nt, Human
guguuucuuuaguuuu

SEQ ID NO: 2414344 - RNA, 13 nt, Human
guguuucuuuagu

SEQ ID NO: 2414345 - RNA, 21 nt, Human
guguuucucccucucacuguc

SEQ ID NO: 2414346 - RNA, 13 nt, Human
guguuucucccuc

SEQ ID NO: 2414347 - RNA, 13 nt, Human
guguuucugacuc

SEQ ID NO: 2414348 - RNA, 17 nt, Human
guguuucuauugacuuc

SEQ ID NO: 2414349 - RNA, 15 nt, Human
guguuucuagggaaa

SEQ ID NO: 2414350 - RNA, 13 nt, Human
gugugaaguuaga

SEQ ID NO: 2414351 - RNA, 12 nt, Human
gugugaaguuag

SEQ ID NO: 2414352 - RNA, 11 nt, Human
gugugaaguua

SEQ ID NO: 2414353 - RNA, 18 nt, Human
gugugaagguccugcuau

SEQ ID NO: 2414354 - RNA, 21 nt, Human
gugugaaguuagaauuccuuc

SEQ ID NO: 2414355 - RNA, 17 nt, Human
gugugaaguuagaauuc

SEQ ID NO: 2414356 - RNA, 22 nt, Human
guguuugcacguuaugguguuu

SEQ ID NO: 2414357 - RNA, 20 nt, Human
aagcaauuuuccuugaagcc

SEQ ID NO: 2414358 - RNA, 19 nt, Human
aagcaauuuuccuugaagc

SEQ ID NO: 2414359 - RNA, 18 nt, Human
aagcaauuuuccuugaag

SEQ ID NO: 2414360 - RNA, 22 nt, Human
aagcaauuuuccuugaagccga

SEQ ID NO: 2414361 - RNA, 21 nt, Human
aagcaauuuuccuugaagccg

SEQ ID NO: 2414362 - RNA, 13 nt, Human
aagcacaagaagc

SEQ ID NO: 2414363 - RNA, 16 nt, Human
aagcacacuugacauc

SEQ ID NO: 2414364 - RNA, 19 nt, Human
aagcacagaaggaggagga

SEQ ID NO: 2414365 - RNA, 19 nt, Human
aagcacacucauccccuca

SEQ ID NO: 2414366 - RNA, 20 nt, Human
aagccaaagcuaggccuggc

SEQ ID NO: 2414367 - RNA, 13 nt, Human
aagccaagcagcc

SEQ ID NO: 2414368 - RNA, 13 nt, Human
aagccaaagccaa

SEQ ID NO: 2414369 - RNA, 14 nt, Human
aagccaagcagcca

SEQ ID NO: 2414370 - RNA, 16 nt, Human
aagccaagcagccaag

SEQ ID NO: 2414371 - RNA, 16 nt, Human
aagccaagggaaaggg

SEQ ID NO: 2414372 - RNA, 14 nt, Human
aagccaagggaaag

SEQ ID NO: 2414373 - RNA, 13 nt, Human
aagccaagggaaa

SEQ ID NO: 2414374 - RNA, 17 nt, Human
aagccaagcagccaagc

SEQ ID NO: 2414375 - RNA, 18 nt, Human
aagccaaagcuaggccug

SEQ ID NO: 2414376 - RNA, 17 nt, Human
aagccaaagcuaggccu

SEQ ID NO: 2414377 - RNA, 19 nt, Human
aagccaauccccuccuugg

SEQ ID NO: 2414378 - RNA, 16 nt, Human
aagccaauccccuccu

SEQ ID NO: 2414379 - RNA, 15 nt, Human
aagccaauccccucc

SEQ ID NO: 2414380 - RNA, 14 nt, Human
aagccaauccccuc

SEQ ID NO: 2414381 - RNA, 19 nt, Human
aagccaagggaaccugugu

SEQ ID NO: 2414382 - RNA, 18 nt, Human
aagccaagggaaccugug

SEQ ID NO: 2414383 - RNA, 20 nt, Human
aagccaagggaaccuguguc

SEQ ID NO: 2414384 - RNA, 23 nt, Human
aagccaagggaaaggggugcuuu

SEQ ID NO: 2414385 - RNA, 13 nt, Human
aagccaagggccu

SEQ ID NO: 2414386 - RNA, 20 nt, Human
aagccaauaacacacagcua

SEQ ID NO: 2414387 - RNA, 18 nt, Human
aagccaauaacacacagc

SEQ ID NO: 2414388 - RNA, 17 nt, Human
aagccaauaacacacag

SEQ ID NO: 2414389 - RNA, 19 nt, Human
aagccaaguggggugcugg

SEQ ID NO: 2414390 - RNA, 16 nt, Human
aagccaagggccucuu

SEQ ID NO: 2414391 - RNA, 13 nt, Human
aagccaagugggg

SEQ ID NO: 2414392 - RNA, 22 nt, Human
aagccaagucagcuuugccuuc

SEQ ID NO: 2414393 - RNA, 19 nt, Human
aagcauuguaaaugugcuu

SEQ ID NO: 2414394 - RNA, 20 nt, Human
aagcauguuucauguuuugu

SEQ ID NO: 2414395 - RNA, 16 nt, Human
aagcauguuucauguu

SEQ ID NO: 2414396 - RNA, 17 nt, Human
aagcauuaacuucucug

SEQ ID NO: 2414397 - RNA, 22 nt, Human
aagcauuguuugcuuauuguuc

SEQ ID NO: 2414398 - RNA, 23 nt, Human
aagcauuguuugcuuauuguucc

SEQ ID NO: 2414399 - RNA, 11 nt, Human
aagcauuguuu

SEQ ID NO: 2414400 - RNA, 14 nt, Human
aagcauuguuugcu

SEQ ID NO: 2414401 - RNA, 20 nt, Human
aagcauuguuugcuuauugu

SEQ ID NO: 2414402 - RNA, 21 nt, Human
aagcauuguuugcuuauuguu

SEQ ID NO: 2414403 - RNA, 20 nt, Human
aagcauuuaauguagccaug

SEQ ID NO: 2414404 - RNA, 19 nt, Human
aagcauuuaauguagccau

SEQ ID NO: 2414405 - RNA, 23 nt, Human
aagcauuuaauguagccauggga

SEQ ID NO: 2414406 - RNA, 16 nt, Human
aagcauuuacuuugaa

SEQ ID NO: 2414407 - RNA, 17 nt, Human
aagcauuugaaugcauu

SEQ ID NO: 2414408 - RNA, 12 nt, Human
aagcauuuuaua

SEQ ID NO: 2414409 - RNA, 14 nt, Human
aagcauuuuauaaa

SEQ ID NO: 2414410 - RNA, 15 nt, Human
aagcauuuuauaaau

SEQ ID NO: 2414411 - RNA, 21 nt, Human
aagcauuugaaugcauuuugu

SEQ ID NO: 2414412 - RNA, 18 nt, Human
aagcauuugaaugcauuu

SEQ ID NO: 2414413 - RNA, 17 nt, Human
aagcauuuuauaaaucg

SEQ ID NO: 2414414 - RNA, 19 nt, Human
aagcauuuuauaaaucgcu

SEQ ID NO: 2414415 - RNA, 21 nt, Human
aagcauuuuauaaaucgcuuu

SEQ ID NO: 2414416 - RNA, 12 nt, Human
aagccaaagagu

SEQ ID NO: 2414417 - RNA, 16 nt, Human
aagccaaagacuuagu

SEQ ID NO: 2414418 - RNA, 19 nt, Human
aagcacugacuucuaagua

SEQ ID NO: 2414419 - RNA, 20 nt, Human
aagcacugacuucuaaguaa

SEQ ID NO: 2414420 - RNA, 12 nt, Human
aagcacugugcu

SEQ ID NO: 2414421 - RNA, 23 nt, Human
aagcacugcuaggcgagugccag

SEQ ID NO: 2414422 - RNA, 19 nt, Human
aagcacugcuaggcgagug

SEQ ID NO: 2414423 - RNA, 16 nt, Human
aagcacugaccuguca

SEQ ID NO: 2414424 - RNA, 21 nt, Human
aagcacugaccugucaugccc

SEQ ID NO: 2414425 - RNA, 19 nt, Human
aagcauauguguuggcuug

SEQ ID NO: 2414426 - RNA, 17 nt, Human
aagcauauuguuauuau

SEQ ID NO: 2414427 - RNA, 23 nt, Human
aagcauauuguuauuauauaauu

SEQ ID NO: 2414428 - RNA, 14 nt, Human
aagcaucaaacucu

SEQ ID NO: 2414429 - RNA, 15 nt, Human
aagcaucaccucagg

SEQ ID NO: 2414430 - RNA, 16 nt, Human
aagcaucaccucaggc

SEQ ID NO: 2414431 - RNA, 18 nt, Human
aagcaucaccucaggcca

SEQ ID NO: 2414432 - RNA, 19 nt, Human
aagcaucaccucaggccag

SEQ ID NO: 2414433 - RNA, 21 nt, Human
aagcaucuuccagaaguguga

SEQ ID NO: 2414434 - RNA, 23 nt, Human
aagcaucaccucaggccaggugc

SEQ ID NO: 2414435 - RNA, 15 nt, Human
aagcaucaaacucuu

SEQ ID NO: 2414436 - RNA, 15 nt, Human
aagcauguacagugu

SEQ ID NO: 2414437 - RNA, 13 nt, Human
aagcauguacagu

SEQ ID NO: 2414438 - RNA, 12 nt, Human
aagcauguacag

SEQ ID NO: 2414439 - RNA, 23 nt, Human
aagcaugcacaaauucugucucu

SEQ ID NO: 2414440 - RNA, 20 nt, Human
aagcaucuuggggggguggc

SEQ ID NO: 2414441 - RNA, 13 nt, Human
aagcaugaaaaag

SEQ ID NO: 2414442 - RNA, 12 nt, Human
aagcaugugaga

SEQ ID NO: 2414443 - RNA, 21 nt, Human
aagcauguacaguguucuguu

SEQ ID NO: 2414444 - RNA, 18 nt, Human
aagcauguacaguguucu

SEQ ID NO: 2414445 - RNA, 17 nt, Human
aagcauguacaguguuc

SEQ ID NO: 2414446 - RNA, 16 nt, Human
aagcauguacaguguu

SEQ ID NO: 2414447 - RNA, 18 nt, Human
aagcauguauucagcuuu

SEQ ID NO: 2414448 - RNA, 22 nt, Human
aagcauguacaguguucuguuu

SEQ ID NO: 2414449 - RNA, 16 nt, Human
aagcauguaggagaau

SEQ ID NO: 2414450 - RNA, 18 nt, Human
aagcauuguaaaugugcu

SEQ ID NO: 2414451 - RNA, 17 nt, Human
aagcaugucucaauagu

SEQ ID NO: 2414452 - RNA, 13 nt, Human
aagcauguggcau

SEQ ID NO: 2414453 - RNA, 19 nt, Human
aagcauguggcauguucau

SEQ ID NO: 2414454 - RNA, 15 nt, Human
aagcauguuucaugu

SEQ ID NO: 2414455 - RNA, 14 nt, Human
aagcauguuucaug

SEQ ID NO: 2414456 - RNA, 12 nt, Human
aagcauguuuca

SEQ ID NO: 2414457 - RNA, 14 nt, Human
guuaauuuuuccua

SEQ ID NO: 2414458 - RNA, 23 nt, Human
guuacucuucaguuaagccuuug

SEQ ID NO: 2414459 - RNA, 18 nt, Human
guuaauucagcacugauu

SEQ ID NO: 2414460 - RNA, 14 nt, Human
guuacucugguucu

SEQ ID NO: 2414461 - RNA, 17 nt, Human
guuacugaucaugcauu

SEQ ID NO: 2414462 - RNA, 18 nt, Human
guuacugaucaugcauug

SEQ ID NO: 2414463 - RNA, 19 nt, Human
guuacugaucaugcauugu

SEQ ID NO: 2414464 - RNA, 21 nt, Human
guuaauucagcacugauuuca

SEQ ID NO: 2414465 - RNA, 22 nt, Human
guuaaucaauuuaaacccauuu

SEQ ID NO: 2414466 - RNA, 21 nt, Human
guuaaucaauuuaaacccauu

SEQ ID NO: 2414467 - RNA, 17 nt, Human
guuaaucaauuuaaacc

SEQ ID NO: 2414468 - RNA, 19 nt, Human
guuaauuccaauuauauga

SEQ ID NO: 2414469 - RNA, 18 nt, Human
guuaaucauuagguguga

SEQ ID NO: 2414470 - RNA, 19 nt, Human
guuaauauuuauaggucac

SEQ ID NO: 2414471 - RNA, 14 nt, Human
guuaaucaauuuaa

SEQ ID NO: 2414472 - RNA, 13 nt, Human
guuaaucaauuua

SEQ ID NO: 2414473 - RNA, 12 nt, Human
guuaaucaauuu

SEQ ID NO: 2414474 - RNA, 14 nt, Human
aagccauugucuuc

SEQ ID NO: 2414475 - RNA, 13 nt, Human
aagccauugucuu

SEQ ID NO: 2414476 - RNA, 16 nt, Human
aagcccaaccuccuga

SEQ ID NO: 2414477 - RNA, 18 nt, Human
aagcccaauauuauaauu

SEQ ID NO: 2414478 - RNA, 17 nt, Human
aagcccaaccuccugac

SEQ ID NO: 2414479 - RNA, 22 nt, Human
aagcccaaccuccugaccuguc

SEQ ID NO: 2414480 - RNA, 12 nt, Human
aagccauugucu

SEQ ID NO: 2414481 - RNA, 20 nt, Human
aagccaauccccuccuuggg

SEQ ID NO: 2414482 - RNA, 20 nt, Human
aagccauucuaaggaaauua

SEQ ID NO: 2414483 - RNA, 18 nt, Human
aagcccagaaaaggacag

SEQ ID NO: 2414484 - RNA, 20 nt, Human
aagcccagcacugcuugagg

SEQ ID NO: 2414485 - RNA, 23 nt, Human
aagcccagcacugcuugaggaaa

SEQ ID NO: 2414486 - RNA, 13 nt, Human
aagcccagcuuga

SEQ ID NO: 2414487 - RNA, 21 nt, Human
guuaauauaucccagaaauua

SEQ ID NO: 2414488 - RNA, 12 nt, Human
guuaauacuagu

SEQ ID NO: 2414489 - RNA, 15 nt, Human
guuaauauuuaagac

SEQ ID NO: 2414490 - RNA, 15 nt, Human
guuaauaaauuaaaa

SEQ ID NO: 2414491 - RNA, 12 nt, Human
guuaauaaaagu

SEQ ID NO: 2414492 - RNA, 19 nt, Human
guuauuauauuuacaaaug

SEQ ID NO: 2414493 - RNA, 19 nt, Human
guuagagguucccuuugac

SEQ ID NO: 2414494 - RNA, 13 nt, Human
guuagaauuccuu

SEQ ID NO: 2414495 - RNA, 14 nt, Human
guuacuguugugac

SEQ ID NO: 2414496 - RNA, 16 nt, Human
guuacuguugugaccu

SEQ ID NO: 2414497 - RNA, 12 nt, Human
guuagaauuccu

SEQ ID NO: 2414498 - RNA, 18 nt, Human
guuagacucuuacuuuuu

SEQ ID NO: 2414499 - RNA, 20 nt, Human
guuagaauuccuucagggug

SEQ ID NO: 2414500 - RNA, 13 nt, Human
guuacuguaauuc

SEQ ID NO: 2414501 - RNA, 16 nt, Human
guuacuguuauagagg

SEQ ID NO: 2414502 - RNA, 14 nt, Human
guuauugcaguuua

SEQ ID NO: 2414503 - RNA, 13 nt, Human
guuauugcaguuu

SEQ ID NO: 2414504 - RNA, 22 nt, Human
guuagagguuuuaaagugauua

SEQ ID NO: 2414505 - RNA, 20 nt, Human
guuauuauauuuacaaaugg

SEQ ID NO: 2414506 - RNA, 17 nt, Human
guuauuauauuuacaaa

SEQ ID NO: 2414507 - RNA, 15 nt, Human
guuauuuucaguauu

SEQ ID NO: 2414508 - RNA, 14 nt, Human
guuauuuucaguau

SEQ ID NO: 2414509 - RNA, 12 nt, Human
guuauuuucagu

SEQ ID NO: 2414510 - RNA, 19 nt, Human
guuauuuuaguuucuguuc

SEQ ID NO: 2414511 - RNA, 21 nt, Human
guuauuuuauugauuauuacu

SEQ ID NO: 2414512 - RNA, 15 nt, Human
guuauuuuaguuucu

SEQ ID NO: 2414513 - RNA, 13 nt, Human
guuauuuuaguuu

SEQ ID NO: 2414514 - RNA, 19 nt, Human
guuauuuguuauuuucagu

SEQ ID NO: 2414515 - RNA, 18 nt, Human
guuauuuguuauuuucag

SEQ ID NO: 2414516 - RNA, 17 nt, Human
guuauuuguuuaccacu

SEQ ID NO: 2414517 - RNA, 17 nt, Human
guuauuguacagcuguu

SEQ ID NO: 2414518 - RNA, 13 nt, Human
guuauuuaaagaa

SEQ ID NO: 2414519 - RNA, 10 nt, Human
guuauuuaaa

SEQ ID NO: 2414520 - RNA, 23 nt, Human
guuauugcaguuuaucauucaag

SEQ ID NO: 2414521 - RNA, 16 nt, Human
guuauugcaguuuauc

SEQ ID NO: 2414522 - RNA, 21 nt, Human
guuauugggcaagugauugaa

SEQ ID NO: 2414523 - RNA, 20 nt, Human
guuauugggcaagugauuga

SEQ ID NO: 2414524 - RNA, 23 nt, Human
guuauuuucuuugaaauuguuua

SEQ ID NO: 2414525 - RNA, 14 nt, Human
guuauuuucuacag

SEQ ID NO: 2414526 - RNA, 17 nt, Human
guuauuuucaguauuuu

SEQ ID NO: 2414527 - RNA, 12 nt, Human
guuauuuucuac

SEQ ID NO: 2414528 - RNA, 17 nt, Human
guuauuuucuacagugg

SEQ ID NO: 2414529 - RNA, 15 nt, Human
guuauuuucuacagu

SEQ ID NO: 2414530 - RNA, 20 nt, Human
guuauuuucuacagugguuu

SEQ ID NO: 2414531 - RNA, 23 nt, Human
guucagcuuguaaauagcucagg

SEQ ID NO: 2414532 - RNA, 12 nt, Human
guucagcuuggg

SEQ ID NO: 2414533 - RNA, 15 nt, Human
guucaggagucccaa

SEQ ID NO: 2414534 - RNA, 18 nt, Human
guucaggagucccaagga

SEQ ID NO: 2414535 - RNA, 22 nt, Human
guucaggguuggccccugcccg

SEQ ID NO: 2414536 - RNA, 21 nt, Human
guucaggguuggccccugccc

SEQ ID NO: 2414537 - RNA, 15 nt, Human
guucagcugccccac

SEQ ID NO: 2414538 - RNA, 20 nt, Human
guucaggagucccaaggaaa

SEQ ID NO: 2414539 - RNA, 21 nt, Human
guucaggagucccaaggaaag

SEQ ID NO: 2414540 - RNA, 20 nt, Human
guucaggguuggccccugcc

SEQ ID NO: 2414541 - RNA, 22 nt, Human
guucaguggcagggcucaggau

SEQ ID NO: 2414542 - RNA, 21 nt, Human
guucaguggcagggcucagga

SEQ ID NO: 2414543 - RNA, 12 nt, Human
guucaguguaau

SEQ ID NO: 2414544 - RNA, 16 nt, Human
guucaguguaaauagu

SEQ ID NO: 2414545 - RNA, 13 nt, Human
guucaguguaauu

SEQ ID NO: 2414546 - RNA, 22 nt, Human
aagccgugcucgccccagcagg

SEQ ID NO: 2414547 - RNA, 21 nt, Human
aagccgugauuuucauugcug

SEQ ID NO: 2414548 - RNA, 14 nt, Human
aagccguggcuucc

SEQ ID NO: 2414549 - RNA, 13 nt, Human
aagccguggcuuc

SEQ ID NO: 2414550 - RNA, 15 nt, Human
aagccguggcuuccc

SEQ ID NO: 2414551 - RNA, 22 nt, Human
aagccguuguuuacuuaaagau

SEQ ID NO: 2414552 - RNA, 14 nt, Human
aagccgugcccugc

SEQ ID NO: 2414553 - RNA, 18 nt, Human
guucagguaacaggcaga

SEQ ID NO: 2414554 - RNA, 17 nt, Human
guucagguaacaggcag

SEQ ID NO: 2414555 - RNA, 13 nt, Human
guucaguaccugg

SEQ ID NO: 2414556 - RNA, 19 nt, Human
guucaggggacucagcccu

SEQ ID NO: 2414557 - RNA, 13 nt, Human
guucagguagcug

SEQ ID NO: 2414558 - RNA, 15 nt, Human
guucaggggacucag

SEQ ID NO: 2414559 - RNA, 18 nt, Human
guucaggggacucagccc

SEQ ID NO: 2414560 - RNA, 17 nt, Human
guucaguaccuggagga

SEQ ID NO: 2414561 - RNA, 14 nt, Human
guucaguaccugga

SEQ ID NO: 2414562 - RNA, 20 nt, Human
guucaguggcagggcucagg

SEQ ID NO: 2414563 - RNA, 18 nt, Human
guucaguggcagggcuca

SEQ ID NO: 2414564 - RNA, 16 nt, Human
guucaguaccuggagg

SEQ ID NO: 2414565 - RNA, 17 nt, Human
guucaguggcagggcuc

SEQ ID NO: 2414566 - RNA, 16 nt, Human
aagccucccacgacug

SEQ ID NO: 2414567 - RNA, 14 nt, Human
aagccucauauuua

SEQ ID NO: 2414568 - RNA, 20 nt, Human
aagccucauauuuaaagaca

SEQ ID NO: 2414569 - RNA, 19 nt, Human
aagccuccauuuaguucuu

SEQ ID NO: 2414570 - RNA, 18 nt, Human
aagccuggucagcccaaa

SEQ ID NO: 2414571 - RNA, 15 nt, Human
aagccuccuccagcc

SEQ ID NO: 2414572 - RNA, 15 nt, Human
aagccuguuuaagag

SEQ ID NO: 2414573 - RNA, 21 nt, Human
aagccuguauucucaaacaca

SEQ ID NO: 2414574 - RNA, 14 nt, Human
aagccuccccagcu

SEQ ID NO: 2414575 - RNA, 20 nt, Human
aagccuccauuuaguucuuu

SEQ ID NO: 2414576 - RNA, 22 nt, Human
aagccuccauuuaguucuuugu

SEQ ID NO: 2414577 - RNA, 18 nt, Human
aagccuguuuaagagaca

SEQ ID NO: 2414578 - RNA, 19 nt, Human
aagccuguuuuguuggaag

SEQ ID NO: 2414579 - RNA, 18 nt, Human
aagccuguuccccucacu

SEQ ID NO: 2414580 - RNA, 20 nt, Human
aagccuguuccccucacugg

SEQ ID NO: 2414581 - RNA, 16 nt, Human
aagccuguuccccuca

SEQ ID NO: 2414582 - RNA, 17 nt, Human
aagccuguaaucccagc

SEQ ID NO: 2414583 - RNA, 18 nt, Human
aagcuaguggcuucaaaa

SEQ ID NO: 2414584 - RNA, 19 nt, Human
aagcuaguggcuucaaaau

SEQ ID NO: 2414585 - RNA, 22 nt, Human
aagcuaggguggcccuugcagu

SEQ ID NO: 2414586 - RNA, 15 nt, Human
aagcuaggguggccc

SEQ ID NO: 2414587 - RNA, 19 nt, Human
aagcuaggguggcccuugc

SEQ ID NO: 2414588 - RNA, 23 nt, Human
aagccuuaucaagugucuuccau

SEQ ID NO: 2414589 - RNA, 22 nt, Human
aagccuuaucaagugucuucca

SEQ ID NO: 2414590 - RNA, 16 nt, Human
aagccuuaucaagugu

SEQ ID NO: 2414591 - RNA, 16 nt, Human
aagccuucauugccuu

SEQ ID NO: 2414592 - RNA, 21 nt, Human
aagccuuggggcugaugcagu

SEQ ID NO: 2414593 - RNA, 16 nt, Human
aagccuuccacacuca

SEQ ID NO: 2414594 - RNA, 19 nt, Human
guucuagcauggcugccaa

SEQ ID NO: 2414595 - RNA, 19 nt, Human
guuccggauuggcuugugu

SEQ ID NO: 2414596 - RNA, 20 nt, Human
guuccgaaaccaaagaagaa

SEQ ID NO: 2414597 - RNA, 14 nt, Human
guucuagucucucu

SEQ ID NO: 2414598 - RNA, 21 nt, Human
guucuagucuccuuugcacug

SEQ ID NO: 2414599 - RNA, 14 nt, Human
guucuagucuccuu

SEQ ID NO: 2414600 - RNA, 23 nt, Human
guucuagucuccuuugcacugag

SEQ ID NO: 2414601 - RNA, 13 nt, Human
guucucuccuucu

SEQ ID NO: 2414602 - RNA, 15 nt, Human
guucucugcccucca

SEQ ID NO: 2414603 - RNA, 13 nt, Human
guucucugcccuc

SEQ ID NO: 2414604 - RNA, 14 nt, Human
guucucugaggaca

SEQ ID NO: 2414605 - RNA, 12 nt, Human
guucucugagga

SEQ ID NO: 2414606 - RNA, 15 nt, Human
guucucucuucucca

SEQ ID NO: 2414607 - RNA, 14 nt, Human
guucuuaauucuua

SEQ ID NO: 2414608 - RNA, 17 nt, Human
guucuuaauucuuagcu

SEQ ID NO: 2414609 - RNA, 14 nt, Human
guucuucaucuaag

SEQ ID NO: 2414610 - RNA, 15 nt, Human
guucuuaauugcacu

SEQ ID NO: 2414611 - RNA, 13 nt, Human
guucuuaauugca

SEQ ID NO: 2414612 - RNA, 18 nt, Human
guucucugcccuccaaga

SEQ ID NO: 2414613 - RNA, 17 nt, Human
guucucugcccuccaag

SEQ ID NO: 2414614 - RNA, 13 nt, Human
guucuuaauucuu

SEQ ID NO: 2414615 - RNA, 16 nt, Human
guucuuaagacgugau

SEQ ID NO: 2414616 - RNA, 19 nt, Human
guugauagcacagacccug

SEQ ID NO: 2414617 - RNA, 14 nt, Human
guugauagcacaga

SEQ ID NO: 2414618 - RNA, 19 nt, Human
aaggaaaaagcacaagaag

SEQ ID NO: 2414619 - RNA, 16 nt, Human
aaggaaaaagcacaag

SEQ ID NO: 2414620 - RNA, 20 nt, Human
aaggaaaaacacaagcaaaa

SEQ ID NO: 2414621 - RNA, 19 nt, Human
aaggaaaaacacaagcaaa

SEQ ID NO: 2414622 - RNA, 17 nt, Human
aaggaaaaaauguugga

SEQ ID NO: 2414623 - RNA, 16 nt, Human
aaggaaaaacacaagc

SEQ ID NO: 2414624 - RNA, 15 nt, Human
aaggaaaaaauguug

SEQ ID NO: 2414625 - RNA, 23 nt, Human
guugauagcaagugaauuuuucu

SEQ ID NO: 2414626 - RNA, 15 nt, Human
guugauaacuuugcu

SEQ ID NO: 2414627 - RNA, 20 nt, Human
guugagaauugugcucaaaa

SEQ ID NO: 2414628 - RNA, 17 nt, Human
guugauaacuuugcuug

SEQ ID NO: 2414629 - RNA, 14 nt, Human
guugauaacuuugc

SEQ ID NO: 2414630 - RNA, 19 nt, Human
guugagaaucccaaauuug

SEQ ID NO: 2414631 - RNA, 22 nt, Human
guugauagcaagugaauuuuuc

SEQ ID NO: 2414632 - RNA, 16 nt, Human
guugagaaucccaaau

SEQ ID NO: 2414633 - RNA, 18 nt, Human
guugacuuuagggacuca

SEQ ID NO: 2414634 - RNA, 12 nt, Human
guugagaaauga

SEQ ID NO: 2414635 - RNA, 15 nt, Human
guugacuuuagggac

SEQ ID NO: 2414636 - RNA, 21 nt, Human
guugacuuauuuucucugugu

SEQ ID NO: 2414637 - RNA, 14 nt, Human
guugacuuucaggu

SEQ ID NO: 2414638 - RNA, 20 nt, Human
guugacuuauuuucucugug

SEQ ID NO: 2414639 - RNA, 20 nt, Human
guugacuugacagaacacug

SEQ ID NO: 2414640 - RNA, 19 nt, Human
guugacuugacagaacacu

SEQ ID NO: 2414641 - RNA, 15 nt, Human
guucuugguuuguaa

SEQ ID NO: 2414642 - RNA, 18 nt, Human
guucuugguuuguaaauu

SEQ ID NO: 2414643 - RNA, 14 nt, Human
guugaccccagagg

SEQ ID NO: 2414644 - RNA, 16 nt, Human
guucuugguagagauu

SEQ ID NO: 2414645 - RNA, 19 nt, Human
guucuuggggcccuacacc

SEQ ID NO: 2414646 - RNA, 15 nt, Human
guugaccccagagga

SEQ ID NO: 2414647 - RNA, 15 nt, Human
guucuugaagcagua

SEQ ID NO: 2414648 - RNA, 20 nt, Human
guucuucuuccugaagcuga

SEQ ID NO: 2414649 - RNA, 17 nt, Human
guucuucuuccugaagc

SEQ ID NO: 2414650 - RNA, 22 nt, Human
guucuucgggaagagaggaguu

SEQ ID NO: 2414651 - RNA, 21 nt, Human
guucuucgggaagagaggagu

SEQ ID NO: 2414652 - RNA, 16 nt, Human
guucuucgggaagaga

SEQ ID NO: 2414653 - RNA, 14 nt, Human
guucuucgggaaga

SEQ ID NO: 2414654 - RNA, 14 nt, Human
guucuucgaggugg

SEQ ID NO: 2414655 - RNA, 14 nt, Human
guucuugguuugua

SEQ ID NO: 2414656 - RNA, 21 nt, Human
aagcuuuuaugugaaacaugu

SEQ ID NO: 2414657 - RNA, 19 nt, Human
aagcuuuuaugugaaacau

SEQ ID NO: 2414658 - RNA, 12 nt, Human
guuccccagaga

SEQ ID NO: 2414659 - RNA, 13 nt, Human
guuccccagagaa

SEQ ID NO: 2414660 - RNA, 23 nt, Human
aagcuuuuuauuccuccugcuca

SEQ ID NO: 2414661 - RNA, 15 nt, Human
guuccccaagacauu

SEQ ID NO: 2414662 - RNA, 21 nt, Human
guucccccuucacaaagccca

SEQ ID NO: 2414663 - RNA, 15 nt, Human
guucccccagcccug

SEQ ID NO: 2414664 - RNA, 16 nt, Human
guucccccagcccugu

SEQ ID NO: 2414665 - RNA, 17 nt, Human
guucccccagcccugug

SEQ ID NO: 2414666 - RNA, 20 nt, Human
guucccccagcccuguggaa

SEQ ID NO: 2414667 - RNA, 19 nt, Human
guuccccaucuggguccuu

SEQ ID NO: 2414668 - RNA, 18 nt, Human
guuccccaucuggguccu

SEQ ID NO: 2414669 - RNA, 14 nt, Human
guuccccagagaaa

SEQ ID NO: 2414670 - RNA, 14 nt, Human
guuccccaugcaga

SEQ ID NO: 2414671 - RNA, 23 nt, Human
guuccccaucuggguccuugcac

SEQ ID NO: 2414672 - RNA, 13 nt, Human
guucccccagccc

SEQ ID NO: 2414673 - RNA, 14 nt, Human
guucccccagcccu

SEQ ID NO: 2414674 - RNA, 18 nt, Human
guucccuugaugaagaag

SEQ ID NO: 2414675 - RNA, 21 nt, Human
guucccucugcuccuggagcc

SEQ ID NO: 2414676 - RNA, 16 nt, Human
guucccucugcuccug

SEQ ID NO: 2414677 - RNA, 20 nt, Human
guuccccuaguaagugccuu

SEQ ID NO: 2414678 - RNA, 17 nt, Human
guucccugaaaacccag

SEQ ID NO: 2414679 - RNA, 18 nt, Human
guucccugaaaacccaga

SEQ ID NO: 2414680 - RNA, 19 nt, Human
guucccugaaaacccagag

SEQ ID NO: 2414681 - RNA, 20 nt, Human
guucccugaaaacccagaga

SEQ ID NO: 2414682 - RNA, 16 nt, Human
guucccugucuugucc

SEQ ID NO: 2414683 - RNA, 21 nt, Human
guucccugaaaacccagagag

SEQ ID NO: 2414684 - RNA, 12 nt, Human
guucccuuggcc

SEQ ID NO: 2414685 - RNA, 13 nt, Human
guucccuuggccu

SEQ ID NO: 2414686 - RNA, 14 nt, Human
guucccuuggccuc

SEQ ID NO: 2414687 - RNA, 15 nt, Human
guucccuuggccuca

SEQ ID NO: 2414688 - RNA, 22 nt, Human
guucccuuuuuuggcugcugaa

SEQ ID NO: 2414689 - RNA, 21 nt, Human
guucccuuuuuuggcugcuga

SEQ ID NO: 2414690 - RNA, 21 nt, Human
guuccgaaaccaaagaagaaa

SEQ ID NO: 2414691 - RNA, 22 nt, Human
guuccggaauccuguccucagc

SEQ ID NO: 2414692 - RNA, 19 nt, Human
guuccggaauccuguccuc

SEQ ID NO: 2414693 - RNA, 14 nt, Human
aagcuugcucacau

SEQ ID NO: 2414694 - RNA, 20 nt, Human
aagcuucuuaaaugagaagg

SEQ ID NO: 2414695 - RNA, 22 nt, Human
aagcuucuuaaaugagaaggaa

SEQ ID NO: 2414696 - RNA, 14 nt, Human
aagcuuggcagccg

SEQ ID NO: 2414697 - RNA, 21 nt, Human
aagcuuggcagccgagcucgu

SEQ ID NO: 2414698 - RNA, 21 nt, Human
aagcuuggcuguagaaggaga

SEQ ID NO: 2414699 - RNA, 21 nt, Human
aagcuuccaugauucuauuua

SEQ ID NO: 2414700 - RNA, 22 nt, Human
aagcuucgaggcccagcgaccu

SEQ ID NO: 2414701 - RNA, 23 nt, Human
aagcuuccuuuguuuuuuuuucc

SEQ ID NO: 2414702 - RNA, 13 nt, Human
aagcuuccuuggc

SEQ ID NO: 2414703 - RNA, 18 nt, Human
aagcuuauuaaaacucau

SEQ ID NO: 2414704 - RNA, 13 nt, Human
aagcuuaggcagg

SEQ ID NO: 2414705 - RNA, 22 nt, Human
aagcuuagcaggagaggagagc

SEQ ID NO: 2414706 - RNA, 20 nt, Human
aagcuuagcaggagaggaga

SEQ ID NO: 2414707 - RNA, 16 nt, Human
aagcuuagcaggagag

SEQ ID NO: 2414708 - RNA, 15 nt, Human
aagcuuagcaggaga

SEQ ID NO: 2414709 - RNA, 13 nt, Human
aagcuuagcagga

SEQ ID NO: 2414710 - RNA, 11 nt, Human
aagcuuagaac

SEQ ID NO: 2414711 - RNA, 10 nt, Human
aagcuuagaa

SEQ ID NO: 2414712 - RNA, 21 nt, Human
aagcucuugaagacacugaaa

SEQ ID NO: 2414713 - RNA, 15 nt, Human
aagcucagaauccaa

SEQ ID NO: 2414714 - RNA, 14 nt, Human
aagcucagaaucca

SEQ ID NO: 2414715 - RNA, 13 nt, Human
aagcucagaaucc

SEQ ID NO: 2414716 - RNA, 12 nt, Human
aagcucagaauc

SEQ ID NO: 2414717 - RNA, 22 nt, Human
aagcucagaggcgcacugugac

SEQ ID NO: 2414718 - RNA, 23 nt, Human
aagcucagaggcgcacugugacc

SEQ ID NO: 2414719 - RNA, 14 nt, Human
aagcucacuucugg

SEQ ID NO: 2414720 - RNA, 23 nt, Human
aagcucacuucugggcuucaucu

SEQ ID NO: 2414721 - RNA, 16 nt, Human
aagcucagaaggcucu

SEQ ID NO: 2414722 - RNA, 14 nt, Human
aagcucagaaggcu

SEQ ID NO: 2414723 - RNA, 15 nt, Human
aagcucacaguuccu

SEQ ID NO: 2414724 - RNA, 19 nt, Human
aagcucacaguuccucgcc

SEQ ID NO: 2414725 - RNA, 20 nt, Human
aagcucacaguuccucgccc

SEQ ID NO: 2414726 - RNA, 22 nt, Human
aagcucacaguuccucgcccug

SEQ ID NO: 2414727 - RNA, 23 nt, Human
aagcucaccuguugcuuacaauu

SEQ ID NO: 2414728 - RNA, 22 nt, Human
aagcucaccuguugcuuacaau

SEQ ID NO: 2414729 - RNA, 18 nt, Human
aagcucaccuguugcuua

SEQ ID NO: 2414730 - RNA, 16 nt, Human
aagcucaccuguugcu

SEQ ID NO: 2414731 - RNA, 23 nt, Human
aagcucacaguuccucgcccugg

SEQ ID NO: 2414732 - RNA, 17 nt, Human
aagcucugcuccucucc

SEQ ID NO: 2414733 - RNA, 21 nt, Human
aagcucuggcugaacccugug

SEQ ID NO: 2414734 - RNA, 15 nt, Human
aagcucuggcugaac

SEQ ID NO: 2414735 - RNA, 13 nt, Human
aagcucuggcuga

SEQ ID NO: 2414736 - RNA, 11 nt, Human
aagcucuggcu

SEQ ID NO: 2414737 - RNA, 15 nt, Human
aagcucagccagccc

SEQ ID NO: 2414738 - RNA, 17 nt, Human
aagcucagacugguuga

SEQ ID NO: 2414739 - RNA, 13 nt, Human
aagcucagcccac

SEQ ID NO: 2414740 - RNA, 14 nt, Human
aagcucagcccacc

SEQ ID NO: 2414741 - RNA, 12 nt, Human
aagcugaaaaua

SEQ ID NO: 2414742 - RNA, 19 nt, Human
aagcucuugaagacacuga

SEQ ID NO: 2414743 - RNA, 20 nt, Human
aagcucuugaagacacugaa

SEQ ID NO: 2414744 - RNA, 23 nt, Human
aagcucuggcugaacccugugcu

SEQ ID NO: 2414745 - RNA, 22 nt, Human
aagcucuggcugaacccugugc

SEQ ID NO: 2414746 - RNA, 24 nt, Human
aagcucuggcugaacccugugcug

SEQ ID NO: 2414747 - RNA, 20 nt, Human
aagcucuggugacaccagcc

SEQ ID NO: 2414748 - RNA, 22 nt, Human
aagcucuuacacuacauuagaa

SEQ ID NO: 2414749 - RNA, 21 nt, Human
aagcucuggugacaccagccu

SEQ ID NO: 2414750 - RNA, 17 nt, Human
aagcucuugaagacacu

SEQ ID NO: 2414751 - RNA, 19 nt, Human
aaguuaauccacugugacu

SEQ ID NO: 2414752 - RNA, 23 nt, Human
aaguuaagaauguucuuauguug

SEQ ID NO: 2414753 - RNA, 20 nt, Human
aaguuacaaauugcuugaaa

SEQ ID NO: 2414754 - RNA, 22 nt, Human
aaguuagaauuccuucagggug

SEQ ID NO: 2414755 - RNA, 21 nt, Human
aaguuagaauuccuucagggu

SEQ ID NO: 2414756 - RNA, 17 nt, Human
aaguuagaauuccuuca

SEQ ID NO: 2414757 - RNA, 13 nt, Human
aaguuagcucagg

SEQ ID NO: 2414758 - RNA, 15 nt, Human
aaguuagaauuccuu

SEQ ID NO: 2414759 - RNA, 18 nt, Human
aaguuacaacuuccuaau

SEQ ID NO: 2414760 - RNA, 21 nt, Human
aaguguguguuuuucauaaag

SEQ ID NO: 2414761 - RNA, 16 nt, Human
aaguguguguuuuuca

SEQ ID NO: 2414762 - RNA, 13 nt, Human
aagugugugugcg

SEQ ID NO: 2414763 - RNA, 16 nt, Human
aaguguguuguugcuu

SEQ ID NO: 2414764 - RNA, 11 nt, Human
aagugugugug

SEQ ID NO: 2414765 - RNA, 17 nt, Human
aaguguguuuccuucag

SEQ ID NO: 2414766 - RNA, 21 nt, Human
aaguguguuuccuucagugca

SEQ ID NO: 2414767 - RNA, 11 nt, Human
aaguuaagaau

SEQ ID NO: 2414768 - RNA, 16 nt, Human
aaguguuaauacuagu

SEQ ID NO: 2414769 - RNA, 13 nt, Human
aaguuaacagaga

SEQ ID NO: 2414770 - RNA, 14 nt, Human
aaguuaaauuuuau

SEQ ID NO: 2414771 - RNA, 23 nt, Human
aaguuagucuacucuuaagccau

SEQ ID NO: 2414772 - RNA, 11 nt, Human
aaguuagucua

SEQ ID NO: 2414773 - RNA, 21 nt, Human
aaguuagcugagcgugguggc

SEQ ID NO: 2414774 - RNA, 14 nt, Human
aaguuagcugagcg

SEQ ID NO: 2414775 - RNA, 14 nt, Human
aaguuagcucagga

SEQ ID NO: 2414776 - RNA, 15 nt, Human
aaguuagcucaggag

SEQ ID NO: 2414777 - RNA, 18 nt, Human
aaguuauaaaucaauguc

SEQ ID NO: 2414778 - RNA, 19 nt, Human
aaguuauaaaucaauguca

SEQ ID NO: 2414779 - RNA, 20 nt, Human
aaguuauaaaucaaugucac

SEQ ID NO: 2414780 - RNA, 20 nt, Human
aaguuauuguacagcuguuu

SEQ ID NO: 2414781 - RNA, 12 nt, Human
aaguuauuguac

SEQ ID NO: 2414782 - RNA, 11 nt, Human
aaguuauugua

SEQ ID NO: 2414783 - RNA, 23 nt, Human
aaguuauugcaguuuaucauuca

SEQ ID NO: 2414784 - RNA, 17 nt, Human
aaguuauaguauaucug

SEQ ID NO: 2414785 - RNA, 16 nt, Human
aaguuauaguauaucu

SEQ ID NO: 2414786 - RNA, 23 nt, Human
aaguuauauagguuuuguuugcu

SEQ ID NO: 2414787 - RNA, 22 nt, Human
aaguuaucagacacucuggcug

SEQ ID NO: 2414788 - RNA, 12 nt, Human
aaguguguguuu

SEQ ID NO: 2414789 - RNA, 23 nt, Human
aaguguguggucccaaguuggaa

SEQ ID NO: 2414790 - RNA, 16 nt, Human
aaguguguauuaaaaa

SEQ ID NO: 2414791 - RNA, 15 nt, Human
aaguguguauuaaaa

SEQ ID NO: 2414792 - RNA, 13 nt, Human
aaguguguauuaa

SEQ ID NO: 2414793 - RNA, 12 nt, Human
aaguguguaugu

SEQ ID NO: 2414794 - RNA, 22 nt, Human
aaguguguaugugcgugugugc

SEQ ID NO: 2414795 - RNA, 19 nt, Human
aaguguggucccaacagga

SEQ ID NO: 2414796 - RNA, 23 nt, Human
aagugugcuuuaugcugaaacag

SEQ ID NO: 2414797 - RNA, 20 nt, Human
aagugugggucugugugugu

SEQ ID NO: 2414798 - RNA, 13 nt, Human
aagugugguagag

SEQ ID NO: 2414799 - RNA, 21 nt, Human
aagugugcauauuguacacuu

SEQ ID NO: 2414800 - RNA, 19 nt, Human
aagugugcauauuguacac

SEQ ID NO: 2414801 - RNA, 22 nt, Human
aagugugcauauuguacacuuu

SEQ ID NO: 2414802 - RNA, 21 nt, Human
aagugugcuuuaugcugaaac

SEQ ID NO: 2414803 - RNA, 10 nt, Human
aagugugggu

SEQ ID NO: 2414804 - RNA, 17 nt, Human
aagugugggucugugug

SEQ ID NO: 2414805 - RNA, 18 nt, Human
aagugugggucugugugu

SEQ ID NO: 2414806 - RNA, 15 nt, Human
aagugugagcaguga

SEQ ID NO: 2414807 - RNA, 13 nt, Human
aagugugagcaaa

SEQ ID NO: 2414808 - RNA, 11 nt, Human
aagugugagua

SEQ ID NO: 2414809 - RNA, 18 nt, Human
aagugugaguaagagcug

SEQ ID NO: 2414810 - RNA, 19 nt, Human
aagugugaguaagagcugg

SEQ ID NO: 2414811 - RNA, 20 nt, Human
aagugugaguaagagcuggu

SEQ ID NO: 2414812 - RNA, 18 nt, Human
aagugugcauauuguaca

SEQ ID NO: 2414813 - RNA, 17 nt, Human
aagugugcauauuguac

SEQ ID NO: 2414814 - RNA, 11 nt, Human
aagugugcaua

SEQ ID NO: 2414815 - RNA, 22 nt, Human
aagugugauugggaauaaauau

SEQ ID NO: 2414816 - RNA, 21 nt, Human
aagugugauugggaauaaaua

SEQ ID NO: 2414817 - RNA, 20 nt, Human
aagugugauugggaauaaau

SEQ ID NO: 2414818 - RNA, 11 nt, Human
aagugugauug

SEQ ID NO: 2414819 - RNA, 21 nt, Human
aagugugaguaagagcuggug

SEQ ID NO: 2414820 - RNA, 21 nt, Human
aagugugaacuggacccuguu

SEQ ID NO: 2414821 - RNA, 13 nt, Human
aagugugaacugg

SEQ ID NO: 2414822 - RNA, 23 nt, Human
aaguguccauugacauguacaga

SEQ ID NO: 2414823 - RNA, 22 nt, Human
aaguguccauugacauguacag

SEQ ID NO: 2414824 - RNA, 19 nt, Human
aagugucucaguccaccug

SEQ ID NO: 2414825 - RNA, 17 nt, Human
aagugugaacaaaagau

SEQ ID NO: 2414826 - RNA, 14 nt, Human
aagugucugugugc

SEQ ID NO: 2414827 - RNA, 21 nt, Human
aaguguccauugacauguaca

SEQ ID NO: 2414828 - RNA, 19 nt, Human
aaguguccauugacaugua

SEQ ID NO: 2414829 - RNA, 18 nt, Human
aaguguccauugacaugu

SEQ ID NO: 2414830 - RNA, 22 nt, Human
aagugucauauguaggugucug

SEQ ID NO: 2414831 - RNA, 24 nt, Human
aagugucauauguaggugucugca

SEQ ID NO: 2414832 - RNA, 12 nt, Human
aagugccccugc

SEQ ID NO: 2414833 - RNA, 21 nt, Human
aagugccagucuugugucugc

SEQ ID NO: 2414834 - RNA, 16 nt, Human
aagugcaugcucucug

SEQ ID NO: 2414835 - RNA, 20 nt, Human
aagugccacucauuccugua

SEQ ID NO: 2414836 - RNA, 19 nt, Human
aagugcauccaaaggugcu

SEQ ID NO: 2414837 - RNA, 16 nt, Human
aagugcauccaaaggu

SEQ ID NO: 2414838 - RNA, 15 nt, Human
aagugcauccaaagg

SEQ ID NO: 2414839 - RNA, 21 nt, Human
aagugccacucauuccuguag

SEQ ID NO: 2414840 - RNA, 21 nt, Human
aagugccacugcccgagcugg

SEQ ID NO: 2414841 - RNA, 22 nt, Human
aagugccacugcccgagcuggu

SEQ ID NO: 2414842 - RNA, 23 nt, Human
aagugccacugcccgagcuggug

SEQ ID NO: 2414843 - RNA, 23 nt, Human
aaguguauuuuuuuacuaauaga

SEQ ID NO: 2414844 - RNA, 20 nt, Human
aagugccagaggugggcagg

SEQ ID NO: 2414845 - RNA, 19 nt, Human
aagugccagaggugggcag

SEQ ID NO: 2414846 - RNA, 18 nt, Human
aagugccagaggugggca

SEQ ID NO: 2414847 - RNA, 15 nt, Human
aagugccagaggugg

SEQ ID NO: 2414848 - RNA, 14 nt, Human
aagugccagaggug

SEQ ID NO: 2414849 - RNA, 15 nt, Human
uaaaauuguaaaauu

SEQ ID NO: 2414850 - RNA, 14 nt, Human
uaaaauuguaaaau

SEQ ID NO: 2414851 - RNA, 19 nt, Human
uaaaauugccauauugcac

SEQ ID NO: 2414852 - RNA, 18 nt, Human
uaaaauugccauauugca

SEQ ID NO: 2414853 - RNA, 16 nt, Human
uaaaauugccauauug

SEQ ID NO: 2414854 - RNA, 15 nt, Human
uaaaauugccauauu

SEQ ID NO: 2414855 - RNA, 14 nt, Human
uaaaauugccauau

SEQ ID NO: 2414856 - RNA, 13 nt, Human
uaaaauugccaua

SEQ ID NO: 2414857 - RNA, 12 nt, Human
uaaaauugccau

SEQ ID NO: 2414858 - RNA, 15 nt, Human
uaaaauugugaugug

SEQ ID NO: 2414859 - RNA, 19 nt, Human
uaaaauuguaaaauuguau

SEQ ID NO: 2414860 - RNA, 16 nt, Human
uaaaauuguaaaauug

SEQ ID NO: 2414861 - RNA, 22 nt, Human
uaaaauuguaaaauuguauaga

SEQ ID NO: 2414862 - RNA, 23 nt, Human
uaaaauuguauagagauaugcag

SEQ ID NO: 2414863 - RNA, 16 nt, Human
uaaaauuguauagaga

SEQ ID NO: 2414864 - RNA, 14 nt, Human
uaaaauuguauaga

SEQ ID NO: 2414865 - RNA, 16 nt, Human
uaaaauugugaugugu

SEQ ID NO: 2414866 - RNA, 22 nt, Human
uaaaauuccacugcguugucca

SEQ ID NO: 2414867 - RNA, 12 nt, Human
uaaaauuccacu

SEQ ID NO: 2414868 - RNA, 21 nt, Human
uaaaauuauuuuggauuuugu

SEQ ID NO: 2414869 - RNA, 15 nt, Human
uaaaauuauuuugga

SEQ ID NO: 2414870 - RNA, 14 nt, Human
uaaaauuauuuugg

SEQ ID NO: 2414871 - RNA, 14 nt, Human
uaaaauugcacuuu

SEQ ID NO: 2414872 - RNA, 13 nt, Human
uaaaauugaaagg

SEQ ID NO: 2414873 - RNA, 16 nt, Human
uaaaauucuacuguau

SEQ ID NO: 2414874 - RNA, 13 nt, Human
uaaaaugugaagu

SEQ ID NO: 2414875 - RNA, 18 nt, Human
uaaaaugugauuuuucug

SEQ ID NO: 2414876 - RNA, 19 nt, Human
uaaaaugugauuuuucuga

SEQ ID NO: 2414877 - RNA, 9 nt, Human
uaaaauggu

SEQ ID NO: 2414878 - RNA, 15 nt, Human
aaguuugauuucauu

SEQ ID NO: 2414879 - RNA, 17 nt, Human
aaguuugaaggaaacag

SEQ ID NO: 2414880 - RNA, 20 nt, Human
aaguuugagaucagccuggg

SEQ ID NO: 2414881 - RNA, 11 nt, Human
uaaaaugugaa

SEQ ID NO: 2414882 - RNA, 22 nt, Human
uaaaauguauucuuaaauucau

SEQ ID NO: 2414883 - RNA, 23 nt, Human
uaaaauguauucuuaaauucauu

SEQ ID NO: 2414884 - RNA, 20 nt, Human
aaguucccuacuuccuguga

SEQ ID NO: 2414885 - RNA, 14 nt, Human
aaguuccucuagug

SEQ ID NO: 2414886 - RNA, 17 nt, Human
aaguucccuacuuccug

SEQ ID NO: 2414887 - RNA, 14 nt, Human
aaguucccuacuuc

SEQ ID NO: 2414888 - RNA, 18 nt, Human
aaguuuccauauguuaua

SEQ ID NO: 2414889 - RNA, 12 nt, Human
aaguuuccauau

SEQ ID NO: 2414890 - RNA, 14 nt, Human
aaguuccuuugggu

SEQ ID NO: 2414891 - RNA, 20 nt, Human
aaguuccuuauguauauuua

SEQ ID NO: 2414892 - RNA, 19 nt, Human
aaguuccaguguucucucu

SEQ ID NO: 2414893 - RNA, 15 nt, Human
aaguuccacugagcu

SEQ ID NO: 2414894 - RNA, 19 nt, Human
aaguuccaaguugcuaaua

SEQ ID NO: 2414895 - RNA, 19 nt, Human
aaguucaaucuguuuuuca

SEQ ID NO: 2414896 - RNA, 15 nt, Human
aaguucaccauuaaa

SEQ ID NO: 2414897 - RNA, 14 nt, Human
aaguuauuuucuac

SEQ ID NO: 2414898 - RNA, 21 nt, Human
aaguuauuuucuacagugguu

SEQ ID NO: 2414899 - RNA, 18 nt, Human
aaguuauuuucuacagug

SEQ ID NO: 2414900 - RNA, 23 nt, Human
aaguucaaauucuucugaacuca

SEQ ID NO: 2414901 - RNA, 21 nt, Human
aaguuucugccgcagcccugc

SEQ ID NO: 2414902 - RNA, 19 nt, Human
aaguuucugccgcagcccu

SEQ ID NO: 2414903 - RNA, 22 nt, Human
aaguuugaauguuaaauaaauu

SEQ ID NO: 2414904 - RNA, 18 nt, Human
aaguuugaauguuaaaua

SEQ ID NO: 2414905 - RNA, 16 nt, Human
aaguuugaauguuaaa

SEQ ID NO: 2414906 - RNA, 15 nt, Human
aaguuugaauguuaa

SEQ ID NO: 2414907 - RNA, 14 nt, Human
aaguuugaauguua

SEQ ID NO: 2414908 - RNA, 13 nt, Human
aaguuugaauguu

SEQ ID NO: 2414909 - RNA, 16 nt, Human
aaguuucuuugcuuca

SEQ ID NO: 2414910 - RNA, 18 nt, Human
aaguuucucagcucccau

SEQ ID NO: 2414911 - RNA, 17 nt, Human
aaguuucucagcuccca

SEQ ID NO: 2414912 - RNA, 16 nt, Human
aaguuucucagcuccc

SEQ ID NO: 2414913 - RNA, 14 nt, Human
aaguuucucagcuc

SEQ ID NO: 2414914 - RNA, 13 nt, Human
aaguuucucagcu

SEQ ID NO: 2414915 - RNA, 23 nt, Human
aaguuucucagauccuuguuuca

SEQ ID NO: 2414916 - RNA, 22 nt, Human
aaguuucucagauccuuguuuc

SEQ ID NO: 2414917 - RNA, 13 nt, Human
aaguuucucagau

SEQ ID NO: 2414918 - RNA, 23 nt, Human
aaguuucuagcuagaaauaugau

SEQ ID NO: 2414919 - RNA, 21 nt, Human
aaguuucuagcuagaaauaug

SEQ ID NO: 2414920 - RNA, 19 nt, Human
aaguuucuagcuagaaaua

SEQ ID NO: 2414921 - RNA, 18 nt, Human
aaguuuccuuggcuggug

SEQ ID NO: 2414922 - RNA, 17 nt, Human
aaguuuccuuggcuggu

SEQ ID NO: 2414923 - RNA, 20 nt, Human
aaguuuccuuggcuggugca

SEQ ID NO: 2414924 - RNA, 16 nt, Human
aaguuuccuuggcugg

SEQ ID NO: 2414925 - RNA, 20 nt, Human
aagugauccucccaccucag

SEQ ID NO: 2414926 - RNA, 19 nt, Human
aagugauccucccaccuca

SEQ ID NO: 2414927 - RNA, 13 nt, Human
aagugauccuccc

SEQ ID NO: 2414928 - RNA, 18 nt, Human
uaaaauagcuuguauagu

SEQ ID NO: 2414929 - RNA, 18 nt, Human
uaaaauauagcuguacaa

SEQ ID NO: 2414930 - RNA, 19 nt, Human
uaaaauauagcuguacaaa

SEQ ID NO: 2414931 - RNA, 17 nt, Human
uaaaauauauuucagau

SEQ ID NO: 2414932 - RNA, 21 nt, Human
uaaaauaccagccaguaaaug

SEQ ID NO: 2414933 - RNA, 14 nt, Human
uaaaauagcuugua

SEQ ID NO: 2414934 - RNA, 21 nt, Human
uaaaauagcaacacucuauau

SEQ ID NO: 2414935 - RNA, 23 nt, Human
uaaaauagccacuuaccuucaau

SEQ ID NO: 2414936 - RNA, 15 nt, Human
uaaaauagccacuua

SEQ ID NO: 2414937 - RNA, 21 nt, Human
uaaaauagccacuuaccuuca

SEQ ID NO: 2414938 - RNA, 13 nt, Human
aagugauucucau

SEQ ID NO: 2414939 - RNA, 16 nt, Human
aagugauucucaugcc

SEQ ID NO: 2414940 - RNA, 20 nt, Human
aagugauucuccugccucag

SEQ ID NO: 2414941 - RNA, 23 nt, Human
aagugauccucccaccucagccu

SEQ ID NO: 2414942 - RNA, 23 nt, Human
aagugaucaauaaaaugugauuu

SEQ ID NO: 2414943 - RNA, 22 nt, Human
aagugaucaauaaaaugugauu

SEQ ID NO: 2414944 - RNA, 15 nt, Human
aagugauuguuggca

SEQ ID NO: 2414945 - RNA, 18 nt, Human
aagugauugggacagagg

SEQ ID NO: 2414946 - RNA, 22 nt, Human
aagugcaauaaaucugacccag

SEQ ID NO: 2414947 - RNA, 23 nt, Human
aagugcaauaaaucugacccagu

SEQ ID NO: 2414948 - RNA, 17 nt, Human
aagugauuuuuuugucc

SEQ ID NO: 2414949 - RNA, 12 nt, Human
aagugcaggcug

SEQ ID NO: 2414950 - RNA, 13 nt, Human
aagugcaggcugg

SEQ ID NO: 2414951 - RNA, 17 nt, Human
aagugcaggcuggcacc

SEQ ID NO: 2414952 - RNA, 21 nt, Human
aagugcaggcuggcaccgccu

SEQ ID NO: 2414953 - RNA, 14 nt, Human
aagugauugaaaau

SEQ ID NO: 2414954 - RNA, 21 nt, Human
aagugauuaaacgugcagacu

SEQ ID NO: 2414955 - RNA, 19 nt, Human
aagugauggagcagagcaa

SEQ ID NO: 2414956 - RNA, 18 nt, Human
aagugauggagcagagca

SEQ ID NO: 2414957 - RNA, 18 nt, Human
aagugauuguaugaauuu

SEQ ID NO: 2414958 - RNA, 13 nt, Human
aagugauuguaug

SEQ ID NO: 2414959 - RNA, 17 nt, Human
aagugauucucaugccu

SEQ ID NO: 2414960 - RNA, 21 nt, Human
aagugauucuccugccucagc

SEQ ID NO: 2414961 - RNA, 19 nt, Human
uaaaagugggcuugauucu

SEQ ID NO: 2414962 - RNA, 13 nt, Human
uaaaagugaucaa

SEQ ID NO: 2414963 - RNA, 15 nt, Human
uaaaagugaucaaua

SEQ ID NO: 2414964 - RNA, 20 nt, Human
uaaaaguacauguuaaacuu

SEQ ID NO: 2414965 - RNA, 14 nt, Human
uaaaauaaauauau

SEQ ID NO: 2414966 - RNA, 13 nt, Human
uaaaauaaauaua

SEQ ID NO: 2414967 - RNA, 13 nt, Human
uaaaauaaauaaa

SEQ ID NO: 2414968 - RNA, 13 nt, Human
uaaaauaaaguau

SEQ ID NO: 2414969 - RNA, 17 nt, Human
uaaaauaaaguauauau

SEQ ID NO: 2414970 - RNA, 21 nt, Human
uaaaauaacuaguguugcuug

SEQ ID NO: 2414971 - RNA, 23 nt, Human
uaaaauaaauauauauaaaccua

SEQ ID NO: 2414972 - RNA, 21 nt, Human
uaaaauacacacucaaaucaa

SEQ ID NO: 2414973 - RNA, 22 nt, Human
uaaaauaauuuuuauauuugaa

SEQ ID NO: 2414974 - RNA, 20 nt, Human
uaaaauaagcacugugcuaa

SEQ ID NO: 2414975 - RNA, 24 nt, Human
uaaaauaacuaguguugcuuggac

SEQ ID NO: 2414976 - RNA, 13 nt, Human
uaaaagaauauuu

SEQ ID NO: 2414977 - RNA, 16 nt, Human
uaaaagaauauuuuaa

SEQ ID NO: 2414978 - RNA, 13 nt, Human
uaaaagucuugug

SEQ ID NO: 2414979 - RNA, 14 nt, Human
uaaaaguaaacauu

SEQ ID NO: 2414980 - RNA, 13 nt, Human
uaaaaguaaacau

SEQ ID NO: 2414981 - RNA, 12 nt, Human
uaaaaguaaaca

SEQ ID NO: 2414982 - RNA, 15 nt, Human
uaaaagguucaggga

SEQ ID NO: 2414983 - RNA, 21 nt, Human
uaaaagguucagggaaccguu

SEQ ID NO: 2414984 - RNA, 17 nt, Human
uaaaagaaaauaaaaaa

SEQ ID NO: 2414985 - RNA, 22 nt, Human
uaaaagaaaauaaaaaaaagaa

SEQ ID NO: 2414986 - RNA, 16 nt, Human
uaaaacuuugcugcca

SEQ ID NO: 2414987 - RNA, 13 nt, Human
uaaaacuuuuuau

SEQ ID NO: 2414988 - RNA, 14 nt, Human
uaaaagaaaauaaa

SEQ ID NO: 2414989 - RNA, 23 nt, Human
uaaaacuuuuuauauuuuauaca

SEQ ID NO: 2414990 - RNA, 18 nt, Human
uaaaagaacaguaaacau

SEQ ID NO: 2414991 - RNA, 17 nt, Human
uaaaagaacaguaaaca

SEQ ID NO: 2414992 - RNA, 21 nt, Human
uaaaagaaagccucagagaau

SEQ ID NO: 2414993 - RNA, 22 nt, Human
uaaaagaaagccucagagaauu

SEQ ID NO: 2414994 - RNA, 16 nt, Human
uaaaaaguauauguua

SEQ ID NO: 2414995 - RNA, 20 nt, Human
uaaaaagggcagggcaucuc

SEQ ID NO: 2414996 - RNA, 20 nt, Human
uaaaaaggaauccacuccca

SEQ ID NO: 2414997 - RNA, 19 nt, Human
uaaaaaggcaccuauaaaa

SEQ ID NO: 2414998 - RNA, 14 nt, Human
uaaaaauauugugu

SEQ ID NO: 2414999 - RNA, 19 nt, Human
uaaaaauauggaacuucua

SEQ ID NO: 2415000 - RNA, 15 nt, Human
uaaaaauauaaaacu

SEQ ID NO: 2415001 - RNA, 14 nt, Human
uaaaaauauaaaac

SEQ ID NO: 2415002 - RNA, 12 nt, Human
uaaaaauauaaa

SEQ ID NO: 2415003 - RNA, 10 nt, Human
uaaaaauaua

SEQ ID NO: 2415004 - RNA, 18 nt, Human
uaaaaagugacacagcag

SEQ ID NO: 2415005 - RNA, 17 nt, Human
uaaaaagugacacagca

SEQ ID NO: 2415006 - RNA, 15 nt, Human
uaaaaagugacacag

SEQ ID NO: 2415007 - RNA, 16 nt, Human
uaaaaagucaauguuu

SEQ ID NO: 2415008 - RNA, 17 nt, Human
uaaaaagucuucacucu

SEQ ID NO: 2415009 - RNA, 14 nt, Human
uaaaaagucuucac

SEQ ID NO: 2415010 - RNA, 21 nt, Human
uaaaaaaaaaccugagcccca

SEQ ID NO: 2415011 - RNA, 22 nt, Human
uaaaaagccugcaauuucauau

SEQ ID NO: 2415012 - RNA, 19 nt, Human
uaaaaagccugcaauuuca

SEQ ID NO: 2415013 - RNA, 13 nt, Human
uaaaaagcugacc

SEQ ID NO: 2415014 - RNA, 11 nt, Human
uaaaaagcuga

SEQ ID NO: 2415015 - RNA, 20 nt, Human
uaaaaagcuuccaugauucu

SEQ ID NO: 2415016 - RNA, 22 nt, Human
uaaaaagcuccaaaugcagcuu

SEQ ID NO: 2415017 - RNA, 20 nt, Human
uaaaaaaaaaaaaguuauau

SEQ ID NO: 2415018 - RNA, 22 nt, Human
uaaaaaaaaaaaccaaaacugu

SEQ ID NO: 2415019 - RNA, 19 nt, Human
uaaaaaaaaaaaaguuaua

SEQ ID NO: 2415020 - RNA, 18 nt, Human
uaaaaaaaaaaaaguuau

SEQ ID NO: 2415021 - RNA, 17 nt, Human
uaaaaaaaaaaaaguua

SEQ ID NO: 2415022 - RNA, 16 nt, Human
uaaaaaaaaaaaagua

SEQ ID NO: 2415023 - RNA, 21 nt, Human
aagucaggcccuuauuuucaa

SEQ ID NO: 2415024 - RNA, 16 nt, Human
aagucagguccaauuu

SEQ ID NO: 2415025 - RNA, 15 nt, Human
aagucagguccaauu

SEQ ID NO: 2415026 - RNA, 21 nt, Human
aagucagaugugguaacuguu

SEQ ID NO: 2415027 - RNA, 13 nt, Human
aagucagaugugg

SEQ ID NO: 2415028 - RNA, 23 nt, Human
aagucagaggauggccagugucu

SEQ ID NO: 2415029 - RNA, 19 nt, Human
aagucagcuuugccuucca

SEQ ID NO: 2415030 - RNA, 14 nt, Human
uaaaaccacagcag

SEQ ID NO: 2415031 - RNA, 22 nt, Human
uaaaaaugagguacucuccugg

SEQ ID NO: 2415032 - RNA, 15 nt, Human
uaaaaccacagcagu

SEQ ID NO: 2415033 - RNA, 21 nt, Human
uaaaaccauguagaaaauuug

SEQ ID NO: 2415034 - RNA, 14 nt, Human
uaaaaaugaauccu

SEQ ID NO: 2415035 - RNA, 22 nt, Human
uaaaaauauuguguugugaaug

SEQ ID NO: 2415036 - RNA, 21 nt, Human
uaaaaauauuguguugugaau

SEQ ID NO: 2415037 - RNA, 23 nt, Human
uaaaaaucucaaauuucuaaauc

SEQ ID NO: 2415038 - RNA, 14 nt, Human
uaaaaaugaaauuu

SEQ ID NO: 2415039 - RNA, 18 nt, Human
uaaaaaugaaauuauuua

SEQ ID NO: 2415040 - RNA, 14 nt, Human
uaaaaaugaaauua

SEQ ID NO: 2415041 - RNA, 23 nt, Human
uaaaaauauggaacuucuaauau

SEQ ID NO: 2415042 - RNA, 15 nt, Human
uaaaaauauguacaa

SEQ ID NO: 2415043 - RNA, 15 nt, Human
uaaaaaugagguacu

SEQ ID NO: 2415044 - RNA, 12 nt, Human
uaaaacuuuuua

SEQ ID NO: 2415045 - RNA, 15 nt, Human
uaaaacuuuuuaaaa

SEQ ID NO: 2415046 - RNA, 20 nt, Human
uaaaacuucucaagauacug

SEQ ID NO: 2415047 - RNA, 17 nt, Human
uaaaacuguuaaagucu

SEQ ID NO: 2415048 - RNA, 14 nt, Human
uaaaacuuugcugc

SEQ ID NO: 2415049 - RNA, 15 nt, Human
uaaaacuuugcugcc

SEQ ID NO: 2415050 - RNA, 13 nt, Human
uaaaacugucccu

SEQ ID NO: 2415051 - RNA, 10 nt, Human
uaaaacugcg

SEQ ID NO: 2415052 - RNA, 13 nt, Human
uaaaacugaauug

SEQ ID NO: 2415053 - RNA, 19 nt, Human
uaaaacugaagucugaaau

SEQ ID NO: 2415054 - RNA, 18 nt, Human
uaaaacugaagucugaaa

SEQ ID NO: 2415055 - RNA, 17 nt, Human
uaaaacugaagucugaa

SEQ ID NO: 2415056 - RNA, 17 nt, Human
uaaaacuggcuuuggcu

SEQ ID NO: 2415057 - RNA, 13 nt, Human
uaaaacuguacuu

SEQ ID NO: 2415058 - RNA, 18 nt, Human
uaaaacuggcuuuggcuu

SEQ ID NO: 2415059 - RNA, 20 nt, Human
uaaaacugaagucugaaauu

SEQ ID NO: 2415060 - RNA, 13 nt, Human
uaaaacccaagug

SEQ ID NO: 2415061 - RNA, 16 nt, Human
uaaaacugaagucuga

SEQ ID NO: 2415062 - RNA, 22 nt, Human
guuucaauugcaucucccagau

SEQ ID NO: 2415063 - RNA, 16 nt, Human
guuucaauugcaucuc

SEQ ID NO: 2415064 - RNA, 17 nt, Human
guuucaauugcaucucc

SEQ ID NO: 2415065 - RNA, 19 nt, Human
guuucacggugccagguuu

SEQ ID NO: 2415066 - RNA, 21 nt, Human
guuucaaugugauucuaaugu

SEQ ID NO: 2415067 - RNA, 19 nt, Human
guuucaaugugauucuaau

SEQ ID NO: 2415068 - RNA, 13 nt, Human
guuucaaugugau

SEQ ID NO: 2415069 - RNA, 22 nt, Human
guuucaauuccaccugcaauca

SEQ ID NO: 2415070 - RNA, 15 nt, Human
guuucaauucagugc

SEQ ID NO: 2415071 - RNA, 17 nt, Human
guuucaaacuuuacuau

SEQ ID NO: 2415072 - RNA, 23 nt, Human
guuucaaccaagucaugugcauu

SEQ ID NO: 2415073 - RNA, 17 nt, Human
guuuaugcaaggaagga

SEQ ID NO: 2415074 - RNA, 13 nt, Human
guuuauggccuca

SEQ ID NO: 2415075 - RNA, 14 nt, Human
guuuauggccucag

SEQ ID NO: 2415076 - RNA, 15 nt, Human
guuuauggccucagc

SEQ ID NO: 2415077 - RNA, 18 nt, Human
guuuauggccucagcugc

SEQ ID NO: 2415078 - RNA, 22 nt, Human
guuuauggccucagcugccuca

SEQ ID NO: 2415079 - RNA, 23 nt, Human
guuuauggccucagcugccucac

SEQ ID NO: 2415080 - RNA, 14 nt, Human
guuuaugauuccac

SEQ ID NO: 2415081 - RNA, 20 nt, Human
guuuaauacucauccuugua

SEQ ID NO: 2415082 - RNA, 13 nt, Human
guuuaugagccag

SEQ ID NO: 2415083 - RNA, 16 nt, Human
guuuaaagagagguua

SEQ ID NO: 2415084 - RNA, 15 nt, Human
guuuaaagagagguu

SEQ ID NO: 2415085 - RNA, 17 nt, Human
guuguuuguauguauaa

SEQ ID NO: 2415086 - RNA, 19 nt, Human
guuguuuuuugaaaacaug

SEQ ID NO: 2415087 - RNA, 19 nt, Human
guuuaaauauuucaagaca

SEQ ID NO: 2415088 - RNA, 13 nt, Human
guuuaauacucau

SEQ ID NO: 2415089 - RNA, 12 nt, Human
guuuaaguguug

SEQ ID NO: 2415090 - RNA, 21 nt, Human
guuuaagugacugauggcuaa

SEQ ID NO: 2415091 - RNA, 14 nt, Human
guuuaaauauuuca

SEQ ID NO: 2415092 - RNA, 13 nt, Human
guuuaaauauuuc

SEQ ID NO: 2415093 - RNA, 23 nt, Human
guuuaaauaaaguaucaugcauu

SEQ ID NO: 2415094 - RNA, 22 nt, Human
guuuaaauaaaguaucaugcau

SEQ ID NO: 2415095 - RNA, 19 nt, Human
guuuaaauaaaguaucaug

SEQ ID NO: 2415096 - RNA, 17 nt, Human
guuuaaauaaaguauca

SEQ ID NO: 2415097 - RNA, 16 nt, Human
guuuaaauaaaguauc

SEQ ID NO: 2415098 - RNA, 15 nt, Human
guuuaaauaaaguau

SEQ ID NO: 2415099 - RNA, 14 nt, Human
guuuaaauaaagua

SEQ ID NO: 2415100 - RNA, 14 nt, Human
guuuaaagcaacug

SEQ ID NO: 2415101 - RNA, 13 nt, Human
guuuaaauaaagu

SEQ ID NO: 2415102 - RNA, 21 nt, Human
aaggaaaaauguguaauuuug

SEQ ID NO: 2415103 - RNA, 17 nt, Human
aaggaaaaauguguaau

SEQ ID NO: 2415104 - RNA, 16 nt, Human
aaggaaaaauguguaa

SEQ ID NO: 2415105 - RNA, 15 nt, Human
aaggaaaaaugugua

SEQ ID NO: 2415106 - RNA, 14 nt, Human
aaggaaaaaugugu

SEQ ID NO: 2415107 - RNA, 17 nt, Human
aaggaaaaauaaauauu

SEQ ID NO: 2415108 - RNA, 21 nt, Human
aaggaaaaagcacaagaagcg

SEQ ID NO: 2415109 - RNA, 22 nt, Human
aaggaaacccagcucuggucca

SEQ ID NO: 2415110 - RNA, 17 nt, Human
aaggaaacccagcucug

SEQ ID NO: 2415111 - RNA, 23 nt, Human
guuguuugauucagacagcugcc

SEQ ID NO: 2415112 - RNA, 12 nt, Human
guuguuugcaug

SEQ ID NO: 2415113 - RNA, 21 nt, Human
aaggaaacuugaaucaaagca

SEQ ID NO: 2415114 - RNA, 13 nt, Human
guuguuuguaugu

SEQ ID NO: 2415115 - RNA, 19 nt, Human
aaggaaacucuuaucucag

SEQ ID NO: 2415116 - RNA, 16 nt, Human
aaggaaacucuuaucu

SEQ ID NO: 2415117 - RNA, 20 nt, Human
aaggaaacuggguuccugca

SEQ ID NO: 2415118 - RNA, 13 nt, Human
aaggaaacucuua

SEQ ID NO: 2415119 - RNA, 12 nt, Human
aaggaaacucuu

SEQ ID NO: 2415120 - RNA, 17 nt, Human
aaggaaaauaguaaugu

SEQ ID NO: 2415121 - RNA, 23 nt, Human
aagggggcugggacaugggaaag

SEQ ID NO: 2415122 - RNA, 12 nt, Human
aagggggcuggg

SEQ ID NO: 2415123 - RNA, 18 nt, Human
aaggggagagccugcugg

SEQ ID NO: 2415124 - RNA, 15 nt, Human
aaggggagagccugc

SEQ ID NO: 2415125 - RNA, 14 nt, Human
aaggggagagccug

SEQ ID NO: 2415126 - RNA, 12 nt, Human
aaggggagagcc

SEQ ID NO: 2415127 - RNA, 19 nt, Human
aaggggagagccugcuggc

SEQ ID NO: 2415128 - RNA, 13 nt, Human
aaggggagaguaa

SEQ ID NO: 2415129 - RNA, 14 nt, Human
aagguagccauccc

SEQ ID NO: 2415130 - RNA, 12 nt, Human
aagguaguuuuu

SEQ ID NO: 2415131 - RNA, 22 nt, Human
aagguaguuuuuaccuaccaca

SEQ ID NO: 2415132 - RNA, 20 nt, Human
aagguagcccuggccagagg

SEQ ID NO: 2415133 - RNA, 17 nt, Human
aagggggucccaguggg

SEQ ID NO: 2415134 - RNA, 12 nt, Human
aaggggguccca

SEQ ID NO: 2415135 - RNA, 17 nt, Human
aaggggguggugucucc

SEQ ID NO: 2415136 - RNA, 19 nt, Human
aagggggucccagugggag

SEQ ID NO: 2415137 - RNA, 16 nt, Human
aaggggguccacccag

SEQ ID NO: 2415138 - RNA, 15 nt, Human
aaggggggagcuggg

SEQ ID NO: 2415139 - RNA, 21 nt, Human
aagggggauaugaauggagau

SEQ ID NO: 2415140 - RNA, 12 nt, Human
aaguaaaugcua

SEQ ID NO: 2415141 - RNA, 20 nt, Human
aagguuuuauaaggcugaug

SEQ ID NO: 2415142 - RNA, 18 nt, Human
aagguauuaaauugaugu

SEQ ID NO: 2415143 - RNA, 22 nt, Human
aagguauuaaauugauguugcu

SEQ ID NO: 2415144 - RNA, 19 nt, Human
aagguaucaguugcaauaa

SEQ ID NO: 2415145 - RNA, 20 nt, Human
aagguaucaguugcaauaau

SEQ ID NO: 2415146 - RNA, 11 nt, Human
aagguauaauu

SEQ ID NO: 2415147 - RNA, 16 nt, Human
aagguuucguuucugu

SEQ ID NO: 2415148 - RNA, 22 nt, Human
aagguuuaggcugguggcccag

SEQ ID NO: 2415149 - RNA, 23 nt, Human
aagguuucagaaagaagugggga

SEQ ID NO: 2415150 - RNA, 22 nt, Human
aagguuucguuucuguauacaa

SEQ ID NO: 2415151 - RNA, 21 nt, Human
aagguuucguuucuguauaca

SEQ ID NO: 2415152 - RNA, 16 nt, Human
aagguuucugaaaauu

SEQ ID NO: 2415153 - RNA, 17 nt, Human
aagguuuguauauuguc

SEQ ID NO: 2415154 - RNA, 13 nt, Human
aagguuuggugug

SEQ ID NO: 2415155 - RNA, 11 nt, Human
guuucagaaau

SEQ ID NO: 2415156 - RNA, 13 nt, Human
guuucagaaaugu

SEQ ID NO: 2415157 - RNA, 16 nt, Human
aaggcugggggaagaa

SEQ ID NO: 2415158 - RNA, 14 nt, Human
aaggcugggggaag

SEQ ID NO: 2415159 - RNA, 19 nt, Human
aaggcugggggaagaagcu

SEQ ID NO: 2415160 - RNA, 22 nt, Human
aaggcugggggaagaagcucuc

SEQ ID NO: 2415161 - RNA, 20 nt, Human
aaggcugucaauuacaggaa

SEQ ID NO: 2415162 - RNA, 16 nt, Human
aaggcugugcucccug

SEQ ID NO: 2415163 - RNA, 22 nt, Human
aaggcuguccuuacccaucugc

SEQ ID NO: 2415164 - RNA, 20 nt, Human
guuucacugacuuagaacca

SEQ ID NO: 2415165 - RNA, 21 nt, Human
guuucacuuucacauagaugu

SEQ ID NO: 2415166 - RNA, 17 nt, Human
aaggggaauugaggaca

SEQ ID NO: 2415167 - RNA, 17 nt, Human
aagggcuguuauaaucu

SEQ ID NO: 2415168 - RNA, 18 nt, Human
aagggcuucugcacccuc

SEQ ID NO: 2415169 - RNA, 17 nt, Human
aagggcuucugcacccu

SEQ ID NO: 2415170 - RNA, 21 nt, Human
aagggcuuacacguggaggaa

SEQ ID NO: 2415171 - RNA, 20 nt, Human
aaggggacccccgcccccug

SEQ ID NO: 2415172 - RNA, 16 nt, Human
aaggggacccccgccc

SEQ ID NO: 2415173 - RNA, 15 nt, Human
aagggcuguuauaau

SEQ ID NO: 2415174 - RNA, 19 nt, Human
aagggcuagaaccuggagg

SEQ ID NO: 2415175 - RNA, 19 nt, Human
aagggcuagaaccuggaga

SEQ ID NO: 2415176 - RNA, 19 nt, Human
aaggcuguguacacugaca

SEQ ID NO: 2415177 - RNA, 22 nt, Human
aaggcugugcucccugguucug

SEQ ID NO: 2415178 - RNA, 13 nt, Human
aaggcuguugcau

SEQ ID NO: 2415179 - RNA, 23 nt, Human
aaggcuguugcaugggcuaauga

SEQ ID NO: 2415180 - RNA, 16 nt, Human
guuuggaccccagcug

SEQ ID NO: 2415181 - RNA, 15 nt, Human
guuuggaccccagcu

SEQ ID NO: 2415182 - RNA, 15 nt, Human
guuuggaaugcuucu

SEQ ID NO: 2415183 - RNA, 13 nt, Human
guuuggaaugcuu

SEQ ID NO: 2415184 - RNA, 19 nt, Human
guuuggaccccagcuggga

SEQ ID NO: 2415185 - RNA, 18 nt, Human
guuuggaccccagcuggg

SEQ ID NO: 2415186 - RNA, 17 nt, Human
guuuggaccccagcugg

SEQ ID NO: 2415187 - RNA, 13 nt, Human
guuuggagacaga

SEQ ID NO: 2415188 - RNA, 20 nt, Human
guuugcuuuguaugcacuuu

SEQ ID NO: 2415189 - RNA, 23 nt, Human
guuuggagacauuccugggcaca

SEQ ID NO: 2415190 - RNA, 13 nt, Human
guuuggagacauu

SEQ ID NO: 2415191 - RNA, 21 nt, Human
guuuggaggagcaaaggcuga

SEQ ID NO: 2415192 - RNA, 20 nt, Human
guuuggaugggagugagaca

SEQ ID NO: 2415193 - RNA, 17 nt, Human
guuuuaaaaugagaaau

SEQ ID NO: 2415194 - RNA, 12 nt, Human
guuuuaaaauua

SEQ ID NO: 2415195 - RNA, 19 nt, Human
guuuuaaacauagaaaguu

SEQ ID NO: 2415196 - RNA, 18 nt, Human
guuuggauucuuauguag

SEQ ID NO: 2415197 - RNA, 14 nt, Human
guuuuaaaauuaaa

SEQ ID NO: 2415198 - RNA, 22 nt, Human
guuuuaaauacgcacuacaugu

SEQ ID NO: 2415199 - RNA, 12 nt, Human
guuuuaaauucu

SEQ ID NO: 2415200 - RNA, 15 nt, Human
guuuuaaagugauua

SEQ ID NO: 2415201 - RNA, 19 nt, Human
guuuuaaauuuauuucaaa

SEQ ID NO: 2415202 - RNA, 22 nt, Human
guuuuaaagaccugacaccuuu

SEQ ID NO: 2415203 - RNA, 18 nt, Human
guuugcuguugauuucuu

SEQ ID NO: 2415204 - RNA, 13 nt, Human
guuugcuuauugu

SEQ ID NO: 2415205 - RNA, 14 nt, Human
guuugcuuauuguu

SEQ ID NO: 2415206 - RNA, 15 nt, Human
guuugcuuauuguuc

SEQ ID NO: 2415207 - RNA, 16 nt, Human
guuugcuuauuguucc

SEQ ID NO: 2415208 - RNA, 17 nt, Human
guuugcuuauuguucca

SEQ ID NO: 2415209 - RNA, 16 nt, Human
guuugcuucauaaaug

SEQ ID NO: 2415210 - RNA, 17 nt, Human
guuugcuucauaaauga

SEQ ID NO: 2415211 - RNA, 18 nt, Human
guuugcuuauuguuccaa

SEQ ID NO: 2415212 - RNA, 21 nt, Human
aaguaauaugcacacauuuuu

SEQ ID NO: 2415213 - RNA, 19 nt, Human
guuugcugaacaccuugug

SEQ ID NO: 2415214 - RNA, 18 nt, Human
aaguaagaaagugaagca

SEQ ID NO: 2415215 - RNA, 19 nt, Human
aaguaagaaaauauuuugu

SEQ ID NO: 2415216 - RNA, 18 nt, Human
aaguaauaugcacacauu

SEQ ID NO: 2415217 - RNA, 20 nt, Human
aaguaauaugcacacauuuu

SEQ ID NO: 2415218 - RNA, 17 nt, Human
aaguaauaugcacacau

SEQ ID NO: 2415219 - RNA, 18 nt, Human
aaguaagaaaauauuuug

SEQ ID NO: 2415220 - RNA, 16 nt, Human
aaguaagaaaauauuu

SEQ ID NO: 2415221 - RNA, 15 nt, Human
aaguaagaaaauauu

SEQ ID NO: 2415222 - RNA, 14 nt, Human
aaguaagaaaauau

SEQ ID NO: 2415223 - RNA, 13 nt, Human
aaguaagaaaaua

SEQ ID NO: 2415224 - RNA, 12 nt, Human
aaguaagaaaau

SEQ ID NO: 2415225 - RNA, 11 nt, Human
aaguaagaaaa

SEQ ID NO: 2415226 - RNA, 14 nt, Human
guuuucuguucuuu

SEQ ID NO: 2415227 - RNA, 15 nt, Human
guuuucuguucuuuc

SEQ ID NO: 2415228 - RNA, 16 nt, Human
guuuucuguucuuucu

SEQ ID NO: 2415229 - RNA, 18 nt, Human
guuuugaaugguguugua

SEQ ID NO: 2415230 - RNA, 21 nt, Human
guuuugaaggcaaaauugcaa

SEQ ID NO: 2415231 - RNA, 15 nt, Human
guuuugaaggcaaaa

SEQ ID NO: 2415232 - RNA, 17 nt, Human
guuuugacauuuuuagu

SEQ ID NO: 2415233 - RNA, 14 nt, Human
guuuugacauuuuu

SEQ ID NO: 2415234 - RNA, 16 nt, Human
guuuugacggaugauu

SEQ ID NO: 2415235 - RNA, 12 nt, Human
guuuugagcuuu

SEQ ID NO: 2415236 - RNA, 19 nt, Human
guuuugauugagaguaacu

SEQ ID NO: 2415237 - RNA, 13 nt, Human
guuuugauugaga

SEQ ID NO: 2415238 - RNA, 20 nt, Human
guuuugauuuaauguuuuca

SEQ ID NO: 2415239 - RNA, 22 nt, Human
guuuugauguuuguggccucag

SEQ ID NO: 2415240 - RNA, 23 nt, Human
guuuugauguuuguggccucaga

SEQ ID NO: 2415241 - RNA, 19 nt, Human
guuuugauaaaguaguaaa

SEQ ID NO: 2415242 - RNA, 14 nt, Human
guuuugauaaagua

SEQ ID NO: 2415243 - RNA, 23 nt, Human
guuuugagguuuccuucagacag

SEQ ID NO: 2415244 - RNA, 20 nt, Human
guuuugauaaaguaguaaaa

SEQ ID NO: 2415245 - RNA, 21 nt, Human
guuuugauguuuguggccuca

SEQ ID NO: 2415246 - RNA, 22 nt, Human
guuuuaauuccaugaaucgcuu

SEQ ID NO: 2415247 - RNA, 16 nt, Human
guuuuaauuccaugaa

SEQ ID NO: 2415248 - RNA, 14 nt, Human
guuuuaauuccaug

SEQ ID NO: 2415249 - RNA, 13 nt, Human
guuuuaauuccau

SEQ ID NO: 2415250 - RNA, 23 nt, Human
guuuuaauuccaauaugaugacu

SEQ ID NO: 2415251 - RNA, 20 nt, Human
guuuuaauuccaauaugaug

SEQ ID NO: 2415252 - RNA, 17 nt, Human
guuuuaaguuguuugca

SEQ ID NO: 2415253 - RNA, 18 nt, Human
guuuuaaguuguuugcau

SEQ ID NO: 2415254 - RNA, 22 nt, Human
guuuuaaggaugcuuguacaua

SEQ ID NO: 2415255 - RNA, 22 nt, Human
guuuuaacaauuuccuuuauau

SEQ ID NO: 2415256 - RNA, 14 nt, Human
guuuuaacaaaaac

SEQ ID NO: 2415257 - RNA, 19 nt, Human
guuuuaacuagaauuuauu

SEQ ID NO: 2415258 - RNA, 20 nt, Human
guuuuauuccuguauguugu

SEQ ID NO: 2415259 - RNA, 14 nt, Human
guuuuauuccugua

SEQ ID NO: 2415260 - RNA, 13 nt, Human
guuuuauuguguu

SEQ ID NO: 2415261 - RNA, 13 nt, Human
guuuuaugacuuc

SEQ ID NO: 2415262 - RNA, 18 nt, Human
guuuuaugacuucauuaa

SEQ ID NO: 2415263 - RNA, 22 nt, Human
guuuuaucaugacauguuauau

SEQ ID NO: 2415264 - RNA, 14 nt, Human
guuuuaucaugaca

SEQ ID NO: 2415265 - RNA, 22 nt, Human
guuuuaucacauguauguuuug

SEQ ID NO: 2415266 - RNA, 21 nt, Human
guuuuaucacauguauguuuu

SEQ ID NO: 2415267 - RNA, 20 nt, Human
guuuuaucacauguauguuu

SEQ ID NO: 2415268 - RNA, 18 nt, Human
guuuuaucacauguaugu

SEQ ID NO: 2415269 - RNA, 19 nt, Human
guuuuauauuuuuauagac

SEQ ID NO: 2415270 - RNA, 14 nt, Human
guuuuaauuuaaac

SEQ ID NO: 2415271 - RNA, 21 nt, Human
guuuuaauuuaaacaccuccu

SEQ ID NO: 2415272 - RNA, 19 nt, Human
aaguauguuagugcaaauu

SEQ ID NO: 2415273 - RNA, 18 nt, Human
aaguauguuagugcaaau

SEQ ID NO: 2415274 - RNA, 15 nt, Human
aaguauuauaccuuu

SEQ ID NO: 2415275 - RNA, 19 nt, Human
aaguauguguaaaauguga

SEQ ID NO: 2415276 - RNA, 20 nt, Human
aaguacuucuccacccugcu

SEQ ID NO: 2415277 - RNA, 19 nt, Human
aaguacuucuccacccugc

SEQ ID NO: 2415278 - RNA, 18 nt, Human
aaguacuucuccacccug

SEQ ID NO: 2415279 - RNA, 16 nt, Human
aaguacuguguacaga

SEQ ID NO: 2415280 - RNA, 22 nt, Human
aaguaauucugcugucucagcc

SEQ ID NO: 2415281 - RNA, 14 nt, Human
aaguaauuccucuc

SEQ ID NO: 2415282 - RNA, 16 nt, Human
aaguaauugugaaaaa

SEQ ID NO: 2415283 - RNA, 19 nt, Human
guuuugauuuguacugaaa

SEQ ID NO: 2415284 - RNA, 11 nt, Human
aaguaauuauc

SEQ ID NO: 2415285 - RNA, 13 nt, Human
aaguaauuaucgg

SEQ ID NO: 2415286 - RNA, 15 nt, Human
aaguaauuaucggga

SEQ ID NO: 2415287 - RNA, 22 nt, Human
aaguaauuaucgggaacagugu

SEQ ID NO: 2415288 - RNA, 23 nt, Human
aaguaauuaucgggaacaguguu

SEQ ID NO: 2415289 - RNA, 16 nt, Human
aaguacguuauuguug

SEQ ID NO: 2415290 - RNA, 15 nt, Human
aaguacguuauuguu

SEQ ID NO: 2415291 - RNA, 20 nt, Human
aaguacccguucacauuuuu

SEQ ID NO: 2415292 - RNA, 14 nt, Human
aaguacuauaauuu

SEQ ID NO: 2415293 - RNA, 17 nt, Human
aaguacuauaauuuacc

SEQ ID NO: 2415294 - RNA, 13 nt, Human
aaguacuauguau

SEQ ID NO: 2415295 - RNA, 22 nt, Human
aagucagaggauggccaguguc

SEQ ID NO: 2415296 - RNA, 21 nt, Human
aagucagaggauggccagugu

SEQ ID NO: 2415297 - RNA, 20 nt, Human
aagucagaggauggccagug

SEQ ID NO: 2415298 - RNA, 15 nt, Human
aagucagaggauggc

SEQ ID NO: 2415299 - RNA, 14 nt, Human
aagucacugcacag

SEQ ID NO: 2415300 - RNA, 16 nt, Human
aagucagacugcuggg

SEQ ID NO: 2415301 - RNA, 17 nt, Human
aagucagacugcuggga

SEQ ID NO: 2415302 - RNA, 12 nt, Human
aagucagaggau

SEQ ID NO: 2415303 - RNA, 20 nt, Human
aagucagacugcugggacug

SEQ ID NO: 2415304 - RNA, 15 nt, Human
aaguauuuuuuuauc

SEQ ID NO: 2415305 - RNA, 16 nt, Human
aagucaaaaggugccu

SEQ ID NO: 2415306 - RNA, 19 nt, Human
aagucaaaaggugccugug

SEQ ID NO: 2415307 - RNA, 23 nt, Human
aagucaaagacauucugacaucu

SEQ ID NO: 2415308 - RNA, 21 nt, Human
aagucacuggccaguggcugg

SEQ ID NO: 2415309 - RNA, 22 nt, Human
aagucacugcacagugcaucuc

SEQ ID NO: 2415310 - RNA, 15 nt, Human
aagucaaauuaauaa

SEQ ID NO: 2415311 - RNA, 19 nt, Human
aagucaaauuaauaaucuu

SEQ ID NO: 2415312 - RNA, 22 nt, Human
aagucaaaguaaaacuugcugc

SEQ ID NO: 2415313 - RNA, 20 nt, Human
aagucaaagcaaggaaacua

SEQ ID NO: 2415314 - RNA, 14 nt, Human
aagucaaaguaaaa

SEQ ID NO: 2415315 - RNA, 16 nt, Human
aaguauuauaccuuuu

SEQ ID NO: 2415316 - RNA, 19 nt, Human
aaguauuauaccuuuuuua

SEQ ID NO: 2415317 - RNA, 13 nt, Human
aaguauuauaaau

SEQ ID NO: 2415318 - RNA, 13 nt, Human
aaguauuaucaga

SEQ ID NO: 2415319 - RNA, 21 nt, Human
aaguauucuuauuuaaugaaa

SEQ ID NO: 2415320 - RNA, 18 nt, Human
aaguauugcaucuguaua

SEQ ID NO: 2415321 - RNA, 17 nt, Human
aaguauuauaaauuaug

SEQ ID NO: 2415322 - RNA, 15 nt, Human
aaguauuaugucucu

SEQ ID NO: 2415323 - RNA, 22 nt, Human
aaguauugcaucuguauaagua

SEQ ID NO: 2415324 - RNA, 19 nt, Human
aaguauugcaucuguauaa

SEQ ID NO: 2415325 - RNA, 23 nt, Human
aaguauucuuauuuaaugaaaga

SEQ ID NO: 2415326 - RNA, 15 nt, Human
aaguauuuugcugga

SEQ ID NO: 2415327 - RNA, 22 nt, Human
gucuaugggacucaaugcacug

SEQ ID NO: 2415328 - RNA, 22 nt, Human
gucuauguaaaugcaucugucc

SEQ ID NO: 2415329 - RNA, 19 nt, Human
gucuaguuaacauuucaag

SEQ ID NO: 2415330 - RNA, 12 nt, Human
gucuauucauua

SEQ ID NO: 2415331 - RNA, 13 nt, Human
gucuauucagcuu

SEQ ID NO: 2415332 - RNA, 13 nt, Human
gucuauucuaguc

SEQ ID NO: 2415333 - RNA, 10 nt, Human
gucuauuuaa

SEQ ID NO: 2415334 - RNA, 17 nt, Human
gucuauucuccagcuga

SEQ ID NO: 2415335 - RNA, 18 nt, Human
gucgcucugcuggccugg

SEQ ID NO: 2415336 - RNA, 18 nt, Human
gucgcgcugccugugugg

SEQ ID NO: 2415337 - RNA, 20 nt, Human
gucgcucugcuggccuggcc

SEQ ID NO: 2415338 - RNA, 19 nt, Human
gucuagauggcuccucuca

SEQ ID NO: 2415339 - RNA, 20 nt, Human
gucuagauggcuccucucag

SEQ ID NO: 2415340 - RNA, 21 nt, Human
gucuagauggcuccucucagu

SEQ ID NO: 2415341 - RNA, 12 nt, Human
gucuagggagag

SEQ ID NO: 2415342 - RNA, 14 nt, Human
gucuagggagagac

SEQ ID NO: 2415343 - RNA, 23 nt, Human
gucuaggcaggaccuguggccaa

SEQ ID NO: 2415344 - RNA, 21 nt, Human
gucuaggagcugggaggaaaa

SEQ ID NO: 2415345 - RNA, 13 nt, Human
gucuaggagcugg

SEQ ID NO: 2415346 - RNA, 19 nt, Human
gucuagcagagcaggggca

SEQ ID NO: 2415347 - RNA, 16 nt, Human
gucuaccugaggggcc

SEQ ID NO: 2415348 - RNA, 15 nt, Human
gucuaccugaggggc

SEQ ID NO: 2415349 - RNA, 13 nt, Human
gucuaccugaggg

SEQ ID NO: 2415350 - RNA, 14 nt, Human
gucuaccugagggg

SEQ ID NO: 2415351 - RNA, 20 nt, Human
gucgccuuagcauguuugcu

SEQ ID NO: 2415352 - RNA, 18 nt, Human
gucgccuuagcauguuug

SEQ ID NO: 2415353 - RNA, 17 nt, Human
gucgccuuagcauguuu

SEQ ID NO: 2415354 - RNA, 12 nt, Human
gucgccucugca

SEQ ID NO: 2415355 - RNA, 19 nt, Human
gucgccaccuggcauuccu

SEQ ID NO: 2415356 - RNA, 14 nt, Human
gucgaugaacuauu

SEQ ID NO: 2415357 - RNA, 15 nt, Human
gucgcuccugcccac

SEQ ID NO: 2415358 - RNA, 11 nt, Human
gucgcuccugc

SEQ ID NO: 2415359 - RNA, 21 nt, Human
gucgcucaugugugcaacagg

SEQ ID NO: 2415360 - RNA, 16 nt, Human
gucgcucaugugugca

SEQ ID NO: 2415361 - RNA, 17 nt, Human
gucgcgcugccugugug

SEQ ID NO: 2415362 - RNA, 16 nt, Human
gucgcgcugccugugu

SEQ ID NO: 2415363 - RNA, 13 nt, Human
gucgcgcugccug

SEQ ID NO: 2415364 - RNA, 12 nt, Human
gucgcgcugccu

SEQ ID NO: 2415365 - RNA, 13 nt, Human
gucgcgcucagca

SEQ ID NO: 2415366 - RNA, 22 nt, Human
guccuuuucagaagugagcuuu

SEQ ID NO: 2415367 - RNA, 15 nt, Human
guccuuuucagaagu

SEQ ID NO: 2415368 - RNA, 14 nt, Human
guccuuucccucca

SEQ ID NO: 2415369 - RNA, 15 nt, Human
guccuuucccuccac

SEQ ID NO: 2415370 - RNA, 15 nt, Human
guccuuuucacuaca

SEQ ID NO: 2415371 - RNA, 18 nt, Human
guccuuuucacuacacca

SEQ ID NO: 2415372 - RNA, 19 nt, Human
guccuggagcagaccaccc

SEQ ID NO: 2415373 - RNA, 22 nt, Human
guccuuuccaaggcuucuccaa

SEQ ID NO: 2415374 - RNA, 20 nt, Human
guccuuuccaaggcuucucc

SEQ ID NO: 2415375 - RNA, 18 nt, Human
guccuuuccaaggcuucu

SEQ ID NO: 2415376 - RNA, 22 nt, Human
guccuuuauguggaaaacagaa

SEQ ID NO: 2415377 - RNA, 11 nt, Human
guccuuucccu

SEQ ID NO: 2415378 - RNA, 13 nt, Human
guccuuucccucc

SEQ ID NO: 2415379 - RNA, 16 nt, Human
gucgaggacagggagg

SEQ ID NO: 2415380 - RNA, 12 nt, Human
gucgaggcagga

SEQ ID NO: 2415381 - RNA, 19 nt, Human
gucgaggggcucucagcuc

SEQ ID NO: 2415382 - RNA, 16 nt, Human
gucgaggggcucucag

SEQ ID NO: 2415383 - RNA, 15 nt, Human
gucgaggggcucuca

SEQ ID NO: 2415384 - RNA, 14 nt, Human
gucgaggggcucuc

SEQ ID NO: 2415385 - RNA, 14 nt, Human
gucgauagagcugu

SEQ ID NO: 2415386 - RNA, 14 nt, Human
gucgauaaucagag

SEQ ID NO: 2415387 - RNA, 15 nt, Human
guccugaccacccuc

SEQ ID NO: 2415388 - RNA, 14 nt, Human
guccugaccacccu

SEQ ID NO: 2415389 - RNA, 13 nt, Human
guccugaccaccc

SEQ ID NO: 2415390 - RNA, 20 nt, Human
guccuggacaccgggccagu

SEQ ID NO: 2415391 - RNA, 21 nt, Human
guccuggaagcgcgagggccu

SEQ ID NO: 2415392 - RNA, 16 nt, Human
guccuggcaugggaau

SEQ ID NO: 2415393 - RNA, 12 nt, Human
guccugaccacc

SEQ ID NO: 2415394 - RNA, 23 nt, Human
guccugaagaggcgggccagcca

SEQ ID NO: 2415395 - RNA, 19 nt, Human
guccugcugcaguugccag

SEQ ID NO: 2415396 - RNA, 22 nt, Human
guccugaagaggcgggccagcc

SEQ ID NO: 2415397 - RNA, 21 nt, Human
guccugaagaggcgggccagc

SEQ ID NO: 2415398 - RNA, 20 nt, Human
guccugaagaggcgggccag

SEQ ID NO: 2415399 - RNA, 17 nt, Human
guccugaagaggcgggc

SEQ ID NO: 2415400 - RNA, 16 nt, Human
guccugaagaggcggg

SEQ ID NO: 2415401 - RNA, 14 nt, Human
guccucuuuucuga

SEQ ID NO: 2415402 - RNA, 18 nt, Human
guccucuccaccuagugg

SEQ ID NO: 2415403 - RNA, 14 nt, Human
guccucuccaccua

SEQ ID NO: 2415404 - RNA, 13 nt, Human
guccucuccaccu

SEQ ID NO: 2415405 - RNA, 18 nt, Human
guccucuugccuccugga

SEQ ID NO: 2415406 - RNA, 20 nt, Human
guccucuccaccuaguggcu

SEQ ID NO: 2415407 - RNA, 15 nt, Human
guccucuuucaaagg

SEQ ID NO: 2415408 - RNA, 17 nt, Human
guccgguguccuuuuca

SEQ ID NO: 2415409 - RNA, 14 nt, Human
gucccuugagaccu

SEQ ID NO: 2415410 - RNA, 24 nt, Human
guccgguguccuuuucacuacacc

SEQ ID NO: 2415411 - RNA, 19 nt, Human
gucccuuccccucccuggc

SEQ ID NO: 2415412 - RNA, 20 nt, Human
gucccuuccccucccuggcu

SEQ ID NO: 2415413 - RNA, 22 nt, Human
gucccuuccccucccuggcucc

SEQ ID NO: 2415414 - RNA, 19 nt, Human
gucccuucucuuaauuuaa

SEQ ID NO: 2415415 - RNA, 13 nt, Human
aacagucucagga

SEQ ID NO: 2415416 - RNA, 18 nt, Human
aacaguccauugaaaggg

SEQ ID NO: 2415417 - RNA, 19 nt, Human
guccgugggacggugccca

SEQ ID NO: 2415418 - RNA, 15 nt, Human
guccgugcugacagc

SEQ ID NO: 2415419 - RNA, 19 nt, Human
guccgugcugacagcugcu

SEQ ID NO: 2415420 - RNA, 20 nt, Human
guccgugcugacagcugcuc

SEQ ID NO: 2415421 - RNA, 21 nt, Human
guccgugcugacagcugcucc

SEQ ID NO: 2415422 - RNA, 13 nt, Human
aacagucauuuaa

SEQ ID NO: 2415423 - RNA, 22 nt, Human
guccgugcugacagcugcuccu

SEQ ID NO: 2415424 - RNA, 17 nt, Human
aacagucaaaacagaga

SEQ ID NO: 2415425 - RNA, 14 nt, Human
aacauaaaauacaa

SEQ ID NO: 2415426 - RNA, 14 nt, Human
aacagucucaggaa

SEQ ID NO: 2415427 - RNA, 14 nt, Human
aacagucauuuaaa

SEQ ID NO: 2415428 - RNA, 21 nt, Human
aacaguuuuuuaugcuaauca

SEQ ID NO: 2415429 - RNA, 12 nt, Human
aacauauauaac

SEQ ID NO: 2415430 - RNA, 21 nt, Human
aacauauaauguuguuauuua

SEQ ID NO: 2415431 - RNA, 18 nt, Human
aacauauaauguuguuau

SEQ ID NO: 2415432 - RNA, 13 nt, Human
aacauauaauguu

SEQ ID NO: 2415433 - RNA, 15 nt, Human
aacauauaaagcacu

SEQ ID NO: 2415434 - RNA, 17 nt, Human
aacauaaauaaaaugac

SEQ ID NO: 2415435 - RNA, 14 nt, Human
aacauaaauaaaau

SEQ ID NO: 2415436 - RNA, 18 nt, Human
aacauugguucuuguauu

SEQ ID NO: 2415437 - RNA, 19 nt, Human
aacauugguucuuguauua

SEQ ID NO: 2415438 - RNA, 22 nt, Human
aacauugguucuuguauuaaga

SEQ ID NO: 2415439 - RNA, 23 nt, Human
aacauugguucuuguauuaagaa

SEQ ID NO: 2415440 - RNA, 16 nt, Human
aacauugguucuugua

SEQ ID NO: 2415441 - RNA, 20 nt, Human
aacauugccuauuucagugg

SEQ ID NO: 2415442 - RNA, 16 nt, Human
aacauugccuauuuca

SEQ ID NO: 2415443 - RNA, 14 nt, Human
aacauugccuauuu

SEQ ID NO: 2415444 - RNA, 22 nt, Human
aacauugcauauaacuuauauu

SEQ ID NO: 2415445 - RNA, 13 nt, Human
guccuccucugug

SEQ ID NO: 2415446 - RNA, 14 nt, Human
guccuccucuguga

SEQ ID NO: 2415447 - RNA, 23 nt, Human
guccuccugguggguccaggggc

SEQ ID NO: 2415448 - RNA, 22 nt, Human
guccuccugguggguccagggg

SEQ ID NO: 2415449 - RNA, 21 nt, Human
guccuccugguggguccaggg

SEQ ID NO: 2415450 - RNA, 12 nt, Human
guccucuccacc

SEQ ID NO: 2415451 - RNA, 17 nt, Human
guccucguagccaucuc

SEQ ID NO: 2415452 - RNA, 17 nt, Human
guccuccucaccucaug

SEQ ID NO: 2415453 - RNA, 15 nt, Human
guccuccucaccuca

SEQ ID NO: 2415454 - RNA, 21 nt, Human
guccuccucaccucaugccca

SEQ ID NO: 2415455 - RNA, 13 nt, Human
guccuccucaccu

SEQ ID NO: 2415456 - RNA, 18 nt, Human
aacauugggaaaucuuau

SEQ ID NO: 2415457 - RNA, 22 nt, Human
guccuccuaccgaaaccuugcc

SEQ ID NO: 2415458 - RNA, 12 nt, Human
guccuccucugu

SEQ ID NO: 2415459 - RNA, 22 nt, Human
guccuccucggaucaccgagag

SEQ ID NO: 2415460 - RNA, 21 nt, Human
guccuccucggaucaccgaga

SEQ ID NO: 2415461 - RNA, 13 nt, Human
aacaugucuccua

SEQ ID NO: 2415462 - RNA, 15 nt, Human
aacauguacuguucu

SEQ ID NO: 2415463 - RNA, 13 nt, Human
aacauguguuuua

SEQ ID NO: 2415464 - RNA, 19 nt, Human
aacaugucuccuauccugg

SEQ ID NO: 2415465 - RNA, 13 nt, Human
aacauguguacuu

SEQ ID NO: 2415466 - RNA, 15 nt, Human
aacauguaggaagua

SEQ ID NO: 2415467 - RNA, 22 nt, Human
aacauauaauguuguuauuuaa

SEQ ID NO: 2415468 - RNA, 17 nt, Human
aacauguauaauauuuu

SEQ ID NO: 2415469 - RNA, 10 nt, Human
aacauuccau

SEQ ID NO: 2415470 - RNA, 13 nt, Human
aacauuccauccu

SEQ ID NO: 2415471 - RNA, 14 nt, Human
aacauuccauccuu

SEQ ID NO: 2415472 - RNA, 23 nt, Human
aacauuccauccuugagucaaaa

SEQ ID NO: 2415473 - RNA, 23 nt, Human
aacauuauuuauucagcuucauu

SEQ ID NO: 2415474 - RNA, 16 nt, Human
aacauuauuuauucag

SEQ ID NO: 2415475 - RNA, 18 nt, Human
aacacuguucucugcccu

SEQ ID NO: 2415476 - RNA, 17 nt, Human
aacacuguucucugccc

SEQ ID NO: 2415477 - RNA, 16 nt, Human
aacacuguucucugcc

SEQ ID NO: 2415478 - RNA, 22 nt, Human
aacacuggugugaccugagggc

SEQ ID NO: 2415479 - RNA, 20 nt, Human
aacacuggugugaccugagg

SEQ ID NO: 2415480 - RNA, 17 nt, Human
aacacuggugugaccug

SEQ ID NO: 2415481 - RNA, 23 nt, Human
aacacugguggaggauggaaagg

SEQ ID NO: 2415482 - RNA, 23 nt, Human
gucauuuauauagauuauaacuu

SEQ ID NO: 2415483 - RNA, 14 nt, Human
gucauuuauaaaac

SEQ ID NO: 2415484 - RNA, 19 nt, Human
aacacuguucucugcccuc

SEQ ID NO: 2415485 - RNA, 15 nt, Human
gucauuucauuuccu

SEQ ID NO: 2415486 - RNA, 17 nt, Human
gucauuugagcagggcu

SEQ ID NO: 2415487 - RNA, 16 nt, Human
aacacuauuuuaugca

SEQ ID NO: 2415488 - RNA, 21 nt, Human
aacacucacauuuauucugcu

SEQ ID NO: 2415489 - RNA, 13 nt, Human
aacacuauuuuau

SEQ ID NO: 2415490 - RNA, 16 nt, Human
aacacuauguuuauuu

SEQ ID NO: 2415491 - RNA, 21 nt, Human
aacacuauauggcagugucuu

SEQ ID NO: 2415492 - RNA, 17 nt, Human
aacacucaagaagcagg

SEQ ID NO: 2415493 - RNA, 19 nt, Human
aacacagcugagagacuuu

SEQ ID NO: 2415494 - RNA, 15 nt, Human
aacacaggcaaaauc

SEQ ID NO: 2415495 - RNA, 19 nt, Human
aacacagcgagacuccguc

SEQ ID NO: 2415496 - RNA, 14 nt, Human
aacacucaugcuga

SEQ ID NO: 2415497 - RNA, 19 nt, Human
aacacuggcaacaacaaag

SEQ ID NO: 2415498 - RNA, 21 nt, Human
aacacugggagaaaugaaaaa

SEQ ID NO: 2415499 - RNA, 14 nt, Human
aacacuggggcugg

SEQ ID NO: 2415500 - RNA, 15 nt, Human
aacacuggccccuag

SEQ ID NO: 2415501 - RNA, 16 nt, Human
aacacucaugcugaaa

SEQ ID NO: 2415502 - RNA, 15 nt, Human
aacacucaugcugaa

SEQ ID NO: 2415503 - RNA, 12 nt, Human
aacacuggcccc

SEQ ID NO: 2415504 - RNA, 13 nt, Human
aacacuggccccu

SEQ ID NO: 2415505 - RNA, 17 nt, Human
aacacugggggagggga

SEQ ID NO: 2415506 - RNA, 18 nt, Human
aacacuggggcuggcaca

SEQ ID NO: 2415507 - RNA, 15 nt, Human
aacacuggggcuggc

SEQ ID NO: 2415508 - RNA, 16 nt, Human
aacacugggggagggg

SEQ ID NO: 2415509 - RNA, 18 nt, Human
aacacagcaagggugaug

SEQ ID NO: 2415510 - RNA, 15 nt, Human
aacacaagcuggaag

SEQ ID NO: 2415511 - RNA, 12 nt, Human
aacacacagaca

SEQ ID NO: 2415512 - RNA, 16 nt, Human
aacacaccaggcugug

SEQ ID NO: 2415513 - RNA, 15 nt, Human
aacacaccaggcugu

SEQ ID NO: 2415514 - RNA, 20 nt, Human
aacacagcaagggugauggg

SEQ ID NO: 2415515 - RNA, 16 nt, Human
aacacagcauguguau

SEQ ID NO: 2415516 - RNA, 18 nt, Human
aacacagcauguguauuu

SEQ ID NO: 2415517 - RNA, 17 nt, Human
aacacaagccacagaag

SEQ ID NO: 2415518 - RNA, 16 nt, Human
aacacaagccacagaa

SEQ ID NO: 2415519 - RNA, 14 nt, Human
aacacaagccacag

SEQ ID NO: 2415520 - RNA, 16 nt, Human
aacacaagcaaaaaaa

SEQ ID NO: 2415521 - RNA, 13 nt, Human
aacacaagcaaaa

SEQ ID NO: 2415522 - RNA, 12 nt, Human
aacacaagcaaa

SEQ ID NO: 2415523 - RNA, 14 nt, Human
aacacacaaaggua

SEQ ID NO: 2415524 - RNA, 18 nt, Human
aacacaagcuggaagcac

SEQ ID NO: 2415525 - RNA, 16 nt, Human
aacacaaguccuguga

SEQ ID NO: 2415526 - RNA, 16 nt, Human
aaauuugaagaaugaa

SEQ ID NO: 2415527 - RNA, 10 nt, Human
aaauuugaau

SEQ ID NO: 2415528 - RNA, 19 nt, Human
aaauuucuaaaucuccaaa

SEQ ID NO: 2415529 - RNA, 24 nt, Human
gucaguguccaaagcagggucugg

SEQ ID NO: 2415530 - RNA, 14 nt, Human
aaauuucuggaccu

SEQ ID NO: 2415531 - RNA, 19 nt, Human
aacacaaacgggcucagca

SEQ ID NO: 2415532 - RNA, 13 nt, Human
aacacaaacugua

SEQ ID NO: 2415533 - RNA, 20 nt, Human
aaauuugaauggguccauuu

SEQ ID NO: 2415534 - RNA, 15 nt, Human
aacacaaacuguaaa

SEQ ID NO: 2415535 - RNA, 16 nt, Human
aacacaaacuguaaau

SEQ ID NO: 2415536 - RNA, 19 nt, Human
aacacaaacuguaaauaaa

SEQ ID NO: 2415537 - RNA, 17 nt, Human
aacacaaacccccacuc

SEQ ID NO: 2415538 - RNA, 22 nt, Human
guccaugaagauguagaggaga

SEQ ID NO: 2415539 - RNA, 23 nt, Human
guccaugaagauguagaggagaa

SEQ ID NO: 2415540 - RNA, 20 nt, Human
guccaaccuaaccccuuucc

SEQ ID NO: 2415541 - RNA, 21 nt, Human
guccaaccuaaccccuuuccu

SEQ ID NO: 2415542 - RNA, 20 nt, Human
guccaacccgaggcccgcau

SEQ ID NO: 2415543 - RNA, 14 nt, Human
guccaaccuaaccc

SEQ ID NO: 2415544 - RNA, 17 nt, Human
guccaaccuaaccccuu

SEQ ID NO: 2415545 - RNA, 18 nt, Human
guccaaauguuuacaggg

SEQ ID NO: 2415546 - RNA, 20 nt, Human
guccaaauaaaaacuaaauu

SEQ ID NO: 2415547 - RNA, 22 nt, Human
guccaaauguccuccagaagcc

SEQ ID NO: 2415548 - RNA, 18 nt, Human
guccaaaagauugcugaa

SEQ ID NO: 2415549 - RNA, 21 nt, Human
guccaaacugccuaagcccuc

SEQ ID NO: 2415550 - RNA, 14 nt, Human
guccaaacugccua

SEQ ID NO: 2415551 - RNA, 19 nt, Human
gucauuugagcagggcuca

SEQ ID NO: 2415552 - RNA, 17 nt, Human
guccaaagcagggucug

SEQ ID NO: 2415553 - RNA, 14 nt, Human
guccaaaggaggcu

SEQ ID NO: 2415554 - RNA, 18 nt, Human
guccaaauaaaaacuaaa

SEQ ID NO: 2415555 - RNA, 15 nt, Human
guccaaauaaaaacu

SEQ ID NO: 2415556 - RNA, 13 nt, Human
guccaaauaaaaa

SEQ ID NO: 2415557 - RNA, 11 nt, Human
guccaaauaaa

SEQ ID NO: 2415558 - RNA, 16 nt, Human
guccaaaggaggcugg

SEQ ID NO: 2415559 - RNA, 20 nt, Human
guccaaaggaggcuggcagg

SEQ ID NO: 2415560 - RNA, 18 nt, Human
guccccaccgcagacagg

SEQ ID NO: 2415561 - RNA, 20 nt, Human
gucccaccccacacacgcca

SEQ ID NO: 2415562 - RNA, 14 nt, Human
guccccaccuggga

SEQ ID NO: 2415563 - RNA, 20 nt, Human
gucccaccaugcagugcccc

SEQ ID NO: 2415564 - RNA, 22 nt, Human
guccccagacuccaccaagccu

SEQ ID NO: 2415565 - RNA, 22 nt, Human
guccccaccgcagacaggacca

SEQ ID NO: 2415566 - RNA, 15 nt, Human
gucccaccccacaca

SEQ ID NO: 2415567 - RNA, 23 nt, Human
gucccaaggaaagccccagcacu

SEQ ID NO: 2415568 - RNA, 17 nt, Human
gucccacacuggugacu

SEQ ID NO: 2415569 - RNA, 19 nt, Human
gucccugguggcagcucac

SEQ ID NO: 2415570 - RNA, 19 nt, Human
gucccuguuuucugagccc

SEQ ID NO: 2415571 - RNA, 18 nt, Human
gucccuguuuucugagcc

SEQ ID NO: 2415572 - RNA, 17 nt, Human
gucccuguuuucugagc

SEQ ID NO: 2415573 - RNA, 15 nt, Human
gucccuguuuucuga

SEQ ID NO: 2415574 - RNA, 15 nt, Human
gucccugugccuaac

SEQ ID NO: 2415575 - RNA, 17 nt, Human
gucccuaaagaaaaaaa

SEQ ID NO: 2415576 - RNA, 18 nt, Human
gucccugguggcagcuca

SEQ ID NO: 2415577 - RNA, 15 nt, Human
gucccuaauaaagcu

SEQ ID NO: 2415578 - RNA, 15 nt, Human
gucccuaaagaaaaa

SEQ ID NO: 2415579 - RNA, 21 nt, Human
gucccgugcagcuucuguccu

SEQ ID NO: 2415580 - RNA, 23 nt, Human
gucccgggguccuguggcaggca

SEQ ID NO: 2415581 - RNA, 19 nt, Human
gucccgucaggacguugag

SEQ ID NO: 2415582 - RNA, 19 nt, Human
gucccuuacgugaguccug

SEQ ID NO: 2415583 - RNA, 18 nt, Human
gucccuuacgugaguccu

SEQ ID NO: 2415584 - RNA, 18 nt, Human
gucccuuccacaccccca

SEQ ID NO: 2415585 - RNA, 20 nt, Human
gucccuguuuucugagcccg

SEQ ID NO: 2415586 - RNA, 17 nt, Human
gucccuucacauaguuu

SEQ ID NO: 2415587 - RNA, 22 nt, Human
gucccuuccacacccccacccc

SEQ ID NO: 2415588 - RNA, 20 nt, Human
gucccuuccacacccccacc

SEQ ID NO: 2415589 - RNA, 12 nt, Human
gucccuuccccu

SEQ ID NO: 2415590 - RNA, 13 nt, Human
gucccuuccccuc

SEQ ID NO: 2415591 - RNA, 14 nt, Human
gucccuuccccucc

SEQ ID NO: 2415592 - RNA, 17 nt, Human
gucccuuccccucccug

SEQ ID NO: 2415593 - RNA, 18 nt, Human
gucccuuccccucccugg

SEQ ID NO: 2415594 - RNA, 22 nt, Human
guccccuguuuguuucugaaag

SEQ ID NO: 2415595 - RNA, 12 nt, Human
gucccuaauaaa

SEQ ID NO: 2415596 - RNA, 21 nt, Human
gucccgggguccuguggcagg

SEQ ID NO: 2415597 - RNA, 20 nt, Human
gucccgggguccuguggcag

SEQ ID NO: 2415598 - RNA, 19 nt, Human
gucccgggguccuguggca

SEQ ID NO: 2415599 - RNA, 16 nt, Human
gucccgggguccugug

SEQ ID NO: 2415600 - RNA, 14 nt, Human
gucccgggguccug

SEQ ID NO: 2415601 - RNA, 15 nt, Human
gucccggggcuccac

SEQ ID NO: 2415602 - RNA, 21 nt, Human
guccccucuugccccaacccc

SEQ ID NO: 2415603 - RNA, 16 nt, Human
guccccucuugcccca

SEQ ID NO: 2415604 - RNA, 15 nt, Human
guccccucuugcccc

SEQ ID NO: 2415605 - RNA, 23 nt, Human
guccccucuugccccaaccccca

SEQ ID NO: 2415606 - RNA, 18 nt, Human
guccccuguuuguuucug

SEQ ID NO: 2415607 - RNA, 19 nt, Human
guccccucccaucugggag

SEQ ID NO: 2415608 - RNA, 17 nt, Human
guccccucccaucuggg

SEQ ID NO: 2415609 - RNA, 16 nt, Human
guccccucccaucugg

SEQ ID NO: 2415610 - RNA, 22 nt, Human
guccccuccccggcccuaccag

SEQ ID NO: 2415611 - RNA, 16 nt, Human
guccccuccccggccc

SEQ ID NO: 2415612 - RNA, 13 nt, Human
guccccucuugcc

SEQ ID NO: 2415613 - RNA, 15 nt, Human
guccccaccugggac

SEQ ID NO: 2415614 - RNA, 16 nt, Human
gucacugagacagccc

SEQ ID NO: 2415615 - RNA, 15 nt, Human
gucacugagacagcc

SEQ ID NO: 2415616 - RNA, 15 nt, Human
gucacugaaggccug

SEQ ID NO: 2415617 - RNA, 20 nt, Human
gucacucuuccugcaaggac

SEQ ID NO: 2415618 - RNA, 19 nt, Human
gucacucuuccugcaagga

SEQ ID NO: 2415619 - RNA, 14 nt, Human
gucacugagacagc

SEQ ID NO: 2415620 - RNA, 23 nt, Human
gucacucuggcagcucagagagg

SEQ ID NO: 2415621 - RNA, 16 nt, Human
gucacauucaggaaga

SEQ ID NO: 2415622 - RNA, 17 nt, Human
gucaccaagcucacagu

SEQ ID NO: 2415623 - RNA, 14 nt, Human
gucacauucaggaa

SEQ ID NO: 2415624 - RNA, 15 nt, Human
gucaccaagcccagu

SEQ ID NO: 2415625 - RNA, 12 nt, Human
gucaccaagccc

SEQ ID NO: 2415626 - RNA, 23 nt, Human
gucacugagacagcccgggcucu

SEQ ID NO: 2415627 - RNA, 21 nt, Human
gucacugagacagcccgggcu

SEQ ID NO: 2415628 - RNA, 18 nt, Human
gucacugagacagcccgg

SEQ ID NO: 2415629 - RNA, 17 nt, Human
gucacugagacagcccg

SEQ ID NO: 2415630 - RNA, 14 nt, Human
gucacugcaggcac

SEQ ID NO: 2415631 - RNA, 23 nt, Human
gucacugcacagugcaucucagc

SEQ ID NO: 2415632 - RNA, 20 nt, Human
gucacugcacagugcaucuc

SEQ ID NO: 2415633 - RNA, 21 nt, Human
gucacugaaggccuggcccac

SEQ ID NO: 2415634 - RNA, 10 nt, Human
gucacugcuu

SEQ ID NO: 2415635 - RNA, 12 nt, Human
gucacugccucu

SEQ ID NO: 2415636 - RNA, 20 nt, Human
gucacugccucucccuggcc

SEQ ID NO: 2415637 - RNA, 22 nt, Human
gucacugccucucccuggcccu

SEQ ID NO: 2415638 - RNA, 23 nt, Human
gucacugccucucccuggcccuc

SEQ ID NO: 2415639 - RNA, 20 nt, Human
gucacugccauggaggcaca

SEQ ID NO: 2415640 - RNA, 16 nt, Human
gucacugccauggagg

SEQ ID NO: 2415641 - RNA, 13 nt, Human
gucacagggccaa

SEQ ID NO: 2415642 - RNA, 12 nt, Human
gucacagggcca

SEQ ID NO: 2415643 - RNA, 18 nt, Human
gucacagggccuggggag

SEQ ID NO: 2415644 - RNA, 20 nt, Human
gucacagggcaugccccggc

SEQ ID NO: 2415645 - RNA, 13 nt, Human
gucacaugaaaca

SEQ ID NO: 2415646 - RNA, 15 nt, Human
gucacaucacaggac

SEQ ID NO: 2415647 - RNA, 15 nt, Human
gucacagggccaacu

SEQ ID NO: 2415648 - RNA, 14 nt, Human
gucacauacaauua

SEQ ID NO: 2415649 - RNA, 23 nt, Human
gucacauggccuaugcacauaug

SEQ ID NO: 2415650 - RNA, 21 nt, Human
gucacauggccuaugcacaua

SEQ ID NO: 2415651 - RNA, 22 nt, Human
gucaccaaaucagcugcuacua

SEQ ID NO: 2415652 - RNA, 16 nt, Human
gucacaggagggaggg

SEQ ID NO: 2415653 - RNA, 19 nt, Human
gucacaggacucugccucc

SEQ ID NO: 2415654 - RNA, 12 nt, Human
gucacaggcagg

SEQ ID NO: 2415655 - RNA, 20 nt, Human
gucacaggaaguagaggagg

SEQ ID NO: 2415656 - RNA, 18 nt, Human
gucacaggacucugccuc

SEQ ID NO: 2415657 - RNA, 17 nt, Human
gucacaggacucugccu

SEQ ID NO: 2415658 - RNA, 22 nt, Human
gucaauuacaggaaguacugga

SEQ ID NO: 2415659 - RNA, 22 nt, Human
gucaauuucccugacuccucua

SEQ ID NO: 2415660 - RNA, 20 nt, Human
aaauuuaauauagcuauuuu

SEQ ID NO: 2415661 - RNA, 23 nt, Human
aaauuuaaaggguguacuuauau

SEQ ID NO: 2415662 - RNA, 12 nt, Human
aaauuuaagcau

SEQ ID NO: 2415663 - RNA, 13 nt, Human
aaauuuaagcauu

SEQ ID NO: 2415664 - RNA, 21 nt, Human
aaauuuaagugcguguguaga

SEQ ID NO: 2415665 - RNA, 16 nt, Human
aaauuuaagugcgugu

SEQ ID NO: 2415666 - RNA, 23 nt, Human
aaauuuaaguaucuuuuuucaaa

SEQ ID NO: 2415667 - RNA, 15 nt, Human
aaauuuaaguaucuu

SEQ ID NO: 2415668 - RNA, 14 nt, Human
aaauuuaagcauug

SEQ ID NO: 2415669 - RNA, 15 nt, Human
aaauuuaagcauugu

SEQ ID NO: 2415670 - RNA, 16 nt, Human
aaauuuaagcauuguu

SEQ ID NO: 2415671 - RNA, 17 nt, Human
aaauuuaagcauuguuu

SEQ ID NO: 2415672 - RNA, 13 nt, Human
gucacaggaagua

SEQ ID NO: 2415673 - RNA, 15 nt, Human
gucacaggaaguaga

SEQ ID NO: 2415674 - RNA, 21 nt, Human
gucaauuuuguuauguauauu

SEQ ID NO: 2415675 - RNA, 22 nt, Human
gucaauuucuguguugccaagc

SEQ ID NO: 2415676 - RNA, 17 nt, Human
gucaauuucuguguugc

SEQ ID NO: 2415677 - RNA, 17 nt, Human
gucaggggcagcugacc

SEQ ID NO: 2415678 - RNA, 14 nt, Human
gucaggggcagcug

SEQ ID NO: 2415679 - RNA, 20 nt, Human
gucagggcccaagucccugu

SEQ ID NO: 2415680 - RNA, 21 nt, Human
gucagggcccaagucccuguu

SEQ ID NO: 2415681 - RNA, 19 nt, Human
gucagggcccaagucccug

SEQ ID NO: 2415682 - RNA, 15 nt, Human
gucagggcccaaguc

SEQ ID NO: 2415683 - RNA, 14 nt, Human
gucagggcccaagu

SEQ ID NO: 2415684 - RNA, 12 nt, Human
gucagggcccaa

SEQ ID NO: 2415685 - RNA, 18 nt, Human
gucagggaccccugcccu

SEQ ID NO: 2415686 - RNA, 15 nt, Human
gucaggagagcagcg

SEQ ID NO: 2415687 - RNA, 14 nt, Human
gucaggagagcagc

SEQ ID NO: 2415688 - RNA, 12 nt, Human
gucaggagagca

SEQ ID NO: 2415689 - RNA, 17 nt, Human
gucaggaaggaugagca

SEQ ID NO: 2415690 - RNA, 18 nt, Human
gucaggaaggaugagcau

SEQ ID NO: 2415691 - RNA, 15 nt, Human
gucaggaagaaauca

SEQ ID NO: 2415692 - RNA, 17 nt, Human
gucaggaacagaaggau

SEQ ID NO: 2415693 - RNA, 15 nt, Human
gucaggaacagaagg

SEQ ID NO: 2415694 - RNA, 16 nt, Human
gucaggaacagaagga

SEQ ID NO: 2415695 - RNA, 22 nt, Human
gucagguggggcagcuugaggg

SEQ ID NO: 2415696 - RNA, 18 nt, Human
gucagguggggcagcuug

SEQ ID NO: 2415697 - RNA, 17 nt, Human
gucagguggggcagcuu

SEQ ID NO: 2415698 - RNA, 16 nt, Human
gucagguggggcagcu

SEQ ID NO: 2415699 - RNA, 13 nt, Human
aaauuucuaaauc

SEQ ID NO: 2415700 - RNA, 15 nt, Human
aaauuucuaaaucuc

SEQ ID NO: 2415701 - RNA, 12 nt, Human
aaauuucuaaau

SEQ ID NO: 2415702 - RNA, 23 nt, Human
gucagugccgccgccucgcccac

SEQ ID NO: 2415703 - RNA, 22 nt, Human
gucagugguccacaucccggga

SEQ ID NO: 2415704 - RNA, 23 nt, Human
gucaguguccaaagcagggucug

SEQ ID NO: 2415705 - RNA, 20 nt, Human
gucaguguccaaagcagggu

SEQ ID NO: 2415706 - RNA, 17 nt, Human
gucaguguccaaagcag

SEQ ID NO: 2415707 - RNA, 14 nt, Human
gucagugaggccca

SEQ ID NO: 2415708 - RNA, 18 nt, Human
gucagugcaaaugucaga

SEQ ID NO: 2415709 - RNA, 23 nt, Human
gucagugaggcccagggagaggc

SEQ ID NO: 2415710 - RNA, 22 nt, Human
gucagugggaacgugacugccc

SEQ ID NO: 2415711 - RNA, 22 nt, Human
gucagugccgccgccucgccca

SEQ ID NO: 2415712 - RNA, 17 nt, Human
gucagugccgccgccuc

SEQ ID NO: 2415713 - RNA, 16 nt, Human
gucagugcagcccgug

SEQ ID NO: 2415714 - RNA, 23 nt, Human
gucagugcagcccguguggcccc

SEQ ID NO: 2415715 - RNA, 13 nt, Human
gucagguuugagu

SEQ ID NO: 2415716 - RNA, 22 nt, Human
gucagucaugauggcaccacug

SEQ ID NO: 2415717 - RNA, 20 nt, Human
gucacuggcucuccaagugc

SEQ ID NO: 2415718 - RNA, 18 nt, Human
gucacuggcucuccaagu

SEQ ID NO: 2415719 - RNA, 17 nt, Human
gucacuggcucuccaag

SEQ ID NO: 2415720 - RNA, 16 nt, Human
gucacuggcucuccaa

SEQ ID NO: 2415721 - RNA, 15 nt, Human
gucacuggcucucca

SEQ ID NO: 2415722 - RNA, 14 nt, Human
gucacuggcucucc

SEQ ID NO: 2415723 - RNA, 12 nt, Human
gucacuggcucu

SEQ ID NO: 2415724 - RNA, 23 nt, Human
gucacuggagguugaagccaagu

SEQ ID NO: 2415725 - RNA, 19 nt, Human
gucacuggcugccuccacu

SEQ ID NO: 2415726 - RNA, 16 nt, Human
gucacuggcugccucc

SEQ ID NO: 2415727 - RNA, 14 nt, Human
gucacuggcugccu

SEQ ID NO: 2415728 - RNA, 21 nt, Human
gucacuggcucuccaagugcc

SEQ ID NO: 2415729 - RNA, 21 nt, Human
gucacuggcugccuccacucc

SEQ ID NO: 2415730 - RNA, 20 nt, Human
gucacuggcugccuccacuc

SEQ ID NO: 2415731 - RNA, 23 nt, Human
gucacuggcugccuccacuccca

SEQ ID NO: 2415732 - RNA, 17 nt, Human
gucacugucccucaaau

SEQ ID NO: 2415733 - RNA, 21 nt, Human
gucacugguagaccaaaauaa

SEQ ID NO: 2415734 - RNA, 14 nt, Human
gucacugugguccu

SEQ ID NO: 2415735 - RNA, 19 nt, Human
gucacuguuuauuuuuuua

SEQ ID NO: 2415736 - RNA, 17 nt, Human
gucacuguuccuuguca

SEQ ID NO: 2415737 - RNA, 13 nt, Human
gucacuguuucuc

SEQ ID NO: 2415738 - RNA, 15 nt, Human
gucacuguuucucug

SEQ ID NO: 2415739 - RNA, 15 nt, Human
gucacugcuuaacuu

SEQ ID NO: 2415740 - RNA, 21 nt, Human
gucacugcuuaacuucacaua

SEQ ID NO: 2415741 - RNA, 23 nt, Human
gucacuggaaaggggagagccug

SEQ ID NO: 2415742 - RNA, 20 nt, Human
gucacuggaaaggggagagc

SEQ ID NO: 2415743 - RNA, 18 nt, Human
gucacuggaaaggggaga

SEQ ID NO: 2415744 - RNA, 15 nt, Human
gucacuggaaagggg

SEQ ID NO: 2415745 - RNA, 20 nt, Human
gucacuggagguugaagcca

SEQ ID NO: 2415746 - RNA, 18 nt, Human
gucacuggagguugaagc

SEQ ID NO: 2415747 - RNA, 19 nt, Human
gucacuggaccacugggca

SEQ ID NO: 2415748 - RNA, 12 nt, Human
gucacuggaaag

SEQ ID NO: 2415749 - RNA, 12 nt, Human
gucacugcuguc

SEQ ID NO: 2415750 - RNA, 11 nt, Human
gucacugcugu

SEQ ID NO: 2415751 - RNA, 23 nt, Human
gucacugccugcagaggucugug

SEQ ID NO: 2415752 - RNA, 18 nt, Human
gucacugccugcagaggu

SEQ ID NO: 2415753 - RNA, 13 nt, Human
gucaggaaagaga

SEQ ID NO: 2415754 - RNA, 14 nt, Human
gucaggaaagagaa

SEQ ID NO: 2415755 - RNA, 21 nt, Human
gucagaaguuucugccgcagc

SEQ ID NO: 2415756 - RNA, 13 nt, Human
gucagaaacuguu

SEQ ID NO: 2415757 - RNA, 18 nt, Human
gucacuucgcgugcccuc

SEQ ID NO: 2415758 - RNA, 16 nt, Human
gucacuuauuucauaa

SEQ ID NO: 2415759 - RNA, 24 nt, Human
gucacuucgcgugcccucgcugcu

SEQ ID NO: 2415760 - RNA, 23 nt, Human
gucacuugaugugccauuuuaaa

SEQ ID NO: 2415761 - RNA, 18 nt, Human
gucacuuacuguuucugu

SEQ ID NO: 2415762 - RNA, 16 nt, Human
gucacuuacuguuucu

SEQ ID NO: 2415763 - RNA, 15 nt, Human
gucacuuauuucaua

SEQ ID NO: 2415764 - RNA, 16 nt, Human
gucacuguuucucugc

SEQ ID NO: 2415765 - RNA, 20 nt, Human
gucacuuaccuagauuuaca

SEQ ID NO: 2415766 - RNA, 17 nt, Human
gucacuuuguuuuacug

SEQ ID NO: 2415767 - RNA, 23 nt, Human
gucacuuugcucuggguggaagu

SEQ ID NO: 2415768 - RNA, 17 nt, Human
gucacuuugcucugggu

SEQ ID NO: 2415769 - RNA, 16 nt, Human
gucacuuugcucuggg

SEQ ID NO: 2415770 - RNA, 16 nt, Human
aaauuacacccaaaga

SEQ ID NO: 2415771 - RNA, 22 nt, Human
aaauuacacccaaagagguauu

SEQ ID NO: 2415772 - RNA, 15 nt, Human
aaauuagccgggcgu

SEQ ID NO: 2415773 - RNA, 18 nt, Human
aaaugugccuucauuuuu

SEQ ID NO: 2415774 - RNA, 15 nt, Human
aaaugugcuuuuaaa

SEQ ID NO: 2415775 - RNA, 19 nt, Human
aaauuaauuggcagcagau

SEQ ID NO: 2415776 - RNA, 18 nt, Human
aaauuaauuggcagcaga

SEQ ID NO: 2415777 - RNA, 21 nt, Human
aaauuaauuggcagcagauuu

SEQ ID NO: 2415778 - RNA, 16 nt, Human
aaauuaauuggcagca

SEQ ID NO: 2415779 - RNA, 14 nt, Human
aaauuaaucugggc

SEQ ID NO: 2415780 - RNA, 15 nt, Human
aaauguggcuccugg

SEQ ID NO: 2415781 - RNA, 17 nt, Human
aaauuauguauguuuac

SEQ ID NO: 2415782 - RNA, 23 nt, Human
aaauuaugugccagauuuaugca

SEQ ID NO: 2415783 - RNA, 21 nt, Human
aaauucaaaaaguguuuauuu

SEQ ID NO: 2415784 - RNA, 23 nt, Human
aaauuauguuuauauaaaugcuu

SEQ ID NO: 2415785 - RNA, 17 nt, Human
aaauuauguuuauauaa

SEQ ID NO: 2415786 - RNA, 14 nt, Human
aaauuauguuuaua

SEQ ID NO: 2415787 - RNA, 19 nt, Human
aaauuauguauguuuacau

SEQ ID NO: 2415788 - RNA, 20 nt, Human
aaauuauguuacaucuguuu

SEQ ID NO: 2415789 - RNA, 15 nt, Human
aaauucaauuguaaa

SEQ ID NO: 2415790 - RNA, 19 nt, Human
aaauuaggauuucaugauu

SEQ ID NO: 2415791 - RNA, 17 nt, Human
aaauuagcugugugaaa

SEQ ID NO: 2415792 - RNA, 18 nt, Human
aaauuagcugugugaaau

SEQ ID NO: 2415793 - RNA, 14 nt, Human
aaauuaggaauaaa

SEQ ID NO: 2415794 - RNA, 15 nt, Human
aaauuaggaauaaau

SEQ ID NO: 2415795 - RNA, 16 nt, Human
aaauuaggaauaaaua

SEQ ID NO: 2415796 - RNA, 18 nt, Human
aaauuaggauuucaugau

SEQ ID NO: 2415797 - RNA, 18 nt, Human
aaauuaggaauaaauaaa

SEQ ID NO: 2415798 - RNA, 19 nt, Human
aaauuagcugugugaaaua

SEQ ID NO: 2415799 - RNA, 20 nt, Human
aaauuguuuugagcuuucca

SEQ ID NO: 2415800 - RNA, 23 nt, Human
aaauuuaaaagacacuguuuaca

SEQ ID NO: 2415801 - RNA, 23 nt, Human
aaauuguccguguucauacauuu

SEQ ID NO: 2415802 - RNA, 21 nt, Human
aaauugucccuuaaacaaaaa

SEQ ID NO: 2415803 - RNA, 16 nt, Human
aaauucuccuggaggu

SEQ ID NO: 2415804 - RNA, 16 nt, Human
aaauuguauauucacu

SEQ ID NO: 2415805 - RNA, 14 nt, Human
aaauucuccuggag

SEQ ID NO: 2415806 - RNA, 17 nt, Human
aaauuguauauucacuu

SEQ ID NO: 2415807 - RNA, 18 nt, Human
aaauugucagaugcugug

SEQ ID NO: 2415808 - RNA, 22 nt, Human
aaauuguaucuagugcagcuga

SEQ ID NO: 2415809 - RNA, 17 nt, Human
aaauuguauuacaaauc

SEQ ID NO: 2415810 - RNA, 15 nt, Human
aaauucuacaacaca

SEQ ID NO: 2415811 - RNA, 19 nt, Human
aaauucuauaggaacauau

SEQ ID NO: 2415812 - RNA, 22 nt, Human
aaauucuauaggaacauaugaa

SEQ ID NO: 2415813 - RNA, 23 nt, Human
aaauucuauaggaacauaugaaa

SEQ ID NO: 2415814 - RNA, 21 nt, Human
aaauucuauucugaucuuauu

SEQ ID NO: 2415815 - RNA, 19 nt, Human
aaauucuauuacaguaugu

SEQ ID NO: 2415816 - RNA, 13 nt, Human
aaauucuccugga

SEQ ID NO: 2415817 - RNA, 20 nt, Human
aaauucucagucaguaauug

SEQ ID NO: 2415818 - RNA, 17 nt, Human
aaauuccaagugauuga

SEQ ID NO: 2415819 - RNA, 14 nt, Human
aaauucacaaacuu

SEQ ID NO: 2415820 - RNA, 15 nt, Human
aaauucacaaacuuu

SEQ ID NO: 2415821 - RNA, 17 nt, Human
aaauucaauuguaaauu

SEQ ID NO: 2415822 - RNA, 19 nt, Human
aaauucaauuguaaauuga

SEQ ID NO: 2415823 - RNA, 20 nt, Human
aaauucaauuguaaauugaa

SEQ ID NO: 2415824 - RNA, 23 nt, Human
aaauucaauuguaaauugaauca

SEQ ID NO: 2415825 - RNA, 17 nt, Human
aaauucacaaacuuuua

SEQ ID NO: 2415826 - RNA, 18 nt, Human
aaauucacaaacuuuuau

SEQ ID NO: 2415827 - RNA, 18 nt, Human
aaauucacaaguuguguu

SEQ ID NO: 2415828 - RNA, 19 nt, Human
aaauucacaaguuguguuu

SEQ ID NO: 2415829 - RNA, 16 nt, Human
aaauuccccacccuga

SEQ ID NO: 2415830 - RNA, 14 nt, Human
aaauuccuguagca

SEQ ID NO: 2415831 - RNA, 20 nt, Human
aaauuccucuuugcuuugcu

SEQ ID NO: 2415832 - RNA, 22 nt, Human
aaauuccuuagcuuagaccuca

SEQ ID NO: 2415833 - RNA, 23 nt, Human
aaauucgaccugauuuacaguuu

SEQ ID NO: 2415834 - RNA, 21 nt, Human
aaauucgcugcaaccuguuga

SEQ ID NO: 2415835 - RNA, 18 nt, Human
aaauucgaccugauuuac

SEQ ID NO: 2415836 - RNA, 17 nt, Human
aaauucgaccugauuua

SEQ ID NO: 2415837 - RNA, 23 nt, Human
aaauuccuuagcuuagaccucag

SEQ ID NO: 2415838 - RNA, 16 nt, Human
aaauucacaauagaaa

SEQ ID NO: 2415839 - RNA, 13 nt, Human
aaauuccacugga

SEQ ID NO: 2415840 - RNA, 23 nt, Human
guauucuuugauguuaacacauu

SEQ ID NO: 2415841 - RNA, 21 nt, Human
guauucuuugauguuaacaca

SEQ ID NO: 2415842 - RNA, 18 nt, Human
guauucuuugauguuaac

SEQ ID NO: 2415843 - RNA, 16 nt, Human
guauucuuugauguua

SEQ ID NO: 2415844 - RNA, 10 nt, Human
guauugaagc

SEQ ID NO: 2415845 - RNA, 13 nt, Human
guauugaagcauu

SEQ ID NO: 2415846 - RNA, 17 nt, Human
guauugaagcauuuuau

SEQ ID NO: 2415847 - RNA, 18 nt, Human
guauugaagcauuuuaua

SEQ ID NO: 2415848 - RNA, 22 nt, Human
guauugaagcauuuuauaaauc

SEQ ID NO: 2415849 - RNA, 17 nt, Human
guauuguaaacaugugu

SEQ ID NO: 2415850 - RNA, 14 nt, Human
guauugaaucaugu

SEQ ID NO: 2415851 - RNA, 12 nt, Human
guauugaaucau

SEQ ID NO: 2415852 - RNA, 17 nt, Human
guauugaaucauguagu

SEQ ID NO: 2415853 - RNA, 16 nt, Human
guauuguauuuauuca

SEQ ID NO: 2415854 - RNA, 15 nt, Human
guauuguauuuauuc

SEQ ID NO: 2415855 - RNA, 13 nt, Human
guauuguauuuau

SEQ ID NO: 2415856 - RNA, 12 nt, Human
guauuguauuua

SEQ ID NO: 2415857 - RNA, 18 nt, Human
guauuguauuuauucaau

SEQ ID NO: 2415858 - RNA, 17 nt, Human
guauuguauuuauucaa

SEQ ID NO: 2415859 - RNA, 22 nt, Human
guauuguauuuauucaauaaag

SEQ ID NO: 2415860 - RNA, 20 nt, Human
guauuguaccuuuuaacacc

SEQ ID NO: 2415861 - RNA, 21 nt, Human
aaaucaugaagauauuuuucc

SEQ ID NO: 2415862 - RNA, 17 nt, Human
aaaucauggaaugguua

SEQ ID NO: 2415863 - RNA, 16 nt, Human
aaaucauguacauuuc

SEQ ID NO: 2415864 - RNA, 16 nt, Human
aaaucauucauuuucu

SEQ ID NO: 2415865 - RNA, 11 nt, Human
aaaucauuucu

SEQ ID NO: 2415866 - RNA, 19 nt, Human
aaaucauuaauacucuucu

SEQ ID NO: 2415867 - RNA, 12 nt, Human
aaaucauguuug

SEQ ID NO: 2415868 - RNA, 17 nt, Human
aaaucauguacauuucu

SEQ ID NO: 2415869 - RNA, 18 nt, Human
guauucucuccuguaccu

SEQ ID NO: 2415870 - RNA, 14 nt, Human
guauucuugucaaa

SEQ ID NO: 2415871 - RNA, 14 nt, Human
guauucuuugaugu

SEQ ID NO: 2415872 - RNA, 11 nt, Human
guauucuuuga

SEQ ID NO: 2415873 - RNA, 19 nt, Human
guauucuagcuaauguaau

SEQ ID NO: 2415874 - RNA, 21 nt, Human
aaaucauugcuuugaagcagu

SEQ ID NO: 2415875 - RNA, 18 nt, Human
guauucuaguuuugucaa

SEQ ID NO: 2415876 - RNA, 18 nt, Human
aaaugucuucuguauuca

SEQ ID NO: 2415877 - RNA, 12 nt, Human
aaaugucuugug

SEQ ID NO: 2415878 - RNA, 14 nt, Human
aaaugucuuccugg

SEQ ID NO: 2415879 - RNA, 15 nt, Human
aaaugugauuuuucu

SEQ ID NO: 2415880 - RNA, 16 nt, Human
aaaugucuucuguauu

SEQ ID NO: 2415881 - RNA, 16 nt, Human
aaaugugauuuuucug

SEQ ID NO: 2415882 - RNA, 23 nt, Human
aaaugugcauucuuuuaaaagac

SEQ ID NO: 2415883 - RNA, 22 nt, Human
aaaugugcauucuuuuaaaaga

SEQ ID NO: 2415884 - RNA, 17 nt, Human
aaaugugcaaaacagcg

SEQ ID NO: 2415885 - RNA, 17 nt, Human
aaaugugauuuuucuga

SEQ ID NO: 2415886 - RNA, 21 nt, Human
aaaugucucuuuaaugucaca

SEQ ID NO: 2415887 - RNA, 16 nt, Human
aaaugucuauuaaggu

SEQ ID NO: 2415888 - RNA, 16 nt, Human
guauuuaauuuugaca

SEQ ID NO: 2415889 - RNA, 20 nt, Human
aaauguaucauagaaaugua

SEQ ID NO: 2415890 - RNA, 17 nt, Human
aaauguaucauagaaau

SEQ ID NO: 2415891 - RNA, 14 nt, Human
aaauguaucuuauu

SEQ ID NO: 2415892 - RNA, 17 nt, Human
aaauguaucuuauucac

SEQ ID NO: 2415893 - RNA, 14 nt, Human
aaauguauaugcac

SEQ ID NO: 2415894 - RNA, 15 nt, Human
aaauguauaugcacu

SEQ ID NO: 2415895 - RNA, 13 nt, Human
guauuuaucuuua

SEQ ID NO: 2415896 - RNA, 17 nt, Human
guauuuauauauuuaua

SEQ ID NO: 2415897 - RNA, 15 nt, Human
guauuuauauauuua

SEQ ID NO: 2415898 - RNA, 16 nt, Human
guauuuauauauuuau

SEQ ID NO: 2415899 - RNA, 16 nt, Human
guauuuacgcuuugau

SEQ ID NO: 2415900 - RNA, 17 nt, Human
guauuuacgcuuugauu

SEQ ID NO: 2415901 - RNA, 19 nt, Human
guauuuacgcuuugauuca

SEQ ID NO: 2415902 - RNA, 13 nt, Human
guauuuauaaaua

SEQ ID NO: 2415903 - RNA, 12 nt, Human
guauuuauauau

SEQ ID NO: 2415904 - RNA, 13 nt, Human
guauuuauauauu

SEQ ID NO: 2415905 - RNA, 21 nt, Human
guauugugucuuuugcaugau

SEQ ID NO: 2415906 - RNA, 18 nt, Human
guauugugucuuuugcau

SEQ ID NO: 2415907 - RNA, 17 nt, Human
guauugugucuuuugca

SEQ ID NO: 2415908 - RNA, 18 nt, Human
guauuguucccagugaca

SEQ ID NO: 2415909 - RNA, 11 nt, Human
guauuguuccc

SEQ ID NO: 2415910 - RNA, 14 nt, Human
guauuguucccagu

SEQ ID NO: 2415911 - RNA, 20 nt, Human
guauuguuuugguuugcuac

SEQ ID NO: 2415912 - RNA, 9 nt, Human
guauuuaac

SEQ ID NO: 2415913 - RNA, 22 nt, Human
gucuuaaugaaguuugaauguu

SEQ ID NO: 2415914 - RNA, 20 nt, Human
gucuuaaugaaguuugaaug

SEQ ID NO: 2415915 - RNA, 19 nt, Human
gucuuaaugaaguuugaau

SEQ ID NO: 2415916 - RNA, 18 nt, Human
gucuuaaugaaguuugaa

SEQ ID NO: 2415917 - RNA, 17 nt, Human
gucuuaaugaaguuuga

SEQ ID NO: 2415918 - RNA, 16 nt, Human
gucuuaaugaaguuug

SEQ ID NO: 2415919 - RNA, 23 nt, Human
gucuuaagccuuuugcucacaaa

SEQ ID NO: 2415920 - RNA, 14 nt, Human
gucuuaaugaaguu

SEQ ID NO: 2415921 - RNA, 14 nt, Human
gucuuaauuaaaag

SEQ ID NO: 2415922 - RNA, 19 nt, Human
gucuuauauauuguagaua

SEQ ID NO: 2415923 - RNA, 16 nt, Human
gucuggaaugcagugg

SEQ ID NO: 2415924 - RNA, 15 nt, Human
gucuggaaugcagug

SEQ ID NO: 2415925 - RNA, 18 nt, Human
gucuggaaugcaguggua

SEQ ID NO: 2415926 - RNA, 22 nt, Human
gucuuaaaauaacuuauaucau

SEQ ID NO: 2415927 - RNA, 15 nt, Human
gucuuaaaauaacuu

SEQ ID NO: 2415928 - RNA, 12 nt, Human
gucuuaaaauaa

SEQ ID NO: 2415929 - RNA, 12 nt, Human
gucuuguucugu

SEQ ID NO: 2415930 - RNA, 21 nt, Human
gucuuucaggaccuuuugaag

SEQ ID NO: 2415931 - RNA, 22 nt, Human
gucuuuccacuccuccuagcca

SEQ ID NO: 2415932 - RNA, 18 nt, Human
gucuuuccacggagccac

SEQ ID NO: 2415933 - RNA, 20 nt, Human
gucuuguuaagugcagucug

SEQ ID NO: 2415934 - RNA, 22 nt, Human
gucuuguuuuuuuuuuccacuu

SEQ ID NO: 2415935 - RNA, 23 nt, Human
gucuuguguuuccacagccugca

SEQ ID NO: 2415936 - RNA, 20 nt, Human
gucuuguguuucuuuaguuu

SEQ ID NO: 2415937 - RNA, 15 nt, Human
gucuuaucaagcagc

SEQ ID NO: 2415938 - RNA, 19 nt, Human
gucuucaacagcuccccau

SEQ ID NO: 2415939 - RNA, 14 nt, Human
gucuuauuuauuau

SEQ ID NO: 2415940 - RNA, 16 nt, Human
gucuucaacagcuccc

SEQ ID NO: 2415941 - RNA, 14 nt, Human
gucuuauuuccuca

SEQ ID NO: 2415942 - RNA, 14 nt, Human
gucuucaagggcuu

SEQ ID NO: 2415943 - RNA, 14 nt, Human
gucugacaggcaau

SEQ ID NO: 2415944 - RNA, 13 nt, Human
gucugacaggcaa

SEQ ID NO: 2415945 - RNA, 12 nt, Human
gucugacaggca

SEQ ID NO: 2415946 - RNA, 21 nt, Human
gucugaaggacacuuccugcc

SEQ ID NO: 2415947 - RNA, 20 nt, Human
gucugaaggacacuuccugc

SEQ ID NO: 2415948 - RNA, 22 nt, Human
gucugaaggacacuuccugccu

SEQ ID NO: 2415949 - RNA, 14 nt, Human
gucugaauguucug

SEQ ID NO: 2415950 - RNA, 15 nt, Human
gucugaauguucuga

SEQ ID NO: 2415951 - RNA, 17 nt, Human
gucugaauguucugaca

SEQ ID NO: 2415952 - RNA, 18 nt, Human
gucugaauguucugacau

SEQ ID NO: 2415953 - RNA, 20 nt, Human
gucugaauguucugacauua

SEQ ID NO: 2415954 - RNA, 18 nt, Human
gucugacaggcaaugcug

SEQ ID NO: 2415955 - RNA, 15 nt, Human
gucugacaggcaaug

SEQ ID NO: 2415956 - RNA, 20 nt, Human
gucugacaggcaaugcuggc

SEQ ID NO: 2415957 - RNA, 14 nt, Human
gucuggaaguccaa

SEQ ID NO: 2415958 - RNA, 17 nt, Human
gucucaaaaaaagaaaa

SEQ ID NO: 2415959 - RNA, 14 nt, Human
gucucaaaaaaaca

SEQ ID NO: 2415960 - RNA, 16 nt, Human
gucuauuuaagccuca

SEQ ID NO: 2415961 - RNA, 12 nt, Human
gucuauuuaagc

SEQ ID NO: 2415962 - RNA, 13 nt, Human
gucuauuucugcu

SEQ ID NO: 2415963 - RNA, 14 nt, Human
gucuauuucuaguu

SEQ ID NO: 2415964 - RNA, 17 nt, Human
gucuauuucugcugaau

SEQ ID NO: 2415965 - RNA, 11 nt, Human
gucugaaaugg

SEQ ID NO: 2415966 - RNA, 13 nt, Human
gucugaauguucu

SEQ ID NO: 2415967 - RNA, 15 nt, Human
gucugaacagcugua

SEQ ID NO: 2415968 - RNA, 19 nt, Human
gucugaaggacacuuccug

SEQ ID NO: 2415969 - RNA, 14 nt, Human
gucugaagcagaug

SEQ ID NO: 2415970 - RNA, 23 nt, Human
gucucuuuucuuuagagcauugc

SEQ ID NO: 2415971 - RNA, 16 nt, Human
gucuauuuuugucuua

SEQ ID NO: 2415972 - RNA, 22 nt, Human
gucucuuucaugaguuuuuccc

SEQ ID NO: 2415973 - RNA, 24 nt, Human
aacucauuuuuguuuucauuaucu

SEQ ID NO: 2415974 - RNA, 23 nt, Human
aacuauucaggagaguagaacag

SEQ ID NO: 2415975 - RNA, 21 nt, Human
aacucauuuuuguuuucauua

SEQ ID NO: 2415976 - RNA, 22 nt, Human
aacuauuaagaggcagaaaauu

SEQ ID NO: 2415977 - RNA, 15 nt, Human
aacuauguugauaaa

SEQ ID NO: 2415978 - RNA, 17 nt, Human
aacuagggccaagccca

SEQ ID NO: 2415979 - RNA, 22 nt, Human
aacuaggucugauauucaaaug

SEQ ID NO: 2415980 - RNA, 15 nt, Human
aacuaguccuuuacu

SEQ ID NO: 2415981 - RNA, 14 nt, Human
aacuauaugugaau

SEQ ID NO: 2415982 - RNA, 12 nt, Human
aacuauggccug

SEQ ID NO: 2415983 - RNA, 18 nt, Human
aacuauggaucagaauag

SEQ ID NO: 2415984 - RNA, 23 nt, Human
aacuaugcauggugccccaggac

SEQ ID NO: 2415985 - RNA, 23 nt, Human
aacguuuuuccuuuaaaaaaauu

SEQ ID NO: 2415986 - RNA, 21 nt, Human
aacuaggugcauauuuauaaa

SEQ ID NO: 2415987 - RNA, 17 nt, Human
aacuagggaagauaaua

SEQ ID NO: 2415988 - RNA, 13 nt, Human
aacguggcugcuu

SEQ ID NO: 2415989 - RNA, 12 nt, Human
aacguggcugcu

SEQ ID NO: 2415990 - RNA, 13 nt, Human
aacguuuuauugu

SEQ ID NO: 2415991 - RNA, 15 nt, Human
aacguuuuauugugu

SEQ ID NO: 2415992 - RNA, 23 nt, Human
aacguuuucuguuuggaggagca

SEQ ID NO: 2415993 - RNA, 15 nt, Human
aacguuuugaacuaa

SEQ ID NO: 2415994 - RNA, 20 nt, Human
aacguuuugaacuaauaaaa

SEQ ID NO: 2415995 - RNA, 17 nt, Human
aacguuuuuccuguucu

SEQ ID NO: 2415996 - RNA, 19 nt, Human
aaccuggguccaaauaaaa

SEQ ID NO: 2415997 - RNA, 18 nt, Human
aaccuggguccaaauaaa

SEQ ID NO: 2415998 - RNA, 22 nt, Human
aaccuggguccaaauaaaaacu

SEQ ID NO: 2415999 - RNA, 17 nt, Human
aaccuggguccaaauaa

SEQ ID NO: 2416000 - RNA, 22 nt, Human
aaccugggaggcggagaguaca

SEQ ID NO: 2416001 - RNA, 12 nt, Human
aaccuggggggc

SEQ ID NO: 2416002 - RNA, 14 nt, Human
aaccugggauucag

SEQ ID NO: 2416003 - RNA, 17 nt, Human
aaccugggauucaggaa

SEQ ID NO: 2416004 - RNA, 20 nt, Human
aaccugggauucaggaaugu

SEQ ID NO: 2416005 - RNA, 21 nt, Human
aaccugggauucaggaaugug

SEQ ID NO: 2416006 - RNA, 15 nt, Human
aaccuuauuguaccu

SEQ ID NO: 2416007 - RNA, 19 nt, Human
aaccuuauuguaccucucu

SEQ ID NO: 2416008 - RNA, 18 nt, Human
aaccuuauuguaccucuc

SEQ ID NO: 2416009 - RNA, 17 nt, Human
aaccuuauuguaccucu

SEQ ID NO: 2416010 - RNA, 16 nt, Human
aaccuuauuguaccuc

SEQ ID NO: 2416011 - RNA, 20 nt, Human
aaccuggaggggcuagaacc

SEQ ID NO: 2416012 - RNA, 22 nt, Human
aaccuggagggcuggaaucugg

SEQ ID NO: 2416013 - RNA, 19 nt, Human
aaccuggcaagcuagaacc

SEQ ID NO: 2416014 - RNA, 22 nt, Human
aaccuggagggcuagaaucugg

SEQ ID NO: 2416015 - RNA, 19 nt, Human
aaccuggagggcuagaacc

SEQ ID NO: 2416016 - RNA, 10 nt, Human
aaccuggagg

SEQ ID NO: 2416017 - RNA, 19 nt, Human
gucuuucccauggggaggg

SEQ ID NO: 2416018 - RNA, 20 nt, Human
gucuuuccauuggaucucau

SEQ ID NO: 2416019 - RNA, 20 nt, Human
gucuuucccauggggaggga

SEQ ID NO: 2416020 - RNA, 12 nt, Human
gucuuuccuaga

SEQ ID NO: 2416021 - RNA, 16 nt, Human
gucuuuccuggcacua

SEQ ID NO: 2416022 - RNA, 13 nt, Human
gucuuucuggaga

SEQ ID NO: 2416023 - RNA, 13 nt, Human
aacgucugugcca

SEQ ID NO: 2416024 - RNA, 12 nt, Human
aaccuucuggcc

SEQ ID NO: 2416025 - RNA, 21 nt, Human
aaccuucgccaccuggguucc

SEQ ID NO: 2416026 - RNA, 19 nt, Human
aaccuuccaucucgccacc

SEQ ID NO: 2416027 - RNA, 13 nt, Human
aaccuuccaucuc

SEQ ID NO: 2416028 - RNA, 17 nt, Human
aaccuuccaucucgcca

SEQ ID NO: 2416029 - RNA, 16 nt, Human
aacgugcauugugcuu

SEQ ID NO: 2416030 - RNA, 14 nt, Human
aacgugcauugugc

SEQ ID NO: 2416031 - RNA, 17 nt, Human
aacgugcagacuaugca

SEQ ID NO: 2416032 - RNA, 23 nt, Human
aacgugcauugugcuucuuucuu

SEQ ID NO: 2416033 - RNA, 17 nt, Human
aacguggcucugcuggc

SEQ ID NO: 2416034 - RNA, 16 nt, Human
aacguggcucugcugg

SEQ ID NO: 2416035 - RNA, 15 nt, Human
aacguggcucugcug

SEQ ID NO: 2416036 - RNA, 13 nt, Human
aacguggcccaga

SEQ ID NO: 2416037 - RNA, 12 nt, Human
aacgugaaaaug

SEQ ID NO: 2416038 - RNA, 11 nt, Human
aacgugcauug

SEQ ID NO: 2416039 - RNA, 15 nt, Human
aacgugaugaucagc

SEQ ID NO: 2416040 - RNA, 20 nt, Human
aacgugaugaucagcuguuu

SEQ ID NO: 2416041 - RNA, 16 nt, Human
gugagacucugucuca

SEQ ID NO: 2416042 - RNA, 14 nt, Human
gugagacucugucu

SEQ ID NO: 2416043 - RNA, 16 nt, Human
gugagaccugccccuc

SEQ ID NO: 2416044 - RNA, 23 nt, Human
gugagaccugccccuccucucug

SEQ ID NO: 2416045 - RNA, 22 nt, Human
gugagacucgagaacuuucauu

SEQ ID NO: 2416046 - RNA, 20 nt, Human
gugagacucgagaacuuuca

SEQ ID NO: 2416047 - RNA, 17 nt, Human
gugagacucgagaacuu

SEQ ID NO: 2416048 - RNA, 16 nt, Human
gugagacccugucucu

SEQ ID NO: 2416049 - RNA, 14 nt, Human
gugagaccugcccc

SEQ ID NO: 2416050 - RNA, 15 nt, Human
gugagaccugccccu

SEQ ID NO: 2416051 - RNA, 13 nt, Human
gugagaccugccc

SEQ ID NO: 2416052 - RNA, 16 nt, Human
gugagacccccacacc

SEQ ID NO: 2416053 - RNA, 17 nt, Human
gugagacccccacaccu

SEQ ID NO: 2416054 - RNA, 22 nt, Human
gugagacccugucucaaaaaaa

SEQ ID NO: 2416055 - RNA, 20 nt, Human
gugagacccagcccucaucc

SEQ ID NO: 2416056 - RNA, 14 nt, Human
gugagacccccaca

SEQ ID NO: 2416057 - RNA, 15 nt, Human
gugagacccccacac

SEQ ID NO: 2416058 - RNA, 23 nt, Human
gugacuugugucccaugaucccu

SEQ ID NO: 2416059 - RNA, 18 nt, Human
gugacuuuggcugcaugc

SEQ ID NO: 2416060 - RNA, 16 nt, Human
gugagacagugggaaa

SEQ ID NO: 2416061 - RNA, 20 nt, Human
gugagacaguccagccugga

SEQ ID NO: 2416062 - RNA, 17 nt, Human
gugacuugugucccaug

SEQ ID NO: 2416063 - RNA, 22 nt, Human
gugacuugcaucguggagacag

SEQ ID NO: 2416064 - RNA, 15 nt, Human
gugacuucuccaggu

SEQ ID NO: 2416065 - RNA, 21 nt, Human
gugacuugcaucguggagaca

SEQ ID NO: 2416066 - RNA, 16 nt, Human
gugacuucagcucugu

SEQ ID NO: 2416067 - RNA, 22 nt, Human
gugacaugugaaaccuuuuuua

SEQ ID NO: 2416068 - RNA, 20 nt, Human
gugacaugugaaaccuuuuu

SEQ ID NO: 2416069 - RNA, 19 nt, Human
gugacaugugaaaccuuuu

SEQ ID NO: 2416070 - RNA, 18 nt, Human
gugacaugugaaaccuuu

SEQ ID NO: 2416071 - RNA, 17 nt, Human
gugacaugugaaaccuu

SEQ ID NO: 2416072 - RNA, 16 nt, Human
gugacaugugaaaccu

SEQ ID NO: 2416073 - RNA, 15 nt, Human
gugacaugugaaacc

SEQ ID NO: 2416074 - RNA, 14 nt, Human
gugacaugugaaac

SEQ ID NO: 2416075 - RNA, 19 nt, Human
gugacaugucuuuucuugc

SEQ ID NO: 2416076 - RNA, 22 nt, Human
gugacauuugggagacauguga

SEQ ID NO: 2416077 - RNA, 21 nt, Human
gugacauuuauuuuucucaug

SEQ ID NO: 2416078 - RNA, 22 nt, Human
gugacauguguuggcagccucu

SEQ ID NO: 2416079 - RNA, 21 nt, Human
gugacuuagcagaugcugguc

SEQ ID NO: 2416080 - RNA, 18 nt, Human
gugacuguggcacacgcc

SEQ ID NO: 2416081 - RNA, 21 nt, Human
aacuccuagggccacugaaga

SEQ ID NO: 2416082 - RNA, 19 nt, Human
aacuccaccuugcggggau

SEQ ID NO: 2416083 - RNA, 16 nt, Human
aacuccacaucugccu

SEQ ID NO: 2416084 - RNA, 15 nt, Human
aacuccacaucugcc

SEQ ID NO: 2416085 - RNA, 14 nt, Human
aacuccacaucugc

SEQ ID NO: 2416086 - RNA, 18 nt, Human
aacuccacaucugccuua

SEQ ID NO: 2416087 - RNA, 17 nt, Human
aacuccacaucugccuu

SEQ ID NO: 2416088 - RNA, 15 nt, Human
aacuccaccaaccca

SEQ ID NO: 2416089 - RNA, 23 nt, Human
aacuccaccaacccaucagaagg

SEQ ID NO: 2416090 - RNA, 12 nt, Human
aacuccugaccu

SEQ ID NO: 2416091 - RNA, 14 nt, Human
aacuccugaccuca

SEQ ID NO: 2416092 - RNA, 16 nt, Human
aacuccugacagucuu

SEQ ID NO: 2416093 - RNA, 12 nt, Human
aacuccugcccc

SEQ ID NO: 2416094 - RNA, 18 nt, Human
aacuccugccccuguucu

SEQ ID NO: 2416095 - RNA, 17 nt, Human
aacuccugccccuguuc

SEQ ID NO: 2416096 - RNA, 18 nt, Human
aacuccuggaaauaucag

SEQ ID NO: 2416097 - RNA, 19 nt, Human
gugaaguuuaauugacuua

SEQ ID NO: 2416098 - RNA, 23 nt, Human
gugaauaauacaguaucucaggg

SEQ ID NO: 2416099 - RNA, 14 nt, Human
gugaaguuuacauu

SEQ ID NO: 2416100 - RNA, 18 nt, Human
gugacaguggauugcauu

SEQ ID NO: 2416101 - RNA, 14 nt, Human
gugacaucaguggc

SEQ ID NO: 2416102 - RNA, 15 nt, Human
gugacaucaguggca

SEQ ID NO: 2416103 - RNA, 19 nt, Human
gugacaguauuuugguucu

SEQ ID NO: 2416104 - RNA, 15 nt, Human
gugacagugccuggg

SEQ ID NO: 2416105 - RNA, 17 nt, Human
gugacagugccugggaa

SEQ ID NO: 2416106 - RNA, 23 nt, Human
gugacagugccugggaauguauu

SEQ ID NO: 2416107 - RNA, 20 nt, Human
gugacagggaagcuacaggu

SEQ ID NO: 2416108 - RNA, 19 nt, Human
gugacagggaagcuacagg

SEQ ID NO: 2416109 - RNA, 18 nt, Human
gugacagggaagcuacag

SEQ ID NO: 2416110 - RNA, 17 nt, Human
gugacagggaagcuaca

SEQ ID NO: 2416111 - RNA, 22 nt, Human
gugacagggaagcuacagguua

SEQ ID NO: 2416112 - RNA, 16 nt, Human
gugacagggaagcuac

SEQ ID NO: 2416113 - RNA, 13 nt, Human
gugacagggaagc

SEQ ID NO: 2416114 - RNA, 16 nt, Human
gugacaggcagcagag

SEQ ID NO: 2416115 - RNA, 15 nt, Human
gugacaggcagcaga

SEQ ID NO: 2416116 - RNA, 14 nt, Human
gugacaggcagcag

SEQ ID NO: 2416117 - RNA, 16 nt, Human
gugacagauuauacag

SEQ ID NO: 2416118 - RNA, 17 nt, Human
gugacagaguucacuau

SEQ ID NO: 2416119 - RNA, 18 nt, Human
gugacagaguucacuaua

SEQ ID NO: 2416120 - RNA, 22 nt, Human
gugacagagugagacucugucu

SEQ ID NO: 2416121 - RNA, 20 nt, Human
gugacagagugagacucugu

SEQ ID NO: 2416122 - RNA, 23 nt, Human
gugacagaggcagccccauucug

SEQ ID NO: 2416123 - RNA, 16 nt, Human
gugaauaaaugucuug

SEQ ID NO: 2416124 - RNA, 13 nt, Human
gugaauaaauguc

SEQ ID NO: 2416125 - RNA, 15 nt, Human
gugaauaauaaaagu

SEQ ID NO: 2416126 - RNA, 17 nt, Human
gugaggcucugcccuug

SEQ ID NO: 2416127 - RNA, 16 nt, Human
gugaggcucugcccuu

SEQ ID NO: 2416128 - RNA, 15 nt, Human
gugaggcucugcccu

SEQ ID NO: 2416129 - RNA, 14 nt, Human
gugaggcucugccc

SEQ ID NO: 2416130 - RNA, 13 nt, Human
gugaggcucugcc

SEQ ID NO: 2416131 - RNA, 12 nt, Human
gugaggcucugc

SEQ ID NO: 2416132 - RNA, 19 nt, Human
gugagacgccaccauuccu

SEQ ID NO: 2416133 - RNA, 17 nt, Human
gugagagagaugggagc

SEQ ID NO: 2416134 - RNA, 18 nt, Human
gugagacucugucucaaa

SEQ ID NO: 2416135 - RNA, 21 nt, Human
aacucuccucugcugcuggcu

SEQ ID NO: 2416136 - RNA, 19 nt, Human
aacucuccucugcugcugg

SEQ ID NO: 2416137 - RNA, 17 nt, Human
aacucuccucugcugcu

SEQ ID NO: 2416138 - RNA, 21 nt, Human
gugaguacuacaguccuccca

SEQ ID NO: 2416139 - RNA, 19 nt, Human
gugagucaccaagcccagu

SEQ ID NO: 2416140 - RNA, 23 nt, Human
gugaguacuacaguccucccauc

SEQ ID NO: 2416141 - RNA, 17 nt, Human
gugagucaccaagccca

SEQ ID NO: 2416142 - RNA, 18 nt, Human
gugaggcucugcccuugg

SEQ ID NO: 2416143 - RNA, 16 nt, Human
gugaggcuguccugua

SEQ ID NO: 2416144 - RNA, 14 nt, Human
gugaggcuguccug

SEQ ID NO: 2416145 - RNA, 19 nt, Human
aacucugaauuuuaaagca

SEQ ID NO: 2416146 - RNA, 16 nt, Human
aacucugacaacagac

SEQ ID NO: 2416147 - RNA, 17 nt, Human
aacucuugauuauccau

SEQ ID NO: 2416148 - RNA, 17 nt, Human
aacucuugguuucuuca

SEQ ID NO: 2416149 - RNA, 12 nt, Human
aacucuuucaaa

SEQ ID NO: 2416150 - RNA, 11 nt, Human
aacucuugauu

SEQ ID NO: 2416151 - RNA, 23 nt, Human
aacucuccucugcugcuggcugg

SEQ ID NO: 2416152 - RNA, 22 nt, Human
aacucuccucugcugcuggcug

SEQ ID NO: 2416153 - RNA, 19 nt, Human
aacucucuuugggaauguu

SEQ ID NO: 2416154 - RNA, 10 nt, Human
aacucucuuu

SEQ ID NO: 2416155 - RNA, 13 nt, Human
gugaggccuugcu

SEQ ID NO: 2416156 - RNA, 12 nt, Human
aacucucuccac

SEQ ID NO: 2416157 - RNA, 22 nt, Human
aacucucuccacccuauaugua

SEQ ID NO: 2416158 - RNA, 12 nt, Human
aacucucugaac

SEQ ID NO: 2416159 - RNA, 23 nt, Human
aacugauuuuuuuuuccuucagu

SEQ ID NO: 2416160 - RNA, 22 nt, Human
aacugauuuuuuuuuccuucag

SEQ ID NO: 2416161 - RNA, 16 nt, Human
aacugcauuggcuuug

SEQ ID NO: 2416162 - RNA, 18 nt, Human
aacugccaaaaugcucua

SEQ ID NO: 2416163 - RNA, 20 nt, Human
aacugcauugagaacugcau

SEQ ID NO: 2416164 - RNA, 16 nt, Human
aacugcauuagaaauu

SEQ ID NO: 2416165 - RNA, 14 nt, Human
aacugcauugagaa

SEQ ID NO: 2416166 - RNA, 21 nt, Human
aacugauuuuuuuuuccuuca

SEQ ID NO: 2416167 - RNA, 20 nt, Human
aacugauuuuuuuuuccuuc

SEQ ID NO: 2416168 - RNA, 19 nt, Human
aacucuuugaaugacaaag

SEQ ID NO: 2416169 - RNA, 13 nt, Human
aacucuuucaaaa

SEQ ID NO: 2416170 - RNA, 14 nt, Human
aacucuuugagaaa

SEQ ID NO: 2416171 - RNA, 23 nt, Human
aacucuuuuugggcuccuuuuuc

SEQ ID NO: 2416172 - RNA, 17 nt, Human
aacucuuuuugggcucc

SEQ ID NO: 2416173 - RNA, 17 nt, Human
aagaaaaaucauguuug

SEQ ID NO: 2416174 - RNA, 12 nt, Human
aagaaaaaauac

SEQ ID NO: 2416175 - RNA, 14 nt, Human
aagaaaaaauacau

SEQ ID NO: 2416176 - RNA, 16 nt, Human
aagaaaaaauacauuu

SEQ ID NO: 2416177 - RNA, 17 nt, Human
aagaaaaaugagccugg

SEQ ID NO: 2416178 - RNA, 14 nt, Human
aagaaaacaacuuc

SEQ ID NO: 2416179 - RNA, 22 nt, Human
aagaaaaaucauguuugcucuc

SEQ ID NO: 2416180 - RNA, 19 nt, Human
aagaaaaaucauguuugcu

SEQ ID NO: 2416181 - RNA, 18 nt, Human
aagaaaaaugagccuggc

SEQ ID NO: 2416182 - RNA, 19 nt, Human
aagaaaaaauauuuucccu

SEQ ID NO: 2416183 - RNA, 19 nt, Human
aacuuuacuaagaugacau

SEQ ID NO: 2416184 - RNA, 18 nt, Human
gugccagcaacugaauaa

SEQ ID NO: 2416185 - RNA, 16 nt, Human
gugccagcaacugaau

SEQ ID NO: 2416186 - RNA, 20 nt, Human
aacuuuacuaagaugacauu

SEQ ID NO: 2416187 - RNA, 22 nt, Human
aacuuuagaguagcaugagaga

SEQ ID NO: 2416188 - RNA, 13 nt, Human
aagaaaaagaaaa

SEQ ID NO: 2416189 - RNA, 18 nt, Human
aagaaaaagaaaaagaaa

SEQ ID NO: 2416190 - RNA, 12 nt, Human
gugccagcaacu

SEQ ID NO: 2416191 - RNA, 19 nt, Human
gugccagcaaagccccaug

SEQ ID NO: 2416192 - RNA, 18 nt, Human
gugccagcaaagccccau

SEQ ID NO: 2416193 - RNA, 17 nt, Human
gugccagcaaagcccca

SEQ ID NO: 2416194 - RNA, 16 nt, Human
gugccagcaaagcccc

SEQ ID NO: 2416195 - RNA, 15 nt, Human
gugccagcaaagccc

SEQ ID NO: 2416196 - RNA, 14 nt, Human
gugccagcaaagcc

SEQ ID NO: 2416197 - RNA, 22 nt, Human
gugccagaggugggcagguggu

SEQ ID NO: 2416198 - RNA, 21 nt, Human
aacuuuaccuuuuuuauacau

SEQ ID NO: 2416199 - RNA, 22 nt, Human
aacuuuaccuuuuuuauacaua

SEQ ID NO: 2416200 - RNA, 23 nt, Human
aacuuuaccuuuuuuauacauaa

SEQ ID NO: 2416201 - RNA, 21 nt, Human
gugccagaggugggcaggugg

SEQ ID NO: 2416202 - RNA, 20 nt, Human
gugccagaggugggcaggug

SEQ ID NO: 2416203 - RNA, 19 nt, Human
gugccagaggugggcaggu

SEQ ID NO: 2416204 - RNA, 18 nt, Human
gugccagaggugggcagg

SEQ ID NO: 2416205 - RNA, 17 nt, Human
gugccagaggugggcag

SEQ ID NO: 2416206 - RNA, 16 nt, Human
gugccagaggugggca

SEQ ID NO: 2416207 - RNA, 15 nt, Human
gugccagaggugggc

SEQ ID NO: 2416208 - RNA, 14 nt, Human
gugccagagguggg

SEQ ID NO: 2416209 - RNA, 19 nt, Human
gugccagauuuaugcauau

SEQ ID NO: 2416210 - RNA, 18 nt, Human
gugccaacacucaagaag

SEQ ID NO: 2416211 - RNA, 13 nt, Human
gugccaacacuca

SEQ ID NO: 2416212 - RNA, 20 nt, Human
gugccaacaauccuagugcu

SEQ ID NO: 2416213 - RNA, 18 nt, Human
gugcauuuuugugaaaug

SEQ ID NO: 2416214 - RNA, 22 nt, Human
gugcauuuuugugaaaugaaaa

SEQ ID NO: 2416215 - RNA, 16 nt, Human
aagaaaauaccaagga

SEQ ID NO: 2416216 - RNA, 13 nt, Human
aagaaaacaucua

SEQ ID NO: 2416217 - RNA, 16 nt, Human
aagaaaacaucuauuc

SEQ ID NO: 2416218 - RNA, 15 nt, Human
aagaaaauaguggug

SEQ ID NO: 2416219 - RNA, 21 nt, Human
aagaaaauaguggugugauuu

SEQ ID NO: 2416220 - RNA, 22 nt, Human
aagaaaauaguggugugauuug

SEQ ID NO: 2416221 - RNA, 11 nt, Human
aagaaacauuu

SEQ ID NO: 2416222 - RNA, 19 nt, Human
aagaaacagaucuccuggc

SEQ ID NO: 2416223 - RNA, 11 nt, Human
aagaaacccaa

SEQ ID NO: 2416224 - RNA, 14 nt, Human
aagaaacaacagaa

SEQ ID NO: 2416225 - RNA, 19 nt, Human
aagaaacaacucuuugaga

SEQ ID NO: 2416226 - RNA, 22 nt, Human
aagaaacacacugaggcaggga

SEQ ID NO: 2416227 - RNA, 14 nt, Human
aagaaagaaaauca

SEQ ID NO: 2416228 - RNA, 13 nt, Human
aagaaagaaaauc

SEQ ID NO: 2416229 - RNA, 16 nt, Human
aagaaagaaaaucagg

SEQ ID NO: 2416230 - RNA, 12 nt, Human
aagaaagagaga

SEQ ID NO: 2416231 - RNA, 13 nt, Human
aagaaagagagaa

SEQ ID NO: 2416232 - RNA, 16 nt, Human
aagaaacccgacagag

SEQ ID NO: 2416233 - RNA, 18 nt, Human
aagaaacccgacagaggg

SEQ ID NO: 2416234 - RNA, 14 nt, Human
aagaaagagagaaa

SEQ ID NO: 2416235 - RNA, 15 nt, Human
aagaaagagagaaaa

SEQ ID NO: 2416236 - RNA, 16 nt, Human
aagaaagagagaaaau

SEQ ID NO: 2416237 - RNA, 18 nt, Human
aagaaagagagaaaauaa

SEQ ID NO: 2416238 - RNA, 17 nt, Human
aagaaagaggagugcuu

SEQ ID NO: 2416239 - RNA, 20 nt, Human
aagaaagagagaaaauaaaa

SEQ ID NO: 2416240 - RNA, 23 nt, Human
aagaaagagcaacaauccaucuc

SEQ ID NO: 2416241 - RNA, 22 nt, Human
aagaaagcuucaaacugcauga

SEQ ID NO: 2416242 - RNA, 17 nt, Human
aagaaagcugguaaacu

SEQ ID NO: 2416243 - RNA, 16 nt, Human
aagaaagcauagacau

SEQ ID NO: 2416244 - RNA, 19 nt, Human
aagaaagcccuuaggaaga

SEQ ID NO: 2416245 - RNA, 22 nt, Human
gugcuccgugccuccaccacca

SEQ ID NO: 2416246 - RNA, 18 nt, Human
gugcuccgugccuccacc

SEQ ID NO: 2416247 - RNA, 14 nt, Human
gugcuccuccuugg

SEQ ID NO: 2416248 - RNA, 14 nt, Human
gugcucgccccagc

SEQ ID NO: 2416249 - RNA, 16 nt, Human
gugcucgccccagcag

SEQ ID NO: 2416250 - RNA, 19 nt, Human
gugcucgcuguugcugaau

SEQ ID NO: 2416251 - RNA, 18 nt, Human
gugcucgcuguugcugaa

SEQ ID NO: 2416252 - RNA, 15 nt, Human
gugcucgcuguugcu

SEQ ID NO: 2416253 - RNA, 14 nt, Human
gugcucgcccugcg

SEQ ID NO: 2416254 - RNA, 16 nt, Human
gugcuccagccuggcu

SEQ ID NO: 2416255 - RNA, 16 nt, Human
gugcucauuucaggau

SEQ ID NO: 2416256 - RNA, 22 nt, Human
gugcucaguuguagaauguauu

SEQ ID NO: 2416257 - RNA, 13 nt, Human
gugcuccaggcag

SEQ ID NO: 2416258 - RNA, 15 nt, Human
gugcucccuaccacc

SEQ ID NO: 2416259 - RNA, 17 nt, Human
gugcuccgugccuccac

SEQ ID NO: 2416260 - RNA, 16 nt, Human
gugcuccgugccucca

SEQ ID NO: 2416261 - RNA, 13 nt, Human
gugcuccgugccu

SEQ ID NO: 2416262 - RNA, 18 nt, Human
gugcucccuaccaccucc

SEQ ID NO: 2416263 - RNA, 16 nt, Human
gugcucaggagcccug

SEQ ID NO: 2416264 - RNA, 18 nt, Human
gugcucaggagcccuggg

SEQ ID NO: 2416265 - RNA, 19 nt, Human
gugcucaggagcccuggga

SEQ ID NO: 2416266 - RNA, 19 nt, Human
gugcucaguuguagaaugu

SEQ ID NO: 2416267 - RNA, 17 nt, Human
gugcucaguuguagaau

SEQ ID NO: 2416268 - RNA, 13 nt, Human
gugcucaguugua

SEQ ID NO: 2416269 - RNA, 21 nt, Human
gugcuauaggcuggagaagcu

SEQ ID NO: 2416270 - RNA, 13 nt, Human
gugcucagggcua

SEQ ID NO: 2416271 - RNA, 13 nt, Human
gugcucagggcug

SEQ ID NO: 2416272 - RNA, 15 nt, Human
gugcugcccugccca

SEQ ID NO: 2416273 - RNA, 14 nt, Human
gugcugcccugccc

SEQ ID NO: 2416274 - RNA, 13 nt, Human
gugcugcccugcc

SEQ ID NO: 2416275 - RNA, 12 nt, Human
gugcugcccugc

SEQ ID NO: 2416276 - RNA, 14 nt, Human
gugcucuggacagg

SEQ ID NO: 2416277 - RNA, 13 nt, Human
gugcucuggacag

SEQ ID NO: 2416278 - RNA, 21 nt, Human
gugcucgagacacagugaagc

SEQ ID NO: 2416279 - RNA, 22 nt, Human
gugcucgcuguugcugaauagg

SEQ ID NO: 2416280 - RNA, 15 nt, Human
gugcucuccaagccc

SEQ ID NO: 2416281 - RNA, 16 nt, Human
gugcucugaucaucca

SEQ ID NO: 2416282 - RNA, 14 nt, Human
aagaaguuuaagga

SEQ ID NO: 2416283 - RNA, 17 nt, Human
aagaaguuuaaggaaua

SEQ ID NO: 2416284 - RNA, 14 nt, Human
aagaagauguuuaa

SEQ ID NO: 2416285 - RNA, 18 nt, Human
aagaauaaaauguugaaa

SEQ ID NO: 2416286 - RNA, 15 nt, Human
aagaauaaaauguug

SEQ ID NO: 2416287 - RNA, 16 nt, Human
aagaauaaucacgcuu

SEQ ID NO: 2416288 - RNA, 22 nt, Human
aagaauaaucacgcuuuccuga

SEQ ID NO: 2416289 - RNA, 21 nt, Human
aagaauaaaauguugaaaagu

SEQ ID NO: 2416290 - RNA, 20 nt, Human
aagaauaaaauguugaaaag

SEQ ID NO: 2416291 - RNA, 23 nt, Human
aagaauaaaauguugaaaaguca

SEQ ID NO: 2416292 - RNA, 21 nt, Human
aagaauaauaugcugccaaau

SEQ ID NO: 2416293 - RNA, 21 nt, Human
aagaagaucacgcuccccgcc

SEQ ID NO: 2416294 - RNA, 17 nt, Human
aagaagaucacgcuccc

SEQ ID NO: 2416295 - RNA, 13 nt, Human
aagaagagggaga

SEQ ID NO: 2416296 - RNA, 22 nt, Human
aagaagaggagaaaaaaacuuc

SEQ ID NO: 2416297 - RNA, 19 nt, Human
aagaagauccuaaaacaaa

SEQ ID NO: 2416298 - RNA, 22 nt, Human
aagaagaucacgcuccccgccu

SEQ ID NO: 2416299 - RNA, 19 nt, Human
aagaagugugucacccuua

SEQ ID NO: 2416300 - RNA, 13 nt, Human
aagaagacuuuuu

SEQ ID NO: 2416301 - RNA, 11 nt, Human
aagaagagaca

SEQ ID NO: 2416302 - RNA, 10 nt, Human
aagaagagac

SEQ ID NO: 2416303 - RNA, 22 nt, Human
aagaagagagaagacccuucuc

SEQ ID NO: 2416304 - RNA, 14 nt, Human
aagaagagacagga

SEQ ID NO: 2416305 - RNA, 18 nt, Human
gugcuaucucccccagcc

SEQ ID NO: 2416306 - RNA, 15 nt, Human
gugcuaucuccccca

SEQ ID NO: 2416307 - RNA, 19 nt, Human
gugcuauaggcuggagaag

SEQ ID NO: 2416308 - RNA, 18 nt, Human
gugcuauaggcuggagaa

SEQ ID NO: 2416309 - RNA, 16 nt, Human
gugcuauaggcuggag

SEQ ID NO: 2416310 - RNA, 21 nt, Human
gugcuauacugcauacuuuuu

SEQ ID NO: 2416311 - RNA, 22 nt, Human
gugcuacaaaaacacagcaagg

SEQ ID NO: 2416312 - RNA, 16 nt, Human
gugcuacugauuguuu

SEQ ID NO: 2416313 - RNA, 20 nt, Human
gugcuacguacaugugaggc

SEQ ID NO: 2416314 - RNA, 19 nt, Human
gugcuaccuggguccuuuu

SEQ ID NO: 2416315 - RNA, 16 nt, Human
gugcuaccuggguccu

SEQ ID NO: 2416316 - RNA, 23 nt, Human
aagaauaaucacgcuuuccugaa

SEQ ID NO: 2416317 - RNA, 21 nt, Human
gugcuacacccuuuuccagcu

SEQ ID NO: 2416318 - RNA, 16 nt, Human
aacugccuacuccaaa

SEQ ID NO: 2416319 - RNA, 16 nt, Human
aacugcccccaacuuu

SEQ ID NO: 2416320 - RNA, 16 nt, Human
aacuguccagagagca

SEQ ID NO: 2416321 - RNA, 19 nt, Human
aacugucuauuucugcuga

SEQ ID NO: 2416322 - RNA, 17 nt, Human
aacugucuauuucugcu

SEQ ID NO: 2416323 - RNA, 23 nt, Human
aacugucucgaugcaaugaacac

SEQ ID NO: 2416324 - RNA, 16 nt, Human
aacugucuauuucugc

SEQ ID NO: 2416325 - RNA, 14 nt, Human
aacugucuauuucu

SEQ ID NO: 2416326 - RNA, 14 nt, Human
aacuguccagagag

SEQ ID NO: 2416327 - RNA, 18 nt, Human
aacugcccccucugcccu

SEQ ID NO: 2416328 - RNA, 19 nt, Human
aacugcccccucugcccug

SEQ ID NO: 2416329 - RNA, 20 nt, Human
aacugcccccucugcccugc

SEQ ID NO: 2416330 - RNA, 21 nt, Human
aacugcccccucugcccugcg

SEQ ID NO: 2416331 - RNA, 16 nt, Human
aacugcccccucugcc

SEQ ID NO: 2416332 - RNA, 17 nt, Human
aacugcccccucugccc

SEQ ID NO: 2416333 - RNA, 14 nt, Human
aacugccaguuuug

SEQ ID NO: 2416334 - RNA, 19 nt, Human
aacugccaguuuuguuucc

SEQ ID NO: 2416335 - RNA, 14 nt, Human
aacugcauuagaaa

SEQ ID NO: 2416336 - RNA, 22 nt, Human
aacuucacauauugauuuccgu

SEQ ID NO: 2416337 - RNA, 22 nt, Human
aacuucaccauauuaccacaga

SEQ ID NO: 2416338 - RNA, 14 nt, Human
aacuucacauauug

SEQ ID NO: 2416339 - RNA, 17 nt, Human
aacuguguucauuagaa

SEQ ID NO: 2416340 - RNA, 18 nt, Human
aacuguguggacugugau

SEQ ID NO: 2416341 - RNA, 19 nt, Human
aacugucucucaugaaccu

SEQ ID NO: 2416342 - RNA, 17 nt, Human
aacugugaaguuuacau

SEQ ID NO: 2416343 - RNA, 19 nt, Human
aacugugaaguuuacauug

SEQ ID NO: 2416344 - RNA, 22 nt, Human
aacugugcagagucuagaaguu

SEQ ID NO: 2416345 - RNA, 20 nt, Human
aacuguguacauaacugaaa

SEQ ID NO: 2416346 - RNA, 21 nt, Human
aacuguguacauaacugaaaa

SEQ ID NO: 2416347 - RNA, 23 nt, Human
aacuguguacauaacugaaaaug

SEQ ID NO: 2416348 - RNA, 11 nt, Human
aacuguggccg

SEQ ID NO: 2416349 - RNA, 20 nt, Human
aacuguggccguuaucugga

SEQ ID NO: 2416350 - RNA, 23 nt, Human
aacuucgcaucaaaagacaauuc

SEQ ID NO: 2416351 - RNA, 19 nt, Human
aacuucgcaucaaaagaca

SEQ ID NO: 2416352 - RNA, 17 nt, Human
aacuucgcaucaaaaga

SEQ ID NO: 2416353 - RNA, 18 nt, Human
aacuucagcaguaccuau

SEQ ID NO: 2416354 - RNA, 16 nt, Human
aacuucuaauauauuu

SEQ ID NO: 2416355 - RNA, 14 nt, Human
aacuucuaauauau

SEQ ID NO: 2416356 - RNA, 23 nt, Human
aacuuccuuggacucauuuuaaa

SEQ ID NO: 2416357 - RNA, 11 nt, Human
aacuucagcag

SEQ ID NO: 2416358 - RNA, 20 nt, Human
aacuucgaaagcaucauuau

SEQ ID NO: 2416359 - RNA, 22 nt, Human
aacuuccuuggacucauuuuaa

SEQ ID NO: 2416360 - RNA, 18 nt, Human
aacuucagcgguuuauau

SEQ ID NO: 2416361 - RNA, 13 nt, Human
aacuucagacaua

SEQ ID NO: 2416362 - RNA, 15 nt, Human
aacuucagacacaaa

SEQ ID NO: 2416363 - RNA, 22 nt, Human
aacuucagagggaaaguaaaua

SEQ ID NO: 2416364 - RNA, 24 nt, Human
aacuucuuuguaaucguuaugugu

SEQ ID NO: 2416365 - RNA, 19 nt, Human
aacuugagggcccagagca

SEQ ID NO: 2416366 - RNA, 17 nt, Human
gugcauuuaugagcucu

SEQ ID NO: 2416367 - RNA, 13 nt, Human
gugcauugugcuu

SEQ ID NO: 2416368 - RNA, 11 nt, Human
gugcauugugc

SEQ ID NO: 2416369 - RNA, 21 nt, Human
gugcauuuggugguuucagaa

SEQ ID NO: 2416370 - RNA, 23 nt, Human
gugccaaaaacaacaacaaaaug

SEQ ID NO: 2416371 - RNA, 22 nt, Human
gugccaaacaaaaagguucuca

SEQ ID NO: 2416372 - RNA, 17 nt, Human
gugcauuuucccagaua

SEQ ID NO: 2416373 - RNA, 16 nt, Human
gugcauuuuugugaaa

SEQ ID NO: 2416374 - RNA, 17 nt, Human
gugcauuugaggucugu

SEQ ID NO: 2416375 - RNA, 19 nt, Human
gugcauuugaggucuguuc

SEQ ID NO: 2416376 - RNA, 21 nt, Human
gugcauuggaagaccccaccc

SEQ ID NO: 2416377 - RNA, 20 nt, Human
gugcauuggaagaccccacc

SEQ ID NO: 2416378 - RNA, 23 nt, Human
gugcauucuuuuaaaagacaaga

SEQ ID NO: 2416379 - RNA, 22 nt, Human
gugcauucuuuuaaaagacaag

SEQ ID NO: 2416380 - RNA, 19 nt, Human
gugcauucuuuuaaaagac

SEQ ID NO: 2416381 - RNA, 21 nt, Human
gugcaccuuaccaacuuucug

SEQ ID NO: 2416382 - RNA, 20 nt, Human
gugcaccuuaccaacuuucu

SEQ ID NO: 2416383 - RNA, 18 nt, Human
gugcaccuguacucagga

SEQ ID NO: 2416384 - RNA, 21 nt, Human
gugcaccuguacucaggaggc

SEQ ID NO: 2416385 - RNA, 21 nt, Human
gugcacaagcuccaagcuccc

SEQ ID NO: 2416386 - RNA, 16 nt, Human
gugcacaagcuccaag

SEQ ID NO: 2416387 - RNA, 13 nt, Human
gugcacaagcucc

SEQ ID NO: 2416388 - RNA, 18 nt, Human
gugcaaugaccuuucaau

SEQ ID NO: 2416389 - RNA, 20 nt, Human
gugcacaaauauuuauuuuc

SEQ ID NO: 2416390 - RNA, 16 nt, Human
gugcaccaucccuuuu

SEQ ID NO: 2416391 - RNA, 23 nt, Human
gugcacccaugggcucugacaga

SEQ ID NO: 2416392 - RNA, 19 nt, Human
gugcacccaugggcucuga

SEQ ID NO: 2416393 - RNA, 23 nt, Human
gugcaccaucccuuuuugaagug

SEQ ID NO: 2416394 - RNA, 15 nt, Human
gugcacccacucugc

SEQ ID NO: 2416395 - RNA, 23 nt, Human
gugcacaagcuccaagcucccag

SEQ ID NO: 2416396 - RNA, 21 nt, Human
gugcacaugcacgugugugca

SEQ ID NO: 2416397 - RNA, 11 nt, Human
gugauuaccag

SEQ ID NO: 2416398 - RNA, 16 nt, Human
gugauuaccagggacu

SEQ ID NO: 2416399 - RNA, 17 nt, Human
gugauuaccagggacug

SEQ ID NO: 2416400 - RNA, 18 nt, Human
gugauuaaacgugcagac

SEQ ID NO: 2416401 - RNA, 15 nt, Human
gugauuaaacgugca

SEQ ID NO: 2416402 - RNA, 14 nt, Human
gugauuaaacgugc

SEQ ID NO: 2416403 - RNA, 22 nt, Human
gugauguuuaacaggaagaucu

SEQ ID NO: 2416404 - RNA, 19 nt, Human
gugauuaaacgugcagacu

SEQ ID NO: 2416405 - RNA, 19 nt, Human
gugauuagaggcagaucug

SEQ ID NO: 2416406 - RNA, 17 nt, Human
gugauuacauaaucugu

SEQ ID NO: 2416407 - RNA, 22 nt, Human
gugcaauaaaucugacccagug

SEQ ID NO: 2416408 - RNA, 23 nt, Human
gugcaauaaaucugacccagugc

SEQ ID NO: 2416409 - RNA, 19 nt, Human
gugcaauaaaucugaccca

SEQ ID NO: 2416410 - RNA, 21 nt, Human
gugcaauaaaucugacccagu

SEQ ID NO: 2416411 - RNA, 20 nt, Human
gugcaagugugugcaugugu

SEQ ID NO: 2416412 - RNA, 15 nt, Human
gugcaagugugugca

SEQ ID NO: 2416413 - RNA, 22 nt, Human
gugcaagugugugcacaugugu

SEQ ID NO: 2416414 - RNA, 14 nt, Human
gugauucaaucugu

SEQ ID NO: 2416415 - RNA, 16 nt, Human
gugauucaaucuguaa

SEQ ID NO: 2416416 - RNA, 22 nt, Human
gugauuagagggaggagaauga

SEQ ID NO: 2416417 - RNA, 16 nt, Human
gugauuauuucacuuu

SEQ ID NO: 2416418 - RNA, 21 nt, Human
gugauucaaucuguaaacugu

SEQ ID NO: 2416419 - RNA, 23 nt, Human
gugauucaaucuguaaacugugu

SEQ ID NO: 2416420 - RNA, 22 nt, Human
gugauucaauucaacacucccu

SEQ ID NO: 2416421 - RNA, 19 nt, Human
gugauuauuuguuauuugu

SEQ ID NO: 2416422 - RNA, 14 nt, Human
gugcaagugugugc

SEQ ID NO: 2416423 - RNA, 18 nt, Human
gugcaagugucugugugc

SEQ ID NO: 2416424 - RNA, 15 nt, Human
gugaugugaguugca

SEQ ID NO: 2416425 - RNA, 10 nt, Human
gugauguguc

SEQ ID NO: 2416426 - RNA, 14 nt, Human
gugauguuuguccu

SEQ ID NO: 2416427 - RNA, 14 nt, Human
gugaugucaucugu

SEQ ID NO: 2416428 - RNA, 15 nt, Human
gugaugugaagccaa

SEQ ID NO: 2416429 - RNA, 22 nt, Human
gugaugguuccccuguucacuc

SEQ ID NO: 2416430 - RNA, 14 nt, Human
gugauccuuuuaug

SEQ ID NO: 2416431 - RNA, 22 nt, Human
aacuugagcuuuaaaaaucauu

SEQ ID NO: 2416432 - RNA, 14 nt, Human
gugaucucagauca

SEQ ID NO: 2416433 - RNA, 15 nt, Human
gugaucucagaucag

SEQ ID NO: 2416434 - RNA, 14 nt, Human
gugaucucauuuaa

SEQ ID NO: 2416435 - RNA, 19 nt, Human
gugauccuuuuauguuauu

SEQ ID NO: 2416436 - RNA, 12 nt, Human
gugaucuccaua

SEQ ID NO: 2416437 - RNA, 13 nt, Human
gugaucuccauau

SEQ ID NO: 2416438 - RNA, 15 nt, Human
gugaucugaacagaa

SEQ ID NO: 2416439 - RNA, 22 nt, Human
gugaucuuggcuuacugcagcc

SEQ ID NO: 2416440 - RNA, 23 nt, Human
gugaugguuccccuguucacucu

SEQ ID NO: 2416441 - RNA, 15 nt, Human
gugaugaacuuucuc

SEQ ID NO: 2416442 - RNA, 14 nt, Human
gugaugaacuuucu

SEQ ID NO: 2416443 - RNA, 18 nt, Human
uaggaaauauuuauuuua

SEQ ID NO: 2416444 - RNA, 19 nt, Human
uaggaaauaaaaccuuuca

SEQ ID NO: 2416445 - RNA, 20 nt, Human
uagcuguuauuucuauuuuu

SEQ ID NO: 2416446 - RNA, 17 nt, Human
uagcuguuauuucuauu

SEQ ID NO: 2416447 - RNA, 13 nt, Human
uagcuguugagcu

SEQ ID NO: 2416448 - RNA, 17 nt, Human
uagcuguugagcuguuu

SEQ ID NO: 2416449 - RNA, 16 nt, Human
uagcuguugagcuguu

SEQ ID NO: 2416450 - RNA, 14 nt, Human
uagcugugggggug

SEQ ID NO: 2416451 - RNA, 13 nt, Human
uagcugugggggu

SEQ ID NO: 2416452 - RNA, 14 nt, Human
uagcugugugaaau

SEQ ID NO: 2416453 - RNA, 14 nt, Human
uagcuguggugagg

SEQ ID NO: 2416454 - RNA, 18 nt, Human
uagcuguggugagguggg

SEQ ID NO: 2416455 - RNA, 19 nt, Human
uaggaaauauuuauuuuaa

SEQ ID NO: 2416456 - RNA, 16 nt, Human
uaggaaauccagggug

SEQ ID NO: 2416457 - RNA, 14 nt, Human
uaggaaaugaaugu

SEQ ID NO: 2416458 - RNA, 20 nt, Human
uaggaaauaaaaccuuucaa

SEQ ID NO: 2416459 - RNA, 15 nt, Human
uaggacgccacccag

SEQ ID NO: 2416460 - RNA, 22 nt, Human
uaggaccuuuccaccacagcca

SEQ ID NO: 2416461 - RNA, 21 nt, Human
uaggaccuuuccaccacagcc

SEQ ID NO: 2416462 - RNA, 19 nt, Human
uaggaccuuuccaccacag

SEQ ID NO: 2416463 - RNA, 16 nt, Human
uaggacgccacccagc

SEQ ID NO: 2416464 - RNA, 19 nt, Human
uaggacucaaaguuucaga

SEQ ID NO: 2416465 - RNA, 14 nt, Human
uaggacucugaggc

SEQ ID NO: 2416466 - RNA, 15 nt, Human
uaggacucugaggcu

SEQ ID NO: 2416467 - RNA, 16 nt, Human
uaggacucugaggcuc

SEQ ID NO: 2416468 - RNA, 23 nt, Human
uaggagccugcuggucacagccu

SEQ ID NO: 2416469 - RNA, 15 nt, Human
uaggagccugcuggu

SEQ ID NO: 2416470 - RNA, 18 nt, Human
uaggagcugccuuggcuc

SEQ ID NO: 2416471 - RNA, 23 nt, Human
uaggagcugccuuggcucagaca

SEQ ID NO: 2416472 - RNA, 14 nt, Human
uaggagcugggagg

SEQ ID NO: 2416473 - RNA, 20 nt, Human
uaggaggaccagagcuacug

SEQ ID NO: 2416474 - RNA, 18 nt, Human
uaggagcugggaggaaaa

SEQ ID NO: 2416475 - RNA, 11 nt, Human
uaggagccugc

SEQ ID NO: 2416476 - RNA, 14 nt, Human
uaggagcagagcuc

SEQ ID NO: 2416477 - RNA, 18 nt, Human
uaggagaggaugagagcc

SEQ ID NO: 2416478 - RNA, 14 nt, Human
uaggagaggaugag

SEQ ID NO: 2416479 - RNA, 22 nt, Human
uaggagaggaugagagcccaga

SEQ ID NO: 2416480 - RNA, 16 nt, Human
uaggagauaccagguu

SEQ ID NO: 2416481 - RNA, 22 nt, Human
uaggagauaccagguugaaaga

SEQ ID NO: 2416482 - RNA, 15 nt, Human
uaggagaagccagga

SEQ ID NO: 2416483 - RNA, 16 nt, Human
uaggagaagccaggaa

SEQ ID NO: 2416484 - RNA, 22 nt, Human
uaggagaauugcuugaaccugg

SEQ ID NO: 2416485 - RNA, 14 nt, Human
uaggagagaccgag

SEQ ID NO: 2416486 - RNA, 14 nt, Human
uaggagaccaaggc

SEQ ID NO: 2416487 - RNA, 21 nt, Human
uaggagaccaaggcgggagca

SEQ ID NO: 2416488 - RNA, 20 nt, Human
uaggagaaccaaaucuggaa

SEQ ID NO: 2416489 - RNA, 12 nt, Human
uaggagaagcca

SEQ ID NO: 2416490 - RNA, 17 nt, Human
uaggagaaccaaaucug

SEQ ID NO: 2416491 - RNA, 18 nt, Human
uaggacucugaggcucuu

SEQ ID NO: 2416492 - RNA, 14 nt, Human
uaggacuguagaaa

SEQ ID NO: 2416493 - RNA, 13 nt, Human
uaggacuguagaa

SEQ ID NO: 2416494 - RNA, 14 nt, Human
uaggcauuguggga

SEQ ID NO: 2416495 - RNA, 12 nt, Human
uaggcagagccu

SEQ ID NO: 2416496 - RNA, 22 nt, Human
uaggcagacacagggacuugaa

SEQ ID NO: 2416497 - RNA, 17 nt, Human
uaggcagacuggguuuc

SEQ ID NO: 2416498 - RNA, 16 nt, Human
uaggcagagccuuugg

SEQ ID NO: 2416499 - RNA, 13 nt, Human
uaggcagagccuu

SEQ ID NO: 2416500 - RNA, 20 nt, Human
uaggcagauugaaaaggaca

SEQ ID NO: 2416501 - RNA, 13 nt, Human
uaggcagcagcuu

SEQ ID NO: 2416502 - RNA, 16 nt, Human
uaggcauuugcugaau

SEQ ID NO: 2416503 - RNA, 20 nt, Human
uaggcauuugcugaauacag

SEQ ID NO: 2416504 - RNA, 13 nt, Human
uaggaggaugggc

SEQ ID NO: 2416505 - RNA, 14 nt, Human
uaggagggagacac

SEQ ID NO: 2416506 - RNA, 16 nt, Human
uaggagggaguuaucu

SEQ ID NO: 2416507 - RNA, 18 nt, Human
uaggcaaccuuuauuuuu

SEQ ID NO: 2416508 - RNA, 18 nt, Human
uaggagggaguuaucuaa

SEQ ID NO: 2416509 - RNA, 21 nt, Human
uaggagggaguuaucuaaaag

SEQ ID NO: 2416510 - RNA, 15 nt, Human
uaggcagacacaggg

SEQ ID NO: 2416511 - RNA, 14 nt, Human
uaggcagacacagg

SEQ ID NO: 2416512 - RNA, 12 nt, Human
uaggcagacaca

SEQ ID NO: 2416513 - RNA, 11 nt, Human
uaggcagacac

SEQ ID NO: 2416514 - RNA, 14 nt, Human
uagggagagaagau

SEQ ID NO: 2416515 - RNA, 15 nt, Human
uagggagagaagaua

SEQ ID NO: 2416516 - RNA, 14 nt, Human
uagggaccccuccu

SEQ ID NO: 2416517 - RNA, 16 nt, Human
uagggaccccuccucc

SEQ ID NO: 2416518 - RNA, 15 nt, Human
uagggaccccuccuc

SEQ ID NO: 2416519 - RNA, 20 nt, Human
uagggacucaauuucucccc

SEQ ID NO: 2416520 - RNA, 17 nt, Human
uagggaccccuccuccc

SEQ ID NO: 2416521 - RNA, 13 nt, Human
uagggacuuaaaa

SEQ ID NO: 2416522 - RNA, 16 nt, Human
uagggagaaauguugu

SEQ ID NO: 2416523 - RNA, 14 nt, Human
uagggacuuaaaaa

SEQ ID NO: 2416524 - RNA, 16 nt, Human
uaggcaggacaugcug

SEQ ID NO: 2416525 - RNA, 12 nt, Human
uaggcauuuccu

SEQ ID NO: 2416526 - RNA, 21 nt, Human
uagggaaggauacaaaagcau

SEQ ID NO: 2416527 - RNA, 14 nt, Human
uagggaagggccug

SEQ ID NO: 2416528 - RNA, 14 nt, Human
uagggaaguaacag

SEQ ID NO: 2416529 - RNA, 20 nt, Human
uagggaagggugguggagcc

SEQ ID NO: 2416530 - RNA, 22 nt, Human
uagggacaauacagaacccauu

SEQ ID NO: 2416531 - RNA, 21 nt, Human
uagggaagggugguggagcca

SEQ ID NO: 2416532 - RNA, 21 nt, Human
uagggaauggcacagcccaaa

SEQ ID NO: 2416533 - RNA, 10 nt, Human
uagcuguggg

SEQ ID NO: 2416534 - RNA, 16 nt, Human
uagcuaucagaagacc

SEQ ID NO: 2416535 - RNA, 15 nt, Human
uagcuaucagaagac

SEQ ID NO: 2416536 - RNA, 14 nt, Human
uagcuaucagaaga

SEQ ID NO: 2416537 - RNA, 17 nt, Human
uagcuauaucuauauau

SEQ ID NO: 2416538 - RNA, 16 nt, Human
uagcugugaccucucc

SEQ ID NO: 2416539 - RNA, 14 nt, Human
uagcuauauccaug

SEQ ID NO: 2416540 - RNA, 15 nt, Human
uagcuauauccaugu

SEQ ID NO: 2416541 - RNA, 13 nt, Human
uagcuagaggaac

SEQ ID NO: 2416542 - RNA, 14 nt, Human
uagcuagaggaacc

SEQ ID NO: 2416543 - RNA, 15 nt, Human
uagcuagaggaacca

SEQ ID NO: 2416544 - RNA, 16 nt, Human
uagcuauauccaugua

SEQ ID NO: 2416545 - RNA, 17 nt, Human
uagcuauauccauguac

SEQ ID NO: 2416546 - RNA, 18 nt, Human
uagcuauauccauguacu

SEQ ID NO: 2416547 - RNA, 19 nt, Human
uagcuauauccauguacug

SEQ ID NO: 2416548 - RNA, 20 nt, Human
uagcuauauccauguacugu

SEQ ID NO: 2416549 - RNA, 21 nt, Human
uagcuauauccauguacugua

SEQ ID NO: 2416550 - RNA, 15 nt, Human
uagcuauaucuauau

SEQ ID NO: 2416551 - RNA, 22 nt, Human
uagcuauauccauguacuguag

SEQ ID NO: 2416552 - RNA, 15 nt, Human
uagcuacaggaagca

SEQ ID NO: 2416553 - RNA, 20 nt, Human
uagcuacaggaagcacccca

SEQ ID NO: 2416554 - RNA, 19 nt, Human
uagcuaauguaauaacugu

SEQ ID NO: 2416555 - RNA, 12 nt, Human
uagcuaauguaa

SEQ ID NO: 2416556 - RNA, 18 nt, Human
acaaucauuugcuuuuug

SEQ ID NO: 2416557 - RNA, 22 nt, Human
acaaucauugcugaaaauggua

SEQ ID NO: 2416558 - RNA, 21 nt, Human
acaaucauugcugaaaauggu

SEQ ID NO: 2416559 - RNA, 18 nt, Human
acaaucauugcugaaaau

SEQ ID NO: 2416560 - RNA, 14 nt, Human
acaaucauugcuga

SEQ ID NO: 2416561 - RNA, 13 nt, Human
acaaucauugcug

SEQ ID NO: 2416562 - RNA, 19 nt, Human
acaaucaugaaauaugcau

SEQ ID NO: 2416563 - RNA, 18 nt, Human
acaaucaugaaauaugca

SEQ ID NO: 2416564 - RNA, 12 nt, Human
acaaugacuuac

SEQ ID NO: 2416565 - RNA, 15 nt, Human
acaauccuagugcuu

SEQ ID NO: 2416566 - RNA, 16 nt, Human
acaauccuagugcuuu

SEQ ID NO: 2416567 - RNA, 17 nt, Human
acaauccuagugcuuuc

SEQ ID NO: 2416568 - RNA, 22 nt, Human
acaauccuagugcuuuccuuuu

SEQ ID NO: 2416569 - RNA, 16 nt, Human
acaaucgauggccuug

SEQ ID NO: 2416570 - RNA, 23 nt, Human
acaauccuagugcuuuccuuuuu

SEQ ID NO: 2416571 - RNA, 17 nt, Human
acaaucgauggccuugc

SEQ ID NO: 2416572 - RNA, 17 nt, Human
acaaugacuuacuguac

SEQ ID NO: 2416573 - RNA, 18 nt, Human
acaaugacuuacuguaca

SEQ ID NO: 2416574 - RNA, 16 nt, Human
acaaugacauuuauau

SEQ ID NO: 2416575 - RNA, 22 nt, Human
acaaggacagccccuccuccau

SEQ ID NO: 2416576 - RNA, 21 nt, Human
acaaggacagccccuccucca

SEQ ID NO: 2416577 - RNA, 18 nt, Human
acaaggacuaggguccug

SEQ ID NO: 2416578 - RNA, 19 nt, Human
acaaggacuaggguccugg

SEQ ID NO: 2416579 - RNA, 15 nt, Human
acaaggacuuccugu

SEQ ID NO: 2416580 - RNA, 16 nt, Human
acaaggauagaugcug

SEQ ID NO: 2416581 - RNA, 17 nt, Human
acaaggauagaugcugg

SEQ ID NO: 2416582 - RNA, 18 nt, Human
acaaggauagaugcuggc

SEQ ID NO: 2416583 - RNA, 21 nt, Human
acaaggauagaugcuggccca

SEQ ID NO: 2416584 - RNA, 21 nt, Human
acaauaaaauuuuuuuucaug

SEQ ID NO: 2416585 - RNA, 23 nt, Human
acaauaaaauuuuuuuucauguu

SEQ ID NO: 2416586 - RNA, 12 nt, Human
acaauaaagaga

SEQ ID NO: 2416587 - RNA, 14 nt, Human
acaagacugcacau

SEQ ID NO: 2416588 - RNA, 13 nt, Human
acaagacugcaca

SEQ ID NO: 2416589 - RNA, 14 nt, Human
acaagacuucagua

SEQ ID NO: 2416590 - RNA, 19 nt, Human
acaagaccccgucucaaaa

SEQ ID NO: 2416591 - RNA, 18 nt, Human
acaagaccacguuucuaa

SEQ ID NO: 2416592 - RNA, 17 nt, Human
acaagacuucaguaugu

SEQ ID NO: 2416593 - RNA, 16 nt, Human
acaagacuucaguaug

SEQ ID NO: 2416594 - RNA, 21 nt, Human
acaagacuucaguauguuguc

SEQ ID NO: 2416595 - RNA, 22 nt, Human
acaaucaguccccucccaucug

SEQ ID NO: 2416596 - RNA, 20 nt, Human
acaaucaguccccucccauc

SEQ ID NO: 2416597 - RNA, 19 nt, Human
acaaucaguccccucccau

SEQ ID NO: 2416598 - RNA, 18 nt, Human
acaaucaguccccuccca

SEQ ID NO: 2416599 - RNA, 17 nt, Human
acaaucaguccccuccc

SEQ ID NO: 2416600 - RNA, 16 nt, Human
acaaucaguccccucc

SEQ ID NO: 2416601 - RNA, 15 nt, Human
acaaucaguccccuc

SEQ ID NO: 2416602 - RNA, 13 nt, Human
acaauacccccag

SEQ ID NO: 2416603 - RNA, 16 nt, Human
acaauacaugcugcua

SEQ ID NO: 2416604 - RNA, 23 nt, Human
acaauacaucccuuaccugggaa

SEQ ID NO: 2416605 - RNA, 14 nt, Human
acaauaauuuucua

SEQ ID NO: 2416606 - RNA, 12 nt, Human
acaauaauuuca

SEQ ID NO: 2416607 - RNA, 13 nt, Human
acaauaauuucag

SEQ ID NO: 2416608 - RNA, 14 nt, Human
acaauaaauaaucu

SEQ ID NO: 2416609 - RNA, 23 nt, Human
acaauaaagaucgcccccaccuc

SEQ ID NO: 2416610 - RNA, 14 nt, Human
acaauaaagagauu

SEQ ID NO: 2416611 - RNA, 22 nt, Human
acaauaaaauuuuuuuucaugu

SEQ ID NO: 2416612 - RNA, 15 nt, Human
acaauaaaugugcuu

SEQ ID NO: 2416613 - RNA, 16 nt, Human
acaauaacuacugugu

SEQ ID NO: 2416614 - RNA, 17 nt, Human
acaauaacuacuguguu

SEQ ID NO: 2416615 - RNA, 14 nt, Human
acaauaaaugugca

SEQ ID NO: 2416616 - RNA, 22 nt, Human
acaauaacuacuguguuccugg

SEQ ID NO: 2416617 - RNA, 18 nt, Human
acaauaacuacuguguuc

SEQ ID NO: 2416618 - RNA, 19 nt, Human
acaauaacuacuguguucc

SEQ ID NO: 2416619 - RNA, 20 nt, Human
acaauaacuacuguguuccu

SEQ ID NO: 2416620 - RNA, 21 nt, Human
acaauaacuacuguguuccug

SEQ ID NO: 2416621 - RNA, 21 nt, Human
acaauaaguuaacuauuuuau

SEQ ID NO: 2416622 - RNA, 14 nt, Human
uagauggcuccucu

SEQ ID NO: 2416623 - RNA, 20 nt, Human
uagaugcugaugauuuguuu

SEQ ID NO: 2416624 - RNA, 14 nt, Human
uagauggauucucc

SEQ ID NO: 2416625 - RNA, 16 nt, Human
uagaugcuggcccagg

SEQ ID NO: 2416626 - RNA, 18 nt, Human
uagaugcuggcccagggc

SEQ ID NO: 2416627 - RNA, 21 nt, Human
uagaugcuggcccagggccca

SEQ ID NO: 2416628 - RNA, 22 nt, Human
uagaugcuggcccagggcccag

SEQ ID NO: 2416629 - RNA, 19 nt, Human
uagcauggcugccaauggg

SEQ ID NO: 2416630 - RNA, 13 nt, Human
uagaugggaauga

SEQ ID NO: 2416631 - RNA, 12 nt, Human
uagcauguaaug

SEQ ID NO: 2416632 - RNA, 19 nt, Human
uagaugcaagauauuuaua

SEQ ID NO: 2416633 - RNA, 15 nt, Human
uagaugcaguucuga

SEQ ID NO: 2416634 - RNA, 13 nt, Human
uagaugcuggccc

SEQ ID NO: 2416635 - RNA, 14 nt, Human
uagaugcuggccca

SEQ ID NO: 2416636 - RNA, 15 nt, Human
uagaugcuggcccag

SEQ ID NO: 2416637 - RNA, 14 nt, Human
uagaugcugacugu

SEQ ID NO: 2416638 - RNA, 23 nt, Human
uagaugcugacuguacuccuccc

SEQ ID NO: 2416639 - RNA, 21 nt, Human
uagccaaggccaaaggaagca

SEQ ID NO: 2416640 - RNA, 20 nt, Human
uagccaaggugggcugagcc

SEQ ID NO: 2416641 - RNA, 21 nt, Human
uagccaaggugggcugagccc

SEQ ID NO: 2416642 - RNA, 23 nt, Human
uagccaaggugggcugagcccug

SEQ ID NO: 2416643 - RNA, 14 nt, Human
uagccaaggccaaa

SEQ ID NO: 2416644 - RNA, 20 nt, Human
uagcauuuuugauuuaugca

SEQ ID NO: 2416645 - RNA, 14 nt, Human
uagcauuuuugauu

SEQ ID NO: 2416646 - RNA, 22 nt, Human
uagcauuuugcuaaaugugaau

SEQ ID NO: 2416647 - RNA, 23 nt, Human
uagcauguauugugucuuuugca

SEQ ID NO: 2416648 - RNA, 16 nt, Human
uagcauuuugcuaaau

SEQ ID NO: 2416649 - RNA, 19 nt, Human
uagcauguauugugucuuu

SEQ ID NO: 2416650 - RNA, 18 nt, Human
uagcauguauugugucuu

SEQ ID NO: 2416651 - RNA, 15 nt, Human
uagcauguauugugu

SEQ ID NO: 2416652 - RNA, 13 nt, Human
uagcauguauugu

SEQ ID NO: 2416653 - RNA, 20 nt, Human
acaagacccaaaaggcagaa

SEQ ID NO: 2416654 - RNA, 19 nt, Human
acaagacccuugugguccc

SEQ ID NO: 2416655 - RNA, 19 nt, Human
acaagaccacguuucuaaa

SEQ ID NO: 2416656 - RNA, 14 nt, Human
acaacagauuugug

SEQ ID NO: 2416657 - RNA, 13 nt, Human
acaacagauuugu

SEQ ID NO: 2416658 - RNA, 21 nt, Human
acaacacucauugaccugagg

SEQ ID NO: 2416659 - RNA, 23 nt, Human
acaacacucauugaccugaggcc

SEQ ID NO: 2416660 - RNA, 19 nt, Human
acaacagaagcuucagaag

SEQ ID NO: 2416661 - RNA, 13 nt, Human
acaacagaagcuu

SEQ ID NO: 2416662 - RNA, 11 nt, Human
acaacagaagu

SEQ ID NO: 2416663 - RNA, 13 nt, Human
acaacagaaguca

SEQ ID NO: 2416664 - RNA, 17 nt, Human
acaacaaaaagcuuccc

SEQ ID NO: 2416665 - RNA, 15 nt, Human
uagccagaggagaga

SEQ ID NO: 2416666 - RNA, 11 nt, Human
uagccagagga

SEQ ID NO: 2416667 - RNA, 18 nt, Human
uagccaauauuuuucuua

SEQ ID NO: 2416668 - RNA, 14 nt, Human
uagccaauguggga

SEQ ID NO: 2416669 - RNA, 20 nt, Human
uagccacaaaauugggaaag

SEQ ID NO: 2416670 - RNA, 19 nt, Human
uagccacaucccuuugaaa

SEQ ID NO: 2416671 - RNA, 18 nt, Human
uagccacuuaccuucaau

SEQ ID NO: 2416672 - RNA, 22 nt, Human
uagccacuuaccuucaauaaag

SEQ ID NO: 2416673 - RNA, 18 nt, Human
acaaauuuacagagacag

SEQ ID NO: 2416674 - RNA, 15 nt, Human
uagccagacacucug

SEQ ID NO: 2416675 - RNA, 14 nt, Human
uagccagacacucu

SEQ ID NO: 2416676 - RNA, 21 nt, Human
uagccacuuuggucccgugca

SEQ ID NO: 2416677 - RNA, 23 nt, Human
uagccacuuaccuucaauaaagu

SEQ ID NO: 2416678 - RNA, 16 nt, Human
uagccagacacucugc

SEQ ID NO: 2416679 - RNA, 19 nt, Human
acaaauuuacagagacaga

SEQ ID NO: 2416680 - RNA, 18 nt, Human
uagccagcacacagggca

SEQ ID NO: 2416681 - RNA, 19 nt, Human
uagccagcacacagggcag

SEQ ID NO: 2416682 - RNA, 21 nt, Human
uagagcaaaauugauguguuu

SEQ ID NO: 2416683 - RNA, 14 nt, Human
uagagcaaaauuga

SEQ ID NO: 2416684 - RNA, 21 nt, Human
uagagauuaccuccugagaaa

SEQ ID NO: 2416685 - RNA, 19 nt, Human
uagaggagaaacuggaacu

SEQ ID NO: 2416686 - RNA, 22 nt, Human
uagagcaaaauugauguguuua

SEQ ID NO: 2416687 - RNA, 16 nt, Human
uagagcacacuguagc

SEQ ID NO: 2416688 - RNA, 17 nt, Human
uagagcacacuguagca

SEQ ID NO: 2416689 - RNA, 20 nt, Human
uagagauguuuuuaaaaguu

SEQ ID NO: 2416690 - RNA, 19 nt, Human
uagagauguuuuuaaaagu

SEQ ID NO: 2416691 - RNA, 17 nt, Human
uagagauuaccuccuga

SEQ ID NO: 2416692 - RNA, 18 nt, Human
uagagauuaccuccugag

SEQ ID NO: 2416693 - RNA, 19 nt, Human
uagagauuaccuccugaga

SEQ ID NO: 2416694 - RNA, 21 nt, Human
uagagaucugguuuugcuauu

SEQ ID NO: 2416695 - RNA, 14 nt, Human
uagagauggaggag

SEQ ID NO: 2416696 - RNA, 19 nt, Human
uagagauggaggaggaggc

SEQ ID NO: 2416697 - RNA, 12 nt, Human
uagagauguuuu

SEQ ID NO: 2416698 - RNA, 19 nt, Human
uagagaucauccuuuccag

SEQ ID NO: 2416699 - RNA, 19 nt, Human
uagagauaugcagaaggaa

SEQ ID NO: 2416700 - RNA, 20 nt, Human
uagagauaugcagaaggaag

SEQ ID NO: 2416701 - RNA, 18 nt, Human
acaaaggguuuuaaugua

SEQ ID NO: 2416702 - RNA, 17 nt, Human
acaaaggguuuuaaugu

SEQ ID NO: 2416703 - RNA, 17 nt, Human
uagagauaguacauaaa

SEQ ID NO: 2416704 - RNA, 18 nt, Human
uagagaucugguuuugcu

SEQ ID NO: 2416705 - RNA, 17 nt, Human
uagagaucugguuuugc

SEQ ID NO: 2416706 - RNA, 23 nt, Human
uagagaucauccuuuccagcaug

SEQ ID NO: 2416707 - RNA, 20 nt, Human
uagagaucauccuuuccagc

SEQ ID NO: 2416708 - RNA, 20 nt, Human
uagagaucugguuuugcuau

SEQ ID NO: 2416709 - RNA, 19 nt, Human
uagagaucugguuuugcua

SEQ ID NO: 2416710 - RNA, 17 nt, Human
uagagaugacugagucc

SEQ ID NO: 2416711 - RNA, 15 nt, Human
uagaggccagccugg

SEQ ID NO: 2416712 - RNA, 20 nt, Human
uagaggccagccccacccag

SEQ ID NO: 2416713 - RNA, 16 nt, Human
uagaggccagccuggc

SEQ ID NO: 2416714 - RNA, 15 nt, Human
uagauauaugcucug

SEQ ID NO: 2416715 - RNA, 22 nt, Human
uagaggagaaacuggaacucuc

SEQ ID NO: 2416716 - RNA, 20 nt, Human
uagaggaucccucucuggau

SEQ ID NO: 2416717 - RNA, 18 nt, Human
uagaggccagccccaccc

SEQ ID NO: 2416718 - RNA, 20 nt, Human
uagagcaccuaguccaguga

SEQ ID NO: 2416719 - RNA, 23 nt, Human
uagagauguuuuuaaaaguuuca

SEQ ID NO: 2416720 - RNA, 19 nt, Human
uagaggcagggaggggacu

SEQ ID NO: 2416721 - RNA, 14 nt, Human
uagauauuauucau

SEQ ID NO: 2416722 - RNA, 21 nt, Human
uagaugagauuguuuuaucau

SEQ ID NO: 2416723 - RNA, 19 nt, Human
uagauauaugcucugcaug

SEQ ID NO: 2416724 - RNA, 19 nt, Human
uagauauccacuugagaca

SEQ ID NO: 2416725 - RNA, 23 nt, Human
uagauaucgacuuguuuuugcac

SEQ ID NO: 2416726 - RNA, 11 nt, Human
acaaaagcaug

SEQ ID NO: 2416727 - RNA, 22 nt, Human
acaaaagcaugugagacugguu

SEQ ID NO: 2416728 - RNA, 18 nt, Human
acaaaaggauaaugaaua

SEQ ID NO: 2416729 - RNA, 16 nt, Human
aauuguuacaaauugu

SEQ ID NO: 2416730 - RNA, 18 nt, Human
aauuguugacaguucuga

SEQ ID NO: 2416731 - RNA, 13 nt, Human
aauuguugacagu

SEQ ID NO: 2416732 - RNA, 21 nt, Human
aauuguguuuauaauuuuaaa

SEQ ID NO: 2416733 - RNA, 20 nt, Human
aauuguguuuauaauuuuaa

SEQ ID NO: 2416734 - RNA, 15 nt, Human
aauuguuaagauaug

SEQ ID NO: 2416735 - RNA, 11 nt, Human
acaaaggcaag

SEQ ID NO: 2416736 - RNA, 15 nt, Human
acaaaggguuuuaau

SEQ ID NO: 2416737 - RNA, 22 nt, Human
acaaaggaugcccaaagaugca

SEQ ID NO: 2416738 - RNA, 13 nt, Human
acaaagcagccac

SEQ ID NO: 2416739 - RNA, 18 nt, Human
acaaagcacaguuugaac

SEQ ID NO: 2416740 - RNA, 17 nt, Human
acaaagcacaguuugaa

SEQ ID NO: 2416741 - RNA, 16 nt, Human
acaaagcacaguuuga

SEQ ID NO: 2416742 - RNA, 16 nt, Human
acaaagcacaguguua

SEQ ID NO: 2416743 - RNA, 19 nt, Human
acaaagcacaguuugaaca

SEQ ID NO: 2416744 - RNA, 12 nt, Human
acaaagcagcca

SEQ ID NO: 2416745 - RNA, 21 nt, Human
acaaagauguuugucagauau

SEQ ID NO: 2416746 - RNA, 22 nt, Human
acaaagauguuugucagauaug

SEQ ID NO: 2416747 - RNA, 23 nt, Human
acaaagauguuugucagauauga

SEQ ID NO: 2416748 - RNA, 14 nt, Human
acaaagcacagugu

SEQ ID NO: 2416749 - RNA, 15 nt, Human
acaaagcacaguguu

SEQ ID NO: 2416750 - RNA, 24 nt, Human
acaaagauguuugucagauaugau

SEQ ID NO: 2416751 - RNA, 20 nt, Human
aauuguugacaguucugaag

SEQ ID NO: 2416752 - RNA, 22 nt, Human
uagugaaacucguuaauuugua

SEQ ID NO: 2416753 - RNA, 19 nt, Human
uagugaaggcuucucucug

SEQ ID NO: 2416754 - RNA, 23 nt, Human
uagugaaaugaauauuuaaauaa

SEQ ID NO: 2416755 - RNA, 18 nt, Human
uaguccuagaggaccuga

SEQ ID NO: 2416756 - RNA, 21 nt, Human
uaguccgugcugacagcugcu

SEQ ID NO: 2416757 - RNA, 22 nt, Human
uaguccgugcugacagcugcuc

SEQ ID NO: 2416758 - RNA, 14 nt, Human
uaguccuauucuau

SEQ ID NO: 2416759 - RNA, 23 nt, Human
uaguccgugcugacagcugcucc

SEQ ID NO: 2416760 - RNA, 24 nt, Human
uagugaaaccccaucucuacugaa

SEQ ID NO: 2416761 - RNA, 16 nt, Human
uagucccuuccccucc

SEQ ID NO: 2416762 - RNA, 20 nt, Human
uagucccuuccccucccugg

SEQ ID NO: 2416763 - RNA, 22 nt, Human
uagucccuuccccucccuggcu

SEQ ID NO: 2416764 - RNA, 23 nt, Human
uagucccuuccccucccuggcuc

SEQ ID NO: 2416765 - RNA, 23 nt, Human
uaguccagcuuuguucuucuuaa

SEQ ID NO: 2416766 - RNA, 22 nt, Human
uaguccagcuuuguucuucuua

SEQ ID NO: 2416767 - RNA, 14 nt, Human
uaguacuaacuccu

SEQ ID NO: 2416768 - RNA, 16 nt, Human
uaguaccugaaaagua

SEQ ID NO: 2416769 - RNA, 20 nt, Human
uaguaccauuuauacaaauu

SEQ ID NO: 2416770 - RNA, 18 nt, Human
uaguaccugaaaaguaac

SEQ ID NO: 2416771 - RNA, 18 nt, Human
uaguaccauuuauacaaa

SEQ ID NO: 2416772 - RNA, 19 nt, Human
uaguaccauuuauacaaau

SEQ ID NO: 2416773 - RNA, 15 nt, Human
uaguaccugaaaagu

SEQ ID NO: 2416774 - RNA, 17 nt, Human
uagucccuuccacaccc

SEQ ID NO: 2416775 - RNA, 12 nt, Human
uagucccuucca

SEQ ID NO: 2416776 - RNA, 15 nt, Human
uagucccagcuacuc

SEQ ID NO: 2416777 - RNA, 14 nt, Human
uagucccuuccccu

SEQ ID NO: 2416778 - RNA, 15 nt, Human
uagucccuuccccuc

SEQ ID NO: 2416779 - RNA, 18 nt, Human
uagucccucaugcaaauc

SEQ ID NO: 2416780 - RNA, 20 nt, Human
uagucccagcuacucaggag

SEQ ID NO: 2416781 - RNA, 14 nt, Human
uagucccagcuacu

SEQ ID NO: 2416782 - RNA, 21 nt, Human
uagucccagcuacucagaagc

SEQ ID NO: 2416783 - RNA, 14 nt, Human
uaguuacagcugug

SEQ ID NO: 2416784 - RNA, 13 nt, Human
uaguuaauucugu

SEQ ID NO: 2416785 - RNA, 19 nt, Human
uaguuaaauuucuggaccu

SEQ ID NO: 2416786 - RNA, 14 nt, Human
uaguuaagacauga

SEQ ID NO: 2416787 - RNA, 19 nt, Human
uaguuaagacaugauuucc

SEQ ID NO: 2416788 - RNA, 21 nt, Human
uaguuaagacaugauuuccuu

SEQ ID NO: 2416789 - RNA, 23 nt, Human
uaguuaagacaugauuuccuuga

SEQ ID NO: 2416790 - RNA, 23 nt, Human
uaguuaauauugugaagaaaaau

SEQ ID NO: 2416791 - RNA, 15 nt, Human
uaguuaaauuucugg

SEQ ID NO: 2416792 - RNA, 12 nt, Human
uaguuaaauuuc

SEQ ID NO: 2416793 - RNA, 17 nt, Human
uaguguuucugugcaug

SEQ ID NO: 2416794 - RNA, 16 nt, Human
uaguguuucugugcau

SEQ ID NO: 2416795 - RNA, 15 nt, Human
uaguguuucugugca

SEQ ID NO: 2416796 - RNA, 17 nt, Human
uagugacccggaggcca

SEQ ID NO: 2416797 - RNA, 20 nt, Human
uaguguuuggguauauucau

SEQ ID NO: 2416798 - RNA, 23 nt, Human
uaguguuggagaagaacugaaau

SEQ ID NO: 2416799 - RNA, 21 nt, Human
uagugaaggcuucucucugug

SEQ ID NO: 2416800 - RNA, 21 nt, Human
uagugaaucacguaaagcuag

SEQ ID NO: 2416801 - RNA, 22 nt, Human
uaguaaaauucuacuguaugga

SEQ ID NO: 2416802 - RNA, 12 nt, Human
uaguaaagaaau

SEQ ID NO: 2416803 - RNA, 13 nt, Human
uaguaaagaaaug

SEQ ID NO: 2416804 - RNA, 14 nt, Human
uaguaaagaaauga

SEQ ID NO: 2416805 - RNA, 13 nt, Human
uaguaaagaaauu

SEQ ID NO: 2416806 - RNA, 21 nt, Human
acacauaauuaaaguguccau

SEQ ID NO: 2416807 - RNA, 20 nt, Human
acacauaauuaaagugucca

SEQ ID NO: 2416808 - RNA, 19 nt, Human
acacauaauuaaagugucc

SEQ ID NO: 2416809 - RNA, 18 nt, Human
acacauaauuaaaguguc

SEQ ID NO: 2416810 - RNA, 17 nt, Human
acacauaauuaaagugu

SEQ ID NO: 2416811 - RNA, 16 nt, Human
acacauaauuaaagug

SEQ ID NO: 2416812 - RNA, 15 nt, Human
acacauaauuaaagu

SEQ ID NO: 2416813 - RNA, 13 nt, Human
acacauaauuaaa

SEQ ID NO: 2416814 - RNA, 15 nt, Human
acacaguugcuguca

SEQ ID NO: 2416815 - RNA, 22 nt, Human
acacaguugcugucauaagaau

SEQ ID NO: 2416816 - RNA, 18 nt, Human
uaguaacuucuuauggaa

SEQ ID NO: 2416817 - RNA, 19 nt, Human
uaguaacuucuuauggaau

SEQ ID NO: 2416818 - RNA, 16 nt, Human
uaguaccaaaugcuuu

SEQ ID NO: 2416819 - RNA, 23 nt, Human
uaguacagguaaggugagggaau

SEQ ID NO: 2416820 - RNA, 12 nt, Human
uaguacauaaag

SEQ ID NO: 2416821 - RNA, 23 nt, Human
uaguaccaaucauuuuaauuauu

SEQ ID NO: 2416822 - RNA, 20 nt, Human
uaguaccaaaugcuuuaaaa

SEQ ID NO: 2416823 - RNA, 16 nt, Human
uaguaccauuuauaca

SEQ ID NO: 2416824 - RNA, 16 nt, Human
uaguaccaaucauuuu

SEQ ID NO: 2416825 - RNA, 19 nt, Human
uaguaccaaaugcuuuaaa

SEQ ID NO: 2416826 - RNA, 21 nt, Human
uaguacauaaaggugguaugu

SEQ ID NO: 2416827 - RNA, 16 nt, Human
acacacuguguccugg

SEQ ID NO: 2416828 - RNA, 23 nt, Human
acacacugugcuuucuauuguac

SEQ ID NO: 2416829 - RNA, 22 nt, Human
acacacugugcuuucuauugua

SEQ ID NO: 2416830 - RNA, 21 nt, Human
acacacugugcuuucuauugu

SEQ ID NO: 2416831 - RNA, 19 nt, Human
acacacugugcuuucuauu

SEQ ID NO: 2416832 - RNA, 17 nt, Human
acacacugugcuuucua

SEQ ID NO: 2416833 - RNA, 16 nt, Human
acacacugugcuuucu

SEQ ID NO: 2416834 - RNA, 11 nt, Human
acacacugugc

SEQ ID NO: 2416835 - RNA, 15 nt, Human
acacacugaugcuua

SEQ ID NO: 2416836 - RNA, 17 nt, Human
acacacugaugcuuaga

SEQ ID NO: 2416837 - RNA, 16 nt, Human
acacaguauuacuucu

SEQ ID NO: 2416838 - RNA, 23 nt, Human
acacacuuuugguuaagucuguu

SEQ ID NO: 2416839 - RNA, 18 nt, Human
acacaguauuacuucugc

SEQ ID NO: 2416840 - RNA, 22 nt, Human
acacaguauuacuucugcuaca

SEQ ID NO: 2416841 - RNA, 19 nt, Human
acacaguauuacuucugcu

SEQ ID NO: 2416842 - RNA, 20 nt, Human
acacagugccuucaauaaau

SEQ ID NO: 2416843 - RNA, 19 nt, Human
acacagugccuucaauaaa

SEQ ID NO: 2416844 - RNA, 16 nt, Human
acacagugccuucaau

SEQ ID NO: 2416845 - RNA, 20 nt, Human
acacacuguguccuggugcu

SEQ ID NO: 2416846 - RNA, 13 nt, Human
acacagugagucg

SEQ ID NO: 2416847 - RNA, 18 nt, Human
acacaguuacacuugugc

SEQ ID NO: 2416848 - RNA, 20 nt, Human
acacagugggugguggaucu

SEQ ID NO: 2416849 - RNA, 21 nt, Human
acacaguguuuuuguaaagug

SEQ ID NO: 2416850 - RNA, 13 nt, Human
acacacuaaucga

SEQ ID NO: 2416851 - RNA, 22 nt, Human
acacacgugcaauuuguuugug

SEQ ID NO: 2416852 - RNA, 13 nt, Human
acacacugaugcu

SEQ ID NO: 2416853 - RNA, 21 nt, Human
acacacugcauguuugugauu

SEQ ID NO: 2416854 - RNA, 15 nt, Human
acacacucaaaucaa

SEQ ID NO: 2416855 - RNA, 19 nt, Human
acacacgugcaauuuguuu

SEQ ID NO: 2416856 - RNA, 21 nt, Human
acacacgcaggaacucccagc

SEQ ID NO: 2416857 - RNA, 21 nt, Human
acacacgcgugcacacaccag

SEQ ID NO: 2416858 - RNA, 20 nt, Human
acacaccagagcccaccuug

SEQ ID NO: 2416859 - RNA, 15 nt, Human
acacaccagagccca

SEQ ID NO: 2416860 - RNA, 14 nt, Human
acacaccagagccc

SEQ ID NO: 2416861 - RNA, 22 nt, Human
acacacacgcgugcacacacca

SEQ ID NO: 2416862 - RNA, 12 nt, Human
acacacacgcac

SEQ ID NO: 2416863 - RNA, 16 nt, Human
acacacacaugcauac

SEQ ID NO: 2416864 - RNA, 21 nt, Human
acacacacgcacgcacacaca

SEQ ID NO: 2416865 - RNA, 19 nt, Human
acacacacgcacgcacaca

SEQ ID NO: 2416866 - RNA, 14 nt, Human
acacacacgcacgc

SEQ ID NO: 2416867 - RNA, 17 nt, Human
acacacaccacacauac

SEQ ID NO: 2416868 - RNA, 13 nt, Human
acacacacaugca

SEQ ID NO: 2416869 - RNA, 14 nt, Human
acacacacaugcau

SEQ ID NO: 2416870 - RNA, 15 nt, Human
acacacacaugcaua

SEQ ID NO: 2416871 - RNA, 11 nt, Human
acacacacaug

SEQ ID NO: 2416872 - RNA, 12 nt, Human
acacacacaugc

SEQ ID NO: 2416873 - RNA, 15 nt, Human
acacacacacacaca

SEQ ID NO: 2416874 - RNA, 14 nt, Human
acacacagcucugu

SEQ ID NO: 2416875 - RNA, 13 nt, Human
acacacagcucug

SEQ ID NO: 2416876 - RNA, 17 nt, Human
acacacagcucuguccu

SEQ ID NO: 2416877 - RNA, 22 nt, Human
acaaugcugugcccuaaagugu

SEQ ID NO: 2416878 - RNA, 23 nt, Human
acaaugcugugcccuaaagugua

SEQ ID NO: 2416879 - RNA, 24 nt, Human
acaaugcugugcccuaaaguguau

SEQ ID NO: 2416880 - RNA, 19 nt, Human
acaauggauaggcacagga

SEQ ID NO: 2416881 - RNA, 22 nt, Human
acaaugcuguauuuuaaaagaa

SEQ ID NO: 2416882 - RNA, 21 nt, Human
acaaugcugugcccuaaagug

SEQ ID NO: 2416883 - RNA, 17 nt, Human
uagggagagucauauuu

SEQ ID NO: 2416884 - RNA, 12 nt, Human
uagggagaguca

SEQ ID NO: 2416885 - RNA, 23 nt, Human
uagggaggaccagggcagggcca

SEQ ID NO: 2416886 - RNA, 22 nt, Human
uagggaggaccuuaucugugcg

SEQ ID NO: 2416887 - RNA, 18 nt, Human
acaaugcuguauuuuaaa

SEQ ID NO: 2416888 - RNA, 14 nt, Human
acacacacauacac

SEQ ID NO: 2416889 - RNA, 14 nt, Human
acacacacacacac

SEQ ID NO: 2416890 - RNA, 12 nt, Human
acacacacacac

SEQ ID NO: 2416891 - RNA, 13 nt, Human
acacacacacaca

SEQ ID NO: 2416892 - RNA, 14 nt, Human
acacacaacaauua

SEQ ID NO: 2416893 - RNA, 22 nt, Human
acacacaaaauguacccaguau

SEQ ID NO: 2416894 - RNA, 14 nt, Human
acacaauaugaaua

SEQ ID NO: 2416895 - RNA, 14 nt, Human
acacaauacaauaa

SEQ ID NO: 2416896 - RNA, 23 nt, Human
acaauguauuuauuuaaaagauu

SEQ ID NO: 2416897 - RNA, 21 nt, Human
acaauguauuuauuuaaaaga

SEQ ID NO: 2416898 - RNA, 20 nt, Human
acaauguauuuauuuaaaag

SEQ ID NO: 2416899 - RNA, 16 nt, Human
acaauggaaacugaau

SEQ ID NO: 2416900 - RNA, 14 nt, Human
acaauggaaacuga

SEQ ID NO: 2416901 - RNA, 19 nt, Human
acaauggaaacugaaugcu

SEQ ID NO: 2416902 - RNA, 17 nt, Human
acaaugugaaaagaaaa

SEQ ID NO: 2416903 - RNA, 19 nt, Human
acaaugugaaaagaaaaau

SEQ ID NO: 2416904 - RNA, 12 nt, Human
acaaugugaacu

SEQ ID NO: 2416905 - RNA, 15 nt, Human
uauaaguguguguuu

SEQ ID NO: 2416906 - RNA, 16 nt, Human
uauaacuucuuaaaag

SEQ ID NO: 2416907 - RNA, 15 nt, Human
uauaacuucuuaaaa

SEQ ID NO: 2416908 - RNA, 17 nt, Human
acaccccuuauccagga

SEQ ID NO: 2416909 - RNA, 19 nt, Human
uauaacuugucuaaauaag

SEQ ID NO: 2416910 - RNA, 13 nt, Human
uauaacuugucua

SEQ ID NO: 2416911 - RNA, 19 nt, Human
uauaacuuauauuguaaga

SEQ ID NO: 2416912 - RNA, 21 nt, Human
uauaacuuauauuguaagaaa

SEQ ID NO: 2416913 - RNA, 22 nt, Human
uauaacuuauauuguaagaaau

SEQ ID NO: 2416914 - RNA, 24 nt, Human
uauaacuuauauuguaagaaauac

SEQ ID NO: 2416915 - RNA, 17 nt, Human
acacucaagaagcaggc

SEQ ID NO: 2416916 - RNA, 18 nt, Human
uauaacuuaaaauauuuu

SEQ ID NO: 2416917 - RNA, 17 nt, Human
uauaacuuauauuguaa

SEQ ID NO: 2416918 - RNA, 22 nt, Human
acacucacauuuauucugcuca

SEQ ID NO: 2416919 - RNA, 20 nt, Human
acacucacauuuauucugcu

SEQ ID NO: 2416920 - RNA, 16 nt, Human
acacucaagaagcagg

SEQ ID NO: 2416921 - RNA, 15 nt, Human
acacucaagaagcag

SEQ ID NO: 2416922 - RNA, 19 nt, Human
acacucaaaucaagaaacu

SEQ ID NO: 2416923 - RNA, 15 nt, Human
acacucaaaagcugg

SEQ ID NO: 2416924 - RNA, 18 nt, Human
acacuauuaccaugagaa

SEQ ID NO: 2416925 - RNA, 18 nt, Human
acacuauaucuguauaua

SEQ ID NO: 2416926 - RNA, 22 nt, Human
acacuaugguauuugaguguuu

SEQ ID NO: 2416927 - RNA, 15 nt, Human
acacuauuuuaugca

SEQ ID NO: 2416928 - RNA, 14 nt, Human
acacuauuuuaugc

SEQ ID NO: 2416929 - RNA, 13 nt, Human
acacuauuuuaug

SEQ ID NO: 2416930 - RNA, 19 nt, Human
acacuaugguauuugagug

SEQ ID NO: 2416931 - RNA, 18 nt, Human
acacuaugguauuugagu

SEQ ID NO: 2416932 - RNA, 21 nt, Human
acacuauaucuguauauaaaa

SEQ ID NO: 2416933 - RNA, 17 nt, Human
acacuaugguauuugag

SEQ ID NO: 2416934 - RNA, 13 nt, Human
acacuaagagaga

SEQ ID NO: 2416935 - RNA, 14 nt, Human
acacuaaccugacc

SEQ ID NO: 2416936 - RNA, 18 nt, Human
acacgaacuuuagcugca

SEQ ID NO: 2416937 - RNA, 15 nt, Human
acacuaaccuggguu

SEQ ID NO: 2416938 - RNA, 14 nt, Human
acacuaagagagaa

SEQ ID NO: 2416939 - RNA, 17 nt, Human
acacuauaucuguauau

SEQ ID NO: 2416940 - RNA, 15 nt, Human
acacuauaucuguau

SEQ ID NO: 2416941 - RNA, 14 nt, Human
acacuauaucugua

SEQ ID NO: 2416942 - RNA, 13 nt, Human
acacuauaucugu

SEQ ID NO: 2416943 - RNA, 23 nt, Human
acacuaguuuugugccagccgug

SEQ ID NO: 2416944 - RNA, 19 nt, Human
acacuaguuuugugccagc

SEQ ID NO: 2416945 - RNA, 18 nt, Human
acacuaguuuugugccag

SEQ ID NO: 2416946 - RNA, 20 nt, Human
acacccuucacauacccucc

SEQ ID NO: 2416947 - RNA, 16 nt, Human
acacccuuggacuuga

SEQ ID NO: 2416948 - RNA, 18 nt, Human
acacccuuggacuugagg

SEQ ID NO: 2416949 - RNA, 19 nt, Human
acacccugugauggggccc

SEQ ID NO: 2416950 - RNA, 17 nt, Human
acacccugcccucaugc

SEQ ID NO: 2416951 - RNA, 12 nt, Human
acacccugcccu

SEQ ID NO: 2416952 - RNA, 17 nt, Human
acacccucucccaggac

SEQ ID NO: 2416953 - RNA, 22 nt, Human
acaccgccacauggcuuccucc

SEQ ID NO: 2416954 - RNA, 15 nt, Human
acaccgagggcgacc

SEQ ID NO: 2416955 - RNA, 14 nt, Human
acaccgggccugga

SEQ ID NO: 2416956 - RNA, 16 nt, Human
acaccgggcacucaga

SEQ ID NO: 2416957 - RNA, 14 nt, Human
acaccucugccaga

SEQ ID NO: 2416958 - RNA, 13 nt, Human
acaccucugccag

SEQ ID NO: 2416959 - RNA, 12 nt, Human
acaccucugcca

SEQ ID NO: 2416960 - RNA, 14 nt, Human
acaccugaugugua

SEQ ID NO: 2416961 - RNA, 12 nt, Human
acaccugaugug

SEQ ID NO: 2416962 - RNA, 17 nt, Human
acaccugagccagccug

SEQ ID NO: 2416963 - RNA, 21 nt, Human
acaccugacucugaaaucuga

SEQ ID NO: 2416964 - RNA, 18 nt, Human
acaccugacucugaaauc

SEQ ID NO: 2416965 - RNA, 16 nt, Human
acaccugacucugaaa

SEQ ID NO: 2416966 - RNA, 14 nt, Human
acaccugacucuga

SEQ ID NO: 2416967 - RNA, 19 nt, Human
acaccucugcacaagcugc

SEQ ID NO: 2416968 - RNA, 21 nt, Human
acaccucugcacaagcugcac

SEQ ID NO: 2416969 - RNA, 21 nt, Human
acaccuuagccugcccuccuu

SEQ ID NO: 2416970 - RNA, 16 nt, Human
acaccuguagucccag

SEQ ID NO: 2416971 - RNA, 17 nt, Human
acaccuguagucccagc

SEQ ID NO: 2416972 - RNA, 19 nt, Human
acaccuguagucccagcua

SEQ ID NO: 2416973 - RNA, 17 nt, Human
acaccugggcuuaagaa

SEQ ID NO: 2416974 - RNA, 23 nt, Human
acaccuggcugagguuccucugc

SEQ ID NO: 2416975 - RNA, 20 nt, Human
acaccuguagcacuuacugg

SEQ ID NO: 2416976 - RNA, 19 nt, Human
acaccuggcugagguuccu

SEQ ID NO: 2416977 - RNA, 23 nt, Human
acaccuuggacauccuccuccca

SEQ ID NO: 2416978 - RNA, 20 nt, Human
acaccuuccagcuccuguaa

SEQ ID NO: 2416979 - RNA, 21 nt, Human
acaccuguagucccagcuacu

SEQ ID NO: 2416980 - RNA, 16 nt, Human
acaccuuccagcuccu

SEQ ID NO: 2416981 - RNA, 14 nt, Human
acaccuuccagcuc

SEQ ID NO: 2416982 - RNA, 15 nt, Human
acaccuuauauuuac

SEQ ID NO: 2416983 - RNA, 23 nt, Human
acaccuuuuauugacacagaaaa

SEQ ID NO: 2416984 - RNA, 21 nt, Human
acaccuuuuauugacacagaa

SEQ ID NO: 2416985 - RNA, 20 nt, Human
acacuaaccacgcuggaccu

SEQ ID NO: 2416986 - RNA, 22 nt, Human
acaccuuugcaggcaugcaugu

SEQ ID NO: 2416987 - RNA, 18 nt, Human
acaccuuugcaggcaugc

SEQ ID NO: 2416988 - RNA, 15 nt, Human
acaccuuuuaacuca

SEQ ID NO: 2416989 - RNA, 17 nt, Human
acaccuuuuaacucacc

SEQ ID NO: 2416990 - RNA, 16 nt, Human
acaccuuugcaggcau

SEQ ID NO: 2416991 - RNA, 22 nt, Human
acaccuuucuccuuuguacuuu

SEQ ID NO: 2416992 - RNA, 22 nt, Human
acaccuuggacauccuccuccc

SEQ ID NO: 2416993 - RNA, 17 nt, Human
acaccuuucuccuuugu

SEQ ID NO: 2416994 - RNA, 14 nt, Human
acaccuuucuccuu

SEQ ID NO: 2416995 - RNA, 15 nt, Human
acacaucagcuugcc

SEQ ID NO: 2416996 - RNA, 15 nt, Human
acacaugaaguccaa

SEQ ID NO: 2416997 - RNA, 18 nt, Human
acacaugauccugcaauu

SEQ ID NO: 2416998 - RNA, 21 nt, Human
acacaugagcaucaggccagg

SEQ ID NO: 2416999 - RNA, 13 nt, Human
acacauuuuauuu

SEQ ID NO: 2417000 - RNA, 14 nt, Human
acacauuuuauuuu

SEQ ID NO: 2417001 - RNA, 19 nt, Human
acacauuuuauuuuauuau

SEQ ID NO: 2417002 - RNA, 20 nt, Human
acacauuuuauuuuauuaug

SEQ ID NO: 2417003 - RNA, 20 nt, Human
acacccaaagagguauuuau

SEQ ID NO: 2417004 - RNA, 19 nt, Human
acacccaaagagguauuua

SEQ ID NO: 2417005 - RNA, 18 nt, Human
acaccccuuauccaggac

SEQ ID NO: 2417006 - RNA, 17 nt, Human
acacccucaaccucuuc

SEQ ID NO: 2417007 - RNA, 18 nt, Human
acacccucaaccucuucu

SEQ ID NO: 2417008 - RNA, 20 nt, Human
acaccccuuauccaggacuc

SEQ ID NO: 2417009 - RNA, 19 nt, Human
acaccccuuauccaggacu

SEQ ID NO: 2417010 - RNA, 17 nt, Human
acacccgacuccucaaa

SEQ ID NO: 2417011 - RNA, 16 nt, Human
acacccucacacuggg

SEQ ID NO: 2417012 - RNA, 13 nt, Human
acacccucccccg

SEQ ID NO: 2417013 - RNA, 13 nt, Human
acacccucacacu

SEQ ID NO: 2417014 - RNA, 16 nt, Human
acacccucccccgcca

SEQ ID NO: 2417015 - RNA, 14 nt, Human
acacccucccccgc

SEQ ID NO: 2417016 - RNA, 22 nt, Human
acacccucgaagcgcgccacuc

SEQ ID NO: 2417017 - RNA, 19 nt, Human
acacccucccccgccacuc

SEQ ID NO: 2417018 - RNA, 12 nt, Human
acacccucuccc

SEQ ID NO: 2417019 - RNA, 13 nt, Human
acacccucuccca

SEQ ID NO: 2417020 - RNA, 16 nt, Human
acacccucucccagga

SEQ ID NO: 2417021 - RNA, 18 nt, Human
acacaucacccuuaccau

SEQ ID NO: 2417022 - RNA, 14 nt, Human
acaccaucuuuugu

SEQ ID NO: 2417023 - RNA, 23 nt, Human
acaccauguuugagcucagaccc

SEQ ID NO: 2417024 - RNA, 20 nt, Human
uauaaaagccuguuuaagag

SEQ ID NO: 2417025 - RNA, 19 nt, Human
uauaaaaauaaaaaacacu

SEQ ID NO: 2417026 - RNA, 22 nt, Human
uauaaaagggacugagaaauuu

SEQ ID NO: 2417027 - RNA, 18 nt, Human
uauaaaagcuauggugag

SEQ ID NO: 2417028 - RNA, 19 nt, Human
uauaaaaggcaaaugugua

SEQ ID NO: 2417029 - RNA, 19 nt, Human
uauaaaagccuguuuaaga

SEQ ID NO: 2417030 - RNA, 17 nt, Human
uauaaaauaaauauaua

SEQ ID NO: 2417031 - RNA, 16 nt, Human
uauaaaauaaauauau

SEQ ID NO: 2417032 - RNA, 15 nt, Human
uauaaaauaaauaua

SEQ ID NO: 2417033 - RNA, 14 nt, Human
uauaaaauaaauau

SEQ ID NO: 2417034 - RNA, 13 nt, Human
uauaaaauaaaua

SEQ ID NO: 2417035 - RNA, 22 nt, Human
uauaaaagugauuguuggcaca

SEQ ID NO: 2417036 - RNA, 13 nt, Human
uauaaaagugauu

SEQ ID NO: 2417037 - RNA, 20 nt, Human
uauaaaaggcaaauguguac

SEQ ID NO: 2417038 - RNA, 19 nt, Human
uauaaaauaaauauauaua

SEQ ID NO: 2417039 - RNA, 15 nt, Human
acacauacccucuuc

SEQ ID NO: 2417040 - RNA, 13 nt, Human
acacauaugaggg

SEQ ID NO: 2417041 - RNA, 16 nt, Human
acacauaugucauaua

SEQ ID NO: 2417042 - RNA, 17 nt, Human
acacauaugagggggaa

SEQ ID NO: 2417043 - RNA, 22 nt, Human
acacauauaaacaucacacaca

SEQ ID NO: 2417044 - RNA, 14 nt, Human
acacauauaaacau

SEQ ID NO: 2417045 - RNA, 17 nt, Human
acacauagcauguaaug

SEQ ID NO: 2417046 - RNA, 11 nt, Human
uauaaaaacaa

SEQ ID NO: 2417047 - RNA, 17 nt, Human
uauaaaaaauggugccu

SEQ ID NO: 2417048 - RNA, 13 nt, Human
uauaaaaaauggu

SEQ ID NO: 2417049 - RNA, 19 nt, Human
uauaaaaaauggugccuga

SEQ ID NO: 2417050 - RNA, 23 nt, Human
uauaaaaagaaaagauaaagaug

SEQ ID NO: 2417051 - RNA, 21 nt, Human
uauaaaaagaaaagauaaaga

SEQ ID NO: 2417052 - RNA, 18 nt, Human
uauaaaaagcuuccauga

SEQ ID NO: 2417053 - RNA, 19 nt, Human
uauaaaaagaaaagauaaa

SEQ ID NO: 2417054 - RNA, 20 nt, Human
uauaaaaaccccaaacuguu

SEQ ID NO: 2417055 - RNA, 23 nt, Human
uauaaaaaaaauaguugagccag

SEQ ID NO: 2417056 - RNA, 14 nt, Human
uauaaaaaaaauag

SEQ ID NO: 2417057 - RNA, 20 nt, Human
uaguuccaccaucaagccac

SEQ ID NO: 2417058 - RNA, 18 nt, Human
uaguucauccaauccuca

SEQ ID NO: 2417059 - RNA, 20 nt, Human
uaguucauccaauccucacu

SEQ ID NO: 2417060 - RNA, 14 nt, Human
uaguuacucauuca

SEQ ID NO: 2417061 - RNA, 14 nt, Human
uaguucauccaauc

SEQ ID NO: 2417062 - RNA, 15 nt, Human
uaguuacuauaugcc

SEQ ID NO: 2417063 - RNA, 16 nt, Human
acagucaccucaugga

SEQ ID NO: 2417064 - RNA, 14 nt, Human
acaguaggagccca

SEQ ID NO: 2417065 - RNA, 22 nt, Human
acaguaggagcccagcucugaa

SEQ ID NO: 2417066 - RNA, 21 nt, Human
acaguaguaccaaaugcuuua

SEQ ID NO: 2417067 - RNA, 14 nt, Human
acaguagucuugau

SEQ ID NO: 2417068 - RNA, 23 nt, Human
acaguagucuugaugaccaaagu

SEQ ID NO: 2417069 - RNA, 18 nt, Human
acagucaccucauggaau

SEQ ID NO: 2417070 - RNA, 17 nt, Human
acagucaccucauggaa

SEQ ID NO: 2417071 - RNA, 15 nt, Human
acagucagauuucca

SEQ ID NO: 2417072 - RNA, 21 nt, Human
acagucagauuuccagucucc

SEQ ID NO: 2417073 - RNA, 18 nt, Human
acagucaaggaguggcuu

SEQ ID NO: 2417074 - RNA, 23 nt, Human
acaguaguaccaaaugcuuuaaa

SEQ ID NO: 2417075 - RNA, 22 nt, Human
acagucaaggaguggcuuacua

SEQ ID NO: 2417076 - RNA, 20 nt, Human
acaguaaguuccuacuaggc

SEQ ID NO: 2417077 - RNA, 16 nt, Human
acaguaaguuccuacu

SEQ ID NO: 2417078 - RNA, 14 nt, Human
acaguaaguuccua

SEQ ID NO: 2417079 - RNA, 14 nt, Human
acaguaagcugcuc

SEQ ID NO: 2417080 - RNA, 21 nt, Human
acaguaacuuuauguguaaau

SEQ ID NO: 2417081 - RNA, 19 nt, Human
acaguaacuuuauguguaa

SEQ ID NO: 2417082 - RNA, 12 nt, Human
acaguacaggca

SEQ ID NO: 2417083 - RNA, 13 nt, Human
acaguaggagccc

SEQ ID NO: 2417084 - RNA, 20 nt, Human
acaguacaggcagcacagag

SEQ ID NO: 2417085 - RNA, 13 nt, Human
acaguacaggcag

SEQ ID NO: 2417086 - RNA, 14 nt, Human
acaguacaggcagc

SEQ ID NO: 2417087 - RNA, 16 nt, Human
acaguacaggcagcac

SEQ ID NO: 2417088 - RNA, 18 nt, Human
acaguacaggcagcacag

SEQ ID NO: 2417089 - RNA, 23 nt, Human
acagggaugagcauggagcuggc

SEQ ID NO: 2417090 - RNA, 21 nt, Human
acagggaugagcauggagcug

SEQ ID NO: 2417091 - RNA, 18 nt, Human
acaguaacuuuaugugua

SEQ ID NO: 2417092 - RNA, 16 nt, Human
acaguaacuuuaugug

SEQ ID NO: 2417093 - RNA, 15 nt, Human
acaguaacuuuaugu

SEQ ID NO: 2417094 - RNA, 20 nt, Human
acagggcacaccgggcacuc

SEQ ID NO: 2417095 - RNA, 12 nt, Human
acagggcacacc

SEQ ID NO: 2417096 - RNA, 14 nt, Human
acagggaugagcau

SEQ ID NO: 2417097 - RNA, 13 nt, Human
acagggaugagca

SEQ ID NO: 2417098 - RNA, 12 nt, Human
acagggagggga

SEQ ID NO: 2417099 - RNA, 10 nt, Human
acagggaggg

SEQ ID NO: 2417100 - RNA, 13 nt, Human
acaggcuccugcc

SEQ ID NO: 2417101 - RNA, 15 nt, Human
acaggcuccugccac

SEQ ID NO: 2417102 - RNA, 21 nt, Human
acaggcuccugccaccacgcc

SEQ ID NO: 2417103 - RNA, 22 nt, Human
acaggcuccugccaccacgccc

SEQ ID NO: 2417104 - RNA, 20 nt, Human
acaggcucuuagcagcuucc

SEQ ID NO: 2417105 - RNA, 19 nt, Human
acaggcucuuagcagcuuc

SEQ ID NO: 2417106 - RNA, 15 nt, Human
acaggcucuuagcag

SEQ ID NO: 2417107 - RNA, 13 nt, Human
acaggcucuuagc

SEQ ID NO: 2417108 - RNA, 23 nt, Human
acaggcugggcuucaguggcagc

SEQ ID NO: 2417109 - RNA, 22 nt, Human
acaggcugggcuucaguggcag

SEQ ID NO: 2417110 - RNA, 12 nt, Human
acaggcugggcu

SEQ ID NO: 2417111 - RNA, 16 nt, Human
acagggaagcuacagg

SEQ ID NO: 2417112 - RNA, 15 nt, Human
acagggaagcuacag

SEQ ID NO: 2417113 - RNA, 14 nt, Human
acagggaagcuaca

SEQ ID NO: 2417114 - RNA, 13 nt, Human
acagggaagcuac

SEQ ID NO: 2417115 - RNA, 19 nt, Human
acagggaagcuacagguua

SEQ ID NO: 2417116 - RNA, 18 nt, Human
acagggaagcuacagguu

SEQ ID NO: 2417117 - RNA, 23 nt, Human
acagggaagcuacagguuacaac

SEQ ID NO: 2417118 - RNA, 22 nt, Human
acagggaacccugcuugcacuu

SEQ ID NO: 2417119 - RNA, 23 nt, Human
acagggaacccugcuugcacuuu

SEQ ID NO: 2417120 - RNA, 15 nt, Human
acagggaagagcaga

SEQ ID NO: 2417121 - RNA, 20 nt, Human
acagggaggacgcucucugg

SEQ ID NO: 2417122 - RNA, 21 nt, Human
acagggaggacgcucucuggc

SEQ ID NO: 2417123 - RNA, 16 nt, Human
acagggagccuccugc

SEQ ID NO: 2417124 - RNA, 15 nt, Human
acagggagccuccug

SEQ ID NO: 2417125 - RNA, 14 nt, Human
acagggagccuccu

SEQ ID NO: 2417126 - RNA, 13 nt, Human
acagggagccucc

SEQ ID NO: 2417127 - RNA, 18 nt, Human
acagggagccuccugccc

SEQ ID NO: 2417128 - RNA, 17 nt, Human
acagggagccuccugcc

SEQ ID NO: 2417129 - RNA, 19 nt, Human
acagggagccuccugccca

SEQ ID NO: 2417130 - RNA, 16 nt, Human
acagggagcugggaca

SEQ ID NO: 2417131 - RNA, 22 nt, Human
acagggaaugccugagugccug

SEQ ID NO: 2417132 - RNA, 12 nt, Human
acagggacccac

SEQ ID NO: 2417133 - RNA, 16 nt, Human
acagggacuugaaguu

SEQ ID NO: 2417134 - RNA, 13 nt, Human
acagggacuugaa

SEQ ID NO: 2417135 - RNA, 22 nt, Human
acagggacugaaaaccucuccu

SEQ ID NO: 2417136 - RNA, 14 nt, Human
uauuacuguaagaa

SEQ ID NO: 2417137 - RNA, 21 nt, Human
uauuacuagaagaugaauaca

SEQ ID NO: 2417138 - RNA, 22 nt, Human
uauuacuaaggaguaaucugug

SEQ ID NO: 2417139 - RNA, 22 nt, Human
uauuaaaaugauuguaaaauag

SEQ ID NO: 2417140 - RNA, 20 nt, Human
uauuaaaaugauuguaaaau

SEQ ID NO: 2417141 - RNA, 22 nt, Human
uauuaaaauauggcuauaaaua

SEQ ID NO: 2417142 - RNA, 20 nt, Human
uauuaaaauaagcacugugc

SEQ ID NO: 2417143 - RNA, 10 nt, Human
uauuaaaauc

SEQ ID NO: 2417144 - RNA, 19 nt, Human
uauuaaaaugauuguaaaa

SEQ ID NO: 2417145 - RNA, 18 nt, Human
uauuaaaaugauuguaaa

SEQ ID NO: 2417146 - RNA, 17 nt, Human
uauuaaaaugauuguaa

SEQ ID NO: 2417147 - RNA, 13 nt, Human
uauuaaaaucuua

SEQ ID NO: 2417148 - RNA, 22 nt, Human
uauuacuaugacugcuccccag

SEQ ID NO: 2417149 - RNA, 23 nt, Human
uauuacugucugguuuuaacaau

SEQ ID NO: 2417150 - RNA, 18 nt, Human
uauuacugucugguuuua

SEQ ID NO: 2417151 - RNA, 13 nt, Human
uauuacuucugcu

SEQ ID NO: 2417152 - RNA, 21 nt, Human
uauuacuguuugucuucuccc

SEQ ID NO: 2417153 - RNA, 23 nt, Human
uauuacuuauuuuugacaguguu

SEQ ID NO: 2417154 - RNA, 14 nt, Human
uauuacuucugcua

SEQ ID NO: 2417155 - RNA, 23 nt, Human
uauucaaacagucucaggaaauc

SEQ ID NO: 2417156 - RNA, 21 nt, Human
uauuagugaccucagcuuuga

SEQ ID NO: 2417157 - RNA, 21 nt, Human
uauuagucuuggggcaggaug

SEQ ID NO: 2417158 - RNA, 15 nt, Human
uauucaaacagucuc

SEQ ID NO: 2417159 - RNA, 19 nt, Human
uauuagugaccucagcuuu

SEQ ID NO: 2417160 - RNA, 16 nt, Human
uauuagucuuggggca

SEQ ID NO: 2417161 - RNA, 14 nt, Human
uauuagcuuuacug

SEQ ID NO: 2417162 - RNA, 21 nt, Human
uauuaguacugcucuuguuuc

SEQ ID NO: 2417163 - RNA, 14 nt, Human
uauuaguaccauag

SEQ ID NO: 2417164 - RNA, 18 nt, Human
uauuagggguaauauauu

SEQ ID NO: 2417165 - RNA, 17 nt, Human
uauuagggguaauauau

SEQ ID NO: 2417166 - RNA, 21 nt, Human
uauuagggagaaaauucaauu

SEQ ID NO: 2417167 - RNA, 15 nt, Human
uauuagggagaaaau

SEQ ID NO: 2417168 - RNA, 16 nt, Human
uauuagggagaaaauu

SEQ ID NO: 2417169 - RNA, 16 nt, Human
uauuagcuuuacuguu

SEQ ID NO: 2417170 - RNA, 12 nt, Human
acaggcuccugc

SEQ ID NO: 2417171 - RNA, 18 nt, Human
acaggcuacucuccucgg

SEQ ID NO: 2417172 - RNA, 14 nt, Human
acaggcucaauauu

SEQ ID NO: 2417173 - RNA, 23 nt, Human
uauucauaagccaauuuuucugc

SEQ ID NO: 2417174 - RNA, 20 nt, Human
uauucauaagccaauuuuuc

SEQ ID NO: 2417175 - RNA, 14 nt, Human
acaggcgaggccug

SEQ ID NO: 2417176 - RNA, 22 nt, Human
acaggcgugagccaccgugccu

SEQ ID NO: 2417177 - RNA, 15 nt, Human
uauucagugucacug

SEQ ID NO: 2417178 - RNA, 21 nt, Human
uauucagugcuguggccuggg

SEQ ID NO: 2417179 - RNA, 21 nt, Human
uauucaguucccagaaucaaa

SEQ ID NO: 2417180 - RNA, 17 nt, Human
uauucaguucccagaau

SEQ ID NO: 2417181 - RNA, 14 nt, Human
uauucaguucccag

SEQ ID NO: 2417182 - RNA, 14 nt, Human
uauucaggaagcuc

SEQ ID NO: 2417183 - RNA, 16 nt, Human
uauucaggaagcucag

SEQ ID NO: 2417184 - RNA, 19 nt, Human
uauucagcuuuaguagaua

SEQ ID NO: 2417185 - RNA, 17 nt, Human
uauucaggaaaagccuc

SEQ ID NO: 2417186 - RNA, 14 nt, Human
uauucaguaaaaaa

SEQ ID NO: 2417187 - RNA, 20 nt, Human
uauucaguaauaacucuacc

SEQ ID NO: 2417188 - RNA, 15 nt, Human
uauucagugcugugg

SEQ ID NO: 2417189 - RNA, 18 nt, Human
uauucagugcuguggccu

SEQ ID NO: 2417190 - RNA, 22 nt, Human
uauucagugcuguggccugggc

SEQ ID NO: 2417191 - RNA, 21 nt, Human
uauucagcucauggacuucug

SEQ ID NO: 2417192 - RNA, 16 nt, Human
uauucagcuucauuug

SEQ ID NO: 2417193 - RNA, 14 nt, Human
uauucagcuucauu

SEQ ID NO: 2417194 - RNA, 15 nt, Human
uauucagcucaugga

SEQ ID NO: 2417195 - RNA, 19 nt, Human
uauucagcuucauuugugu

SEQ ID NO: 2417196 - RNA, 17 nt, Human
uauucagcuucauuugu

SEQ ID NO: 2417197 - RNA, 21 nt, Human
uauucagcuucauuuguguca

SEQ ID NO: 2417198 - RNA, 18 nt, Human
uauucaauuccucuggga

SEQ ID NO: 2417199 - RNA, 17 nt, Human
uauucaauuccucuggg

SEQ ID NO: 2417200 - RNA, 16 nt, Human
uauucaauuccucugg

SEQ ID NO: 2417201 - RNA, 15 nt, Human
uauucaauuccucug

SEQ ID NO: 2417202 - RNA, 14 nt, Human
uauucaauuccucu

SEQ ID NO: 2417203 - RNA, 14 nt, Human
uauucaauaaagua

SEQ ID NO: 2417204 - RNA, 17 nt, Human
uauucaauaaaguauuu

SEQ ID NO: 2417205 - RNA, 15 nt, Human
uauucaauaaaguau

SEQ ID NO: 2417206 - RNA, 20 nt, Human
uauucaauaaaguauuuaau

SEQ ID NO: 2417207 - RNA, 19 nt, Human
uauucaauaaaguauuuaa

SEQ ID NO: 2417208 - RNA, 21 nt, Human
uauucaauaaaguauuuaauu

SEQ ID NO: 2417209 - RNA, 16 nt, Human
uauucaauauccuuug

SEQ ID NO: 2417210 - RNA, 17 nt, Human
acaggaaaagcugcuga

SEQ ID NO: 2417211 - RNA, 16 nt, Human
acaggaaaagcugcug

SEQ ID NO: 2417212 - RNA, 15 nt, Human
acaggaaaagcugcu

SEQ ID NO: 2417213 - RNA, 13 nt, Human
acaggaaguacug

SEQ ID NO: 2417214 - RNA, 22 nt, Human
acaggaagaucuuaaauuuugu

SEQ ID NO: 2417215 - RNA, 18 nt, Human
acaggaagaucuuaaauu

SEQ ID NO: 2417216 - RNA, 17 nt, Human
acaggaagaucuuaaau

SEQ ID NO: 2417217 - RNA, 10 nt, Human
acaggaagau

SEQ ID NO: 2417218 - RNA, 17 nt, Human
acaggaaguagaggagg

SEQ ID NO: 2417219 - RNA, 15 nt, Human
acaggaagcacccca

SEQ ID NO: 2417220 - RNA, 20 nt, Human
acaggaagcaccccaugcca

SEQ ID NO: 2417221 - RNA, 15 nt, Human
acaggaagugaagaa

SEQ ID NO: 2417222 - RNA, 20 nt, Human
acaggaagguggugcuuaca

SEQ ID NO: 2417223 - RNA, 17 nt, Human
acaggaagucuucaggg

SEQ ID NO: 2417224 - RNA, 13 nt, Human
acagcuaacaugg

SEQ ID NO: 2417225 - RNA, 15 nt, Human
acagcuaacacacag

SEQ ID NO: 2417226 - RNA, 19 nt, Human
acagcuaacaauugugaag

SEQ ID NO: 2417227 - RNA, 17 nt, Human
acagcguuuaagacugu

SEQ ID NO: 2417228 - RNA, 16 nt, Human
acagcguuuaagacug

SEQ ID NO: 2417229 - RNA, 21 nt, Human
acagcggcuggacuuggaggu

SEQ ID NO: 2417230 - RNA, 11 nt, Human
acagccuggca

SEQ ID NO: 2417231 - RNA, 22 nt, Human
acagcggcuggacuuggaggua

SEQ ID NO: 2417232 - RNA, 15 nt, Human
acagccugcaaguca

SEQ ID NO: 2417233 - RNA, 16 nt, Human
acagcggggccccagg

SEQ ID NO: 2417234 - RNA, 19 nt, Human
acagcuaacacacagcucc

SEQ ID NO: 2417235 - RNA, 18 nt, Human
acagcuaacacacagcuc

SEQ ID NO: 2417236 - RNA, 15 nt, Human
acagcuuguauuuug

SEQ ID NO: 2417237 - RNA, 17 nt, Human
acagcuuuaucaccaga

SEQ ID NO: 2417238 - RNA, 11 nt, Human
acagcuuugcu

SEQ ID NO: 2417239 - RNA, 12 nt, Human
acagcuuugcug

SEQ ID NO: 2417240 - RNA, 20 nt, Human
acagcuuucaugauuagcaa

SEQ ID NO: 2417241 - RNA, 23 nt, Human
acagcuuugugacuguauauaaa

SEQ ID NO: 2417242 - RNA, 21 nt, Human
acagcuuugugacuguauaua

SEQ ID NO: 2417243 - RNA, 20 nt, Human
acagcuuugugacuguauau

SEQ ID NO: 2417244 - RNA, 19 nt, Human
acagcuuugugacuguaua

SEQ ID NO: 2417245 - RNA, 21 nt, Human
acagcuuugcugcugaaggcu

SEQ ID NO: 2417246 - RNA, 15 nt, Human
acagcuuugugacug

SEQ ID NO: 2417247 - RNA, 15 nt, Human
acagcuuugcugcug

SEQ ID NO: 2417248 - RNA, 13 nt, Human
acaggcaggucca

SEQ ID NO: 2417249 - RNA, 14 nt, Human
acaggaucagucug

SEQ ID NO: 2417250 - RNA, 16 nt, Human
acaggagugagcacua

SEQ ID NO: 2417251 - RNA, 16 nt, Human
acaggcagguccaggg

SEQ ID NO: 2417252 - RNA, 14 nt, Human
acaggcagguccag

SEQ ID NO: 2417253 - RNA, 19 nt, Human
acaggcaguuacuucugag

SEQ ID NO: 2417254 - RNA, 19 nt, Human
acaggauaaagauaucaau

SEQ ID NO: 2417255 - RNA, 14 nt, Human
acaggcauguucuc

SEQ ID NO: 2417256 - RNA, 14 nt, Human
acaggacccccuuc

SEQ ID NO: 2417257 - RNA, 17 nt, Human
acaggacccccuucccc

SEQ ID NO: 2417258 - RNA, 14 nt, Human
acaggaccagauuu

SEQ ID NO: 2417259 - RNA, 18 nt, Human
acaggagggcaagggcca

SEQ ID NO: 2417260 - RNA, 22 nt, Human
acaggaggacaauucaugaacu

SEQ ID NO: 2417261 - RNA, 14 nt, Human
acaggacucugccu

SEQ ID NO: 2417262 - RNA, 23 nt, Human
acaggaccagggauuuccaugau

SEQ ID NO: 2417263 - RNA, 22 nt, Human
acaggacaugcgguagccagca

SEQ ID NO: 2417264 - RNA, 20 nt, Human
acaggacagugcuucagccu

SEQ ID NO: 2417265 - RNA, 22 nt, Human
acaggacagugcuucagccuga

SEQ ID NO: 2417266 - RNA, 19 nt, Human
acaggaaucaagagcugcc

SEQ ID NO: 2417267 - RNA, 14 nt, Human
acaggacacaguca

SEQ ID NO: 2417268 - RNA, 15 nt, Human
acaggacacagucag

SEQ ID NO: 2417269 - RNA, 16 nt, Human
acaggacacagucaga

SEQ ID NO: 2417270 - RNA, 17 nt, Human
acaggacagugcuucag

SEQ ID NO: 2417271 - RNA, 12 nt, Human
uauguuuuggua

SEQ ID NO: 2417272 - RNA, 22 nt, Human
uauguuuugacauuuuuaguuu

SEQ ID NO: 2417273 - RNA, 18 nt, Human
uauguuuugguaucuguu

SEQ ID NO: 2417274 - RNA, 14 nt, Human
uauguuuugguauc

SEQ ID NO: 2417275 - RNA, 20 nt, Human
uauguuuugguaucuguucu

SEQ ID NO: 2417276 - RNA, 21 nt, Human
uauguuuucaggcuagaugua

SEQ ID NO: 2417277 - RNA, 14 nt, Human
uauguguguagaca

SEQ ID NO: 2417278 - RNA, 16 nt, Human
uaugugugaggagcug

SEQ ID NO: 2417279 - RNA, 21 nt, Human
uaugugugaggagcugcuggc

SEQ ID NO: 2417280 - RNA, 12 nt, Human
uauguguaugua

SEQ ID NO: 2417281 - RNA, 13 nt, Human
uauguguauguac

SEQ ID NO: 2417282 - RNA, 15 nt, Human
uaugugugaggagcu

SEQ ID NO: 2417283 - RNA, 14 nt, Human
uauguguaaauaca

SEQ ID NO: 2417284 - RNA, 23 nt, Human
uaugugggcagauuuucagcaaa

SEQ ID NO: 2417285 - RNA, 17 nt, Human
uaugugggcagauuuuc

SEQ ID NO: 2417286 - RNA, 15 nt, Human
uauguuuuuguucaa

SEQ ID NO: 2417287 - RNA, 17 nt, Human
uauguuuuuuaaaauau

SEQ ID NO: 2417288 - RNA, 19 nt, Human
uauguuuuuuagaucaaau

SEQ ID NO: 2417289 - RNA, 17 nt, Human
uauguuuuuuagaucaa

SEQ ID NO: 2417290 - RNA, 23 nt, Human
uauguuuuuuagaucaaauacuu

SEQ ID NO: 2417291 - RNA, 13 nt, Human
uauuaaaaaacaa

SEQ ID NO: 2417292 - RNA, 23 nt, Human
uauuaaaaaaaacaaaaagaaca

SEQ ID NO: 2417293 - RNA, 14 nt, Human
uauuaaaaaaaaca

SEQ ID NO: 2417294 - RNA, 22 nt, Human
uauguuuuuuuucugcuggaaa

SEQ ID NO: 2417295 - RNA, 15 nt, Human
uauguuuuuuuucug

SEQ ID NO: 2417296 - RNA, 14 nt, Human
uauguuuuugaagg

SEQ ID NO: 2417297 - RNA, 16 nt, Human
uauguuuuugaaggca

SEQ ID NO: 2417298 - RNA, 16 nt, Human
uauguuuuuguucaaa

SEQ ID NO: 2417299 - RNA, 18 nt, Human
uauguuuuuguguauuug

SEQ ID NO: 2417300 - RNA, 14 nt, Human
uauguuuuugugua

SEQ ID NO: 2417301 - RNA, 21 nt, Human
uauuaaaaauauaaaacugcg

SEQ ID NO: 2417302 - RNA, 19 nt, Human
uauuaaaaauauaaaacug

SEQ ID NO: 2417303 - RNA, 18 nt, Human
uauuaaaaauauaaaacu

SEQ ID NO: 2417304 - RNA, 15 nt, Human
uauuaaaaauauaaa

SEQ ID NO: 2417305 - RNA, 14 nt, Human
uauuaaaaauauaa

SEQ ID NO: 2417306 - RNA, 13 nt, Human
uauuaaaaauaua

SEQ ID NO: 2417307 - RNA, 12 nt, Human
uauuaaaaauau

SEQ ID NO: 2417308 - RNA, 16 nt, Human
uauuaaaacucauuuu

SEQ ID NO: 2417309 - RNA, 21 nt, Human
uaugucuuggacacuguacaa

SEQ ID NO: 2417310 - RNA, 19 nt, Human
uaugucuuggacacuguac

SEQ ID NO: 2417311 - RNA, 17 nt, Human
uaugucuuggacacugu

SEQ ID NO: 2417312 - RNA, 14 nt, Human
uaugucuuggacac

SEQ ID NO: 2417313 - RNA, 14 nt, Human
uaugugaaacaugu

SEQ ID NO: 2417314 - RNA, 22 nt, Human
acaggcauguucucugaggaca

SEQ ID NO: 2417315 - RNA, 20 nt, Human
acaggcauguucucugagga

SEQ ID NO: 2417316 - RNA, 19 nt, Human
acaggcauguucucugagg

SEQ ID NO: 2417317 - RNA, 18 nt, Human
acaggcauguucucugag

SEQ ID NO: 2417318 - RNA, 15 nt, Human
acaggcauguucucu

SEQ ID NO: 2417319 - RNA, 12 nt, Human
uauguggaagug

SEQ ID NO: 2417320 - RNA, 16 nt, Human
uauguggaaguguggg

SEQ ID NO: 2417321 - RNA, 20 nt, Human
uauguggaguucaucuugaa

SEQ ID NO: 2417322 - RNA, 23 nt, Human
uaugugccagauuuaugcauauu

SEQ ID NO: 2417323 - RNA, 13 nt, Human
uaugugagugugu

SEQ ID NO: 2417324 - RNA, 17 nt, Human
uaugugaaacauguuuc

SEQ ID NO: 2417325 - RNA, 22 nt, Human
uaugugaaugaucucucugaau

SEQ ID NO: 2417326 - RNA, 19 nt, Human
uaugugacaauuuuguaca

SEQ ID NO: 2417327 - RNA, 22 nt, Human
uaugugaauauggacucaguuu

SEQ ID NO: 2417328 - RNA, 21 nt, Human
uaugugaauccucuucuuuau

SEQ ID NO: 2417329 - RNA, 12 nt, Human
uaugugaaugau

SEQ ID NO: 2417330 - RNA, 14 nt, Human
uaugugaacauuua

SEQ ID NO: 2417331 - RNA, 13 nt, Human
uauaaguuugaag

SEQ ID NO: 2417332 - RNA, 12 nt, Human
uauaaguuucuu

SEQ ID NO: 2417333 - RNA, 15 nt, Human
uauaaguguacauau

SEQ ID NO: 2417334 - RNA, 18 nt, Human
uauaaguguacauaugug

SEQ ID NO: 2417335 - RNA, 23 nt, Human
uauaaguguguguuuuucauaaa

SEQ ID NO: 2417336 - RNA, 17 nt, Human
uauaaguguguguuuuu

SEQ ID NO: 2417337 - RNA, 13 nt, Human
uauacaaauuaga

SEQ ID NO: 2417338 - RNA, 14 nt, Human
uauacaaauuagaa

SEQ ID NO: 2417339 - RNA, 16 nt, Human
uauacaaauuagaaaa

SEQ ID NO: 2417340 - RNA, 18 nt, Human
uauacaaauuagaaaaug

SEQ ID NO: 2417341 - RNA, 17 nt, Human
uauacaaauuagaaaau

SEQ ID NO: 2417342 - RNA, 16 nt, Human
acagaaaauauacugu

SEQ ID NO: 2417343 - RNA, 17 nt, Human
acagaaaauauacugua

SEQ ID NO: 2417344 - RNA, 12 nt, Human
uauacaacagug

SEQ ID NO: 2417345 - RNA, 21 nt, Human
uauaauuuuuuucaauauuua

SEQ ID NO: 2417346 - RNA, 15 nt, Human
uauaauuuuuuaaag

SEQ ID NO: 2417347 - RNA, 18 nt, Human
uauaauuuuuuucaauau

SEQ ID NO: 2417348 - RNA, 20 nt, Human
uauaauuuuuuuauuacuga

SEQ ID NO: 2417349 - RNA, 16 nt, Human
uauaaguuugaaggaa

SEQ ID NO: 2417350 - RNA, 19 nt, Human
uauaauuuuuaaaguauau

SEQ ID NO: 2417351 - RNA, 19 nt, Human
uauaauuuuuuagagagcu

SEQ ID NO: 2417352 - RNA, 17 nt, Human
acagaaaauucuucucc

SEQ ID NO: 2417353 - RNA, 13 nt, Human
acagaaauguaca

SEQ ID NO: 2417354 - RNA, 18 nt, Human
acagaaaauauacuguaa

SEQ ID NO: 2417355 - RNA, 19 nt, Human
acagaaaauauacuguaaa

SEQ ID NO: 2417356 - RNA, 20 nt, Human
acagaaaauauacuguaaag

SEQ ID NO: 2417357 - RNA, 21 nt, Human
acagaaaauauacuguaaaga

SEQ ID NO: 2417358 - RNA, 20 nt, Human
acagaaaauggaagacagcu

SEQ ID NO: 2417359 - RNA, 14 nt, Human
acagaaauguacag

SEQ ID NO: 2417360 - RNA, 16 nt, Human
acagaaauguacagca

SEQ ID NO: 2417361 - RNA, 17 nt, Human
acagaaauguacagcaa

SEQ ID NO: 2417362 - RNA, 17 nt, Human
acagaaauuagccgggc

SEQ ID NO: 2417363 - RNA, 15 nt, Human
acagacccugcccug

SEQ ID NO: 2417364 - RNA, 21 nt, Human
acagaccacaucuuuaucugu

SEQ ID NO: 2417365 - RNA, 20 nt, Human
acagaccacaucuuuaucug

SEQ ID NO: 2417366 - RNA, 16 nt, Human
acagacauuguuuugc

SEQ ID NO: 2417367 - RNA, 12 nt, Human
acagacauuguu

SEQ ID NO: 2417368 - RNA, 11 nt, Human
acagacauugu

SEQ ID NO: 2417369 - RNA, 14 nt, Human
acagacccugcccu

SEQ ID NO: 2417370 - RNA, 13 nt, Human
acagacccugccc

SEQ ID NO: 2417371 - RNA, 22 nt, Human
acagaccacaucuuuaucuguu

SEQ ID NO: 2417372 - RNA, 22 nt, Human
uauauuacuagcauaugaguuu

SEQ ID NO: 2417373 - RNA, 16 nt, Human
uauauuagcauuuagu

SEQ ID NO: 2417374 - RNA, 23 nt, Human
uauauuagcauuuaguccaaugu

SEQ ID NO: 2417375 - RNA, 14 nt, Human
uauauuaucaugca

SEQ ID NO: 2417376 - RNA, 20 nt, Human
uauauuaucaugcaaaugcu

SEQ ID NO: 2417377 - RNA, 18 nt, Human
uauauuguguuuguguau

SEQ ID NO: 2417378 - RNA, 20 nt, Human
uauauuguaagaaauacugu

SEQ ID NO: 2417379 - RNA, 22 nt, Human
uauauuguaagaaauacuguac

SEQ ID NO: 2417380 - RNA, 12 nt, Human
uauauuguaaga

SEQ ID NO: 2417381 - RNA, 15 nt, Human
uauauuguaagaaau

SEQ ID NO: 2417382 - RNA, 19 nt, Human
uauauuguaagaaauacug

SEQ ID NO: 2417383 - RNA, 15 nt, Human
uauauuguuugcuaa

SEQ ID NO: 2417384 - RNA, 19 nt, Human
uauauuguguuuguguauu

SEQ ID NO: 2417385 - RNA, 19 nt, Human
uauauugucagauauuuuu

SEQ ID NO: 2417386 - RNA, 16 nt, Human
uauauuuaguaucuuu

SEQ ID NO: 2417387 - RNA, 12 nt, Human
uauauuuauaac

SEQ ID NO: 2417388 - RNA, 14 nt, Human
uauauuuauaacuc

SEQ ID NO: 2417389 - RNA, 15 nt, Human
uauauuuauaacuca

SEQ ID NO: 2417390 - RNA, 16 nt, Human
uauauuuauaacucau

SEQ ID NO: 2417391 - RNA, 21 nt, Human
uauauuuagauuguuaaaaua

SEQ ID NO: 2417392 - RNA, 18 nt, Human
uauauuuaguuauaguuu

SEQ ID NO: 2417393 - RNA, 16 nt, Human
uauauuuaguuauagu

SEQ ID NO: 2417394 - RNA, 22 nt, Human
uaucauuuuuguacaguuugcu

SEQ ID NO: 2417395 - RNA, 21 nt, Human
uaucauuuuuguacaguuugc

SEQ ID NO: 2417396 - RNA, 17 nt, Human
uaucauuuuuguacagu

SEQ ID NO: 2417397 - RNA, 15 nt, Human
uaucauuuuuguaca

SEQ ID NO: 2417398 - RNA, 13 nt, Human
uauccaaaagcuu

SEQ ID NO: 2417399 - RNA, 19 nt, Human
uauccaaaccaaauaaaaa

SEQ ID NO: 2417400 - RNA, 21 nt, Human
uaucauuuaauaauauacuug

SEQ ID NO: 2417401 - RNA, 20 nt, Human
uaucauuuaauaauauacuu

SEQ ID NO: 2417402 - RNA, 19 nt, Human
uaucauuuaauaauauacu

SEQ ID NO: 2417403 - RNA, 18 nt, Human
uaucauuuaauaauauac

SEQ ID NO: 2417404 - RNA, 22 nt, Human
uaucauuuaauaauauacuugu

SEQ ID NO: 2417405 - RNA, 20 nt, Human
uaucauuuauuuuuuacauu

SEQ ID NO: 2417406 - RNA, 17 nt, Human
uaucauuuuagaagacu

SEQ ID NO: 2417407 - RNA, 14 nt, Human
uaucauuuucugca

SEQ ID NO: 2417408 - RNA, 21 nt, Human
uaucauuuucugcauuuaacc

SEQ ID NO: 2417409 - RNA, 12 nt, Human
uaucaagaaagu

SEQ ID NO: 2417410 - RNA, 21 nt, Human
uauauuuauaacucaucauaa

SEQ ID NO: 2417411 - RNA, 21 nt, Human
uaucaacacuguuacuuucgu

SEQ ID NO: 2417412 - RNA, 15 nt, Human
uaucaagcagccaag

SEQ ID NO: 2417413 - RNA, 23 nt, Human
uaucaagccaguacgugcuaaca

SEQ ID NO: 2417414 - RNA, 16 nt, Human
uaucauuuaauaauau

SEQ ID NO: 2417415 - RNA, 21 nt, Human
uauccagguaauccaagauau

SEQ ID NO: 2417416 - RNA, 18 nt, Human
uauccagguaauccaaga

SEQ ID NO: 2417417 - RNA, 17 nt, Human
uauccauauugagucaa

SEQ ID NO: 2417418 - RNA, 11 nt, Human
uauccagucua

SEQ ID NO: 2417419 - RNA, 15 nt, Human
uauccacuuugcaca

SEQ ID NO: 2417420 - RNA, 18 nt, Human
uauccacuuugcacagcu

SEQ ID NO: 2417421 - RNA, 19 nt, Human
uauccacccagcccauucu

SEQ ID NO: 2417422 - RNA, 20 nt, Human
uauccacccagcccauucuc

SEQ ID NO: 2417423 - RNA, 11 nt, Human
uauccaggacu

SEQ ID NO: 2417424 - RNA, 14 nt, Human
uaucccuuccuuuu

SEQ ID NO: 2417425 - RNA, 16 nt, Human
uauccggacuccugcc

SEQ ID NO: 2417426 - RNA, 19 nt, Human
acagagaacuaacacuauu

SEQ ID NO: 2417427 - RNA, 16 nt, Human
acagagaagacaaaau

SEQ ID NO: 2417428 - RNA, 18 nt, Human
acagagaacuaacacuau

SEQ ID NO: 2417429 - RNA, 14 nt, Human
acagagaaccugga

SEQ ID NO: 2417430 - RNA, 19 nt, Human
acagagaaagaggaagcuu

SEQ ID NO: 2417431 - RNA, 17 nt, Human
acagagaaagagagaga

SEQ ID NO: 2417432 - RNA, 18 nt, Human
acagagaaaguacuucuc

SEQ ID NO: 2417433 - RNA, 11 nt, Human
acagagaaagu

SEQ ID NO: 2417434 - RNA, 15 nt, Human
acagagaaggcagga

SEQ ID NO: 2417435 - RNA, 14 nt, Human
acagagaaggcagg

SEQ ID NO: 2417436 - RNA, 16 nt, Human
acagagaaggcaggaa

SEQ ID NO: 2417437 - RNA, 14 nt, Human
uaucuauauuuuug

SEQ ID NO: 2417438 - RNA, 13 nt, Human
uaucuaucuuaua

SEQ ID NO: 2417439 - RNA, 17 nt, Human
uaucucaaaacugcacu

SEQ ID NO: 2417440 - RNA, 22 nt, Human
uaucucagucaugcauaaauau

SEQ ID NO: 2417441 - RNA, 14 nt, Human
uaucucccccagcc

SEQ ID NO: 2417442 - RNA, 13 nt, Human
uaucucccccagc

SEQ ID NO: 2417443 - RNA, 23 nt, Human
uaucuccaggauugaagagcauu

SEQ ID NO: 2417444 - RNA, 18 nt, Human
uaucucagucaugcauaa

SEQ ID NO: 2417445 - RNA, 11 nt, Human
uaucucaucuc

SEQ ID NO: 2417446 - RNA, 15 nt, Human
uaucuccaagaccag

SEQ ID NO: 2417447 - RNA, 22 nt, Human
uaugaaauuuaauauagcuauu

SEQ ID NO: 2417448 - RNA, 15 nt, Human
uaucuuuuuucaaaa

SEQ ID NO: 2417449 - RNA, 20 nt, Human
uaugaaauuuaauauagcua

SEQ ID NO: 2417450 - RNA, 14 nt, Human
uaugaacauauugu

SEQ ID NO: 2417451 - RNA, 13 nt, Human
uaucuuuugaccu

SEQ ID NO: 2417452 - RNA, 19 nt, Human
uaucuuuugaccuguggug

SEQ ID NO: 2417453 - RNA, 22 nt, Human
uaucuuuuugcuuacaguuuua

SEQ ID NO: 2417454 - RNA, 22 nt, Human
uaucuuugccacccucaugcug

SEQ ID NO: 2417455 - RNA, 23 nt, Human
uaucuuuucuauuguuuauucuu

SEQ ID NO: 2417456 - RNA, 18 nt, Human
acagccguuuguucccca

SEQ ID NO: 2417457 - RNA, 19 nt, Human
acagccgucagccaaaugu

SEQ ID NO: 2417458 - RNA, 17 nt, Human
acagccgucagccaaau

SEQ ID NO: 2417459 - RNA, 19 nt, Human
acagccgcuccugucugcc

SEQ ID NO: 2417460 - RNA, 20 nt, Human
acagccgcuccugucugcca

SEQ ID NO: 2417461 - RNA, 23 nt, Human
acagccgcuccugucugccagcc

SEQ ID NO: 2417462 - RNA, 24 nt, Human
acagccgcuccugucugccagcca

SEQ ID NO: 2417463 - RNA, 14 nt, Human
uaucuuugccaccc

SEQ ID NO: 2417464 - RNA, 16 nt, Human
uaucuuugccacccuc

SEQ ID NO: 2417465 - RNA, 11 nt, Human
uaucuuugcca

SEQ ID NO: 2417466 - RNA, 22 nt, Human
uaucuuugauucuccuucagcc

SEQ ID NO: 2417467 - RNA, 19 nt, Human
uaucuuugauucuccuuca

SEQ ID NO: 2417468 - RNA, 14 nt, Human
acagccucacagaa

SEQ ID NO: 2417469 - RNA, 18 nt, Human
uaucuuugauucuccuuc

SEQ ID NO: 2417470 - RNA, 20 nt, Human
acagccgucagccaaaugua

SEQ ID NO: 2417471 - RNA, 17 nt, Human
acagccucacagaagaa

SEQ ID NO: 2417472 - RNA, 21 nt, Human
acagcaaggaggcuggcuggg

SEQ ID NO: 2417473 - RNA, 20 nt, Human
acagcaaggaggcuggcugg

SEQ ID NO: 2417474 - RNA, 19 nt, Human
acagcaaggaggcuggcug

SEQ ID NO: 2417475 - RNA, 18 nt, Human
acagcaaggaggcuggcu

SEQ ID NO: 2417476 - RNA, 17 nt, Human
acagcccgggcucugcc

SEQ ID NO: 2417477 - RNA, 21 nt, Human
acagcaaggagauuuacaacu

SEQ ID NO: 2417478 - RNA, 17 nt, Human
acagcaaggaggcuggc

SEQ ID NO: 2417479 - RNA, 16 nt, Human
acagcaaggaggcugg

SEQ ID NO: 2417480 - RNA, 16 nt, Human
acagcaaggagauuua

SEQ ID NO: 2417481 - RNA, 19 nt, Human
acagcccgggcucugccuc

SEQ ID NO: 2417482 - RNA, 18 nt, Human
acagcccgggcucugccu

SEQ ID NO: 2417483 - RNA, 22 nt, Human
acagccgcagccucccucugac

SEQ ID NO: 2417484 - RNA, 18 nt, Human
acagcaaggcaccugcag

SEQ ID NO: 2417485 - RNA, 16 nt, Human
acagcaaggcaccugc

SEQ ID NO: 2417486 - RNA, 23 nt, Human
acagcaaggaggcuggcuggggc

SEQ ID NO: 2417487 - RNA, 20 nt, Human
acagcccgggcucugccucc

SEQ ID NO: 2417488 - RNA, 23 nt, Human
acagccgcagccucccucugacc

SEQ ID NO: 2417489 - RNA, 14 nt, Human
acagccgcuccugu

SEQ ID NO: 2417490 - RNA, 18 nt, Human
acagccgcuccugucugc

SEQ ID NO: 2417491 - RNA, 18 nt, Human
acagaucaagcugugaga

SEQ ID NO: 2417492 - RNA, 16 nt, Human
acagaucaagcuguga

SEQ ID NO: 2417493 - RNA, 15 nt, Human
acagaucaagcugug

SEQ ID NO: 2417494 - RNA, 14 nt, Human
acagauauaaaugg

SEQ ID NO: 2417495 - RNA, 17 nt, Human
acagauccccaagccug

SEQ ID NO: 2417496 - RNA, 17 nt, Human
acagauauaaauggcug

SEQ ID NO: 2417497 - RNA, 14 nt, Human
acagaucaagcugu

SEQ ID NO: 2417498 - RNA, 13 nt, Human
acagauaguugug

SEQ ID NO: 2417499 - RNA, 23 nt, Human
acagauagucaaaccauaaacuu

SEQ ID NO: 2417500 - RNA, 21 nt, Human
acagauaguaucuagcaauca

SEQ ID NO: 2417501 - RNA, 22 nt, Human
acagaucucugcuuuggaaauc

SEQ ID NO: 2417502 - RNA, 12 nt, Human
acagaucuggaa

SEQ ID NO: 2417503 - RNA, 17 nt, Human
acagaucuccuggcaaa

SEQ ID NO: 2417504 - RNA, 18 nt, Human
acagauccccaagccugg

SEQ ID NO: 2417505 - RNA, 23 nt, Human
acagaucgaaccguuuugaagcu

SEQ ID NO: 2417506 - RNA, 19 nt, Human
acagagcccacgcccccac

SEQ ID NO: 2417507 - RNA, 18 nt, Human
acagagcccacgccccca

SEQ ID NO: 2417508 - RNA, 15 nt, Human
acagagcccacgccc

SEQ ID NO: 2417509 - RNA, 14 nt, Human
acagagcccacgcc

SEQ ID NO: 2417510 - RNA, 14 nt, Human
acagagacaccugc

SEQ ID NO: 2417511 - RNA, 17 nt, Human
acagcaaggagauuuac

SEQ ID NO: 2417512 - RNA, 14 nt, Human
acagauuugagcuc

SEQ ID NO: 2417513 - RNA, 15 nt, Human
acagauuugagcuca

SEQ ID NO: 2417514 - RNA, 20 nt, Human
acagaugcaaugugcuacug

SEQ ID NO: 2417515 - RNA, 14 nt, Human
acagaucuggaacc

SEQ ID NO: 2417516 - RNA, 16 nt, Human
acagaucuggaaccuc

SEQ ID NO: 2417517 - RNA, 20 nt, Human
acagaucuggaaccucagcc

SEQ ID NO: 2417518 - RNA, 21 nt, Human
acagaucuggaaccucagccu

SEQ ID NO: 2417519 - RNA, 22 nt, Human
acagaucuggaaccucagccug

SEQ ID NO: 2417520 - RNA, 20 nt, Human
acagaugaaacacaaacaau

SEQ ID NO: 2417521 - RNA, 19 nt, Human
acagaugaaacacaaacaa

SEQ ID NO: 2417522 - RNA, 14 nt, Human
acagaugaauguau

SEQ ID NO: 2417523 - RNA, 17 nt, Human
acagaugaauguauuua

SEQ ID NO: 2417524 - RNA, 16 nt, Human
acagaugcaaugugcu

SEQ ID NO: 2417525 - RNA, 17 nt, Human
acagaugcaaugugcua

SEQ ID NO: 2417526 - RNA, 18 nt, Human
acagaugccacacaagga

SEQ ID NO: 2417527 - RNA, 16 nt, Human
acagccucuuagaugc

SEQ ID NO: 2417528 - RNA, 20 nt, Human
acagccucugaccccuccuc

SEQ ID NO: 2417529 - RNA, 18 nt, Human
acagccucugaccccucc

SEQ ID NO: 2417530 - RNA, 13 nt, Human
acagccucugacu

SEQ ID NO: 2417531 - RNA, 23 nt, Human
acagccucugaccccuccucacu

SEQ ID NO: 2417532 - RNA, 22 nt, Human
acagccucugaccccuccucac

SEQ ID NO: 2417533 - RNA, 21 nt, Human
acagccucugaccccuccuca

SEQ ID NO: 2417534 - RNA, 19 nt, Human
acagcggcuggacuuggag

SEQ ID NO: 2417535 - RNA, 22 nt, Human
uauggguguguguuugugugag

SEQ ID NO: 2417536 - RNA, 23 nt, Human
uauggggggccaacaccagggau

SEQ ID NO: 2417537 - RNA, 23 nt, Human
uauggcuuuugugcauuaucuag

SEQ ID NO: 2417538 - RNA, 20 nt, Human
uauggggauagaugugugga

SEQ ID NO: 2417539 - RNA, 20 nt, Human
uauggggcugaacggggaga

SEQ ID NO: 2417540 - RNA, 22 nt, Human
uaugggggccuggauucauuuc

SEQ ID NO: 2417541 - RNA, 19 nt, Human
uauggggggccaacaccag

SEQ ID NO: 2417542 - RNA, 18 nt, Human
uauggcuuuugugcauua

SEQ ID NO: 2417543 - RNA, 21 nt, Human
uauggcuuuugugcauuaucu

SEQ ID NO: 2417544 - RNA, 17 nt, Human
uaugcuuaguaaugcua

SEQ ID NO: 2417545 - RNA, 16 nt, Human
uaugcuuacugauaua

SEQ ID NO: 2417546 - RNA, 21 nt, Human
uaugcuuacugauauauuuua

SEQ ID NO: 2417547 - RNA, 17 nt, Human
uauggcuuuugugcauu

SEQ ID NO: 2417548 - RNA, 20 nt, Human
uaugcugccaaauuuuggcc

SEQ ID NO: 2417549 - RNA, 22 nt, Human
uaugcugccaaauuuuggccaa

SEQ ID NO: 2417550 - RNA, 16 nt, Human
uaugcugccaaauuuu

SEQ ID NO: 2417551 - RNA, 16 nt, Human
uaugcuacuacaaaaa

SEQ ID NO: 2417552 - RNA, 15 nt, Human
uaugcuuauacacuu

SEQ ID NO: 2417553 - RNA, 15 nt, Human
uaugcuuacugauau

SEQ ID NO: 2417554 - RNA, 21 nt, Human
uaugauuaaguaaugauaacu

SEQ ID NO: 2417555 - RNA, 11 nt, Human
uaugcauuuga

SEQ ID NO: 2417556 - RNA, 23 nt, Human
uaugcauuugaaaauuuugaugu

SEQ ID NO: 2417557 - RNA, 24 nt, Human
uaugcauuugaaaauuuugauguu

SEQ ID NO: 2417558 - RNA, 20 nt, Human
uaugauuaaguaaugauaac

SEQ ID NO: 2417559 - RNA, 16 nt, Human
uaugauuaaguaauga

SEQ ID NO: 2417560 - RNA, 19 nt, Human
uaugaacauauuguugaaa

SEQ ID NO: 2417561 - RNA, 17 nt, Human
uaugaacauauuguuga

SEQ ID NO: 2417562 - RNA, 18 nt, Human
uaugaacggugagcauug

SEQ ID NO: 2417563 - RNA, 17 nt, Human
uaugccugggcagaagg

SEQ ID NO: 2417564 - RNA, 14 nt, Human
uaugccuucuuauu

SEQ ID NO: 2417565 - RNA, 22 nt, Human
uaugccuguacucgcuugugca

SEQ ID NO: 2417566 - RNA, 10 nt, Human
uaugccugug

SEQ ID NO: 2417567 - RNA, 12 nt, Human
uaugccuguacu

SEQ ID NO: 2417568 - RNA, 22 nt, Human
uaugccuuuaaaucugugauga

SEQ ID NO: 2417569 - RNA, 20 nt, Human
uaugccuuuaaaucugugau

SEQ ID NO: 2417570 - RNA, 19 nt, Human
uaugccuucuuauugcuuu

SEQ ID NO: 2417571 - RNA, 16 nt, Human
uaugccuuuaaaucug

SEQ ID NO: 2417572 - RNA, 13 nt, Human
uaugcuaaucagg

SEQ ID NO: 2417573 - RNA, 19 nt, Human
uaugccccauucaacaucu

SEQ ID NO: 2417574 - RNA, 21 nt, Human
uaugcauuuaaauacagucuu

SEQ ID NO: 2417575 - RNA, 22 nt, Human
uaugcauuuaaauacagucuuc

SEQ ID NO: 2417576 - RNA, 19 nt, Human
uaugccucuccuuuguaua

SEQ ID NO: 2417577 - RNA, 18 nt, Human
uaugccucuccuuuguau

SEQ ID NO: 2417578 - RNA, 17 nt, Human
uaugccucuccuuugua

SEQ ID NO: 2417579 - RNA, 15 nt, Human
uaugccucuccuuug

SEQ ID NO: 2417580 - RNA, 21 nt, Human
uaugccucuccuuuguauauu

SEQ ID NO: 2417581 - RNA, 20 nt, Human
uaugccucuccuuuguauau

SEQ ID NO: 2417582 - RNA, 16 nt, Human
uaugccucuguauuua

SEQ ID NO: 2417583 - RNA, 16 nt, Human
uaugccggaugugcuu

SEQ ID NO: 2417584 - RNA, 15 nt, Human
uaugccggaugugcu

SEQ ID NO: 2417585 - RNA, 20 nt, Human
uaugccgaaugcccucaggg

SEQ ID NO: 2417586 - RNA, 23 nt, Human
uaugccggaugugcuuuucucca

SEQ ID NO: 2417587 - RNA, 21 nt, Human
uaugccggaugugcuuuucuc

SEQ ID NO: 2417588 - RNA, 14 nt, Human
uaugccucuccuuu

SEQ ID NO: 2417589 - RNA, 23 nt, Human
aauugccauauugcacaugucuu

SEQ ID NO: 2417590 - RNA, 19 nt, Human
aauugccauauugcacaug

SEQ ID NO: 2417591 - RNA, 17 nt, Human
aauugccauauugcaca

SEQ ID NO: 2417592 - RNA, 16 nt, Human
aauugccauauugcac

SEQ ID NO: 2417593 - RNA, 23 nt, Human
aauugccugacgaacuccuugau

SEQ ID NO: 2417594 - RNA, 19 nt, Human
aauugccugcagagagaag

SEQ ID NO: 2417595 - RNA, 15 nt, Human
aauugccugacgaac

SEQ ID NO: 2417596 - RNA, 15 nt, Human
aauugccauauugca

SEQ ID NO: 2417597 - RNA, 13 nt, Human
aauugccauauug

SEQ ID NO: 2417598 - RNA, 12 nt, Human
aauugccauauu

SEQ ID NO: 2417599 - RNA, 22 nt, Human
aauugaucauuuuccccccacu

SEQ ID NO: 2417600 - RNA, 14 nt, Human
aauugccaaagcug

SEQ ID NO: 2417601 - RNA, 14 nt, Human
aauugauguguuua

SEQ ID NO: 2417602 - RNA, 12 nt, Human
aauugcauuucc

SEQ ID NO: 2417603 - RNA, 13 nt, Human
aauugauguguuu

SEQ ID NO: 2417604 - RNA, 22 nt, Human
aauugaucauagguauuucaaa

SEQ ID NO: 2417605 - RNA, 21 nt, Human
aauugaucauagguauuucaa

SEQ ID NO: 2417606 - RNA, 19 nt, Human
aauugaugggauuugguca

SEQ ID NO: 2417607 - RNA, 17 nt, Human
aauugaguuuucagugg

SEQ ID NO: 2417608 - RNA, 15 nt, Human
aauugacucaaaucu

SEQ ID NO: 2417609 - RNA, 14 nt, Human
aauugaggucugcu

SEQ ID NO: 2417610 - RNA, 19 nt, Human
aauugaggucugcucggcc

SEQ ID NO: 2417611 - RNA, 22 nt, Human
uacuguacaugaaaacacauuu

SEQ ID NO: 2417612 - RNA, 18 nt, Human
uacuguacaugaaaacac

SEQ ID NO: 2417613 - RNA, 14 nt, Human
uacuggcuggugau

SEQ ID NO: 2417614 - RNA, 21 nt, Human
uacuguacaugaaaacacauu

SEQ ID NO: 2417615 - RNA, 23 nt, Human
uacuguaauuugugauacaaugc

SEQ ID NO: 2417616 - RNA, 21 nt, Human
aauugacccacaagaaaugaa

SEQ ID NO: 2417617 - RNA, 12 nt, Human
uacuguaguuuu

SEQ ID NO: 2417618 - RNA, 14 nt, Human
uacuguacuuaaua

SEQ ID NO: 2417619 - RNA, 13 nt, Human
uacuguaguuuuu

SEQ ID NO: 2417620 - RNA, 15 nt, Human
uacuguaguuuuucu

SEQ ID NO: 2417621 - RNA, 22 nt, Human
aauugacccacaagaaaugaaa

SEQ ID NO: 2417622 - RNA, 14 nt, Human
aauugacugucacu

SEQ ID NO: 2417623 - RNA, 14 nt, Human
aauugacuuauuua

SEQ ID NO: 2417624 - RNA, 19 nt, Human
uacuguaauuugugauaca

SEQ ID NO: 2417625 - RNA, 20 nt, Human
uacuguaauuugugauacaa

SEQ ID NO: 2417626 - RNA, 18 nt, Human
uacuguaauuugugauac

SEQ ID NO: 2417627 - RNA, 19 nt, Human
uacuguaaggcaaucaugg

SEQ ID NO: 2417628 - RNA, 14 nt, Human
uacuguaagaaaau

SEQ ID NO: 2417629 - RNA, 18 nt, Human
uacuguaaggcaaucaug

SEQ ID NO: 2417630 - RNA, 21 nt, Human
uacuggccucgccuggccuga

SEQ ID NO: 2417631 - RNA, 19 nt, Human
uacuggccucgccuggccu

SEQ ID NO: 2417632 - RNA, 14 nt, Human
uacuggccucgccu

SEQ ID NO: 2417633 - RNA, 18 nt, Human
uacuggcaaaaggaucuu

SEQ ID NO: 2417634 - RNA, 22 nt, Human
uacuggcaaaaggaucuuugug

SEQ ID NO: 2417635 - RNA, 18 nt, Human
uacuggaaguuuugcauu

SEQ ID NO: 2417636 - RNA, 23 nt, Human
uacuggaaguuuugcauuuaugg

SEQ ID NO: 2417637 - RNA, 12 nt, Human
uacucuguguca

SEQ ID NO: 2417638 - RNA, 17 nt, Human
uacuggaaguuuugcau

SEQ ID NO: 2417639 - RNA, 16 nt, Human
uacuggagaaaaugga

SEQ ID NO: 2417640 - RNA, 14 nt, Human
uacuggagaagucu

SEQ ID NO: 2417641 - RNA, 15 nt, Human
uacucugguucuuug

SEQ ID NO: 2417642 - RNA, 15 nt, Human
uacucugucagaugg

SEQ ID NO: 2417643 - RNA, 17 nt, Human
uacucugguucuuuguu

SEQ ID NO: 2417644 - RNA, 20 nt, Human
uacucuccucggcccccucc

SEQ ID NO: 2417645 - RNA, 19 nt, Human
uacucuccucggcccccuc

SEQ ID NO: 2417646 - RNA, 12 nt, Human
uacucugaaggg

SEQ ID NO: 2417647 - RNA, 22 nt, Human
uacucugaagggcaucaugcau

SEQ ID NO: 2417648 - RNA, 19 nt, Human
uacucugaagggcaucaug

SEQ ID NO: 2417649 - RNA, 13 nt, Human
uacguacacauuu

SEQ ID NO: 2417650 - RNA, 15 nt, Human
uacguugugcauuug

SEQ ID NO: 2417651 - RNA, 16 nt, Human
uacguugugcauuugg

SEQ ID NO: 2417652 - RNA, 12 nt, Human
uacguacacauu

SEQ ID NO: 2417653 - RNA, 13 nt, Human
uacgcuaguuauc

SEQ ID NO: 2417654 - RNA, 16 nt, Human
uacgccugccuccccu

SEQ ID NO: 2417655 - RNA, 19 nt, Human
uacgcccaacccuucccca

SEQ ID NO: 2417656 - RNA, 17 nt, Human
uacgcccaacccuuccc

SEQ ID NO: 2417657 - RNA, 23 nt, Human
uacgcacuacaugugguuuauag

SEQ ID NO: 2417658 - RNA, 21 nt, Human
aauuccucucacuaaacuuua

SEQ ID NO: 2417659 - RNA, 22 nt, Human
uacgcagcgugcuuuaaaaaau

SEQ ID NO: 2417660 - RNA, 17 nt, Human
uacgccugcauguaaac

SEQ ID NO: 2417661 - RNA, 18 nt, Human
uacgggaggguaaggcug

SEQ ID NO: 2417662 - RNA, 16 nt, Human
uacgauggcacccagu

SEQ ID NO: 2417663 - RNA, 22 nt, Human
uacgccaggggaaaaucagccu

SEQ ID NO: 2417664 - RNA, 22 nt, Human
aauuccuauugugauuugacug

SEQ ID NO: 2417665 - RNA, 20 nt, Human
aauuccuauugugauuugac

SEQ ID NO: 2417666 - RNA, 19 nt, Human
aauuccuauugugauuuga

SEQ ID NO: 2417667 - RNA, 18 nt, Human
aauuccuauugugauuug

SEQ ID NO: 2417668 - RNA, 16 nt, Human
aauuccuauugugauu

SEQ ID NO: 2417669 - RNA, 15 nt, Human
aauuccuauugugau

SEQ ID NO: 2417670 - RNA, 12 nt, Human
aauuccuauugu

SEQ ID NO: 2417671 - RNA, 14 nt, Human
aauuccucugggaa

SEQ ID NO: 2417672 - RNA, 13 nt, Human
aauuccucuggga

SEQ ID NO: 2417673 - RNA, 20 nt, Human
aauucccuggccuuucauau

SEQ ID NO: 2417674 - RNA, 22 nt, Human
aauuccuauacgcagcgugcuu

SEQ ID NO: 2417675 - RNA, 14 nt, Human
aauucccugcuguc

SEQ ID NO: 2417676 - RNA, 13 nt, Human
aauucccugcugu

SEQ ID NO: 2417677 - RNA, 19 nt, Human
aauucccuggccuuucaua

SEQ ID NO: 2417678 - RNA, 23 nt, Human
aauucccucucucugacucucaa

SEQ ID NO: 2417679 - RNA, 21 nt, Human
aauucccucucucugacucuc

SEQ ID NO: 2417680 - RNA, 17 nt, Human
aauucccucucucugac

SEQ ID NO: 2417681 - RNA, 23 nt, Human
aauucccuaucuuuuaguuuuag

SEQ ID NO: 2417682 - RNA, 16 nt, Human
aauucccucucucuga

SEQ ID NO: 2417683 - RNA, 10 nt, Human
aauucccuau

SEQ ID NO: 2417684 - RNA, 22 nt, Human
aauucccuaucuuuuaguuuua

SEQ ID NO: 2417685 - RNA, 14 nt, Human
uacuauguaucaau

SEQ ID NO: 2417686 - RNA, 13 nt, Human
uacuaugccugug

SEQ ID NO: 2417687 - RNA, 14 nt, Human
uacuaugccugugu

SEQ ID NO: 2417688 - RNA, 14 nt, Human
uacucuccucaucu

SEQ ID NO: 2417689 - RNA, 16 nt, Human
uacucuccucaucucu

SEQ ID NO: 2417690 - RNA, 22 nt, Human
uacucuccuggaaauauuaaga

SEQ ID NO: 2417691 - RNA, 23 nt, Human
uacucuccuggaaauauuaagaa

SEQ ID NO: 2417692 - RNA, 23 nt, Human
uacuauggcccuggccuagcaua

SEQ ID NO: 2417693 - RNA, 15 nt, Human
uacuaucuacucucc

SEQ ID NO: 2417694 - RNA, 17 nt, Human
uacuaucuacucuccuc

SEQ ID NO: 2417695 - RNA, 12 nt, Human
uacuauguauca

SEQ ID NO: 2417696 - RNA, 13 nt, Human
uacuauguaucaa

SEQ ID NO: 2417697 - RNA, 17 nt, Human
uacuacugaaucucuaa

SEQ ID NO: 2417698 - RNA, 16 nt, Human
uacuacugaaucucua

SEQ ID NO: 2417699 - RNA, 20 nt, Human
uacuacuguggaaaaauauu

SEQ ID NO: 2417700 - RNA, 14 nt, Human
uacuagaagaugaa

SEQ ID NO: 2417701 - RNA, 18 nt, Human
uacuagaacacagaaagc

SEQ ID NO: 2417702 - RNA, 12 nt, Human
uacuagaacaca

SEQ ID NO: 2417703 - RNA, 20 nt, Human
uacuacuuuugcaugaaaau

SEQ ID NO: 2417704 - RNA, 22 nt, Human
uacuacuguggaaaaauauuua

SEQ ID NO: 2417705 - RNA, 19 nt, Human
uacuauauaugugaugauc

SEQ ID NO: 2417706 - RNA, 14 nt, Human
uacuauauuuaugg

SEQ ID NO: 2417707 - RNA, 20 nt, Human
uacuaucaugucaaacguga

SEQ ID NO: 2417708 - RNA, 16 nt, Human
uacuacuccuguaauu

SEQ ID NO: 2417709 - RNA, 17 nt, Human
uacuaaaaagaaggaaa

SEQ ID NO: 2417710 - RNA, 23 nt, Human
uacuaaaaagaaggaaaaugauc

SEQ ID NO: 2417711 - RNA, 16 nt, Human
uacuaaaaagaaggaa

SEQ ID NO: 2417712 - RNA, 13 nt, Human
uacguuuuuguaa

SEQ ID NO: 2417713 - RNA, 17 nt, Human
uacuacuccuguaggaa

SEQ ID NO: 2417714 - RNA, 13 nt, Human
uacuacuccugua

SEQ ID NO: 2417715 - RNA, 20 nt, Human
uacguuuguauguguguaga

SEQ ID NO: 2417716 - RNA, 14 nt, Human
uacguuuguaugug

SEQ ID NO: 2417717 - RNA, 13 nt, Human
uacguuuguaugu

SEQ ID NO: 2417718 - RNA, 17 nt, Human
uaccugucccccugaca

SEQ ID NO: 2417719 - RNA, 16 nt, Human
uaccugucccccugac

SEQ ID NO: 2417720 - RNA, 14 nt, Human
uaccugucccccug

SEQ ID NO: 2417721 - RNA, 13 nt, Human
uaccugucccccu

SEQ ID NO: 2417722 - RNA, 18 nt, Human
uaccugggugauuacaua

SEQ ID NO: 2417723 - RNA, 10 nt, Human
uaccuguccc

SEQ ID NO: 2417724 - RNA, 23 nt, Human
uaccugcucuccaagucucagug

SEQ ID NO: 2417725 - RNA, 14 nt, Human
uaccugcucuccaa

SEQ ID NO: 2417726 - RNA, 20 nt, Human
uaccugggcauacuaauaaa

SEQ ID NO: 2417727 - RNA, 14 nt, Human
uaccugggaagggg

SEQ ID NO: 2417728 - RNA, 17 nt, Human
uaccuggaggaggagca

SEQ ID NO: 2417729 - RNA, 21 nt, Human
uaccuggguccuuuucagaag

SEQ ID NO: 2417730 - RNA, 20 nt, Human
uaccugccaggaagccagca

SEQ ID NO: 2417731 - RNA, 18 nt, Human
uaccugccaggaagccag

SEQ ID NO: 2417732 - RNA, 16 nt, Human
uaccugcccugacaug

SEQ ID NO: 2417733 - RNA, 23 nt, Human
uaccugccaggaagccagcaggc

SEQ ID NO: 2417734 - RNA, 18 nt, Human
uaccaccccuuccugucc

SEQ ID NO: 2417735 - RNA, 17 nt, Human
uaccaccccuuccuguc

SEQ ID NO: 2417736 - RNA, 16 nt, Human
uaccaccccuuccugu

SEQ ID NO: 2417737 - RNA, 15 nt, Human
uaccaccccuuccug

SEQ ID NO: 2417738 - RNA, 14 nt, Human
uaccaccccuuccu

SEQ ID NO: 2417739 - RNA, 15 nt, Human
uaccacccccacacc

SEQ ID NO: 2417740 - RNA, 14 nt, Human
uaccacccccacac

SEQ ID NO: 2417741 - RNA, 15 nt, Human
uaccacccaaugcug

SEQ ID NO: 2417742 - RNA, 19 nt, Human
uacauuggcugguaacagu

SEQ ID NO: 2417743 - RNA, 19 nt, Human
uaccaccccuuccuguccc

SEQ ID NO: 2417744 - RNA, 10 nt, Human
uaccaccucc

SEQ ID NO: 2417745 - RNA, 13 nt, Human
uaccacuccugcc

SEQ ID NO: 2417746 - RNA, 14 nt, Human
uaccacucaggcca

SEQ ID NO: 2417747 - RNA, 12 nt, Human
aauuagcaauug

SEQ ID NO: 2417748 - RNA, 14 nt, Human
aauuagccgggcgu

SEQ ID NO: 2417749 - RNA, 15 nt, Human
aauuagccaagugug

SEQ ID NO: 2417750 - RNA, 14 nt, Human
aauuacugguccaa

SEQ ID NO: 2417751 - RNA, 19 nt, Human
aauuacucaggaagaacac

SEQ ID NO: 2417752 - RNA, 13 nt, Human
aauuacucaggaa

SEQ ID NO: 2417753 - RNA, 16 nt, Human
aauuacuacaaaauuu

SEQ ID NO: 2417754 - RNA, 17 nt, Human
aauuaggaagugauuau

SEQ ID NO: 2417755 - RNA, 21 nt, Human
aauuaggaaguguaacagcug

SEQ ID NO: 2417756 - RNA, 20 nt, Human
aauuaggaauaaauaaaaau

SEQ ID NO: 2417757 - RNA, 22 nt, Human
aauuaggaaguguaacagcuga

SEQ ID NO: 2417758 - RNA, 16 nt, Human
aauuagcugugugaaa

SEQ ID NO: 2417759 - RNA, 23 nt, Human
aauuaccuuagauuagcucugga

SEQ ID NO: 2417760 - RNA, 21 nt, Human
aauuaccuuagauuagcucug

SEQ ID NO: 2417761 - RNA, 21 nt, Human
aauuaccuugagccaguaauu

SEQ ID NO: 2417762 - RNA, 14 nt, Human
aauuacacccaaag

SEQ ID NO: 2417763 - RNA, 14 nt, Human
aauuacaauuguca

SEQ ID NO: 2417764 - RNA, 15 nt, Human
aauuacuacaaaauu

SEQ ID NO: 2417765 - RNA, 17 nt, Human
aauuacuacaaaauuug

SEQ ID NO: 2417766 - RNA, 11 nt, Human
aauuacaggaa

SEQ ID NO: 2417767 - RNA, 23 nt, Human
aauuacaauugucauuuauaaaa

SEQ ID NO: 2417768 - RNA, 23 nt, Human
aauuaauuuuuuuauuguuuaaa

SEQ ID NO: 2417769 - RNA, 22 nt, Human
aauuaauuuuuuuauuguuuaa

SEQ ID NO: 2417770 - RNA, 21 nt, Human
aauuaauuuuuuuauuguuua

SEQ ID NO: 2417771 - RNA, 18 nt, Human
aauuaauuuuuuuauugu

SEQ ID NO: 2417772 - RNA, 15 nt, Human
uaccuguauucccag

SEQ ID NO: 2417773 - RNA, 15 nt, Human
aauucauuuuuuuca

SEQ ID NO: 2417774 - RNA, 14 nt, Human
aauuccaaaggaau

SEQ ID NO: 2417775 - RNA, 23 nt, Human
aauuccaaggaguuccaugaaga

SEQ ID NO: 2417776 - RNA, 12 nt, Human
aauuccaaggag

SEQ ID NO: 2417777 - RNA, 13 nt, Human
aauuccacuggac

SEQ ID NO: 2417778 - RNA, 14 nt, Human
aauuccacuggacu

SEQ ID NO: 2417779 - RNA, 22 nt, Human
aauuccacuuauaggaauugac

SEQ ID NO: 2417780 - RNA, 16 nt, Human
aauuccaauaugauga

SEQ ID NO: 2417781 - RNA, 22 nt, Human
aauuccacugucaagaaagagc

SEQ ID NO: 2417782 - RNA, 14 nt, Human
aauuccacugucaa

SEQ ID NO: 2417783 - RNA, 21 nt, Human
aauuccacuggacuugagcuu

SEQ ID NO: 2417784 - RNA, 12 nt, Human
aauuccccagau

SEQ ID NO: 2417785 - RNA, 14 nt, Human
aauuccccacccug

SEQ ID NO: 2417786 - RNA, 11 nt, Human
aauuccaugaa

SEQ ID NO: 2417787 - RNA, 10 nt, Human
aauuccauga

SEQ ID NO: 2417788 - RNA, 18 nt, Human
aauuccaugaaucgcuuc

SEQ ID NO: 2417789 - RNA, 16 nt, Human
aauuccaugaaucgcu

SEQ ID NO: 2417790 - RNA, 17 nt, Human
aauucccauuuugcaaa

SEQ ID NO: 2417791 - RNA, 19 nt, Human
aauucccauuuugcaaaau

SEQ ID NO: 2417792 - RNA, 21 nt, Human
aauucccauuuugcaaaauuu

SEQ ID NO: 2417793 - RNA, 22 nt, Human
aauucccauuuugcaaaauuuc

SEQ ID NO: 2417794 - RNA, 16 nt, Human
aauucccauuuugcaa

SEQ ID NO: 2417795 - RNA, 18 nt, Human
aauuccaagugauugaaa

SEQ ID NO: 2417796 - RNA, 23 nt, Human
aauucacucccacacccaagaag

SEQ ID NO: 2417797 - RNA, 14 nt, Human
aauucaccaaagua

SEQ ID NO: 2417798 - RNA, 17 nt, Human
aauucaccaaaguauuu

SEQ ID NO: 2417799 - RNA, 21 nt, Human
aauucacccccuuuccuggac

SEQ ID NO: 2417800 - RNA, 13 nt, Human
aauucacucccac

SEQ ID NO: 2417801 - RNA, 21 nt, Human
aauucacaucuaaccucaucu

SEQ ID NO: 2417802 - RNA, 22 nt, Human
aauucacaucuaaccucaucuu

SEQ ID NO: 2417803 - RNA, 19 nt, Human
aauucacaaacuuuuauac

SEQ ID NO: 2417804 - RNA, 14 nt, Human
aauucacaaacuuu

SEQ ID NO: 2417805 - RNA, 13 nt, Human
aauucacaaacuu

SEQ ID NO: 2417806 - RNA, 14 nt, Human
aauucaacccuuug

SEQ ID NO: 2417807 - RNA, 21 nt, Human
aauucaaccacuguaaaauga

SEQ ID NO: 2417808 - RNA, 18 nt, Human
aauucaacccuuugcccc

SEQ ID NO: 2417809 - RNA, 15 nt, Human
aauucaacucagacu

SEQ ID NO: 2417810 - RNA, 19 nt, Human
aauuauuuugguacuuuua

SEQ ID NO: 2417811 - RNA, 18 nt, Human
aauuauuuuggauuuugu

SEQ ID NO: 2417812 - RNA, 11 nt, Human
aauuauuuugg

SEQ ID NO: 2417813 - RNA, 20 nt, Human
aauuauuuugguacuuuuau

SEQ ID NO: 2417814 - RNA, 17 nt, Human
aauuauuuuuacaguuc

SEQ ID NO: 2417815 - RNA, 14 nt, Human
aauucaaaaagugu

SEQ ID NO: 2417816 - RNA, 15 nt, Human
aauucaaaaaguguu

SEQ ID NO: 2417817 - RNA, 18 nt, Human
aauucaaagcucuauuaa

SEQ ID NO: 2417818 - RNA, 14 nt, Human
aauucaaagcucua

SEQ ID NO: 2417819 - RNA, 20 nt, Human
aauucaaacuggggccucca

SEQ ID NO: 2417820 - RNA, 16 nt, Human
aauucaaaaaguguuu

SEQ ID NO: 2417821 - RNA, 18 nt, Human
aauuagugcuaaguguga

SEQ ID NO: 2417822 - RNA, 14 nt, Human
aauuagugcuaagu

SEQ ID NO: 2417823 - RNA, 21 nt, Human
aauuauuauuuauauauguau

SEQ ID NO: 2417824 - RNA, 20 nt, Human
aauuagugcuaagugugaac

SEQ ID NO: 2417825 - RNA, 12 nt, Human
aauuauuauuug

SEQ ID NO: 2417826 - RNA, 22 nt, Human
aauuauuauuuauauauguauu

SEQ ID NO: 2417827 - RNA, 16 nt, Human
aauuauuauuuggccc

SEQ ID NO: 2417828 - RNA, 16 nt, Human
aauuauuauuuguguu

SEQ ID NO: 2417829 - RNA, 15 nt, Human
aauuauuauuugugu

SEQ ID NO: 2417830 - RNA, 18 nt, Human
aauuauuauuuguguuuu

SEQ ID NO: 2417831 - RNA, 17 nt, Human
aauuagggguugcuaag

SEQ ID NO: 2417832 - RNA, 20 nt, Human
aauuagggguugcuaagaag

SEQ ID NO: 2417833 - RNA, 17 nt, Human
aauuaguauuuauuuaa

SEQ ID NO: 2417834 - RNA, 18 nt, Human
aauuaguauuuauuuaau

SEQ ID NO: 2417835 - RNA, 17 nt, Human
aauuaguaacauguguu

SEQ ID NO: 2417836 - RNA, 16 nt, Human
aauuagguuuuguaca

SEQ ID NO: 2417837 - RNA, 17 nt, Human
aauuagguuuuguacaa

SEQ ID NO: 2417838 - RNA, 19 nt, Human
aauuaagaaggcaaaaaug

SEQ ID NO: 2417839 - RNA, 23 nt, Human
aauuaagaaggcaaaaauguaaa

SEQ ID NO: 2417840 - RNA, 15 nt, Human
aauuaauaaucuuau

SEQ ID NO: 2417841 - RNA, 14 nt, Human
aauuaagaaggcaa

SEQ ID NO: 2417842 - RNA, 16 nt, Human
aauuaagaaggcaaaa

SEQ ID NO: 2417843 - RNA, 13 nt, Human
aauuaagaaggca

SEQ ID NO: 2417844 - RNA, 16 nt, Human
aauuaagaagaaacua

SEQ ID NO: 2417845 - RNA, 21 nt, Human
aauuaagaaaggauaaaguug

SEQ ID NO: 2417846 - RNA, 17 nt, Human
aauuaacuugaguuuua

SEQ ID NO: 2417847 - RNA, 15 nt, Human
aauuaacuugaguuu

SEQ ID NO: 2417848 - RNA, 11 nt, Human
aauuaacuuga

SEQ ID NO: 2417849 - RNA, 20 nt, Human
aauuaagaaaggauaaaguu

SEQ ID NO: 2417850 - RNA, 12 nt, Human
aauuaagaagaa

SEQ ID NO: 2417851 - RNA, 17 nt, Human
aauuaauuggcagcaga

SEQ ID NO: 2417852 - RNA, 13 nt, Human
aauuaauuggcag

SEQ ID NO: 2417853 - RNA, 18 nt, Human
aauuaauuggcagcagau

SEQ ID NO: 2417854 - RNA, 17 nt, Human
aauuaaugaaauaucug

SEQ ID NO: 2417855 - RNA, 16 nt, Human
aauuaaugaaauaucu

SEQ ID NO: 2417856 - RNA, 19 nt, Human
aauuaaugaaauaucugua

SEQ ID NO: 2417857 - RNA, 13 nt, Human
aauuaaugacaga

SEQ ID NO: 2417858 - RNA, 16 nt, Human
aauuaaucaugaaugu

SEQ ID NO: 2417859 - RNA, 13 nt, Human
aauuaauagcuuu

SEQ ID NO: 2417860 - RNA, 21 nt, Human
aauuaauaucccuacauguau

SEQ ID NO: 2417861 - RNA, 22 nt, Human
aauuaaucugggccagaauuuc

SEQ ID NO: 2417862 - RNA, 14 nt, Human
aauuaauagcuuuu

SEQ ID NO: 2417863 - RNA, 19 nt, Human
aauuaauaucccuacaugu

SEQ ID NO: 2417864 - RNA, 13 nt, Human
uacauucuguuaa

SEQ ID NO: 2417865 - RNA, 18 nt, Human
uaccaccagucugacugu

SEQ ID NO: 2417866 - RNA, 17 nt, Human
uacauuguaaauaguau

SEQ ID NO: 2417867 - RNA, 17 nt, Human
uacauugaauuagaaac

SEQ ID NO: 2417868 - RNA, 13 nt, Human
uacauguauuugu

SEQ ID NO: 2417869 - RNA, 19 nt, Human
uacaugugccgaaugugca

SEQ ID NO: 2417870 - RNA, 17 nt, Human
uacaugugccgaaugug

SEQ ID NO: 2417871 - RNA, 22 nt, Human
uacauguauugcacauuguaaa

SEQ ID NO: 2417872 - RNA, 21 nt, Human
uacauguauugcacauuguaa

SEQ ID NO: 2417873 - RNA, 20 nt, Human
uacauguauugcacauugua

SEQ ID NO: 2417874 - RNA, 19 nt, Human
uacauguauugcacauugu

SEQ ID NO: 2417875 - RNA, 20 nt, Human
uacaugugccgaaugugcag

SEQ ID NO: 2417876 - RNA, 18 nt, Human
uacauguguagccugugc

SEQ ID NO: 2417877 - RNA, 19 nt, Human
uacauguguagccugugca

SEQ ID NO: 2417878 - RNA, 14 nt, Human
uacaugugguuuau

SEQ ID NO: 2417879 - RNA, 16 nt, Human
uacauguguagccugu

SEQ ID NO: 2417880 - RNA, 16 nt, Human
uacauguggcccaaca

SEQ ID NO: 2417881 - RNA, 13 nt, Human
uacaugugggagc

SEQ ID NO: 2417882 - RNA, 16 nt, Human
aauguugaaaagucaa

SEQ ID NO: 2417883 - RNA, 13 nt, Human
aauguugaaaagu

SEQ ID NO: 2417884 - RNA, 12 nt, Human
aauguugaaaag

SEQ ID NO: 2417885 - RNA, 21 nt, Human
aauguucucucuucuccaccu

SEQ ID NO: 2417886 - RNA, 21 nt, Human
aauguucugaauaauuucuua

SEQ ID NO: 2417887 - RNA, 12 nt, Human
aauguucugaca

SEQ ID NO: 2417888 - RNA, 14 nt, Human
aauguucugacauu

SEQ ID NO: 2417889 - RNA, 15 nt, Human
aauguucugacauua

SEQ ID NO: 2417890 - RNA, 17 nt, Human
aauguucugacauuaac

SEQ ID NO: 2417891 - RNA, 19 nt, Human
aauguucugacauuaacag

SEQ ID NO: 2417892 - RNA, 20 nt, Human
aauguucugacauuaacagu

SEQ ID NO: 2417893 - RNA, 19 nt, Human
aauguugaaaagucaaacu

SEQ ID NO: 2417894 - RNA, 12 nt, Human
aauuaaccuggu

SEQ ID NO: 2417895 - RNA, 17 nt, Human
aauuaaccaaaaaaguu

SEQ ID NO: 2417896 - RNA, 20 nt, Human
aauuaacauugggaaaucuu

SEQ ID NO: 2417897 - RNA, 11 nt, Human
aauuaacuuuu

SEQ ID NO: 2417898 - RNA, 18 nt, Human
aauuaaccuggugcugga

SEQ ID NO: 2417899 - RNA, 13 nt, Human
aauuaaccuggug

SEQ ID NO: 2417900 - RNA, 14 nt, Human
aauuaaccuggugc

SEQ ID NO: 2417901 - RNA, 15 nt, Human
aauuaaccuggugcu

SEQ ID NO: 2417902 - RNA, 16 nt, Human
aauuaaccuggugcug

SEQ ID NO: 2417903 - RNA, 16 nt, Human
aauguuaaaauguauu

SEQ ID NO: 2417904 - RNA, 15 nt, Human
aauguuaaaauguau

SEQ ID NO: 2417905 - RNA, 13 nt, Human
aauguguuucugu

SEQ ID NO: 2417906 - RNA, 15 nt, Human
aauguuaaauaaauu

SEQ ID NO: 2417907 - RNA, 13 nt, Human
aauguuaaauaaa

SEQ ID NO: 2417908 - RNA, 14 nt, Human
aauguuaaagucag

SEQ ID NO: 2417909 - RNA, 15 nt, Human
aauguuaaagucagu

SEQ ID NO: 2417910 - RNA, 21 nt, Human
aauguuaaauuuguaaguuuc

SEQ ID NO: 2417911 - RNA, 18 nt, Human
aauguuaaauuuguaagu

SEQ ID NO: 2417912 - RNA, 17 nt, Human
aauguuaaauuuguaag

SEQ ID NO: 2417913 - RNA, 16 nt, Human
aauguuaaauuuguaa

SEQ ID NO: 2417914 - RNA, 13 nt, Human
aauguuaaauuug

SEQ ID NO: 2417915 - RNA, 12 nt, Human
aauguuaaauuu

SEQ ID NO: 2417916 - RNA, 23 nt, Human
aauguuaaauaaauuguauauuc

SEQ ID NO: 2417917 - RNA, 22 nt, Human
aauguuaaauaaauuguauauu

SEQ ID NO: 2417918 - RNA, 21 nt, Human
aauguuaaauaaauuguauau

SEQ ID NO: 2417919 - RNA, 20 nt, Human
aauguuaaauaaauuguaua

SEQ ID NO: 2417920 - RNA, 18 nt, Human
aauguuaaauaaauugua

SEQ ID NO: 2417921 - RNA, 13 nt, Human
aauguuaagcaga

SEQ ID NO: 2417922 - RNA, 23 nt, Human
aauguuaauucagcacugauuuc

SEQ ID NO: 2417923 - RNA, 22 nt, Human
aauguuaaggaaacucuuaucu

SEQ ID NO: 2417924 - RNA, 18 nt, Human
aauguuaaggaaacucuu

SEQ ID NO: 2417925 - RNA, 22 nt, Human
aauguuaaauuuguaaguuuca

SEQ ID NO: 2417926 - RNA, 21 nt, Human
uacaguaaauaaauuguuuga

SEQ ID NO: 2417927 - RNA, 18 nt, Human
uacaguaaauaaauuguu

SEQ ID NO: 2417928 - RNA, 17 nt, Human
uacaguaaauaaauugu

SEQ ID NO: 2417929 - RNA, 16 nt, Human
uacaguaaauaaauug

SEQ ID NO: 2417930 - RNA, 21 nt, Human
uacauaaugcgugcauaccac

SEQ ID NO: 2417931 - RNA, 23 nt, Human
uacauaaugcgugcauaccacuu

SEQ ID NO: 2417932 - RNA, 13 nt, Human
uacaguaacuuua

SEQ ID NO: 2417933 - RNA, 19 nt, Human
uacauaauuuuuuauucaa

SEQ ID NO: 2417934 - RNA, 22 nt, Human
uacauaauuuuuuauucaaguu

SEQ ID NO: 2417935 - RNA, 24 nt, Human
uacauaaugcgugcauaccacuuu

SEQ ID NO: 2417936 - RNA, 15 nt, Human
uacaguaaauaaauu

SEQ ID NO: 2417937 - RNA, 13 nt, Human
uacaguaaauaaa

SEQ ID NO: 2417938 - RNA, 23 nt, Human
uacagguuacaacagauuuguga

SEQ ID NO: 2417939 - RNA, 21 nt, Human
uacagguuacaacagauuugu

SEQ ID NO: 2417940 - RNA, 18 nt, Human
uacagguuacaacagauu

SEQ ID NO: 2417941 - RNA, 17 nt, Human
uacagguuacaacagau

SEQ ID NO: 2417942 - RNA, 15 nt, Human
uacagguuacaacag

SEQ ID NO: 2417943 - RNA, 13 nt, Human
uacagguuacaac

SEQ ID NO: 2417944 - RNA, 16 nt, Human
uacaggugugagucac

SEQ ID NO: 2417945 - RNA, 18 nt, Human
uacagaugaauguauuua

SEQ ID NO: 2417946 - RNA, 22 nt, Human
uacagaugaauguauuuauuug

SEQ ID NO: 2417947 - RNA, 22 nt, Human
uacauaugaguguggaagccgg

SEQ ID NO: 2417948 - RNA, 16 nt, Human
uacauaugagugugga

SEQ ID NO: 2417949 - RNA, 13 nt, Human
uacauaugaaauu

SEQ ID NO: 2417950 - RNA, 15 nt, Human
uacauauguaaaaua

SEQ ID NO: 2417951 - RNA, 16 nt, Human
uacauauguaaaauaa

SEQ ID NO: 2417952 - RNA, 20 nt, Human
uacauauguaaaauaaaauu

SEQ ID NO: 2417953 - RNA, 20 nt, Human
uacauaucaccucauggccu

SEQ ID NO: 2417954 - RNA, 18 nt, Human
uacauaucaccucauggc

SEQ ID NO: 2417955 - RNA, 12 nt, Human
uacauaucuuua

SEQ ID NO: 2417956 - RNA, 16 nt, Human
uacauaucuuuauuaa

SEQ ID NO: 2417957 - RNA, 22 nt, Human
uacauaucuuuauuaaucacua

SEQ ID NO: 2417958 - RNA, 22 nt, Human
uacauauaagugauugcugguu

SEQ ID NO: 2417959 - RNA, 20 nt, Human
uacaucccuuaccugggaaa

SEQ ID NO: 2417960 - RNA, 21 nt, Human
uacaucccauguaacagaaag

SEQ ID NO: 2417961 - RNA, 20 nt, Human
uacaucccauguaacagaaa

SEQ ID NO: 2417962 - RNA, 19 nt, Human
uacaucccauguaacagaa

SEQ ID NO: 2417963 - RNA, 18 nt, Human
uacaucccauguaacaga

SEQ ID NO: 2417964 - RNA, 22 nt, Human
uacaucccauguaacagaaagg

SEQ ID NO: 2417965 - RNA, 19 nt, Human
uacauccaaagcagacagc

SEQ ID NO: 2417966 - RNA, 20 nt, Human
uacauccaaagcagacagcu

SEQ ID NO: 2417967 - RNA, 17 nt, Human
uacaucccauguaacag

SEQ ID NO: 2417968 - RNA, 16 nt, Human
uacaucccauguaaca

SEQ ID NO: 2417969 - RNA, 23 nt, Human
uacauccaaagcagacagcucca

SEQ ID NO: 2417970 - RNA, 16 nt, Human
uacaucacuugagaca

SEQ ID NO: 2417971 - RNA, 17 nt, Human
uacauauguaaaauaaa

SEQ ID NO: 2417972 - RNA, 13 nt, Human
aauguauaugcac

SEQ ID NO: 2417973 - RNA, 14 nt, Human
aauguauaugcacu

SEQ ID NO: 2417974 - RNA, 19 nt, Human
aauguauguguaaguauuc

SEQ ID NO: 2417975 - RNA, 20 nt, Human
aauguauguguaaguauucu

SEQ ID NO: 2417976 - RNA, 21 nt, Human
aauguauauguuuugugggaa

SEQ ID NO: 2417977 - RNA, 13 nt, Human
aauguaucaggaa

SEQ ID NO: 2417978 - RNA, 14 nt, Human
aauguaucaggaaa

SEQ ID NO: 2417979 - RNA, 15 nt, Human
aaugugaaacuggau

SEQ ID NO: 2417980 - RNA, 22 nt, Human
aaugugaaaaugguccaggaga

SEQ ID NO: 2417981 - RNA, 14 nt, Human
aauguauuauucug

SEQ ID NO: 2417982 - RNA, 16 nt, Human
aauguauuauucugca

SEQ ID NO: 2417983 - RNA, 14 nt, Human
aaugugaaacugga

SEQ ID NO: 2417984 - RNA, 19 nt, Human
aaugugaaaagaaaaauga

SEQ ID NO: 2417985 - RNA, 22 nt, Human
aaugugauuccuuugaagagga

SEQ ID NO: 2417986 - RNA, 21 nt, Human
aaugugauuccuuugaagagg

SEQ ID NO: 2417987 - RNA, 19 nt, Human
aaugugauucuaaugucuu

SEQ ID NO: 2417988 - RNA, 14 nt, Human
aaugugauucuaau

SEQ ID NO: 2417989 - RNA, 20 nt, Human
aaugugauuuacgcucauug

SEQ ID NO: 2417990 - RNA, 22 nt, Human
aaugugcagguuuguuacauag

SEQ ID NO: 2417991 - RNA, 20 nt, Human
aaugugcagguuuguuacau

SEQ ID NO: 2417992 - RNA, 19 nt, Human
aaugugcagguuuguuaca

SEQ ID NO: 2417993 - RNA, 22 nt, Human
aaugugauucuaaugucuucau

SEQ ID NO: 2417994 - RNA, 16 nt, Human
aaugugauuuuucuga

SEQ ID NO: 2417995 - RNA, 18 nt, Human
aaugugcuauacugcaua

SEQ ID NO: 2417996 - RNA, 22 nt, Human
aaugugugugguuuuuuuucua

SEQ ID NO: 2417997 - RNA, 11 nt, Human
aaugugugugu

SEQ ID NO: 2417998 - RNA, 24 nt, Human
aaugugcauucuuuuaaaagacaa

SEQ ID NO: 2417999 - RNA, 23 nt, Human
aaugugcauucuuuuaaaagaca

SEQ ID NO: 2418000 - RNA, 13 nt, Human
aaugugcccccag

SEQ ID NO: 2418001 - RNA, 19 nt, Human
aaugugcuacugauuguuu

SEQ ID NO: 2418002 - RNA, 17 nt, Human
aaugugccuaguucuuu

SEQ ID NO: 2418003 - RNA, 12 nt, Human
aaugcccagccc

SEQ ID NO: 2418004 - RNA, 11 nt, Human
aaugcccagcc

SEQ ID NO: 2418005 - RNA, 12 nt, Human
aaugcuguacau

SEQ ID NO: 2418006 - RNA, 13 nt, Human
aaugcuguacauc

SEQ ID NO: 2418007 - RNA, 15 nt, Human
aaugcuguacaucua

SEQ ID NO: 2418008 - RNA, 17 nt, Human
aaugcuguacaucuauu

SEQ ID NO: 2418009 - RNA, 16 nt, Human
aaugcuguauuuuaaa

SEQ ID NO: 2418010 - RNA, 22 nt, Human
aaugcuguauuagucacagaga

SEQ ID NO: 2418011 - RNA, 20 nt, Human
aaugcuuaucaucuaaagau

SEQ ID NO: 2418012 - RNA, 13 nt, Human
aaugcuguguuaa

SEQ ID NO: 2418013 - RNA, 23 nt, Human
aaugcuguacaucuauuuuggau

SEQ ID NO: 2418014 - RNA, 16 nt, Human
aaugcuguugccucau

SEQ ID NO: 2418015 - RNA, 18 nt, Human
aaugcugguuuuucaguu

SEQ ID NO: 2418016 - RNA, 20 nt, Human
aauggacuaacuugucuuug

SEQ ID NO: 2418017 - RNA, 23 nt, Human
aauggacguguuaugacuccaga

SEQ ID NO: 2418018 - RNA, 14 nt, Human
aauggaaccacucu

SEQ ID NO: 2418019 - RNA, 21 nt, Human
aauggacguguuaugacucca

SEQ ID NO: 2418020 - RNA, 15 nt, Human
aauggaaaggagagg

SEQ ID NO: 2418021 - RNA, 17 nt, Human
aauggaaacugaaugcu

SEQ ID NO: 2418022 - RNA, 21 nt, Human
aauggaaaugggcagagcaga

SEQ ID NO: 2418023 - RNA, 20 nt, Human
aauggaaaugggcagagcag

SEQ ID NO: 2418024 - RNA, 16 nt, Human
aaugcuucaucccuuu

SEQ ID NO: 2418025 - RNA, 23 nt, Human
aaugcuuccuagaaguuacugaa

SEQ ID NO: 2418026 - RNA, 16 nt, Human
aauggaaacugaaugc

SEQ ID NO: 2418027 - RNA, 20 nt, Human
uacaauguauuuauuuaaaa

SEQ ID NO: 2418028 - RNA, 19 nt, Human
uacaauguauuuauuuaaa

SEQ ID NO: 2418029 - RNA, 18 nt, Human
uacaauguauuuauuuaa

SEQ ID NO: 2418030 - RNA, 17 nt, Human
uacaauguauuuauuua

SEQ ID NO: 2418031 - RNA, 14 nt, Human
uacaauguauuuau

SEQ ID NO: 2418032 - RNA, 16 nt, Human
aaugacaacagaagcu

SEQ ID NO: 2418033 - RNA, 22 nt, Human
uacaauguauuuauuuaaaaga

SEQ ID NO: 2418034 - RNA, 14 nt, Human
uacaaugugaacuu

SEQ ID NO: 2418035 - RNA, 15 nt, Human
uacaaugugaacuuu

SEQ ID NO: 2418036 - RNA, 16 nt, Human
uacaaugugaacuuua

SEQ ID NO: 2418037 - RNA, 17 nt, Human
uacaaugugaacuuuau

SEQ ID NO: 2418038 - RNA, 20 nt, Human
uacaaugugaacuuuauuaa

SEQ ID NO: 2418039 - RNA, 21 nt, Human
uacaaugugaacuuuauuaaa

SEQ ID NO: 2418040 - RNA, 21 nt, Human
aaugcacuuuguucuggcucu

SEQ ID NO: 2418041 - RNA, 17 nt, Human
aaugaccuuucaauagg

SEQ ID NO: 2418042 - RNA, 16 nt, Human
aaugaccuuucaauag

SEQ ID NO: 2418043 - RNA, 18 nt, Human
aaugaccuuucaauagga

SEQ ID NO: 2418044 - RNA, 21 nt, Human
uacaaugcugugcccuaaagu

SEQ ID NO: 2418045 - RNA, 20 nt, Human
aaugcagcagggaugcccug

SEQ ID NO: 2418046 - RNA, 22 nt, Human
aaugcagcagggaugcccugga

SEQ ID NO: 2418047 - RNA, 22 nt, Human
uacaaugugaacuuuauuaaau

SEQ ID NO: 2418048 - RNA, 22 nt, Human
aaugcacuuuguucuggcucuu

SEQ ID NO: 2418049 - RNA, 22 nt, Human
aaugccacugccuucgcuucuu

SEQ ID NO: 2418050 - RNA, 14 nt, Human
aaugcagcgugaag

SEQ ID NO: 2418051 - RNA, 12 nt, Human
aaugcagccaga

SEQ ID NO: 2418052 - RNA, 23 nt, Human
aaugcagggauugcugccacuuu

SEQ ID NO: 2418053 - RNA, 22 nt, Human
aaugcagggauugcugccacuu

SEQ ID NO: 2418054 - RNA, 22 nt, Human
aaugcagcgaaccaauauuugu

SEQ ID NO: 2418055 - RNA, 23 nt, Human
aaugccaguaacgcgucuuccug

SEQ ID NO: 2418056 - RNA, 22 nt, Human
aaugccagagacggaagccuuu

SEQ ID NO: 2418057 - RNA, 21 nt, Human
aaugccaguaacgcgucuucc

SEQ ID NO: 2418058 - RNA, 21 nt, Human
aaugccauccucaaacacugc

SEQ ID NO: 2418059 - RNA, 17 nt, Human
aaugccauccucaaaca

SEQ ID NO: 2418060 - RNA, 15 nt, Human
aaugccaucaucucc

SEQ ID NO: 2418061 - RNA, 22 nt, Human
aaugccauccucaaacacugca

SEQ ID NO: 2418062 - RNA, 16 nt, Human
aaugccauuaucccug

SEQ ID NO: 2418063 - RNA, 21 nt, Human
aaugccauggacagaagaagg

SEQ ID NO: 2418064 - RNA, 20 nt, Human
uacagauccccaagccuggc

SEQ ID NO: 2418065 - RNA, 19 nt, Human
uacagauagucaaaccaua

SEQ ID NO: 2418066 - RNA, 23 nt, Human
uacagaggucucugccggcucuu

SEQ ID NO: 2418067 - RNA, 20 nt, Human
uacagaggucucugccggcu

SEQ ID NO: 2418068 - RNA, 18 nt, Human
uacagacacuaaguuaua

SEQ ID NO: 2418069 - RNA, 16 nt, Human
uacagagugauagccu

SEQ ID NO: 2418070 - RNA, 13 nt, Human
uacagacguaugc

SEQ ID NO: 2418071 - RNA, 19 nt, Human
uacagacaaagcguggugg

SEQ ID NO: 2418072 - RNA, 17 nt, Human
uacacguguccuguagu

SEQ ID NO: 2418073 - RNA, 13 nt, Human
uacacguguccug

SEQ ID NO: 2418074 - RNA, 22 nt, Human
uacagacaacaaaccuguuucu

SEQ ID NO: 2418075 - RNA, 19 nt, Human
uacagaccgaacuguugua

SEQ ID NO: 2418076 - RNA, 20 nt, Human
uacagaccgaacuguuguau

SEQ ID NO: 2418077 - RNA, 21 nt, Human
uacagaccgaacuguuguaua

SEQ ID NO: 2418078 - RNA, 23 nt, Human
uacagaccgaacuguuguauaaa

SEQ ID NO: 2418079 - RNA, 19 nt, Human
uacagacacuaaguuauag

SEQ ID NO: 2418080 - RNA, 14 nt, Human
uacagacacuaagu

SEQ ID NO: 2418081 - RNA, 13 nt, Human
uacagacacuaag

SEQ ID NO: 2418082 - RNA, 11 nt, Human
uacagacacua

SEQ ID NO: 2418083 - RNA, 21 nt, Human
uacacauuuuauuuuauuaug

SEQ ID NO: 2418084 - RNA, 22 nt, Human
uacacauuuuauuuuauuaugc

SEQ ID NO: 2418085 - RNA, 19 nt, Human
uacacauuuuauuuuauua

SEQ ID NO: 2418086 - RNA, 16 nt, Human
aauguaacuuuuguaa

SEQ ID NO: 2418087 - RNA, 22 nt, Human
aauguaacuuuuguaagacaaa

SEQ ID NO: 2418088 - RNA, 15 nt, Human
aauguaacuuuugua

SEQ ID NO: 2418089 - RNA, 18 nt, Human
uacacuaagagagaauga

SEQ ID NO: 2418090 - RNA, 14 nt, Human
uacacuaagagaga

SEQ ID NO: 2418091 - RNA, 23 nt, Human
uacacauuuuauuuuauuaugca

SEQ ID NO: 2418092 - RNA, 15 nt, Human
uacacuaaaagguga

SEQ ID NO: 2418093 - RNA, 15 nt, Human
aauggccucaugugg

SEQ ID NO: 2418094 - RNA, 16 nt, Human
aauggccggcuggaaa

SEQ ID NO: 2418095 - RNA, 17 nt, Human
aauggccauuugcuuuu

SEQ ID NO: 2418096 - RNA, 22 nt, Human
aauggccucauguggcuggaag

SEQ ID NO: 2418097 - RNA, 20 nt, Human
aauggccucauguggcugga

SEQ ID NO: 2418098 - RNA, 14 nt, Human
aauggccugccuug

SEQ ID NO: 2418099 - RNA, 20 nt, Human
aauggccugccuugaagcca

SEQ ID NO: 2418100 - RNA, 18 nt, Human
aauggcgugaucucggcu

SEQ ID NO: 2418101 - RNA, 20 nt, Human
aauggcgcagugccucuggu

SEQ ID NO: 2418102 - RNA, 16 nt, Human
aauggcuaauucccag

SEQ ID NO: 2418103 - RNA, 20 nt, Human
aauggcgucuggaaguccaa

SEQ ID NO: 2418104 - RNA, 19 nt, Human
aauggcgugaacccgggag

SEQ ID NO: 2418105 - RNA, 19 nt, Human
aauggcgcagugccucugg

SEQ ID NO: 2418106 - RNA, 18 nt, Human
aauggcgcagugccucug

SEQ ID NO: 2418107 - RNA, 17 nt, Human
aauggccuccucccuua

SEQ ID NO: 2418108 - RNA, 22 nt, Human
aauggccugccuugaagccacu

SEQ ID NO: 2418109 - RNA, 17 nt, Human
aauguaacagucugauc

SEQ ID NO: 2418110 - RNA, 21 nt, Human
aauggcucacuauggugccaa

SEQ ID NO: 2418111 - RNA, 15 nt, Human
aauggcucagaugcc

SEQ ID NO: 2418112 - RNA, 12 nt, Human
aauggcucagau

SEQ ID NO: 2418113 - RNA, 23 nt, Human
aauggcacaaucucggcucacug

SEQ ID NO: 2418114 - RNA, 23 nt, Human
aauggcaaggcagcccugucuga

SEQ ID NO: 2418115 - RNA, 21 nt, Human
aauggcaaggcagcccugucu

SEQ ID NO: 2418116 - RNA, 21 nt, Human
aauggauuugaugcuguuuga

SEQ ID NO: 2418117 - RNA, 22 nt, Human
aauggauuggauuauuuaauaa

SEQ ID NO: 2418118 - RNA, 23 nt, Human
aauggauuggauuauuuaauaac

SEQ ID NO: 2418119 - RNA, 23 nt, Human
aauggacuggaaggggaagggac

SEQ ID NO: 2418120 - RNA, 17 nt, Human
aauggacuggaagggga

SEQ ID NO: 2418121 - RNA, 13 nt, Human
aauggaaaggaga

SEQ ID NO: 2418122 - RNA, 14 nt, Human
aauggacucaaacu

SEQ ID NO: 2418123 - RNA, 16 nt, Human
aauggcagccuuggca

SEQ ID NO: 2418124 - RNA, 19 nt, Human
aauggcacagcccaaagaa

SEQ ID NO: 2418125 - RNA, 12 nt, Human
aauggcagccuu

SEQ ID NO: 2418126 - RNA, 20 nt, Human
aauggcacagcccaaagaag

SEQ ID NO: 2418127 - RNA, 17 nt, Human
aauggcacagcccaaag

SEQ ID NO: 2418128 - RNA, 21 nt, Human
uaauauuuaugucuauuuaag

SEQ ID NO: 2418129 - RNA, 16 nt, Human
uaauauuuauauauuu

SEQ ID NO: 2418130 - RNA, 23 nt, Human
uaauauuuaugucuauuuaagcc

SEQ ID NO: 2418131 - RNA, 17 nt, Human
uaauauuuauugcuuua

SEQ ID NO: 2418132 - RNA, 16 nt, Human
uaauauuuauugcuuu

SEQ ID NO: 2418133 - RNA, 15 nt, Human
uaauauuuauugcuu

SEQ ID NO: 2418134 - RNA, 14 nt, Human
uaauauuuauugcu

SEQ ID NO: 2418135 - RNA, 20 nt, Human
uaauauuuauugcuuuauaa

SEQ ID NO: 2418136 - RNA, 18 nt, Human
uaauauuuauugcuuuau

SEQ ID NO: 2418137 - RNA, 14 nt, Human
uaauauuugcugac

SEQ ID NO: 2418138 - RNA, 22 nt, Human
uaauagcggguuacuuucacau

SEQ ID NO: 2418139 - RNA, 19 nt, Human
uaauagcggguuacuuuca

SEQ ID NO: 2418140 - RNA, 18 nt, Human
uaauagacaauuuauuau

SEQ ID NO: 2418141 - RNA, 22 nt, Human
uaauagacaauuuauuauggca

SEQ ID NO: 2418142 - RNA, 21 nt, Human
uaauagagcaaaauugaugug

SEQ ID NO: 2418143 - RNA, 12 nt, Human
uaauagagcaaa

SEQ ID NO: 2418144 - RNA, 18 nt, Human
uaauacaccacuacauuc

SEQ ID NO: 2418145 - RNA, 19 nt, Human
uaauacaccacuacauucu

SEQ ID NO: 2418146 - RNA, 14 nt, Human
uaauagacaauuua

SEQ ID NO: 2418147 - RNA, 16 nt, Human
uaauagacaauuuauu

SEQ ID NO: 2418148 - RNA, 16 nt, Human
uaauacaccacuacau

SEQ ID NO: 2418149 - RNA, 14 nt, Human
uaauacaccacuac

SEQ ID NO: 2418150 - RNA, 15 nt, Human
aaucuuaucaugguc

SEQ ID NO: 2418151 - RNA, 21 nt, Human
aaucuuaucauggucucaguc

SEQ ID NO: 2418152 - RNA, 15 nt, Human
aaucuuauauuccau

SEQ ID NO: 2418153 - RNA, 18 nt, Human
uaaucuuuucacaaauaa

SEQ ID NO: 2418154 - RNA, 17 nt, Human
uaaucuuuucacaaaua

SEQ ID NO: 2418155 - RNA, 19 nt, Human
uaaucuuuucacaaauaaa

SEQ ID NO: 2418156 - RNA, 23 nt, Human
uaaucuuucuuuaccugagacca

SEQ ID NO: 2418157 - RNA, 16 nt, Human
uaaucuuuucacaaau

SEQ ID NO: 2418158 - RNA, 15 nt, Human
uaaucuuuucacaaa

SEQ ID NO: 2418159 - RNA, 22 nt, Human
uaaucuuuggguaacuucaaaa

SEQ ID NO: 2418160 - RNA, 20 nt, Human
uaauccccaguaaaauugcc

SEQ ID NO: 2418161 - RNA, 18 nt, Human
uaauccccaguaaaauug

SEQ ID NO: 2418162 - RNA, 17 nt, Human
uaauccccaguaaaauu

SEQ ID NO: 2418163 - RNA, 20 nt, Human
uaaucccagcuacuugggaa

SEQ ID NO: 2418164 - RNA, 20 nt, Human
uaaucccagcuacucaggag

SEQ ID NO: 2418165 - RNA, 21 nt, Human
uaaucuuucuuuaccugagac

SEQ ID NO: 2418166 - RNA, 18 nt, Human
uaaucuuucuuuaccuga

SEQ ID NO: 2418167 - RNA, 12 nt, Human
uaaucuuugggu

SEQ ID NO: 2418168 - RNA, 19 nt, Human
uaaugaaguuugaauguua

SEQ ID NO: 2418169 - RNA, 20 nt, Human
uaaugaaguuugaauguuaa

SEQ ID NO: 2418170 - RNA, 22 nt, Human
uaaugaaguuugaauguuaaau

SEQ ID NO: 2418171 - RNA, 21 nt, Human
uaaugaaguuugaauguuaaa

SEQ ID NO: 2418172 - RNA, 13 nt, Human
uaaugaaaauguc

SEQ ID NO: 2418173 - RNA, 14 nt, Human
uaaugaaaauguca

SEQ ID NO: 2418174 - RNA, 15 nt, Human
uaaugaaaaugucag

SEQ ID NO: 2418175 - RNA, 18 nt, Human
uaaugaaucuaagcagca

SEQ ID NO: 2418176 - RNA, 17 nt, Human
uaaugaaugaaacauuu

SEQ ID NO: 2418177 - RNA, 18 nt, Human
uaauccaggcagauccag

SEQ ID NO: 2418178 - RNA, 19 nt, Human
uaauccaggcagauccagg

SEQ ID NO: 2418179 - RNA, 17 nt, Human
uaauccaggcagaucca

SEQ ID NO: 2418180 - RNA, 11 nt, Human
uaaucagccuc

SEQ ID NO: 2418181 - RNA, 19 nt, Human
uaaucacuuuuuuccacau

SEQ ID NO: 2418182 - RNA, 18 nt, Human
uaaucacuuuuuuccaca

SEQ ID NO: 2418183 - RNA, 20 nt, Human
uaaucagcaagaauuugauc

SEQ ID NO: 2418184 - RNA, 21 nt, Human
uaaucagcaagaauuugaucg

SEQ ID NO: 2418185 - RNA, 21 nt, Human
uaaucccagcaugcugagauu

SEQ ID NO: 2418186 - RNA, 19 nt, Human
uaaucccagcacuuuggga

SEQ ID NO: 2418187 - RNA, 19 nt, Human
uaaucccagcuacuuggga

SEQ ID NO: 2418188 - RNA, 22 nt, Human
uaauccaggcagauccaggacu

SEQ ID NO: 2418189 - RNA, 23 nt, Human
uaauccaggcagauccaggacua

SEQ ID NO: 2418190 - RNA, 16 nt, Human
uaaucccagcacuuug

SEQ ID NO: 2418191 - RNA, 16 nt, Human
uaaucacuuuuuucca

SEQ ID NO: 2418192 - RNA, 17 nt, Human
uaaucacuuuuuuccac

SEQ ID NO: 2418193 - RNA, 13 nt, Human
uaauauuuugcac

SEQ ID NO: 2418194 - RNA, 14 nt, Human
uaauauuuuuaauu

SEQ ID NO: 2418195 - RNA, 18 nt, Human
uaaucacgcuuuccugaa

SEQ ID NO: 2418196 - RNA, 17 nt, Human
uaaucacgcuuuccuga

SEQ ID NO: 2418197 - RNA, 15 nt, Human
uaauauuuuuaauua

SEQ ID NO: 2418198 - RNA, 18 nt, Human
aaugaaacccccacacac

SEQ ID NO: 2418199 - RNA, 19 nt, Human
aaugaaacccccacacaca

SEQ ID NO: 2418200 - RNA, 14 nt, Human
aaugaaacuuggau

SEQ ID NO: 2418201 - RNA, 17 nt, Human
aaugaaaccugugucuc

SEQ ID NO: 2418202 - RNA, 16 nt, Human
aaugaaagacuguaca

SEQ ID NO: 2418203 - RNA, 17 nt, Human
aaugaaagacuguacaa

SEQ ID NO: 2418204 - RNA, 20 nt, Human
aaugaaacaccuucucugga

SEQ ID NO: 2418205 - RNA, 17 nt, Human
aaugaaacaccuucucu

SEQ ID NO: 2418206 - RNA, 14 nt, Human
aaugaaacccccac

SEQ ID NO: 2418207 - RNA, 19 nt, Human
aaugaaacacucaguuguu

SEQ ID NO: 2418208 - RNA, 17 nt, Human
aaugaaacauuuuguca

SEQ ID NO: 2418209 - RNA, 16 nt, Human
aaugaaacaccuucuc

SEQ ID NO: 2418210 - RNA, 16 nt, Human
aaugaaaaugucuugu

SEQ ID NO: 2418211 - RNA, 20 nt, Human
aaugaaaauuguauguuaag

SEQ ID NO: 2418212 - RNA, 15 nt, Human
aaugaaaaugucuug

SEQ ID NO: 2418213 - RNA, 18 nt, Human
aaucuuuauugagaaaga

SEQ ID NO: 2418214 - RNA, 15 nt, Human
aaucuuuauugagaa

SEQ ID NO: 2418215 - RNA, 22 nt, Human
aaugaauggcuaagcaaaaugu

SEQ ID NO: 2418216 - RNA, 20 nt, Human
aaugaaacccccacacacac

SEQ ID NO: 2418217 - RNA, 17 nt, Human
aaugaaugcauaaaaug

SEQ ID NO: 2418218 - RNA, 13 nt, Human
aaugaaugucagu

SEQ ID NO: 2418219 - RNA, 19 nt, Human
aaugaauggacucaaacug

SEQ ID NO: 2418220 - RNA, 12 nt, Human
aaugaaugaccu

SEQ ID NO: 2418221 - RNA, 17 nt, Human
aaugaauuaaauaaacc

SEQ ID NO: 2418222 - RNA, 16 nt, Human
aaugaauguguguggu

SEQ ID NO: 2418223 - RNA, 13 nt, Human
aaugaaugugugu

SEQ ID NO: 2418224 - RNA, 23 nt, Human
aaugaauguuuacacucuuugua

SEQ ID NO: 2418225 - RNA, 22 nt, Human
aaugaaugucagugugacugau

SEQ ID NO: 2418226 - RNA, 15 nt, Human
aaugacaacagaagc

SEQ ID NO: 2418227 - RNA, 14 nt, Human
aaugacaacagaag

SEQ ID NO: 2418228 - RNA, 13 nt, Human
aaugacaacagaa

SEQ ID NO: 2418229 - RNA, 20 nt, Human
aaugaaugugugugguuuuu

SEQ ID NO: 2418230 - RNA, 13 nt, Human
aaugaauuuuguu

SEQ ID NO: 2418231 - RNA, 17 nt, Human
aaugaauuuuuaugaua

SEQ ID NO: 2418232 - RNA, 15 nt, Human
aaugaccuuucaaua

SEQ ID NO: 2418233 - RNA, 19 nt, Human
uaauguguauuacaaauau

SEQ ID NO: 2418234 - RNA, 21 nt, Human
uaaugucuucauuucauugua

SEQ ID NO: 2418235 - RNA, 19 nt, Human
uaaugucuucauuucauug

SEQ ID NO: 2418236 - RNA, 16 nt, Human
uaaugugguuauuucu

SEQ ID NO: 2418237 - RNA, 18 nt, Human
uaauguuaaauuuguaag

SEQ ID NO: 2418238 - RNA, 17 nt, Human
uaauguuaaauuuguaa

SEQ ID NO: 2418239 - RNA, 16 nt, Human
uaauguuaaauuugua

SEQ ID NO: 2418240 - RNA, 13 nt, Human
uaauguuaaauuu

SEQ ID NO: 2418241 - RNA, 22 nt, Human
uaauguuaaauuuguaaguuuc

SEQ ID NO: 2418242 - RNA, 20 nt, Human
uaauguuaaauuuguaaguu

SEQ ID NO: 2418243 - RNA, 15 nt, Human
uaauguuaauucagc

SEQ ID NO: 2418244 - RNA, 11 nt, Human
uaauguuacug

SEQ ID NO: 2418245 - RNA, 16 nt, Human
aaucuuuaauuuuaca

SEQ ID NO: 2418246 - RNA, 15 nt, Human
aaucuuuaauuuuac

SEQ ID NO: 2418247 - RNA, 14 nt, Human
aaucuuuauugaga

SEQ ID NO: 2418248 - RNA, 22 nt, Human
aaucuuuagagaaguauacaua

SEQ ID NO: 2418249 - RNA, 21 nt, Human
aaucuuuagagaaguauacau

SEQ ID NO: 2418250 - RNA, 14 nt, Human
uaauguuacugauc

SEQ ID NO: 2418251 - RNA, 12 nt, Human
uaauguuacuga

SEQ ID NO: 2418252 - RNA, 13 nt, Human
uaauguuacugau

SEQ ID NO: 2418253 - RNA, 15 nt, Human
uaaugaaugcauaaa

SEQ ID NO: 2418254 - RNA, 18 nt, Human
uaauguaauaacugugaa

SEQ ID NO: 2418255 - RNA, 15 nt, Human
uaauguacaucuggc

SEQ ID NO: 2418256 - RNA, 16 nt, Human
uaauguagccauggga

SEQ ID NO: 2418257 - RNA, 13 nt, Human
uaauguacugcau

SEQ ID NO: 2418258 - RNA, 14 nt, Human
uaauguagccaugg

SEQ ID NO: 2418259 - RNA, 18 nt, Human
uaaugucacaggcagguc

SEQ ID NO: 2418260 - RNA, 15 nt, Human
uaaugucaccaccuu

SEQ ID NO: 2418261 - RNA, 21 nt, Human
uaaugucaccaccuucccagc

SEQ ID NO: 2418262 - RNA, 22 nt, Human
uaaugucaccaccuucccagcu

SEQ ID NO: 2418263 - RNA, 19 nt, Human
uaaugucucugugagacuc

SEQ ID NO: 2418264 - RNA, 11 nt, Human
uaaugucucug

SEQ ID NO: 2418265 - RNA, 17 nt, Human
uaaugucuucauuucau

SEQ ID NO: 2418266 - RNA, 13 nt, Human
uaaugucuucauu

SEQ ID NO: 2418267 - RNA, 17 nt, Human
aaucuguuugaucccug

SEQ ID NO: 2418268 - RNA, 20 nt, Human
aaucuguguacaaagaaaua

SEQ ID NO: 2418269 - RNA, 17 nt, Human
aaucuguguacaaagaa

SEQ ID NO: 2418270 - RNA, 12 nt, Human
aaucugugauga

SEQ ID NO: 2418271 - RNA, 13 nt, Human
aaucuguguacaa

SEQ ID NO: 2418272 - RNA, 19 nt, Human
aaucuguguacaaagaaau

SEQ ID NO: 2418273 - RNA, 18 nt, Human
aaucuguguacaaagaaa

SEQ ID NO: 2418274 - RNA, 19 nt, Human
aaucuuauaauuuaaaaua

SEQ ID NO: 2418275 - RNA, 18 nt, Human
aaucuuacagcugggugg

SEQ ID NO: 2418276 - RNA, 14 nt, Human
aaucuuacagcugg

SEQ ID NO: 2418277 - RNA, 23 nt, Human
aaucuuacagcuggguggcacug

SEQ ID NO: 2418278 - RNA, 19 nt, Human
aaucuuaggggagagcuuu

SEQ ID NO: 2418279 - RNA, 16 nt, Human
aaucugggccagaauu

SEQ ID NO: 2418280 - RNA, 17 nt, Human
aaucugggccagaauuu

SEQ ID NO: 2418281 - RNA, 19 nt, Human
aaucuggagagcuagaacc

SEQ ID NO: 2418282 - RNA, 16 nt, Human
aaucugggaagggaag

SEQ ID NO: 2418283 - RNA, 17 nt, Human
aaucuaccuucuguagu

SEQ ID NO: 2418284 - RNA, 16 nt, Human
aaucuaccuucuguag

SEQ ID NO: 2418285 - RNA, 15 nt, Human
aaucuaccuucugua

SEQ ID NO: 2418286 - RNA, 17 nt, Human
aaucuacccaaaggaua

SEQ ID NO: 2418287 - RNA, 16 nt, Human
aaucuacccaaaggau

SEQ ID NO: 2418288 - RNA, 15 nt, Human
aaucuacccaaagga

SEQ ID NO: 2418289 - RNA, 14 nt, Human
aaucuggagugagg

SEQ ID NO: 2418290 - RNA, 15 nt, Human
aaucuggagaccagg

SEQ ID NO: 2418291 - RNA, 19 nt, Human
aaucuacacuccagugaga

SEQ ID NO: 2418292 - RNA, 20 nt, Human
aaucuaauauuaaaaauaug

SEQ ID NO: 2418293 - RNA, 20 nt, Human
aaucuaaccacaucaauauu

SEQ ID NO: 2418294 - RNA, 19 nt, Human
aaucuaauauuaaaaauau

SEQ ID NO: 2418295 - RNA, 17 nt, Human
aaucuaauauuaaaaau

SEQ ID NO: 2418296 - RNA, 16 nt, Human
aaucuaauauuaaaaa

SEQ ID NO: 2418297 - RNA, 12 nt, Human
aauccgcccauc

SEQ ID NO: 2418298 - RNA, 13 nt, Human
aauccgaaccucc

SEQ ID NO: 2418299 - RNA, 19 nt, Human
aauccgaaccuccucugug

SEQ ID NO: 2418300 - RNA, 21 nt, Human
aauccgaccacuaauugccaa

SEQ ID NO: 2418301 - RNA, 12 nt, Human
aauccgaaccuc

SEQ ID NO: 2418302 - RNA, 23 nt, Human
aaucccuuuauuacccccuccuu

SEQ ID NO: 2418303 - RNA, 19 nt, Human
aaucccuuuauuacccccu

SEQ ID NO: 2418304 - RNA, 23 nt, Human
aaucccuguuuaauauuuaaaca

SEQ ID NO: 2418305 - RNA, 17 nt, Human
aaucccuguuuaauauu

SEQ ID NO: 2418306 - RNA, 17 nt, Human
aaucauuaggugugacu

SEQ ID NO: 2418307 - RNA, 23 nt, Human
aaucauuaggugugacugaauuu

SEQ ID NO: 2418308 - RNA, 15 nt, Human
aaucauuagguguga

SEQ ID NO: 2418309 - RNA, 22 nt, Human
aaucaugaauguguaacacagu

SEQ ID NO: 2418310 - RNA, 16 nt, Human
aaucaugaaauuacuu

SEQ ID NO: 2418311 - RNA, 18 nt, Human
aaucgaggaaccagagcc

SEQ ID NO: 2418312 - RNA, 13 nt, Human
aaucgauuggcuu

SEQ ID NO: 2418313 - RNA, 17 nt, Human
aaucuaagugauauaaa

SEQ ID NO: 2418314 - RNA, 15 nt, Human
aaucuaagugauaua

SEQ ID NO: 2418315 - RNA, 22 nt, Human
aaucuaagcagcauuucugaag

SEQ ID NO: 2418316 - RNA, 14 nt, Human
aaucgauuggcuuu

SEQ ID NO: 2418317 - RNA, 13 nt, Human
aaucgauggggga

SEQ ID NO: 2418318 - RNA, 15 nt, Human
aaucgaccugccucg

SEQ ID NO: 2418319 - RNA, 17 nt, Human
aaucgaggaaccagagc

SEQ ID NO: 2418320 - RNA, 19 nt, Human
aaucgaggaaccagagcca

SEQ ID NO: 2418321 - RNA, 20 nt, Human
aauccuuuuucuuuauaaac

SEQ ID NO: 2418322 - RNA, 12 nt, Human
aauccugucuuu

SEQ ID NO: 2418323 - RNA, 13 nt, Human
aauccuuuacugu

SEQ ID NO: 2418324 - RNA, 21 nt, Human
aauccuguccucagcuucuua

SEQ ID NO: 2418325 - RNA, 18 nt, Human
aauccuguccucagcuuc

SEQ ID NO: 2418326 - RNA, 15 nt, Human
aauccuguccucagc

SEQ ID NO: 2418327 - RNA, 19 nt, Human
aauccuggcccucuguguu

SEQ ID NO: 2418328 - RNA, 20 nt, Human
aauccgaaccuccucuguga

SEQ ID NO: 2418329 - RNA, 15 nt, Human
aauccuaaaagaagc

SEQ ID NO: 2418330 - RNA, 14 nt, Human
aauccuggggaaca

SEQ ID NO: 2418331 - RNA, 21 nt, Human
aauccuggggaacauagaacu

SEQ ID NO: 2418332 - RNA, 13 nt, Human
uaaguacuaugua

SEQ ID NO: 2418333 - RNA, 16 nt, Human
uaaguacuauguauca

SEQ ID NO: 2418334 - RNA, 17 nt, Human
uaaguacuauguaucaa

SEQ ID NO: 2418335 - RNA, 20 nt, Human
uaaguaagaaaauauuuugu

SEQ ID NO: 2418336 - RNA, 18 nt, Human
uaaguaccacucaggcca

SEQ ID NO: 2418337 - RNA, 19 nt, Human
uaaguaagcaacagcauaa

SEQ ID NO: 2418338 - RNA, 20 nt, Human
uaaguauucuuauuuaauga

SEQ ID NO: 2418339 - RNA, 21 nt, Human
uaaguauuaugucucuucuga

SEQ ID NO: 2418340 - RNA, 22 nt, Human
uaaguucauauuccauauuuau

SEQ ID NO: 2418341 - RNA, 17 nt, Human
uaaguauuaugucucuu

SEQ ID NO: 2418342 - RNA, 19 nt, Human
uaaguauucuuauuuaaug

SEQ ID NO: 2418343 - RNA, 19 nt, Human
uaaguaaugauaacuggaa

SEQ ID NO: 2418344 - RNA, 19 nt, Human
uaaguaagaaaauauuuug

SEQ ID NO: 2418345 - RNA, 15 nt, Human
uaaguaagaaaauau

SEQ ID NO: 2418346 - RNA, 14 nt, Human
uaaguaagaaaaua

SEQ ID NO: 2418347 - RNA, 13 nt, Human
uaaguaagaaaau

SEQ ID NO: 2418348 - RNA, 12 nt, Human
uaaguaagaaaa

SEQ ID NO: 2418349 - RNA, 13 nt, Human
uaaguaaaugcua

SEQ ID NO: 2418350 - RNA, 16 nt, Human
uaagcuuguauuccuu

SEQ ID NO: 2418351 - RNA, 16 nt, Human
uaagcuuaugucagac

SEQ ID NO: 2418352 - RNA, 14 nt, Human
uaagcuuauuuaau

SEQ ID NO: 2418353 - RNA, 22 nt, Human
uaagcuuugccagcugcugcug

SEQ ID NO: 2418354 - RNA, 21 nt, Human
uaagcuuugccagcugcugcu

SEQ ID NO: 2418355 - RNA, 19 nt, Human
uaagcuuugccagcugcug

SEQ ID NO: 2418356 - RNA, 18 nt, Human
uaagcuuugccagcugcu

SEQ ID NO: 2418357 - RNA, 17 nt, Human
uaaggaaaaaaagacaa

SEQ ID NO: 2418358 - RNA, 18 nt, Human
uaagcuuauuuaauuaaa

SEQ ID NO: 2418359 - RNA, 17 nt, Human
uaagcuuugccagcugc

SEQ ID NO: 2418360 - RNA, 18 nt, Human
uaauaaacacucuugaaa

SEQ ID NO: 2418361 - RNA, 12 nt, Human
uaauaaacacuc

SEQ ID NO: 2418362 - RNA, 13 nt, Human
uaauaaacauucu

SEQ ID NO: 2418363 - RNA, 22 nt, Human
uaauaaacauccuucaagaacu

SEQ ID NO: 2418364 - RNA, 17 nt, Human
uaaguugaauggccugc

SEQ ID NO: 2418365 - RNA, 19 nt, Human
uaaguuccacugagcucca

SEQ ID NO: 2418366 - RNA, 17 nt, Human
uaaguuccacugagcuc

SEQ ID NO: 2418367 - RNA, 15 nt, Human
uaaguuccacugagc

SEQ ID NO: 2418368 - RNA, 14 nt, Human
uaaguuccacugag

SEQ ID NO: 2418369 - RNA, 23 nt, Human
uaaguucuggaugcauuucucug

SEQ ID NO: 2418370 - RNA, 20 nt, Human
uaaguucuggaugcauuucu

SEQ ID NO: 2418371 - RNA, 19 nt, Human
uaaguuuaccuauguaaca

SEQ ID NO: 2418372 - RNA, 15 nt, Human
uaaguuguuugcaug

SEQ ID NO: 2418373 - RNA, 13 nt, Human
uaaguuguuugca

SEQ ID NO: 2418374 - RNA, 17 nt, Human
uaauaaacuuagaauaa

SEQ ID NO: 2418375 - RNA, 23 nt, Human
aaucauaagauauuuuucaugau

SEQ ID NO: 2418376 - RNA, 14 nt, Human
uaauaaacuguguu

SEQ ID NO: 2418377 - RNA, 15 nt, Human
uaauaaacuguguuu

SEQ ID NO: 2418378 - RNA, 19 nt, Human
aaucauaguacucuuugua

SEQ ID NO: 2418379 - RNA, 21 nt, Human
aaucauauaauaaauguacau

SEQ ID NO: 2418380 - RNA, 18 nt, Human
aaucauauaauaaaugua

SEQ ID NO: 2418381 - RNA, 22 nt, Human
aaucauaguacucuuuguagca

SEQ ID NO: 2418382 - RNA, 15 nt, Human
aaucaugaauuaguu

SEQ ID NO: 2418383 - RNA, 12 nt, Human
aaucaugaauua

SEQ ID NO: 2418384 - RNA, 20 nt, Human
aaucaugaagauauuuuucc

SEQ ID NO: 2418385 - RNA, 17 nt, Human
aaucaugaaauaugcau

SEQ ID NO: 2418386 - RNA, 16 nt, Human
aaucaugaaauaugca

SEQ ID NO: 2418387 - RNA, 18 nt, Human
aaucaucugugugaaaau

SEQ ID NO: 2418388 - RNA, 15 nt, Human
aaucauaugauucug

SEQ ID NO: 2418389 - RNA, 14 nt, Human
aaucauaugauucu

SEQ ID NO: 2418390 - RNA, 20 nt, Human
uaagaauaaaauguugaaaa

SEQ ID NO: 2418391 - RNA, 19 nt, Human
uaagaauaaaauguugaaa

SEQ ID NO: 2418392 - RNA, 17 nt, Human
uaagaauaaaauguuga

SEQ ID NO: 2418393 - RNA, 16 nt, Human
uaagaauaaaauguug

SEQ ID NO: 2418394 - RNA, 13 nt, Human
uaagaauauuuga

SEQ ID NO: 2418395 - RNA, 21 nt, Human
uaagaauaaaauguugaaaag

SEQ ID NO: 2418396 - RNA, 18 nt, Human
uaagaagugaaaaucuac

SEQ ID NO: 2418397 - RNA, 24 nt, Human
uaacuuugcuugcaguagauuuuc

SEQ ID NO: 2418398 - RNA, 22 nt, Human
uaacuuugcuugcaguagauuu

SEQ ID NO: 2418399 - RNA, 12 nt, Human
uaacuuugcuug

SEQ ID NO: 2418400 - RNA, 15 nt, Human
uaagaauaaaauguu

SEQ ID NO: 2418401 - RNA, 23 nt, Human
uaagacacugaaaaaucuaagug

SEQ ID NO: 2418402 - RNA, 20 nt, Human
uaagacacugaaaaaucuaa

SEQ ID NO: 2418403 - RNA, 14 nt, Human
uaagaauauuugaa

SEQ ID NO: 2418404 - RNA, 13 nt, Human
uaagacaaauaug

SEQ ID NO: 2418405 - RNA, 14 nt, Human
uaagacacuuuuug

SEQ ID NO: 2418406 - RNA, 12 nt, Human
uaagacauaacg

SEQ ID NO: 2418407 - RNA, 19 nt, Human
uaagacagucccaucaaaa

SEQ ID NO: 2418408 - RNA, 21 nt, Human
uaagacauaacguuuuuccuu

SEQ ID NO: 2418409 - RNA, 20 nt, Human
uaagacauaacguuuuuccu

SEQ ID NO: 2418410 - RNA, 17 nt, Human
uaagacauaacguuuuu

SEQ ID NO: 2418411 - RNA, 16 nt, Human
uaagacauaacguuuu

SEQ ID NO: 2418412 - RNA, 16 nt, Human
uaagacaugauuuccu

SEQ ID NO: 2418413 - RNA, 20 nt, Human
uaagacauacuccuuccauc

SEQ ID NO: 2418414 - RNA, 19 nt, Human
uaacuuggauguagccaug

SEQ ID NO: 2418415 - RNA, 16 nt, Human
uaacuuggagccccag

SEQ ID NO: 2418416 - RNA, 15 nt, Human
uaacuuuaucacauu

SEQ ID NO: 2418417 - RNA, 17 nt, Human
uaacuuuaucacauuau

SEQ ID NO: 2418418 - RNA, 16 nt, Human
uaacuuuauguguaaa

SEQ ID NO: 2418419 - RNA, 15 nt, Human
uaacuuuauguguaa

SEQ ID NO: 2418420 - RNA, 14 nt, Human
uaacuuuaugugua

SEQ ID NO: 2418421 - RNA, 21 nt, Human
uaacuuuaucacauuauuugc

SEQ ID NO: 2418422 - RNA, 16 nt, Human
uaacuuucugaaauaa

SEQ ID NO: 2418423 - RNA, 15 nt, Human
uaacuuucucuauga

SEQ ID NO: 2418424 - RNA, 19 nt, Human
uaacuuucauuaaagcauu

SEQ ID NO: 2418425 - RNA, 23 nt, Human
uaacuuucauuaaagcauuuacu

SEQ ID NO: 2418426 - RNA, 18 nt, Human
uaacuuuauguguaaaua

SEQ ID NO: 2418427 - RNA, 13 nt, Human
uaacuuucagaag

SEQ ID NO: 2418428 - RNA, 23 nt, Human
uaacuuucagaagagaugggcuu

SEQ ID NO: 2418429 - RNA, 23 nt, Human
uaacuucuuauggaauugauuug

SEQ ID NO: 2418430 - RNA, 15 nt, Human
uaacuugcaccucug

SEQ ID NO: 2418431 - RNA, 21 nt, Human
uaacuugaguuuuauuuauuu

SEQ ID NO: 2418432 - RNA, 15 nt, Human
uaacuugaguuuuau

SEQ ID NO: 2418433 - RNA, 22 nt, Human
uaacuugaggguaauaaacuua

SEQ ID NO: 2418434 - RNA, 22 nt, Human
uaacuugagaguagaugguuug

SEQ ID NO: 2418435 - RNA, 14 nt, Human
uaacuucaccauau

SEQ ID NO: 2418436 - RNA, 17 nt, Human
uaacuuccaauuuacau

SEQ ID NO: 2418437 - RNA, 21 nt, Human
uaacuucacauauugauuucc

SEQ ID NO: 2418438 - RNA, 13 nt, Human
uaacuucacauau

SEQ ID NO: 2418439 - RNA, 14 nt, Human
uaacuuaaucaauu

SEQ ID NO: 2418440 - RNA, 16 nt, Human
uaacuuaauaguauuu

SEQ ID NO: 2418441 - RNA, 22 nt, Human
uaacuuaaaagaacauguauau

SEQ ID NO: 2418442 - RNA, 21 nt, Human
uaacuuaaaaauguaaauauu

SEQ ID NO: 2418443 - RNA, 20 nt, Human
uaacuuaaaaauguaaauau

SEQ ID NO: 2418444 - RNA, 23 nt, Human
uaacuuaaaaauguaaauauucu

SEQ ID NO: 2418445 - RNA, 16 nt, Human
uaacuuaaaauauuuu

SEQ ID NO: 2418446 - RNA, 21 nt, Human
uaacuagagcagcccuggagu

SEQ ID NO: 2418447 - RNA, 18 nt, Human
uaacuagagcagcccugg

SEQ ID NO: 2418448 - RNA, 21 nt, Human
uaacuguuauuuauaaucacu

SEQ ID NO: 2418449 - RNA, 19 nt, Human
uaacuuaaaaauguaaaua

SEQ ID NO: 2418450 - RNA, 17 nt, Human
uaacuuaaaaauguaaa

SEQ ID NO: 2418451 - RNA, 18 nt, Human
uaacuuaaaaaaaugaca

SEQ ID NO: 2418452 - RNA, 18 nt, Human
uaacuagaauuuauucaa

SEQ ID NO: 2418453 - RNA, 17 nt, Human
uaacuagaauuuauuca

SEQ ID NO: 2418454 - RNA, 15 nt, Human
uaacuagaauuuauu

SEQ ID NO: 2418455 - RNA, 17 nt, Human
uaacgaccacagggucu

SEQ ID NO: 2418456 - RNA, 14 nt, Human
uaacgacuucaggg

SEQ ID NO: 2418457 - RNA, 23 nt, Human
uaacgacuucagggcagggcucu

SEQ ID NO: 2418458 - RNA, 20 nt, Human
uaacgauaaaagacagugaa

SEQ ID NO: 2418459 - RNA, 21 nt, Human
uaaccuuaccagauuuuuaca

SEQ ID NO: 2418460 - RNA, 18 nt, Human
uaacauggugugcuucuu

SEQ ID NO: 2418461 - RNA, 23 nt, Human
aauaguauuugagaguucuaaau

SEQ ID NO: 2418462 - RNA, 16 nt, Human
aauaguggugugauuu

SEQ ID NO: 2418463 - RNA, 22 nt, Human
aauaguggugugauuuggggau

SEQ ID NO: 2418464 - RNA, 12 nt, Human
aauaguguggaa

SEQ ID NO: 2418465 - RNA, 22 nt, Human
aauaguauuugagaguucuaaa

SEQ ID NO: 2418466 - RNA, 20 nt, Human
aauaguauuugagaguucua

SEQ ID NO: 2418467 - RNA, 16 nt, Human
aauagucaaauugugu

SEQ ID NO: 2418468 - RNA, 21 nt, Human
uaaaauuugcccucccauccc

SEQ ID NO: 2418469 - RNA, 16 nt, Human
uaaaauuugcccuccc

SEQ ID NO: 2418470 - RNA, 13 nt, Human
uaaaauuucaaca

SEQ ID NO: 2418471 - RNA, 17 nt, Human
uaaaauuuaaguaucuu

SEQ ID NO: 2418472 - RNA, 23 nt, Human
uaaaauuuauugcuugauacuuu

SEQ ID NO: 2418473 - RNA, 15 nt, Human
aauauauuuuaagac

SEQ ID NO: 2418474 - RNA, 14 nt, Human
aauauauuuuaaga

SEQ ID NO: 2418475 - RNA, 14 nt, Human
aauaguugagcccc

SEQ ID NO: 2418476 - RNA, 23 nt, Human
aauaguugagccagcagacauug

SEQ ID NO: 2418477 - RNA, 22 nt, Human
aauaguugagccagcagacauu

SEQ ID NO: 2418478 - RNA, 14 nt, Human
aauaguuguugauu

SEQ ID NO: 2418479 - RNA, 15 nt, Human
aauauauuucagaua

SEQ ID NO: 2418480 - RNA, 19 nt, Human
aauaguuuacauguaguag

SEQ ID NO: 2418481 - RNA, 14 nt, Human
aauauauuugugua

SEQ ID NO: 2418482 - RNA, 13 nt, Human
aauauauuugugu

SEQ ID NO: 2418483 - RNA, 14 nt, Human
aauaguguguucug

SEQ ID NO: 2418484 - RNA, 15 nt, Human
aauaguguguucuga

SEQ ID NO: 2418485 - RNA, 17 nt, Human
aauaguguguucugauu

SEQ ID NO: 2418486 - RNA, 19 nt, Human
aauaguguggaaauuaaga

SEQ ID NO: 2418487 - RNA, 20 nt, Human
aauaguguggaaauuaagaa

SEQ ID NO: 2418488 - RNA, 22 nt, Human
aauaguguggaaauuaagaaga

SEQ ID NO: 2418489 - RNA, 13 nt, Human
aauaguguguucu

SEQ ID NO: 2418490 - RNA, 13 nt, Human
aauaguuggcuag

SEQ ID NO: 2418491 - RNA, 21 nt, Human
aauaguugagccagcagacau

SEQ ID NO: 2418492 - RNA, 20 nt, Human
aauaguugagccagcagaca

SEQ ID NO: 2418493 - RNA, 19 nt, Human
aauaguugagccagcagac

SEQ ID NO: 2418494 - RNA, 18 nt, Human
aauaguugagccagcaga

SEQ ID NO: 2418495 - RNA, 16 nt, Human
aauaguugagccagca

SEQ ID NO: 2418496 - RNA, 20 nt, Human
uaacaguuuuccaugaaaac

SEQ ID NO: 2418497 - RNA, 23 nt, Human
uaacauauaauguuguuauuuaa

SEQ ID NO: 2418498 - RNA, 14 nt, Human
uaacauauaauguu

SEQ ID NO: 2418499 - RNA, 13 nt, Human
uaacauauuuacu

SEQ ID NO: 2418500 - RNA, 20 nt, Human
uaacaucuaaaaauagacuu

SEQ ID NO: 2418501 - RNA, 14 nt, Human
uaacaucuaaaaau

SEQ ID NO: 2418502 - RNA, 13 nt, Human
uaacaucugagaa

SEQ ID NO: 2418503 - RNA, 23 nt, Human
uaacauauuuacuaagccacaag

SEQ ID NO: 2418504 - RNA, 22 nt, Human
uaacauauuuacuaagccacaa

SEQ ID NO: 2418505 - RNA, 14 nt, Human
uaacauauuuacua

SEQ ID NO: 2418506 - RNA, 23 nt, Human
uaacauccuuucuauugaaaaau

SEQ ID NO: 2418507 - RNA, 23 nt, Human
uaacauggacaugaucuucuuua

SEQ ID NO: 2418508 - RNA, 18 nt, Human
uaacauggacaugaucuu

SEQ ID NO: 2418509 - RNA, 21 nt, Human
uaacagugcauauuccuuucu

SEQ ID NO: 2418510 - RNA, 21 nt, Human
aauaucaguuacucagcccug

SEQ ID NO: 2418511 - RNA, 19 nt, Human
aauaucaguagaaacucua

SEQ ID NO: 2418512 - RNA, 19 nt, Human
aauaucaguuacucagccc

SEQ ID NO: 2418513 - RNA, 22 nt, Human
aauaucaguuacucagcccugg

SEQ ID NO: 2418514 - RNA, 18 nt, Human
uaacaguucauguuugcu

SEQ ID NO: 2418515 - RNA, 14 nt, Human
uaacaguucauguu

SEQ ID NO: 2418516 - RNA, 13 nt, Human
uaacaguuuucca

SEQ ID NO: 2418517 - RNA, 14 nt, Human
uaacaguuuuccau

SEQ ID NO: 2418518 - RNA, 15 nt, Human
uaacaguuuuccaug

SEQ ID NO: 2418519 - RNA, 16 nt, Human
uaacaguuuuccauga

SEQ ID NO: 2418520 - RNA, 17 nt, Human
uaacaguuuuccaugaa

SEQ ID NO: 2418521 - RNA, 19 nt, Human
uaacaguuuuccaugaaaa

SEQ ID NO: 2418522 - RNA, 21 nt, Human
uaacaguuuuccaugaaaacg

SEQ ID NO: 2418523 - RNA, 22 nt, Human
aauaucacuugucaauaaaauc

SEQ ID NO: 2418524 - RNA, 15 nt, Human
aauaucagacuagug

SEQ ID NO: 2418525 - RNA, 24 nt, Human
aauauauuuguguauuuaacaggg

SEQ ID NO: 2418526 - RNA, 20 nt, Human
aauaucagcaagucucuuua

SEQ ID NO: 2418527 - RNA, 13 nt, Human
aauaucagacuuu

SEQ ID NO: 2418528 - RNA, 20 nt, Human
aauaucacuugucaauaaaa

SEQ ID NO: 2418529 - RNA, 18 nt, Human
aauauauuuuaagacgaa

SEQ ID NO: 2418530 - RNA, 21 nt, Human
aauauauuuguguauuuaaca

SEQ ID NO: 2418531 - RNA, 19 nt, Human
aauauauuuguguauuuaa

SEQ ID NO: 2418532 - RNA, 18 nt, Human
uaagagaaagaaaaugaa

SEQ ID NO: 2418533 - RNA, 13 nt, Human
uaagagaaagaaa

SEQ ID NO: 2418534 - RNA, 15 nt, Human
uaagacuuugggaua

SEQ ID NO: 2418535 - RNA, 15 nt, Human
uaagagaaaugagcu

SEQ ID NO: 2418536 - RNA, 22 nt, Human
uaagacauaacguuuuuccuuu

SEQ ID NO: 2418537 - RNA, 17 nt, Human
uaagacaugauuuccuu

SEQ ID NO: 2418538 - RNA, 19 nt, Human
uaagacaugauuuccuuga

SEQ ID NO: 2418539 - RNA, 20 nt, Human
uaagacuuugggauaggaaa

SEQ ID NO: 2418540 - RNA, 16 nt, Human
aauaugcacacauuuu

SEQ ID NO: 2418541 - RNA, 17 nt, Human
aauaugcacacauuuuu

SEQ ID NO: 2418542 - RNA, 22 nt, Human
aauaugcacacauuuuuuaaau

SEQ ID NO: 2418543 - RNA, 13 nt, Human
uaagagacaguca

SEQ ID NO: 2418544 - RNA, 19 nt, Human
uaagagaauauuuuaagua

SEQ ID NO: 2418545 - RNA, 24 nt, Human
aauaugccccauucaacaucuagu

SEQ ID NO: 2418546 - RNA, 21 nt, Human
aauaugccccauucaacaucu

SEQ ID NO: 2418547 - RNA, 23 nt, Human
aauaugccucuccuuuguauauu

SEQ ID NO: 2418548 - RNA, 21 nt, Human
aauaugccucuccuuuguaua

SEQ ID NO: 2418549 - RNA, 15 nt, Human
aauaugcaguucugc

SEQ ID NO: 2418550 - RNA, 22 nt, Human
aauaugcagugauauggcagaa

SEQ ID NO: 2418551 - RNA, 19 nt, Human
aauaugccucuccuuugua

SEQ ID NO: 2418552 - RNA, 16 nt, Human
aauaugccucuccuuu

SEQ ID NO: 2418553 - RNA, 20 nt, Human
aauaugcaucuaauaaaaaa

SEQ ID NO: 2418554 - RNA, 15 nt, Human
aauauucccuagaaa

SEQ ID NO: 2418555 - RNA, 13 nt, Human
aauauucccaagc

SEQ ID NO: 2418556 - RNA, 17 nt, Human
aauauucccuagaaacu

SEQ ID NO: 2418557 - RNA, 20 nt, Human
aauauuccccuaucucuaga

SEQ ID NO: 2418558 - RNA, 12 nt, Human
aauauuccugaa

SEQ ID NO: 2418559 - RNA, 18 nt, Human
aauauucauaguuuaauu

SEQ ID NO: 2418560 - RNA, 12 nt, Human
aauauuccagag

SEQ ID NO: 2418561 - RNA, 15 nt, Human
aauauuccugcauuu

SEQ ID NO: 2418562 - RNA, 20 nt, Human
aauauucuauaugaauuuaa

SEQ ID NO: 2418563 - RNA, 16 nt, Human
aauauucuauaugaau

SEQ ID NO: 2418564 - RNA, 15 nt, Human
aauauuccugaauga

SEQ ID NO: 2418565 - RNA, 23 nt, Human
aauauucuauuuucauuuucugc

SEQ ID NO: 2418566 - RNA, 19 nt, Human
aauauuuauuuuaauaaug

SEQ ID NO: 2418567 - RNA, 14 nt, Human
aauauuucagauaa

SEQ ID NO: 2418568 - RNA, 19 nt, Human
aauauuuauaaaacuucuc

SEQ ID NO: 2418569 - RNA, 21 nt, Human
aauauuugaauguaugcuuca

SEQ ID NO: 2418570 - RNA, 23 nt, Human
aauauuugaauguaugcuucaua

SEQ ID NO: 2418571 - RNA, 15 nt, Human
aauauuucaagacau

SEQ ID NO: 2418572 - RNA, 14 nt, Human
aauauuucaagaca

SEQ ID NO: 2418573 - RNA, 16 nt, Human
aauauuucaagacauu

SEQ ID NO: 2418574 - RNA, 16 nt, Human
aauauuugaaucuugu

SEQ ID NO: 2418575 - RNA, 14 nt, Human
aauauuugaaugua

SEQ ID NO: 2418576 - RNA, 12 nt, Human
aauauuuagugu

SEQ ID NO: 2418577 - RNA, 15 nt, Human
aauauuuaaacaugg

SEQ ID NO: 2418578 - RNA, 17 nt, Human
aauauuuaagauaguuu

SEQ ID NO: 2418579 - RNA, 18 nt, Human
aauauuuauuuuaauaau

SEQ ID NO: 2418580 - RNA, 20 nt, Human
aauauuuagcaaauaauuuc

SEQ ID NO: 2418581 - RNA, 13 nt, Human
aauauuuauaaaa

SEQ ID NO: 2418582 - RNA, 16 nt, Human
aauauuuauaaaacuu

SEQ ID NO: 2418583 - RNA, 17 nt, Human
aauauuuauaaaacuuc

SEQ ID NO: 2418584 - RNA, 14 nt, Human
aauauuuagcaaau

SEQ ID NO: 2418585 - RNA, 15 nt, Human
aauauuuacauauga

SEQ ID NO: 2418586 - RNA, 20 nt, Human
aauauugagaaagaaacuaa

SEQ ID NO: 2418587 - RNA, 14 nt, Human
aauauuguacaguu

SEQ ID NO: 2418588 - RNA, 16 nt, Human
aauauugagaaagaaa

SEQ ID NO: 2418589 - RNA, 19 nt, Human
aauauugagaaagaaacua

SEQ ID NO: 2418590 - RNA, 16 nt, Human
aauauugacuuugucu

SEQ ID NO: 2418591 - RNA, 15 nt, Human
aauauugacuuuguc

SEQ ID NO: 2418592 - RNA, 15 nt, Human
aauauugaacuuuuu

SEQ ID NO: 2418593 - RNA, 14 nt, Human
aauauugacuugua

SEQ ID NO: 2418594 - RNA, 17 nt, Human
aauauugacuuguauau

SEQ ID NO: 2418595 - RNA, 14 nt, Human
aauauugacuuugu

SEQ ID NO: 2418596 - RNA, 17 nt, Human
aauauuguacaguuuuu

SEQ ID NO: 2418597 - RNA, 15 nt, Human
aauauuguacaguuu

SEQ ID NO: 2418598 - RNA, 23 nt, Human
aauauuguacaguuuuuauugcu

SEQ ID NO: 2418599 - RNA, 13 nt, Human
aauauuguccauu

SEQ ID NO: 2418600 - RNA, 16 nt, Human
aauauugucauuccug

SEQ ID NO: 2418601 - RNA, 17 nt, Human
aauauuguguugugaau

SEQ ID NO: 2418602 - RNA, 23 nt, Human
aauauugugaagaaaaauaaagu

SEQ ID NO: 2418603 - RNA, 22 nt, Human
aauauuuaaacaugguuacaau

SEQ ID NO: 2418604 - RNA, 12 nt, Human
aauauuuaagac

SEQ ID NO: 2418605 - RNA, 13 nt, Human
aauauuuaaacau

SEQ ID NO: 2418606 - RNA, 19 nt, Human
aauauuuaaacagcagugu

SEQ ID NO: 2418607 - RNA, 17 nt, Human
uaagcagaccacugaua

SEQ ID NO: 2418608 - RNA, 20 nt, Human
uaagcagaccacugauaaaa

SEQ ID NO: 2418609 - RNA, 16 nt, Human
uaagcacugugcuaau

SEQ ID NO: 2418610 - RNA, 17 nt, Human
uaagcacugugcuaaua

SEQ ID NO: 2418611 - RNA, 14 nt, Human
uaagcacugugcua

SEQ ID NO: 2418612 - RNA, 13 nt, Human
uaagcacugugcu

SEQ ID NO: 2418613 - RNA, 22 nt, Human
uaagcacuacauaaacugacuu

SEQ ID NO: 2418614 - RNA, 17 nt, Human
uaagcacuacauaaacu

SEQ ID NO: 2418615 - RNA, 16 nt, Human
uaagcacuacauaaac

SEQ ID NO: 2418616 - RNA, 13 nt, Human
uaagcacuacaua

SEQ ID NO: 2418617 - RNA, 13 nt, Human
uaagcaagagaga

SEQ ID NO: 2418618 - RNA, 18 nt, Human
uaagcaagagagauguuu

SEQ ID NO: 2418619 - RNA, 22 nt, Human
uaagcuguuacugucuucagua

SEQ ID NO: 2418620 - RNA, 21 nt, Human
uaagcuguuuauuuuauauua

SEQ ID NO: 2418621 - RNA, 13 nt, Human
uaagcuguuuauu

SEQ ID NO: 2418622 - RNA, 15 nt, Human
uaagcuguaaaaaga

SEQ ID NO: 2418623 - RNA, 16 nt, Human
uaagcuguuuccauag

SEQ ID NO: 2418624 - RNA, 11 nt, Human
uaagcuguuuc

SEQ ID NO: 2418625 - RNA, 14 nt, Human
uaagcugaaaauau

SEQ ID NO: 2418626 - RNA, 15 nt, Human
uaagcagaggagggg

SEQ ID NO: 2418627 - RNA, 16 nt, Human
uaagcagaggaggggc

SEQ ID NO: 2418628 - RNA, 13 nt, Human
uaagcagaggagg

SEQ ID NO: 2418629 - RNA, 16 nt, Human
uaagcugcucuauugu

SEQ ID NO: 2418630 - RNA, 17 nt, Human
uaagcagaggaggggcc

SEQ ID NO: 2418631 - RNA, 12 nt, Human
uaagcuguaaaa

SEQ ID NO: 2418632 - RNA, 13 nt, Human
uaagcuguaaaaa

SEQ ID NO: 2418633 - RNA, 18 nt, Human
uaagcacacuugacauca

SEQ ID NO: 2418634 - RNA, 23 nt, Human
uaagcaacaucuagcaaauguua

SEQ ID NO: 2418635 - RNA, 21 nt, Human
uaagauuuuucucaaaguuuu

SEQ ID NO: 2418636 - RNA, 20 nt, Human
uaagauuuuucucaaaguuu

SEQ ID NO: 2418637 - RNA, 18 nt, Human
uaagauuuuucucaaagu

SEQ ID NO: 2418638 - RNA, 16 nt, Human
uaagauuuuucucaaa

SEQ ID NO: 2418639 - RNA, 23 nt, Human
uaagcaaagggagcacuggguug

SEQ ID NO: 2418640 - RNA, 19 nt, Human
uaagauuuagagaugaauu

SEQ ID NO: 2418641 - RNA, 15 nt, Human
uaagauuuuucucaa

SEQ ID NO: 2418642 - RNA, 22 nt, Human
aaucaggguuaguauuguccag

SEQ ID NO: 2418643 - RNA, 21 nt, Human
aauauuuuuuauauauacagu

SEQ ID NO: 2418644 - RNA, 19 nt, Human
aauauuuuuuauauauaca

SEQ ID NO: 2418645 - RNA, 15 nt, Human
uaagaugacauugcu

SEQ ID NO: 2418646 - RNA, 17 nt, Human
uaagaugacauugcuaa

SEQ ID NO: 2418647 - RNA, 16 nt, Human
uaagaugacauugcua

SEQ ID NO: 2418648 - RNA, 17 nt, Human
uaagaugcuaccuugug

SEQ ID NO: 2418649 - RNA, 19 nt, Human
uaagauggaagcuuccagu

SEQ ID NO: 2418650 - RNA, 18 nt, Human
uaagauggaagcuuccag

SEQ ID NO: 2418651 - RNA, 17 nt, Human
uaagauggaagcuucca

SEQ ID NO: 2418652 - RNA, 13 nt, Human
uaagaugcugggu

SEQ ID NO: 2418653 - RNA, 12 nt, Human
uaagaugcuggg

SEQ ID NO: 2418654 - RNA, 11 nt, Human
uaagaugcugg

SEQ ID NO: 2418655 - RNA, 24 nt, Human
uaagaugcucuaucuugcucugua

SEQ ID NO: 2418656 - RNA, 23 nt, Human
uaagaugcuaccuugugacccag

SEQ ID NO: 2418657 - RNA, 15 nt, Human
uaagauggauucuca

SEQ ID NO: 2418658 - RNA, 17 nt, Human
uaagauggauucucaga

SEQ ID NO: 2418659 - RNA, 18 nt, Human
uaagauggauucucagau

SEQ ID NO: 2418660 - RNA, 20 nt, Human
uaagauggauucucagauau

SEQ ID NO: 2418661 - RNA, 18 nt, Human
uaagaugggcagcuaguu

SEQ ID NO: 2418662 - RNA, 22 nt, Human
uaagauggauucucagauauuu

SEQ ID NO: 2418663 - RNA, 21 nt, Human
uaagauuccagagaguggcuc

SEQ ID NO: 2418664 - RNA, 14 nt, Human
uaagauuccagaga

SEQ ID NO: 2418665 - RNA, 21 nt, Human
uaagauggauucucagauauu

SEQ ID NO: 2418666 - RNA, 21 nt, Human
aaucaggguuaguauugucca

SEQ ID NO: 2418667 - RNA, 16 nt, Human
aaucaggguuaguauu

SEQ ID NO: 2418668 - RNA, 22 nt, Human
aauauuuuuauagauuugaccu

SEQ ID NO: 2418669 - RNA, 17 nt, Human
aauauuuuuuauauaua

SEQ ID NO: 2418670 - RNA, 23 nt, Human
aauauuuuugaaaggcauguucc

SEQ ID NO: 2418671 - RNA, 13 nt, Human
aauauuuuucuua

SEQ ID NO: 2418672 - RNA, 21 nt, Human
aauauuuugucuaaaaugccu

SEQ ID NO: 2418673 - RNA, 20 nt, Human
aauauuuugucuaaaaugcc

SEQ ID NO: 2418674 - RNA, 19 nt, Human
aauauuuugucuaaaaugc

SEQ ID NO: 2418675 - RNA, 16 nt, Human
aauauuuugucuaaaa

SEQ ID NO: 2418676 - RNA, 17 nt, Human
aauauuuuuaauauaua

SEQ ID NO: 2418677 - RNA, 14 nt, Human
aauauuuuuagaua

SEQ ID NO: 2418678 - RNA, 12 nt, Human
aauauuuguaca

SEQ ID NO: 2418679 - RNA, 14 nt, Human
aauauuuguacaua

SEQ ID NO: 2418680 - RNA, 20 nt, Human
aauauuugaaucuugucuca

SEQ ID NO: 2418681 - RNA, 12 nt, Human
aauauuugcuga

SEQ ID NO: 2418682 - RNA, 20 nt, Human
aauauuuugcuaguuuuuga

SEQ ID NO: 2418683 - RNA, 15 nt, Human
aauauuuugucuaaa

SEQ ID NO: 2418684 - RNA, 14 nt, Human
aauauuuugucuaa

SEQ ID NO: 2418685 - RNA, 13 nt, Human
aauauuuugucua

SEQ ID NO: 2418686 - RNA, 22 nt, Human
accacaggcccuuuccucaggc

SEQ ID NO: 2418687 - RNA, 21 nt, Human
accacaggcccuuuccucagg

SEQ ID NO: 2418688 - RNA, 16 nt, Human
accacagcugcuggag

SEQ ID NO: 2418689 - RNA, 15 nt, Human
accacagcugcugga

SEQ ID NO: 2418690 - RNA, 14 nt, Human
accacagcugcugg

SEQ ID NO: 2418691 - RNA, 13 nt, Human
accacagcugcug

SEQ ID NO: 2418692 - RNA, 12 nt, Human
accacagcugcu

SEQ ID NO: 2418693 - RNA, 14 nt, Human
accacagcccuguc

SEQ ID NO: 2418694 - RNA, 15 nt, Human
accacagcccuguca

SEQ ID NO: 2418695 - RNA, 16 nt, Human
accacagcccugucag

SEQ ID NO: 2418696 - RNA, 17 nt, Human
accacagcccugucagu

SEQ ID NO: 2418697 - RNA, 13 nt, Human
ucacccccuucuc

SEQ ID NO: 2418698 - RNA, 16 nt, Human
ucacccccuucuccau

SEQ ID NO: 2418699 - RNA, 22 nt, Human
ucacccccuucuccauccacau

SEQ ID NO: 2418700 - RNA, 19 nt, Human
accacagccagcaccuggc

SEQ ID NO: 2418701 - RNA, 18 nt, Human
ucacccccuucuccaucc

SEQ ID NO: 2418702 - RNA, 20 nt, Human
accacagccagcaccuggca

SEQ ID NO: 2418703 - RNA, 13 nt, Human
accacagcccugu

SEQ ID NO: 2418704 - RNA, 17 nt, Human
accacagccagcaccug

SEQ ID NO: 2418705 - RNA, 19 nt, Human
accacaucuugcucugcug

SEQ ID NO: 2418706 - RNA, 18 nt, Human
accacaucuugcucugcu

SEQ ID NO: 2418707 - RNA, 22 nt, Human
accacaggguucaaaaugucug

SEQ ID NO: 2418708 - RNA, 23 nt, Human
accacaggguucaaaaugucugu

SEQ ID NO: 2418709 - RNA, 17 nt, Human
accacaggguucaaaau

SEQ ID NO: 2418710 - RNA, 17 nt, Human
accacaucuugcucugc

SEQ ID NO: 2418711 - RNA, 24 nt, Human
accacauuggagauguuuaguaau

SEQ ID NO: 2418712 - RNA, 18 nt, Human
accacaugcggagaacaa

SEQ ID NO: 2418713 - RNA, 19 nt, Human
accacauuuuauauuuauu

SEQ ID NO: 2418714 - RNA, 22 nt, Human
accacaugccaagcacugugcu

SEQ ID NO: 2418715 - RNA, 20 nt, Human
accacaugccaagcacugug

SEQ ID NO: 2418716 - RNA, 22 nt, Human
accacagguucaugccaccaug

SEQ ID NO: 2418717 - RNA, 18 nt, Human
accacaugugcacaugca

SEQ ID NO: 2418718 - RNA, 16 nt, Human
accaccaagccaaggg

SEQ ID NO: 2418719 - RNA, 22 nt, Human
accaccacuggccaccaggcug

SEQ ID NO: 2418720 - RNA, 21 nt, Human
accaccacuggccaccaggcu

SEQ ID NO: 2418721 - RNA, 20 nt, Human
accaccacuggccaccaggc

SEQ ID NO: 2418722 - RNA, 16 nt, Human
accaccacuggccacc

SEQ ID NO: 2418723 - RNA, 15 nt, Human
accaccacuggccac

SEQ ID NO: 2418724 - RNA, 14 nt, Human
accaccacuggcca

SEQ ID NO: 2418725 - RNA, 20 nt, Human
accaccacacccagcccacu

SEQ ID NO: 2418726 - RNA, 15 nt, Human
accaccacacccagc

SEQ ID NO: 2418727 - RNA, 20 nt, Human
ucacaguuuugguugcuuua

SEQ ID NO: 2418728 - RNA, 17 nt, Human
ucacaguuggccuucag

SEQ ID NO: 2418729 - RNA, 13 nt, Human
ucacaguugacaa

SEQ ID NO: 2418730 - RNA, 22 nt, Human
ucacaguucuuugggccagaca

SEQ ID NO: 2418731 - RNA, 19 nt, Human
ucacaguucuuugggccag

SEQ ID NO: 2418732 - RNA, 20 nt, Human
ucacaguucuuugggccaga

SEQ ID NO: 2418733 - RNA, 13 nt, Human
ucacagcggaggu

SEQ ID NO: 2418734 - RNA, 22 nt, Human
ucacagccucugaccccuccuc

SEQ ID NO: 2418735 - RNA, 22 nt, Human
ucacaguuggcuggaugaaauu

SEQ ID NO: 2418736 - RNA, 21 nt, Human
ucacaguuuugguugcuuuaa

SEQ ID NO: 2418737 - RNA, 23 nt, Human
ucacaguuuugguugcuuuaaua

SEQ ID NO: 2418738 - RNA, 17 nt, Human
ucacauaaaaccucauu

SEQ ID NO: 2418739 - RNA, 18 nt, Human
ucacauaaaauagauuuu

SEQ ID NO: 2418740 - RNA, 20 nt, Human
ucacauaagcucagaaucca

SEQ ID NO: 2418741 - RNA, 19 nt, Human
ucacauaagcucagaaucc

SEQ ID NO: 2418742 - RNA, 17 nt, Human
ucacauaagcucagaau

SEQ ID NO: 2418743 - RNA, 16 nt, Human
ucacauagaugucccu

SEQ ID NO: 2418744 - RNA, 17 nt, Human
ucacauagaugucccuu

SEQ ID NO: 2418745 - RNA, 15 nt, Human
ucacauacccucccc

SEQ ID NO: 2418746 - RNA, 14 nt, Human
ucacauacccuccc

SEQ ID NO: 2418747 - RNA, 18 nt, Human
ucacauacaauuauuuuu

SEQ ID NO: 2418748 - RNA, 18 nt, Human
ucacauagagaucauccu

SEQ ID NO: 2418749 - RNA, 16 nt, Human
ucacauacccuccccc

SEQ ID NO: 2418750 - RNA, 15 nt, Human
ucacauagauguccc

SEQ ID NO: 2418751 - RNA, 17 nt, Human
ucaccaucucaggccac

SEQ ID NO: 2418752 - RNA, 15 nt, Human
ucaccaucuuggcca

SEQ ID NO: 2418753 - RNA, 14 nt, Human
ucaccaucugugca

SEQ ID NO: 2418754 - RNA, 21 nt, Human
ucaccaucucaggccaccugc

SEQ ID NO: 2418755 - RNA, 23 nt, Human
ucaccaucucaggccaccugccc

SEQ ID NO: 2418756 - RNA, 15 nt, Human
ucaccauguuggcca

SEQ ID NO: 2418757 - RNA, 15 nt, Human
ucacccacagggcua

SEQ ID NO: 2418758 - RNA, 22 nt, Human
ucacccacagggcuaagagcua

SEQ ID NO: 2418759 - RNA, 11 nt, Human
ucacccacagg

SEQ ID NO: 2418760 - RNA, 12 nt, Human
ucacccacaggg

SEQ ID NO: 2418761 - RNA, 14 nt, Human
ucacccacagggcu

SEQ ID NO: 2418762 - RNA, 16 nt, Human
ucacccagacagcucc

SEQ ID NO: 2418763 - RNA, 17 nt, Human
ucacccagacagcuccc

SEQ ID NO: 2418764 - RNA, 19 nt, Human
ucaccccaucccacacccu

SEQ ID NO: 2418765 - RNA, 14 nt, Human
ucaccccccacuca

SEQ ID NO: 2418766 - RNA, 13 nt, Human
ucaccccccacuc

SEQ ID NO: 2418767 - RNA, 19 nt, Human
ucacccccucgggucuccu

SEQ ID NO: 2418768 - RNA, 14 nt, Human
ucacccccucgggu

SEQ ID NO: 2418769 - RNA, 18 nt, Human
ucaccccccacucaccag

SEQ ID NO: 2418770 - RNA, 13 nt, Human
ucacccccucggg

SEQ ID NO: 2418771 - RNA, 18 nt, Human
ucacccccagcuuugcua

SEQ ID NO: 2418772 - RNA, 18 nt, Human
ucaccccccacacucacu

SEQ ID NO: 2418773 - RNA, 19 nt, Human
ucacccccaaggggcaguc

SEQ ID NO: 2418774 - RNA, 13 nt, Human
ucacccccagcuu

SEQ ID NO: 2418775 - RNA, 13 nt, Human
ucacccccaaggg

SEQ ID NO: 2418776 - RNA, 17 nt, Human
ucaccauuugauuaugu

SEQ ID NO: 2418777 - RNA, 22 nt, Human
ucaccauuugauuauguagcaa

SEQ ID NO: 2418778 - RNA, 19 nt, Human
ucacccaagagauuguugu

SEQ ID NO: 2418779 - RNA, 19 nt, Human
ucacccaagcaaggccaaa

SEQ ID NO: 2418780 - RNA, 23 nt, Human
ucaccauuuggcaaugccaucau

SEQ ID NO: 2418781 - RNA, 22 nt, Human
ucaccauguuggccaggcuggu

SEQ ID NO: 2418782 - RNA, 21 nt, Human
ucaccauguuggccaggcugg

SEQ ID NO: 2418783 - RNA, 21 nt, Human
ucacagaugugugauucacag

SEQ ID NO: 2418784 - RNA, 22 nt, Human
ucacacuucugugagaccccca

SEQ ID NO: 2418785 - RNA, 23 nt, Human
ucacacuucugugagacccccac

SEQ ID NO: 2418786 - RNA, 23 nt, Human
ucacagcaagucacuggccagug

SEQ ID NO: 2418787 - RNA, 23 nt, Human
ucacagaugugugauucacagug

SEQ ID NO: 2418788 - RNA, 22 nt, Human
ucacagccuccucugucugccc

SEQ ID NO: 2418789 - RNA, 20 nt, Human
ucacagccuccucugucugc

SEQ ID NO: 2418790 - RNA, 19 nt, Human
ucacagccuccucugucug

SEQ ID NO: 2418791 - RNA, 17 nt, Human
ucacagccuccucuguc

SEQ ID NO: 2418792 - RNA, 15 nt, Human
ucacagccuccucug

SEQ ID NO: 2418793 - RNA, 14 nt, Human
ucacagccuccucu

SEQ ID NO: 2418794 - RNA, 15 nt, Human
ucacagcagcuucua

SEQ ID NO: 2418795 - RNA, 13 nt, Human
ucacagccuccuc

SEQ ID NO: 2418796 - RNA, 18 nt, Human
ucacagcacagagaagac

SEQ ID NO: 2418797 - RNA, 12 nt, Human
ucacagaaauga

SEQ ID NO: 2418798 - RNA, 20 nt, Human
ucacacuuccaccagccugc

SEQ ID NO: 2418799 - RNA, 16 nt, Human
ucacagaaaugagauc

SEQ ID NO: 2418800 - RNA, 17 nt, Human
ucacagcacagagaaga

SEQ ID NO: 2418801 - RNA, 20 nt, Human
ucacaguucucuccuucuuc

SEQ ID NO: 2418802 - RNA, 16 nt, Human
ucacaguucucuccuu

SEQ ID NO: 2418803 - RNA, 21 nt, Human
ucacagccucugaccccuccu

SEQ ID NO: 2418804 - RNA, 20 nt, Human
ucacagccucugaccccucc

SEQ ID NO: 2418805 - RNA, 19 nt, Human
ucacagccucugaccccuc

SEQ ID NO: 2418806 - RNA, 18 nt, Human
ucacagccucugaccccu

SEQ ID NO: 2418807 - RNA, 17 nt, Human
ucacagccucugacccc

SEQ ID NO: 2418808 - RNA, 16 nt, Human
ucacagccucugaccc

SEQ ID NO: 2418809 - RNA, 12 nt, Human
ucacagccucug

SEQ ID NO: 2418810 - RNA, 11 nt, Human
ucacagccucu

SEQ ID NO: 2418811 - RNA, 13 nt, Human
ucacagccucuga

SEQ ID NO: 2418812 - RNA, 20 nt, Human
ucacagaugggugcuuggag

SEQ ID NO: 2418813 - RNA, 18 nt, Human
ucacacuuccaccagccu

SEQ ID NO: 2418814 - RNA, 19 nt, Human
ucacacuuccaccagccug

SEQ ID NO: 2418815 - RNA, 16 nt, Human
ucacacuucugugaga

SEQ ID NO: 2418816 - RNA, 11 nt, Human
ucacacuggga

SEQ ID NO: 2418817 - RNA, 20 nt, Human
ucacacugcaagagccuugg

SEQ ID NO: 2418818 - RNA, 19 nt, Human
ucacaacgugcauugugcu

SEQ ID NO: 2418819 - RNA, 18 nt, Human
ucacaacgugcauugugc

SEQ ID NO: 2418820 - RNA, 17 nt, Human
ucacaacgugcauugug

SEQ ID NO: 2418821 - RNA, 16 nt, Human
ucacaacgugcauugu

SEQ ID NO: 2418822 - RNA, 21 nt, Human
ucacaacgugcauugugcuuc

SEQ ID NO: 2418823 - RNA, 20 nt, Human
ucacaacgugcauugugcuu

SEQ ID NO: 2418824 - RNA, 14 nt, Human
ucacaagaagacca

SEQ ID NO: 2418825 - RNA, 18 nt, Human
ucacacugcaagagccuu

SEQ ID NO: 2418826 - RNA, 21 nt, Human
ucacacugcaagagccuuggu

SEQ ID NO: 2418827 - RNA, 16 nt, Human
ucacaaagcccaaggg

SEQ ID NO: 2418828 - RNA, 14 nt, Human
ucacaaccugaacc

SEQ ID NO: 2418829 - RNA, 14 nt, Human
ucacaaccuucugu

SEQ ID NO: 2418830 - RNA, 19 nt, Human
ucacaaccugaaccuagga

SEQ ID NO: 2418831 - RNA, 16 nt, Human
ucacaaccugaaccua

SEQ ID NO: 2418832 - RNA, 16 nt, Human
ucaauugcaucuccca

SEQ ID NO: 2418833 - RNA, 17 nt, Human
ucaauugcaucucccag

SEQ ID NO: 2418834 - RNA, 18 nt, Human
ucaauugcaucucccaga

SEQ ID NO: 2418835 - RNA, 22 nt, Human
ucaauugcaucucccagauaau

SEQ ID NO: 2418836 - RNA, 13 nt, Human
ucaauuguaaauu

SEQ ID NO: 2418837 - RNA, 15 nt, Human
ucaauugaaugguca

SEQ ID NO: 2418838 - RNA, 14 nt, Human
ucaauuguaaauug

SEQ ID NO: 2418839 - RNA, 18 nt, Human
ucaauuguaaauugaauc

SEQ ID NO: 2418840 - RNA, 16 nt, Human
ucaauucuugccaaau

SEQ ID NO: 2418841 - RNA, 19 nt, Human
accaaaggugaaggaauau

SEQ ID NO: 2418842 - RNA, 18 nt, Human
accaaaggugaaggaaua

SEQ ID NO: 2418843 - RNA, 17 nt, Human
accaaaggugaaggaau

SEQ ID NO: 2418844 - RNA, 13 nt, Human
accaaaggccagg

SEQ ID NO: 2418845 - RNA, 18 nt, Human
accaaaguauuuuuuuau

SEQ ID NO: 2418846 - RNA, 15 nt, Human
accaaaguauuuuuu

SEQ ID NO: 2418847 - RNA, 21 nt, Human
accaaaggugaaggaauauau

SEQ ID NO: 2418848 - RNA, 20 nt, Human
accaaaggugaaggaauaua

SEQ ID NO: 2418849 - RNA, 21 nt, Human
accaaaguccuuuuuuuccau

SEQ ID NO: 2418850 - RNA, 16 nt, Human
accaaagcgaauuuua

SEQ ID NO: 2418851 - RNA, 20 nt, Human
accaaagcaccuuagcuggc

SEQ ID NO: 2418852 - RNA, 14 nt, Human
accaaagccaccag

SEQ ID NO: 2418853 - RNA, 15 nt, Human
ucaauuucuccccag

SEQ ID NO: 2418854 - RNA, 14 nt, Human
ucaauuucucccca

SEQ ID NO: 2418855 - RNA, 15 nt, Human
ucaauuucuguguug

SEQ ID NO: 2418856 - RNA, 23 nt, Human
ucaauuucuguguugccaagcuc

SEQ ID NO: 2418857 - RNA, 20 nt, Human
ucaauuuguaauugcuuaca

SEQ ID NO: 2418858 - RNA, 20 nt, Human
ucaauuuauucaagaaaagu

SEQ ID NO: 2418859 - RNA, 21 nt, Human
ucaauuucccugacuccucua

SEQ ID NO: 2418860 - RNA, 18 nt, Human
ucaauuucccugacuccu

SEQ ID NO: 2418861 - RNA, 20 nt, Human
ucaauuuccaagagcugagg

SEQ ID NO: 2418862 - RNA, 18 nt, Human
ucaauuuccaagagcuga

SEQ ID NO: 2418863 - RNA, 13 nt, Human
ucaauuuccaaga

SEQ ID NO: 2418864 - RNA, 21 nt, Human
ucacaaacuuuuauacucuuu

SEQ ID NO: 2418865 - RNA, 12 nt, Human
ucacaaagccca

SEQ ID NO: 2418866 - RNA, 15 nt, Human
ucacaaagcccaagg

SEQ ID NO: 2418867 - RNA, 17 nt, Human
ucacaaaggaugcccaa

SEQ ID NO: 2418868 - RNA, 15 nt, Human
ucacaaacuuuuaua

SEQ ID NO: 2418869 - RNA, 17 nt, Human
ucacaaacuuuuauacu

SEQ ID NO: 2418870 - RNA, 22 nt, Human
ucacaaaauuuuauuccuauau

SEQ ID NO: 2418871 - RNA, 21 nt, Human
ucacaaaaccuggcacaaugg

SEQ ID NO: 2418872 - RNA, 17 nt, Human
ucacaaaaccuggcaca

SEQ ID NO: 2418873 - RNA, 14 nt, Human
ucacaaaauuuuau

SEQ ID NO: 2418874 - RNA, 13 nt, Human
ucaccucauggaa

SEQ ID NO: 2418875 - RNA, 12 nt, Human
ucaccucaugga

SEQ ID NO: 2418876 - RNA, 14 nt, Human
ucaccucauggaau

SEQ ID NO: 2418877 - RNA, 14 nt, Human
accaggacucccuc

SEQ ID NO: 2418878 - RNA, 15 nt, Human
accaggacucccucc

SEQ ID NO: 2418879 - RNA, 20 nt, Human
ucaccucaugcccacccccu

SEQ ID NO: 2418880 - RNA, 23 nt, Human
ucaccucaugcccacccccugcc

SEQ ID NO: 2418881 - RNA, 20 nt, Human
ucaccugggcaccuggggag

SEQ ID NO: 2418882 - RNA, 16 nt, Human
ucaccuguaaaccuga

SEQ ID NO: 2418883 - RNA, 17 nt, Human
ucaccuguaaaccugag

SEQ ID NO: 2418884 - RNA, 16 nt, Human
ucaccuguacucuucc

SEQ ID NO: 2418885 - RNA, 15 nt, Human
ucaccuguacucuuc

SEQ ID NO: 2418886 - RNA, 19 nt, Human
ucaccuguaaaccugaguc

SEQ ID NO: 2418887 - RNA, 20 nt, Human
ucaccuggggcugcuggccu

SEQ ID NO: 2418888 - RNA, 18 nt, Human
ucaccuggggcugcuggc

SEQ ID NO: 2418889 - RNA, 17 nt, Human
ucaccuggggcugcugg

SEQ ID NO: 2418890 - RNA, 16 nt, Human
ucaccuggggcugcug

SEQ ID NO: 2418891 - RNA, 22 nt, Human
ucaccuggggcugcuggccuga

SEQ ID NO: 2418892 - RNA, 19 nt, Human
ucaccuggggugugggagg

SEQ ID NO: 2418893 - RNA, 18 nt, Human
ucaccuguacucuuccga

SEQ ID NO: 2418894 - RNA, 17 nt, Human
ucaccuguacucuuccg

SEQ ID NO: 2418895 - RNA, 17 nt, Human
ucacggugccagguuuu

SEQ ID NO: 2418896 - RNA, 18 nt, Human
ucacguaaagcuagaaau

SEQ ID NO: 2418897 - RNA, 16 nt, Human
ucacguggaggagcag

SEQ ID NO: 2418898 - RNA, 21 nt, Human
ucacguggaggagcagugcag

SEQ ID NO: 2418899 - RNA, 12 nt, Human
ucacguguguga

SEQ ID NO: 2418900 - RNA, 22 nt, Human
ucacguuucauguaauccucaa

SEQ ID NO: 2418901 - RNA, 16 nt, Human
ucacgugugugacuca

SEQ ID NO: 2418902 - RNA, 17 nt, Human
ucacgugugugacucag

SEQ ID NO: 2418903 - RNA, 17 nt, Human
ucacgugcagcucaagg

SEQ ID NO: 2418904 - RNA, 17 nt, Human
ucaccugucaggccuga

SEQ ID NO: 2418905 - RNA, 13 nt, Human
ucacgucacacuu

SEQ ID NO: 2418906 - RNA, 20 nt, Human
ucacguaaagcuagaaauga

SEQ ID NO: 2418907 - RNA, 19 nt, Human
ucacguaaagcuagaaaug

SEQ ID NO: 2418908 - RNA, 19 nt, Human
ucacuaauacuaauucauu

SEQ ID NO: 2418909 - RNA, 13 nt, Human
ucacuaaacuuua

SEQ ID NO: 2418910 - RNA, 22 nt, Human
ucacuaccauuguaacuuggau

SEQ ID NO: 2418911 - RNA, 16 nt, Human
ucacuaggcuucuggu

SEQ ID NO: 2418912 - RNA, 23 nt, Human
ucacuaggcccccacuugccucu

SEQ ID NO: 2418913 - RNA, 19 nt, Human
ucacuacccuauucucucu

SEQ ID NO: 2418914 - RNA, 23 nt, Human
accagcgcccgcugggcugagcc

SEQ ID NO: 2418915 - RNA, 23 nt, Human
accagcuaagaaaagauuuuaau

SEQ ID NO: 2418916 - RNA, 22 nt, Human
accagcuaagaaaagauuuuaa

SEQ ID NO: 2418917 - RNA, 13 nt, Human
accagcucaggac

SEQ ID NO: 2418918 - RNA, 14 nt, Human
accagcucaggaca

SEQ ID NO: 2418919 - RNA, 15 nt, Human
accagcucaggacag

SEQ ID NO: 2418920 - RNA, 16 nt, Human
accagcucaggacaga

SEQ ID NO: 2418921 - RNA, 22 nt, Human
accagcgugugacuacuccccc

SEQ ID NO: 2418922 - RNA, 20 nt, Human
accagcgcccgcugggcuga

SEQ ID NO: 2418923 - RNA, 19 nt, Human
accagcgcccgcugggcug

SEQ ID NO: 2418924 - RNA, 18 nt, Human
accagcgcccgcugggcu

SEQ ID NO: 2418925 - RNA, 17 nt, Human
accagcgcccgcugggc

SEQ ID NO: 2418926 - RNA, 15 nt, Human
accacuaugaagcua

SEQ ID NO: 2418927 - RNA, 15 nt, Human
accagcgcccgcugg

SEQ ID NO: 2418928 - RNA, 16 nt, Human
accacuacauucuguu

SEQ ID NO: 2418929 - RNA, 24 nt, Human
accaccacuggccaccaggcuggc

SEQ ID NO: 2418930 - RNA, 23 nt, Human
accaccacuggccaccaggcugg

SEQ ID NO: 2418931 - RNA, 15 nt, Human
accacuacauucugu

SEQ ID NO: 2418932 - RNA, 17 nt, Human
accacuacauucuguua

SEQ ID NO: 2418933 - RNA, 17 nt, Human
accacuaggacucugag

SEQ ID NO: 2418934 - RNA, 13 nt, Human
accacuagaacuc

SEQ ID NO: 2418935 - RNA, 20 nt, Human
accacuagaacucuccaucu

SEQ ID NO: 2418936 - RNA, 15 nt, Human
accagcuucuccagg

SEQ ID NO: 2418937 - RNA, 23 nt, Human
accagcuguucugucccuuggag

SEQ ID NO: 2418938 - RNA, 20 nt, Human
accagcuucuccaggcucuu

SEQ ID NO: 2418939 - RNA, 18 nt, Human
accagcuucuccaggcuc

SEQ ID NO: 2418940 - RNA, 16 nt, Human
accagcuucuccaggc

SEQ ID NO: 2418941 - RNA, 17 nt, Human
accaggaaccucuucag

SEQ ID NO: 2418942 - RNA, 20 nt, Human
accaggaauguuaaagucag

SEQ ID NO: 2418943 - RNA, 21 nt, Human
accaggacuauagcccagguc

SEQ ID NO: 2418944 - RNA, 20 nt, Human
accaggacuauagcccaggu

SEQ ID NO: 2418945 - RNA, 19 nt, Human
accaggacuauagcccagg

SEQ ID NO: 2418946 - RNA, 17 nt, Human
accaggacaggaccaga

SEQ ID NO: 2418947 - RNA, 14 nt, Human
accaggacaggacc

SEQ ID NO: 2418948 - RNA, 15 nt, Human
accaggacaggacca

SEQ ID NO: 2418949 - RNA, 20 nt, Human
accagcuggggcguggggag

SEQ ID NO: 2418950 - RNA, 11 nt, Human
accagcugggg

SEQ ID NO: 2418951 - RNA, 10 nt, Human
accagcuggg

SEQ ID NO: 2418952 - RNA, 20 nt, Human
accagcugcgcuugcuuuuc

SEQ ID NO: 2418953 - RNA, 19 nt, Human
accagcugcgcuugcuuuu

SEQ ID NO: 2418954 - RNA, 18 nt, Human
accagcugcgcuugcuuu

SEQ ID NO: 2418955 - RNA, 23 nt, Human
accagcuggggcguggggagggc

SEQ ID NO: 2418956 - RNA, 21 nt, Human
accagcuggggcguggggagg

SEQ ID NO: 2418957 - RNA, 17 nt, Human
accagcuguaacacagc

SEQ ID NO: 2418958 - RNA, 22 nt, Human
accagcuguucugucccuugga

SEQ ID NO: 2418959 - RNA, 16 nt, Human
accagcuuagauuuua

SEQ ID NO: 2418960 - RNA, 13 nt, Human
accagcuccuccc

SEQ ID NO: 2418961 - RNA, 23 nt, Human
accagcucaggacagaugccaca

SEQ ID NO: 2418962 - RNA, 14 nt, Human
accagcuccucccu

SEQ ID NO: 2418963 - RNA, 14 nt, Human
accagcugccucuu

SEQ ID NO: 2418964 - RNA, 16 nt, Human
accagcugcgcuugcu

SEQ ID NO: 2418965 - RNA, 16 nt, Human
accagcugccucuucu

SEQ ID NO: 2418966 - RNA, 15 nt, Human
accagcugccucuuc

SEQ ID NO: 2418967 - RNA, 10 nt, Human
ucacuugagu

SEQ ID NO: 2418968 - RNA, 19 nt, Human
ucacuugaugugccauuuu

SEQ ID NO: 2418969 - RNA, 18 nt, Human
ucacuugaugugccauuu

SEQ ID NO: 2418970 - RNA, 22 nt, Human
ucacuugaggucaggaguuccu

SEQ ID NO: 2418971 - RNA, 16 nt, Human
ucacuguucccucugc

SEQ ID NO: 2418972 - RNA, 14 nt, Human
ucacuguuucucug

SEQ ID NO: 2418973 - RNA, 17 nt, Human
ucacuguuucucugcug

SEQ ID NO: 2418974 - RNA, 23 nt, Human
ucacuugaacccgggaggcagag

SEQ ID NO: 2418975 - RNA, 18 nt, Human
ucacuguuucucugcugu

SEQ ID NO: 2418976 - RNA, 21 nt, Human
ucacuugaauccuagggccug

SEQ ID NO: 2418977 - RNA, 13 nt, Human
ucacuugaaugug

SEQ ID NO: 2418978 - RNA, 14 nt, Human
ucacuugagacaaa

SEQ ID NO: 2418979 - RNA, 12 nt, Human
ucacuugagacc

SEQ ID NO: 2418980 - RNA, 15 nt, Human
accaguguuguggau

SEQ ID NO: 2418981 - RNA, 17 nt, Human
accaguguuguggauuu

SEQ ID NO: 2418982 - RNA, 18 nt, Human
accaguguccccuccacu

SEQ ID NO: 2418983 - RNA, 18 nt, Human
accagugaaccaaagaga

SEQ ID NO: 2418984 - RNA, 13 nt, Human
accaguguccccu

SEQ ID NO: 2418985 - RNA, 17 nt, Human
accagugaaccaaagag

SEQ ID NO: 2418986 - RNA, 16 nt, Human
accagugaaccaaaga

SEQ ID NO: 2418987 - RNA, 14 nt, Human
accagugaaccaaa

SEQ ID NO: 2418988 - RNA, 17 nt, Human
accaguccccccacccu

SEQ ID NO: 2418989 - RNA, 14 nt, Human
accagucugacccu

SEQ ID NO: 2418990 - RNA, 20 nt, Human
accaguaucgcucauagauc

SEQ ID NO: 2418991 - RNA, 14 nt, Human
accagucugacugu

SEQ ID NO: 2418992 - RNA, 15 nt, Human
accaguccccccacc

SEQ ID NO: 2418993 - RNA, 21 nt, Human
ucacugagacagcccgggcuc

SEQ ID NO: 2418994 - RNA, 17 nt, Human
ucacugagacagcccgg

SEQ ID NO: 2418995 - RNA, 22 nt, Human
ucacugagacagcccgggcucu

SEQ ID NO: 2418996 - RNA, 14 nt, Human
ucacugcagccuca

SEQ ID NO: 2418997 - RNA, 20 nt, Human
ucacuaucccggcugcccuu

SEQ ID NO: 2418998 - RNA, 21 nt, Human
ucacuaugaaucuauuauacu

SEQ ID NO: 2418999 - RNA, 21 nt, Human
ucacuauauaggcaucacauu

SEQ ID NO: 2419000 - RNA, 23 nt, Human
ucacuauaggucauacaauccau

SEQ ID NO: 2419001 - RNA, 13 nt, Human
ucacuauaaaugg

SEQ ID NO: 2419002 - RNA, 19 nt, Human
ucacuaucccggcugcccu

SEQ ID NO: 2419003 - RNA, 17 nt, Human
ucacuauaaaugguguu

SEQ ID NO: 2419004 - RNA, 16 nt, Human
ucacugagacagcccg

SEQ ID NO: 2419005 - RNA, 19 nt, Human
ucacuauggugccaaugga

SEQ ID NO: 2419006 - RNA, 22 nt, Human
ucacuaugaaucuauuauacug

SEQ ID NO: 2419007 - RNA, 14 nt, Human
ucacuauggugcca

SEQ ID NO: 2419008 - RNA, 21 nt, Human
ucacugugggaaggccagcug

SEQ ID NO: 2419009 - RNA, 17 nt, Human
ucacugugguccuaugc

SEQ ID NO: 2419010 - RNA, 18 nt, Human
ucacugugggaaggccag

SEQ ID NO: 2419011 - RNA, 16 nt, Human
ucacuguggugucugu

SEQ ID NO: 2419012 - RNA, 15 nt, Human
ucacuguucccucug

SEQ ID NO: 2419013 - RNA, 23 nt, Human
ucacuguugcccaggcuggcgug

SEQ ID NO: 2419014 - RNA, 13 nt, Human
ucacugcagccuc

SEQ ID NO: 2419015 - RNA, 23 nt, Human
ucacuauggugccaauggaaccu

SEQ ID NO: 2419016 - RNA, 15 nt, Human
ucacugcagccucaa

SEQ ID NO: 2419017 - RNA, 21 nt, Human
ucacugcaggcacucaaugca

SEQ ID NO: 2419018 - RNA, 22 nt, Human
ucacugcagccuccuucuccug

SEQ ID NO: 2419019 - RNA, 13 nt, Human
ucacugcaggcac

SEQ ID NO: 2419020 - RNA, 17 nt, Human
ucacugucuuuccuaga

SEQ ID NO: 2419021 - RNA, 15 nt, Human
ucacugucuuuccua

SEQ ID NO: 2419022 - RNA, 16 nt, Human
ucacugucuuuccuag

SEQ ID NO: 2419023 - RNA, 14 nt, Human
acauuuuuuaaaug

SEQ ID NO: 2419024 - RNA, 16 nt, Human
acauuuuuuaaaugca

SEQ ID NO: 2419025 - RNA, 17 nt, Human
acauuuuuuaaaugcac

SEQ ID NO: 2419026 - RNA, 23 nt, Human
accaaaaaucucaauauuucaga

SEQ ID NO: 2419027 - RNA, 21 nt, Human
acauuuuuuaaaugcaccugg

SEQ ID NO: 2419028 - RNA, 21 nt, Human
acauuuuuaagugcugcauuu

SEQ ID NO: 2419029 - RNA, 22 nt, Human
acauuuuuaagugcugcauuua

SEQ ID NO: 2419030 - RNA, 23 nt, Human
acauuuuuaagugcugcauuuaa

SEQ ID NO: 2419031 - RNA, 19 nt, Human
acauuuuuaagugcugcau

SEQ ID NO: 2419032 - RNA, 12 nt, Human
acauuuuuacaa

SEQ ID NO: 2419033 - RNA, 18 nt, Human
acauuuuggugagaaaug

SEQ ID NO: 2419034 - RNA, 18 nt, Human
accaaagagggcuuccuc

SEQ ID NO: 2419035 - RNA, 15 nt, Human
accaaagagggcuuc

SEQ ID NO: 2419036 - RNA, 22 nt, Human
accaaagagacuggagcaucug

SEQ ID NO: 2419037 - RNA, 21 nt, Human
accaaagagacuggagcaucu

SEQ ID NO: 2419038 - RNA, 23 nt, Human
accaaagauauauacacaggauc

SEQ ID NO: 2419039 - RNA, 22 nt, Human
accaaagauauauacacaggau

SEQ ID NO: 2419040 - RNA, 17 nt, Human
accaaagagacuggagc

SEQ ID NO: 2419041 - RNA, 18 nt, Human
accaaagagacuggagca

SEQ ID NO: 2419042 - RNA, 13 nt, Human
accaaagaagaaa

SEQ ID NO: 2419043 - RNA, 12 nt, Human
accaaagaagaa

SEQ ID NO: 2419044 - RNA, 17 nt, Human
accaaaauuauuucaga

SEQ ID NO: 2419045 - RNA, 17 nt, Human
accaaaauccccuucuc

SEQ ID NO: 2419046 - RNA, 16 nt, Human
accaaaauccccuucu

SEQ ID NO: 2419047 - RNA, 14 nt, Human
accaaaccuagccc

SEQ ID NO: 2419048 - RNA, 23 nt, Human
accaaaccgccagcgaacuugac

SEQ ID NO: 2419049 - RNA, 16 nt, Human
accaaaauuauuucag

SEQ ID NO: 2419050 - RNA, 13 nt, Human
accaaaauaagaa

SEQ ID NO: 2419051 - RNA, 15 nt, Human
accaaaauaagaaaa

SEQ ID NO: 2419052 - RNA, 16 nt, Human
accaaaauaagaaaag

SEQ ID NO: 2419053 - RNA, 17 nt, Human
accaaaauaagaaaaga

SEQ ID NO: 2419054 - RNA, 18 nt, Human
accaaaauaagaaaagau

SEQ ID NO: 2419055 - RNA, 14 nt, Human
accaaaauccccuu

SEQ ID NO: 2419056 - RNA, 18 nt, Human
accaaaacugugcagagu

SEQ ID NO: 2419057 - RNA, 12 nt, Human
accaaaacugug

SEQ ID NO: 2419058 - RNA, 12 nt, Human
accaaaacaugu

SEQ ID NO: 2419059 - RNA, 17 nt, Human
accaaaacugugcagag

SEQ ID NO: 2419060 - RNA, 15 nt, Human
accaaaagaacaaga

SEQ ID NO: 2419061 - RNA, 22 nt, Human
acauugaauuagaaacauaaau

SEQ ID NO: 2419062 - RNA, 18 nt, Human
acauugaauuagaaacau

SEQ ID NO: 2419063 - RNA, 14 nt, Human
acauugaauuagaa

SEQ ID NO: 2419064 - RNA, 19 nt, Human
acauugcauauaacuuaua

SEQ ID NO: 2419065 - RNA, 17 nt, Human
acauugucauuuauaua

SEQ ID NO: 2419066 - RNA, 19 nt, Human
acauugucauuuauauaga

SEQ ID NO: 2419067 - RNA, 15 nt, Human
acauugucauuuaua

SEQ ID NO: 2419068 - RNA, 18 nt, Human
acauugucagcaaauuaa

SEQ ID NO: 2419069 - RNA, 12 nt, Human
acauugucaaua

SEQ ID NO: 2419070 - RNA, 13 nt, Human
acauugucaauaa

SEQ ID NO: 2419071 - RNA, 14 nt, Human
acauugucagcaaa

SEQ ID NO: 2419072 - RNA, 14 nt, Human
acauugucaauaaa

SEQ ID NO: 2419073 - RNA, 17 nt, Human
acauuguugagcuauug

SEQ ID NO: 2419074 - RNA, 22 nt, Human
acauugucucuaaauugugggu

SEQ ID NO: 2419075 - RNA, 16 nt, Human
acauuguucaauuaga

SEQ ID NO: 2419076 - RNA, 20 nt, Human
acauuguucaauuagaauag

SEQ ID NO: 2419077 - RNA, 17 nt, Human
acauuguggcacauucu

SEQ ID NO: 2419078 - RNA, 12 nt, Human
acauugucugcg

SEQ ID NO: 2419079 - RNA, 18 nt, Human
acauuuuauuuuauuaug

SEQ ID NO: 2419080 - RNA, 14 nt, Human
acauuuuauuuuau

SEQ ID NO: 2419081 - RNA, 19 nt, Human
acauuuuauuuuauuaugc

SEQ ID NO: 2419082 - RNA, 20 nt, Human
acauuuuauuuuauuaugca

SEQ ID NO: 2419083 - RNA, 20 nt, Human
acauuuuguaacaaagaacu

SEQ ID NO: 2419084 - RNA, 14 nt, Human
acauuuugccaaaa

SEQ ID NO: 2419085 - RNA, 17 nt, Human
acauuuuggugagaaau

SEQ ID NO: 2419086 - RNA, 12 nt, Human
acauuuucauuu

SEQ ID NO: 2419087 - RNA, 12 nt, Human
acauuuuccuuu

SEQ ID NO: 2419088 - RNA, 19 nt, Human
acauuuuccuuuucaaaua

SEQ ID NO: 2419089 - RNA, 14 nt, Human
acauuguugagcua

SEQ ID NO: 2419090 - RNA, 13 nt, Human
acauuuucacaca

SEQ ID NO: 2419091 - RNA, 15 nt, Human
acauuuucacacaau

SEQ ID NO: 2419092 - RNA, 20 nt, Human
acauuuucacacaauacaau

SEQ ID NO: 2419093 - RNA, 18 nt, Human
ucaaugacagagccuucu

SEQ ID NO: 2419094 - RNA, 17 nt, Human
ucaaugacagagccuuc

SEQ ID NO: 2419095 - RNA, 23 nt, Human
ucaaugaaugaaugaauggcuaa

SEQ ID NO: 2419096 - RNA, 15 nt, Human
ucaaugacagagccu

SEQ ID NO: 2419097 - RNA, 17 nt, Human
acauucuuauaaauaug

SEQ ID NO: 2419098 - RNA, 11 nt, Human
ucaaugaucua

SEQ ID NO: 2419099 - RNA, 16 nt, Human
acauucuuauaaauau

SEQ ID NO: 2419100 - RNA, 10 nt, Human
ucaaugaucu

SEQ ID NO: 2419101 - RNA, 22 nt, Human
acauucuuauaaauaugaagcu

SEQ ID NO: 2419102 - RNA, 18 nt, Human
acauucuuauaaauauga

SEQ ID NO: 2419103 - RNA, 23 nt, Human
acauucuuauaaauaugaagcuc

SEQ ID NO: 2419104 - RNA, 19 nt, Human
acauucuuccaaaaagauu

SEQ ID NO: 2419105 - RNA, 12 nt, Human
acauugaaagag

SEQ ID NO: 2419106 - RNA, 15 nt, Human
acauugaaguaauga

SEQ ID NO: 2419107 - RNA, 18 nt, Human
acauugaaguaaugaauu

SEQ ID NO: 2419108 - RNA, 19 nt, Human
acauugaaguaaugaauuu

SEQ ID NO: 2419109 - RNA, 20 nt, Human
acauugaaguaaugaauuuu

SEQ ID NO: 2419110 - RNA, 17 nt, Human
ucaaucuguaaacugug

SEQ ID NO: 2419111 - RNA, 16 nt, Human
ucaaucuguuuuucau

SEQ ID NO: 2419112 - RNA, 14 nt, Human
ucaaucuguaaacu

SEQ ID NO: 2419113 - RNA, 16 nt, Human
ucaaucuguaaacugu

SEQ ID NO: 2419114 - RNA, 13 nt, Human
ucaaucuguaaac

SEQ ID NO: 2419115 - RNA, 18 nt, Human
ucaaucucccgcugcugc

SEQ ID NO: 2419116 - RNA, 20 nt, Human
ucaaucucccgcugcugcug

SEQ ID NO: 2419117 - RNA, 17 nt, Human
ucaauauuuaaacaugg

SEQ ID NO: 2419118 - RNA, 15 nt, Human
ucaauccuuguucag

SEQ ID NO: 2419119 - RNA, 15 nt, Human
ucaaucucucuuaga

SEQ ID NO: 2419120 - RNA, 19 nt, Human
ucaauauuucagauaauca

SEQ ID NO: 2419121 - RNA, 13 nt, Human
ucaauauuuauua

SEQ ID NO: 2419122 - RNA, 12 nt, Human
ucaauauuuauu

SEQ ID NO: 2419123 - RNA, 20 nt, Human
ucaauauuuauuauuuucac

SEQ ID NO: 2419124 - RNA, 14 nt, Human
ucaauccucuaagc

SEQ ID NO: 2419125 - RNA, 15 nt, Human
ucaauauuucagaua

SEQ ID NO: 2419126 - RNA, 13 nt, Human
ucaauauuuaaac

SEQ ID NO: 2419127 - RNA, 18 nt, Human
ucaauauugucauuccug

SEQ ID NO: 2419128 - RNA, 11 nt, Human
ucaauauuuau

SEQ ID NO: 2419129 - RNA, 17 nt, Human
ucaauauugucauuccu

SEQ ID NO: 2419130 - RNA, 15 nt, Human
ucaauauugucauuc

SEQ ID NO: 2419131 - RNA, 10 nt, Human
ucaauauuua

SEQ ID NO: 2419132 - RNA, 21 nt, Human
ucaagaaaaauuauuguauaa

SEQ ID NO: 2419133 - RNA, 18 nt, Human
ucaagaaaaauuauugua

SEQ ID NO: 2419134 - RNA, 21 nt, Human
ucaacuuuuccuuugaauccu

SEQ ID NO: 2419135 - RNA, 17 nt, Human
ucaagaaaacaacuuca

SEQ ID NO: 2419136 - RNA, 22 nt, Human
ucaaguccucuuuucugagagg

SEQ ID NO: 2419137 - RNA, 22 nt, Human
ucaaguccuuaccucuuccgga

SEQ ID NO: 2419138 - RNA, 18 nt, Human
ucaaguccuuaccucuuc

SEQ ID NO: 2419139 - RNA, 14 nt, Human
ucaagucucugcug

SEQ ID NO: 2419140 - RNA, 16 nt, Human
ucaagucucugcuggc

SEQ ID NO: 2419141 - RNA, 17 nt, Human
ucaagucucugcuggcc

SEQ ID NO: 2419142 - RNA, 19 nt, Human
ucaagucucugcuggccca

SEQ ID NO: 2419143 - RNA, 20 nt, Human
ucaacugccaaaaugcucua

SEQ ID NO: 2419144 - RNA, 12 nt, Human
ucaacugggcug

SEQ ID NO: 2419145 - RNA, 18 nt, Human
ucaacuucuggcuccuca

SEQ ID NO: 2419146 - RNA, 16 nt, Human
ucaacuucuggcuccu

SEQ ID NO: 2419147 - RNA, 19 nt, Human
ucaacuucuggcuccucaa

SEQ ID NO: 2419148 - RNA, 15 nt, Human
ucaacuuuuccuuug

SEQ ID NO: 2419149 - RNA, 22 nt, Human
ucaacuuucuuuugauuagugu

SEQ ID NO: 2419150 - RNA, 19 nt, Human
ucaacuugcauccaacucc

SEQ ID NO: 2419151 - RNA, 22 nt, Human
ucaauauuaaauacagacacua

SEQ ID NO: 2419152 - RNA, 21 nt, Human
ucaauauuaaauacagacacu

SEQ ID NO: 2419153 - RNA, 19 nt, Human
ucaauauuaaauacagaca

SEQ ID NO: 2419154 - RNA, 17 nt, Human
ucaauauuaaauacaga

SEQ ID NO: 2419155 - RNA, 16 nt, Human
ucaauauuaaauacag

SEQ ID NO: 2419156 - RNA, 15 nt, Human
ucaauauuaaauaca

SEQ ID NO: 2419157 - RNA, 14 nt, Human
ucaauauuaaauac

SEQ ID NO: 2419158 - RNA, 13 nt, Human
ucaauaugcuuac

SEQ ID NO: 2419159 - RNA, 22 nt, Human
ucaauaucuuuuuuuuaauaaa

SEQ ID NO: 2419160 - RNA, 17 nt, Human
ucaauauuccugaauga

SEQ ID NO: 2419161 - RNA, 18 nt, Human
ucaauauuccugaaugaa

SEQ ID NO: 2419162 - RNA, 21 nt, Human
ucaauauuccugaaugaaaua

SEQ ID NO: 2419163 - RNA, 22 nt, Human
ucaauauuccugaaugaaauau

SEQ ID NO: 2419164 - RNA, 14 nt, Human
ucaauauuccugaa

SEQ ID NO: 2419165 - RNA, 17 nt, Human
ucaauagucaagaaaaa

SEQ ID NO: 2419166 - RNA, 14 nt, Human
ucaauagucaagaa

SEQ ID NO: 2419167 - RNA, 19 nt, Human
ucaauaguaaaagauaaca

SEQ ID NO: 2419168 - RNA, 12 nt, Human
ucaagucuuccc

SEQ ID NO: 2419169 - RNA, 18 nt, Human
ucaauauccaaaccaaau

SEQ ID NO: 2419170 - RNA, 16 nt, Human
ucaauauccuuugccu

SEQ ID NO: 2419171 - RNA, 14 nt, Human
ucaauauccuuugc

SEQ ID NO: 2419172 - RNA, 15 nt, Human
ucaaauugugugaaa

SEQ ID NO: 2419173 - RNA, 18 nt, Human
ucaaauugugugaaaggu

SEQ ID NO: 2419174 - RNA, 16 nt, Human
acauucugauuuggaa

SEQ ID NO: 2419175 - RNA, 20 nt, Human
acauucugacaucuuaguau

SEQ ID NO: 2419176 - RNA, 14 nt, Human
acauuccugaugcu

SEQ ID NO: 2419177 - RNA, 18 nt, Human
acauuccuugccugcaca

SEQ ID NO: 2419178 - RNA, 17 nt, Human
acauucggcucccugga

SEQ ID NO: 2419179 - RNA, 20 nt, Human
acauucggcucccuggagcc

SEQ ID NO: 2419180 - RNA, 17 nt, Human
acauuccuugccugcac

SEQ ID NO: 2419181 - RNA, 15 nt, Human
acauucggcucccug

SEQ ID NO: 2419182 - RNA, 23 nt, Human
acaugucaccguggaccuuccug

SEQ ID NO: 2419183 - RNA, 18 nt, Human
acaugucaguaccuucaa

SEQ ID NO: 2419184 - RNA, 19 nt, Human
acaugucaguaccuucaaa

SEQ ID NO: 2419185 - RNA, 21 nt, Human
acaugucaguaccuucaaacu

SEQ ID NO: 2419186 - RNA, 15 nt, Human
acauguccaagaagc

SEQ ID NO: 2419187 - RNA, 17 nt, Human
acauucccaucugucac

SEQ ID NO: 2419188 - RNA, 20 nt, Human
acauuccuaaacuaucuuuu

SEQ ID NO: 2419189 - RNA, 13 nt, Human
acauuccauccuu

SEQ ID NO: 2419190 - RNA, 23 nt, Human
acauuccgacaaccgaugcucca

SEQ ID NO: 2419191 - RNA, 19 nt, Human
acauuccuaaacuaucuuu

SEQ ID NO: 2419192 - RNA, 18 nt, Human
acauggugccugagaggc

SEQ ID NO: 2419193 - RNA, 16 nt, Human
acauggugccugagag

SEQ ID NO: 2419194 - RNA, 13 nt, Human
acauggugccuga

SEQ ID NO: 2419195 - RNA, 13 nt, Human
acauguacagaga

SEQ ID NO: 2419196 - RNA, 11 nt, Human
acauguacaga

SEQ ID NO: 2419197 - RNA, 18 nt, Human
acauguaauauaaagaug

SEQ ID NO: 2419198 - RNA, 23 nt, Human
acauguaauuaaguacuauguau

SEQ ID NO: 2419199 - RNA, 19 nt, Human
acauguauuuguuugcaua

SEQ ID NO: 2419200 - RNA, 17 nt, Human
acauguauuuguuugca

SEQ ID NO: 2419201 - RNA, 18 nt, Human
acauguauuuguuugcau

SEQ ID NO: 2419202 - RNA, 23 nt, Human
acauguagguguuuguucaucug

SEQ ID NO: 2419203 - RNA, 15 nt, Human
acauguagguguuug

SEQ ID NO: 2419204 - RNA, 16 nt, Human
acauguauuuguuugc

SEQ ID NO: 2419205 - RNA, 17 nt, Human
acauguaggaaguagga

SEQ ID NO: 2419206 - RNA, 20 nt, Human
acauguacuguucucuucuu

SEQ ID NO: 2419207 - RNA, 20 nt, Human
ucaacugcaucaagauguga

SEQ ID NO: 2419208 - RNA, 23 nt, Human
ucaacccaggagcauccaccucc

SEQ ID NO: 2419209 - RNA, 20 nt, Human
ucaaccccaccacuucuuuu

SEQ ID NO: 2419210 - RNA, 18 nt, Human
ucaacugccuacuccaaa

SEQ ID NO: 2419211 - RNA, 20 nt, Human
ucaacugccuacuccaaaau

SEQ ID NO: 2419212 - RNA, 18 nt, Human
ucaacugggcugaacacu

SEQ ID NO: 2419213 - RNA, 14 nt, Human
ucaacugccuacuc

SEQ ID NO: 2419214 - RNA, 19 nt, Human
ucaacugccaaaaugcucu

SEQ ID NO: 2419215 - RNA, 18 nt, Human
ucaacccccauuucuauu

SEQ ID NO: 2419216 - RNA, 24 nt, Human
ucaacugaccagccuccaugcugc

SEQ ID NO: 2419217 - RNA, 17 nt, Human
ucaaccaccuuucagau

SEQ ID NO: 2419218 - RNA, 23 nt, Human
ucaaccacuguaaaaugaaauua

SEQ ID NO: 2419219 - RNA, 14 nt, Human
ucaaccagcagaug

SEQ ID NO: 2419220 - RNA, 18 nt, Human
ucaaccauuccccauggg

SEQ ID NO: 2419221 - RNA, 16 nt, Human
ucaaccaucgcuuuau

SEQ ID NO: 2419222 - RNA, 15 nt, Human
ucaacccaggagcau

SEQ ID NO: 2419223 - RNA, 15 nt, Human
ucaaccauuccccau

SEQ ID NO: 2419224 - RNA, 18 nt, Human
ucaacaaacuauuucuua

SEQ ID NO: 2419225 - RNA, 15 nt, Human
ucaacaaaaauuguc

SEQ ID NO: 2419226 - RNA, 14 nt, Human
ucaacaaacuauuu

SEQ ID NO: 2419227 - RNA, 18 nt, Human
ucaacaaaaauugucccu

SEQ ID NO: 2419228 - RNA, 13 nt, Human
ucaaauuucuaaa

SEQ ID NO: 2419229 - RNA, 12 nt, Human
ucaaauuucaca

SEQ ID NO: 2419230 - RNA, 14 nt, Human
ucaacauuuacaug

SEQ ID NO: 2419231 - RNA, 23 nt, Human
ucaacaaagcacaguguuaaaug

SEQ ID NO: 2419232 - RNA, 18 nt, Human
ucaacaaagcacaguguu

SEQ ID NO: 2419233 - RNA, 15 nt, Human
ucaacaaagcacagu

SEQ ID NO: 2419234 - RNA, 14 nt, Human
ucaacaaagcacag

SEQ ID NO: 2419235 - RNA, 14 nt, Human
ucaacaaccaggga

SEQ ID NO: 2419236 - RNA, 16 nt, Human
ucaacauuuacaugua

SEQ ID NO: 2419237 - RNA, 16 nt, Human
ucaacaagggagagac

SEQ ID NO: 2419238 - RNA, 14 nt, Human
ucaacauuucucaa

SEQ ID NO: 2419239 - RNA, 17 nt, Human
ucaacauuuacauguau

SEQ ID NO: 2419240 - RNA, 15 nt, Human
ucaaccaauguagaa

SEQ ID NO: 2419241 - RNA, 17 nt, Human
ucaaccaaugccaaaaa

SEQ ID NO: 2419242 - RNA, 18 nt, Human
acaugcgguagccagcac

SEQ ID NO: 2419243 - RNA, 13 nt, Human
acaugagucccag

SEQ ID NO: 2419244 - RNA, 13 nt, Human
acaugagucaaga

SEQ ID NO: 2419245 - RNA, 20 nt, Human
acaugcgguagccagcacac

SEQ ID NO: 2419246 - RNA, 22 nt, Human
acaugcgguagccagcacacag

SEQ ID NO: 2419247 - RNA, 23 nt, Human
acaugcgguagccagcacacagg

SEQ ID NO: 2419248 - RNA, 23 nt, Human
acaugagguacugagagugaaca

SEQ ID NO: 2419249 - RNA, 15 nt, Human
acaugcuacacacug

SEQ ID NO: 2419250 - RNA, 21 nt, Human
acaugcuacacacugcauguu

SEQ ID NO: 2419251 - RNA, 16 nt, Human
acaugagguacugaga

SEQ ID NO: 2419252 - RNA, 20 nt, Human
acaugagguacugagaguga

SEQ ID NO: 2419253 - RNA, 23 nt, Human
acaugaaucccacccacauguga

SEQ ID NO: 2419254 - RNA, 21 nt, Human
acaugaaucccacccacaugu

SEQ ID NO: 2419255 - RNA, 20 nt, Human
acaugaaucccacccacaug

SEQ ID NO: 2419256 - RNA, 13 nt, Human
acaugaauaugau

SEQ ID NO: 2419257 - RNA, 18 nt, Human
acaugaauugcauuuuac

SEQ ID NO: 2419258 - RNA, 15 nt, Human
acaugaaugcacacu

SEQ ID NO: 2419259 - RNA, 20 nt, Human
acaugaauauuuaguguuca

SEQ ID NO: 2419260 - RNA, 17 nt, Human
acagucccuaaagaaaa

SEQ ID NO: 2419261 - RNA, 16 nt, Human
acaguccagccuggag

SEQ ID NO: 2419262 - RNA, 18 nt, Human
acaguccagccuggagau

SEQ ID NO: 2419263 - RNA, 19 nt, Human
acaugaaguguguuuccuu

SEQ ID NO: 2419264 - RNA, 21 nt, Human
acaugaaguguguuuccuuca

SEQ ID NO: 2419265 - RNA, 20 nt, Human
acagucagauuuccagucuc

SEQ ID NO: 2419266 - RNA, 13 nt, Human
acagucauuuaaa

SEQ ID NO: 2419267 - RNA, 15 nt, Human
acaguccagccugga

SEQ ID NO: 2419268 - RNA, 14 nt, Human
acagucauuuaaaa

SEQ ID NO: 2419269 - RNA, 14 nt, Human
acaguccagccugg

SEQ ID NO: 2419270 - RNA, 20 nt, Human
acaugggacauuugcucaug

SEQ ID NO: 2419271 - RNA, 15 nt, Human
acaugggacauuugc

SEQ ID NO: 2419272 - RNA, 21 nt, Human
acaugggacauuugcucaugg

SEQ ID NO: 2419273 - RNA, 20 nt, Human
acaugggagccgggucugcc

SEQ ID NO: 2419274 - RNA, 20 nt, Human
acauggcuugccacagcucu

SEQ ID NO: 2419275 - RNA, 14 nt, Human
acaugggacauuug

SEQ ID NO: 2419276 - RNA, 11 nt, Human
acaugggacau

SEQ ID NO: 2419277 - RNA, 17 nt, Human
acauggaacucauuccu

SEQ ID NO: 2419278 - RNA, 13 nt, Human
acaugcuuuguga

SEQ ID NO: 2419279 - RNA, 16 nt, Human
acauggcuuccuccug

SEQ ID NO: 2419280 - RNA, 13 nt, Human
acauggcuuccuc

SEQ ID NO: 2419281 - RNA, 14 nt, Human
acauggcuuaguuu

SEQ ID NO: 2419282 - RNA, 19 nt, Human
acauggcuuaguuuucaua

SEQ ID NO: 2419283 - RNA, 17 nt, Human
acauguaauuaaguacu

SEQ ID NO: 2419284 - RNA, 19 nt, Human
acauguaauuaaguacuau

SEQ ID NO: 2419285 - RNA, 21 nt, Human
acauguaauuaaguacuaugu

SEQ ID NO: 2419286 - RNA, 22 nt, Human
acauguaauuaaguacuaugua

SEQ ID NO: 2419287 - RNA, 23 nt, Human
acaugggagccgggucugccucu

SEQ ID NO: 2419288 - RNA, 16 nt, Human
acauggggaggaagga

SEQ ID NO: 2419289 - RNA, 18 nt, Human
acauggggcugggcagcu

SEQ ID NO: 2419290 - RNA, 17 nt, Human
acaugggguuggcuggg

SEQ ID NO: 2419291 - RNA, 20 nt, Human
acaugggguuggcugggccc

SEQ ID NO: 2419292 - RNA, 21 nt, Human
acaugggguuggcugggccca

SEQ ID NO: 2419293 - RNA, 16 nt, Human
acaugggguuuucaau

SEQ ID NO: 2419294 - RNA, 18 nt, Human
acaugggguuuucaauuu

SEQ ID NO: 2419295 - RNA, 22 nt, Human
acaugggguuuucaauuuugca

SEQ ID NO: 2419296 - RNA, 15 nt, Human
acauguaauuaagua

SEQ ID NO: 2419297 - RNA, 21 nt, Human
acauggugaaaccucaucucu

SEQ ID NO: 2419298 - RNA, 22 nt, Human
acaugguagccaguugaauuua

SEQ ID NO: 2419299 - RNA, 21 nt, Human
acaugguaaacgcugucccua

SEQ ID NO: 2419300 - RNA, 13 nt, Human
acccgggaagggg

SEQ ID NO: 2419301 - RNA, 12 nt, Human
acccgggaaggg

SEQ ID NO: 2419302 - RNA, 14 nt, Human
acccggcugcagag

SEQ ID NO: 2419303 - RNA, 17 nt, Human
acccgggaggcagaggu

SEQ ID NO: 2419304 - RNA, 20 nt, Human
acccggccccugcugguuca

SEQ ID NO: 2419305 - RNA, 17 nt, Human
acccggccccugcuggu

SEQ ID NO: 2419306 - RNA, 22 nt, Human
acccggccccugcugguucagg

SEQ ID NO: 2419307 - RNA, 22 nt, Human
acccggcaggcuagaaccuggc

SEQ ID NO: 2419308 - RNA, 21 nt, Human
acccggcgguccccuccgcca

SEQ ID NO: 2419309 - RNA, 16 nt, Human
acccggccccugcugg

SEQ ID NO: 2419310 - RNA, 15 nt, Human
acccggccccugcug

SEQ ID NO: 2419311 - RNA, 21 nt, Human
acccggaggggccuggcagcc

SEQ ID NO: 2419312 - RNA, 18 nt, Human
acccggaggggccuggca

SEQ ID NO: 2419313 - RNA, 14 nt, Human
acccggccccugcu

SEQ ID NO: 2419314 - RNA, 22 nt, Human
ucagguaacaggcagauacagg

SEQ ID NO: 2419315 - RNA, 21 nt, Human
ucagguaacaggcagauacag

SEQ ID NO: 2419316 - RNA, 23 nt, Human
ucagguaacaggcagauacagga

SEQ ID NO: 2419317 - RNA, 15 nt, Human
acccggaggggccug

SEQ ID NO: 2419318 - RNA, 21 nt, Human
ucaggguucuccucuccccuc

SEQ ID NO: 2419319 - RNA, 22 nt, Human
ucagcuuguaaauagcucaggu

SEQ ID NO: 2419320 - RNA, 21 nt, Human
ucagcuuguaaauagcucagg

SEQ ID NO: 2419321 - RNA, 14 nt, Human
ucagcuccagcuca

SEQ ID NO: 2419322 - RNA, 22 nt, Human
ucaggccaggcccucugcccac

SEQ ID NO: 2419323 - RNA, 21 nt, Human
ucaggccaggcccucugccca

SEQ ID NO: 2419324 - RNA, 16 nt, Human
ucagcuugugcacaau

SEQ ID NO: 2419325 - RNA, 23 nt, Human
ucagcuccagacguaggggaggg

SEQ ID NO: 2419326 - RNA, 15 nt, Human
ucagcuacugauuuu

SEQ ID NO: 2419327 - RNA, 20 nt, Human
ucaggccaggcccucugccc

SEQ ID NO: 2419328 - RNA, 15 nt, Human
ucagcuuugccuucc

SEQ ID NO: 2419329 - RNA, 16 nt, Human
ucagcuuugccuucca

SEQ ID NO: 2419330 - RNA, 16 nt, Human
ucagcuuuugcuucau

SEQ ID NO: 2419331 - RNA, 22 nt, Human
ucagcuuugccuuccacgcugu

SEQ ID NO: 2419332 - RNA, 23 nt, Human
ucaggccaggcccucugcccacu

SEQ ID NO: 2419333 - RNA, 12 nt, Human
ucagggcugaca

SEQ ID NO: 2419334 - RNA, 14 nt, Human
ucagggcuccuggg

SEQ ID NO: 2419335 - RNA, 18 nt, Human
ucagcuuuuugucuuuuc

SEQ ID NO: 2419336 - RNA, 22 nt, Human
ucagggcugacacguccacccc

SEQ ID NO: 2419337 - RNA, 16 nt, Human
ucaggggacucagccc

SEQ ID NO: 2419338 - RNA, 20 nt, Human
ucaggggcugcccgcuccca

SEQ ID NO: 2419339 - RNA, 16 nt, Human
ucaggggcugcccgcu

SEQ ID NO: 2419340 - RNA, 14 nt, Human
ucaggggcugcccg

SEQ ID NO: 2419341 - RNA, 13 nt, Human
ucaggggcugccc

SEQ ID NO: 2419342 - RNA, 16 nt, Human
ucaggggccagaggaa

SEQ ID NO: 2419343 - RNA, 15 nt, Human
ucaggggccagagga

SEQ ID NO: 2419344 - RNA, 18 nt, Human
ucaggggacucagcccug

SEQ ID NO: 2419345 - RNA, 14 nt, Human
ucaggggccagagg

SEQ ID NO: 2419346 - RNA, 12 nt, Human
ucaggggccaga

SEQ ID NO: 2419347 - RNA, 16 nt, Human
ucaggggagucccguc

SEQ ID NO: 2419348 - RNA, 20 nt, Human
ucaggggagucccgucagga

SEQ ID NO: 2419349 - RNA, 16 nt, Human
ucaggguuggccccug

SEQ ID NO: 2419350 - RNA, 17 nt, Human
ucagggucucugcugcc

SEQ ID NO: 2419351 - RNA, 16 nt, Human
ucagggucucugcugc

SEQ ID NO: 2419352 - RNA, 12 nt, Human
ucagggucucug

SEQ ID NO: 2419353 - RNA, 14 nt, Human
ucaggggcuguuug

SEQ ID NO: 2419354 - RNA, 16 nt, Human
ucagggugaugccagg

SEQ ID NO: 2419355 - RNA, 18 nt, Human
ucagggucucugcugccg

SEQ ID NO: 2419356 - RNA, 15 nt, Human
ucaggguucuccucu

SEQ ID NO: 2419357 - RNA, 19 nt, Human
ucagggucccugguggcag

SEQ ID NO: 2419358 - RNA, 18 nt, Human
ucaggggcuguuugagga

SEQ ID NO: 2419359 - RNA, 22 nt, Human
ucaggggcugcccgcucccagu

SEQ ID NO: 2419360 - RNA, 21 nt, Human
ucaggggcugcccgcucccag

SEQ ID NO: 2419361 - RNA, 13 nt, Human
ucagggggccagg

SEQ ID NO: 2419362 - RNA, 12 nt, Human
ucagggggccag

SEQ ID NO: 2419363 - RNA, 14 nt, Human
acccguccagaccu

SEQ ID NO: 2419364 - RNA, 15 nt, Human
acccguacaacgugu

SEQ ID NO: 2419365 - RNA, 23 nt, Human
acccgggcucagggaccacagca

SEQ ID NO: 2419366 - RNA, 13 nt, Human
acccgggcucagg

SEQ ID NO: 2419367 - RNA, 12 nt, Human
acccgggcucag

SEQ ID NO: 2419368 - RNA, 21 nt, Human
acccgggaggcggagcuugca

SEQ ID NO: 2419369 - RNA, 18 nt, Human
acccucgaggcggaucuu

SEQ ID NO: 2419370 - RNA, 19 nt, Human
acccucgaggcggaucuuu

SEQ ID NO: 2419371 - RNA, 17 nt, Human
acccucgggcccaccug

SEQ ID NO: 2419372 - RNA, 16 nt, Human
acccucgggcccaccu

SEQ ID NO: 2419373 - RNA, 15 nt, Human
acccucgggcccacc

SEQ ID NO: 2419374 - RNA, 14 nt, Human
acccucgggcccac

SEQ ID NO: 2419375 - RNA, 13 nt, Human
acccucgggccca

SEQ ID NO: 2419376 - RNA, 21 nt, Human
acccucgggcccaccuggcca

SEQ ID NO: 2419377 - RNA, 20 nt, Human
acccucgggcccaccuggcc

SEQ ID NO: 2419378 - RNA, 19 nt, Human
acccucgggcccaccuggc

SEQ ID NO: 2419379 - RNA, 18 nt, Human
acccucgggcccaccugg

SEQ ID NO: 2419380 - RNA, 22 nt, Human
acccucgggcccaccuggccac

SEQ ID NO: 2419381 - RNA, 20 nt, Human
acccucguggccuuccccag

SEQ ID NO: 2419382 - RNA, 14 nt, Human
acccucguggccuu

SEQ ID NO: 2419383 - RNA, 16 nt, Human
acccugaaagcccuga

SEQ ID NO: 2419384 - RNA, 18 nt, Human
acccugaaagcccugagc

SEQ ID NO: 2419385 - RNA, 16 nt, Human
acccucucagcuccag

SEQ ID NO: 2419386 - RNA, 15 nt, Human
acccucucagcucca

SEQ ID NO: 2419387 - RNA, 19 nt, Human
acccucucaggugaccaaa

SEQ ID NO: 2419388 - RNA, 14 nt, Human
acccucuccacccc

SEQ ID NO: 2419389 - RNA, 15 nt, Human
acccucuccacccca

SEQ ID NO: 2419390 - RNA, 16 nt, Human
acccucuccaccccau

SEQ ID NO: 2419391 - RNA, 19 nt, Human
acccucugaaugguccagg

SEQ ID NO: 2419392 - RNA, 14 nt, Human
acccucucccagga

SEQ ID NO: 2419393 - RNA, 15 nt, Human
acccucucccaggac

SEQ ID NO: 2419394 - RNA, 21 nt, Human
acccucugaaugguccagggu

SEQ ID NO: 2419395 - RNA, 22 nt, Human
acccucugaaugguccaggguu

SEQ ID NO: 2419396 - RNA, 12 nt, Human
acccugaagggg

SEQ ID NO: 2419397 - RNA, 17 nt, Human
acccugaaggggccaug

SEQ ID NO: 2419398 - RNA, 13 nt, Human
acccucugccacc

SEQ ID NO: 2419399 - RNA, 21 nt, Human
acccucugagcuuugcauguu

SEQ ID NO: 2419400 - RNA, 18 nt, Human
acccucugagcuuugcau

SEQ ID NO: 2419401 - RNA, 13 nt, Human
acccucugagcuu

SEQ ID NO: 2419402 - RNA, 17 nt, Human
acccucugccaccagag

SEQ ID NO: 2419403 - RNA, 14 nt, Human
acccucugccacca

SEQ ID NO: 2419404 - RNA, 14 nt, Human
acccugaggcccag

SEQ ID NO: 2419405 - RNA, 22 nt, Human
acccugaaugguuccaugccug

SEQ ID NO: 2419406 - RNA, 21 nt, Human
acccugaaugguuccaugccu

SEQ ID NO: 2419407 - RNA, 18 nt, Human
acccugaaggggccauga

SEQ ID NO: 2419408 - RNA, 21 nt, Human
acccugaauuuggccugcacu

SEQ ID NO: 2419409 - RNA, 15 nt, Human
acccugcccuguggg

SEQ ID NO: 2419410 - RNA, 16 nt, Human
acccugaggcccagag

SEQ ID NO: 2419411 - RNA, 15 nt, Human
acccugaggcccaga

SEQ ID NO: 2419412 - RNA, 22 nt, Human
acccugcccugugggcccccaa

SEQ ID NO: 2419413 - RNA, 17 nt, Human
acccugcccugugggcc

SEQ ID NO: 2419414 - RNA, 15 nt, Human
acccuucuuuccucu

SEQ ID NO: 2419415 - RNA, 14 nt, Human
acccuucuuuccuc

SEQ ID NO: 2419416 - RNA, 12 nt, Human
acccuucuuuuc

SEQ ID NO: 2419417 - RNA, 23 nt, Human
acccuucuccucuuguaaauaaa

SEQ ID NO: 2419418 - RNA, 23 nt, Human
acccuuguggucccaccccacac

SEQ ID NO: 2419419 - RNA, 20 nt, Human
acccuuguggucccacccca

SEQ ID NO: 2419420 - RNA, 17 nt, Human
acccuugccgucuaccu

SEQ ID NO: 2419421 - RNA, 20 nt, Human
acccuucuuuccucuucccc

SEQ ID NO: 2419422 - RNA, 18 nt, Human
acccuucuuuccucuucc

SEQ ID NO: 2419423 - RNA, 16 nt, Human
acccuucuuuccucuu

SEQ ID NO: 2419424 - RNA, 11 nt, Human
acccuugacac

SEQ ID NO: 2419425 - RNA, 16 nt, Human
acccuugaaaagacau

SEQ ID NO: 2419426 - RNA, 23 nt, Human
acccuuuccuuccuucccuggcu

SEQ ID NO: 2419427 - RNA, 21 nt, Human
acccuuuccuuccuucccugg

SEQ ID NO: 2419428 - RNA, 22 nt, Human
acccuuuccuuccuucccuggc

SEQ ID NO: 2419429 - RNA, 15 nt, Human
acccuuuccuuccuu

SEQ ID NO: 2419430 - RNA, 17 nt, Human
acccuuuccuuccuucc

SEQ ID NO: 2419431 - RNA, 18 nt, Human
acccuuuccuuccuuccc

SEQ ID NO: 2419432 - RNA, 19 nt, Human
acccuuuccuuccuucccu

SEQ ID NO: 2419433 - RNA, 20 nt, Human
acccuuuagccaaacccuug

SEQ ID NO: 2419434 - RNA, 14 nt, Human
acccuuuccuuccu

SEQ ID NO: 2419435 - RNA, 17 nt, Human
acccuugcccaccccac

SEQ ID NO: 2419436 - RNA, 16 nt, Human
acccuugcccacccca

SEQ ID NO: 2419437 - RNA, 13 nt, Human
acccuugaaaaga

SEQ ID NO: 2419438 - RNA, 15 nt, Human
accgaaaacguggcu

SEQ ID NO: 2419439 - RNA, 14 nt, Human
acccuuuugucugc

SEQ ID NO: 2419440 - RNA, 17 nt, Human
acccuuuuucuccagcu

SEQ ID NO: 2419441 - RNA, 22 nt, Human
accccagccccaaaacucuccu

SEQ ID NO: 2419442 - RNA, 23 nt, Human
accccagccgcucggaggcccca

SEQ ID NO: 2419443 - RNA, 12 nt, Human
accccagccuaa

SEQ ID NO: 2419444 - RNA, 15 nt, Human
accccacccucccug

SEQ ID NO: 2419445 - RNA, 18 nt, Human
accccagacgaugucuuc

SEQ ID NO: 2419446 - RNA, 13 nt, Human
accccagcauccu

SEQ ID NO: 2419447 - RNA, 13 nt, Human
accccagccccaa

SEQ ID NO: 2419448 - RNA, 13 nt, Human
accccagagugug

SEQ ID NO: 2419449 - RNA, 17 nt, Human
accccacacacgccaga

SEQ ID NO: 2419450 - RNA, 20 nt, Human
accccacaccaggccguccu

SEQ ID NO: 2419451 - RNA, 17 nt, Human
accccacaccaggccgu

SEQ ID NO: 2419452 - RNA, 16 nt, Human
accccacaccaggccg

SEQ ID NO: 2419453 - RNA, 23 nt, Human
acccaggagguggagguugcagu

SEQ ID NO: 2419454 - RNA, 18 nt, Human
accccacacgcuccuccc

SEQ ID NO: 2419455 - RNA, 22 nt, Human
accccacaccaggccguccucc

SEQ ID NO: 2419456 - RNA, 11 nt, Human
accccacacuu

SEQ ID NO: 2419457 - RNA, 11 nt, Human
accccacccaa

SEQ ID NO: 2419458 - RNA, 22 nt, Human
accccaccacgauguggcccug

SEQ ID NO: 2419459 - RNA, 21 nt, Human
accccacacuuguuccagcuc

SEQ ID NO: 2419460 - RNA, 15 nt, Human
accccacccccaccc

SEQ ID NO: 2419461 - RNA, 12 nt, Human
accccacccccu

SEQ ID NO: 2419462 - RNA, 21 nt, Human
accccacccccuucagugccc

SEQ ID NO: 2419463 - RNA, 13 nt, Human
accccacccuccc

SEQ ID NO: 2419464 - RNA, 21 nt, Human
accccacccucagcaccccuu

SEQ ID NO: 2419465 - RNA, 15 nt, Human
accccacccucagca

SEQ ID NO: 2419466 - RNA, 14 nt, Human
accccacccucagc

SEQ ID NO: 2419467 - RNA, 13 nt, Human
accccacccucag

SEQ ID NO: 2419468 - RNA, 12 nt, Human
accccacccuca

SEQ ID NO: 2419469 - RNA, 21 nt, Human
accccacccuaguuucccuga

SEQ ID NO: 2419470 - RNA, 22 nt, Human
accccacccccuucagugccca

SEQ ID NO: 2419471 - RNA, 19 nt, Human
acccaggagggagggggcu

SEQ ID NO: 2419472 - RNA, 11 nt, Human
acccaggaggu

SEQ ID NO: 2419473 - RNA, 14 nt, Human
acccaggaggugga

SEQ ID NO: 2419474 - RNA, 20 nt, Human
acccaggagguggagguugc

SEQ ID NO: 2419475 - RNA, 21 nt, Human
acccaggagguggagguugca

SEQ ID NO: 2419476 - RNA, 23 nt, Human
acccaggagccccgaggccuucu

SEQ ID NO: 2419477 - RNA, 19 nt, Human
acccaggagccccgaggcc

SEQ ID NO: 2419478 - RNA, 16 nt, Human
ucagcccucccugccc

SEQ ID NO: 2419479 - RNA, 15 nt, Human
ucagcccucccugcc

SEQ ID NO: 2419480 - RNA, 14 nt, Human
ucagcccucccugc

SEQ ID NO: 2419481 - RNA, 13 nt, Human
ucagcccucccug

SEQ ID NO: 2419482 - RNA, 17 nt, Human
ucagccagccccaucag

SEQ ID NO: 2419483 - RNA, 15 nt, Human
ucagccagccccauc

SEQ ID NO: 2419484 - RNA, 14 nt, Human
ucagccagagaagc

SEQ ID NO: 2419485 - RNA, 12 nt, Human
ucagccaggagc

SEQ ID NO: 2419486 - RNA, 18 nt, Human
accauaauguuacauuau

SEQ ID NO: 2419487 - RNA, 15 nt, Human
accauaauguuacau

SEQ ID NO: 2419488 - RNA, 22 nt, Human
accauaagguuucguuucugua

SEQ ID NO: 2419489 - RNA, 13 nt, Human
accauaauguuac

SEQ ID NO: 2419490 - RNA, 12 nt, Human
ucagauuugaac

SEQ ID NO: 2419491 - RNA, 17 nt, Human
accauaccuuccuuccc

SEQ ID NO: 2419492 - RNA, 16 nt, Human
accauaccuuccuucc

SEQ ID NO: 2419493 - RNA, 15 nt, Human
accauaccuuccuuc

SEQ ID NO: 2419494 - RNA, 21 nt, Human
ucagauuugaacucuucaauc

SEQ ID NO: 2419495 - RNA, 18 nt, Human
accaguguuguggauuua

SEQ ID NO: 2419496 - RNA, 19 nt, Human
accaguugggagcacugga

SEQ ID NO: 2419497 - RNA, 18 nt, Human
accaguugggagcacugg

SEQ ID NO: 2419498 - RNA, 22 nt, Human
accaguguuagggaagggccug

SEQ ID NO: 2419499 - RNA, 20 nt, Human
accaguguccccuccacugu

SEQ ID NO: 2419500 - RNA, 21 nt, Human
accagugugguuuguguuuga

SEQ ID NO: 2419501 - RNA, 15 nt, Human
accauaaaaagcuga

SEQ ID NO: 2419502 - RNA, 15 nt, Human
accaguugggagcac

SEQ ID NO: 2419503 - RNA, 21 nt, Human
accaguuuaaccugaugcagu

SEQ ID NO: 2419504 - RNA, 20 nt, Human
accaguuuaaccugaugcag

SEQ ID NO: 2419505 - RNA, 19 nt, Human
accaguuuaaccugaugca

SEQ ID NO: 2419506 - RNA, 21 nt, Human
accaguugggagcacuggagu

SEQ ID NO: 2419507 - RNA, 20 nt, Human
accaguugggagcacuggag

SEQ ID NO: 2419508 - RNA, 19 nt, Human
accauaaccccggaagcca

SEQ ID NO: 2419509 - RNA, 17 nt, Human
ucagauuugccuuauug

SEQ ID NO: 2419510 - RNA, 20 nt, Human
ucagcaaaaagcaaaaucau

SEQ ID NO: 2419511 - RNA, 16 nt, Human
ucagcaaaaagcaaaa

SEQ ID NO: 2419512 - RNA, 15 nt, Human
ucagcaaaaagcaaa

SEQ ID NO: 2419513 - RNA, 14 nt, Human
ucagcaaaaagcaa

SEQ ID NO: 2419514 - RNA, 13 nt, Human
ucagcaaaaagca

SEQ ID NO: 2419515 - RNA, 17 nt, Human
ucagccaauuauguuaa

SEQ ID NO: 2419516 - RNA, 15 nt, Human
ucagccaauuauguu

SEQ ID NO: 2419517 - RNA, 13 nt, Human
ucagccaauuaug

SEQ ID NO: 2419518 - RNA, 23 nt, Human
ucagccaagguuuuauaaggcug

SEQ ID NO: 2419519 - RNA, 15 nt, Human
ucagcaaaagaugcu

SEQ ID NO: 2419520 - RNA, 14 nt, Human
ucagccagcacuug

SEQ ID NO: 2419521 - RNA, 23 nt, Human
ucagccagcacuuguccagcuga

SEQ ID NO: 2419522 - RNA, 12 nt, Human
ucagccagcacu

SEQ ID NO: 2419523 - RNA, 23 nt, Human
ucagccaccauccuauugcaaag

SEQ ID NO: 2419524 - RNA, 21 nt, Human
ucagcaaaaagcaaaaucauu

SEQ ID NO: 2419525 - RNA, 18 nt, Human
ucagccaauuauguuaaa

SEQ ID NO: 2419526 - RNA, 18 nt, Human
ucagcggggacagcuccu

SEQ ID NO: 2419527 - RNA, 24 nt, Human
ucagccuucccccucccagggcca

SEQ ID NO: 2419528 - RNA, 21 nt, Human
ucagccuuccccuugcccagg

SEQ ID NO: 2419529 - RNA, 22 nt, Human
ucagccuuccccuugcccaggg

SEQ ID NO: 2419530 - RNA, 23 nt, Human
ucagccuuccccuugcccagggc

SEQ ID NO: 2419531 - RNA, 17 nt, Human
ucagccugugcugcccg

SEQ ID NO: 2419532 - RNA, 21 nt, Human
ucagccuucccccucccaggg

SEQ ID NO: 2419533 - RNA, 22 nt, Human
ucagccuucccccucccagggc

SEQ ID NO: 2419534 - RNA, 18 nt, Human
ucagccugucucuuccau

SEQ ID NO: 2419535 - RNA, 17 nt, Human
ucagccugucucuucca

SEQ ID NO: 2419536 - RNA, 16 nt, Human
ucagccugucucuucc

SEQ ID NO: 2419537 - RNA, 12 nt, Human
ucagccugugcu

SEQ ID NO: 2419538 - RNA, 16 nt, Human
ucagccugugcugccc

SEQ ID NO: 2419539 - RNA, 21 nt, Human
accccuggcuuuucacugcug

SEQ ID NO: 2419540 - RNA, 20 nt, Human
accccuggcuuuucacugcu

SEQ ID NO: 2419541 - RNA, 19 nt, Human
accccuggcuuuucacugc

SEQ ID NO: 2419542 - RNA, 18 nt, Human
accccuggcuuuucacug

SEQ ID NO: 2419543 - RNA, 16 nt, Human
accccuggugguucac

SEQ ID NO: 2419544 - RNA, 15 nt, Human
accccugggggcucu

SEQ ID NO: 2419545 - RNA, 17 nt, Human
accccuggcuuuucacu

SEQ ID NO: 2419546 - RNA, 16 nt, Human
accccugggggcucuc

SEQ ID NO: 2419547 - RNA, 17 nt, Human
accccugggggcucuca

SEQ ID NO: 2419548 - RNA, 17 nt, Human
ucagccuggugggccuc

SEQ ID NO: 2419549 - RNA, 18 nt, Human
ucagccuggugggccucc

SEQ ID NO: 2419550 - RNA, 19 nt, Human
ucagccuggugggccuccu

SEQ ID NO: 2419551 - RNA, 23 nt, Human
ucagcggggacagcuccuucugu

SEQ ID NO: 2419552 - RNA, 21 nt, Human
ucagcggggacagcuccuucu

SEQ ID NO: 2419553 - RNA, 20 nt, Human
ucagcggggacagcuccuuc

SEQ ID NO: 2419554 - RNA, 19 nt, Human
ucagcggggacagcuccuu

SEQ ID NO: 2419555 - RNA, 13 nt, Human
ucagcguugcaug

SEQ ID NO: 2419556 - RNA, 16 nt, Human
ucagcgugcuuagccu

SEQ ID NO: 2419557 - RNA, 18 nt, Human
ucagcgugcuuagccucc

SEQ ID NO: 2419558 - RNA, 14 nt, Human
ucagcguugcaugu

SEQ ID NO: 2419559 - RNA, 18 nt, Human
ucagcuaaagcccaaccu

SEQ ID NO: 2419560 - RNA, 12 nt, Human
ucagcuccagcu

SEQ ID NO: 2419561 - RNA, 15 nt, Human
ucagcuacuaaugau

SEQ ID NO: 2419562 - RNA, 14 nt, Human
ucagcuacugauuu

SEQ ID NO: 2419563 - RNA, 20 nt, Human
ucagcuacuaaugauguuuu

SEQ ID NO: 2419564 - RNA, 12 nt, Human
ucagcucaugga

SEQ ID NO: 2419565 - RNA, 18 nt, Human
ucagcuccacuuucagug

SEQ ID NO: 2419566 - RNA, 21 nt, Human
accccugccuccacccucuga

SEQ ID NO: 2419567 - RNA, 20 nt, Human
accccugccuccacccucug

SEQ ID NO: 2419568 - RNA, 19 nt, Human
accccugccuccacccucu

SEQ ID NO: 2419569 - RNA, 18 nt, Human
accccugccuccacccuc

SEQ ID NO: 2419570 - RNA, 14 nt, Human
accccugcuucuga

SEQ ID NO: 2419571 - RNA, 23 nt, Human
accccugccuccacccucugagc

SEQ ID NO: 2419572 - RNA, 22 nt, Human
accccugccuccacccucugag

SEQ ID NO: 2419573 - RNA, 17 nt, Human
accccugcccccagccc

SEQ ID NO: 2419574 - RNA, 19 nt, Human
accccugcccccacuuccu

SEQ ID NO: 2419575 - RNA, 13 nt, Human
accccugccccca

SEQ ID NO: 2419576 - RNA, 12 nt, Human
accccugccccc

SEQ ID NO: 2419577 - RNA, 20 nt, Human
accccugcccccagccccgg

SEQ ID NO: 2419578 - RNA, 12 nt, Human
accccugcccug

SEQ ID NO: 2419579 - RNA, 13 nt, Human
accccugcccugg

SEQ ID NO: 2419580 - RNA, 14 nt, Human
accccugcccuggg

SEQ ID NO: 2419581 - RNA, 17 nt, Human
accccugccuccacccu

SEQ ID NO: 2419582 - RNA, 16 nt, Human
accccugccuccaccc

SEQ ID NO: 2419583 - RNA, 15 nt, Human
accccugccuccacc

SEQ ID NO: 2419584 - RNA, 14 nt, Human
accccugccuccac

SEQ ID NO: 2419585 - RNA, 13 nt, Human
accccugccucca

SEQ ID NO: 2419586 - RNA, 12 nt, Human
accccugccucc

SEQ ID NO: 2419587 - RNA, 15 nt, Human
accccugcccuggga

SEQ ID NO: 2419588 - RNA, 16 nt, Human
accccugcccuugucc

SEQ ID NO: 2419589 - RNA, 13 nt, Human
accccucuggcca

SEQ ID NO: 2419590 - RNA, 14 nt, Human
accccucuggccag

SEQ ID NO: 2419591 - RNA, 15 nt, Human
accccucuggccagg

SEQ ID NO: 2419592 - RNA, 13 nt, Human
accccucucugca

SEQ ID NO: 2419593 - RNA, 23 nt, Human
accccuccuuccuugaccagcag

SEQ ID NO: 2419594 - RNA, 20 nt, Human
accccuccuuccuugaccag

SEQ ID NO: 2419595 - RNA, 14 nt, Human
acccccucuagaaa

SEQ ID NO: 2419596 - RNA, 21 nt, Human
accccuccuuccuugaccagc

SEQ ID NO: 2419597 - RNA, 22 nt, Human
accccuccuuccuugaccagca

SEQ ID NO: 2419598 - RNA, 10 nt, Human
accccugccc

SEQ ID NO: 2419599 - RNA, 11 nt, Human
accccugcccc

SEQ ID NO: 2419600 - RNA, 15 nt, Human
accccugagcuugca

SEQ ID NO: 2419601 - RNA, 15 nt, Human
accccugaucugaca

SEQ ID NO: 2419602 - RNA, 19 nt, Human
accccugaggaagaugggg

SEQ ID NO: 2419603 - RNA, 18 nt, Human
accccucuggccaggaug

SEQ ID NO: 2419604 - RNA, 14 nt, Human
acccccuccugcug

SEQ ID NO: 2419605 - RNA, 13 nt, Human
acccccuccugcu

SEQ ID NO: 2419606 - RNA, 16 nt, Human
acccccuccucucugc

SEQ ID NO: 2419607 - RNA, 15 nt, Human
acccccuccucucug

SEQ ID NO: 2419608 - RNA, 16 nt, Human
acccccuccugcugca

SEQ ID NO: 2419609 - RNA, 15 nt, Human
acccccuccugcugc

SEQ ID NO: 2419610 - RNA, 11 nt, Human
acccccuccuu

SEQ ID NO: 2419611 - RNA, 14 nt, Human
accccaucugccca

SEQ ID NO: 2419612 - RNA, 16 nt, Human
acccccucccuggccu

SEQ ID NO: 2419613 - RNA, 17 nt, Human
acccccucccuggccug

SEQ ID NO: 2419614 - RNA, 14 nt, Human
acccccuccucucu

SEQ ID NO: 2419615 - RNA, 13 nt, Human
acccccuccucuc

SEQ ID NO: 2419616 - RNA, 20 nt, Human
acccccucccuggccuguuc

SEQ ID NO: 2419617 - RNA, 22 nt, Human
acccccucccuggccuguucug

SEQ ID NO: 2419618 - RNA, 12 nt, Human
acccccuccuuc

SEQ ID NO: 2419619 - RNA, 15 nt, Human
acccccuccuucaga

SEQ ID NO: 2419620 - RNA, 16 nt, Human
acccccuccuucagac

SEQ ID NO: 2419621 - RNA, 17 nt, Human
acccccuccuucagaca

SEQ ID NO: 2419622 - RNA, 21 nt, Human
acccccucgggucuccucacu

SEQ ID NO: 2419623 - RNA, 18 nt, Human
acccccucgggucuccuc

SEQ ID NO: 2419624 - RNA, 19 nt, Human
acccccuccuucagacacc

SEQ ID NO: 2419625 - RNA, 16 nt, Human
acccccucgcuuggac

SEQ ID NO: 2419626 - RNA, 18 nt, Human
accccaucucuacaaaaa

SEQ ID NO: 2419627 - RNA, 13 nt, Human
accccaucugccc

SEQ ID NO: 2419628 - RNA, 21 nt, Human
accccauagugaccggcugcu

SEQ ID NO: 2419629 - RNA, 17 nt, Human
accccaucccuccccag

SEQ ID NO: 2419630 - RNA, 15 nt, Human
accccaucccacacc

SEQ ID NO: 2419631 - RNA, 23 nt, Human
accccaguucugcuccucuccag

SEQ ID NO: 2419632 - RNA, 22 nt, Human
accccaguucugcuccucucca

SEQ ID NO: 2419633 - RNA, 21 nt, Human
accccaguucugcuccucucc

SEQ ID NO: 2419634 - RNA, 20 nt, Human
accccaguucugcuccucuc

SEQ ID NO: 2419635 - RNA, 19 nt, Human
accccaguucugcuccucu

SEQ ID NO: 2419636 - RNA, 17 nt, Human
accccaguucugcuccu

SEQ ID NO: 2419637 - RNA, 17 nt, Human
accccauccaguucaug

SEQ ID NO: 2419638 - RNA, 19 nt, Human
accccauagugaccggcug

SEQ ID NO: 2419639 - RNA, 14 nt, Human
ucaguauguggaag

SEQ ID NO: 2419640 - RNA, 16 nt, Human
ucaguauguggaagug

SEQ ID NO: 2419641 - RNA, 24 nt, Human
ucaguaucuguaucucucucucuu

SEQ ID NO: 2419642 - RNA, 12 nt, Human
ucaguaugugga

SEQ ID NO: 2419643 - RNA, 16 nt, Human
ucagugccaaaaacaa

SEQ ID NO: 2419644 - RNA, 12 nt, Human
ucagugccacua

SEQ ID NO: 2419645 - RNA, 19 nt, Human
accgaaaacguggcugcuu

SEQ ID NO: 2419646 - RNA, 17 nt, Human
accgaaaacguggcugc

SEQ ID NO: 2419647 - RNA, 16 nt, Human
ucaguauaauucugua

SEQ ID NO: 2419648 - RNA, 17 nt, Human
ucaguauaaacaaaguu

SEQ ID NO: 2419649 - RNA, 15 nt, Human
ucaguauaaacaaag

SEQ ID NO: 2419650 - RNA, 20 nt, Human
ucaguaucuguaucucucuc

SEQ ID NO: 2419651 - RNA, 18 nt, Human
ucaguaucuguaucucuc

SEQ ID NO: 2419652 - RNA, 13 nt, Human
ucaguaucaggcc

SEQ ID NO: 2419653 - RNA, 20 nt, Human
ucaguauaauucuguacuga

SEQ ID NO: 2419654 - RNA, 16 nt, Human
ucaguauaauuuuuua

SEQ ID NO: 2419655 - RNA, 15 nt, Human
ucagugccuuaugga

SEQ ID NO: 2419656 - RNA, 14 nt, Human
ucagugccuuaugg

SEQ ID NO: 2419657 - RNA, 12 nt, Human
ucagugccuuau

SEQ ID NO: 2419658 - RNA, 11 nt, Human
ucagugccuua

SEQ ID NO: 2419659 - RNA, 10 nt, Human
ucagugccuu

SEQ ID NO: 2419660 - RNA, 9 nt, Human
ucagugccu

SEQ ID NO: 2419661 - RNA, 20 nt, Human
ucagugcccuccaggauaga

SEQ ID NO: 2419662 - RNA, 16 nt, Human
ucagugccgccgccuc

SEQ ID NO: 2419663 - RNA, 14 nt, Human
ucagugccgccgcc

SEQ ID NO: 2419664 - RNA, 22 nt, Human
ucagugccaauaaaauuuagga

SEQ ID NO: 2419665 - RNA, 9 nt, Human
ucagugccc

SEQ ID NO: 2419666 - RNA, 16 nt, Human
ucagugcccaacuguu

SEQ ID NO: 2419667 - RNA, 13 nt, Human
ucagugcccacca

SEQ ID NO: 2419668 - RNA, 22 nt, Human
ucagugcccaccaacaucccau

SEQ ID NO: 2419669 - RNA, 15 nt, Human
ucaguuuuugugaaa

SEQ ID NO: 2419670 - RNA, 17 nt, Human
ucaguuuuaucauuuuc

SEQ ID NO: 2419671 - RNA, 16 nt, Human
ucaguuuuaucauuuu

SEQ ID NO: 2419672 - RNA, 19 nt, Human
ucaguuuuaucauuuucaa

SEQ ID NO: 2419673 - RNA, 14 nt, Human
ucagugggagaaaa

SEQ ID NO: 2419674 - RNA, 14 nt, Human
ucaguuuuaucuuu

SEQ ID NO: 2419675 - RNA, 14 nt, Human
ucaguggggcaguc

SEQ ID NO: 2419676 - RNA, 16 nt, Human
ucagugggagaaaaca

SEQ ID NO: 2419677 - RNA, 13 nt, Human
ucaguuuuaacua

SEQ ID NO: 2419678 - RNA, 17 nt, Human
ucaguuuuugugaaaag

SEQ ID NO: 2419679 - RNA, 22 nt, Human
ucauaaaaagccugcaauuuca

SEQ ID NO: 2419680 - RNA, 15 nt, Human
ucaguuuuuuuuuau

SEQ ID NO: 2419681 - RNA, 12 nt, Human
ucaguuuucauu

SEQ ID NO: 2419682 - RNA, 13 nt, Human
ucaguuuucauuu

SEQ ID NO: 2419683 - RNA, 16 nt, Human
ucaguuuucaggagug

SEQ ID NO: 2419684 - RNA, 19 nt, Human
ucaguggcagggcucagga

SEQ ID NO: 2419685 - RNA, 16 nt, Human
ucaguggcagggcuca

SEQ ID NO: 2419686 - RNA, 15 nt, Human
ucaguggcagggcuc

SEQ ID NO: 2419687 - RNA, 14 nt, Human
ucaguggcagggcu

SEQ ID NO: 2419688 - RNA, 12 nt, Human
ucaguggcagcu

SEQ ID NO: 2419689 - RNA, 16 nt, Human
ucaguggggaggggcu

SEQ ID NO: 2419690 - RNA, 22 nt, Human
ucagugggaacgugacugcccc

SEQ ID NO: 2419691 - RNA, 23 nt, Human
ucagugggaacgugacugcccca

SEQ ID NO: 2419692 - RNA, 12 nt, Human
ucagugggagaa

SEQ ID NO: 2419693 - RNA, 13 nt, Human
ucagugggagaaa

SEQ ID NO: 2419694 - RNA, 17 nt, Human
ucaguggcgagaaauaa

SEQ ID NO: 2419695 - RNA, 19 nt, Human
ucaguggcauggcuccagu

SEQ ID NO: 2419696 - RNA, 20 nt, Human
ucaguggcauggcuccaguc

SEQ ID NO: 2419697 - RNA, 20 nt, Human
ucaguggcuucaucugucaa

SEQ ID NO: 2419698 - RNA, 17 nt, Human
ucaguggcuucaucugu

SEQ ID NO: 2419699 - RNA, 15 nt, Human
ucagugggaacguga

SEQ ID NO: 2419700 - RNA, 19 nt, Human
ucagugggaacgugacugc

SEQ ID NO: 2419701 - RNA, 16 nt, Human
ucagugccuuauggaa

SEQ ID NO: 2419702 - RNA, 18 nt, Human
ucagugccuuauggaaca

SEQ ID NO: 2419703 - RNA, 21 nt, Human
ucagugccgccgccucgccca

SEQ ID NO: 2419704 - RNA, 20 nt, Human
ucagugccgccgccucgccc

SEQ ID NO: 2419705 - RNA, 15 nt, Human
ucagugcuucgcaga

SEQ ID NO: 2419706 - RNA, 11 nt, Human
ucaguggcagc

SEQ ID NO: 2419707 - RNA, 23 nt, Human
ucagugccgccgccucgcccacc

SEQ ID NO: 2419708 - RNA, 16 nt, Human
ucaguggaagaagcag

SEQ ID NO: 2419709 - RNA, 21 nt, Human
ucaguggaagaagcagaugag

SEQ ID NO: 2419710 - RNA, 19 nt, Human
ucaguggacuuuccacccc

SEQ ID NO: 2419711 - RNA, 21 nt, Human
ucaguggacuuuccacccccu

SEQ ID NO: 2419712 - RNA, 23 nt, Human
ucaguggacuuuccacccccucc

SEQ ID NO: 2419713 - RNA, 12 nt, Human
ucaguggagcca

SEQ ID NO: 2419714 - RNA, 15 nt, Human
ucauauaauaaaugu

SEQ ID NO: 2419715 - RNA, 18 nt, Human
ucauauaagauucauauu

SEQ ID NO: 2419716 - RNA, 16 nt, Human
ucauauaauaaaugua

SEQ ID NO: 2419717 - RNA, 16 nt, Human
ucauauaccagcaaua

SEQ ID NO: 2419718 - RNA, 14 nt, Human
ucauauacgugaaa

SEQ ID NO: 2419719 - RNA, 17 nt, Human
ucauauaccagcaauau

SEQ ID NO: 2419720 - RNA, 14 nt, Human
ucauauauaucuau

SEQ ID NO: 2419721 - RNA, 18 nt, Human
ucauauauggggggccaa

SEQ ID NO: 2419722 - RNA, 22 nt, Human
ucauauauggggggccaacacc

SEQ ID NO: 2419723 - RNA, 20 nt, Human
ucauauaaacuuuuuaaaga

SEQ ID NO: 2419724 - RNA, 20 nt, Human
ucauauaaaagcuaugguga

SEQ ID NO: 2419725 - RNA, 16 nt, Human
ucauauaaaagcuaug

SEQ ID NO: 2419726 - RNA, 13 nt, Human
ucauaguuuaauu

SEQ ID NO: 2419727 - RNA, 17 nt, Human
ucauaguuauuguuucu

SEQ ID NO: 2419728 - RNA, 16 nt, Human
ucauaguuauuguuuc

SEQ ID NO: 2419729 - RNA, 21 nt, Human
ucauaguuauuguuucugguc

SEQ ID NO: 2419730 - RNA, 21 nt, Human
ucauaguaugguggcuggguu

SEQ ID NO: 2419731 - RNA, 19 nt, Human
ucauaguaugguggcuggg

SEQ ID NO: 2419732 - RNA, 18 nt, Human
ucauaguaugguggcugg

SEQ ID NO: 2419733 - RNA, 23 nt, Human
ucauaacggaucagaaauacaga

SEQ ID NO: 2419734 - RNA, 22 nt, Human
ucauaguacucuuuguagcaaa

SEQ ID NO: 2419735 - RNA, 22 nt, Human
ucauaacggaucagaaauacag

SEQ ID NO: 2419736 - RNA, 15 nt, Human
ucauaguaugguggc

SEQ ID NO: 2419737 - RNA, 14 nt, Human
ucauaaccuagccu

SEQ ID NO: 2419738 - RNA, 22 nt, Human
ucaguuuuuuuuuauacacugu

SEQ ID NO: 2419739 - RNA, 20 nt, Human
ucauaaaaagcaaaacaaaa

SEQ ID NO: 2419740 - RNA, 12 nt, Human
ucauaaaauaaa

SEQ ID NO: 2419741 - RNA, 21 nt, Human
ucauaacggaucagaaauaca

SEQ ID NO: 2419742 - RNA, 19 nt, Human
ucauaacggaucagaaaua

SEQ ID NO: 2419743 - RNA, 18 nt, Human
ucauaacggaucagaaau

SEQ ID NO: 2419744 - RNA, 16 nt, Human
ucauaacggaucagaa

SEQ ID NO: 2419745 - RNA, 16 nt, Human
ucauaaauuuaugguu

SEQ ID NO: 2419746 - RNA, 14 nt, Human
ucauaacggaucag

SEQ ID NO: 2419747 - RNA, 23 nt, Human
accgcagaagccuccccagcuca

SEQ ID NO: 2419748 - RNA, 20 nt, Human
accgcagaagccuccccagc

SEQ ID NO: 2419749 - RNA, 17 nt, Human
accgagucucuucucca

SEQ ID NO: 2419750 - RNA, 17 nt, Human
accgaggggcucaggaa

SEQ ID NO: 2419751 - RNA, 19 nt, Human
accgaggggcucaggaaaa

SEQ ID NO: 2419752 - RNA, 16 nt, Human
accgagucucuucucc

SEQ ID NO: 2419753 - RNA, 16 nt, Human
accgaggcgcgggggc

SEQ ID NO: 2419754 - RNA, 15 nt, Human
accgaggacaugaaa

SEQ ID NO: 2419755 - RNA, 17 nt, Human
accgaggcgcgggggcc

SEQ ID NO: 2419756 - RNA, 17 nt, Human
accgaggcuggagcugg

SEQ ID NO: 2419757 - RNA, 18 nt, Human
accgaggcuggagcuggc

SEQ ID NO: 2419758 - RNA, 20 nt, Human
accgagcgcuuucuggaaaa

SEQ ID NO: 2419759 - RNA, 18 nt, Human
accgagcgcuuucuggaa

SEQ ID NO: 2419760 - RNA, 15 nt, Human
ucauauuuucuuuca

SEQ ID NO: 2419761 - RNA, 22 nt, Human
ucauauuucuuaucaccacagu

SEQ ID NO: 2419762 - RNA, 19 nt, Human
ucauauugaauguuuccaa

SEQ ID NO: 2419763 - RNA, 21 nt, Human
ucauauugugauucugccuuu

SEQ ID NO: 2419764 - RNA, 22 nt, Human
ucauauugugccaauauguauu

SEQ ID NO: 2419765 - RNA, 20 nt, Human
ucauauugugccaauaugua

SEQ ID NO: 2419766 - RNA, 15 nt, Human
ucauauugugccaau

SEQ ID NO: 2419767 - RNA, 14 nt, Human
ucauauugugccaa

SEQ ID NO: 2419768 - RNA, 12 nt, Human
ucauauuuaaag

SEQ ID NO: 2419769 - RNA, 14 nt, Human
ucauauuguuuccu

SEQ ID NO: 2419770 - RNA, 19 nt, Human
ucauauuuaaagacaggga

SEQ ID NO: 2419771 - RNA, 15 nt, Human
ucauauuuacuucuu

SEQ ID NO: 2419772 - RNA, 23 nt, Human
ucauauuuacuucuuauacauuu

SEQ ID NO: 2419773 - RNA, 18 nt, Human
ucauauccccuauuuaac

SEQ ID NO: 2419774 - RNA, 21 nt, Human
ucauaugaaaaaaaugcauuu

SEQ ID NO: 2419775 - RNA, 12 nt, Human
ucauaugaaaaa

SEQ ID NO: 2419776 - RNA, 20 nt, Human
ucauaugacauucaugccug

SEQ ID NO: 2419777 - RNA, 11 nt, Human
ucauaugaaaa

SEQ ID NO: 2419778 - RNA, 19 nt, Human
ucauaugauucugcuuuua

SEQ ID NO: 2419779 - RNA, 15 nt, Human
ucauaugauucugcu

SEQ ID NO: 2419780 - RNA, 17 nt, Human
ucauauggcccaguguc

SEQ ID NO: 2419781 - RNA, 18 nt, Human
ucauauggcccaguguca

SEQ ID NO: 2419782 - RNA, 21 nt, Human
ucauauguaccauguacauga

SEQ ID NO: 2419783 - RNA, 22 nt, Human
ucauauguaccauguacaugaa

SEQ ID NO: 2419784 - RNA, 14 nt, Human
ucauauugaauaua

SEQ ID NO: 2419785 - RNA, 15 nt, Human
accuccccugaggcu

SEQ ID NO: 2419786 - RNA, 21 nt, Human
accuccccuauccacccagcc

SEQ ID NO: 2419787 - RNA, 23 nt, Human
accuccccuauccacccagccca

SEQ ID NO: 2419788 - RNA, 13 nt, Human
accuccccuccuu

SEQ ID NO: 2419789 - RNA, 17 nt, Human
accuccccuccuugccu

SEQ ID NO: 2419790 - RNA, 19 nt, Human
accuccccuccuugccucc

SEQ ID NO: 2419791 - RNA, 20 nt, Human
accuccccuccuugccuccu

SEQ ID NO: 2419792 - RNA, 21 nt, Human
accuccccuccuugccuccug

SEQ ID NO: 2419793 - RNA, 22 nt, Human
accuccccuccuugccuccugu

SEQ ID NO: 2419794 - RNA, 13 nt, Human
accuccccagccc

SEQ ID NO: 2419795 - RNA, 12 nt, Human
accuccccagcc

SEQ ID NO: 2419796 - RNA, 23 nt, Human
accuccccagcauuccagccccu

SEQ ID NO: 2419797 - RNA, 21 nt, Human
accuccccagcauuccagccc

SEQ ID NO: 2419798 - RNA, 15 nt, Human
accuccccagcauuc

SEQ ID NO: 2419799 - RNA, 15 nt, Human
accucccccugcccc

SEQ ID NO: 2419800 - RNA, 21 nt, Human
accucccccucccccuucucc

SEQ ID NO: 2419801 - RNA, 14 nt, Human
accuccccuaucca

SEQ ID NO: 2419802 - RNA, 17 nt, Human
accuccccuauccaccc

SEQ ID NO: 2419803 - RNA, 18 nt, Human
accuccccuauccaccca

SEQ ID NO: 2419804 - RNA, 19 nt, Human
accuccccuauccacccag

SEQ ID NO: 2419805 - RNA, 20 nt, Human
accuccccuauccacccagc

SEQ ID NO: 2419806 - RNA, 13 nt, Human
accuccucuguga

SEQ ID NO: 2419807 - RNA, 14 nt, Human
accuccucugugaa

SEQ ID NO: 2419808 - RNA, 18 nt, Human
accuccucugugaagcau

SEQ ID NO: 2419809 - RNA, 11 nt, Human
accuccucugu

SEQ ID NO: 2419810 - RNA, 12 nt, Human
accuccucugug

SEQ ID NO: 2419811 - RNA, 16 nt, Human
accuccucuucugacg

SEQ ID NO: 2419812 - RNA, 13 nt, Human
accuccugagaaa

SEQ ID NO: 2419813 - RNA, 12 nt, Human
accuccugccca

SEQ ID NO: 2419814 - RNA, 13 nt, Human
accuccugcccag

SEQ ID NO: 2419815 - RNA, 14 nt, Human
accuccugcccagg

SEQ ID NO: 2419816 - RNA, 15 nt, Human
accuccugcccagga

SEQ ID NO: 2419817 - RNA, 16 nt, Human
accuccugcccaggag

SEQ ID NO: 2419818 - RNA, 17 nt, Human
accuccugcccaggaga

SEQ ID NO: 2419819 - RNA, 18 nt, Human
accuccugcccaggagag

SEQ ID NO: 2419820 - RNA, 15 nt, Human
accucacucuugcca

SEQ ID NO: 2419821 - RNA, 13 nt, Human
accucacuccugu

SEQ ID NO: 2419822 - RNA, 14 nt, Human
accucacuccuguu

SEQ ID NO: 2419823 - RNA, 18 nt, Human
accucacucuugccaacc

SEQ ID NO: 2419824 - RNA, 16 nt, Human
accucacucuugccaa

SEQ ID NO: 2419825 - RNA, 15 nt, Human
accuccacagcuucc

SEQ ID NO: 2419826 - RNA, 20 nt, Human
accuccacaguucaguggca

SEQ ID NO: 2419827 - RNA, 16 nt, Human
accuccacauccucca

SEQ ID NO: 2419828 - RNA, 19 nt, Human
accuccacaguucaguggc

SEQ ID NO: 2419829 - RNA, 18 nt, Human
accuccacaguucagugg

SEQ ID NO: 2419830 - RNA, 14 nt, Human
accuccacauccuc

SEQ ID NO: 2419831 - RNA, 21 nt, Human
accuccagaaacggccauuca

SEQ ID NO: 2419832 - RNA, 21 nt, Human
accucccagcccuauggaugu

SEQ ID NO: 2419833 - RNA, 20 nt, Human
accucccagcccuauggaug

SEQ ID NO: 2419834 - RNA, 19 nt, Human
accucccagcccuauggau

SEQ ID NO: 2419835 - RNA, 15 nt, Human
accucccagcccuau

SEQ ID NO: 2419836 - RNA, 14 nt, Human
accucccagcccua

SEQ ID NO: 2419837 - RNA, 13 nt, Human
accucccagcccu

SEQ ID NO: 2419838 - RNA, 22 nt, Human
accuccccacgcccuccccucc

SEQ ID NO: 2419839 - RNA, 21 nt, Human
accuccccacgcccuccccuc

SEQ ID NO: 2419840 - RNA, 20 nt, Human
accuccccacgcccuccccu

SEQ ID NO: 2419841 - RNA, 19 nt, Human
accuccccacgcccucccc

SEQ ID NO: 2419842 - RNA, 14 nt, Human
accuccccacgccc

SEQ ID NO: 2419843 - RNA, 11 nt, Human
accuccccacg

SEQ ID NO: 2419844 - RNA, 22 nt, Human
accucccagcccuauggaugug

SEQ ID NO: 2419845 - RNA, 15 nt, Human
accucccauccuaau

SEQ ID NO: 2419846 - RNA, 20 nt, Human
accucccacaaaggagagcu

SEQ ID NO: 2419847 - RNA, 10 nt, Human
accuccaucu

SEQ ID NO: 2419848 - RNA, 20 nt, Human
accuacuuugacuuuuugca

SEQ ID NO: 2419849 - RNA, 21 nt, Human
accuacuuugacuuuuugcau

SEQ ID NO: 2419850 - RNA, 22 nt, Human
accuagaaauugacacaagugg

SEQ ID NO: 2419851 - RNA, 20 nt, Human
accuagagacuucacccggg

SEQ ID NO: 2419852 - RNA, 14 nt, Human
accuagaagggcua

SEQ ID NO: 2419853 - RNA, 17 nt, Human
accuaggauaucuucuc

SEQ ID NO: 2419854 - RNA, 16 nt, Human
accgcagacaggacca

SEQ ID NO: 2419855 - RNA, 12 nt, Human
accgcagacagg

SEQ ID NO: 2419856 - RNA, 17 nt, Human
accgcagacaggaccag

SEQ ID NO: 2419857 - RNA, 20 nt, Human
accuaccucagguugcuggu

SEQ ID NO: 2419858 - RNA, 18 nt, Human
accuaccuucauuucagg

SEQ ID NO: 2419859 - RNA, 16 nt, Human
accuauuccuccuggg

SEQ ID NO: 2419860 - RNA, 23 nt, Human
accuauguccuaaggacacacua

SEQ ID NO: 2419861 - RNA, 22 nt, Human
accuauguccuaaggacacacu

SEQ ID NO: 2419862 - RNA, 19 nt, Human
accuauguccuaaggacac

SEQ ID NO: 2419863 - RNA, 17 nt, Human
accuauguccuaaggac

SEQ ID NO: 2419864 - RNA, 22 nt, Human
accuaugucauuucauuuccua

SEQ ID NO: 2419865 - RNA, 19 nt, Human
accuaugucauuucauuuc

SEQ ID NO: 2419866 - RNA, 20 nt, Human
accuagggauguucuggccc

SEQ ID NO: 2419867 - RNA, 16 nt, Human
accuagggugauauua

SEQ ID NO: 2419868 - RNA, 17 nt, Human
accuaggccacuccucc

SEQ ID NO: 2419869 - RNA, 18 nt, Human
accuaggccacuccucca

SEQ ID NO: 2419870 - RNA, 15 nt, Human
accuagggaggaccu

SEQ ID NO: 2419871 - RNA, 17 nt, Human
accuagggaggaccuua

SEQ ID NO: 2419872 - RNA, 24 nt, Human
accuagggaggaccuuaucugugc

SEQ ID NO: 2419873 - RNA, 15 nt, Human
accuaggggcgccgc

SEQ ID NO: 2419874 - RNA, 20 nt, Human
accucacuauucaaguauua

SEQ ID NO: 2419875 - RNA, 19 nt, Human
accucacgcaccucccauc

SEQ ID NO: 2419876 - RNA, 22 nt, Human
accucacgcaccucccauccua

SEQ ID NO: 2419877 - RNA, 15 nt, Human
accucacgcaccucc

SEQ ID NO: 2419878 - RNA, 16 nt, Human
accucacgcaccuccc

SEQ ID NO: 2419879 - RNA, 17 nt, Human
accucacgcaccuccca

SEQ ID NO: 2419880 - RNA, 18 nt, Human
accucacgcaccucccau

SEQ ID NO: 2419881 - RNA, 14 nt, Human
accucaccuagaaa

SEQ ID NO: 2419882 - RNA, 15 nt, Human
accucaccuagaaau

SEQ ID NO: 2419883 - RNA, 14 nt, Human
accucacccugcua

SEQ ID NO: 2419884 - RNA, 12 nt, Human
accucacccugc

SEQ ID NO: 2419885 - RNA, 21 nt, Human
accuauuuugaaaaauuccua

SEQ ID NO: 2419886 - RNA, 19 nt, Human
accucacccgaggcugccc

SEQ ID NO: 2419887 - RNA, 16 nt, Human
accucaaaaugucuaa

SEQ ID NO: 2419888 - RNA, 20 nt, Human
accuauuuugaaaaauuccu

SEQ ID NO: 2419889 - RNA, 14 nt, Human
accuauuugacaua

SEQ ID NO: 2419890 - RNA, 12 nt, Human
accuauuuccau

SEQ ID NO: 2419891 - RNA, 16 nt, Human
ucaugugaaaucauuc

SEQ ID NO: 2419892 - RNA, 17 nt, Human
ucaugugaaaucauuca

SEQ ID NO: 2419893 - RNA, 17 nt, Human
ucaugugaccacucugu

SEQ ID NO: 2419894 - RNA, 20 nt, Human
ucaugcaucuccaccugcuc

SEQ ID NO: 2419895 - RNA, 20 nt, Human
ucaugcauaaauaugcagug

SEQ ID NO: 2419896 - RNA, 16 nt, Human
ucaugcaucuccaccu

SEQ ID NO: 2419897 - RNA, 23 nt, Human
ucaugcagccgugaucaagggaa

SEQ ID NO: 2419898 - RNA, 14 nt, Human
ucaugcagccguga

SEQ ID NO: 2419899 - RNA, 13 nt, Human
ucaugcagccgug

SEQ ID NO: 2419900 - RNA, 19 nt, Human
ucaugcauaaauaugcagu

SEQ ID NO: 2419901 - RNA, 15 nt, Human
ucaugcauaaauaug

SEQ ID NO: 2419902 - RNA, 14 nt, Human
ucaugcauaaauau

SEQ ID NO: 2419903 - RNA, 23 nt, Human
ucaugcaaacuuuauuuuguguu

SEQ ID NO: 2419904 - RNA, 17 nt, Human
ucaugcaaaggcuggga

SEQ ID NO: 2419905 - RNA, 20 nt, Human
ucaugcaaaugcuguauucu

SEQ ID NO: 2419906 - RNA, 13 nt, Human
ucaugcaaugaca

SEQ ID NO: 2419907 - RNA, 15 nt, Human
ucaugcaaugacauc

SEQ ID NO: 2419908 - RNA, 16 nt, Human
ucaugcaaugacaucu

SEQ ID NO: 2419909 - RNA, 23 nt, Human
ucauguguaaucaauaaacgauu

SEQ ID NO: 2419910 - RNA, 22 nt, Human
ucauguguaaucaauaaacgau

SEQ ID NO: 2419911 - RNA, 21 nt, Human
ucauguguaaucaauaaacga

SEQ ID NO: 2419912 - RNA, 19 nt, Human
ucauguguaaucaauaaac

SEQ ID NO: 2419913 - RNA, 20 nt, Human
ucauguguacaaaaguuuca

SEQ ID NO: 2419914 - RNA, 21 nt, Human
ucauguggcuggaagauccug

SEQ ID NO: 2419915 - RNA, 16 nt, Human
ucauguggcuggaaga

SEQ ID NO: 2419916 - RNA, 18 nt, Human
ucauguguaaucaauaaa

SEQ ID NO: 2419917 - RNA, 20 nt, Human
ucaugugauccuuuuauguu

SEQ ID NO: 2419918 - RNA, 13 nt, Human
ucauguggcugga

SEQ ID NO: 2419919 - RNA, 19 nt, Human
ucauguggaauauaaagau

SEQ ID NO: 2419920 - RNA, 15 nt, Human
ucaugugauccuuuu

SEQ ID NO: 2419921 - RNA, 22 nt, Human
ucaugcaucuccaccugcuccc

SEQ ID NO: 2419922 - RNA, 18 nt, Human
ucauguggaauauaaaga

SEQ ID NO: 2419923 - RNA, 21 nt, Human
ucauguuugcuucauaaauga

SEQ ID NO: 2419924 - RNA, 17 nt, Human
ucauguuugcuucauaa

SEQ ID NO: 2419925 - RNA, 15 nt, Human
ucauguuugcuucau

SEQ ID NO: 2419926 - RNA, 21 nt, Human
ucauguuuuaaagcuugcuca

SEQ ID NO: 2419927 - RNA, 20 nt, Human
ucauguuugcuucauaaaug

SEQ ID NO: 2419928 - RNA, 13 nt, Human
ucauguuuuaaca

SEQ ID NO: 2419929 - RNA, 14 nt, Human
ucauguuugcuuca

SEQ ID NO: 2419930 - RNA, 15 nt, Human
ucauguuugcucucc

SEQ ID NO: 2419931 - RNA, 16 nt, Human
ucauguuucuuaaaug

SEQ ID NO: 2419932 - RNA, 19 nt, Human
ucauguguaugggcaaaaa

SEQ ID NO: 2419933 - RNA, 17 nt, Human
ucauguuuacagaggac

SEQ ID NO: 2419934 - RNA, 11 nt, Human
ucauguuucuu

SEQ ID NO: 2419935 - RNA, 15 nt, Human
ucauguuucuuaaau

SEQ ID NO: 2419936 - RNA, 14 nt, Human
ucauccauucuauu

SEQ ID NO: 2419937 - RNA, 17 nt, Human
ucauccaucaucaugug

SEQ ID NO: 2419938 - RNA, 19 nt, Human
ucauccauucuauuguuaa

SEQ ID NO: 2419939 - RNA, 16 nt, Human
ucaucccaacugucuu

SEQ ID NO: 2419940 - RNA, 15 nt, Human
ucauccaucaucaug

SEQ ID NO: 2419941 - RNA, 16 nt, Human
ucauccaucaucaugu

SEQ ID NO: 2419942 - RNA, 13 nt, Human
ucauccauccagg

SEQ ID NO: 2419943 - RNA, 21 nt, Human
ucauccagggcucugaccagu

SEQ ID NO: 2419944 - RNA, 14 nt, Human
ucauccagggcucu

SEQ ID NO: 2419945 - RNA, 11 nt, Human
ucauccaucau

SEQ ID NO: 2419946 - RNA, 12 nt, Human
ucauccaucauc

SEQ ID NO: 2419947 - RNA, 14 nt, Human
ucauccaucaucau

SEQ ID NO: 2419948 - RNA, 19 nt, Human
accuccugcccaggagagc

SEQ ID NO: 2419949 - RNA, 20 nt, Human
accuccugcccaggagagcc

SEQ ID NO: 2419950 - RNA, 11 nt, Human
accuccugccu

SEQ ID NO: 2419951 - RNA, 21 nt, Human
accuccugcccaggagagcca

SEQ ID NO: 2419952 - RNA, 17 nt, Human
ucauccuuuccagcaug

SEQ ID NO: 2419953 - RNA, 16 nt, Human
ucauccuuuccagcau

SEQ ID NO: 2419954 - RNA, 13 nt, Human
ucaucccagcugc

SEQ ID NO: 2419955 - RNA, 18 nt, Human
ucaucccacgcacuccau

SEQ ID NO: 2419956 - RNA, 14 nt, Human
ucaucgaaucuacu

SEQ ID NO: 2419957 - RNA, 21 nt, Human
ucaucgaaucuacuaauucca

SEQ ID NO: 2419958 - RNA, 13 nt, Human
ucaucuaggauuu

SEQ ID NO: 2419959 - RNA, 19 nt, Human
ucaucgggaauacuaggga

SEQ ID NO: 2419960 - RNA, 17 nt, Human
ucaucgcguccuccuac

SEQ ID NO: 2419961 - RNA, 18 nt, Human
ucaucgcguccuccuacc

SEQ ID NO: 2419962 - RNA, 14 nt, Human
ucaugcaaacuuua

SEQ ID NO: 2419963 - RNA, 21 nt, Human
ucaugauuuugaaaucaugaa

SEQ ID NO: 2419964 - RNA, 11 nt, Human
ucaugauuuuu

SEQ ID NO: 2419965 - RNA, 14 nt, Human
ucaugauuuugaaa

SEQ ID NO: 2419966 - RNA, 23 nt, Human
ucaugauuucauuucaacuguuu

SEQ ID NO: 2419967 - RNA, 17 nt, Human
ucaugauuucauuucaa

SEQ ID NO: 2419968 - RNA, 22 nt, Human
ucaugaacuucgcaucaaaaga

SEQ ID NO: 2419969 - RNA, 21 nt, Human
ucaugaacuucgcaucaaaag

SEQ ID NO: 2419970 - RNA, 19 nt, Human
ucaugaagauauuuuucca

SEQ ID NO: 2419971 - RNA, 22 nt, Human
ucaugauucacccccaaacagu

SEQ ID NO: 2419972 - RNA, 12 nt, Human
ucaugaagccca

SEQ ID NO: 2419973 - RNA, 16 nt, Human
ucaugauuagcaaguu

SEQ ID NO: 2419974 - RNA, 15 nt, Human
ucaugaaauaugcau

SEQ ID NO: 2419975 - RNA, 14 nt, Human
ucaugaaauaugca

SEQ ID NO: 2419976 - RNA, 18 nt, Human
ucaugaacuucgcaucaa

SEQ ID NO: 2419977 - RNA, 15 nt, Human
ucaugaacuucgcau

SEQ ID NO: 2419978 - RNA, 22 nt, Human
ucaugaaccucaagcugcaucu

SEQ ID NO: 2419979 - RNA, 11 nt, Human
ucaugaaccuc

SEQ ID NO: 2419980 - RNA, 23 nt, Human
ucaugaacauguuccugaauucu

SEQ ID NO: 2419981 - RNA, 18 nt, Human
acuaugcguuuuuauaaa

SEQ ID NO: 2419982 - RNA, 14 nt, Human
acuaugcguuuuua

SEQ ID NO: 2419983 - RNA, 12 nt, Human
acuaugccugug

SEQ ID NO: 2419984 - RNA, 18 nt, Human
acuaugccugugucuucu

SEQ ID NO: 2419985 - RNA, 19 nt, Human
acuaugccugugucuucuc

SEQ ID NO: 2419986 - RNA, 22 nt, Human
acuauggcccuggccuagcaua

SEQ ID NO: 2419987 - RNA, 14 nt, Human
acuauguugcccag

SEQ ID NO: 2419988 - RNA, 16 nt, Human
acuauguugcccaggc

SEQ ID NO: 2419989 - RNA, 15 nt, Human
acuauguugcccagg

SEQ ID NO: 2419990 - RNA, 15 nt, Human
acuaugguauuugag

SEQ ID NO: 2419991 - RNA, 16 nt, Human
acuaugguauuugagu

SEQ ID NO: 2419992 - RNA, 14 nt, Human
acucaagaggcuga

SEQ ID NO: 2419993 - RNA, 15 nt, Human
acucaagaggcugag

SEQ ID NO: 2419994 - RNA, 17 nt, Human
acucaagaggcugaggc

SEQ ID NO: 2419995 - RNA, 18 nt, Human
acucaagaggcugaggca

SEQ ID NO: 2419996 - RNA, 17 nt, Human
acucaaggacuuugcag

SEQ ID NO: 2419997 - RNA, 22 nt, Human
acucaagccaagcagccaagcu

SEQ ID NO: 2419998 - RNA, 17 nt, Human
acucaagccaagcagcc

SEQ ID NO: 2419999 - RNA, 19 nt, Human
acucaagccaagcagccaa

SEQ ID NO: 2420000 - RNA, 14 nt, Human
acucaagcccgcgg

SEQ ID NO: 2420001 - RNA, 14 nt, Human
acucaagccaagca

SEQ ID NO: 2420002 - RNA, 16 nt, Human
acucaagccaagcagc

SEQ ID NO: 2420003 - RNA, 11 nt, Human
acucaagccaa

SEQ ID NO: 2420004 - RNA, 16 nt, Human
acucaaugcacugaca

SEQ ID NO: 2420005 - RNA, 19 nt, Human
acucaagguucccagagau

SEQ ID NO: 2420006 - RNA, 20 nt, Human
acucaagguucccagagaug

SEQ ID NO: 2420007 - RNA, 14 nt, Human
acucacacaggacc

SEQ ID NO: 2420008 - RNA, 22 nt, Human
acucacacagccaggugccuug

SEQ ID NO: 2420009 - RNA, 15 nt, Human
acucacacagccagg

SEQ ID NO: 2420010 - RNA, 14 nt, Human
acucacacagccag

SEQ ID NO: 2420011 - RNA, 21 nt, Human
acucacaagaagaccagacug

SEQ ID NO: 2420012 - RNA, 18 nt, Human
acucacaagaagaccaga

SEQ ID NO: 2420013 - RNA, 16 nt, Human
acucacaagaagacca

SEQ ID NO: 2420014 - RNA, 14 nt, Human
acucacaagaagac

SEQ ID NO: 2420015 - RNA, 17 nt, Human
acucaauuucuccccag

SEQ ID NO: 2420016 - RNA, 16 nt, Human
acucaauuucucccca

SEQ ID NO: 2420017 - RNA, 14 nt, Human
acucaauuucuccc

SEQ ID NO: 2420018 - RNA, 21 nt, Human
acucacaaccugaaccuagga

SEQ ID NO: 2420019 - RNA, 21 nt, Human
acucaauguuacuaucugcuu

SEQ ID NO: 2420020 - RNA, 15 nt, Human
acucaauugauaaac

SEQ ID NO: 2420021 - RNA, 16 nt, Human
acucaauggauuugau

SEQ ID NO: 2420022 - RNA, 22 nt, Human
acucaagugucucaguccaccu

SEQ ID NO: 2420023 - RNA, 17 nt, Human
acuaucucauuuccaag

SEQ ID NO: 2420024 - RNA, 16 nt, Human
acuaucucauuuccaa

SEQ ID NO: 2420025 - RNA, 13 nt, Human
acuaucugcuuuu

SEQ ID NO: 2420026 - RNA, 12 nt, Human
acuaucugcuuu

SEQ ID NO: 2420027 - RNA, 20 nt, Human
acuaucugaaccauuaaagu

SEQ ID NO: 2420028 - RNA, 19 nt, Human
acuaucuacucuccucauc

SEQ ID NO: 2420029 - RNA, 17 nt, Human
acuaucugucugguggc

SEQ ID NO: 2420030 - RNA, 16 nt, Human
acuaugccugugucuu

SEQ ID NO: 2420031 - RNA, 14 nt, Human
acuaucugucuggu

SEQ ID NO: 2420032 - RNA, 12 nt, Human
acuaucugggug

SEQ ID NO: 2420033 - RNA, 17 nt, Human
acuaucuacucuccuca

SEQ ID NO: 2420034 - RNA, 16 nt, Human
acuaucuaaauguuga

SEQ ID NO: 2420035 - RNA, 21 nt, Human
acuaucuaaauguugaaagau

SEQ ID NO: 2420036 - RNA, 15 nt, Human
acuaucucauuucca

SEQ ID NO: 2420037 - RNA, 15 nt, Human
acuaucuacucuccu

SEQ ID NO: 2420038 - RNA, 16 nt, Human
acuaucuacucuccuc

SEQ ID NO: 2420039 - RNA, 14 nt, Human
acuaucaaacugaa

SEQ ID NO: 2420040 - RNA, 19 nt, Human
acuaucaaacugaagccag

SEQ ID NO: 2420041 - RNA, 22 nt, Human
acuauauuguuugcuaagcauu

SEQ ID NO: 2420042 - RNA, 23 nt, Human
acuauauuugggccugcuccaga

SEQ ID NO: 2420043 - RNA, 22 nt, Human
acuauauuugggccugcuccag

SEQ ID NO: 2420044 - RNA, 17 nt, Human
acuauauuguuugcuaa

SEQ ID NO: 2420045 - RNA, 18 nt, Human
acuauagccuaggugaca

SEQ ID NO: 2420046 - RNA, 16 nt, Human
acuagaggcagggagg

SEQ ID NO: 2420047 - RNA, 22 nt, Human
acuauagccuaggugacagagu

SEQ ID NO: 2420048 - RNA, 20 nt, Human
acuauagccuaggugacaga

SEQ ID NO: 2420049 - RNA, 19 nt, Human
acuagagcagcccuggagu

SEQ ID NO: 2420050 - RNA, 23 nt, Human
acuagagaucugguuuugcuauu

SEQ ID NO: 2420051 - RNA, 16 nt, Human
acuagagcagcccugg

SEQ ID NO: 2420052 - RNA, 17 nt, Human
acuagagaucugguuuu

SEQ ID NO: 2420053 - RNA, 14 nt, Human
acuagaggcaggga

SEQ ID NO: 2420054 - RNA, 15 nt, Human
acuagaggcagggag

SEQ ID NO: 2420055 - RNA, 21 nt, Human
acuagagcagcccuggaguca

SEQ ID NO: 2420056 - RNA, 18 nt, Human
acuagagggaccucuccc

SEQ ID NO: 2420057 - RNA, 11 nt, Human
ucccccagccc

SEQ ID NO: 2420058 - RNA, 23 nt, Human
uccccagguccagcucuggaggg

SEQ ID NO: 2420059 - RNA, 17 nt, Human
uccccagguccagcucu

SEQ ID NO: 2420060 - RNA, 15 nt, Human
uccccagguggcuga

SEQ ID NO: 2420061 - RNA, 18 nt, Human
uccccagguggcugaccc

SEQ ID NO: 2420062 - RNA, 19 nt, Human
uccccagguggcugaccca

SEQ ID NO: 2420063 - RNA, 20 nt, Human
uccccagguggcugacccag

SEQ ID NO: 2420064 - RNA, 15 nt, Human
uccccaggggaguug

SEQ ID NO: 2420065 - RNA, 17 nt, Human
uccccaggggucccagc

SEQ ID NO: 2420066 - RNA, 18 nt, Human
uccccaggggucccagcc

SEQ ID NO: 2420067 - RNA, 20 nt, Human
uccccaggggucccagccac

SEQ ID NO: 2420068 - RNA, 16 nt, Human
uccccagguccagcuc

SEQ ID NO: 2420069 - RNA, 15 nt, Human
uccccagguccagcu

SEQ ID NO: 2420070 - RNA, 22 nt, Human
uccccaggggucccagccaccc

SEQ ID NO: 2420071 - RNA, 23 nt, Human
uccccaggggucccagccacccc

SEQ ID NO: 2420072 - RNA, 21 nt, Human
uccccaggaggccagccuuga

SEQ ID NO: 2420073 - RNA, 20 nt, Human
uccccaggaggccagccuug

SEQ ID NO: 2420074 - RNA, 10 nt, Human
uccccagggg

SEQ ID NO: 2420075 - RNA, 19 nt, Human
uccccaggggaaaaugaag

SEQ ID NO: 2420076 - RNA, 18 nt, Human
uccccaggggaaaaugaa

SEQ ID NO: 2420077 - RNA, 14 nt, Human
uccccaggggagag

SEQ ID NO: 2420078 - RNA, 23 nt, Human
uccccaggggagagggucuggag

SEQ ID NO: 2420079 - RNA, 18 nt, Human
ucccauuuuggaaguuuu

SEQ ID NO: 2420080 - RNA, 19 nt, Human
ucccauuuuggaaguuuuc

SEQ ID NO: 2420081 - RNA, 17 nt, Human
uccccaggaggccagcc

SEQ ID NO: 2420082 - RNA, 18 nt, Human
acuacugggcaaagagug

SEQ ID NO: 2420083 - RNA, 20 nt, Human
acuacugcuaccacaacuau

SEQ ID NO: 2420084 - RNA, 13 nt, Human
acuacuguguucc

SEQ ID NO: 2420085 - RNA, 22 nt, Human
acuacuguggaaaaauauuuaa

SEQ ID NO: 2420086 - RNA, 15 nt, Human
acuacuguguuccug

SEQ ID NO: 2420087 - RNA, 18 nt, Human
acuacuguggaaaaauau

SEQ ID NO: 2420088 - RNA, 19 nt, Human
acuacuguggaaaaauauu

SEQ ID NO: 2420089 - RNA, 20 nt, Human
acuacuguggaaaaauauuu

SEQ ID NO: 2420090 - RNA, 21 nt, Human
acuacuguggaaaaauauuua

SEQ ID NO: 2420091 - RNA, 20 nt, Human
acuagacauucugucgccuu

SEQ ID NO: 2420092 - RNA, 16 nt, Human
acuagacauucugucg

SEQ ID NO: 2420093 - RNA, 15 nt, Human
acuagacauucuguc

SEQ ID NO: 2420094 - RNA, 21 nt, Human
acuacuguguuccuggcaaua

SEQ ID NO: 2420095 - RNA, 16 nt, Human
acuacuguguuccugg

SEQ ID NO: 2420096 - RNA, 18 nt, Human
acuacuguguuccuggca

SEQ ID NO: 2420097 - RNA, 19 nt, Human
acuagacucccaagcugga

SEQ ID NO: 2420098 - RNA, 15 nt, Human
ucccccagccccauc

SEQ ID NO: 2420099 - RNA, 13 nt, Human
ucccccagcccca

SEQ ID NO: 2420100 - RNA, 16 nt, Human
ucccccagccccaucc

SEQ ID NO: 2420101 - RNA, 13 nt, Human
acuacucugugcc

SEQ ID NO: 2420102 - RNA, 18 nt, Human
acuacugacauguggggc

SEQ ID NO: 2420103 - RNA, 23 nt, Human
acuacugacauguggggccaggu

SEQ ID NO: 2420104 - RNA, 18 nt, Human
uccccaggaggccagccu

SEQ ID NO: 2420105 - RNA, 16 nt, Human
uccccaccgcagacag

SEQ ID NO: 2420106 - RNA, 15 nt, Human
uccccaccgcagaca

SEQ ID NO: 2420107 - RNA, 23 nt, Human
uccccacccugaaagcccugagc

SEQ ID NO: 2420108 - RNA, 13 nt, Human
ucccauuucagcu

SEQ ID NO: 2420109 - RNA, 16 nt, Human
ucccauuguggcuccu

SEQ ID NO: 2420110 - RNA, 18 nt, Human
ucccauuucucacugaga

SEQ ID NO: 2420111 - RNA, 16 nt, Human
ucccauuucucacuga

SEQ ID NO: 2420112 - RNA, 15 nt, Human
ucccauuucucacug

SEQ ID NO: 2420113 - RNA, 14 nt, Human
ucccauuucuacuc

SEQ ID NO: 2420114 - RNA, 21 nt, Human
ucccauuucuaaaggccucuu

SEQ ID NO: 2420115 - RNA, 24 nt, Human
ucccauuucuaaaggccucuuccu

SEQ ID NO: 2420116 - RNA, 12 nt, Human
uccccacccuga

SEQ ID NO: 2420117 - RNA, 13 nt, Human
ucccauuuugcaa

SEQ ID NO: 2420118 - RNA, 21 nt, Human
ucccauuuugcaaaauuucca

SEQ ID NO: 2420119 - RNA, 22 nt, Human
ucccauuuugcaaaauuuccag

SEQ ID NO: 2420120 - RNA, 16 nt, Human
ucccagcucacgucac

SEQ ID NO: 2420121 - RNA, 17 nt, Human
ucccagcucacgucaca

SEQ ID NO: 2420122 - RNA, 17 nt, Human
ucccauugucccucugc

SEQ ID NO: 2420123 - RNA, 18 nt, Human
ucccauugucccucugcc

SEQ ID NO: 2420124 - RNA, 19 nt, Human
ucccauugucccucugccc

SEQ ID NO: 2420125 - RNA, 21 nt, Human
ucccauugucccucugcccca

SEQ ID NO: 2420126 - RNA, 21 nt, Human
ucccagcucuagacaacccug

SEQ ID NO: 2420127 - RNA, 20 nt, Human
ucccagcucuagacaacccu

SEQ ID NO: 2420128 - RNA, 16 nt, Human
ucccagcuacuuggga

SEQ ID NO: 2420129 - RNA, 17 nt, Human
ucccagcuacucaggag

SEQ ID NO: 2420130 - RNA, 15 nt, Human
ucccagcuacucagg

SEQ ID NO: 2420131 - RNA, 16 nt, Human
ucccagcuacucagga

SEQ ID NO: 2420132 - RNA, 16 nt, Human
ucccagcuacucggga

SEQ ID NO: 2420133 - RNA, 18 nt, Human
ucccagcuacuugggagg

SEQ ID NO: 2420134 - RNA, 17 nt, Human
ucccagcuacuugggag

SEQ ID NO: 2420135 - RNA, 17 nt, Human
ucccagcuacuugggaa

SEQ ID NO: 2420136 - RNA, 19 nt, Human
ucccagcuacuugggaggc

SEQ ID NO: 2420137 - RNA, 18 nt, Human
ucccagcccuauggaugu

SEQ ID NO: 2420138 - RNA, 10 nt, Human
ucccagccug

SEQ ID NO: 2420139 - RNA, 14 nt, Human
ucccagccuuggca

SEQ ID NO: 2420140 - RNA, 13 nt, Human
ucccagccuuggc

SEQ ID NO: 2420141 - RNA, 17 nt, Human
ucccagcccuauggaug

SEQ ID NO: 2420142 - RNA, 16 nt, Human
ucccagcccuauggau

SEQ ID NO: 2420143 - RNA, 15 nt, Human
ucccagcccuaugga

SEQ ID NO: 2420144 - RNA, 22 nt, Human
ucccagcccuuugggaggcuga

SEQ ID NO: 2420145 - RNA, 16 nt, Human
ucccagcuacucagaa

SEQ ID NO: 2420146 - RNA, 19 nt, Human
ucccagcuacucagaagcc

SEQ ID NO: 2420147 - RNA, 21 nt, Human
ucccagcuacucagaagccug

SEQ ID NO: 2420148 - RNA, 23 nt, Human
ucccagcuacucagaagccugag

SEQ ID NO: 2420149 - RNA, 21 nt, Human
ucccagccuuggcaucuagag

SEQ ID NO: 2420150 - RNA, 13 nt, Human
ucccagcuacuca

SEQ ID NO: 2420151 - RNA, 22 nt, Human
ucccagcuacucaagaggcuga

SEQ ID NO: 2420152 - RNA, 14 nt, Human
ucccagcuacucag

SEQ ID NO: 2420153 - RNA, 16 nt, Human
ucccagcuaccucaac

SEQ ID NO: 2420154 - RNA, 16 nt, Human
ucccagcuacaccuuu

SEQ ID NO: 2420155 - RNA, 21 nt, Human
acguggcugcuucaaggaucc

SEQ ID NO: 2420156 - RNA, 19 nt, Human
acguggcugcuucaaggau

SEQ ID NO: 2420157 - RNA, 11 nt, Human
acguguugccu

SEQ ID NO: 2420158 - RNA, 22 nt, Human
acguguuuuauuccuguauguu

SEQ ID NO: 2420159 - RNA, 16 nt, Human
acguguuugugcugug

SEQ ID NO: 2420160 - RNA, 23 nt, Human
acgugugugacucagaugucucu

SEQ ID NO: 2420161 - RNA, 15 nt, Human
acguccugccaccug

SEQ ID NO: 2420162 - RNA, 16 nt, Human
acguccugccaccugg

SEQ ID NO: 2420163 - RNA, 21 nt, Human
acgucacuggaccacugggca

SEQ ID NO: 2420164 - RNA, 18 nt, Human
acguccagaauuuuucau

SEQ ID NO: 2420165 - RNA, 23 nt, Human
acguccaccaugggguccuacca

SEQ ID NO: 2420166 - RNA, 13 nt, Human
acgucccccuggg

SEQ ID NO: 2420167 - RNA, 17 nt, Human
acgucaucuaguuuuaa

SEQ ID NO: 2420168 - RNA, 18 nt, Human
acguggcugcuucaagga

SEQ ID NO: 2420169 - RNA, 17 nt, Human
acguggcugcuucaagg

SEQ ID NO: 2420170 - RNA, 22 nt, Human
acgucccuccacguucaccccu

SEQ ID NO: 2420171 - RNA, 12 nt, Human
acgucccuccac

SEQ ID NO: 2420172 - RNA, 15 nt, Human
acguuucuaaaggcu

SEQ ID NO: 2420173 - RNA, 16 nt, Human
acguuucuaaaggcua

SEQ ID NO: 2420174 - RNA, 14 nt, Human
acguugugcauuug

SEQ ID NO: 2420175 - RNA, 15 nt, Human
acguugugcauuugg

SEQ ID NO: 2420176 - RNA, 22 nt, Human
acguuagucgugagcucuugug

SEQ ID NO: 2420177 - RNA, 21 nt, Human
acguuagucgugagcucuugu

SEQ ID NO: 2420178 - RNA, 17 nt, Human
acguuagaccacaaaua

SEQ ID NO: 2420179 - RNA, 12 nt, Human
acguuacauuuu

SEQ ID NO: 2420180 - RNA, 16 nt, Human
acguuagucgugagcu

SEQ ID NO: 2420181 - RNA, 21 nt, Human
acguuaagggaaggaacucug

SEQ ID NO: 2420182 - RNA, 15 nt, Human
acguuaccaggcagg

SEQ ID NO: 2420183 - RNA, 13 nt, Human
acguugugcauuu

SEQ ID NO: 2420184 - RNA, 17 nt, Human
acguuaugguguuucuc

SEQ ID NO: 2420185 - RNA, 16 nt, Human
acguuaugguguuucu

SEQ ID NO: 2420186 - RNA, 18 nt, Human
acguuagaccacaaauag

SEQ ID NO: 2420187 - RNA, 19 nt, Human
acguuggagaagcccgugu

SEQ ID NO: 2420188 - RNA, 13 nt, Human
acguucaccccuc

SEQ ID NO: 2420189 - RNA, 23 nt, Human
uccagugguuugagacacugguu

SEQ ID NO: 2420190 - RNA, 16 nt, Human
uccagugguuugagac

SEQ ID NO: 2420191 - RNA, 19 nt, Human
uccagugguugcuguugau

SEQ ID NO: 2420192 - RNA, 15 nt, Human
uccagugguugcugu

SEQ ID NO: 2420193 - RNA, 19 nt, Human
uccaguggugaagaaaacu

SEQ ID NO: 2420194 - RNA, 12 nt, Human
uccaguggugaa

SEQ ID NO: 2420195 - RNA, 22 nt, Human
uccagugguccauggaaugcuu

SEQ ID NO: 2420196 - RNA, 20 nt, Human
uccagugguccauggaaugc

SEQ ID NO: 2420197 - RNA, 20 nt, Human
uccaguggggcaagauuuuc

SEQ ID NO: 2420198 - RNA, 17 nt, Human
uccaguguccuuagaac

SEQ ID NO: 2420199 - RNA, 18 nt, Human
uccaguguccuuagaaca

SEQ ID NO: 2420200 - RNA, 21 nt, Human
uccaguguccuuagaacauuu

SEQ ID NO: 2420201 - RNA, 15 nt, Human
uccagugucucacag

SEQ ID NO: 2420202 - RNA, 20 nt, Human
uccaguguccuuagaacauu

SEQ ID NO: 2420203 - RNA, 12 nt, Human
uccauccugagg

SEQ ID NO: 2420204 - RNA, 15 nt, Human
uccauccugaggcuc

SEQ ID NO: 2420205 - RNA, 18 nt, Human
acggucuguucuugaagc

SEQ ID NO: 2420206 - RNA, 16 nt, Human
uccagugucucacagc

SEQ ID NO: 2420207 - RNA, 19 nt, Human
uccaguuaaaaaaaauuuu

SEQ ID NO: 2420208 - RNA, 16 nt, Human
uccagugucucggagg

SEQ ID NO: 2420209 - RNA, 14 nt, Human
acgucaaacaugaa

SEQ ID NO: 2420210 - RNA, 16 nt, Human
acgucaaacaugaagu

SEQ ID NO: 2420211 - RNA, 17 nt, Human
acgucaaacaugaagug

SEQ ID NO: 2420212 - RNA, 17 nt, Human
acgucaagucuccuucc

SEQ ID NO: 2420213 - RNA, 18 nt, Human
acguaaugaaacuuggau

SEQ ID NO: 2420214 - RNA, 17 nt, Human
acggugggccuugcugg

SEQ ID NO: 2420215 - RNA, 18 nt, Human
acguaaccacggaaaaga

SEQ ID NO: 2420216 - RNA, 21 nt, Human
acggugccuuuuuucacggaa

SEQ ID NO: 2420217 - RNA, 17 nt, Human
acggugcagucugggug

SEQ ID NO: 2420218 - RNA, 15 nt, Human
acggugcccaagcca

SEQ ID NO: 2420219 - RNA, 20 nt, Human
acggucuguucuugaagcag

SEQ ID NO: 2420220 - RNA, 14 nt, Human
acggugcccaagcc

SEQ ID NO: 2420221 - RNA, 22 nt, Human
acggugcuccaggcaggcuaag

SEQ ID NO: 2420222 - RNA, 18 nt, Human
acggugcuccaggcaggc

SEQ ID NO: 2420223 - RNA, 15 nt, Human
acggugcuccaggca

SEQ ID NO: 2420224 - RNA, 18 nt, Human
acggugggcauuugugag

SEQ ID NO: 2420225 - RNA, 19 nt, Human
acggugggcauuugugagg

SEQ ID NO: 2420226 - RNA, 18 nt, Human
acguaaagcuagaaauga

SEQ ID NO: 2420227 - RNA, 17 nt, Human
acguaaagcuagaaaug

SEQ ID NO: 2420228 - RNA, 21 nt, Human
ucccagauuggcucacacuga

SEQ ID NO: 2420229 - RNA, 20 nt, Human
ucccagauuggcucacacug

SEQ ID NO: 2420230 - RNA, 19 nt, Human
ucccagauuggcucacacu

SEQ ID NO: 2420231 - RNA, 18 nt, Human
ucccagauuggcucacac

SEQ ID NO: 2420232 - RNA, 18 nt, Human
ucccagauacuugggggg

SEQ ID NO: 2420233 - RNA, 17 nt, Human
ucccagaucggaucugu

SEQ ID NO: 2420234 - RNA, 16 nt, Human
ucccagauaaugugaa

SEQ ID NO: 2420235 - RNA, 15 nt, Human
ucccagagugcuggg

SEQ ID NO: 2420236 - RNA, 17 nt, Human
ucccagagcaggaggcc

SEQ ID NO: 2420237 - RNA, 21 nt, Human
ucccagagcaggaggccccug

SEQ ID NO: 2420238 - RNA, 18 nt, Human
ucccagagcaggaggccc

SEQ ID NO: 2420239 - RNA, 21 nt, Human
ucccagaggguuuccaugggg

SEQ ID NO: 2420240 - RNA, 16 nt, Human
ucccagaggcugcccc

SEQ ID NO: 2420241 - RNA, 17 nt, Human
ucccagaggcugcccca

SEQ ID NO: 2420242 - RNA, 16 nt, Human
ucccagauacuugggg

SEQ ID NO: 2420243 - RNA, 23 nt, Human
ucccacuuggccaagcagggagg

SEQ ID NO: 2420244 - RNA, 12 nt, Human
ucccagaaauua

SEQ ID NO: 2420245 - RNA, 17 nt, Human
ucccagaacacacucca

SEQ ID NO: 2420246 - RNA, 19 nt, Human
ucccagaacacacuccauc

SEQ ID NO: 2420247 - RNA, 20 nt, Human
ucccagaacacacuccauca

SEQ ID NO: 2420248 - RNA, 18 nt, Human
ucccagaaggaccuccug

SEQ ID NO: 2420249 - RNA, 19 nt, Human
ucccagaaucaaagcaaug

SEQ ID NO: 2420250 - RNA, 18 nt, Human
ucccagaaucaaagcaau

SEQ ID NO: 2420251 - RNA, 12 nt, Human
ucccagaaucaa

SEQ ID NO: 2420252 - RNA, 20 nt, Human
ucccagaaggaccuccugag

SEQ ID NO: 2420253 - RNA, 16 nt, Human
ucccagagcaaaauaa

SEQ ID NO: 2420254 - RNA, 20 nt, Human
ucccagagacaggaaaaucc

SEQ ID NO: 2420255 - RNA, 17 nt, Human
ucccagagacaggaaaa

SEQ ID NO: 2420256 - RNA, 18 nt, Human
ucccagagacaggaaaau

SEQ ID NO: 2420257 - RNA, 18 nt, Human
ucccagacacccacccuc

SEQ ID NO: 2420258 - RNA, 22 nt, Human
ucccagaaucaaagcaaugcau

SEQ ID NO: 2420259 - RNA, 23 nt, Human
ucccagaaucaaagcaaugcauu

SEQ ID NO: 2420260 - RNA, 22 nt, Human
ucccagaccugccucuuccccc

SEQ ID NO: 2420261 - RNA, 16 nt, Human
ucccagagacaggaaa

SEQ ID NO: 2420262 - RNA, 13 nt, Human
acuacaccuggcu

SEQ ID NO: 2420263 - RNA, 14 nt, Human
acuacaccuggcug

SEQ ID NO: 2420264 - RNA, 23 nt, Human
acuacaccauguuugagcucaga

SEQ ID NO: 2420265 - RNA, 15 nt, Human
acuacacuccagccu

SEQ ID NO: 2420266 - RNA, 17 nt, Human
acuacacuccagccuga

SEQ ID NO: 2420267 - RNA, 18 nt, Human
acuacacuccagccugag

SEQ ID NO: 2420268 - RNA, 19 nt, Human
acuacacuccagccugagc

SEQ ID NO: 2420269 - RNA, 20 nt, Human
acuacacuccagccugagca

SEQ ID NO: 2420270 - RNA, 14 nt, Human
ucccacuuggccaa

SEQ ID NO: 2420271 - RNA, 13 nt, Human
ucccacuuggcca

SEQ ID NO: 2420272 - RNA, 12 nt, Human
ucccacuuguca

SEQ ID NO: 2420273 - RNA, 23 nt, Human
ucccacuuggcaucagcuggcgu

SEQ ID NO: 2420274 - RNA, 21 nt, Human
ucccacuuggcaucagcuggc

SEQ ID NO: 2420275 - RNA, 17 nt, Human
ucccacuuggaggccuu

SEQ ID NO: 2420276 - RNA, 15 nt, Human
acuaauuuuaaaaug

SEQ ID NO: 2420277 - RNA, 18 nt, Human
acuaaauuguaaacuccu

SEQ ID NO: 2420278 - RNA, 15 nt, Human
acuaacacuauuuua

SEQ ID NO: 2420279 - RNA, 12 nt, Human
acuaacacuauu

SEQ ID NO: 2420280 - RNA, 21 nt, Human
acuacaaaaaaguuguuaacu

SEQ ID NO: 2420281 - RNA, 13 nt, Human
acuacaaaauuug

SEQ ID NO: 2420282 - RNA, 14 nt, Human
acuacaaaauuuga

SEQ ID NO: 2420283 - RNA, 18 nt, Human
acuacaaacaaaauuucu

SEQ ID NO: 2420284 - RNA, 16 nt, Human
acuacaaaauuugaaa

SEQ ID NO: 2420285 - RNA, 18 nt, Human
acuacaaaauuugaaauu

SEQ ID NO: 2420286 - RNA, 23 nt, Human
acuacacaucccuaaugugugcc

SEQ ID NO: 2420287 - RNA, 15 nt, Human
acuacacauucaaua

SEQ ID NO: 2420288 - RNA, 20 nt, Human
acuacacaucccuaaugugu

SEQ ID NO: 2420289 - RNA, 19 nt, Human
acuacacauucaauaagca

SEQ ID NO: 2420290 - RNA, 17 nt, Human
acuaauuugauguuuac

SEQ ID NO: 2420291 - RNA, 16 nt, Human
acuaacagauaagcaa

SEQ ID NO: 2420292 - RNA, 22 nt, Human
acuaacacuauuuuaugcaaau

SEQ ID NO: 2420293 - RNA, 13 nt, Human
acuaacagauaag

SEQ ID NO: 2420294 - RNA, 17 nt, Human
acuaaagcaguagaaau

SEQ ID NO: 2420295 - RNA, 21 nt, Human
acuaaagaaaauaucugaaau

SEQ ID NO: 2420296 - RNA, 13 nt, Human
acuaaacuuuacc

SEQ ID NO: 2420297 - RNA, 17 nt, Human
acuaaagaaagauuacu

SEQ ID NO: 2420298 - RNA, 15 nt, Human
acuaaagaaagauua

SEQ ID NO: 2420299 - RNA, 12 nt, Human
acuaaagagaga

SEQ ID NO: 2420300 - RNA, 14 nt, Human
acuaaagagagaau

SEQ ID NO: 2420301 - RNA, 16 nt, Human
acuaaagagagaaugu

SEQ ID NO: 2420302 - RNA, 21 nt, Human
acuaaagagagaauguagaua

SEQ ID NO: 2420303 - RNA, 22 nt, Human
acguuucuaaaggcuaccuuug

SEQ ID NO: 2420304 - RNA, 18 nt, Human
acguuggagaagcccgug

SEQ ID NO: 2420305 - RNA, 15 nt, Human
acuaaacuuucacac

SEQ ID NO: 2420306 - RNA, 16 nt, Human
acuaaacuuucacacc

SEQ ID NO: 2420307 - RNA, 13 nt, Human
acguuuguaugug

SEQ ID NO: 2420308 - RNA, 18 nt, Human
uccaguaucuugaagacu

SEQ ID NO: 2420309 - RNA, 16 nt, Human
uccaguaucuugaaga

SEQ ID NO: 2420310 - RNA, 20 nt, Human
uccagucaggccuaucuaaa

SEQ ID NO: 2420311 - RNA, 13 nt, Human
uccagucaggaug

SEQ ID NO: 2420312 - RNA, 22 nt, Human
uccagucaacaaacuauuucuu

SEQ ID NO: 2420313 - RNA, 13 nt, Human
uccagucaacaaa

SEQ ID NO: 2420314 - RNA, 19 nt, Human
uccaguauucuugucaaaa

SEQ ID NO: 2420315 - RNA, 13 nt, Human
uccaguauucuug

SEQ ID NO: 2420316 - RNA, 16 nt, Human
uccaguaggauccagu

SEQ ID NO: 2420317 - RNA, 17 nt, Human
uccaguaccuuugucac

SEQ ID NO: 2420318 - RNA, 23 nt, Human
uccaguagcuugggacaaaucaa

SEQ ID NO: 2420319 - RNA, 23 nt, Human
uccaguccaaggaaaccacagcu

SEQ ID NO: 2420320 - RNA, 16 nt, Human
uccaguccaaggaaac

SEQ ID NO: 2420321 - RNA, 17 nt, Human
uccaguccaaucucaug

SEQ ID NO: 2420322 - RNA, 15 nt, Human
uccagucuccaccag

SEQ ID NO: 2420323 - RNA, 16 nt, Human
uccagucuccaccagg

SEQ ID NO: 2420324 - RNA, 22 nt, Human
uccagucuaaaaauaucugucu

SEQ ID NO: 2420325 - RNA, 18 nt, Human
uccagugagacagcucug

SEQ ID NO: 2420326 - RNA, 15 nt, Human
uccagugaggcucug

SEQ ID NO: 2420327 - RNA, 16 nt, Human
uccagugaggcucugc

SEQ ID NO: 2420328 - RNA, 19 nt, Human
uccagucuccaccaggaac

SEQ ID NO: 2420329 - RNA, 13 nt, Human
uccagucugcugc

SEQ ID NO: 2420330 - RNA, 14 nt, Human
uccagucugcugcc

SEQ ID NO: 2420331 - RNA, 23 nt, Human
uccagugaggcucugcccuuggu

SEQ ID NO: 2420332 - RNA, 22 nt, Human
uccagugaggcucugcccuugg

SEQ ID NO: 2420333 - RNA, 19 nt, Human
uccaguggggcaagauuuu

SEQ ID NO: 2420334 - RNA, 20 nt, Human
uccagugcccauuccucacc

SEQ ID NO: 2420335 - RNA, 17 nt, Human
uccagugccagcaauga

SEQ ID NO: 2420336 - RNA, 14 nt, Human
uccagugccagcaa

SEQ ID NO: 2420337 - RNA, 18 nt, Human
uccagugccaacaauccu

SEQ ID NO: 2420338 - RNA, 19 nt, Human
uccagugccaacaauccua

SEQ ID NO: 2420339 - RNA, 18 nt, Human
uccagugagcuuaucaug

SEQ ID NO: 2420340 - RNA, 14 nt, Human
uccagugcaauugu

SEQ ID NO: 2420341 - RNA, 18 nt, Human
uccagugcaacacugaag

SEQ ID NO: 2420342 - RNA, 20 nt, Human
acggcaggcucacugccagg

SEQ ID NO: 2420343 - RNA, 18 nt, Human
acggcaggcucacugcca

SEQ ID NO: 2420344 - RNA, 17 nt, Human
acggcaggcucacugcc

SEQ ID NO: 2420345 - RNA, 15 nt, Human
acggcaggcucacug

SEQ ID NO: 2420346 - RNA, 16 nt, Human
acggaugauuggauua

SEQ ID NO: 2420347 - RNA, 17 nt, Human
acggaucugagaaucuu

SEQ ID NO: 2420348 - RNA, 22 nt, Human
acggcaggacaacgaggaagcc

SEQ ID NO: 2420349 - RNA, 15 nt, Human
acggaucugagaauc

SEQ ID NO: 2420350 - RNA, 21 nt, Human
acggauccauguagcaggacu

SEQ ID NO: 2420351 - RNA, 16 nt, Human
acggccaacaaagcug

SEQ ID NO: 2420352 - RNA, 22 nt, Human
acggcaggcucacugccaggcc

SEQ ID NO: 2420353 - RNA, 12 nt, Human
acggccaggcca

SEQ ID NO: 2420354 - RNA, 18 nt, Human
acggcucacugcagccuc

SEQ ID NO: 2420355 - RNA, 17 nt, Human
acggcucacugcagccu

SEQ ID NO: 2420356 - RNA, 16 nt, Human
acggcucacugcagcc

SEQ ID NO: 2420357 - RNA, 17 nt, Human
acgggaaguuuagagag

SEQ ID NO: 2420358 - RNA, 15 nt, Human
acgggaccgggccgc

SEQ ID NO: 2420359 - RNA, 13 nt, Human
acgggaccgggcc

SEQ ID NO: 2420360 - RNA, 19 nt, Human
uccaguaaucuaauauggc

SEQ ID NO: 2420361 - RNA, 15 nt, Human
uccaguaaucuaaua

SEQ ID NO: 2420362 - RNA, 15 nt, Human
uccaguaucuugaag

SEQ ID NO: 2420363 - RNA, 14 nt, Human
uccaguaucuugaa

SEQ ID NO: 2420364 - RNA, 18 nt, Human
acggcuuuuacuuaaacc

SEQ ID NO: 2420365 - RNA, 23 nt, Human
acggcuuagacuucgacucagga

SEQ ID NO: 2420366 - RNA, 22 nt, Human
acggcugggcacacgccuccca

SEQ ID NO: 2420367 - RNA, 11 nt, Human
acggcugggca

SEQ ID NO: 2420368 - RNA, 19 nt, Human
acggcucuagguggggcgg

SEQ ID NO: 2420369 - RNA, 18 nt, Human
acggcucuagguggggcg

SEQ ID NO: 2420370 - RNA, 17 nt, Human
acggcucuagguggggc

SEQ ID NO: 2420371 - RNA, 15 nt, Human
acggccacuggccau

SEQ ID NO: 2420372 - RNA, 18 nt, Human
acggcucgauuucuccag

SEQ ID NO: 2420373 - RNA, 19 nt, Human
acggcucgauuucuccagg

SEQ ID NO: 2420374 - RNA, 13 nt, Human
acggccacaucaa

SEQ ID NO: 2420375 - RNA, 18 nt, Human
acggccacaucaaagagg

SEQ ID NO: 2420376 - RNA, 16 nt, Human
acgcuggagugcagug

SEQ ID NO: 2420377 - RNA, 15 nt, Human
acgcuggagugcagu

SEQ ID NO: 2420378 - RNA, 23 nt, Human
acgcuggaccuugaacuggguac

SEQ ID NO: 2420379 - RNA, 20 nt, Human
acgcuggaccuugaacuggg

SEQ ID NO: 2420380 - RNA, 17 nt, Human
acgcuggagugcaguga

SEQ ID NO: 2420381 - RNA, 23 nt, Human
acggagucccaccuuggcugcag

SEQ ID NO: 2420382 - RNA, 16 nt, Human
acggaucagaaauaca

SEQ ID NO: 2420383 - RNA, 17 nt, Human
acggaucagaaauacag

SEQ ID NO: 2420384 - RNA, 13 nt, Human
acggagucucgcu

SEQ ID NO: 2420385 - RNA, 20 nt, Human
acggauccauguagcaggac

SEQ ID NO: 2420386 - RNA, 20 nt, Human
acgcuccccgccuguucccc

SEQ ID NO: 2420387 - RNA, 19 nt, Human
acgcuccccgccuguuccc

SEQ ID NO: 2420388 - RNA, 18 nt, Human
acgcuccccgccuguucc

SEQ ID NO: 2420389 - RNA, 17 nt, Human
acgcuccccgccuguuc

SEQ ID NO: 2420390 - RNA, 14 nt, Human
acgcuccccgccug

SEQ ID NO: 2420391 - RNA, 15 nt, Human
acgcgucuccuguuu

SEQ ID NO: 2420392 - RNA, 15 nt, Human
acgcuccuuccucug

SEQ ID NO: 2420393 - RNA, 23 nt, Human
acgcuccucccucugaggcugua

SEQ ID NO: 2420394 - RNA, 22 nt, Human
acgcuccucccucugaggcugu

SEQ ID NO: 2420395 - RNA, 14 nt, Human
acgcuccuuccucu

SEQ ID NO: 2420396 - RNA, 22 nt, Human
acgcuccccgccuguucccccg

SEQ ID NO: 2420397 - RNA, 11 nt, Human
acgcucucugg

SEQ ID NO: 2420398 - RNA, 14 nt, Human
acgcucucuggccu

SEQ ID NO: 2420399 - RNA, 13 nt, Human
acgcuggaccuug

SEQ ID NO: 2420400 - RNA, 22 nt, Human
acgcucuccuuucuuucuaacu

SEQ ID NO: 2420401 - RNA, 15 nt, Human
acgcgucuuccugag

SEQ ID NO: 2420402 - RNA, 21 nt, Human
acgcuacccgggaagggggcu

SEQ ID NO: 2420403 - RNA, 22 nt, Human
acgcgaaaguaucaccagggug

SEQ ID NO: 2420404 - RNA, 13 nt, Human
acgcgucuuccug

SEQ ID NO: 2420405 - RNA, 12 nt, Human
acgcgucuccug

SEQ ID NO: 2420406 - RNA, 12 nt, Human
acgcggccgaga

SEQ ID NO: 2420407 - RNA, 12 nt, Human
acgccugccucc

SEQ ID NO: 2420408 - RNA, 22 nt, Human
acgccugcccuccccagagcac

SEQ ID NO: 2420409 - RNA, 21 nt, Human
acgccugcccuccccagagca

SEQ ID NO: 2420410 - RNA, 19 nt, Human
acgccugcccuccccagag

SEQ ID NO: 2420411 - RNA, 22 nt, Human
acgccugcaaacgcugccugcc

SEQ ID NO: 2420412 - RNA, 23 nt, Human
acgccugcaaacgcugccugccc

SEQ ID NO: 2420413 - RNA, 15 nt, Human
acgccugccuccccu

SEQ ID NO: 2420414 - RNA, 18 nt, Human
acgccugggggugccagg

SEQ ID NO: 2420415 - RNA, 16 nt, Human
acgccuguaaucccag

SEQ ID NO: 2420416 - RNA, 17 nt, Human
acgccuguaaucccagc

SEQ ID NO: 2420417 - RNA, 20 nt, Human
acgccuguaaucccagcacu

SEQ ID NO: 2420418 - RNA, 18 nt, Human
acgccuguaaucccagca

SEQ ID NO: 2420419 - RNA, 19 nt, Human
acgccuguaaucccagcac

SEQ ID NO: 2420420 - RNA, 21 nt, Human
acgccuguaaucccagcacuu

SEQ ID NO: 2420421 - RNA, 16 nt, Human
acgccuguaguccuag

SEQ ID NO: 2420422 - RNA, 23 nt, Human
acgcgaaaguaucaccagggugc

SEQ ID NO: 2420423 - RNA, 19 nt, Human
acgccuguaaucccagcag

SEQ ID NO: 2420424 - RNA, 14 nt, Human
acgccuuguucuug

SEQ ID NO: 2420425 - RNA, 18 nt, Human
acgccuuguucuuggcca

SEQ ID NO: 2420426 - RNA, 13 nt, Human
acgccugaggaac

SEQ ID NO: 2420427 - RNA, 21 nt, Human
acgccugaggaacccuuacag

SEQ ID NO: 2420428 - RNA, 14 nt, Human
acgccugcaaacgc

SEQ ID NO: 2420429 - RNA, 17 nt, Human
acgccugcaaacgcugc

SEQ ID NO: 2420430 - RNA, 18 nt, Human
acgccugcaaacgcugcc

SEQ ID NO: 2420431 - RNA, 19 nt, Human
acgccugcaaacgcugccu

SEQ ID NO: 2420432 - RNA, 20 nt, Human
acgccugcaaacgcugccug

SEQ ID NO: 2420433 - RNA, 21 nt, Human
acgccugcaaacgcugccugc

SEQ ID NO: 2420434 - RNA, 21 nt, Human
acgaauauugcugauggugca

SEQ ID NO: 2420435 - RNA, 15 nt, Human
acgaacccaccugcu

SEQ ID NO: 2420436 - RNA, 16 nt, Human
acgaacccaccugcug

SEQ ID NO: 2420437 - RNA, 16 nt, Human
acgccuaugaucccag

SEQ ID NO: 2420438 - RNA, 17 nt, Human
acgccuaugaucccagc

SEQ ID NO: 2420439 - RNA, 18 nt, Human
acgccuaugaucccagca

SEQ ID NO: 2420440 - RNA, 14 nt, Human
acgccucccacugg

SEQ ID NO: 2420441 - RNA, 15 nt, Human
acgccucccacuggg

SEQ ID NO: 2420442 - RNA, 19 nt, Human
uccacugucacccuccacc

SEQ ID NO: 2420443 - RNA, 17 nt, Human
uccacugucacccucca

SEQ ID NO: 2420444 - RNA, 12 nt, Human
uccacugucacc

SEQ ID NO: 2420445 - RNA, 21 nt, Human
uccacuccuuccugccaccug

SEQ ID NO: 2420446 - RNA, 21 nt, Human
uccacugugccaugugccagg

SEQ ID NO: 2420447 - RNA, 18 nt, Human
uccagaauggucuuucua

SEQ ID NO: 2420448 - RNA, 21 nt, Human
uccagaaugcuguacaucuau

SEQ ID NO: 2420449 - RNA, 16 nt, Human
uccagaauugaccuuu

SEQ ID NO: 2420450 - RNA, 17 nt, Human
uccagaaugcuguacau

SEQ ID NO: 2420451 - RNA, 18 nt, Human
uccagaaugcuguacauc

SEQ ID NO: 2420452 - RNA, 19 nt, Human
uccacugucacuguuucuc

SEQ ID NO: 2420453 - RNA, 22 nt, Human
uccacugucacuguuucucugc

SEQ ID NO: 2420454 - RNA, 18 nt, Human
uccacucucccccacccc

SEQ ID NO: 2420455 - RNA, 16 nt, Human
uccacucucccccacc

SEQ ID NO: 2420456 - RNA, 14 nt, Human
uccacucuccccca

SEQ ID NO: 2420457 - RNA, 13 nt, Human
uccacucuccccc

SEQ ID NO: 2420458 - RNA, 22 nt, Human
uccacugguucuucuuggucuc

SEQ ID NO: 2420459 - RNA, 12 nt, Human
uccacucucccc

SEQ ID NO: 2420460 - RNA, 23 nt, Human
uccacucuacccucccacccccu

SEQ ID NO: 2420461 - RNA, 20 nt, Human
uccacucuacccucccaccc

SEQ ID NO: 2420462 - RNA, 21 nt, Human
uccacucuacccucccacccc

SEQ ID NO: 2420463 - RNA, 17 nt, Human
uccacucuacccuccca

SEQ ID NO: 2420464 - RNA, 18 nt, Human
uccacucuacccucccac

SEQ ID NO: 2420465 - RNA, 13 nt, Human
accuuuuuuauac

SEQ ID NO: 2420466 - RNA, 19 nt, Human
accuuuugaaguaguuugu

SEQ ID NO: 2420467 - RNA, 14 nt, Human
accuuuuuaucucc

SEQ ID NO: 2420468 - RNA, 19 nt, Human
accuuuuuauuugcaugug

SEQ ID NO: 2420469 - RNA, 14 nt, Human
accuuuuuccuucc

SEQ ID NO: 2420470 - RNA, 22 nt, Human
accuuuuuuaagauuuuucuca

SEQ ID NO: 2420471 - RNA, 20 nt, Human
accuuuuuuaagauuuuucu

SEQ ID NO: 2420472 - RNA, 13 nt, Human
uccacuccuuccu

SEQ ID NO: 2420473 - RNA, 14 nt, Human
uccacuccuuccug

SEQ ID NO: 2420474 - RNA, 16 nt, Human
accuuuuuuaagauuu

SEQ ID NO: 2420475 - RNA, 15 nt, Human
accuuuuuuaagauu

SEQ ID NO: 2420476 - RNA, 15 nt, Human
accuuuuuccuuccu

SEQ ID NO: 2420477 - RNA, 21 nt, Human
uccacuccuccuagccaccca

SEQ ID NO: 2420478 - RNA, 20 nt, Human
accuuuuauugacacagaaa

SEQ ID NO: 2420479 - RNA, 20 nt, Human
accuuuuauguaguaauuga

SEQ ID NO: 2420480 - RNA, 14 nt, Human
accuuuuauuacau

SEQ ID NO: 2420481 - RNA, 21 nt, Human
accuuuuaauuaaugaaauau

SEQ ID NO: 2420482 - RNA, 15 nt, Human
accuuuuauguagua

SEQ ID NO: 2420483 - RNA, 15 nt, Human
accuuuuauccacuu

SEQ ID NO: 2420484 - RNA, 20 nt, Human
accuuuuggucuggagggaa

SEQ ID NO: 2420485 - RNA, 21 nt, Human
accuuuugaggagccccagcu

SEQ ID NO: 2420486 - RNA, 17 nt, Human
accuuuugaggagcccc

SEQ ID NO: 2420487 - RNA, 16 nt, Human
accuuuuauugacaca

SEQ ID NO: 2420488 - RNA, 23 nt, Human
accuuugugggguuuuuggagaa

SEQ ID NO: 2420489 - RNA, 14 nt, Human
accuuugcaggcau

SEQ ID NO: 2420490 - RNA, 18 nt, Human
accuuuggagcaaagcug

SEQ ID NO: 2420491 - RNA, 18 nt, Human
accuuuguccccaccgca

SEQ ID NO: 2420492 - RNA, 22 nt, Human
accuuuguuugcaucugaaaau

SEQ ID NO: 2420493 - RNA, 12 nt, Human
accuuuuaacac

SEQ ID NO: 2420494 - RNA, 20 nt, Human
accuuuuaacaccugaugug

SEQ ID NO: 2420495 - RNA, 21 nt, Human
accuuuuaacaccugaugugu

SEQ ID NO: 2420496 - RNA, 14 nt, Human
accuuuuaacucac

SEQ ID NO: 2420497 - RNA, 18 nt, Human
accuuugacaaagguaaa

SEQ ID NO: 2420498 - RNA, 17 nt, Human
accuuugacaaagguaa

SEQ ID NO: 2420499 - RNA, 17 nt, Human
accuuuguccccaccgc

SEQ ID NO: 2420500 - RNA, 20 nt, Human
accuuucuccuuuguacuuu

SEQ ID NO: 2420501 - RNA, 19 nt, Human
accuuucuccuuuguacuu

SEQ ID NO: 2420502 - RNA, 23 nt, Human
accuuucuccuuuguacuuugug

SEQ ID NO: 2420503 - RNA, 14 nt, Human
ucauuccugaaaga

SEQ ID NO: 2420504 - RNA, 18 nt, Human
ucauuccuaacacagcau

SEQ ID NO: 2420505 - RNA, 16 nt, Human
ucauuccugaaagaaa

SEQ ID NO: 2420506 - RNA, 20 nt, Human
ucauuccugaaagaaacagu

SEQ ID NO: 2420507 - RNA, 21 nt, Human
ucauuccugaaagaaacaguu

SEQ ID NO: 2420508 - RNA, 22 nt, Human
ucauuccugaaagaaacaguua

SEQ ID NO: 2420509 - RNA, 13 nt, Human
ucauuccugccug

SEQ ID NO: 2420510 - RNA, 17 nt, Human
ucauuccugccugucuc

SEQ ID NO: 2420511 - RNA, 19 nt, Human
ucauuccugccugucuccu

SEQ ID NO: 2420512 - RNA, 19 nt, Human
ucauuccauucuggaagug

SEQ ID NO: 2420513 - RNA, 14 nt, Human
ucauguuuuaacaa

SEQ ID NO: 2420514 - RNA, 23 nt, Human
ucauuccccagguggcugaccca

SEQ ID NO: 2420515 - RNA, 12 nt, Human
ucauuccccagg

SEQ ID NO: 2420516 - RNA, 14 nt, Human
ucauuccccaggug

SEQ ID NO: 2420517 - RNA, 17 nt, Human
ucauuccuaacacagca

SEQ ID NO: 2420518 - RNA, 19 nt, Human
accuugaaaacuuuaugcu

SEQ ID NO: 2420519 - RNA, 14 nt, Human
ucauuccuguauuc

SEQ ID NO: 2420520 - RNA, 20 nt, Human
accuugaaaauaagaauaga

SEQ ID NO: 2420521 - RNA, 18 nt, Human
accuugaacacuggggga

SEQ ID NO: 2420522 - RNA, 21 nt, Human
accuugaacacugggggaggg

SEQ ID NO: 2420523 - RNA, 20 nt, Human
accuugaacuggguacuugu

SEQ ID NO: 2420524 - RNA, 18 nt, Human
accuugaacuccugggcu

SEQ ID NO: 2420525 - RNA, 16 nt, Human
accuuucuccuuugua

SEQ ID NO: 2420526 - RNA, 15 nt, Human
accuuucuccuuugu

SEQ ID NO: 2420527 - RNA, 15 nt, Human
uccagaauuucccaa

SEQ ID NO: 2420528 - RNA, 14 nt, Human
uccagaauuuccca

SEQ ID NO: 2420529 - RNA, 16 nt, Human
uccagacagccuguau

SEQ ID NO: 2420530 - RNA, 15 nt, Human
uccagacagccugua

SEQ ID NO: 2420531 - RNA, 12 nt, Human
uccagaccccca

SEQ ID NO: 2420532 - RNA, 18 nt, Human
uccagacagccuguaucu

SEQ ID NO: 2420533 - RNA, 13 nt, Human
uccagacccccac

SEQ ID NO: 2420534 - RNA, 14 nt, Human
uccagacagccugu

SEQ ID NO: 2420535 - RNA, 13 nt, Human
uccagacagccug

SEQ ID NO: 2420536 - RNA, 13 nt, Human
uccagacacuuuu

SEQ ID NO: 2420537 - RNA, 14 nt, Human
uccagacccccacc

SEQ ID NO: 2420538 - RNA, 16 nt, Human
uccagacccccacccc

SEQ ID NO: 2420539 - RNA, 17 nt, Human
uccagacccccaccccu

SEQ ID NO: 2420540 - RNA, 20 nt, Human
uccagacccccaccccuucc

SEQ ID NO: 2420541 - RNA, 21 nt, Human
uccagacccccaccccuuccc

SEQ ID NO: 2420542 - RNA, 22 nt, Human
uccagacccccaccccuucccc

SEQ ID NO: 2420543 - RNA, 14 nt, Human
uccagacccccagc

SEQ ID NO: 2420544 - RNA, 15 nt, Human
uccagacccccagca

SEQ ID NO: 2420545 - RNA, 20 nt, Human
uccagcccugaguuccuagc

SEQ ID NO: 2420546 - RNA, 22 nt, Human
uccagcccugaguuccuagcca

SEQ ID NO: 2420547 - RNA, 17 nt, Human
uccagcccuggcugaag

SEQ ID NO: 2420548 - RNA, 15 nt, Human
uccagcccuggcuga

SEQ ID NO: 2420549 - RNA, 16 nt, Human
uccagacccccagcaa

SEQ ID NO: 2420550 - RNA, 21 nt, Human
uccagacccccagcaacccuc

SEQ ID NO: 2420551 - RNA, 20 nt, Human
uccagcccuggcugaaggac

SEQ ID NO: 2420552 - RNA, 19 nt, Human
uccagcccuggcugaagga

SEQ ID NO: 2420553 - RNA, 16 nt, Human
uccagccgccauugcc

SEQ ID NO: 2420554 - RNA, 15 nt, Human
uccagccucuccccu

SEQ ID NO: 2420555 - RNA, 13 nt, Human
uccagccugccac

SEQ ID NO: 2420556 - RNA, 20 nt, Human
uccagccugcugccugcuuu

SEQ ID NO: 2420557 - RNA, 18 nt, Human
uccagccgccauugccac

SEQ ID NO: 2420558 - RNA, 19 nt, Human
uccagccgccauugccacc

SEQ ID NO: 2420559 - RNA, 20 nt, Human
uccagccgccauugccacca

SEQ ID NO: 2420560 - RNA, 21 nt, Human
uccagccgccauugccaccag

SEQ ID NO: 2420561 - RNA, 12 nt, Human
uccagccuagag

SEQ ID NO: 2420562 - RNA, 20 nt, Human
uccagccggcauggcuggga

SEQ ID NO: 2420563 - RNA, 21 nt, Human
uccagcccuggcugaaggacu

SEQ ID NO: 2420564 - RNA, 22 nt, Human
uccagccgccauugccaccagg

SEQ ID NO: 2420565 - RNA, 23 nt, Human
uccagccgccauugccaccagga

SEQ ID NO: 2420566 - RNA, 13 nt, Human
uccagccuggcuc

SEQ ID NO: 2420567 - RNA, 12 nt, Human
uccagccuggcu

SEQ ID NO: 2420568 - RNA, 14 nt, Human
uccagccuggagau

SEQ ID NO: 2420569 - RNA, 22 nt, Human
uccagccuggacccccagcuuu

SEQ ID NO: 2420570 - RNA, 21 nt, Human
uccagccuggacccccagcuu

SEQ ID NO: 2420571 - RNA, 20 nt, Human
uccagccuggacccccagcu

SEQ ID NO: 2420572 - RNA, 19 nt, Human
uccagccuggacccccagc

SEQ ID NO: 2420573 - RNA, 18 nt, Human
uccagccuggacccccag

SEQ ID NO: 2420574 - RNA, 17 nt, Human
uccagccuggaccccca

SEQ ID NO: 2420575 - RNA, 14 nt, Human
uccagccuggaccc

SEQ ID NO: 2420576 - RNA, 13 nt, Human
uccagccuggacc

SEQ ID NO: 2420577 - RNA, 12 nt, Human
uccagccuggac

SEQ ID NO: 2420578 - RNA, 16 nt, Human
uccagccugccuggca

SEQ ID NO: 2420579 - RNA, 19 nt, Human
uccagccugccuggcaggc

SEQ ID NO: 2420580 - RNA, 13 nt, Human
uccaggagccugg

SEQ ID NO: 2420581 - RNA, 14 nt, Human
uccaggagccuggc

SEQ ID NO: 2420582 - RNA, 23 nt, Human
uccaggagccuggcuccguccag

SEQ ID NO: 2420583 - RNA, 15 nt, Human
uccaggagccugugc

SEQ ID NO: 2420584 - RNA, 11 nt, Human
uccagccuggg

SEQ ID NO: 2420585 - RNA, 18 nt, Human
acgaauauugcugauggu

SEQ ID NO: 2420586 - RNA, 15 nt, Human
acgaauauugcugau

SEQ ID NO: 2420587 - RNA, 13 nt, Human
acgaaauguuauu

SEQ ID NO: 2420588 - RNA, 12 nt, Human
acgaaauguuau

SEQ ID NO: 2420589 - RNA, 23 nt, Human
acgaaauguuauuuuuuaauuau

SEQ ID NO: 2420590 - RNA, 16 nt, Human
acgaaauguuauuuuu

SEQ ID NO: 2420591 - RNA, 14 nt, Human
acgaacccaccugc

SEQ ID NO: 2420592 - RNA, 23 nt, Human
uccaggcugggagagccuuccag

SEQ ID NO: 2420593 - RNA, 13 nt, Human
uccaggcugguuc

SEQ ID NO: 2420594 - RNA, 11 nt, Human
uccaggcuggu

SEQ ID NO: 2420595 - RNA, 19 nt, Human
uccaggcgaugugcaagug

SEQ ID NO: 2420596 - RNA, 21 nt, Human
uccaggcugggagagccuucc

SEQ ID NO: 2420597 - RNA, 20 nt, Human
uccaggcugggagagccuuc

SEQ ID NO: 2420598 - RNA, 22 nt, Human
uccaggcuccuuuagcgcccag

SEQ ID NO: 2420599 - RNA, 12 nt, Human
uccaggcuccuu

SEQ ID NO: 2420600 - RNA, 10 nt, Human
uccaggcucc

SEQ ID NO: 2420601 - RNA, 19 nt, Human
uccaggauugaagagcauu

SEQ ID NO: 2420602 - RNA, 22 nt, Human
uccaggccugugaggugcagag

SEQ ID NO: 2420603 - RNA, 18 nt, Human
uccaggagccugugccuc

SEQ ID NO: 2420604 - RNA, 19 nt, Human
uccaggaugcuaacaucua

SEQ ID NO: 2420605 - RNA, 15 nt, Human
uccaggauccagaag

SEQ ID NO: 2420606 - RNA, 22 nt, Human
uccaggaugcuaacaucuaaaa

SEQ ID NO: 2420607 - RNA, 22 nt, Human
uccugcacacgcuccuuccucu

SEQ ID NO: 2420608 - RNA, 21 nt, Human
uccugcacaguuuucuggcug

SEQ ID NO: 2420609 - RNA, 20 nt, Human
uccugcacaguuuucuggcu

SEQ ID NO: 2420610 - RNA, 21 nt, Human
uccugcaaugaagucucugaa

SEQ ID NO: 2420611 - RNA, 14 nt, Human
uccugcacacgcuc

SEQ ID NO: 2420612 - RNA, 21 nt, Human
uccugcacacgcuccuuccuc

SEQ ID NO: 2420613 - RNA, 22 nt, Human
uccugcaaugaagucucugaag

SEQ ID NO: 2420614 - RNA, 14 nt, Human
uccugaucagagcc

SEQ ID NO: 2420615 - RNA, 21 nt, Human
uccugaugcuucuucagagac

SEQ ID NO: 2420616 - RNA, 20 nt, Human
uccugaugcuucuucagaga

SEQ ID NO: 2420617 - RNA, 19 nt, Human
uccugaugcuucuucagag

SEQ ID NO: 2420618 - RNA, 15 nt, Human
uccugaucagagccg

SEQ ID NO: 2420619 - RNA, 21 nt, Human
acugcacuauagccuagguga

SEQ ID NO: 2420620 - RNA, 14 nt, Human
acugcacuccagcc

SEQ ID NO: 2420621 - RNA, 22 nt, Human
acugcacccccuccugcugcag

SEQ ID NO: 2420622 - RNA, 21 nt, Human
acugcacccccuccugcugca

SEQ ID NO: 2420623 - RNA, 20 nt, Human
acugcacccccuccugcugc

SEQ ID NO: 2420624 - RNA, 19 nt, Human
acugcacccccuccugcug

SEQ ID NO: 2420625 - RNA, 15 nt, Human
acugcacuccagccu

SEQ ID NO: 2420626 - RNA, 17 nt, Human
acugcacuccagccugg

SEQ ID NO: 2420627 - RNA, 18 nt, Human
acugcacuccagccuggg

SEQ ID NO: 2420628 - RNA, 19 nt, Human
acugcacuccagccugggc

SEQ ID NO: 2420629 - RNA, 20 nt, Human
acugcacuccagccugggca

SEQ ID NO: 2420630 - RNA, 20 nt, Human
acugcacuccagccugggcg

SEQ ID NO: 2420631 - RNA, 21 nt, Human
acugcacuccagccugggcga

SEQ ID NO: 2420632 - RNA, 19 nt, Human
acugcacuccagccugggu

SEQ ID NO: 2420633 - RNA, 20 nt, Human
acugcacuccagccugggug

SEQ ID NO: 2420634 - RNA, 13 nt, Human
acugauaaagaug

SEQ ID NO: 2420635 - RNA, 21 nt, Human
acugauaaagaugagugagca

SEQ ID NO: 2420636 - RNA, 14 nt, Human
acugagcagagucu

SEQ ID NO: 2420637 - RNA, 14 nt, Human
acugagcagacugg

SEQ ID NO: 2420638 - RNA, 23 nt, Human
acugagcagacuggugagcagac

SEQ ID NO: 2420639 - RNA, 13 nt, Human
acugagcagacug

SEQ ID NO: 2420640 - RNA, 12 nt, Human
acugagcagacu

SEQ ID NO: 2420641 - RNA, 20 nt, Human
acugagccccgcagaccucc

SEQ ID NO: 2420642 - RNA, 18 nt, Human
acugagccccgcagaccu

SEQ ID NO: 2420643 - RNA, 14 nt, Human
acugagccccgcag

SEQ ID NO: 2420644 - RNA, 22 nt, Human
acugagcccccccaacacugug

SEQ ID NO: 2420645 - RNA, 15 nt, Human
acugagcccccccaa

SEQ ID NO: 2420646 - RNA, 13 nt, Human
acugagccccccc

SEQ ID NO: 2420647 - RNA, 20 nt, Human
acugagccagucccaggggc

SEQ ID NO: 2420648 - RNA, 17 nt, Human
acugauaguuacuguug

SEQ ID NO: 2420649 - RNA, 15 nt, Human
acugauaguuacugu

SEQ ID NO: 2420650 - RNA, 17 nt, Human
acugauaguguccaaau

SEQ ID NO: 2420651 - RNA, 16 nt, Human
acugauaguguccaaa

SEQ ID NO: 2420652 - RNA, 23 nt, Human
acugagccccgcagaccucccca

SEQ ID NO: 2420653 - RNA, 21 nt, Human
acugagccccgcagaccuccc

SEQ ID NO: 2420654 - RNA, 15 nt, Human
acugauaaagaaaga

SEQ ID NO: 2420655 - RNA, 20 nt, Human
acugauaguuacuguuguga

SEQ ID NO: 2420656 - RNA, 18 nt, Human
acugauaguuacuguugu

SEQ ID NO: 2420657 - RNA, 22 nt, Human
acugauauaucaugagugaaua

SEQ ID NO: 2420658 - RNA, 16 nt, Human
acugauauauuuuaca

SEQ ID NO: 2420659 - RNA, 23 nt, Human
acugauaguuacuguugugaccu

SEQ ID NO: 2420660 - RNA, 23 nt, Human
acugcaaccuucgccaccugggu

SEQ ID NO: 2420661 - RNA, 14 nt, Human
acugcaacuucugc

SEQ ID NO: 2420662 - RNA, 20 nt, Human
acugcaacuuguaaaugugg

SEQ ID NO: 2420663 - RNA, 16 nt, Human
acugcaacuucugccu

SEQ ID NO: 2420664 - RNA, 23 nt, Human
acugcacagugcaucucagccca

SEQ ID NO: 2420665 - RNA, 22 nt, Human
acugcacagugcaucucagccc

SEQ ID NO: 2420666 - RNA, 18 nt, Human
acugcaagagccuuggug

SEQ ID NO: 2420667 - RNA, 16 nt, Human
acugcaagaaaaugau

SEQ ID NO: 2420668 - RNA, 15 nt, Human
acugcaagagccuug

SEQ ID NO: 2420669 - RNA, 16 nt, Human
acugcaagagccuugg

SEQ ID NO: 2420670 - RNA, 17 nt, Human
acugcaagagccuuggu

SEQ ID NO: 2420671 - RNA, 20 nt, Human
acugcacuauagccuaggug

SEQ ID NO: 2420672 - RNA, 16 nt, Human
acugcaccgggccaca

SEQ ID NO: 2420673 - RNA, 14 nt, Human
acugcaccgggcca

SEQ ID NO: 2420674 - RNA, 18 nt, Human
acugcacccccuccugcu

SEQ ID NO: 2420675 - RNA, 17 nt, Human
acugcacccccuccugc

SEQ ID NO: 2420676 - RNA, 16 nt, Human
acugcacccccuccug

SEQ ID NO: 2420677 - RNA, 15 nt, Human
acugcacccccuccu

SEQ ID NO: 2420678 - RNA, 22 nt, Human
uccuggaaauugacgaggggug

SEQ ID NO: 2420679 - RNA, 16 nt, Human
uccuggaaaucagggu

SEQ ID NO: 2420680 - RNA, 15 nt, Human
uccuggaaauauuaa

SEQ ID NO: 2420681 - RNA, 18 nt, Human
uccugcuuugggaagccg

SEQ ID NO: 2420682 - RNA, 23 nt, Human
uccuggaagugcuaauuuugaaa

SEQ ID NO: 2420683 - RNA, 17 nt, Human
uccuggacacucagacc

SEQ ID NO: 2420684 - RNA, 21 nt, Human
uccuggaagcuguguccuugc

SEQ ID NO: 2420685 - RNA, 18 nt, Human
uccuggaagccagcuuuc

SEQ ID NO: 2420686 - RNA, 20 nt, Human
uccuggaagccagcuuuccc

SEQ ID NO: 2420687 - RNA, 22 nt, Human
uccuggaagcgcgagggccuca

SEQ ID NO: 2420688 - RNA, 14 nt, Human
uccuggaaaccaca

SEQ ID NO: 2420689 - RNA, 14 nt, Human
uccuggaagcugug

SEQ ID NO: 2420690 - RNA, 14 nt, Human
uccuggaagccagc

SEQ ID NO: 2420691 - RNA, 22 nt, Human
uccuggaaaggcucagucucag

SEQ ID NO: 2420692 - RNA, 16 nt, Human
uccuggaaaggcucag

SEQ ID NO: 2420693 - RNA, 19 nt, Human
uccuggaaaggcucagucu

SEQ ID NO: 2420694 - RNA, 17 nt, Human
uccugggagugagcugg

SEQ ID NO: 2420695 - RNA, 14 nt, Human
uccugggagugagc

SEQ ID NO: 2420696 - RNA, 12 nt, Human
uccugggaguga

SEQ ID NO: 2420697 - RNA, 19 nt, Human
uccugggagaaccucaggc

SEQ ID NO: 2420698 - RNA, 20 nt, Human
uccugggagaaccucaggcu

SEQ ID NO: 2420699 - RNA, 20 nt, Human
uccugggaaauauucccuag

SEQ ID NO: 2420700 - RNA, 21 nt, Human
uccugggaaauauucccuaga

SEQ ID NO: 2420701 - RNA, 17 nt, Human
uccugggagaaccucag

SEQ ID NO: 2420702 - RNA, 18 nt, Human
uccugggagaaccucagg

SEQ ID NO: 2420703 - RNA, 14 nt, Human
uccugggaaauauu

SEQ ID NO: 2420704 - RNA, 16 nt, Human
uccugggaaauauucc

SEQ ID NO: 2420705 - RNA, 19 nt, Human
uccuggacacucagaccug

SEQ ID NO: 2420706 - RNA, 23 nt, Human
uccuggcucuugauaccccccuc

SEQ ID NO: 2420707 - RNA, 13 nt, Human
uccuggcuccuga

SEQ ID NO: 2420708 - RNA, 16 nt, Human
uccuggcuccugaggg

SEQ ID NO: 2420709 - RNA, 14 nt, Human
uccugcaggcagcc

SEQ ID NO: 2420710 - RNA, 21 nt, Human
uccugccucgaacuggcugca

SEQ ID NO: 2420711 - RNA, 13 nt, Human
uccugcaggcagc

SEQ ID NO: 2420712 - RNA, 12 nt, Human
uccugcaggcag

SEQ ID NO: 2420713 - RNA, 13 nt, Human
uccugccuguggc

SEQ ID NO: 2420714 - RNA, 12 nt, Human
uccugccugugg

SEQ ID NO: 2420715 - RNA, 18 nt, Human
uccugccugucugaagcc

SEQ ID NO: 2420716 - RNA, 20 nt, Human
uccugccugccccucucccg

SEQ ID NO: 2420717 - RNA, 14 nt, Human
uccugccuggccag

SEQ ID NO: 2420718 - RNA, 16 nt, Human
uccugccuggccaggc

SEQ ID NO: 2420719 - RNA, 20 nt, Human
uccugccugucuccuuugca

SEQ ID NO: 2420720 - RNA, 17 nt, Human
uccugcagccuggaggc

SEQ ID NO: 2420721 - RNA, 14 nt, Human
uccugcagccugga

SEQ ID NO: 2420722 - RNA, 14 nt, Human
uccugccugccccu

SEQ ID NO: 2420723 - RNA, 12 nt, Human
uccugccuggcc

SEQ ID NO: 2420724 - RNA, 13 nt, Human
uccugccuggcca

SEQ ID NO: 2420725 - RNA, 16 nt, Human
uccugccuucuucuuu

SEQ ID NO: 2420726 - RNA, 23 nt, Human
uccugccuucuguccugguguca

SEQ ID NO: 2420727 - RNA, 22 nt, Human
uccugccuucuguccugguguc

SEQ ID NO: 2420728 - RNA, 17 nt, Human
uccugccuucuguccug

SEQ ID NO: 2420729 - RNA, 14 nt, Human
uccugccuucuguc

SEQ ID NO: 2420730 - RNA, 13 nt, Human
uccugccuucugu

SEQ ID NO: 2420731 - RNA, 23 nt, Human
uccugccuuccuccugggcccuc

SEQ ID NO: 2420732 - RNA, 22 nt, Human
uccugccuucuucuuuuugcug

SEQ ID NO: 2420733 - RNA, 19 nt, Human
uccugcggagugaagaggg

SEQ ID NO: 2420734 - RNA, 14 nt, Human
uccugccuuccucc

SEQ ID NO: 2420735 - RNA, 16 nt, Human
uccugccuuccuccug

SEQ ID NO: 2420736 - RNA, 19 nt, Human
uccugccuuccuccugggc

SEQ ID NO: 2420737 - RNA, 22 nt, Human
uccugccuuccuccugggcccu

SEQ ID NO: 2420738 - RNA, 18 nt, Human
uccugccuuagagccagg

SEQ ID NO: 2420739 - RNA, 17 nt, Human
uccugccuuagagccag

SEQ ID NO: 2420740 - RNA, 14 nt, Human
uccugccuguggcg

SEQ ID NO: 2420741 - RNA, 20 nt, Human
uccugcgggcuuuuccccgg

SEQ ID NO: 2420742 - RNA, 21 nt, Human
uccugcugcaguugccaguca

SEQ ID NO: 2420743 - RNA, 22 nt, Human
uccugcggagugaagaggggca

SEQ ID NO: 2420744 - RNA, 21 nt, Human
uccugcggagugaagaggggc

SEQ ID NO: 2420745 - RNA, 23 nt, Human
uccugcggagugaagaggggcag

SEQ ID NO: 2420746 - RNA, 12 nt, Human
uccugcgggcuu

SEQ ID NO: 2420747 - RNA, 15 nt, Human
uccugcugcuguguu

SEQ ID NO: 2420748 - RNA, 14 nt, Human
uccugcugcugugu

SEQ ID NO: 2420749 - RNA, 21 nt, Human
uccugaauuuuauuuuuuggg

SEQ ID NO: 2420750 - RNA, 22 nt, Human
uccugaauuuauuauuguucuu

SEQ ID NO: 2420751 - RNA, 21 nt, Human
uccugaauuuauuauuguucu

SEQ ID NO: 2420752 - RNA, 15 nt, Human
uccugaauucuauuu

SEQ ID NO: 2420753 - RNA, 14 nt, Human
uccugaaugaaaua

SEQ ID NO: 2420754 - RNA, 19 nt, Human
uccugaaugaaauaucaga

SEQ ID NO: 2420755 - RNA, 15 nt, Human
uccugaaauuucaga

SEQ ID NO: 2420756 - RNA, 14 nt, Human
uccugaaauuucag

SEQ ID NO: 2420757 - RNA, 22 nt, Human
uccugaauccaaacuaauccau

SEQ ID NO: 2420758 - RNA, 17 nt, Human
uccucuuugcauggaau

SEQ ID NO: 2420759 - RNA, 14 nt, Human
uccucuuugcaugg

SEQ ID NO: 2420760 - RNA, 15 nt, Human
uccucuuugcuuugc

SEQ ID NO: 2420761 - RNA, 16 nt, Human
uccucuuugcuuugcu

SEQ ID NO: 2420762 - RNA, 22 nt, Human
uccucuuuggucuacacugugc

SEQ ID NO: 2420763 - RNA, 17 nt, Human
uccugaaacaacuugga

SEQ ID NO: 2420764 - RNA, 20 nt, Human
uccucuuugcuuugcuuucu

SEQ ID NO: 2420765 - RNA, 23 nt, Human
uccucuuugcuuugcuuucugcu

SEQ ID NO: 2420766 - RNA, 19 nt, Human
uccugaaacuuacacacaa

SEQ ID NO: 2420767 - RNA, 16 nt, Human
uccugaaagacaauau

SEQ ID NO: 2420768 - RNA, 18 nt, Human
uccugaaagaaacaguua

SEQ ID NO: 2420769 - RNA, 21 nt, Human
uccugaaagaaacaguuaacu

SEQ ID NO: 2420770 - RNA, 21 nt, Human
uccucuuuggucuacacugug

SEQ ID NO: 2420771 - RNA, 19 nt, Human
uccucuuuggucuacacug

SEQ ID NO: 2420772 - RNA, 22 nt, Human
uccucccgggcccucccuugga

SEQ ID NO: 2420773 - RNA, 19 nt, Human
uccucuuuccaucuacccu

SEQ ID NO: 2420774 - RNA, 11 nt, Human
uccucccuccc

SEQ ID NO: 2420775 - RNA, 14 nt, Human
uccucccucccucu

SEQ ID NO: 2420776 - RNA, 11 nt, Human
uccucuuucca

SEQ ID NO: 2420777 - RNA, 12 nt, Human
uccucuuuccau

SEQ ID NO: 2420778 - RNA, 11 nt, Human
acucuuucaaa

SEQ ID NO: 2420779 - RNA, 13 nt, Human
acucuuucaaaac

SEQ ID NO: 2420780 - RNA, 19 nt, Human
acucuuucuauuguuucuu

SEQ ID NO: 2420781 - RNA, 14 nt, Human
acucuuugguggcu

SEQ ID NO: 2420782 - RNA, 12 nt, Human
acucuuuugcuu

SEQ ID NO: 2420783 - RNA, 14 nt, Human
acucuuuugcuuua

SEQ ID NO: 2420784 - RNA, 20 nt, Human
acucuuuugcuuuauuccag

SEQ ID NO: 2420785 - RNA, 13 nt, Human
acucuuuguaaga

SEQ ID NO: 2420786 - RNA, 14 nt, Human
acucuuuguaagag

SEQ ID NO: 2420787 - RNA, 13 nt, Human
uccugaccacccu

SEQ ID NO: 2420788 - RNA, 13 nt, Human
uccugacacuuua

SEQ ID NO: 2420789 - RNA, 15 nt, Human
acucuuguuuccuua

SEQ ID NO: 2420790 - RNA, 15 nt, Human
uccugaccacccucc

SEQ ID NO: 2420791 - RNA, 14 nt, Human
uccugaccacccuc

SEQ ID NO: 2420792 - RNA, 16 nt, Human
uccugaccacccuccc

SEQ ID NO: 2420793 - RNA, 18 nt, Human
acucuuguggauguuuua

SEQ ID NO: 2420794 - RNA, 21 nt, Human
acugaacuucaggauaauaaa

SEQ ID NO: 2420795 - RNA, 16 nt, Human
acugaacuuugcugag

SEQ ID NO: 2420796 - RNA, 19 nt, Human
acugaacuuugcugagccu

SEQ ID NO: 2420797 - RNA, 19 nt, Human
acugaaccggcuuuaccaa

SEQ ID NO: 2420798 - RNA, 18 nt, Human
acugaacucacuuuccuc

SEQ ID NO: 2420799 - RNA, 20 nt, Human
acugaacucugacaacagac

SEQ ID NO: 2420800 - RNA, 18 nt, Human
acugaaccggcuuuacca

SEQ ID NO: 2420801 - RNA, 16 nt, Human
acugaacauuccagag

SEQ ID NO: 2420802 - RNA, 13 nt, Human
acugaacauucca

SEQ ID NO: 2420803 - RNA, 19 nt, Human
acugaacauguacacuggu

SEQ ID NO: 2420804 - RNA, 13 nt, Human
acucuuuuuguac

SEQ ID NO: 2420805 - RNA, 18 nt, Human
acucuuuuugggcuccuu

SEQ ID NO: 2420806 - RNA, 17 nt, Human
acucuuuuugggcuccu

SEQ ID NO: 2420807 - RNA, 20 nt, Human
acucuuuuuagggccaggca

SEQ ID NO: 2420808 - RNA, 19 nt, Human
acucuuuuuagggccaggc

SEQ ID NO: 2420809 - RNA, 14 nt, Human
acucuuuuuagggc

SEQ ID NO: 2420810 - RNA, 21 nt, Human
acucuuuugcuuuauuccaga

SEQ ID NO: 2420811 - RNA, 20 nt, Human
acucuuuuuguaccugguga

SEQ ID NO: 2420812 - RNA, 16 nt, Human
acucuuuuuguaccug

SEQ ID NO: 2420813 - RNA, 20 nt, Human
acucuuuuuucauggacacu

SEQ ID NO: 2420814 - RNA, 18 nt, Human
acucuuuuuguuuuuugu

SEQ ID NO: 2420815 - RNA, 21 nt, Human
acugagaaauuuauaaacuuu

SEQ ID NO: 2420816 - RNA, 17 nt, Human
acugagaaauuuauaaa

SEQ ID NO: 2420817 - RNA, 12 nt, Human
acugagaaauuu

SEQ ID NO: 2420818 - RNA, 15 nt, Human
acugacuuuauccuc

SEQ ID NO: 2420819 - RNA, 14 nt, Human
acugacuuuauccu

SEQ ID NO: 2420820 - RNA, 21 nt, Human
acugagacagcccgggcucug

SEQ ID NO: 2420821 - RNA, 18 nt, Human
acugagacagcccgggcu

SEQ ID NO: 2420822 - RNA, 15 nt, Human
acugagacagcccgg

SEQ ID NO: 2420823 - RNA, 20 nt, Human
acugagaauguaagaacuac

SEQ ID NO: 2420824 - RNA, 19 nt, Human
acugagaauguaagaacua

SEQ ID NO: 2420825 - RNA, 23 nt, Human
acugagacagcccgggcucugcc

SEQ ID NO: 2420826 - RNA, 22 nt, Human
acugagacagcccgggcucugc

SEQ ID NO: 2420827 - RNA, 18 nt, Human
acugagagugaacaaauu

SEQ ID NO: 2420828 - RNA, 15 nt, Human
acugagaccaaagaa

SEQ ID NO: 2420829 - RNA, 22 nt, Human
acugagaugugaacacaucagc

SEQ ID NO: 2420830 - RNA, 17 nt, Human
acugagauuuugguauu

SEQ ID NO: 2420831 - RNA, 17 nt, Human
acugagaugugaacaca

SEQ ID NO: 2420832 - RNA, 18 nt, Human
acugagauaccagcgagg

SEQ ID NO: 2420833 - RNA, 19 nt, Human
acugagauaccagcgagga

SEQ ID NO: 2420834 - RNA, 20 nt, Human
acugagauccuuccuuuuga

SEQ ID NO: 2420835 - RNA, 13 nt, Human
acugacuucuaag

SEQ ID NO: 2420836 - RNA, 15 nt, Human
acugacuucuaagua

SEQ ID NO: 2420837 - RNA, 16 nt, Human
acugacuucuaaguaa

SEQ ID NO: 2420838 - RNA, 22 nt, Human
acugacuucuaaguaaaaccac

SEQ ID NO: 2420839 - RNA, 18 nt, Human
acugacucuuaagaagac

SEQ ID NO: 2420840 - RNA, 17 nt, Human
acugacucuuaagaaga

SEQ ID NO: 2420841 - RNA, 20 nt, Human
acugacucuuaagaagacug

SEQ ID NO: 2420842 - RNA, 14 nt, Human
acugacuccuuaga

SEQ ID NO: 2420843 - RNA, 16 nt, Human
acugacucuuaagaag

SEQ ID NO: 2420844 - RNA, 15 nt, Human
acugacucuuaagaa

SEQ ID NO: 2420845 - RNA, 14 nt, Human
acugacucuuaaga

SEQ ID NO: 2420846 - RNA, 13 nt, Human
acugacucuuaag

SEQ ID NO: 2420847 - RNA, 12 nt, Human
acugaagaagca

SEQ ID NO: 2420848 - RNA, 21 nt, Human
acugaacuuugcugagccugu

SEQ ID NO: 2420849 - RNA, 22 nt, Human
acugaccugucaugccccccuc

SEQ ID NO: 2420850 - RNA, 13 nt, Human
acugaacuucagg

SEQ ID NO: 2420851 - RNA, 21 nt, Human
acugaccugucaugccccccu

SEQ ID NO: 2420852 - RNA, 14 nt, Human
acuccuggccucaa

SEQ ID NO: 2420853 - RNA, 13 nt, Human
acuccuggccuca

SEQ ID NO: 2420854 - RNA, 12 nt, Human
acuccuggccuc

SEQ ID NO: 2420855 - RNA, 13 nt, Human
uccuaggcauuug

SEQ ID NO: 2420856 - RNA, 21 nt, Human
uccuagcuugggaggcuuccc

SEQ ID NO: 2420857 - RNA, 14 nt, Human
uccuaggaaaauac

SEQ ID NO: 2420858 - RNA, 22 nt, Human
uccuagcuugggaggcuucccc

SEQ ID NO: 2420859 - RNA, 18 nt, Human
uccuaggaguauccucau

SEQ ID NO: 2420860 - RNA, 20 nt, Human
uccuagcugcacagggcagc

SEQ ID NO: 2420861 - RNA, 17 nt, Human
uccuagcugcacagggc

SEQ ID NO: 2420862 - RNA, 16 nt, Human
uccuagcugcacaggg

SEQ ID NO: 2420863 - RNA, 14 nt, Human
uccuagcugcacag

SEQ ID NO: 2420864 - RNA, 15 nt, Human
uccguaguucccuga

SEQ ID NO: 2420865 - RNA, 20 nt, Human
uccguagccagcugcucccc

SEQ ID NO: 2420866 - RNA, 14 nt, Human
uccguaguucccug

SEQ ID NO: 2420867 - RNA, 15 nt, Human
uccuacucuguguca

SEQ ID NO: 2420868 - RNA, 16 nt, Human
uccguaacccaacucu

SEQ ID NO: 2420869 - RNA, 22 nt, Human
uccguaacccaacucuccugga

SEQ ID NO: 2420870 - RNA, 21 nt, Human
uccguagccagcugcucccca

SEQ ID NO: 2420871 - RNA, 14 nt, Human
uccuacucuguguc

SEQ ID NO: 2420872 - RNA, 13 nt, Human
uccuacucugugu

SEQ ID NO: 2420873 - RNA, 21 nt, Human
ucccuuuuuuuaaguaaggaa

SEQ ID NO: 2420874 - RNA, 16 nt, Human
ucccuuuuuuuaagua

SEQ ID NO: 2420875 - RNA, 18 nt, Human
uccgguguuuaagacauu

SEQ ID NO: 2420876 - RNA, 18 nt, Human
uccggugugccugcagcc

SEQ ID NO: 2420877 - RNA, 19 nt, Human
uccggugugccugcagccc

SEQ ID NO: 2420878 - RNA, 18 nt, Human
uccggucgugucucuggu

SEQ ID NO: 2420879 - RNA, 15 nt, Human
ucccuuugaaaugaa

SEQ ID NO: 2420880 - RNA, 12 nt, Human
uccggugugccu

SEQ ID NO: 2420881 - RNA, 15 nt, Human
uccggugugccugca

SEQ ID NO: 2420882 - RNA, 17 nt, Human
uccggugugccugcagc

SEQ ID NO: 2420883 - RNA, 19 nt, Human
ucccuuuuuuggcugcuga

SEQ ID NO: 2420884 - RNA, 17 nt, Human
ucccuuuuuuggcugcu

SEQ ID NO: 2420885 - RNA, 19 nt, Human
ucccuuugacgccauccca

SEQ ID NO: 2420886 - RNA, 17 nt, Human
ucccuuggguucugaua

SEQ ID NO: 2420887 - RNA, 21 nt, Human
ucccuuucuuggccaguuauc

SEQ ID NO: 2420888 - RNA, 21 nt, Human
ucccuuugacgccaucccagc

SEQ ID NO: 2420889 - RNA, 22 nt, Human
ucccuuuuuuggcugcugaagg

SEQ ID NO: 2420890 - RNA, 20 nt, Human
ucccuuuuuuggcugcugaa

SEQ ID NO: 2420891 - RNA, 23 nt, Human
ucccuuuuuuggcugcugaaggc

SEQ ID NO: 2420892 - RNA, 13 nt, Human
ucccuuuuuuuaa

SEQ ID NO: 2420893 - RNA, 18 nt, Human
ucccuuugacgccauccc

SEQ ID NO: 2420894 - RNA, 16 nt, Human
ucccuuugacgccauc

SEQ ID NO: 2420895 - RNA, 14 nt, Human
ucccuugggcuccc

SEQ ID NO: 2420896 - RNA, 12 nt, Human
ucccuugggcuc

SEQ ID NO: 2420897 - RNA, 16 nt, Human
ucccuuggccucagaa

SEQ ID NO: 2420898 - RNA, 12 nt, Human
ucccuuggccuc

SEQ ID NO: 2420899 - RNA, 13 nt, Human
ucccuuggccuca

SEQ ID NO: 2420900 - RNA, 14 nt, Human
ucccuuggccucag

SEQ ID NO: 2420901 - RNA, 20 nt, Human
ucccuuggauuguccccgac

SEQ ID NO: 2420902 - RNA, 19 nt, Human
ucccuuggauuguccccga

SEQ ID NO: 2420903 - RNA, 22 nt, Human
ucccugguggcagcucaccucu

SEQ ID NO: 2420904 - RNA, 13 nt, Human
acuccuggaagcu

SEQ ID NO: 2420905 - RNA, 16 nt, Human
acuccuggaagcugug

SEQ ID NO: 2420906 - RNA, 12 nt, Human
acuccuggaaau

SEQ ID NO: 2420907 - RNA, 21 nt, Human
ucccugguggcagcucaccuc

SEQ ID NO: 2420908 - RNA, 20 nt, Human
ucccugguggcagcucaccu

SEQ ID NO: 2420909 - RNA, 19 nt, Human
ucccugguggcagcucacc

SEQ ID NO: 2420910 - RNA, 18 nt, Human
ucccugguggcagcucac

SEQ ID NO: 2420911 - RNA, 17 nt, Human
ucccugguggcagcuca

SEQ ID NO: 2420912 - RNA, 16 nt, Human
ucccugguggcagcuc

SEQ ID NO: 2420913 - RNA, 22 nt, Human
acuccugcccuguuguguauag

SEQ ID NO: 2420914 - RNA, 14 nt, Human
acuccugcccuguu

SEQ ID NO: 2420915 - RNA, 21 nt, Human
acuccugccccuguucucuuc

SEQ ID NO: 2420916 - RNA, 11 nt, Human
acuccuggccu

SEQ ID NO: 2420917 - RNA, 16 nt, Human
acuccugcaggcagcc

SEQ ID NO: 2420918 - RNA, 15 nt, Human
acuccugcaggcagc

SEQ ID NO: 2420919 - RNA, 22 nt, Human
acuccugcaggcagccaggcca

SEQ ID NO: 2420920 - RNA, 17 nt, Human
acuccugccaaggagga

SEQ ID NO: 2420921 - RNA, 14 nt, Human
acuccugcaggcag

SEQ ID NO: 2420922 - RNA, 12 nt, Human
acuccugcaggc

SEQ ID NO: 2420923 - RNA, 12 nt, Human
acuccucccagg

SEQ ID NO: 2420924 - RNA, 16 nt, Human
acuccucaggguugag

SEQ ID NO: 2420925 - RNA, 19 nt, Human
acuccucaggguugagguc

SEQ ID NO: 2420926 - RNA, 20 nt, Human
acuccucaaaagcaaaugag

SEQ ID NO: 2420927 - RNA, 21 nt, Human
acuccucaaaagcaaaugaga

SEQ ID NO: 2420928 - RNA, 18 nt, Human
acuccuaugaucucaggu

SEQ ID NO: 2420929 - RNA, 14 nt, Human
acuccaugagaagc

SEQ ID NO: 2420930 - RNA, 19 nt, Human
acuccaucaguuagagcug

SEQ ID NO: 2420931 - RNA, 21 nt, Human
acuccuaggcaggacaugcug

SEQ ID NO: 2420932 - RNA, 18 nt, Human
acuccaguggugaagaaa

SEQ ID NO: 2420933 - RNA, 16 nt, Human
acuccaguggugaaga

SEQ ID NO: 2420934 - RNA, 22 nt, Human
acuccaguggggcaagauuuuc

SEQ ID NO: 2420935 - RNA, 10 nt, Human
acuccagugg

SEQ ID NO: 2420936 - RNA, 19 nt, Human
acuccagugccagcaauga

SEQ ID NO: 2420937 - RNA, 15 nt, Human
acuccagugccagca

SEQ ID NO: 2420938 - RNA, 14 nt, Human
acuccagugccagc

SEQ ID NO: 2420939 - RNA, 21 nt, Human
acuccagugccaacaauccua

SEQ ID NO: 2420940 - RNA, 18 nt, Human
acuccaguuaaaaaaaau

SEQ ID NO: 2420941 - RNA, 20 nt, Human
acuccaguuaaaaaaaauuu

SEQ ID NO: 2420942 - RNA, 14 nt, Human
acuccaucagcuua

SEQ ID NO: 2420943 - RNA, 19 nt, Human
acuccaucucaaaaaauaa

SEQ ID NO: 2420944 - RNA, 17 nt, Human
acuccagacucucugug

SEQ ID NO: 2420945 - RNA, 21 nt, Human
acuccagaccccuggcuuuuc

SEQ ID NO: 2420946 - RNA, 19 nt, Human
acuccagaccccuggcuuu

SEQ ID NO: 2420947 - RNA, 18 nt, Human
acuccagaccccuggcuu

SEQ ID NO: 2420948 - RNA, 19 nt, Human
acuccagugagacagcucu

SEQ ID NO: 2420949 - RNA, 20 nt, Human
acuccagugauguucuucaa

SEQ ID NO: 2420950 - RNA, 15 nt, Human
acucaccccagcccc

SEQ ID NO: 2420951 - RNA, 14 nt, Human
acucaccccagccc

SEQ ID NO: 2420952 - RNA, 16 nt, Human
acucaccccagcccca

SEQ ID NO: 2420953 - RNA, 15 nt, Human
acuccagaccccugg

SEQ ID NO: 2420954 - RNA, 13 nt, Human
acuccagaccccu

SEQ ID NO: 2420955 - RNA, 13 nt, Human
acucaccccagcc

SEQ ID NO: 2420956 - RNA, 22 nt, Human
acucacacaggacccccuuccc

SEQ ID NO: 2420957 - RNA, 23 nt, Human
acucacagaccuggagccccugg

SEQ ID NO: 2420958 - RNA, 22 nt, Human
acucacagaccuggagccccug

SEQ ID NO: 2420959 - RNA, 19 nt, Human
acucacagaccuggagccc

SEQ ID NO: 2420960 - RNA, 18 nt, Human
acucacagaccuggagcc

SEQ ID NO: 2420961 - RNA, 14 nt, Human
acucacagaccugg

SEQ ID NO: 2420962 - RNA, 24 nt, Human
acuccuugaaaacacuguucucug

SEQ ID NO: 2420963 - RNA, 23 nt, Human
acuccuugaaaacacuguucucu

SEQ ID NO: 2420964 - RNA, 16 nt, Human
acuccuggguugagcu

SEQ ID NO: 2420965 - RNA, 13 nt, Human
acuccuuccugcc

SEQ ID NO: 2420966 - RNA, 20 nt, Human
acuccuuccugccaccugcu

SEQ ID NO: 2420967 - RNA, 19 nt, Human
uccuaggcaggacaugcug

SEQ ID NO: 2420968 - RNA, 21 nt, Human
acuccugggcucaagcagucu

SEQ ID NO: 2420969 - RNA, 16 nt, Human
acuccuggggccucuu

SEQ ID NO: 2420970 - RNA, 14 nt, Human
acuccuggguugag

SEQ ID NO: 2420971 - RNA, 21 nt, Human
acuccuggggccucuuggguc

SEQ ID NO: 2420972 - RNA, 17 nt, Human
acucuccuccagaguca

SEQ ID NO: 2420973 - RNA, 14 nt, Human
acucuccuccagag

SEQ ID NO: 2420974 - RNA, 23 nt, Human
acuccuugagagaccaggcaaag

SEQ ID NO: 2420975 - RNA, 21 nt, Human
acuccuugagagaccaggcaa

SEQ ID NO: 2420976 - RNA, 20 nt, Human
acucucccccacccccuccc

SEQ ID NO: 2420977 - RNA, 18 nt, Human
acuccuugagagaccagg

SEQ ID NO: 2420978 - RNA, 17 nt, Human
acuccuugagagaccag

SEQ ID NO: 2420979 - RNA, 21 nt, Human
acuccuuccugccaccugcug

SEQ ID NO: 2420980 - RNA, 21 nt, Human
acucuccuagagacagaagca

SEQ ID NO: 2420981 - RNA, 13 nt, Human
acucuccuagaga

SEQ ID NO: 2420982 - RNA, 23 nt, Human
acucuccuagagacagaagcagg

SEQ ID NO: 2420983 - RNA, 22 nt, Human
acucucccccacccccuccccg

SEQ ID NO: 2420984 - RNA, 12 nt, Human
acucuccuagag

SEQ ID NO: 2420985 - RNA, 14 nt, Human
acucuccucugcug

SEQ ID NO: 2420986 - RNA, 13 nt, Human
acucuccucugcu

SEQ ID NO: 2420987 - RNA, 14 nt, Human
acucuccucugccu

SEQ ID NO: 2420988 - RNA, 22 nt, Human
acucuccucggcccccuccauc

SEQ ID NO: 2420989 - RNA, 20 nt, Human
acucuccucggcccccucca

SEQ ID NO: 2420990 - RNA, 19 nt, Human
acucuccucggcccccucc

SEQ ID NO: 2420991 - RNA, 14 nt, Human
acucuccucaucuc

SEQ ID NO: 2420992 - RNA, 15 nt, Human
acucuccucaucucu

SEQ ID NO: 2420993 - RNA, 12 nt, Human
acucuccucugc

SEQ ID NO: 2420994 - RNA, 16 nt, Human
acucuccucugccuca

SEQ ID NO: 2420995 - RNA, 21 nt, Human
acucuccucugcugcuggcug

SEQ ID NO: 2420996 - RNA, 16 nt, Human
acucuccucugcugcu

SEQ ID NO: 2420997 - RNA, 15 nt, Human
acucuccuugguguc

SEQ ID NO: 2420998 - RNA, 18 nt, Human
acucuccuggaaauauua

SEQ ID NO: 2420999 - RNA, 18 nt, Human
acucugcccccugcuggc

SEQ ID NO: 2421000 - RNA, 17 nt, Human
acucugcccccugcugg

SEQ ID NO: 2421001 - RNA, 15 nt, Human
acucugcccccugcu

SEQ ID NO: 2421002 - RNA, 13 nt, Human
acucugcccccug

SEQ ID NO: 2421003 - RNA, 12 nt, Human
acucugcccccu

SEQ ID NO: 2421004 - RNA, 21 nt, Human
acucugcccccugcuggcucu

SEQ ID NO: 2421005 - RNA, 19 nt, Human
acucugcccccugcuggcu

SEQ ID NO: 2421006 - RNA, 12 nt, Human
acucugccuccu

SEQ ID NO: 2421007 - RNA, 13 nt, Human
acucugccagcca

SEQ ID NO: 2421008 - RNA, 16 nt, Human
acucugccagccacau

SEQ ID NO: 2421009 - RNA, 15 nt, Human
acucuggcagcucag

SEQ ID NO: 2421010 - RNA, 13 nt, Human
acucuggcagcuc

SEQ ID NO: 2421011 - RNA, 17 nt, Human
acucuggcaaagcuuuu

SEQ ID NO: 2421012 - RNA, 23 nt, Human
acucuggcaaagcuuuuagaaau

SEQ ID NO: 2421013 - RNA, 15 nt, Human
acucuggcaaagcuu

SEQ ID NO: 2421014 - RNA, 16 nt, Human
acucuggcaaagcuuu

SEQ ID NO: 2421015 - RNA, 14 nt, Human
acucuggcaaagcu

SEQ ID NO: 2421016 - RNA, 22 nt, Human
acucugagacucgcgacaaugc

SEQ ID NO: 2421017 - RNA, 11 nt, Human
acucugagacu

SEQ ID NO: 2421018 - RNA, 21 nt, Human
acucugaggcucuuucugggc

SEQ ID NO: 2421019 - RNA, 23 nt, Human
acucugaggcucuuucugggcca

SEQ ID NO: 2421020 - RNA, 19 nt, Human
acucucugaaccccucccu

SEQ ID NO: 2421021 - RNA, 21 nt, Human
acucucugaaccccucccucc

SEQ ID NO: 2421022 - RNA, 23 nt, Human
acucuccuuggugucgggcauga

SEQ ID NO: 2421023 - RNA, 16 nt, Human
acucuccuuggugucg

SEQ ID NO: 2421024 - RNA, 17 nt, Human
acucuccuugcuaccca

SEQ ID NO: 2421025 - RNA, 15 nt, Human
acucuccuggacugc

SEQ ID NO: 2421026 - RNA, 13 nt, Human
acucucuccaccc

SEQ ID NO: 2421027 - RNA, 20 nt, Human
acucucuccacccuauaugu

SEQ ID NO: 2421028 - RNA, 21 nt, Human
acucucuccacccuauaugua

SEQ ID NO: 2421029 - RNA, 18 nt, Human
acucucugaaccccuccc

SEQ ID NO: 2421030 - RNA, 21 nt, Human
acucuuaagaagacugcauua

SEQ ID NO: 2421031 - RNA, 13 nt, Human
acucuuaagccau

SEQ ID NO: 2421032 - RNA, 21 nt, Human
acucuuaaguuucucagcucc

SEQ ID NO: 2421033 - RNA, 19 nt, Human
acucuuaaguuucucagcu

SEQ ID NO: 2421034 - RNA, 18 nt, Human
acucuuaaguuucucagc

SEQ ID NO: 2421035 - RNA, 17 nt, Human
acucuuaaguuucucag

SEQ ID NO: 2421036 - RNA, 16 nt, Human
acucuuaaguuucuca

SEQ ID NO: 2421037 - RNA, 14 nt, Human
acucuuaaguuucu

SEQ ID NO: 2421038 - RNA, 22 nt, Human
acucuuaagccaucuugguaaa

SEQ ID NO: 2421039 - RNA, 14 nt, Human
acucuuaagccauc

SEQ ID NO: 2421040 - RNA, 22 nt, Human
acucuuaaguuucucagcuccc

SEQ ID NO: 2421041 - RNA, 14 nt, Human
acucuuaaucaaau

SEQ ID NO: 2421042 - RNA, 14 nt, Human
acucuuagaaauga

SEQ ID NO: 2421043 - RNA, 19 nt, Human
acucuuagauggauucucc

SEQ ID NO: 2421044 - RNA, 17 nt, Human
acucuuaggaagagaaa

SEQ ID NO: 2421045 - RNA, 21 nt, Human
acucuugaaaaaugcauguug

SEQ ID NO: 2421046 - RNA, 14 nt, Human
acucuugaccucag

SEQ ID NO: 2421047 - RNA, 20 nt, Human
acucuuaggaagagaaacca

SEQ ID NO: 2421048 - RNA, 19 nt, Human
acucuuaggaagagaaacc

SEQ ID NO: 2421049 - RNA, 16 nt, Human
acucuugaccucaggu

SEQ ID NO: 2421050 - RNA, 15 nt, Human
acucuugaccucagg

SEQ ID NO: 2421051 - RNA, 16 nt, Human
acucuugauuauccau

SEQ ID NO: 2421052 - RNA, 15 nt, Human
acucuuaguuacuca

SEQ ID NO: 2421053 - RNA, 15 nt, Human
acucuuggagccugc

SEQ ID NO: 2421054 - RNA, 16 nt, Human
acucuuggagccugca

SEQ ID NO: 2421055 - RNA, 14 nt, Human
acucuugcucuuuc

SEQ ID NO: 2421056 - RNA, 13 nt, Human
acucuugcucuuu

SEQ ID NO: 2421057 - RNA, 14 nt, Human
acucuuggagccug

SEQ ID NO: 2421058 - RNA, 22 nt, Human
acucuuggagccugcagagcug

SEQ ID NO: 2421059 - RNA, 23 nt, Human
acucuuggagccugcagagcugc

SEQ ID NO: 2421060 - RNA, 21 nt, Human
uccucaccccuguccucacug

SEQ ID NO: 2421061 - RNA, 20 nt, Human
uccucaccccuguccucacu

SEQ ID NO: 2421062 - RNA, 16 nt, Human
acucuugguuucuuca

SEQ ID NO: 2421063 - RNA, 16 nt, Human
acucuugcucuuucua

SEQ ID NO: 2421064 - RNA, 21 nt, Human
uccucaccucaugcccacccc

SEQ ID NO: 2421065 - RNA, 16 nt, Human
uccucaccucaugccc

SEQ ID NO: 2421066 - RNA, 15 nt, Human
uccucaccucaugcc

SEQ ID NO: 2421067 - RNA, 20 nt, Human
uccucagccuugccagagau

SEQ ID NO: 2421068 - RNA, 14 nt, Human
uccucacucccuuc

SEQ ID NO: 2421069 - RNA, 18 nt, Human
uccucagccuugccagag

SEQ ID NO: 2421070 - RNA, 12 nt, Human
uccucacucccu

SEQ ID NO: 2421071 - RNA, 22 nt, Human
uccucaccuuuucccggggagg

SEQ ID NO: 2421072 - RNA, 17 nt, Human
uccucacucccagucca

SEQ ID NO: 2421073 - RNA, 19 nt, Human
uccucaccuuuucccgggg

SEQ ID NO: 2421074 - RNA, 15 nt, Human
uccucaccuuuuccc

SEQ ID NO: 2421075 - RNA, 12 nt, Human
uccucacuccca

SEQ ID NO: 2421076 - RNA, 13 nt, Human
uccucacucccag

SEQ ID NO: 2421077 - RNA, 14 nt, Human
uccucacucccagu

SEQ ID NO: 2421078 - RNA, 12 nt, Human
uccucaccucug

SEQ ID NO: 2421079 - RNA, 13 nt, Human
uccucaccucugg

SEQ ID NO: 2421080 - RNA, 15 nt, Human
uccucaccucuggac

SEQ ID NO: 2421081 - RNA, 16 nt, Human
uccucaccucuggacu

SEQ ID NO: 2421082 - RNA, 20 nt, Human
uccucaccucuggacuggcu

SEQ ID NO: 2421083 - RNA, 21 nt, Human
uccucaccucuggacuggcua

SEQ ID NO: 2421084 - RNA, 22 nt, Human
uccucaccucuggacuggcuag

SEQ ID NO: 2421085 - RNA, 23 nt, Human
uccucaccucuggacuggcuaga

SEQ ID NO: 2421086 - RNA, 21 nt, Human
uccucagccuugccagagauc

SEQ ID NO: 2421087 - RNA, 13 nt, Human
uccucaggcugcu

SEQ ID NO: 2421088 - RNA, 19 nt, Human
uccucaggcugcuggagga

SEQ ID NO: 2421089 - RNA, 16 nt, Human
uccucagggacagaga

SEQ ID NO: 2421090 - RNA, 18 nt, Human
uccucagggacagagaca

SEQ ID NO: 2421091 - RNA, 22 nt, Human
uccucagggacagagacaccug

SEQ ID NO: 2421092 - RNA, 23 nt, Human
uccucauacccacccccacccaa

SEQ ID NO: 2421093 - RNA, 24 nt, Human
uccucagggacagagacaccugca

SEQ ID NO: 2421094 - RNA, 16 nt, Human
uccucagguggccaug

SEQ ID NO: 2421095 - RNA, 13 nt, Human
uccucagguggcc

SEQ ID NO: 2421096 - RNA, 21 nt, Human
uccucccauguuaugcccagc

SEQ ID NO: 2421097 - RNA, 19 nt, Human
uccucccauccccuggacu

SEQ ID NO: 2421098 - RNA, 23 nt, Human
uccucccauccccuggacuggga

SEQ ID NO: 2421099 - RNA, 14 nt, Human
uccuccccuugggc

SEQ ID NO: 2421100 - RNA, 13 nt, Human
uccuccccuuggg

SEQ ID NO: 2421101 - RNA, 14 nt, Human
uccucccgggcccu

SEQ ID NO: 2421102 - RNA, 17 nt, Human
uccucccgggcccuccc

SEQ ID NO: 2421103 - RNA, 16 nt, Human
uccucccgggcccucc

SEQ ID NO: 2421104 - RNA, 15 nt, Human
uccucccgggcccuc

SEQ ID NO: 2421105 - RNA, 21 nt, Human
uccucccgggcccucccuugg

SEQ ID NO: 2421106 - RNA, 19 nt, Human
uccucccgggcccucccuu

SEQ ID NO: 2421107 - RNA, 15 nt, Human
uccucccucagugcc

SEQ ID NO: 2421108 - RNA, 18 nt, Human
uccucccauccccuggac

SEQ ID NO: 2421109 - RNA, 15 nt, Human
uccucccauccccug

SEQ ID NO: 2421110 - RNA, 13 nt, Human
uccucccaucccc

SEQ ID NO: 2421111 - RNA, 21 nt, Human
uccucccaggcgccccuuccc

SEQ ID NO: 2421112 - RNA, 19 nt, Human
uccucccaggcgccccuuc

SEQ ID NO: 2421113 - RNA, 18 nt, Human
uccucauccaccccaucc

SEQ ID NO: 2421114 - RNA, 17 nt, Human
uccucauccaccccauc

SEQ ID NO: 2421115 - RNA, 15 nt, Human
uccucauccacccca

SEQ ID NO: 2421116 - RNA, 14 nt, Human
uccucauccacccc

SEQ ID NO: 2421117 - RNA, 16 nt, Human
uccucauccagggcuc

SEQ ID NO: 2421118 - RNA, 21 nt, Human
uccucauauggcccaguguca

SEQ ID NO: 2421119 - RNA, 13 nt, Human
uccucccaggcgc

SEQ ID NO: 2421120 - RNA, 22 nt, Human
uccucauaguaugguggcuggg

SEQ ID NO: 2421121 - RNA, 15 nt, Human
uccucauauggccca

SEQ ID NO: 2421122 - RNA, 22 nt, Human
uccucagguggccagccuggau

SEQ ID NO: 2421123 - RNA, 18 nt, Human
uccucagguggccaugcc

SEQ ID NO: 2421124 - RNA, 16 nt, Human
agaaauaugauuuuau

SEQ ID NO: 2421125 - RNA, 15 nt, Human
agaaauaugauuuua

SEQ ID NO: 2421126 - RNA, 13 nt, Human
agaaauaugauuu

SEQ ID NO: 2421127 - RNA, 21 nt, Human
agaaauaugcacaauagcagu

SEQ ID NO: 2421128 - RNA, 22 nt, Human
agaaauaugauuuuauuugaca

SEQ ID NO: 2421129 - RNA, 16 nt, Human
agaaauauggaacuua

SEQ ID NO: 2421130 - RNA, 14 nt, Human
agaaauauggacac

SEQ ID NO: 2421131 - RNA, 17 nt, Human
agaaauauggaacuuac

SEQ ID NO: 2421132 - RNA, 20 nt, Human
agaaauauggaacuuacauu

SEQ ID NO: 2421133 - RNA, 17 nt, Human
agaaauauggacacuua

SEQ ID NO: 2421134 - RNA, 22 nt, Human
agaaauauggaacuuacauugu

SEQ ID NO: 2421135 - RNA, 15 nt, Human
agaaagccucagaga

SEQ ID NO: 2421136 - RNA, 21 nt, Human
agaaagccucagagaauugcu

SEQ ID NO: 2421137 - RNA, 20 nt, Human
agaaagcccuuaggaagaau

SEQ ID NO: 2421138 - RNA, 22 nt, Human
agaaagcccuuaggaagaauuu

SEQ ID NO: 2421139 - RNA, 14 nt, Human
agaaauaugugguu

SEQ ID NO: 2421140 - RNA, 15 nt, Human
agaaauaugugguuu

SEQ ID NO: 2421141 - RNA, 12 nt, Human
agaaaugaauaa

SEQ ID NO: 2421142 - RNA, 19 nt, Human
agaaaugaauaauuuccca

SEQ ID NO: 2421143 - RNA, 23 nt, Human
agaaaugaccaauauuauacuaa

SEQ ID NO: 2421144 - RNA, 20 nt, Human
agaaaugagaucaggcucug

SEQ ID NO: 2421145 - RNA, 19 nt, Human
agaaaugagaucaggcucu

SEQ ID NO: 2421146 - RNA, 17 nt, Human
agaaaugagaucaggcu

SEQ ID NO: 2421147 - RNA, 22 nt, Human
ucuccuuugcacugagggccac

SEQ ID NO: 2421148 - RNA, 21 nt, Human
ucuccuuugcacugagggcca

SEQ ID NO: 2421149 - RNA, 19 nt, Human
ucuccuuugcacugagggc

SEQ ID NO: 2421150 - RNA, 17 nt, Human
ucuccuuugcacugagg

SEQ ID NO: 2421151 - RNA, 16 nt, Human
ucuccuuugcacugag

SEQ ID NO: 2421152 - RNA, 23 nt, Human
ucuccuuugauaaaauaaaugag

SEQ ID NO: 2421153 - RNA, 17 nt, Human
ucuccuuugauaaaaua

SEQ ID NO: 2421154 - RNA, 20 nt, Human
ucuccuuucuuuuucuucuu

SEQ ID NO: 2421155 - RNA, 23 nt, Human
ucuccuuucaccccagggccuga

SEQ ID NO: 2421156 - RNA, 14 nt, Human
ucuccuuucaggga

SEQ ID NO: 2421157 - RNA, 15 nt, Human
ucuccuuucuuucua

SEQ ID NO: 2421158 - RNA, 18 nt, Human
ucuccuuguucugauaau

SEQ ID NO: 2421159 - RNA, 16 nt, Human
ucuccuuucacaaccu

SEQ ID NO: 2421160 - RNA, 14 nt, Human
ucuccuuguucuga

SEQ ID NO: 2421161 - RNA, 16 nt, Human
ucuccuuguucugaua

SEQ ID NO: 2421162 - RNA, 13 nt, Human
ucuccuuguucug

SEQ ID NO: 2421163 - RNA, 20 nt, Human
ucuccuuguggccugggccu

SEQ ID NO: 2421164 - RNA, 19 nt, Human
ucuccuuagucuucucaua

SEQ ID NO: 2421165 - RNA, 18 nt, Human
agaaagcauuugaaugca

SEQ ID NO: 2421166 - RNA, 17 nt, Human
agaaagcauuugaaugc

SEQ ID NO: 2421167 - RNA, 16 nt, Human
agaaagcauuugaaug

SEQ ID NO: 2421168 - RNA, 15 nt, Human
agaaagcauuugaau

SEQ ID NO: 2421169 - RNA, 21 nt, Human
agaaagcauuugaaugcauuu

SEQ ID NO: 2421170 - RNA, 20 nt, Human
agaaagcauuugaaugcauu

SEQ ID NO: 2421171 - RNA, 22 nt, Human
agaaagcauuugaaugcauuuu

SEQ ID NO: 2421172 - RNA, 15 nt, Human
agaaagccaggcagg

SEQ ID NO: 2421173 - RNA, 21 nt, Human
agaaagccaaaucaaaauaug

SEQ ID NO: 2421174 - RNA, 22 nt, Human
ucuccuuuguauauuauuucua

SEQ ID NO: 2421175 - RNA, 17 nt, Human
ucuccuuuuccucucuc

SEQ ID NO: 2421176 - RNA, 14 nt, Human
agaaagcauuugaa

SEQ ID NO: 2421177 - RNA, 23 nt, Human
ucuccuuugcacugagggccaca

SEQ ID NO: 2421178 - RNA, 17 nt, Human
ucuccuuugcaggcuca

SEQ ID NO: 2421179 - RNA, 19 nt, Human
ucuccuuuguacuuugugc

SEQ ID NO: 2421180 - RNA, 14 nt, Human
ucuccuuuguauau

SEQ ID NO: 2421181 - RNA, 22 nt, Human
ucuccuuugcugaggccuccag

SEQ ID NO: 2421182 - RNA, 20 nt, Human
ucuccuuuguacuuugugcu

SEQ ID NO: 2421183 - RNA, 20 nt, Human
ucugacucgguuucuccaaa

SEQ ID NO: 2421184 - RNA, 19 nt, Human
ucugacucgguuucuccaa

SEQ ID NO: 2421185 - RNA, 18 nt, Human
ucugacucgguuucucca

SEQ ID NO: 2421186 - RNA, 16 nt, Human
ucugacucgguuucuc

SEQ ID NO: 2421187 - RNA, 20 nt, Human
ucugacucagggcuccuggg

SEQ ID NO: 2421188 - RNA, 19 nt, Human
ucugacucauauccccuau

SEQ ID NO: 2421189 - RNA, 14 nt, Human
ucugacuccagugg

SEQ ID NO: 2421190 - RNA, 13 nt, Human
ucugacuccagug

SEQ ID NO: 2421191 - RNA, 23 nt, Human
ucugacuccaguggggcaagauu

SEQ ID NO: 2421192 - RNA, 16 nt, Human
ucugacucacaagaag

SEQ ID NO: 2421193 - RNA, 14 nt, Human
ucugacucacaaga

SEQ ID NO: 2421194 - RNA, 13 nt, Human
ucugacucagggc

SEQ ID NO: 2421195 - RNA, 14 nt, Human
ucugacucagggcu

SEQ ID NO: 2421196 - RNA, 15 nt, Human
ucugacucagggcuc

SEQ ID NO: 2421197 - RNA, 15 nt, Human
ucugacacacagcuc

SEQ ID NO: 2421198 - RNA, 14 nt, Human
ucugacacacagcu

SEQ ID NO: 2421199 - RNA, 13 nt, Human
ucugacacacagc

SEQ ID NO: 2421200 - RNA, 15 nt, Human
ucugaauuauuuucu

SEQ ID NO: 2421201 - RNA, 19 nt, Human
ucugaauuaguccuugcuu

SEQ ID NO: 2421202 - RNA, 18 nt, Human
ucugaauuaguccuugcu

SEQ ID NO: 2421203 - RNA, 23 nt, Human
ucugaauguucugacauuaacag

SEQ ID NO: 2421204 - RNA, 12 nt, Human
ucugacacacag

SEQ ID NO: 2421205 - RNA, 20 nt, Human
ucugaagcugacgaacuucc

SEQ ID NO: 2421206 - RNA, 21 nt, Human
ucugaagcugacgaacuucca

SEQ ID NO: 2421207 - RNA, 21 nt, Human
ucugaaggacauugcggacag

SEQ ID NO: 2421208 - RNA, 16 nt, Human
ucugaagccucuggga

SEQ ID NO: 2421209 - RNA, 13 nt, Human
ucugaagccucac

SEQ ID NO: 2421210 - RNA, 16 nt, Human
agaaaugcauauugua

SEQ ID NO: 2421211 - RNA, 15 nt, Human
agaaaugcauauugu

SEQ ID NO: 2421212 - RNA, 12 nt, Human
agaaaugcagaa

SEQ ID NO: 2421213 - RNA, 22 nt, Human
agaaaugcauccauuccucagg

SEQ ID NO: 2421214 - RNA, 18 nt, Human
agaaaugcauauuguauu

SEQ ID NO: 2421215 - RNA, 18 nt, Human
agaaaugcauccauuccu

SEQ ID NO: 2421216 - RNA, 10 nt, Human
ucugaauuau

SEQ ID NO: 2421217 - RNA, 13 nt, Human
ucugaauggucca

SEQ ID NO: 2421218 - RNA, 13 nt, Human
ucugaauguucug

SEQ ID NO: 2421219 - RNA, 14 nt, Human
ucugaauguucuga

SEQ ID NO: 2421220 - RNA, 16 nt, Human
ucugaauguucugaca

SEQ ID NO: 2421221 - RNA, 17 nt, Human
ucugaauguucugacau

SEQ ID NO: 2421222 - RNA, 19 nt, Human
ucugaauguucugacauua

SEQ ID NO: 2421223 - RNA, 22 nt, Human
ucugaauguucugacauuaaca

SEQ ID NO: 2421224 - RNA, 21 nt, Human
ucugaaggacacuuccugccu

SEQ ID NO: 2421225 - RNA, 12 nt, Human
ucugaauguucu

SEQ ID NO: 2421226 - RNA, 20 nt, Human
ucugaaggacacuuccugcc

SEQ ID NO: 2421227 - RNA, 19 nt, Human
ucugaaggacacuuccugc

SEQ ID NO: 2421228 - RNA, 16 nt, Human
ucugaaggacacuucc

SEQ ID NO: 2421229 - RNA, 15 nt, Human
ucugacucucaaauc

SEQ ID NO: 2421230 - RNA, 12 nt, Human
ucugacucucaa

SEQ ID NO: 2421231 - RNA, 14 nt, Human
ucugacucugagcu

SEQ ID NO: 2421232 - RNA, 16 nt, Human
ucugacugaugcuuuc

SEQ ID NO: 2421233 - RNA, 14 nt, Human
ucugacugugugug

SEQ ID NO: 2421234 - RNA, 12 nt, Human
ucugacugugug

SEQ ID NO: 2421235 - RNA, 13 nt, Human
ucugagaacucau

SEQ ID NO: 2421236 - RNA, 20 nt, Human
ucugagaauuccaaggaguu

SEQ ID NO: 2421237 - RNA, 18 nt, Human
ucugagaauuccaaggag

SEQ ID NO: 2421238 - RNA, 19 nt, Human
ucugagacaaagcaaugga

SEQ ID NO: 2421239 - RNA, 23 nt, Human
ucugagaaucuuuauugagaaag

SEQ ID NO: 2421240 - RNA, 22 nt, Human
ucugagaaucuuuauugagaaa

SEQ ID NO: 2421241 - RNA, 19 nt, Human
ucugagaaucuuuauugag

SEQ ID NO: 2421242 - RNA, 15 nt, Human
ucugagaaucuuuau

SEQ ID NO: 2421243 - RNA, 12 nt, Human
ucugagaaucuu

SEQ ID NO: 2421244 - RNA, 17 nt, Human
ucugagaagguccuuaa

SEQ ID NO: 2421245 - RNA, 18 nt, Human
ucugagaagguccuuaau

SEQ ID NO: 2421246 - RNA, 20 nt, Human
ucugagaagguccuuaauga

SEQ ID NO: 2421247 - RNA, 21 nt, Human
ucugaggugccugucccaccc

SEQ ID NO: 2421248 - RNA, 21 nt, Human
ucugagacucgcgacaaugca

SEQ ID NO: 2421249 - RNA, 24 nt, Human
ucugagucccaggagcugcccaga

SEQ ID NO: 2421250 - RNA, 23 nt, Human
ucugagucccaggagcugcccag

SEQ ID NO: 2421251 - RNA, 14 nt, Human
ucugagucccagga

SEQ ID NO: 2421252 - RNA, 20 nt, Human
ucugagugaaccuguauaag

SEQ ID NO: 2421253 - RNA, 23 nt, Human
ucugaguaucuccucgcaagcug

SEQ ID NO: 2421254 - RNA, 18 nt, Human
ucugaguaucuccucgca

SEQ ID NO: 2421255 - RNA, 21 nt, Human
ucugaucugugcuuuccagcu

SEQ ID NO: 2421256 - RNA, 18 nt, Human
ucugaucugugcuuucca

SEQ ID NO: 2421257 - RNA, 15 nt, Human
ucugaucugugcuuu

SEQ ID NO: 2421258 - RNA, 14 nt, Human
ucugaucugugcuu

SEQ ID NO: 2421259 - RNA, 23 nt, Human
ucugaucugugcuuuccagcuca

SEQ ID NO: 2421260 - RNA, 22 nt, Human
ucugaucugugcuuuccagcuc

SEQ ID NO: 2421261 - RNA, 16 nt, Human
ucugaugcaagcaaga

SEQ ID NO: 2421262 - RNA, 16 nt, Human
ucugaugaugugccug

SEQ ID NO: 2421263 - RNA, 20 nt, Human
ucugaucgugacgcugaaua

SEQ ID NO: 2421264 - RNA, 21 nt, Human
ucugaucccucuacagagcuu

SEQ ID NO: 2421265 - RNA, 22 nt, Human
ucugaucgugacgcugaauaaa

SEQ ID NO: 2421266 - RNA, 21 nt, Human
ucugaucgugacgcugaauaa

SEQ ID NO: 2421267 - RNA, 21 nt, Human
ucugaucuccauggcuuccuc

SEQ ID NO: 2421268 - RNA, 15 nt, Human
ucugaucuccauggc

SEQ ID NO: 2421269 - RNA, 17 nt, Human
ucugaucauccacugug

SEQ ID NO: 2421270 - RNA, 13 nt, Human
ucugagugaaccu

SEQ ID NO: 2421271 - RNA, 21 nt, Human
ucugaucauccacugugccau

SEQ ID NO: 2421272 - RNA, 18 nt, Human
ucugagugaaccuguaua

SEQ ID NO: 2421273 - RNA, 15 nt, Human
ucugcacuccccugc

SEQ ID NO: 2421274 - RNA, 14 nt, Human
ucugcacuccccug

SEQ ID NO: 2421275 - RNA, 16 nt, Human
ucugcacuccccugcu

SEQ ID NO: 2421276 - RNA, 17 nt, Human
ucugcacuccccugcug

SEQ ID NO: 2421277 - RNA, 21 nt, Human
ucugaugcaagcaagaaacac

SEQ ID NO: 2421278 - RNA, 18 nt, Human
ucugcagauaaacaguag

SEQ ID NO: 2421279 - RNA, 15 nt, Human
ucugcagauaaacag

SEQ ID NO: 2421280 - RNA, 17 nt, Human
ucugcagcaauaaagca

SEQ ID NO: 2421281 - RNA, 16 nt, Human
ucugcaggcagacacg

SEQ ID NO: 2421282 - RNA, 14 nt, Human
ucugcaggcagggc

SEQ ID NO: 2421283 - RNA, 15 nt, Human
ucugcaggcagacac

SEQ ID NO: 2421284 - RNA, 14 nt, Human
agaaauguacagca

SEQ ID NO: 2421285 - RNA, 15 nt, Human
agaaauguacagcaa

SEQ ID NO: 2421286 - RNA, 23 nt, Human
agaaaugguuguauuagauguuc

SEQ ID NO: 2421287 - RNA, 22 nt, Human
agaaaugguuguauuagauguu

SEQ ID NO: 2421288 - RNA, 21 nt, Human
agaaaugguuguauuagaugu

SEQ ID NO: 2421289 - RNA, 20 nt, Human
agaaaugguuguauuagaug

SEQ ID NO: 2421290 - RNA, 19 nt, Human
agaaaugguuguauuagau

SEQ ID NO: 2421291 - RNA, 18 nt, Human
agaaaugguuguauuaga

SEQ ID NO: 2421292 - RNA, 17 nt, Human
agaaaugguuguauuag

SEQ ID NO: 2421293 - RNA, 13 nt, Human
ucugcaggcaggg

SEQ ID NO: 2421294 - RNA, 12 nt, Human
ucugcagguccc

SEQ ID NO: 2421295 - RNA, 11 nt, Human
ucugcaggucc

SEQ ID NO: 2421296 - RNA, 13 nt, Human
ucugcaggucccu

SEQ ID NO: 2421297 - RNA, 19 nt, Human
ucugcagggggugugucug

SEQ ID NO: 2421298 - RNA, 17 nt, Human
ucugcccacucccugca

SEQ ID NO: 2421299 - RNA, 16 nt, Human
ucugcccacucccugc

SEQ ID NO: 2421300 - RNA, 22 nt, Human
agaagcccaggaaaggcuccag

SEQ ID NO: 2421301 - RNA, 21 nt, Human
agaagcccaggaaaggcucca

SEQ ID NO: 2421302 - RNA, 20 nt, Human
agaagcccaggaaaggcucc

SEQ ID NO: 2421303 - RNA, 18 nt, Human
agaagcccaggaaaggcu

SEQ ID NO: 2421304 - RNA, 16 nt, Human
agaagcccaggaaagg

SEQ ID NO: 2421305 - RNA, 12 nt, Human
agaagcccagga

SEQ ID NO: 2421306 - RNA, 12 nt, Human
agaagcccagaa

SEQ ID NO: 2421307 - RNA, 13 nt, Human
agaagcccagaau

SEQ ID NO: 2421308 - RNA, 11 nt, Human
agaagcccaga

SEQ ID NO: 2421309 - RNA, 17 nt, Human
agaagccacaggccuga

SEQ ID NO: 2421310 - RNA, 21 nt, Human
agaagcccaauauuauaauuu

SEQ ID NO: 2421311 - RNA, 19 nt, Human
agaagccaagggaaagggg

SEQ ID NO: 2421312 - RNA, 18 nt, Human
agaagccaagggaaaggg

SEQ ID NO: 2421313 - RNA, 16 nt, Human
agaagccaagggaaag

SEQ ID NO: 2421314 - RNA, 15 nt, Human
agaagccaagggaaa

SEQ ID NO: 2421315 - RNA, 22 nt, Human
agaagccaagggaaaggggugc

SEQ ID NO: 2421316 - RNA, 16 nt, Human
agaagccacaggccug

SEQ ID NO: 2421317 - RNA, 24 nt, Human
agaagcauuccuucuuugauaaug

SEQ ID NO: 2421318 - RNA, 17 nt, Human
agaagccaaaagauugg

SEQ ID NO: 2421319 - RNA, 23 nt, Human
agaagcauuccuucuuugauaau

SEQ ID NO: 2421320 - RNA, 22 nt, Human
agaagcauuccuucuuugauaa

SEQ ID NO: 2421321 - RNA, 20 nt, Human
agaagcauuccuucuuugau

SEQ ID NO: 2421322 - RNA, 19 nt, Human
agaagcauuccuucuuuga

SEQ ID NO: 2421323 - RNA, 17 nt, Human
agaagcauuccuucuuu

SEQ ID NO: 2421324 - RNA, 15 nt, Human
agaagcauuccuucu

SEQ ID NO: 2421325 - RNA, 23 nt, Human
agaagauuugaugcuggagaggu

SEQ ID NO: 2421326 - RNA, 17 nt, Human
agaagcaacagaaaaaa

SEQ ID NO: 2421327 - RNA, 14 nt, Human
agaagcauuccuuc

SEQ ID NO: 2421328 - RNA, 18 nt, Human
agaagauuuugaaauuuu

SEQ ID NO: 2421329 - RNA, 14 nt, Human
agaagauguuuaac

SEQ ID NO: 2421330 - RNA, 19 nt, Human
agaagauggcacuuauaac

SEQ ID NO: 2421331 - RNA, 22 nt, Human
agaagauuugaugcuggagagg

SEQ ID NO: 2421332 - RNA, 22 nt, Human
agaagauguuuaacuuaaucaa

SEQ ID NO: 2421333 - RNA, 19 nt, Human
agaagauuugaugcuggag

SEQ ID NO: 2421334 - RNA, 17 nt, Human
agaagaauugaacccag

SEQ ID NO: 2421335 - RNA, 20 nt, Human
agaagaauugaacccaggag

SEQ ID NO: 2421336 - RNA, 16 nt, Human
agaagaauauucagga

SEQ ID NO: 2421337 - RNA, 15 nt, Human
agaagaauauucagg

SEQ ID NO: 2421338 - RNA, 14 nt, Human
agaagaauauucag

SEQ ID NO: 2421339 - RNA, 19 nt, Human
agaagaauauucaggacuu

SEQ ID NO: 2421340 - RNA, 18 nt, Human
agaagaauauucaggacu

SEQ ID NO: 2421341 - RNA, 18 nt, Human
agaagaugguaccaccag

SEQ ID NO: 2421342 - RNA, 13 nt, Human
agaagacaaaauu

SEQ ID NO: 2421343 - RNA, 19 nt, Human
agaagaauugaacccagga

SEQ ID NO: 2421344 - RNA, 22 nt, Human
agaagaauuuucagaccccagc

SEQ ID NO: 2421345 - RNA, 23 nt, Human
agaagaauuuucagaccccagcg

SEQ ID NO: 2421346 - RNA, 14 nt, Human
agaagaacugaaau

SEQ ID NO: 2421347 - RNA, 14 nt, Human
agaagaaguguguc

SEQ ID NO: 2421348 - RNA, 20 nt, Human
agaagaauacaaacauauuu

SEQ ID NO: 2421349 - RNA, 19 nt, Human
agaagaacuauaugugaau

SEQ ID NO: 2421350 - RNA, 13 nt, Human
agaagaacugaaa

SEQ ID NO: 2421351 - RNA, 13 nt, Human
agaagaacaucca

SEQ ID NO: 2421352 - RNA, 19 nt, Human
agaacuguguuucaaguuc

SEQ ID NO: 2421353 - RNA, 21 nt, Human
agaacuguguuucaaguucaa

SEQ ID NO: 2421354 - RNA, 20 nt, Human
agaacuguguuucaaguuca

SEQ ID NO: 2421355 - RNA, 22 nt, Human
agaacuggacucaggaugccca

SEQ ID NO: 2421356 - RNA, 19 nt, Human
agaacuguaugucagacau

SEQ ID NO: 2421357 - RNA, 15 nt, Human
agaacuggacucagg

SEQ ID NO: 2421358 - RNA, 16 nt, Human
agaacuggacucagga

SEQ ID NO: 2421359 - RNA, 17 nt, Human
agaacuggacucaggau

SEQ ID NO: 2421360 - RNA, 20 nt, Human
agaacuggacucaggaugcc

SEQ ID NO: 2421361 - RNA, 23 nt, Human
agaacugcuuucuuucguuuguu

SEQ ID NO: 2421362 - RNA, 22 nt, Human
agaacugccuuuggcagaguuc

SEQ ID NO: 2421363 - RNA, 20 nt, Human
agaaauugcauuuccugaca

SEQ ID NO: 2421364 - RNA, 17 nt, Human
agaaauugcauuuccug

SEQ ID NO: 2421365 - RNA, 20 nt, Human
agaaauuccuguagcaucuu

SEQ ID NO: 2421366 - RNA, 19 nt, Human
agaaauuccuguagcaucu

SEQ ID NO: 2421367 - RNA, 16 nt, Human
agaaauuccuguagca

SEQ ID NO: 2421368 - RNA, 23 nt, Human
agaaauuccuguagcaucuucug

SEQ ID NO: 2421369 - RNA, 23 nt, Human
agaaauuccuugauucacaauga

SEQ ID NO: 2421370 - RNA, 19 nt, Human
ucugcccuccaagaccuuc

SEQ ID NO: 2421371 - RNA, 18 nt, Human
ucugcccuccaagaccuu

SEQ ID NO: 2421372 - RNA, 21 nt, Human
ucugcccacucccugcaaccu

SEQ ID NO: 2421373 - RNA, 18 nt, Human
ucugcccacucccugcaa

SEQ ID NO: 2421374 - RNA, 15 nt, Human
ucugccgcagcccug

SEQ ID NO: 2421375 - RNA, 14 nt, Human
ucugccgcagcccu

SEQ ID NO: 2421376 - RNA, 11 nt, Human
ucugcccugcg

SEQ ID NO: 2421377 - RNA, 12 nt, Human
ucugcccugcgg

SEQ ID NO: 2421378 - RNA, 10 nt, Human
ucugcccugc

SEQ ID NO: 2421379 - RNA, 21 nt, Human
agaagccaagggaaaggggug

SEQ ID NO: 2421380 - RNA, 18 nt, Human
ucugcccugcccuagcuc

SEQ ID NO: 2421381 - RNA, 22 nt, Human
ucugccgcagcccugcagaggg

SEQ ID NO: 2421382 - RNA, 18 nt, Human
ucugccgcaauacaggaa

SEQ ID NO: 2421383 - RNA, 22 nt, Human
ucugccugcccaggccccugcc

SEQ ID NO: 2421384 - RNA, 21 nt, Human
ucugccugcccaggccccugc

SEQ ID NO: 2421385 - RNA, 13 nt, Human
ucugccuggagug

SEQ ID NO: 2421386 - RNA, 12 nt, Human
ucugccuggagu

SEQ ID NO: 2421387 - RNA, 14 nt, Human
ucugccugccccgc

SEQ ID NO: 2421388 - RNA, 12 nt, Human
ucugccugcccc

SEQ ID NO: 2421389 - RNA, 23 nt, Human
ucugccuggagacuuagggcacc

SEQ ID NO: 2421390 - RNA, 21 nt, Human
ucugccuggaguguaugacug

SEQ ID NO: 2421391 - RNA, 16 nt, Human
ucugcgugacaauaaa

SEQ ID NO: 2421392 - RNA, 15 nt, Human
ucugcgucuguguug

SEQ ID NO: 2421393 - RNA, 22 nt, Human
ucugcgugguuccuuucucagc

SEQ ID NO: 2421394 - RNA, 16 nt, Human
ucugcgucaugcuugu

SEQ ID NO: 2421395 - RNA, 17 nt, Human
ucugcgucaugcuugug

SEQ ID NO: 2421396 - RNA, 22 nt, Human
ucugcucagacagaaccccuac

SEQ ID NO: 2421397 - RNA, 13 nt, Human
ucugcucagcagc

SEQ ID NO: 2421398 - RNA, 14 nt, Human
ucugcucagcagcu

SEQ ID NO: 2421399 - RNA, 23 nt, Human
ucugcucaucauucucugucuca

SEQ ID NO: 2421400 - RNA, 10 nt, Human
ucugcuccac

SEQ ID NO: 2421401 - RNA, 12 nt, Human
ucugcuccacca

SEQ ID NO: 2421402 - RNA, 14 nt, Human
ucugcuccaccaca

SEQ ID NO: 2421403 - RNA, 20 nt, Human
ucugcuccaccacauccucc

SEQ ID NO: 2421404 - RNA, 12 nt, Human
ucugcuccaccc

SEQ ID NO: 2421405 - RNA, 14 nt, Human
ucugcuccacccuu

SEQ ID NO: 2421406 - RNA, 15 nt, Human
ucugcuccacccuug

SEQ ID NO: 2421407 - RNA, 16 nt, Human
ucugcuccacccuugg

SEQ ID NO: 2421408 - RNA, 17 nt, Human
ucugcuccacccuuggc

SEQ ID NO: 2421409 - RNA, 18 nt, Human
ucugcuccacccuuggcc

SEQ ID NO: 2421410 - RNA, 19 nt, Human
ucugcuccacccuuggccu

SEQ ID NO: 2421411 - RNA, 20 nt, Human
ucugcucacauaucugucau

SEQ ID NO: 2421412 - RNA, 19 nt, Human
ucugcucacauaucuguca

SEQ ID NO: 2421413 - RNA, 17 nt, Human
ucugcucacauaucugu

SEQ ID NO: 2421414 - RNA, 15 nt, Human
ucugcgugucaccug

SEQ ID NO: 2421415 - RNA, 19 nt, Human
ucugcgugucaccugugcu

SEQ ID NO: 2421416 - RNA, 20 nt, Human
ucugcgugucaccugugcuu

SEQ ID NO: 2421417 - RNA, 14 nt, Human
ucugcuucagugga

SEQ ID NO: 2421418 - RNA, 13 nt, Human
ucugcuucagugg

SEQ ID NO: 2421419 - RNA, 18 nt, Human
ucugcuugcucuuguccu

SEQ ID NO: 2421420 - RNA, 15 nt, Human
ucugcuucagccucc

SEQ ID NO: 2421421 - RNA, 14 nt, Human
ucugcuucagccuc

SEQ ID NO: 2421422 - RNA, 13 nt, Human
ucugcuucagccu

SEQ ID NO: 2421423 - RNA, 20 nt, Human
ucugcuccacccuuggccug

SEQ ID NO: 2421424 - RNA, 21 nt, Human
ucugcuccacccuuggccugu

SEQ ID NO: 2421425 - RNA, 23 nt, Human
ucugcuccacccuuggccugucu

SEQ ID NO: 2421426 - RNA, 13 nt, Human
ucugucaagaaga

SEQ ID NO: 2421427 - RNA, 17 nt, Human
ucugucacccaggcugg

SEQ ID NO: 2421428 - RNA, 16 nt, Human
ucugucacccaggcug

SEQ ID NO: 2421429 - RNA, 19 nt, Human
ucugucaccaauugguuaa

SEQ ID NO: 2421430 - RNA, 15 nt, Human
ucugucacaccagcc

SEQ ID NO: 2421431 - RNA, 14 nt, Human
ucugucaaugaaaa

SEQ ID NO: 2421432 - RNA, 13 nt, Human
ucugucacuuaau

SEQ ID NO: 2421433 - RNA, 22 nt, Human
ucugugaaaggaaagagggagg

SEQ ID NO: 2421434 - RNA, 16 nt, Human
ucugugaaaguacauu

SEQ ID NO: 2421435 - RNA, 17 nt, Human
ucugucacugcaggcac

SEQ ID NO: 2421436 - RNA, 18 nt, Human
ucugucagaugggaagac

SEQ ID NO: 2421437 - RNA, 19 nt, Human
ucugucagaugggaagaca

SEQ ID NO: 2421438 - RNA, 14 nt, Human
ucugggccagaauu

SEQ ID NO: 2421439 - RNA, 15 nt, Human
ucugggccagaauuu

SEQ ID NO: 2421440 - RNA, 21 nt, Human
ucugggccauucuccacagca

SEQ ID NO: 2421441 - RNA, 23 nt, Human
ucugggccaaguuccucuagugc

SEQ ID NO: 2421442 - RNA, 18 nt, Human
ucugggcccccuccuccc

SEQ ID NO: 2421443 - RNA, 18 nt, Human
ucugggccaagucaaaga

SEQ ID NO: 2421444 - RNA, 20 nt, Human
ucugggcccggccauguccu

SEQ ID NO: 2421445 - RNA, 23 nt, Human
ucuguauuuuauuuagacaagag

SEQ ID NO: 2421446 - RNA, 19 nt, Human
ucugugagauucauucaug

SEQ ID NO: 2421447 - RNA, 17 nt, Human
ucugugagauucauuca

SEQ ID NO: 2421448 - RNA, 21 nt, Human
ucugugagacucgagaacuuu

SEQ ID NO: 2421449 - RNA, 17 nt, Human
ucugugagacucgagaa

SEQ ID NO: 2421450 - RNA, 23 nt, Human
ucugugagaugcuagaacucccu

SEQ ID NO: 2421451 - RNA, 17 nt, Human
ucugugagaugcuagaa

SEQ ID NO: 2421452 - RNA, 22 nt, Human
ucugugagaugcuagaacuccc

SEQ ID NO: 2421453 - RNA, 14 nt, Human
ucugugagaugcua

SEQ ID NO: 2421454 - RNA, 23 nt, Human
ucugugaccucaggcacuagccu

SEQ ID NO: 2421455 - RNA, 21 nt, Human
ucugugaacgauuuagaaaga

SEQ ID NO: 2421456 - RNA, 17 nt, Human
ucugugaacgauuuaga

SEQ ID NO: 2421457 - RNA, 17 nt, Human
ucugugaaaugcuggca

SEQ ID NO: 2421458 - RNA, 20 nt, Human
ucugugaaaugcuggcauuu

SEQ ID NO: 2421459 - RNA, 20 nt, Human
ucugugagcaucacaguuuu

SEQ ID NO: 2421460 - RNA, 13 nt, Human
ucuguucuuucca

SEQ ID NO: 2421461 - RNA, 22 nt, Human
ucuguucuuuccaaaguacacu

SEQ ID NO: 2421462 - RNA, 16 nt, Human
ucuguugcaagugcaa

SEQ ID NO: 2421463 - RNA, 12 nt, Human
ucuguugcaaac

SEQ ID NO: 2421464 - RNA, 18 nt, Human
ucuguucuuuaauuuauu

SEQ ID NO: 2421465 - RNA, 12 nt, Human
ucuguugaaguu

SEQ ID NO: 2421466 - RNA, 17 nt, Human
ucuguuggccaguguga

SEQ ID NO: 2421467 - RNA, 12 nt, Human
ucuguuggccag

SEQ ID NO: 2421468 - RNA, 15 nt, Human
ucuguugcugccuca

SEQ ID NO: 2421469 - RNA, 15 nt, Human
ucuguuggcaggcug

SEQ ID NO: 2421470 - RNA, 15 nt, Human
ucuguugccaggcua

SEQ ID NO: 2421471 - RNA, 18 nt, Human
ucuguugccacaacccug

SEQ ID NO: 2421472 - RNA, 16 nt, Human
ucuguugcccaggcug

SEQ ID NO: 2421473 - RNA, 13 nt, Human
ucuguuuagauaa

SEQ ID NO: 2421474 - RNA, 20 nt, Human
ucuguuuacaucaguuuuaa

SEQ ID NO: 2421475 - RNA, 23 nt, Human
ucuguuuaauacucauccuugua

SEQ ID NO: 2421476 - RNA, 16 nt, Human
agaauucuuacauguu

SEQ ID NO: 2421477 - RNA, 17 nt, Human
agaauucuuacauguuu

SEQ ID NO: 2421478 - RNA, 19 nt, Human
agaauucuuacauguuuuc

SEQ ID NO: 2421479 - RNA, 20 nt, Human
agaauucuuacauguuuucu

SEQ ID NO: 2421480 - RNA, 23 nt, Human
agaauucuuacauguuuucuuug

SEQ ID NO: 2421481 - RNA, 14 nt, Human
agaauucuuucaag

SEQ ID NO: 2421482 - RNA, 17 nt, Human
agaauucuucaggugga

SEQ ID NO: 2421483 - RNA, 13 nt, Human
agaauucuuucaa

SEQ ID NO: 2421484 - RNA, 16 nt, Human
agaauugaacccagga

SEQ ID NO: 2421485 - RNA, 17 nt, Human
agaauugaacccaggag

SEQ ID NO: 2421486 - RNA, 14 nt, Human
ucuguuuacagugu

SEQ ID NO: 2421487 - RNA, 17 nt, Human
ucuguuuaauacucauc

SEQ ID NO: 2421488 - RNA, 15 nt, Human
ucuguuuaauacuca

SEQ ID NO: 2421489 - RNA, 21 nt, Human
ucuguuguccuccccuugggc

SEQ ID NO: 2421490 - RNA, 17 nt, Human
ucuguuuaaaguagauu

SEQ ID NO: 2421491 - RNA, 20 nt, Human
ucuguuggcaggcuggccag

SEQ ID NO: 2421492 - RNA, 18 nt, Human
ucuguuggcaggcuggcc

SEQ ID NO: 2421493 - RNA, 19 nt, Human
ucuguuguccuccccuugg

SEQ ID NO: 2421494 - RNA, 17 nt, Human
ucuguuguccuccccuu

SEQ ID NO: 2421495 - RNA, 15 nt, Human
ucuguuguccucccc

SEQ ID NO: 2421496 - RNA, 18 nt, Human
ucuguugucauugcuguu

SEQ ID NO: 2421497 - RNA, 14 nt, Human
ucuguugucauugc

SEQ ID NO: 2421498 - RNA, 20 nt, Human
agacacuggcugccagcuau

SEQ ID NO: 2421499 - RNA, 18 nt, Human
agacacuggcugccagcu

SEQ ID NO: 2421500 - RNA, 16 nt, Human
agacacuggccccuca

SEQ ID NO: 2421501 - RNA, 15 nt, Human
agacacuggccccuc

SEQ ID NO: 2421502 - RNA, 13 nt, Human
agacacuggcccc

SEQ ID NO: 2421503 - RNA, 20 nt, Human
agacacugccacacaggguc

SEQ ID NO: 2421504 - RNA, 20 nt, Human
agacacuucuaaaugaagug

SEQ ID NO: 2421505 - RNA, 21 nt, Human
agacagagaccuccugccucc

SEQ ID NO: 2421506 - RNA, 16 nt, Human
agacagagaccuccug

SEQ ID NO: 2421507 - RNA, 13 nt, Human
agacacuugccuu

SEQ ID NO: 2421508 - RNA, 20 nt, Human
agacacugguuuacacuuua

SEQ ID NO: 2421509 - RNA, 18 nt, Human
agacacugguuuacacuu

SEQ ID NO: 2421510 - RNA, 18 nt, Human
agacacuguuuacaagaa

SEQ ID NO: 2421511 - RNA, 19 nt, Human
agacacuguuuacaagaaa

SEQ ID NO: 2421512 - RNA, 20 nt, Human
agacacuguuuacaagaaaa

SEQ ID NO: 2421513 - RNA, 22 nt, Human
agacacuguuuacaagaaaaaa

SEQ ID NO: 2421514 - RNA, 20 nt, Human
agacagagaggacuguaggg

SEQ ID NO: 2421515 - RNA, 15 nt, Human
agacagagaggacug

SEQ ID NO: 2421516 - RNA, 19 nt, Human
agacagagaccuccugccu

SEQ ID NO: 2421517 - RNA, 16 nt, Human
agacaggaccagggau

SEQ ID NO: 2421518 - RNA, 17 nt, Human
agacaccuugacagggc

SEQ ID NO: 2421519 - RNA, 14 nt, Human
agacaccugcaccu

SEQ ID NO: 2421520 - RNA, 16 nt, Human
agacaccugcaccucc

SEQ ID NO: 2421521 - RNA, 17 nt, Human
agacaccugcaccuccc

SEQ ID NO: 2421522 - RNA, 21 nt, Human
agacaccugcaccucccccca

SEQ ID NO: 2421523 - RNA, 18 nt, Human
agacaccuugacagggca

SEQ ID NO: 2421524 - RNA, 20 nt, Human
agacaccugcaccucccccc

SEQ ID NO: 2421525 - RNA, 19 nt, Human
agacacugaccauccacuc

SEQ ID NO: 2421526 - RNA, 22 nt, Human
agacacugaaauauacacacag

SEQ ID NO: 2421527 - RNA, 20 nt, Human
agacacauguccaagaagcc

SEQ ID NO: 2421528 - RNA, 16 nt, Human
agacacauguccaaga

SEQ ID NO: 2421529 - RNA, 14 nt, Human
agacacauaugagg

SEQ ID NO: 2421530 - RNA, 16 nt, Human
agacacauaugagggg

SEQ ID NO: 2421531 - RNA, 22 nt, Human
agaauugaacccaggaggugga

SEQ ID NO: 2421532 - RNA, 18 nt, Human
agaauugaacccaggagg

SEQ ID NO: 2421533 - RNA, 19 nt, Human
agaauugaacccaggaggu

SEQ ID NO: 2421534 - RNA, 20 nt, Human
agaauugauauacacggaug

SEQ ID NO: 2421535 - RNA, 21 nt, Human
agaauugaucauuuucccccc

SEQ ID NO: 2421536 - RNA, 22 nt, Human
agaauugaucauuuucccccca

SEQ ID NO: 2421537 - RNA, 20 nt, Human
agaauuuuaaaaaugaaucc

SEQ ID NO: 2421538 - RNA, 19 nt, Human
agaauuuuaaaaaugaauc

SEQ ID NO: 2421539 - RNA, 18 nt, Human
agaauuuuaaaaaugaau

SEQ ID NO: 2421540 - RNA, 17 nt, Human
agaauuuuaaaaaugaa

SEQ ID NO: 2421541 - RNA, 16 nt, Human
agaauuuuaaaaauga

SEQ ID NO: 2421542 - RNA, 14 nt, Human
agaauuuuaaaaau

SEQ ID NO: 2421543 - RNA, 12 nt, Human
agaauuuuaaaa

SEQ ID NO: 2421544 - RNA, 16 nt, Human
agaauuuuaagugcuu

SEQ ID NO: 2421545 - RNA, 21 nt, Human
agaauuuuaaaaaugaauccu

SEQ ID NO: 2421546 - RNA, 13 nt, Human
agaauuuuaaauu

SEQ ID NO: 2421547 - RNA, 15 nt, Human
agaauuuuaaauuau

SEQ ID NO: 2421548 - RNA, 18 nt, Human
agaauuuuaaauuauaac

SEQ ID NO: 2421549 - RNA, 21 nt, Human
agacacacacacgcacgcaca

SEQ ID NO: 2421550 - RNA, 20 nt, Human
agacacacacacgcacgcac

SEQ ID NO: 2421551 - RNA, 18 nt, Human
agacacacacacgcacgc

SEQ ID NO: 2421552 - RNA, 16 nt, Human
agacacacacacgcac

SEQ ID NO: 2421553 - RNA, 12 nt, Human
agacacagacug

SEQ ID NO: 2421554 - RNA, 15 nt, Human
agacacacaugaagu

SEQ ID NO: 2421555 - RNA, 12 nt, Human
agacacacauga

SEQ ID NO: 2421556 - RNA, 15 nt, Human
agacacacacacgca

SEQ ID NO: 2421557 - RNA, 14 nt, Human
agacacacacacgc

SEQ ID NO: 2421558 - RNA, 13 nt, Human
agacacacacaca

SEQ ID NO: 2421559 - RNA, 21 nt, Human
agaauuuuaagugcuuuguaa

SEQ ID NO: 2421560 - RNA, 22 nt, Human
agaauuuuaagugcuuuguaau

SEQ ID NO: 2421561 - RNA, 12 nt, Human
agacacacacac

SEQ ID NO: 2421562 - RNA, 13 nt, Human
agacacaggcccg

SEQ ID NO: 2421563 - RNA, 12 nt, Human
agacacaggccc

SEQ ID NO: 2421564 - RNA, 16 nt, Human
agacacaggcccggcu

SEQ ID NO: 2421565 - RNA, 22 nt, Human
agacacagggacuugaaguugu

SEQ ID NO: 2421566 - RNA, 20 nt, Human
agacacagggacuugaaguu

SEQ ID NO: 2421567 - RNA, 19 nt, Human
agacacagggacuugaagu

SEQ ID NO: 2421568 - RNA, 16 nt, Human
agacacagggacuuga

SEQ ID NO: 2421569 - RNA, 23 nt, Human
agacacacacacgcacgcacaca

SEQ ID NO: 2421570 - RNA, 22 nt, Human
agacacacacacgcacgcacac

SEQ ID NO: 2421571 - RNA, 14 nt, Human
ucugcuuguguuaa

SEQ ID NO: 2421572 - RNA, 19 nt, Human
ucugcuuguuauuagagau

SEQ ID NO: 2421573 - RNA, 13 nt, Human
ucugcuuuccaca

SEQ ID NO: 2421574 - RNA, 15 nt, Human
ucugcuuuauguugc

SEQ ID NO: 2421575 - RNA, 12 nt, Human
ucugcuuuccuc

SEQ ID NO: 2421576 - RNA, 13 nt, Human
ucugcuuuccucu

SEQ ID NO: 2421577 - RNA, 18 nt, Human
ucugcuuuccucuuccug

SEQ ID NO: 2421578 - RNA, 23 nt, Human
agaaguggaccaggacaggacca

SEQ ID NO: 2421579 - RNA, 18 nt, Human
agaaggcucuucugacua

SEQ ID NO: 2421580 - RNA, 17 nt, Human
agaaggccaagaggcug

SEQ ID NO: 2421581 - RNA, 13 nt, Human
agaaggccaagag

SEQ ID NO: 2421582 - RNA, 12 nt, Human
agaaggcucuuc

SEQ ID NO: 2421583 - RNA, 11 nt, Human
agaaggcucuu

SEQ ID NO: 2421584 - RNA, 14 nt, Human
agaaggccacaugu

SEQ ID NO: 2421585 - RNA, 15 nt, Human
agaaggcagggaaag

SEQ ID NO: 2421586 - RNA, 15 nt, Human
agaaggcaaaugacu

SEQ ID NO: 2421587 - RNA, 20 nt, Human
agaaggcaaaugacuuugga

SEQ ID NO: 2421588 - RNA, 14 nt, Human
agaaggcaaaugac

SEQ ID NO: 2421589 - RNA, 15 nt, Human
agaaggcaaaaaugu

SEQ ID NO: 2421590 - RNA, 22 nt, Human
agaaggcauaucagucucugag

SEQ ID NO: 2421591 - RNA, 13 nt, Human
agaaggccaagaa

SEQ ID NO: 2421592 - RNA, 22 nt, Human
agaaggcaaguuucuagcuaga

SEQ ID NO: 2421593 - RNA, 13 nt, Human
agaaggcagccac

SEQ ID NO: 2421594 - RNA, 20 nt, Human
agaauaaaauguugaaaagu

SEQ ID NO: 2421595 - RNA, 16 nt, Human
agaauaaaauguugaa

SEQ ID NO: 2421596 - RNA, 14 nt, Human
agaauaaaauguug

SEQ ID NO: 2421597 - RNA, 13 nt, Human
agaauaaaauguu

SEQ ID NO: 2421598 - RNA, 22 nt, Human
agaaguuuuuguacuguaaaga

SEQ ID NO: 2421599 - RNA, 21 nt, Human
agaaguuuuuguacuguaaag

SEQ ID NO: 2421600 - RNA, 20 nt, Human
agaaguuuuuguacuguaaa

SEQ ID NO: 2421601 - RNA, 23 nt, Human
agaaguuucugccgcagcccugc

SEQ ID NO: 2421602 - RNA, 22 nt, Human
agaaguuucugccgcagcccug

SEQ ID NO: 2421603 - RNA, 21 nt, Human
agaaguuucugccgcagcccu

SEQ ID NO: 2421604 - RNA, 20 nt, Human
agaaguggggacagagcaga

SEQ ID NO: 2421605 - RNA, 17 nt, Human
agaagugggccaggaca

SEQ ID NO: 2421606 - RNA, 18 nt, Human
agaagugggccaggacag

SEQ ID NO: 2421607 - RNA, 19 nt, Human
agaagugggccaggacagg

SEQ ID NO: 2421608 - RNA, 23 nt, Human
agaagugggccaggacaggcccg

SEQ ID NO: 2421609 - RNA, 23 nt, Human
agaagugugauugggaauaaaua

SEQ ID NO: 2421610 - RNA, 15 nt, Human
agaaguuaagcaaca

SEQ ID NO: 2421611 - RNA, 22 nt, Human
agaagugugauugggaauaaau

SEQ ID NO: 2421612 - RNA, 14 nt, Human
agaagugugauugg

SEQ ID NO: 2421613 - RNA, 12 nt, Human
agaagugugauu

SEQ ID NO: 2421614 - RNA, 23 nt, Human
agaaguuauuuucuacagugguu

SEQ ID NO: 2421615 - RNA, 15 nt, Human
agaaguuacugaaug

SEQ ID NO: 2421616 - RNA, 14 nt, Human
agaaguuacugaau

SEQ ID NO: 2421617 - RNA, 19 nt, Human
agaaguuaagcaacaucua

SEQ ID NO: 2421618 - RNA, 19 nt, Human
agaauauuagcuuuacugu

SEQ ID NO: 2421619 - RNA, 20 nt, Human
agaauauuagcuuuacuguu

SEQ ID NO: 2421620 - RNA, 21 nt, Human
agaauauuagcuuuacuguuu

SEQ ID NO: 2421621 - RNA, 19 nt, Human
agaauauccuacuucucca

SEQ ID NO: 2421622 - RNA, 11 nt, Human
agaauaucugg

SEQ ID NO: 2421623 - RNA, 17 nt, Human
agaauauccaugaccua

SEQ ID NO: 2421624 - RNA, 17 nt, Human
agaauagccacauuugg

SEQ ID NO: 2421625 - RNA, 16 nt, Human
agaauagaugcugacu

SEQ ID NO: 2421626 - RNA, 14 nt, Human
agaauacuuuucuc

SEQ ID NO: 2421627 - RNA, 20 nt, Human
agaauacuguuaaaggaaaa

SEQ ID NO: 2421628 - RNA, 22 nt, Human
agaauagaaauaaaggauguga

SEQ ID NO: 2421629 - RNA, 16 nt, Human
agaauacuuuucucuu

SEQ ID NO: 2421630 - RNA, 14 nt, Human
agaauaagagaaag

SEQ ID NO: 2421631 - RNA, 14 nt, Human
agaauaaaauugua

SEQ ID NO: 2421632 - RNA, 13 nt, Human
agaauaaaauugu

SEQ ID NO: 2421633 - RNA, 12 nt, Human
agaauaaaauug

SEQ ID NO: 2421634 - RNA, 17 nt, Human
agaauaaaauuuuuaau

SEQ ID NO: 2421635 - RNA, 14 nt, Human
agaauaaaauuuuu

SEQ ID NO: 2421636 - RNA, 12 nt, Human
agaauaaaauuu

SEQ ID NO: 2421637 - RNA, 17 nt, Human
agaauaaguuauugcag

SEQ ID NO: 2421638 - RNA, 16 nt, Human
agaauaaguuauugca

SEQ ID NO: 2421639 - RNA, 14 nt, Human
agaauaaguuauug

SEQ ID NO: 2421640 - RNA, 13 nt, Human
agaauaaguuauu

SEQ ID NO: 2421641 - RNA, 22 nt, Human
agaauaagagagucauaaaccu

SEQ ID NO: 2421642 - RNA, 21 nt, Human
agaauaagagaaagaaaauga

SEQ ID NO: 2421643 - RNA, 16 nt, Human
agaauaagagaaagaa

SEQ ID NO: 2421644 - RNA, 18 nt, Human
agaauaagucauguuccu

SEQ ID NO: 2421645 - RNA, 15 nt, Human
agaauaagucauguu

SEQ ID NO: 2421646 - RNA, 12 nt, Human
agaauaaguuau

SEQ ID NO: 2421647 - RNA, 19 nt, Human
agaauacuguuaaaggaaa

SEQ ID NO: 2421648 - RNA, 22 nt, Human
agaauaauaugcugccaaauuu

SEQ ID NO: 2421649 - RNA, 14 nt, Human
agaauaauaagagg

SEQ ID NO: 2421650 - RNA, 20 nt, Human
agaauaaguuauugcaguuu

SEQ ID NO: 2421651 - RNA, 19 nt, Human
agaauaaguuauugcaguu

SEQ ID NO: 2421652 - RNA, 21 nt, Human
agaauaaguuauugcaguuua

SEQ ID NO: 2421653 - RNA, 21 nt, Human
agaauaagucauguuccuuca

SEQ ID NO: 2421654 - RNA, 21 nt, Human
agaaugguugccuuaaagaaa

SEQ ID NO: 2421655 - RNA, 23 nt, Human
agaaugguugccuuaaagaaagu

SEQ ID NO: 2421656 - RNA, 15 nt, Human
agaaucccaaauuug

SEQ ID NO: 2421657 - RNA, 17 nt, Human
agaaucccaaauuugau

SEQ ID NO: 2421658 - RNA, 18 nt, Human
agaaucccaaauuugauu

SEQ ID NO: 2421659 - RNA, 18 nt, Human
agaaucccacuuucuaua

SEQ ID NO: 2421660 - RNA, 22 nt, Human
agaauccacccauccuaccaau

SEQ ID NO: 2421661 - RNA, 19 nt, Human
agaaucccaaauuugauug

SEQ ID NO: 2421662 - RNA, 18 nt, Human
agaaucccuggcaaaggg

SEQ ID NO: 2421663 - RNA, 16 nt, Human
agaaugggcaguuaca

SEQ ID NO: 2421664 - RNA, 17 nt, Human
agaaugggcaguuacau

SEQ ID NO: 2421665 - RNA, 18 nt, Human
agaauggggaucacagag

SEQ ID NO: 2421666 - RNA, 19 nt, Human
agaaugggcaguuacaugc

SEQ ID NO: 2421667 - RNA, 15 nt, Human
agaauggggugcaug

SEQ ID NO: 2421668 - RNA, 11 nt, Human
agaauauuuau

SEQ ID NO: 2421669 - RNA, 15 nt, Human
agaauauucaggacu

SEQ ID NO: 2421670 - RNA, 13 nt, Human
agaauauucagga

SEQ ID NO: 2421671 - RNA, 12 nt, Human
agaauauucagg

SEQ ID NO: 2421672 - RNA, 23 nt, Human
agaauauuagcuuuacuguuugu

SEQ ID NO: 2421673 - RNA, 17 nt, Human
agaaucagaucauuuca

SEQ ID NO: 2421674 - RNA, 22 nt, Human
agaauauuuauuaccucugaua

SEQ ID NO: 2421675 - RNA, 21 nt, Human
agaaucagucuauccacagag

SEQ ID NO: 2421676 - RNA, 19 nt, Human
agaaucagucuauccacag

SEQ ID NO: 2421677 - RNA, 13 nt, Human
agaaucagccuag

SEQ ID NO: 2421678 - RNA, 19 nt, Human
agaaguuuuuguacuguaa

SEQ ID NO: 2421679 - RNA, 19 nt, Human
agaauauuuauuaccucug

SEQ ID NO: 2421680 - RNA, 16 nt, Human
agaauauuuauuaccu

SEQ ID NO: 2421681 - RNA, 14 nt, Human
agaauauuuuaagu

SEQ ID NO: 2421682 - RNA, 12 nt, Human
agaauccaaacu

SEQ ID NO: 2421683 - RNA, 14 nt, Human
agaauccaaacuug

SEQ ID NO: 2421684 - RNA, 16 nt, Human
agaauccaaacuugga

SEQ ID NO: 2421685 - RNA, 18 nt, Human
agaauccaagugaacacu

SEQ ID NO: 2421686 - RNA, 21 nt, Human
agaauccaaacuuggauuuuu

SEQ ID NO: 2421687 - RNA, 22 nt, Human
agaaucauaugauucugcuuuu

SEQ ID NO: 2421688 - RNA, 18 nt, Human
agaaucaugugaacccgg

SEQ ID NO: 2421689 - RNA, 21 nt, Human
agaaucaugugaacccgggac

SEQ ID NO: 2421690 - RNA, 21 nt, Human
agaaucauaugauucugcuuu

SEQ ID NO: 2421691 - RNA, 20 nt, Human
agaaucauaugauucugcuu

SEQ ID NO: 2421692 - RNA, 17 nt, Human
agaaucauaugauucug

SEQ ID NO: 2421693 - RNA, 16 nt, Human
agaaucagugcaaaga

SEQ ID NO: 2421694 - RNA, 14 nt, Human
agaaucauacuuag

SEQ ID NO: 2421695 - RNA, 22 nt, Human
agaaucagucuauccacagaga

SEQ ID NO: 2421696 - RNA, 16 nt, Human
agaauguaagaacuac

SEQ ID NO: 2421697 - RNA, 15 nt, Human
agaauguaagaacua

SEQ ID NO: 2421698 - RNA, 12 nt, Human
agaauguauugu

SEQ ID NO: 2421699 - RNA, 14 nt, Human
agaauguagccauu

SEQ ID NO: 2421700 - RNA, 23 nt, Human
agaauguauuguaccuuuuaaca

SEQ ID NO: 2421701 - RNA, 22 nt, Human
agaauguauuguaccuuuuaac

SEQ ID NO: 2421702 - RNA, 21 nt, Human
agaauguauuguaccuuuuaa

SEQ ID NO: 2421703 - RNA, 17 nt, Human
agaauguauuguaccuu

SEQ ID NO: 2421704 - RNA, 16 nt, Human
agaauguauuguaccu

SEQ ID NO: 2421705 - RNA, 15 nt, Human
agaauguauuguacc

SEQ ID NO: 2421706 - RNA, 14 nt, Human
agaauguauuguac

SEQ ID NO: 2421707 - RNA, 13 nt, Human
agaauguauugua

SEQ ID NO: 2421708 - RNA, 15 nt, Human
agaauuaacacauga

SEQ ID NO: 2421709 - RNA, 17 nt, Human
agaauuaaaaaugaaau

SEQ ID NO: 2421710 - RNA, 23 nt, Human
agaauuaacacaugauccugcaa

SEQ ID NO: 2421711 - RNA, 22 nt, Human
agaauuauauagguugugcaaa

SEQ ID NO: 2421712 - RNA, 13 nt, Human
agaauuauauagg

SEQ ID NO: 2421713 - RNA, 21 nt, Human
ucugggcacugguaaucccaa

SEQ ID NO: 2421714 - RNA, 15 nt, Human
ucugggauucuacuu

SEQ ID NO: 2421715 - RNA, 14 nt, Human
ucugggcaggaccu

SEQ ID NO: 2421716 - RNA, 18 nt, Human
ucugggcaggaccucaga

SEQ ID NO: 2421717 - RNA, 21 nt, Human
ucugggcaggacucagcuccc

SEQ ID NO: 2421718 - RNA, 20 nt, Human
ucugggcaggacucagcucc

SEQ ID NO: 2421719 - RNA, 14 nt, Human
ucugggcaggacuc

SEQ ID NO: 2421720 - RNA, 19 nt, Human
ucugggcaggaccucagag

SEQ ID NO: 2421721 - RNA, 19 nt, Human
ucugggcaucuguucuggu

SEQ ID NO: 2421722 - RNA, 18 nt, Human
ucugggcaucuguucugg

SEQ ID NO: 2421723 - RNA, 12 nt, Human
ucugggccaagu

SEQ ID NO: 2421724 - RNA, 16 nt, Human
ucugggccaaguuccu

SEQ ID NO: 2421725 - RNA, 19 nt, Human
ucugggccaaguuccucua

SEQ ID NO: 2421726 - RNA, 13 nt, Human
ucugggagggcag

SEQ ID NO: 2421727 - RNA, 19 nt, Human
ucugggagggcagcagggc

SEQ ID NO: 2421728 - RNA, 21 nt, Human
ucugggagggcagcagggcua

SEQ ID NO: 2421729 - RNA, 19 nt, Human
ucugggauucuacuuuaag

SEQ ID NO: 2421730 - RNA, 18 nt, Human
ucugggauaaguaaguuu

SEQ ID NO: 2421731 - RNA, 16 nt, Human
ucugggaguccccuuu

SEQ ID NO: 2421732 - RNA, 19 nt, Human
ucugggaggaauggacaga

SEQ ID NO: 2421733 - RNA, 23 nt, Human
ucugggaggaauggacagacaga

SEQ ID NO: 2421734 - RNA, 15 nt, Human
ucugggagaggauuu

SEQ ID NO: 2421735 - RNA, 14 nt, Human
agaauuccaaggag

SEQ ID NO: 2421736 - RNA, 16 nt, Human
ucugggagaggauuuu

SEQ ID NO: 2421737 - RNA, 13 nt, Human
agaauuccaagga

SEQ ID NO: 2421738 - RNA, 20 nt, Human
agaauucaaacuggggccuc

SEQ ID NO: 2421739 - RNA, 11 nt, Human
agaauuauuua

SEQ ID NO: 2421740 - RNA, 19 nt, Human
acuugaugugccauuuuaa

SEQ ID NO: 2421741 - RNA, 18 nt, Human
acuugaugugccauuuua

SEQ ID NO: 2421742 - RNA, 17 nt, Human
acuugcaaaaaggguca

SEQ ID NO: 2421743 - RNA, 23 nt, Human
acuugcaaaaagggucaguaugg

SEQ ID NO: 2421744 - RNA, 21 nt, Human
acuugcaaccgucuguuaugc

SEQ ID NO: 2421745 - RNA, 13 nt, Human
acuugcaccucug

SEQ ID NO: 2421746 - RNA, 19 nt, Human
acuugcacgcccaugugug

SEQ ID NO: 2421747 - RNA, 20 nt, Human
acuugaugugccauuuuaaa

SEQ ID NO: 2421748 - RNA, 16 nt, Human
acuugaugugccauuu

SEQ ID NO: 2421749 - RNA, 23 nt, Human
ucucacuauguugcccaggcagg

SEQ ID NO: 2421750 - RNA, 22 nt, Human
ucucacuauguugcccaggcag

SEQ ID NO: 2421751 - RNA, 21 nt, Human
ucucacuauguugcccaggca

SEQ ID NO: 2421752 - RNA, 20 nt, Human
ucucacuauguugcccaggc

SEQ ID NO: 2421753 - RNA, 22 nt, Human
acuugcagacucuacagaggcc

SEQ ID NO: 2421754 - RNA, 19 nt, Human
acuugcagacucuacagag

SEQ ID NO: 2421755 - RNA, 16 nt, Human
acuugcucuugaugcc

SEQ ID NO: 2421756 - RNA, 23 nt, Human
acuugcagacucuacagaggcca

SEQ ID NO: 2421757 - RNA, 18 nt, Human
acuugcucuugaugccug

SEQ ID NO: 2421758 - RNA, 17 nt, Human
acuugcucuugaugccu

SEQ ID NO: 2421759 - RNA, 20 nt, Human
acuugcucuugaugccuggc

SEQ ID NO: 2421760 - RNA, 20 nt, Human
acuugcagcugauguuggaa

SEQ ID NO: 2421761 - RNA, 21 nt, Human
acuugcugcaguaugaaaaua

SEQ ID NO: 2421762 - RNA, 23 nt, Human
acuugcagcugauguuggaagag

SEQ ID NO: 2421763 - RNA, 22 nt, Human
acuuguggacacagcucuucuc

SEQ ID NO: 2421764 - RNA, 19 nt, Human
acuuguggacacagcucuu

SEQ ID NO: 2421765 - RNA, 20 nt, Human
acuuguggacuaaaagauau

SEQ ID NO: 2421766 - RNA, 19 nt, Human
acuuguggacuaaaagaua

SEQ ID NO: 2421767 - RNA, 18 nt, Human
acuuguggacuaaaagau

SEQ ID NO: 2421768 - RNA, 15 nt, Human
acuuguggacuaaaa

SEQ ID NO: 2421769 - RNA, 16 nt, Human
acuugucaaagaaggu

SEQ ID NO: 2421770 - RNA, 15 nt, Human
acuugucuuuuucug

SEQ ID NO: 2421771 - RNA, 18 nt, Human
acuugucuuuggacccug

SEQ ID NO: 2421772 - RNA, 20 nt, Human
acuugucuuuggacccugag

SEQ ID NO: 2421773 - RNA, 21 nt, Human
acuugucuuuggacccugagg

SEQ ID NO: 2421774 - RNA, 18 nt, Human
acuugucaaagaagguuu

SEQ ID NO: 2421775 - RNA, 15 nt, Human
acuugucaaagaagg

SEQ ID NO: 2421776 - RNA, 14 nt, Human
acuugucaaagaag

SEQ ID NO: 2421777 - RNA, 17 nt, Human
acuugucuuuuucugga

SEQ ID NO: 2421778 - RNA, 19 nt, Human
acuuguauuauguguguuu

SEQ ID NO: 2421779 - RNA, 18 nt, Human
acuuguauuauguguguu

SEQ ID NO: 2421780 - RNA, 15 nt, Human
acuugucaauaaaau

SEQ ID NO: 2421781 - RNA, 22 nt, Human
acuugcuuuaugccuucuuauu

SEQ ID NO: 2421782 - RNA, 13 nt, Human
acuugucaaagaa

SEQ ID NO: 2421783 - RNA, 14 nt, Human
acuugcuuuuaaaa

SEQ ID NO: 2421784 - RNA, 16 nt, Human
acuugcuuauuugaca

SEQ ID NO: 2421785 - RNA, 22 nt, Human
acuugcugcaguaugaaaauaa

SEQ ID NO: 2421786 - RNA, 17 nt, Human
acuugcugccugaagaa

SEQ ID NO: 2421787 - RNA, 23 nt, Human
acuugcugccugaagaacaguaa

SEQ ID NO: 2421788 - RNA, 18 nt, Human
acuugcuguuuuguucug

SEQ ID NO: 2421789 - RNA, 23 nt, Human
ucucagcagcgaccaccccugcc

SEQ ID NO: 2421790 - RNA, 18 nt, Human
ucucagcagcgaccaccc

SEQ ID NO: 2421791 - RNA, 16 nt, Human
acuugucuuuuucugg

SEQ ID NO: 2421792 - RNA, 15 nt, Human
ucucagccaacgagu

SEQ ID NO: 2421793 - RNA, 21 nt, Human
ucucagccgcuucugacugcu

SEQ ID NO: 2421794 - RNA, 21 nt, Human
ucucagcaaugauuacucuuu

SEQ ID NO: 2421795 - RNA, 14 nt, Human
ucucaggaaaucaa

SEQ ID NO: 2421796 - RNA, 21 nt, Human
ucucaggaaaucaaauaugca

SEQ ID NO: 2421797 - RNA, 23 nt, Human
ucucaggaaaucaaauaugcaaa

SEQ ID NO: 2421798 - RNA, 11 nt, Human
ucucagccucc

SEQ ID NO: 2421799 - RNA, 13 nt, Human
ucucaggccagcu

SEQ ID NO: 2421800 - RNA, 12 nt, Human
ucucaggccagc

SEQ ID NO: 2421801 - RNA, 12 nt, Human
ucucaggccaaa

SEQ ID NO: 2421802 - RNA, 20 nt, Human
ucucaggcaugaacauguac

SEQ ID NO: 2421803 - RNA, 18 nt, Human
ucucaggcaugccugugu

SEQ ID NO: 2421804 - RNA, 20 nt, Human
ucucaggcaugccuguguga

SEQ ID NO: 2421805 - RNA, 21 nt, Human
ucucaggcaugccugugugac

SEQ ID NO: 2421806 - RNA, 13 nt, Human
ucucaggccaccu

SEQ ID NO: 2421807 - RNA, 18 nt, Human
ucucaggccaccugcccc

SEQ ID NO: 2421808 - RNA, 19 nt, Human
ucucaggccaccugccccc

SEQ ID NO: 2421809 - RNA, 10 nt, Human
ucucaggcca

SEQ ID NO: 2421810 - RNA, 22 nt, Human
ucucaggauccccucucuuccu

SEQ ID NO: 2421811 - RNA, 20 nt, Human
ucucaggaucaagaaagugu

SEQ ID NO: 2421812 - RNA, 23 nt, Human
ucucaggaccaaagcuuucaugu

SEQ ID NO: 2421813 - RNA, 21 nt, Human
ucucaggaccuagggauguuc

SEQ ID NO: 2421814 - RNA, 14 nt, Human
ucucaggagcacag

SEQ ID NO: 2421815 - RNA, 16 nt, Human
ucucaggaccuaggga

SEQ ID NO: 2421816 - RNA, 19 nt, Human
ucucaggagcacaggcagc

SEQ ID NO: 2421817 - RNA, 18 nt, Human
ucucaggagcacaggcag

SEQ ID NO: 2421818 - RNA, 16 nt, Human
ucucaggagcacaggc

SEQ ID NO: 2421819 - RNA, 15 nt, Human
ucucaggagcacagg

SEQ ID NO: 2421820 - RNA, 23 nt, Human
ucucaggagcacaggcagcugga

SEQ ID NO: 2421821 - RNA, 20 nt, Human
ucucaggagcacaggcagcu

SEQ ID NO: 2421822 - RNA, 15 nt, Human
ucucaggagcauggg

SEQ ID NO: 2421823 - RNA, 15 nt, Human
ucucauuuccaagca

SEQ ID NO: 2421824 - RNA, 18 nt, Human
ucucauuuagaacuugca

SEQ ID NO: 2421825 - RNA, 16 nt, Human
ucucauuuaauccucu

SEQ ID NO: 2421826 - RNA, 17 nt, Human
ucucauuucaccccucc

SEQ ID NO: 2421827 - RNA, 16 nt, Human
ucucauuucaccccuc

SEQ ID NO: 2421828 - RNA, 22 nt, Human
ucucauuucaccccucccuuuc

SEQ ID NO: 2421829 - RNA, 19 nt, Human
ucucauuucaccccucccu

SEQ ID NO: 2421830 - RNA, 19 nt, Human
ucucauuugccaauaauaa

SEQ ID NO: 2421831 - RNA, 14 nt, Human
ucucauuugucaca

SEQ ID NO: 2421832 - RNA, 16 nt, Human
ucuccaagcaggacau

SEQ ID NO: 2421833 - RNA, 15 nt, Human
ucuccaagcaggaca

SEQ ID NO: 2421834 - RNA, 16 nt, Human
ucucauuugucacaca

SEQ ID NO: 2421835 - RNA, 19 nt, Human
ucucaugugauccuuuuau

SEQ ID NO: 2421836 - RNA, 18 nt, Human
ucucaugugauccuuuua

SEQ ID NO: 2421837 - RNA, 17 nt, Human
ucucaugugauccuuuu

SEQ ID NO: 2421838 - RNA, 16 nt, Human
ucucaugugauccuuu

SEQ ID NO: 2421839 - RNA, 21 nt, Human
ucucaugugugcucuucuucu

SEQ ID NO: 2421840 - RNA, 17 nt, Human
ucucauguuuucaacug

SEQ ID NO: 2421841 - RNA, 23 nt, Human
ucucaugugauccuuuuauguua

SEQ ID NO: 2421842 - RNA, 18 nt, Human
ucucauguuuucaacugc

SEQ ID NO: 2421843 - RNA, 18 nt, Human
ucucauguuuuccauugu

SEQ ID NO: 2421844 - RNA, 19 nt, Human
ucucauguuuucaacugcc

SEQ ID NO: 2421845 - RNA, 20 nt, Human
ucucauuggacccuuccaug

SEQ ID NO: 2421846 - RNA, 15 nt, Human
ucucaugugauccuu

SEQ ID NO: 2421847 - RNA, 14 nt, Human
ucucaugugauccu

SEQ ID NO: 2421848 - RNA, 18 nt, Human
ucucauguaucaucugga

SEQ ID NO: 2421849 - RNA, 16 nt, Human
ucucauggagaaguua

SEQ ID NO: 2421850 - RNA, 15 nt, Human
ucucauggagaaguu

SEQ ID NO: 2421851 - RNA, 22 nt, Human
ucucauggagaagcagaaauac

SEQ ID NO: 2421852 - RNA, 21 nt, Human
ucucaugccucagccuccuga

SEQ ID NO: 2421853 - RNA, 20 nt, Human
ucucauggagaagcagaaau

SEQ ID NO: 2421854 - RNA, 18 nt, Human
ucucaggccagcugcuug

SEQ ID NO: 2421855 - RNA, 17 nt, Human
ucucaggccagcugcuu

SEQ ID NO: 2421856 - RNA, 21 nt, Human
ucucaggccagcugcuugggc

SEQ ID NO: 2421857 - RNA, 20 nt, Human
ucucaugccucagccuccug

SEQ ID NO: 2421858 - RNA, 16 nt, Human
ucucaggccaucauca

SEQ ID NO: 2421859 - RNA, 21 nt, Human
ucucaggccaccugcccccuu

SEQ ID NO: 2421860 - RNA, 20 nt, Human
acuuuacaauguucauccca

SEQ ID NO: 2421861 - RNA, 19 nt, Human
acuuuacaauguucauccc

SEQ ID NO: 2421862 - RNA, 23 nt, Human
acuuuaauucucaugugauccuu

SEQ ID NO: 2421863 - RNA, 19 nt, Human
acuuuaauucucaugugau

SEQ ID NO: 2421864 - RNA, 20 nt, Human
ucuccuccaccgccauggcu

SEQ ID NO: 2421865 - RNA, 22 nt, Human
acuuuaauuaccaaccuguuac

SEQ ID NO: 2421866 - RNA, 20 nt, Human
acuuuaauuaccaaccuguu

SEQ ID NO: 2421867 - RNA, 18 nt, Human
ucuccucugcugcuggcu

SEQ ID NO: 2421868 - RNA, 17 nt, Human
ucuccucugcugcuggc

SEQ ID NO: 2421869 - RNA, 16 nt, Human
ucuccucugcugcugg

SEQ ID NO: 2421870 - RNA, 15 nt, Human
ucuccucugcugcug

SEQ ID NO: 2421871 - RNA, 15 nt, Human
ucuccuccagaguca

SEQ ID NO: 2421872 - RNA, 14 nt, Human
ucuccuccaccgcc

SEQ ID NO: 2421873 - RNA, 23 nt, Human
ucuccuccaagacacuguggacu

SEQ ID NO: 2421874 - RNA, 19 nt, Human
ucuccuccaagacacugug

SEQ ID NO: 2421875 - RNA, 18 nt, Human
ucuccucaucucuaacag

SEQ ID NO: 2421876 - RNA, 17 nt, Human
ucuccuccauacucagg

SEQ ID NO: 2421877 - RNA, 18 nt, Human
ucuccuccauacucagga

SEQ ID NO: 2421878 - RNA, 20 nt, Human
acuuucugaaauaacauggc

SEQ ID NO: 2421879 - RNA, 14 nt, Human
acuuucugaaauaa

SEQ ID NO: 2421880 - RNA, 17 nt, Human
acuuuacccaaaaacua

SEQ ID NO: 2421881 - RNA, 16 nt, Human
acuuuaccacccccac

SEQ ID NO: 2421882 - RNA, 15 nt, Human
acuuuaccaccccca

SEQ ID NO: 2421883 - RNA, 20 nt, Human
acuuuacaugacacagcuuu

SEQ ID NO: 2421884 - RNA, 18 nt, Human
acuuuacaugacacagcu

SEQ ID NO: 2421885 - RNA, 17 nt, Human
acuuuacaugacacagc

SEQ ID NO: 2421886 - RNA, 15 nt, Human
acuuuacaugacaca

SEQ ID NO: 2421887 - RNA, 12 nt, Human
acuuuaccuuuu

SEQ ID NO: 2421888 - RNA, 18 nt, Human
acuuucuguaaacucaaa

SEQ ID NO: 2421889 - RNA, 14 nt, Human
acuuucuguaaacu

SEQ ID NO: 2421890 - RNA, 14 nt, Human
acuuucugccugga

SEQ ID NO: 2421891 - RNA, 13 nt, Human
acuuucugccugg

SEQ ID NO: 2421892 - RNA, 19 nt, Human
acuuucuguaaacucaaaa

SEQ ID NO: 2421893 - RNA, 19 nt, Human
acuuucuguugccacaacc

SEQ ID NO: 2421894 - RNA, 22 nt, Human
ucuccccacacuaaccuggguu

SEQ ID NO: 2421895 - RNA, 23 nt, Human
ucuccacccucccagaccugccu

SEQ ID NO: 2421896 - RNA, 14 nt, Human
ucuccacccuccca

SEQ ID NO: 2421897 - RNA, 19 nt, Human
ucuccacccccagcugcuu

SEQ ID NO: 2421898 - RNA, 23 nt, Human
ucuccccagcaagugagagcugg

SEQ ID NO: 2421899 - RNA, 12 nt, Human
ucuccacccugc

SEQ ID NO: 2421900 - RNA, 14 nt, Human
ucuccacagcaacc

SEQ ID NO: 2421901 - RNA, 19 nt, Human
ucuccacagcaaccccagg

SEQ ID NO: 2421902 - RNA, 18 nt, Human
ucuccaauaucagugcuc

SEQ ID NO: 2421903 - RNA, 16 nt, Human
ucuccaccaggaaccu

SEQ ID NO: 2421904 - RNA, 18 nt, Human
ucuccaccaggaaccucu

SEQ ID NO: 2421905 - RNA, 19 nt, Human
ucuccaagcaggacaugga

SEQ ID NO: 2421906 - RNA, 18 nt, Human
ucuccaagcaggacaugg

SEQ ID NO: 2421907 - RNA, 23 nt, Human
ucuccaagggcuucugcacccuc

SEQ ID NO: 2421908 - RNA, 22 nt, Human
ucuccaagggcuucugcacccu

SEQ ID NO: 2421909 - RNA, 21 nt, Human
ucuccaagggcuucugcaccc

SEQ ID NO: 2421910 - RNA, 20 nt, Human
ucuccaagggcuucugcacc

SEQ ID NO: 2421911 - RNA, 16 nt, Human
ucuccaagggcuucug

SEQ ID NO: 2421912 - RNA, 16 nt, Human
ucuccaaggaccaggu

SEQ ID NO: 2421913 - RNA, 14 nt, Human
ucuccaaggaccag

SEQ ID NO: 2421914 - RNA, 21 nt, Human
ucuccaagugccagagguggg

SEQ ID NO: 2421915 - RNA, 20 nt, Human
ucuccaagugccagaggugg

SEQ ID NO: 2421916 - RNA, 14 nt, Human
ucuccaagugccag

SEQ ID NO: 2421917 - RNA, 17 nt, Human
ucuccaagucucagugg

SEQ ID NO: 2421918 - RNA, 16 nt, Human
ucuccaauaucagugc

SEQ ID NO: 2421919 - RNA, 23 nt, Human
ucuccaagugccagaggugggca

SEQ ID NO: 2421920 - RNA, 22 nt, Human
ucuccacacacagcugggcugu

SEQ ID NO: 2421921 - RNA, 14 nt, Human
ucuccccagcccag

SEQ ID NO: 2421922 - RNA, 15 nt, Human
ucuccccagcccaga

SEQ ID NO: 2421923 - RNA, 16 nt, Human
ucuccccagcccagag

SEQ ID NO: 2421924 - RNA, 17 nt, Human
ucuccccagcccagaga

SEQ ID NO: 2421925 - RNA, 20 nt, Human
ucuccccaggguucaguccu

SEQ ID NO: 2421926 - RNA, 12 nt, Human
ucuccccagagu

SEQ ID NO: 2421927 - RNA, 18 nt, Human
ucuccccagcccagagac

SEQ ID NO: 2421928 - RNA, 19 nt, Human
ucuccccagcccagagaca

SEQ ID NO: 2421929 - RNA, 15 nt, Human
ucucccuuucccuuc

SEQ ID NO: 2421930 - RNA, 23 nt, Human
ucuccgaccagacaccuugacag

SEQ ID NO: 2421931 - RNA, 17 nt, Human
ucuccgaccagacaccu

SEQ ID NO: 2421932 - RNA, 23 nt, Human
ucuccucacucccuucuaccugc

SEQ ID NO: 2421933 - RNA, 13 nt, Human
ucuccucacuccc

SEQ ID NO: 2421934 - RNA, 14 nt, Human
ucuccucagccucc

SEQ ID NO: 2421935 - RNA, 13 nt, Human
ucuccucagccuc

SEQ ID NO: 2421936 - RNA, 22 nt, Human
ucuccucagccuccucaucugg

SEQ ID NO: 2421937 - RNA, 20 nt, Human
ucuccucagccuccucaucu

SEQ ID NO: 2421938 - RNA, 14 nt, Human
ucuccucaucucua

SEQ ID NO: 2421939 - RNA, 15 nt, Human
ucuccucaucucuaa

SEQ ID NO: 2421940 - RNA, 16 nt, Human
ucuccucauguucugc

SEQ ID NO: 2421941 - RNA, 20 nt, Human
acuuuguuaguuucuccaag

SEQ ID NO: 2421942 - RNA, 22 nt, Human
acuuuguaccccccaaccccug

SEQ ID NO: 2421943 - RNA, 18 nt, Human
acuuuguaccccccaacc

SEQ ID NO: 2421944 - RNA, 14 nt, Human
acuuuguucuggcu

SEQ ID NO: 2421945 - RNA, 21 nt, Human
acuuuguuaguuucuccaagc

SEQ ID NO: 2421946 - RNA, 12 nt, Human
acuuuuguucuu

SEQ ID NO: 2421947 - RNA, 13 nt, Human
acuuuuguucuug

SEQ ID NO: 2421948 - RNA, 22 nt, Human
acuuuggaguccccucaccucc

SEQ ID NO: 2421949 - RNA, 18 nt, Human
acuuuggaguccccucac

SEQ ID NO: 2421950 - RNA, 23 nt, Human
acuuuggaguccccucaccuccu

SEQ ID NO: 2421951 - RNA, 18 nt, Human
acuuuggaauacauuucu

SEQ ID NO: 2421952 - RNA, 12 nt, Human
acuuugaccucu

SEQ ID NO: 2421953 - RNA, 13 nt, Human
acuuugaccucug

SEQ ID NO: 2421954 - RNA, 15 nt, Human
acuuuggaauacauu

SEQ ID NO: 2421955 - RNA, 15 nt, Human
ucuccuucaccuuug

SEQ ID NO: 2421956 - RNA, 14 nt, Human
ucuccuucaccuuu

SEQ ID NO: 2421957 - RNA, 14 nt, Human
agaaaaaauacauu

SEQ ID NO: 2421958 - RNA, 16 nt, Human
agaaaaaauacauuuu

SEQ ID NO: 2421959 - RNA, 18 nt, Human
agaaaaaauacauuuuau

SEQ ID NO: 2421960 - RNA, 18 nt, Human
agaaaaaauaacacacau

SEQ ID NO: 2421961 - RNA, 11 nt, Human
agaaaaaauac

SEQ ID NO: 2421962 - RNA, 17 nt, Human
agaaaaaauauuuuccc

SEQ ID NO: 2421963 - RNA, 13 nt, Human
ucuccuuguguua

SEQ ID NO: 2421964 - RNA, 21 nt, Human
ucuccuuguguuacuaaguuu

SEQ ID NO: 2421965 - RNA, 16 nt, Human
ucuccuucaccuuugu

SEQ ID NO: 2421966 - RNA, 19 nt, Human
ucuccuuguggccugggcc

SEQ ID NO: 2421967 - RNA, 17 nt, Human
ucuccuuagucuucuca

SEQ ID NO: 2421968 - RNA, 22 nt, Human
agaaaaaauacauuuuauauua

SEQ ID NO: 2421969 - RNA, 18 nt, Human
ucuccuuagucuucucau

SEQ ID NO: 2421970 - RNA, 17 nt, Human
acuuuuuauauuuuaua

SEQ ID NO: 2421971 - RNA, 10 nt, Human
agaaaaaaga

SEQ ID NO: 2421972 - RNA, 10 nt, Human
agaaaaaagu

SEQ ID NO: 2421973 - RNA, 12 nt, Human
agaaaaaaguug

SEQ ID NO: 2421974 - RNA, 14 nt, Human
agaaaaaaguugua

SEQ ID NO: 2421975 - RNA, 17 nt, Human
agaaaaaagagaaaaga

SEQ ID NO: 2421976 - RNA, 18 nt, Human
agaaaaaagagaaaagaa

SEQ ID NO: 2421977 - RNA, 12 nt, Human
agaaaaaagaag

SEQ ID NO: 2421978 - RNA, 21 nt, Human
acuuuuuauauuuuauacauu

SEQ ID NO: 2421979 - RNA, 15 nt, Human
acuuuuguucuuggu

SEQ ID NO: 2421980 - RNA, 23 nt, Human
acuuuuguucuugguuuguaaau

SEQ ID NO: 2421981 - RNA, 18 nt, Human
acuuuuuaauucaccaaa

SEQ ID NO: 2421982 - RNA, 19 nt, Human
acuuuuuaacuauuaagag

SEQ ID NO: 2421983 - RNA, 11 nt, Human
acuuuuuacaa

SEQ ID NO: 2421984 - RNA, 18 nt, Human
acuuuuuaaauguaaaga

SEQ ID NO: 2421985 - RNA, 21 nt, Human
acuuuuuaaaaucuuuucuau

SEQ ID NO: 2421986 - RNA, 11 nt, Human
acuuuguucac

SEQ ID NO: 2421987 - RNA, 14 nt, Human
acuuaacauauuua

SEQ ID NO: 2421988 - RNA, 21 nt, Human
acuuaacagaugcaaugugcu

SEQ ID NO: 2421989 - RNA, 15 nt, Human
acuuaacaagcuccc

SEQ ID NO: 2421990 - RNA, 20 nt, Human
acuuaacaagcucccaggcc

SEQ ID NO: 2421991 - RNA, 14 nt, Human
acuuaacagaugca

SEQ ID NO: 2421992 - RNA, 17 nt, Human
acuuaaauuuuaauuua

SEQ ID NO: 2421993 - RNA, 19 nt, Human
acuuaacggcuccaggauu

SEQ ID NO: 2421994 - RNA, 17 nt, Human
acuuaacggcuccagga

SEQ ID NO: 2421995 - RNA, 23 nt, Human
acuuaacuauucaggagaguaga

SEQ ID NO: 2421996 - RNA, 15 nt, Human
acuuaacggcuccag

SEQ ID NO: 2421997 - RNA, 23 nt, Human
acuguugaaaauuauuuuaaaca

SEQ ID NO: 2421998 - RNA, 21 nt, Human
acuguugaaaauuauuuuaaa

SEQ ID NO: 2421999 - RNA, 14 nt, Human
acuguugaaaauua

SEQ ID NO: 2422000 - RNA, 13 nt, Human
acuguugaaaauu

SEQ ID NO: 2422001 - RNA, 20 nt, Human
acuuaaauaaugugaaacug

SEQ ID NO: 2422002 - RNA, 19 nt, Human
acuuaaauggaaaaaauga

SEQ ID NO: 2422003 - RNA, 18 nt, Human
acuguugccagagaugga

SEQ ID NO: 2422004 - RNA, 13 nt, Human
acuuaaaugaaag

SEQ ID NO: 2422005 - RNA, 14 nt, Human
acuguugccagaga

SEQ ID NO: 2422006 - RNA, 13 nt, Human
acuuaaugaauga

SEQ ID NO: 2422007 - RNA, 19 nt, Human
acuuaagagaauauuuuaa

SEQ ID NO: 2422008 - RNA, 18 nt, Human
acuuaagagaauauuuua

SEQ ID NO: 2422009 - RNA, 22 nt, Human
acuuaaucuaaauggaaccacu

SEQ ID NO: 2422010 - RNA, 14 nt, Human
acuuaauugcuaca

SEQ ID NO: 2422011 - RNA, 16 nt, Human
acuuacacuuuaugca

SEQ ID NO: 2422012 - RNA, 17 nt, Human
acuuaaucuaaauggaa

SEQ ID NO: 2422013 - RNA, 19 nt, Human
acuuaaucuaaauggaacc

SEQ ID NO: 2422014 - RNA, 13 nt, Human
acuuaagcacacu

SEQ ID NO: 2422015 - RNA, 15 nt, Human
acuuaagagaauauu

SEQ ID NO: 2422016 - RNA, 14 nt, Human
acuuaagagaauau

SEQ ID NO: 2422017 - RNA, 13 nt, Human
acuuaagagaaua

SEQ ID NO: 2422018 - RNA, 16 nt, Human
acuuacuuacccucac

SEQ ID NO: 2422019 - RNA, 21 nt, Human
acuuacuguuucugucaggag

SEQ ID NO: 2422020 - RNA, 20 nt, Human
acuuacuguuucugucagga

SEQ ID NO: 2422021 - RNA, 16 nt, Human
acuuacuguuucuguc

SEQ ID NO: 2422022 - RNA, 13 nt, Human
acuuacuguuucu

SEQ ID NO: 2422023 - RNA, 24 nt, Human
acuuacuguuguccuaugggaguc

SEQ ID NO: 2422024 - RNA, 12 nt, Human
acuuacaugauu

SEQ ID NO: 2422025 - RNA, 22 nt, Human
acuuacuguacaugaaaacaca

SEQ ID NO: 2422026 - RNA, 16 nt, Human
acuuagcuaucagaag

SEQ ID NO: 2422027 - RNA, 13 nt, Human
acuuacuugcuua

SEQ ID NO: 2422028 - RNA, 14 nt, Human
acuuagcugggaga

SEQ ID NO: 2422029 - RNA, 22 nt, Human
acuuacuuacccucaccuguca

SEQ ID NO: 2422030 - RNA, 21 nt, Human
acuuagcuugaaggaucuguu

SEQ ID NO: 2422031 - RNA, 21 nt, Human
acuuacuguacaugaaaacac

SEQ ID NO: 2422032 - RNA, 16 nt, Human
acuuacuguacaugaa

SEQ ID NO: 2422033 - RNA, 21 nt, Human
acuuaauuucuuuauguaauc

SEQ ID NO: 2422034 - RNA, 22 nt, Human
acuuaauuucuuuauguaaucu

SEQ ID NO: 2422035 - RNA, 17 nt, Human
acuuacacuuuaugcac

SEQ ID NO: 2422036 - RNA, 21 nt, Human
acuucaguauguugucaaaga

SEQ ID NO: 2422037 - RNA, 19 nt, Human
acuucaguauguugucaaa

SEQ ID NO: 2422038 - RNA, 17 nt, Human
acuucaguauguuguca

SEQ ID NO: 2422039 - RNA, 23 nt, Human
acuucaguauguugucaaagaga

SEQ ID NO: 2422040 - RNA, 22 nt, Human
acuucaggggcugcccgcuccc

SEQ ID NO: 2422041 - RNA, 19 nt, Human
acuucaggggcugcccgcu

SEQ ID NO: 2422042 - RNA, 17 nt, Human
acuucaggggcugcccg

SEQ ID NO: 2422043 - RNA, 16 nt, Human
acuucaggggcugccc

SEQ ID NO: 2422044 - RNA, 23 nt, Human
acuucaggguucuccucuccccu

SEQ ID NO: 2422045 - RNA, 21 nt, Human
acuucaggguucuccucuccc

SEQ ID NO: 2422046 - RNA, 22 nt, Human
acuucaggguucuccucucccc

SEQ ID NO: 2422047 - RNA, 22 nt, Human
acuuauuaaucuguaugaagau

SEQ ID NO: 2422048 - RNA, 19 nt, Human
acuuauuacugcuaaguau

SEQ ID NO: 2422049 - RNA, 16 nt, Human
acuuauuacugcuaag

SEQ ID NO: 2422050 - RNA, 14 nt, Human
acuuauuacugcua

SEQ ID NO: 2422051 - RNA, 16 nt, Human
acuuauucucaagaag

SEQ ID NO: 2422052 - RNA, 20 nt, Human
acuuauuacugcuaaguauu

SEQ ID NO: 2422053 - RNA, 15 nt, Human
acuuagguguggggg

SEQ ID NO: 2422054 - RNA, 17 nt, Human
acuuaguauauuuucuu

SEQ ID NO: 2422055 - RNA, 16 nt, Human
acuuagggcaccaggg

SEQ ID NO: 2422056 - RNA, 23 nt, Human
acuuaugaccucuuccuuuagga

SEQ ID NO: 2422057 - RNA, 23 nt, Human
acuuagggcaccagggguuucuc

SEQ ID NO: 2422058 - RNA, 14 nt, Human
acuuaucuuaugcc

SEQ ID NO: 2422059 - RNA, 13 nt, Human
acuuaugauuuca

SEQ ID NO: 2422060 - RNA, 16 nt, Human
acuuaugauuucaugu

SEQ ID NO: 2422061 - RNA, 17 nt, Human
acuuaugauuucaugug

SEQ ID NO: 2422062 - RNA, 20 nt, Human
ucuacagcuaaucagcauuc

SEQ ID NO: 2422063 - RNA, 20 nt, Human
ucuaauaccucugugugcuc

SEQ ID NO: 2422064 - RNA, 23 nt, Human
ucuacagcuaaucagcauucuca

SEQ ID NO: 2422065 - RNA, 19 nt, Human
ucuacccagcgagcccugg

SEQ ID NO: 2422066 - RNA, 17 nt, Human
ucuaauaccucugugug

SEQ ID NO: 2422067 - RNA, 16 nt, Human
ucuaauaccucugugu

SEQ ID NO: 2422068 - RNA, 14 nt, Human
ucuaauaccucugu

SEQ ID NO: 2422069 - RNA, 21 nt, Human
ucuacagaggccaugggccuc

SEQ ID NO: 2422070 - RNA, 14 nt, Human
ucuaaguaaaacca

SEQ ID NO: 2422071 - RNA, 15 nt, Human
ucuaaguaaaaccac

SEQ ID NO: 2422072 - RNA, 19 nt, Human
ucuaaguaaaaccacagca

SEQ ID NO: 2422073 - RNA, 20 nt, Human
ucuaaguaaaaccacagcag

SEQ ID NO: 2422074 - RNA, 18 nt, Human
ucuaagguucucauagga

SEQ ID NO: 2422075 - RNA, 14 nt, Human
ucuaagguucucau

SEQ ID NO: 2422076 - RNA, 18 nt, Human
uccugggagugagcuggu

SEQ ID NO: 2422077 - RNA, 11 nt, Human
uccugggcaca

SEQ ID NO: 2422078 - RNA, 22 nt, Human
uccugggauguggcugcagcag

SEQ ID NO: 2422079 - RNA, 18 nt, Human
uccugggauguggcugca

SEQ ID NO: 2422080 - RNA, 17 nt, Human
uccugggauguggcugc

SEQ ID NO: 2422081 - RNA, 13 nt, Human
uccugggaugugg

SEQ ID NO: 2422082 - RNA, 23 nt, Human
uccugggagaaccucaggcuucc

SEQ ID NO: 2422083 - RNA, 14 nt, Human
ucuacccaggugcu

SEQ ID NO: 2422084 - RNA, 20 nt, Human
ucuacccagcgagcccuggu

SEQ ID NO: 2422085 - RNA, 19 nt, Human
ucuacccuggcacuauaau

SEQ ID NO: 2422086 - RNA, 14 nt, Human
ucuacccuggcacu

SEQ ID NO: 2422087 - RNA, 15 nt, Human
ucuaccucaggcagc

SEQ ID NO: 2422088 - RNA, 14 nt, Human
acuguuauuuauaa

SEQ ID NO: 2422089 - RNA, 15 nt, Human
acuguuauuuauaau

SEQ ID NO: 2422090 - RNA, 17 nt, Human
acuguuauuuauaauca

SEQ ID NO: 2422091 - RNA, 20 nt, Human
acuguuauuuauaaucacuu

SEQ ID NO: 2422092 - RNA, 21 nt, Human
ucuacccuggcacuauaaugu

SEQ ID NO: 2422093 - RNA, 13 nt, Human
ucuacccagggcc

SEQ ID NO: 2422094 - RNA, 16 nt, Human
ucuacccagggccugc

SEQ ID NO: 2422095 - RNA, 13 nt, Human
acuguucuugaau

SEQ ID NO: 2422096 - RNA, 16 nt, Human
acuguucccucugcuc

SEQ ID NO: 2422097 - RNA, 18 nt, Human
acuguucucugcccucca

SEQ ID NO: 2422098 - RNA, 15 nt, Human
acuguucccucugcu

SEQ ID NO: 2422099 - RNA, 14 nt, Human
acuguuccagccug

SEQ ID NO: 2422100 - RNA, 18 nt, Human
acuguucccccugugcag

SEQ ID NO: 2422101 - RNA, 19 nt, Human
acuguucucugcccuccaa

SEQ ID NO: 2422102 - RNA, 17 nt, Human
acuguucucugcccucc

SEQ ID NO: 2422103 - RNA, 16 nt, Human
acuguucucugcccuc

SEQ ID NO: 2422104 - RNA, 16 nt, Human
acuguucaagagcaca

SEQ ID NO: 2422105 - RNA, 15 nt, Human
acuguucaagagcac

SEQ ID NO: 2422106 - RNA, 13 nt, Human
acuguucaagagc

SEQ ID NO: 2422107 - RNA, 21 nt, Human
acuguuauuuauaaucacuuu

SEQ ID NO: 2422108 - RNA, 15 nt, Human
acuguucccccugug

SEQ ID NO: 2422109 - RNA, 16 nt, Human
acuguucccccugugc

SEQ ID NO: 2422110 - RNA, 18 nt, Human
acuguucccaccugcugg

SEQ ID NO: 2422111 - RNA, 17 nt, Human
ucuaggaaauauuuauu

SEQ ID NO: 2422112 - RNA, 23 nt, Human
ucuaggaagaauuuuaaaaauga

SEQ ID NO: 2422113 - RNA, 22 nt, Human
ucuaggaagaauuuuaaaaaug

SEQ ID NO: 2422114 - RNA, 20 nt, Human
ucuaggaagaauuuuaaaaa

SEQ ID NO: 2422115 - RNA, 23 nt, Human
ucuagccacuuuggucccgugca

SEQ ID NO: 2422116 - RNA, 15 nt, Human
ucuaggaagaauuuu

SEQ ID NO: 2422117 - RNA, 16 nt, Human
ucuagccaaaugguuu

SEQ ID NO: 2422118 - RNA, 16 nt, Human
ucuaggaaauauuuau

SEQ ID NO: 2422119 - RNA, 13 nt, Human
ucuagccagagga

SEQ ID NO: 2422120 - RNA, 12 nt, Human
ucuaggaagacu

SEQ ID NO: 2422121 - RNA, 13 nt, Human
ucuaguucuuugu

SEQ ID NO: 2422122 - RNA, 22 nt, Human
ucuaguuguuugauucagacag

SEQ ID NO: 2422123 - RNA, 14 nt, Human
ucuaguuucccaca

SEQ ID NO: 2422124 - RNA, 13 nt, Human
ucuaguuucccac

SEQ ID NO: 2422125 - RNA, 14 nt, Human
ucuaguuucuugug

SEQ ID NO: 2422126 - RNA, 22 nt, Human
ucuaguuugauuaaauucuugc

SEQ ID NO: 2422127 - RNA, 21 nt, Human
ucuaguuugauuaaauucuug

SEQ ID NO: 2422128 - RNA, 23 nt, Human
ucuaguuguuugauucagacagc

SEQ ID NO: 2422129 - RNA, 22 nt, Human
ucuaguuuaauuaaucuguaau

SEQ ID NO: 2422130 - RNA, 18 nt, Human
ucuaguugcuuguaaaau

SEQ ID NO: 2422131 - RNA, 13 nt, Human
ucuauaaauaacc

SEQ ID NO: 2422132 - RNA, 20 nt, Human
ucuauaaagaagaacuugca

SEQ ID NO: 2422133 - RNA, 13 nt, Human
ucuauaaggccau

SEQ ID NO: 2422134 - RNA, 14 nt, Human
ucuauaaggccaua

SEQ ID NO: 2422135 - RNA, 16 nt, Human
ucuauaaggccauaaa

SEQ ID NO: 2422136 - RNA, 16 nt, Human
ucuauaaauuguccgu

SEQ ID NO: 2422137 - RNA, 15 nt, Human
ucuauaacaugcauu

SEQ ID NO: 2422138 - RNA, 18 nt, Human
ucuagcauggcugccaau

SEQ ID NO: 2422139 - RNA, 13 nt, Human
ucuagauacugua

SEQ ID NO: 2422140 - RNA, 21 nt, Human
ucuagaggcuuccuucauuuc

SEQ ID NO: 2422141 - RNA, 16 nt, Human
ucuagaggcuuccuuc

SEQ ID NO: 2422142 - RNA, 17 nt, Human
ucuagagcuugaugcca

SEQ ID NO: 2422143 - RNA, 20 nt, Human
ucuagagccgugaugccucc

SEQ ID NO: 2422144 - RNA, 13 nt, Human
ucuagagaagagg

SEQ ID NO: 2422145 - RNA, 15 nt, Human
ucuagacuuucuguu

SEQ ID NO: 2422146 - RNA, 14 nt, Human
ucuagacuuucugu

SEQ ID NO: 2422147 - RNA, 13 nt, Human
ucuagacuuucug

SEQ ID NO: 2422148 - RNA, 16 nt, Human
ucuagagaagaggcug

SEQ ID NO: 2422149 - RNA, 13 nt, Human
ucuagagagggag

SEQ ID NO: 2422150 - RNA, 15 nt, Human
ucuagagcagggauu

SEQ ID NO: 2422151 - RNA, 23 nt, Human
ucuagagagggaggcaagcccug

SEQ ID NO: 2422152 - RNA, 16 nt, Human
ucuagagauaguacau

SEQ ID NO: 2422153 - RNA, 20 nt, Human
ucuagagauaguacauaaag

SEQ ID NO: 2422154 - RNA, 22 nt, Human
acuucccugacacugcggggcu

SEQ ID NO: 2422155 - RNA, 13 nt, Human
acuucccugggca

SEQ ID NO: 2422156 - RNA, 20 nt, Human
acuucccucuguuucucuuu

SEQ ID NO: 2422157 - RNA, 14 nt, Human
acuucccugggcaa

SEQ ID NO: 2422158 - RNA, 19 nt, Human
ucuagaauuuuaagugcuu

SEQ ID NO: 2422159 - RNA, 13 nt, Human
ucuagacaacccu

SEQ ID NO: 2422160 - RNA, 24 nt, Human
ucuagacucaagguucccagagau

SEQ ID NO: 2422161 - RNA, 14 nt, Human
ucuagacacugcca

SEQ ID NO: 2422162 - RNA, 17 nt, Human
ucuagacaacccugcaa

SEQ ID NO: 2422163 - RNA, 14 nt, Human
acuucccucuguuu

SEQ ID NO: 2422164 - RNA, 17 nt, Human
acuucccucaucucucc

SEQ ID NO: 2422165 - RNA, 23 nt, Human
acuucccgucccauauccugccu

SEQ ID NO: 2422166 - RNA, 22 nt, Human
acuucccgucccauauccugcc

SEQ ID NO: 2422167 - RNA, 21 nt, Human
acuuccccuccuaccccuccc

SEQ ID NO: 2422168 - RNA, 17 nt, Human
acuuccccuccuacccc

SEQ ID NO: 2422169 - RNA, 20 nt, Human
acuucccgucccauauccug

SEQ ID NO: 2422170 - RNA, 13 nt, Human
acuuccccuuccu

SEQ ID NO: 2422171 - RNA, 19 nt, Human
acuuccccuuccuaauucc

SEQ ID NO: 2422172 - RNA, 24 nt, Human
acuucauauugcugagagaaauau

SEQ ID NO: 2422173 - RNA, 14 nt, Human
acuucauauugcug

SEQ ID NO: 2422174 - RNA, 22 nt, Human
acuucauauugcugagagaaau

SEQ ID NO: 2422175 - RNA, 18 nt, Human
acuucauauaugaggacu

SEQ ID NO: 2422176 - RNA, 17 nt, Human
acuucauagauuuccuu

SEQ ID NO: 2422177 - RNA, 16 nt, Human
acuucaucccucuggg

SEQ ID NO: 2422178 - RNA, 16 nt, Human
acuuccccuccuaccc

SEQ ID NO: 2422179 - RNA, 12 nt, Human
acuuccccuccu

SEQ ID NO: 2422180 - RNA, 16 nt, Human
ucucacuauguugccc

SEQ ID NO: 2422181 - RNA, 19 nt, Human
ucucacuauguugcccagg

SEQ ID NO: 2422182 - RNA, 17 nt, Human
ucucacuauguugccca

SEQ ID NO: 2422183 - RNA, 24 nt, Human
ucuauuuuguaacuuucucuauga

SEQ ID NO: 2422184 - RNA, 17 nt, Human
ucuauuuuguaaacuca

SEQ ID NO: 2422185 - RNA, 18 nt, Human
ucuauuuuggauuguaua

SEQ ID NO: 2422186 - RNA, 15 nt, Human
ucucaccccauccca

SEQ ID NO: 2422187 - RNA, 16 nt, Human
ucucaccgcagucguc

SEQ ID NO: 2422188 - RNA, 21 nt, Human
ucucaccccaucccacacccu

SEQ ID NO: 2422189 - RNA, 17 nt, Human
ucucaccccaucccaca

SEQ ID NO: 2422190 - RNA, 19 nt, Human
ucucaccccaucccacacc

SEQ ID NO: 2422191 - RNA, 13 nt, Human
ucuauuuggaauu

SEQ ID NO: 2422192 - RNA, 12 nt, Human
ucuauuuggaau

SEQ ID NO: 2422193 - RNA, 16 nt, Human
ucuauuuggaauuuau

SEQ ID NO: 2422194 - RNA, 16 nt, Human
ucuauuuucauuuucu

SEQ ID NO: 2422195 - RNA, 15 nt, Human
ucuauuuuggauugu

SEQ ID NO: 2422196 - RNA, 22 nt, Human
ucuauugcuggcaaagacagaa

SEQ ID NO: 2422197 - RNA, 13 nt, Human
ucuauuuaauauu

SEQ ID NO: 2422198 - RNA, 12 nt, Human
ucuauuuaauau

SEQ ID NO: 2422199 - RNA, 17 nt, Human
ucuauugcuggcaaaga

SEQ ID NO: 2422200 - RNA, 15 nt, Human
ucuauuuaaguaaaa

SEQ ID NO: 2422201 - RNA, 13 nt, Human
ucuauuuauguuu

SEQ ID NO: 2422202 - RNA, 15 nt, Human
ucuauuuauguuugc

SEQ ID NO: 2422203 - RNA, 22 nt, Human
ucuauuuauuuacugagcuucu

SEQ ID NO: 2422204 - RNA, 15 nt, Human
ucuauuuauuuacug

SEQ ID NO: 2422205 - RNA, 13 nt, Human
ucuauuuauaugu

SEQ ID NO: 2422206 - RNA, 13 nt, Human
ucuauuuagcaug

SEQ ID NO: 2422207 - RNA, 18 nt, Human
ucuauuuauauguacaug

SEQ ID NO: 2422208 - RNA, 19 nt, Human
ucuauguauauacauuuau

SEQ ID NO: 2422209 - RNA, 18 nt, Human
ucuauuaagauuuccaag

SEQ ID NO: 2422210 - RNA, 17 nt, Human
ucuauuaagauuuccaa

SEQ ID NO: 2422211 - RNA, 16 nt, Human
ucuauuaagauuucca

SEQ ID NO: 2422212 - RNA, 15 nt, Human
ucuauuauacuguau

SEQ ID NO: 2422213 - RNA, 14 nt, Human
ucuauuauacugua

SEQ ID NO: 2422214 - RNA, 16 nt, Human
ucuauucagacaagca

SEQ ID NO: 2422215 - RNA, 22 nt, Human
ucuauuauacuguauuaagagu

SEQ ID NO: 2422216 - RNA, 19 nt, Human
ucuauuauacuguauuaag

SEQ ID NO: 2422217 - RNA, 12 nt, Human
ucuauucagcuu

SEQ ID NO: 2422218 - RNA, 20 nt, Human
ucuauugauguacagucugu

SEQ ID NO: 2422219 - RNA, 22 nt, Human
ucuauugacuucaaugauagua

SEQ ID NO: 2422220 - RNA, 23 nt, Human
ucuauugcaguuauagaaaaucu

SEQ ID NO: 2422221 - RNA, 13 nt, Human
ucuauugaaaaau

SEQ ID NO: 2422222 - RNA, 16 nt, Human
ucuauugauguacagu

SEQ ID NO: 2422223 - RNA, 16 nt, Human
ucuauucuccagcuga

SEQ ID NO: 2422224 - RNA, 13 nt, Human
ucuauucucucca

SEQ ID NO: 2422225 - RNA, 22 nt, Human
ucuauguuuacaaauggacaua

SEQ ID NO: 2422226 - RNA, 17 nt, Human
ucuaugugcuuguaaaa

SEQ ID NO: 2422227 - RNA, 19 nt, Human
ucuauguaaaugcaucugu

SEQ ID NO: 2422228 - RNA, 16 nt, Human
ucuauguauauacauu

SEQ ID NO: 2422229 - RNA, 23 nt, Human
ucuaugggacucaaugcacugac

SEQ ID NO: 2422230 - RNA, 17 nt, Human
ucuauagcaccagggcu

SEQ ID NO: 2422231 - RNA, 16 nt, Human
ucuauagacucuagga

SEQ ID NO: 2422232 - RNA, 20 nt, Human
ucuauaccugucuccuuucu

SEQ ID NO: 2422233 - RNA, 17 nt, Human
ucuauagaacugaauga

SEQ ID NO: 2422234 - RNA, 13 nt, Human
ucuauagacucua

SEQ ID NO: 2422235 - RNA, 15 nt, Human
ugacuguuuuuaccc

SEQ ID NO: 2422236 - RNA, 16 nt, Human
ugacucugaaaucuga

SEQ ID NO: 2422237 - RNA, 17 nt, Human
ugacuguuuuuacccau

SEQ ID NO: 2422238 - RNA, 16 nt, Human
ugacuguuuuuaccca

SEQ ID NO: 2422239 - RNA, 18 nt, Human
ugacuguuuuuacccaua

SEQ ID NO: 2422240 - RNA, 16 nt, Human
ugacuuaacugcauuu

SEQ ID NO: 2422241 - RNA, 17 nt, Human
ugacuguuuuuguagug

SEQ ID NO: 2422242 - RNA, 21 nt, Human
ugacuguuuucucuugagagg

SEQ ID NO: 2422243 - RNA, 15 nt, Human
ugacucugaaaucug

SEQ ID NO: 2422244 - RNA, 14 nt, Human
ugacucugaaaucu

SEQ ID NO: 2422245 - RNA, 11 nt, Human
ugacucugaaa

SEQ ID NO: 2422246 - RNA, 14 nt, Human
ugacucucaaaucu

SEQ ID NO: 2422247 - RNA, 13 nt, Human
ugacucucuguga

SEQ ID NO: 2422248 - RNA, 15 nt, Human
ugacucucugugacc

SEQ ID NO: 2422249 - RNA, 15 nt, Human
ugacucgugcugcau

SEQ ID NO: 2422250 - RNA, 20 nt, Human
ugacucgucugacugugugu

SEQ ID NO: 2422251 - RNA, 16 nt, Human
ugacucgucugacugu

SEQ ID NO: 2422252 - RNA, 13 nt, Human
ugacucucaaauc

SEQ ID NO: 2422253 - RNA, 15 nt, Human
ugacucgucugacug

SEQ ID NO: 2422254 - RNA, 18 nt, Human
ugacucggggguggggaa

SEQ ID NO: 2422255 - RNA, 18 nt, Human
ugacucgguuucuccaaa

SEQ ID NO: 2422256 - RNA, 21 nt, Human
ugacucguauaugucucaggu

SEQ ID NO: 2422257 - RNA, 16 nt, Human
ugacucgguuucucca

SEQ ID NO: 2422258 - RNA, 15 nt, Human
ugacucgguuucucc

SEQ ID NO: 2422259 - RNA, 14 nt, Human
ugacucgguuucuc

SEQ ID NO: 2422260 - RNA, 19 nt, Human
ugacuauuuuucagaaucu

SEQ ID NO: 2422261 - RNA, 13 nt, Human
ugaccuuucaaua

SEQ ID NO: 2422262 - RNA, 21 nt, Human
ugaccuuguaccucucuuuga

SEQ ID NO: 2422263 - RNA, 12 nt, Human
ugaccuuucaau

SEQ ID NO: 2422264 - RNA, 21 nt, Human
ugacuauauagagauguuuuu

SEQ ID NO: 2422265 - RNA, 19 nt, Human
ugacuauauagagauguuu

SEQ ID NO: 2422266 - RNA, 18 nt, Human
ugacuauauagagauguu

SEQ ID NO: 2422267 - RNA, 17 nt, Human
ugacuauauagagaugu

SEQ ID NO: 2422268 - RNA, 16 nt, Human
ugacuauauagagaug

SEQ ID NO: 2422269 - RNA, 14 nt, Human
ugacuauauagaga

SEQ ID NO: 2422270 - RNA, 16 nt, Human
ugacuaucaaacugaa

SEQ ID NO: 2422271 - RNA, 22 nt, Human
ugacuaucaaacugaagccaga

SEQ ID NO: 2422272 - RNA, 20 nt, Human
ugacuauugaaguugcagau

SEQ ID NO: 2422273 - RNA, 19 nt, Human
agaugucuucugccuguua

SEQ ID NO: 2422274 - RNA, 22 nt, Human
agauguauguacuucaugcugu

SEQ ID NO: 2422275 - RNA, 17 nt, Human
agaugugaacacaucag

SEQ ID NO: 2422276 - RNA, 13 nt, Human
agaugucuuuagg

SEQ ID NO: 2422277 - RNA, 23 nt, Human
agaugucuuuaggcagcagcuuu

SEQ ID NO: 2422278 - RNA, 15 nt, Human
agaugucuuuaggca

SEQ ID NO: 2422279 - RNA, 22 nt, Human
agaugugaacacaucagcuugc

SEQ ID NO: 2422280 - RNA, 17 nt, Human
agaugugauaaggauca

SEQ ID NO: 2422281 - RNA, 16 nt, Human
ugaccugccucccuuc

SEQ ID NO: 2422282 - RNA, 20 nt, Human
ugaccugccccgcccagcug

SEQ ID NO: 2422283 - RNA, 13 nt, Human
ugaccugccccgc

SEQ ID NO: 2422284 - RNA, 19 nt, Human
ugaccugccccgcccagcu

SEQ ID NO: 2422285 - RNA, 16 nt, Human
ugaccugccaggcaca

SEQ ID NO: 2422286 - RNA, 19 nt, Human
ugaccugccaggcacacug

SEQ ID NO: 2422287 - RNA, 21 nt, Human
ugaccugcuggguaaacugug

SEQ ID NO: 2422288 - RNA, 17 nt, Human
ugaccugccucccuuca

SEQ ID NO: 2422289 - RNA, 19 nt, Human
ugaccugccucccuucaug

SEQ ID NO: 2422290 - RNA, 23 nt, Human
ugaccugccucccuucaugcaug

SEQ ID NO: 2422291 - RNA, 21 nt, Human
ugaccugccucccuucaugca

SEQ ID NO: 2422292 - RNA, 22 nt, Human
ugaccuggauaacuuagguggc

SEQ ID NO: 2422293 - RNA, 19 nt, Human
ugaccugucaugccccccu

SEQ ID NO: 2422294 - RNA, 16 nt, Human
ugaccugucaugcccc

SEQ ID NO: 2422295 - RNA, 15 nt, Human
ugaccugucaugccc

SEQ ID NO: 2422296 - RNA, 12 nt, Human
ugaccugucacc

SEQ ID NO: 2422297 - RNA, 15 nt, Human
ugaccuuuaagagaa

SEQ ID NO: 2422298 - RNA, 16 nt, Human
ugaccuugcaacuuca

SEQ ID NO: 2422299 - RNA, 21 nt, Human
agauuucaucugcucuccuuc

SEQ ID NO: 2422300 - RNA, 20 nt, Human
agauuucaucugcucuccuu

SEQ ID NO: 2422301 - RNA, 19 nt, Human
agauuucaucugcucuccu

SEQ ID NO: 2422302 - RNA, 18 nt, Human
agauuucaucugcucucc

SEQ ID NO: 2422303 - RNA, 15 nt, Human
agauuucaucugcuc

SEQ ID NO: 2422304 - RNA, 13 nt, Human
agauuucaucugc

SEQ ID NO: 2422305 - RNA, 19 nt, Human
agauuucacucuccuuggu

SEQ ID NO: 2422306 - RNA, 17 nt, Human
agauuucacucuccuug

SEQ ID NO: 2422307 - RNA, 17 nt, Human
agauuuuaaaaagucuu

SEQ ID NO: 2422308 - RNA, 12 nt, Human
agauuuuaaaga

SEQ ID NO: 2422309 - RNA, 13 nt, Human
agauuuguguuau

SEQ ID NO: 2422310 - RNA, 23 nt, Human
agauuucaucugcucuccuuccu

SEQ ID NO: 2422311 - RNA, 21 nt, Human
agauuuuaauuuugaauaaau

SEQ ID NO: 2422312 - RNA, 17 nt, Human
agauuuuaauuuugaau

SEQ ID NO: 2422313 - RNA, 14 nt, Human
agauuuuaauuuug

SEQ ID NO: 2422314 - RNA, 19 nt, Human
agauuuuaaucaaguugaa

SEQ ID NO: 2422315 - RNA, 22 nt, Human
agauuuuaaauucacaauagaa

SEQ ID NO: 2422316 - RNA, 13 nt, Human
agauuuuaaauuc

SEQ ID NO: 2422317 - RNA, 19 nt, Human
agauuuuaaauucacaaua

SEQ ID NO: 2422318 - RNA, 22 nt, Human
agauuguuuuaucaugacaugu

SEQ ID NO: 2422319 - RNA, 23 nt, Human
agauuguuuuaucaugacauguu

SEQ ID NO: 2422320 - RNA, 23 nt, Human
agauuguuguuugccauacuuug

SEQ ID NO: 2422321 - RNA, 22 nt, Human
agauuguuguuugccauacuuu

SEQ ID NO: 2422322 - RNA, 16 nt, Human
agauuguuguuugcca

SEQ ID NO: 2422323 - RNA, 15 nt, Human
agauuguuguuugcc

SEQ ID NO: 2422324 - RNA, 16 nt, Human
agauucccagagcaaa

SEQ ID NO: 2422325 - RNA, 14 nt, Human
agauucccagagac

SEQ ID NO: 2422326 - RNA, 14 nt, Human
agauuguuaaaaua

SEQ ID NO: 2422327 - RNA, 15 nt, Human
agauuguuaaaauaa

SEQ ID NO: 2422328 - RNA, 21 nt, Human
agauuguguaacaauuuuaau

SEQ ID NO: 2422329 - RNA, 15 nt, Human
agauuguguaacaau

SEQ ID NO: 2422330 - RNA, 13 nt, Human
agauuguguaaca

SEQ ID NO: 2422331 - RNA, 19 nt, Human
agauucagguauguugccu

SEQ ID NO: 2422332 - RNA, 19 nt, Human
agauuccagagaguggcuc

SEQ ID NO: 2422333 - RNA, 22 nt, Human
agauuccagagaguggcuccuc

SEQ ID NO: 2422334 - RNA, 21 nt, Human
agauuccagagaguggcuccu

SEQ ID NO: 2422335 - RNA, 19 nt, Human
agauucauauuuacuucuu

SEQ ID NO: 2422336 - RNA, 13 nt, Human
agauucccagagc

SEQ ID NO: 2422337 - RNA, 12 nt, Human
agauucccagag

SEQ ID NO: 2422338 - RNA, 13 nt, Human
agauucccagaga

SEQ ID NO: 2422339 - RNA, 18 nt, Human
agauuauaacuugucuaa

SEQ ID NO: 2422340 - RNA, 14 nt, Human
agauuauaacuugu

SEQ ID NO: 2422341 - RNA, 13 nt, Human
agauuauaacuug

SEQ ID NO: 2422342 - RNA, 17 nt, Human
agauuauacagaauugu

SEQ ID NO: 2422343 - RNA, 14 nt, Human
agauuauacagaau

SEQ ID NO: 2422344 - RNA, 18 nt, Human
agauuagagggagguguu

SEQ ID NO: 2422345 - RNA, 21 nt, Human
agauuagaaugaaaauuguau

SEQ ID NO: 2422346 - RNA, 16 nt, Human
agauuagaucuuuuaa

SEQ ID NO: 2422347 - RNA, 17 nt, Human
agauuagcucuggacca

SEQ ID NO: 2422348 - RNA, 15 nt, Human
agauuagcucuggac

SEQ ID NO: 2422349 - RNA, 14 nt, Human
agauuagcucugga

SEQ ID NO: 2422350 - RNA, 15 nt, Human
agauuagaucuuuua

SEQ ID NO: 2422351 - RNA, 14 nt, Human
agauuagagggagg

SEQ ID NO: 2422352 - RNA, 15 nt, Human
agauuagaagcugaa

SEQ ID NO: 2422353 - RNA, 21 nt, Human
agauuacccccucauuguuua

SEQ ID NO: 2422354 - RNA, 20 nt, Human
agauucagguauguugccuu

SEQ ID NO: 2422355 - RNA, 18 nt, Human
agauucagguauguugcc

SEQ ID NO: 2422356 - RNA, 13 nt, Human
agauucauauuua

SEQ ID NO: 2422357 - RNA, 16 nt, Human
agauucauauuuacuu

SEQ ID NO: 2422358 - RNA, 12 nt, Human
ugacuuacugua

SEQ ID NO: 2422359 - RNA, 20 nt, Human
ugacuuacuguacaugaaaa

SEQ ID NO: 2422360 - RNA, 16 nt, Human
ugacuuagcagaugcu

SEQ ID NO: 2422361 - RNA, 16 nt, Human
agauuaagagccauau

SEQ ID NO: 2422362 - RNA, 16 nt, Human
agauuacuuagaggaa

SEQ ID NO: 2422363 - RNA, 14 nt, Human
agauuaccuccuga

SEQ ID NO: 2422364 - RNA, 23 nt, Human
ugaccaacauggagaaacccugu

SEQ ID NO: 2422365 - RNA, 18 nt, Human
ugaccaacuagacauucu

SEQ ID NO: 2422366 - RNA, 16 nt, Human
ugaccaacuagacauu

SEQ ID NO: 2422367 - RNA, 15 nt, Human
ugaccaacuagacau

SEQ ID NO: 2422368 - RNA, 22 nt, Human
ugaccaacuagacauucugucg

SEQ ID NO: 2422369 - RNA, 21 nt, Human
ugaccaacuagacauucuguc

SEQ ID NO: 2422370 - RNA, 20 nt, Human
ugaccaacuagacauucugu

SEQ ID NO: 2422371 - RNA, 15 nt, Human
ugaccaagagagaaa

SEQ ID NO: 2422372 - RNA, 14 nt, Human
ugaccaagcaggaa

SEQ ID NO: 2422373 - RNA, 16 nt, Human
ugaccaagagagaaag

SEQ ID NO: 2422374 - RNA, 17 nt, Human
ugaccaagagagaaaga

SEQ ID NO: 2422375 - RNA, 18 nt, Human
ugaccaagagagaaagaa

SEQ ID NO: 2422376 - RNA, 15 nt, Human
ugaccaagcaggaag

SEQ ID NO: 2422377 - RNA, 16 nt, Human
ugaccaagcaggaagc

SEQ ID NO: 2422378 - RNA, 17 nt, Human
ugaccaagcaggaagcu

SEQ ID NO: 2422379 - RNA, 18 nt, Human
ugaccaagcaggaagcuc

SEQ ID NO: 2422380 - RNA, 19 nt, Human
ugaccaagcaggaagcuca

SEQ ID NO: 2422381 - RNA, 21 nt, Human
ugaccaagcaggaagcucaga

SEQ ID NO: 2422382 - RNA, 13 nt, Human
ugaccaaguuaua

SEQ ID NO: 2422383 - RNA, 16 nt, Human
ugaccaaguuauaaau

SEQ ID NO: 2422384 - RNA, 20 nt, Human
ugaccaaguuauaaaucaau

SEQ ID NO: 2422385 - RNA, 22 nt, Human
agaucccagaaggaccuccuga

SEQ ID NO: 2422386 - RNA, 18 nt, Human
agauccccaagccuggca

SEQ ID NO: 2422387 - RNA, 14 nt, Human
agaucccccagacu

SEQ ID NO: 2422388 - RNA, 11 nt, Human
agauccccuca

SEQ ID NO: 2422389 - RNA, 13 nt, Human
agaucccagcuca

SEQ ID NO: 2422390 - RNA, 16 nt, Human
agauccuaaaacaaaa

SEQ ID NO: 2422391 - RNA, 22 nt, Human
agauccuaccccaauuccuugu

SEQ ID NO: 2422392 - RNA, 15 nt, Human
agauccccucaggac

SEQ ID NO: 2422393 - RNA, 15 nt, Human
agaucccgccucuuc

SEQ ID NO: 2422394 - RNA, 19 nt, Human
agaucccgccucuucuucu

SEQ ID NO: 2422395 - RNA, 22 nt, Human
agauccuaaaacaaaagcucau

SEQ ID NO: 2422396 - RNA, 13 nt, Human
agauccuaaaaca

SEQ ID NO: 2422397 - RNA, 22 nt, Human
agaucccgccucuucuucuuca

SEQ ID NO: 2422398 - RNA, 20 nt, Human
agaucuaagccuuuccauaa

SEQ ID NO: 2422399 - RNA, 17 nt, Human
agaucguuaguaucuaa

SEQ ID NO: 2422400 - RNA, 16 nt, Human
agaucguuaguaucua

SEQ ID NO: 2422401 - RNA, 22 nt, Human
agaucuaaggaugucacagggc

SEQ ID NO: 2422402 - RNA, 19 nt, Human
agaucuaggugaggauuga

SEQ ID NO: 2422403 - RNA, 18 nt, Human
agaucucuaacuucacca

SEQ ID NO: 2422404 - RNA, 18 nt, Human
agaucuccuggcaaaggc

SEQ ID NO: 2422405 - RNA, 20 nt, Human
agaugcaaagaggcaagagg

SEQ ID NO: 2422406 - RNA, 14 nt, Human
agaucuccuggcaa

SEQ ID NO: 2422407 - RNA, 15 nt, Human
agaugcaaggaccag

SEQ ID NO: 2422408 - RNA, 13 nt, Human
agauccuggaaau

SEQ ID NO: 2422409 - RNA, 12 nt, Human
agauccuccugc

SEQ ID NO: 2422410 - RNA, 17 nt, Human
agauccugcgggugggg

SEQ ID NO: 2422411 - RNA, 14 nt, Human
agauccuggaaauc

SEQ ID NO: 2422412 - RNA, 22 nt, Human
agaucgugccguuacucuccaa

SEQ ID NO: 2422413 - RNA, 18 nt, Human
agauccugcggguggggc

SEQ ID NO: 2422414 - RNA, 16 nt, Human
agaucguucucugccu

SEQ ID NO: 2422415 - RNA, 22 nt, Human
agaugcuggagaagagaggaga

SEQ ID NO: 2422416 - RNA, 21 nt, Human
agaugcuggagaagagaggag

SEQ ID NO: 2422417 - RNA, 20 nt, Human
agaugcuggagaagagagga

SEQ ID NO: 2422418 - RNA, 19 nt, Human
agaugcuggagaagagagg

SEQ ID NO: 2422419 - RNA, 18 nt, Human
agaugcuggagaagagag

SEQ ID NO: 2422420 - RNA, 17 nt, Human
agaugcuggagaagaga

SEQ ID NO: 2422421 - RNA, 16 nt, Human
agaugcuggagaagag

SEQ ID NO: 2422422 - RNA, 13 nt, Human
agaugcuggagaa

SEQ ID NO: 2422423 - RNA, 11 nt, Human
agaugcuggag

SEQ ID NO: 2422424 - RNA, 22 nt, Human
agaugcugauguucaguguaau

SEQ ID NO: 2422425 - RNA, 21 nt, Human
agaugcugauguucaguguaa

SEQ ID NO: 2422426 - RNA, 20 nt, Human
agaugcugauguucagugua

SEQ ID NO: 2422427 - RNA, 19 nt, Human
agaugcugauguucagugu

SEQ ID NO: 2422428 - RNA, 18 nt, Human
agaugcugauguucagug

SEQ ID NO: 2422429 - RNA, 17 nt, Human
agaugcugauguucagu

SEQ ID NO: 2422430 - RNA, 21 nt, Human
agaugcuagaacucccuuuca

SEQ ID NO: 2422431 - RNA, 16 nt, Human
agaugcugauguucag

SEQ ID NO: 2422432 - RNA, 14 nt, Human
agaugcuggcccag

SEQ ID NO: 2422433 - RNA, 15 nt, Human
agaugcuggcccagg

SEQ ID NO: 2422434 - RNA, 16 nt, Human
agaugcuggcccaggg

SEQ ID NO: 2422435 - RNA, 17 nt, Human
agaugcuggcccagggc

SEQ ID NO: 2422436 - RNA, 18 nt, Human
agaugcuggcccagggcc

SEQ ID NO: 2422437 - RNA, 21 nt, Human
agauguagccccucuccugga

SEQ ID NO: 2422438 - RNA, 22 nt, Human
agauguagccccucuccuggaa

SEQ ID NO: 2422439 - RNA, 21 nt, Human
agaugcuggaugucugccaau

SEQ ID NO: 2422440 - RNA, 21 nt, Human
agaugcaguucugaagaagau

SEQ ID NO: 2422441 - RNA, 22 nt, Human
agaugcauucuugguuggcugg

SEQ ID NO: 2422442 - RNA, 20 nt, Human
agaugcaccaccaagccaag

SEQ ID NO: 2422443 - RNA, 19 nt, Human
agaugcuagaacucccuuu

SEQ ID NO: 2422444 - RNA, 20 nt, Human
agaugcaguucugaagaaga

SEQ ID NO: 2422445 - RNA, 18 nt, Human
agaugcaccaccaagcca

SEQ ID NO: 2422446 - RNA, 19 nt, Human
agaugcaaugugcuacuga

SEQ ID NO: 2422447 - RNA, 13 nt, Human
agaugcaagauau

SEQ ID NO: 2422448 - RNA, 18 nt, Human
agaugcaaugugcuacug

SEQ ID NO: 2422449 - RNA, 20 nt, Human
agaugcaaggaccaggacuc

SEQ ID NO: 2422450 - RNA, 17 nt, Human
agaugcaaggaccagga

SEQ ID NO: 2422451 - RNA, 18 nt, Human
agaugcaaggaccaggac

SEQ ID NO: 2422452 - RNA, 20 nt, Human
agaugcaaugacucaggaca

SEQ ID NO: 2422453 - RNA, 21 nt, Human
ugacagcuuugcugcugaagg

SEQ ID NO: 2422454 - RNA, 20 nt, Human
ugacagcuuugcugcugaag

SEQ ID NO: 2422455 - RNA, 15 nt, Human
ugacagguaaacuau

SEQ ID NO: 2422456 - RNA, 15 nt, Human
ugacagguuugggac

SEQ ID NO: 2422457 - RNA, 22 nt, Human
ugacagggcacaccgggcacuc

SEQ ID NO: 2422458 - RNA, 15 nt, Human
ugacagcuuugcugc

SEQ ID NO: 2422459 - RNA, 16 nt, Human
ugacagcuuugcugcu

SEQ ID NO: 2422460 - RNA, 17 nt, Human
ugacagcuuugcugcug

SEQ ID NO: 2422461 - RNA, 18 nt, Human
ugacagcuuugcugcuga

SEQ ID NO: 2422462 - RNA, 21 nt, Human
ugacagggcacaccgggcacu

SEQ ID NO: 2422463 - RNA, 19 nt, Human
ugacaggcaaugcuggcug

SEQ ID NO: 2422464 - RNA, 17 nt, Human
ugacaggcaaugcuggc

SEQ ID NO: 2422465 - RNA, 14 nt, Human
ugacagcagguggg

SEQ ID NO: 2422466 - RNA, 13 nt, Human
ugacagcuuugcu

SEQ ID NO: 2422467 - RNA, 14 nt, Human
ugacagcuuugcug

SEQ ID NO: 2422468 - RNA, 11 nt, Human
ugacagccucc

SEQ ID NO: 2422469 - RNA, 12 nt, Human
ugacagccuccc

SEQ ID NO: 2422470 - RNA, 20 nt, Human
ugacauuuauauauugaauu

SEQ ID NO: 2422471 - RNA, 19 nt, Human
ugacauuuauauauugaau

SEQ ID NO: 2422472 - RNA, 18 nt, Human
ugacauuuauuuuucauu

SEQ ID NO: 2422473 - RNA, 21 nt, Human
ugacauuuauuuuucauuuag

SEQ ID NO: 2422474 - RNA, 21 nt, Human
ugacauuuggaguguuccccu

SEQ ID NO: 2422475 - RNA, 13 nt, Human
ugacauuucuuug

SEQ ID NO: 2422476 - RNA, 14 nt, Human
ugacauuucuuugu

SEQ ID NO: 2422477 - RNA, 22 nt, Human
ugacauuuauuuuucucaugaa

SEQ ID NO: 2422478 - RNA, 21 nt, Human
ugacauuuauuuuucucauga

SEQ ID NO: 2422479 - RNA, 12 nt, Human
ugacauuucuuu

SEQ ID NO: 2422480 - RNA, 24 nt, Human
ugacauuugggagacaugugacau

SEQ ID NO: 2422481 - RNA, 23 nt, Human
ugacauuugggagacaugugaca

SEQ ID NO: 2422482 - RNA, 22 nt, Human
ugacauuugggagacaugugac

SEQ ID NO: 2422483 - RNA, 21 nt, Human
ugacauuugggagacauguga

SEQ ID NO: 2422484 - RNA, 21 nt, Human
ugacauuccuaaacuaucuuu

SEQ ID NO: 2422485 - RNA, 20 nt, Human
ugacauuccuaaacuaucuu

SEQ ID NO: 2422486 - RNA, 15 nt, Human
ugacauucaugccug

SEQ ID NO: 2422487 - RNA, 15 nt, Human
ugacauucaaggcau

SEQ ID NO: 2422488 - RNA, 22 nt, Human
ugacauucucaggaagccccca

SEQ ID NO: 2422489 - RNA, 17 nt, Human
ugacauucaugccuggc

SEQ ID NO: 2422490 - RNA, 15 nt, Human
ugacauucaccugcc

SEQ ID NO: 2422491 - RNA, 18 nt, Human
ugacauucaccugcccca

SEQ ID NO: 2422492 - RNA, 12 nt, Human
ugacauucaccu

SEQ ID NO: 2422493 - RNA, 21 nt, Human
ugacauuaacaguuuuccaug

SEQ ID NO: 2422494 - RNA, 17 nt, Human
ugacauuaacaguuuuc

SEQ ID NO: 2422495 - RNA, 19 nt, Human
ugacauuaacaguuuucca

SEQ ID NO: 2422496 - RNA, 22 nt, Human
ugacauuaacaguuuuccauga

SEQ ID NO: 2422497 - RNA, 17 nt, Human
ugacagguaaauuaaga

SEQ ID NO: 2422498 - RNA, 13 nt, Human
ugacauuaacagu

SEQ ID NO: 2422499 - RNA, 13 nt, Human
ugacauguuuuau

SEQ ID NO: 2422500 - RNA, 15 nt, Human
ugaaugcugggacuc

SEQ ID NO: 2422501 - RNA, 14 nt, Human
ugaaugcugggacu

SEQ ID NO: 2422502 - RNA, 19 nt, Human
ugaaugcugggacucagcc

SEQ ID NO: 2422503 - RNA, 19 nt, Human
ugaaugcuuauagguggcc

SEQ ID NO: 2422504 - RNA, 15 nt, Human
ugacaccugcugaga

SEQ ID NO: 2422505 - RNA, 21 nt, Human
ugacaccgggguggugggaac

SEQ ID NO: 2422506 - RNA, 16 nt, Human
ugacacgaauauugcu

SEQ ID NO: 2422507 - RNA, 18 nt, Human
ugaaugcccccagcuggc

SEQ ID NO: 2422508 - RNA, 17 nt, Human
ugaaugcccccagcugg

SEQ ID NO: 2422509 - RNA, 20 nt, Human
ugaaucaauaauauauuuuc

SEQ ID NO: 2422510 - RNA, 19 nt, Human
ugaaucaauaauauauuuu

SEQ ID NO: 2422511 - RNA, 17 nt, Human
ugaaucaauaauauauu

SEQ ID NO: 2422512 - RNA, 16 nt, Human
ugaaucaauaauauau

SEQ ID NO: 2422513 - RNA, 15 nt, Human
ugaaucaauaauaua

SEQ ID NO: 2422514 - RNA, 13 nt, Human
ugaaucaauaaua

SEQ ID NO: 2422515 - RNA, 13 nt, Human
ugaaugcugggac

SEQ ID NO: 2422516 - RNA, 12 nt, Human
ugaaugcuggga

SEQ ID NO: 2422517 - RNA, 17 nt, Human
ugaaugccucaauguga

SEQ ID NO: 2422518 - RNA, 11 nt, Human
ugaaugcuggg

SEQ ID NO: 2422519 - RNA, 20 nt, Human
ugaaugcccccagcuggccc

SEQ ID NO: 2422520 - RNA, 19 nt, Human
ugaaugcccccagcuggcc

SEQ ID NO: 2422521 - RNA, 14 nt, Human
ugaaugccguggau

SEQ ID NO: 2422522 - RNA, 13 nt, Human
ugaaugcggccca

SEQ ID NO: 2422523 - RNA, 15 nt, Human
ugacacuuaaaaaug

SEQ ID NO: 2422524 - RNA, 22 nt, Human
ugacagagugagacucugucuc

SEQ ID NO: 2422525 - RNA, 19 nt, Human
ugacagaugucagccgagc

SEQ ID NO: 2422526 - RNA, 21 nt, Human
ugacagaucaagcugugagac

SEQ ID NO: 2422527 - RNA, 22 nt, Human
ugacagaugucagccgagccgg

SEQ ID NO: 2422528 - RNA, 19 nt, Human
ugacagauguugaaugccc

SEQ ID NO: 2422529 - RNA, 19 nt, Human
ugacagaucaagcugugag

SEQ ID NO: 2422530 - RNA, 18 nt, Human
ugacagaucaagcuguga

SEQ ID NO: 2422531 - RNA, 17 nt, Human
ugacagaucaagcugug

SEQ ID NO: 2422532 - RNA, 16 nt, Human
ugacagaucaagcugu

SEQ ID NO: 2422533 - RNA, 21 nt, Human
ugacacugguauuccugccuc

SEQ ID NO: 2422534 - RNA, 20 nt, Human
ugacacugguauuccugccu

SEQ ID NO: 2422535 - RNA, 15 nt, Human
ugacagaucaagcug

SEQ ID NO: 2422536 - RNA, 15 nt, Human
ugacagaguucacua

SEQ ID NO: 2422537 - RNA, 19 nt, Human
ugacacugguauuccugcc

SEQ ID NO: 2422538 - RNA, 23 nt, Human
ugacacugcggggcuuggcugag

SEQ ID NO: 2422539 - RNA, 19 nt, Human
ugacacgaauauugcugau

SEQ ID NO: 2422540 - RNA, 19 nt, Human
ugacaccuuugcaggcaug

SEQ ID NO: 2422541 - RNA, 18 nt, Human
ugacaccuuugcaggcau

SEQ ID NO: 2422542 - RNA, 20 nt, Human
ugacacugcggggcuuggcu

SEQ ID NO: 2422543 - RNA, 23 nt, Human
ugacaccuuucauaaucuuugcu

SEQ ID NO: 2422544 - RNA, 20 nt, Human
ugacaccuuucauaaucuuu

SEQ ID NO: 2422545 - RNA, 22 nt, Human
agcacaugccucucucaggcca

SEQ ID NO: 2422546 - RNA, 21 nt, Human
agcacaugccucucucaggcc

SEQ ID NO: 2422547 - RNA, 20 nt, Human
agcacaugccucucucaggc

SEQ ID NO: 2422548 - RNA, 19 nt, Human
agcacaugccucucucagg

SEQ ID NO: 2422549 - RNA, 16 nt, Human
agcacaugccucucuc

SEQ ID NO: 2422550 - RNA, 15 nt, Human
agcacaggugggcuu

SEQ ID NO: 2422551 - RNA, 18 nt, Human
agcacaugccucucucag

SEQ ID NO: 2422552 - RNA, 20 nt, Human
agcacagcuugaccugaggc

SEQ ID NO: 2422553 - RNA, 18 nt, Human
agcacagcuugaccugag

SEQ ID NO: 2422554 - RNA, 13 nt, Human
agcacaggcagcu

SEQ ID NO: 2422555 - RNA, 12 nt, Human
agcacaggcagc

SEQ ID NO: 2422556 - RNA, 15 nt, Human
agcacaggcagcugg

SEQ ID NO: 2422557 - RNA, 23 nt, Human
agcaauaauggucccauccaggc

SEQ ID NO: 2422558 - RNA, 21 nt, Human
agcaauaauggucccauccag

SEQ ID NO: 2422559 - RNA, 20 nt, Human
agcaauaauggucccaucca

SEQ ID NO: 2422560 - RNA, 19 nt, Human
agcaauaauggucccaucc

SEQ ID NO: 2422561 - RNA, 14 nt, Human
agcaagugaauuuu

SEQ ID NO: 2422562 - RNA, 13 nt, Human
agcaauaaaugaa

SEQ ID NO: 2422563 - RNA, 14 nt, Human
agcaauaaaugaau

SEQ ID NO: 2422564 - RNA, 15 nt, Human
agcaauaaaugaaug

SEQ ID NO: 2422565 - RNA, 17 nt, Human
agcaagugagagcuggg

SEQ ID NO: 2422566 - RNA, 15 nt, Human
agcaagucugcaggu

SEQ ID NO: 2422567 - RNA, 14 nt, Human
agcaagucugcagg

SEQ ID NO: 2422568 - RNA, 13 nt, Human
agcaagucugcag

SEQ ID NO: 2422569 - RNA, 16 nt, Human
agcaauaaagaagagu

SEQ ID NO: 2422570 - RNA, 21 nt, Human
agcaauaucaguuauuuuuug

SEQ ID NO: 2422571 - RNA, 15 nt, Human
agcaauaucaguuau

SEQ ID NO: 2422572 - RNA, 12 nt, Human
agcaauaugcau

SEQ ID NO: 2422573 - RNA, 15 nt, Human
agcaauauguaaaua

SEQ ID NO: 2422574 - RNA, 17 nt, Human
agcaauccauguuaguu

SEQ ID NO: 2422575 - RNA, 20 nt, Human
agcaauccauguuaguuuuu

SEQ ID NO: 2422576 - RNA, 21 nt, Human
agcacagcuucauuuccugug

SEQ ID NO: 2422577 - RNA, 14 nt, Human
agcacagcuugacc

SEQ ID NO: 2422578 - RNA, 19 nt, Human
agcaauccuagguaggguu

SEQ ID NO: 2422579 - RNA, 22 nt, Human
agcaauccauguuaguuuuuac

SEQ ID NO: 2422580 - RNA, 23 nt, Human
agcaauccauguuaguuuuuacu

SEQ ID NO: 2422581 - RNA, 23 nt, Human
agcacaugccucucucaggccaa

SEQ ID NO: 2422582 - RNA, 16 nt, Human
agcaccaucucuccuc

SEQ ID NO: 2422583 - RNA, 14 nt, Human
agcaccccaaggcu

SEQ ID NO: 2422584 - RNA, 20 nt, Human
agcaccauccgccagggccc

SEQ ID NO: 2422585 - RNA, 19 nt, Human
agcaccauccgccagggcc

SEQ ID NO: 2422586 - RNA, 20 nt, Human
agcacccagcaacuccaacu

SEQ ID NO: 2422587 - RNA, 15 nt, Human
agcaccguucugugc

SEQ ID NO: 2422588 - RNA, 16 nt, Human
agcaccguucugugca

SEQ ID NO: 2422589 - RNA, 17 nt, Human
agcaccguucugugcac

SEQ ID NO: 2422590 - RNA, 17 nt, Human
agcacccgggcucaggg

SEQ ID NO: 2422591 - RNA, 15 nt, Human
agcacccgggcucag

SEQ ID NO: 2422592 - RNA, 14 nt, Human
agcaccccuuccau

SEQ ID NO: 2422593 - RNA, 13 nt, Human
agcaccccuucca

SEQ ID NO: 2422594 - RNA, 12 nt, Human
agcaccccuucc

SEQ ID NO: 2422595 - RNA, 15 nt, Human
agcaccccugucucu

SEQ ID NO: 2422596 - RNA, 13 nt, Human
agcaccccugucu

SEQ ID NO: 2422597 - RNA, 19 nt, Human
agcaccccucucugcaucu

SEQ ID NO: 2422598 - RNA, 16 nt, Human
agcaccccucucugca

SEQ ID NO: 2422599 - RNA, 15 nt, Human
agcaccccucucugc

SEQ ID NO: 2422600 - RNA, 14 nt, Human
agcaccccucucug

SEQ ID NO: 2422601 - RNA, 19 nt, Human
agcaccccaugccaaagcu

SEQ ID NO: 2422602 - RNA, 16 nt, Human
agcaccuccugccucg

SEQ ID NO: 2422603 - RNA, 14 nt, Human
agcaccuccugccu

SEQ ID NO: 2422604 - RNA, 13 nt, Human
agcaccuccugcc

SEQ ID NO: 2422605 - RNA, 21 nt, Human
agcaccuacaguguacagucu

SEQ ID NO: 2422606 - RNA, 19 nt, Human
agcaccuacaguguacagu

SEQ ID NO: 2422607 - RNA, 15 nt, Human
agcaccuacagugua

SEQ ID NO: 2422608 - RNA, 14 nt, Human
agcaccuacagugu

SEQ ID NO: 2422609 - RNA, 18 nt, Human
agcaccuaguccagugac

SEQ ID NO: 2422610 - RNA, 17 nt, Human
agcaccuagccucgcuc

SEQ ID NO: 2422611 - RNA, 15 nt, Human
agcaccuacuuacau

SEQ ID NO: 2422612 - RNA, 18 nt, Human
agcaccguucugugcaca

SEQ ID NO: 2422613 - RNA, 22 nt, Human
agcaccuacaguguacagucuu

SEQ ID NO: 2422614 - RNA, 14 nt, Human
ugagcauuagauuu

SEQ ID NO: 2422615 - RNA, 16 nt, Human
ugagcauuagauuucu

SEQ ID NO: 2422616 - RNA, 21 nt, Human
ugagcauuguggcugucagca

SEQ ID NO: 2422617 - RNA, 13 nt, Human
ugagccacugcac

SEQ ID NO: 2422618 - RNA, 12 nt, Human
ugagccacugca

SEQ ID NO: 2422619 - RNA, 21 nt, Human
ugagauuucaucugcucuccu

SEQ ID NO: 2422620 - RNA, 19 nt, Human
ugagauuucaucugcucuc

SEQ ID NO: 2422621 - RNA, 18 nt, Human
ugagauuucaucugcucu

SEQ ID NO: 2422622 - RNA, 14 nt, Human
ugagauuucaucug

SEQ ID NO: 2422623 - RNA, 14 nt, Human
ugagauuuugguau

SEQ ID NO: 2422624 - RNA, 22 nt, Human
ugagauuucaucugcucuccuu

SEQ ID NO: 2422625 - RNA, 18 nt, Human
ugagcaaacuaacuugac

SEQ ID NO: 2422626 - RNA, 20 nt, Human
ugagcaaagggaacagugag

SEQ ID NO: 2422627 - RNA, 14 nt, Human
ugagcauggagcug

SEQ ID NO: 2422628 - RNA, 15 nt, Human
ugagcauggagcugg

SEQ ID NO: 2422629 - RNA, 18 nt, Human
ugagcauggagcuggccg

SEQ ID NO: 2422630 - RNA, 16 nt, Human
ugagcauggagcuggc

SEQ ID NO: 2422631 - RNA, 19 nt, Human
ugagccagauuucacucuc

SEQ ID NO: 2422632 - RNA, 18 nt, Human
ugagccagauuucacucu

SEQ ID NO: 2422633 - RNA, 14 nt, Human
ugagccacugcacc

SEQ ID NO: 2422634 - RNA, 22 nt, Human
ugagcauuguggcugucagcag

SEQ ID NO: 2422635 - RNA, 23 nt, Human
ugagcauuguggcugucagcagg

SEQ ID NO: 2422636 - RNA, 21 nt, Human
ugagccagauuucacucuccu

SEQ ID NO: 2422637 - RNA, 20 nt, Human
ugagccagauuucacucucc

SEQ ID NO: 2422638 - RNA, 15 nt, Human
agcaagcucccaagg

SEQ ID NO: 2422639 - RNA, 11 nt, Human
agcaagcuccc

SEQ ID NO: 2422640 - RNA, 20 nt, Human
agcaagcauuuauguuuauu

SEQ ID NO: 2422641 - RNA, 14 nt, Human
agcaagauuucaga

SEQ ID NO: 2422642 - RNA, 16 nt, Human
agcaagggugauggga

SEQ ID NO: 2422643 - RNA, 16 nt, Human
agcaaggcaccugcag

SEQ ID NO: 2422644 - RNA, 17 nt, Human
agcaaggaggcuggcug

SEQ ID NO: 2422645 - RNA, 16 nt, Human
agcaaggaggcuggcu

SEQ ID NO: 2422646 - RNA, 22 nt, Human
agcaaggaggcuggcuggggcc

SEQ ID NO: 2422647 - RNA, 13 nt, Human
agcaaggcaccug

SEQ ID NO: 2422648 - RNA, 17 nt, Human
agcaaggagauuuacaa

SEQ ID NO: 2422649 - RNA, 19 nt, Human
agcaaggagauuuacaacu

SEQ ID NO: 2422650 - RNA, 14 nt, Human
agcaaggagauuua

SEQ ID NO: 2422651 - RNA, 20 nt, Human
agcaagcucccaagggaugg

SEQ ID NO: 2422652 - RNA, 20 nt, Human
agcaagggugaugggaaagc

SEQ ID NO: 2422653 - RNA, 22 nt, Human
agcaagggugaugggaaagcau

SEQ ID NO: 2422654 - RNA, 15 nt, Human
agcaagucagaauag

SEQ ID NO: 2422655 - RNA, 23 nt, Human
agcaaggugcucacaccccauug

SEQ ID NO: 2422656 - RNA, 20 nt, Human
agcaaggguucccucaagag

SEQ ID NO: 2422657 - RNA, 16 nt, Human
agcaagugagagcugg

SEQ ID NO: 2422658 - RNA, 15 nt, Human
agcaagugagagcug

SEQ ID NO: 2422659 - RNA, 16 nt, Human
agcaagugagacccug

SEQ ID NO: 2422660 - RNA, 13 nt, Human
agcaagucucuuu

SEQ ID NO: 2422661 - RNA, 14 nt, Human
agcaagucaggguu

SEQ ID NO: 2422662 - RNA, 18 nt, Human
ugagaaucuauauuuaac

SEQ ID NO: 2422663 - RNA, 23 nt, Human
ugagaaucuauauuuaacaagau

SEQ ID NO: 2422664 - RNA, 12 nt, Human
ugagaaucuacc

SEQ ID NO: 2422665 - RNA, 21 nt, Human
ugagaaucuacccccagaucc

SEQ ID NO: 2422666 - RNA, 13 nt, Human
ugagaaucccaaa

SEQ ID NO: 2422667 - RNA, 20 nt, Human
ugagaaucccaaauuugauu

SEQ ID NO: 2422668 - RNA, 21 nt, Human
ugagaaucccaaauuugauug

SEQ ID NO: 2422669 - RNA, 22 nt, Human
ugagaaucccaaauuugauuga

SEQ ID NO: 2422670 - RNA, 15 nt, Human
ugagaauguaagaac

SEQ ID NO: 2422671 - RNA, 21 nt, Human
ugagacacggagcccagcccu

SEQ ID NO: 2422672 - RNA, 17 nt, Human
ugagacacggagcccag

SEQ ID NO: 2422673 - RNA, 22 nt, Human
ugagaaucuuuauugagaaaga

SEQ ID NO: 2422674 - RNA, 21 nt, Human
ugagaaucuuuauugagaaag

SEQ ID NO: 2422675 - RNA, 20 nt, Human
ugagaaucuuuauugagaaa

SEQ ID NO: 2422676 - RNA, 19 nt, Human
ugagaaucuuuauugagaa

SEQ ID NO: 2422677 - RNA, 13 nt, Human
ugagacagcccgg

SEQ ID NO: 2422678 - RNA, 21 nt, Human
ugagacagaguuuucacucuu

SEQ ID NO: 2422679 - RNA, 13 nt, Human
ugagacagaaucu

SEQ ID NO: 2422680 - RNA, 22 nt, Human
ugagacacggagcccagcccuc

SEQ ID NO: 2422681 - RNA, 20 nt, Human
ugagacagaaucucgcucug

SEQ ID NO: 2422682 - RNA, 11 nt, Human
ugagacagagu

SEQ ID NO: 2422683 - RNA, 13 nt, Human
ugagaaggcagcc

SEQ ID NO: 2422684 - RNA, 22 nt, Human
ugagaaggagucagaaacuguu

SEQ ID NO: 2422685 - RNA, 16 nt, Human
ugagaaggagagaaag

SEQ ID NO: 2422686 - RNA, 15 nt, Human
ugagaaggagagaaa

SEQ ID NO: 2422687 - RNA, 14 nt, Human
ugagaaggcagcca

SEQ ID NO: 2422688 - RNA, 20 nt, Human
ugagaagcuuugcccuccua

SEQ ID NO: 2422689 - RNA, 19 nt, Human
ugagaagcuuuugaauaaa

SEQ ID NO: 2422690 - RNA, 14 nt, Human
ugagaaggagagaa

SEQ ID NO: 2422691 - RNA, 13 nt, Human
ugagaaggagaga

SEQ ID NO: 2422692 - RNA, 12 nt, Human
ugagaaggagag

SEQ ID NO: 2422693 - RNA, 17 nt, Human
ugagaaggaauuugagu

SEQ ID NO: 2422694 - RNA, 19 nt, Human
agauuuuccuuuuuuauac

SEQ ID NO: 2422695 - RNA, 13 nt, Human
agauuuuccuucc

SEQ ID NO: 2422696 - RNA, 20 nt, Human
agauuuuccuuuuuuauaca

SEQ ID NO: 2422697 - RNA, 16 nt, Human
ugagaagccgugggug

SEQ ID NO: 2422698 - RNA, 17 nt, Human
ugagaagccgugggugg

SEQ ID NO: 2422699 - RNA, 14 nt, Human
agauuuuccugaaa

SEQ ID NO: 2422700 - RNA, 19 nt, Human
agauuuuaggaaaugaaug

SEQ ID NO: 2422701 - RNA, 15 nt, Human
agauuuuccugaaaa

SEQ ID NO: 2422702 - RNA, 16 nt, Human
agauuuuccugaaaac

SEQ ID NO: 2422703 - RNA, 20 nt, Human
agauuuuaggaaaugaaugu

SEQ ID NO: 2422704 - RNA, 11 nt, Human
agauuuuccuu

SEQ ID NO: 2422705 - RNA, 20 nt, Human
ugagacagcccgggcucugc

SEQ ID NO: 2422706 - RNA, 19 nt, Human
ugagacagcccgggcucug

SEQ ID NO: 2422707 - RNA, 18 nt, Human
ugagacagcccgggcucu

SEQ ID NO: 2422708 - RNA, 17 nt, Human
ugagacagcccgggcuc

SEQ ID NO: 2422709 - RNA, 12 nt, Human
ugagacagcucu

SEQ ID NO: 2422710 - RNA, 22 nt, Human
ugagacagcccgggcucugccu

SEQ ID NO: 2422711 - RNA, 20 nt, Human
ugagacucugucucagucca

SEQ ID NO: 2422712 - RNA, 20 nt, Human
ugagacucugucucaaaaaa

SEQ ID NO: 2422713 - RNA, 20 nt, Human
ugagagacacacugaagaag

SEQ ID NO: 2422714 - RNA, 19 nt, Human
ugagagacacacugaagaa

SEQ ID NO: 2422715 - RNA, 17 nt, Human
ugagagacacacugaag

SEQ ID NO: 2422716 - RNA, 16 nt, Human
ugagagacacacugaa

SEQ ID NO: 2422717 - RNA, 14 nt, Human
ugagacagaaucuc

SEQ ID NO: 2422718 - RNA, 22 nt, Human
ugagacugcgggaugguccugg

SEQ ID NO: 2422719 - RNA, 23 nt, Human
ugagacugcgggaugguccuggg

SEQ ID NO: 2422720 - RNA, 12 nt, Human
ugagacuuccaa

SEQ ID NO: 2422721 - RNA, 21 nt, Human
ugagacuggauacugcccggg

SEQ ID NO: 2422722 - RNA, 18 nt, Human
ugagacugggucucgcuu

SEQ ID NO: 2422723 - RNA, 14 nt, Human
ugagacuugcucuc

SEQ ID NO: 2422724 - RNA, 20 nt, Human
ugagacuugcucucuggccu

SEQ ID NO: 2422725 - RNA, 13 nt, Human
ugagagaaaauaa

SEQ ID NO: 2422726 - RNA, 22 nt, Human
ugagagaaauauggaacuuaca

SEQ ID NO: 2422727 - RNA, 18 nt, Human
ugagagaauaagucaugu

SEQ ID NO: 2422728 - RNA, 15 nt, Human
ugagagaagggacac

SEQ ID NO: 2422729 - RNA, 14 nt, Human
ugagagaauggaaa

SEQ ID NO: 2422730 - RNA, 19 nt, Human
ugagagaauggaaaacaga

SEQ ID NO: 2422731 - RNA, 23 nt, Human
ugagagagaugggagcuccucuc

SEQ ID NO: 2422732 - RNA, 22 nt, Human
ugagagagaugggagcuccucu

SEQ ID NO: 2422733 - RNA, 16 nt, Human
ugagagcccagaggua

SEQ ID NO: 2422734 - RNA, 15 nt, Human
ugagagcccagaggu

SEQ ID NO: 2422735 - RNA, 22 nt, Human
ugagagacacacugaagaagca

SEQ ID NO: 2422736 - RNA, 21 nt, Human
ugagagacacacugaagaagc

SEQ ID NO: 2422737 - RNA, 14 nt, Human
ugagagaccaggca

SEQ ID NO: 2422738 - RNA, 24 nt, Human
ugagagaccaggcaaagcaaguga

SEQ ID NO: 2422739 - RNA, 23 nt, Human
ugagagaauggaaaacagacuca

SEQ ID NO: 2422740 - RNA, 18 nt, Human
ugagagaauuguaucauu

SEQ ID NO: 2422741 - RNA, 19 nt, Human
ugagagaauuguaucauuu

SEQ ID NO: 2422742 - RNA, 21 nt, Human
ugagagacccaaggaggaaaa

SEQ ID NO: 2422743 - RNA, 12 nt, Human
ugagagacuuuu

SEQ ID NO: 2422744 - RNA, 20 nt, Human
ugagagacccaaggaggaaa

SEQ ID NO: 2422745 - RNA, 21 nt, Human
ugagagagaugggagcuccuc

SEQ ID NO: 2422746 - RNA, 17 nt, Human
ugagagagaugggagcu

SEQ ID NO: 2422747 - RNA, 16 nt, Human
ugagagagaugggagc

SEQ ID NO: 2422748 - RNA, 14 nt, Human
ugagaggaaaucac

SEQ ID NO: 2422749 - RNA, 13 nt, Human
ugagaggaaauca

SEQ ID NO: 2422750 - RNA, 12 nt, Human
ugagaggaaauc

SEQ ID NO: 2422751 - RNA, 11 nt, Human
ugagaggaaau

SEQ ID NO: 2422752 - RNA, 16 nt, Human
ugagagcugcucugga

SEQ ID NO: 2422753 - RNA, 22 nt, Human
ugagagccccagcugacaugga

SEQ ID NO: 2422754 - RNA, 23 nt, Human
ugagagcgugcuccagccuggcu

SEQ ID NO: 2422755 - RNA, 17 nt, Human
ugagagcugugcaucag

SEQ ID NO: 2422756 - RNA, 10 nt, Human
ugagaggaaa

SEQ ID NO: 2422757 - RNA, 14 nt, Human
ugagagcugggugu

SEQ ID NO: 2422758 - RNA, 15 nt, Human
ugagagccccagcug

SEQ ID NO: 2422759 - RNA, 12 nt, Human
ugagagccccag

SEQ ID NO: 2422760 - RNA, 20 nt, Human
ugagagcccagagguaacag

SEQ ID NO: 2422761 - RNA, 19 nt, Human
ugagagcccagagguaaca

SEQ ID NO: 2422762 - RNA, 19 nt, Human
ugagagccccagcugacau

SEQ ID NO: 2422763 - RNA, 16 nt, Human
ugagagccccagcuga

SEQ ID NO: 2422764 - RNA, 23 nt, Human
ugagaugcuggagaagagaggag

SEQ ID NO: 2422765 - RNA, 20 nt, Human
ugagaugcuggagaagagag

SEQ ID NO: 2422766 - RNA, 19 nt, Human
ugagaugcuggagaagaga

SEQ ID NO: 2422767 - RNA, 18 nt, Human
ugagaugcuggagaagag

SEQ ID NO: 2422768 - RNA, 17 nt, Human
ugagaugcuggagaaga

SEQ ID NO: 2422769 - RNA, 16 nt, Human
ugagaugcuggagaag

SEQ ID NO: 2422770 - RNA, 15 nt, Human
ugagaugcuggagaa

SEQ ID NO: 2422771 - RNA, 13 nt, Human
ugagaugcuggag

SEQ ID NO: 2422772 - RNA, 15 nt, Human
ugagaggaugaaugu

SEQ ID NO: 2422773 - RNA, 19 nt, Human
ugagagcugcucuggaaaa

SEQ ID NO: 2422774 - RNA, 23 nt, Human
ugagaggaugaauguaugugcac

SEQ ID NO: 2422775 - RNA, 22 nt, Human
ugagaggaugaauguaugugca

SEQ ID NO: 2422776 - RNA, 20 nt, Human
ugagaggcaaugauuguuaa

SEQ ID NO: 2422777 - RNA, 17 nt, Human
ugagaggaaaucaccga

SEQ ID NO: 2422778 - RNA, 23 nt, Human
ugagaggacuuuucuuuguggcu

SEQ ID NO: 2422779 - RNA, 13 nt, Human
ugagaugugaaca

SEQ ID NO: 2422780 - RNA, 23 nt, Human
ugagauguagccccucuccugga

SEQ ID NO: 2422781 - RNA, 18 nt, Human
ugagauggagucucacuc

SEQ ID NO: 2422782 - RNA, 16 nt, Human
ugagauggacacacug

SEQ ID NO: 2422783 - RNA, 21 nt, Human
ugagaugcugguaauggccau

SEQ ID NO: 2422784 - RNA, 13 nt, Human
ugagauggacaca

SEQ ID NO: 2422785 - RNA, 21 nt, Human
ugagauggaacccuuuuggcc

SEQ ID NO: 2422786 - RNA, 18 nt, Human
ugagaugugaacacauca

SEQ ID NO: 2422787 - RNA, 19 nt, Human
ugagaugugaacacaucag

SEQ ID NO: 2422788 - RNA, 24 nt, Human
ugagaugugaacacaucagcuugc

SEQ ID NO: 2422789 - RNA, 18 nt, Human
ugagauugcaccacugca

SEQ ID NO: 2422790 - RNA, 13 nt, Human
ugagauuucaucu

SEQ ID NO: 2422791 - RNA, 14 nt, Human
ugagauguguucac

SEQ ID NO: 2422792 - RNA, 19 nt, Human
ugagauuacagaggaaguu

SEQ ID NO: 2422793 - RNA, 17 nt, Human
ugagauuagagggaggu

SEQ ID NO: 2422794 - RNA, 15 nt, Human
ugagauuauuuuaau

SEQ ID NO: 2422795 - RNA, 15 nt, Human
ugagauuacagagga

SEQ ID NO: 2422796 - RNA, 17 nt, Human
agagacuggagcaucug

SEQ ID NO: 2422797 - RNA, 14 nt, Human
agagacuggagcau

SEQ ID NO: 2422798 - RNA, 13 nt, Human
agagacuggagca

SEQ ID NO: 2422799 - RNA, 22 nt, Human
agagacucuggccuccacaguu

SEQ ID NO: 2422800 - RNA, 22 nt, Human
agagacuccuugagagaccagg

SEQ ID NO: 2422801 - RNA, 21 nt, Human
agagacuccuugagagaccag

SEQ ID NO: 2422802 - RNA, 11 nt, Human
agagacuccug

SEQ ID NO: 2422803 - RNA, 14 nt, Human
agagagaaaaacaa

SEQ ID NO: 2422804 - RNA, 13 nt, Human
agagagaaaaaca

SEQ ID NO: 2422805 - RNA, 19 nt, Human
agagacuuuuaaucagaca

SEQ ID NO: 2422806 - RNA, 16 nt, Human
agagacuuuuaaucag

SEQ ID NO: 2422807 - RNA, 17 nt, Human
agagacuuuuaaucaga

SEQ ID NO: 2422808 - RNA, 20 nt, Human
agagacuugggacauugccu

SEQ ID NO: 2422809 - RNA, 23 nt, Human
agagacugggaagauaggcucug

SEQ ID NO: 2422810 - RNA, 21 nt, Human
agagacuggagcaucugacuc

SEQ ID NO: 2422811 - RNA, 13 nt, Human
agagacugggaag

SEQ ID NO: 2422812 - RNA, 14 nt, Human
agagacuccugcag

SEQ ID NO: 2422813 - RNA, 13 nt, Human
agagacuccugca

SEQ ID NO: 2422814 - RNA, 12 nt, Human
agagacuccugc

SEQ ID NO: 2422815 - RNA, 13 nt, Human
agagaccucauca

SEQ ID NO: 2422816 - RNA, 20 nt, Human
agagaccuaccucagguugc

SEQ ID NO: 2422817 - RNA, 18 nt, Human
agagaccuaccucagguu

SEQ ID NO: 2422818 - RNA, 17 nt, Human
agagaccuaccucaggu

SEQ ID NO: 2422819 - RNA, 16 nt, Human
agagaccuaccucagg

SEQ ID NO: 2422820 - RNA, 23 nt, Human
agagaccguccucaccccugucc

SEQ ID NO: 2422821 - RNA, 15 nt, Human
agagaccuaccucag

SEQ ID NO: 2422822 - RNA, 15 nt, Human
agagaguugaaccua

SEQ ID NO: 2422823 - RNA, 21 nt, Human
agagagaaaacuuauuugagu

SEQ ID NO: 2422824 - RNA, 19 nt, Human
agagagaaaacuuauuuga

SEQ ID NO: 2422825 - RNA, 11 nt, Human
agagagaaaau

SEQ ID NO: 2422826 - RNA, 17 nt, Human
agagaguggcuccuccc

SEQ ID NO: 2422827 - RNA, 18 nt, Human
agagauccaaaagaagcc

SEQ ID NO: 2422828 - RNA, 19 nt, Human
agagaugaagagugagagg

SEQ ID NO: 2422829 - RNA, 20 nt, Human
agagauaugcagaaggaagg

SEQ ID NO: 2422830 - RNA, 17 nt, Human
agagaugacugaguccu

SEQ ID NO: 2422831 - RNA, 14 nt, Human
agagaugccuccac

SEQ ID NO: 2422832 - RNA, 12 nt, Human
agagaugccucc

SEQ ID NO: 2422833 - RNA, 12 nt, Human
agagaugaauua

SEQ ID NO: 2422834 - RNA, 18 nt, Human
agagaugacugaguccuc

SEQ ID NO: 2422835 - RNA, 16 nt, Human
agagaugccuccaccg

SEQ ID NO: 2422836 - RNA, 17 nt, Human
agagaugccuccaccgc

SEQ ID NO: 2422837 - RNA, 21 nt, Human
agagaugccuccaccgcugcc

SEQ ID NO: 2422838 - RNA, 23 nt, Human
agagaugccuccaccgcugccua

SEQ ID NO: 2422839 - RNA, 23 nt, Human
agagaccaucccugaaggccccg

SEQ ID NO: 2422840 - RNA, 22 nt, Human
agagaccaucccugaaggcccc

SEQ ID NO: 2422841 - RNA, 23 nt, Human
agagacccucugccaccagagac

SEQ ID NO: 2422842 - RNA, 21 nt, Human
agagacccucugccaccagag

SEQ ID NO: 2422843 - RNA, 19 nt, Human
agagacccucugccaccag

SEQ ID NO: 2422844 - RNA, 15 nt, Human
agagaccguccucac

SEQ ID NO: 2422845 - RNA, 22 nt, Human
agagaccguccucaccccuguc

SEQ ID NO: 2422846 - RNA, 17 nt, Human
agagacccuuguuugau

SEQ ID NO: 2422847 - RNA, 16 nt, Human
ugaaagagaaccaguu

SEQ ID NO: 2422848 - RNA, 18 nt, Human
ugaaagagaaccaguuuc

SEQ ID NO: 2422849 - RNA, 12 nt, Human
agagacccaagg

SEQ ID NO: 2422850 - RNA, 13 nt, Human
agagacccaagga

SEQ ID NO: 2422851 - RNA, 14 nt, Human
agagacccaaggag

SEQ ID NO: 2422852 - RNA, 16 nt, Human
agagacccaaggagga

SEQ ID NO: 2422853 - RNA, 21 nt, Human
agagacccaaggaggaaaaac

SEQ ID NO: 2422854 - RNA, 21 nt, Human
agagacccccggaacaagccu

SEQ ID NO: 2422855 - RNA, 21 nt, Human
agagaccaucccugaaggccc

SEQ ID NO: 2422856 - RNA, 19 nt, Human
agagaccaucccugaaggc

SEQ ID NO: 2422857 - RNA, 18 nt, Human
ugaaagaggaaugaagua

SEQ ID NO: 2422858 - RNA, 18 nt, Human
agagaccaucccugaagg

SEQ ID NO: 2422859 - RNA, 13 nt, Human
ugaaagagaacca

SEQ ID NO: 2422860 - RNA, 18 nt, Human
ugaaagacuguacaaagu

SEQ ID NO: 2422861 - RNA, 19 nt, Human
ugaaagacuguacaaagua

SEQ ID NO: 2422862 - RNA, 17 nt, Human
ugaaagaggaaugaagu

SEQ ID NO: 2422863 - RNA, 22 nt, Human
ugaaagacuguacaaaguagaa

SEQ ID NO: 2422864 - RNA, 22 nt, Human
ugaaagaaaauaccaaggaaca

SEQ ID NO: 2422865 - RNA, 20 nt, Human
ugaaacugcuuguuuccuag

SEQ ID NO: 2422866 - RNA, 22 nt, Human
ugaaacugcuuguuuccuagca

SEQ ID NO: 2422867 - RNA, 14 nt, Human
ugaaagaaacaguu

SEQ ID NO: 2422868 - RNA, 20 nt, Human
ugaaagaaacaguuaacuuu

SEQ ID NO: 2422869 - RNA, 22 nt, Human
ugaaagaaacaguuaacuuuca

SEQ ID NO: 2422870 - RNA, 20 nt, Human
ugaaagaaaauaugcaucua

SEQ ID NO: 2422871 - RNA, 16 nt, Human
ugaaagacuguacaaa

SEQ ID NO: 2422872 - RNA, 15 nt, Human
ugaaaacacauuuuu

SEQ ID NO: 2422873 - RNA, 17 nt, Human
ugaaaacacauuuuucu

SEQ ID NO: 2422874 - RNA, 19 nt, Human
ugaaaacacauuuuucuua

SEQ ID NO: 2422875 - RNA, 22 nt, Human
ugaaaaguuacuaccugucaag

SEQ ID NO: 2422876 - RNA, 20 nt, Human
ugaaaauaaaaagaucacuu

SEQ ID NO: 2422877 - RNA, 20 nt, Human
ugaaaacacauuuuucuuag

SEQ ID NO: 2422878 - RNA, 21 nt, Human
ugaaaauaaaaagaucacuuu

SEQ ID NO: 2422879 - RNA, 16 nt, Human
ugaaaauaagaauaga

SEQ ID NO: 2422880 - RNA, 17 nt, Human
ugaaaauauuuguauca

SEQ ID NO: 2422881 - RNA, 12 nt, Human
ugaaaauacaac

SEQ ID NO: 2422882 - RNA, 19 nt, Human
ugaaaauacaacuuaaaua

SEQ ID NO: 2422883 - RNA, 16 nt, Human
ugaaaacaagugcugg

SEQ ID NO: 2422884 - RNA, 15 nt, Human
ugaaaacaagugcug

SEQ ID NO: 2422885 - RNA, 14 nt, Human
ugaaaacaagugcu

SEQ ID NO: 2422886 - RNA, 13 nt, Human
ugaaaacaagugc

SEQ ID NO: 2422887 - RNA, 21 nt, Human
ugaaaacaagugcuggcacca

SEQ ID NO: 2422888 - RNA, 18 nt, Human
ugaaaacaagugcuggca

SEQ ID NO: 2422889 - RNA, 14 nt, Human
ugaaaacacauuuu

SEQ ID NO: 2422890 - RNA, 12 nt, Human
ugaaaacacauu

SEQ ID NO: 2422891 - RNA, 13 nt, Human
ugaaaacacauuu

SEQ ID NO: 2422892 - RNA, 19 nt, Human
ucuuuuuuuuauuccacau

SEQ ID NO: 2422893 - RNA, 22 nt, Human
ucuuuuuuuuaaugugcugugu

SEQ ID NO: 2422894 - RNA, 20 nt, Human
ucuuuuuuuuaaugugcugu

SEQ ID NO: 2422895 - RNA, 19 nt, Human
ucuuuuuuuuaaugugcug

SEQ ID NO: 2422896 - RNA, 16 nt, Human
ucuuuuuuugugaugu

SEQ ID NO: 2422897 - RNA, 14 nt, Human
ucuuuuuuugugau

SEQ ID NO: 2422898 - RNA, 12 nt, Human
ugaaaacaagug

SEQ ID NO: 2422899 - RNA, 20 nt, Human
ugaaaaauuuaagcauuguu

SEQ ID NO: 2422900 - RNA, 22 nt, Human
ugaaaaaaaaaaugcugaacau

SEQ ID NO: 2422901 - RNA, 20 nt, Human
ugaaaaaaaaaaugcugaac

SEQ ID NO: 2422902 - RNA, 21 nt, Human
ugaaaaaaaaaaugcugaaca

SEQ ID NO: 2422903 - RNA, 18 nt, Human
ugaaaaaaaaaaugcuga

SEQ ID NO: 2422904 - RNA, 23 nt, Human
ucuuuuuuuuuuuuuaaagacag

SEQ ID NO: 2422905 - RNA, 21 nt, Human
ugaaaauauuuguaucacaaa

SEQ ID NO: 2422906 - RNA, 22 nt, Human
ugaaaauauuuguaucacaaau

SEQ ID NO: 2422907 - RNA, 23 nt, Human
ugaaaauauuuuuuauauauaca

SEQ ID NO: 2422908 - RNA, 21 nt, Human
ugaaaauauuuuuuauauaua

SEQ ID NO: 2422909 - RNA, 18 nt, Human
ugaaaauagguauacagu

SEQ ID NO: 2422910 - RNA, 18 nt, Human
ugaaaauacuuaggaagg

SEQ ID NO: 2422911 - RNA, 13 nt, Human
ugaaaauaauugu

SEQ ID NO: 2422912 - RNA, 23 nt, Human
ugaaaauacaacuuaaauaauaa

SEQ ID NO: 2422913 - RNA, 18 nt, Human
ugaaaauguaagcuguuu

SEQ ID NO: 2422914 - RNA, 21 nt, Human
ugaaaaugguauuuucccccu

SEQ ID NO: 2422915 - RNA, 16 nt, Human
ugaaaaugguauuuuc

SEQ ID NO: 2422916 - RNA, 15 nt, Human
ugaaaaugguauuuu

SEQ ID NO: 2422917 - RNA, 21 nt, Human
ugaaaauggguuggugcuucu

SEQ ID NO: 2422918 - RNA, 17 nt, Human
ugaaaaugugcuauacu

SEQ ID NO: 2422919 - RNA, 19 nt, Human
ugaaaaugugcuauacugc

SEQ ID NO: 2422920 - RNA, 16 nt, Human
ugaaaaugucuugugu

SEQ ID NO: 2422921 - RNA, 19 nt, Human
ugaaaauguaagcuguuua

SEQ ID NO: 2422922 - RNA, 12 nt, Human
ugaaaaucaaau

SEQ ID NO: 2422923 - RNA, 18 nt, Human
ugaaaaugcaacaacaug

SEQ ID NO: 2422924 - RNA, 21 nt, Human
ugaaaaugcaacaacauguau

SEQ ID NO: 2422925 - RNA, 20 nt, Human
ugaaaaugcaacaacaugua

SEQ ID NO: 2422926 - RNA, 23 nt, Human
ugaaaaugcaacaacauguauaa

SEQ ID NO: 2422927 - RNA, 17 nt, Human
ugaaacuggauuaaacu

SEQ ID NO: 2422928 - RNA, 18 nt, Human
ugaaacuggauuaaacuu

SEQ ID NO: 2422929 - RNA, 13 nt, Human
ugaaagaaaauaa

SEQ ID NO: 2422930 - RNA, 20 nt, Human
ugaaaaugugcuauacugca

SEQ ID NO: 2422931 - RNA, 21 nt, Human
ugaaaaugugcuauacugcau

SEQ ID NO: 2422932 - RNA, 22 nt, Human
ugaaaaugugcuauacugcaua

SEQ ID NO: 2422933 - RNA, 13 nt, Human
ugaaaaugugaau

SEQ ID NO: 2422934 - RNA, 16 nt, Human
ugaaaauuaacacugc

SEQ ID NO: 2422935 - RNA, 15 nt, Human
ugaaaauuaacacug

SEQ ID NO: 2422936 - RNA, 13 nt, Human
ugaaaauguuuuu

SEQ ID NO: 2422937 - RNA, 14 nt, Human
ugaaaauuaacacu

SEQ ID NO: 2422938 - RNA, 14 nt, Human
ugaaaauuaacaug

SEQ ID NO: 2422939 - RNA, 18 nt, Human
ugaaacugcuuguuuccu

SEQ ID NO: 2422940 - RNA, 19 nt, Human
ugaaacugcuuguuuccua

SEQ ID NO: 2422941 - RNA, 18 nt, Human
ugaaaauuaacacugcuu

SEQ ID NO: 2422942 - RNA, 19 nt, Human
agagacacaagccuucggc

SEQ ID NO: 2422943 - RNA, 16 nt, Human
agagacacaagccuuc

SEQ ID NO: 2422944 - RNA, 15 nt, Human
agagacacaagccuu

SEQ ID NO: 2422945 - RNA, 16 nt, Human
agacuguaaugaaucu

SEQ ID NO: 2422946 - RNA, 18 nt, Human
agacuuuuaaucagacaa

SEQ ID NO: 2422947 - RNA, 19 nt, Human
agacuuuggaaagaguagg

SEQ ID NO: 2422948 - RNA, 12 nt, Human
agacuuuuauga

SEQ ID NO: 2422949 - RNA, 15 nt, Human
agacuuuuccaaccc

SEQ ID NO: 2422950 - RNA, 15 nt, Human
agacuuuuaugauac

SEQ ID NO: 2422951 - RNA, 20 nt, Human
agacugggcugagggagccu

SEQ ID NO: 2422952 - RNA, 15 nt, Human
agacugggcugaggg

SEQ ID NO: 2422953 - RNA, 16 nt, Human
agacugggcugaggga

SEQ ID NO: 2422954 - RNA, 12 nt, Human
agacugggcuga

SEQ ID NO: 2422955 - RNA, 14 nt, Human
agacugggcugagg

SEQ ID NO: 2422956 - RNA, 20 nt, Human
agacugguuccauggccucu

SEQ ID NO: 2422957 - RNA, 15 nt, Human
agacuuuggaaagag

SEQ ID NO: 2422958 - RNA, 17 nt, Human
agacuuuggaaagacuu

SEQ ID NO: 2422959 - RNA, 15 nt, Human
agacuuuggaaagac

SEQ ID NO: 2422960 - RNA, 22 nt, Human
agacugguuuauccacccacaa

SEQ ID NO: 2422961 - RNA, 18 nt, Human
agacuggggggcuugaaa

SEQ ID NO: 2422962 - RNA, 18 nt, Human
agacuggugagcagacug

SEQ ID NO: 2422963 - RNA, 14 nt, Human
agacuguaaugaau

SEQ ID NO: 2422964 - RNA, 23 nt, Human
agacuggugagcagacugguggg

SEQ ID NO: 2422965 - RNA, 20 nt, Human
ucuuuguacagacaacaaac

SEQ ID NO: 2422966 - RNA, 15 nt, Human
ucuuuguacagacaa

SEQ ID NO: 2422967 - RNA, 14 nt, Human
ucuuuguacagaca

SEQ ID NO: 2422968 - RNA, 16 nt, Human
ucuuuguaaugaaaac

SEQ ID NO: 2422969 - RNA, 21 nt, Human
agagacaccugcaccuccccc

SEQ ID NO: 2422970 - RNA, 22 nt, Human
agagacaccugcaccucccccc

SEQ ID NO: 2422971 - RNA, 14 nt, Human
agagacagaaagca

SEQ ID NO: 2422972 - RNA, 15 nt, Human
agagacagaaagcag

SEQ ID NO: 2422973 - RNA, 16 nt, Human
agagacacacugaaga

SEQ ID NO: 2422974 - RNA, 13 nt, Human
agagacaccugca

SEQ ID NO: 2422975 - RNA, 14 nt, Human
agagacaccugcac

SEQ ID NO: 2422976 - RNA, 15 nt, Human
agagacaccugcacc

SEQ ID NO: 2422977 - RNA, 16 nt, Human
agagacaccugcaccu

SEQ ID NO: 2422978 - RNA, 18 nt, Human
agagacaccugcaccucc

SEQ ID NO: 2422979 - RNA, 19 nt, Human
agagacaccugcaccuccc

SEQ ID NO: 2422980 - RNA, 20 nt, Human
agagacaccugcaccucccc

SEQ ID NO: 2422981 - RNA, 13 nt, Human
ucuuugucuaaaa

SEQ ID NO: 2422982 - RNA, 23 nt, Human
ucuuuguaaugucaccaccuucc

SEQ ID NO: 2422983 - RNA, 15 nt, Human
ucuuugucuaaaaca

SEQ ID NO: 2422984 - RNA, 19 nt, Human
ucuuugucuaaaacaauaa

SEQ ID NO: 2422985 - RNA, 20 nt, Human
ucuuugucuaaaacaauaaa

SEQ ID NO: 2422986 - RNA, 14 nt, Human
ucuuuguggcuucc

SEQ ID NO: 2422987 - RNA, 13 nt, Human
ucuuuguggccaa

SEQ ID NO: 2422988 - RNA, 14 nt, Human
ucuuuguggccaag

SEQ ID NO: 2422989 - RNA, 22 nt, Human
ucuuuguggccaaggagcugcu

SEQ ID NO: 2422990 - RNA, 23 nt, Human
ucuuuguggccaaggagcugcua

SEQ ID NO: 2422991 - RNA, 16 nt, Human
ucuuugugcuuuggcu

SEQ ID NO: 2422992 - RNA, 22 nt, Human
ucuuuuuucuaaaguaaaaaca

SEQ ID NO: 2422993 - RNA, 21 nt, Human
ucuuuuuucuaaaguaaaaac

SEQ ID NO: 2422994 - RNA, 23 nt, Human
ucuuuuuucauggacacuuugaa

SEQ ID NO: 2422995 - RNA, 14 nt, Human
ucuuuuuucacaaa

SEQ ID NO: 2422996 - RNA, 12 nt, Human
ucuuuccuccuu

SEQ ID NO: 2422997 - RNA, 23 nt, Human
ucuuuccuaaggcugcaagguuu

SEQ ID NO: 2422998 - RNA, 19 nt, Human
ucuuuccuagauggcaguc

SEQ ID NO: 2422999 - RNA, 17 nt, Human
ucuuuccuaaggcugca

SEQ ID NO: 2423000 - RNA, 11 nt, Human
ucuuuccucuu

SEQ ID NO: 2423001 - RNA, 15 nt, Human
ucuuuccuccuucca

SEQ ID NO: 2423002 - RNA, 22 nt, Human
ucuuuccuagauggcagucacu

SEQ ID NO: 2423003 - RNA, 14 nt, Human
ucuuuccuccuucc

SEQ ID NO: 2423004 - RNA, 12 nt, Human
ucuuuccugagg

SEQ ID NO: 2423005 - RNA, 22 nt, Human
ucuuucuaguucagcugcccca

SEQ ID NO: 2423006 - RNA, 22 nt, Human
ucuuucuaguggucuuuguaag

SEQ ID NO: 2423007 - RNA, 21 nt, Human
ucuuucuaguggucuuuguaa

SEQ ID NO: 2423008 - RNA, 20 nt, Human
ucuuucuaguggucuuugua

SEQ ID NO: 2423009 - RNA, 17 nt, Human
ucuuucuaguggucuuu

SEQ ID NO: 2423010 - RNA, 16 nt, Human
ucuuucuaguggucuu

SEQ ID NO: 2423011 - RNA, 15 nt, Human
ucuuucuaguggucu

SEQ ID NO: 2423012 - RNA, 19 nt, Human
ucuuucuacucugaacuaa

SEQ ID NO: 2423013 - RNA, 16 nt, Human
ucuuucuacucugaac

SEQ ID NO: 2423014 - RNA, 14 nt, Human
ucuuucuacaguau

SEQ ID NO: 2423015 - RNA, 23 nt, Human
ucuuuccucuuccccuugcccuu

SEQ ID NO: 2423016 - RNA, 22 nt, Human
ucuuuccucuuccccuugcccu

SEQ ID NO: 2423017 - RNA, 20 nt, Human
ucuuuccucuuccccuugcc

SEQ ID NO: 2423018 - RNA, 19 nt, Human
ucuuucuaaugugugaauc

SEQ ID NO: 2423019 - RNA, 22 nt, Human
agacuccaaagaaauguaaggg

SEQ ID NO: 2423020 - RNA, 12 nt, Human
agacuccaccaa

SEQ ID NO: 2423021 - RNA, 16 nt, Human
agacuccaccaagccu

SEQ ID NO: 2423022 - RNA, 15 nt, Human
ucuuucuauuccaaa

SEQ ID NO: 2423023 - RNA, 19 nt, Human
ucuuucuaguucagcugcc

SEQ ID NO: 2423024 - RNA, 18 nt, Human
ucuuucuccuuagucuuc

SEQ ID NO: 2423025 - RNA, 21 nt, Human
ucuuucuccuuagucuucuca

SEQ ID NO: 2423026 - RNA, 16 nt, Human
ucuuucucuacuuuga

SEQ ID NO: 2423027 - RNA, 15 nt, Human
ucuuucucuccuuuc

SEQ ID NO: 2423028 - RNA, 24 nt, Human
ucuuucuccuuagucuucucauag

SEQ ID NO: 2423029 - RNA, 15 nt, Human
ucuuuaaugucacag

SEQ ID NO: 2423030 - RNA, 19 nt, Human
agacaggagggcaagggcc

SEQ ID NO: 2423031 - RNA, 14 nt, Human
agacaggagggcaa

SEQ ID NO: 2423032 - RNA, 22 nt, Human
agacaggcaagcaccuccugcc

SEQ ID NO: 2423033 - RNA, 18 nt, Human
agacaggaccugacuauu

SEQ ID NO: 2423034 - RNA, 16 nt, Human
agacaggaccuaggau

SEQ ID NO: 2423035 - RNA, 14 nt, Human
agacaggagaaaug

SEQ ID NO: 2423036 - RNA, 20 nt, Human
agacaggcaagcaccuccug

SEQ ID NO: 2423037 - RNA, 19 nt, Human
ucuuuaaugucacaggcag

SEQ ID NO: 2423038 - RNA, 18 nt, Human
ucuuuaaugucacaggca

SEQ ID NO: 2423039 - RNA, 13 nt, Human
ucuuuaaugcuuu

SEQ ID NO: 2423040 - RNA, 16 nt, Human
ucuuuaaugcuuuuau

SEQ ID NO: 2423041 - RNA, 11 nt, Human
ucuuuaaugcu

SEQ ID NO: 2423042 - RNA, 23 nt, Human
agacaggagggcaagggccaugc

SEQ ID NO: 2423043 - RNA, 20 nt, Human
ucuuucccugcuuaaugaaa

SEQ ID NO: 2423044 - RNA, 18 nt, Human
agacuggcuuuuauuaau

SEQ ID NO: 2423045 - RNA, 11 nt, Human
agacuggcuuu

SEQ ID NO: 2423046 - RNA, 14 nt, Human
agacuggcuggcug

SEQ ID NO: 2423047 - RNA, 20 nt, Human
agacuggcuggcugcaguga

SEQ ID NO: 2423048 - RNA, 23 nt, Human
agacuggcuuuuauuaaugcacu

SEQ ID NO: 2423049 - RNA, 22 nt, Human
agacuggcuuuuauuaaugcac

SEQ ID NO: 2423050 - RNA, 21 nt, Human
agacugggaagauaggcucug

SEQ ID NO: 2423051 - RNA, 22 nt, Human
agacugggaagauaggcucugc

SEQ ID NO: 2423052 - RNA, 23 nt, Human
agacugggaagauaggcucugca

SEQ ID NO: 2423053 - RNA, 23 nt, Human
agacuggcacaguuuucugagaa

SEQ ID NO: 2423054 - RNA, 20 nt, Human
agacuggcacaguuuucuga

SEQ ID NO: 2423055 - RNA, 21 nt, Human
agacuggcacaguuuucugag

SEQ ID NO: 2423056 - RNA, 14 nt, Human
agacucucuuagga

SEQ ID NO: 2423057 - RNA, 16 nt, Human
agacucugaaaucuca

SEQ ID NO: 2423058 - RNA, 14 nt, Human
agacucuggucuuc

SEQ ID NO: 2423059 - RNA, 20 nt, Human
agacucugaaaucucagaau

SEQ ID NO: 2423060 - RNA, 19 nt, Human
agacucuggucuucuuugg

SEQ ID NO: 2423061 - RNA, 12 nt, Human
ucuuucucuccu

SEQ ID NO: 2423062 - RNA, 21 nt, Human
agacuccagcuggguuggaaa

SEQ ID NO: 2423063 - RNA, 16 nt, Human
agacucccaagcugga

SEQ ID NO: 2423064 - RNA, 17 nt, Human
agacucccauuccugaa

SEQ ID NO: 2423065 - RNA, 19 nt, Human
agacucccauuccugaaga

SEQ ID NO: 2423066 - RNA, 23 nt, Human
agacucccauuccugaagaacca

SEQ ID NO: 2423067 - RNA, 11 nt, Human
agacuccuagg

SEQ ID NO: 2423068 - RNA, 18 nt, Human
agacuccgucucaaggaa

SEQ ID NO: 2423069 - RNA, 22 nt, Human
agacuccuaggcaggacaugcu

SEQ ID NO: 2423070 - RNA, 14 nt, Human
agacuccuaggcag

SEQ ID NO: 2423071 - RNA, 14 nt, Human
agacuccuccucca

SEQ ID NO: 2423072 - RNA, 21 nt, Human
agacucuaccagacuguguau

SEQ ID NO: 2423073 - RNA, 13 nt, Human
agacucuaccaga

SEQ ID NO: 2423074 - RNA, 19 nt, Human
agacucuacccauauuaca

SEQ ID NO: 2423075 - RNA, 21 nt, Human
agacucuaggacauaaauuag

SEQ ID NO: 2423076 - RNA, 13 nt, Human
agacuccugcagg

SEQ ID NO: 2423077 - RNA, 22 nt, Human
agacuccugaggacagcugucc

SEQ ID NO: 2423078 - RNA, 20 nt, Human
agacuccugaggacagcugu

SEQ ID NO: 2423079 - RNA, 15 nt, Human
agacuccugaggaca

SEQ ID NO: 2423080 - RNA, 23 nt, Human
agacuccuccuccaaaggccccc

SEQ ID NO: 2423081 - RNA, 20 nt, Human
agaguaauccaagcaaaugu

SEQ ID NO: 2423082 - RNA, 21 nt, Human
ugaagauucuuucccaauuca

SEQ ID NO: 2423083 - RNA, 18 nt, Human
agaguaauccaagcaaau

SEQ ID NO: 2423084 - RNA, 12 nt, Human
agagguuuuucu

SEQ ID NO: 2423085 - RNA, 22 nt, Human
agagguuuuucuuaaauaauaa

SEQ ID NO: 2423086 - RNA, 18 nt, Human
agaguaaaggaaaugauu

SEQ ID NO: 2423087 - RNA, 15 nt, Human
agaguaaaaacugaa

SEQ ID NO: 2423088 - RNA, 16 nt, Human
agagguucaaagauau

SEQ ID NO: 2423089 - RNA, 19 nt, Human
agagguucaaagauauuuu

SEQ ID NO: 2423090 - RNA, 20 nt, Human
agagguucaaagauauuuug

SEQ ID NO: 2423091 - RNA, 23 nt, Human
agagggauaagguaccuuucaca

SEQ ID NO: 2423092 - RNA, 14 nt, Human
agagggagguguuu

SEQ ID NO: 2423093 - RNA, 22 nt, Human
agagggaggucacuggaaaggg

SEQ ID NO: 2423094 - RNA, 20 nt, Human
agagggaggucacuggaaag

SEQ ID NO: 2423095 - RNA, 19 nt, Human
agagguuuuguuguuuuau

SEQ ID NO: 2423096 - RNA, 16 nt, Human
agagguuuuguuguuu

SEQ ID NO: 2423097 - RNA, 22 nt, Human
agagggaugaggugcugggagg

SEQ ID NO: 2423098 - RNA, 23 nt, Human
agagggaugaggugcugggaggg

SEQ ID NO: 2423099 - RNA, 15 nt, Human
agagggagugacaga

SEQ ID NO: 2423100 - RNA, 15 nt, Human
agagggagguaagga

SEQ ID NO: 2423101 - RNA, 16 nt, Human
agaggcuggaggcagg

SEQ ID NO: 2423102 - RNA, 13 nt, Human
agagguucaaaga

SEQ ID NO: 2423103 - RNA, 20 nt, Human
agagggagugacagaggcag

SEQ ID NO: 2423104 - RNA, 16 nt, Human
agaggcugaggcuggc

SEQ ID NO: 2423105 - RNA, 19 nt, Human
agaggcugaggcuggcaca

SEQ ID NO: 2423106 - RNA, 13 nt, Human
agaggcugcagaa

SEQ ID NO: 2423107 - RNA, 21 nt, Human
agaggcugaggcuggcacagg

SEQ ID NO: 2423108 - RNA, 22 nt, Human
agaggcugcagaaggccaagaa

SEQ ID NO: 2423109 - RNA, 21 nt, Human
agaggcugcagaaggccaaga

SEQ ID NO: 2423110 - RNA, 16 nt, Human
agaggcugcagccagg

SEQ ID NO: 2423111 - RNA, 22 nt, Human
agaggcugccucucccaucacu

SEQ ID NO: 2423112 - RNA, 18 nt, Human
agagcuguucacagccag

SEQ ID NO: 2423113 - RNA, 19 nt, Human
agagcuguucacagccaga

SEQ ID NO: 2423114 - RNA, 16 nt, Human
agagcuguggagaggg

SEQ ID NO: 2423115 - RNA, 17 nt, Human
agagcuguauuaagcca

SEQ ID NO: 2423116 - RNA, 19 nt, Human
agagcuguauuaagccacu

SEQ ID NO: 2423117 - RNA, 17 nt, Human
agagcuggugucugauu

SEQ ID NO: 2423118 - RNA, 16 nt, Human
agagcugguugggaag

SEQ ID NO: 2423119 - RNA, 22 nt, Human
agagcugguugggaagacaugg

SEQ ID NO: 2423120 - RNA, 11 nt, Human
agagcuggugu

SEQ ID NO: 2423121 - RNA, 15 nt, Human
agagcuggugucuga

SEQ ID NO: 2423122 - RNA, 23 nt, Human
agaggcagccccauucugccugc

SEQ ID NO: 2423123 - RNA, 21 nt, Human
agaggcagggucucacucugu

SEQ ID NO: 2423124 - RNA, 22 nt, Human
agaggcagccccauucugccug

SEQ ID NO: 2423125 - RNA, 21 nt, Human
agaggcagccccauucugccu

SEQ ID NO: 2423126 - RNA, 13 nt, Human
agaggccugcccg

SEQ ID NO: 2423127 - RNA, 22 nt, Human
agaggccugccuccagggcugg

SEQ ID NO: 2423128 - RNA, 21 nt, Human
agaggccugccuccagggcug

SEQ ID NO: 2423129 - RNA, 12 nt, Human
agaggccugccc

SEQ ID NO: 2423130 - RNA, 22 nt, Human
agaggccugaggaugagcugga

SEQ ID NO: 2423131 - RNA, 20 nt, Human
agaggccugccuccagggcu

SEQ ID NO: 2423132 - RNA, 13 nt, Human
agaggccugagga

SEQ ID NO: 2423133 - RNA, 24 nt, Human
agaggcccucuggaguggccacua

SEQ ID NO: 2423134 - RNA, 22 nt, Human
agaggcccucuggaguggccac

SEQ ID NO: 2423135 - RNA, 23 nt, Human
agaggcccucuggaguggccacu

SEQ ID NO: 2423136 - RNA, 14 nt, Human
agaggccagccugg

SEQ ID NO: 2423137 - RNA, 23 nt, Human
agaggccagccccacccaggagg

SEQ ID NO: 2423138 - RNA, 21 nt, Human
agaggcccucuggaguggcca

SEQ ID NO: 2423139 - RNA, 15 nt, Human
agaggccagccuggc

SEQ ID NO: 2423140 - RNA, 16 nt, Human
agaggccagccccacc

SEQ ID NO: 2423141 - RNA, 17 nt, Human
agaggccagccccaccc

SEQ ID NO: 2423142 - RNA, 18 nt, Human
agaggccagccccaccca

SEQ ID NO: 2423143 - RNA, 21 nt, Human
agaggccagccccacccagga

SEQ ID NO: 2423144 - RNA, 13 nt, Human
agaggccagaggc

SEQ ID NO: 2423145 - RNA, 13 nt, Human
agaggccaaugcc

SEQ ID NO: 2423146 - RNA, 16 nt, Human
ugaaguaauaugcaca

SEQ ID NO: 2423147 - RNA, 20 nt, Human
ugaaguaauaugcacacauu

SEQ ID NO: 2423148 - RNA, 21 nt, Human
ugaaguaauaugcacacauuu

SEQ ID NO: 2423149 - RNA, 22 nt, Human
ugaaguaauaugcacacauuuu

SEQ ID NO: 2423150 - RNA, 15 nt, Human
ugaaguaauaugcac

SEQ ID NO: 2423151 - RNA, 14 nt, Human
ugaaguaagcaaag

SEQ ID NO: 2423152 - RNA, 13 nt, Human
ugaaguaagcaaa

SEQ ID NO: 2423153 - RNA, 15 nt, Human
ugaagggcaggugcu

SEQ ID NO: 2423154 - RNA, 19 nt, Human
ugaagggcaggugcuucag

SEQ ID NO: 2423155 - RNA, 12 nt, Human
ugaagggccaga

SEQ ID NO: 2423156 - RNA, 14 nt, Human
ugaagggccagagc

SEQ ID NO: 2423157 - RNA, 16 nt, Human
ugaagggagagccagc

SEQ ID NO: 2423158 - RNA, 17 nt, Human
ugaagggagagccagcu

SEQ ID NO: 2423159 - RNA, 11 nt, Human
ugaagggaggu

SEQ ID NO: 2423160 - RNA, 19 nt, Human
ugaagggagagccagcucc

SEQ ID NO: 2423161 - RNA, 21 nt, Human
ugaagggagguggggaugaga

SEQ ID NO: 2423162 - RNA, 16 nt, Human
ugaagggaggugggga

SEQ ID NO: 2423163 - RNA, 24 nt, Human
ugaagggauuuuagucacacgugg

SEQ ID NO: 2423164 - RNA, 15 nt, Human
ugaagggccagagcc

SEQ ID NO: 2423165 - RNA, 16 nt, Human
ugaagggccagagcca

SEQ ID NO: 2423166 - RNA, 17 nt, Human
ugaagggccagagccag

SEQ ID NO: 2423167 - RNA, 18 nt, Human
ugaagguuucugaaaauu

SEQ ID NO: 2423168 - RNA, 16 nt, Human
ugaagguuucugaaaa

SEQ ID NO: 2423169 - RNA, 20 nt, Human
ugaagauuuaccacuugugu

SEQ ID NO: 2423170 - RNA, 17 nt, Human
ugaagauuuaccacuug

SEQ ID NO: 2423171 - RNA, 20 nt, Human
ugaagggaccuugaagggua

SEQ ID NO: 2423172 - RNA, 14 nt, Human
ugaagggagagcca

SEQ ID NO: 2423173 - RNA, 18 nt, Human
ugaagggaaaggauauuu

SEQ ID NO: 2423174 - RNA, 21 nt, Human
ugaagggaaaggauauuuucu

SEQ ID NO: 2423175 - RNA, 22 nt, Human
ugaagggaaaggauauuuucuu

SEQ ID NO: 2423176 - RNA, 14 nt, Human
ugaagcaaacacau

SEQ ID NO: 2423177 - RNA, 13 nt, Human
ugaagcaaacaca

SEQ ID NO: 2423178 - RNA, 23 nt, Human
ugaauaauguaagacaaauaugu

SEQ ID NO: 2423179 - RNA, 20 nt, Human
ugaauaaugguaccagauaa

SEQ ID NO: 2423180 - RNA, 14 nt, Human
ugaauaauuuccca

SEQ ID NO: 2423181 - RNA, 15 nt, Human
ugaauaauuucccaa

SEQ ID NO: 2423182 - RNA, 13 nt, Human
ugaauaauuucuu

SEQ ID NO: 2423183 - RNA, 22 nt, Human
ugaauaauuucccaauuaggaa

SEQ ID NO: 2423184 - RNA, 17 nt, Human
ugaauaagccauucuga

SEQ ID NO: 2423185 - RNA, 22 nt, Human
ugaauaagccauucugacucau

SEQ ID NO: 2423186 - RNA, 18 nt, Human
ugaauaaugguaccagau

SEQ ID NO: 2423187 - RNA, 13 nt, Human
ugaauaauacagu

SEQ ID NO: 2423188 - RNA, 15 nt, Human
ugaauacaaagugau

SEQ ID NO: 2423189 - RNA, 20 nt, Human
ugaauacaaacaauggaaac

SEQ ID NO: 2423190 - RNA, 17 nt, Human
ugaauacaaacaaugga

SEQ ID NO: 2423191 - RNA, 16 nt, Human
ugaauacaaacaaugg

SEQ ID NO: 2423192 - RNA, 15 nt, Human
ugaauacaaacaaug

SEQ ID NO: 2423193 - RNA, 23 nt, Human
ugaauacaaacaauggaaacuga

SEQ ID NO: 2423194 - RNA, 22 nt, Human
ugaauacaaacaauggaaacug

SEQ ID NO: 2423195 - RNA, 18 nt, Human
ugaauauuuaguguucau

SEQ ID NO: 2423196 - RNA, 21 nt, Human
ugaauauuuguuauguagaua

SEQ ID NO: 2423197 - RNA, 21 nt, Human
ugaauauuuccauauggauuu

SEQ ID NO: 2423198 - RNA, 19 nt, Human
ugaauauuuauauuucacu

SEQ ID NO: 2423199 - RNA, 19 nt, Human
ugaauacagggcaugcauu

SEQ ID NO: 2423200 - RNA, 20 nt, Human
ugaauauuuauauuucacua

SEQ ID NO: 2423201 - RNA, 13 nt, Human
ugaaucaaagaca

SEQ ID NO: 2423202 - RNA, 13 nt, Human
ugaagucacacag

SEQ ID NO: 2423203 - RNA, 20 nt, Human
ugaaguauuuugcuggaaua

SEQ ID NO: 2423204 - RNA, 15 nt, Human
ugaauaaaugucuug

SEQ ID NO: 2423205 - RNA, 19 nt, Human
ugaauaaauucuauaggaa

SEQ ID NO: 2423206 - RNA, 21 nt, Human
ugaauaaauucuauaggaaca

SEQ ID NO: 2423207 - RNA, 15 nt, Human
ugaauaaccacuuaa

SEQ ID NO: 2423208 - RNA, 12 nt, Human
ugaauaauacag

SEQ ID NO: 2423209 - RNA, 17 nt, Human
ugaaguacucauacaug

SEQ ID NO: 2423210 - RNA, 15 nt, Human
ugaaguaagcaaaga

SEQ ID NO: 2423211 - RNA, 14 nt, Human
ugaaguaaugaauu

SEQ ID NO: 2423212 - RNA, 20 nt, Human
ugaaguaaugaauuuuuaug

SEQ ID NO: 2423213 - RNA, 17 nt, Human
ugaaguauuucucacuc

SEQ ID NO: 2423214 - RNA, 16 nt, Human
ugaaguauauaauggu

SEQ ID NO: 2423215 - RNA, 22 nt, Human
ugaaguauauaaugguuucaaa

SEQ ID NO: 2423216 - RNA, 15 nt, Human
ugaaguaguuuguau

SEQ ID NO: 2423217 - RNA, 14 nt, Human
ugaaguaguuugua

SEQ ID NO: 2423218 - RNA, 15 nt, Human
ugaaguauacuguau

SEQ ID NO: 2423219 - RNA, 18 nt, Human
ugaaguacccguucacau

SEQ ID NO: 2423220 - RNA, 13 nt, Human
ugaaguacauauu

SEQ ID NO: 2423221 - RNA, 20 nt, Human
ugaaguacauauuaggaaaa

SEQ ID NO: 2423222 - RNA, 23 nt, Human
ugaaguacccguucacauuuuug

SEQ ID NO: 2423223 - RNA, 22 nt, Human
ugaagacaaugacuuacuguac

SEQ ID NO: 2423224 - RNA, 23 nt, Human
ugaagacaaugacuuacuguaca

SEQ ID NO: 2423225 - RNA, 13 nt, Human
ugaagacagagcu

SEQ ID NO: 2423226 - RNA, 16 nt, Human
agagcuggugcccgga

SEQ ID NO: 2423227 - RNA, 18 nt, Human
ugaagaacugcaggcccu

SEQ ID NO: 2423228 - RNA, 22 nt, Human
ugaagaagcuaaauccuuuacu

SEQ ID NO: 2423229 - RNA, 21 nt, Human
ugaagaaucuguuucccagca

SEQ ID NO: 2423230 - RNA, 21 nt, Human
ugaagacaaugacuuacugua

SEQ ID NO: 2423231 - RNA, 21 nt, Human
ugaacucagccaagcacagug

SEQ ID NO: 2423232 - RNA, 20 nt, Human
ugaacucagccaagcacagu

SEQ ID NO: 2423233 - RNA, 19 nt, Human
ugaacucagccaagcacag

SEQ ID NO: 2423234 - RNA, 18 nt, Human
ugaacucagccaagcaca

SEQ ID NO: 2423235 - RNA, 17 nt, Human
ugaacucagccaagcac

SEQ ID NO: 2423236 - RNA, 16 nt, Human
ugaacucagccaagca

SEQ ID NO: 2423237 - RNA, 15 nt, Human
ugaacucagccaagc

SEQ ID NO: 2423238 - RNA, 14 nt, Human
ugaacucagccaag

SEQ ID NO: 2423239 - RNA, 13 nt, Human
ugaacucagccaa

SEQ ID NO: 2423240 - RNA, 22 nt, Human
ugaacucagaucugucugauag

SEQ ID NO: 2423241 - RNA, 18 nt, Human
ugaacucagaucugucug

SEQ ID NO: 2423242 - RNA, 21 nt, Human
ugaacuacgcuugcucauuuu

SEQ ID NO: 2423243 - RNA, 20 nt, Human
ugaacuaccuugguuccccc

SEQ ID NO: 2423244 - RNA, 20 nt, Human
ugaacucacuuuccuccuga

SEQ ID NO: 2423245 - RNA, 15 nt, Human
ugaacuccugaccuc

SEQ ID NO: 2423246 - RNA, 23 nt, Human
ugaacucagccaagcacaguggu

SEQ ID NO: 2423247 - RNA, 22 nt, Human
ugaacucagccaagcacagugg

SEQ ID NO: 2423248 - RNA, 13 nt, Human
ugaagaacaguaa

SEQ ID NO: 2423249 - RNA, 11 nt, Human
ugaacuccugg

SEQ ID NO: 2423250 - RNA, 22 nt, Human
ugaagaagcaccaaucaugaau

SEQ ID NO: 2423251 - RNA, 17 nt, Human
ugaagaacugcaggccc

SEQ ID NO: 2423252 - RNA, 16 nt, Human
ugaagaacugcaggcc

SEQ ID NO: 2423253 - RNA, 15 nt, Human
ugaagaacugcaggc

SEQ ID NO: 2423254 - RNA, 14 nt, Human
ugaagaacugcagg

SEQ ID NO: 2423255 - RNA, 13 nt, Human
ugaagaacugagg

SEQ ID NO: 2423256 - RNA, 19 nt, Human
ugaagaacugaggaggaaa

SEQ ID NO: 2423257 - RNA, 19 nt, Human
ugaagaaccagucccccca

SEQ ID NO: 2423258 - RNA, 20 nt, Human
ugaagaaccaguccccccac

SEQ ID NO: 2423259 - RNA, 13 nt, Human
ugaagaacaugug

SEQ ID NO: 2423260 - RNA, 14 nt, Human
ugaagaacauguga

SEQ ID NO: 2423261 - RNA, 15 nt, Human
ugaagaacaguaacu

SEQ ID NO: 2423262 - RNA, 20 nt, Human
ugaagaacaguaacugccau

SEQ ID NO: 2423263 - RNA, 16 nt, Human
ugaacggggagaaaag

SEQ ID NO: 2423264 - RNA, 13 nt, Human
ugaacggggagaa

SEQ ID NO: 2423265 - RNA, 22 nt, Human
ugaaccgaggggcucaggaaaa

SEQ ID NO: 2423266 - RNA, 15 nt, Human
ugaacggggagaaaa

SEQ ID NO: 2423267 - RNA, 15 nt, Human
ugaacggugagcauu

SEQ ID NO: 2423268 - RNA, 17 nt, Human
ugaacuaaacuuucaca

SEQ ID NO: 2423269 - RNA, 19 nt, Human
ugaacuaaacuuucacacc

SEQ ID NO: 2423270 - RNA, 18 nt, Human
ugaacucacuuuccuccu

SEQ ID NO: 2423271 - RNA, 16 nt, Human
ugaacuaauaaaagca

SEQ ID NO: 2423272 - RNA, 22 nt, Human
ugaacccauauuuguacaccaa

SEQ ID NO: 2423273 - RNA, 18 nt, Human
ugaacccgggaggcagag

SEQ ID NO: 2423274 - RNA, 22 nt, Human
ugaacccgggacgcagggguug

SEQ ID NO: 2423275 - RNA, 14 nt, Human
ugaacccccaugau

SEQ ID NO: 2423276 - RNA, 13 nt, Human
ugaacccugugcu

SEQ ID NO: 2423277 - RNA, 13 nt, Human
ugaacccaggagg

SEQ ID NO: 2423278 - RNA, 14 nt, Human
ugaacccaggaggu

SEQ ID NO: 2423279 - RNA, 19 nt, Human
ugaacccauuuugagugac

SEQ ID NO: 2423280 - RNA, 19 nt, Human
ugaacccaggagguggagg

SEQ ID NO: 2423281 - RNA, 15 nt, Human
ugaacccugugcugg

SEQ ID NO: 2423282 - RNA, 14 nt, Human
ugaacccugugcug

SEQ ID NO: 2423283 - RNA, 13 nt, Human
ugaacccuugcuu

SEQ ID NO: 2423284 - RNA, 20 nt, Human
ugaaccgaggggcucaggaa

SEQ ID NO: 2423285 - RNA, 19 nt, Human
ugaacccugugcugguguc

SEQ ID NO: 2423286 - RNA, 15 nt, Human
ugaacccuugcuugc

SEQ ID NO: 2423287 - RNA, 16 nt, Human
ugaaccacuucccuca

SEQ ID NO: 2423288 - RNA, 15 nt, Human
ugaaccacuucccuc

SEQ ID NO: 2423289 - RNA, 14 nt, Human
ugaaccacuucccu

SEQ ID NO: 2423290 - RNA, 21 nt, Human
ugaacaaauugaacucuuuga

SEQ ID NO: 2423291 - RNA, 23 nt, Human
ugaaccacuucccucaucucucc

SEQ ID NO: 2423292 - RNA, 17 nt, Human
ugaaccauuaaagucga

SEQ ID NO: 2423293 - RNA, 21 nt, Human
ugaaccaucauuauaaacgug

SEQ ID NO: 2423294 - RNA, 20 nt, Human
ugaacccaggacgcuucuga

SEQ ID NO: 2423295 - RNA, 21 nt, Human
ugaacccaggacgcuucugaa

SEQ ID NO: 2423296 - RNA, 22 nt, Human
ugaacccaggacgcuucugaau

SEQ ID NO: 2423297 - RNA, 12 nt, Human
ugaacccaggag

SEQ ID NO: 2423298 - RNA, 22 nt, Human
ugaaccaccacacccagcccac

SEQ ID NO: 2423299 - RNA, 13 nt, Human
ugaacaaauuuac

SEQ ID NO: 2423300 - RNA, 21 nt, Human
ugaaccaccacacccagccca

SEQ ID NO: 2423301 - RNA, 22 nt, Human
agagauuggaaugggcagcuca

SEQ ID NO: 2423302 - RNA, 20 nt, Human
agagauuggaaugggcagcu

SEQ ID NO: 2423303 - RNA, 22 nt, Human
agagauguuuuuaaaaguuuca

SEQ ID NO: 2423304 - RNA, 21 nt, Human
agagauuggaaugggcagcuc

SEQ ID NO: 2423305 - RNA, 17 nt, Human
ugaaauaaaacuggcuu

SEQ ID NO: 2423306 - RNA, 19 nt, Human
ugaaauaaaacuggcuuug

SEQ ID NO: 2423307 - RNA, 22 nt, Human
ugaaauaaaacuggcuuuggcu

SEQ ID NO: 2423308 - RNA, 20 nt, Human
agagauuaccuccugagaaa

SEQ ID NO: 2423309 - RNA, 16 nt, Human
agagauugugguuuca

SEQ ID NO: 2423310 - RNA, 21 nt, Human
agagauguuuuuaaaaguuuc

SEQ ID NO: 2423311 - RNA, 20 nt, Human
agagauguuuuuaaaaguuu

SEQ ID NO: 2423312 - RNA, 12 nt, Human
agagauguuuuu

SEQ ID NO: 2423313 - RNA, 16 nt, Human
agagauuaccuccuga

SEQ ID NO: 2423314 - RNA, 19 nt, Human
agagauuaccuccugagaa

SEQ ID NO: 2423315 - RNA, 12 nt, Human
agagauggagga

SEQ ID NO: 2423316 - RNA, 13 nt, Human
agagauggaggag

SEQ ID NO: 2423317 - RNA, 14 nt, Human
agagauggaggagg

SEQ ID NO: 2423318 - RNA, 16 nt, Human
ugaaauaacauggccu

SEQ ID NO: 2423319 - RNA, 17 nt, Human
ugaaauaacauggccuu

SEQ ID NO: 2423320 - RNA, 14 nt, Human
ugaaauaagccaga

SEQ ID NO: 2423321 - RNA, 20 nt, Human
ugaaauaaagaaauugcaau

SEQ ID NO: 2423322 - RNA, 14 nt, Human
ugaaauaacuccuu

SEQ ID NO: 2423323 - RNA, 21 nt, Human
ugaaauaaagaaauugcaaua

SEQ ID NO: 2423324 - RNA, 14 nt, Human
ugaaauacuguuug

SEQ ID NO: 2423325 - RNA, 16 nt, Human
ugaaauacuguuugag

SEQ ID NO: 2423326 - RNA, 13 nt, Human
ugaaauacuacuu

SEQ ID NO: 2423327 - RNA, 22 nt, Human
ugaaauaccagugaaccaaaga

SEQ ID NO: 2423328 - RNA, 23 nt, Human
ugaaauaccagugaaccaaagag

SEQ ID NO: 2423329 - RNA, 14 nt, Human
ugaaauaccagugu

SEQ ID NO: 2423330 - RNA, 16 nt, Human
ugaaauaccagugugg

SEQ ID NO: 2423331 - RNA, 22 nt, Human
ugaaauuuauuaguuaauauau

SEQ ID NO: 2423332 - RNA, 21 nt, Human
ugaaauuuauuaguuaauaua

SEQ ID NO: 2423333 - RNA, 20 nt, Human
ugaaauuuauuaguuaauau

SEQ ID NO: 2423334 - RNA, 23 nt, Human
ugaaauuuauacaccaauugauu

SEQ ID NO: 2423335 - RNA, 16 nt, Human
ugaaauuuauacacca

SEQ ID NO: 2423336 - RNA, 12 nt, Human
ugaaauuguaaa

SEQ ID NO: 2423337 - RNA, 12 nt, Human
ugaaauuucaga

SEQ ID NO: 2423338 - RNA, 22 nt, Human
ugaaauuuaauauagcuauuuu

SEQ ID NO: 2423339 - RNA, 23 nt, Human
ugaaauagacccacaagaggcag

SEQ ID NO: 2423340 - RNA, 13 nt, Human
ugaaauagucugu

SEQ ID NO: 2423341 - RNA, 16 nt, Human
ugaaauagucugugug

SEQ ID NO: 2423342 - RNA, 17 nt, Human
ugaaauagucuguguga

SEQ ID NO: 2423343 - RNA, 18 nt, Human
ugaaauagucugugugaa

SEQ ID NO: 2423344 - RNA, 20 nt, Human
ugaaauuuuuauuaaauuau

SEQ ID NO: 2423345 - RNA, 22 nt, Human
ugaaauuucagauucccagagc

SEQ ID NO: 2423346 - RNA, 19 nt, Human
ugaaauuuuuauuaaauua

SEQ ID NO: 2423347 - RNA, 16 nt, Human
ugaacaaagcagccac

SEQ ID NO: 2423348 - RNA, 17 nt, Human
ugaacaaagcagccacg

SEQ ID NO: 2423349 - RNA, 18 nt, Human
ugaacaaauugaacucuu

SEQ ID NO: 2423350 - RNA, 14 nt, Human
ugaacaaagcagcc

SEQ ID NO: 2423351 - RNA, 15 nt, Human
ugaacaaagcagcca

SEQ ID NO: 2423352 - RNA, 18 nt, Human
ugaacaaaaaauaaaaau

SEQ ID NO: 2423353 - RNA, 20 nt, Human
agucacauuccaagccucau

SEQ ID NO: 2423354 - RNA, 13 nt, Human
agucacagccacc

SEQ ID NO: 2423355 - RNA, 14 nt, Human
agucacaucacagg

SEQ ID NO: 2423356 - RNA, 23 nt, Human
agucacauggccuaugcacauau

SEQ ID NO: 2423357 - RNA, 16 nt, Human
agucacaucucuuccu

SEQ ID NO: 2423358 - RNA, 14 nt, Human
agucacaucucuuc

SEQ ID NO: 2423359 - RNA, 15 nt, Human
agucacaucacagga

SEQ ID NO: 2423360 - RNA, 16 nt, Human
agucacugagacagcc

SEQ ID NO: 2423361 - RNA, 15 nt, Human
agucacugagacagc

SEQ ID NO: 2423362 - RNA, 17 nt, Human
agucacugagacagccc

SEQ ID NO: 2423363 - RNA, 15 nt, Human
ugucagcauagaagu

SEQ ID NO: 2423364 - RNA, 16 nt, Human
aguauuguccaggucu

SEQ ID NO: 2423365 - RNA, 15 nt, Human
aguauuguccagguc

SEQ ID NO: 2423366 - RNA, 17 nt, Human
aguauuuaauuagugcu

SEQ ID NO: 2423367 - RNA, 16 nt, Human
aguauuuaauuagugc

SEQ ID NO: 2423368 - RNA, 15 nt, Human
aguauuuaauuagug

SEQ ID NO: 2423369 - RNA, 14 nt, Human
aguauuuaauuagu

SEQ ID NO: 2423370 - RNA, 13 nt, Human
aguauuuaauuag

SEQ ID NO: 2423371 - RNA, 11 nt, Human
aguauuuaauu

SEQ ID NO: 2423372 - RNA, 21 nt, Human
aguauuuaauucauguugccu

SEQ ID NO: 2423373 - RNA, 21 nt, Human
aguauuuaauuagugcuaagu

SEQ ID NO: 2423374 - RNA, 19 nt, Human
aguauuuaauuagugcuaa

SEQ ID NO: 2423375 - RNA, 22 nt, Human
agucacagagauaauucuagcu

SEQ ID NO: 2423376 - RNA, 20 nt, Human
aguauugcaucuguauaagu

SEQ ID NO: 2423377 - RNA, 22 nt, Human
aguauugcaucuguauaaguaa

SEQ ID NO: 2423378 - RNA, 18 nt, Human
aguauuggggucugaccc

SEQ ID NO: 2423379 - RNA, 14 nt, Human
aguauuauaccuuu

SEQ ID NO: 2423380 - RNA, 20 nt, Human
aguauuauaaauuauguuua

SEQ ID NO: 2423381 - RNA, 19 nt, Human
aguauuauaaauuauguuu

SEQ ID NO: 2423382 - RNA, 18 nt, Human
aguauuauaaauuauguu

SEQ ID NO: 2423383 - RNA, 13 nt, Human
aguauuauaaauu

SEQ ID NO: 2423384 - RNA, 15 nt, Human
aguauuauaccuuuu

SEQ ID NO: 2423385 - RNA, 17 nt, Human
aguauugcaucuguaua

SEQ ID NO: 2423386 - RNA, 20 nt, Human
aguauuauaggccaaacugg

SEQ ID NO: 2423387 - RNA, 21 nt, Human
aguauguuagugcaaauuguc

SEQ ID NO: 2423388 - RNA, 18 nt, Human
aguauguuagugcaaauu

SEQ ID NO: 2423389 - RNA, 21 nt, Human
aguauuagaauaccacaggaa

SEQ ID NO: 2423390 - RNA, 18 nt, Human
aguauguguuugugugug

SEQ ID NO: 2423391 - RNA, 16 nt, Human
aguauguuaagcucuu

SEQ ID NO: 2423392 - RNA, 19 nt, Human
aguauguguuugugugugu

SEQ ID NO: 2423393 - RNA, 19 nt, Human
aguauguuaagcucuuuau

SEQ ID NO: 2423394 - RNA, 21 nt, Human
aguagcugggacuacaggcac

SEQ ID NO: 2423395 - RNA, 19 nt, Human
aguagcugggacuacaggc

SEQ ID NO: 2423396 - RNA, 22 nt, Human
aguagcugggacuacaggcacc

SEQ ID NO: 2423397 - RNA, 17 nt, Human
aguagcuggauuacagg

SEQ ID NO: 2423398 - RNA, 15 nt, Human
ugucaaaguggugag

SEQ ID NO: 2423399 - RNA, 14 nt, Human
ugucaaagugguga

SEQ ID NO: 2423400 - RNA, 16 nt, Human
ugucaaacuguagaaa

SEQ ID NO: 2423401 - RNA, 14 nt, Human
ugucaaagaagguu

SEQ ID NO: 2423402 - RNA, 12 nt, Human
ugucaaagaagg

SEQ ID NO: 2423403 - RNA, 18 nt, Human
ugucaaacuguagaaaug

SEQ ID NO: 2423404 - RNA, 11 nt, Human
uguauuaugug

SEQ ID NO: 2423405 - RNA, 23 nt, Human
uguauuacuagaagaugaauaca

SEQ ID NO: 2423406 - RNA, 18 nt, Human
uguauuagauguucucua

SEQ ID NO: 2423407 - RNA, 16 nt, Human
uguauuagauguucuc

SEQ ID NO: 2423408 - RNA, 14 nt, Human
uguauuagauguuc

SEQ ID NO: 2423409 - RNA, 13 nt, Human
uguauuagauguu

SEQ ID NO: 2423410 - RNA, 15 nt, Human
uguauuagucacaga

SEQ ID NO: 2423411 - RNA, 19 nt, Human
uguauuagauguucucuau

SEQ ID NO: 2423412 - RNA, 21 nt, Human
uguauuaggugucauuuccau

SEQ ID NO: 2423413 - RNA, 17 nt, Human
uguauuaagagugaaaa

SEQ ID NO: 2423414 - RNA, 16 nt, Human
uguauuaagagugaaa

SEQ ID NO: 2423415 - RNA, 12 nt, Human
uguauuaagagu

SEQ ID NO: 2423416 - RNA, 18 nt, Human
uguauuaagagugaaaau

SEQ ID NO: 2423417 - RNA, 14 nt, Human
uguauuaagccacu

SEQ ID NO: 2423418 - RNA, 19 nt, Human
uguauuacuagaagaugaa

SEQ ID NO: 2423419 - RNA, 16 nt, Human
uguauuacuagaagau

SEQ ID NO: 2423420 - RNA, 21 nt, Human
uguauuaaguuguuaauaaaa

SEQ ID NO: 2423421 - RNA, 14 nt, Human
ugucaacuucuggc

SEQ ID NO: 2423422 - RNA, 15 nt, Human
ugucaacuucaacau

SEQ ID NO: 2423423 - RNA, 15 nt, Human
ugucaacugaccuaa

SEQ ID NO: 2423424 - RNA, 18 nt, Human
ugucaacuucuggcuccu

SEQ ID NO: 2423425 - RNA, 15 nt, Human
ugucaacuucuggcu

SEQ ID NO: 2423426 - RNA, 20 nt, Human
ugucaacuucuggcuccuca

SEQ ID NO: 2423427 - RNA, 14 nt, Human
aguagcugggacua

SEQ ID NO: 2423428 - RNA, 13 nt, Human
aguagcugggacu

SEQ ID NO: 2423429 - RNA, 19 nt, Human
ugucaaaguggugagaggc

SEQ ID NO: 2423430 - RNA, 16 nt, Human
ugucaaaguggugaga

SEQ ID NO: 2423431 - RNA, 17 nt, Human
ugucaaauaaacacugu

SEQ ID NO: 2423432 - RNA, 15 nt, Human
ugucaaauaaacacu

SEQ ID NO: 2423433 - RNA, 12 nt, Human
ugucaaagcagg

SEQ ID NO: 2423434 - RNA, 17 nt, Human
ugucaaagagagggcuu

SEQ ID NO: 2423435 - RNA, 18 nt, Human
ugucaaauaaacacugug

SEQ ID NO: 2423436 - RNA, 15 nt, Human
ugucaacuaugauau

SEQ ID NO: 2423437 - RNA, 22 nt, Human
uguauuaaaaaaaacaaaaaga

SEQ ID NO: 2423438 - RNA, 21 nt, Human
uguauuaaaaaaaacaaaaag

SEQ ID NO: 2423439 - RNA, 20 nt, Human
uguauuaaaaaaaacaaaaa

SEQ ID NO: 2423440 - RNA, 19 nt, Human
uguauuaaaaaaaacaaaa

SEQ ID NO: 2423441 - RNA, 17 nt, Human
uguauuaaaaaaaacaa

SEQ ID NO: 2423442 - RNA, 17 nt, Human
uguauguuuuuuuucug

SEQ ID NO: 2423443 - RNA, 12 nt, Human
uguauuaagaau

SEQ ID NO: 2423444 - RNA, 16 nt, Human
uguauuaagaaugaaa

SEQ ID NO: 2423445 - RNA, 15 nt, Human
uguaucccaugagcc

SEQ ID NO: 2423446 - RNA, 21 nt, Human
uguaugugggggucugugugu

SEQ ID NO: 2423447 - RNA, 22 nt, Human
uguaugugggggucuguguguu

SEQ ID NO: 2423448 - RNA, 14 nt, Human
uguauguguaagua

SEQ ID NO: 2423449 - RNA, 15 nt, Human
uguagagccaggguc

SEQ ID NO: 2423450 - RNA, 12 nt, Human
uguagagccagg

SEQ ID NO: 2423451 - RNA, 21 nt, Human
agguuuggaugggagugagac

SEQ ID NO: 2423452 - RNA, 17 nt, Human
agguuugagaagcacug

SEQ ID NO: 2423453 - RNA, 14 nt, Human
agguuugaguagag

SEQ ID NO: 2423454 - RNA, 23 nt, Human
agguuucuggucucuaggcuggg

SEQ ID NO: 2423455 - RNA, 22 nt, Human
agguuucuggucucuaggcugg

SEQ ID NO: 2423456 - RNA, 22 nt, Human
uguauccauccauggggcugau

SEQ ID NO: 2423457 - RNA, 20 nt, Human
agguuuguauauugucagau

SEQ ID NO: 2423458 - RNA, 13 nt, Human
agguuuguauauu

SEQ ID NO: 2423459 - RNA, 16 nt, Human
uguauccaugggggca

SEQ ID NO: 2423460 - RNA, 22 nt, Human
uguauccauuaucauguguaau

SEQ ID NO: 2423461 - RNA, 20 nt, Human
uguauccauuaucaugugua

SEQ ID NO: 2423462 - RNA, 19 nt, Human
uguauccauuaucaugugu

SEQ ID NO: 2423463 - RNA, 18 nt, Human
uguauccauuaucaugug

SEQ ID NO: 2423464 - RNA, 17 nt, Human
uguauccauuaucaugu

SEQ ID NO: 2423465 - RNA, 14 nt, Human
uguauccauuauca

SEQ ID NO: 2423466 - RNA, 13 nt, Human
uguauccauuauc

SEQ ID NO: 2423467 - RNA, 19 nt, Human
uguauccaugggggcaggg

SEQ ID NO: 2423468 - RNA, 16 nt, Human
agguuugggaccccug

SEQ ID NO: 2423469 - RNA, 21 nt, Human
agguuugggaccccugguggu

SEQ ID NO: 2423470 - RNA, 22 nt, Human
agguuugguguguggagaugca

SEQ ID NO: 2423471 - RNA, 12 nt, Human
agguuuguauau

SEQ ID NO: 2423472 - RNA, 16 nt, Human
agguuuggugugugga

SEQ ID NO: 2423473 - RNA, 22 nt, Human
ugucccuaccgagucucuucuc

SEQ ID NO: 2423474 - RNA, 21 nt, Human
ugucccuaccgagucucuucu

SEQ ID NO: 2423475 - RNA, 20 nt, Human
ugucccuaccgagucucuuc

SEQ ID NO: 2423476 - RNA, 19 nt, Human
ugucccuacaccccucccc

SEQ ID NO: 2423477 - RNA, 21 nt, Human
uguccaggcacugcugcccag

SEQ ID NO: 2423478 - RNA, 20 nt, Human
uguccaggcacugcugccca

SEQ ID NO: 2423479 - RNA, 17 nt, Human
uguccagcugagcgcca

SEQ ID NO: 2423480 - RNA, 21 nt, Human
uguccagcugagcgccaggau

SEQ ID NO: 2423481 - RNA, 19 nt, Human
uguccaggcacugcugccc

SEQ ID NO: 2423482 - RNA, 15 nt, Human
uguccagaagaauau

SEQ ID NO: 2423483 - RNA, 13 nt, Human
uguccacugugua

SEQ ID NO: 2423484 - RNA, 19 nt, Human
uguccacgacugucuccau

SEQ ID NO: 2423485 - RNA, 20 nt, Human
uguccagaagaauauucagg

SEQ ID NO: 2423486 - RNA, 16 nt, Human
uguccagaagaauauu

SEQ ID NO: 2423487 - RNA, 11 nt, Human
uguccagcucc

SEQ ID NO: 2423488 - RNA, 12 nt, Human
uguccagcucca

SEQ ID NO: 2423489 - RNA, 16 nt, Human
uguccagcuccaaccu

SEQ ID NO: 2423490 - RNA, 20 nt, Human
uguccagcuccaaccugcaa

SEQ ID NO: 2423491 - RNA, 23 nt, Human
uguccagcuccaaccugcaaaga

SEQ ID NO: 2423492 - RNA, 17 nt, Human
uguccacgacugucucc

SEQ ID NO: 2423493 - RNA, 18 nt, Human
uguccacgacugucucca

SEQ ID NO: 2423494 - RNA, 16 nt, Human
uguccacgacugucuc

SEQ ID NO: 2423495 - RNA, 15 nt, Human
uguccaccuggcccc

SEQ ID NO: 2423496 - RNA, 11 nt, Human
uguccaccugg

SEQ ID NO: 2423497 - RNA, 12 nt, Human
uguccaccuggc

SEQ ID NO: 2423498 - RNA, 13 nt, Human
uguccaccuggcc

SEQ ID NO: 2423499 - RNA, 14 nt, Human
uguccaccuggccc

SEQ ID NO: 2423500 - RNA, 21 nt, Human
ugucagccgggcccugaguaa

SEQ ID NO: 2423501 - RNA, 17 nt, Human
ugucagccgggcccuga

SEQ ID NO: 2423502 - RNA, 16 nt, Human
ugucagccgggcccug

SEQ ID NO: 2423503 - RNA, 15 nt, Human
ugucagccgggcccu

SEQ ID NO: 2423504 - RNA, 23 nt, Human
ugucagccgagccgggccugggg

SEQ ID NO: 2423505 - RNA, 22 nt, Human
ugucagccgagccgggccuggg

SEQ ID NO: 2423506 - RNA, 21 nt, Human
ugucagccgagccgggccugg

SEQ ID NO: 2423507 - RNA, 20 nt, Human
ugucagccgagccgggccug

SEQ ID NO: 2423508 - RNA, 23 nt, Human
ugucagcgcagguuuaguuuacu

SEQ ID NO: 2423509 - RNA, 22 nt, Human
ugucagccgggcccugaguaau

SEQ ID NO: 2423510 - RNA, 18 nt, Human
ugucagcuacuaaugaug

SEQ ID NO: 2423511 - RNA, 19 nt, Human
ugucagcuacuaaugaugu

SEQ ID NO: 2423512 - RNA, 21 nt, Human
ugucagcuacuaaugauguuu

SEQ ID NO: 2423513 - RNA, 16 nt, Human
ugucagccauuccugu

SEQ ID NO: 2423514 - RNA, 20 nt, Human
ugucagcuccccucggagaa

SEQ ID NO: 2423515 - RNA, 21 nt, Human
ugucagcuccccucggagaag

SEQ ID NO: 2423516 - RNA, 23 nt, Human
ugucagcuccccucggagaagag

SEQ ID NO: 2423517 - RNA, 20 nt, Human
uguccacagaugccuccacc

SEQ ID NO: 2423518 - RNA, 21 nt, Human
uguccacccaccuaugugcca

SEQ ID NO: 2423519 - RNA, 23 nt, Human
ugucagcuacugcggaaaaggaa

SEQ ID NO: 2423520 - RNA, 14 nt, Human
uguccacagaugcc

SEQ ID NO: 2423521 - RNA, 18 nt, Human
uguccacagaugccucca

SEQ ID NO: 2423522 - RNA, 19 nt, Human
uguccacagaugccuccac

SEQ ID NO: 2423523 - RNA, 24 nt, Human
uguccuguaguugcguggacucug

SEQ ID NO: 2423524 - RNA, 16 nt, Human
uguccuguacauugug

SEQ ID NO: 2423525 - RNA, 20 nt, Human
uguccuguagagguuuuguu

SEQ ID NO: 2423526 - RNA, 22 nt, Human
uguccuucccugcauuucugag

SEQ ID NO: 2423527 - RNA, 16 nt, Human
uguccuucccugcauu

SEQ ID NO: 2423528 - RNA, 14 nt, Human
uguccuucccugca

SEQ ID NO: 2423529 - RNA, 11 nt, Human
uguccuuagca

SEQ ID NO: 2423530 - RNA, 12 nt, Human
uguccuuagaac

SEQ ID NO: 2423531 - RNA, 18 nt, Human
uguccuuagaacauuuua

SEQ ID NO: 2423532 - RNA, 20 nt, Human
uguccuuacccaucugcacc

SEQ ID NO: 2423533 - RNA, 15 nt, Human
uguccugguucccgu

SEQ ID NO: 2423534 - RNA, 13 nt, Human
uguccugguguca

SEQ ID NO: 2423535 - RNA, 21 nt, Human
uguccuggugucacuuacugu

SEQ ID NO: 2423536 - RNA, 16 nt, Human
uguccuggugucacuu

SEQ ID NO: 2423537 - RNA, 15 nt, Human
uguccuguaaagguu

SEQ ID NO: 2423538 - RNA, 22 nt, Human
uguccuguaaagguuacaagcc

SEQ ID NO: 2423539 - RNA, 12 nt, Human
ugucccuuuucc

SEQ ID NO: 2423540 - RNA, 18 nt, Human
ugucccuuucuuggccag

SEQ ID NO: 2423541 - RNA, 16 nt, Human
ugucccuuucuuggcc

SEQ ID NO: 2423542 - RNA, 17 nt, Human
ugucccuuucuuggcca

SEQ ID NO: 2423543 - RNA, 14 nt, Human
ugucccucugcccc

SEQ ID NO: 2423544 - RNA, 15 nt, Human
ugucccucugcccca

SEQ ID NO: 2423545 - RNA, 16 nt, Human
ugucccucugccccau

SEQ ID NO: 2423546 - RNA, 18 nt, Human
ugucccuucugucccuca

SEQ ID NO: 2423547 - RNA, 18 nt, Human
uguccacacccagcucag

SEQ ID NO: 2423548 - RNA, 18 nt, Human
ugucccuucacauaguuu

SEQ ID NO: 2423549 - RNA, 14 nt, Human
ugucccugcacuug

SEQ ID NO: 2423550 - RNA, 22 nt, Human
ugucccuugccucaaugccagu

SEQ ID NO: 2423551 - RNA, 20 nt, Human
ugucccuucugucccucaca

SEQ ID NO: 2423552 - RNA, 14 nt, Human
ugucccuuggagcu

SEQ ID NO: 2423553 - RNA, 20 nt, Human
ugucccuuucugugugaaga

SEQ ID NO: 2423554 - RNA, 18 nt, Human
ugucccucccaccucugu

SEQ ID NO: 2423555 - RNA, 17 nt, Human
ugucccucccaccucug

SEQ ID NO: 2423556 - RNA, 14 nt, Human
ugucccucccccuu

SEQ ID NO: 2423557 - RNA, 12 nt, Human
ugucccuccugg

SEQ ID NO: 2423558 - RNA, 12 nt, Human
ugucccuccggg

SEQ ID NO: 2423559 - RNA, 13 nt, Human
ugucccucuaaag

SEQ ID NO: 2423560 - RNA, 20 nt, Human
ugucccucccaccucuguga

SEQ ID NO: 2423561 - RNA, 11 nt, Human
ugucccucuca

SEQ ID NO: 2423562 - RNA, 14 nt, Human
ugucccucucaggc

SEQ ID NO: 2423563 - RNA, 21 nt, Human
ugucccucucggaaggcuggc

SEQ ID NO: 2423564 - RNA, 15 nt, Human
ugucccucucaggca

SEQ ID NO: 2423565 - RNA, 16 nt, Human
ugucccucccaccucu

SEQ ID NO: 2423566 - RNA, 15 nt, Human
ugucccucccaccuc

SEQ ID NO: 2423567 - RNA, 14 nt, Human
ugucccucccaccu

SEQ ID NO: 2423568 - RNA, 13 nt, Human
ugucccucccacc

SEQ ID NO: 2423569 - RNA, 12 nt, Human
ugucccucccac

SEQ ID NO: 2423570 - RNA, 19 nt, Human
ugucccucaaaugacccaa

SEQ ID NO: 2423571 - RNA, 21 nt, Human
ugucccucacuguugaauuuu

SEQ ID NO: 2423572 - RNA, 21 nt, Human
uguccagaagaauauucagga

SEQ ID NO: 2423573 - RNA, 14 nt, Human
ugucccuaggucag

SEQ ID NO: 2423574 - RNA, 17 nt, Human
ugucccuaugcauauca

SEQ ID NO: 2423575 - RNA, 21 nt, Human
ugucccuaguaaaaauacaaa

SEQ ID NO: 2423576 - RNA, 14 nt, Human
ugucuaagauagua

SEQ ID NO: 2423577 - RNA, 15 nt, Human
ugucuaagauaguaa

SEQ ID NO: 2423578 - RNA, 19 nt, Human
ugucuaaagagcuuuaguc

SEQ ID NO: 2423579 - RNA, 13 nt, Human
ugucuaaacugca

SEQ ID NO: 2423580 - RNA, 18 nt, Human
ugucuaaauuugaauguu

SEQ ID NO: 2423581 - RNA, 13 nt, Human
uguccuuucccuc

SEQ ID NO: 2423582 - RNA, 11 nt, Human
ugucuaaacug

SEQ ID NO: 2423583 - RNA, 15 nt, Human
uguccuuguguguuu

SEQ ID NO: 2423584 - RNA, 14 nt, Human
uguccuugugcaug

SEQ ID NO: 2423585 - RNA, 13 nt, Human
uguccuugcaccu

SEQ ID NO: 2423586 - RNA, 15 nt, Human
uguccuugcaccugc

SEQ ID NO: 2423587 - RNA, 18 nt, Human
uguccuuggaaguuucau

SEQ ID NO: 2423588 - RNA, 16 nt, Human
uguccuugcaccugca

SEQ ID NO: 2423589 - RNA, 19 nt, Human
uguccuucucucaccuccu

SEQ ID NO: 2423590 - RNA, 18 nt, Human
uguccuucucucaccucc

SEQ ID NO: 2423591 - RNA, 21 nt, Human
uguccuucucucaccuccuaa

SEQ ID NO: 2423592 - RNA, 19 nt, Human
agucagggguucccuuuuu

SEQ ID NO: 2423593 - RNA, 17 nt, Human
agucaguauuguuuugg

SEQ ID NO: 2423594 - RNA, 15 nt, Human
agucaguauuguuuu

SEQ ID NO: 2423595 - RNA, 14 nt, Human
agucaguauuguuu

SEQ ID NO: 2423596 - RNA, 13 nt, Human
agucaguauuguu

SEQ ID NO: 2423597 - RNA, 14 nt, Human
agucagguccaauu

SEQ ID NO: 2423598 - RNA, 14 nt, Human
agucagaugcccag

SEQ ID NO: 2423599 - RNA, 23 nt, Human
agucagaugcccagagggcccag

SEQ ID NO: 2423600 - RNA, 21 nt, Human
agucagucaugauggcaccac

SEQ ID NO: 2423601 - RNA, 16 nt, Human
agucagugccaggucc

SEQ ID NO: 2423602 - RNA, 23 nt, Human
agucagugcaaaugucagauaca

SEQ ID NO: 2423603 - RNA, 16 nt, Human
agucagugcaaauguc

SEQ ID NO: 2423604 - RNA, 14 nt, Human
agucaucucaacca

SEQ ID NO: 2423605 - RNA, 15 nt, Human
agucaucucaaccau

SEQ ID NO: 2423606 - RNA, 17 nt, Human
agucaucuccaucagcu

SEQ ID NO: 2423607 - RNA, 18 nt, Human
agucaucuccaucagcug

SEQ ID NO: 2423608 - RNA, 19 nt, Human
agucaucuccaucagcugu

SEQ ID NO: 2423609 - RNA, 20 nt, Human
agucaucuccaucagcugua

SEQ ID NO: 2423610 - RNA, 20 nt, Human
agucagugcccaacuguuau

SEQ ID NO: 2423611 - RNA, 13 nt, Human
agucauccaaucu

SEQ ID NO: 2423612 - RNA, 13 nt, Human
agucccaguggga

SEQ ID NO: 2423613 - RNA, 18 nt, Human
agucccacugccucaggu

SEQ ID NO: 2423614 - RNA, 12 nt, Human
aguccccacccc

SEQ ID NO: 2423615 - RNA, 11 nt, Human
aguccccaccc

SEQ ID NO: 2423616 - RNA, 15 nt, Human
agucccagugggagg

SEQ ID NO: 2423617 - RNA, 20 nt, Human
agucccaggcugagccucag

SEQ ID NO: 2423618 - RNA, 17 nt, Human
agucccacugccucagg

SEQ ID NO: 2423619 - RNA, 12 nt, Human
agucccacugcc

SEQ ID NO: 2423620 - RNA, 23 nt, Human
aguccauauuucaauuuccaaga

SEQ ID NO: 2423621 - RNA, 19 nt, Human
aguccccuguuuguuucug

SEQ ID NO: 2423622 - RNA, 14 nt, Human
aguccccuguuugu

SEQ ID NO: 2423623 - RNA, 17 nt, Human
aguccccaccccugccc

SEQ ID NO: 2423624 - RNA, 16 nt, Human
aguccccaccccugcc

SEQ ID NO: 2423625 - RNA, 15 nt, Human
aguccccaccccugc

SEQ ID NO: 2423626 - RNA, 13 nt, Human
aguccccaccccu

SEQ ID NO: 2423627 - RNA, 20 nt, Human
aguccccaccccugccccca

SEQ ID NO: 2423628 - RNA, 18 nt, Human
aguccccaccccugcccc

SEQ ID NO: 2423629 - RNA, 19 nt, Human
aguccccaggccccaggaa

SEQ ID NO: 2423630 - RNA, 16 nt, Human
aguccccaggccccag

SEQ ID NO: 2423631 - RNA, 17 nt, Human
aguccccaggccccagg

SEQ ID NO: 2423632 - RNA, 13 nt, Human
aguccccaggccc

SEQ ID NO: 2423633 - RNA, 20 nt, Human
agucccaccuuggcugcagg

SEQ ID NO: 2423634 - RNA, 23 nt, Human
agucccaccuuggcugcagggag

SEQ ID NO: 2423635 - RNA, 21 nt, Human
agucccaccuuggcugcaggg

SEQ ID NO: 2423636 - RNA, 20 nt, Human
agucaucuugaccaagcagg

SEQ ID NO: 2423637 - RNA, 13 nt, Human
agucaugaagccc

SEQ ID NO: 2423638 - RNA, 14 nt, Human
agucaugaagccca

SEQ ID NO: 2423639 - RNA, 21 nt, Human
agucaugaagcccaagugaaa

SEQ ID NO: 2423640 - RNA, 21 nt, Human
agucaucuugaccaagcagga

SEQ ID NO: 2423641 - RNA, 15 nt, Human
aguccagucucuucu

SEQ ID NO: 2423642 - RNA, 17 nt, Human
aguccagugaccugcug

SEQ ID NO: 2423643 - RNA, 21 nt, Human
aguccauauuucaauuuccaa

SEQ ID NO: 2423644 - RNA, 21 nt, Human
ugucuucccaggguagcccgc

SEQ ID NO: 2423645 - RNA, 16 nt, Human
ugucuucccaggguag

SEQ ID NO: 2423646 - RNA, 14 nt, Human
ugucuucccagggu

SEQ ID NO: 2423647 - RNA, 13 nt, Human
ugucuucccaggg

SEQ ID NO: 2423648 - RNA, 22 nt, Human
ugucuucccaggguagcccgcc

SEQ ID NO: 2423649 - RNA, 16 nt, Human
ugucuuccucccaagu

SEQ ID NO: 2423650 - RNA, 13 nt, Human
ugucuuccugcau

SEQ ID NO: 2423651 - RNA, 17 nt, Human
ugucuuccugcauucac

SEQ ID NO: 2423652 - RNA, 13 nt, Human
ugucuuccugugg

SEQ ID NO: 2423653 - RNA, 18 nt, Human
ugucuuccugcauucacc

SEQ ID NO: 2423654 - RNA, 17 nt, Human
ugucuucguacaguucu

SEQ ID NO: 2423655 - RNA, 16 nt, Human
ugucuucguacaguuc

SEQ ID NO: 2423656 - RNA, 21 nt, Human
ugucuucggaaaccuuggugu

SEQ ID NO: 2423657 - RNA, 20 nt, Human
ugucuucggaaaccuuggug

SEQ ID NO: 2423658 - RNA, 19 nt, Human
ugucuucggaaaccuuggu

SEQ ID NO: 2423659 - RNA, 16 nt, Human
ugucuucggaaaccuu

SEQ ID NO: 2423660 - RNA, 14 nt, Human
ugucuuccuuggag

SEQ ID NO: 2423661 - RNA, 14 nt, Human
ugucuuccuguggg

SEQ ID NO: 2423662 - RNA, 18 nt, Human
ugucuucguacaguucuu

SEQ ID NO: 2423663 - RNA, 16 nt, Human
ugucuucucaggcucu

SEQ ID NO: 2423664 - RNA, 21 nt, Human
ugucuucucaggcucugcccu

SEQ ID NO: 2423665 - RNA, 22 nt, Human
ugucuucucaggcucugcccug

SEQ ID NO: 2423666 - RNA, 14 nt, Human
ugucuucacaacag

SEQ ID NO: 2423667 - RNA, 22 nt, Human
ugucuucauaccuacauguauu

SEQ ID NO: 2423668 - RNA, 24 nt, Human
ugucuucaccugauucaacuaaaa

SEQ ID NO: 2423669 - RNA, 19 nt, Human
ugucuucacagcucugugu

SEQ ID NO: 2423670 - RNA, 19 nt, Human
ugucuucauuucauuguau

SEQ ID NO: 2423671 - RNA, 17 nt, Human
ugucuucauuucauugu

SEQ ID NO: 2423672 - RNA, 16 nt, Human
ugucuucauuucauug

SEQ ID NO: 2423673 - RNA, 13 nt, Human
ugucuucaccuga

SEQ ID NO: 2423674 - RNA, 15 nt, Human
ugucuucauagcaga

SEQ ID NO: 2423675 - RNA, 23 nt, Human
ugucuucauuucauuguaugaug

SEQ ID NO: 2423676 - RNA, 21 nt, Human
ugucuucauuucauuguauga

SEQ ID NO: 2423677 - RNA, 12 nt, Human
ugucuuccauaa

SEQ ID NO: 2423678 - RNA, 13 nt, Human
ugucuuccauaau

SEQ ID NO: 2423679 - RNA, 14 nt, Human
ugucuuccauaaug

SEQ ID NO: 2423680 - RNA, 17 nt, Human
ugucuuccauaauguau

SEQ ID NO: 2423681 - RNA, 21 nt, Human
ugucuugcaauggcagccuug

SEQ ID NO: 2423682 - RNA, 20 nt, Human
ugucuugcaauggcagccuu

SEQ ID NO: 2423683 - RNA, 18 nt, Human
ugucuugcaauggcagcc

SEQ ID NO: 2423684 - RNA, 17 nt, Human
ugucuugcaauggcagc

SEQ ID NO: 2423685 - RNA, 18 nt, Human
ugucuucugccuguuaua

SEQ ID NO: 2423686 - RNA, 17 nt, Human
ugucuucugccuguuau

SEQ ID NO: 2423687 - RNA, 15 nt, Human
ugucuucugccuguu

SEQ ID NO: 2423688 - RNA, 14 nt, Human
ugucuucugccugu

SEQ ID NO: 2423689 - RNA, 13 nt, Human
ugucuucugccug

SEQ ID NO: 2423690 - RNA, 12 nt, Human
ugucuucugccu

SEQ ID NO: 2423691 - RNA, 14 nt, Human
ugucuucuccccag

SEQ ID NO: 2423692 - RNA, 23 nt, Human
ugucuucucaggcucugcccugc

SEQ ID NO: 2423693 - RNA, 20 nt, Human
ugucuugaaugucuuuugaa

SEQ ID NO: 2423694 - RNA, 17 nt, Human
ugucuugaaugucuuuu

SEQ ID NO: 2423695 - RNA, 19 nt, Human
ugucuugaaagauucaggu

SEQ ID NO: 2423696 - RNA, 16 nt, Human
ugucuucuucugugcu

SEQ ID NO: 2423697 - RNA, 22 nt, Human
ugucuugaugcaugcacuguuc

SEQ ID NO: 2423698 - RNA, 15 nt, Human
ugucuugcaauggca

SEQ ID NO: 2423699 - RNA, 23 nt, Human
ugugaaccaccacacccagccca

SEQ ID NO: 2423700 - RNA, 22 nt, Human
ugugaaccaccacacccagccc

SEQ ID NO: 2423701 - RNA, 16 nt, Human
ugugaaccaccacacc

SEQ ID NO: 2423702 - RNA, 14 nt, Human
ugugaacuaaacuu

SEQ ID NO: 2423703 - RNA, 19 nt, Human
ugugaacuaaacuuucaca

SEQ ID NO: 2423704 - RNA, 20 nt, Human
ugugaacuaaacuuucacac

SEQ ID NO: 2423705 - RNA, 20 nt, Human
ugugaacucagccaagcaca

SEQ ID NO: 2423706 - RNA, 19 nt, Human
ugugaacucagccaagcac

SEQ ID NO: 2423707 - RNA, 18 nt, Human
ugugaacucagccaagca

SEQ ID NO: 2423708 - RNA, 16 nt, Human
ugugaacucagccaag

SEQ ID NO: 2423709 - RNA, 15 nt, Human
ugugaacucagccaa

SEQ ID NO: 2423710 - RNA, 14 nt, Human
ugugaacucagcca

SEQ ID NO: 2423711 - RNA, 12 nt, Human
ugugaacauuua

SEQ ID NO: 2423712 - RNA, 14 nt, Human
ugugaacauggacu

SEQ ID NO: 2423713 - RNA, 19 nt, Human
ugucuuucagauacauggu

SEQ ID NO: 2423714 - RNA, 20 nt, Human
ugucuuucagauacaugguu

SEQ ID NO: 2423715 - RNA, 17 nt, Human
ugugaaccgaggggcuc

SEQ ID NO: 2423716 - RNA, 21 nt, Human
ugugaacgauuuagaaagaag

SEQ ID NO: 2423717 - RNA, 15 nt, Human
ugugaaccaccacac

SEQ ID NO: 2423718 - RNA, 15 nt, Human
ugucuuucagauaca

SEQ ID NO: 2423719 - RNA, 16 nt, Human
ugucuuucagauacau

SEQ ID NO: 2423720 - RNA, 14 nt, Human
ugucuuuaaggaaa

SEQ ID NO: 2423721 - RNA, 15 nt, Human
ugucuuuaaggaaaa

SEQ ID NO: 2423722 - RNA, 19 nt, Human
ugucuuuaggcagcagcuu

SEQ ID NO: 2423723 - RNA, 21 nt, Human
ugucuuuaggcagcagcuuuu

SEQ ID NO: 2423724 - RNA, 15 nt, Human
ugucuuggacacugu

SEQ ID NO: 2423725 - RNA, 13 nt, Human
ugucuuggacacu

SEQ ID NO: 2423726 - RNA, 23 nt, Human
ugucuugcuauggggagaaaaga

SEQ ID NO: 2423727 - RNA, 13 nt, Human
ugucuuguucugu

SEQ ID NO: 2423728 - RNA, 18 nt, Human
ugucuuguguuucuuuag

SEQ ID NO: 2423729 - RNA, 22 nt, Human
ugucucuggauuauauuaugaa

SEQ ID NO: 2423730 - RNA, 13 nt, Human
ugucucugagagu

SEQ ID NO: 2423731 - RNA, 12 nt, Human
ugucucucauga

SEQ ID NO: 2423732 - RNA, 19 nt, Human
ugucucuagccacuuuggu

SEQ ID NO: 2423733 - RNA, 13 nt, Human
ugucucucagaau

SEQ ID NO: 2423734 - RNA, 20 nt, Human
ugucucgugguaggacugua

SEQ ID NO: 2423735 - RNA, 19 nt, Human
ugucucgugguaggacugu

SEQ ID NO: 2423736 - RNA, 18 nt, Human
ugucucgugguaggacug

SEQ ID NO: 2423737 - RNA, 17 nt, Human
ugucucuacuaaaaaua

SEQ ID NO: 2423738 - RNA, 16 nt, Human
ugucucuagccacuuu

SEQ ID NO: 2423739 - RNA, 15 nt, Human
ugucucuagccacuu

SEQ ID NO: 2423740 - RNA, 21 nt, Human
ugucucgugguaggacuguag

SEQ ID NO: 2423741 - RNA, 16 nt, Human
agucccugccaaugga

SEQ ID NO: 2423742 - RNA, 14 nt, Human
agucccugccaaug

SEQ ID NO: 2423743 - RNA, 13 nt, Human
agucccugccaau

SEQ ID NO: 2423744 - RNA, 23 nt, Human
aguccccuguuuguuucugaaag

SEQ ID NO: 2423745 - RNA, 21 nt, Human
ugucuccuuucaccccagggc

SEQ ID NO: 2423746 - RNA, 22 nt, Human
ugucuccuuucaccccagggcc

SEQ ID NO: 2423747 - RNA, 19 nt, Human
ugucuccuuugcaggcuca

SEQ ID NO: 2423748 - RNA, 12 nt, Human
ugucuccuaucc

SEQ ID NO: 2423749 - RNA, 18 nt, Human
ugucuccuuaacacugag

SEQ ID NO: 2423750 - RNA, 17 nt, Human
ugucuccuuaacacuga

SEQ ID NO: 2423751 - RNA, 21 nt, Human
ugucucuugguccugcugcag

SEQ ID NO: 2423752 - RNA, 20 nt, Human
ugucucuugguccugcugca

SEQ ID NO: 2423753 - RNA, 19 nt, Human
ugucucuugguccugcugc

SEQ ID NO: 2423754 - RNA, 18 nt, Human
ugucucuugguccugcug

SEQ ID NO: 2423755 - RNA, 13 nt, Human
ugucucuucugag

SEQ ID NO: 2423756 - RNA, 16 nt, Human
ugucucuucugagcua

SEQ ID NO: 2423757 - RNA, 13 nt, Human
ugucucuuccaua

SEQ ID NO: 2423758 - RNA, 21 nt, Human
ugucucuuccauaugaccuca

SEQ ID NO: 2423759 - RNA, 17 nt, Human
ugucucuugaguuuguc

SEQ ID NO: 2423760 - RNA, 14 nt, Human
ugucucuugaguuu

SEQ ID NO: 2423761 - RNA, 13 nt, Human
ugucucugugaga

SEQ ID NO: 2423762 - RNA, 23 nt, Human
ugucucugggcuuggggcuuccu

SEQ ID NO: 2423763 - RNA, 16 nt, Human
ugucucugucauggua

SEQ ID NO: 2423764 - RNA, 22 nt, Human
ugucucugccucccucacccug

SEQ ID NO: 2423765 - RNA, 13 nt, Human
ugucucugccucc

SEQ ID NO: 2423766 - RNA, 13 nt, Human
ugucucuggccug

SEQ ID NO: 2423767 - RNA, 17 nt, Human
ugucucugccucccuca

SEQ ID NO: 2423768 - RNA, 18 nt, Human
ugucucuggcgugugggu

SEQ ID NO: 2423769 - RNA, 19 nt, Human
ugucucuggcgugugggua

SEQ ID NO: 2423770 - RNA, 15 nt, Human
ugucuuaauuauuau

SEQ ID NO: 2423771 - RNA, 14 nt, Human
ugucuuaauuauua

SEQ ID NO: 2423772 - RNA, 12 nt, Human
ugucugaaaaau

SEQ ID NO: 2423773 - RNA, 22 nt, Human
ugucuuauauauauuucuuugu

SEQ ID NO: 2423774 - RNA, 13 nt, Human
ugucuuauauaua

SEQ ID NO: 2423775 - RNA, 17 nt, Human
ugucuucaacagcuccc

SEQ ID NO: 2423776 - RNA, 14 nt, Human
ugucuuaauuaaaa

SEQ ID NO: 2423777 - RNA, 22 nt, Human
ugucugaaaaauuccuuugugu

SEQ ID NO: 2423778 - RNA, 22 nt, Human
ugucucuugguccugcugcagu

SEQ ID NO: 2423779 - RNA, 21 nt, Human
ugucucuuuaaugucacaggc

SEQ ID NO: 2423780 - RNA, 22 nt, Human
ugucucuuuaaugucacaggca

SEQ ID NO: 2423781 - RNA, 18 nt, Human
ugucucuuuucucuuucu

SEQ ID NO: 2423782 - RNA, 14 nt, Human
ugucucuuuucucu

SEQ ID NO: 2423783 - RNA, 13 nt, Human
ugucucuuucaug

SEQ ID NO: 2423784 - RNA, 11 nt, Human
agugaaaaagg

SEQ ID NO: 2423785 - RNA, 17 nt, Human
agugaaaaaggaggaag

SEQ ID NO: 2423786 - RNA, 20 nt, Human
agugaaaaaggaggaagaga

SEQ ID NO: 2423787 - RNA, 23 nt, Human
agugaaaaaggaggaagagaaaa

SEQ ID NO: 2423788 - RNA, 20 nt, Human
agucuuuugcuuuuggcaaa

SEQ ID NO: 2423789 - RNA, 19 nt, Human
agucuuuugcuuuuggcaa

SEQ ID NO: 2423790 - RNA, 22 nt, Human
agucuuuuguucgcauggucac

SEQ ID NO: 2423791 - RNA, 18 nt, Human
agucuuuugcuuuuggca

SEQ ID NO: 2423792 - RNA, 14 nt, Human
agucuuuugcuuuu

SEQ ID NO: 2423793 - RNA, 20 nt, Human
agucuucucauagcauuaac

SEQ ID NO: 2423794 - RNA, 21 nt, Human
agucuucucauagcauuaacu

SEQ ID NO: 2423795 - RNA, 12 nt, Human
agucuucucaua

SEQ ID NO: 2423796 - RNA, 13 nt, Human
agucuucucauag

SEQ ID NO: 2423797 - RNA, 18 nt, Human
agucuucucauagcauua

SEQ ID NO: 2423798 - RNA, 13 nt, Human
agucuuuuccaug

SEQ ID NO: 2423799 - RNA, 15 nt, Human
agucuuuuccaugaa

SEQ ID NO: 2423800 - RNA, 15 nt, Human
agucuuccugacacu

SEQ ID NO: 2423801 - RNA, 16 nt, Human
agucuuccugacacuu

SEQ ID NO: 2423802 - RNA, 12 nt, Human
agucuuccugac

SEQ ID NO: 2423803 - RNA, 19 nt, Human
agucuuccauuugcaaggg

SEQ ID NO: 2423804 - RNA, 17 nt, Human
agucuuccugacacuuu

SEQ ID NO: 2423805 - RNA, 18 nt, Human
agucuuccugacacuuua

SEQ ID NO: 2423806 - RNA, 19 nt, Human
agucuuccugacacuuuaa

SEQ ID NO: 2423807 - RNA, 15 nt, Human
agucuuccauuugca

SEQ ID NO: 2423808 - RNA, 22 nt, Human
agucuuaauauauauauccaga

SEQ ID NO: 2423809 - RNA, 16 nt, Human
agucuuccauuugcaa

SEQ ID NO: 2423810 - RNA, 17 nt, Human
agucuuccauuugcaag

SEQ ID NO: 2423811 - RNA, 13 nt, Human
agucuucccugau

SEQ ID NO: 2423812 - RNA, 13 nt, Human
agucuguuuuaug

SEQ ID NO: 2423813 - RNA, 14 nt, Human
agucuguuuuauga

SEQ ID NO: 2423814 - RNA, 17 nt, Human
agucuguuuuaugacuu

SEQ ID NO: 2423815 - RNA, 18 nt, Human
agucuguuuuaugacuuc

SEQ ID NO: 2423816 - RNA, 21 nt, Human
agucucugagggcuuccuuug

SEQ ID NO: 2423817 - RNA, 16 nt, Human
agucucugcuggccca

SEQ ID NO: 2423818 - RNA, 17 nt, Human
agucucugcuggcccag

SEQ ID NO: 2423819 - RNA, 16 nt, Human
agucuuacgaauacuu

SEQ ID NO: 2423820 - RNA, 24 nt, Human
agucuuagacuugaaauacuacuu

SEQ ID NO: 2423821 - RNA, 13 nt, Human
agucuuaagaacu

SEQ ID NO: 2423822 - RNA, 23 nt, Human
agucuuaaaauaacuuauaucau

SEQ ID NO: 2423823 - RNA, 17 nt, Human
agucuuaaaauaacuua

SEQ ID NO: 2423824 - RNA, 13 nt, Human
agucuuaaaauaa

SEQ ID NO: 2423825 - RNA, 11 nt, Human
agucucugagc

SEQ ID NO: 2423826 - RNA, 13 nt, Human
agucucugagcag

SEQ ID NO: 2423827 - RNA, 19 nt, Human
agucucugagggcuuccuu

SEQ ID NO: 2423828 - RNA, 15 nt, Human
agucucugagggcuu

SEQ ID NO: 2423829 - RNA, 16 nt, Human
agucucugagcaguga

SEQ ID NO: 2423830 - RNA, 23 nt, Human
agucucccucacagcacagagaa

SEQ ID NO: 2423831 - RNA, 18 nt, Human
agucucugaagugaaacu

SEQ ID NO: 2423832 - RNA, 19 nt, Human
agucucugaagugaaacug

SEQ ID NO: 2423833 - RNA, 14 nt, Human
agucucccucccuu

SEQ ID NO: 2423834 - RNA, 18 nt, Human
agucucccucccuugggg

SEQ ID NO: 2423835 - RNA, 14 nt, Human
ugugagcccagcug

SEQ ID NO: 2423836 - RNA, 15 nt, Human
ugugagcccagcugg

SEQ ID NO: 2423837 - RNA, 18 nt, Human
ugugagcaucacaguuuu

SEQ ID NO: 2423838 - RNA, 14 nt, Human
ugugagcagugagu

SEQ ID NO: 2423839 - RNA, 19 nt, Human
agucuccaaagucucugga

SEQ ID NO: 2423840 - RNA, 14 nt, Human
agucucccaaggcu

SEQ ID NO: 2423841 - RNA, 13 nt, Human
agucucccaaggc

SEQ ID NO: 2423842 - RNA, 22 nt, Human
agucuccagugguugcuguuga

SEQ ID NO: 2423843 - RNA, 16 nt, Human
agucuccaccaggaac

SEQ ID NO: 2423844 - RNA, 20 nt, Human
agucucccucacagcacaga

SEQ ID NO: 2423845 - RNA, 15 nt, Human
agucucccucacagc

SEQ ID NO: 2423846 - RNA, 14 nt, Human
agucuccaccagga

SEQ ID NO: 2423847 - RNA, 15 nt, Human
agucuccaccaggaa

SEQ ID NO: 2423848 - RNA, 19 nt, Human
agucuccagugguugcugu

SEQ ID NO: 2423849 - RNA, 17 nt, Human
agucucauuacuuuuga

SEQ ID NO: 2423850 - RNA, 18 nt, Human
agucucauuacuuuugaa

SEQ ID NO: 2423851 - RNA, 21 nt, Human
ugugaacucagccaagcacag

SEQ ID NO: 2423852 - RNA, 18 nt, Human
ugugaacuggacccuguu

SEQ ID NO: 2423853 - RNA, 14 nt, Human
ugugaacugaacuc

SEQ ID NO: 2423854 - RNA, 23 nt, Human
ugugaacugaacucugacaacag

SEQ ID NO: 2423855 - RNA, 14 nt, Human
ugugaagcaaaauu

SEQ ID NO: 2423856 - RNA, 22 nt, Human
ugugaagaugauauacuauuuu

SEQ ID NO: 2423857 - RNA, 15 nt, Human
ugugaacugacaggc

SEQ ID NO: 2423858 - RNA, 18 nt, Human
ugugaagagggagaagca

SEQ ID NO: 2423859 - RNA, 22 nt, Human
ugugaagaucacguuccuuccc

SEQ ID NO: 2423860 - RNA, 12 nt, Human
ugugaagcauuc

SEQ ID NO: 2423861 - RNA, 10 nt, Human
ugugaagcca

SEQ ID NO: 2423862 - RNA, 20 nt, Human
ugugaagccaauucagacag

SEQ ID NO: 2423863 - RNA, 21 nt, Human
ugugaagccaauucagacagg

SEQ ID NO: 2423864 - RNA, 22 nt, Human
ugugagaugcuagaacucccuu

SEQ ID NO: 2423865 - RNA, 19 nt, Human
ugugagcacaaagguagcu

SEQ ID NO: 2423866 - RNA, 14 nt, Human
ugugagcaagaagu

SEQ ID NO: 2423867 - RNA, 19 nt, Human
ugugagcaagcauuuaugu

SEQ ID NO: 2423868 - RNA, 14 nt, Human
ugugagauguaauu

SEQ ID NO: 2423869 - RNA, 22 nt, Human
agugaaagaggcagcuugaaac

SEQ ID NO: 2423870 - RNA, 14 nt, Human
agugagacagcucu

SEQ ID NO: 2423871 - RNA, 16 nt, Human
agugaaagaggcagcu

SEQ ID NO: 2423872 - RNA, 17 nt, Human
agugaaagaaaauaaca

SEQ ID NO: 2423873 - RNA, 20 nt, Human
agugaaacucguuaauuugu

SEQ ID NO: 2423874 - RNA, 21 nt, Human
agugaaaccuuuagggcagcu

SEQ ID NO: 2423875 - RNA, 20 nt, Human
agugaaaccuuuagggcagc

SEQ ID NO: 2423876 - RNA, 19 nt, Human
agugaaaccuuuagggcag

SEQ ID NO: 2423877 - RNA, 15 nt, Human
agugaaaauugucuu

SEQ ID NO: 2423878 - RNA, 17 nt, Human
agucuuuuguucgcaug

SEQ ID NO: 2423879 - RNA, 14 nt, Human
agugaaaaaugaga

SEQ ID NO: 2423880 - RNA, 19 nt, Human
agugaaaacaagugcuggc

SEQ ID NO: 2423881 - RNA, 12 nt, Human
agugaaaacaag

SEQ ID NO: 2423882 - RNA, 20 nt, Human
agugaaaacaagugcuggca

SEQ ID NO: 2423883 - RNA, 14 nt, Human
agugaaaauaggua

SEQ ID NO: 2423884 - RNA, 17 nt, Human
agugagacucugucuca

SEQ ID NO: 2423885 - RNA, 16 nt, Human
agugagacucugucuc

SEQ ID NO: 2423886 - RNA, 22 nt, Human
agugagacucugucucaaaaaa

SEQ ID NO: 2423887 - RNA, 21 nt, Human
agugagacccagcccucaucc

SEQ ID NO: 2423888 - RNA, 16 nt, Human
agugagacccugucuc

SEQ ID NO: 2423889 - RNA, 17 nt, Human
agugagacccugucucu

SEQ ID NO: 2423890 - RNA, 13 nt, Human
agugagacucugu

SEQ ID NO: 2423891 - RNA, 21 nt, Human
agugagacccugucucaaaaa

SEQ ID NO: 2423892 - RNA, 17 nt, Human
agugagacccugucuca

SEQ ID NO: 2423893 - RNA, 21 nt, Human
agugagacaguccagccugga

SEQ ID NO: 2423894 - RNA, 13 nt, Human
agugagacagaag

SEQ ID NO: 2423895 - RNA, 17 nt, Human
agugaaagacaagcugc

SEQ ID NO: 2423896 - RNA, 22 nt, Human
agugaaaccuuuagggcagcuu

SEQ ID NO: 2423897 - RNA, 14 nt, Human
agugaaagcaucac

SEQ ID NO: 2423898 - RNA, 18 nt, Human
ugugauuauuucacuuua

SEQ ID NO: 2423899 - RNA, 14 nt, Human
ugugauuuuaacuc

SEQ ID NO: 2423900 - RNA, 16 nt, Human
ugugauuuuaacucug

SEQ ID NO: 2423901 - RNA, 17 nt, Human
ugugauuuuaacucugu

SEQ ID NO: 2423902 - RNA, 20 nt, Human
ugugauuuuaacucugucuu

SEQ ID NO: 2423903 - RNA, 18 nt, Human
ugugauuuuaacucuguc

SEQ ID NO: 2423904 - RNA, 19 nt, Human
ugugauuuuaacucugucu

SEQ ID NO: 2423905 - RNA, 11 nt, Human
ugugauuuuuu

SEQ ID NO: 2423906 - RNA, 17 nt, Human
ugugauuauuucacuuu

SEQ ID NO: 2423907 - RNA, 15 nt, Human
ugugauuauuucacu

SEQ ID NO: 2423908 - RNA, 22 nt, Human
ugugauuuggaagggaaacuuu

SEQ ID NO: 2423909 - RNA, 14 nt, Human
ugugauucaaucug

SEQ ID NO: 2423910 - RNA, 15 nt, Human
ugugaugugaagcca

SEQ ID NO: 2423911 - RNA, 11 nt, Human
ugugauguguc

SEQ ID NO: 2423912 - RNA, 17 nt, Human
ugugauggggcccugcc

SEQ ID NO: 2423913 - RNA, 21 nt, Human
agugagcagucaggaaagaga

SEQ ID NO: 2423914 - RNA, 23 nt, Human
agugagagcgugcuccagccugg

SEQ ID NO: 2423915 - RNA, 16 nt, Human
agugagcacucccaag

SEQ ID NO: 2423916 - RNA, 15 nt, Human
agugagcacucccaa

SEQ ID NO: 2423917 - RNA, 22 nt, Human
agugagagagaugggagcuccu

SEQ ID NO: 2423918 - RNA, 14 nt, Human
agugagagcugggu

SEQ ID NO: 2423919 - RNA, 16 nt, Human
ugugauggggcccugc

SEQ ID NO: 2423920 - RNA, 15 nt, Human
ugugauggggcccug

SEQ ID NO: 2423921 - RNA, 16 nt, Human
agugagccgagauugu

SEQ ID NO: 2423922 - RNA, 17 nt, Human
ugugaugcuuugaagua

SEQ ID NO: 2423923 - RNA, 13 nt, Human
uggucccacccca

SEQ ID NO: 2423924 - RNA, 15 nt, Human
uggucucgaacuccu

SEQ ID NO: 2423925 - RNA, 19 nt, Human
uggucucgaacuccugacc

SEQ ID NO: 2423926 - RNA, 19 nt, Human
uggucucuaggcuggggaa

SEQ ID NO: 2423927 - RNA, 18 nt, Human
uggucucuaggcugggga

SEQ ID NO: 2423928 - RNA, 17 nt, Human
uggucucuaggcugggg

SEQ ID NO: 2423929 - RNA, 16 nt, Human
uggucucuaggcuggg

SEQ ID NO: 2423930 - RNA, 14 nt, Human
uggucucuaggcug

SEQ ID NO: 2423931 - RNA, 20 nt, Human
uggucucgaacuccugaccu

SEQ ID NO: 2423932 - RNA, 21 nt, Human
uggucucgaacuccugaccuu

SEQ ID NO: 2423933 - RNA, 19 nt, Human
ugguccauagagagcaaga

SEQ ID NO: 2423934 - RNA, 21 nt, Human
uggucccaacaggaggacaau

SEQ ID NO: 2423935 - RNA, 20 nt, Human
ugguccauggaaugcuugaa

SEQ ID NO: 2423936 - RNA, 17 nt, Human
ugguccauggaaugcuu

SEQ ID NO: 2423937 - RNA, 22 nt, Human
ugguccaugggccauaugaaaa

SEQ ID NO: 2423938 - RNA, 22 nt, Human
uggucugugagaugcuagaacu

SEQ ID NO: 2423939 - RNA, 12 nt, Human
uggucuguguga

SEQ ID NO: 2423940 - RNA, 16 nt, Human
uggucuuauuuguaaa

SEQ ID NO: 2423941 - RNA, 18 nt, Human
uggucuguuggcaggcug

SEQ ID NO: 2423942 - RNA, 14 nt, Human
uggucuguuggcag

SEQ ID NO: 2423943 - RNA, 21 nt, Human
uggucugggacuuccuugcuc

SEQ ID NO: 2423944 - RNA, 18 nt, Human
uggucugacccacugcuu

SEQ ID NO: 2423945 - RNA, 22 nt, Human
uggucucugcugaagguuguaa

SEQ ID NO: 2423946 - RNA, 12 nt, Human
uggucugaaugu

SEQ ID NO: 2423947 - RNA, 22 nt, Human
uggucugaggggcaacugaguc

SEQ ID NO: 2423948 - RNA, 16 nt, Human
uggucugauuucagga

SEQ ID NO: 2423949 - RNA, 19 nt, Human
uggucugggacuuccuugc

SEQ ID NO: 2423950 - RNA, 17 nt, Human
uggucugggacuuccuu

SEQ ID NO: 2423951 - RNA, 16 nt, Human
uggucugggacuuccu

SEQ ID NO: 2423952 - RNA, 16 nt, Human
uggucugggacucucu

SEQ ID NO: 2423953 - RNA, 17 nt, Human
uggucugcucgggccca

SEQ ID NO: 2423954 - RNA, 15 nt, Human
uggucugcaggcagg

SEQ ID NO: 2423955 - RNA, 21 nt, Human
uggucugcucgggcccaggcc

SEQ ID NO: 2423956 - RNA, 19 nt, Human
uggucugcucgggcccagg

SEQ ID NO: 2423957 - RNA, 18 nt, Human
uggucugcucgggcccag

SEQ ID NO: 2423958 - RNA, 14 nt, Human
uggucugcaggcag

SEQ ID NO: 2423959 - RNA, 19 nt, Human
aggguggugaccucugccu

SEQ ID NO: 2423960 - RNA, 18 nt, Human
aggguggugaccucugcc

SEQ ID NO: 2423961 - RNA, 17 nt, Human
aggguggugaccucugc

SEQ ID NO: 2423962 - RNA, 15 nt, Human
uggugaaaauguacu

SEQ ID NO: 2423963 - RNA, 23 nt, Human
uggucuuuguaagaguguagaag

SEQ ID NO: 2423964 - RNA, 19 nt, Human
uggugaacagaacaaaagg

SEQ ID NO: 2423965 - RNA, 15 nt, Human
aggguugggcuggug

SEQ ID NO: 2423966 - RNA, 13 nt, Human
aggguugggcugg

SEQ ID NO: 2423967 - RNA, 14 nt, Human
aggguuggccccug

SEQ ID NO: 2423968 - RNA, 13 nt, Human
aggguuggccccu

SEQ ID NO: 2423969 - RNA, 14 nt, Human
aggguucuggcugc

SEQ ID NO: 2423970 - RNA, 23 nt, Human
aggguuccuguagaccuagggag

SEQ ID NO: 2423971 - RNA, 17 nt, Human
aggguucuccucucccc

SEQ ID NO: 2423972 - RNA, 21 nt, Human
aggguuccuguagaccuaggg

SEQ ID NO: 2423973 - RNA, 19 nt, Human
aggguucccccagcccugu

SEQ ID NO: 2423974 - RNA, 16 nt, Human
aggguugaccccagag

SEQ ID NO: 2423975 - RNA, 17 nt, Human
aggguugaccccagagg

SEQ ID NO: 2423976 - RNA, 18 nt, Human
aggguugaccccagagga

SEQ ID NO: 2423977 - RNA, 20 nt, Human
aggguucuccucuccccucu

SEQ ID NO: 2423978 - RNA, 21 nt, Human
aggguugaguuacuuccuauc

SEQ ID NO: 2423979 - RNA, 16 nt, Human
aggguucagagacuca

SEQ ID NO: 2423980 - RNA, 18 nt, Human
aggguucagagacucagg

SEQ ID NO: 2423981 - RNA, 22 nt, Human
aggguucaaaaugucuguagcu

SEQ ID NO: 2423982 - RNA, 15 nt, Human
aggguucccccagcc

SEQ ID NO: 2423983 - RNA, 17 nt, Human
aggguucccccagcccu

SEQ ID NO: 2423984 - RNA, 18 nt, Human
aggguucccccagcccug

SEQ ID NO: 2423985 - RNA, 19 nt, Human
uggugaaauuuauuaguua

SEQ ID NO: 2423986 - RNA, 18 nt, Human
aggguuauugcauuugga

SEQ ID NO: 2423987 - RNA, 14 nt, Human
aggguucaaaaugu

SEQ ID NO: 2423988 - RNA, 18 nt, Human
aggguucaaaaugucugu

SEQ ID NO: 2423989 - RNA, 13 nt, Human
uggugaauauugu

SEQ ID NO: 2423990 - RNA, 18 nt, Human
uggugaaauuuauuaguu

SEQ ID NO: 2423991 - RNA, 21 nt, Human
aggguuuggcugugucuaaac

SEQ ID NO: 2423992 - RNA, 20 nt, Human
aggguuuggcugugucuaaa

SEQ ID NO: 2423993 - RNA, 18 nt, Human
aggguuucugagcugcuc

SEQ ID NO: 2423994 - RNA, 19 nt, Human
aggguuucgagaagcugcu

SEQ ID NO: 2423995 - RNA, 17 nt, Human
aggguuucugagcugcu

SEQ ID NO: 2423996 - RNA, 22 nt, Human
aggguuuaauccccaguaaaau

SEQ ID NO: 2423997 - RNA, 17 nt, Human
aggguuucagagagccu

SEQ ID NO: 2423998 - RNA, 17 nt, Human
aggguuucgagaagcug

SEQ ID NO: 2423999 - RNA, 23 nt, Human
agguagaguuugaaggaggugag

SEQ ID NO: 2424000 - RNA, 21 nt, Human
agguagaguuugaaggaggug

SEQ ID NO: 2424001 - RNA, 20 nt, Human
agguagaguuugaaggaggu

SEQ ID NO: 2424002 - RNA, 17 nt, Human
agguagaguuugaagga

SEQ ID NO: 2424003 - RNA, 20 nt, Human
agguagauguucagauugcu

SEQ ID NO: 2424004 - RNA, 16 nt, Human
agguagcccuggccag

SEQ ID NO: 2424005 - RNA, 23 nt, Human
aggguuuggcugugucuaaacug

SEQ ID NO: 2424006 - RNA, 22 nt, Human
aggguuuggcugugucuaaacu

SEQ ID NO: 2424007 - RNA, 20 nt, Human
aggguuuauguuuaggaugu

SEQ ID NO: 2424008 - RNA, 20 nt, Human
aggguugguccucuugccuc

SEQ ID NO: 2424009 - RNA, 21 nt, Human
aggguuuaauccccaguaaaa

SEQ ID NO: 2424010 - RNA, 21 nt, Human
aggguuguuaauggugcaaau

SEQ ID NO: 2424011 - RNA, 17 nt, Human
aggguugggcugguguc

SEQ ID NO: 2424012 - RNA, 23 nt, Human
aggguuggguucaucugagcaag

SEQ ID NO: 2424013 - RNA, 14 nt, Human
aggguugaucacac

SEQ ID NO: 2424014 - RNA, 14 nt, Human
aggguuggagcagu

SEQ ID NO: 2424015 - RNA, 22 nt, Human
agguaucaguugcaauaauacu

SEQ ID NO: 2424016 - RNA, 17 nt, Human
agguaucaguugcaaua

SEQ ID NO: 2424017 - RNA, 19 nt, Human
agguagcugccccuggcuc

SEQ ID NO: 2424018 - RNA, 21 nt, Human
agguagcccuggccagaggcu

SEQ ID NO: 2424019 - RNA, 19 nt, Human
agguagcccuggccagagg

SEQ ID NO: 2424020 - RNA, 20 nt, Human
agguagcccuggccagaggc

SEQ ID NO: 2424021 - RNA, 23 nt, Human
agguagcuuugagguggaagagg

SEQ ID NO: 2424022 - RNA, 14 nt, Human
agguagcugccccu

SEQ ID NO: 2424023 - RNA, 19 nt, Human
agguaggagaauugcuuga

SEQ ID NO: 2424024 - RNA, 14 nt, Human
agguauuuaucuuu

SEQ ID NO: 2424025 - RNA, 16 nt, Human
agguaugaggucuagg

SEQ ID NO: 2424026 - RNA, 14 nt, Human
aggucaacagagaa

SEQ ID NO: 2424027 - RNA, 14 nt, Human
agguauuucaaaac

SEQ ID NO: 2424028 - RNA, 23 nt, Human
agguaugaccuucuaggaagcuc

SEQ ID NO: 2424029 - RNA, 22 nt, Human
agguaugaccuucuaggaagcu

SEQ ID NO: 2424030 - RNA, 17 nt, Human
agguaugcaaucaaauc

SEQ ID NO: 2424031 - RNA, 14 nt, Human
agguaucuccagga

SEQ ID NO: 2424032 - RNA, 13 nt, Human
agguaucuccagg

SEQ ID NO: 2424033 - RNA, 21 nt, Human
agguaucauuuucugcauuua

SEQ ID NO: 2424034 - RNA, 15 nt, Human
agguaucuccaggau

SEQ ID NO: 2424035 - RNA, 13 nt, Human
agguaugaauaag

SEQ ID NO: 2424036 - RNA, 20 nt, Human
agguaugaccuucuaggaag

SEQ ID NO: 2424037 - RNA, 17 nt, Human
agguccacaacacacag

SEQ ID NO: 2424038 - RNA, 14 nt, Human
agguccaagauacc

SEQ ID NO: 2424039 - RNA, 17 nt, Human
aggucauagcugagauu

SEQ ID NO: 2424040 - RNA, 21 nt, Human
aggucuugaacuccuggccuc

SEQ ID NO: 2424041 - RNA, 20 nt, Human
aggucuugaacuccuggccu

SEQ ID NO: 2424042 - RNA, 14 nt, Human
aggugaaagggagc

SEQ ID NO: 2424043 - RNA, 16 nt, Human
aggugaaagggagcua

SEQ ID NO: 2424044 - RNA, 19 nt, Human
aggugaaaguuaauccacu

SEQ ID NO: 2424045 - RNA, 21 nt, Human
aggugaaagggagcuaucagg

SEQ ID NO: 2424046 - RNA, 22 nt, Human
aggucuugaacuccuggccuca

SEQ ID NO: 2424047 - RNA, 16 nt, Human
agguccaauuuguaaa

SEQ ID NO: 2424048 - RNA, 21 nt, Human
aggucuuuugacauguggaaa

SEQ ID NO: 2424049 - RNA, 18 nt, Human
aggucuugaacuccuggc

SEQ ID NO: 2424050 - RNA, 15 nt, Human
aggucagugcaaaua

SEQ ID NO: 2424051 - RNA, 21 nt, Human
aggucaaggcugcagugagcc

SEQ ID NO: 2424052 - RNA, 17 nt, Human
aggucaacagagaaggc

SEQ ID NO: 2424053 - RNA, 19 nt, Human
aggucaacagagaaggcag

SEQ ID NO: 2424054 - RNA, 21 nt, Human
aggucaacagagaaggcagga

SEQ ID NO: 2424055 - RNA, 19 nt, Human
aggucaagaagaagaugga

SEQ ID NO: 2424056 - RNA, 16 nt, Human
aggucaagcccaggag

SEQ ID NO: 2424057 - RNA, 18 nt, Human
aggucaagcccaggagga

SEQ ID NO: 2424058 - RNA, 17 nt, Human
aggucaaguaagaagac

SEQ ID NO: 2424059 - RNA, 22 nt, Human
aggucauuuuuuuuaagaaaaa

SEQ ID NO: 2424060 - RNA, 23 nt, Human
aggucauuuuuuuuaagaaaaag

SEQ ID NO: 2424061 - RNA, 20 nt, Human
aggucauacaauccauucuu

SEQ ID NO: 2424062 - RNA, 21 nt, Human
aggucauacaauccauucuua

SEQ ID NO: 2424063 - RNA, 22 nt, Human
aggucauacuaucuacucuccu

SEQ ID NO: 2424064 - RNA, 18 nt, Human
aggucaaguaagaagaca

SEQ ID NO: 2424065 - RNA, 20 nt, Human
aggucaggaguuccuaacca

SEQ ID NO: 2424066 - RNA, 15 nt, Human
aggucaggaguucga

SEQ ID NO: 2424067 - RNA, 21 nt, Human
agggugaugggaaagcauugu

SEQ ID NO: 2424068 - RNA, 22 nt, Human
agggugaugggaaagcauugua

SEQ ID NO: 2424069 - RNA, 14 nt, Human
agggugaugccagg

SEQ ID NO: 2424070 - RNA, 14 nt, Human
agggugagagcugc

SEQ ID NO: 2424071 - RNA, 13 nt, Human
agggugaggaugg

SEQ ID NO: 2424072 - RNA, 21 nt, Human
agggucuuuucaucugggaaa

SEQ ID NO: 2424073 - RNA, 18 nt, Human
agggucuuuucaucuggg

SEQ ID NO: 2424074 - RNA, 13 nt, Human
agggucuuuucau

SEQ ID NO: 2424075 - RNA, 22 nt, Human
aggguggacuuagaaagcaggg

SEQ ID NO: 2424076 - RNA, 21 nt, Human
aggguggacuuagaaagcagg

SEQ ID NO: 2424077 - RNA, 20 nt, Human
aggguggacuuagaaagcag

SEQ ID NO: 2424078 - RNA, 16 nt, Human
aggguggacuuagaaa

SEQ ID NO: 2424079 - RNA, 13 nt, Human
ugggucugugugu

SEQ ID NO: 2424080 - RNA, 19 nt, Human
ugggucuguuuuccuuucu

SEQ ID NO: 2424081 - RNA, 15 nt, Human
ugggucuguuuuccu

SEQ ID NO: 2424082 - RNA, 14 nt, Human
ugggucuguuuucc

SEQ ID NO: 2424083 - RNA, 23 nt, Human
aggguggacuuagaaagcagggg

SEQ ID NO: 2424084 - RNA, 15 nt, Human
ugggucugugugugu

SEQ ID NO: 2424085 - RNA, 19 nt, Human
agggugaugccagguucua

SEQ ID NO: 2424086 - RNA, 15 nt, Human
agggugaugccaggu

SEQ ID NO: 2424087 - RNA, 20 nt, Human
agggugcaguaucaugcccu

SEQ ID NO: 2424088 - RNA, 22 nt, Human
agggugcuacguacaugugagg

SEQ ID NO: 2424089 - RNA, 17 nt, Human
agggugcugcuucccuc

SEQ ID NO: 2424090 - RNA, 23 nt, Human
agggugcuacguacaugugaggc

SEQ ID NO: 2424091 - RNA, 21 nt, Human
agggugcugcuucccucugcc

SEQ ID NO: 2424092 - RNA, 19 nt, Human
uggguuuuguauucucuga

SEQ ID NO: 2424093 - RNA, 21 nt, Human
uggguuuuguauucucugagc

SEQ ID NO: 2424094 - RNA, 14 nt, Human
uggguuuuucccug

SEQ ID NO: 2424095 - RNA, 15 nt, Human
uggguuuuuguuacc

SEQ ID NO: 2424096 - RNA, 22 nt, Human
uggguuuuuguuaccuuuaugg

SEQ ID NO: 2424097 - RNA, 23 nt, Human
uggguggaugccugguggcagcu

SEQ ID NO: 2424098 - RNA, 20 nt, Human
uggguggauauaaauauaua

SEQ ID NO: 2424099 - RNA, 23 nt, Human
uggguggagaagccauugucuuc

SEQ ID NO: 2424100 - RNA, 22 nt, Human
uggguggagaagccauugucuu

SEQ ID NO: 2424101 - RNA, 21 nt, Human
uggguggagaagccauugucu

SEQ ID NO: 2424102 - RNA, 19 nt, Human
uggguuuucuuaaccaucu

SEQ ID NO: 2424103 - RNA, 14 nt, Human
uggguuuucuuccc

SEQ ID NO: 2424104 - RNA, 24 nt, Human
uggguuuucuucccaucacuggag

SEQ ID NO: 2424105 - RNA, 14 nt, Human
uggguggaugccug

SEQ ID NO: 2424106 - RNA, 17 nt, Human
uggguggagaagccauu

SEQ ID NO: 2424107 - RNA, 16 nt, Human
uggguggagaagccau

SEQ ID NO: 2424108 - RNA, 15 nt, Human
uggguggagaagcca

SEQ ID NO: 2424109 - RNA, 14 nt, Human
uggguggagaagcc

SEQ ID NO: 2424110 - RNA, 16 nt, Human
uggguggacaggggcc

SEQ ID NO: 2424111 - RNA, 19 nt, Human
uggguggaaccaggaaccu

SEQ ID NO: 2424112 - RNA, 22 nt, Human
ugggucuuguuuuuuuuuucca

SEQ ID NO: 2424113 - RNA, 22 nt, Human
ugggucuguuuuccuuucucac

SEQ ID NO: 2424114 - RNA, 21 nt, Human
ugggucuguuuuccuuucuca

SEQ ID NO: 2424115 - RNA, 22 nt, Human
ugggucuucagggggccaggug

SEQ ID NO: 2424116 - RNA, 15 nt, Human
ugggugaagacagag

SEQ ID NO: 2424117 - RNA, 16 nt, Human
uggucaccaugaaacu

SEQ ID NO: 2424118 - RNA, 14 nt, Human
uggucaccaugaaa

SEQ ID NO: 2424119 - RNA, 15 nt, Human
uggucaccagcuccu

SEQ ID NO: 2424120 - RNA, 14 nt, Human
uggucaccagcucc

SEQ ID NO: 2424121 - RNA, 23 nt, Human
uggucaccaaaucagcugcuacu

SEQ ID NO: 2424122 - RNA, 21 nt, Human
uggucaccaaaucagcugcua

SEQ ID NO: 2424123 - RNA, 16 nt, Human
ugguacauggccagug

SEQ ID NO: 2424124 - RNA, 15 nt, Human
ugguacauggccagu

SEQ ID NO: 2424125 - RNA, 22 nt, Human
ugguaauuuguaucugaaggag

SEQ ID NO: 2424126 - RNA, 13 nt, Human
ugguaauuguugc

SEQ ID NO: 2424127 - RNA, 21 nt, Human
ugguaauuuguaucugaagga

SEQ ID NO: 2424128 - RNA, 19 nt, Human
ugguaauuuguaucugaag

SEQ ID NO: 2424129 - RNA, 21 nt, Human
ugguaaacuauuugucuuuca

SEQ ID NO: 2424130 - RNA, 13 nt, Human
ugguaaacuauuu

SEQ ID NO: 2424131 - RNA, 16 nt, Human
ugguaaagacuggcuu

SEQ ID NO: 2424132 - RNA, 19 nt, Human
ugguaaacgcugucccuag

SEQ ID NO: 2424133 - RNA, 22 nt, Human
ugguaauuuaagauuccagaga

SEQ ID NO: 2424134 - RNA, 17 nt, Human
ugguaaagacuggcuuu

SEQ ID NO: 2424135 - RNA, 16 nt, Human
ugguccauagagagca

SEQ ID NO: 2424136 - RNA, 15 nt, Human
ugguccauagagagc

SEQ ID NO: 2424137 - RNA, 13 nt, Human
ugguccagggcua

SEQ ID NO: 2424138 - RNA, 19 nt, Human
ugguccagggaagcuggcc

SEQ ID NO: 2424139 - RNA, 21 nt, Human
ugguccagggcuagugacuug

SEQ ID NO: 2424140 - RNA, 14 nt, Human
ugguccaggguuga

SEQ ID NO: 2424141 - RNA, 22 nt, Human
ugguccagcuugcucuucagug

SEQ ID NO: 2424142 - RNA, 16 nt, Human
ugguccaggagaaggc

SEQ ID NO: 2424143 - RNA, 17 nt, Human
ugguccagggaagcugg

SEQ ID NO: 2424144 - RNA, 12 nt, Human
ugguccaggaga

SEQ ID NO: 2424145 - RNA, 15 nt, Human
ugguccagcuugcuc

SEQ ID NO: 2424146 - RNA, 18 nt, Human
uggucauuuuauguuaag

SEQ ID NO: 2424147 - RNA, 21 nt, Human
ugguccaaaagauugcugaaa

SEQ ID NO: 2424148 - RNA, 23 nt, Human
ugguccaaaagauugcugaaauu

SEQ ID NO: 2424149 - RNA, 16 nt, Human
uggucaucuuuuucuc

SEQ ID NO: 2424150 - RNA, 12 nt, Human
aggguagggugg

SEQ ID NO: 2424151 - RNA, 16 nt, Human
aggguaucaggugcug

SEQ ID NO: 2424152 - RNA, 22 nt, Human
agggucuugguuccagccugcc

SEQ ID NO: 2424153 - RNA, 18 nt, Human
aggguaucaaauaaaauu

SEQ ID NO: 2424154 - RNA, 21 nt, Human
agggucuugguuccagccugc

SEQ ID NO: 2424155 - RNA, 17 nt, Human
aggguagucugguuucu

SEQ ID NO: 2424156 - RNA, 22 nt, Human
aggguaauaaacuuagaauaaa

SEQ ID NO: 2424157 - RNA, 23 nt, Human
aggguaccuugaacacuggggga

SEQ ID NO: 2424158 - RNA, 19 nt, Human
aggguaccuugaacacugg

SEQ ID NO: 2424159 - RNA, 19 nt, Human
aggguacuaaggaaucuuu

SEQ ID NO: 2424160 - RNA, 23 nt, Human
aggguagcccgccugccaguccu

SEQ ID NO: 2424161 - RNA, 16 nt, Human
aggguagcccgccugc

SEQ ID NO: 2424162 - RNA, 21 nt, Human
aggguaggagguuuggauggg

SEQ ID NO: 2424163 - RNA, 14 nt, Human
aggguagcccgccu

SEQ ID NO: 2424164 - RNA, 15 nt, Human
aggguagcagguacc

SEQ ID NO: 2424165 - RNA, 19 nt, Human
agggggcuugaagccaaag

SEQ ID NO: 2424166 - RNA, 18 nt, Human
agggggcuugaagccaaa

SEQ ID NO: 2424167 - RNA, 16 nt, Human
agggggcuugaagcca

SEQ ID NO: 2424168 - RNA, 14 nt, Human
aggggggagcuggg

SEQ ID NO: 2424169 - RNA, 13 nt, Human
aggggggagcugg

SEQ ID NO: 2424170 - RNA, 14 nt, Human
aggggggaagauca

SEQ ID NO: 2424171 - RNA, 17 nt, Human
aggggggaagaucaggu

SEQ ID NO: 2424172 - RNA, 23 nt, Human
aggggggcacaugcugagucucc

SEQ ID NO: 2424173 - RNA, 17 nt, Human
aggggggcugccuggcc

SEQ ID NO: 2424174 - RNA, 24 nt, Human
agggggucccagugggaggggcag

SEQ ID NO: 2424175 - RNA, 20 nt, Human
agggggucccagugggaggg

SEQ ID NO: 2424176 - RNA, 19 nt, Human
agggggucccagugggagg

SEQ ID NO: 2424177 - RNA, 16 nt, Human
agggggucccaguggg

SEQ ID NO: 2424178 - RNA, 16 nt, Human
aggggguccacccagc

SEQ ID NO: 2424179 - RNA, 21 nt, Human
agggggguugugaggccuggc

SEQ ID NO: 2424180 - RNA, 16 nt, Human
aggggucaggcuccau

SEQ ID NO: 2424181 - RNA, 14 nt, Human
aggggucagggacc

SEQ ID NO: 2424182 - RNA, 20 nt, Human
aggggucagggaccaaggac

SEQ ID NO: 2424183 - RNA, 24 nt, Human
aggggucagggaccaaggaccccu

SEQ ID NO: 2424184 - RNA, 15 nt, Human
aggggucaggcucca

SEQ ID NO: 2424185 - RNA, 17 nt, Human
aggggucucccuggagu

SEQ ID NO: 2424186 - RNA, 15 nt, Human
aggguaaggugccuu

SEQ ID NO: 2424187 - RNA, 14 nt, Human
aggguaaggugccu

SEQ ID NO: 2424188 - RNA, 19 nt, Human
aggggucucccuggagugc

SEQ ID NO: 2424189 - RNA, 16 nt, Human
aggggucucccuggag

SEQ ID NO: 2424190 - RNA, 15 nt, Human
aggggucucccugga

SEQ ID NO: 2424191 - RNA, 16 nt, Human
agggguccuuggugug

SEQ ID NO: 2424192 - RNA, 18 nt, Human
aggggucuccaggaggag

SEQ ID NO: 2424193 - RNA, 13 nt, Human
aggggucucccug

SEQ ID NO: 2424194 - RNA, 19 nt, Human
aggggucuccaggaggaga

SEQ ID NO: 2424195 - RNA, 19 nt, Human
aggggucccagccaccccg

SEQ ID NO: 2424196 - RNA, 15 nt, Human
aggggucccagccac

SEQ ID NO: 2424197 - RNA, 18 nt, Human
aggggucccagccacccc

SEQ ID NO: 2424198 - RNA, 21 nt, Human
aggggucggcugaccaugcuc

SEQ ID NO: 2424199 - RNA, 15 nt, Human
aggggucggcugacc

SEQ ID NO: 2424200 - RNA, 14 nt, Human
aggggcuuucugga

SEQ ID NO: 2424201 - RNA, 16 nt, Human
aggggcuuucuggaga

SEQ ID NO: 2424202 - RNA, 13 nt, Human
agggggcugggac

SEQ ID NO: 2424203 - RNA, 17 nt, Human
aggggcuuucuggagag

SEQ ID NO: 2424204 - RNA, 20 nt, Human
aggggcuuucuggagaggag

SEQ ID NO: 2424205 - RNA, 16 nt, Human
aggggauagagagaga

SEQ ID NO: 2424206 - RNA, 16 nt, Human
aggggaguugugucug

SEQ ID NO: 2424207 - RNA, 19 nt, Human
aggggcuggccuuccugcc

SEQ ID NO: 2424208 - RNA, 19 nt, Human
aggggcuggcuucaggagg

SEQ ID NO: 2424209 - RNA, 17 nt, Human
aggggcuggcuucagga

SEQ ID NO: 2424210 - RNA, 16 nt, Human
aggggcuggcuucagg

SEQ ID NO: 2424211 - RNA, 23 nt, Human
aggggcuggccuuccugcccuac

SEQ ID NO: 2424212 - RNA, 19 nt, Human
aggggaggguggcagguga

SEQ ID NO: 2424213 - RNA, 16 nt, Human
aggggaggguggcagg

SEQ ID NO: 2424214 - RNA, 16 nt, Human
aggggaggggggcaca

SEQ ID NO: 2424215 - RNA, 18 nt, Human
aggggagggggauccgac

SEQ ID NO: 2424216 - RNA, 13 nt, Human
aggggaggcagcc

SEQ ID NO: 2424217 - RNA, 21 nt, Human
aggggaggcagccggcaccca

SEQ ID NO: 2424218 - RNA, 14 nt, Human
aggggaggagggcg

SEQ ID NO: 2424219 - RNA, 19 nt, Human
aggggaggaucacuggagc

SEQ ID NO: 2424220 - RNA, 14 nt, Human
aggggacgcuggua

SEQ ID NO: 2424221 - RNA, 13 nt, Human
aggggaggagggc

SEQ ID NO: 2424222 - RNA, 22 nt, Human
aggggacccccgcccccugccc

SEQ ID NO: 2424223 - RNA, 14 nt, Human
aggggacccccgcc

SEQ ID NO: 2424224 - RNA, 19 nt, Human
aggggacccccgcccccug

SEQ ID NO: 2424225 - RNA, 18 nt, Human
aggggacccccgcccccu

SEQ ID NO: 2424226 - RNA, 15 nt, Human
aggggacccccgccc

SEQ ID NO: 2424227 - RNA, 20 nt, Human
ugggaauauuugaaucuugu

SEQ ID NO: 2424228 - RNA, 19 nt, Human
ugggaauauuugaaucuug

SEQ ID NO: 2424229 - RNA, 23 nt, Human
aggggacacuucccucuguuucu

SEQ ID NO: 2424230 - RNA, 22 nt, Human
ugggaauauuugaaucuugucu

SEQ ID NO: 2424231 - RNA, 18 nt, Human
ugggaauauuugaaucuu

SEQ ID NO: 2424232 - RNA, 16 nt, Human
ugggaauauuugaauc

SEQ ID NO: 2424233 - RNA, 15 nt, Human
ugggaauauuugaau

SEQ ID NO: 2424234 - RNA, 14 nt, Human
ugggaauauuugaa

SEQ ID NO: 2424235 - RNA, 23 nt, Human
ugggaauaagugccaggauggaa

SEQ ID NO: 2424236 - RNA, 13 nt, Human
ugggaauauuuga

SEQ ID NO: 2424237 - RNA, 23 nt, Human
ugguggcagcucaccucucccuu

SEQ ID NO: 2424238 - RNA, 20 nt, Human
ugguggcagcucaccucucc

SEQ ID NO: 2424239 - RNA, 19 nt, Human
ugguggcagcucaccucuc

SEQ ID NO: 2424240 - RNA, 16 nt, Human
ugguggcagcucaccu

SEQ ID NO: 2424241 - RNA, 12 nt, Human
ugguggcagcuc

SEQ ID NO: 2424242 - RNA, 15 nt, Human
ugguggcagagugga

SEQ ID NO: 2424243 - RNA, 16 nt, Human
aggugaaggaauauau

SEQ ID NO: 2424244 - RNA, 14 nt, Human
aggugaaggaauau

SEQ ID NO: 2424245 - RNA, 23 nt, Human
aggugaaggaauauauggcagag

SEQ ID NO: 2424246 - RNA, 17 nt, Human
aggugaaggaauauaug

SEQ ID NO: 2424247 - RNA, 19 nt, Human
ugguggcacugagcccccc

SEQ ID NO: 2424248 - RNA, 17 nt, Human
ugguggcacugagcccc

SEQ ID NO: 2424249 - RNA, 12 nt, Human
ugguggcagcug

SEQ ID NO: 2424250 - RNA, 18 nt, Human
uggugugaucgucugacu

SEQ ID NO: 2424251 - RNA, 17 nt, Human
uggugugaccugagggc

SEQ ID NO: 2424252 - RNA, 18 nt, Human
uggugugacccucugaau

SEQ ID NO: 2424253 - RNA, 16 nt, Human
ugguggcacugagccc

SEQ ID NO: 2424254 - RNA, 16 nt, Human
uggugugaccugaggg

SEQ ID NO: 2424255 - RNA, 16 nt, Human
uggugugaucgucuga

SEQ ID NO: 2424256 - RNA, 16 nt, Human
ugguguggcaaagccu

SEQ ID NO: 2424257 - RNA, 19 nt, Human
uggugugucccccucuguc

SEQ ID NO: 2424258 - RNA, 15 nt, Human
ugguguguguaugcg

SEQ ID NO: 2424259 - RNA, 21 nt, Human
ugguguucaaaaaacuuguaa

SEQ ID NO: 2424260 - RNA, 22 nt, Human
ugguguucaaaaaacuuguaaa

SEQ ID NO: 2424261 - RNA, 13 nt, Human
ugguguugcagaa

SEQ ID NO: 2424262 - RNA, 20 nt, Human
ugguucacucuuggagccug

SEQ ID NO: 2424263 - RNA, 21 nt, Human
ugguucacucuuggagccugc

SEQ ID NO: 2424264 - RNA, 22 nt, Human
ugguucacucuuggagccugca

SEQ ID NO: 2424265 - RNA, 13 nt, Human
ugguuauuucucu

SEQ ID NO: 2424266 - RNA, 22 nt, Human
ugguucaggguuggccccugcc

SEQ ID NO: 2424267 - RNA, 20 nt, Human
ugguucaggguuggccccug

SEQ ID NO: 2424268 - RNA, 23 nt, Human
ugguucaggguuggccccugccc

SEQ ID NO: 2424269 - RNA, 16 nt, Human
ugguucagcuaagcua

SEQ ID NO: 2424270 - RNA, 17 nt, Human
ugguuuacacuuuaugc

SEQ ID NO: 2424271 - RNA, 17 nt, Human
ugguguuuccuggcacu

SEQ ID NO: 2424272 - RNA, 15 nt, Human
ugguguuuccuggca

SEQ ID NO: 2424273 - RNA, 20 nt, Human
ugguguuuuggggaugagag

SEQ ID NO: 2424274 - RNA, 16 nt, Human
ugguguuucucccucu

SEQ ID NO: 2424275 - RNA, 20 nt, Human
ugguguuuucuuaugcagga

SEQ ID NO: 2424276 - RNA, 21 nt, Human
ugguguuucuagcacuggccu

SEQ ID NO: 2424277 - RNA, 18 nt, Human
ugguguuucuagcacugg

SEQ ID NO: 2424278 - RNA, 16 nt, Human
ugguguuguaugccuu

SEQ ID NO: 2424279 - RNA, 17 nt, Human
ugguguugcagaagguu

SEQ ID NO: 2424280 - RNA, 17 nt, Human
ugguucacucuuggagc

SEQ ID NO: 2424281 - RNA, 15 nt, Human
ugguuauuucucuga

SEQ ID NO: 2424282 - RNA, 22 nt, Human
ugguuauuuagggaacugcuug

SEQ ID NO: 2424283 - RNA, 15 nt, Human
ugguuaagucuguuu

SEQ ID NO: 2424284 - RNA, 18 nt, Human
ugguuaagucuguuuuau

SEQ ID NO: 2424285 - RNA, 17 nt, Human
ugguuaaucuuuccuga

SEQ ID NO: 2424286 - RNA, 18 nt, Human
uguaaagccaacacccug

SEQ ID NO: 2424287 - RNA, 18 nt, Human
uguaaagcauuccaacaa

SEQ ID NO: 2424288 - RNA, 13 nt, Human
ugguuuucuguuc

SEQ ID NO: 2424289 - RNA, 15 nt, Human
ugguuuucuguucuu

SEQ ID NO: 2424290 - RNA, 21 nt, Human
uguaaagagaccuaccucagg

SEQ ID NO: 2424291 - RNA, 23 nt, Human
uguaaagaaagagagaaaauaaa

SEQ ID NO: 2424292 - RNA, 23 nt, Human
uguaaagagaccuaccucagguu

SEQ ID NO: 2424293 - RNA, 22 nt, Human
uguaaagagaccuaccucaggu

SEQ ID NO: 2424294 - RNA, 18 nt, Human
uguaaagauauuuuuauc

SEQ ID NO: 2424295 - RNA, 17 nt, Human
uguaaagcauuccaaca

SEQ ID NO: 2424296 - RNA, 12 nt, Human
uguaaagcauuc

SEQ ID NO: 2424297 - RNA, 23 nt, Human
aggugauccacccaccucagccu

SEQ ID NO: 2424298 - RNA, 21 nt, Human
aggugauccacccaccucagc

SEQ ID NO: 2424299 - RNA, 13 nt, Human
uguaaauauuuau

SEQ ID NO: 2424300 - RNA, 20 nt, Human
uguaaauauucuauaugaau

SEQ ID NO: 2424301 - RNA, 12 nt, Human
uguaaauauuua

SEQ ID NO: 2424302 - RNA, 16 nt, Human
uguaaauauucuauau

SEQ ID NO: 2424303 - RNA, 15 nt, Human
uguaaauauucuaua

SEQ ID NO: 2424304 - RNA, 14 nt, Human
uguaaauauucuau

SEQ ID NO: 2424305 - RNA, 22 nt, Human
uguaaauauguuuuuuagauca

SEQ ID NO: 2424306 - RNA, 21 nt, Human
uguaaauauauaaauauauau

SEQ ID NO: 2424307 - RNA, 19 nt, Human
uguaaauauauaaauauau

SEQ ID NO: 2424308 - RNA, 18 nt, Human
uguaaauauauaaauaua

SEQ ID NO: 2424309 - RNA, 17 nt, Human
uguaaauauauaaauau

SEQ ID NO: 2424310 - RNA, 16 nt, Human
uguaaauauauaaaua

SEQ ID NO: 2424311 - RNA, 15 nt, Human
uguaaauauauaaau

SEQ ID NO: 2424312 - RNA, 14 nt, Human
uguaaauauauaaa

SEQ ID NO: 2424313 - RNA, 13 nt, Human
uguaaauauauaa

SEQ ID NO: 2424314 - RNA, 12 nt, Human
uguaaauauaua

SEQ ID NO: 2424315 - RNA, 12 nt, Human
uguaaauacaua

SEQ ID NO: 2424316 - RNA, 13 nt, Human
uguaaauacauaa

SEQ ID NO: 2424317 - RNA, 12 nt, Human
uguaaauacacc

SEQ ID NO: 2424318 - RNA, 21 nt, Human
uguaaauacacauagcaugua

SEQ ID NO: 2424319 - RNA, 14 nt, Human
ugguuucagaaaug

SEQ ID NO: 2424320 - RNA, 15 nt, Human
ugguuucagaaaugu

SEQ ID NO: 2424321 - RNA, 11 nt, Human
ugguuuauguc

SEQ ID NO: 2424322 - RNA, 21 nt, Human
ugguuuauagagggccaagac

SEQ ID NO: 2424323 - RNA, 12 nt, Human
ugguuuauguca

SEQ ID NO: 2424324 - RNA, 16 nt, Human
ugguuucaaagauuca

SEQ ID NO: 2424325 - RNA, 16 nt, Human
ugguuucacuggccca

SEQ ID NO: 2424326 - RNA, 18 nt, Human
ugguuuaacuucugccug

SEQ ID NO: 2424327 - RNA, 11 nt, Human
ugguuuauaga

SEQ ID NO: 2424328 - RNA, 16 nt, Human
ugguuucuagacuugu

SEQ ID NO: 2424329 - RNA, 12 nt, Human
ugguuucuccag

SEQ ID NO: 2424330 - RNA, 15 nt, Human
ugguuucgaacuccu

SEQ ID NO: 2424331 - RNA, 20 nt, Human
ugguuuccacgaugaaaaac

SEQ ID NO: 2424332 - RNA, 13 nt, Human
ugguuuccuuccu

SEQ ID NO: 2424333 - RNA, 18 nt, Human
ugguuucacuggcccaag

SEQ ID NO: 2424334 - RNA, 21 nt, Human
ugguuucacggugccagguuu

SEQ ID NO: 2424335 - RNA, 21 nt, Human
ugguuuccacgaugaaaaacu

SEQ ID NO: 2424336 - RNA, 21 nt, Human
ugguuuguaaauuaacuuuua

SEQ ID NO: 2424337 - RNA, 23 nt, Human
ugguuucuucaacaggagaauuu

SEQ ID NO: 2424338 - RNA, 21 nt, Human
ugguuugagacacugguuuac

SEQ ID NO: 2424339 - RNA, 23 nt, Human
ugguuugagcuuagugaaauuac

SEQ ID NO: 2424340 - RNA, 17 nt, Human
ugguuugagcuuaguga

SEQ ID NO: 2424341 - RNA, 15 nt, Human
ugguuugcagagcuu

SEQ ID NO: 2424342 - RNA, 17 nt, Human
ugguuugcaaggaagcc

SEQ ID NO: 2424343 - RNA, 15 nt, Human
ugguuugcaaggaag

SEQ ID NO: 2424344 - RNA, 12 nt, Human
ugguuuuaacaa

SEQ ID NO: 2424345 - RNA, 18 nt, Human
ugguuuuaacaauuuccu

SEQ ID NO: 2424346 - RNA, 18 nt, Human
ugguuuuaguugcaacuu

SEQ ID NO: 2424347 - RNA, 23 nt, Human
ugguuuuauacugaaggaaaaac

SEQ ID NO: 2424348 - RNA, 16 nt, Human
ugguuuuauacugaag

SEQ ID NO: 2424349 - RNA, 12 nt, Human
ugguuuucuguu

SEQ ID NO: 2424350 - RNA, 22 nt, Human
ugguuuuccccucccuggguuc

SEQ ID NO: 2424351 - RNA, 16 nt, Human
ugguuuuccuaaaugc

SEQ ID NO: 2424352 - RNA, 22 nt, Human
ugguuuuccuaaaugcagugaa

SEQ ID NO: 2424353 - RNA, 20 nt, Human
aggugugagucaccaagccc

SEQ ID NO: 2424354 - RNA, 14 nt, Human
aggugugagucacc

SEQ ID NO: 2424355 - RNA, 20 nt, Human
aggugugacugaauuucuuu

SEQ ID NO: 2424356 - RNA, 20 nt, Human
aggugugagccaccacgccc

SEQ ID NO: 2424357 - RNA, 15 nt, Human
agguggucugaaugu

SEQ ID NO: 2424358 - RNA, 16 nt, Human
agguggucugaauguu

SEQ ID NO: 2424359 - RNA, 17 nt, Human
agguggucugaauguuc

SEQ ID NO: 2424360 - RNA, 22 nt, Human
aggugugaaccaccacacccag

SEQ ID NO: 2424361 - RNA, 19 nt, Human
agguggguuuucuucccau

SEQ ID NO: 2424362 - RNA, 21 nt, Human
agguggguuuucuucccauca

SEQ ID NO: 2424363 - RNA, 22 nt, Human
agguggguuuucuucccaucac

SEQ ID NO: 2424364 - RNA, 15 nt, Human
aggugguaugugugu

SEQ ID NO: 2424365 - RNA, 18 nt, Human
aggugguaugugugugua

SEQ ID NO: 2424366 - RNA, 19 nt, Human
aggugguccugagaccuga

SEQ ID NO: 2424367 - RNA, 14 nt, Human
agguggucugaaug

SEQ ID NO: 2424368 - RNA, 18 nt, Human
aggugugacugaauuucu

SEQ ID NO: 2424369 - RNA, 23 nt, Human
aggugugaaccaccacacccagc

SEQ ID NO: 2424370 - RNA, 22 nt, Human
aggugauccacucgccuucauc

SEQ ID NO: 2424371 - RNA, 13 nt, Human
agguggggcagcu

SEQ ID NO: 2424372 - RNA, 19 nt, Human
agguggggagacugggcug

SEQ ID NO: 2424373 - RNA, 21 nt, Human
agguggggagacugggcugag

SEQ ID NO: 2424374 - RNA, 11 nt, Human
agguggggagg

SEQ ID NO: 2424375 - RNA, 22 nt, Human
agguggggaggggguuuggggg

SEQ ID NO: 2424376 - RNA, 23 nt, Human
agguggggaggggguuugggggc

SEQ ID NO: 2424377 - RNA, 13 nt, Human
agguggggaguca

SEQ ID NO: 2424378 - RNA, 23 nt, Human
agguggggucacucuggcagcuc

SEQ ID NO: 2424379 - RNA, 14 nt, Human
agguggggcagcuu

SEQ ID NO: 2424380 - RNA, 23 nt, Human
agguggguuuucaucaagacugg

SEQ ID NO: 2424381 - RNA, 23 nt, Human
agguggguuuucuucccaucacu

SEQ ID NO: 2424382 - RNA, 22 nt, Human
agguggggucuuugugagagug

SEQ ID NO: 2424383 - RNA, 22 nt, Human
aggugggguugggauugggggc

SEQ ID NO: 2424384 - RNA, 21 nt, Human
agguggggucuuugugagagu

SEQ ID NO: 2424385 - RNA, 17 nt, Human
agguuuaaacuucucug

SEQ ID NO: 2424386 - RNA, 16 nt, Human
agguuguuccuaaaau

SEQ ID NO: 2424387 - RNA, 17 nt, Human
agguuguaguaaagaaa

SEQ ID NO: 2424388 - RNA, 20 nt, Human
agguugucugaagucacugc

SEQ ID NO: 2424389 - RNA, 20 nt, Human
agguguuuaaagagagguua

SEQ ID NO: 2424390 - RNA, 18 nt, Human
agguguuuaaagagaggu

SEQ ID NO: 2424391 - RNA, 17 nt, Human
agguguuuaaagagagg

SEQ ID NO: 2424392 - RNA, 13 nt, Human
agguguuuaaaga

SEQ ID NO: 2424393 - RNA, 16 nt, Human
agguugucugaaguca

SEQ ID NO: 2424394 - RNA, 15 nt, Human
agguguuacuguaau

SEQ ID NO: 2424395 - RNA, 16 nt, Human
agguguuacuguaauu

SEQ ID NO: 2424396 - RNA, 22 nt, Human
agguguucaagaccagccugac

SEQ ID NO: 2424397 - RNA, 17 nt, Human
agguguucuacacucau

SEQ ID NO: 2424398 - RNA, 23 nt, Human
agguguugccaaauauguccugg

SEQ ID NO: 2424399 - RNA, 22 nt, Human
agguguugccaaauauguccug

SEQ ID NO: 2424400 - RNA, 15 nt, Human
agguguugucccuuc

SEQ ID NO: 2424401 - RNA, 16 nt, Human
agguguugucccuucu

SEQ ID NO: 2424402 - RNA, 21 nt, Human
agguguugccaaauauguccu

SEQ ID NO: 2424403 - RNA, 12 nt, Human
agguguugccaa

SEQ ID NO: 2424404 - RNA, 21 nt, Human
agguguugauuuucuguugua

SEQ ID NO: 2424405 - RNA, 18 nt, Human
agguguugauuuucuguu

SEQ ID NO: 2424406 - RNA, 20 nt, Human
agguguucuacacucaucuu

SEQ ID NO: 2424407 - RNA, 15 nt, Human
uguaaggaaugauua

SEQ ID NO: 2424408 - RNA, 14 nt, Human
uguaaggaaugauu

SEQ ID NO: 2424409 - RNA, 13 nt, Human
uguaaggaaugau

SEQ ID NO: 2424410 - RNA, 16 nt, Human
uguaagcugaaaauau

SEQ ID NO: 2424411 - RNA, 14 nt, Human
uguaagcugaaaau

SEQ ID NO: 2424412 - RNA, 12 nt, Human
uguaagaaauac

SEQ ID NO: 2424413 - RNA, 18 nt, Human
uguaagaaauacuguaca

SEQ ID NO: 2424414 - RNA, 22 nt, Human
uguaagcucuacugaggugcua

SEQ ID NO: 2424415 - RNA, 18 nt, Human
uguaagaaaauaucacuu

SEQ ID NO: 2424416 - RNA, 17 nt, Human
uguaagaaaauaucacu

SEQ ID NO: 2424417 - RNA, 13 nt, Human
agguuuaacucag

SEQ ID NO: 2424418 - RNA, 17 nt, Human
uguaagaaacacacuga

SEQ ID NO: 2424419 - RNA, 22 nt, Human
uguaagaaacacacugaggcag

SEQ ID NO: 2424420 - RNA, 16 nt, Human
uguaauuugugauaca

SEQ ID NO: 2424421 - RNA, 15 nt, Human
uguaaggcaaucaug

SEQ ID NO: 2424422 - RNA, 18 nt, Human
uguaaggaaugauuaauu

SEQ ID NO: 2424423 - RNA, 22 nt, Human
uguaagcuguuuauuuuauauu

SEQ ID NO: 2424424 - RNA, 16 nt, Human
uguaagcuguuuauuu

SEQ ID NO: 2424425 - RNA, 15 nt, Human
uguaagcuguuuauu

SEQ ID NO: 2424426 - RNA, 14 nt, Human
uguaagcuguuuau

SEQ ID NO: 2424427 - RNA, 13 nt, Human
uguaagcugaagu

SEQ ID NO: 2424428 - RNA, 17 nt, Human
uguaauuugugauacaa

SEQ ID NO: 2424429 - RNA, 21 nt, Human
uguaauuugugauacaaugcu

SEQ ID NO: 2424430 - RNA, 14 nt, Human
uguaaggcaugaag

SEQ ID NO: 2424431 - RNA, 15 nt, Human
uguaaggcaugaagg

SEQ ID NO: 2424432 - RNA, 16 nt, Human
uguaauuuuauaugaa

SEQ ID NO: 2424433 - RNA, 22 nt, Human
uguacaaaauaaacaaauaaca

SEQ ID NO: 2424434 - RNA, 21 nt, Human
uguaauuuuaaauaaaaguga

SEQ ID NO: 2424435 - RNA, 14 nt, Human
uguacauauaagug

SEQ ID NO: 2424436 - RNA, 21 nt, Human
uguacaaaaucgauuggcuuu

SEQ ID NO: 2424437 - RNA, 19 nt, Human
uguacaaaguagaagucuu

SEQ ID NO: 2424438 - RNA, 23 nt, Human
uguacaaaguagaagucuuagau

SEQ ID NO: 2424439 - RNA, 21 nt, Human
uguacaucccauguaacagaa

SEQ ID NO: 2424440 - RNA, 20 nt, Human
uguacaucccauguaacaga

SEQ ID NO: 2424441 - RNA, 18 nt, Human
uguacaucccauguaaca

SEQ ID NO: 2424442 - RNA, 17 nt, Human
uguacaucccauguaac

SEQ ID NO: 2424443 - RNA, 23 nt, Human
uguacaucccauguaacagaaag

SEQ ID NO: 2424444 - RNA, 22 nt, Human
uguacaucccauguaacagaaa

SEQ ID NO: 2424445 - RNA, 14 nt, Human
uguacaucuauuuu

SEQ ID NO: 2424446 - RNA, 20 nt, Human
uguacauaugugcuggaauu

SEQ ID NO: 2424447 - RNA, 19 nt, Human
uguacauauuuguggaaua

SEQ ID NO: 2424448 - RNA, 18 nt, Human
uguacauauuuguggaau

SEQ ID NO: 2424449 - RNA, 20 nt, Human
uguacauauuugagacuagu

SEQ ID NO: 2424450 - RNA, 17 nt, Human
uguacauaugugcugga

SEQ ID NO: 2424451 - RNA, 15 nt, Human
uguacauaugugcug

SEQ ID NO: 2424452 - RNA, 19 nt, Human
uguacauauguaaaauaaa

SEQ ID NO: 2424453 - RNA, 21 nt, Human
uguacauauguaaaauaaaau

SEQ ID NO: 2424454 - RNA, 13 nt, Human
uguacauauguaa

SEQ ID NO: 2424455 - RNA, 15 nt, Human
uguacauauguaaaa

SEQ ID NO: 2424456 - RNA, 16 nt, Human
uguacauauguaaaau

SEQ ID NO: 2424457 - RNA, 18 nt, Human
uguacauauguaaaauaa

SEQ ID NO: 2424458 - RNA, 17 nt, Human
uguacaugaaaacacau

SEQ ID NO: 2424459 - RNA, 18 nt, Human
uguacaugaaaacacauu

SEQ ID NO: 2424460 - RNA, 19 nt, Human
uguacaugaaaacacauuu

SEQ ID NO: 2424461 - RNA, 20 nt, Human
uguacauguguagccugugc

SEQ ID NO: 2424462 - RNA, 17 nt, Human
uguacauguguagccug

SEQ ID NO: 2424463 - RNA, 20 nt, Human
uguacaugaaaacacauuuu

SEQ ID NO: 2424464 - RNA, 21 nt, Human
uguacauuuccaaauucacaa

SEQ ID NO: 2424465 - RNA, 22 nt, Human
uguacauuuccaaauucacaag

SEQ ID NO: 2424466 - RNA, 15 nt, Human
uguacuuaacuauuc

SEQ ID NO: 2424467 - RNA, 13 nt, Human
uguacauuucuga

SEQ ID NO: 2424468 - RNA, 22 nt, Human
uguacauuagucauucaauaaa

SEQ ID NO: 2424469 - RNA, 14 nt, Human
uguacauuaauuac

SEQ ID NO: 2424470 - RNA, 21 nt, Human
uguacauguguagccugugca

SEQ ID NO: 2424471 - RNA, 21 nt, Human
uguacauuuaugauuuaauaa

SEQ ID NO: 2424472 - RNA, 20 nt, Human
uguacauuuaugauuuaaua

SEQ ID NO: 2424473 - RNA, 15 nt, Human
uguacauucuaaaau

SEQ ID NO: 2424474 - RNA, 10 nt, Human
uguacauuuc

SEQ ID NO: 2424475 - RNA, 18 nt, Human
uguacauuuccaaauuca

SEQ ID NO: 2424476 - RNA, 15 nt, Human
uguacuugcucuuga

SEQ ID NO: 2424477 - RNA, 16 nt, Human
uguacauuucugaaau

SEQ ID NO: 2424478 - RNA, 16 nt, Human
uguacuuaauaaauuc

SEQ ID NO: 2424479 - RNA, 20 nt, Human
uguacuuaauaaauucagau

SEQ ID NO: 2424480 - RNA, 21 nt, Human
uguacuuaauaaauucagaua

SEQ ID NO: 2424481 - RNA, 14 nt, Human
uguacuucacuguc

SEQ ID NO: 2424482 - RNA, 13 nt, Human
uguacuucacugu

SEQ ID NO: 2424483 - RNA, 22 nt, Human
uguacuuaauaaauucagauau

SEQ ID NO: 2424484 - RNA, 14 nt, Human
uguacuucaaguua

SEQ ID NO: 2424485 - RNA, 21 nt, Human
uguacuucgucuucuaauuuc

SEQ ID NO: 2424486 - RNA, 21 nt, Human
uguacuucacugucaggaaga

SEQ ID NO: 2424487 - RNA, 16 nt, Human
uguacuugaugacaga

SEQ ID NO: 2424488 - RNA, 17 nt, Human
uguagaaugauuucaug

SEQ ID NO: 2424489 - RNA, 18 nt, Human
uguagaaugauuucaugc

SEQ ID NO: 2424490 - RNA, 19 nt, Human
uguagaauguauuguaccu

SEQ ID NO: 2424491 - RNA, 17 nt, Human
uguagaauguauuguac

SEQ ID NO: 2424492 - RNA, 18 nt, Human
uguagaauguauuguacc

SEQ ID NO: 2424493 - RNA, 21 nt, Human
uguagaccuagggaggaccuu

SEQ ID NO: 2424494 - RNA, 16 nt, Human
uguagaaugauuucau

SEQ ID NO: 2424495 - RNA, 22 nt, Human
uguagaaguaggaagugaaaau

SEQ ID NO: 2424496 - RNA, 22 nt, Human
uguagaagcauuccuucuuuga

SEQ ID NO: 2424497 - RNA, 17 nt, Human
uguagaagcauuccuuc

SEQ ID NO: 2424498 - RNA, 17 nt, Human
uguagaaggagacagag

SEQ ID NO: 2424499 - RNA, 21 nt, Human
uguagaaggagacagagcugg

SEQ ID NO: 2424500 - RNA, 16 nt, Human
uguagaagcauuccuu

SEQ ID NO: 2424501 - RNA, 15 nt, Human
uguagaagcauuccu

SEQ ID NO: 2424502 - RNA, 13 nt, Human
uguagaagcauuc

SEQ ID NO: 2424503 - RNA, 14 nt, Human
auaaccagcuguaa

SEQ ID NO: 2424504 - RNA, 22 nt, Human
auaacucuguggcauuauugca

SEQ ID NO: 2424505 - RNA, 13 nt, Human
auaacugaaaaug

SEQ ID NO: 2424506 - RNA, 19 nt, Human
auaaccagcuguaacacag

SEQ ID NO: 2424507 - RNA, 15 nt, Human
auaacugaaaaugug

SEQ ID NO: 2424508 - RNA, 14 nt, Human
auaacugaaggaga

SEQ ID NO: 2424509 - RNA, 20 nt, Human
auaaccaguguuguggauuu

SEQ ID NO: 2424510 - RNA, 22 nt, Human
auaaccacuuaaaaaaugucca

SEQ ID NO: 2424511 - RNA, 13 nt, Human
auaaccacuuaaa

SEQ ID NO: 2424512 - RNA, 20 nt, Human
auaaccaaagcccaaagugg

SEQ ID NO: 2424513 - RNA, 23 nt, Human
auaaccacaaagcacaguuugaa

SEQ ID NO: 2424514 - RNA, 12 nt, Human
auaacuggaaac

SEQ ID NO: 2424515 - RNA, 18 nt, Human
auaacugccuuaaaacuu

SEQ ID NO: 2424516 - RNA, 18 nt, Human
auaacugaaggagaaggu

SEQ ID NO: 2424517 - RNA, 12 nt, Human
auaacugagaau

SEQ ID NO: 2424518 - RNA, 16 nt, Human
auaacugaaggagaag

SEQ ID NO: 2424519 - RNA, 19 nt, Human
auaaauaaaguuuguugaa

SEQ ID NO: 2424520 - RNA, 13 nt, Human
auaaauaaaguuu

SEQ ID NO: 2424521 - RNA, 12 nt, Human
auaaauaaaugu

SEQ ID NO: 2424522 - RNA, 15 nt, Human
auaaauaaauauaua

SEQ ID NO: 2424523 - RNA, 16 nt, Human
auaaauaaaugcaaua

SEQ ID NO: 2424524 - RNA, 14 nt, Human
auaaauaaauauau

SEQ ID NO: 2424525 - RNA, 13 nt, Human
auaaauaaauaua

SEQ ID NO: 2424526 - RNA, 14 nt, Human
auaaauaaaaugac

SEQ ID NO: 2424527 - RNA, 12 nt, Human
auaaauaaauau

SEQ ID NO: 2424528 - RNA, 20 nt, Human
auaaaugucuuuuuuuuaau

SEQ ID NO: 2424529 - RNA, 12 nt, Human
auaaaugucuuu

SEQ ID NO: 2424530 - RNA, 15 nt, Human
auaaaugucuguuga

SEQ ID NO: 2424531 - RNA, 12 nt, Human
auaaaugucugu

SEQ ID NO: 2424532 - RNA, 21 nt, Human
auaaaugucauuaaaauaaau

SEQ ID NO: 2424533 - RNA, 20 nt, Human
auaacauuaccuuacugugg

SEQ ID NO: 2424534 - RNA, 19 nt, Human
auaacauuaccuuacugug

SEQ ID NO: 2424535 - RNA, 14 nt, Human
auaacauuaccuua

SEQ ID NO: 2424536 - RNA, 21 nt, Human
auaaauuauuaguuuacauca

SEQ ID NO: 2424537 - RNA, 15 nt, Human
auaaauuauguuuau

SEQ ID NO: 2424538 - RNA, 14 nt, Human
auaaauuauguuua

SEQ ID NO: 2424539 - RNA, 13 nt, Human
auaaauuauguuu

SEQ ID NO: 2424540 - RNA, 13 nt, Human
auaaauuauaagu

SEQ ID NO: 2424541 - RNA, 19 nt, Human
auaaaugugccuucauuuu

SEQ ID NO: 2424542 - RNA, 23 nt, Human
auaaaugucuuuuuuuuaaugug

SEQ ID NO: 2424543 - RNA, 22 nt, Human
auaaaugucuuuuuuuuaaugu

SEQ ID NO: 2424544 - RNA, 22 nt, Human
uuacaggaaguacuggagaaaa

SEQ ID NO: 2424545 - RNA, 18 nt, Human
uuacaggaaguacuggag

SEQ ID NO: 2424546 - RNA, 16 nt, Human
uuacaugauucauuuu

SEQ ID NO: 2424547 - RNA, 17 nt, Human
uuacaugauucauuuua

SEQ ID NO: 2424548 - RNA, 17 nt, Human
uuacaugaauugcauuu

SEQ ID NO: 2424549 - RNA, 14 nt, Human
uuacaugacacagc

SEQ ID NO: 2424550 - RNA, 18 nt, Human
uuacaucuguuuuaaauu

SEQ ID NO: 2424551 - RNA, 21 nt, Human
uuacaucuguuuuaaauuuau

SEQ ID NO: 2424552 - RNA, 15 nt, Human
uuacaucuuucacau

SEQ ID NO: 2424553 - RNA, 16 nt, Human
uuacaggaaguacugg

SEQ ID NO: 2424554 - RNA, 15 nt, Human
uuacaggaaguacug

SEQ ID NO: 2424555 - RNA, 12 nt, Human
auaacugugaag

SEQ ID NO: 2424556 - RNA, 18 nt, Human
uuacaugcauacuucaaa

SEQ ID NO: 2424557 - RNA, 15 nt, Human
uuacaugcauacuuc

SEQ ID NO: 2424558 - RNA, 14 nt, Human
uuacaugcauacuu

SEQ ID NO: 2424559 - RNA, 12 nt, Human
uuacaugcauac

SEQ ID NO: 2424560 - RNA, 22 nt, Human
uuacaugcaauuuauuaaaaug

SEQ ID NO: 2424561 - RNA, 23 nt, Human
uuacaugcaauuuauuaaaauga

SEQ ID NO: 2424562 - RNA, 21 nt, Human
uuacaugcauacuucaaaagu

SEQ ID NO: 2424563 - RNA, 19 nt, Human
uuacaugcauacuucaaaa

SEQ ID NO: 2424564 - RNA, 22 nt, Human
uuacaugcauuacugcaugcac

SEQ ID NO: 2424565 - RNA, 22 nt, Human
uuacaugcauacuucaaaagua

SEQ ID NO: 2424566 - RNA, 13 nt, Human
uuacaugcauuug

SEQ ID NO: 2424567 - RNA, 16 nt, Human
uuaccaugugccugau

SEQ ID NO: 2424568 - RNA, 23 nt, Human
uuaccauuuugggguacccacug

SEQ ID NO: 2424569 - RNA, 22 nt, Human
uuacccugcgauuuugccugug

SEQ ID NO: 2424570 - RNA, 13 nt, Human
uuacccuuuagac

SEQ ID NO: 2424571 - RNA, 16 nt, Human
uuacccuuuagacugu

SEQ ID NO: 2424572 - RNA, 24 nt, Human
uuacccaaaaacuaaaucucuaau

SEQ ID NO: 2424573 - RNA, 13 nt, Human
uuacccaagcaaa

SEQ ID NO: 2424574 - RNA, 12 nt, Human
uuacccaagcaa

SEQ ID NO: 2424575 - RNA, 20 nt, Human
uuacccaagcaaaaucaugg

SEQ ID NO: 2424576 - RNA, 16 nt, Human
uuacccacacacagau

SEQ ID NO: 2424577 - RNA, 12 nt, Human
aguuuucugaga

SEQ ID NO: 2424578 - RNA, 13 nt, Human
aguuuucugagaa

SEQ ID NO: 2424579 - RNA, 22 nt, Human
aguuuuccuaagugauuguaug

SEQ ID NO: 2424580 - RNA, 12 nt, Human
aguuuuccuucu

SEQ ID NO: 2424581 - RNA, 14 nt, Human
aguuuuccuucuca

SEQ ID NO: 2424582 - RNA, 18 nt, Human
aguuuuccuucucaucug

SEQ ID NO: 2424583 - RNA, 22 nt, Human
aguuuuccuucucaucugugau

SEQ ID NO: 2424584 - RNA, 14 nt, Human
aguuuucugagaaa

SEQ ID NO: 2424585 - RNA, 17 nt, Human
aguuuucugagaaagac

SEQ ID NO: 2424586 - RNA, 23 nt, Human
auaaacacucuugaaaaaugcau

SEQ ID NO: 2424587 - RNA, 17 nt, Human
aguuuucuccucccagg

SEQ ID NO: 2424588 - RNA, 23 nt, Human
aguuuuccuucucaucugugauu

SEQ ID NO: 2424589 - RNA, 22 nt, Human
auaaaccucuaauuuauuuugu

SEQ ID NO: 2424590 - RNA, 20 nt, Human
auaaaccucuaauuuauuuu

SEQ ID NO: 2424591 - RNA, 19 nt, Human
auaaaccucuaauuuauuu

SEQ ID NO: 2424592 - RNA, 18 nt, Human
auaaaccucuaauuuauu

SEQ ID NO: 2424593 - RNA, 22 nt, Human
auaaaccuaaaaaagauauauu

SEQ ID NO: 2424594 - RNA, 20 nt, Human
auaaaccuaaaaaagauaua

SEQ ID NO: 2424595 - RNA, 19 nt, Human
auaaaccuaaaaaagauau

SEQ ID NO: 2424596 - RNA, 20 nt, Human
auaaacgauuuaauucucuu

SEQ ID NO: 2424597 - RNA, 19 nt, Human
auaaacgauuuaauucucu

SEQ ID NO: 2424598 - RNA, 18 nt, Human
auaaacgauuuaauucuc

SEQ ID NO: 2424599 - RNA, 16 nt, Human
auaaaccuuaaguaag

SEQ ID NO: 2424600 - RNA, 15 nt, Human
auaaacgauuuaauu

SEQ ID NO: 2424601 - RNA, 16 nt, Human
auaaaccucaaaaugu

SEQ ID NO: 2424602 - RNA, 18 nt, Human
auaaaccuaaaaaagaua

SEQ ID NO: 2424603 - RNA, 17 nt, Human
auaaaccuaaaaaagau

SEQ ID NO: 2424604 - RNA, 21 nt, Human
auaaaccagguuuagacagua

SEQ ID NO: 2424605 - RNA, 21 nt, Human
auaaacccaguugccaucugc

SEQ ID NO: 2424606 - RNA, 18 nt, Human
auaaacacucuugaaaaa

SEQ ID NO: 2424607 - RNA, 12 nt, Human
auaaacacugug

SEQ ID NO: 2424608 - RNA, 11 nt, Human
aguuuuccuga

SEQ ID NO: 2424609 - RNA, 14 nt, Human
auaaacacugugua

SEQ ID NO: 2424610 - RNA, 16 nt, Human
auaaacaucacacaca

SEQ ID NO: 2424611 - RNA, 22 nt, Human
auaaacaguggaauauaaggaa

SEQ ID NO: 2424612 - RNA, 17 nt, Human
auaaacaucacacacac

SEQ ID NO: 2424613 - RNA, 21 nt, Human
auaaacauccuucaagaacuc

SEQ ID NO: 2424614 - RNA, 23 nt, Human
auaaacauuaagauugaggccug

SEQ ID NO: 2424615 - RNA, 13 nt, Human
auaaacauuguau

SEQ ID NO: 2424616 - RNA, 22 nt, Human
auaaacauuuguagcauccucu

SEQ ID NO: 2424617 - RNA, 17 nt, Human
auaaacuagauuacauu

SEQ ID NO: 2424618 - RNA, 19 nt, Human
auaaacuagauuacauuca

SEQ ID NO: 2424619 - RNA, 20 nt, Human
auaaacgugaugaucagcug

SEQ ID NO: 2424620 - RNA, 20 nt, Human
auaaacgcgggaaaaaagau

SEQ ID NO: 2424621 - RNA, 13 nt, Human
auaaacugacuuu

SEQ ID NO: 2424622 - RNA, 12 nt, Human
auaaacugacuu

SEQ ID NO: 2424623 - RNA, 15 nt, Human
auaaacucuaaacau

SEQ ID NO: 2424624 - RNA, 14 nt, Human
auaaacuaucaguu

SEQ ID NO: 2424625 - RNA, 18 nt, Human
auaaacuggcagcucagc

SEQ ID NO: 2424626 - RNA, 18 nt, Human
auaaacugacuuuauccu

SEQ ID NO: 2424627 - RNA, 15 nt, Human
auaaacugacuuuau

SEQ ID NO: 2424628 - RNA, 12 nt, Human
auaaacugugug

SEQ ID NO: 2424629 - RNA, 22 nt, Human
auaaacuuuaauauaaaguagu

SEQ ID NO: 2424630 - RNA, 20 nt, Human
auaaacuuuaauauaaagua

SEQ ID NO: 2424631 - RNA, 15 nt, Human
auaaacuuagaauaa

SEQ ID NO: 2424632 - RNA, 14 nt, Human
auaaacuuagaaua

SEQ ID NO: 2424633 - RNA, 16 nt, Human
auaaacuuuaauauaa

SEQ ID NO: 2424634 - RNA, 20 nt, Human
auaaacugacuuuauccuca

SEQ ID NO: 2424635 - RNA, 14 nt, Human
auaaacugugugca

SEQ ID NO: 2424636 - RNA, 16 nt, Human
auaaacuguguuuacu

SEQ ID NO: 2424637 - RNA, 23 nt, Human
auaaacuuagugcggacaaguuu

SEQ ID NO: 2424638 - RNA, 13 nt, Human
auaaacuuuaccu

SEQ ID NO: 2424639 - RNA, 15 nt, Human
auaaacuuuaccuuu

SEQ ID NO: 2424640 - RNA, 17 nt, Human
auaaaguaguccuguga

SEQ ID NO: 2424641 - RNA, 18 nt, Human
auaaaguaucaugcauuc

SEQ ID NO: 2424642 - RNA, 17 nt, Human
auaaaguaucaugcauu

SEQ ID NO: 2424643 - RNA, 15 nt, Human
auaaaguaucaugca

SEQ ID NO: 2424644 - RNA, 18 nt, Human
auaaaguaguaaaaauua

SEQ ID NO: 2424645 - RNA, 16 nt, Human
auaaaguaguccugug

SEQ ID NO: 2424646 - RNA, 21 nt, Human
auaaacuuagaauaaaauugu

SEQ ID NO: 2424647 - RNA, 21 nt, Human
auaaaguauuuaauuagugcu

SEQ ID NO: 2424648 - RNA, 19 nt, Human
auaaaguauuuaauuagug

SEQ ID NO: 2424649 - RNA, 17 nt, Human
auaaaguauuuaauuag

SEQ ID NO: 2424650 - RNA, 15 nt, Human
auaaaguauuuaauu

SEQ ID NO: 2424651 - RNA, 14 nt, Human
auaaaguauuuaau

SEQ ID NO: 2424652 - RNA, 12 nt, Human
auaaaguauuua

SEQ ID NO: 2424653 - RNA, 19 nt, Human
auaaaguaugguauugaaa

SEQ ID NO: 2424654 - RNA, 14 nt, Human
auaaaguaucuaca

SEQ ID NO: 2424655 - RNA, 15 nt, Human
auaaauaaaaaugga

SEQ ID NO: 2424656 - RNA, 17 nt, Human
auaaauaaaaauggaua

SEQ ID NO: 2424657 - RNA, 13 nt, Human
auaaauaaaacau

SEQ ID NO: 2424658 - RNA, 23 nt, Human
auaauacaccacuacauucuguu

SEQ ID NO: 2424659 - RNA, 21 nt, Human
auaauacaccacuacauucug

SEQ ID NO: 2424660 - RNA, 18 nt, Human
auaaguuugcaauuuggg

SEQ ID NO: 2424661 - RNA, 17 nt, Human
auaaguuugcaauuugg

SEQ ID NO: 2424662 - RNA, 21 nt, Human
auaaguuugaaggaaacaguu

SEQ ID NO: 2424663 - RNA, 20 nt, Human
auaaguuugaaggaaacagu

SEQ ID NO: 2424664 - RNA, 13 nt, Human
auaaguuuuaugu

SEQ ID NO: 2424665 - RNA, 23 nt, Human
auaauaaauucccuggccuuuca

SEQ ID NO: 2424666 - RNA, 13 nt, Human
auaauaagcuaaa

SEQ ID NO: 2424667 - RNA, 15 nt, Human
auaauaagcuaaaga

SEQ ID NO: 2424668 - RNA, 22 nt, Human
auaaguuuauuucuuaaaucua

SEQ ID NO: 2424669 - RNA, 18 nt, Human
auaaguuuauuucuuaaa

SEQ ID NO: 2424670 - RNA, 14 nt, Human
auaaguuuauuucu

SEQ ID NO: 2424671 - RNA, 12 nt, Human
auaaguuuauuu

SEQ ID NO: 2424672 - RNA, 19 nt, Human
auaaguuugaaggaaacag

SEQ ID NO: 2424673 - RNA, 15 nt, Human
auaaguuugaaggaa

SEQ ID NO: 2424674 - RNA, 13 nt, Human
auaaguuugaagg

SEQ ID NO: 2424675 - RNA, 18 nt, Human
auaaguuucuuugcuuca

SEQ ID NO: 2424676 - RNA, 21 nt, Human
auaaguuucugggaccucagu

SEQ ID NO: 2424677 - RNA, 20 nt, Human
auaaguuucacugacuuaga

SEQ ID NO: 2424678 - RNA, 20 nt, Human
auaaguucuuaugccauguu

SEQ ID NO: 2424679 - RNA, 23 nt, Human
auaaguucuaguugcuuguaaaa

SEQ ID NO: 2424680 - RNA, 20 nt, Human
auaaguucaaauucuucuga

SEQ ID NO: 2424681 - RNA, 21 nt, Human
auaaguucaaauucuucugaa

SEQ ID NO: 2424682 - RNA, 24 nt, Human
auaaguucaaauucuucugaacuc

SEQ ID NO: 2424683 - RNA, 24 nt, Human
auaaguuauugcaguuuaucauuc

SEQ ID NO: 2424684 - RNA, 21 nt, Human
auaaguuauugcaguuuauca

SEQ ID NO: 2424685 - RNA, 18 nt, Human
auaaguucaaauucuucu

SEQ ID NO: 2424686 - RNA, 20 nt, Human
auaaguuauugcaguuuauc

SEQ ID NO: 2424687 - RNA, 16 nt, Human
auaaguuauugcaguu

SEQ ID NO: 2424688 - RNA, 14 nt, Human
auaaguuauugcag

SEQ ID NO: 2424689 - RNA, 13 nt, Human
auaaguuauugca

SEQ ID NO: 2424690 - RNA, 22 nt, Human
auaaguuaacuuccaauuuaca

SEQ ID NO: 2424691 - RNA, 23 nt, Human
uuaccugaucaaugacagagccu

SEQ ID NO: 2424692 - RNA, 20 nt, Human
uuaccugaucaaugacagag

SEQ ID NO: 2424693 - RNA, 22 nt, Human
auaagaaagugcgaguccucca

SEQ ID NO: 2424694 - RNA, 22 nt, Human
auaagaaccuuuugagugccuu

SEQ ID NO: 2424695 - RNA, 18 nt, Human
uuaccugaaaacacugug

SEQ ID NO: 2424696 - RNA, 20 nt, Human
uuaccugaaaacacugugca

SEQ ID NO: 2424697 - RNA, 22 nt, Human
uuaccugaaaacacugugcaca

SEQ ID NO: 2424698 - RNA, 19 nt, Human
uuaccugaucaaugacaga

SEQ ID NO: 2424699 - RNA, 18 nt, Human
uuaccugaucaaugacag

SEQ ID NO: 2424700 - RNA, 17 nt, Human
uuaccugaucaaugaca

SEQ ID NO: 2424701 - RNA, 16 nt, Human
uuaccuaaacagauau

SEQ ID NO: 2424702 - RNA, 16 nt, Human
uuaccguuucuucccu

SEQ ID NO: 2424703 - RNA, 14 nt, Human
uuaccguuucuucc

SEQ ID NO: 2424704 - RNA, 21 nt, Human
uuaccgcguuguaaaauauag

SEQ ID NO: 2424705 - RNA, 18 nt, Human
uuaccgcguuguaaaaua

SEQ ID NO: 2424706 - RNA, 16 nt, Human
uuaccgcguuguaaaa

SEQ ID NO: 2424707 - RNA, 15 nt, Human
uuaccgcguuguaaa

SEQ ID NO: 2424708 - RNA, 20 nt, Human
uuaccuaaacagauauaaau

SEQ ID NO: 2424709 - RNA, 19 nt, Human
uuaccuaaacagauauaaa

SEQ ID NO: 2424710 - RNA, 18 nt, Human
uuaccuaaacagauauaa

SEQ ID NO: 2424711 - RNA, 17 nt, Human
uuaccuaaacagauaua

SEQ ID NO: 2424712 - RNA, 21 nt, Human
uuaccuaaacagauauaaaug

SEQ ID NO: 2424713 - RNA, 12 nt, Human
uuaccucuuuaa

SEQ ID NO: 2424714 - RNA, 20 nt, Human
uuaccucuuaacaauuucug

SEQ ID NO: 2424715 - RNA, 15 nt, Human
uuaccucuuaacaau

SEQ ID NO: 2424716 - RNA, 21 nt, Human
uuaccucugauaccucaaccc

SEQ ID NO: 2424717 - RNA, 11 nt, Human
uuaccucugau

SEQ ID NO: 2424718 - RNA, 19 nt, Human
uuaccuccugcccaggaga

SEQ ID NO: 2424719 - RNA, 13 nt, Human
uuaccuaauuaga

SEQ ID NO: 2424720 - RNA, 15 nt, Human
auaagaaaguuucac

SEQ ID NO: 2424721 - RNA, 23 nt, Human
auaagaaccuuuugagugccuua

SEQ ID NO: 2424722 - RNA, 15 nt, Human
auaagaauaaaaugu

SEQ ID NO: 2424723 - RNA, 21 nt, Human
auaagaagggauggauuccaa

SEQ ID NO: 2424724 - RNA, 18 nt, Human
auaagaauaaaauguuga

SEQ ID NO: 2424725 - RNA, 20 nt, Human
auaagaagggauggauucca

SEQ ID NO: 2424726 - RNA, 23 nt, Human
auaagcaaagggagcacuggguu

SEQ ID NO: 2424727 - RNA, 12 nt, Human
auaagcaagaga

SEQ ID NO: 2424728 - RNA, 14 nt, Human
auaagcaagagaga

SEQ ID NO: 2424729 - RNA, 15 nt, Human
auaagcaagagagau

SEQ ID NO: 2424730 - RNA, 17 nt, Human
auaagcaagagagaugu

SEQ ID NO: 2424731 - RNA, 17 nt, Human
auaaguuaacuuccaau

SEQ ID NO: 2424732 - RNA, 17 nt, Human
auaagcacugugcuaau

SEQ ID NO: 2424733 - RNA, 14 nt, Human
auaagcacugugcu

SEQ ID NO: 2424734 - RNA, 16 nt, Human
auaagcaagagagaug

SEQ ID NO: 2424735 - RNA, 18 nt, Human
auaagcacugugcuaaua

SEQ ID NO: 2424736 - RNA, 16 nt, Human
auaagcagauuuaaca

SEQ ID NO: 2424737 - RNA, 22 nt, Human
auaaguuaacuauuuuauuuuc

SEQ ID NO: 2424738 - RNA, 23 nt, Human
uuagauugaaaacuuuucucaga

SEQ ID NO: 2424739 - RNA, 17 nt, Human
uuagauuagcucuggac

SEQ ID NO: 2424740 - RNA, 16 nt, Human
uuagauuagcucugga

SEQ ID NO: 2424741 - RNA, 21 nt, Human
auaauuguaucguauagcugu

SEQ ID NO: 2424742 - RNA, 20 nt, Human
auaauuguaucguauagcug

SEQ ID NO: 2424743 - RNA, 22 nt, Human
auaauuguaucguauagcugua

SEQ ID NO: 2424744 - RNA, 16 nt, Human
uuagauggauucucca

SEQ ID NO: 2424745 - RNA, 17 nt, Human
uuagauggauucuccac

SEQ ID NO: 2424746 - RNA, 14 nt, Human
uuagauuagcucug

SEQ ID NO: 2424747 - RNA, 23 nt, Human
uuagauggauucuccacucaguu

SEQ ID NO: 2424748 - RNA, 12 nt, Human
uuagcaccaggg

SEQ ID NO: 2424749 - RNA, 15 nt, Human
uuagcagcuuccaga

SEQ ID NO: 2424750 - RNA, 20 nt, Human
uuagcaggagaggagagcca

SEQ ID NO: 2424751 - RNA, 12 nt, Human
uuagcagacagg

SEQ ID NO: 2424752 - RNA, 21 nt, Human
uuagcagcagccuuuaaugca

SEQ ID NO: 2424753 - RNA, 12 nt, Human
auaauucuaaag

SEQ ID NO: 2424754 - RNA, 20 nt, Human
auaauucccuaucuuuuagu

SEQ ID NO: 2424755 - RNA, 14 nt, Human
auaauugcauucau

SEQ ID NO: 2424756 - RNA, 13 nt, Human
auaauugcauuca

SEQ ID NO: 2424757 - RNA, 14 nt, Human
auaauugaucaaau

SEQ ID NO: 2424758 - RNA, 15 nt, Human
auaauugaucaaauu

SEQ ID NO: 2424759 - RNA, 19 nt, Human
auaauugaguuuucagugg

SEQ ID NO: 2424760 - RNA, 22 nt, Human
uuagaugcaguucugaagaaga

SEQ ID NO: 2424761 - RNA, 23 nt, Human
uuagaugcaguucugaagaagau

SEQ ID NO: 2424762 - RNA, 13 nt, Human
auaauuguaucgu

SEQ ID NO: 2424763 - RNA, 23 nt, Human
auaauuguaucagaggccuauaa

SEQ ID NO: 2424764 - RNA, 17 nt, Human
auaauuguaucagaggc

SEQ ID NO: 2424765 - RNA, 12 nt, Human
auaauuguauca

SEQ ID NO: 2424766 - RNA, 14 nt, Human
auaaugaauacuuu

SEQ ID NO: 2424767 - RNA, 14 nt, Human
auaaugaagcuuua

SEQ ID NO: 2424768 - RNA, 14 nt, Human
auaauucuacuuug

SEQ ID NO: 2424769 - RNA, 16 nt, Human
auaauuaugacaguua

SEQ ID NO: 2424770 - RNA, 20 nt, Human
auaauucaggaagcagcuuu

SEQ ID NO: 2424771 - RNA, 14 nt, Human
auaauuaugacagu

SEQ ID NO: 2424772 - RNA, 12 nt, Human
auaauucccuau

SEQ ID NO: 2424773 - RNA, 17 nt, Human
auaauucccuaucuuuu

SEQ ID NO: 2424774 - RNA, 19 nt, Human
auaauucccuaucuuuuag

SEQ ID NO: 2424775 - RNA, 17 nt, Human
auaauuauccagaguuu

SEQ ID NO: 2424776 - RNA, 16 nt, Human
auaauuaucggaagca

SEQ ID NO: 2424777 - RNA, 19 nt, Human
auaauuaucggaagcagug

SEQ ID NO: 2424778 - RNA, 20 nt, Human
auaauuaucggaagcagugc

SEQ ID NO: 2424779 - RNA, 21 nt, Human
auaauuaucggaagcagugcc

SEQ ID NO: 2424780 - RNA, 22 nt, Human
auaauuaucggaagcagugccu

SEQ ID NO: 2424781 - RNA, 19 nt, Human
auaaucacuuuuuuccaca

SEQ ID NO: 2424782 - RNA, 21 nt, Human
auaaucagcaagaauuugauc

SEQ ID NO: 2424783 - RNA, 13 nt, Human
auaaucagccucu

SEQ ID NO: 2424784 - RNA, 16 nt, Human
auaaucacgcuuuccu

SEQ ID NO: 2424785 - RNA, 18 nt, Human
auaaucacgcuuuccuga

SEQ ID NO: 2424786 - RNA, 21 nt, Human
auaauacacuaauuccuuucu

SEQ ID NO: 2424787 - RNA, 17 nt, Human
auaauacagccaaagau

SEQ ID NO: 2424788 - RNA, 21 nt, Human
auaauacagccaaagauaauc

SEQ ID NO: 2424789 - RNA, 22 nt, Human
auaauacacuaauuccuuucua

SEQ ID NO: 2424790 - RNA, 12 nt, Human
auaauaauauau

SEQ ID NO: 2424791 - RNA, 19 nt, Human
auaauacaguaucucaggg

SEQ ID NO: 2424792 - RNA, 21 nt, Human
auaaucuuucacaggggacag

SEQ ID NO: 2424793 - RNA, 15 nt, Human
auaaucccagcacuu

SEQ ID NO: 2424794 - RNA, 17 nt, Human
auaauccagucuucacu

SEQ ID NO: 2424795 - RNA, 13 nt, Human
auaaucuuugggu

SEQ ID NO: 2424796 - RNA, 14 nt, Human
auaaucagccucuu

SEQ ID NO: 2424797 - RNA, 15 nt, Human
auaaucagccucuua

SEQ ID NO: 2424798 - RNA, 16 nt, Human
auaaucagccucuuaa

SEQ ID NO: 2424799 - RNA, 17 nt, Human
auaaucagccucuuaaa

SEQ ID NO: 2424800 - RNA, 20 nt, Human
auaaucagugugucuaaauu

SEQ ID NO: 2424801 - RNA, 22 nt, Human
auaccacaggaaccacaagacu

SEQ ID NO: 2424802 - RNA, 19 nt, Human
auaccaaugaaaaaaugua

SEQ ID NO: 2424803 - RNA, 17 nt, Human
auaccagccaguaaaug

SEQ ID NO: 2424804 - RNA, 20 nt, Human
auaccaaugcuuuuaucaaa

SEQ ID NO: 2424805 - RNA, 17 nt, Human
auaccaaguauuuauua

SEQ ID NO: 2424806 - RNA, 21 nt, Human
auaccaaugaaaaaauguaua

SEQ ID NO: 2424807 - RNA, 19 nt, Human
auaccagccaguaaauggg

SEQ ID NO: 2424808 - RNA, 21 nt, Human
auacuaaccagcagaaaugcc

SEQ ID NO: 2424809 - RNA, 20 nt, Human
auaccagugaaccaaagaga

SEQ ID NO: 2424810 - RNA, 14 nt, Human
auacuaagaaaaga

SEQ ID NO: 2424811 - RNA, 16 nt, Human
auaccagcgaggaggc

SEQ ID NO: 2424812 - RNA, 22 nt, Human
auaccagcgaggaggcuccaga

SEQ ID NO: 2424813 - RNA, 18 nt, Human
auaccagcuuagauuuua

SEQ ID NO: 2424814 - RNA, 22 nt, Human
auaccagccccuguauggcacu

SEQ ID NO: 2424815 - RNA, 17 nt, Human
auaccaggccgccccag

SEQ ID NO: 2424816 - RNA, 19 nt, Human
auaccagugaaccaaagag

SEQ ID NO: 2424817 - RNA, 17 nt, Human
auaccagugaaccaaag

SEQ ID NO: 2424818 - RNA, 14 nt, Human
auaccagguugaaa

SEQ ID NO: 2424819 - RNA, 16 nt, Human
auaccagguugaaaga

SEQ ID NO: 2424820 - RNA, 12 nt, Human
auaccagugugg

SEQ ID NO: 2424821 - RNA, 19 nt, Human
auaccauggugaauuaauc

SEQ ID NO: 2424822 - RNA, 13 nt, Human
auacuacaguuug

SEQ ID NO: 2424823 - RNA, 15 nt, Human
auacuacaguuuguu

SEQ ID NO: 2424824 - RNA, 16 nt, Human
auacuacaguuuguua

SEQ ID NO: 2424825 - RNA, 20 nt, Human
auacuacaguuuguuaguau

SEQ ID NO: 2424826 - RNA, 14 nt, Human
auacuaccuugaaa

SEQ ID NO: 2424827 - RNA, 15 nt, Human
auacuaccuugaaaa

SEQ ID NO: 2424828 - RNA, 17 nt, Human
auacuaccuugaaaaua

SEQ ID NO: 2424829 - RNA, 13 nt, Human
auacuacuccugu

SEQ ID NO: 2424830 - RNA, 22 nt, Human
auacuauuuaaagccuccucau

SEQ ID NO: 2424831 - RNA, 21 nt, Human
auacuauuuaaagccuccuca

SEQ ID NO: 2424832 - RNA, 20 nt, Human
auacuauuuaguuuuuguaa

SEQ ID NO: 2424833 - RNA, 19 nt, Human
auacuauuuuuacugccac

SEQ ID NO: 2424834 - RNA, 18 nt, Human
auacuauuuuuacugcca

SEQ ID NO: 2424835 - RNA, 20 nt, Human
auacuauuuuuacugccacu

SEQ ID NO: 2424836 - RNA, 15 nt, Human
auacuauuuuuacug

SEQ ID NO: 2424837 - RNA, 23 nt, Human
auacuauuuaguuuuuguaauuu

SEQ ID NO: 2424838 - RNA, 17 nt, Human
uuaucaugugaaaucau

SEQ ID NO: 2424839 - RNA, 20 nt, Human
uuaucauccacauuguuuua

SEQ ID NO: 2424840 - RNA, 19 nt, Human
uuaucaugacauguuauau

SEQ ID NO: 2424841 - RNA, 18 nt, Human
uuaucauccacauuguuu

SEQ ID NO: 2424842 - RNA, 11 nt, Human
uuaucaugcaa

SEQ ID NO: 2424843 - RNA, 21 nt, Human
uuaucagucauaacuaaauaa

SEQ ID NO: 2424844 - RNA, 23 nt, Human
uuaucagucaauauuuuuagaua

SEQ ID NO: 2424845 - RNA, 14 nt, Human
uuaucagucaauau

SEQ ID NO: 2424846 - RNA, 15 nt, Human
uuaucagucaauauu

SEQ ID NO: 2424847 - RNA, 23 nt, Human
uuaucagucauaacuaaauaaag

SEQ ID NO: 2424848 - RNA, 21 nt, Human
uuaucaguaagaaaaagaaga

SEQ ID NO: 2424849 - RNA, 16 nt, Human
uuaucagugacagagu

SEQ ID NO: 2424850 - RNA, 16 nt, Human
uuaucauccacauugu

SEQ ID NO: 2424851 - RNA, 17 nt, Human
uuaucagugacagaguu

SEQ ID NO: 2424852 - RNA, 20 nt, Human
uuaucaugugaaaucauuca

SEQ ID NO: 2424853 - RNA, 18 nt, Human
uuaucaugugaaaucauu

SEQ ID NO: 2424854 - RNA, 22 nt, Human
uuaucaugugaaaucauucauu

SEQ ID NO: 2424855 - RNA, 14 nt, Human
uuaucauguguaau

SEQ ID NO: 2424856 - RNA, 13 nt, Human
uuaucauguguaa

SEQ ID NO: 2424857 - RNA, 12 nt, Human
uuaucaugugua

SEQ ID NO: 2424858 - RNA, 19 nt, Human
uuaucauggucucagucau

SEQ ID NO: 2424859 - RNA, 16 nt, Human
uuaucaugcaaaugcu

SEQ ID NO: 2424860 - RNA, 13 nt, Human
uuaucaugcuguc

SEQ ID NO: 2424861 - RNA, 16 nt, Human
uuaucaugcugucuuu

SEQ ID NO: 2424862 - RNA, 16 nt, Human
uuaucaaaacuuucuu

SEQ ID NO: 2424863 - RNA, 15 nt, Human
uuaucaaaacuuucu

SEQ ID NO: 2424864 - RNA, 13 nt, Human
uuaucaaaucagu

SEQ ID NO: 2424865 - RNA, 15 nt, Human
uuaucaacaauagug

SEQ ID NO: 2424866 - RNA, 17 nt, Human
auacucauaaugugaag

SEQ ID NO: 2424867 - RNA, 16 nt, Human
auacucauaaugugaa

SEQ ID NO: 2424868 - RNA, 15 nt, Human
auacucauaauguga

SEQ ID NO: 2424869 - RNA, 15 nt, Human
auacucauccuugua

SEQ ID NO: 2424870 - RNA, 20 nt, Human
auacucauaaugugaagugu

SEQ ID NO: 2424871 - RNA, 19 nt, Human
auacucauaaugugaagug

SEQ ID NO: 2424872 - RNA, 18 nt, Human
auacucauaaugugaagu

SEQ ID NO: 2424873 - RNA, 11 nt, Human
auacucaugug

SEQ ID NO: 2424874 - RNA, 18 nt, Human
auacucauccuuguauaa

SEQ ID NO: 2424875 - RNA, 12 nt, Human
auacucaugugu

SEQ ID NO: 2424876 - RNA, 20 nt, Human
uuaucaguaagaaaaagaag

SEQ ID NO: 2424877 - RNA, 18 nt, Human
uuaucacugacacaaaaa

SEQ ID NO: 2424878 - RNA, 14 nt, Human
uuaucaagugucuu

SEQ ID NO: 2424879 - RNA, 11 nt, Human
uuaucaagugu

SEQ ID NO: 2424880 - RNA, 21 nt, Human
uuaucaccgugggcucccuga

SEQ ID NO: 2424881 - RNA, 14 nt, Human
uuaucaacauuugu

SEQ ID NO: 2424882 - RNA, 20 nt, Human
uuaucaaaucagucagugca

SEQ ID NO: 2424883 - RNA, 19 nt, Human
auacauugaauuagaaaca

SEQ ID NO: 2424884 - RNA, 17 nt, Human
auacauugaauuagaaa

SEQ ID NO: 2424885 - RNA, 15 nt, Human
auacauugaauuaga

SEQ ID NO: 2424886 - RNA, 21 nt, Human
auacauugucucuaaauugug

SEQ ID NO: 2424887 - RNA, 16 nt, Human
auacauugucucuaaa

SEQ ID NO: 2424888 - RNA, 15 nt, Human
auacauuuauaaugu

SEQ ID NO: 2424889 - RNA, 20 nt, Human
auacauuuauaauguuugcu

SEQ ID NO: 2424890 - RNA, 21 nt, Human
auacauuuauaauguuugcua

SEQ ID NO: 2424891 - RNA, 21 nt, Human
auacauuucuccuuugauaaa

SEQ ID NO: 2424892 - RNA, 20 nt, Human
auacauuucuccuuugauaa

SEQ ID NO: 2424893 - RNA, 17 nt, Human
auacauuuaugaauuaa

SEQ ID NO: 2424894 - RNA, 23 nt, Human
auacauuuauaauguuugcuauu

SEQ ID NO: 2424895 - RNA, 16 nt, Human
auacauuugauaaagu

SEQ ID NO: 2424896 - RNA, 19 nt, Human
auacauuugaggggaaaac

SEQ ID NO: 2424897 - RNA, 22 nt, Human
auacauuucuccuuugauaaaa

SEQ ID NO: 2424898 - RNA, 14 nt, Human
auaccaaguauuua

SEQ ID NO: 2424899 - RNA, 18 nt, Human
auaccaaaauuauuucag

SEQ ID NO: 2424900 - RNA, 20 nt, Human
auaccaaaauuauuucagaa

SEQ ID NO: 2424901 - RNA, 19 nt, Human
auaccaaaauuauuucaga

SEQ ID NO: 2424902 - RNA, 16 nt, Human
auacaguuguuggccu

SEQ ID NO: 2424903 - RNA, 22 nt, Human
auacagucccuaaagaaaaaaa

SEQ ID NO: 2424904 - RNA, 20 nt, Human
auacagucccuaaagaaaaa

SEQ ID NO: 2424905 - RNA, 18 nt, Human
auacagucccuaaagaaa

SEQ ID NO: 2424906 - RNA, 17 nt, Human
auacagucccuaaagaa

SEQ ID NO: 2424907 - RNA, 20 nt, Human
auacaguaacuuuaugugua

SEQ ID NO: 2424908 - RNA, 19 nt, Human
auacaguaacuuuaugugu

SEQ ID NO: 2424909 - RNA, 19 nt, Human
auacaguaagcugcucuau

SEQ ID NO: 2424910 - RNA, 15 nt, Human
auacaguacaggcag

SEQ ID NO: 2424911 - RNA, 16 nt, Human
auacaguacaggcagc

SEQ ID NO: 2424912 - RNA, 19 nt, Human
auacaguacaggcagcaca

SEQ ID NO: 2424913 - RNA, 22 nt, Human
auacauaugaguguggaagccg

SEQ ID NO: 2424914 - RNA, 21 nt, Human
auacauaucuuuauuaaucac

SEQ ID NO: 2424915 - RNA, 22 nt, Human
auacaguuugucacaugaaaca

SEQ ID NO: 2424916 - RNA, 20 nt, Human
auacaguuguuggccuccgg

SEQ ID NO: 2424917 - RNA, 14 nt, Human
auacauauuuccaa

SEQ ID NO: 2424918 - RNA, 20 nt, Human
auacaucccuuaccugggaa

SEQ ID NO: 2424919 - RNA, 21 nt, Human
auacauauuuuauagaacuuc

SEQ ID NO: 2424920 - RNA, 16 nt, Human
auacaugacucagcau

SEQ ID NO: 2424921 - RNA, 21 nt, Human
auacaguucggugagcuacaa

SEQ ID NO: 2424922 - RNA, 21 nt, Human
auacagggcaugcauuuugca

SEQ ID NO: 2424923 - RNA, 18 nt, Human
auacaguaacuuuaugug

SEQ ID NO: 2424924 - RNA, 17 nt, Human
auacaguaacuuuaugu

SEQ ID NO: 2424925 - RNA, 20 nt, Human
auacaggaaaagcugcugac

SEQ ID NO: 2424926 - RNA, 19 nt, Human
auacaggaaaagcugcuga

SEQ ID NO: 2424927 - RNA, 14 nt, Human
auacaggaaaagcu

SEQ ID NO: 2424928 - RNA, 15 nt, Human
auacaaauuagaaaa

SEQ ID NO: 2424929 - RNA, 17 nt, Human
auacaaauuagaaaaug

SEQ ID NO: 2424930 - RNA, 14 nt, Human
auacaaauuagaaa

SEQ ID NO: 2424931 - RNA, 23 nt, Human
auaauuuuuuuauuacugauuuu

SEQ ID NO: 2424932 - RNA, 18 nt, Human
auacaaacaauggaaacu

SEQ ID NO: 2424933 - RNA, 16 nt, Human
auacaaacaauggaaa

SEQ ID NO: 2424934 - RNA, 22 nt, Human
auacaaacaauggaaacugaau

SEQ ID NO: 2424935 - RNA, 19 nt, Human
auacaaacauauuuguuaa

SEQ ID NO: 2424936 - RNA, 11 nt, Human
auacagcucua

SEQ ID NO: 2424937 - RNA, 13 nt, Human
auacagcucagaa

SEQ ID NO: 2424938 - RNA, 20 nt, Human
auacagcauuacaaauugcu

SEQ ID NO: 2424939 - RNA, 20 nt, Human
auacagcccucccccagcag

SEQ ID NO: 2424940 - RNA, 18 nt, Human
auacagccaaagauaauc

SEQ ID NO: 2424941 - RNA, 16 nt, Human
auacagcaacaauuua

SEQ ID NO: 2424942 - RNA, 22 nt, Human
auacagauuuugauagcaaagc

SEQ ID NO: 2424943 - RNA, 19 nt, Human
auacagauuuugauagcaa

SEQ ID NO: 2424944 - RNA, 18 nt, Human
auacagauuuugauagca

SEQ ID NO: 2424945 - RNA, 17 nt, Human
auacagauuuugauagc

SEQ ID NO: 2424946 - RNA, 16 nt, Human
auacagauuuugauag

SEQ ID NO: 2424947 - RNA, 14 nt, Human
auacagauuuugau

SEQ ID NO: 2424948 - RNA, 18 nt, Human
auacaaauuagaaaaugu

SEQ ID NO: 2424949 - RNA, 15 nt, Human
uuauaguuguaacua

SEQ ID NO: 2424950 - RNA, 20 nt, Human
uuauaguugugggugggaga

SEQ ID NO: 2424951 - RNA, 18 nt, Human
uuauauaagcuuguauuc

SEQ ID NO: 2424952 - RNA, 12 nt, Human
uuauaguuugua

SEQ ID NO: 2424953 - RNA, 16 nt, Human
uuauaguuuguacaug

SEQ ID NO: 2424954 - RNA, 15 nt, Human
uuauaguuuguacau

SEQ ID NO: 2424955 - RNA, 14 nt, Human
uuauauaaaugcuu

SEQ ID NO: 2424956 - RNA, 13 nt, Human
uuauauaaaugcu

SEQ ID NO: 2424957 - RNA, 22 nt, Human
uuauauagauuauaacuugucu

SEQ ID NO: 2424958 - RNA, 21 nt, Human
auaauuuuaagaaaucaaaga

SEQ ID NO: 2424959 - RNA, 15 nt, Human
auaauuuuaagaaau

SEQ ID NO: 2424960 - RNA, 14 nt, Human
auaauuuuaagaaa

SEQ ID NO: 2424961 - RNA, 12 nt, Human
uuauauauguga

SEQ ID NO: 2424962 - RNA, 17 nt, Human
uuauauauguauuuaua

SEQ ID NO: 2424963 - RNA, 13 nt, Human
auaauuuucuuca

SEQ ID NO: 2424964 - RNA, 17 nt, Human
auaauuuucuucaugca

SEQ ID NO: 2424965 - RNA, 22 nt, Human
auaauuuucuucaugcaaugac

SEQ ID NO: 2424966 - RNA, 23 nt, Human
auaauuuucuucaugcaaugaca

SEQ ID NO: 2424967 - RNA, 19 nt, Human
auaauuuuaugaaugucuu

SEQ ID NO: 2424968 - RNA, 15 nt, Human
auaauuuuaugaaug

SEQ ID NO: 2424969 - RNA, 19 nt, Human
uuauauauauauauauuuc

SEQ ID NO: 2424970 - RNA, 14 nt, Human
uuauauauguauuu

SEQ ID NO: 2424971 - RNA, 19 nt, Human
uuauauagauuauaacuug

SEQ ID NO: 2424972 - RNA, 18 nt, Human
uuauauagguugugcaaa

SEQ ID NO: 2424973 - RNA, 21 nt, Human
uuauauagggaucaaccagcu

SEQ ID NO: 2424974 - RNA, 15 nt, Human
uuauauauacaguaa

SEQ ID NO: 2424975 - RNA, 23 nt, Human
uuauauagguuuuguuugcuauc

SEQ ID NO: 2424976 - RNA, 21 nt, Human
uuauauagguuuuguuugcua

SEQ ID NO: 2424977 - RNA, 18 nt, Human
uuauauaguuuacuauuu

SEQ ID NO: 2424978 - RNA, 20 nt, Human
auaauuuugugaagcaaaau

SEQ ID NO: 2424979 - RNA, 15 nt, Human
auaauuuugugaagc

SEQ ID NO: 2424980 - RNA, 14 nt, Human
auaauuuugugaag

SEQ ID NO: 2424981 - RNA, 13 nt, Human
auaauuuugugaa

SEQ ID NO: 2424982 - RNA, 19 nt, Human
auaauuuuuauauuugaaa

SEQ ID NO: 2424983 - RNA, 16 nt, Human
auaauuuuuauauuug

SEQ ID NO: 2424984 - RNA, 14 nt, Human
auaauuuuuauauu

SEQ ID NO: 2424985 - RNA, 15 nt, Human
auaauuuuuaaagua

SEQ ID NO: 2424986 - RNA, 22 nt, Human
auacaaaaaaaaaaaaaaauua

SEQ ID NO: 2424987 - RNA, 12 nt, Human
auacaaaagcau

SEQ ID NO: 2424988 - RNA, 13 nt, Human
auacaaaagcaug

SEQ ID NO: 2424989 - RNA, 15 nt, Human
auacaaaagcaugug

SEQ ID NO: 2424990 - RNA, 22 nt, Human
auaauuuuuauauuugaaauau

SEQ ID NO: 2424991 - RNA, 21 nt, Human
auaauuuuuauauuugaaaua

SEQ ID NO: 2424992 - RNA, 22 nt, Human
auaauuuuuuucaauauuuauu

SEQ ID NO: 2424993 - RNA, 21 nt, Human
auaauuuuuuucaauauuuau

SEQ ID NO: 2424994 - RNA, 17 nt, Human
auaauuuuuuauucaag

SEQ ID NO: 2424995 - RNA, 20 nt, Human
auaauuuuuuucaauauuua

SEQ ID NO: 2424996 - RNA, 16 nt, Human
auaauuuuuuauucaa

SEQ ID NO: 2424997 - RNA, 15 nt, Human
auaauuuuuuauuca

SEQ ID NO: 2424998 - RNA, 18 nt, Human
auaauuuuuaaaguauau

SEQ ID NO: 2424999 - RNA, 19 nt, Human
auaauuuuuaaaguauaua

SEQ ID NO: 2425000 - RNA, 21 nt, Human
auaauuuuuaaaguauauauu

SEQ ID NO: 2425001 - RNA, 23 nt, Human
auaauuuuuaaaguauauauuua

SEQ ID NO: 2425002 - RNA, 19 nt, Human
uuauagguggccucuccuu

SEQ ID NO: 2425003 - RNA, 17 nt, Human
uuauaggucacuccugg

SEQ ID NO: 2425004 - RNA, 18 nt, Human
uuauaggucacuccuggg

SEQ ID NO: 2425005 - RNA, 18 nt, Human
uuauaguauaucuggaca

SEQ ID NO: 2425006 - RNA, 15 nt, Human
uuauaguauaucugg

SEQ ID NO: 2425007 - RNA, 21 nt, Human
uuauagugauguaaucuugaa

SEQ ID NO: 2425008 - RNA, 16 nt, Human
uuauaggaucauuugu

SEQ ID NO: 2425009 - RNA, 22 nt, Human
uuauagccacaucccuuugaaa

SEQ ID NO: 2425010 - RNA, 17 nt, Human
uuauagcuauuacuguc

SEQ ID NO: 2425011 - RNA, 16 nt, Human
uuauagcucaguuuau

SEQ ID NO: 2425012 - RNA, 21 nt, Human
uuauagaugggaaugaagcuu

SEQ ID NO: 2425013 - RNA, 21 nt, Human
uuauagaucccccagacuuua

SEQ ID NO: 2425014 - RNA, 15 nt, Human
uuauagaugucuagg

SEQ ID NO: 2425015 - RNA, 15 nt, Human
uuauagauuugaccu

SEQ ID NO: 2425016 - RNA, 17 nt, Human
uuauagcaaacuuggaa

SEQ ID NO: 2425017 - RNA, 16 nt, Human
uuauagccgaaaugau

SEQ ID NO: 2425018 - RNA, 17 nt, Human
uuauacguguagcuaua

SEQ ID NO: 2425019 - RNA, 15 nt, Human
uuauacguguagcua

SEQ ID NO: 2425020 - RNA, 21 nt, Human
uuauacguguagcuauaucua

SEQ ID NO: 2425021 - RNA, 18 nt, Human
uuauacguguagcuauau

SEQ ID NO: 2425022 - RNA, 12 nt, Human
uuauacuaagaa

SEQ ID NO: 2425023 - RNA, 16 nt, Human
uuauacucuuucugua

SEQ ID NO: 2425024 - RNA, 16 nt, Human
uuauacuaagaaaaga

SEQ ID NO: 2425025 - RNA, 22 nt, Human
uuauacuguacuuaauaaauuc

SEQ ID NO: 2425026 - RNA, 23 nt, Human
uuauagaguguacuuaacuauuc

SEQ ID NO: 2425027 - RNA, 19 nt, Human
uuauagagggccaagacuu

SEQ ID NO: 2425028 - RNA, 21 nt, Human
uuauagaggcuagcuucugcu

SEQ ID NO: 2425029 - RNA, 15 nt, Human
uuauagacaaauaau

SEQ ID NO: 2425030 - RNA, 23 nt, Human
uuauagaauauuuauuaccucug

SEQ ID NO: 2425031 - RNA, 15 nt, Human
uuauagaauauuuau

SEQ ID NO: 2425032 - RNA, 14 nt, Human
uuauagaaaguuca

SEQ ID NO: 2425033 - RNA, 14 nt, Human
uuauacuguauuaa

SEQ ID NO: 2425034 - RNA, 18 nt, Human
uuauacuuuguaaagaca

SEQ ID NO: 2425035 - RNA, 16 nt, Human
uuauaacucaucauaa

SEQ ID NO: 2425036 - RNA, 17 nt, Human
uuauaacucaucauaaa

SEQ ID NO: 2425037 - RNA, 18 nt, Human
uuauaacucaucauaaaa

SEQ ID NO: 2425038 - RNA, 16 nt, Human
uuauaacucugcacua

SEQ ID NO: 2425039 - RNA, 22 nt, Human
uuauaacuacuccggagacagg

SEQ ID NO: 2425040 - RNA, 19 nt, Human
uuauaacucugcacuacuc

SEQ ID NO: 2425041 - RNA, 18 nt, Human
uuauaacugaaggagaag

SEQ ID NO: 2425042 - RNA, 19 nt, Human
uuauaacucaucauaaaau

SEQ ID NO: 2425043 - RNA, 20 nt, Human
uuauaacucaucauaaaaua

SEQ ID NO: 2425044 - RNA, 21 nt, Human
uuauaacucaucauaaaauaa

SEQ ID NO: 2425045 - RNA, 22 nt, Human
uuauaacucaucauaaaauaaa

SEQ ID NO: 2425046 - RNA, 18 nt, Human
uuauacccccugcaaagc

SEQ ID NO: 2425047 - RNA, 13 nt, Human
uuauaacuuaaaa

SEQ ID NO: 2425048 - RNA, 15 nt, Human
uuauaacuuaaaaaa

SEQ ID NO: 2425049 - RNA, 17 nt, Human
uuauaacuuaaaauauu

SEQ ID NO: 2425050 - RNA, 14 nt, Human
uuauaaaugcuauu

SEQ ID NO: 2425051 - RNA, 17 nt, Human
uuauaaaucgcuuuuga

SEQ ID NO: 2425052 - RNA, 18 nt, Human
uuauaaaucgcuuuugau

SEQ ID NO: 2425053 - RNA, 21 nt, Human
uuauaaauuauguuuauauaa

SEQ ID NO: 2425054 - RNA, 17 nt, Human
uuauaaauuauguuuau

SEQ ID NO: 2425055 - RNA, 16 nt, Human
uuauaaauuauguuua

SEQ ID NO: 2425056 - RNA, 15 nt, Human
uuauaaauuauguuu

SEQ ID NO: 2425057 - RNA, 14 nt, Human
uuauaaauuauguu

SEQ ID NO: 2425058 - RNA, 13 nt, Human
uuauaaauuaugu

SEQ ID NO: 2425059 - RNA, 11 nt, Human
uuauaaauuau

SEQ ID NO: 2425060 - RNA, 17 nt, Human
uuagccugaguagaaag

SEQ ID NO: 2425061 - RNA, 15 nt, Human
uuagccucccugaaa

SEQ ID NO: 2425062 - RNA, 21 nt, Human
uuauaaauaugaagcucaccu

SEQ ID NO: 2425063 - RNA, 14 nt, Human
uuauaaaucgcuuu

SEQ ID NO: 2425064 - RNA, 12 nt, Human
uuauaaauauga

SEQ ID NO: 2425065 - RNA, 13 nt, Human
uuagcccccaccc

SEQ ID NO: 2425066 - RNA, 12 nt, Human
uuagcccccacc

SEQ ID NO: 2425067 - RNA, 17 nt, Human
uuagcccccacccacuu

SEQ ID NO: 2425068 - RNA, 13 nt, Human
uuagccgggcgug

SEQ ID NO: 2425069 - RNA, 14 nt, Human
uuagccccauaauu

SEQ ID NO: 2425070 - RNA, 16 nt, Human
uuagcaguuugcuuug

SEQ ID NO: 2425071 - RNA, 23 nt, Human
uuagcaggagaggagagccagag

SEQ ID NO: 2425072 - RNA, 22 nt, Human
uuagcaggagaggagagccaga

SEQ ID NO: 2425073 - RNA, 13 nt, Human
uguucugggacac

SEQ ID NO: 2425074 - RNA, 14 nt, Human
uguuccccucacug

SEQ ID NO: 2425075 - RNA, 21 nt, Human
uguucccccgccgcuuuucuc

SEQ ID NO: 2425076 - RNA, 16 nt, Human
uguucccccugugcag

SEQ ID NO: 2425077 - RNA, 12 nt, Human
uguucugggaca

SEQ ID NO: 2425078 - RNA, 16 nt, Human
uguucccccgccgcuu

SEQ ID NO: 2425079 - RNA, 18 nt, Human
uguuccccauggccacuu

SEQ ID NO: 2425080 - RNA, 15 nt, Human
uguucccccugugca

SEQ ID NO: 2425081 - RNA, 13 nt, Human
uguuccccaucug

SEQ ID NO: 2425082 - RNA, 14 nt, Human
uguuccccagagaa

SEQ ID NO: 2425083 - RNA, 13 nt, Human
uguuccccagaga

SEQ ID NO: 2425084 - RNA, 22 nt, Human
uguuccccacugacagccuccc

SEQ ID NO: 2425085 - RNA, 14 nt, Human
uguucuuaauucuu

SEQ ID NO: 2425086 - RNA, 16 nt, Human
uguucuuaauucuuag

SEQ ID NO: 2425087 - RNA, 15 nt, Human
uguucugggacacag

SEQ ID NO: 2425088 - RNA, 14 nt, Human
uguucugggacaca

SEQ ID NO: 2425089 - RNA, 19 nt, Human
uguucuugguuuguaaauu

SEQ ID NO: 2425090 - RNA, 13 nt, Human
uguucuuuccaaa

SEQ ID NO: 2425091 - RNA, 14 nt, Human
uguucuuuccaaag

SEQ ID NO: 2425092 - RNA, 17 nt, Human
uguucuugguuuguaaa

SEQ ID NO: 2425093 - RNA, 18 nt, Human
uguucuugguuuguaaau

SEQ ID NO: 2425094 - RNA, 18 nt, Human
uguucuuaauugcacucu

SEQ ID NO: 2425095 - RNA, 17 nt, Human
uguucuuaccuguaugu

SEQ ID NO: 2425096 - RNA, 22 nt, Human
uguucuuaccuguaugucucca

SEQ ID NO: 2425097 - RNA, 17 nt, Human
uguucuuaauugcacuc

SEQ ID NO: 2425098 - RNA, 16 nt, Human
uguucuuaauugcacu

SEQ ID NO: 2425099 - RNA, 15 nt, Human
uguuccccucacugg

SEQ ID NO: 2425100 - RNA, 16 nt, Human
uguucuuaagacguga

SEQ ID NO: 2425101 - RNA, 23 nt, Human
aguguaggcagacacagggacuu

SEQ ID NO: 2425102 - RNA, 22 nt, Human
aguguaggcagacacagggacu

SEQ ID NO: 2425103 - RNA, 20 nt, Human
aguguaggcagacacaggga

SEQ ID NO: 2425104 - RNA, 18 nt, Human
aguguaggcagacacagg

SEQ ID NO: 2425105 - RNA, 16 nt, Human
aguguaggcagacaca

SEQ ID NO: 2425106 - RNA, 15 nt, Human
aguguaggcagacac

SEQ ID NO: 2425107 - RNA, 14 nt, Human
aguguaggcagaca

SEQ ID NO: 2425108 - RNA, 13 nt, Human
aguguaggcagac

SEQ ID NO: 2425109 - RNA, 23 nt, Human
aguguagcccacacuugagagga

SEQ ID NO: 2425110 - RNA, 21 nt, Human
aguguagcccacacuugagag

SEQ ID NO: 2425111 - RNA, 15 nt, Human
aguguagccuugccc

SEQ ID NO: 2425112 - RNA, 17 nt, Human
aguguagccuugcccgg

SEQ ID NO: 2425113 - RNA, 18 nt, Human
aguguagccuugcccgga

SEQ ID NO: 2425114 - RNA, 23 nt, Human
aguguacauggaauaacauguaa

SEQ ID NO: 2425115 - RNA, 13 nt, Human
aguguaccauaau

SEQ ID NO: 2425116 - RNA, 20 nt, Human
aguguaauuucuuugccugu

SEQ ID NO: 2425117 - RNA, 17 nt, Human
aguguacagucuuguau

SEQ ID NO: 2425118 - RNA, 22 nt, Human
aguguagaagcauuccuucuuu

SEQ ID NO: 2425119 - RNA, 15 nt, Human
aguguagaucagagc

SEQ ID NO: 2425120 - RNA, 23 nt, Human
aguguagaucagagcagcaguga

SEQ ID NO: 2425121 - RNA, 13 nt, Human
aguguagccuugc

SEQ ID NO: 2425122 - RNA, 18 nt, Human
aguguagcccacacuuga

SEQ ID NO: 2425123 - RNA, 23 nt, Human
uguuauuaaacguaugcauguga

SEQ ID NO: 2425124 - RNA, 18 nt, Human
uguuauuucuuacaggca

SEQ ID NO: 2425125 - RNA, 22 nt, Human
uguuauuaaacguaugcaugug

SEQ ID NO: 2425126 - RNA, 21 nt, Human
uguuauuaaacguaugcaugu

SEQ ID NO: 2425127 - RNA, 20 nt, Human
uguuauuaaacguaugcaug

SEQ ID NO: 2425128 - RNA, 18 nt, Human
uguuauuuucaguauuuu

SEQ ID NO: 2425129 - RNA, 14 nt, Human
uguuauuuucagua

SEQ ID NO: 2425130 - RNA, 16 nt, Human
uguuauuuguacaguu

SEQ ID NO: 2425131 - RNA, 17 nt, Human
uguuauuuguacaguuc

SEQ ID NO: 2425132 - RNA, 22 nt, Human
uguuauguaaaaggccaaaccu

SEQ ID NO: 2425133 - RNA, 15 nt, Human
uguuaugcugugaca

SEQ ID NO: 2425134 - RNA, 14 nt, Human
uguuauggaaacug

SEQ ID NO: 2425135 - RNA, 17 nt, Human
uguuauguagauaacaa

SEQ ID NO: 2425136 - RNA, 18 nt, Human
uguuauggcuuaaugaca

SEQ ID NO: 2425137 - RNA, 16 nt, Human
uguucccauuucagcu

SEQ ID NO: 2425138 - RNA, 17 nt, Human
uguucccauuucagcug

SEQ ID NO: 2425139 - RNA, 16 nt, Human
uguucccauucuugca

SEQ ID NO: 2425140 - RNA, 21 nt, Human
uguucaaagccagcguccucc

SEQ ID NO: 2425141 - RNA, 22 nt, Human
uguucaaagccagcguccuccu

SEQ ID NO: 2425142 - RNA, 20 nt, Human
uguucccauguagcccccug

SEQ ID NO: 2425143 - RNA, 22 nt, Human
uguuauuuuuauaucagccuga

SEQ ID NO: 2425144 - RNA, 19 nt, Human
uguuauuuucuuugaaauu

SEQ ID NO: 2425145 - RNA, 14 nt, Human
uguuauuuugcaac

SEQ ID NO: 2425146 - RNA, 18 nt, Human
uguuauuuucuguugaag

SEQ ID NO: 2425147 - RNA, 18 nt, Human
uguuauuuuuuaauuauu

SEQ ID NO: 2425148 - RNA, 16 nt, Human
uguuauuuuuguuucu

SEQ ID NO: 2425149 - RNA, 21 nt, Human
uguuauuuuuguuucuuccaa

SEQ ID NO: 2425150 - RNA, 19 nt, Human
uguucaaaaaaacacuagu

SEQ ID NO: 2425151 - RNA, 21 nt, Human
agugguuccuaauccucuagg

SEQ ID NO: 2425152 - RNA, 24 nt, Human
aguggucuuuguaagaguguagaa

SEQ ID NO: 2425153 - RNA, 22 nt, Human
aguggucuuuguaagaguguag

SEQ ID NO: 2425154 - RNA, 21 nt, Human
aguggucuuuguaagagugua

SEQ ID NO: 2425155 - RNA, 20 nt, Human
aguggucuuuguaagagugu

SEQ ID NO: 2425156 - RNA, 16 nt, Human
aguggugcgaucuggg

SEQ ID NO: 2425157 - RNA, 22 nt, Human
aguggucgcuuacuuugaguga

SEQ ID NO: 2425158 - RNA, 20 nt, Human
aguggucuuuccuaucaugg

SEQ ID NO: 2425159 - RNA, 13 nt, Human
aguggucuuucug

SEQ ID NO: 2425160 - RNA, 15 nt, Human
aguggucuuucugga

SEQ ID NO: 2425161 - RNA, 16 nt, Human
aguggucuuucuggag

SEQ ID NO: 2425162 - RNA, 18 nt, Human
aguggucuuucuggagag

SEQ ID NO: 2425163 - RNA, 19 nt, Human
aguggucuuuguaagagug

SEQ ID NO: 2425164 - RNA, 18 nt, Human
aguggucuuuguaagagu

SEQ ID NO: 2425165 - RNA, 17 nt, Human
aguggucuuuguaagag

SEQ ID NO: 2425166 - RNA, 16 nt, Human
aguggucuuuguaaga

SEQ ID NO: 2425167 - RNA, 15 nt, Human
aguggucuuuguaag

SEQ ID NO: 2425168 - RNA, 14 nt, Human
aguggucuuuguaa

SEQ ID NO: 2425169 - RNA, 13 nt, Human
aguggucuuugua

SEQ ID NO: 2425170 - RNA, 20 nt, Human
aguggucuuucuggagaggu

SEQ ID NO: 2425171 - RNA, 22 nt, Human
agugggucccacuuccccuccu

SEQ ID NO: 2425172 - RNA, 21 nt, Human
agugggucccacuuccccucc

SEQ ID NO: 2425173 - RNA, 17 nt, Human
agugggucccacuuccc

SEQ ID NO: 2425174 - RNA, 16 nt, Human
agugggucccacuucc

SEQ ID NO: 2425175 - RNA, 14 nt, Human
agugggucccagau

SEQ ID NO: 2425176 - RNA, 19 nt, Human
agugggugaauaauacagu

SEQ ID NO: 2425177 - RNA, 19 nt, Human
agugggugagaugcuggag

SEQ ID NO: 2425178 - RNA, 18 nt, Human
agugggugagaugcugga

SEQ ID NO: 2425179 - RNA, 22 nt, Human
agugggugagaugcuggagaag

SEQ ID NO: 2425180 - RNA, 16 nt, Human
aguggguuauucugga

SEQ ID NO: 2425181 - RNA, 15 nt, Human
aguggguuauucugg

SEQ ID NO: 2425182 - RNA, 18 nt, Human
agugggugguggaucugu

SEQ ID NO: 2425183 - RNA, 21 nt, Human
aguggguuucacaagugaaaa

SEQ ID NO: 2425184 - RNA, 19 nt, Human
aguggguuauucuggaguu

SEQ ID NO: 2425185 - RNA, 18 nt, Human
aguggguuauucuggagu

SEQ ID NO: 2425186 - RNA, 15 nt, Human
aguggguuucacaag

SEQ ID NO: 2425187 - RNA, 11 nt, Human
aguggugccua

SEQ ID NO: 2425188 - RNA, 18 nt, Human
agugguuuuauacugaag

SEQ ID NO: 2425189 - RNA, 17 nt, Human
agugguuuuauacugaa

SEQ ID NO: 2425190 - RNA, 19 nt, Human
agugguuguuaguuauaga

SEQ ID NO: 2425191 - RNA, 13 nt, Human
aguguaaguguga

SEQ ID NO: 2425192 - RNA, 13 nt, Human
aguguaaaauaag

SEQ ID NO: 2425193 - RNA, 23 nt, Human
agugguuuuauacugaaggaaaa

SEQ ID NO: 2425194 - RNA, 21 nt, Human
agugguuuuauacugaaggaa

SEQ ID NO: 2425195 - RNA, 20 nt, Human
agugguuuuauacugaagga

SEQ ID NO: 2425196 - RNA, 11 nt, Human
aguguaaaaua

SEQ ID NO: 2425197 - RNA, 21 nt, Human
aguguacauggaauaacaugu

SEQ ID NO: 2425198 - RNA, 22 nt, Human
aguguacauggaauaacaugua

SEQ ID NO: 2425199 - RNA, 16 nt, Human
aguguacagucuugua

SEQ ID NO: 2425200 - RNA, 15 nt, Human
aguguacagucuugu

SEQ ID NO: 2425201 - RNA, 21 nt, Human
aguguaauuucuuugccuguu

SEQ ID NO: 2425202 - RNA, 16 nt, Human
aguguaauuucuuugc

SEQ ID NO: 2425203 - RNA, 13 nt, Human
aguguacagucuu

SEQ ID NO: 2425204 - RNA, 14 nt, Human
agugggucccacuu

SEQ ID NO: 2425205 - RNA, 22 nt, Human
agugggguugcaaccacugcaa

SEQ ID NO: 2425206 - RNA, 19 nt, Human
agugggguugcaaccacug

SEQ ID NO: 2425207 - RNA, 20 nt, Human
agugggguuaucucuguguu

SEQ ID NO: 2425208 - RNA, 23 nt, Human
agugggggagagcaggcuggcag

SEQ ID NO: 2425209 - RNA, 21 nt, Human
agugggggagagcaggcuggc

SEQ ID NO: 2425210 - RNA, 21 nt, Human
agugggguuaucucuguguua

SEQ ID NO: 2425211 - RNA, 18 nt, Human
agugggggaucacagccu

SEQ ID NO: 2425212 - RNA, 13 nt, Human
agugggugaauaa

SEQ ID NO: 2425213 - RNA, 18 nt, Human
agugggugaauaauacag

SEQ ID NO: 2425214 - RNA, 20 nt, Human
agugggggaguggccacaga

SEQ ID NO: 2425215 - RNA, 19 nt, Human
agugggggaguggccacag

SEQ ID NO: 2425216 - RNA, 18 nt, Human
aguggcaggggacaggag

SEQ ID NO: 2425217 - RNA, 18 nt, Human
aguggggcucgccaugcc

SEQ ID NO: 2425218 - RNA, 19 nt, Human
agugggggagagcaggcug

SEQ ID NO: 2425219 - RNA, 16 nt, Human
agugggggagagcagg

SEQ ID NO: 2425220 - RNA, 11 nt, Human
aguggcagggg

SEQ ID NO: 2425221 - RNA, 15 nt, Human
aguggggcucgccau

SEQ ID NO: 2425222 - RNA, 11 nt, Human
aguggcagcug

SEQ ID NO: 2425223 - RNA, 20 nt, Human
ugugcaacaggguauggacu

SEQ ID NO: 2425224 - RNA, 18 nt, Human
ugugcaacaggguaugga

SEQ ID NO: 2425225 - RNA, 15 nt, Human
ugugcaaauuaacag

SEQ ID NO: 2425226 - RNA, 12 nt, Human
ugugcaaauccu

SEQ ID NO: 2425227 - RNA, 13 nt, Human
aguggcagcugcu

SEQ ID NO: 2425228 - RNA, 12 nt, Human
aguggcagcugc

SEQ ID NO: 2425229 - RNA, 20 nt, Human
aguggcagcugcuuuugucu

SEQ ID NO: 2425230 - RNA, 14 nt, Human
aguggcagcugcuu

SEQ ID NO: 2425231 - RNA, 18 nt, Human
aguggcagggcucaggau

SEQ ID NO: 2425232 - RNA, 17 nt, Human
aguggcagggcucagga

SEQ ID NO: 2425233 - RNA, 14 nt, Human
aguggcagggcuca

SEQ ID NO: 2425234 - RNA, 13 nt, Human
aguggcagggcuc

SEQ ID NO: 2425235 - RNA, 13 nt, Human
aguuauuguacag

SEQ ID NO: 2425236 - RNA, 12 nt, Human
aguuauuguaca

SEQ ID NO: 2425237 - RNA, 22 nt, Human
aguuauugcaguuuaucauuca

SEQ ID NO: 2425238 - RNA, 19 nt, Human
aguuauugcaguuuaucau

SEQ ID NO: 2425239 - RNA, 18 nt, Human
aguuauugcaguuuauca

SEQ ID NO: 2425240 - RNA, 16 nt, Human
aguuauugcaguuuau

SEQ ID NO: 2425241 - RNA, 13 nt, Human
aguuauugcaguu

SEQ ID NO: 2425242 - RNA, 17 nt, Human
aguuauugacaaacucu

SEQ ID NO: 2425243 - RNA, 18 nt, Human
aguuauugacaaacucuc

SEQ ID NO: 2425244 - RNA, 20 nt, Human
aguuauuauauuuacaaaug

SEQ ID NO: 2425245 - RNA, 15 nt, Human
aguuaugugaaugau

SEQ ID NO: 2425246 - RNA, 13 nt, Human
aguuaugugaaug

SEQ ID NO: 2425247 - RNA, 14 nt, Human
aguuaugugaauga

SEQ ID NO: 2425248 - RNA, 21 nt, Human
aguuauggccuauacacuauu

SEQ ID NO: 2425249 - RNA, 18 nt, Human
aguuauggccuauacacu

SEQ ID NO: 2425250 - RNA, 19 nt, Human
aguuauggcuauaggugcu

SEQ ID NO: 2425251 - RNA, 20 nt, Human
aguuaugauuuuuuuuucau

SEQ ID NO: 2425252 - RNA, 19 nt, Human
aguuaugccgcuagauaca

SEQ ID NO: 2425253 - RNA, 17 nt, Human
aguuaucuaaaagaaau

SEQ ID NO: 2425254 - RNA, 19 nt, Human
aguuauagaugucuaggua

SEQ ID NO: 2425255 - RNA, 17 nt, Human
aguuauagaugucuagg

SEQ ID NO: 2425256 - RNA, 15 nt, Human
aguuauagaugucua

SEQ ID NO: 2425257 - RNA, 21 nt, Human
aguuauaaguagcaggccaag

SEQ ID NO: 2425258 - RNA, 12 nt, Human
aguuauaaauca

SEQ ID NO: 2425259 - RNA, 23 nt, Human
aguuagucuacucuuaagccauc

SEQ ID NO: 2425260 - RNA, 17 nt, Human
aguuaguggauuacugc

SEQ ID NO: 2425261 - RNA, 20 nt, Human
aguuaguggauuacugccau

SEQ ID NO: 2425262 - RNA, 22 nt, Human
aguuagucuacucuuaagccau

SEQ ID NO: 2425263 - RNA, 15 nt, Human
aguuaguagcauguu

SEQ ID NO: 2425264 - RNA, 14 nt, Human
aguuaguagcaugu

SEQ ID NO: 2425265 - RNA, 17 nt, Human
aguuagucuacucuuaa

SEQ ID NO: 2425266 - RNA, 16 nt, Human
aguuaguagcauguug

SEQ ID NO: 2425267 - RNA, 17 nt, Human
aguuaguagcauguuga

SEQ ID NO: 2425268 - RNA, 16 nt, Human
aguuaguuucuuuggg

SEQ ID NO: 2425269 - RNA, 23 nt, Human
aguuaguucucucguaacugguu

SEQ ID NO: 2425270 - RNA, 17 nt, Human
aguuaguuucuuuggga

SEQ ID NO: 2425271 - RNA, 23 nt, Human
aguuacuaagaagaaaauugcug

SEQ ID NO: 2425272 - RNA, 18 nt, Human
aguuacuaagaagaaaau

SEQ ID NO: 2425273 - RNA, 17 nt, Human
aguuaggaaauaaaacc

SEQ ID NO: 2425274 - RNA, 18 nt, Human
aguuaggaaauaaaaccu

SEQ ID NO: 2425275 - RNA, 20 nt, Human
aguuaggaaauaaaaccuuu

SEQ ID NO: 2425276 - RNA, 21 nt, Human
aguuaggaaauaaaaccuuuc

SEQ ID NO: 2425277 - RNA, 22 nt, Human
aguuaggaaauaaaaccuuuca

SEQ ID NO: 2425278 - RNA, 18 nt, Human
aguuaggauagcauuuuu

SEQ ID NO: 2425279 - RNA, 16 nt, Human
aguuaggauagcauuu

SEQ ID NO: 2425280 - RNA, 15 nt, Human
aguuaggaaauaaaa

SEQ ID NO: 2425281 - RNA, 18 nt, Human
aguuaggcuauucacaac

SEQ ID NO: 2425282 - RNA, 17 nt, Human
aguuagggaauggcaca

SEQ ID NO: 2425283 - RNA, 12 nt, Human
aguguuucuguu

SEQ ID NO: 2425284 - RNA, 17 nt, Human
aguguuucugugcaugg

SEQ ID NO: 2425285 - RNA, 15 nt, Human
aguguuucugugcau

SEQ ID NO: 2425286 - RNA, 14 nt, Human
aguguuucugugca

SEQ ID NO: 2425287 - RNA, 14 nt, Human
aguguuucuguuau

SEQ ID NO: 2425288 - RNA, 13 nt, Human
aguguuucuguua

SEQ ID NO: 2425289 - RNA, 16 nt, Human
aguuacauuaauguua

SEQ ID NO: 2425290 - RNA, 13 nt, Human
aguguuucugugc

SEQ ID NO: 2425291 - RNA, 16 nt, Human
aguguuuccuuuuugg

SEQ ID NO: 2425292 - RNA, 13 nt, Human
aguguuuccuuuu

SEQ ID NO: 2425293 - RNA, 16 nt, Human
aguguuucccauaauu

SEQ ID NO: 2425294 - RNA, 19 nt, Human
aguguuucgacagcugauu

SEQ ID NO: 2425295 - RNA, 18 nt, Human
uguucuuuccaaaguaca

SEQ ID NO: 2425296 - RNA, 21 nt, Human
aguguuuauuuuucauauugu

SEQ ID NO: 2425297 - RNA, 19 nt, Human
aguguuuauuuuucauauu

SEQ ID NO: 2425298 - RNA, 17 nt, Human
aguguuuauuuuucaua

SEQ ID NO: 2425299 - RNA, 15 nt, Human
aguguuuauuuuuca

SEQ ID NO: 2425300 - RNA, 22 nt, Human
aguguuuauuuuucauauugug

SEQ ID NO: 2425301 - RNA, 15 nt, Human
aguguuucccauaau

SEQ ID NO: 2425302 - RNA, 18 nt, Human
aguucaaauucuucugaa

SEQ ID NO: 2425303 - RNA, 22 nt, Human
aguuauuguacagcuguuuaag

SEQ ID NO: 2425304 - RNA, 21 nt, Human
aguuauuguacagcuguuuaa

SEQ ID NO: 2425305 - RNA, 19 nt, Human
aguuauuguacagcuguuu

SEQ ID NO: 2425306 - RNA, 18 nt, Human
aguuauuguacagcuguu

SEQ ID NO: 2425307 - RNA, 22 nt, Human
aguuauuuaugccucuguauuu

SEQ ID NO: 2425308 - RNA, 23 nt, Human
aguuauuuucuacagugguuuua

SEQ ID NO: 2425309 - RNA, 14 nt, Human
aguuauuuucuaca

SEQ ID NO: 2425310 - RNA, 21 nt, Human
aguuauuuauuuauuggagau

SEQ ID NO: 2425311 - RNA, 19 nt, Human
aguuauuuuaauuaucuuu

SEQ ID NO: 2425312 - RNA, 13 nt, Human
aguucaaacaaga

SEQ ID NO: 2425313 - RNA, 21 nt, Human
aguuauuuuuauuuauuuaaa

SEQ ID NO: 2425314 - RNA, 17 nt, Human
aguucccuacuuccugu

SEQ ID NO: 2425315 - RNA, 14 nt, Human
aguucccugaaaac

SEQ ID NO: 2425316 - RNA, 15 nt, Human
aguucccuacuuccu

SEQ ID NO: 2425317 - RNA, 19 nt, Human
aguucccugaaaacccaga

SEQ ID NO: 2425318 - RNA, 20 nt, Human
aguucccugaaaacccagag

SEQ ID NO: 2425319 - RNA, 24 nt, Human
aguucccugaaaacccagagagga

SEQ ID NO: 2425320 - RNA, 21 nt, Human
aguucccugaaaacccagaga

SEQ ID NO: 2425321 - RNA, 13 nt, Human
aguucccuuggcc

SEQ ID NO: 2425322 - RNA, 16 nt, Human
aguuccgauuucccag

SEQ ID NO: 2425323 - RNA, 17 nt, Human
aguuccuagccaccgcc

SEQ ID NO: 2425324 - RNA, 20 nt, Human
aguuccugucccuucucuua

SEQ ID NO: 2425325 - RNA, 15 nt, Human
aguucccuuggccuc

SEQ ID NO: 2425326 - RNA, 16 nt, Human
aguucccuuggccuca

SEQ ID NO: 2425327 - RNA, 17 nt, Human
aguucccuuggccucag

SEQ ID NO: 2425328 - RNA, 18 nt, Human
aguucccuuggccucaga

SEQ ID NO: 2425329 - RNA, 20 nt, Human
aguuccuugaucuguauaua

SEQ ID NO: 2425330 - RNA, 14 nt, Human
aguuccuuauguau

SEQ ID NO: 2425331 - RNA, 20 nt, Human
aguuccuucagcuuccauuu

SEQ ID NO: 2425332 - RNA, 21 nt, Human
aguuccugucccuucucuuaa

SEQ ID NO: 2425333 - RNA, 23 nt, Human
aguuccugucccuucucuuaauu

SEQ ID NO: 2425334 - RNA, 18 nt, Human
aguucgagaccaaccuga

SEQ ID NO: 2425335 - RNA, 14 nt, Human
aguucgagaccagc

SEQ ID NO: 2425336 - RNA, 17 nt, Human
aguucgagaccagccug

SEQ ID NO: 2425337 - RNA, 18 nt, Human
uguugggauuccugaccc

SEQ ID NO: 2425338 - RNA, 17 nt, Human
uguugggauuccugacc

SEQ ID NO: 2425339 - RNA, 15 nt, Human
uguugggauuccuga

SEQ ID NO: 2425340 - RNA, 16 nt, Human
uguugggccaggagcc

SEQ ID NO: 2425341 - RNA, 18 nt, Human
uguugggauacugcaggg

SEQ ID NO: 2425342 - RNA, 18 nt, Human
uguugggagugaggaugu

SEQ ID NO: 2425343 - RNA, 13 nt, Human
uguugggccagga

SEQ ID NO: 2425344 - RNA, 15 nt, Human
aguucuaaauuuugu

SEQ ID NO: 2425345 - RNA, 21 nt, Human
aguucgagaccagccuggcca

SEQ ID NO: 2425346 - RNA, 18 nt, Human
aguucgagaccagccugg

SEQ ID NO: 2425347 - RNA, 19 nt, Human
aguucgagaccagccuggc

SEQ ID NO: 2425348 - RNA, 22 nt, Human
uguuguacauuuaugauuuaau

SEQ ID NO: 2425349 - RNA, 20 nt, Human
uguuguacauuuaugauuua

SEQ ID NO: 2425350 - RNA, 18 nt, Human
uguuguacauuuaugauu

SEQ ID NO: 2425351 - RNA, 17 nt, Human
uguuguacauuuaugau

SEQ ID NO: 2425352 - RNA, 16 nt, Human
uguuguacauuuauga

SEQ ID NO: 2425353 - RNA, 15 nt, Human
uguuguacauuuaug

SEQ ID NO: 2425354 - RNA, 14 nt, Human
uguuguacauuuau

SEQ ID NO: 2425355 - RNA, 13 nt, Human
uguuguacauuua

SEQ ID NO: 2425356 - RNA, 23 nt, Human
uguuguacauuuaugauuuaaua

SEQ ID NO: 2425357 - RNA, 14 nt, Human
uguuguaaauauuu

SEQ ID NO: 2425358 - RNA, 21 nt, Human
uguuguaaauauuuauguaaa

SEQ ID NO: 2425359 - RNA, 13 nt, Human
uguuguauuuuaa

SEQ ID NO: 2425360 - RNA, 15 nt, Human
uguuguaugccuuua

SEQ ID NO: 2425361 - RNA, 14 nt, Human
uguuguauaaauuu

SEQ ID NO: 2425362 - RNA, 11 nt, Human
uguuguauaaa

SEQ ID NO: 2425363 - RNA, 13 nt, Human
uguuguauaaauu

SEQ ID NO: 2425364 - RNA, 13 nt, Human
uguugucagcuga

SEQ ID NO: 2425365 - RNA, 18 nt, Human
uuaaaaaagaaacauuug

SEQ ID NO: 2425366 - RNA, 15 nt, Human
uuaaaaaagaaacau

SEQ ID NO: 2425367 - RNA, 16 nt, Human
uuaaaaaaauuuaagu

SEQ ID NO: 2425368 - RNA, 21 nt, Human
uuaaaaaaauugguuggagaa

SEQ ID NO: 2425369 - RNA, 20 nt, Human
uuaaaaaaauugguuggaga

SEQ ID NO: 2425370 - RNA, 20 nt, Human
aguugccagucaccccggcc

SEQ ID NO: 2425371 - RNA, 21 nt, Human
aguugcauggcaucaccucca

SEQ ID NO: 2425372 - RNA, 20 nt, Human
aguugcauggcaucaccucc

SEQ ID NO: 2425373 - RNA, 22 nt, Human
aguugcauagguuuaauaauuu

SEQ ID NO: 2425374 - RNA, 16 nt, Human
aguugcacagcuauga

SEQ ID NO: 2425375 - RNA, 20 nt, Human
aguugcaauugaauuaaauu

SEQ ID NO: 2425376 - RNA, 18 nt, Human
aguugcaauugaauuaaa

SEQ ID NO: 2425377 - RNA, 19 nt, Human
aguugcaauugaauuaaau

SEQ ID NO: 2425378 - RNA, 20 nt, Human
uuaaaaaugguuuaaauggu

SEQ ID NO: 2425379 - RNA, 16 nt, Human
uuaaaaauauaaaacu

SEQ ID NO: 2425380 - RNA, 15 nt, Human
uuaaaaauauaaaac

SEQ ID NO: 2425381 - RNA, 23 nt, Human
uuaaaaauauggaacuucuaaua

SEQ ID NO: 2425382 - RNA, 22 nt, Human
uuaaaaauauggaacuucuaau

SEQ ID NO: 2425383 - RNA, 20 nt, Human
uuaaaaauauggaacuucua

SEQ ID NO: 2425384 - RNA, 17 nt, Human
uuaaaaauguaaauauu

SEQ ID NO: 2425385 - RNA, 16 nt, Human
uuaaaaauguaaauau

SEQ ID NO: 2425386 - RNA, 14 nt, Human
uuaaaaauguaaau

SEQ ID NO: 2425387 - RNA, 13 nt, Human
uuaaaaauguaaa

SEQ ID NO: 2425388 - RNA, 21 nt, Human
uuaaaaauguuaaaauguauu

SEQ ID NO: 2425389 - RNA, 19 nt, Human
uuaaaaauguaaauauucu

SEQ ID NO: 2425390 - RNA, 17 nt, Human
uuaaaacaacacucaca

SEQ ID NO: 2425391 - RNA, 13 nt, Human
uuaaaaauauaaa

SEQ ID NO: 2425392 - RNA, 14 nt, Human
uuaaaaagucuuca

SEQ ID NO: 2425393 - RNA, 18 nt, Human
uuaaaaaguggaaaaaua

SEQ ID NO: 2425394 - RNA, 11 nt, Human
uuaaaaaacaa

SEQ ID NO: 2425395 - RNA, 13 nt, Human
uuaaaaaacuugu

SEQ ID NO: 2425396 - RNA, 20 nt, Human
uuaaauaaugugaaacugga

SEQ ID NO: 2425397 - RNA, 21 nt, Human
uuaaauaaugugaaacuggau

SEQ ID NO: 2425398 - RNA, 22 nt, Human
uuaaauaaugugaaacuggauu

SEQ ID NO: 2425399 - RNA, 19 nt, Human
uuaaauaaugugaaacugg

SEQ ID NO: 2425400 - RNA, 13 nt, Human
uuaaauaaaucau

SEQ ID NO: 2425401 - RNA, 15 nt, Human
uuaaauaaaucauaa

SEQ ID NO: 2425402 - RNA, 21 nt, Human
uuaaacggauuauuuuuucag

SEQ ID NO: 2425403 - RNA, 16 nt, Human
uuaaacggauuauuuu

SEQ ID NO: 2425404 - RNA, 13 nt, Human
uuaaauaaaagug

SEQ ID NO: 2425405 - RNA, 14 nt, Human
uuaaauaaaaguga

SEQ ID NO: 2425406 - RNA, 20 nt, Human
uuaaauaaaagugaucaaua

SEQ ID NO: 2425407 - RNA, 19 nt, Human
uuaaauaaaguaucaugca

SEQ ID NO: 2425408 - RNA, 17 nt, Human
uuaaauaaaguaucaug

SEQ ID NO: 2425409 - RNA, 19 nt, Human
uuaaaauaucuuuugaccu

SEQ ID NO: 2425410 - RNA, 13 nt, Human
uuaaaauaucuuu

SEQ ID NO: 2425411 - RNA, 12 nt, Human
uuaaaauauauu

SEQ ID NO: 2425412 - RNA, 17 nt, Human
uuaaaauauuuauuuau

SEQ ID NO: 2425413 - RNA, 14 nt, Human
uuaaaauauggcua

SEQ ID NO: 2425414 - RNA, 12 nt, Human
uuaaaauauuuu

SEQ ID NO: 2425415 - RNA, 14 nt, Human
uuaaaauauuuuau

SEQ ID NO: 2425416 - RNA, 19 nt, Human
uuaaaauauuccugcauuu

SEQ ID NO: 2425417 - RNA, 16 nt, Human
uuaaaauauuccugca

SEQ ID NO: 2425418 - RNA, 17 nt, Human
uuaaaccgccaaggcug

SEQ ID NO: 2425419 - RNA, 16 nt, Human
uuaaacccauuuuagu

SEQ ID NO: 2425420 - RNA, 13 nt, Human
uuaaacccauuuu

SEQ ID NO: 2425421 - RNA, 20 nt, Human
uuaaacccuggaucaguccu

SEQ ID NO: 2425422 - RNA, 15 nt, Human
uuaaacggauuauuu

SEQ ID NO: 2425423 - RNA, 14 nt, Human
uuaaacggauuauu

SEQ ID NO: 2425424 - RNA, 13 nt, Human
uuaaacggauuau

SEQ ID NO: 2425425 - RNA, 18 nt, Human
uuaaaccucucuucuacc

SEQ ID NO: 2425426 - RNA, 21 nt, Human
aguuugucgcucaugugugca

SEQ ID NO: 2425427 - RNA, 19 nt, Human
aguuugucgcucaugugug

SEQ ID NO: 2425428 - RNA, 17 nt, Human
aguuugucgcucaugug

SEQ ID NO: 2425429 - RNA, 20 nt, Human
aguuuuaucauuuucaaaau

SEQ ID NO: 2425430 - RNA, 14 nt, Human
aguuuuaucauuuu

SEQ ID NO: 2425431 - RNA, 18 nt, Human
aguuuguacaugcauuca

SEQ ID NO: 2425432 - RNA, 17 nt, Human
aguuuguauaacuucuu

SEQ ID NO: 2425433 - RNA, 15 nt, Human
aguuuguacaugcau

SEQ ID NO: 2425434 - RNA, 23 nt, Human
aguuuguacagacguaugcuuau

SEQ ID NO: 2425435 - RNA, 13 nt, Human
aguuuguauauac

SEQ ID NO: 2425436 - RNA, 14 nt, Human
aguuuguauaacuu

SEQ ID NO: 2425437 - RNA, 22 nt, Human
aguuuguaugccaagugagaag

SEQ ID NO: 2425438 - RNA, 16 nt, Human
aguuuguccuguagag

SEQ ID NO: 2425439 - RNA, 18 nt, Human
aguuugucacaugaaaca

SEQ ID NO: 2425440 - RNA, 14 nt, Human
aguuugucagacuu

SEQ ID NO: 2425441 - RNA, 20 nt, Human
aguuugguucacuuacagau

SEQ ID NO: 2425442 - RNA, 22 nt, Human
aguuuguacagacguaugcuua

SEQ ID NO: 2425443 - RNA, 22 nt, Human
aguuuggccgggugcgguggcu

SEQ ID NO: 2425444 - RNA, 21 nt, Human
aguuucucagcucccauuucu

SEQ ID NO: 2425445 - RNA, 20 nt, Human
aguuuggggguuuugcuguu

SEQ ID NO: 2425446 - RNA, 17 nt, Human
aguuuucaguuuguaua

SEQ ID NO: 2425447 - RNA, 15 nt, Human
aguuuucaguuugua

SEQ ID NO: 2425448 - RNA, 11 nt, Human
aguuuucaguu

SEQ ID NO: 2425449 - RNA, 12 nt, Human
aguuuucagugg

SEQ ID NO: 2425450 - RNA, 22 nt, Human
aguuuucagaaccucuucccca

SEQ ID NO: 2425451 - RNA, 17 nt, Human
aguuuucagaaccucuu

SEQ ID NO: 2425452 - RNA, 18 nt, Human
aguuuucagaaccucuuc

SEQ ID NO: 2425453 - RNA, 20 nt, Human
aguuuucagaaccucuuccc

SEQ ID NO: 2425454 - RNA, 21 nt, Human
aguuuucagaaccucuucccc

SEQ ID NO: 2425455 - RNA, 12 nt, Human
aguuuuccauga

SEQ ID NO: 2425456 - RNA, 13 nt, Human
aguuuuccaugaa

SEQ ID NO: 2425457 - RNA, 16 nt, Human
aguuuuccaugaaaac

SEQ ID NO: 2425458 - RNA, 21 nt, Human
aguuuuccaugaaaacguuuu

SEQ ID NO: 2425459 - RNA, 18 nt, Human
aguuuucccuugaggaaa

SEQ ID NO: 2425460 - RNA, 20 nt, Human
aguuuucccuugaggaaaca

SEQ ID NO: 2425461 - RNA, 23 nt, Human
aguuuuauuaauaaacauucuau

SEQ ID NO: 2425462 - RNA, 15 nt, Human
aguuuuaucauuuuc

SEQ ID NO: 2425463 - RNA, 21 nt, Human
aguuuuauugagaauuuuaaa

SEQ ID NO: 2425464 - RNA, 16 nt, Human
aguuuuauugagaauu

SEQ ID NO: 2425465 - RNA, 22 nt, Human
aguuuucacucuuauugcccac

SEQ ID NO: 2425466 - RNA, 21 nt, Human
aguuuucaagucaaauuaaua

SEQ ID NO: 2425467 - RNA, 16 nt, Human
aguuuucagaaccucu

SEQ ID NO: 2425468 - RNA, 22 nt, Human
aguuuucaagucaaauuaauaa

SEQ ID NO: 2425469 - RNA, 23 nt, Human
uuaaauucuccaguuuuuuguua

SEQ ID NO: 2425470 - RNA, 16 nt, Human
uuaaauucuugcaaag

SEQ ID NO: 2425471 - RNA, 13 nt, Human
uuaaauucuugca

SEQ ID NO: 2425472 - RNA, 21 nt, Human
uuaaauaaaguaucaugcauu

SEQ ID NO: 2425473 - RNA, 12 nt, Human
uuaaauaaaugu

SEQ ID NO: 2425474 - RNA, 21 nt, Human
uuaaauucaguccuaagaaag

SEQ ID NO: 2425475 - RNA, 21 nt, Human
uuaaauuauaacuuaaaauau

SEQ ID NO: 2425476 - RNA, 15 nt, Human
aguuucaaugugauu

SEQ ID NO: 2425477 - RNA, 14 nt, Human
aguuucaaugugau

SEQ ID NO: 2425478 - RNA, 12 nt, Human
aguuucaaugug

SEQ ID NO: 2425479 - RNA, 22 nt, Human
aguuucaaugugauucuaaugu

SEQ ID NO: 2425480 - RNA, 16 nt, Human
aguuucaaugugauuc

SEQ ID NO: 2425481 - RNA, 18 nt, Human
aguuuccucaggcugcug

SEQ ID NO: 2425482 - RNA, 15 nt, Human
aguuucaaaaacugu

SEQ ID NO: 2425483 - RNA, 15 nt, Human
aguuuauuuuaagac

SEQ ID NO: 2425484 - RNA, 15 nt, Human
aguuucuccaagcag

SEQ ID NO: 2425485 - RNA, 13 nt, Human
aguuucuccaagc

SEQ ID NO: 2425486 - RNA, 21 nt, Human
aguuucuccaagcaggacaug

SEQ ID NO: 2425487 - RNA, 16 nt, Human
aguuucucagcuccca

SEQ ID NO: 2425488 - RNA, 16 nt, Human
aguuucguuuucaaaa

SEQ ID NO: 2425489 - RNA, 19 nt, Human
aguuuccuuggcuggugca

SEQ ID NO: 2425490 - RNA, 15 nt, Human
aguuucucagcuccc

SEQ ID NO: 2425491 - RNA, 15 nt, Human
aguuucguuuucaaa

SEQ ID NO: 2425492 - RNA, 12 nt, Human
aguuuccugaaa

SEQ ID NO: 2425493 - RNA, 20 nt, Human
aguuuccucaggcugcugga

SEQ ID NO: 2425494 - RNA, 23 nt, Human
aguuuccucaggcugcuggagga

SEQ ID NO: 2425495 - RNA, 18 nt, Human
aguuuccuuggcuggugc

SEQ ID NO: 2425496 - RNA, 17 nt, Human
aguuuccuuggcuggug

SEQ ID NO: 2425497 - RNA, 15 nt, Human
aguuuccuuggcugg

SEQ ID NO: 2425498 - RNA, 21 nt, Human
aguugauagcacagacccugc

SEQ ID NO: 2425499 - RNA, 20 nt, Human
aguugauagcacagacccug

SEQ ID NO: 2425500 - RNA, 19 nt, Human
aguugauagcacagacccu

SEQ ID NO: 2425501 - RNA, 15 nt, Human
aguugauagcacaga

SEQ ID NO: 2425502 - RNA, 13 nt, Human
aguucuucuccaa

SEQ ID NO: 2425503 - RNA, 22 nt, Human
aguucuucgggaagagaggagu

SEQ ID NO: 2425504 - RNA, 20 nt, Human
aguucuucgggaagagagga

SEQ ID NO: 2425505 - RNA, 19 nt, Human
aguucuucgggaagagagg

SEQ ID NO: 2425506 - RNA, 18 nt, Human
aguucuucgggaagagag

SEQ ID NO: 2425507 - RNA, 14 nt, Human
aguucuugugccau

SEQ ID NO: 2425508 - RNA, 13 nt, Human
aguucuugugcca

SEQ ID NO: 2425509 - RNA, 22 nt, Human
aguucuugucugauuggcucac

SEQ ID NO: 2425510 - RNA, 12 nt, Human
aguucuugugcc

SEQ ID NO: 2425511 - RNA, 15 nt, Human
aguucuuugggccag

SEQ ID NO: 2425512 - RNA, 16 nt, Human
aguucuuugggccaga

SEQ ID NO: 2425513 - RNA, 17 nt, Human
aguucuuugggccagac

SEQ ID NO: 2425514 - RNA, 14 nt, Human
aguugauagcacag

SEQ ID NO: 2425515 - RNA, 14 nt, Human
aguucugaagaaga

SEQ ID NO: 2425516 - RNA, 13 nt, Human
aguucugaagaag

SEQ ID NO: 2425517 - RNA, 15 nt, Human
aguucugaagaagau

SEQ ID NO: 2425518 - RNA, 16 nt, Human
aguucugaagaagaug

SEQ ID NO: 2425519 - RNA, 15 nt, Human
aguucuguagaaaug

SEQ ID NO: 2425520 - RNA, 13 nt, Human
aguucuguagaaa

SEQ ID NO: 2425521 - RNA, 17 nt, Human
aguucuguagaaauggu

SEQ ID NO: 2425522 - RNA, 16 nt, Human
aguucuguagaaaugg

SEQ ID NO: 2425523 - RNA, 18 nt, Human
aguucuguagaaaugguu

SEQ ID NO: 2425524 - RNA, 17 nt, Human
aguucuucgggaagaga

SEQ ID NO: 2425525 - RNA, 21 nt, Human
aguugauaugccuuuucccaa

SEQ ID NO: 2425526 - RNA, 19 nt, Human
aguugauauagaacagugc

SEQ ID NO: 2425527 - RNA, 17 nt, Human
aguugauauagaacagu

SEQ ID NO: 2425528 - RNA, 21 nt, Human
aguugaucgccuuucccaggu

SEQ ID NO: 2425529 - RNA, 18 nt, Human
aguucuuugggccagaca

SEQ ID NO: 2425530 - RNA, 15 nt, Human
aguugauauagaaca

SEQ ID NO: 2425531 - RNA, 23 nt, Human
aguugauagcacagacccugccc

SEQ ID NO: 2425532 - RNA, 22 nt, Human
aguugauagcacagacccugcc

SEQ ID NO: 2425533 - RNA, 18 nt, Human
aguugaucuggaacccag

SEQ ID NO: 2425534 - RNA, 19 nt, Human
aguugaucuggaacccaga

SEQ ID NO: 2425535 - RNA, 20 nt, Human
aguugaucuggaacccagac

SEQ ID NO: 2425536 - RNA, 21 nt, Human
aguugaucuggaacccagacu

SEQ ID NO: 2425537 - RNA, 15 nt, Human
aguugaucuggaacc

SEQ ID NO: 2425538 - RNA, 17 nt, Human
aguugaucuggaaccca

SEQ ID NO: 2425539 - RNA, 13 nt, Human
aguugaucuggaa

SEQ ID NO: 2425540 - RNA, 13 nt, Human
aguugauucagcu

SEQ ID NO: 2425541 - RNA, 23 nt, Human
aguugaucuggaacccagacuca

SEQ ID NO: 2425542 - RNA, 15 nt, Human
aguugauguugcauu

SEQ ID NO: 2425543 - RNA, 16 nt, Human
aguugauguugcauuu

SEQ ID NO: 2425544 - RNA, 19 nt, Human
aguugcaacuuuguauaaa

SEQ ID NO: 2425545 - RNA, 23 nt, Human
aguugauucagcucugcaagaau

SEQ ID NO: 2425546 - RNA, 19 nt, Human
aguugcaaucguaauguac

SEQ ID NO: 2425547 - RNA, 17 nt, Human
aguugcaauagaacaga

SEQ ID NO: 2425548 - RNA, 15 nt, Human
aguugcaauagaaca

SEQ ID NO: 2425549 - RNA, 22 nt, Human
aguugcaauaauacuucucaaa

SEQ ID NO: 2425550 - RNA, 17 nt, Human
aguugcaauaauacuuc

SEQ ID NO: 2425551 - RNA, 14 nt, Human
aguugcaauaauac

SEQ ID NO: 2425552 - RNA, 13 nt, Human
aguugcaauaaua

SEQ ID NO: 2425553 - RNA, 18 nt, Human
aguugauuuaguguuuuu

SEQ ID NO: 2425554 - RNA, 21 nt, Human
aguugauuuuacaauugaaau

SEQ ID NO: 2425555 - RNA, 23 nt, Human
aguugauuuuacaauugaaauga

SEQ ID NO: 2425556 - RNA, 14 nt, Human
aguugauucagcuc

SEQ ID NO: 2425557 - RNA, 15 nt, Human
aguugauucagcucu

SEQ ID NO: 2425558 - RNA, 17 nt, Human
aguugauucagcucugc

SEQ ID NO: 2425559 - RNA, 18 nt, Human
aguugauucagcucugca

SEQ ID NO: 2425560 - RNA, 17 nt, Human
uguuuuaguuaaauuuc

SEQ ID NO: 2425561 - RNA, 16 nt, Human
uguuuuaguuaaauuu

SEQ ID NO: 2425562 - RNA, 23 nt, Human
uguuuuagguuaaaaaaaggcau

SEQ ID NO: 2425563 - RNA, 19 nt, Human
uguuuuagaguuaacaaug

SEQ ID NO: 2425564 - RNA, 18 nt, Human
uguuuuauuuuuuauugu

SEQ ID NO: 2425565 - RNA, 23 nt, Human
uguuuuauuuuuuauuguuuuca

SEQ ID NO: 2425566 - RNA, 15 nt, Human
uguuuucagacucag

SEQ ID NO: 2425567 - RNA, 15 nt, Human
uguuuucaguguaca

SEQ ID NO: 2425568 - RNA, 20 nt, Human
uguuuuauaauuuugugaag

SEQ ID NO: 2425569 - RNA, 13 nt, Human
uguuuuauaauuu

SEQ ID NO: 2425570 - RNA, 24 nt, Human
uguuuuagacaaauacucaugugu

SEQ ID NO: 2425571 - RNA, 23 nt, Human
uguuuuagacaaauacucaugug

SEQ ID NO: 2425572 - RNA, 22 nt, Human
uguuuuagacaaauacucaugu

SEQ ID NO: 2425573 - RNA, 21 nt, Human
uguuuuagacaaauacucaug

SEQ ID NO: 2425574 - RNA, 21 nt, Human
uguuuuacuaaagaaagauua

SEQ ID NO: 2425575 - RNA, 16 nt, Human
uguuuuacuaaagaaa

SEQ ID NO: 2425576 - RNA, 15 nt, Human
uguuuuacugugaaa

SEQ ID NO: 2425577 - RNA, 20 nt, Human
uguuuuagacaaauacucau

SEQ ID NO: 2425578 - RNA, 18 nt, Human
uguuuuacugugaaacug

SEQ ID NO: 2425579 - RNA, 19 nt, Human
uguuuuagacaaauacuca

SEQ ID NO: 2425580 - RNA, 12 nt, Human
aguucucuccuu

SEQ ID NO: 2425581 - RNA, 13 nt, Human
aguucucuccuuc

SEQ ID NO: 2425582 - RNA, 17 nt, Human
aguucucucguaacugg

SEQ ID NO: 2425583 - RNA, 16 nt, Human
aguucucucguaacug

SEQ ID NO: 2425584 - RNA, 21 nt, Human
uguuuucucuggaguauucua

SEQ ID NO: 2425585 - RNA, 20 nt, Human
aguucucuucacucaaggau

SEQ ID NO: 2425586 - RNA, 16 nt, Human
aguucucuccuucuuc

SEQ ID NO: 2425587 - RNA, 16 nt, Human
uguuuuccgugaaaac

SEQ ID NO: 2425588 - RNA, 19 nt, Human
uguuuuccgugaaaacgga

SEQ ID NO: 2425589 - RNA, 14 nt, Human
uguuuuccucccuu

SEQ ID NO: 2425590 - RNA, 16 nt, Human
uguuuucccugaccuc

SEQ ID NO: 2425591 - RNA, 21 nt, Human
uguuuuccucccuucugcuac

SEQ ID NO: 2425592 - RNA, 22 nt, Human
uguuuuccucccuucugcuacu

SEQ ID NO: 2425593 - RNA, 17 nt, Human
uguuuucaguguacaug

SEQ ID NO: 2425594 - RNA, 15 nt, Human
uguuuuccuuucuca

SEQ ID NO: 2425595 - RNA, 23 nt, Human
uguuuuccucccuucugcuacug

SEQ ID NO: 2425596 - RNA, 15 nt, Human
uguuuucucuugaga

SEQ ID NO: 2425597 - RNA, 15 nt, Human
uguugucauugcugu

SEQ ID NO: 2425598 - RNA, 12 nt, Human
uguugucccuuc

SEQ ID NO: 2425599 - RNA, 13 nt, Human
uguugucccuucu

SEQ ID NO: 2425600 - RNA, 14 nt, Human
uguugucagcugaa

SEQ ID NO: 2425601 - RNA, 14 nt, Human
uguugucauugcug

SEQ ID NO: 2425602 - RNA, 11 nt, Human
uguugucauug

SEQ ID NO: 2425603 - RNA, 13 nt, Human
uguugucaaagag

SEQ ID NO: 2425604 - RNA, 15 nt, Human
uguuugcuaagcauu

SEQ ID NO: 2425605 - RNA, 16 nt, Human
uguuugccucugccuc

SEQ ID NO: 2425606 - RNA, 15 nt, Human
uguuugcaucugaaa

SEQ ID NO: 2425607 - RNA, 14 nt, Human
uguuugccucugcc

SEQ ID NO: 2425608 - RNA, 19 nt, Human
uguuugcuaagcauuccaa

SEQ ID NO: 2425609 - RNA, 15 nt, Human
uguuugccauacuuu

SEQ ID NO: 2425610 - RNA, 22 nt, Human
uguuugcaugugaaaaucaaau

SEQ ID NO: 2425611 - RNA, 17 nt, Human
uguuugcuaucuuaauu

SEQ ID NO: 2425612 - RNA, 22 nt, Human
uguuugccauacuuugucugaa

SEQ ID NO: 2425613 - RNA, 20 nt, Human
uguuugccuucuacuuuuaa

SEQ ID NO: 2425614 - RNA, 15 nt, Human
uguuuggagacauuc

SEQ ID NO: 2425615 - RNA, 14 nt, Human
uguuugcucucccg

SEQ ID NO: 2425616 - RNA, 15 nt, Human
uguuuggaggagcaa

SEQ ID NO: 2425617 - RNA, 12 nt, Human
uguuuggagagc

SEQ ID NO: 2425618 - RNA, 19 nt, Human
uguuuggagacauuccugg

SEQ ID NO: 2425619 - RNA, 15 nt, Human
uguuuggggaugaga

SEQ ID NO: 2425620 - RNA, 19 nt, Human
uguuuggggaugagaaagg

SEQ ID NO: 2425621 - RNA, 19 nt, Human
uguuuuacgucugggagaa

SEQ ID NO: 2425622 - RNA, 16 nt, Human
uguuugggcagaaggg

SEQ ID NO: 2425623 - RNA, 22 nt, Human
uguuugggcagaagggagaagg

SEQ ID NO: 2425624 - RNA, 14 nt, Human
agcccaggaaaggc

SEQ ID NO: 2425625 - RNA, 23 nt, Human
agcccagcuugaaaccuucacuu

SEQ ID NO: 2425626 - RNA, 21 nt, Human
agcccagcugggucaggcagg

SEQ ID NO: 2425627 - RNA, 13 nt, Human
agcccagcuggug

SEQ ID NO: 2425628 - RNA, 16 nt, Human
agcccagcugguggga

SEQ ID NO: 2425629 - RNA, 19 nt, Human
agcccagcugggucaggca

SEQ ID NO: 2425630 - RNA, 20 nt, Human
agcccagcugggucaggcag

SEQ ID NO: 2425631 - RNA, 17 nt, Human
agcccagcugggucagg

SEQ ID NO: 2425632 - RNA, 13 nt, Human
agcccagccacgu

SEQ ID NO: 2425633 - RNA, 21 nt, Human
agcccagcacugcuugaggaa

SEQ ID NO: 2425634 - RNA, 15 nt, Human
agcccagcagggccu

SEQ ID NO: 2425635 - RNA, 20 nt, Human
agcccagcagggccucaaag

SEQ ID NO: 2425636 - RNA, 16 nt, Human
ugauucauaaugacuu

SEQ ID NO: 2425637 - RNA, 15 nt, Human
ugauucauaaugacu

SEQ ID NO: 2425638 - RNA, 21 nt, Human
ugauucauaaugacuuaagca

SEQ ID NO: 2425639 - RNA, 16 nt, Human
ugauucauaguaacuu

SEQ ID NO: 2425640 - RNA, 18 nt, Human
ugauucauaguaacuucu

SEQ ID NO: 2425641 - RNA, 20 nt, Human
agcccagcuggugggaagcg

SEQ ID NO: 2425642 - RNA, 23 nt, Human
ugauucccaagcucugcuccucu

SEQ ID NO: 2425643 - RNA, 22 nt, Human
ugauucccaagcucugcuccuc

SEQ ID NO: 2425644 - RNA, 14 nt, Human
ugauuccuuccugu

SEQ ID NO: 2425645 - RNA, 20 nt, Human
ugauucucagggucucugcu

SEQ ID NO: 2425646 - RNA, 18 nt, Human
ugauucccuccugcuacu

SEQ ID NO: 2425647 - RNA, 19 nt, Human
ugauucaugccaauuagca

SEQ ID NO: 2425648 - RNA, 19 nt, Human
ugauucauaguaacuucuu

SEQ ID NO: 2425649 - RNA, 17 nt, Human
ugauucccuccugcuac

SEQ ID NO: 2425650 - RNA, 23 nt, Human
ugauucucagggucucugcugcc

SEQ ID NO: 2425651 - RNA, 22 nt, Human
ugauucucagggucucugcugc

SEQ ID NO: 2425652 - RNA, 21 nt, Human
ugauucucagggucucugcug

SEQ ID NO: 2425653 - RNA, 12 nt, Human
ugauuccuuccu

SEQ ID NO: 2425654 - RNA, 13 nt, Human
ugauucucaugcc

SEQ ID NO: 2425655 - RNA, 14 nt, Human
ugauucucaugccu

SEQ ID NO: 2425656 - RNA, 15 nt, Human
ugauucucaugccuc

SEQ ID NO: 2425657 - RNA, 17 nt, Human
ugauuuacaguuucaaa

SEQ ID NO: 2425658 - RNA, 15 nt, Human
ugauuuacaguuuca

SEQ ID NO: 2425659 - RNA, 13 nt, Human
ugauuuacaguuu

SEQ ID NO: 2425660 - RNA, 16 nt, Human
ugauucucaugccuca

SEQ ID NO: 2425661 - RNA, 13 nt, Human
ugauucuccugcc

SEQ ID NO: 2425662 - RNA, 20 nt, Human
ugauuucuauucaagguggc

SEQ ID NO: 2425663 - RNA, 14 nt, Human
ugauuucuauucaa

SEQ ID NO: 2425664 - RNA, 13 nt, Human
ugauuucuauuca

SEQ ID NO: 2425665 - RNA, 17 nt, Human
ugauuucuagaaagccu

SEQ ID NO: 2425666 - RNA, 13 nt, Human
ugauuuccuugaa

SEQ ID NO: 2425667 - RNA, 14 nt, Human
ugauuuccuugaau

SEQ ID NO: 2425668 - RNA, 15 nt, Human
ugauuuccuugaaug

SEQ ID NO: 2425669 - RNA, 16 nt, Human
ugauuuccuugaaugu

SEQ ID NO: 2425670 - RNA, 17 nt, Human
ugauuuccuugaaugug

SEQ ID NO: 2425671 - RNA, 19 nt, Human
ugauuuccuugaauguggc

SEQ ID NO: 2425672 - RNA, 23 nt, Human
ugauuuccuugaauguggcuuga

SEQ ID NO: 2425673 - RNA, 13 nt, Human
ugauuuggugacc

SEQ ID NO: 2425674 - RNA, 19 nt, Human
ugauuuggugaccaacugu

SEQ ID NO: 2425675 - RNA, 20 nt, Human
ugauuuggugaccaacuguc

SEQ ID NO: 2425676 - RNA, 17 nt, Human
ugauuugaagaacaugu

SEQ ID NO: 2425677 - RNA, 17 nt, Human
ugauuuggggauauuuu

SEQ ID NO: 2425678 - RNA, 16 nt, Human
ugauuucuuuccagag

SEQ ID NO: 2425679 - RNA, 15 nt, Human
ugauuucuuuccaga

SEQ ID NO: 2425680 - RNA, 19 nt, Human
ugauuucuucuguuuucug

SEQ ID NO: 2425681 - RNA, 17 nt, Human
ugauuucugccuuccuu

SEQ ID NO: 2425682 - RNA, 22 nt, Human
ugauuuccguuaaaauaccagc

SEQ ID NO: 2425683 - RNA, 15 nt, Human
ugauuucauuaauac

SEQ ID NO: 2425684 - RNA, 18 nt, Human
ugauuuccguuaaaauac

SEQ ID NO: 2425685 - RNA, 19 nt, Human
ugauuucaggauacucugu

SEQ ID NO: 2425686 - RNA, 11 nt, Human
ugauuucagga

SEQ ID NO: 2425687 - RNA, 18 nt, Human
ugauuucaggauacucug

SEQ ID NO: 2425688 - RNA, 23 nt, Human
ugauuucaggauacucugucaga

SEQ ID NO: 2425689 - RNA, 16 nt, Human
ugauuuaggagaagcc

SEQ ID NO: 2425690 - RNA, 20 nt, Human
ugauuuaggagaagccagga

SEQ ID NO: 2425691 - RNA, 16 nt, Human
ugauuuacgcucauug

SEQ ID NO: 2425692 - RNA, 21 nt, Human
ugauuuagaacuguaugucag

SEQ ID NO: 2425693 - RNA, 21 nt, Human
ugauuuaggagaagccaggaa

SEQ ID NO: 2425694 - RNA, 22 nt, Human
ugauuuaggagaagccaggaau

SEQ ID NO: 2425695 - RNA, 22 nt, Human
ugauuuaguguuuuuaccucug

SEQ ID NO: 2425696 - RNA, 20 nt, Human
ugauuucagcaccuacagug

SEQ ID NO: 2425697 - RNA, 17 nt, Human
ugauuucagcucacugc

SEQ ID NO: 2425698 - RNA, 21 nt, Human
ugauuucagcaccuacagugu

SEQ ID NO: 2425699 - RNA, 15 nt, Human
agcccacuucugcca

SEQ ID NO: 2425700 - RNA, 14 nt, Human
agcccacuucugcc

SEQ ID NO: 2425701 - RNA, 15 nt, Human
agcccacuguccugg

SEQ ID NO: 2425702 - RNA, 17 nt, Human
agcccacuguccugggc

SEQ ID NO: 2425703 - RNA, 18 nt, Human
agcccacuguccugggcc

SEQ ID NO: 2425704 - RNA, 19 nt, Human
agcccacuguccugggccu

SEQ ID NO: 2425705 - RNA, 13 nt, Human
agcccacuucugc

SEQ ID NO: 2425706 - RNA, 22 nt, Human
agcccagauguuuuacgucugg

SEQ ID NO: 2425707 - RNA, 18 nt, Human
agcccagaucagcuccua

SEQ ID NO: 2425708 - RNA, 17 nt, Human
agcccagaucagcuccu

SEQ ID NO: 2425709 - RNA, 16 nt, Human
agcccagaucagcucc

SEQ ID NO: 2425710 - RNA, 15 nt, Human
agcccagcacugcuu

SEQ ID NO: 2425711 - RNA, 18 nt, Human
agcccagagguaacagaa

SEQ ID NO: 2425712 - RNA, 17 nt, Human
agcccagagguaacaga

SEQ ID NO: 2425713 - RNA, 16 nt, Human
agcccagagguaacag

SEQ ID NO: 2425714 - RNA, 15 nt, Human
agcccagagguaaca

SEQ ID NO: 2425715 - RNA, 21 nt, Human
agcccagagguaacagaacag

SEQ ID NO: 2425716 - RNA, 20 nt, Human
agcccagagguaacagaaca

SEQ ID NO: 2425717 - RNA, 16 nt, Human
agcccagaggagggca

SEQ ID NO: 2425718 - RNA, 20 nt, Human
agcccacuguccugggccug

SEQ ID NO: 2425719 - RNA, 22 nt, Human
agcccacuguccugggccugca

SEQ ID NO: 2425720 - RNA, 13 nt, Human
agcccagagguaa

SEQ ID NO: 2425721 - RNA, 23 nt, Human
agcccacuguccugggccugcag

SEQ ID NO: 2425722 - RNA, 16 nt, Human
agccaugggaccaaac

SEQ ID NO: 2425723 - RNA, 15 nt, Human
agccaugggaccaaa

SEQ ID NO: 2425724 - RNA, 13 nt, Human
agccaugggacca

SEQ ID NO: 2425725 - RNA, 20 nt, Human
agcccacugcccacccccuc

SEQ ID NO: 2425726 - RNA, 19 nt, Human
agcccacugcccacccccu

SEQ ID NO: 2425727 - RNA, 14 nt, Human
agcccacuguccug

SEQ ID NO: 2425728 - RNA, 16 nt, Human
agcccacuguacuugc

SEQ ID NO: 2425729 - RNA, 14 nt, Human
agcccacuguacuu

SEQ ID NO: 2425730 - RNA, 19 nt, Human
agccaugcugggaagacgc

SEQ ID NO: 2425731 - RNA, 15 nt, Human
agccaugcugggaag

SEQ ID NO: 2425732 - RNA, 12 nt, Human
agccaugggacc

SEQ ID NO: 2425733 - RNA, 18 nt, Human
agccauggacucuacacu

SEQ ID NO: 2425734 - RNA, 23 nt, Human
agccaugcgcccccuccgcccug

SEQ ID NO: 2425735 - RNA, 16 nt, Human
agccaugcgcccccuc

SEQ ID NO: 2425736 - RNA, 23 nt, Human
agccaugauguggaguggggcag

SEQ ID NO: 2425737 - RNA, 18 nt, Human
agccaugauaacugcaau

SEQ ID NO: 2425738 - RNA, 18 nt, Human
agccaugaggaguugcug

SEQ ID NO: 2425739 - RNA, 19 nt, Human
agccaugaggaguugcugu

SEQ ID NO: 2425740 - RNA, 20 nt, Human
agccaugaggaguugcuguu

SEQ ID NO: 2425741 - RNA, 21 nt, Human
agccaugagaugauacaucca

SEQ ID NO: 2425742 - RNA, 18 nt, Human
agccaugaccuuacauuu

SEQ ID NO: 2425743 - RNA, 20 nt, Human
agccaugacuugagaaacaa

SEQ ID NO: 2425744 - RNA, 17 nt, Human
agccaugaccuuacauu

SEQ ID NO: 2425745 - RNA, 19 nt, Human
agccaucuugguaaauuuc

SEQ ID NO: 2425746 - RNA, 17 nt, Human
agccaucuugguaaauu

SEQ ID NO: 2425747 - RNA, 15 nt, Human
agccaucuugguaaa

SEQ ID NO: 2425748 - RNA, 19 nt, Human
agccaucugcccaggggug

SEQ ID NO: 2425749 - RNA, 18 nt, Human
agccaucugcccaggggu

SEQ ID NO: 2425750 - RNA, 16 nt, Human
agccaucugcccaggg

SEQ ID NO: 2425751 - RNA, 15 nt, Human
agccaucugcccagg

SEQ ID NO: 2425752 - RNA, 22 nt, Human
agccaucuccaucuugaaggaa

SEQ ID NO: 2425753 - RNA, 22 nt, Human
agccaucggugaaacuaacaga

SEQ ID NO: 2425754 - RNA, 14 nt, Human
agccaucugcccag

SEQ ID NO: 2425755 - RNA, 19 nt, Human
agccaucccaugaacacac

SEQ ID NO: 2425756 - RNA, 22 nt, Human
agccaucucucuacuccuaccu

SEQ ID NO: 2425757 - RNA, 21 nt, Human
agccaggcucugugcugaccc

SEQ ID NO: 2425758 - RNA, 21 nt, Human
agccaggcugccaaggccaga

SEQ ID NO: 2425759 - RNA, 11 nt, Human
agccagggcca

SEQ ID NO: 2425760 - RNA, 22 nt, Human
agccagcucccucuauuuaugu

SEQ ID NO: 2425761 - RNA, 13 nt, Human
agccagcucucag

SEQ ID NO: 2425762 - RNA, 14 nt, Human
agccagcucucagc

SEQ ID NO: 2425763 - RNA, 15 nt, Human
agccagcucucagcc

SEQ ID NO: 2425764 - RNA, 16 nt, Human
agccagcucucagcca

SEQ ID NO: 2425765 - RNA, 14 nt, Human
agccaggcucugug

SEQ ID NO: 2425766 - RNA, 17 nt, Human
agccaggcucugugcug

SEQ ID NO: 2425767 - RNA, 16 nt, Human
agccaggcucugugcu

SEQ ID NO: 2425768 - RNA, 20 nt, Human
agccaggcugccaaggccag

SEQ ID NO: 2425769 - RNA, 15 nt, Human
agccagcucauuuca

SEQ ID NO: 2425770 - RNA, 23 nt, Human
agccagccuucuuccaucccagg

SEQ ID NO: 2425771 - RNA, 23 nt, Human
agccagcguccuccucugugacc

SEQ ID NO: 2425772 - RNA, 14 nt, Human
agccagcucccucu

SEQ ID NO: 2425773 - RNA, 15 nt, Human
agccagcucccucua

SEQ ID NO: 2425774 - RNA, 17 nt, Human
agccagcucccucuauu

SEQ ID NO: 2425775 - RNA, 19 nt, Human
agccagcucccucuauuua

SEQ ID NO: 2425776 - RNA, 17 nt, Human
agccagcguccuccucu

SEQ ID NO: 2425777 - RNA, 18 nt, Human
agccagcguccuccucug

SEQ ID NO: 2425778 - RNA, 19 nt, Human
agccagcguccuccucugu

SEQ ID NO: 2425779 - RNA, 21 nt, Human
agccagcguccuccucuguga

SEQ ID NO: 2425780 - RNA, 16 nt, Human
agccagcguccuccuc

SEQ ID NO: 2425781 - RNA, 22 nt, Human
agccagcgggaauggcagcugc

SEQ ID NO: 2425782 - RNA, 18 nt, Human
agccaucaacaagaguug

SEQ ID NO: 2425783 - RNA, 18 nt, Human
agccaguaaacagaggag

SEQ ID NO: 2425784 - RNA, 18 nt, Human
agccaucaaaaugcuuuu

SEQ ID NO: 2425785 - RNA, 21 nt, Human
agccaguaaaugggggugcau

SEQ ID NO: 2425786 - RNA, 18 nt, Human
agccaucauaggaaggga

SEQ ID NO: 2425787 - RNA, 13 nt, Human
agccaucauggau

SEQ ID NO: 2425788 - RNA, 19 nt, Human
agccaucccagccuuggca

SEQ ID NO: 2425789 - RNA, 18 nt, Human
agccaucccagccuuggc

SEQ ID NO: 2425790 - RNA, 17 nt, Human
agccaucccagccuugg

SEQ ID NO: 2425791 - RNA, 14 nt, Human
agccaucccagccu

SEQ ID NO: 2425792 - RNA, 13 nt, Human
agccaguaaaugg

SEQ ID NO: 2425793 - RNA, 17 nt, Human
agccaggugccuuggag

SEQ ID NO: 2425794 - RNA, 16 nt, Human
agccaggugccuugga

SEQ ID NO: 2425795 - RNA, 14 nt, Human
agccaggugccuug

SEQ ID NO: 2425796 - RNA, 16 nt, Human
agccaguaaacagagg

SEQ ID NO: 2425797 - RNA, 18 nt, Human
agccaggugccuuggagg

SEQ ID NO: 2425798 - RNA, 21 nt, Human
agccagggcugcuagacggag

SEQ ID NO: 2425799 - RNA, 14 nt, Human
agccagggcugcua

SEQ ID NO: 2425800 - RNA, 13 nt, Human
agccaggugccuu

SEQ ID NO: 2425801 - RNA, 12 nt, Human
agccagggcugc

SEQ ID NO: 2425802 - RNA, 23 nt, Human
agccagggcuaugggagcagcuu

SEQ ID NO: 2425803 - RNA, 11 nt, Human
agccagggcug

SEQ ID NO: 2425804 - RNA, 17 nt, Human
agccagggccagggguc

SEQ ID NO: 2425805 - RNA, 14 nt, Human
agccagggccaggg

SEQ ID NO: 2425806 - RNA, 13 nt, Human
agccagggccagg

SEQ ID NO: 2425807 - RNA, 12 nt, Human
agccagggccag

SEQ ID NO: 2425808 - RNA, 22 nt, Human
agccagggcuaugggagcagcu

SEQ ID NO: 2425809 - RNA, 19 nt, Human
ugaugggagaguagauggu

SEQ ID NO: 2425810 - RNA, 21 nt, Human
ugauggagguuucauacucua

SEQ ID NO: 2425811 - RNA, 18 nt, Human
ugauggagguuucauacu

SEQ ID NO: 2425812 - RNA, 15 nt, Human
ugauggagcagagca

SEQ ID NO: 2425813 - RNA, 19 nt, Human
ugaugggaaagcauuguaa

SEQ ID NO: 2425814 - RNA, 14 nt, Human
ugaugggauuuggu

SEQ ID NO: 2425815 - RNA, 19 nt, Human
ugauggggcccugccuccu

SEQ ID NO: 2425816 - RNA, 16 nt, Human
ugauggggcccugccu

SEQ ID NO: 2425817 - RNA, 15 nt, Human
ugauggggcccugcc

SEQ ID NO: 2425818 - RNA, 14 nt, Human
ugauggggcccugc

SEQ ID NO: 2425819 - RNA, 16 nt, Human
ugaugagaggaaauca

SEQ ID NO: 2425820 - RNA, 15 nt, Human
ugaugagaggaaauc

SEQ ID NO: 2425821 - RNA, 14 nt, Human
ugaugagaggaaau

SEQ ID NO: 2425822 - RNA, 13 nt, Human
ugaugagaggaaa

SEQ ID NO: 2425823 - RNA, 14 nt, Human
ugaugggaaagcau

SEQ ID NO: 2425824 - RNA, 20 nt, Human
ugauggacccaaugcacaca

SEQ ID NO: 2425825 - RNA, 18 nt, Human
ugauggaaauauuuauuu

SEQ ID NO: 2425826 - RNA, 23 nt, Human
ugaugcuucuucagagacuccug

SEQ ID NO: 2425827 - RNA, 18 nt, Human
ugaugcuuucagauuaaa

SEQ ID NO: 2425828 - RNA, 21 nt, Human
ugauccucccaccucagccuc

SEQ ID NO: 2425829 - RNA, 16 nt, Human
ugauccucccaccuca

SEQ ID NO: 2425830 - RNA, 22 nt, Human
ugauccucccaccucagccucc

SEQ ID NO: 2425831 - RNA, 14 nt, Human
ugauccuggaggcc

SEQ ID NO: 2425832 - RNA, 15 nt, Human
ugauccuggaggccc

SEQ ID NO: 2425833 - RNA, 17 nt, Human
ugauccuccaacuucau

SEQ ID NO: 2425834 - RNA, 21 nt, Human
agcaccugccgaccucguccu

SEQ ID NO: 2425835 - RNA, 22 nt, Human
ugauccuaaugaaugcauaaaa

SEQ ID NO: 2425836 - RNA, 18 nt, Human
ugauccucauauggccca

SEQ ID NO: 2425837 - RNA, 22 nt, Human
agcaccugccgaccucguccuc

SEQ ID NO: 2425838 - RNA, 15 nt, Human
ugauccucccaccuc

SEQ ID NO: 2425839 - RNA, 16 nt, Human
ugauccuaguuccacc

SEQ ID NO: 2425840 - RNA, 15 nt, Human
agcaccugccgaccu

SEQ ID NO: 2425841 - RNA, 16 nt, Human
agcaccugccgaccuc

SEQ ID NO: 2425842 - RNA, 19 nt, Human
agcaccugccgaccucguc

SEQ ID NO: 2425843 - RNA, 20 nt, Human
agcaccugccgaccucgucc

SEQ ID NO: 2425844 - RNA, 11 nt, Human
agcaccugccg

SEQ ID NO: 2425845 - RNA, 12 nt, Human
ugaugaagaagu

SEQ ID NO: 2425846 - RNA, 11 nt, Human
ugaugaagaag

SEQ ID NO: 2425847 - RNA, 16 nt, Human
ugauccuggaggccca

SEQ ID NO: 2425848 - RNA, 17 nt, Human
ugauccuggaggcccag

SEQ ID NO: 2425849 - RNA, 18 nt, Human
ugauccuggaggcccagu

SEQ ID NO: 2425850 - RNA, 18 nt, Human
ugaugaaauguaaauacu

SEQ ID NO: 2425851 - RNA, 13 nt, Human
ugaugaacuuucu

SEQ ID NO: 2425852 - RNA, 17 nt, Human
ugaugaacuuauucugu

SEQ ID NO: 2425853 - RNA, 18 nt, Human
ugaugaacucuuaaucaa

SEQ ID NO: 2425854 - RNA, 15 nt, Human
ugaugaacuuucucu

SEQ ID NO: 2425855 - RNA, 14 nt, Human
ugaugaacuuucuc

SEQ ID NO: 2425856 - RNA, 23 nt, Human
ugaugaacuuucucuucauacuu

SEQ ID NO: 2425857 - RNA, 18 nt, Human
ugaugaagaaaagugggc

SEQ ID NO: 2425858 - RNA, 14 nt, Human
ugaugaccaaaguc

SEQ ID NO: 2425859 - RNA, 15 nt, Human
ugaugacagagcgag

SEQ ID NO: 2425860 - RNA, 17 nt, Human
ugaugacaguaguacca

SEQ ID NO: 2425861 - RNA, 20 nt, Human
ugaugaagaaaagugggcca

SEQ ID NO: 2425862 - RNA, 14 nt, Human
ugaugacagacacu

SEQ ID NO: 2425863 - RNA, 14 nt, Human
agccacuaacuaga

SEQ ID NO: 2425864 - RNA, 15 nt, Human
agccacucaggaggc

SEQ ID NO: 2425865 - RNA, 22 nt, Human
agccacucaggaggcugaggca

SEQ ID NO: 2425866 - RNA, 13 nt, Human
agccacuaacuag

SEQ ID NO: 2425867 - RNA, 22 nt, Human
agccacguuccuuacugcagaa

SEQ ID NO: 2425868 - RNA, 23 nt, Human
agccacguuccuuacugcagaau

SEQ ID NO: 2425869 - RNA, 12 nt, Human
agccacuccucu

SEQ ID NO: 2425870 - RNA, 16 nt, Human
agccacugcaccgggc

SEQ ID NO: 2425871 - RNA, 15 nt, Human
agccacgguguucug

SEQ ID NO: 2425872 - RNA, 17 nt, Human
ugauuaauggaaauguu

SEQ ID NO: 2425873 - RNA, 17 nt, Human
agccacguuccuuacug

SEQ ID NO: 2425874 - RNA, 18 nt, Human
agccacguuccuuacugc

SEQ ID NO: 2425875 - RNA, 20 nt, Human
agccacguuccuuacugcag

SEQ ID NO: 2425876 - RNA, 21 nt, Human
agccacguuccuuacugcaga

SEQ ID NO: 2425877 - RNA, 23 nt, Human
ugauuaaguaaugauaacuggaa

SEQ ID NO: 2425878 - RNA, 16 nt, Human
ugauuaauccagaaua

SEQ ID NO: 2425879 - RNA, 13 nt, Human
ugauuaauccaga

SEQ ID NO: 2425880 - RNA, 17 nt, Human
ugauuaauccagaauaa

SEQ ID NO: 2425881 - RNA, 15 nt, Human
ugauggugcaaugac

SEQ ID NO: 2425882 - RNA, 19 nt, Human
ugauuaaauucuugcaaag

SEQ ID NO: 2425883 - RNA, 13 nt, Human
ugauggugcaaug

SEQ ID NO: 2425884 - RNA, 16 nt, Human
ugauggugaugaaaug

SEQ ID NO: 2425885 - RNA, 15 nt, Human
ugauggugaugaaau

SEQ ID NO: 2425886 - RNA, 20 nt, Human
ugauuaaauucuugcaaagu

SEQ ID NO: 2425887 - RNA, 17 nt, Human
ugauggugaugaaaugu

SEQ ID NO: 2425888 - RNA, 16 nt, Human
ugauggucuucagccu

SEQ ID NO: 2425889 - RNA, 18 nt, Human
ugauuaaguaaugauaac

SEQ ID NO: 2425890 - RNA, 19 nt, Human
ugauuaaccacuucagcug

SEQ ID NO: 2425891 - RNA, 19 nt, Human
agccacugcaccgggccac

SEQ ID NO: 2425892 - RNA, 18 nt, Human
agccacugcaccgggcca

SEQ ID NO: 2425893 - RNA, 19 nt, Human
agccagagaagugacaggg

SEQ ID NO: 2425894 - RNA, 18 nt, Human
agccagagaagugacagg

SEQ ID NO: 2425895 - RNA, 17 nt, Human
agccagagaagugacag

SEQ ID NO: 2425896 - RNA, 16 nt, Human
agccagagaagugaca

SEQ ID NO: 2425897 - RNA, 15 nt, Human
agccagagaagugac

SEQ ID NO: 2425898 - RNA, 14 nt, Human
agccagagaaguga

SEQ ID NO: 2425899 - RNA, 11 nt, Human
agccagagaag

SEQ ID NO: 2425900 - RNA, 11 nt, Human
agccagaggag

SEQ ID NO: 2425901 - RNA, 10 nt, Human
agccagagga

SEQ ID NO: 2425902 - RNA, 21 nt, Human
agccagccuucuuccauccca

SEQ ID NO: 2425903 - RNA, 18 nt, Human
agccagccuucuuccauc

SEQ ID NO: 2425904 - RNA, 12 nt, Human
agccagcccucc

SEQ ID NO: 2425905 - RNA, 13 nt, Human
agccagcccuccc

SEQ ID NO: 2425906 - RNA, 15 nt, Human
agccagcccucccug

SEQ ID NO: 2425907 - RNA, 16 nt, Human
agccagcccucccugu

SEQ ID NO: 2425908 - RNA, 18 nt, Human
agccagcccucccugucc

SEQ ID NO: 2425909 - RNA, 20 nt, Human
agccagcccucccuguccuc

SEQ ID NO: 2425910 - RNA, 22 nt, Human
agccagcccucccuguccuccu

SEQ ID NO: 2425911 - RNA, 23 nt, Human
agccagcccucccuguccuccuc

SEQ ID NO: 2425912 - RNA, 21 nt, Human
agccagagaagugacagggaa

SEQ ID NO: 2425913 - RNA, 12 nt, Human
agccagcccagc

SEQ ID NO: 2425914 - RNA, 14 nt, Human
agccagcccagccc

SEQ ID NO: 2425915 - RNA, 15 nt, Human
agccagcccagccca

SEQ ID NO: 2425916 - RNA, 16 nt, Human
agccagcccagcccag

SEQ ID NO: 2425917 - RNA, 17 nt, Human
agccagcccagcccagc

SEQ ID NO: 2425918 - RNA, 18 nt, Human
agccagcccagcccagcu

SEQ ID NO: 2425919 - RNA, 14 nt, Human
ugcaagucauggcu

SEQ ID NO: 2425920 - RNA, 21 nt, Human
ugcaagucagaggauggccag

SEQ ID NO: 2425921 - RNA, 23 nt, Human
ugcaagucaguccaggaugcuaa

SEQ ID NO: 2425922 - RNA, 16 nt, Human
ugcaagucagaggaug

SEQ ID NO: 2425923 - RNA, 15 nt, Human
ugcaagucagaggau

SEQ ID NO: 2425924 - RNA, 14 nt, Human
ugcaagucagagga

SEQ ID NO: 2425925 - RNA, 22 nt, Human
ugcaaguauguuuuagcaugug

SEQ ID NO: 2425926 - RNA, 13 nt, Human
ugcaagucagagg

SEQ ID NO: 2425927 - RNA, 18 nt, Human
ugcaaguaugugagugug

SEQ ID NO: 2425928 - RNA, 22 nt, Human
ugcaaguaugugagugugucca

SEQ ID NO: 2425929 - RNA, 19 nt, Human
ugcaaguauguuuuagcau

SEQ ID NO: 2425930 - RNA, 21 nt, Human
ugcaaguauguuuuagcaugu

SEQ ID NO: 2425931 - RNA, 17 nt, Human
ugcaaacgcugccugcc

SEQ ID NO: 2425932 - RNA, 19 nt, Human
ugcaaacgcugccugccca

SEQ ID NO: 2425933 - RNA, 21 nt, Human
ugcaaacgcugccugcccgua

SEQ ID NO: 2425934 - RNA, 21 nt, Human
ugcaaacgcugccugccggua

SEQ ID NO: 2425935 - RNA, 16 nt, Human
ugcaaacucacugcuc

SEQ ID NO: 2425936 - RNA, 15 nt, Human
ugcaaguaugugagu

SEQ ID NO: 2425937 - RNA, 23 nt, Human
ugcaaaccugaccccugcucagu

SEQ ID NO: 2425938 - RNA, 14 nt, Human
ugcaaacgcugccu

SEQ ID NO: 2425939 - RNA, 15 nt, Human
ugcaaacgcugccug

SEQ ID NO: 2425940 - RNA, 16 nt, Human
ugcaaacgcugccugc

SEQ ID NO: 2425941 - RNA, 22 nt, Human
ugcaaaccugaccccugcucag

SEQ ID NO: 2425942 - RNA, 21 nt, Human
ugcaaaccaucauugaaaucu

SEQ ID NO: 2425943 - RNA, 15 nt, Human
ugauuuguacugaaa

SEQ ID NO: 2425944 - RNA, 18 nt, Human
ugauuuguacugaaaaau

SEQ ID NO: 2425945 - RNA, 19 nt, Human
ugauuuguuuuccucuuaa

SEQ ID NO: 2425946 - RNA, 22 nt, Human
agcccaggagagagaaagccag

SEQ ID NO: 2425947 - RNA, 17 nt, Human
agcccaggaggacugcc

SEQ ID NO: 2425948 - RNA, 12 nt, Human
agcccaggagga

SEQ ID NO: 2425949 - RNA, 19 nt, Human
agcccaggagagagaaagc

SEQ ID NO: 2425950 - RNA, 18 nt, Human
agcccaggagagagaaag

SEQ ID NO: 2425951 - RNA, 20 nt, Human
ugcaauauaucuaaauugaa

SEQ ID NO: 2425952 - RNA, 19 nt, Human
ugcaauauaucuaaauuga

SEQ ID NO: 2425953 - RNA, 18 nt, Human
ugcaauauaucuaaauug

SEQ ID NO: 2425954 - RNA, 20 nt, Human
ugcaauagaacagagaaaga

SEQ ID NO: 2425955 - RNA, 14 nt, Human
ugcaauaauacuuc

SEQ ID NO: 2425956 - RNA, 21 nt, Human
ugcaauaagaauuuagggaga

SEQ ID NO: 2425957 - RNA, 21 nt, Human
ugcaauaaaucugacccagug

SEQ ID NO: 2425958 - RNA, 23 nt, Human
ugcaauaaaucugacccagugcc

SEQ ID NO: 2425959 - RNA, 20 nt, Human
ugcaauaaaucugacccagu

SEQ ID NO: 2425960 - RNA, 19 nt, Human
ugcaauaaaucugacccag

SEQ ID NO: 2425961 - RNA, 21 nt, Human
ugcaagugguagcaagaagug

SEQ ID NO: 2425962 - RNA, 21 nt, Human
ugcaaguguaugcacgugugc

SEQ ID NO: 2425963 - RNA, 16 nt, Human
ugcaagugucugugug

SEQ ID NO: 2425964 - RNA, 17 nt, Human
ugcaagugucugugugc

SEQ ID NO: 2425965 - RNA, 16 nt, Human
ugcaagucauggcugu

SEQ ID NO: 2425966 - RNA, 18 nt, Human
ugcaagugaagguuuaca

SEQ ID NO: 2425967 - RNA, 13 nt, Human
ugcaagugaaggu

SEQ ID NO: 2425968 - RNA, 16 nt, Human
ugcaagugacaucucu

SEQ ID NO: 2425969 - RNA, 22 nt, Human
agccccauucugccugcccagg

SEQ ID NO: 2425970 - RNA, 21 nt, Human
agccccauucugccugcccag

SEQ ID NO: 2425971 - RNA, 18 nt, Human
agccccaaaacucuccuc

SEQ ID NO: 2425972 - RNA, 20 nt, Human
agccccauucugccugccca

SEQ ID NO: 2425973 - RNA, 17 nt, Human
agccccaaaacucuccu

SEQ ID NO: 2425974 - RNA, 16 nt, Human
agccccaaaacucucc

SEQ ID NO: 2425975 - RNA, 13 nt, Human
agcccauuucaau

SEQ ID NO: 2425976 - RNA, 22 nt, Human
agcccauucucucuccugucca

SEQ ID NO: 2425977 - RNA, 20 nt, Human
agcccauucucucuccuguc

SEQ ID NO: 2425978 - RNA, 21 nt, Human
agcccauucucucuccugucc

SEQ ID NO: 2425979 - RNA, 16 nt, Human
agcccauucucucucc

SEQ ID NO: 2425980 - RNA, 17 nt, Human
agcccauucucucuccu

SEQ ID NO: 2425981 - RNA, 18 nt, Human
agcccauucucucuccug

SEQ ID NO: 2425982 - RNA, 19 nt, Human
agcccauucucucuccugu

SEQ ID NO: 2425983 - RNA, 17 nt, Human
agcccauucauuccauu

SEQ ID NO: 2425984 - RNA, 22 nt, Human
agcccauucauuccauucugga

SEQ ID NO: 2425985 - RNA, 23 nt, Human
agcccauucauuccauucuggaa

SEQ ID NO: 2425986 - RNA, 15 nt, Human
agcccauucucucuc

SEQ ID NO: 2425987 - RNA, 14 nt, Human
agcccauucauucc

SEQ ID NO: 2425988 - RNA, 19 nt, Human
agcccauggcccucccagu

SEQ ID NO: 2425989 - RNA, 16 nt, Human
agcccagggcuccugc

SEQ ID NO: 2425990 - RNA, 15 nt, Human
agcccagggcuccug

SEQ ID NO: 2425991 - RNA, 14 nt, Human
agcccagggcuccu

SEQ ID NO: 2425992 - RNA, 23 nt, Human
agcccagggcuccugcacuuacu

SEQ ID NO: 2425993 - RNA, 17 nt, Human
agcccagggcuccugca

SEQ ID NO: 2425994 - RNA, 10 nt, Human
agcccagggu

SEQ ID NO: 2425995 - RNA, 11 nt, Human
agcccaggagu

SEQ ID NO: 2425996 - RNA, 19 nt, Human
agcccaggaguuugaggcu

SEQ ID NO: 2425997 - RNA, 21 nt, Human
agcccaggcgggagcgguggc

SEQ ID NO: 2425998 - RNA, 21 nt, Human
agcccaggccuccuacagcuu

SEQ ID NO: 2425999 - RNA, 18 nt, Human
agcccagggagcggaaag

SEQ ID NO: 2426000 - RNA, 19 nt, Human
agcccagggagcggaaagc

SEQ ID NO: 2426001 - RNA, 20 nt, Human
agcccagggagcggaaagca

SEQ ID NO: 2426002 - RNA, 21 nt, Human
agcccagggagcggaaagcag

SEQ ID NO: 2426003 - RNA, 22 nt, Human
agcccagggagcggaaagcagc

SEQ ID NO: 2426004 - RNA, 23 nt, Human
agcccagggagcggaaagcagcu

SEQ ID NO: 2426005 - RNA, 15 nt, Human
agcccggcugguuuu

SEQ ID NO: 2426006 - RNA, 15 nt, Human
agcccggcucccacc

SEQ ID NO: 2426007 - RNA, 13 nt, Human
agcccggcugguu

SEQ ID NO: 2426008 - RNA, 16 nt, Human
agcccugcuggccgcc

SEQ ID NO: 2426009 - RNA, 13 nt, Human
agcccugcuggcc

SEQ ID NO: 2426010 - RNA, 12 nt, Human
agcccugcuggc

SEQ ID NO: 2426011 - RNA, 17 nt, Human
agcccugcuuugggcug

SEQ ID NO: 2426012 - RNA, 19 nt, Human
agcccuggagucaugccaa

SEQ ID NO: 2426013 - RNA, 19 nt, Human
agcccugcuuugggcugcc

SEQ ID NO: 2426014 - RNA, 21 nt, Human
agcccugcuggccgccucacc

SEQ ID NO: 2426015 - RNA, 17 nt, Human
agcccugcuggccgccu

SEQ ID NO: 2426016 - RNA, 12 nt, Human
agcccuggcagg

SEQ ID NO: 2426017 - RNA, 13 nt, Human
agcccuggcagga

SEQ ID NO: 2426018 - RNA, 17 nt, Human
agcccuggcaggaugac

SEQ ID NO: 2426019 - RNA, 13 nt, Human
agcccuggccaga

SEQ ID NO: 2426020 - RNA, 21 nt, Human
agcccuggcaggaugacccug

SEQ ID NO: 2426021 - RNA, 23 nt, Human
agcccuggauuucagaaagagca

SEQ ID NO: 2426022 - RNA, 14 nt, Human
agcccuggccagag

SEQ ID NO: 2426023 - RNA, 15 nt, Human
agcccuggccagagg

SEQ ID NO: 2426024 - RNA, 16 nt, Human
agcccuggccagaggc

SEQ ID NO: 2426025 - RNA, 15 nt, Human
agcccuggcugaagg

SEQ ID NO: 2426026 - RNA, 13 nt, Human
agcccuggcugaa

SEQ ID NO: 2426027 - RNA, 12 nt, Human
agcccuggcuga

SEQ ID NO: 2426028 - RNA, 15 nt, Human
agcccuggcucugca

SEQ ID NO: 2426029 - RNA, 14 nt, Human
agcccuggcucugc

SEQ ID NO: 2426030 - RNA, 17 nt, Human
agcccuggccagaggcu

SEQ ID NO: 2426031 - RNA, 16 nt, Human
agcccugguggcagug

SEQ ID NO: 2426032 - RNA, 15 nt, Human
agcccugguggcagu

SEQ ID NO: 2426033 - RNA, 21 nt, Human
agcccuggcugaaggacugug

SEQ ID NO: 2426034 - RNA, 20 nt, Human
agcccuggcugaaggacugu

SEQ ID NO: 2426035 - RNA, 18 nt, Human
agcccuggcugaaggacu

SEQ ID NO: 2426036 - RNA, 16 nt, Human
agcccuggcugaagga

SEQ ID NO: 2426037 - RNA, 14 nt, Human
agcccugguggcag

SEQ ID NO: 2426038 - RNA, 18 nt, Human
ugcacacaccagagccca

SEQ ID NO: 2426039 - RNA, 17 nt, Human
ugcacacaccagagccc

SEQ ID NO: 2426040 - RNA, 16 nt, Human
agcccuggucucagca

SEQ ID NO: 2426041 - RNA, 14 nt, Human
agcccuggucucag

SEQ ID NO: 2426042 - RNA, 21 nt, Human
ugcacacaccagagcccaccu

SEQ ID NO: 2426043 - RNA, 19 nt, Human
agcccgcacccccacccuu

SEQ ID NO: 2426044 - RNA, 21 nt, Human
agcccgcacccccacccuuug

SEQ ID NO: 2426045 - RNA, 19 nt, Human
agcccgccaagguagccau

SEQ ID NO: 2426046 - RNA, 16 nt, Human
agcccgcacccccacc

SEQ ID NO: 2426047 - RNA, 17 nt, Human
agcccgcacccccaccc

SEQ ID NO: 2426048 - RNA, 18 nt, Human
agcccgcacccccacccu

SEQ ID NO: 2426049 - RNA, 15 nt, Human
agcccgaauacaaac

SEQ ID NO: 2426050 - RNA, 15 nt, Human
agcccgcacccccac

SEQ ID NO: 2426051 - RNA, 23 nt, Human
agccccugccccagcccaagucc

SEQ ID NO: 2426052 - RNA, 21 nt, Human
agccccugccccagcccaagu

SEQ ID NO: 2426053 - RNA, 18 nt, Human
agccccugccccagccca

SEQ ID NO: 2426054 - RNA, 17 nt, Human
agccccugccccagccc

SEQ ID NO: 2426055 - RNA, 16 nt, Human
agccccugccccagcc

SEQ ID NO: 2426056 - RNA, 15 nt, Human
agccccugccccagc

SEQ ID NO: 2426057 - RNA, 13 nt, Human
agccccugcccca

SEQ ID NO: 2426058 - RNA, 14 nt, Human
agcccgaauacaaa

SEQ ID NO: 2426059 - RNA, 23 nt, Human
agccccuuuuucauauguugcuc

SEQ ID NO: 2426060 - RNA, 22 nt, Human
agccccuuuuucauauguugcu

SEQ ID NO: 2426061 - RNA, 22 nt, Human
agcccggcgccccugccaccuc

SEQ ID NO: 2426062 - RNA, 21 nt, Human
agcccggcgccccugccaccu

SEQ ID NO: 2426063 - RNA, 18 nt, Human
agcccggcgccccugcca

SEQ ID NO: 2426064 - RNA, 16 nt, Human
agcccggcgccccugc

SEQ ID NO: 2426065 - RNA, 21 nt, Human
agcccggcgccaccauccugc

SEQ ID NO: 2426066 - RNA, 20 nt, Human
agcccggcgccaccauccug

SEQ ID NO: 2426067 - RNA, 22 nt, Human
agcccggccugcucccagcagc

SEQ ID NO: 2426068 - RNA, 21 nt, Human
agcccggccugcucccagcag

SEQ ID NO: 2426069 - RNA, 20 nt, Human
agcccggccugcucccagca

SEQ ID NO: 2426070 - RNA, 19 nt, Human
agcccggccugcucccagc

SEQ ID NO: 2426071 - RNA, 11 nt, Human
agcccggccug

SEQ ID NO: 2426072 - RNA, 20 nt, Human
agcccggaccuuggcagccc

SEQ ID NO: 2426073 - RNA, 19 nt, Human
agcccgcugaguggacugg

SEQ ID NO: 2426074 - RNA, 14 nt, Human
agcccggaugcuuc

SEQ ID NO: 2426075 - RNA, 21 nt, Human
agcccgccugccaguccuagc

SEQ ID NO: 2426076 - RNA, 19 nt, Human
agcccgccugccaguccua

SEQ ID NO: 2426077 - RNA, 18 nt, Human
agcccgccugccaguccu

SEQ ID NO: 2426078 - RNA, 16 nt, Human
agcccgccugccaguc

SEQ ID NO: 2426079 - RNA, 15 nt, Human
agcccgccugccagu

SEQ ID NO: 2426080 - RNA, 14 nt, Human
agcccgccugccag

SEQ ID NO: 2426081 - RNA, 13 nt, Human
agcccgccugcca

SEQ ID NO: 2426082 - RNA, 12 nt, Human
agcccgccugcc

SEQ ID NO: 2426083 - RNA, 20 nt, Human
agcccgcggggacauuggga

SEQ ID NO: 2426084 - RNA, 23 nt, Human
agcccgccugccaguccuagcug

SEQ ID NO: 2426085 - RNA, 22 nt, Human
agcccgccugccaguccuagcu

SEQ ID NO: 2426086 - RNA, 15 nt, Human
agcccgcggggacau

SEQ ID NO: 2426087 - RNA, 14 nt, Human
agcccccuggccuc

SEQ ID NO: 2426088 - RNA, 21 nt, Human
agccccucuggucgcuccugc

SEQ ID NO: 2426089 - RNA, 20 nt, Human
agccccucuggucgcuccug

SEQ ID NO: 2426090 - RNA, 22 nt, Human
agccccucuggucgcuccugcc

SEQ ID NO: 2426091 - RNA, 10 nt, Human
agccccucuu

SEQ ID NO: 2426092 - RNA, 12 nt, Human
agccccugcccc

SEQ ID NO: 2426093 - RNA, 20 nt, Human
agccccugauccugugaagu

SEQ ID NO: 2426094 - RNA, 16 nt, Human
agccccucuugccccc

SEQ ID NO: 2426095 - RNA, 17 nt, Human
agccccucuugcccccc

SEQ ID NO: 2426096 - RNA, 20 nt, Human
agccccucuugccccccacc

SEQ ID NO: 2426097 - RNA, 23 nt, Human
agccccucuugccccccacccca

SEQ ID NO: 2426098 - RNA, 21 nt, Human
agccccucuugccccccaccc

SEQ ID NO: 2426099 - RNA, 22 nt, Human
agccccucuugccccccacccc

SEQ ID NO: 2426100 - RNA, 23 nt, Human
agccccauucugccugcccaggc

SEQ ID NO: 2426101 - RNA, 22 nt, Human
agcccccccaacacugugcccu

SEQ ID NO: 2426102 - RNA, 21 nt, Human
agcccccccaacacugugccc

SEQ ID NO: 2426103 - RNA, 20 nt, Human
agcccccccaacacugugcc

SEQ ID NO: 2426104 - RNA, 19 nt, Human
agcccccccaacacugugc

SEQ ID NO: 2426105 - RNA, 17 nt, Human
agcccccaggcugcugg

SEQ ID NO: 2426106 - RNA, 18 nt, Human
agcccccccaacacugug

SEQ ID NO: 2426107 - RNA, 18 nt, Human
agcccccaggcugcugga

SEQ ID NO: 2426108 - RNA, 16 nt, Human
agcccccuccuugucu

SEQ ID NO: 2426109 - RNA, 23 nt, Human
agcccccgccccgccccacauuc

SEQ ID NO: 2426110 - RNA, 23 nt, Human
agcccccccaacacugugcccug

SEQ ID NO: 2426111 - RNA, 22 nt, Human
agcccccgccccgccccacauu

SEQ ID NO: 2426112 - RNA, 15 nt, Human
agcccccccuuccac

SEQ ID NO: 2426113 - RNA, 13 nt, Human
agcccccccuucc

SEQ ID NO: 2426114 - RNA, 20 nt, Human
agccucauauuuaaagacag

SEQ ID NO: 2426115 - RNA, 21 nt, Human
agccuccaagcuccaucucca

SEQ ID NO: 2426116 - RNA, 17 nt, Human
agccucauccgaggcag

SEQ ID NO: 2426117 - RNA, 14 nt, Human
agccuccagccucu

SEQ ID NO: 2426118 - RNA, 13 nt, Human
agccuccagccuc

SEQ ID NO: 2426119 - RNA, 12 nt, Human
agccuccagccu

SEQ ID NO: 2426120 - RNA, 17 nt, Human
agccuccagcugccccg

SEQ ID NO: 2426121 - RNA, 18 nt, Human
agccuccagccucuguuc

SEQ ID NO: 2426122 - RNA, 16 nt, Human
agccuccagccucugu

SEQ ID NO: 2426123 - RNA, 15 nt, Human
agccuccagccucug

SEQ ID NO: 2426124 - RNA, 17 nt, Human
agccuccaugcugccuc

SEQ ID NO: 2426125 - RNA, 23 nt, Human
agccucugaaaaccaauguucuc

SEQ ID NO: 2426126 - RNA, 22 nt, Human
agccuccaguccaaggaaacca

SEQ ID NO: 2426127 - RNA, 16 nt, Human
agccuccaguccaagg

SEQ ID NO: 2426128 - RNA, 15 nt, Human
agccucucucccagu

SEQ ID NO: 2426129 - RNA, 14 nt, Human
agccucucucccag

SEQ ID NO: 2426130 - RNA, 17 nt, Human
agccucucucccagucu

SEQ ID NO: 2426131 - RNA, 16 nt, Human
agccucucucccaguc

SEQ ID NO: 2426132 - RNA, 18 nt, Human
agccucucucccagucua

SEQ ID NO: 2426133 - RNA, 13 nt, Human
agccucugcuccc

SEQ ID NO: 2426134 - RNA, 21 nt, Human
agccucugacuuaagcugccu

SEQ ID NO: 2426135 - RNA, 22 nt, Human
agccucugaccccuccucacug

SEQ ID NO: 2426136 - RNA, 18 nt, Human
agccucugagccccuggg

SEQ ID NO: 2426137 - RNA, 21 nt, Human
agccucugaccccuccucacu

SEQ ID NO: 2426138 - RNA, 20 nt, Human
agccucugaccccuccucac

SEQ ID NO: 2426139 - RNA, 19 nt, Human
agccucugaccccuccuca

SEQ ID NO: 2426140 - RNA, 18 nt, Human
agccucugaccccuccuc

SEQ ID NO: 2426141 - RNA, 17 nt, Human
agccucugaccccuccu

SEQ ID NO: 2426142 - RNA, 15 nt, Human
agccucugaccccuc

SEQ ID NO: 2426143 - RNA, 12 nt, Human
agccucugaccc

SEQ ID NO: 2426144 - RNA, 22 nt, Human
ugcagcucaaggaaaggccuga

SEQ ID NO: 2426145 - RNA, 16 nt, Human
ugcagcucacuacccu

SEQ ID NO: 2426146 - RNA, 21 nt, Human
ugcagcucaaggaaaggccug

SEQ ID NO: 2426147 - RNA, 22 nt, Human
ugcagccucaaccuccugggcu

SEQ ID NO: 2426148 - RNA, 21 nt, Human
ugcagccucaaccuccugggc

SEQ ID NO: 2426149 - RNA, 20 nt, Human
ugcagccucaaccuccuggg

SEQ ID NO: 2426150 - RNA, 13 nt, Human
agccucuggguca

SEQ ID NO: 2426151 - RNA, 20 nt, Human
agccucuggcuagaggccag

SEQ ID NO: 2426152 - RNA, 12 nt, Human
agccucuggcua

SEQ ID NO: 2426153 - RNA, 13 nt, Human
agccucuggcuag

SEQ ID NO: 2426154 - RNA, 14 nt, Human
agccucuggcuaga

SEQ ID NO: 2426155 - RNA, 15 nt, Human
agccucuggcuagag

SEQ ID NO: 2426156 - RNA, 15 nt, Human
agccucugcucccca

SEQ ID NO: 2426157 - RNA, 16 nt, Human
agccucugcuccccag

SEQ ID NO: 2426158 - RNA, 12 nt, Human
agccucugcugc

SEQ ID NO: 2426159 - RNA, 13 nt, Human
agccucugcugcc

SEQ ID NO: 2426160 - RNA, 23 nt, Human
agccucuggcauuagaauuauuu

SEQ ID NO: 2426161 - RNA, 22 nt, Human
agccucuggcauuagaauuauu

SEQ ID NO: 2426162 - RNA, 14 nt, Human
agccucugcugcca

SEQ ID NO: 2426163 - RNA, 18 nt, Human
agccucugcugccauggc

SEQ ID NO: 2426164 - RNA, 13 nt, Human
agccucagucucc

SEQ ID NO: 2426165 - RNA, 16 nt, Human
agccucagucucccuc

SEQ ID NO: 2426166 - RNA, 19 nt, Human
agccucagucucccucccu

SEQ ID NO: 2426167 - RNA, 20 nt, Human
agccucagucucccucccuu

SEQ ID NO: 2426168 - RNA, 19 nt, Human
agccucaguccuccccuca

SEQ ID NO: 2426169 - RNA, 18 nt, Human
agccucaguccuccccuc

SEQ ID NO: 2426170 - RNA, 20 nt, Human
agccucaguccuccccucac

SEQ ID NO: 2426171 - RNA, 22 nt, Human
agccucagucucccucccuugg

SEQ ID NO: 2426172 - RNA, 16 nt, Human
agccucauauuuaaag

SEQ ID NO: 2426173 - RNA, 15 nt, Human
agccucauauuuaaa

SEQ ID NO: 2426174 - RNA, 14 nt, Human
agccucauauuuaa

SEQ ID NO: 2426175 - RNA, 19 nt, Human
agccucauauuuaaagaca

SEQ ID NO: 2426176 - RNA, 17 nt, Human
agccucauauuuaaaga

SEQ ID NO: 2426177 - RNA, 14 nt, Human
agccucauccgagg

SEQ ID NO: 2426178 - RNA, 17 nt, Human
agccucaguccuccccu

SEQ ID NO: 2426179 - RNA, 16 nt, Human
agccucaguccucccc

SEQ ID NO: 2426180 - RNA, 15 nt, Human
agccucaguccuccc

SEQ ID NO: 2426181 - RNA, 11 nt, Human
agccucagucc

SEQ ID NO: 2426182 - RNA, 12 nt, Human
agccucagccau

SEQ ID NO: 2426183 - RNA, 15 nt, Human
agccucagccauuca

SEQ ID NO: 2426184 - RNA, 22 nt, Human
agccucacuugaaugugucacu

SEQ ID NO: 2426185 - RNA, 18 nt, Human
agccgagaucacgccacu

SEQ ID NO: 2426186 - RNA, 19 nt, Human
agccucaaccuccugggcu

SEQ ID NO: 2426187 - RNA, 20 nt, Human
agccucaaccuccugggcua

SEQ ID NO: 2426188 - RNA, 21 nt, Human
agccucaagucuuauuuccuc

SEQ ID NO: 2426189 - RNA, 21 nt, Human
agcccuuugggaggcugaggc

SEQ ID NO: 2426190 - RNA, 22 nt, Human
agcccuuugggaggcugaggcg

SEQ ID NO: 2426191 - RNA, 17 nt, Human
agccucacaguccuuac

SEQ ID NO: 2426192 - RNA, 20 nt, Human
agccucaauaagccuugucg

SEQ ID NO: 2426193 - RNA, 19 nt, Human
agccucaauaagccuuguc

SEQ ID NO: 2426194 - RNA, 18 nt, Human
agccucaauaagccuugu

SEQ ID NO: 2426195 - RNA, 15 nt, Human
agccucacagaagaa

SEQ ID NO: 2426196 - RNA, 18 nt, Human
agccucacaguccuuacc

SEQ ID NO: 2426197 - RNA, 16 nt, Human
agccucacuugaaugu

SEQ ID NO: 2426198 - RNA, 17 nt, Human
agccucacuugaaugug

SEQ ID NO: 2426199 - RNA, 18 nt, Human
agcccuguggaugagccc

SEQ ID NO: 2426200 - RNA, 19 nt, Human
agcccuguggaugagcccu

SEQ ID NO: 2426201 - RNA, 22 nt, Human
agcccuguggaugagcccucag

SEQ ID NO: 2426202 - RNA, 23 nt, Human
agcccuguggaugagcccucaga

SEQ ID NO: 2426203 - RNA, 16 nt, Human
agcccuuagcagggaa

SEQ ID NO: 2426204 - RNA, 23 nt, Human
agcccugucgagacacuugccuu

SEQ ID NO: 2426205 - RNA, 21 nt, Human
agcccugucgagacacuugcc

SEQ ID NO: 2426206 - RNA, 12 nt, Human
agcccuguggaa

SEQ ID NO: 2426207 - RNA, 18 nt, Human
agcccugucgagacacuu

SEQ ID NO: 2426208 - RNA, 17 nt, Human
agcccugucgagacacu

SEQ ID NO: 2426209 - RNA, 17 nt, Human
ugcagacucuacagagg

SEQ ID NO: 2426210 - RNA, 16 nt, Human
ugcagacucuacagag

SEQ ID NO: 2426211 - RNA, 16 nt, Human
agcccugucagugcag

SEQ ID NO: 2426212 - RNA, 14 nt, Human
ugcagacucacugu

SEQ ID NO: 2426213 - RNA, 14 nt, Human
ugcagacucaguuu

SEQ ID NO: 2426214 - RNA, 15 nt, Human
ugcagacucaguuug

SEQ ID NO: 2426215 - RNA, 20 nt, Human
agcccugucagugcagcccg

SEQ ID NO: 2426216 - RNA, 19 nt, Human
ugcagacucaguuugucag

SEQ ID NO: 2426217 - RNA, 20 nt, Human
ugcagacucaguuugucaga

SEQ ID NO: 2426218 - RNA, 17 nt, Human
agcccugucagugcagc

SEQ ID NO: 2426219 - RNA, 19 nt, Human
agcccugucagugcagccc

SEQ ID NO: 2426220 - RNA, 18 nt, Human
agcccuuucugugugcac

SEQ ID NO: 2426221 - RNA, 17 nt, Human
agcccuuucugugugca

SEQ ID NO: 2426222 - RNA, 16 nt, Human
agcccuuucugugugc

SEQ ID NO: 2426223 - RNA, 13 nt, Human
agcccuuucugug

SEQ ID NO: 2426224 - RNA, 12 nt, Human
agcccuuucugu

SEQ ID NO: 2426225 - RNA, 21 nt, Human
agcccuuuacuugaccuccua

SEQ ID NO: 2426226 - RNA, 20 nt, Human
agccgagauagccaaggcca

SEQ ID NO: 2426227 - RNA, 21 nt, Human
agccgagauagccaaggccaa

SEQ ID NO: 2426228 - RNA, 17 nt, Human
agccgagaucacgccac

SEQ ID NO: 2426229 - RNA, 15 nt, Human
agcccuuaucugugc

SEQ ID NO: 2426230 - RNA, 23 nt, Human
agcccuguugacacaggucuuuc

SEQ ID NO: 2426231 - RNA, 17 nt, Human
agcccuguugacacagg

SEQ ID NO: 2426232 - RNA, 18 nt, Human
agcccuguugacacaggu

SEQ ID NO: 2426233 - RNA, 20 nt, Human
agcccuguugacacaggucu

SEQ ID NO: 2426234 - RNA, 21 nt, Human
agcccuguugacacaggucuu

SEQ ID NO: 2426235 - RNA, 21 nt, Human
agcccuuagcagggaaacagc

SEQ ID NO: 2426236 - RNA, 11 nt, Human
agcccuuggcc

SEQ ID NO: 2426237 - RNA, 23 nt, Human
agcccuugccuccccauuuccca

SEQ ID NO: 2426238 - RNA, 12 nt, Human
agcccuuggcca

SEQ ID NO: 2426239 - RNA, 12 nt, Human
agcccuuggguu

SEQ ID NO: 2426240 - RNA, 16 nt, Human
agcccuugccucccca

SEQ ID NO: 2426241 - RNA, 14 nt, Human
agcccuugccuccc

SEQ ID NO: 2426242 - RNA, 13 nt, Human
agcccuugccucc

SEQ ID NO: 2426243 - RNA, 12 nt, Human
agcccuugccuc

SEQ ID NO: 2426244 - RNA, 17 nt, Human
agcccuugcauugcaga

SEQ ID NO: 2426245 - RNA, 11 nt, Human
ugcacacauuu

SEQ ID NO: 2426246 - RNA, 12 nt, Human
ugcacacauuuu

SEQ ID NO: 2426247 - RNA, 13 nt, Human
ugcacacauuuuu

SEQ ID NO: 2426248 - RNA, 15 nt, Human
ugcacacauuuuuua

SEQ ID NO: 2426249 - RNA, 17 nt, Human
ugcacuccccugcuggg

SEQ ID NO: 2426250 - RNA, 16 nt, Human
ugcacuccccugcugg

SEQ ID NO: 2426251 - RNA, 18 nt, Human
ugcacucuaaaagguuca

SEQ ID NO: 2426252 - RNA, 17 nt, Human
agcccuggucucagcag

SEQ ID NO: 2426253 - RNA, 19 nt, Human
ugcacuccccugcugggug

SEQ ID NO: 2426254 - RNA, 15 nt, Human
ugcagaagacaguau

SEQ ID NO: 2426255 - RNA, 22 nt, Human
ugcagacaggcaagcaccuccu

SEQ ID NO: 2426256 - RNA, 14 nt, Human
ugcagaagacagua

SEQ ID NO: 2426257 - RNA, 22 nt, Human
ugcacucuaacccuaggcauca

SEQ ID NO: 2426258 - RNA, 21 nt, Human
ugcacucuaaaagguucaggg

SEQ ID NO: 2426259 - RNA, 14 nt, Human
ugcagaacuaaacu

SEQ ID NO: 2426260 - RNA, 23 nt, Human
ugcagaccacgcccguccugccu

SEQ ID NO: 2426261 - RNA, 15 nt, Human
ugcagacaugagugc

SEQ ID NO: 2426262 - RNA, 23 nt, Human
ugcagaccuguccuccugguggg

SEQ ID NO: 2426263 - RNA, 21 nt, Human
ugcagaccuguccuccuggug

SEQ ID NO: 2426264 - RNA, 20 nt, Human
ugcagaccuguccuccuggu

SEQ ID NO: 2426265 - RNA, 19 nt, Human
ugcagaccuguccuccugg

SEQ ID NO: 2426266 - RNA, 18 nt, Human
ugcagaccuguccuccug

SEQ ID NO: 2426267 - RNA, 15 nt, Human
ugcagaccuguccuc

SEQ ID NO: 2426268 - RNA, 14 nt, Human
ugcagaccuguccu

SEQ ID NO: 2426269 - RNA, 23 nt, Human
ugcagacuagaauucuagugcug

SEQ ID NO: 2426270 - RNA, 22 nt, Human
ugcagacuagaauucuagugcu

SEQ ID NO: 2426271 - RNA, 16 nt, Human
ugcagacucaauaaaa

SEQ ID NO: 2426272 - RNA, 19 nt, Human
ugcagacucaauaaaauca

SEQ ID NO: 2426273 - RNA, 19 nt, Human
ugcagacuagaauucuagu

SEQ ID NO: 2426274 - RNA, 17 nt, Human
ugcagacuagaauucua

SEQ ID NO: 2426275 - RNA, 14 nt, Human
ugcagacuagaauu

SEQ ID NO: 2426276 - RNA, 10 nt, Human
ugccugcuga

SEQ ID NO: 2426277 - RNA, 23 nt, Human
ugccugcugaaugauuuccaaag

SEQ ID NO: 2426278 - RNA, 21 nt, Human
ugccugcuuuucacugcugca

SEQ ID NO: 2426279 - RNA, 19 nt, Human
ugccugcuuuucacugcug

SEQ ID NO: 2426280 - RNA, 10 nt, Human
agcugccugu

SEQ ID NO: 2426281 - RNA, 22 nt, Human
agcugcuuuugucuaugggacu

SEQ ID NO: 2426282 - RNA, 13 nt, Human
agcugccuguuca

SEQ ID NO: 2426283 - RNA, 14 nt, Human
agcugccuguaguu

SEQ ID NO: 2426284 - RNA, 15 nt, Human
agcugccuguaguua

SEQ ID NO: 2426285 - RNA, 18 nt, Human
agcugccuguaguuagga

SEQ ID NO: 2426286 - RNA, 19 nt, Human
agcugccuguaguuaggaa

SEQ ID NO: 2426287 - RNA, 20 nt, Human
agcugccuguaguuaggaaa

SEQ ID NO: 2426288 - RNA, 22 nt, Human
agcugccuguaguuaggaaaua

SEQ ID NO: 2426289 - RNA, 23 nt, Human
agcugccuguaguuaggaaauaa

SEQ ID NO: 2426290 - RNA, 14 nt, Human
agcugccugugccu

SEQ ID NO: 2426291 - RNA, 24 nt, Human
agcugcuuuugucuaugggacuca

SEQ ID NO: 2426292 - RNA, 23 nt, Human
agcugcuuuugucuaugggacuc

SEQ ID NO: 2426293 - RNA, 13 nt, Human
agcuggaggacua

SEQ ID NO: 2426294 - RNA, 19 nt, Human
agcuggagccuggugcccu

SEQ ID NO: 2426295 - RNA, 17 nt, Human
agcuggagccuggugcc

SEQ ID NO: 2426296 - RNA, 15 nt, Human
agcuggagccuggug

SEQ ID NO: 2426297 - RNA, 14 nt, Human
agcuggagccuggu

SEQ ID NO: 2426298 - RNA, 22 nt, Human
agcuggaggacuagaaccugga

SEQ ID NO: 2426299 - RNA, 20 nt, Human
agcuggaggacuagaaccug

SEQ ID NO: 2426300 - RNA, 15 nt, Human
agcugggacuacagg

SEQ ID NO: 2426301 - RNA, 13 nt, Human
ugccucucuguuu

SEQ ID NO: 2426302 - RNA, 12 nt, Human
ugccucucuguu

SEQ ID NO: 2426303 - RNA, 21 nt, Human
ugccucucugcaggucccuaa

SEQ ID NO: 2426304 - RNA, 22 nt, Human
ugccucugccaaaggaugugau

SEQ ID NO: 2426305 - RNA, 21 nt, Human
ugccucugccaaaggauguga

SEQ ID NO: 2426306 - RNA, 11 nt, Human
ugccucugccu

SEQ ID NO: 2426307 - RNA, 23 nt, Human
ugccucucugcaggucccuaaua

SEQ ID NO: 2426308 - RNA, 15 nt, Human
ugccucucugcaggu

SEQ ID NO: 2426309 - RNA, 16 nt, Human
ugccucugacacacag

SEQ ID NO: 2426310 - RNA, 14 nt, Human
ugccucugacacac

SEQ ID NO: 2426311 - RNA, 19 nt, Human
ugccugcccaggccccugc

SEQ ID NO: 2426312 - RNA, 18 nt, Human
ugccugcccaggccccug

SEQ ID NO: 2426313 - RNA, 17 nt, Human
ugccugcccaggccccu

SEQ ID NO: 2426314 - RNA, 12 nt, Human
ugccucugccuc

SEQ ID NO: 2426315 - RNA, 20 nt, Human
ugccugccugucugucucuc

SEQ ID NO: 2426316 - RNA, 21 nt, Human
ugccugccugucugucucucc

SEQ ID NO: 2426317 - RNA, 14 nt, Human
ugccugcgcccacc

SEQ ID NO: 2426318 - RNA, 21 nt, Human
ugccugcgcccaccccgcucu

SEQ ID NO: 2426319 - RNA, 20 nt, Human
ugccugcgcccaccccgcuc

SEQ ID NO: 2426320 - RNA, 19 nt, Human
ugccugcggaguugugcac

SEQ ID NO: 2426321 - RNA, 16 nt, Human
ugcccuuccucaguuu

SEQ ID NO: 2426322 - RNA, 20 nt, Human
ugcccuucccugucccucua

SEQ ID NO: 2426323 - RNA, 18 nt, Human
ugcccuuccucaguuuaa

SEQ ID NO: 2426324 - RNA, 20 nt, Human
ugccgcagcccugcagaggg

SEQ ID NO: 2426325 - RNA, 19 nt, Human
ugcccuuaccugccaggaa

SEQ ID NO: 2426326 - RNA, 14 nt, Human
ugcccuucacccca

SEQ ID NO: 2426327 - RNA, 17 nt, Human
ugcccuucacaguguuu

SEQ ID NO: 2426328 - RNA, 18 nt, Human
ugcccuucccugucccuc

SEQ ID NO: 2426329 - RNA, 17 nt, Human
ugcccuucccugucccu

SEQ ID NO: 2426330 - RNA, 16 nt, Human
ugcccuucccuguccc

SEQ ID NO: 2426331 - RNA, 15 nt, Human
ugcccuucccugucc

SEQ ID NO: 2426332 - RNA, 20 nt, Human
ugcccuucaccccaguggcc

SEQ ID NO: 2426333 - RNA, 15 nt, Human
ugcccuucaccccag

SEQ ID NO: 2426334 - RNA, 13 nt, Human
ugcccuucccugu

SEQ ID NO: 2426335 - RNA, 16 nt, Human
ugccgccccacccaga

SEQ ID NO: 2426336 - RNA, 15 nt, Human
ugccgccccacccag

SEQ ID NO: 2426337 - RNA, 14 nt, Human
ugccgccccaccca

SEQ ID NO: 2426338 - RNA, 20 nt, Human
ugccgccgccucgcccaccg

SEQ ID NO: 2426339 - RNA, 18 nt, Human
ugccgccgccucgcccac

SEQ ID NO: 2426340 - RNA, 21 nt, Human
ugccgccgccucgcccaccgc

SEQ ID NO: 2426341 - RNA, 17 nt, Human
ugccgccgccucgccca

SEQ ID NO: 2426342 - RNA, 16 nt, Human
ugccgccgccucgccc

SEQ ID NO: 2426343 - RNA, 15 nt, Human
ugccgccgccucgcc

SEQ ID NO: 2426344 - RNA, 15 nt, Human
ugccucaccccuugc

SEQ ID NO: 2426345 - RNA, 16 nt, Human
ugccgccucaaugugg

SEQ ID NO: 2426346 - RNA, 13 nt, Human
ugccgccucccag

SEQ ID NO: 2426347 - RNA, 14 nt, Human
ugccgccucccagc

SEQ ID NO: 2426348 - RNA, 19 nt, Human
ugcccuguuaaaagaugaa

SEQ ID NO: 2426349 - RNA, 12 nt, Human
ugcccugugcaa

SEQ ID NO: 2426350 - RNA, 22 nt, Human
ugcccuuaccugccaggaagcc

SEQ ID NO: 2426351 - RNA, 18 nt, Human
ugcccugugggcccccaa

SEQ ID NO: 2426352 - RNA, 15 nt, Human
ugcccugugggcccc

SEQ ID NO: 2426353 - RNA, 23 nt, Human
ugcccugugaguacuacaguccu

SEQ ID NO: 2426354 - RNA, 16 nt, Human
agcucuucuccaggcu

SEQ ID NO: 2426355 - RNA, 15 nt, Human
agcucuguuucgguu

SEQ ID NO: 2426356 - RNA, 15 nt, Human
agcucuucuccaggc

SEQ ID NO: 2426357 - RNA, 17 nt, Human
ugccucucucaggccaa

SEQ ID NO: 2426358 - RNA, 16 nt, Human
ugccucucucaggcca

SEQ ID NO: 2426359 - RNA, 12 nt, Human
ugccucucugca

SEQ ID NO: 2426360 - RNA, 11 nt, Human
ugccucucugc

SEQ ID NO: 2426361 - RNA, 23 nt, Human
ugccuccccauuucccaucugca

SEQ ID NO: 2426362 - RNA, 22 nt, Human
ugccuccccauuucccaucugc

SEQ ID NO: 2426363 - RNA, 18 nt, Human
ugccuccccggcucgagc

SEQ ID NO: 2426364 - RNA, 19 nt, Human
ugccuccccaacccugccc

SEQ ID NO: 2426365 - RNA, 20 nt, Human
ugccuccccaacccugcccc

SEQ ID NO: 2426366 - RNA, 21 nt, Human
ugccuccccaacccugccccu

SEQ ID NO: 2426367 - RNA, 22 nt, Human
ugccuccccaacccugccccug

SEQ ID NO: 2426368 - RNA, 21 nt, Human
ugccuccccauuucccaucug

SEQ ID NO: 2426369 - RNA, 20 nt, Human
ugccuccccauuucccaucu

SEQ ID NO: 2426370 - RNA, 17 nt, Human
ugccuccccauuuccca

SEQ ID NO: 2426371 - RNA, 23 nt, Human
ugccuccccaacccugccccugc

SEQ ID NO: 2426372 - RNA, 12 nt, Human
ugccucagcccg

SEQ ID NO: 2426373 - RNA, 18 nt, Human
ugccucagaaaacaagga

SEQ ID NO: 2426374 - RNA, 15 nt, Human
ugccucagccucccg

SEQ ID NO: 2426375 - RNA, 18 nt, Human
ugccucagccucccgagu

SEQ ID NO: 2426376 - RNA, 15 nt, Human
ugccucagccuccug

SEQ ID NO: 2426377 - RNA, 17 nt, Human
ugccucagccuccugag

SEQ ID NO: 2426378 - RNA, 22 nt, Human
ugccucccaucacccgcuaaga

SEQ ID NO: 2426379 - RNA, 16 nt, Human
ugccucagguuccuau

SEQ ID NO: 2426380 - RNA, 14 nt, Human
ugccucagguuccu

SEQ ID NO: 2426381 - RNA, 17 nt, Human
ugccucccauucugacc

SEQ ID NO: 2426382 - RNA, 15 nt, Human
ugccuccccaacccu

SEQ ID NO: 2426383 - RNA, 16 nt, Human
ugccuccccaacccug

SEQ ID NO: 2426384 - RNA, 18 nt, Human
ugccuccccaacccugcc

SEQ ID NO: 2426385 - RNA, 18 nt, Human
ugccucaggaggcaggac

SEQ ID NO: 2426386 - RNA, 14 nt, Human
ugccucagccuccg

SEQ ID NO: 2426387 - RNA, 21 nt, Human
ugccucaggaggcaggaccuu

SEQ ID NO: 2426388 - RNA, 12 nt, Human
ugccucagguuc

SEQ ID NO: 2426389 - RNA, 18 nt, Human
agcuccccagaguccucu

SEQ ID NO: 2426390 - RNA, 23 nt, Human
agcucccauuucuacucucccau

SEQ ID NO: 2426391 - RNA, 18 nt, Human
agcucccauuucuacucu

SEQ ID NO: 2426392 - RNA, 22 nt, Human
agcuccccaaaaaccucacccg

SEQ ID NO: 2426393 - RNA, 14 nt, Human
agcuccccaccacc

SEQ ID NO: 2426394 - RNA, 17 nt, Human
agcuccccaccacccca

SEQ ID NO: 2426395 - RNA, 20 nt, Human
agcuccccaccaccccagcu

SEQ ID NO: 2426396 - RNA, 13 nt, Human
agcuccccagagu

SEQ ID NO: 2426397 - RNA, 21 nt, Human
agcuccccaccaccccagcug

SEQ ID NO: 2426398 - RNA, 15 nt, Human
agcucccccuguccc

SEQ ID NO: 2426399 - RNA, 14 nt, Human
agcucccccugucc

SEQ ID NO: 2426400 - RNA, 13 nt, Human
agcucccccuguc

SEQ ID NO: 2426401 - RNA, 23 nt, Human
agcucccccucccccacugccau

SEQ ID NO: 2426402 - RNA, 23 nt, Human
agcucccccgggaggggcccgcu

SEQ ID NO: 2426403 - RNA, 19 nt, Human
agcucccccgggaggggcc

SEQ ID NO: 2426404 - RNA, 21 nt, Human
agcucccccuguccccucagc

SEQ ID NO: 2426405 - RNA, 19 nt, Human
agcucccccuguccccuca

SEQ ID NO: 2426406 - RNA, 17 nt, Human
agcucccccuguccccu

SEQ ID NO: 2426407 - RNA, 16 nt, Human
agcucccccugucccc

SEQ ID NO: 2426408 - RNA, 20 nt, Human
agcuccccgcuucugccugc

SEQ ID NO: 2426409 - RNA, 23 nt, Human
agcucccccuguccccucagcuc

SEQ ID NO: 2426410 - RNA, 23 nt, Human
agcuccuucuguccuacucugug

SEQ ID NO: 2426411 - RNA, 22 nt, Human
agcuccuucuguccuacucugu

SEQ ID NO: 2426412 - RNA, 20 nt, Human
agcuccuugggaggaagcag

SEQ ID NO: 2426413 - RNA, 19 nt, Human
agcuccuugggaggaagca

SEQ ID NO: 2426414 - RNA, 18 nt, Human
agcuccuugggaggaagc

SEQ ID NO: 2426415 - RNA, 17 nt, Human
agcuccuugggaggaag

SEQ ID NO: 2426416 - RNA, 12 nt, Human
agcuccuuggga

SEQ ID NO: 2426417 - RNA, 22 nt, Human
agcuccuugggaggaagcagaa

SEQ ID NO: 2426418 - RNA, 21 nt, Human
agcuccuugggaggaagcaga

SEQ ID NO: 2426419 - RNA, 23 nt, Human
agcuccuugggaggaagcagaau

SEQ ID NO: 2426420 - RNA, 15 nt, Human
agcuccuugggaggc

SEQ ID NO: 2426421 - RNA, 19 nt, Human
agcucguguauccuggggc

SEQ ID NO: 2426422 - RNA, 18 nt, Human
agcucguguauccugggg

SEQ ID NO: 2426423 - RNA, 19 nt, Human
agcuccuugggaggcccca

SEQ ID NO: 2426424 - RNA, 17 nt, Human
agcucguguauccuggg

SEQ ID NO: 2426425 - RNA, 23 nt, Human
agcucccaccccacccccuucag

SEQ ID NO: 2426426 - RNA, 13 nt, Human
agcucccacccca

SEQ ID NO: 2426427 - RNA, 15 nt, Human
agcucccaccccacc

SEQ ID NO: 2426428 - RNA, 17 nt, Human
agcucccaccccacccc

SEQ ID NO: 2426429 - RNA, 23 nt, Human
agcucccaagggauggugcccug

SEQ ID NO: 2426430 - RNA, 22 nt, Human
agcucccaagggauggugcccu

SEQ ID NO: 2426431 - RNA, 20 nt, Human
agcucccaagggauggugcc

SEQ ID NO: 2426432 - RNA, 18 nt, Human
agcucccaagggauggug

SEQ ID NO: 2426433 - RNA, 21 nt, Human
agcuccaucuccacuccagau

SEQ ID NO: 2426434 - RNA, 19 nt, Human
agcuccagcucaccagccc

SEQ ID NO: 2426435 - RNA, 18 nt, Human
agcuccagcucaccagcc

SEQ ID NO: 2426436 - RNA, 21 nt, Human
agcuccagcucaccagcccca

SEQ ID NO: 2426437 - RNA, 19 nt, Human
agcuccagacccccagcaa

SEQ ID NO: 2426438 - RNA, 17 nt, Human
agcucuggacagcccca

SEQ ID NO: 2426439 - RNA, 18 nt, Human
agcucuggacagccccac

SEQ ID NO: 2426440 - RNA, 12 nt, Human
agcucuggacca

SEQ ID NO: 2426441 - RNA, 13 nt, Human
agcucugcauuau

SEQ ID NO: 2426442 - RNA, 21 nt, Human
agcucuggacagccccacccu

SEQ ID NO: 2426443 - RNA, 23 nt, Human
agcucugcccauccugccccuga

SEQ ID NO: 2426444 - RNA, 16 nt, Human
agcucugcagcccagg

SEQ ID NO: 2426445 - RNA, 14 nt, Human
agcucugcagccca

SEQ ID NO: 2426446 - RNA, 12 nt, Human
agcucugcauua

SEQ ID NO: 2426447 - RNA, 21 nt, Human
agcucugcagagcaggaaaca

SEQ ID NO: 2426448 - RNA, 20 nt, Human
agcucguguauccuggggcu

SEQ ID NO: 2426449 - RNA, 13 nt, Human
agcucuacccagg

SEQ ID NO: 2426450 - RNA, 15 nt, Human
agcucuacccagggc

SEQ ID NO: 2426451 - RNA, 17 nt, Human
agcucuacccagggccu

SEQ ID NO: 2426452 - RNA, 19 nt, Human
agcucuacccagggccugc

SEQ ID NO: 2426453 - RNA, 20 nt, Human
agcucuacccagggccugca

SEQ ID NO: 2426454 - RNA, 21 nt, Human
agcucuacccagggccugcag

SEQ ID NO: 2426455 - RNA, 17 nt, Human
agcucccauuucuacuc

SEQ ID NO: 2426456 - RNA, 16 nt, Human
agcucuagacaacccu

SEQ ID NO: 2426457 - RNA, 17 nt, Human
agcucuagacaacccug

SEQ ID NO: 2426458 - RNA, 19 nt, Human
agcucuagacaacccugca

SEQ ID NO: 2426459 - RNA, 20 nt, Human
agcucuagacaacccugcaa

SEQ ID NO: 2426460 - RNA, 13 nt, Human
agcucuucaggcc

SEQ ID NO: 2426461 - RNA, 15 nt, Human
agcucuucaggccuc

SEQ ID NO: 2426462 - RNA, 16 nt, Human
agcucuucaggccucc

SEQ ID NO: 2426463 - RNA, 17 nt, Human
agcucuucaggccuccc

SEQ ID NO: 2426464 - RNA, 13 nt, Human
agcucuucauguu

SEQ ID NO: 2426465 - RNA, 16 nt, Human
agcucuucauguuuca

SEQ ID NO: 2426466 - RNA, 18 nt, Human
agcucuucaggccucccu

SEQ ID NO: 2426467 - RNA, 20 nt, Human
agcucuuaauuguucauuuu

SEQ ID NO: 2426468 - RNA, 18 nt, Human
agcucuguguugccaugu

SEQ ID NO: 2426469 - RNA, 23 nt, Human
agcucuguguugccaugugugcu

SEQ ID NO: 2426470 - RNA, 20 nt, Human
agcucuggaggggaggggga

SEQ ID NO: 2426471 - RNA, 19 nt, Human
agcucuggaggggaggggg

SEQ ID NO: 2426472 - RNA, 18 nt, Human
agcucuggaggggagggg

SEQ ID NO: 2426473 - RNA, 17 nt, Human
agcucuggaggggaggg

SEQ ID NO: 2426474 - RNA, 16 nt, Human
agcucuggaggggagg

SEQ ID NO: 2426475 - RNA, 12 nt, Human
agcucuggaggg

SEQ ID NO: 2426476 - RNA, 17 nt, Human
agcucuggaccagccug

SEQ ID NO: 2426477 - RNA, 15 nt, Human
agcucuggaccagcc

SEQ ID NO: 2426478 - RNA, 21 nt, Human
agcucuggcugaacccugugc

SEQ ID NO: 2426479 - RNA, 20 nt, Human
agcucuggcugaacccugug

SEQ ID NO: 2426480 - RNA, 19 nt, Human
agcucuggcugaacccugu

SEQ ID NO: 2426481 - RNA, 18 nt, Human
agcucuggcugaacccug

SEQ ID NO: 2426482 - RNA, 17 nt, Human
agcucuggcugaacccu

SEQ ID NO: 2426483 - RNA, 16 nt, Human
agcucuggcugaaccc

SEQ ID NO: 2426484 - RNA, 12 nt, Human
agcucuggcuga

SEQ ID NO: 2426485 - RNA, 22 nt, Human
agcucuggcugaacccugugcu

SEQ ID NO: 2426486 - RNA, 15 nt, Human
agcucuguguugcca

SEQ ID NO: 2426487 - RNA, 16 nt, Human
agcucuguguugccau

SEQ ID NO: 2426488 - RNA, 24 nt, Human
agcuccacucugcuucucugacuu

SEQ ID NO: 2426489 - RNA, 23 nt, Human
agcuccacucugcuucucugacu

SEQ ID NO: 2426490 - RNA, 23 nt, Human
agcuccacugucacccuccaccu

SEQ ID NO: 2426491 - RNA, 21 nt, Human
agcuccacugucacccuccac

SEQ ID NO: 2426492 - RNA, 18 nt, Human
agcuccacugucacccuc

SEQ ID NO: 2426493 - RNA, 14 nt, Human
agcuccagaccccc

SEQ ID NO: 2426494 - RNA, 16 nt, Human
agcuccagacccccag

SEQ ID NO: 2426495 - RNA, 17 nt, Human
agcuccagacccccagc

SEQ ID NO: 2426496 - RNA, 18 nt, Human
agcuccagacccccagca

SEQ ID NO: 2426497 - RNA, 23 nt, Human
agcuccagacccccagcaacccu

SEQ ID NO: 2426498 - RNA, 17 nt, Human
agcuccagcucaccagc

SEQ ID NO: 2426499 - RNA, 13 nt, Human
agcuccagcucac

SEQ ID NO: 2426500 - RNA, 22 nt, Human
agcuccacucugcuucucugac

SEQ ID NO: 2426501 - RNA, 19 nt, Human
agcuccacucugcuucucu

SEQ ID NO: 2426502 - RNA, 18 nt, Human
agcuccacucugcuucuc

SEQ ID NO: 2426503 - RNA, 17 nt, Human
agcuccacucugcuucu

SEQ ID NO: 2426504 - RNA, 16 nt, Human
agcuccacucugcuuc

SEQ ID NO: 2426505 - RNA, 14 nt, Human
agcuccacucugcu

SEQ ID NO: 2426506 - RNA, 13 nt, Human
agcuccacucugc

SEQ ID NO: 2426507 - RNA, 12 nt, Human
agcuccacucug

SEQ ID NO: 2426508 - RNA, 11 nt, Human
agcuccacucu

SEQ ID NO: 2426509 - RNA, 17 nt, Human
agcuccacccuggccga

SEQ ID NO: 2426510 - RNA, 15 nt, Human
agcuccacccuggcc

SEQ ID NO: 2426511 - RNA, 22 nt, Human
agcuccacacccucucccagga

SEQ ID NO: 2426512 - RNA, 23 nt, Human
agcuccacacccucucccaggac

SEQ ID NO: 2426513 - RNA, 23 nt, Human
ugcccugaguggaucuccaagga

SEQ ID NO: 2426514 - RNA, 21 nt, Human
agcuccacacccucucccagg

SEQ ID NO: 2426515 - RNA, 19 nt, Human
agcuccaagcucccaggca

SEQ ID NO: 2426516 - RNA, 18 nt, Human
agcuccaagcucccaggc

SEQ ID NO: 2426517 - RNA, 17 nt, Human
agcuccaagcucccagg

SEQ ID NO: 2426518 - RNA, 22 nt, Human
ugcccugaccucccagcccuau

SEQ ID NO: 2426519 - RNA, 22 nt, Human
ugcccugaguggaucuccaagg

SEQ ID NO: 2426520 - RNA, 22 nt, Human
ugcccugcacgucaugggaggg

SEQ ID NO: 2426521 - RNA, 21 nt, Human
ugcccugaccucccagcccua

SEQ ID NO: 2426522 - RNA, 20 nt, Human
ugcccugaccucccagcccu

SEQ ID NO: 2426523 - RNA, 18 nt, Human
ugcccugaccucccagcc

SEQ ID NO: 2426524 - RNA, 17 nt, Human
ugcccugaccucccagc

SEQ ID NO: 2426525 - RNA, 16 nt, Human
ugcccugaccucccag

SEQ ID NO: 2426526 - RNA, 15 nt, Human
ugcccugaccuccca

SEQ ID NO: 2426527 - RNA, 14 nt, Human
ugcccugaccuccc

SEQ ID NO: 2426528 - RNA, 13 nt, Human
ugcccugaccucc

SEQ ID NO: 2426529 - RNA, 12 nt, Human
ugcccugaccuc

SEQ ID NO: 2426530 - RNA, 12 nt, Human
ugcccucuucau

SEQ ID NO: 2426531 - RNA, 18 nt, Human
ugcccucguggccagccc

SEQ ID NO: 2426532 - RNA, 17 nt, Human
ugcccucguggccagcc

SEQ ID NO: 2426533 - RNA, 16 nt, Human
ugcccucguggccagc

SEQ ID NO: 2426534 - RNA, 15 nt, Human
ugcccucguggccag

SEQ ID NO: 2426535 - RNA, 20 nt, Human
ugcccucguggccagcccgg

SEQ ID NO: 2426536 - RNA, 19 nt, Human
ugcccucguggccagcccg

SEQ ID NO: 2426537 - RNA, 21 nt, Human
ugcccucguggccagcccggc

SEQ ID NO: 2426538 - RNA, 22 nt, Human
ugcccuccuuguccacccaccu

SEQ ID NO: 2426539 - RNA, 19 nt, Human
ugcccuccuuguccaccca

SEQ ID NO: 2426540 - RNA, 16 nt, Human
ugcccuccucucccau

SEQ ID NO: 2426541 - RNA, 17 nt, Human
ugcccucgcugcuucug

SEQ ID NO: 2426542 - RNA, 15 nt, Human
ugcccucgcugcuuc

SEQ ID NO: 2426543 - RNA, 14 nt, Human
ugcccucgcugcuu

SEQ ID NO: 2426544 - RNA, 13 nt, Human
ugcccucgcugcu

SEQ ID NO: 2426545 - RNA, 19 nt, Human
ugcccucgggcgagucacu

SEQ ID NO: 2426546 - RNA, 20 nt, Human
ugcccucgggcgagucacug

SEQ ID NO: 2426547 - RNA, 22 nt, Human
ugcccucgggcgagucacugcc

SEQ ID NO: 2426548 - RNA, 23 nt, Human
ugcccucgggcgagucacugccu

SEQ ID NO: 2426549 - RNA, 12 nt, Human
ugcccuccucuc

SEQ ID NO: 2426550 - RNA, 14 nt, Human
ugcccuccucuccc

SEQ ID NO: 2426551 - RNA, 15 nt, Human
ugcccuccucuccca

SEQ ID NO: 2426552 - RNA, 21 nt, Human
ugcccuccccucucugcaccg

SEQ ID NO: 2426553 - RNA, 20 nt, Human
ugcccuccccagagcacugg

SEQ ID NO: 2426554 - RNA, 19 nt, Human
ugcccuccccagagcacug

SEQ ID NO: 2426555 - RNA, 17 nt, Human
ugcccuccccagagcac

SEQ ID NO: 2426556 - RNA, 16 nt, Human
ugcccuccccagagca

SEQ ID NO: 2426557 - RNA, 17 nt, Human
ugcccuccccucucugc

SEQ ID NO: 2426558 - RNA, 14 nt, Human
ugcccuccccucuc

SEQ ID NO: 2426559 - RNA, 22 nt, Human
ugcccuaaccucugagucacca

SEQ ID NO: 2426560 - RNA, 19 nt, Human
ugccccggggaggggcgcu

SEQ ID NO: 2426561 - RNA, 19 nt, Human
ugccccauccuccagcagg

SEQ ID NO: 2426562 - RNA, 20 nt, Human
ugcccuaaugcgcaggcugg

SEQ ID NO: 2426563 - RNA, 21 nt, Human
ugcccuccagcucuuuccucc

SEQ ID NO: 2426564 - RNA, 13 nt, Human
ugcccuccauccc

SEQ ID NO: 2426565 - RNA, 14 nt, Human
ugcccuccaucccg

SEQ ID NO: 2426566 - RNA, 17 nt, Human
ugcccuccaucccgaca

SEQ ID NO: 2426567 - RNA, 15 nt, Human
ugcccuccccagagc

SEQ ID NO: 2426568 - RNA, 15 nt, Human
ugcccucccaucccg

SEQ ID NO: 2426569 - RNA, 12 nt, Human
ugcccucccauc

SEQ ID NO: 2426570 - RNA, 20 nt, Human
ugcccuccaucccgacaugg

SEQ ID NO: 2426571 - RNA, 23 nt, Human
ugcccuaaugcgcaggcuggccc

SEQ ID NO: 2426572 - RNA, 18 nt, Human
ugcccuacagaggucucu

SEQ ID NO: 2426573 - RNA, 22 nt, Human
agcuccaagaccuguugguucc

SEQ ID NO: 2426574 - RNA, 20 nt, Human
agcuccaagaccuguugguu

SEQ ID NO: 2426575 - RNA, 15 nt, Human
agcuccaagccccau

SEQ ID NO: 2426576 - RNA, 15 nt, Human
agcuccaagcuccca

SEQ ID NO: 2426577 - RNA, 16 nt, Human
agcucaggugggcgug

SEQ ID NO: 2426578 - RNA, 10 nt, Human
agcucaggug

SEQ ID NO: 2426579 - RNA, 22 nt, Human
agcuccaaccugcaaagaucug

SEQ ID NO: 2426580 - RNA, 17 nt, Human
agcucaggugucccugc

SEQ ID NO: 2426581 - RNA, 22 nt, Human
ugccauuuaaagcuuauuaaaa

SEQ ID NO: 2426582 - RNA, 16 nt, Human
agcuccaagcucccag

SEQ ID NO: 2426583 - RNA, 22 nt, Human
ugccauuugcacccuccgccuu

SEQ ID NO: 2426584 - RNA, 19 nt, Human
ugccauuugcacccuccgc

SEQ ID NO: 2426585 - RNA, 21 nt, Human
ugccauuugcacccuccgccu

SEQ ID NO: 2426586 - RNA, 23 nt, Human
agcuccaagaccuguugguucca

SEQ ID NO: 2426587 - RNA, 16 nt, Human
ugccauuugcacccuc

SEQ ID NO: 2426588 - RNA, 17 nt, Human
ugccauuugcacccucc

SEQ ID NO: 2426589 - RNA, 15 nt, Human
agcucagggcuucau

SEQ ID NO: 2426590 - RNA, 14 nt, Human
agcucagggcuuca

SEQ ID NO: 2426591 - RNA, 18 nt, Human
agcucagggccuggcuca

SEQ ID NO: 2426592 - RNA, 20 nt, Human
agcucagggccuggcucagg

SEQ ID NO: 2426593 - RNA, 19 nt, Human
agcucagggccuggcucag

SEQ ID NO: 2426594 - RNA, 14 nt, Human
agcucagggccugg

SEQ ID NO: 2426595 - RNA, 13 nt, Human
agcucaggaucuc

SEQ ID NO: 2426596 - RNA, 17 nt, Human
agcucaggaggcuugga

SEQ ID NO: 2426597 - RNA, 13 nt, Human
agcucagggccug

SEQ ID NO: 2426598 - RNA, 12 nt, Human
agcucagggccu

SEQ ID NO: 2426599 - RNA, 19 nt, Human
agcuauucaguaauaacuc

SEQ ID NO: 2426600 - RNA, 18 nt, Human
agcucaggaccaggcaau

SEQ ID NO: 2426601 - RNA, 18 nt, Human
agcucaggaccugggacc

SEQ ID NO: 2426602 - RNA, 22 nt, Human
agcuauuagccaggaucauggu

SEQ ID NO: 2426603 - RNA, 20 nt, Human
agcuauuagccaggaucaug

SEQ ID NO: 2426604 - RNA, 14 nt, Human
agcucaggaccagg

SEQ ID NO: 2426605 - RNA, 19 nt, Human
agcuaguggcuucaaaaua

SEQ ID NO: 2426606 - RNA, 17 nt, Human
agcuaguucguagcuuu

SEQ ID NO: 2426607 - RNA, 18 nt, Human
agcuaguucguagcuuuc

SEQ ID NO: 2426608 - RNA, 17 nt, Human
agcuauauccauguacu

SEQ ID NO: 2426609 - RNA, 20 nt, Human
agcuaucagaagaccacaaa

SEQ ID NO: 2426610 - RNA, 15 nt, Human
agcuauccuggcucu

SEQ ID NO: 2426611 - RNA, 23 nt, Human
agcuaucaagugugcuuuagcuu

SEQ ID NO: 2426612 - RNA, 22 nt, Human
agcuaucaagugugcuuuagcu

SEQ ID NO: 2426613 - RNA, 14 nt, Human
agcuaucaggaaca

SEQ ID NO: 2426614 - RNA, 17 nt, Human
agcuauaucuauauaua

SEQ ID NO: 2426615 - RNA, 15 nt, Human
agcuauaucuauaua

SEQ ID NO: 2426616 - RNA, 20 nt, Human
agcuauauccauguacugua

SEQ ID NO: 2426617 - RNA, 22 nt, Human
agcuauauccauguacuguagu

SEQ ID NO: 2426618 - RNA, 17 nt, Human
agcuaucaagugugcuu

SEQ ID NO: 2426619 - RNA, 19 nt, Human
agcuauaucuauauauaau

SEQ ID NO: 2426620 - RNA, 18 nt, Human
agcuauguuauauugaaa

SEQ ID NO: 2426621 - RNA, 22 nt, Human
agcuauguuauauugaaaaaau

SEQ ID NO: 2426622 - RNA, 18 nt, Human
agcuauuagccaggauca

SEQ ID NO: 2426623 - RNA, 14 nt, Human
agcuauuagccagg

SEQ ID NO: 2426624 - RNA, 21 nt, Human
agcuauuacugucugguuuua

SEQ ID NO: 2426625 - RNA, 20 nt, Human
agcuauuacugucugguuuu

SEQ ID NO: 2426626 - RNA, 15 nt, Human
agcuauuacugucug

SEQ ID NO: 2426627 - RNA, 20 nt, Human
agcuauguuauauugaaaaa

SEQ ID NO: 2426628 - RNA, 17 nt, Human
agcuaucguaaaauuaa

SEQ ID NO: 2426629 - RNA, 22 nt, Human
agcuaucuggucaaccuccugg

SEQ ID NO: 2426630 - RNA, 16 nt, Human
agcuauccuggcucuu

SEQ ID NO: 2426631 - RNA, 17 nt, Human
agcuaucucucagugaa

SEQ ID NO: 2426632 - RNA, 19 nt, Human
agcguccuccucugugacc

SEQ ID NO: 2426633 - RNA, 22 nt, Human
agcgugaaggccgagaagcaag

SEQ ID NO: 2426634 - RNA, 22 nt, Human
agcgugagacgccaccauuccu

SEQ ID NO: 2426635 - RNA, 23 nt, Human
agcgugaaggccgagaagcaaga

SEQ ID NO: 2426636 - RNA, 18 nt, Human
agcuacagguuacaacag

SEQ ID NO: 2426637 - RNA, 14 nt, Human
agcuacagguuaca

SEQ ID NO: 2426638 - RNA, 13 nt, Human
agcuacagguuac

SEQ ID NO: 2426639 - RNA, 12 nt, Human
agcuacagguua

SEQ ID NO: 2426640 - RNA, 14 nt, Human
agcuacaggaagca

SEQ ID NO: 2426641 - RNA, 22 nt, Human
agcuacaggaagcaccccaugc

SEQ ID NO: 2426642 - RNA, 21 nt, Human
agcuacagguuacaacagauu

SEQ ID NO: 2426643 - RNA, 21 nt, Human
agcuaggccuggccagaugca

SEQ ID NO: 2426644 - RNA, 22 nt, Human
agcuacagguuacaacagauuu

SEQ ID NO: 2426645 - RNA, 20 nt, Human
agcuacagguuacaacagau

SEQ ID NO: 2426646 - RNA, 19 nt, Human
agcuacagguuacaacaga

SEQ ID NO: 2426647 - RNA, 17 nt, Human
agcuacccgcagaguuc

SEQ ID NO: 2426648 - RNA, 18 nt, Human
ugcccaggccccugccac

SEQ ID NO: 2426649 - RNA, 17 nt, Human
ugcccaggccccugcca

SEQ ID NO: 2426650 - RNA, 15 nt, Human
ugcccaggccccugc

SEQ ID NO: 2426651 - RNA, 16 nt, Human
ugcccaggagagccag

SEQ ID NO: 2426652 - RNA, 17 nt, Human
ugcccaggagagccagc

SEQ ID NO: 2426653 - RNA, 18 nt, Human
ugcccaggagagccagcc

SEQ ID NO: 2426654 - RNA, 22 nt, Human
ugcccaggacggggccggccag

SEQ ID NO: 2426655 - RNA, 21 nt, Human
ugcccaggacggggccggcca

SEQ ID NO: 2426656 - RNA, 23 nt, Human
ugcccagcuugggcccagcuggg

SEQ ID NO: 2426657 - RNA, 21 nt, Human
ugcccagcuugggcccagcug

SEQ ID NO: 2426658 - RNA, 20 nt, Human
ugcccagcuugggcccagcu

SEQ ID NO: 2426659 - RNA, 18 nt, Human
ugcccagcuugggcccag

SEQ ID NO: 2426660 - RNA, 16 nt, Human
ugcccagcuugggccc

SEQ ID NO: 2426661 - RNA, 14 nt, Human
ugcccagcuugggc

SEQ ID NO: 2426662 - RNA, 13 nt, Human
ugcccagcuuggg

SEQ ID NO: 2426663 - RNA, 21 nt, Human
ugcccagcuagcugcagagcc

SEQ ID NO: 2426664 - RNA, 13 nt, Human
ugcccagcucucg

SEQ ID NO: 2426665 - RNA, 20 nt, Human
ugcccagcuagcugcagagc

SEQ ID NO: 2426666 - RNA, 23 nt, Human
ugcccaacaccagccccugcccc

SEQ ID NO: 2426667 - RNA, 18 nt, Human
ugcccagcuauaccugug

SEQ ID NO: 2426668 - RNA, 14 nt, Human
ugcccagcuagcug

SEQ ID NO: 2426669 - RNA, 20 nt, Human
ugcccagcuauaccugugcc

SEQ ID NO: 2426670 - RNA, 21 nt, Human
ugcccagcuauaccugugccu

SEQ ID NO: 2426671 - RNA, 22 nt, Human
ugcccagcuauaccugugccuc

SEQ ID NO: 2426672 - RNA, 17 nt, Human
ugcccagcucagagggu

SEQ ID NO: 2426673 - RNA, 17 nt, Human
ugcccagccccuucuga

SEQ ID NO: 2426674 - RNA, 16 nt, Human
ugcccagccccuucug

SEQ ID NO: 2426675 - RNA, 22 nt, Human
ugcccaacaccagccccugccc

SEQ ID NO: 2426676 - RNA, 21 nt, Human
ugcccaacaccagccccugcc

SEQ ID NO: 2426677 - RNA, 19 nt, Human
ugcccaacaccagccccug

SEQ ID NO: 2426678 - RNA, 18 nt, Human
ugcccaacaccagccccu

SEQ ID NO: 2426679 - RNA, 12 nt, Human
ugcccagccccu

SEQ ID NO: 2426680 - RNA, 13 nt, Human
ugcccagccccuu

SEQ ID NO: 2426681 - RNA, 20 nt, Human
ugcccaaagaugcagccggu

SEQ ID NO: 2426682 - RNA, 17 nt, Human
ugcccaaagaugcagcc

SEQ ID NO: 2426683 - RNA, 19 nt, Human
ugcccaaaaauaugguuga

SEQ ID NO: 2426684 - RNA, 18 nt, Human
ugcccaaagucuguguga

SEQ ID NO: 2426685 - RNA, 18 nt, Human
agcucaggacagaugcca

SEQ ID NO: 2426686 - RNA, 21 nt, Human
ugcccaaagugcuuccaaggc

SEQ ID NO: 2426687 - RNA, 14 nt, Human
ugcccaacaccagc

SEQ ID NO: 2426688 - RNA, 17 nt, Human
ugcccaacaccagcccc

SEQ ID NO: 2426689 - RNA, 16 nt, Human
ugcccaacaccagccc

SEQ ID NO: 2426690 - RNA, 15 nt, Human
ugcccaacaccagcc

SEQ ID NO: 2426691 - RNA, 14 nt, Human
ugcccccucugccc

SEQ ID NO: 2426692 - RNA, 15 nt, Human
ugcccccucugcccu

SEQ ID NO: 2426693 - RNA, 16 nt, Human
ugcccccucugcccug

SEQ ID NO: 2426694 - RNA, 17 nt, Human
ugcccccucugcccugc

SEQ ID NO: 2426695 - RNA, 22 nt, Human
ugcccccuuucagaugucuucu

SEQ ID NO: 2426696 - RNA, 21 nt, Human
ugcccccuuucagaugucuuc

SEQ ID NO: 2426697 - RNA, 18 nt, Human
ugcccccuuucagauguc

SEQ ID NO: 2426698 - RNA, 16 nt, Human
ugcccccuuucagaug

SEQ ID NO: 2426699 - RNA, 18 nt, Human
ugcccccugaaacuuauu

SEQ ID NO: 2426700 - RNA, 18 nt, Human
ugcccccucgugccaguc

SEQ ID NO: 2426701 - RNA, 17 nt, Human
ugcccccucgugccagu

SEQ ID NO: 2426702 - RNA, 16 nt, Human
ugcccccucgugccag

SEQ ID NO: 2426703 - RNA, 18 nt, Human
ugcccccucugcccugcg

SEQ ID NO: 2426704 - RNA, 23 nt, Human
ugccccggccccggccccagcca

SEQ ID NO: 2426705 - RNA, 22 nt, Human
ugccccggccccggccccagcc

SEQ ID NO: 2426706 - RNA, 21 nt, Human
ugccccggccccggccccagc

SEQ ID NO: 2426707 - RNA, 23 nt, Human
ugccccggccaccucugcggacc

SEQ ID NO: 2426708 - RNA, 18 nt, Human
ugccccggccaccucugc

SEQ ID NO: 2426709 - RNA, 17 nt, Human
ugccccggccaccucug

SEQ ID NO: 2426710 - RNA, 16 nt, Human
ugccccggccaccucu

SEQ ID NO: 2426711 - RNA, 15 nt, Human
ugccccggccaccuc

SEQ ID NO: 2426712 - RNA, 20 nt, Human
ugcccuaaaguguauuuuuu

SEQ ID NO: 2426713 - RNA, 23 nt, Human
ugccccgaacauguuuuucuucu

SEQ ID NO: 2426714 - RNA, 22 nt, Human
ugccccgcccccaguccccacc

SEQ ID NO: 2426715 - RNA, 23 nt, Human
ugcccccuuucagaugucuucug

SEQ ID NO: 2426716 - RNA, 13 nt, Human
ugccccgcccagc

SEQ ID NO: 2426717 - RNA, 14 nt, Human
ugccccggccaccu

SEQ ID NO: 2426718 - RNA, 13 nt, Human
ugccccggccacc

SEQ ID NO: 2426719 - RNA, 15 nt, Human
ugccccgccuccccg

SEQ ID NO: 2426720 - RNA, 21 nt, Human
ugccccccauccuggcccauc

SEQ ID NO: 2426721 - RNA, 20 nt, Human
ugccccccauccuggcccau

SEQ ID NO: 2426722 - RNA, 19 nt, Human
ugccccccauccuggccca

SEQ ID NO: 2426723 - RNA, 18 nt, Human
ugccccccauccuggccc

SEQ ID NO: 2426724 - RNA, 22 nt, Human
ugccccccucaaaccuccucuu

SEQ ID NO: 2426725 - RNA, 20 nt, Human
ugccccccucaaaccuccuc

SEQ ID NO: 2426726 - RNA, 23 nt, Human
ugccccccauccuggcccaucag

SEQ ID NO: 2426727 - RNA, 18 nt, Human
ugccccccuugccagaca

SEQ ID NO: 2426728 - RNA, 23 nt, Human
ugccccccucaaaccuccucuuc

SEQ ID NO: 2426729 - RNA, 14 nt, Human
ugcccccggccccc

SEQ ID NO: 2426730 - RNA, 15 nt, Human
ugcccccucgugcca

SEQ ID NO: 2426731 - RNA, 13 nt, Human
ugcccccucgugc

SEQ ID NO: 2426732 - RNA, 21 nt, Human
ugcccccuccucucccauccc

SEQ ID NO: 2426733 - RNA, 20 nt, Human
ugcccccuccucucccaucc

SEQ ID NO: 2426734 - RNA, 17 nt, Human
ugcccccuccucuccca

SEQ ID NO: 2426735 - RNA, 16 nt, Human
ugcccccuccucuccc

SEQ ID NO: 2426736 - RNA, 14 nt, Human
ugcccccuccucuc

SEQ ID NO: 2426737 - RNA, 12 nt, Human
ugcccccuccuc

SEQ ID NO: 2426738 - RNA, 21 nt, Human
ugcccccggcccccuggucuc

SEQ ID NO: 2426739 - RNA, 11 nt, Human
ugcccccuccu

SEQ ID NO: 2426740 - RNA, 18 nt, Human
ugcccccggcccccuggu

SEQ ID NO: 2426741 - RNA, 17 nt, Human
ugcccccggcccccugg

SEQ ID NO: 2426742 - RNA, 15 nt, Human
ugcccccggcccccu

SEQ ID NO: 2426743 - RNA, 16 nt, Human
ugccccauucaacauc

SEQ ID NO: 2426744 - RNA, 20 nt, Human
ugccccauccuccagcaggg

SEQ ID NO: 2426745 - RNA, 21 nt, Human
ugccccauccuccagcaggga

SEQ ID NO: 2426746 - RNA, 19 nt, Human
ugcccaggagagccagccc

SEQ ID NO: 2426747 - RNA, 20 nt, Human
ugcccaggagagccagcccu

SEQ ID NO: 2426748 - RNA, 12 nt, Human
ugccccaugccu

SEQ ID NO: 2426749 - RNA, 16 nt, Human
ugccccauuuauccac

SEQ ID NO: 2426750 - RNA, 17 nt, Human
ugccccccauccuggcc

SEQ ID NO: 2426751 - RNA, 21 nt, Human
ugcccccaccacggccacugg

SEQ ID NO: 2426752 - RNA, 15 nt, Human
ugccccaugccuguc

SEQ ID NO: 2426753 - RNA, 23 nt, Human
ugccccaugccuguccagccugg

SEQ ID NO: 2426754 - RNA, 18 nt, Human
ugccccauucuuuuguaa

SEQ ID NO: 2426755 - RNA, 12 nt, Human
ugccccauucuu

SEQ ID NO: 2426756 - RNA, 19 nt, Human
ugccacugccucuuccucc

SEQ ID NO: 2426757 - RNA, 18 nt, Human
ugccacugccucuuccuc

SEQ ID NO: 2426758 - RNA, 20 nt, Human
ugccacugccucuuccuccc

SEQ ID NO: 2426759 - RNA, 14 nt, Human
ugccagagauccaa

SEQ ID NO: 2426760 - RNA, 22 nt, Human
ugccacugcccgagcuggugca

SEQ ID NO: 2426761 - RNA, 15 nt, Human
ugccagagauggagg

SEQ ID NO: 2426762 - RNA, 21 nt, Human
ugccagagauggagguucucu

SEQ ID NO: 2426763 - RNA, 20 nt, Human
ugcauuugaggucuguucuu

SEQ ID NO: 2426764 - RNA, 21 nt, Human
ugcauuugaggucuguucuuu

SEQ ID NO: 2426765 - RNA, 20 nt, Human
ugcauuuaugagcucuucau

SEQ ID NO: 2426766 - RNA, 20 nt, Human
ugccacugcccgagcuggug

SEQ ID NO: 2426767 - RNA, 21 nt, Human
ugccacugcccgagcuggugc

SEQ ID NO: 2426768 - RNA, 19 nt, Human
ugccacugcccgagcuggu

SEQ ID NO: 2426769 - RNA, 17 nt, Human
ugccacugccucuuccu

SEQ ID NO: 2426770 - RNA, 13 nt, Human
ugccacugccucu

SEQ ID NO: 2426771 - RNA, 22 nt, Human
ugccagcaaugacaucucaggg

SEQ ID NO: 2426772 - RNA, 18 nt, Human
ugccagcaacugaauaaa

SEQ ID NO: 2426773 - RNA, 17 nt, Human
ugccagcaacugaauaa

SEQ ID NO: 2426774 - RNA, 16 nt, Human
ugccagcaacugaaua

SEQ ID NO: 2426775 - RNA, 15 nt, Human
ugccagcaacugaau

SEQ ID NO: 2426776 - RNA, 14 nt, Human
ugccagcaacugaa

SEQ ID NO: 2426777 - RNA, 13 nt, Human
ugccagcaacuga

SEQ ID NO: 2426778 - RNA, 12 nt, Human
ugccagcaacug

SEQ ID NO: 2426779 - RNA, 11 nt, Human
ugccagcaacu

SEQ ID NO: 2426780 - RNA, 24 nt, Human
ugccagcaaagccccaugcuggag

SEQ ID NO: 2426781 - RNA, 16 nt, Human
ugccagcaaagcccca

SEQ ID NO: 2426782 - RNA, 15 nt, Human
ugccagcaaagcccc

SEQ ID NO: 2426783 - RNA, 14 nt, Human
ugccagcaaagccc

SEQ ID NO: 2426784 - RNA, 13 nt, Human
ugccagcaaagcc

SEQ ID NO: 2426785 - RNA, 22 nt, Human
ugccagaugcugauguucagug

SEQ ID NO: 2426786 - RNA, 20 nt, Human
ugccagaggugggcaggugg

SEQ ID NO: 2426787 - RNA, 19 nt, Human
ugccagaggugggcaggug

SEQ ID NO: 2426788 - RNA, 18 nt, Human
ugccagaggugggcaggu

SEQ ID NO: 2426789 - RNA, 17 nt, Human
ugccagaggugggcagg

SEQ ID NO: 2426790 - RNA, 16 nt, Human
ugccagaggugggcag

SEQ ID NO: 2426791 - RNA, 15 nt, Human
ugccagaggugggca

SEQ ID NO: 2426792 - RNA, 21 nt, Human
ugccagaugcugauguucagu

SEQ ID NO: 2426793 - RNA, 17 nt, Human
ugccagaugcugauguu

SEQ ID NO: 2426794 - RNA, 16 nt, Human
ugccagaugcugaugu

SEQ ID NO: 2426795 - RNA, 14 nt, Human
ugccagaugcugau

SEQ ID NO: 2426796 - RNA, 12 nt, Human
ugccagaugcug

SEQ ID NO: 2426797 - RNA, 11 nt, Human
ugccagaugcu

SEQ ID NO: 2426798 - RNA, 21 nt, Human
ugccagaggugggcagguggu

SEQ ID NO: 2426799 - RNA, 21 nt, Human
ugccagaugccuuuauggcug

SEQ ID NO: 2426800 - RNA, 11 nt, Human
ugccagccaca

SEQ ID NO: 2426801 - RNA, 11 nt, Human
ugccagccagc

SEQ ID NO: 2426802 - RNA, 12 nt, Human
ugccagccagca

SEQ ID NO: 2426803 - RNA, 23 nt, Human
ugccagcaaugacaucucagggg

SEQ ID NO: 2426804 - RNA, 15 nt, Human
ugccagcugcacuga

SEQ ID NO: 2426805 - RNA, 23 nt, Human
ugccagcucuguaucaggaccca

SEQ ID NO: 2426806 - RNA, 22 nt, Human
ugccagcucuguaucaggaccc

SEQ ID NO: 2426807 - RNA, 22 nt, Human
ugccagugacagacaggcucuu

SEQ ID NO: 2426808 - RNA, 20 nt, Human
ugccagugacagacaggcuc

SEQ ID NO: 2426809 - RNA, 19 nt, Human
ugccagugacagacaggcu

SEQ ID NO: 2426810 - RNA, 17 nt, Human
ugccagugacagacagg

SEQ ID NO: 2426811 - RNA, 22 nt, Human
ugccagucgcgcugccugugug

SEQ ID NO: 2426812 - RNA, 21 nt, Human
ugccagucgcgcugccugugu

SEQ ID NO: 2426813 - RNA, 20 nt, Human
ugccagucgcgcugccugug

SEQ ID NO: 2426814 - RNA, 19 nt, Human
ugccagucgcgcugccugu

SEQ ID NO: 2426815 - RNA, 23 nt, Human
ugccagucucacugugggaaggc

SEQ ID NO: 2426816 - RNA, 23 nt, Human
ugccagucgcgcugccugugugg

SEQ ID NO: 2426817 - RNA, 16 nt, Human
ugccagugacagacag

SEQ ID NO: 2426818 - RNA, 13 nt, Human
agcggcuggcagc

SEQ ID NO: 2426819 - RNA, 16 nt, Human
ugccagugacacuucc

SEQ ID NO: 2426820 - RNA, 11 nt, Human
ugccagugccu

SEQ ID NO: 2426821 - RNA, 13 nt, Human
ugccagugccuua

SEQ ID NO: 2426822 - RNA, 18 nt, Human
ugccagucgcgcugccug

SEQ ID NO: 2426823 - RNA, 17 nt, Human
ugccagucgcgcugccu

SEQ ID NO: 2426824 - RNA, 16 nt, Human
ugccagucgcgcugcc

SEQ ID NO: 2426825 - RNA, 12 nt, Human
ugccagucgcgc

SEQ ID NO: 2426826 - RNA, 17 nt, Human
ugccaguccuagcugca

SEQ ID NO: 2426827 - RNA, 19 nt, Human
ugccagcuuuuccucccuu

SEQ ID NO: 2426828 - RNA, 16 nt, Human
ugccaguccuagcugc

SEQ ID NO: 2426829 - RNA, 20 nt, Human
ugccagucccccugccccag

SEQ ID NO: 2426830 - RNA, 20 nt, Human
ugccagcuuuuccucccuug

SEQ ID NO: 2426831 - RNA, 18 nt, Human
ugccagcuuaucucaggg

SEQ ID NO: 2426832 - RNA, 19 nt, Human
agcgucccagucucuggca

SEQ ID NO: 2426833 - RNA, 15 nt, Human
agcguccuccucugu

SEQ ID NO: 2426834 - RNA, 16 nt, Human
agcguccuccucugug

SEQ ID NO: 2426835 - RNA, 17 nt, Human
agcguccuccucuguga

SEQ ID NO: 2426836 - RNA, 18 nt, Human
agcgucccagucucuggc

SEQ ID NO: 2426837 - RNA, 16 nt, Human
agcgucccagucucug

SEQ ID NO: 2426838 - RNA, 13 nt, Human
agcgucccagucu

SEQ ID NO: 2426839 - RNA, 22 nt, Human
agcggggacagcuccuucuguc

SEQ ID NO: 2426840 - RNA, 16 nt, Human
agcgggaccuguggcu

SEQ ID NO: 2426841 - RNA, 15 nt, Human
agcgggaccuguggc

SEQ ID NO: 2426842 - RNA, 14 nt, Human
agcgggaccugugg

SEQ ID NO: 2426843 - RNA, 21 nt, Human
agcggggccccagggcuaccc

SEQ ID NO: 2426844 - RNA, 19 nt, Human
agcggggcgaagcccaggc

SEQ ID NO: 2426845 - RNA, 20 nt, Human
agcggggacagcuccuucug

SEQ ID NO: 2426846 - RNA, 19 nt, Human
agcggggacagcuccuucu

SEQ ID NO: 2426847 - RNA, 23 nt, Human
agcggcuggcagcccaccccuca

SEQ ID NO: 2426848 - RNA, 21 nt, Human
agcggcuggacuuggagguag

SEQ ID NO: 2426849 - RNA, 20 nt, Human
agcgggaauggcagcugcca

SEQ ID NO: 2426850 - RNA, 18 nt, Human
agccuuccagggguggga

SEQ ID NO: 2426851 - RNA, 20 nt, Human
ugcagcugaccucuguuguc

SEQ ID NO: 2426852 - RNA, 15 nt, Human
ugcagcugaccucug

SEQ ID NO: 2426853 - RNA, 22 nt, Human
agccuuccucugcagcugaccu

SEQ ID NO: 2426854 - RNA, 21 nt, Human
agccuuccucugcagcugacc

SEQ ID NO: 2426855 - RNA, 19 nt, Human
agccuuccucugcagcuga

SEQ ID NO: 2426856 - RNA, 18 nt, Human
agccuuccucugcagcug

SEQ ID NO: 2426857 - RNA, 23 nt, Human
agccuuccucugcagcugaccuc

SEQ ID NO: 2426858 - RNA, 12 nt, Human
agccuucucugu

SEQ ID NO: 2426859 - RNA, 15 nt, Human
agccuugaacuuuga

SEQ ID NO: 2426860 - RNA, 19 nt, Human
agccuucccccucccaggg

SEQ ID NO: 2426861 - RNA, 20 nt, Human
agccuuccccuugcccaggg

SEQ ID NO: 2426862 - RNA, 17 nt, Human
agccuuccucugcagcu

SEQ ID NO: 2426863 - RNA, 14 nt, Human
agccuuccucugca

SEQ ID NO: 2426864 - RNA, 23 nt, Human
agccuuccuccacauccuuucua

SEQ ID NO: 2426865 - RNA, 21 nt, Human
agccuuccuccacauccuuuc

SEQ ID NO: 2426866 - RNA, 19 nt, Human
agccuuccuccacauccuu

SEQ ID NO: 2426867 - RNA, 12 nt, Human
agccuuccucca

SEQ ID NO: 2426868 - RNA, 22 nt, Human
agccuuccccuugcccagggcu

SEQ ID NO: 2426869 - RNA, 22 nt, Human
agccuugaccauucuccaccug

SEQ ID NO: 2426870 - RNA, 16 nt, Human
agccuugaacuuugac

SEQ ID NO: 2426871 - RNA, 22 nt, Human
agccuugaacuuugaccucugc

SEQ ID NO: 2426872 - RNA, 13 nt, Human
agccuugccagag

SEQ ID NO: 2426873 - RNA, 14 nt, Human
agccuugccagaga

SEQ ID NO: 2426874 - RNA, 23 nt, Human
agccuugaccauucuccaccugc

SEQ ID NO: 2426875 - RNA, 22 nt, Human
agcgauucuucugcuucagccu

SEQ ID NO: 2426876 - RNA, 15 nt, Human
agccuugccagagau

SEQ ID NO: 2426877 - RNA, 17 nt, Human
agccuugccagagaucc

SEQ ID NO: 2426878 - RNA, 19 nt, Human
agccuugccagagauccaa

SEQ ID NO: 2426879 - RNA, 21 nt, Human
agccuugcccggauucuggga

SEQ ID NO: 2426880 - RNA, 12 nt, Human
agcgcaccugcc

SEQ ID NO: 2426881 - RNA, 14 nt, Human
agcgcaccugcccc

SEQ ID NO: 2426882 - RNA, 17 nt, Human
agcgcaccugcccccug

SEQ ID NO: 2426883 - RNA, 21 nt, Human
agcgcaccugcccccuggugg

SEQ ID NO: 2426884 - RNA, 18 nt, Human
agcgcaccugcccccugg

SEQ ID NO: 2426885 - RNA, 19 nt, Human
agcgcaccugcccccuggu

SEQ ID NO: 2426886 - RNA, 21 nt, Human
agcgccaagcaaccugggucc

SEQ ID NO: 2426887 - RNA, 16 nt, Human
agcgccaagcaaccug

SEQ ID NO: 2426888 - RNA, 19 nt, Human
agcgcagguuuaguuuacu

SEQ ID NO: 2426889 - RNA, 16 nt, Human
agcgcuggccgggacc

SEQ ID NO: 2426890 - RNA, 18 nt, Human
agcgccaagcaaccuggg

SEQ ID NO: 2426891 - RNA, 19 nt, Human
agcgcugccgcaccccaga

SEQ ID NO: 2426892 - RNA, 20 nt, Human
agcgcugccgcaccccagag

SEQ ID NO: 2426893 - RNA, 21 nt, Human
agcgcugccgcaccccagagu

SEQ ID NO: 2426894 - RNA, 16 nt, Human
agcgcuuucuggaaaa

SEQ ID NO: 2426895 - RNA, 22 nt, Human
agcgcuggccgggaccccgagc

SEQ ID NO: 2426896 - RNA, 21 nt, Human
agcgcuuucuggaaaagagga

SEQ ID NO: 2426897 - RNA, 17 nt, Human
agcgcuuucuggaaaag

SEQ ID NO: 2426898 - RNA, 22 nt, Human
agcggaaaagguuuuauuuugu

SEQ ID NO: 2426899 - RNA, 13 nt, Human
agcggaaagcagc

SEQ ID NO: 2426900 - RNA, 14 nt, Human
agcggaaagcagcu

SEQ ID NO: 2426901 - RNA, 17 nt, Human
agcggaaagcagcucaa

SEQ ID NO: 2426902 - RNA, 23 nt, Human
agcggaaagcagcucaaaggcac

SEQ ID NO: 2426903 - RNA, 19 nt, Human
agcggacaucagcugguca

SEQ ID NO: 2426904 - RNA, 22 nt, Human
agcggaacaaggagucagacau

SEQ ID NO: 2426905 - RNA, 17 nt, Human
agcggaacaaggaguca

SEQ ID NO: 2426906 - RNA, 19 nt, Human
ugcauuugaggucuguucu

SEQ ID NO: 2426907 - RNA, 18 nt, Human
ugcauuugaggucuguuc

SEQ ID NO: 2426908 - RNA, 19 nt, Human
ugcauuuaugagcucuuca

SEQ ID NO: 2426909 - RNA, 16 nt, Human
ugcauuuaaauacagu

SEQ ID NO: 2426910 - RNA, 22 nt, Human
ugcauuuaaauacagucuucca

SEQ ID NO: 2426911 - RNA, 24 nt, Human
ugcauuuaaauacagucuuccauu

SEQ ID NO: 2426912 - RNA, 12 nt, Human
ugcauucuagua

SEQ ID NO: 2426913 - RNA, 23 nt, Human
ugcauuccugauaugauuuaaaa

SEQ ID NO: 2426914 - RNA, 14 nt, Human
ugcauucccagugg

SEQ ID NO: 2426915 - RNA, 16 nt, Human
ugcauucacccagaca

SEQ ID NO: 2426916 - RNA, 12 nt, Human
ugcauucaaauu

SEQ ID NO: 2426917 - RNA, 14 nt, Human
ugcauucaaauuaa

SEQ ID NO: 2426918 - RNA, 14 nt, Human
ugcauucacccaga

SEQ ID NO: 2426919 - RNA, 20 nt, Human
ugcauucacccagacagcuc

SEQ ID NO: 2426920 - RNA, 20 nt, Human
ugcauuuaaaagauacaguu

SEQ ID NO: 2426921 - RNA, 21 nt, Human
ugcauucugccgugugcccuc

SEQ ID NO: 2426922 - RNA, 17 nt, Human
uggccucugcacucccc

SEQ ID NO: 2426923 - RNA, 15 nt, Human
uggccucugcacucc

SEQ ID NO: 2426924 - RNA, 14 nt, Human
uggccucugcacuc

SEQ ID NO: 2426925 - RNA, 14 nt, Human
uggccuggaucucc

SEQ ID NO: 2426926 - RNA, 12 nt, Human
uggccuggaucu

SEQ ID NO: 2426927 - RNA, 22 nt, Human
uggccuggaggugggguuggga

SEQ ID NO: 2426928 - RNA, 18 nt, Human
uggccuggaggugggguu

SEQ ID NO: 2426929 - RNA, 16 nt, Human
uggccuggaggugggg

SEQ ID NO: 2426930 - RNA, 19 nt, Human
uggccggcaaccccaguuc

SEQ ID NO: 2426931 - RNA, 16 nt, Human
uggccuggcacacauc

SEQ ID NO: 2426932 - RNA, 12 nt, Human
uggccuggcaca

SEQ ID NO: 2426933 - RNA, 18 nt, Human
uggccuggcacacaucag

SEQ ID NO: 2426934 - RNA, 12 nt, Human
uggccuggccag

SEQ ID NO: 2426935 - RNA, 21 nt, Human
uggccuggaucuccccacucu

SEQ ID NO: 2426936 - RNA, 18 nt, Human
uggccuggccaggagcuc

SEQ ID NO: 2426937 - RNA, 21 nt, Human
uggccuggccaggagcucuuc

SEQ ID NO: 2426938 - RNA, 13 nt, Human
uggccuggccagg

SEQ ID NO: 2426939 - RNA, 15 nt, Human
uggccuggccaggag

SEQ ID NO: 2426940 - RNA, 16 nt, Human
uggccuggccaggagc

SEQ ID NO: 2426941 - RNA, 17 nt, Human
uggccuggccaggagcu

SEQ ID NO: 2426942 - RNA, 21 nt, Human
aggccuggccagaugcaccag

SEQ ID NO: 2426943 - RNA, 17 nt, Human
aggccuggccagaugca

SEQ ID NO: 2426944 - RNA, 16 nt, Human
aggccuggccagaugc

SEQ ID NO: 2426945 - RNA, 15 nt, Human
aggccuggccagaug

SEQ ID NO: 2426946 - RNA, 23 nt, Human
aggccugggggcugggcagagga

SEQ ID NO: 2426947 - RNA, 15 nt, Human
aggccuggccaggca

SEQ ID NO: 2426948 - RNA, 14 nt, Human
aggccuggccaggc

SEQ ID NO: 2426949 - RNA, 13 nt, Human
aggccuggccagg

SEQ ID NO: 2426950 - RNA, 23 nt, Human
aggccuggccagaugcaccagcc

SEQ ID NO: 2426951 - RNA, 22 nt, Human
aggccuggccagaugcaccagc

SEQ ID NO: 2426952 - RNA, 17 nt, Human
uggccgcccccugcccc

SEQ ID NO: 2426953 - RNA, 15 nt, Human
uggccgcccccugcc

SEQ ID NO: 2426954 - RNA, 13 nt, Human
uggccgcccccug

SEQ ID NO: 2426955 - RNA, 22 nt, Human
uggcccucaaggccucccacag

SEQ ID NO: 2426956 - RNA, 21 nt, Human
uggcccucaaggccucccaca

SEQ ID NO: 2426957 - RNA, 20 nt, Human
uggcccucaaggccucccac

SEQ ID NO: 2426958 - RNA, 19 nt, Human
uggcccucaaggccuccca

SEQ ID NO: 2426959 - RNA, 17 nt, Human
uggccgaguccaagcug

SEQ ID NO: 2426960 - RNA, 19 nt, Human
uggccgaguccaagcuggg

SEQ ID NO: 2426961 - RNA, 23 nt, Human
uggccgcccccugccccccagcc

SEQ ID NO: 2426962 - RNA, 21 nt, Human
uggccgcccccugccccccag

SEQ ID NO: 2426963 - RNA, 18 nt, Human
uggccgccucacccccuc

SEQ ID NO: 2426964 - RNA, 16 nt, Human
uggccgccucaccccc

SEQ ID NO: 2426965 - RNA, 12 nt, Human
uggccgccucac

SEQ ID NO: 2426966 - RNA, 23 nt, Human
uggccgcgccaaauaaugucucu

SEQ ID NO: 2426967 - RNA, 22 nt, Human
uggccgcgccaaauaaugucuc

SEQ ID NO: 2426968 - RNA, 21 nt, Human
uggccgcgccaaauaaugucu

SEQ ID NO: 2426969 - RNA, 24 nt, Human
uggccggcaaccccaguucugcuc

SEQ ID NO: 2426970 - RNA, 19 nt, Human
uggccgcugaguggcaggg

SEQ ID NO: 2426971 - RNA, 17 nt, Human
uggccgcugaguggcag

SEQ ID NO: 2426972 - RNA, 15 nt, Human
uggccgggaccccga

SEQ ID NO: 2426973 - RNA, 17 nt, Human
uggccgggaccccgagc

SEQ ID NO: 2426974 - RNA, 23 nt, Human
uggccgggaccccgagccuggcu

SEQ ID NO: 2426975 - RNA, 15 nt, Human
uggccgggagccuga

SEQ ID NO: 2426976 - RNA, 22 nt, Human
uggccggagcaaacucugcugu

SEQ ID NO: 2426977 - RNA, 17 nt, Human
uggcccgacagccuggc

SEQ ID NO: 2426978 - RNA, 16 nt, Human
uggcccgacagccugg

SEQ ID NO: 2426979 - RNA, 15 nt, Human
uggcccgacagccug

SEQ ID NO: 2426980 - RNA, 14 nt, Human
uggcccgacagccu

SEQ ID NO: 2426981 - RNA, 19 nt, Human
uggcccgacagccuggcac

SEQ ID NO: 2426982 - RNA, 18 nt, Human
uggcccgacagccuggca

SEQ ID NO: 2426983 - RNA, 23 nt, Human
uggcccgugacagacuccugagg

SEQ ID NO: 2426984 - RNA, 20 nt, Human
uggcccgugacagacuccug

SEQ ID NO: 2426985 - RNA, 18 nt, Human
uggcccucaaggccuccc

SEQ ID NO: 2426986 - RNA, 18 nt, Human
uggcccgugacagacucc

SEQ ID NO: 2426987 - RNA, 15 nt, Human
uggcccgugacagac

SEQ ID NO: 2426988 - RNA, 16 nt, Human
uggccccuucacuucu

SEQ ID NO: 2426989 - RNA, 14 nt, Human
uggccaguggcugg

SEQ ID NO: 2426990 - RNA, 15 nt, Human
uggccaguggcugga

SEQ ID NO: 2426991 - RNA, 16 nt, Human
uggccaguggcuggau

SEQ ID NO: 2426992 - RNA, 23 nt, Human
uggccaguggcuggaucugugag

SEQ ID NO: 2426993 - RNA, 21 nt, Human
uggccccugcccggcugcgga

SEQ ID NO: 2426994 - RNA, 12 nt, Human
uggccccugggu

SEQ ID NO: 2426995 - RNA, 11 nt, Human
uggccccuuca

SEQ ID NO: 2426996 - RNA, 13 nt, Human
uggccccuucacu

SEQ ID NO: 2426997 - RNA, 21 nt, Human
uggccccuucacuucugacca

SEQ ID NO: 2426998 - RNA, 23 nt, Human
uggccaagcagggaggaagaagc

SEQ ID NO: 2426999 - RNA, 15 nt, Human
uggccaaggagcugc

SEQ ID NO: 2427000 - RNA, 16 nt, Human
uggccaaggagcugcu

SEQ ID NO: 2427001 - RNA, 17 nt, Human
uggccaaggagcugcua

SEQ ID NO: 2427002 - RNA, 18 nt, Human
uggccaaggagcugcuau

SEQ ID NO: 2427003 - RNA, 19 nt, Human
uggccaaggagcugcuaua

SEQ ID NO: 2427004 - RNA, 17 nt, Human
uggccaggcuggucuca

SEQ ID NO: 2427005 - RNA, 15 nt, Human
uggccaggcuggucu

SEQ ID NO: 2427006 - RNA, 18 nt, Human
uggccagggugagagcug

SEQ ID NO: 2427007 - RNA, 17 nt, Human
uggccagggugagagcu

SEQ ID NO: 2427008 - RNA, 16 nt, Human
uggccaguccaggcug

SEQ ID NO: 2427009 - RNA, 21 nt, Human
uggccaguccaggcugccgug

SEQ ID NO: 2427010 - RNA, 17 nt, Human
uggccaguccaggcugc

SEQ ID NO: 2427011 - RNA, 19 nt, Human
uggccagggugagagcugc

SEQ ID NO: 2427012 - RNA, 23 nt, Human
uggccaguccaggcugccguggg

SEQ ID NO: 2427013 - RNA, 13 nt, Human
uggccagggugag

SEQ ID NO: 2427014 - RNA, 12 nt, Human
uggccaggguga

SEQ ID NO: 2427015 - RNA, 23 nt, Human
uggccagggccuggaagacagag

SEQ ID NO: 2427016 - RNA, 20 nt, Human
uggccaggcuggucucgaac

SEQ ID NO: 2427017 - RNA, 16 nt, Human
uggccaaguucuuagu

SEQ ID NO: 2427018 - RNA, 15 nt, Human
uggcaugggaaugaa

SEQ ID NO: 2427019 - RNA, 12 nt, Human
uggcaugggaau

SEQ ID NO: 2427020 - RNA, 14 nt, Human
uggccaaaguguua

SEQ ID NO: 2427021 - RNA, 15 nt, Human
uggcauggcuccagu

SEQ ID NO: 2427022 - RNA, 16 nt, Human
uggcauggcuccaguc

SEQ ID NO: 2427023 - RNA, 14 nt, Human
uggcauggccacca

SEQ ID NO: 2427024 - RNA, 22 nt, Human
uggccaacaucgugaaacccug

SEQ ID NO: 2427025 - RNA, 20 nt, Human
uggccaaauuauuuguguaa

SEQ ID NO: 2427026 - RNA, 18 nt, Human
uggccaaauuauuugugu

SEQ ID NO: 2427027 - RNA, 16 nt, Human
uggccaaauuauuugu

SEQ ID NO: 2427028 - RNA, 17 nt, Human
uggcauggcuccagucu

SEQ ID NO: 2427029 - RNA, 20 nt, Human
aggccugccuccagggcugg

SEQ ID NO: 2427030 - RNA, 19 nt, Human
aggccugccuccagggcug

SEQ ID NO: 2427031 - RNA, 13 nt, Human
aggccugccuguu

SEQ ID NO: 2427032 - RNA, 22 nt, Human
aggccugcccucagggaucuug

SEQ ID NO: 2427033 - RNA, 17 nt, Human
aggccugcccucaggga

SEQ ID NO: 2427034 - RNA, 17 nt, Human
aggccugccuccagggc

SEQ ID NO: 2427035 - RNA, 16 nt, Human
aggccugcccucaggg

SEQ ID NO: 2427036 - RNA, 23 nt, Human
aggccugccagacggcacccacc

SEQ ID NO: 2427037 - RNA, 21 nt, Human
aggccugccuccagggcugga

SEQ ID NO: 2427038 - RNA, 18 nt, Human
aggccugcucagggacug

SEQ ID NO: 2427039 - RNA, 15 nt, Human
aggccugcucaggga

SEQ ID NO: 2427040 - RNA, 19 nt, Human
uggcaugccuuccagcacc

SEQ ID NO: 2427041 - RNA, 15 nt, Human
uggcaugccuuccag

SEQ ID NO: 2427042 - RNA, 15 nt, Human
aggccucccuagcca

SEQ ID NO: 2427043 - RNA, 15 nt, Human
aggccucccucucuc

SEQ ID NO: 2427044 - RNA, 22 nt, Human
aggccucccucucucuucugcu

SEQ ID NO: 2427045 - RNA, 15 nt, Human
aggccucccacagug

SEQ ID NO: 2427046 - RNA, 14 nt, Human
aggccucccacagu

SEQ ID NO: 2427047 - RNA, 13 nt, Human
aggccucccacag

SEQ ID NO: 2427048 - RNA, 12 nt, Human
aggccucccaca

SEQ ID NO: 2427049 - RNA, 18 nt, Human
aggccucccacagugacu

SEQ ID NO: 2427050 - RNA, 16 nt, Human
aggccucccacaguga

SEQ ID NO: 2427051 - RNA, 13 nt, Human
aggccucccucaa

SEQ ID NO: 2427052 - RNA, 16 nt, Human
aggccucagccagaga

SEQ ID NO: 2427053 - RNA, 14 nt, Human
aggccucagccaga

SEQ ID NO: 2427054 - RNA, 15 nt, Human
aggccucagccagag

SEQ ID NO: 2427055 - RNA, 13 nt, Human
aggccucagugga

SEQ ID NO: 2427056 - RNA, 14 nt, Human
aggccucccaaguu

SEQ ID NO: 2427057 - RNA, 23 nt, Human
aggccucaguggacuuuccaccc

SEQ ID NO: 2427058 - RNA, 15 nt, Human
aggccucaguggacu

SEQ ID NO: 2427059 - RNA, 16 nt, Human
aggccucaguggacuu

SEQ ID NO: 2427060 - RNA, 17 nt, Human
aggccuccaucucaugu

SEQ ID NO: 2427061 - RNA, 23 nt, Human
aggccugaggaugagcuggaagg

SEQ ID NO: 2427062 - RNA, 20 nt, Human
aggccugaggaugagcugga

SEQ ID NO: 2427063 - RNA, 19 nt, Human
aggccugaggaugagcugg

SEQ ID NO: 2427064 - RNA, 18 nt, Human
aggccugaggaugagcug

SEQ ID NO: 2427065 - RNA, 17 nt, Human
aggccugaggaugagcu

SEQ ID NO: 2427066 - RNA, 19 nt, Human
aggccaccugcccccuucu

SEQ ID NO: 2427067 - RNA, 16 nt, Human
aggccugaggaugagc

SEQ ID NO: 2427068 - RNA, 13 nt, Human
aggccucuguguc

SEQ ID NO: 2427069 - RNA, 21 nt, Human
aggccucucauuccagaggaa

SEQ ID NO: 2427070 - RNA, 20 nt, Human
aggccucgaaaaccaucaca

SEQ ID NO: 2427071 - RNA, 14 nt, Human
aggccucccuguuu

SEQ ID NO: 2427072 - RNA, 13 nt, Human
aggccucccuguu

SEQ ID NO: 2427073 - RNA, 12 nt, Human
aggccucccugu

SEQ ID NO: 2427074 - RNA, 14 nt, Human
aggcccucugccca

SEQ ID NO: 2427075 - RNA, 13 nt, Human
aggcccucugccc

SEQ ID NO: 2427076 - RNA, 22 nt, Human
aggccuauaaugaagcuuuaua

SEQ ID NO: 2427077 - RNA, 16 nt, Human
aggccuauaaugaagc

SEQ ID NO: 2427078 - RNA, 20 nt, Human
aggcccucgggcccagcccc

SEQ ID NO: 2427079 - RNA, 19 nt, Human
aggcccucgggcccagccc

SEQ ID NO: 2427080 - RNA, 13 nt, Human
aggccucagccag

SEQ ID NO: 2427081 - RNA, 18 nt, Human
aggcccucgggcccagcc

SEQ ID NO: 2427082 - RNA, 17 nt, Human
aggcccucgggcccagc

SEQ ID NO: 2427083 - RNA, 16 nt, Human
aggcccucgggcccag

SEQ ID NO: 2427084 - RNA, 15 nt, Human
aggcccucgggccca

SEQ ID NO: 2427085 - RNA, 15 nt, Human
aggcccucugcccac

SEQ ID NO: 2427086 - RNA, 12 nt, Human
aggcccaaagcc

SEQ ID NO: 2427087 - RNA, 13 nt, Human
aggcccaaagccu

SEQ ID NO: 2427088 - RNA, 15 nt, Human
aggcccaaagccucg

SEQ ID NO: 2427089 - RNA, 17 nt, Human
aggcccucgcugccagc

SEQ ID NO: 2427090 - RNA, 22 nt, Human
aggcccucgcugccagcucugu

SEQ ID NO: 2427091 - RNA, 15 nt, Human
aggcccucgcugcca

SEQ ID NO: 2427092 - RNA, 15 nt, Human
aggccaaaggaagca

SEQ ID NO: 2427093 - RNA, 14 nt, Human
aggccaaaggaagc

SEQ ID NO: 2427094 - RNA, 20 nt, Human
aggccaaacucaccugcccc

SEQ ID NO: 2427095 - RNA, 16 nt, Human
aggccaaaccucuguu

SEQ ID NO: 2427096 - RNA, 17 nt, Human
aggccaaaccucuguuc

SEQ ID NO: 2427097 - RNA, 18 nt, Human
aggccaaaccucuguuca

SEQ ID NO: 2427098 - RNA, 22 nt, Human
aggccaaaccucuguucagugu

SEQ ID NO: 2427099 - RNA, 21 nt, Human
aggccaaacuggcaaacuuca

SEQ ID NO: 2427100 - RNA, 20 nt, Human
aggccaaaggaagcacaugc

SEQ ID NO: 2427101 - RNA, 23 nt, Human
aggccaaaggaagcacaugccuc

SEQ ID NO: 2427102 - RNA, 18 nt, Human
aggccaaggugggaggau

SEQ ID NO: 2427103 - RNA, 14 nt, Human
aggccaagaaacgu

SEQ ID NO: 2427104 - RNA, 17 nt, Human
aggccaagaaacgucuu

SEQ ID NO: 2427105 - RNA, 22 nt, Human
aggccaacccaaaauaagcagg

SEQ ID NO: 2427106 - RNA, 18 nt, Human
uggacgagaaaacaauaa

SEQ ID NO: 2427107 - RNA, 22 nt, Human
uggaccuuuccugaggaagagg

SEQ ID NO: 2427108 - RNA, 13 nt, Human
uggacggcaggcu

SEQ ID NO: 2427109 - RNA, 16 nt, Human
uggaccucugcucuga

SEQ ID NO: 2427110 - RNA, 15 nt, Human
uggaccucugcucug

SEQ ID NO: 2427111 - RNA, 13 nt, Human
uggaccucugcuc

SEQ ID NO: 2427112 - RNA, 17 nt, Human
uggaccucugcucugag

SEQ ID NO: 2427113 - RNA, 16 nt, Human
uggaccuugagaccac

SEQ ID NO: 2427114 - RNA, 18 nt, Human
aggcauuuguuugaacug

SEQ ID NO: 2427115 - RNA, 20 nt, Human
uggacggcaggcucacugcc

SEQ ID NO: 2427116 - RNA, 18 nt, Human
uggacggcaggcucacug

SEQ ID NO: 2427117 - RNA, 15 nt, Human
uggacggcaggcuca

SEQ ID NO: 2427118 - RNA, 18 nt, Human
aggcauuuggcauuuauu

SEQ ID NO: 2427119 - RNA, 16 nt, Human
aggccaaacucaccug

SEQ ID NO: 2427120 - RNA, 14 nt, Human
aggccaaaccucug

SEQ ID NO: 2427121 - RNA, 15 nt, Human
aggccaaaccucugu

SEQ ID NO: 2427122 - RNA, 23 nt, Human
aggccaaaauuaccaaaaaucuu

SEQ ID NO: 2427123 - RNA, 13 nt, Human
aggccaaaaaaau

SEQ ID NO: 2427124 - RNA, 19 nt, Human
uggaugccugguggcagcu

SEQ ID NO: 2427125 - RNA, 18 nt, Human
uggaugccugguggcagc

SEQ ID NO: 2427126 - RNA, 22 nt, Human
uggaugggggaacucagaucca

SEQ ID NO: 2427127 - RNA, 16 nt, Human
uggaguuccugaaccu

SEQ ID NO: 2427128 - RNA, 23 nt, Human
uggaugggggaacucagauccag

SEQ ID NO: 2427129 - RNA, 20 nt, Human
uggaugccugguggcagcug

SEQ ID NO: 2427130 - RNA, 17 nt, Human
uggaguucaucuugaau

SEQ ID NO: 2427131 - RNA, 16 nt, Human
uggaguucaucuugaa

SEQ ID NO: 2427132 - RNA, 20 nt, Human
uggaguucaucuugaauugu

SEQ ID NO: 2427133 - RNA, 15 nt, Human
uggaugccugguggc

SEQ ID NO: 2427134 - RNA, 15 nt, Human
aggccacaagacccu

SEQ ID NO: 2427135 - RNA, 23 nt, Human
aggccaaguuuguaucaggugcc

SEQ ID NO: 2427136 - RNA, 22 nt, Human
aggccaagugugauaaauaaac

SEQ ID NO: 2427137 - RNA, 21 nt, Human
aggccaagaaacgucuucuaa

SEQ ID NO: 2427138 - RNA, 18 nt, Human
aggccaagucaggcccuu

SEQ ID NO: 2427139 - RNA, 14 nt, Human
aggccaagugcagg

SEQ ID NO: 2427140 - RNA, 15 nt, Human
aggccaagugcaggc

SEQ ID NO: 2427141 - RNA, 21 nt, Human
aggccaagugcaggcuggcac

SEQ ID NO: 2427142 - RNA, 17 nt, Human
uggagucuccagugguu

SEQ ID NO: 2427143 - RNA, 13 nt, Human
uggagucuccagu

SEQ ID NO: 2427144 - RNA, 14 nt, Human
uggagucggaaggg

SEQ ID NO: 2427145 - RNA, 21 nt, Human
uggaguccccucaccuccucu

SEQ ID NO: 2427146 - RNA, 20 nt, Human
uggaguccccucaccuccuc

SEQ ID NO: 2427147 - RNA, 19 nt, Human
uggaguccccucaccuccu

SEQ ID NO: 2427148 - RNA, 15 nt, Human
uggaguccccucacc

SEQ ID NO: 2427149 - RNA, 14 nt, Human
uggaguccccucac

SEQ ID NO: 2427150 - RNA, 19 nt, Human
uggagucagacagaugugg

SEQ ID NO: 2427151 - RNA, 15 nt, Human
uggagucaugccaag

SEQ ID NO: 2427152 - RNA, 14 nt, Human
uggaguccagucuc

SEQ ID NO: 2427153 - RNA, 15 nt, Human
uggaguccagucucu

SEQ ID NO: 2427154 - RNA, 22 nt, Human
uggagucaugguccgguguccu

SEQ ID NO: 2427155 - RNA, 20 nt, Human
aggccacaagacccuugugg

SEQ ID NO: 2427156 - RNA, 15 nt, Human
uggcagccucuucaa

SEQ ID NO: 2427157 - RNA, 16 nt, Human
uggcagccucuucaaa

SEQ ID NO: 2427158 - RNA, 19 nt, Human
uggcagccucccauccagg

SEQ ID NO: 2427159 - RNA, 20 nt, Human
uggcagccucccauccaggg

SEQ ID NO: 2427160 - RNA, 21 nt, Human
uggcagccucccauccagggc

SEQ ID NO: 2427161 - RNA, 22 nt, Human
uggcagccucccauccagggcc

SEQ ID NO: 2427162 - RNA, 23 nt, Human
uggcagccgugccuucagcucua

SEQ ID NO: 2427163 - RNA, 22 nt, Human
uggcagccgugccuucagcucu

SEQ ID NO: 2427164 - RNA, 14 nt, Human
uggcagccgagcuc

SEQ ID NO: 2427165 - RNA, 12 nt, Human
uggcagccccug

SEQ ID NO: 2427166 - RNA, 11 nt, Human
uggcagcccug

SEQ ID NO: 2427167 - RNA, 12 nt, Human
uggcagcccugu

SEQ ID NO: 2427168 - RNA, 16 nt, Human
uggcagccgugccuuc

SEQ ID NO: 2427169 - RNA, 14 nt, Human
uggcagcccuguag

SEQ ID NO: 2427170 - RNA, 17 nt, Human
uggcagcccuguaggga

SEQ ID NO: 2427171 - RNA, 21 nt, Human
aggccacaugucaccguggac

SEQ ID NO: 2427172 - RNA, 15 nt, Human
aggccacaugucacc

SEQ ID NO: 2427173 - RNA, 23 nt, Human
aggccacauggggcugggcagcu

SEQ ID NO: 2427174 - RNA, 22 nt, Human
aggccacauggggcugggcagc

SEQ ID NO: 2427175 - RNA, 19 nt, Human
aggccacauggggcugggc

SEQ ID NO: 2427176 - RNA, 18 nt, Human
aggccacaugagucccag

SEQ ID NO: 2427177 - RNA, 19 nt, Human
aggccacaugagucccagu

SEQ ID NO: 2427178 - RNA, 13 nt, Human
aggccaccaggau

SEQ ID NO: 2427179 - RNA, 12 nt, Human
aggccaccagga

SEQ ID NO: 2427180 - RNA, 22 nt, Human
aggccaccauauucagugcugu

SEQ ID NO: 2427181 - RNA, 17 nt, Human
aggccacacucagcaca

SEQ ID NO: 2427182 - RNA, 18 nt, Human
aggccacacucagcacaa

SEQ ID NO: 2427183 - RNA, 16 nt, Human
aggccacaugaguccc

SEQ ID NO: 2427184 - RNA, 21 nt, Human
aggccacaccaucuccuuuca

SEQ ID NO: 2427185 - RNA, 22 nt, Human
aggccacaccaucuccuuucag

SEQ ID NO: 2427186 - RNA, 19 nt, Human
aggccacuccuccaaagga

SEQ ID NO: 2427187 - RNA, 23 nt, Human
aggccacgugauguggagggcac

SEQ ID NO: 2427188 - RNA, 19 nt, Human
aggccacgugauguggagg

SEQ ID NO: 2427189 - RNA, 13 nt, Human
aggccacuccucc

SEQ ID NO: 2427190 - RNA, 14 nt, Human
aggccacuccucca

SEQ ID NO: 2427191 - RNA, 21 nt, Human
aggccaccugcccccuucucc

SEQ ID NO: 2427192 - RNA, 22 nt, Human
aggccaccugcccccuucuccc

SEQ ID NO: 2427193 - RNA, 13 nt, Human
aggccacggcagc

SEQ ID NO: 2427194 - RNA, 12 nt, Human
aggccagagaca

SEQ ID NO: 2427195 - RNA, 20 nt, Human
uggcacaguuuucugagaaa

SEQ ID NO: 2427196 - RNA, 22 nt, Human
uggauuaaacuuaaucuaaaug

SEQ ID NO: 2427197 - RNA, 12 nt, Human
uggauguucuga

SEQ ID NO: 2427198 - RNA, 20 nt, Human
uggaugucugccaauuuuug

SEQ ID NO: 2427199 - RNA, 17 nt, Human
uggaugucugccaauuu

SEQ ID NO: 2427200 - RNA, 15 nt, Human
uggcacaucagaaag

SEQ ID NO: 2427201 - RNA, 14 nt, Human
uggcacaucagaaa

SEQ ID NO: 2427202 - RNA, 20 nt, Human
uggauguuuuaauuccauga

SEQ ID NO: 2427203 - RNA, 18 nt, Human
uggauguuuuaauuccau

SEQ ID NO: 2427204 - RNA, 13 nt, Human
uggauguuuuaau

SEQ ID NO: 2427205 - RNA, 23 nt, Human
uggaugugggguccccaucaucc

SEQ ID NO: 2427206 - RNA, 15 nt, Human
uggaugucuuccuug

SEQ ID NO: 2427207 - RNA, 14 nt, Human
uggaugucuuccuu

SEQ ID NO: 2427208 - RNA, 22 nt, Human
uggcacaguuuucugagaaaga

SEQ ID NO: 2427209 - RNA, 20 nt, Human
uggcacaucagcacgauuuc

SEQ ID NO: 2427210 - RNA, 18 nt, Human
uggcaccagcagccugga

SEQ ID NO: 2427211 - RNA, 20 nt, Human
uggcagauaaucagccucuu

SEQ ID NO: 2427212 - RNA, 21 nt, Human
uggcagauaaucagccucuua

SEQ ID NO: 2427213 - RNA, 20 nt, Human
uggcagcauaaaggccuuuu

SEQ ID NO: 2427214 - RNA, 17 nt, Human
uggcagaguuugugugu

SEQ ID NO: 2427215 - RNA, 23 nt, Human
uggcagaguuguaaauauauaaa

SEQ ID NO: 2427216 - RNA, 20 nt, Human
uggcagaguuguaaauauau

SEQ ID NO: 2427217 - RNA, 19 nt, Human
uggcagaguuguaaauaua

SEQ ID NO: 2427218 - RNA, 22 nt, Human
uggcagaguuuguguguugucu

SEQ ID NO: 2427219 - RNA, 18 nt, Human
uggcagaguuuguguguu

SEQ ID NO: 2427220 - RNA, 19 nt, Human
uggcagauaaucagccucu

SEQ ID NO: 2427221 - RNA, 22 nt, Human
uggcagaguugaagacagagcu

SEQ ID NO: 2427222 - RNA, 17 nt, Human
uggcagaguuguaaaua

SEQ ID NO: 2427223 - RNA, 16 nt, Human
uggcagaguuguaaau

SEQ ID NO: 2427224 - RNA, 15 nt, Human
uggcagaguuguaaa

SEQ ID NO: 2427225 - RNA, 22 nt, Human
uggcacccaccguggaggagga

SEQ ID NO: 2427226 - RNA, 21 nt, Human
uggcacccaccguggaggagg

SEQ ID NO: 2427227 - RNA, 18 nt, Human
uggcaccagcgaagggag

SEQ ID NO: 2427228 - RNA, 20 nt, Human
uggcacccaccguggaggag

SEQ ID NO: 2427229 - RNA, 21 nt, Human
uggcagaguugaagacagagc

SEQ ID NO: 2427230 - RNA, 16 nt, Human
uggcacccggccccug

SEQ ID NO: 2427231 - RNA, 15 nt, Human
uggcacccggccccu

SEQ ID NO: 2427232 - RNA, 21 nt, Human
uggcacaucagcacgauuucu

SEQ ID NO: 2427233 - RNA, 13 nt, Human
uggcaccagcgaa

SEQ ID NO: 2427234 - RNA, 18 nt, Human
uggcacaucagaaaggaa

SEQ ID NO: 2427235 - RNA, 20 nt, Human
aggcuggcgugcaguggugc

SEQ ID NO: 2427236 - RNA, 18 nt, Human
aggcuggcgugcaguggu

SEQ ID NO: 2427237 - RNA, 19 nt, Human
aggcuggcuccagaugcag

SEQ ID NO: 2427238 - RNA, 22 nt, Human
aggcuggcgcagccaaggccga

SEQ ID NO: 2427239 - RNA, 13 nt, Human
aggcuggcuggcc

SEQ ID NO: 2427240 - RNA, 15 nt, Human
aggcuggcuggggcc

SEQ ID NO: 2427241 - RNA, 13 nt, Human
aggcuggcugggg

SEQ ID NO: 2427242 - RNA, 12 nt, Human
aggcuggcuggg

SEQ ID NO: 2427243 - RNA, 22 nt, Human
aggcuggcuggcccgucauguu

SEQ ID NO: 2427244 - RNA, 17 nt, Human
aggcugggaccacguga

SEQ ID NO: 2427245 - RNA, 17 nt, Human
aggcuggcuggggccua

SEQ ID NO: 2427246 - RNA, 14 nt, Human
aggcuggcuugucc

SEQ ID NO: 2427247 - RNA, 22 nt, Human
aggcuggcuuguccccuccuca

SEQ ID NO: 2427248 - RNA, 14 nt, Human
aggcugggagagcc

SEQ ID NO: 2427249 - RNA, 22 nt, Human
uggcuagagguucaaagauauu

SEQ ID NO: 2427250 - RNA, 20 nt, Human
aggcuggcuuguccccuccu

SEQ ID NO: 2427251 - RNA, 15 nt, Human
uggcuagaguccuca

SEQ ID NO: 2427252 - RNA, 16 nt, Human
uggcuagaguccucac

SEQ ID NO: 2427253 - RNA, 17 nt, Human
uggcuaggggagcaggg

SEQ ID NO: 2427254 - RNA, 15 nt, Human
uggcuagucaagcuc

SEQ ID NO: 2427255 - RNA, 18 nt, Human
uggcuagaguccucacuc

SEQ ID NO: 2427256 - RNA, 21 nt, Human
uggcuagaguccucacuccca

SEQ ID NO: 2427257 - RNA, 22 nt, Human
uggcuauuagagaucaaccccu

SEQ ID NO: 2427258 - RNA, 15 nt, Human
uggcuauuuaaaacu

SEQ ID NO: 2427259 - RNA, 16 nt, Human
uggcuauuuaaagaca

SEQ ID NO: 2427260 - RNA, 19 nt, Human
uggcuaugcauuugaaaau

SEQ ID NO: 2427261 - RNA, 16 nt, Human
uggcuaugagggccuu

SEQ ID NO: 2427262 - RNA, 14 nt, Human
uggcuauggccacc

SEQ ID NO: 2427263 - RNA, 13 nt, Human
uggcuauaaauau

SEQ ID NO: 2427264 - RNA, 16 nt, Human
uggcuagucagagaga

SEQ ID NO: 2427265 - RNA, 15 nt, Human
uggcuaugcauuuga

SEQ ID NO: 2427266 - RNA, 17 nt, Human
uggcuaugcauuugaaa

SEQ ID NO: 2427267 - RNA, 14 nt, Human
uggcuaugcauuug

SEQ ID NO: 2427268 - RNA, 17 nt, Human
uggcuagucaagcuccu

SEQ ID NO: 2427269 - RNA, 18 nt, Human
uggcuagucaagcuccuc

SEQ ID NO: 2427270 - RNA, 20 nt, Human
uggcuagucaagcuccuccu

SEQ ID NO: 2427271 - RNA, 21 nt, Human
uggcuagucaagcuccuccuc

SEQ ID NO: 2427272 - RNA, 22 nt, Human
uggcuagucaagcuccuccucc

SEQ ID NO: 2427273 - RNA, 23 nt, Human
uggcuagucaagcuccuccuccc

SEQ ID NO: 2427274 - RNA, 17 nt, Human
uggcuagugucuaucag

SEQ ID NO: 2427275 - RNA, 21 nt, Human
uggcucuuccaggcugggaga

SEQ ID NO: 2427276 - RNA, 20 nt, Human
uggcucuuccaggcugggag

SEQ ID NO: 2427277 - RNA, 19 nt, Human
uggcucuuccaggcuggga

SEQ ID NO: 2427278 - RNA, 18 nt, Human
uggcucaaguccucuuuu

SEQ ID NO: 2427279 - RNA, 22 nt, Human
uggcugagguuccucugccugc

SEQ ID NO: 2427280 - RNA, 21 nt, Human
uggcugagguuccucugccug

SEQ ID NO: 2427281 - RNA, 20 nt, Human
uggcugagguuccucugccu

SEQ ID NO: 2427282 - RNA, 18 nt, Human
uggcugagguuccucugc

SEQ ID NO: 2427283 - RNA, 17 nt, Human
uggcugagguuccucug

SEQ ID NO: 2427284 - RNA, 12 nt, Human
uggcugcaaagg

SEQ ID NO: 2427285 - RNA, 16 nt, Human
uggcucuugaacugag

SEQ ID NO: 2427286 - RNA, 22 nt, Human
uggcucuugaacugagcuugga

SEQ ID NO: 2427287 - RNA, 15 nt, Human
uggcucuucugccca

SEQ ID NO: 2427288 - RNA, 17 nt, Human
uggcugaggaggccucc

SEQ ID NO: 2427289 - RNA, 23 nt, Human
uggcugaggaggccuccaucuca

SEQ ID NO: 2427290 - RNA, 20 nt, Human
uggcugaggauuucaagccu

SEQ ID NO: 2427291 - RNA, 14 nt, Human
uggcugcagggagu

SEQ ID NO: 2427292 - RNA, 13 nt, Human
uggcugcagggag

SEQ ID NO: 2427293 - RNA, 19 nt, Human
uggcugcauaaauguggua

SEQ ID NO: 2427294 - RNA, 24 nt, Human
uggcugagguuccucugccugccc

SEQ ID NO: 2427295 - RNA, 23 nt, Human
uggcugagguuccucugccugcc

SEQ ID NO: 2427296 - RNA, 15 nt, Human
uggcugcagggaguc

SEQ ID NO: 2427297 - RNA, 20 nt, Human
uggcugccaaugggagcuca

SEQ ID NO: 2427298 - RNA, 18 nt, Human
uggcugccaaugggagcu

SEQ ID NO: 2427299 - RNA, 22 nt, Human
uggcugccagcuauuuuuacua

SEQ ID NO: 2427300 - RNA, 20 nt, Human
uggcugcccagaccccucug

SEQ ID NO: 2427301 - RNA, 23 nt, Human
uggcugcccagaccccucuggcc

SEQ ID NO: 2427302 - RNA, 22 nt, Human
uggcugccccauuuauccaccu

SEQ ID NO: 2427303 - RNA, 20 nt, Human
uggcugccccaaccugcuga

SEQ ID NO: 2427304 - RNA, 17 nt, Human
uggcugccccaaccugc

SEQ ID NO: 2427305 - RNA, 21 nt, Human
uggcugcccagaccccucugg

SEQ ID NO: 2427306 - RNA, 14 nt, Human
uggcugccagcuau

SEQ ID NO: 2427307 - RNA, 13 nt, Human
uggcugcccacac

SEQ ID NO: 2427308 - RNA, 12 nt, Human
uggcugcaugcg

SEQ ID NO: 2427309 - RNA, 20 nt, Human
uggcugcaucccccccaccu

SEQ ID NO: 2427310 - RNA, 17 nt, Human
uggcuuaaaacaacacu

SEQ ID NO: 2427311 - RNA, 15 nt, Human
uggcuguuggcuggg

SEQ ID NO: 2427312 - RNA, 14 nt, Human
uggcugugucuccc

SEQ ID NO: 2427313 - RNA, 13 nt, Human
uggcuguuggcug

SEQ ID NO: 2427314 - RNA, 16 nt, Human
uggcugcccuggcccu

SEQ ID NO: 2427315 - RNA, 15 nt, Human
uggcugcccuggccc

SEQ ID NO: 2427316 - RNA, 14 nt, Human
uggcugcccuggcc

SEQ ID NO: 2427317 - RNA, 13 nt, Human
uggcugcccuggc

SEQ ID NO: 2427318 - RNA, 16 nt, Human
uggcugccuccacucc

SEQ ID NO: 2427319 - RNA, 14 nt, Human
uggcugccuccacu

SEQ ID NO: 2427320 - RNA, 17 nt, Human
uggcugcccuggcccug

SEQ ID NO: 2427321 - RNA, 17 nt, Human
uggcugccucauuuaga

SEQ ID NO: 2427322 - RNA, 22 nt, Human
uggcugccuugugaaggaauua

SEQ ID NO: 2427323 - RNA, 18 nt, Human
uggcugccuccacuccca

SEQ ID NO: 2427324 - RNA, 17 nt, Human
uggcugccuccacuccc

SEQ ID NO: 2427325 - RNA, 20 nt, Human
uggcugccuccacucccacu

SEQ ID NO: 2427326 - RNA, 19 nt, Human
uggcugugucuaaacugca

SEQ ID NO: 2427327 - RNA, 20 nt, Human
uggcugugucuaaacugcau

SEQ ID NO: 2427328 - RNA, 15 nt, Human
uggcugcuagcacuu

SEQ ID NO: 2427329 - RNA, 13 nt, Human
uggcugcuagcac

SEQ ID NO: 2427330 - RNA, 14 nt, Human
uggcugcuagcacu

SEQ ID NO: 2427331 - RNA, 17 nt, Human
uggcugcggcacccuug

SEQ ID NO: 2427332 - RNA, 16 nt, Human
uggcugcggcacccuu

SEQ ID NO: 2427333 - RNA, 14 nt, Human
uggcuuaauguuua

SEQ ID NO: 2427334 - RNA, 20 nt, Human
uggcuuaaugcuucuuucau

SEQ ID NO: 2427335 - RNA, 15 nt, Human
uggcuuaauguuuau

SEQ ID NO: 2427336 - RNA, 18 nt, Human
uggcuguuggcagugagu

SEQ ID NO: 2427337 - RNA, 14 nt, Human
uggcuguucuggaa

SEQ ID NO: 2427338 - RNA, 22 nt, Human
uggcuguguucuggugaggccu

SEQ ID NO: 2427339 - RNA, 16 nt, Human
uggcuuaaugcuucuu

SEQ ID NO: 2427340 - RNA, 15 nt, Human
uggcuuaaugcuucu

SEQ ID NO: 2427341 - RNA, 22 nt, Human
uggcuucacggaagagccuugc

SEQ ID NO: 2427342 - RNA, 15 nt, Human
uggcuuauccagcug

SEQ ID NO: 2427343 - RNA, 23 nt, Human
uggcuuacuacaugugggagcuu

SEQ ID NO: 2427344 - RNA, 20 nt, Human
uggcuuacuacaugugggag

SEQ ID NO: 2427345 - RNA, 22 nt, Human
uggcuuccagguaucuccagga

SEQ ID NO: 2427346 - RNA, 21 nt, Human
uggcuuccagguaucuccagg

SEQ ID NO: 2427347 - RNA, 20 nt, Human
uggcuuccagguaucuccag

SEQ ID NO: 2427348 - RNA, 15 nt, Human
uggcuuccagguauc

SEQ ID NO: 2427349 - RNA, 14 nt, Human
uggcuuccagguau

SEQ ID NO: 2427350 - RNA, 20 nt, Human
uggcuucauuagagcaggcg

SEQ ID NO: 2427351 - RNA, 23 nt, Human
uggcuuccagaaaaccccagcau

SEQ ID NO: 2427352 - RNA, 18 nt, Human
uggcuucauuagagcagg

SEQ ID NO: 2427353 - RNA, 16 nt, Human
uggcuucaucugucaa

SEQ ID NO: 2427354 - RNA, 22 nt, Human
uggcuuccagaaaaccccagca

SEQ ID NO: 2427355 - RNA, 13 nt, Human
uggcuucaggagg

SEQ ID NO: 2427356 - RNA, 12 nt, Human
uggcuucaggag

SEQ ID NO: 2427357 - RNA, 23 nt, Human
uggcuucacggaagagccuugcg

SEQ ID NO: 2427358 - RNA, 16 nt, Human
uggcuuccaugauggu

SEQ ID NO: 2427359 - RNA, 23 nt, Human
uggcuuccagguaucuccaggau

SEQ ID NO: 2427360 - RNA, 16 nt, Human
uggcuucccgcucagc

SEQ ID NO: 2427361 - RNA, 15 nt, Human
uggcuucccgcucag

SEQ ID NO: 2427362 - RNA, 16 nt, Human
ugggaaagccaccucu

SEQ ID NO: 2427363 - RNA, 15 nt, Human
ugggaaagccaccuc

SEQ ID NO: 2427364 - RNA, 17 nt, Human
uggcuucccgcucagcc

SEQ ID NO: 2427365 - RNA, 16 nt, Human
ugggaaaggggaaguu

SEQ ID NO: 2427366 - RNA, 21 nt, Human
ugggaaagccaccucucccuc

SEQ ID NO: 2427367 - RNA, 20 nt, Human
ugggaaagccaccucucccu

SEQ ID NO: 2427368 - RNA, 22 nt, Human
ugggaaagccaccucucccuca

SEQ ID NO: 2427369 - RNA, 16 nt, Human
ugggaaaggaguagaa

SEQ ID NO: 2427370 - RNA, 16 nt, Human
ugggaaaguauucugu

SEQ ID NO: 2427371 - RNA, 17 nt, Human
ugggaaauaagagagaa

SEQ ID NO: 2427372 - RNA, 17 nt, Human
ugggaaaggaguagaaa

SEQ ID NO: 2427373 - RNA, 16 nt, Human
ugggaacgagagggga

SEQ ID NO: 2427374 - RNA, 15 nt, Human
ugggaacgagagggg

SEQ ID NO: 2427375 - RNA, 21 nt, Human
ugggaacgcagaugauccaug

SEQ ID NO: 2427376 - RNA, 22 nt, Human
ugggaagauaggcucugcacag

SEQ ID NO: 2427377 - RNA, 17 nt, Human
ugggaagauaggcucug

SEQ ID NO: 2427378 - RNA, 20 nt, Human
ugggaagauaggcucugcac

SEQ ID NO: 2427379 - RNA, 12 nt, Human
ugggaaggaggg

SEQ ID NO: 2427380 - RNA, 16 nt, Human
ugggaaggccagcugc

SEQ ID NO: 2427381 - RNA, 15 nt, Human
ugggaaggccagcug

SEQ ID NO: 2427382 - RNA, 13 nt, Human
ugggaagggagag

SEQ ID NO: 2427383 - RNA, 19 nt, Human
ugggaaggggacccccgcc

SEQ ID NO: 2427384 - RNA, 15 nt, Human
ugggaauaaauaugc

SEQ ID NO: 2427385 - RNA, 14 nt, Human
ugggaauaaauaug

SEQ ID NO: 2427386 - RNA, 13 nt, Human
ugggaauaaauau

SEQ ID NO: 2427387 - RNA, 20 nt, Human
ugggaagugacuuagcagau

SEQ ID NO: 2427388 - RNA, 14 nt, Human
ugggaagugacuua

SEQ ID NO: 2427389 - RNA, 15 nt, Human
ugggaagugaagacu

SEQ ID NO: 2427390 - RNA, 21 nt, Human
ugggaagggagagcggggcag

SEQ ID NO: 2427391 - RNA, 22 nt, Human
ugggaaggggacccccgccccc

SEQ ID NO: 2427392 - RNA, 13 nt, Human
ugggaacuagacu

SEQ ID NO: 2427393 - RNA, 24 nt, Human
ugggaacgcagaugauccaugagu

SEQ ID NO: 2427394 - RNA, 20 nt, Human
ugggaacgagaggggaagag

SEQ ID NO: 2427395 - RNA, 16 nt, Human
ugggaacgugacugcc

SEQ ID NO: 2427396 - RNA, 18 nt, Human
ugggaacucaccuggggc

SEQ ID NO: 2427397 - RNA, 17 nt, Human
ugggaacucaccugggg

SEQ ID NO: 2427398 - RNA, 15 nt, Human
ugggaacucaccugg

SEQ ID NO: 2427399 - RNA, 18 nt, Human
ugggaacgugacugcccc

SEQ ID NO: 2427400 - RNA, 17 nt, Human
ugggaacugcagaccug

SEQ ID NO: 2427401 - RNA, 16 nt, Human
ugggaacugcagaccu

SEQ ID NO: 2427402 - RNA, 19 nt, Human
ugggaagacgccugagcuc

SEQ ID NO: 2427403 - RNA, 18 nt, Human
ugggaagacgccugagcu

SEQ ID NO: 2427404 - RNA, 21 nt, Human
ugggaagacgccugagcucac

SEQ ID NO: 2427405 - RNA, 18 nt, Human
ugggaagacgaggcccuc

SEQ ID NO: 2427406 - RNA, 17 nt, Human
ugggaagacgaggcccu

SEQ ID NO: 2427407 - RNA, 23 nt, Human
ugggaagaccagcuuugcaguga

SEQ ID NO: 2427408 - RNA, 21 nt, Human
ugggaagacauggggaggaag

SEQ ID NO: 2427409 - RNA, 13 nt, Human
ugggaagacauga

SEQ ID NO: 2427410 - RNA, 18 nt, Human
ugggaacugcagaccugu

SEQ ID NO: 2427411 - RNA, 20 nt, Human
aggcucucaggccagcugcu

SEQ ID NO: 2427412 - RNA, 19 nt, Human
aggcucucaggccagcugc

SEQ ID NO: 2427413 - RNA, 18 nt, Human
aggcucucaggccagcug

SEQ ID NO: 2427414 - RNA, 16 nt, Human
aggcucucaggccagc

SEQ ID NO: 2427415 - RNA, 15 nt, Human
aggcucucaggccag

SEQ ID NO: 2427416 - RNA, 14 nt, Human
aggcucucaggcca

SEQ ID NO: 2427417 - RNA, 12 nt, Human
aggcucucaggc

SEQ ID NO: 2427418 - RNA, 11 nt, Human
aggcucucagg

SEQ ID NO: 2427419 - RNA, 21 nt, Human
aggcucucaggccagcugcuu

SEQ ID NO: 2427420 - RNA, 19 nt, Human
aggcucugacccagugaga

SEQ ID NO: 2427421 - RNA, 18 nt, Human
aggcucugaaagccagcu

SEQ ID NO: 2427422 - RNA, 11 nt, Human
aggcucugccc

SEQ ID NO: 2427423 - RNA, 12 nt, Human
aggcucugcccu

SEQ ID NO: 2427424 - RNA, 15 nt, Human
aggcucugcccuugg

SEQ ID NO: 2427425 - RNA, 14 nt, Human
aggcucugcccuug

SEQ ID NO: 2427426 - RNA, 13 nt, Human
aggcucugcccuu

SEQ ID NO: 2427427 - RNA, 13 nt, Human
aggcucugcacag

SEQ ID NO: 2427428 - RNA, 15 nt, Human
aggcucugcacagau

SEQ ID NO: 2427429 - RNA, 17 nt, Human
aggcucugcacagaugg

SEQ ID NO: 2427430 - RNA, 13 nt, Human
aggcucugcccug

SEQ ID NO: 2427431 - RNA, 14 nt, Human
aggcuccugccacc

SEQ ID NO: 2427432 - RNA, 17 nt, Human
aggccugggugcuggcu

SEQ ID NO: 2427433 - RNA, 23 nt, Human
aggccugggugcuggcugcccag

SEQ ID NO: 2427434 - RNA, 22 nt, Human
aggccuguccugaccugucuca

SEQ ID NO: 2427435 - RNA, 16 nt, Human
aggccuggccaggcac

SEQ ID NO: 2427436 - RNA, 16 nt, Human
aggccugggucugugu

SEQ ID NO: 2427437 - RNA, 17 nt, Human
aggccugggucuguguc

SEQ ID NO: 2427438 - RNA, 19 nt, Human
aggccugggucugugucuc

SEQ ID NO: 2427439 - RNA, 21 nt, Human
aggccugggucugugucucuu

SEQ ID NO: 2427440 - RNA, 12 nt, Human
aggccugggugc

SEQ ID NO: 2427441 - RNA, 16 nt, Human
aggccugggugcuggc

SEQ ID NO: 2427442 - RNA, 20 nt, Human
aggcuccugccaccacgccc

SEQ ID NO: 2427443 - RNA, 13 nt, Human
aggcuccugccac

SEQ ID NO: 2427444 - RNA, 21 nt, Human
aggcuccugccaguguggaac

SEQ ID NO: 2427445 - RNA, 19 nt, Human
aggcuccugugcuacuuug

SEQ ID NO: 2427446 - RNA, 13 nt, Human
aggcuccugugcu

SEQ ID NO: 2427447 - RNA, 12 nt, Human
aggcucgagcau

SEQ ID NO: 2427448 - RNA, 19 nt, Human
aggcuccuuuagcgcccag

SEQ ID NO: 2427449 - RNA, 19 nt, Human
aggcucgagcaugccugga

SEQ ID NO: 2427450 - RNA, 18 nt, Human
aggcucgagcaugccugg

SEQ ID NO: 2427451 - RNA, 17 nt, Human
aggcucgagcaugccug

SEQ ID NO: 2427452 - RNA, 15 nt, Human
aggcucgagcaugcc

SEQ ID NO: 2427453 - RNA, 21 nt, Human
aggcucgagcaugccuggaug

SEQ ID NO: 2427454 - RNA, 13 nt, Human
aggcuccuuccug

SEQ ID NO: 2427455 - RNA, 15 nt, Human
aggcuccuuccuguc

SEQ ID NO: 2427456 - RNA, 16 nt, Human
aggcuccuuccugucu

SEQ ID NO: 2427457 - RNA, 16 nt, Human
aggcucgauuuuguau

SEQ ID NO: 2427458 - RNA, 15 nt, Human
aggcucgauuuugua

SEQ ID NO: 2427459 - RNA, 14 nt, Human
aggcucgauuuugu

SEQ ID NO: 2427460 - RNA, 23 nt, Human
aggcuccuuccugucuuccugca

SEQ ID NO: 2427461 - RNA, 23 nt, Human
aggcucgauuuuguaucugcagg

SEQ ID NO: 2427462 - RNA, 19 nt, Human
aggcucgauuuuguaucug

SEQ ID NO: 2427463 - RNA, 17 nt, Human
aggcucgauuuuguauc

SEQ ID NO: 2427464 - RNA, 22 nt, Human
aggcucgauuuuguaucugcag

SEQ ID NO: 2427465 - RNA, 20 nt, Human
aggcucucaacaggggagag

SEQ ID NO: 2427466 - RNA, 16 nt, Human
aggcucugcccuuggu

SEQ ID NO: 2427467 - RNA, 13 nt, Human
aggcucuggagcc

SEQ ID NO: 2427468 - RNA, 15 nt, Human
aggcucuggagccca

SEQ ID NO: 2427469 - RNA, 14 nt, Human
aggcucuggagccc

SEQ ID NO: 2427470 - RNA, 19 nt, Human
aggcucuggagcccacugu

SEQ ID NO: 2427471 - RNA, 18 nt, Human
aggcucuggagcccacug

SEQ ID NO: 2427472 - RNA, 17 nt, Human
aggcugcucagggcugg

SEQ ID NO: 2427473 - RNA, 16 nt, Human
aggcugcucagggcug

SEQ ID NO: 2427474 - RNA, 16 nt, Human
aggcugcgucuggagg

SEQ ID NO: 2427475 - RNA, 15 nt, Human
aggcugcucagggcu

SEQ ID NO: 2427476 - RNA, 18 nt, Human
aggcucugcgccugcccc

SEQ ID NO: 2427477 - RNA, 23 nt, Human
aggcucugcccugcccuagcucc

SEQ ID NO: 2427478 - RNA, 14 nt, Human
aggcucugcccugc

SEQ ID NO: 2427479 - RNA, 17 nt, Human
aggcucugcccugcccu

SEQ ID NO: 2427480 - RNA, 20 nt, Human
aggcugcuggcgccucugca

SEQ ID NO: 2427481 - RNA, 19 nt, Human
aggcugcuggcgccucugc

SEQ ID NO: 2427482 - RNA, 18 nt, Human
aggcugcuggcgccucug

SEQ ID NO: 2427483 - RNA, 15 nt, Human
aggcugcuggcgccu

SEQ ID NO: 2427484 - RNA, 21 nt, Human
aggcugcuggcgccucugcaa

SEQ ID NO: 2427485 - RNA, 14 nt, Human
aggcugcuuagaau

SEQ ID NO: 2427486 - RNA, 13 nt, Human
aggcugcuuucca

SEQ ID NO: 2427487 - RNA, 14 nt, Human
aggcugcuuuccaa

SEQ ID NO: 2427488 - RNA, 17 nt, Human
aggcugcgucuggaggg

SEQ ID NO: 2427489 - RNA, 23 nt, Human
aggcugcucuugaacuccugacc

SEQ ID NO: 2427490 - RNA, 13 nt, Human
aggcugcuggagg

SEQ ID NO: 2427491 - RNA, 14 nt, Human
aggcugcuggagga

SEQ ID NO: 2427492 - RNA, 14 nt, Human
aggcugcuggcgcc

SEQ ID NO: 2427493 - RNA, 12 nt, Human
aggcugcuggcg

SEQ ID NO: 2427494 - RNA, 15 nt, Human
aggcugcuggaggaa

SEQ ID NO: 2427495 - RNA, 16 nt, Human
aggcugcuggaggaaa

SEQ ID NO: 2427496 - RNA, 15 nt, Human
aggcugcuuuccaaa

SEQ ID NO: 2427497 - RNA, 17 nt, Human
aggcugcuuuccaaagc

SEQ ID NO: 2427498 - RNA, 18 nt, Human
aggcugcuuuccaaagcc

SEQ ID NO: 2427499 - RNA, 19 nt, Human
aggcugcuuuccaaagcca

SEQ ID NO: 2427500 - RNA, 21 nt, Human
aggcugcuuuccaaagccaau

SEQ ID NO: 2427501 - RNA, 22 nt, Human
aggcugcuuagaauccaaacuu

SEQ ID NO: 2427502 - RNA, 13 nt, Human
aggcugcuuggga

SEQ ID NO: 2427503 - RNA, 12 nt, Human
aggcuggagaag

SEQ ID NO: 2427504 - RNA, 15 nt, Human
aggcuggcccugccc

SEQ ID NO: 2427505 - RNA, 16 nt, Human
aggcuggcccugcccu

SEQ ID NO: 2427506 - RNA, 17 nt, Human
aggcuggcccugcccug

SEQ ID NO: 2427507 - RNA, 18 nt, Human
aggcuggcccugcccugg

SEQ ID NO: 2427508 - RNA, 21 nt, Human
aggcuggccaguccaggcugc

SEQ ID NO: 2427509 - RNA, 19 nt, Human
aggcuggccaguccaggcu

SEQ ID NO: 2427510 - RNA, 18 nt, Human
aggcuggccaguccaggc

SEQ ID NO: 2427511 - RNA, 17 nt, Human
aggcuggccaguccagg

SEQ ID NO: 2427512 - RNA, 12 nt, Human
aggcuggcccug

SEQ ID NO: 2427513 - RNA, 14 nt, Human
aggcuggcccugcc

SEQ ID NO: 2427514 - RNA, 20 nt, Human
aggcuggcgcagccaaggcc

SEQ ID NO: 2427515 - RNA, 19 nt, Human
aggcuggcgcagccaaggc

SEQ ID NO: 2427516 - RNA, 17 nt, Human
aggcuggcgcagccaag

SEQ ID NO: 2427517 - RNA, 15 nt, Human
aggcuggcgcagcca

SEQ ID NO: 2427518 - RNA, 14 nt, Human
aggcuggcgcagcc

SEQ ID NO: 2427519 - RNA, 19 nt, Human
aggcuggcccugcccuggu

SEQ ID NO: 2427520 - RNA, 17 nt, Human
aggcuggcgugcagugg

SEQ ID NO: 2427521 - RNA, 13 nt, Human
aggcuggcgugca

SEQ ID NO: 2427522 - RNA, 20 nt, Human
aggcuggaguggaguggcgu

SEQ ID NO: 2427523 - RNA, 14 nt, Human
aggcuggcacagga

SEQ ID NO: 2427524 - RNA, 22 nt, Human
aggcuggauccuagccuuaucc

SEQ ID NO: 2427525 - RNA, 22 nt, Human
aggcuggauuuugaauuuucuu

SEQ ID NO: 2427526 - RNA, 16 nt, Human
aggcuggaggcagggc

SEQ ID NO: 2427527 - RNA, 17 nt, Human
aggcuggaggcagggcc

SEQ ID NO: 2427528 - RNA, 18 nt, Human
aggcuggaggcagggccu

SEQ ID NO: 2427529 - RNA, 19 nt, Human
aggcuggaggcagggccuu

SEQ ID NO: 2427530 - RNA, 20 nt, Human
aggcuggagugcaguggcgu

SEQ ID NO: 2427531 - RNA, 20 nt, Human
aggcuggagugcaguggcau

SEQ ID NO: 2427532 - RNA, 23 nt, Human
aggcuggaggcagggccuugccc

SEQ ID NO: 2427533 - RNA, 14 nt, Human
aggcuggagaagcu

SEQ ID NO: 2427534 - RNA, 13 nt, Human
aggcuggagaagc

SEQ ID NO: 2427535 - RNA, 20 nt, Human
aggcuggagaagcucaccca

SEQ ID NO: 2427536 - RNA, 13 nt, Human
aggcuggagccca

SEQ ID NO: 2427537 - RNA, 15 nt, Human
aggcuggagcccagg

SEQ ID NO: 2427538 - RNA, 18 nt, Human
aggcuggagcccagggag

SEQ ID NO: 2427539 - RNA, 12 nt, Human
aggcuggagcug

SEQ ID NO: 2427540 - RNA, 14 nt, Human
aggcuggagcuggc

SEQ ID NO: 2427541 - RNA, 17 nt, Human
aggcuggagcuggcguc

SEQ ID NO: 2427542 - RNA, 18 nt, Human
aggcuggagcuggcgucu

SEQ ID NO: 2427543 - RNA, 13 nt, Human
aggcuggaggcag

SEQ ID NO: 2427544 - RNA, 14 nt, Human
aggcuggaggcagg

SEQ ID NO: 2427545 - RNA, 15 nt, Human
aggcuggaggcaggg

SEQ ID NO: 2427546 - RNA, 16 nt, Human
aggcuggcacaggaca

SEQ ID NO: 2427547 - RNA, 17 nt, Human
aggcuggcacaggacau

SEQ ID NO: 2427548 - RNA, 18 nt, Human
aggcuggcacaggacaug

SEQ ID NO: 2427549 - RNA, 19 nt, Human
aggcuggcaccgccuucuc

SEQ ID NO: 2427550 - RNA, 20 nt, Human
aggcuggcaccgccuucucu

SEQ ID NO: 2427551 - RNA, 18 nt, Human
aggcuggcagcucuccag

SEQ ID NO: 2427552 - RNA, 17 nt, Human
aggcuggcagcucucca

SEQ ID NO: 2427553 - RNA, 16 nt, Human
aggcuggcagcucucc

SEQ ID NO: 2427554 - RNA, 15 nt, Human
aggcuggcagcucuc

SEQ ID NO: 2427555 - RNA, 20 nt, Human
aggcuggcagcucuccaguc

SEQ ID NO: 2427556 - RNA, 19 nt, Human
aggcuggcagcucuccagu

SEQ ID NO: 2427557 - RNA, 15 nt, Human
aggcuggcagguaug

SEQ ID NO: 2427558 - RNA, 21 nt, Human
aggcuggccagccccacagcc

SEQ ID NO: 2427559 - RNA, 20 nt, Human
aggcuggccagccccacagc

SEQ ID NO: 2427560 - RNA, 19 nt, Human
aggcuggccagccccacag

SEQ ID NO: 2427561 - RNA, 18 nt, Human
aggcuggccagccccaca

SEQ ID NO: 2427562 - RNA, 22 nt, Human
aggcuggccagccccacagccc

SEQ ID NO: 2427563 - RNA, 15 nt, Human
aggcuggccagucca

SEQ ID NO: 2427564 - RNA, 17 nt, Human
aggcuggccagccccac

SEQ ID NO: 2427565 - RNA, 16 nt, Human
aggcuggccagcccca

SEQ ID NO: 2427566 - RNA, 15 nt, Human
aggcuggccagcccc

SEQ ID NO: 2427567 - RNA, 14 nt, Human
aggcuggccagccc

SEQ ID NO: 2427568 - RNA, 13 nt, Human
aggcuggccagcc

SEQ ID NO: 2427569 - RNA, 21 nt, Human
aggcuggcagcucuccaguca

SEQ ID NO: 2427570 - RNA, 16 nt, Human
ugcuggaggugggagc

SEQ ID NO: 2427571 - RNA, 15 nt, Human
ugcuggaggugggag

SEQ ID NO: 2427572 - RNA, 14 nt, Human
ugcuggagguggga

SEQ ID NO: 2427573 - RNA, 13 nt, Human
ugcuggaggacug

SEQ ID NO: 2427574 - RNA, 23 nt, Human
ugcuggagccuguguaacagcuc

SEQ ID NO: 2427575 - RNA, 21 nt, Human
ugcuggaggugacaucucuua

SEQ ID NO: 2427576 - RNA, 12 nt, Human
ugcuggcccagg

SEQ ID NO: 2427577 - RNA, 13 nt, Human
ugcuggcccaggg

SEQ ID NO: 2427578 - RNA, 14 nt, Human
ugcuggcccagggc

SEQ ID NO: 2427579 - RNA, 16 nt, Human
ugcuggcccagggccc

SEQ ID NO: 2427580 - RNA, 17 nt, Human
ugcuggcccagggccca

SEQ ID NO: 2427581 - RNA, 18 nt, Human
ugcuggcccagggcccag

SEQ ID NO: 2427582 - RNA, 19 nt, Human
ugcuggcccagggcccaga

SEQ ID NO: 2427583 - RNA, 20 nt, Human
ugcuggcccagggcccagag

SEQ ID NO: 2427584 - RNA, 21 nt, Human
ugcuggcccagggcccagagc

SEQ ID NO: 2427585 - RNA, 22 nt, Human
ugcuggcccagggcccagagcc

SEQ ID NO: 2427586 - RNA, 23 nt, Human
ugcuggcccagggcccagagccc

SEQ ID NO: 2427587 - RNA, 21 nt, Human
ugcuggcugccuuagaaccuu

SEQ ID NO: 2427588 - RNA, 12 nt, Human
ugcuggccccuc

SEQ ID NO: 2427589 - RNA, 13 nt, Human
ugcuggccccuca

SEQ ID NO: 2427590 - RNA, 16 nt, Human
ugcuggcuggaaggga

SEQ ID NO: 2427591 - RNA, 15 nt, Human
ugcuggccccucacc

SEQ ID NO: 2427592 - RNA, 14 nt, Human
ugcuggcugccuua

SEQ ID NO: 2427593 - RNA, 15 nt, Human
ugcuggcugccuuag

SEQ ID NO: 2427594 - RNA, 16 nt, Human
ugcuggcugguuagag

SEQ ID NO: 2427595 - RNA, 18 nt, Human
ugcuggcuguuggcuggg

SEQ ID NO: 2427596 - RNA, 14 nt, Human
ugcugcccugugag

SEQ ID NO: 2427597 - RNA, 13 nt, Human
ugcugcccuguga

SEQ ID NO: 2427598 - RNA, 12 nt, Human
ugcugcccugug

SEQ ID NO: 2427599 - RNA, 13 nt, Human
ugcuggagcucug

SEQ ID NO: 2427600 - RNA, 14 nt, Human
ugcuggagcucugc

SEQ ID NO: 2427601 - RNA, 15 nt, Human
ugcugcccugugagu

SEQ ID NO: 2427602 - RNA, 22 nt, Human
ugcuggagccuguguaacagcu

SEQ ID NO: 2427603 - RNA, 21 nt, Human
ugcuggagccuguguaacagc

SEQ ID NO: 2427604 - RNA, 19 nt, Human
ugcugccgccccacccaga

SEQ ID NO: 2427605 - RNA, 20 nt, Human
ugcugggaggagggagaggg

SEQ ID NO: 2427606 - RNA, 18 nt, Human
ugcuguaacuuucugaaa

SEQ ID NO: 2427607 - RNA, 15 nt, Human
ugcuguacaucuauu

SEQ ID NO: 2427608 - RNA, 16 nt, Human
ugcuguacaucuauuu

SEQ ID NO: 2427609 - RNA, 17 nt, Human
ugcuguacaucuauuuu

SEQ ID NO: 2427610 - RNA, 21 nt, Human
ugcuguacaucuauuuuggau

SEQ ID NO: 2427611 - RNA, 18 nt, Human
ugcugggaggagggagag

SEQ ID NO: 2427612 - RNA, 17 nt, Human
ugcugggaggagggaga

SEQ ID NO: 2427613 - RNA, 21 nt, Human
ugcugggagcugaaaaaucac

SEQ ID NO: 2427614 - RNA, 18 nt, Human
ugcugggagcugaaaaau

SEQ ID NO: 2427615 - RNA, 14 nt, Human
ugcugggagcugaa

SEQ ID NO: 2427616 - RNA, 23 nt, Human
ugcugggagcuccacucugcuuc

SEQ ID NO: 2427617 - RNA, 22 nt, Human
ugcugggagcuccacucugcuu

SEQ ID NO: 2427618 - RNA, 21 nt, Human
ugcugggagcuccacucugcu

SEQ ID NO: 2427619 - RNA, 20 nt, Human
ugcugggagcuccacucugc

SEQ ID NO: 2427620 - RNA, 18 nt, Human
ugcugggagcuccacucu

SEQ ID NO: 2427621 - RNA, 17 nt, Human
ugcugggagcuccacuc

SEQ ID NO: 2427622 - RNA, 16 nt, Human
ugcugggagcuccacu

SEQ ID NO: 2427623 - RNA, 15 nt, Human
ugcugggagcuccac

SEQ ID NO: 2427624 - RNA, 20 nt, Human
ugcugggacugagccagucc

SEQ ID NO: 2427625 - RNA, 17 nt, Human
ugcugggacugagccag

SEQ ID NO: 2427626 - RNA, 16 nt, Human
ugcugggacugagcca

SEQ ID NO: 2427627 - RNA, 21 nt, Human
ugcuggcuggaagggaggagc

SEQ ID NO: 2427628 - RNA, 15 nt, Human
ugcugggacugagcc

SEQ ID NO: 2427629 - RNA, 15 nt, Human
ugcugggacuggcca

SEQ ID NO: 2427630 - RNA, 17 nt, Human
ugcugggacuggccagg

SEQ ID NO: 2427631 - RNA, 17 nt, Human
ugcugucccucccccuu

SEQ ID NO: 2427632 - RNA, 16 nt, Human
ugcugucccucccccu

SEQ ID NO: 2427633 - RNA, 13 nt, Human
ugcugucccuccc

SEQ ID NO: 2427634 - RNA, 12 nt, Human
ugcugucccucc

SEQ ID NO: 2427635 - RNA, 20 nt, Human
ugcuguccccucuugcccca

SEQ ID NO: 2427636 - RNA, 17 nt, Human
ugcuguccccucuugcc

SEQ ID NO: 2427637 - RNA, 15 nt, Human
ugcuguccccucuug

SEQ ID NO: 2427638 - RNA, 13 nt, Human
ugcuguccccucu

SEQ ID NO: 2427639 - RNA, 21 nt, Human
ugcuguccagacagccuguau

SEQ ID NO: 2427640 - RNA, 19 nt, Human
ugcuguccagacagccugu

SEQ ID NO: 2427641 - RNA, 10 nt, Human
ugcugucccc

SEQ ID NO: 2427642 - RNA, 15 nt, Human
ugcuguccagacagc

SEQ ID NO: 2427643 - RNA, 21 nt, Human
ugcuguacuagagaucugguu

SEQ ID NO: 2427644 - RNA, 19 nt, Human
ugcuguacuagagaucugg

SEQ ID NO: 2427645 - RNA, 14 nt, Human
ugcuguacuagaga

SEQ ID NO: 2427646 - RNA, 20 nt, Human
ugcugucaaguuccuuuggg

SEQ ID NO: 2427647 - RNA, 14 nt, Human
ugcuguccuaggcc

SEQ ID NO: 2427648 - RNA, 21 nt, Human
ugcuguccccucuugccccaa

SEQ ID NO: 2427649 - RNA, 16 nt, Human
ugcuguccuaggccac

SEQ ID NO: 2427650 - RNA, 23 nt, Human
ugcuguccuaggccacaccaucu

SEQ ID NO: 2427651 - RNA, 12 nt, Human
ugcuguccucag

SEQ ID NO: 2427652 - RNA, 18 nt, Human
ugcuguccucagguggcc

SEQ ID NO: 2427653 - RNA, 14 nt, Human
ugcuguccucaggu

SEQ ID NO: 2427654 - RNA, 19 nt, Human
ugcugucugaucugugcuu

SEQ ID NO: 2427655 - RNA, 14 nt, Human
ugcugucuaugugg

SEQ ID NO: 2427656 - RNA, 18 nt, Human
ugcugucuaaccugugac

SEQ ID NO: 2427657 - RNA, 17 nt, Human
ugcugucuaaccuguga

SEQ ID NO: 2427658 - RNA, 19 nt, Human
ugcuguccucagguggcca

SEQ ID NO: 2427659 - RNA, 21 nt, Human
ugcuguccucagguggccaug

SEQ ID NO: 2427660 - RNA, 19 nt, Human
aggacacuaaccacgcugg

SEQ ID NO: 2427661 - RNA, 23 nt, Human
aggacacuaaccacgcuggaccu

SEQ ID NO: 2427662 - RNA, 14 nt, Human
aggacacugauaug

SEQ ID NO: 2427663 - RNA, 20 nt, Human
ugcuucauaaaugaagcagc

SEQ ID NO: 2427664 - RNA, 18 nt, Human
ugcuucauaaaugaagca

SEQ ID NO: 2427665 - RNA, 11 nt, Human
ugcuucauaca

SEQ ID NO: 2427666 - RNA, 14 nt, Human
ugcuucauacaggg

SEQ ID NO: 2427667 - RNA, 15 nt, Human
ugcuucauacaggga

SEQ ID NO: 2427668 - RNA, 16 nt, Human
ugcuucauacagggau

SEQ ID NO: 2427669 - RNA, 12 nt, Human
ugcuucagccug

SEQ ID NO: 2427670 - RNA, 14 nt, Human
ugcuucagccugag

SEQ ID NO: 2427671 - RNA, 15 nt, Human
ugcuucagccugagg

SEQ ID NO: 2427672 - RNA, 17 nt, Human
ugcuucagccugaggcu

SEQ ID NO: 2427673 - RNA, 22 nt, Human
ugcuucagccugaggcugagac

SEQ ID NO: 2427674 - RNA, 23 nt, Human
ugcuucagccugaggcugagacu

SEQ ID NO: 2427675 - RNA, 18 nt, Human
ugcuucaguggagaauua

SEQ ID NO: 2427676 - RNA, 16 nt, Human
ugcuucaguggagaau

SEQ ID NO: 2427677 - RNA, 15 nt, Human
aggacagcuguccuc

SEQ ID NO: 2427678 - RNA, 13 nt, Human
aggacagcugucc

SEQ ID NO: 2427679 - RNA, 22 nt, Human
aggacagccuguggcggugccu

SEQ ID NO: 2427680 - RNA, 12 nt, Human
aggacagcuguc

SEQ ID NO: 2427681 - RNA, 23 nt, Human
aggacagccuguggcggugccug

SEQ ID NO: 2427682 - RNA, 18 nt, Human
aggacaggaccagauuuu

SEQ ID NO: 2427683 - RNA, 12 nt, Human
aggacaggcccg

SEQ ID NO: 2427684 - RNA, 22 nt, Human
aggacagggaggugaccccagg

SEQ ID NO: 2427685 - RNA, 20 nt, Human
aggacaugcgguagccagca

SEQ ID NO: 2427686 - RNA, 22 nt, Human
aggacaugcgguagccagcaca

SEQ ID NO: 2427687 - RNA, 17 nt, Human
aggacaugcugaagcca

SEQ ID NO: 2427688 - RNA, 18 nt, Human
aggacaugaaacuccacc

SEQ ID NO: 2427689 - RNA, 13 nt, Human
aggacaugaaacu

SEQ ID NO: 2427690 - RNA, 20 nt, Human
aggacauaaugggguccugg

SEQ ID NO: 2427691 - RNA, 21 nt, Human
aggacaugauggagcgcaccu

SEQ ID NO: 2427692 - RNA, 24 nt, Human
aggacauaaugggguccuggccau

SEQ ID NO: 2427693 - RNA, 20 nt, Human
aggacauccccccgccaaaa

SEQ ID NO: 2427694 - RNA, 19 nt, Human
ugcuucaaggauccugagc

SEQ ID NO: 2427695 - RNA, 18 nt, Human
ugcuucaaggauccugag

SEQ ID NO: 2427696 - RNA, 16 nt, Human
ugcuucaaggauccug

SEQ ID NO: 2427697 - RNA, 22 nt, Human
ugcuuaugcaguuuuucagagu

SEQ ID NO: 2427698 - RNA, 12 nt, Human
ugcuucaaggau

SEQ ID NO: 2427699 - RNA, 16 nt, Human
ugcuucacuucuccca

SEQ ID NO: 2427700 - RNA, 14 nt, Human
ugcuucagccuccc

SEQ ID NO: 2427701 - RNA, 13 nt, Human
ugcuucagccucc

SEQ ID NO: 2427702 - RNA, 17 nt, Human
ugcuuauagguggccuc

SEQ ID NO: 2427703 - RNA, 20 nt, Human
ugcuuaguccaauuccuugc

SEQ ID NO: 2427704 - RNA, 21 nt, Human
ugcuuaugacaucacuuguac

SEQ ID NO: 2427705 - RNA, 18 nt, Human
ugcuuauagguggccucu

SEQ ID NO: 2427706 - RNA, 13 nt, Human
ugcuuauacacuu

SEQ ID NO: 2427707 - RNA, 19 nt, Human
ugcugugaggcuguccugu

SEQ ID NO: 2427708 - RNA, 18 nt, Human
ugcugugaggcuguccug

SEQ ID NO: 2427709 - RNA, 17 nt, Human
ugcugugaggcuguccu

SEQ ID NO: 2427710 - RNA, 16 nt, Human
ugcugugaggcugucc

SEQ ID NO: 2427711 - RNA, 23 nt, Human
ugcuuagucacuuauuucauaaa

SEQ ID NO: 2427712 - RNA, 21 nt, Human
ugcuuagucacuuauuucaua

SEQ ID NO: 2427713 - RNA, 20 nt, Human
ugcuuaguguacuuggagua

SEQ ID NO: 2427714 - RNA, 19 nt, Human
ugcuuagucacugccugca

SEQ ID NO: 2427715 - RNA, 18 nt, Human
ugcuuagucacugccugc

SEQ ID NO: 2427716 - RNA, 12 nt, Human
ugcugugaaaaa

SEQ ID NO: 2427717 - RNA, 13 nt, Human
ugcugugaaaaaa

SEQ ID NO: 2427718 - RNA, 14 nt, Human
ugcugugaggcugu

SEQ ID NO: 2427719 - RNA, 13 nt, Human
ugcugugaggcug

SEQ ID NO: 2427720 - RNA, 21 nt, Human
ugcugugaauuuguguaagga

SEQ ID NO: 2427721 - RNA, 19 nt, Human
ugcugugaauuagcucacu

SEQ ID NO: 2427722 - RNA, 18 nt, Human
ugcugugaauuagcucac

SEQ ID NO: 2427723 - RNA, 14 nt, Human
ugcugugaaaaaaa

SEQ ID NO: 2427724 - RNA, 22 nt, Human
ugcugugaaaaaaaaaaugcug

SEQ ID NO: 2427725 - RNA, 23 nt, Human
aggaauugacccacaagaaauga

SEQ ID NO: 2427726 - RNA, 11 nt, Human
aggaauuuaaa

SEQ ID NO: 2427727 - RNA, 22 nt, Human
aggaauuucaccuguaaaccug

SEQ ID NO: 2427728 - RNA, 15 nt, Human
aggaauuucccagga

SEQ ID NO: 2427729 - RNA, 17 nt, Human
aggaauuucccaggacc

SEQ ID NO: 2427730 - RNA, 18 nt, Human
aggaauuucccaggaccc

SEQ ID NO: 2427731 - RNA, 19 nt, Human
aggaauuucccaggacccu

SEQ ID NO: 2427732 - RNA, 20 nt, Human
aggaauuucccaggacccug

SEQ ID NO: 2427733 - RNA, 21 nt, Human
aggaauuucccaggacccuga

SEQ ID NO: 2427734 - RNA, 23 nt, Human
aggaauuguguuuauaauuuuaa

SEQ ID NO: 2427735 - RNA, 18 nt, Human
aggaauuucaccuguaaa

SEQ ID NO: 2427736 - RNA, 12 nt, Human
aggaauugacuu

SEQ ID NO: 2427737 - RNA, 19 nt, Human
aggaaggaaacccagcucu

SEQ ID NO: 2427738 - RNA, 23 nt, Human
aggaaggagacucaccucugccu

SEQ ID NO: 2427739 - RNA, 15 nt, Human
aggaaggagagccug

SEQ ID NO: 2427740 - RNA, 17 nt, Human
aggaaggagagccugcu

SEQ ID NO: 2427741 - RNA, 15 nt, Human
aggaaggagaggaga

SEQ ID NO: 2427742 - RNA, 21 nt, Human
aggaaggagagaaggggagga

SEQ ID NO: 2427743 - RNA, 18 nt, Human
aggaaggagagccugcug

SEQ ID NO: 2427744 - RNA, 20 nt, Human
aggaagcagaauaaagcaau

SEQ ID NO: 2427745 - RNA, 17 nt, Human
aggaagcugcuccgugc

SEQ ID NO: 2427746 - RNA, 17 nt, Human
aggaagccagcaggcuc

SEQ ID NO: 2427747 - RNA, 18 nt, Human
aggaaggaaacccagcuc

SEQ ID NO: 2427748 - RNA, 19 nt, Human
aggaagacuucaucccucu

SEQ ID NO: 2427749 - RNA, 13 nt, Human
aggaagacuucau

SEQ ID NO: 2427750 - RNA, 23 nt, Human
ugcugagucugaaggcuggguuc

SEQ ID NO: 2427751 - RNA, 22 nt, Human
ugcugagucugaaggcuggguu

SEQ ID NO: 2427752 - RNA, 21 nt, Human
ugcugagucugaaggcugggu

SEQ ID NO: 2427753 - RNA, 18 nt, Human
ugcugagucugaaggcug

SEQ ID NO: 2427754 - RNA, 17 nt, Human
ugcugagucugaaggcu

SEQ ID NO: 2427755 - RNA, 16 nt, Human
ugcugagucugaaggc

SEQ ID NO: 2427756 - RNA, 24 nt, Human
aggaagcacaugccucucucaggc

SEQ ID NO: 2427757 - RNA, 23 nt, Human
aggaagcacaugccucucucagg

SEQ ID NO: 2427758 - RNA, 14 nt, Human
aggaagacuuugga

SEQ ID NO: 2427759 - RNA, 13 nt, Human
aggaagacuuugg

SEQ ID NO: 2427760 - RNA, 15 nt, Human
aggaagccagcaggc

SEQ ID NO: 2427761 - RNA, 14 nt, Human
aggaagccagcagg

SEQ ID NO: 2427762 - RNA, 19 nt, Human
aggaagcagaauaaagcaa

SEQ ID NO: 2427763 - RNA, 18 nt, Human
aggaagcagaauaaagca

SEQ ID NO: 2427764 - RNA, 17 nt, Human
aggaagcagaauaaagc

SEQ ID NO: 2427765 - RNA, 16 nt, Human
aggaagcagaauaaag

SEQ ID NO: 2427766 - RNA, 15 nt, Human
aggaagcagaauaaa

SEQ ID NO: 2427767 - RNA, 14 nt, Human
aggaagcagaauaa

SEQ ID NO: 2427768 - RNA, 13 nt, Human
aggaagcagaaua

SEQ ID NO: 2427769 - RNA, 12 nt, Human
aggaagcagaau

SEQ ID NO: 2427770 - RNA, 11 nt, Human
aggaagcagaa

SEQ ID NO: 2427771 - RNA, 18 nt, Human
aggaagcaccccaugcca

SEQ ID NO: 2427772 - RNA, 18 nt, Human
agcugggacuacaggcac

SEQ ID NO: 2427773 - RNA, 16 nt, Human
agcugggacuacaggc

SEQ ID NO: 2427774 - RNA, 19 nt, Human
agcugggacuacaggcacc

SEQ ID NO: 2427775 - RNA, 18 nt, Human
ugcuauuguagagccaga

SEQ ID NO: 2427776 - RNA, 22 nt, Human
ugcuauuguagagccagagguc

SEQ ID NO: 2427777 - RNA, 15 nt, Human
ugcuccaccacaucc

SEQ ID NO: 2427778 - RNA, 14 nt, Human
ugcuccaccacauc

SEQ ID NO: 2427779 - RNA, 16 nt, Human
ugcuccagccuggcuc

SEQ ID NO: 2427780 - RNA, 15 nt, Human
ugcuccagccuggcu

SEQ ID NO: 2427781 - RNA, 17 nt, Human
ugcuccagccuggcucc

SEQ ID NO: 2427782 - RNA, 15 nt, Human
ugcucccagcagccc

SEQ ID NO: 2427783 - RNA, 14 nt, Human
ugcucccagcagcc

SEQ ID NO: 2427784 - RNA, 13 nt, Human
ugcucccagcagc

SEQ ID NO: 2427785 - RNA, 16 nt, Human
ugcuccagcuguucag

SEQ ID NO: 2427786 - RNA, 19 nt, Human
ugcuccagcuguucagcug

SEQ ID NO: 2427787 - RNA, 12 nt, Human
ugcuccagaccu

SEQ ID NO: 2427788 - RNA, 14 nt, Human
ugcuccagaccuga

SEQ ID NO: 2427789 - RNA, 21 nt, Human
ugcuccagaccugauccugga

SEQ ID NO: 2427790 - RNA, 15 nt, Human
ugcuccagccaaccc

SEQ ID NO: 2427791 - RNA, 17 nt, Human
ugcuccagccaaccccu

SEQ ID NO: 2427792 - RNA, 18 nt, Human
ugcuccagccaaccccug

SEQ ID NO: 2427793 - RNA, 20 nt, Human
ugcuccagccaaccccugug

SEQ ID NO: 2427794 - RNA, 23 nt, Human
ugcuccagccaaccccuguggag

SEQ ID NO: 2427795 - RNA, 14 nt, Human
ugcuccagccuggc

SEQ ID NO: 2427796 - RNA, 22 nt, Human
ugcuccagccaaccccugugga

SEQ ID NO: 2427797 - RNA, 22 nt, Human
ugcuccacccuuggccugucuc

SEQ ID NO: 2427798 - RNA, 23 nt, Human
ugcuccacccuuggccugucuca

SEQ ID NO: 2427799 - RNA, 16 nt, Human
ugcuccacccuuggcc

SEQ ID NO: 2427800 - RNA, 17 nt, Human
ugcuccacccuuggccu

SEQ ID NO: 2427801 - RNA, 18 nt, Human
ugcuccacccuuggccug

SEQ ID NO: 2427802 - RNA, 19 nt, Human
ugcuccacccuuggccugu

SEQ ID NO: 2427803 - RNA, 23 nt, Human
ugcuccccagcccuggcucugca

SEQ ID NO: 2427804 - RNA, 22 nt, Human
ugcuccccagcccuggcucugc

SEQ ID NO: 2427805 - RNA, 18 nt, Human
ugcuccccagcccuggcu

SEQ ID NO: 2427806 - RNA, 17 nt, Human
ugcuccccagcccuggc

SEQ ID NO: 2427807 - RNA, 16 nt, Human
ugcuccccagcccugg

SEQ ID NO: 2427808 - RNA, 21 nt, Human
ugcucccagcagcccuaagga

SEQ ID NO: 2427809 - RNA, 20 nt, Human
ugcucccagcagcccuaagg

SEQ ID NO: 2427810 - RNA, 17 nt, Human
ugcucccagcagcccua

SEQ ID NO: 2427811 - RNA, 17 nt, Human
ugcucccugaagccagc

SEQ ID NO: 2427812 - RNA, 15 nt, Human
ugcucccugaagcca

SEQ ID NO: 2427813 - RNA, 14 nt, Human
ugcucccugaagcc

SEQ ID NO: 2427814 - RNA, 13 nt, Human
ugcucccugaagc

SEQ ID NO: 2427815 - RNA, 13 nt, Human
ugcucccccaucc

SEQ ID NO: 2427816 - RNA, 20 nt, Human
ugcucccuccccugcccugg

SEQ ID NO: 2427817 - RNA, 14 nt, Human
ugcucccccacccc

SEQ ID NO: 2427818 - RNA, 16 nt, Human
ugcucccccacccccu

SEQ ID NO: 2427819 - RNA, 21 nt, Human
ugcucccccacccccucccca

SEQ ID NO: 2427820 - RNA, 23 nt, Human
ugcucccccacccccuccccagg

SEQ ID NO: 2427821 - RNA, 15 nt, Human
ugcucccccauccuc

SEQ ID NO: 2427822 - RNA, 19 nt, Human
ugcucccuccccugcccug

SEQ ID NO: 2427823 - RNA, 21 nt, Human
ugcucccugaagccagccuuc

SEQ ID NO: 2427824 - RNA, 20 nt, Human
ugcucccugaagccagccuu

SEQ ID NO: 2427825 - RNA, 19 nt, Human
ugcucccugaagccagccu

SEQ ID NO: 2427826 - RNA, 18 nt, Human
ugcucccugaagccagcc

SEQ ID NO: 2427827 - RNA, 22 nt, Human
ugcucccugaagccagccuucu

SEQ ID NO: 2427828 - RNA, 18 nt, Human
ugcucccugguucugaug

SEQ ID NO: 2427829 - RNA, 18 nt, Human
ugcuccgccucugcuggc

SEQ ID NO: 2427830 - RNA, 22 nt, Human
ugcucugcugacagacacaggc

SEQ ID NO: 2427831 - RNA, 21 nt, Human
ugcucugcugacagacacagg

SEQ ID NO: 2427832 - RNA, 22 nt, Human
ugcugacggccagggagaagcu

SEQ ID NO: 2427833 - RNA, 14 nt, Human
ugcugacggccagg

SEQ ID NO: 2427834 - RNA, 15 nt, Human
ugcugacggccaggg

SEQ ID NO: 2427835 - RNA, 17 nt, Human
ugcugacggccagggag

SEQ ID NO: 2427836 - RNA, 20 nt, Human
ugcugacggccagggagaag

SEQ ID NO: 2427837 - RNA, 14 nt, Human
ugcugagucugaag

SEQ ID NO: 2427838 - RNA, 15 nt, Human
ugcugagucugaagg

SEQ ID NO: 2427839 - RNA, 23 nt, Human
ugcucuggaaaaugugacccaga

SEQ ID NO: 2427840 - RNA, 19 nt, Human
ugcucuggaaaaugugacc

SEQ ID NO: 2427841 - RNA, 15 nt, Human
ugcugacccuccugu

SEQ ID NO: 2427842 - RNA, 15 nt, Human
ugcugaccuccacag

SEQ ID NO: 2427843 - RNA, 16 nt, Human
ugcugaccuccacagc

SEQ ID NO: 2427844 - RNA, 16 nt, Human
ugcucugcugacagac

SEQ ID NO: 2427845 - RNA, 13 nt, Human
ugcuccgugccuc

SEQ ID NO: 2427846 - RNA, 18 nt, Human
ugcugacauucaccugcc

SEQ ID NO: 2427847 - RNA, 16 nt, Human
ugcucugcuugacaac

SEQ ID NO: 2427848 - RNA, 21 nt, Human
ugcucugcuugacaacaucug

SEQ ID NO: 2427849 - RNA, 13 nt, Human
aggagggagaggg

SEQ ID NO: 2427850 - RNA, 12 nt, Human
aggagggagagg

SEQ ID NO: 2427851 - RNA, 23 nt, Human
aggagggagacacuggccccuca

SEQ ID NO: 2427852 - RNA, 16 nt, Human
aggagggagacacugg

SEQ ID NO: 2427853 - RNA, 13 nt, Human
aggaggccaccuc

SEQ ID NO: 2427854 - RNA, 13 nt, Human
aggaggcuggcuu

SEQ ID NO: 2427855 - RNA, 12 nt, Human
aggaggccaccu

SEQ ID NO: 2427856 - RNA, 20 nt, Human
aggaggcuuggaaagcauca

SEQ ID NO: 2427857 - RNA, 14 nt, Human
aggaggcaggaccu

SEQ ID NO: 2427858 - RNA, 20 nt, Human
aggaggcagcuguugcagug

SEQ ID NO: 2427859 - RNA, 13 nt, Human
aggagcugcuaua

SEQ ID NO: 2427860 - RNA, 19 nt, Human
aggagcugcuauagccugg

SEQ ID NO: 2427861 - RNA, 20 nt, Human
aggagcugcuauagccuggg

SEQ ID NO: 2427862 - RNA, 21 nt, Human
aggagcugcuauagccugggg

SEQ ID NO: 2427863 - RNA, 12 nt, Human
aggagcugcugg

SEQ ID NO: 2427864 - RNA, 13 nt, Human
aggagcugcuggc

SEQ ID NO: 2427865 - RNA, 12 nt, Human
aggaggaggagg

SEQ ID NO: 2427866 - RNA, 14 nt, Human
aggagcugcuggcu

SEQ ID NO: 2427867 - RNA, 16 nt, Human
aggagcugcuggcuug

SEQ ID NO: 2427868 - RNA, 22 nt, Human
aggaggaugggcucgcccacca

SEQ ID NO: 2427869 - RNA, 15 nt, Human
aggaggaugggcucg

SEQ ID NO: 2427870 - RNA, 14 nt, Human
aggaggaugggcuc

SEQ ID NO: 2427871 - RNA, 18 nt, Human
aggaggaggugccaacag

SEQ ID NO: 2427872 - RNA, 23 nt, Human
aggaggaggcaauugggauggcg

SEQ ID NO: 2427873 - RNA, 21 nt, Human
aggaggagguuuaggucaaga

SEQ ID NO: 2427874 - RNA, 20 nt, Human
aggaggauugcuugagccca

SEQ ID NO: 2427875 - RNA, 21 nt, Human
aggaggauugcuugagcccag

SEQ ID NO: 2427876 - RNA, 23 nt, Human
aggaggauugcuugagcccagga

SEQ ID NO: 2427877 - RNA, 17 nt, Human
uggaaauucccuucauc

SEQ ID NO: 2427878 - RNA, 22 nt, Human
uggaaauucccuucaucuggaa

SEQ ID NO: 2427879 - RNA, 21 nt, Human
aggagcugcccagaguugcug

SEQ ID NO: 2427880 - RNA, 14 nt, Human
aggagcugcccaga

SEQ ID NO: 2427881 - RNA, 16 nt, Human
uggaaauugacgaggg

SEQ ID NO: 2427882 - RNA, 18 nt, Human
uggaaauucccuucaucu

SEQ ID NO: 2427883 - RNA, 18 nt, Human
aggagcugccuuggcuca

SEQ ID NO: 2427884 - RNA, 19 nt, Human
aggagcugccuuggcucag

SEQ ID NO: 2427885 - RNA, 11 nt, Human
aggagcugcua

SEQ ID NO: 2427886 - RNA, 23 nt, Human
aggagcugccuuggcucagacau

SEQ ID NO: 2427887 - RNA, 21 nt, Human
aggagcugccuuggcucagac

SEQ ID NO: 2427888 - RNA, 22 nt, Human
aggagcugccuuggcucagaca

SEQ ID NO: 2427889 - RNA, 20 nt, Human
uggaaauauuaagaaagacu

SEQ ID NO: 2427890 - RNA, 22 nt, Human
uggaaauaucaguuacucagcc

SEQ ID NO: 2427891 - RNA, 23 nt, Human
uggaaauauucaugcuucuuccu

SEQ ID NO: 2427892 - RNA, 23 nt, Human
uggaaaugggcagagcagagacc

SEQ ID NO: 2427893 - RNA, 18 nt, Human
uggaaauuaagaagaaac

SEQ ID NO: 2427894 - RNA, 20 nt, Human
uggaaauuaagaagaaacua

SEQ ID NO: 2427895 - RNA, 17 nt, Human
aggaugaucuaggaaga

SEQ ID NO: 2427896 - RNA, 16 nt, Human
aggaugaucuaggaag

SEQ ID NO: 2427897 - RNA, 20 nt, Human
aggaugagcucuacccaggg

SEQ ID NO: 2427898 - RNA, 18 nt, Human
aggaucuuuguggccaag

SEQ ID NO: 2427899 - RNA, 20 nt, Human
aggaucuuuguggccaagga

SEQ ID NO: 2427900 - RNA, 16 nt, Human
aggaugagcuggaagg

SEQ ID NO: 2427901 - RNA, 15 nt, Human
aggaugagcuggaag

SEQ ID NO: 2427902 - RNA, 13 nt, Human
aggaugagcugga

SEQ ID NO: 2427903 - RNA, 13 nt, Human
aggaucuuugugg

SEQ ID NO: 2427904 - RNA, 15 nt, Human
aggaucuuuguggcc

SEQ ID NO: 2427905 - RNA, 16 nt, Human
aggaucuuuguggcca

SEQ ID NO: 2427906 - RNA, 17 nt, Human
aggaucuuuguggccaa

SEQ ID NO: 2427907 - RNA, 14 nt, Human
aggaucuggagaac

SEQ ID NO: 2427908 - RNA, 20 nt, Human
aggaucuguuuuuaaaaauc

SEQ ID NO: 2427909 - RNA, 23 nt, Human
aggaucuguuuuuaaaaaucaua

SEQ ID NO: 2427910 - RNA, 18 nt, Human
aggauccugagccagauu

SEQ ID NO: 2427911 - RNA, 17 nt, Human
aggauccugagccagau

SEQ ID NO: 2427912 - RNA, 21 nt, Human
aggaucucuugagccugggag

SEQ ID NO: 2427913 - RNA, 22 nt, Human
aggaucucuugagccugggagg

SEQ ID NO: 2427914 - RNA, 14 nt, Human
aggagggaggggga

SEQ ID NO: 2427915 - RNA, 15 nt, Human
aggagggagagggag

SEQ ID NO: 2427916 - RNA, 14 nt, Human
aggagggagaggga

SEQ ID NO: 2427917 - RNA, 21 nt, Human
aggagggagcaucagugcccu

SEQ ID NO: 2427918 - RNA, 16 nt, Human
aggauccugagccaga

SEQ ID NO: 2427919 - RNA, 15 nt, Human
aggauccugagccag

SEQ ID NO: 2427920 - RNA, 21 nt, Human
aggauacaaaagcaugugaga

SEQ ID NO: 2427921 - RNA, 12 nt, Human
aggauaaaauaa

SEQ ID NO: 2427922 - RNA, 17 nt, Human
aggauuuuaugcuuuaa

SEQ ID NO: 2427923 - RNA, 17 nt, Human
aggaugcuaaaccuuag

SEQ ID NO: 2427924 - RNA, 19 nt, Human
aggaugcuaacaucuaaaa

SEQ ID NO: 2427925 - RNA, 15 nt, Human
aggauuuuuaucuuu

SEQ ID NO: 2427926 - RNA, 20 nt, Human
aggauuuuaugcuuuaaaca

SEQ ID NO: 2427927 - RNA, 17 nt, Human
aggauuuuuuucugagc

SEQ ID NO: 2427928 - RNA, 16 nt, Human
aggauuuuuuucugag

SEQ ID NO: 2427929 - RNA, 15 nt, Human
aggcaaaaauguaaa

SEQ ID NO: 2427930 - RNA, 17 nt, Human
aggaugcuaacaucuaa

SEQ ID NO: 2427931 - RNA, 16 nt, Human
aggaugcuaacaucua

SEQ ID NO: 2427932 - RNA, 17 nt, Human
aggaugccccguccccc

SEQ ID NO: 2427933 - RNA, 19 nt, Human
aggauuuugauccaagcug

SEQ ID NO: 2427934 - RNA, 14 nt, Human
aggaugcccaaaga

SEQ ID NO: 2427935 - RNA, 20 nt, Human
aggaugaucuaggaagacuu

SEQ ID NO: 2427936 - RNA, 19 nt, Human
aggaugcccaaagaugcag

SEQ ID NO: 2427937 - RNA, 23 nt, Human
aggaugaggccgcuagaggccug

SEQ ID NO: 2427938 - RNA, 21 nt, Human
aggaugaggccgcuagaggcc

SEQ ID NO: 2427939 - RNA, 19 nt, Human
aggaugcagagucagcaga

SEQ ID NO: 2427940 - RNA, 13 nt, Human
aggaugcccaggg

SEQ ID NO: 2427941 - RNA, 14 nt, Human
aggaugcccagggc

SEQ ID NO: 2427942 - RNA, 22 nt, Human
aggaugcccagggccacucugc

SEQ ID NO: 2427943 - RNA, 17 nt, Human
aggcaaaauccuugcuu

SEQ ID NO: 2427944 - RNA, 19 nt, Human
aggcaaaauccuugcuuau

SEQ ID NO: 2427945 - RNA, 13 nt, Human
aggcaaaauugca

SEQ ID NO: 2427946 - RNA, 14 nt, Human
aggcaaauguguac

SEQ ID NO: 2427947 - RNA, 17 nt, Human
aggcaaauguguacaug

SEQ ID NO: 2427948 - RNA, 16 nt, Human
aggcaacauccaaaau

SEQ ID NO: 2427949 - RNA, 17 nt, Human
aggcaacucaucuuagg

SEQ ID NO: 2427950 - RNA, 14 nt, Human
aggcaacugaggca

SEQ ID NO: 2427951 - RNA, 15 nt, Human
aggcaacugaggcag

SEQ ID NO: 2427952 - RNA, 16 nt, Human
aggcaacugaggcaga

SEQ ID NO: 2427953 - RNA, 22 nt, Human
uggaauuucucccagucauuua

SEQ ID NO: 2427954 - RNA, 22 nt, Human
uggaauuggguggggggcuuca

SEQ ID NO: 2427955 - RNA, 17 nt, Human
uggaauugggagcuugg

SEQ ID NO: 2427956 - RNA, 18 nt, Human
uggaauuggagcucgugg

SEQ ID NO: 2427957 - RNA, 23 nt, Human
uggaauugauuugcauugaacac

SEQ ID NO: 2427958 - RNA, 17 nt, Human
aggcaacugaggcagac

SEQ ID NO: 2427959 - RNA, 19 nt, Human
aggcaacugaggcagacag

SEQ ID NO: 2427960 - RNA, 13 nt, Human
uggacccugaggc

SEQ ID NO: 2427961 - RNA, 12 nt, Human
uggacccugagg

SEQ ID NO: 2427962 - RNA, 14 nt, Human
uggacccugaggcc

SEQ ID NO: 2427963 - RNA, 16 nt, Human
uggacccuguugcuaa

SEQ ID NO: 2427964 - RNA, 21 nt, Human
uggaccuaaauggccucaugu

SEQ ID NO: 2427965 - RNA, 18 nt, Human
uggaccuaaauggccuca

SEQ ID NO: 2427966 - RNA, 17 nt, Human
uggaccuaaauggccuc

SEQ ID NO: 2427967 - RNA, 13 nt, Human
uggacccuuccau

SEQ ID NO: 2427968 - RNA, 22 nt, Human
uggaccuauguccuaaggacac

SEQ ID NO: 2427969 - RNA, 14 nt, Human
uggaccuaauccaa

SEQ ID NO: 2427970 - RNA, 22 nt, Human
uggaccuaauccaagcaucccu

SEQ ID NO: 2427971 - RNA, 19 nt, Human
uggaccuauguccuaagga

SEQ ID NO: 2427972 - RNA, 18 nt, Human
uggacacagcucuucucc

SEQ ID NO: 2427973 - RNA, 17 nt, Human
uggaauuuauauacaac

SEQ ID NO: 2427974 - RNA, 16 nt, Human
uggacacagcucuucu

SEQ ID NO: 2427975 - RNA, 15 nt, Human
uggacacagcucuuc

SEQ ID NO: 2427976 - RNA, 13 nt, Human
uggaccagugguc

SEQ ID NO: 2427977 - RNA, 18 nt, Human
uggaccaguggucucaca

SEQ ID NO: 2427978 - RNA, 13 nt, Human
uggaccaggacag

SEQ ID NO: 2427979 - RNA, 14 nt, Human
uggaccaggacagg

SEQ ID NO: 2427980 - RNA, 18 nt, Human
uggaccaggacaggacca

SEQ ID NO: 2427981 - RNA, 19 nt, Human
uggaccaggacaggaccag

SEQ ID NO: 2427982 - RNA, 20 nt, Human
uggacccagggaugacaugu

SEQ ID NO: 2427983 - RNA, 16 nt, Human
ugcuugggcuucaucc

SEQ ID NO: 2427984 - RNA, 12 nt, Human
ugcuugggcuuc

SEQ ID NO: 2427985 - RNA, 19 nt, Human
ugcuugcugccuucuggau

SEQ ID NO: 2427986 - RNA, 15 nt, Human
ugcuugggaaggggc

SEQ ID NO: 2427987 - RNA, 19 nt, Human
ugcuuggcugcuuggccuu

SEQ ID NO: 2427988 - RNA, 19 nt, Human
ugcuuggccuugggcuuca

SEQ ID NO: 2427989 - RNA, 15 nt, Human
ugcuugccucucugu

SEQ ID NO: 2427990 - RNA, 15 nt, Human
ugcuugccugauaua

SEQ ID NO: 2427991 - RNA, 21 nt, Human
ugcuuggaggaaggaaaccca

SEQ ID NO: 2427992 - RNA, 19 nt, Human
ugcuugccuagggccuggu

SEQ ID NO: 2427993 - RNA, 11 nt, Human
ugcuugccucu

SEQ ID NO: 2427994 - RNA, 22 nt, Human
ugcuugccuagggccuggucca

SEQ ID NO: 2427995 - RNA, 19 nt, Human
ugcuugccugcguuuugga

SEQ ID NO: 2427996 - RNA, 22 nt, Human
aggagccugcuggucacagccu

SEQ ID NO: 2427997 - RNA, 11 nt, Human
aggagccuggc

SEQ ID NO: 2427998 - RNA, 19 nt, Human
aggagcccugggaggcucu

SEQ ID NO: 2427999 - RNA, 14 nt, Human
aggagccugcuggu

SEQ ID NO: 2428000 - RNA, 18 nt, Human
aggagcgggaccuguggc

SEQ ID NO: 2428001 - RNA, 16 nt, Human
aggagcgggaccugug

SEQ ID NO: 2428002 - RNA, 17 nt, Human
ugcuugccacagagcgg

SEQ ID NO: 2428003 - RNA, 18 nt, Human
ugcuugcccccaugcugg

SEQ ID NO: 2428004 - RNA, 14 nt, Human
ugcuugccuagggc

SEQ ID NO: 2428005 - RNA, 17 nt, Human
ugcuuuucacugcugca

SEQ ID NO: 2428006 - RNA, 16 nt, Human
ugcuuuucacugcugc

SEQ ID NO: 2428007 - RNA, 22 nt, Human
ugcuuuucacugcugcaaggcc

SEQ ID NO: 2428008 - RNA, 18 nt, Human
ugcuuuucacugcugcaa

SEQ ID NO: 2428009 - RNA, 17 nt, Human
ugcuuuuaccaugcccc

SEQ ID NO: 2428010 - RNA, 13 nt, Human
ugcuuuuaccaug

SEQ ID NO: 2428011 - RNA, 19 nt, Human
ugcuuuguaggugucucau

SEQ ID NO: 2428012 - RNA, 19 nt, Human
ugcuuggguggagaagcca

SEQ ID NO: 2428013 - RNA, 21 nt, Human
ugcuuugggcugcccuggugc

SEQ ID NO: 2428014 - RNA, 20 nt, Human
ugcuuugggcugcccuggug

SEQ ID NO: 2428015 - RNA, 19 nt, Human
ugcuuugggcugcccuggu

SEQ ID NO: 2428016 - RNA, 18 nt, Human
ugcuuugggcugcccugg

SEQ ID NO: 2428017 - RNA, 19 nt, Human
ugcuugggcuucauccucc

SEQ ID NO: 2428018 - RNA, 16 nt, Human
ugcuuggguggagaag

SEQ ID NO: 2428019 - RNA, 15 nt, Human
ugcuuggguggagaa

SEQ ID NO: 2428020 - RNA, 18 nt, Human
ugcuuggguggagaagcc

SEQ ID NO: 2428021 - RNA, 17 nt, Human
ugcuuggguggagaagc

SEQ ID NO: 2428022 - RNA, 17 nt, Human
ugcuuugggcugcccug

SEQ ID NO: 2428023 - RNA, 22 nt, Human
ugcuuuuccuuggggcaggcag

SEQ ID NO: 2428024 - RNA, 23 nt, Human
ugcuuuucuccaauaucagugcu

SEQ ID NO: 2428025 - RNA, 20 nt, Human
ugcuuuucuccaauaucagu

SEQ ID NO: 2428026 - RNA, 12 nt, Human
ugcuuuucucca

SEQ ID NO: 2428027 - RNA, 15 nt, Human
ugcuuuucugcccug

SEQ ID NO: 2428028 - RNA, 12 nt, Human
uggaaagccucu

SEQ ID NO: 2428029 - RNA, 14 nt, Human
uggaaagccucugc

SEQ ID NO: 2428030 - RNA, 20 nt, Human
uggaaagcuccuagcagaga

SEQ ID NO: 2428031 - RNA, 15 nt, Human
uggaaagccucugcu

SEQ ID NO: 2428032 - RNA, 16 nt, Human
uggaaagccucugcug

SEQ ID NO: 2428033 - RNA, 18 nt, Human
uggaaagccucugcugcc

SEQ ID NO: 2428034 - RNA, 21 nt, Human
uggaaauagaaauuuccagag

SEQ ID NO: 2428035 - RNA, 22 nt, Human
uggaaauacaguuguuggccuc

SEQ ID NO: 2428036 - RNA, 18 nt, Human
uggaaauacaguuguugg

SEQ ID NO: 2428037 - RNA, 15 nt, Human
uggaaauauuaagaa

SEQ ID NO: 2428038 - RNA, 13 nt, Human
uggaaaggcagcu

SEQ ID NO: 2428039 - RNA, 17 nt, Human
uggaaaggagaggaaag

SEQ ID NO: 2428040 - RNA, 16 nt, Human
uggaaaggagaggaaa

SEQ ID NO: 2428041 - RNA, 15 nt, Human
uggaaaggagaggaa

SEQ ID NO: 2428042 - RNA, 14 nt, Human
uggaaaggagagga

SEQ ID NO: 2428043 - RNA, 23 nt, Human
uggaaaggagaggaaagaacuca

SEQ ID NO: 2428044 - RNA, 19 nt, Human
uggaaaggagaggaaagaa

SEQ ID NO: 2428045 - RNA, 11 nt, Human
aggagaaacug

SEQ ID NO: 2428046 - RNA, 11 nt, Human
aggacuuugca

SEQ ID NO: 2428047 - RNA, 17 nt, Human
aggacuuucugaagccu

SEQ ID NO: 2428048 - RNA, 23 nt, Human
aggacuuggucugauuucaggau

SEQ ID NO: 2428049 - RNA, 13 nt, Human
aggagaaaaacaa

SEQ ID NO: 2428050 - RNA, 12 nt, Human
aggagaaacaca

SEQ ID NO: 2428051 - RNA, 23 nt, Human
aggacuuuucuuuguggcuuccu

SEQ ID NO: 2428052 - RNA, 21 nt, Human
aggacuuuccuaaauguuuaa

SEQ ID NO: 2428053 - RNA, 14 nt, Human
aggagauuuuccuu

SEQ ID NO: 2428054 - RNA, 22 nt, Human
aggagauugagaaggagagaaa

SEQ ID NO: 2428055 - RNA, 21 nt, Human
aggagauugagaaggagagaa

SEQ ID NO: 2428056 - RNA, 19 nt, Human
aggagauugagaaggagag

SEQ ID NO: 2428057 - RNA, 17 nt, Human
aggagauugagaaggag

SEQ ID NO: 2428058 - RNA, 16 nt, Human
aggagauugagaagga

SEQ ID NO: 2428059 - RNA, 15 nt, Human
aggagauugagaagg

SEQ ID NO: 2428060 - RNA, 17 nt, Human
aggagauuggaaggaac

SEQ ID NO: 2428061 - RNA, 14 nt, Human
aggagaugggccuu

SEQ ID NO: 2428062 - RNA, 14 nt, Human
aggagaaacacauc

SEQ ID NO: 2428063 - RNA, 13 nt, Human
aggagaaacacau

SEQ ID NO: 2428064 - RNA, 14 nt, Human
aggagaaacagaga

SEQ ID NO: 2428065 - RNA, 13 nt, Human
aggagauugagaa

SEQ ID NO: 2428066 - RNA, 16 nt, Human
aggagaaacagagaca

SEQ ID NO: 2428067 - RNA, 18 nt, Human
aggagaaacagagacagg

SEQ ID NO: 2428068 - RNA, 16 nt, Human
aggagcaaaggcugag

SEQ ID NO: 2428069 - RNA, 15 nt, Human
aggagcaaaggcuga

SEQ ID NO: 2428070 - RNA, 18 nt, Human
aggagauuuuccuuccua

SEQ ID NO: 2428071 - RNA, 15 nt, Human
aggagauuuuccuuc

SEQ ID NO: 2428072 - RNA, 14 nt, Human
aggagcagccacau

SEQ ID NO: 2428073 - RNA, 16 nt, Human
aggagcagugcaggca

SEQ ID NO: 2428074 - RNA, 14 nt, Human
aggagcagugcagg

SEQ ID NO: 2428075 - RNA, 19 nt, Human
aggagcaguaucaugaagc

SEQ ID NO: 2428076 - RNA, 20 nt, Human
aggagcauccaccuccuucu

SEQ ID NO: 2428077 - RNA, 16 nt, Human
aggagcauccaccucc

SEQ ID NO: 2428078 - RNA, 19 nt, Human
aggagcagugcaggcacag

SEQ ID NO: 2428079 - RNA, 16 nt, Human
aggagcagcuucaguu

SEQ ID NO: 2428080 - RNA, 19 nt, Human
aggagcagccucagaacaa

SEQ ID NO: 2428081 - RNA, 16 nt, Human
aggagcagccucagaa

SEQ ID NO: 2428082 - RNA, 20 nt, Human
aggagcaggggcguggaggg

SEQ ID NO: 2428083 - RNA, 20 nt, Human
aggagcagcuucaguuguuu

SEQ ID NO: 2428084 - RNA, 19 nt, Human
aggagcaggagccugagcc

SEQ ID NO: 2428085 - RNA, 18 nt, Human
aggagcccugggaggcuc

SEQ ID NO: 2428086 - RNA, 22 nt, Human
aggagccccgaggccuucucug

SEQ ID NO: 2428087 - RNA, 21 nt, Human
aggagcauuuggagagaaggc

SEQ ID NO: 2428088 - RNA, 18 nt, Human
aggacauugcggacagcc

SEQ ID NO: 2428089 - RNA, 17 nt, Human
aggacauugcggacagc

SEQ ID NO: 2428090 - RNA, 15 nt, Human
aggacauugcggaca

SEQ ID NO: 2428091 - RNA, 16 nt, Human
aggacauuccaagaca

SEQ ID NO: 2428092 - RNA, 14 nt, Human
aggacauuccaaga

SEQ ID NO: 2428093 - RNA, 23 nt, Human
aggacauguuuuuguuuucuuug

SEQ ID NO: 2428094 - RNA, 21 nt, Human
aggacauguuuuuguuuucuu

SEQ ID NO: 2428095 - RNA, 16 nt, Human
aggacauguuuuuguu

SEQ ID NO: 2428096 - RNA, 15 nt, Human
aggacauguuuuugu

SEQ ID NO: 2428097 - RNA, 23 nt, Human
aggacauugcggacagccacggc

SEQ ID NO: 2428098 - RNA, 19 nt, Human
aggacauugcggacagcca

SEQ ID NO: 2428099 - RNA, 18 nt, Human
aggacauuccaagacagu

SEQ ID NO: 2428100 - RNA, 17 nt, Human
aggacauuccaagacag

SEQ ID NO: 2428101 - RNA, 15 nt, Human
aggacauuucccagg

SEQ ID NO: 2428102 - RNA, 19 nt, Human
aggacucugccuccucuuc

SEQ ID NO: 2428103 - RNA, 20 nt, Human
aggacuuccuguccagcucc

SEQ ID NO: 2428104 - RNA, 21 nt, Human
aggacuuaacggcuccaggau

SEQ ID NO: 2428105 - RNA, 19 nt, Human
aggacuuauuuaaacucug

SEQ ID NO: 2428106 - RNA, 21 nt, Human
aggacuguuuuuuccugagcu

SEQ ID NO: 2428107 - RNA, 18 nt, Human
aggacuguuuuuuccuga

SEQ ID NO: 2428108 - RNA, 20 nt, Human
aggacuuaacggcuccagga

SEQ ID NO: 2428109 - RNA, 18 nt, Human
aggacuuaacggcuccag

SEQ ID NO: 2428110 - RNA, 17 nt, Human
aggacuuaacggcucca

SEQ ID NO: 2428111 - RNA, 22 nt, Human
aggacuguuuuuuccugagcuu

SEQ ID NO: 2428112 - RNA, 13 nt, Human
aggacuugugucu

SEQ ID NO: 2428113 - RNA, 16 nt, Human
aggacuugugucucug

SEQ ID NO: 2428114 - RNA, 20 nt, Human
aggacuuggucugauuucag

SEQ ID NO: 2428115 - RNA, 16 nt, Human
aggacuuggucugauu

SEQ ID NO: 2428116 - RNA, 18 nt, Human
aggacugagggacucuga

SEQ ID NO: 2428117 - RNA, 12 nt, Human
aggacugaggga

SEQ ID NO: 2428118 - RNA, 24 nt, Human
aggacugagccccgcagaccuccc

SEQ ID NO: 2428119 - RNA, 16 nt, Human
aggacugagccccgca

SEQ ID NO: 2428120 - RNA, 13 nt, Human
aggacugagcccc

SEQ ID NO: 2428121 - RNA, 20 nt, Human
aggacugaauuguccccagu

SEQ ID NO: 2428122 - RNA, 17 nt, Human
aggacugaauugucccc

SEQ ID NO: 2428123 - RNA, 19 nt, Human
aggacugaauuguccccag

SEQ ID NO: 2428124 - RNA, 20 nt, Human
aggacugugacaggcagcag

SEQ ID NO: 2428125 - RNA, 19 nt, Human
aggacugugacaggcagca

SEQ ID NO: 2428126 - RNA, 18 nt, Human
aggacugugacaggcagc

SEQ ID NO: 2428127 - RNA, 17 nt, Human
aggacugugacaggcag

SEQ ID NO: 2428128 - RNA, 22 nt, Human
aggacuguauuugugacuaauu

SEQ ID NO: 2428129 - RNA, 18 nt, Human
aggacuguauuugugacu

SEQ ID NO: 2428130 - RNA, 16 nt, Human
aggacugugacaggca

SEQ ID NO: 2428131 - RNA, 22 nt, Human
aggacugugacaggcagcagag

SEQ ID NO: 2428132 - RNA, 21 nt, Human
aggacugugacaggcagcaga

SEQ ID NO: 2428133 - RNA, 18 nt, Human
aucccaugagccucagca

SEQ ID NO: 2428134 - RNA, 17 nt, Human
aucccaugagccucagc

SEQ ID NO: 2428135 - RNA, 17 nt, Human
aucccugaaggccccgc

SEQ ID NO: 2428136 - RNA, 22 nt, Human
aucccugaaggccccgcccagg

SEQ ID NO: 2428137 - RNA, 22 nt, Human
aucccugaaucccccuugccac

SEQ ID NO: 2428138 - RNA, 20 nt, Human
aucccugaaucccccuugcc

SEQ ID NO: 2428139 - RNA, 15 nt, Human
aucccucugggcacu

SEQ ID NO: 2428140 - RNA, 21 nt, Human
aucccagcacuuugggaggcc

SEQ ID NO: 2428141 - RNA, 16 nt, Human
aucccaugagccucag

SEQ ID NO: 2428142 - RNA, 13 nt, Human
aucccaugagccu

SEQ ID NO: 2428143 - RNA, 11 nt, Human
aucccagcccc

SEQ ID NO: 2428144 - RNA, 20 nt, Human
aucccagcacuuugggaggc

SEQ ID NO: 2428145 - RNA, 17 nt, Human
aucccagcacuuuggga

SEQ ID NO: 2428146 - RNA, 22 nt, Human
aucccagcacuuugggaggcug

SEQ ID NO: 2428147 - RNA, 14 nt, Human
aucccagcacuuug

SEQ ID NO: 2428148 - RNA, 17 nt, Human
aucccagaaauuagaaa

SEQ ID NO: 2428149 - RNA, 19 nt, Human
aucccagcacuuugggagg

SEQ ID NO: 2428150 - RNA, 20 nt, Human
auccauggggcugauuguau

SEQ ID NO: 2428151 - RNA, 21 nt, Human
auccaugaccuaguuuuccau

SEQ ID NO: 2428152 - RNA, 22 nt, Human
auccaugaccuaguuuuccaug

SEQ ID NO: 2428153 - RNA, 19 nt, Human
auccaugaguuugcccugg

SEQ ID NO: 2428154 - RNA, 13 nt, Human
aucccagaaauua

SEQ ID NO: 2428155 - RNA, 20 nt, Human
aucccagagggugggcuuca

SEQ ID NO: 2428156 - RNA, 22 nt, Human
aucccacuuucuauagcagauu

SEQ ID NO: 2428157 - RNA, 16 nt, Human
auccaugggggcaggg

SEQ ID NO: 2428158 - RNA, 19 nt, Human
auccaugggggcagggcau

SEQ ID NO: 2428159 - RNA, 16 nt, Human
aucccacuugccccug

SEQ ID NO: 2428160 - RNA, 20 nt, Human
auccaauggguuuuucccug

SEQ ID NO: 2428161 - RNA, 14 nt, Human
auccaacuccagga

SEQ ID NO: 2428162 - RNA, 19 nt, Human
auccaagauauuuuaaaau

SEQ ID NO: 2428163 - RNA, 16 nt, Human
auccaacuaaugccuu

SEQ ID NO: 2428164 - RNA, 18 nt, Human
auccaacuaaugccuuac

SEQ ID NO: 2428165 - RNA, 20 nt, Human
auccaacuaaugccuuacuc

SEQ ID NO: 2428166 - RNA, 16 nt, Human
auccaagcaaauguga

SEQ ID NO: 2428167 - RNA, 16 nt, Human
uucugccugcccaggc

SEQ ID NO: 2428168 - RNA, 15 nt, Human
uucugccugcccagg

SEQ ID NO: 2428169 - RNA, 18 nt, Human
uucugccugccagcugca

SEQ ID NO: 2428170 - RNA, 19 nt, Human
uucugccugccagcugcac

SEQ ID NO: 2428171 - RNA, 15 nt, Human
auccaaagcagacag

SEQ ID NO: 2428172 - RNA, 22 nt, Human
uucugccugccagcugcacuga

SEQ ID NO: 2428173 - RNA, 18 nt, Human
auccaaccccccaccugc

SEQ ID NO: 2428174 - RNA, 20 nt, Human
auccaaccccccaccugcca

SEQ ID NO: 2428175 - RNA, 16 nt, Human
auccaguaggauccag

SEQ ID NO: 2428176 - RNA, 14 nt, Human
auccaguaucuuga

SEQ ID NO: 2428177 - RNA, 14 nt, Human
auccauccagaggc

SEQ ID NO: 2428178 - RNA, 14 nt, Human
auccaucaucaugu

SEQ ID NO: 2428179 - RNA, 21 nt, Human
auccaucuaaauaccugcccu

SEQ ID NO: 2428180 - RNA, 18 nt, Human
auccaugaccuaguuuuc

SEQ ID NO: 2428181 - RNA, 20 nt, Human
auccaugaccuaguuuucca

SEQ ID NO: 2428182 - RNA, 15 nt, Human
auccaguaucuugaa

SEQ ID NO: 2428183 - RNA, 18 nt, Human
auccaucaucaugugugu

SEQ ID NO: 2428184 - RNA, 21 nt, Human
auccacagagagucccacugc

SEQ ID NO: 2428185 - RNA, 20 nt, Human
auccacagagagucccacug

SEQ ID NO: 2428186 - RNA, 17 nt, Human
auccacauuguuuuaaa

SEQ ID NO: 2428187 - RNA, 15 nt, Human
auccacauuguuuua

SEQ ID NO: 2428188 - RNA, 13 nt, Human
auccacauuguuu

SEQ ID NO: 2428189 - RNA, 17 nt, Human
auccagguucagcuugu

SEQ ID NO: 2428190 - RNA, 19 nt, Human
auccacagagagucccacu

SEQ ID NO: 2428191 - RNA, 17 nt, Human
auccacagagaguccca

SEQ ID NO: 2428192 - RNA, 13 nt, Human
auccacagagagu

SEQ ID NO: 2428193 - RNA, 16 nt, Human
auccacacacagagga

SEQ ID NO: 2428194 - RNA, 20 nt, Human
auccacacacagaggaagag

SEQ ID NO: 2428195 - RNA, 19 nt, Human
auccacacacgcaggaacu

SEQ ID NO: 2428196 - RNA, 23 nt, Human
auccacacacagaggaagagcag

SEQ ID NO: 2428197 - RNA, 15 nt, Human
auccacacacagagg

SEQ ID NO: 2428198 - RNA, 22 nt, Human
auccaauggacugcauaaauaa

SEQ ID NO: 2428199 - RNA, 22 nt, Human
auccaagacagaauaaugaaug

SEQ ID NO: 2428200 - RNA, 14 nt, Human
uucuuacauguuuu

SEQ ID NO: 2428201 - RNA, 14 nt, Human
uucuuacaugcauu

SEQ ID NO: 2428202 - RNA, 16 nt, Human
uucuuacaugcauuug

SEQ ID NO: 2428203 - RNA, 13 nt, Human
uucuuacauguuu

SEQ ID NO: 2428204 - RNA, 15 nt, Human
uucuuaccuguaugu

SEQ ID NO: 2428205 - RNA, 22 nt, Human
uucuuagaaauuuauuuccuag

SEQ ID NO: 2428206 - RNA, 13 nt, Human
uucuuagaaauuu

SEQ ID NO: 2428207 - RNA, 21 nt, Human
uucuuagacuacauuuagaga

SEQ ID NO: 2428208 - RNA, 18 nt, Human
uucuuacuaaacauuuug

SEQ ID NO: 2428209 - RNA, 15 nt, Human
uucuuacuaaacauu

SEQ ID NO: 2428210 - RNA, 12 nt, Human
uucuuagaaauu

SEQ ID NO: 2428211 - RNA, 15 nt, Human
uucuuaaauaauaaa

SEQ ID NO: 2428212 - RNA, 19 nt, Human
uucuuaaauaauaaagauc

SEQ ID NO: 2428213 - RNA, 15 nt, Human
uucuguuuucuguuu

SEQ ID NO: 2428214 - RNA, 22 nt, Human
uucuuaaccagaucauugugaa

SEQ ID NO: 2428215 - RNA, 21 nt, Human
uucuuaaaugggcuacuuugu

SEQ ID NO: 2428216 - RNA, 17 nt, Human
uucuguuuuauaauuuu

SEQ ID NO: 2428217 - RNA, 16 nt, Human
uucuguuuggaggagc

SEQ ID NO: 2428218 - RNA, 11 nt, Human
uucuguuucuu

SEQ ID NO: 2428219 - RNA, 16 nt, Human
uucuguuuuauaauuu

SEQ ID NO: 2428220 - RNA, 19 nt, Human
uucuguuuacaucaguuuu

SEQ ID NO: 2428221 - RNA, 15 nt, Human
uucuguuuccuuuuu

SEQ ID NO: 2428222 - RNA, 13 nt, Human
uucuguuuagaua

SEQ ID NO: 2428223 - RNA, 18 nt, Human
uucuguuuagauaauaca

SEQ ID NO: 2428224 - RNA, 21 nt, Human
uucuguuggccagugugacaa

SEQ ID NO: 2428225 - RNA, 14 nt, Human
aucccugccagcuc

SEQ ID NO: 2428226 - RNA, 15 nt, Human
aucccugccagcucu

SEQ ID NO: 2428227 - RNA, 20 nt, Human
uucuguugucauugcuguug

SEQ ID NO: 2428228 - RNA, 14 nt, Human
aucccugccugguc

SEQ ID NO: 2428229 - RNA, 22 nt, Human
uucuuugauaauguuaaauuug

SEQ ID NO: 2428230 - RNA, 20 nt, Human
uucuuugauguuaacacauu

SEQ ID NO: 2428231 - RNA, 18 nt, Human
uucuuugauguuaacaca

SEQ ID NO: 2428232 - RNA, 13 nt, Human
uucuuugauguua

SEQ ID NO: 2428233 - RNA, 22 nt, Human
uucuuugauguuaacacauuuu

SEQ ID NO: 2428234 - RNA, 21 nt, Human
uucuuugauguuaacacauuu

SEQ ID NO: 2428235 - RNA, 11 nt, Human
uucuuugaaug

SEQ ID NO: 2428236 - RNA, 18 nt, Human
uucuuugauaauguuaaa

SEQ ID NO: 2428237 - RNA, 17 nt, Human
uucuuugauaauguuaa

SEQ ID NO: 2428238 - RNA, 16 nt, Human
uucuuugauaauguua

SEQ ID NO: 2428239 - RNA, 17 nt, Human
uucuuugagacuggguc

SEQ ID NO: 2428240 - RNA, 17 nt, Human
uucuuucuggcuaugca

SEQ ID NO: 2428241 - RNA, 20 nt, Human
uucuuucuggcuaugcauuu

SEQ ID NO: 2428242 - RNA, 12 nt, Human
uucuuucuggcu

SEQ ID NO: 2428243 - RNA, 19 nt, Human
uucuuucuaguucagcugc

SEQ ID NO: 2428244 - RNA, 22 nt, Human
uucuuucuaguggucuuuguaa

SEQ ID NO: 2428245 - RNA, 21 nt, Human
uucuuucuaguggucuuugua

SEQ ID NO: 2428246 - RNA, 18 nt, Human
uucuuucuaguggucuuu

SEQ ID NO: 2428247 - RNA, 21 nt, Human
uucuugccuacuaugccagau

SEQ ID NO: 2428248 - RNA, 18 nt, Human
uucuucuagguucuaaaa

SEQ ID NO: 2428249 - RNA, 21 nt, Human
uucuucuagguucuaaaaauu

SEQ ID NO: 2428250 - RNA, 15 nt, Human
uucuucgggaagaga

SEQ ID NO: 2428251 - RNA, 23 nt, Human
uucuucgagguggaucacagagg

SEQ ID NO: 2428252 - RNA, 17 nt, Human
uucuucgggaagagagg

SEQ ID NO: 2428253 - RNA, 20 nt, Human
uucuucggggaacuccugga

SEQ ID NO: 2428254 - RNA, 22 nt, Human
uucuucuccacuuucuagccag

SEQ ID NO: 2428255 - RNA, 11 nt, Human
uucuucucccu

SEQ ID NO: 2428256 - RNA, 12 nt, Human
uucuugccuuca

SEQ ID NO: 2428257 - RNA, 22 nt, Human
uucuugccucugugcugugugu

SEQ ID NO: 2428258 - RNA, 17 nt, Human
uucuugccucugugcug

SEQ ID NO: 2428259 - RNA, 16 nt, Human
uucuugccucugugcu

SEQ ID NO: 2428260 - RNA, 15 nt, Human
uucuugccucugugc

SEQ ID NO: 2428261 - RNA, 20 nt, Human
uucuugccucuguccccuuc

SEQ ID NO: 2428262 - RNA, 18 nt, Human
uucuugccucuguccccu

SEQ ID NO: 2428263 - RNA, 16 nt, Human
uucuugccaaugaggu

SEQ ID NO: 2428264 - RNA, 23 nt, Human
uucuucucaggcaugaacaugua

SEQ ID NO: 2428265 - RNA, 16 nt, Human
uucugcaucagcugcu

SEQ ID NO: 2428266 - RNA, 21 nt, Human
uucugcaguagucucugugcu

SEQ ID NO: 2428267 - RNA, 12 nt, Human
uucugccugcca

SEQ ID NO: 2428268 - RNA, 16 nt, Human
uucugccugccagcug

SEQ ID NO: 2428269 - RNA, 17 nt, Human
uucugccugccagcugc

SEQ ID NO: 2428270 - RNA, 17 nt, Human
uucugcauauguugaau

SEQ ID NO: 2428271 - RNA, 21 nt, Human
uucugcauauguugaauacuu

SEQ ID NO: 2428272 - RNA, 22 nt, Human
uucugcauauguugaauacuuu

SEQ ID NO: 2428273 - RNA, 23 nt, Human
uucugcauauguugaauacuuuu

SEQ ID NO: 2428274 - RNA, 16 nt, Human
uucugcagcuguuuua

SEQ ID NO: 2428275 - RNA, 15 nt, Human
uucugcagcuguuuu

SEQ ID NO: 2428276 - RNA, 12 nt, Human
uucugcagcugu

SEQ ID NO: 2428277 - RNA, 11 nt, Human
uucugaaugua

SEQ ID NO: 2428278 - RNA, 18 nt, Human
uucugaaugcugcuacuu

SEQ ID NO: 2428279 - RNA, 15 nt, Human
uucugcaguaaaucu

SEQ ID NO: 2428280 - RNA, 18 nt, Human
uucugcaguaaaucuuuu

SEQ ID NO: 2428281 - RNA, 20 nt, Human
uucugcaguagucucugugc

SEQ ID NO: 2428282 - RNA, 19 nt, Human
uucugcaguagucucugug

SEQ ID NO: 2428283 - RNA, 22 nt, Human
uucugcaguaaaucuuuuacaa

SEQ ID NO: 2428284 - RNA, 19 nt, Human
uucugcagccacuauuguu

SEQ ID NO: 2428285 - RNA, 11 nt, Human
uucugaauaug

SEQ ID NO: 2428286 - RNA, 19 nt, Human
uucugaauacaaagugaug

SEQ ID NO: 2428287 - RNA, 17 nt, Human
uucugaauaauuucuua

SEQ ID NO: 2428288 - RNA, 16 nt, Human
uucugaauaauuucuu

SEQ ID NO: 2428289 - RNA, 16 nt, Human
uucugaaugcugcuac

SEQ ID NO: 2428290 - RNA, 14 nt, Human
uucugaaugcugcu

SEQ ID NO: 2428291 - RNA, 15 nt, Human
uucugaauaugcugc

SEQ ID NO: 2428292 - RNA, 17 nt, Human
uucugaauaacauuugu

SEQ ID NO: 2428293 - RNA, 18 nt, Human
uucugaagucuacuuugu

SEQ ID NO: 2428294 - RNA, 21 nt, Human
uucucuaguuugauuaaauuc

SEQ ID NO: 2428295 - RNA, 13 nt, Human
uucucuaucauuu

SEQ ID NO: 2428296 - RNA, 20 nt, Human
uucucuaaaauagccacuua

SEQ ID NO: 2428297 - RNA, 13 nt, Human
uucucucaccucc

SEQ ID NO: 2428298 - RNA, 16 nt, Human
uucucuaucauuuaau

SEQ ID NO: 2428299 - RNA, 12 nt, Human
uucucucaucuc

SEQ ID NO: 2428300 - RNA, 17 nt, Human
uucucucaucucuuagc

SEQ ID NO: 2428301 - RNA, 13 nt, Human
uucucucaucucu

SEQ ID NO: 2428302 - RNA, 23 nt, Human
uucucucaucucuuagcuccccu

SEQ ID NO: 2428303 - RNA, 20 nt, Human
uucucucaucucuuagcucc

SEQ ID NO: 2428304 - RNA, 12 nt, Human
uucucgggcuga

SEQ ID NO: 2428305 - RNA, 18 nt, Human
uucuccuuuuccucucuc

SEQ ID NO: 2428306 - RNA, 13 nt, Human
uucuccuuuuccu

SEQ ID NO: 2428307 - RNA, 16 nt, Human
uucuccuuuugaaaag

SEQ ID NO: 2428308 - RNA, 20 nt, Human
uucuccuuugauaaaauaaa

SEQ ID NO: 2428309 - RNA, 17 nt, Human
uucucgauuuuaucuuu

SEQ ID NO: 2428310 - RNA, 22 nt, Human
uucuccuuucacaaccuucugu

SEQ ID NO: 2428311 - RNA, 18 nt, Human
uucuccuuucacaaccuu

SEQ ID NO: 2428312 - RNA, 17 nt, Human
uucuccuuuguacuuug

SEQ ID NO: 2428313 - RNA, 14 nt, Human
uucuccuuuguacu

SEQ ID NO: 2428314 - RNA, 23 nt, Human
uucuccuccaugggagaaaauag

SEQ ID NO: 2428315 - RNA, 12 nt, Human
uucuccuuugua

SEQ ID NO: 2428316 - RNA, 13 nt, Human
aucauugaaaucu

SEQ ID NO: 2428317 - RNA, 23 nt, Human
aucauucuuauuucaugaaaauu

SEQ ID NO: 2428318 - RNA, 15 nt, Human
aucauuguacaguuu

SEQ ID NO: 2428319 - RNA, 18 nt, Human
aucauuguauauaugugu

SEQ ID NO: 2428320 - RNA, 22 nt, Human
aucauuguacaguuuguuuaca

SEQ ID NO: 2428321 - RNA, 18 nt, Human
aucauuguacaguuuguu

SEQ ID NO: 2428322 - RNA, 16 nt, Human
aucauuguacaguuug

SEQ ID NO: 2428323 - RNA, 14 nt, Human
aucauuguauggau

SEQ ID NO: 2428324 - RNA, 20 nt, Human
aucauucuuauuucaugaaa

SEQ ID NO: 2428325 - RNA, 19 nt, Human
aucauucuuauuucaugaa

SEQ ID NO: 2428326 - RNA, 24 nt, Human
aucauucucugucucauccaucau

SEQ ID NO: 2428327 - RNA, 12 nt, Human
aucauugaaauc

SEQ ID NO: 2428328 - RNA, 15 nt, Human
aucauugugaaauua

SEQ ID NO: 2428329 - RNA, 13 nt, Human
aucauugugaaau

SEQ ID NO: 2428330 - RNA, 19 nt, Human
aucauugugaaauuauuca

SEQ ID NO: 2428331 - RNA, 21 nt, Human
uucuccgccagccuccucugg

SEQ ID NO: 2428332 - RNA, 20 nt, Human
uucuccgccagccuccucug

SEQ ID NO: 2428333 - RNA, 19 nt, Human
uucuccgccagccuccucu

SEQ ID NO: 2428334 - RNA, 17 nt, Human
uucuccguuagcuccug

SEQ ID NO: 2428335 - RNA, 16 nt, Human
uucuccguuagcuccu

SEQ ID NO: 2428336 - RNA, 18 nt, Human
uucuccgccagccuccuc

SEQ ID NO: 2428337 - RNA, 17 nt, Human
uucuccgccagccuccu

SEQ ID NO: 2428338 - RNA, 16 nt, Human
uucuccgccagccucc

SEQ ID NO: 2428339 - RNA, 15 nt, Human
uucuccgccagccuc

SEQ ID NO: 2428340 - RNA, 14 nt, Human
uucuccgccagccu

SEQ ID NO: 2428341 - RNA, 13 nt, Human
uucuccgccagcc

SEQ ID NO: 2428342 - RNA, 23 nt, Human
uucuccgacugcuagggaguggu

SEQ ID NO: 2428343 - RNA, 22 nt, Human
uucuccguuagcuccuguggcc

SEQ ID NO: 2428344 - RNA, 20 nt, Human
uucuccguuagcuccugugg

SEQ ID NO: 2428345 - RNA, 19 nt, Human
uucuccguuagcuccugug

SEQ ID NO: 2428346 - RNA, 18 nt, Human
uucuccguuagcuccugu

SEQ ID NO: 2428347 - RNA, 15 nt, Human
uucuccuauguguaa

SEQ ID NO: 2428348 - RNA, 17 nt, Human
uucuccuuucacaaccu

SEQ ID NO: 2428349 - RNA, 23 nt, Human
uucuccccugcccccaggacugg

SEQ ID NO: 2428350 - RNA, 22 nt, Human
uucuccccugcccccaggacug

SEQ ID NO: 2428351 - RNA, 21 nt, Human
uucuccccugcccccaggacu

SEQ ID NO: 2428352 - RNA, 19 nt, Human
uucuccccugcccccagga

SEQ ID NO: 2428353 - RNA, 18 nt, Human
uucuccccugcccccagg

SEQ ID NO: 2428354 - RNA, 17 nt, Human
uucuccccugcccccag

SEQ ID NO: 2428355 - RNA, 16 nt, Human
uucuccccugccccca

SEQ ID NO: 2428356 - RNA, 15 nt, Human
uucuccccugccccc

SEQ ID NO: 2428357 - RNA, 20 nt, Human
uucucccucauuucaggagc

SEQ ID NO: 2428358 - RNA, 21 nt, Human
uucucccguucacguugccua

SEQ ID NO: 2428359 - RNA, 13 nt, Human
uucucccucugga

SEQ ID NO: 2428360 - RNA, 17 nt, Human
uucucccucucacuguc

SEQ ID NO: 2428361 - RNA, 16 nt, Human
aucauaaacugugugc

SEQ ID NO: 2428362 - RNA, 19 nt, Human
aucaucaguauugaagcau

SEQ ID NO: 2428363 - RNA, 19 nt, Human
aucauaugauucugcuuuu

SEQ ID NO: 2428364 - RNA, 18 nt, Human
aucauaugauucugcuuu

SEQ ID NO: 2428365 - RNA, 16 nt, Human
aucauaugauucugcu

SEQ ID NO: 2428366 - RNA, 18 nt, Human
aucaucaguggagccaug

SEQ ID NO: 2428367 - RNA, 16 nt, Human
aucauauaauaaaugu

SEQ ID NO: 2428368 - RNA, 20 nt, Human
aucauauaauaaauguacau

SEQ ID NO: 2428369 - RNA, 13 nt, Human
aucauaugauucu

SEQ ID NO: 2428370 - RNA, 15 nt, Human
aucauaaaacuugau

SEQ ID NO: 2428371 - RNA, 21 nt, Human
aucaguugcaauaauacuucu

SEQ ID NO: 2428372 - RNA, 18 nt, Human
aucaguugcaauaauacu

SEQ ID NO: 2428373 - RNA, 23 nt, Human
aucauaguggcuuaaaacaacac

SEQ ID NO: 2428374 - RNA, 14 nt, Human
aucauaaacugugu

SEQ ID NO: 2428375 - RNA, 13 nt, Human
aucauaaaauaaa

SEQ ID NO: 2428376 - RNA, 22 nt, Human
aucaguuugcuagcagaaaucu

SEQ ID NO: 2428377 - RNA, 17 nt, Human
aucaguuuuauccacag

SEQ ID NO: 2428378 - RNA, 12 nt, Human
aucauaaaauaa

SEQ ID NO: 2428379 - RNA, 23 nt, Human
aucauccacugugccaugugcca

SEQ ID NO: 2428380 - RNA, 12 nt, Human
aucauuaaaguu

SEQ ID NO: 2428381 - RNA, 11 nt, Human
aucauuaaagu

SEQ ID NO: 2428382 - RNA, 16 nt, Human
aucauccacauuguuu

SEQ ID NO: 2428383 - RNA, 11 nt, Human
aucauuaauac

SEQ ID NO: 2428384 - RNA, 18 nt, Human
aucaucauguguguccac

SEQ ID NO: 2428385 - RNA, 21 nt, Human
aucauccacugugccaugugc

SEQ ID NO: 2428386 - RNA, 16 nt, Human
aucauuaggugugacu

SEQ ID NO: 2428387 - RNA, 14 nt, Human
aucauuaaaguucu

SEQ ID NO: 2428388 - RNA, 13 nt, Human
aucauuaaaguuc

SEQ ID NO: 2428389 - RNA, 11 nt, Human
aucauuagaac

SEQ ID NO: 2428390 - RNA, 15 nt, Human
aucauuaaaguucua

SEQ ID NO: 2428391 - RNA, 19 nt, Human
aucauuagggggaacucua

SEQ ID NO: 2428392 - RNA, 16 nt, Human
aucauuauaaacguga

SEQ ID NO: 2428393 - RNA, 23 nt, Human
aucauuauaaacgugaugaucag

SEQ ID NO: 2428394 - RNA, 12 nt, Human
aucauucucugu

SEQ ID NO: 2428395 - RNA, 14 nt, Human
aucauucucugucu

SEQ ID NO: 2428396 - RNA, 16 nt, Human
aucauucucugucuca

SEQ ID NO: 2428397 - RNA, 21 nt, Human
aucauucucugucucauccau

SEQ ID NO: 2428398 - RNA, 20 nt, Human
aucauuaucagccugugcca

SEQ ID NO: 2428399 - RNA, 20 nt, Human
aucauuauaacugaaggaga

SEQ ID NO: 2428400 - RNA, 22 nt, Human
aucauuauaacugaaggagaag

SEQ ID NO: 2428401 - RNA, 23 nt, Human
aucacuugaacccgggaggcaga

SEQ ID NO: 2428402 - RNA, 15 nt, Human
aucaggugcugccau

SEQ ID NO: 2428403 - RNA, 19 nt, Human
aucaggugcugccauccag

SEQ ID NO: 2428404 - RNA, 17 nt, Human
aucaggugcugccaucc

SEQ ID NO: 2428405 - RNA, 18 nt, Human
aucacuucugagaacuca

SEQ ID NO: 2428406 - RNA, 20 nt, Human
aucacuuaggaaauggcuuu

SEQ ID NO: 2428407 - RNA, 14 nt, Human
aucacugaacuuug

SEQ ID NO: 2428408 - RNA, 17 nt, Human
aucacucuuguggaugu

SEQ ID NO: 2428409 - RNA, 14 nt, Human
aucacucuugugga

SEQ ID NO: 2428410 - RNA, 16 nt, Human
aucacucuuguggaug

SEQ ID NO: 2428411 - RNA, 20 nt, Human
aucagugcucgagacacagu

SEQ ID NO: 2428412 - RNA, 15 nt, Human
aucagugcucccuca

SEQ ID NO: 2428413 - RNA, 17 nt, Human
aucagugcccuccagga

SEQ ID NO: 2428414 - RNA, 13 nt, Human
aucagugcccucc

SEQ ID NO: 2428415 - RNA, 15 nt, Human
aucagugcccuccag

SEQ ID NO: 2428416 - RNA, 19 nt, Human
aucagucugauucccaagc

SEQ ID NO: 2428417 - RNA, 18 nt, Human
aucagucucugagggcuu

SEQ ID NO: 2428418 - RNA, 20 nt, Human
aucagucuauccacagagag

SEQ ID NO: 2428419 - RNA, 13 nt, Human
aucagucucugag

SEQ ID NO: 2428420 - RNA, 14 nt, Human
aucaggugcugcca

SEQ ID NO: 2428421 - RNA, 18 nt, Human
aucaguuacuaagaagaa

SEQ ID NO: 2428422 - RNA, 15 nt, Human
aucaguuacucagcc

SEQ ID NO: 2428423 - RNA, 16 nt, Human
aucaguuacucagccc

SEQ ID NO: 2428424 - RNA, 17 nt, Human
aucaguuacucagcccu

SEQ ID NO: 2428425 - RNA, 18 nt, Human
aucaguuacucagcccug

SEQ ID NO: 2428426 - RNA, 15 nt, Human
aucaguuagagcuga

SEQ ID NO: 2428427 - RNA, 19 nt, Human
aucaguuacucagcccugg

SEQ ID NO: 2428428 - RNA, 21 nt, Human
aucaguuacucagcccugggc

SEQ ID NO: 2428429 - RNA, 18 nt, Human
aucaguuacucugaaggg

SEQ ID NO: 2428430 - RNA, 23 nt, Human
aucagugugucuaaauuugaaug

SEQ ID NO: 2428431 - RNA, 15 nt, Human
aucgggaacaguguu

SEQ ID NO: 2428432 - RNA, 16 nt, Human
aucgggaacaguguuu

SEQ ID NO: 2428433 - RNA, 17 nt, Human
aucgggaacaguguuuc

SEQ ID NO: 2428434 - RNA, 21 nt, Human
aucgggaacaguguuucccau

SEQ ID NO: 2428435 - RNA, 23 nt, Human
aucggcccacagcucccacccca

SEQ ID NO: 2428436 - RNA, 16 nt, Human
aucgggagcagugucu

SEQ ID NO: 2428437 - RNA, 17 nt, Human
aucgggagcagugucuu

SEQ ID NO: 2428438 - RNA, 18 nt, Human
aucgggagcagugucuuc

SEQ ID NO: 2428439 - RNA, 21 nt, Human
aucgggagcagugucuuccau

SEQ ID NO: 2428440 - RNA, 12 nt, Human
aucguaaaauua

SEQ ID NO: 2428441 - RNA, 17 nt, Human
aucggggcacugcaggg

SEQ ID NO: 2428442 - RNA, 19 nt, Human
aucggucuugcccagagga

SEQ ID NO: 2428443 - RNA, 14 nt, Human
aucguaaaauuaag

SEQ ID NO: 2428444 - RNA, 13 nt, Human
aucguaaaauuaa

SEQ ID NO: 2428445 - RNA, 17 nt, Human
aucguaaaauuaagaaa

SEQ ID NO: 2428446 - RNA, 15 nt, Human
aucguaaccagccag

SEQ ID NO: 2428447 - RNA, 18 nt, Human
aucggugaaacuaacaga

SEQ ID NO: 2428448 - RNA, 19 nt, Human
aucggugaaacuaacagau

SEQ ID NO: 2428449 - RNA, 21 nt, Human
aucggugaaacuaacagauaa

SEQ ID NO: 2428450 - RNA, 14 nt, Human
auccuguguuucua

SEQ ID NO: 2428451 - RNA, 18 nt, Human
auccuguguuucuaggga

SEQ ID NO: 2428452 - RNA, 18 nt, Human
auccugugacauguaaca

SEQ ID NO: 2428453 - RNA, 16 nt, Human
auccugugacauguaa

SEQ ID NO: 2428454 - RNA, 15 nt, Human
auccugugacaugua

SEQ ID NO: 2428455 - RNA, 16 nt, Human
auccugugaaguaagg

SEQ ID NO: 2428456 - RNA, 12 nt, Human
auccugugaagu

SEQ ID NO: 2428457 - RNA, 13 nt, Human
auccuguggguga

SEQ ID NO: 2428458 - RNA, 23 nt, Human
auccugucuuucugagcacacuu

SEQ ID NO: 2428459 - RNA, 18 nt, Human
auccugucuuucugagca

SEQ ID NO: 2428460 - RNA, 15 nt, Human
auccugucuuucuga

SEQ ID NO: 2428461 - RNA, 21 nt, Human
auccugucuuuaaggaaaaaa

SEQ ID NO: 2428462 - RNA, 23 nt, Human
auccugucuuuaaggaaaaaaag

SEQ ID NO: 2428463 - RNA, 19 nt, Human
auccugucuuuaaggaaaa

SEQ ID NO: 2428464 - RNA, 18 nt, Human
auccuguccucagcuucu

SEQ ID NO: 2428465 - RNA, 17 nt, Human
auccuguccucagcuuc

SEQ ID NO: 2428466 - RNA, 14 nt, Human
auccuguccucagc

SEQ ID NO: 2428467 - RNA, 16 nt, Human
auccuggggcucccuu

SEQ ID NO: 2428468 - RNA, 15 nt, Human
auccuggggcucccu

SEQ ID NO: 2428469 - RNA, 21 nt, Human
auccugggggacccaauguag

SEQ ID NO: 2428470 - RNA, 20 nt, Human
auccuggggcauuaaaaaaa

SEQ ID NO: 2428471 - RNA, 20 nt, Human
auccuggggcucccuucauc

SEQ ID NO: 2428472 - RNA, 22 nt, Human
auccuggguggucugcaggcag

SEQ ID NO: 2428473 - RNA, 23 nt, Human
auccuggguggucugcaggcagg

SEQ ID NO: 2428474 - RNA, 22 nt, Human
auccugguugguguugcagaag

SEQ ID NO: 2428475 - RNA, 18 nt, Human
auccugggcauccuucuu

SEQ ID NO: 2428476 - RNA, 24 nt, Human
auccuggcucuuuggagaucaagg

SEQ ID NO: 2428477 - RNA, 13 nt, Human
auccuggcccauc

SEQ ID NO: 2428478 - RNA, 12 nt, Human
auccuggcccau

SEQ ID NO: 2428479 - RNA, 16 nt, Human
auccuggcccaucagu

SEQ ID NO: 2428480 - RNA, 14 nt, Human
auccuggcccauca

SEQ ID NO: 2428481 - RNA, 14 nt, Human
auccuggcccucug

SEQ ID NO: 2428482 - RNA, 17 nt, Human
auccuggccaacauggu

SEQ ID NO: 2428483 - RNA, 19 nt, Human
auccuggaggcccaguuca

SEQ ID NO: 2428484 - RNA, 20 nt, Human
auccuggaggcccaguucac

SEQ ID NO: 2428485 - RNA, 23 nt, Human
auccuggcacccggccccugcug

SEQ ID NO: 2428486 - RNA, 22 nt, Human
auccuggcacccggccccugcu

SEQ ID NO: 2428487 - RNA, 21 nt, Human
auccuggcacccggccccugc

SEQ ID NO: 2428488 - RNA, 20 nt, Human
auccuggcacccggccccug

SEQ ID NO: 2428489 - RNA, 19 nt, Human
auccuggcacccggccccu

SEQ ID NO: 2428490 - RNA, 17 nt, Human
auccuggcacccggccc

SEQ ID NO: 2428491 - RNA, 14 nt, Human
auccuggaggccca

SEQ ID NO: 2428492 - RNA, 15 nt, Human
auccuggaggcccag

SEQ ID NO: 2428493 - RNA, 16 nt, Human
auccuggaggcccagu

SEQ ID NO: 2428494 - RNA, 17 nt, Human
auccuggaggcccaguu

SEQ ID NO: 2428495 - RNA, 15 nt, Human
auccuggaguucugg

SEQ ID NO: 2428496 - RNA, 14 nt, Human
auccugcuucagug

SEQ ID NO: 2428497 - RNA, 22 nt, Human
auccuggacaugaagauucuuu

SEQ ID NO: 2428498 - RNA, 21 nt, Human
auccugcuucugauaugcagu

SEQ ID NO: 2428499 - RNA, 19 nt, Human
auccugcuucugauaugca

SEQ ID NO: 2428500 - RNA, 11 nt, Human
auccugaggcu

SEQ ID NO: 2428501 - RNA, 13 nt, Human
auccugaggcucc

SEQ ID NO: 2428502 - RNA, 16 nt, Human
auccugaggcuccacu

SEQ ID NO: 2428503 - RNA, 18 nt, Human
auccugaggcuccacuug

SEQ ID NO: 2428504 - RNA, 21 nt, Human
auccugagccagauuucacuc

SEQ ID NO: 2428505 - RNA, 17 nt, Human
auccugagccagauuuc

SEQ ID NO: 2428506 - RNA, 15 nt, Human
auccugagccagauu

SEQ ID NO: 2428507 - RNA, 14 nt, Human
auccugagccagau

SEQ ID NO: 2428508 - RNA, 13 nt, Human
auccugccccuga

SEQ ID NO: 2428509 - RNA, 20 nt, Human
auccugcagccuccuccuga

SEQ ID NO: 2428510 - RNA, 17 nt, Human
auccugcagccuccucc

SEQ ID NO: 2428511 - RNA, 16 nt, Human
auccugcagccuccuc

SEQ ID NO: 2428512 - RNA, 22 nt, Human
auccugccuuagagccaggcac

SEQ ID NO: 2428513 - RNA, 21 nt, Human
auccugccuuagagccaggca

SEQ ID NO: 2428514 - RNA, 19 nt, Human
auccugccuuagagccagg

SEQ ID NO: 2428515 - RNA, 23 nt, Human
auccugcccccugaaacuuauuu

SEQ ID NO: 2428516 - RNA, 22 nt, Human
auccugcccccugaaacuuauu

SEQ ID NO: 2428517 - RNA, 20 nt, Human
auccugcccccugaaacuua

SEQ ID NO: 2428518 - RNA, 23 nt, Human
auccugccuuagagccaggcaca

SEQ ID NO: 2428519 - RNA, 16 nt, Human
auccugcggguggggc

SEQ ID NO: 2428520 - RNA, 14 nt, Human
auccugcugcugug

SEQ ID NO: 2428521 - RNA, 22 nt, Human
auccugaggcuccacuuggucu

SEQ ID NO: 2428522 - RNA, 13 nt, Human
auccugaggcuga

SEQ ID NO: 2428523 - RNA, 19 nt, Human
auccugacucugcccccug

SEQ ID NO: 2428524 - RNA, 24 nt, Human
auccugagccaucggugaaacuaa

SEQ ID NO: 2428525 - RNA, 16 nt, Human
auccugcaauuccacu

SEQ ID NO: 2428526 - RNA, 19 nt, Human
auccugaugagguuucuac

SEQ ID NO: 2428527 - RNA, 12 nt, Human
auccugagccau

SEQ ID NO: 2428528 - RNA, 13 nt, Human
auccugagccaga

SEQ ID NO: 2428529 - RNA, 12 nt, Human
auccugagccag

SEQ ID NO: 2428530 - RNA, 11 nt, Human
auccugagcca

SEQ ID NO: 2428531 - RNA, 18 nt, Human
auccugacucugcccccu

SEQ ID NO: 2428532 - RNA, 17 nt, Human
auccugacucugccccc

SEQ ID NO: 2428533 - RNA, 15 nt, Human
auccugacucugccc

SEQ ID NO: 2428534 - RNA, 14 nt, Human
auccugacucugcc

SEQ ID NO: 2428535 - RNA, 21 nt, Human
auccugaaauagaggcuaaau

SEQ ID NO: 2428536 - RNA, 21 nt, Human
auccucuuuagaguuagacug

SEQ ID NO: 2428537 - RNA, 20 nt, Human
auccucuuuagaguuagacu

SEQ ID NO: 2428538 - RNA, 19 nt, Human
auccucuuuagaguuagac

SEQ ID NO: 2428539 - RNA, 16 nt, Human
auccucuuuagaguua

SEQ ID NO: 2428540 - RNA, 17 nt, Human
auccucuuugagugaag

SEQ ID NO: 2428541 - RNA, 14 nt, Human
auccugaaauuuca

SEQ ID NO: 2428542 - RNA, 16 nt, Human
auccugaaauuucaga

SEQ ID NO: 2428543 - RNA, 17 nt, Human
auccugaaauuucagau

SEQ ID NO: 2428544 - RNA, 23 nt, Human
auccucuuuagaguuagacuguu

SEQ ID NO: 2428545 - RNA, 22 nt, Human
auccucuuuagaguuagacugu

SEQ ID NO: 2428546 - RNA, 18 nt, Human
auccugaaauagaggcua

SEQ ID NO: 2428547 - RNA, 21 nt, Human
uucuuuucuggaauguaauca

SEQ ID NO: 2428548 - RNA, 23 nt, Human
uucuuuucgccguggcugcggca

SEQ ID NO: 2428549 - RNA, 23 nt, Human
uucuuuugagcaacuuucuuaca

SEQ ID NO: 2428550 - RNA, 21 nt, Human
uucuuuugcccuucacagugu

SEQ ID NO: 2428551 - RNA, 22 nt, Human
uucuuuugcccuucacaguguu

SEQ ID NO: 2428552 - RNA, 23 nt, Human
uucuuuugcccuucacaguguuu

SEQ ID NO: 2428553 - RNA, 20 nt, Human
uucuuuugccguuauuaaaa

SEQ ID NO: 2428554 - RNA, 22 nt, Human
uucuuuugguaaagacuggcuu

SEQ ID NO: 2428555 - RNA, 13 nt, Human
uucuuuugguaaa

SEQ ID NO: 2428556 - RNA, 23 nt, Human
uucuuuugguaaagacuggcuuu

SEQ ID NO: 2428557 - RNA, 12 nt, Human
uucuuuuguaaa

SEQ ID NO: 2428558 - RNA, 20 nt, Human
auccucuguacagagcccac

SEQ ID NO: 2428559 - RNA, 18 nt, Human
auccucuguacagagccc

SEQ ID NO: 2428560 - RNA, 17 nt, Human
auccucuuccucugagg

SEQ ID NO: 2428561 - RNA, 16 nt, Human
auccucuuccucugag

SEQ ID NO: 2428562 - RNA, 15 nt, Human
auccucuuccucuga

SEQ ID NO: 2428563 - RNA, 14 nt, Human
auccucuuccucug

SEQ ID NO: 2428564 - RNA, 14 nt, Human
uucuuuuggcuucc

SEQ ID NO: 2428565 - RNA, 13 nt, Human
auccucuuccucu

SEQ ID NO: 2428566 - RNA, 15 nt, Human
auccucuuuagaguu

SEQ ID NO: 2428567 - RNA, 13 nt, Human
auccucuuuagag

SEQ ID NO: 2428568 - RNA, 22 nt, Human
auccucuucugcuuaggagaga

SEQ ID NO: 2428569 - RNA, 19 nt, Human
auccucuuccucugaggcu

SEQ ID NO: 2428570 - RNA, 17 nt, Human
uugaaggaaaaugauac

SEQ ID NO: 2428571 - RNA, 22 nt, Human
aucuaacccucccauggcaccu

SEQ ID NO: 2428572 - RNA, 18 nt, Human
aucuaaccucaucuucuu

SEQ ID NO: 2428573 - RNA, 15 nt, Human
aucuaacccucccau

SEQ ID NO: 2428574 - RNA, 14 nt, Human
aucuaaccacauca

SEQ ID NO: 2428575 - RNA, 13 nt, Human
aucuaaccucauc

SEQ ID NO: 2428576 - RNA, 14 nt, Human
aucuaaccucaucu

SEQ ID NO: 2428577 - RNA, 15 nt, Human
aucuaaccucaucuu

SEQ ID NO: 2428578 - RNA, 15 nt, Human
aucuaaauguugaaa

SEQ ID NO: 2428579 - RNA, 16 nt, Human
aucuaaauugaauaau

SEQ ID NO: 2428580 - RNA, 15 nt, Human
aucuaaauugaauaa

SEQ ID NO: 2428581 - RNA, 17 nt, Human
aucuaaauuuagaaauc

SEQ ID NO: 2428582 - RNA, 21 nt, Human
aucuaaauugaauaaugguac

SEQ ID NO: 2428583 - RNA, 23 nt, Human
aucuaaaguguguuguugcuuua

SEQ ID NO: 2428584 - RNA, 20 nt, Human
aucuaaaguguguuguugcu

SEQ ID NO: 2428585 - RNA, 17 nt, Human
aucuaaaguguguuguu

SEQ ID NO: 2428586 - RNA, 18 nt, Human
aucuaaauaccugcccug

SEQ ID NO: 2428587 - RNA, 22 nt, Human
aucuaaauauugauuucugccu

SEQ ID NO: 2428588 - RNA, 19 nt, Human
aucuaaauggaaccacucu

SEQ ID NO: 2428589 - RNA, 19 nt, Human
aucuaaaagaaaugucuau

SEQ ID NO: 2428590 - RNA, 15 nt, Human
aucuaaacugccccc

SEQ ID NO: 2428591 - RNA, 22 nt, Human
aucuaaacuggauucacagcuc

SEQ ID NO: 2428592 - RNA, 15 nt, Human
aucuaaaguguguug

SEQ ID NO: 2428593 - RNA, 15 nt, Human
aucgugacaacacuu

SEQ ID NO: 2428594 - RNA, 14 nt, Human
aucgugacaacacu

SEQ ID NO: 2428595 - RNA, 22 nt, Human
aucgugacgcugaauaaauguc

SEQ ID NO: 2428596 - RNA, 21 nt, Human
aucgugacgcugaauaaaugu

SEQ ID NO: 2428597 - RNA, 20 nt, Human
aucgugacgcugaauaaaug

SEQ ID NO: 2428598 - RNA, 18 nt, Human
aucgugacgcugaauaaa

SEQ ID NO: 2428599 - RNA, 23 nt, Human
aucuaaaaauagacuuaaaucuc

SEQ ID NO: 2428600 - RNA, 18 nt, Human
aucgugccguuacucucc

SEQ ID NO: 2428601 - RNA, 19 nt, Human
aucuaaaaauagacuuaaa

SEQ ID NO: 2428602 - RNA, 17 nt, Human
aucgugacgcugaauaa

SEQ ID NO: 2428603 - RNA, 12 nt, Human
aucgugaaaccc

SEQ ID NO: 2428604 - RNA, 20 nt, Human
aucgugaaacccugucucua

SEQ ID NO: 2428605 - RNA, 23 nt, Human
aucgucucucccucccuuugaaa

SEQ ID NO: 2428606 - RNA, 23 nt, Human
aucguccagggagcauuuuccuc

SEQ ID NO: 2428607 - RNA, 22 nt, Human
aucguauagcuguauugaauca

SEQ ID NO: 2428608 - RNA, 18 nt, Human
aucguauagcuguauuga

SEQ ID NO: 2428609 - RNA, 16 nt, Human
aucguauagcuguauu

SEQ ID NO: 2428610 - RNA, 15 nt, Human
aucguauagcuguau

SEQ ID NO: 2428611 - RNA, 14 nt, Human
aucguauagcugua

SEQ ID NO: 2428612 - RNA, 18 nt, Human
aucguaauguacagaugg

SEQ ID NO: 2428613 - RNA, 16 nt, Human
aucguaauguacagau

SEQ ID NO: 2428614 - RNA, 16 nt, Human
aucguaaccagccaga

SEQ ID NO: 2428615 - RNA, 14 nt, Human
aucgucacugcuua

SEQ ID NO: 2428616 - RNA, 18 nt, Human
aucgucacugcuuaacuu

SEQ ID NO: 2428617 - RNA, 19 nt, Human
aucguccagcgaccuuccu

SEQ ID NO: 2428618 - RNA, 23 nt, Human
aucguauagcuguauugaaucau

SEQ ID NO: 2428619 - RNA, 13 nt, Human
aucguccagggag

SEQ ID NO: 2428620 - RNA, 12 nt, Human
aucguccaggga

SEQ ID NO: 2428621 - RNA, 18 nt, Human
uugaaguauuuugcugga

SEQ ID NO: 2428622 - RNA, 18 nt, Human
uugaaguaaucccgccac

SEQ ID NO: 2428623 - RNA, 12 nt, Human
uugaaguaauga

SEQ ID NO: 2428624 - RNA, 16 nt, Human
uugaaguaaugaauuu

SEQ ID NO: 2428625 - RNA, 17 nt, Human
uugaaguaaugaauuuu

SEQ ID NO: 2428626 - RNA, 19 nt, Human
uugaaggguaaagaaguuu

SEQ ID NO: 2428627 - RNA, 18 nt, Human
uugaaggguaaagaaguu

SEQ ID NO: 2428628 - RNA, 23 nt, Human
uugaaggugcugacggccaggga

SEQ ID NO: 2428629 - RNA, 14 nt, Human
uugaaggaaacagu

SEQ ID NO: 2428630 - RNA, 13 nt, Human
uugaaggaaacag

SEQ ID NO: 2428631 - RNA, 11 nt, Human
uugaaggaaac

SEQ ID NO: 2428632 - RNA, 18 nt, Human
uugaaggaggugagggau

SEQ ID NO: 2428633 - RNA, 15 nt, Human
uugaagggccagagc

SEQ ID NO: 2428634 - RNA, 17 nt, Human
uugaagggccagagcca

SEQ ID NO: 2428635 - RNA, 19 nt, Human
uugaagggccagagccagg

SEQ ID NO: 2428636 - RNA, 20 nt, Human
uugaagggccagagccaggg

SEQ ID NO: 2428637 - RNA, 15 nt, Human
uugaaggaucuguuu

SEQ ID NO: 2428638 - RNA, 21 nt, Human
uugaaguuguuacuaacuaaa

SEQ ID NO: 2428639 - RNA, 20 nt, Human
uugaaguguaggcagacaca

SEQ ID NO: 2428640 - RNA, 22 nt, Human
uugaaguguaggcagacacagg

SEQ ID NO: 2428641 - RNA, 19 nt, Human
uugaaguguaggcagacac

SEQ ID NO: 2428642 - RNA, 18 nt, Human
uugaaguguaggcagaca

SEQ ID NO: 2428643 - RNA, 17 nt, Human
uugaaguguaggcagac

SEQ ID NO: 2428644 - RNA, 18 nt, Human
uugaaguggccagaugag

SEQ ID NO: 2428645 - RNA, 12 nt, Human
uugaauacuuuu

SEQ ID NO: 2428646 - RNA, 13 nt, Human
uugaauacuuuuu

SEQ ID NO: 2428647 - RNA, 19 nt, Human
uugaaguuguuacuaacua

SEQ ID NO: 2428648 - RNA, 18 nt, Human
uugaauauaaacacuaua

SEQ ID NO: 2428649 - RNA, 16 nt, Human
uugaauauaaacacua

SEQ ID NO: 2428650 - RNA, 15 nt, Human
uugaauauaaacacu

SEQ ID NO: 2428651 - RNA, 17 nt, Human
uugacacuuaaaaaugg

SEQ ID NO: 2428652 - RNA, 17 nt, Human
uugaauauccccuccca

SEQ ID NO: 2428653 - RNA, 16 nt, Human
uugaauauccccuccc

SEQ ID NO: 2428654 - RNA, 13 nt, Human
uugaauauauuau

SEQ ID NO: 2428655 - RNA, 19 nt, Human
uugaauauauuauaaucuu

SEQ ID NO: 2428656 - RNA, 21 nt, Human
uugaauauaauauauuugugu

SEQ ID NO: 2428657 - RNA, 20 nt, Human
uugaauauaauauauuugug

SEQ ID NO: 2428658 - RNA, 22 nt, Human
uugaauauaauauauuugugua

SEQ ID NO: 2428659 - RNA, 22 nt, Human
uugauaagagggcacacacugu

SEQ ID NO: 2428660 - RNA, 16 nt, Human
uugauaagagggcaca

SEQ ID NO: 2428661 - RNA, 14 nt, Human
uugauaacuuugcu

SEQ ID NO: 2428662 - RNA, 13 nt, Human
uugauaacuuugc

SEQ ID NO: 2428663 - RNA, 19 nt, Human
uugauaacagcacugacua

SEQ ID NO: 2428664 - RNA, 18 nt, Human
uugauaaauuccacugga

SEQ ID NO: 2428665 - RNA, 15 nt, Human
uugauaacagcacug

SEQ ID NO: 2428666 - RNA, 14 nt, Human
uugauaacagcacu

SEQ ID NO: 2428667 - RNA, 19 nt, Human
uugauaaauuccacuggac

SEQ ID NO: 2428668 - RNA, 21 nt, Human
uugauaaauuccacuggacuu

SEQ ID NO: 2428669 - RNA, 19 nt, Human
uugauaaucaacugggcug

SEQ ID NO: 2428670 - RNA, 21 nt, Human
aucuaagcagcauuucugaag

SEQ ID NO: 2428671 - RNA, 18 nt, Human
aucuaagcagcauuucug

SEQ ID NO: 2428672 - RNA, 13 nt, Human
aucuaagccugaa

SEQ ID NO: 2428673 - RNA, 16 nt, Human
aucuaagccuuuccau

SEQ ID NO: 2428674 - RNA, 15 nt, Human
aucuaagugauauaa

SEQ ID NO: 2428675 - RNA, 14 nt, Human
aucuaagugauaua

SEQ ID NO: 2428676 - RNA, 17 nt, Human
aucuaagugauauaaau

SEQ ID NO: 2428677 - RNA, 20 nt, Human
aucuaaggaugucacagggc

SEQ ID NO: 2428678 - RNA, 13 nt, Human
aucuaagugauau

SEQ ID NO: 2428679 - RNA, 18 nt, Human
aucuaagccuuuccauaa

SEQ ID NO: 2428680 - RNA, 18 nt, Human
aucuaaggaugucacagg

SEQ ID NO: 2428681 - RNA, 17 nt, Human
aucuaagccuuuccaua

SEQ ID NO: 2428682 - RNA, 15 nt, Human
uugaggucuguucuu

SEQ ID NO: 2428683 - RNA, 18 nt, Human
uugagaguuuugucuuga

SEQ ID NO: 2428684 - RNA, 17 nt, Human
uugagauagaagaacug

SEQ ID NO: 2428685 - RNA, 18 nt, Human
uugagauagaagaacugc

SEQ ID NO: 2428686 - RNA, 16 nt, Human
uugaggucuguucuuu

SEQ ID NO: 2428687 - RNA, 17 nt, Human
uugaggucuuuugacau

SEQ ID NO: 2428688 - RNA, 18 nt, Human
uugaggucuuuugacaug

SEQ ID NO: 2428689 - RNA, 19 nt, Human
uugaggucuuuugacaugu

SEQ ID NO: 2428690 - RNA, 22 nt, Human
uugaggucuuuugacaugugga

SEQ ID NO: 2428691 - RNA, 23 nt, Human
uugaggucuuuugacauguggaa

SEQ ID NO: 2428692 - RNA, 19 nt, Human
uugagguggaagcccuccu

SEQ ID NO: 2428693 - RNA, 22 nt, Human
uugagguggaagcccuccuucc

SEQ ID NO: 2428694 - RNA, 17 nt, Human
uugauaaaguuucucag

SEQ ID NO: 2428695 - RNA, 14 nt, Human
uugauaaaguuucu

SEQ ID NO: 2428696 - RNA, 13 nt, Human
uugauaaaguuuc

SEQ ID NO: 2428697 - RNA, 12 nt, Human
uugauaaaguuu

SEQ ID NO: 2428698 - RNA, 20 nt, Human
uugauaaaguaguaaaaauu

SEQ ID NO: 2428699 - RNA, 12 nt, Human
uugauaaaguaa

SEQ ID NO: 2428700 - RNA, 21 nt, Human
uugaguuuuguuuuaaaauua

SEQ ID NO: 2428701 - RNA, 12 nt, Human
uugaguuuuguu

SEQ ID NO: 2428702 - RNA, 22 nt, Human
uugagguggcacuuuuucauuu

SEQ ID NO: 2428703 - RNA, 21 nt, Human
uugagguggucugaauguucu

SEQ ID NO: 2428704 - RNA, 19 nt, Human
uugaccauucuccaccugc

SEQ ID NO: 2428705 - RNA, 18 nt, Human
uugaccauucuccaccug

SEQ ID NO: 2428706 - RNA, 20 nt, Human
uugacauaacacuauaaagg

SEQ ID NO: 2428707 - RNA, 19 nt, Human
uugacacuuaaaaaugguu

SEQ ID NO: 2428708 - RNA, 19 nt, Human
uugacagggcacaccgggc

SEQ ID NO: 2428709 - RNA, 17 nt, Human
uugacaguucugaagaa

SEQ ID NO: 2428710 - RNA, 15 nt, Human
uugacaguucugaag

SEQ ID NO: 2428711 - RNA, 18 nt, Human
uugacaguucugaagaau

SEQ ID NO: 2428712 - RNA, 19 nt, Human
uugacaguguugaaaaugu

SEQ ID NO: 2428713 - RNA, 14 nt, Human
uugagaguucuaaa

SEQ ID NO: 2428714 - RNA, 19 nt, Human
uugagaggcccugggguuc

SEQ ID NO: 2428715 - RNA, 17 nt, Human
uugagaaggagagaaag

SEQ ID NO: 2428716 - RNA, 23 nt, Human
uugagagaaauaugaagaacuga

SEQ ID NO: 2428717 - RNA, 16 nt, Human
uugagaaggagagaaa

SEQ ID NO: 2428718 - RNA, 17 nt, Human
uugagagaagagacaaa

SEQ ID NO: 2428719 - RNA, 16 nt, Human
uugagagaccaggcaa

SEQ ID NO: 2428720 - RNA, 17 nt, Human
uugagagaccaggcaaa

SEQ ID NO: 2428721 - RNA, 14 nt, Human
uugagaaggagaga

SEQ ID NO: 2428722 - RNA, 24 nt, Human
uugaccauucuccaccugccaggg

SEQ ID NO: 2428723 - RNA, 21 nt, Human
uugagaaauauggacacuuaa

SEQ ID NO: 2428724 - RNA, 15 nt, Human
uugagaaaugaauaa

SEQ ID NO: 2428725 - RNA, 19 nt, Human
uugagaaaugcauauugua

SEQ ID NO: 2428726 - RNA, 16 nt, Human
uugagaaaugcauauu

SEQ ID NO: 2428727 - RNA, 16 nt, Human
uugagaaaugaauaau

SEQ ID NO: 2428728 - RNA, 22 nt, Human
uugagaaaugaauaauuuccca

SEQ ID NO: 2428729 - RNA, 19 nt, Human
uugagaacugcauauguuu

SEQ ID NO: 2428730 - RNA, 21 nt, Human
uugagaacugcauauguuucg

SEQ ID NO: 2428731 - RNA, 22 nt, Human
uugagaagaccucaccuagaaa

SEQ ID NO: 2428732 - RNA, 15 nt, Human
uugagaagaaaacau

SEQ ID NO: 2428733 - RNA, 18 nt, Human
uugagaagaaaacaucua

SEQ ID NO: 2428734 - RNA, 23 nt, Human
auauuuaaugauaaguaaaugcu

SEQ ID NO: 2428735 - RNA, 13 nt, Human
auauuuaaugaua

SEQ ID NO: 2428736 - RNA, 12 nt, Human
auauuuaaugau

SEQ ID NO: 2428737 - RNA, 13 nt, Human
auauuuacaaaug

SEQ ID NO: 2428738 - RNA, 13 nt, Human
auauuguuuucag

SEQ ID NO: 2428739 - RNA, 17 nt, Human
auauuguuuucagugua

SEQ ID NO: 2428740 - RNA, 14 nt, Human
auauuguuugcuaa

SEQ ID NO: 2428741 - RNA, 21 nt, Human
auauugugccaauauguauug

SEQ ID NO: 2428742 - RNA, 20 nt, Human
auauugugccaauauguauu

SEQ ID NO: 2428743 - RNA, 12 nt, Human
auauuguuucua

SEQ ID NO: 2428744 - RNA, 22 nt, Human
auauugucagaguucugcucua

SEQ ID NO: 2428745 - RNA, 18 nt, Human
auauuguauuacuagaag

SEQ ID NO: 2428746 - RNA, 16 nt, Human
auauuguauuacuaga

SEQ ID NO: 2428747 - RNA, 15 nt, Human
auauuguacacuuuu

SEQ ID NO: 2428748 - RNA, 12 nt, Human
auauugucagau

SEQ ID NO: 2428749 - RNA, 15 nt, Human
auauugucagauauu

SEQ ID NO: 2428750 - RNA, 17 nt, Human
auauugucagauauuuu

SEQ ID NO: 2428751 - RNA, 14 nt, Human
auauuguacaguuu

SEQ ID NO: 2428752 - RNA, 13 nt, Human
auauuguacaguu

SEQ ID NO: 2428753 - RNA, 17 nt, Human
auauugugauucugccu

SEQ ID NO: 2428754 - RNA, 19 nt, Human
auauugugauucugccuuu

SEQ ID NO: 2428755 - RNA, 19 nt, Human
auauugugccaauauguau

SEQ ID NO: 2428756 - RNA, 18 nt, Human
auauugugccaauaugua

SEQ ID NO: 2428757 - RNA, 12 nt, Human
auauugugccaa

SEQ ID NO: 2428758 - RNA, 13 nt, Human
auauugugaagua

SEQ ID NO: 2428759 - RNA, 18 nt, Human
auauugucauuccuguau

SEQ ID NO: 2428760 - RNA, 15 nt, Human
auauugucauuccug

SEQ ID NO: 2428761 - RNA, 16 nt, Human
auauugucagauauuu

SEQ ID NO: 2428762 - RNA, 14 nt, Human
auauugugauucug

SEQ ID NO: 2428763 - RNA, 16 nt, Human
auauugacuuguauau

SEQ ID NO: 2428764 - RNA, 15 nt, Human
auauugacuuguaua

SEQ ID NO: 2428765 - RNA, 14 nt, Human
auauugacuuguau

SEQ ID NO: 2428766 - RNA, 18 nt, Human
auauugaauguuuccaac

SEQ ID NO: 2428767 - RNA, 15 nt, Human
auauugauaugcuua

SEQ ID NO: 2428768 - RNA, 20 nt, Human
auauucuauaugaauuuaaa

SEQ ID NO: 2428769 - RNA, 23 nt, Human
auauucuauuuucauuuucugca

SEQ ID NO: 2428770 - RNA, 18 nt, Human
auauucuauaugaauuua

SEQ ID NO: 2428771 - RNA, 20 nt, Human
auauuccuuucuaucauuuu

SEQ ID NO: 2428772 - RNA, 19 nt, Human
auauuccuuucuaucauuu

SEQ ID NO: 2428773 - RNA, 16 nt, Human
auauuccuuucuauca

SEQ ID NO: 2428774 - RNA, 21 nt, Human
auauuccugcauuugugaaau

SEQ ID NO: 2428775 - RNA, 13 nt, Human
auauuguaagaaa

SEQ ID NO: 2428776 - RNA, 14 nt, Human
auauuguaagaaau

SEQ ID NO: 2428777 - RNA, 15 nt, Human
auauuguaagaaaua

SEQ ID NO: 2428778 - RNA, 16 nt, Human
auauuguaagaaauac

SEQ ID NO: 2428779 - RNA, 14 nt, Human
auauuguacacuuu

SEQ ID NO: 2428780 - RNA, 13 nt, Human
auauuguacacuu

SEQ ID NO: 2428781 - RNA, 12 nt, Human
auauuguacacu

SEQ ID NO: 2428782 - RNA, 12 nt, Human
auauuguacagu

SEQ ID NO: 2428783 - RNA, 13 nt, Human
auauugguauuca

SEQ ID NO: 2428784 - RNA, 12 nt, Human
auauuguaagaa

SEQ ID NO: 2428785 - RNA, 21 nt, Human
auauugcugcugguaauuugu

SEQ ID NO: 2428786 - RNA, 17 nt, Human
auauugagucaaauggu

SEQ ID NO: 2428787 - RNA, 22 nt, Human
auauugcugauggugcaaugac

SEQ ID NO: 2428788 - RNA, 16 nt, Human
auauugcuuuuucuaa

SEQ ID NO: 2428789 - RNA, 15 nt, Human
auauugcuuuuucua

SEQ ID NO: 2428790 - RNA, 13 nt, Human
auauugcuuuuuc

SEQ ID NO: 2428791 - RNA, 17 nt, Human
auauugcuucuucuccu

SEQ ID NO: 2428792 - RNA, 21 nt, Human
auauugcuuuuucuaaugugg

SEQ ID NO: 2428793 - RNA, 18 nt, Human
auauugcuuuuucuaaug

SEQ ID NO: 2428794 - RNA, 22 nt, Human
auauugcuuuuucuaauguggu

SEQ ID NO: 2428795 - RNA, 15 nt, Human
auauugguauucacu

SEQ ID NO: 2428796 - RNA, 21 nt, Human
auauguuuuuuagaucaaaua

SEQ ID NO: 2428797 - RNA, 24 nt, Human
auauguuuaccuuuuaauuaauga

SEQ ID NO: 2428798 - RNA, 16 nt, Human
auauuaaaaauauaaa

SEQ ID NO: 2428799 - RNA, 15 nt, Human
auauuaaaaauauaa

SEQ ID NO: 2428800 - RNA, 14 nt, Human
auauuaaaaauaua

SEQ ID NO: 2428801 - RNA, 13 nt, Human
auauuaaaaauau

SEQ ID NO: 2428802 - RNA, 21 nt, Human
auauuaaaauaagcacugugc

SEQ ID NO: 2428803 - RNA, 14 nt, Human
auauuaaaauaagc

SEQ ID NO: 2428804 - RNA, 17 nt, Human
auauuaaaauauggcua

SEQ ID NO: 2428805 - RNA, 23 nt, Human
auauuaaaaauauggaacuucua

SEQ ID NO: 2428806 - RNA, 21 nt, Human
auauuaaaaauauaaaacugc

SEQ ID NO: 2428807 - RNA, 18 nt, Human
auauuaaaaauauaaaac

SEQ ID NO: 2428808 - RNA, 17 nt, Human
auauuaaaaauauaaaa

SEQ ID NO: 2428809 - RNA, 22 nt, Human
auauguuuaccuuuuaauuaau

SEQ ID NO: 2428810 - RNA, 20 nt, Human
auauguuuaccuuuuaauua

SEQ ID NO: 2428811 - RNA, 17 nt, Human
auauguuuaccuuuuaa

SEQ ID NO: 2428812 - RNA, 15 nt, Human
auauguugaauacuu

SEQ ID NO: 2428813 - RNA, 16 nt, Human
auauguugaauacuuu

SEQ ID NO: 2428814 - RNA, 17 nt, Human
auauguugaauacuuuu

SEQ ID NO: 2428815 - RNA, 18 nt, Human
auauguugaauacuuuuu

SEQ ID NO: 2428816 - RNA, 13 nt, Human
auauguugcucag

SEQ ID NO: 2428817 - RNA, 14 nt, Human
auauguugaugaaa

SEQ ID NO: 2428818 - RNA, 22 nt, Human
auauguugaugaaaaauagcaa

SEQ ID NO: 2428819 - RNA, 16 nt, Human
auauuaagaaagacua

SEQ ID NO: 2428820 - RNA, 15 nt, Human
auauuaagaaagacu

SEQ ID NO: 2428821 - RNA, 17 nt, Human
auauuaagaaagacuau

SEQ ID NO: 2428822 - RNA, 22 nt, Human
auauuaagaaagacuaucuaaa

SEQ ID NO: 2428823 - RNA, 17 nt, Human
auauuaccacagacaua

SEQ ID NO: 2428824 - RNA, 17 nt, Human
auauuaaugccuuuaaa

SEQ ID NO: 2428825 - RNA, 23 nt, Human
auauuaaugccuuuaaaguauga

SEQ ID NO: 2428826 - RNA, 16 nt, Human
uuccagugaggcucug

SEQ ID NO: 2428827 - RNA, 15 nt, Human
uuccagugaggcucu

SEQ ID NO: 2428828 - RNA, 11 nt, Human
uuccagucucc

SEQ ID NO: 2428829 - RNA, 20 nt, Human
uuccagucuccaccaggaac

SEQ ID NO: 2428830 - RNA, 15 nt, Human
uuccagucaggauga

SEQ ID NO: 2428831 - RNA, 15 nt, Human
uuccaguccaaucuc

SEQ ID NO: 2428832 - RNA, 17 nt, Human
uuccagucuuccugaca

SEQ ID NO: 2428833 - RNA, 18 nt, Human
uuccagucucugcaugua

SEQ ID NO: 2428834 - RNA, 22 nt, Human
uuccagucuccaccaggaaccu

SEQ ID NO: 2428835 - RNA, 22 nt, Human
uuccagugaaaucaguuacucu

SEQ ID NO: 2428836 - RNA, 21 nt, Human
uuccagugagcuuaucaugcu

SEQ ID NO: 2428837 - RNA, 16 nt, Human
uucccagcucucccuc

SEQ ID NO: 2428838 - RNA, 17 nt, Human
uucccagcucucccucu

SEQ ID NO: 2428839 - RNA, 18 nt, Human
uucccagcucucccucug

SEQ ID NO: 2428840 - RNA, 19 nt, Human
uucccagcucucccucugg

SEQ ID NO: 2428841 - RNA, 20 nt, Human
uucccagcucucccucuggc

SEQ ID NO: 2428842 - RNA, 20 nt, Human
uuccagucuuccugacacuu

SEQ ID NO: 2428843 - RNA, 22 nt, Human
uucccagcaguggacucaaaac

SEQ ID NO: 2428844 - RNA, 14 nt, Human
uucccagcucuccc

SEQ ID NO: 2428845 - RNA, 21 nt, Human
uucccagcuacaccuuucucc

SEQ ID NO: 2428846 - RNA, 12 nt, Human
uucccaggaccc

SEQ ID NO: 2428847 - RNA, 13 nt, Human
uucccaggacccu

SEQ ID NO: 2428848 - RNA, 11 nt, Human
uucccaggacc

SEQ ID NO: 2428849 - RNA, 23 nt, Human
uucccagcucucccucuggcccu

SEQ ID NO: 2428850 - RNA, 19 nt, Human
uucccaggacccugaaggg

SEQ ID NO: 2428851 - RNA, 20 nt, Human
uucccaggacccugaagggg

SEQ ID NO: 2428852 - RNA, 20 nt, Human
uucccaggaugagcauccca

SEQ ID NO: 2428853 - RNA, 16 nt, Human
auauguucugacauaa

SEQ ID NO: 2428854 - RNA, 21 nt, Human
auauguucacaccuagcguca

SEQ ID NO: 2428855 - RNA, 16 nt, Human
auauguucaacuggag

SEQ ID NO: 2428856 - RNA, 14 nt, Human
auauguugaauacu

SEQ ID NO: 2428857 - RNA, 14 nt, Human
auauguucacuguc

SEQ ID NO: 2428858 - RNA, 18 nt, Human
auauguucuuuaaaaaua

SEQ ID NO: 2428859 - RNA, 20 nt, Human
auauguguguuuaaauaaag

SEQ ID NO: 2428860 - RNA, 19 nt, Human
auauguguguuuaaauaaa

SEQ ID NO: 2428861 - RNA, 17 nt, Human
auauguguuuuucacau

SEQ ID NO: 2428862 - RNA, 19 nt, Human
auauguguuuuucacauuu

SEQ ID NO: 2428863 - RNA, 22 nt, Human
auauguguuuuucacauuugcg

SEQ ID NO: 2428864 - RNA, 20 nt, Human
auauguuaaccucaguguca

SEQ ID NO: 2428865 - RNA, 12 nt, Human
auauguucaacu

SEQ ID NO: 2428866 - RNA, 15 nt, Human
auauguucaacugga

SEQ ID NO: 2428867 - RNA, 19 nt, Human
uucccaguggcugcugccc

SEQ ID NO: 2428868 - RNA, 18 nt, Human
uucccaguggcugcugcc

SEQ ID NO: 2428869 - RNA, 17 nt, Human
uucccaguggcugcugc

SEQ ID NO: 2428870 - RNA, 16 nt, Human
uucccaguggcugcug

SEQ ID NO: 2428871 - RNA, 21 nt, Human
uucccaguggcugcugcccag

SEQ ID NO: 2428872 - RNA, 20 nt, Human
uucccaguggcugcugccca

SEQ ID NO: 2428873 - RNA, 17 nt, Human
uucccagugaauucuug

SEQ ID NO: 2428874 - RNA, 15 nt, Human
uucccaguggcugcu

SEQ ID NO: 2428875 - RNA, 14 nt, Human
uucccaguggcugc

SEQ ID NO: 2428876 - RNA, 23 nt, Human
uucccagugacacuucagagagc

SEQ ID NO: 2428877 - RNA, 20 nt, Human
uucccaggguagcccgccug

SEQ ID NO: 2428878 - RNA, 19 nt, Human
uucccaggguagcccgccu

SEQ ID NO: 2428879 - RNA, 23 nt, Human
uucccaggguagcccgccugcca

SEQ ID NO: 2428880 - RNA, 12 nt, Human
uucccaggugcu

SEQ ID NO: 2428881 - RNA, 16 nt, Human
uucccaggugcuacac

SEQ ID NO: 2428882 - RNA, 10 nt, Human
uucccagggu

SEQ ID NO: 2428883 - RNA, 22 nt, Human
uucccagggaagugcucugaua

SEQ ID NO: 2428884 - RNA, 14 nt, Human
uucccagggaagug

SEQ ID NO: 2428885 - RNA, 13 nt, Human
uucccagggaagu

SEQ ID NO: 2428886 - RNA, 19 nt, Human
aucaauguuucuucuaggu

SEQ ID NO: 2428887 - RNA, 18 nt, Human
aucaauguucauuguaau

SEQ ID NO: 2428888 - RNA, 13 nt, Human
aucaauuaaaugu

SEQ ID NO: 2428889 - RNA, 14 nt, Human
aucaauguucauug

SEQ ID NO: 2428890 - RNA, 15 nt, Human
aucaauguucauugu

SEQ ID NO: 2428891 - RNA, 16 nt, Human
aucaauguucauugua

SEQ ID NO: 2428892 - RNA, 17 nt, Human
aucaauguucauuguaa

SEQ ID NO: 2428893 - RNA, 22 nt, Human
aucaauuaauuuuuuuauuguu

SEQ ID NO: 2428894 - RNA, 15 nt, Human
aucaauuaauuuuuu

SEQ ID NO: 2428895 - RNA, 15 nt, Human
aucaauuaaauguag

SEQ ID NO: 2428896 - RNA, 14 nt, Human
aucaauuaauuuuu

SEQ ID NO: 2428897 - RNA, 14 nt, Human
aucaauuaaaugua

SEQ ID NO: 2428898 - RNA, 13 nt, Human
aucaauuuaaaaa

SEQ ID NO: 2428899 - RNA, 15 nt, Human
aucaauuuaaaccca

SEQ ID NO: 2428900 - RNA, 16 nt, Human
aucaauucauaucuau

SEQ ID NO: 2428901 - RNA, 21 nt, Human
aucaaggguacacugccuucu

SEQ ID NO: 2428902 - RNA, 13 nt, Human
aucaacucuaaua

SEQ ID NO: 2428903 - RNA, 14 nt, Human
aucaaugggaaaua

SEQ ID NO: 2428904 - RNA, 23 nt, Human
aucaauggcgcagugccucuggu

SEQ ID NO: 2428905 - RNA, 22 nt, Human
aucaauggcgcagugccucugg

SEQ ID NO: 2428906 - RNA, 13 nt, Human
aucaauguucauu

SEQ ID NO: 2428907 - RNA, 14 nt, Human
aucaauuuuucuua

SEQ ID NO: 2428908 - RNA, 21 nt, Human
aucaauuuaaacccauuuuag

SEQ ID NO: 2428909 - RNA, 17 nt, Human
aucaauuuaaacccauu

SEQ ID NO: 2428910 - RNA, 16 nt, Human
aucaauuuaaacccau

SEQ ID NO: 2428911 - RNA, 19 nt, Human
aucaauuuuucuuauuuca

SEQ ID NO: 2428912 - RNA, 17 nt, Human
aucacgccacugcacua

SEQ ID NO: 2428913 - RNA, 15 nt, Human
aucacgccacugcac

SEQ ID NO: 2428914 - RNA, 15 nt, Human
aucacgcuccccgcc

SEQ ID NO: 2428915 - RNA, 13 nt, Human
aucacgcuccccg

SEQ ID NO: 2428916 - RNA, 12 nt, Human
aucacgcucccc

SEQ ID NO: 2428917 - RNA, 20 nt, Human
aucaauuuguaauugcuuac

SEQ ID NO: 2428918 - RNA, 13 nt, Human
aucacgcuuuccu

SEQ ID NO: 2428919 - RNA, 14 nt, Human
aucacgccacugca

SEQ ID NO: 2428920 - RNA, 23 nt, Human
aucacgccacugcacuccagccu

SEQ ID NO: 2428921 - RNA, 13 nt, Human
aucacuccccucc

SEQ ID NO: 2428922 - RNA, 12 nt, Human
aucacuccccuc

SEQ ID NO: 2428923 - RNA, 14 nt, Human
aucacuccccucca

SEQ ID NO: 2428924 - RNA, 23 nt, Human
aucacgcuccccgccuguucccc

SEQ ID NO: 2428925 - RNA, 13 nt, Human
aucacucuguccu

SEQ ID NO: 2428926 - RNA, 21 nt, Human
aucacucugcugcuuagacau

SEQ ID NO: 2428927 - RNA, 14 nt, Human
aucacucugcugcu

SEQ ID NO: 2428928 - RNA, 16 nt, Human
aucaaggguacacugc

SEQ ID NO: 2428929 - RNA, 19 nt, Human
aucaacugggcugaacacu

SEQ ID NO: 2428930 - RNA, 21 nt, Human
aucaacugcaucaagauguga

SEQ ID NO: 2428931 - RNA, 13 nt, Human
aucaacugaauga

SEQ ID NO: 2428932 - RNA, 14 nt, Human
aucaacugaaugag

SEQ ID NO: 2428933 - RNA, 11 nt, Human
aucaacugaau

SEQ ID NO: 2428934 - RNA, 16 nt, Human
aucaaauaugcaaagc

SEQ ID NO: 2428935 - RNA, 17 nt, Human
aucaaauaugcaaagca

SEQ ID NO: 2428936 - RNA, 18 nt, Human
aucaaauaugcaaagcac

SEQ ID NO: 2428937 - RNA, 19 nt, Human
uuccuguuuuucacauuuu

SEQ ID NO: 2428938 - RNA, 23 nt, Human
uuccuguuuuucacauuuuccuu

SEQ ID NO: 2428939 - RNA, 13 nt, Human
uuccuuaaacugu

SEQ ID NO: 2428940 - RNA, 15 nt, Human
uuccuuaaacugugu

SEQ ID NO: 2428941 - RNA, 16 nt, Human
uuccuuaaacugugug

SEQ ID NO: 2428942 - RNA, 17 nt, Human
uuccuuaaacugugugg

SEQ ID NO: 2428943 - RNA, 13 nt, Human
uuccuuaccuuuu

SEQ ID NO: 2428944 - RNA, 21 nt, Human
auauuuuucaugauuuugaaa

SEQ ID NO: 2428945 - RNA, 16 nt, Human
uuccuuacugcagaau

SEQ ID NO: 2428946 - RNA, 15 nt, Human
aucaaauaugcaaag

SEQ ID NO: 2428947 - RNA, 21 nt, Human
auauuuuugguugucaauauu

SEQ ID NO: 2428948 - RNA, 18 nt, Human
auauuuuugguugucaau

SEQ ID NO: 2428949 - RNA, 18 nt, Human
uuccucucuuuguucuca

SEQ ID NO: 2428950 - RNA, 15 nt, Human
uuccucucuccagau

SEQ ID NO: 2428951 - RNA, 14 nt, Human
uuccucucuccaga

SEQ ID NO: 2428952 - RNA, 22 nt, Human
uuccucucuuuguucucagcuc

SEQ ID NO: 2428953 - RNA, 21 nt, Human
uuccucucuuuguucucagcu

SEQ ID NO: 2428954 - RNA, 15 nt, Human
uuccucuuugcuuug

SEQ ID NO: 2428955 - RNA, 16 nt, Human
uuccucuuugcuuugc

SEQ ID NO: 2428956 - RNA, 13 nt, Human
uuccucugagccu

SEQ ID NO: 2428957 - RNA, 18 nt, Human
uuccucuccacugccuuc

SEQ ID NO: 2428958 - RNA, 16 nt, Human
uuccucuccacugccu

SEQ ID NO: 2428959 - RNA, 17 nt, Human
uuccuaaguauaaaugg

SEQ ID NO: 2428960 - RNA, 19 nt, Human
uuccucuccacugccuucg

SEQ ID NO: 2428961 - RNA, 16 nt, Human
uuccuaaaugcaguga

SEQ ID NO: 2428962 - RNA, 14 nt, Human
uuccuaacacagca

SEQ ID NO: 2428963 - RNA, 18 nt, Human
uuccuaacacagcaugug

SEQ ID NO: 2428964 - RNA, 19 nt, Human
uuccuaacacagcaugugu

SEQ ID NO: 2428965 - RNA, 14 nt, Human
uuccuaaggcugca

SEQ ID NO: 2428966 - RNA, 19 nt, Human
uuccuaacaggauuagaca

SEQ ID NO: 2428967 - RNA, 21 nt, Human
uuccuaaauauauuuuaagac

SEQ ID NO: 2428968 - RNA, 14 nt, Human
uuccuaaaugcagu

SEQ ID NO: 2428969 - RNA, 13 nt, Human
uuccuaaaugcag

SEQ ID NO: 2428970 - RNA, 20 nt, Human
uuccuaaauauauuuuaaga

SEQ ID NO: 2428971 - RNA, 21 nt, Human
uuccggaauccuguccucagc

SEQ ID NO: 2428972 - RNA, 22 nt, Human
uuccuggcacugcuuccaguga

SEQ ID NO: 2428973 - RNA, 20 nt, Human
uuccuggcacugcuuccagu

SEQ ID NO: 2428974 - RNA, 22 nt, Human
uuccuguuguuauggaaacugu

SEQ ID NO: 2428975 - RNA, 14 nt, Human
uuccucuuugcuuu

SEQ ID NO: 2428976 - RNA, 21 nt, Human
uuccugggaaauauucccuag

SEQ ID NO: 2428977 - RNA, 17 nt, Human
uuccugggaaauauucc

SEQ ID NO: 2428978 - RNA, 14 nt, Human
uuccuggcuucuua

SEQ ID NO: 2428979 - RNA, 19 nt, Human
uuccuggcacugcuuccag

SEQ ID NO: 2428980 - RNA, 15 nt, Human
uuccugaaaugcagu

SEQ ID NO: 2428981 - RNA, 17 nt, Human
uuccugaaagaaacagu

SEQ ID NO: 2428982 - RNA, 18 nt, Human
uuccugaaagaaacaguu

SEQ ID NO: 2428983 - RNA, 22 nt, Human
uuccucuuuuuauuuaguuccu

SEQ ID NO: 2428984 - RNA, 22 nt, Human
uuccucuuugcuuugcuuucug

SEQ ID NO: 2428985 - RNA, 12 nt, Human
uuccugaaagaa

SEQ ID NO: 2428986 - RNA, 18 nt, Human
uuccugaaacaacuugga

SEQ ID NO: 2428987 - RNA, 13 nt, Human
uuccgcuuggagc

SEQ ID NO: 2428988 - RNA, 19 nt, Human
uuccgcuuggagcagaggg

SEQ ID NO: 2428989 - RNA, 20 nt, Human
uuccgacaaccgaugcucca

SEQ ID NO: 2428990 - RNA, 22 nt, Human
uuccgacaaccgaugcuccagc

SEQ ID NO: 2428991 - RNA, 23 nt, Human
uuccgacaaccgaugcuccagcc

SEQ ID NO: 2428992 - RNA, 15 nt, Human
uucccuuuuuuuaag

SEQ ID NO: 2428993 - RNA, 23 nt, Human
uuccgaaaaauccucuuccucug

SEQ ID NO: 2428994 - RNA, 21 nt, Human
uuccgaaaaauccucuuccuc

SEQ ID NO: 2428995 - RNA, 20 nt, Human
uuccgaaaccaaagaagaaa

SEQ ID NO: 2428996 - RNA, 20 nt, Human
uuccgaaaaauccucuuccu

SEQ ID NO: 2428997 - RNA, 15 nt, Human
uucccuaccucaggc

SEQ ID NO: 2428998 - RNA, 13 nt, Human
uucccuaccucag

SEQ ID NO: 2428999 - RNA, 14 nt, Human
uucccuaccucagg

SEQ ID NO: 2429000 - RNA, 16 nt, Human
uucccuaaucuauggu

SEQ ID NO: 2429001 - RNA, 19 nt, Human
uucccuaagccaagggccu

SEQ ID NO: 2429002 - RNA, 17 nt, Human
uucccguggccccagcc

SEQ ID NO: 2429003 - RNA, 16 nt, Human
uucccguggccccagc

SEQ ID NO: 2429004 - RNA, 15 nt, Human
uucccguggccccag

SEQ ID NO: 2429005 - RNA, 13 nt, Human
uucccguggcccc

SEQ ID NO: 2429006 - RNA, 15 nt, Human
uucccguuucuccac

SEQ ID NO: 2429007 - RNA, 14 nt, Human
uucccguuucucca

SEQ ID NO: 2429008 - RNA, 17 nt, Human
uucccguuucuccaccu

SEQ ID NO: 2429009 - RNA, 19 nt, Human
uucccguggccccagccug

SEQ ID NO: 2429010 - RNA, 15 nt, Human
uucccuaagccaagg

SEQ ID NO: 2429011 - RNA, 21 nt, Human
auauuugaauguaugcuucau

SEQ ID NO: 2429012 - RNA, 19 nt, Human
auauuugaaucuugucuca

SEQ ID NO: 2429013 - RNA, 18 nt, Human
auauuugaaucuugucuc

SEQ ID NO: 2429014 - RNA, 17 nt, Human
auauuugaaucuugucu

SEQ ID NO: 2429015 - RNA, 23 nt, Human
auauuuacagugaaaauguaagc

SEQ ID NO: 2429016 - RNA, 16 nt, Human
auauuugaaucuuguc

SEQ ID NO: 2429017 - RNA, 21 nt, Human
auauuugaaucuugucucaau

SEQ ID NO: 2429018 - RNA, 13 nt, Human
auauuugcuuuuu

SEQ ID NO: 2429019 - RNA, 23 nt, Human
uucccgagcaaagucuaaaguuu

SEQ ID NO: 2429020 - RNA, 22 nt, Human
uucccgagcaaagucuaaaguu

SEQ ID NO: 2429021 - RNA, 12 nt, Human
uucccgcucagc

SEQ ID NO: 2429022 - RNA, 15 nt, Human
uucccgcucagcccu

SEQ ID NO: 2429023 - RNA, 14 nt, Human
uucccgcucagccc

SEQ ID NO: 2429024 - RNA, 21 nt, Human
uuccccuugcccuugcccuga

SEQ ID NO: 2429025 - RNA, 20 nt, Human
uuccccuugcccuugcccug

SEQ ID NO: 2429026 - RNA, 14 nt, Human
uuccccuugcccuu

SEQ ID NO: 2429027 - RNA, 13 nt, Human
uuccccuugcccu

SEQ ID NO: 2429028 - RNA, 23 nt, Human
uuccccuugcccuugcccugacc

SEQ ID NO: 2429029 - RNA, 22 nt, Human
uuccccuugcccuugcccugac

SEQ ID NO: 2429030 - RNA, 14 nt, Human
uuccccuuucccca

SEQ ID NO: 2429031 - RNA, 17 nt, Human
uuccccuuuccccacuc

SEQ ID NO: 2429032 - RNA, 21 nt, Human
uucccgagcaaagucuaaagu

SEQ ID NO: 2429033 - RNA, 23 nt, Human
uucccgaaccccaaggagggaga

SEQ ID NO: 2429034 - RNA, 23 nt, Human
uucauaugacauucaugccuggc

SEQ ID NO: 2429035 - RNA, 16 nt, Human
uucaucaaauggaaga

SEQ ID NO: 2429036 - RNA, 19 nt, Human
uucaucaaauggaagacac

SEQ ID NO: 2429037 - RNA, 18 nt, Human
uucauauaugaggacuug

SEQ ID NO: 2429038 - RNA, 21 nt, Human
uucauauaugaggacuugugu

SEQ ID NO: 2429039 - RNA, 20 nt, Human
uucauaugacauucaugccu

SEQ ID NO: 2429040 - RNA, 20 nt, Human
uucauaucuauuuauuaaau

SEQ ID NO: 2429041 - RNA, 17 nt, Human
uucauaguaacuucuua

SEQ ID NO: 2429042 - RNA, 19 nt, Human
uucauaggucacuggcucu

SEQ ID NO: 2429043 - RNA, 14 nt, Human
uucauaggucacug

SEQ ID NO: 2429044 - RNA, 16 nt, Human
uucagugauuacuguc

SEQ ID NO: 2429045 - RNA, 19 nt, Human
uucauagggucucuucagg

SEQ ID NO: 2429046 - RNA, 20 nt, Human
uucagugagggucuucuuac

SEQ ID NO: 2429047 - RNA, 16 nt, Human
uucagugaaagcauca

SEQ ID NO: 2429048 - RNA, 16 nt, Human
uucagguauguugccu

SEQ ID NO: 2429049 - RNA, 19 nt, Human
uucagguagcugccccugg

SEQ ID NO: 2429050 - RNA, 14 nt, Human
uucagguacuaaau

SEQ ID NO: 2429051 - RNA, 17 nt, Human
uucagguaacaggcaga

SEQ ID NO: 2429052 - RNA, 19 nt, Human
uucaggugacaugugaaac

SEQ ID NO: 2429053 - RNA, 18 nt, Human
uucaggugacaugugaaa

SEQ ID NO: 2429054 - RNA, 17 nt, Human
uucaggugacaugugaa

SEQ ID NO: 2429055 - RNA, 16 nt, Human
uucaggugacauguga

SEQ ID NO: 2429056 - RNA, 14 nt, Human
uucaggugacaugu

SEQ ID NO: 2429057 - RNA, 13 nt, Human
uucaggugacaug

SEQ ID NO: 2429058 - RNA, 23 nt, Human
uucaggugacaugugaaaccuuu

SEQ ID NO: 2429059 - RNA, 22 nt, Human
uucaggugacaugugaaaccuu

SEQ ID NO: 2429060 - RNA, 21 nt, Human
uucaggugacaugugaaaccu

SEQ ID NO: 2429061 - RNA, 21 nt, Human
uucagguuaucgaaauaacaa

SEQ ID NO: 2429062 - RNA, 20 nt, Human
uucagguuaucgaaauaaca

SEQ ID NO: 2429063 - RNA, 19 nt, Human
uucagguuaucgaaauaac

SEQ ID NO: 2429064 - RNA, 20 nt, Human
uucagguguuuaguugcaga

SEQ ID NO: 2429065 - RNA, 14 nt, Human
uucaguaagccgug

SEQ ID NO: 2429066 - RNA, 16 nt, Human
uucagguuuuaguuuu

SEQ ID NO: 2429067 - RNA, 22 nt, Human
uucagguuaucgaaauaacaau

SEQ ID NO: 2429068 - RNA, 24 nt, Human
uucagguuaucgaaauaacaaugu

SEQ ID NO: 2429069 - RNA, 15 nt, Human
uucagguuuuguaaa

SEQ ID NO: 2429070 - RNA, 19 nt, Human
uucagguuuuguaaagaug

SEQ ID NO: 2429071 - RNA, 21 nt, Human
uucagucauauaaaagcuaug

SEQ ID NO: 2429072 - RNA, 21 nt, Human
uucaguauuuuggagaaauua

SEQ ID NO: 2429073 - RNA, 20 nt, Human
uucaguauuuuggagaaauu

SEQ ID NO: 2429074 - RNA, 19 nt, Human
uucaguauuuuggagaaau

SEQ ID NO: 2429075 - RNA, 18 nt, Human
uucaguauuuuggagaaa

SEQ ID NO: 2429076 - RNA, 15 nt, Human
uucaguaaaaaacaa

SEQ ID NO: 2429077 - RNA, 20 nt, Human
auauauggcagaguuguaaa

SEQ ID NO: 2429078 - RNA, 19 nt, Human
auauauggcagaguuguaa

SEQ ID NO: 2429079 - RNA, 17 nt, Human
auauauggcagaguugu

SEQ ID NO: 2429080 - RNA, 14 nt, Human
auauauggcagagu

SEQ ID NO: 2429081 - RNA, 13 nt, Human
auauauggcagag

SEQ ID NO: 2429082 - RNA, 14 nt, Human
auauauggauaaug

SEQ ID NO: 2429083 - RNA, 19 nt, Human
uucaucauauuauacagac

SEQ ID NO: 2429084 - RNA, 22 nt, Human
auauauggcagaguuguaaaua

SEQ ID NO: 2429085 - RNA, 21 nt, Human
auauauggcagaguuguaaau

SEQ ID NO: 2429086 - RNA, 13 nt, Human
auauauguguuuu

SEQ ID NO: 2429087 - RNA, 15 nt, Human
auauauguguuuuuc

SEQ ID NO: 2429088 - RNA, 21 nt, Human
auauauguguuuuucacauuu

SEQ ID NO: 2429089 - RNA, 23 nt, Human
auauauguguuuuucacauuugc

SEQ ID NO: 2429090 - RNA, 13 nt, Human
auauaugcuaagu

SEQ ID NO: 2429091 - RNA, 15 nt, Human
uucaucaaugaauga

SEQ ID NO: 2429092 - RNA, 22 nt, Human
uucaucaaucauuguacaguuu

SEQ ID NO: 2429093 - RNA, 16 nt, Human
uucaucaaucauugua

SEQ ID NO: 2429094 - RNA, 13 nt, Human
uucaucaaucauu

SEQ ID NO: 2429095 - RNA, 14 nt, Human
uucaucaagacugg

SEQ ID NO: 2429096 - RNA, 10 nt, Human
auauauuuau

SEQ ID NO: 2429097 - RNA, 12 nt, Human
auauauuuauaa

SEQ ID NO: 2429098 - RNA, 13 nt, Human
auauauuuauaac

SEQ ID NO: 2429099 - RNA, 16 nt, Human
auauauuuaaugauaa

SEQ ID NO: 2429100 - RNA, 17 nt, Human
auauauguuuaccuuuu

SEQ ID NO: 2429101 - RNA, 23 nt, Human
auauauguguguuuaaauaaagu

SEQ ID NO: 2429102 - RNA, 14 nt, Human
auauauguuuaccu

SEQ ID NO: 2429103 - RNA, 22 nt, Human
auauauguuuuaagaggcaggg

SEQ ID NO: 2429104 - RNA, 21 nt, Human
auauauguuuuaagaggcagg

SEQ ID NO: 2429105 - RNA, 9 nt, Human
auauauuuc

SEQ ID NO: 2429106 - RNA, 14 nt, Human
auauauuuauaacu

SEQ ID NO: 2429107 - RNA, 15 nt, Human
auauauuuauaacuc

SEQ ID NO: 2429108 - RNA, 16 nt, Human
auauauuuauaacuca

SEQ ID NO: 2429109 - RNA, 21 nt, Human
auauauuuauaacucaucaua

SEQ ID NO: 2429110 - RNA, 22 nt, Human
auauauuucacguguucccucu

SEQ ID NO: 2429111 - RNA, 20 nt, Human
auauauguuuaccuuuuaau

SEQ ID NO: 2429112 - RNA, 23 nt, Human
auauauuuauaacucaucauaaa

SEQ ID NO: 2429113 - RNA, 14 nt, Human
auauauuucagaua

SEQ ID NO: 2429114 - RNA, 15 nt, Human
auauauuuuaagacg

SEQ ID NO: 2429115 - RNA, 16 nt, Human
auauauuuuacaauuu

SEQ ID NO: 2429116 - RNA, 13 nt, Human
auauauuuuaauu

SEQ ID NO: 2429117 - RNA, 21 nt, Human
uucagcacugucccuugccuc

SEQ ID NO: 2429118 - RNA, 16 nt, Human
uucagcacugucccuu

SEQ ID NO: 2429119 - RNA, 15 nt, Human
uucagcacugucccu

SEQ ID NO: 2429120 - RNA, 14 nt, Human
uucagcacuguccc

SEQ ID NO: 2429121 - RNA, 20 nt, Human
uucagauuuuaaaaagucuu

SEQ ID NO: 2429122 - RNA, 20 nt, Human
uucagcacugucccuugccu

SEQ ID NO: 2429123 - RNA, 16 nt, Human
uucagcauauuuauag

SEQ ID NO: 2429124 - RNA, 17 nt, Human
uucagcgguuuauauaa

SEQ ID NO: 2429125 - RNA, 20 nt, Human
uucagcuaagcuaggaauga

SEQ ID NO: 2429126 - RNA, 14 nt, Human
uucagcuaagcuag

SEQ ID NO: 2429127 - RNA, 24 nt, Human
uucagcgauguaugcagcuaucug

SEQ ID NO: 2429128 - RNA, 10 nt, Human
uucagccaag

SEQ ID NO: 2429129 - RNA, 16 nt, Human
uucagcgauguaugca

SEQ ID NO: 2429130 - RNA, 16 nt, Human
uucagguaacaggcag

SEQ ID NO: 2429131 - RNA, 15 nt, Human
uucagguaacaggca

SEQ ID NO: 2429132 - RNA, 22 nt, Human
uucaggguuggccccugcccgg

SEQ ID NO: 2429133 - RNA, 19 nt, Human
uucaggguuggccccugcc

SEQ ID NO: 2429134 - RNA, 17 nt, Human
uucaggguuggccccug

SEQ ID NO: 2429135 - RNA, 16 nt, Human
uucaggguuggccccu

SEQ ID NO: 2429136 - RNA, 16 nt, Human
uucagggugaugccag

SEQ ID NO: 2429137 - RNA, 18 nt, Human
uucagcucacacaugaga

SEQ ID NO: 2429138 - RNA, 14 nt, Human
uucaggguuggccc

SEQ ID NO: 2429139 - RNA, 16 nt, Human
uucacuucaucuucuc

SEQ ID NO: 2429140 - RNA, 15 nt, Human
uucacuucaucuucu

SEQ ID NO: 2429141 - RNA, 19 nt, Human
uucacuucauaauccagua

SEQ ID NO: 2429142 - RNA, 18 nt, Human
uuaucauucaaguguaaa

SEQ ID NO: 2429143 - RNA, 19 nt, Human
uuaucauucauucuuagcu

SEQ ID NO: 2429144 - RNA, 18 nt, Human
uuaucauguguaaucaau

SEQ ID NO: 2429145 - RNA, 15 nt, Human
uuaucauguguaauc

SEQ ID NO: 2429146 - RNA, 21 nt, Human
uuaucauguguaaucaauaaa

SEQ ID NO: 2429147 - RNA, 14 nt, Human
uucacuucucccaa

SEQ ID NO: 2429148 - RNA, 18 nt, Human
uucacuucaucuucucag

SEQ ID NO: 2429149 - RNA, 18 nt, Human
uucacuucucccaagacu

SEQ ID NO: 2429150 - RNA, 16 nt, Human
uucacuuuagaugcug

SEQ ID NO: 2429151 - RNA, 13 nt, Human
uucacuuuaauuc

SEQ ID NO: 2429152 - RNA, 17 nt, Human
uucacuuucaaaaacau

SEQ ID NO: 2429153 - RNA, 17 nt, Human
uucacuuuagaugcuga

SEQ ID NO: 2429154 - RNA, 19 nt, Human
uucacuuucacauagaugu

SEQ ID NO: 2429155 - RNA, 21 nt, Human
uucagaaauuggaacagaaug

SEQ ID NO: 2429156 - RNA, 13 nt, Human
uucagaaauugga

SEQ ID NO: 2429157 - RNA, 20 nt, Human
uucacuuuuagggagaguca

SEQ ID NO: 2429158 - RNA, 20 nt, Human
uucagaaauuggaacagaau

SEQ ID NO: 2429159 - RNA, 16 nt, Human
uucagaaccauccaua

SEQ ID NO: 2429160 - RNA, 12 nt, Human
uucagaaccucu

SEQ ID NO: 2429161 - RNA, 15 nt, Human
uucagaaccucuucc

SEQ ID NO: 2429162 - RNA, 16 nt, Human
uucagaaauguguuau

SEQ ID NO: 2429163 - RNA, 17 nt, Human
uucacuuuugacaaagg

SEQ ID NO: 2429164 - RNA, 20 nt, Human
uucacuuuugacaaaggcaa

SEQ ID NO: 2429165 - RNA, 23 nt, Human
uucagaaaacccuuuucuacagu

SEQ ID NO: 2429166 - RNA, 16 nt, Human
uucagauuugccuuau

SEQ ID NO: 2429167 - RNA, 21 nt, Human
uucagauucccagagcaaaau

SEQ ID NO: 2429168 - RNA, 22 nt, Human
uucagauucccagagcaaaaua

SEQ ID NO: 2429169 - RNA, 14 nt, Human
uucagauugcuuug

SEQ ID NO: 2429170 - RNA, 14 nt, Human
uucagauucccaga

SEQ ID NO: 2429171 - RNA, 16 nt, Human
uucagauauauuuuuc

SEQ ID NO: 2429172 - RNA, 15 nt, Human
uucagauauauauca

SEQ ID NO: 2429173 - RNA, 19 nt, Human
uucagauauaaaagacuga

SEQ ID NO: 2429174 - RNA, 16 nt, Human
uucagaagacacugca

SEQ ID NO: 2429175 - RNA, 16 nt, Human
uucagaaccucuuccc

SEQ ID NO: 2429176 - RNA, 17 nt, Human
uucagaaccucuucccc

SEQ ID NO: 2429177 - RNA, 18 nt, Human
uucagaaccucuucccca

SEQ ID NO: 2429178 - RNA, 19 nt, Human
uucagaaccucuuccccag

SEQ ID NO: 2429179 - RNA, 22 nt, Human
uucagauauaaaagacugacca

SEQ ID NO: 2429180 - RNA, 21 nt, Human
uucauugccuuaacuggagcc

SEQ ID NO: 2429181 - RNA, 19 nt, Human
uucauugcacuuugauuag

SEQ ID NO: 2429182 - RNA, 20 nt, Human
uucauugcccccagggcacu

SEQ ID NO: 2429183 - RNA, 12 nt, Human
uucauuguaaaa

SEQ ID NO: 2429184 - RNA, 22 nt, Human
uuccaacuguauauauucccaa

SEQ ID NO: 2429185 - RNA, 16 nt, Human
uuccaagacaugucug

SEQ ID NO: 2429186 - RNA, 21 nt, Human
uuccaagacaugucuguucua

SEQ ID NO: 2429187 - RNA, 22 nt, Human
uuccaagacaguauacaguccu

SEQ ID NO: 2429188 - RNA, 12 nt, Human
uuccaagacauu

SEQ ID NO: 2429189 - RNA, 13 nt, Human
uuccaagacauug

SEQ ID NO: 2429190 - RNA, 14 nt, Human
uuccaagacauugu

SEQ ID NO: 2429191 - RNA, 14 nt, Human
uuccaagacaguau

SEQ ID NO: 2429192 - RNA, 12 nt, Human
uuccaagacagu

SEQ ID NO: 2429193 - RNA, 21 nt, Human
uuccaauuuucuggaauacau

SEQ ID NO: 2429194 - RNA, 11 nt, Human
uuccacaaaau

SEQ ID NO: 2429195 - RNA, 18 nt, Human
uuccacaaaaucugucca

SEQ ID NO: 2429196 - RNA, 22 nt, Human
uuccaauuuacauacucugcuu

SEQ ID NO: 2429197 - RNA, 16 nt, Human
uuccaagacauuguca

SEQ ID NO: 2429198 - RNA, 17 nt, Human
uuccaagacauugucaa

SEQ ID NO: 2429199 - RNA, 19 nt, Human
uuccaagacauugucaaua

SEQ ID NO: 2429200 - RNA, 20 nt, Human
uuccaagacauugucaauaa

SEQ ID NO: 2429201 - RNA, 21 nt, Human
uucauuaccuuuuuugauaaa

SEQ ID NO: 2429202 - RNA, 13 nt, Human
uucauuaccuuuu

SEQ ID NO: 2429203 - RNA, 18 nt, Human
uucauuacagcuuaauca

SEQ ID NO: 2429204 - RNA, 13 nt, Human
uucauuacagcuu

SEQ ID NO: 2429205 - RNA, 16 nt, Human
uucauuaauucuauaa

SEQ ID NO: 2429206 - RNA, 13 nt, Human
uucauuagagcag

SEQ ID NO: 2429207 - RNA, 14 nt, Human
uucauuaucucaaa

SEQ ID NO: 2429208 - RNA, 22 nt, Human
uucauuauuaguacugcucuug

SEQ ID NO: 2429209 - RNA, 17 nt, Human
uucauuauguaaaaugu

SEQ ID NO: 2429210 - RNA, 14 nt, Human
uucauuauguaaaa

SEQ ID NO: 2429211 - RNA, 16 nt, Human
uucauugacuaucaaa

SEQ ID NO: 2429212 - RNA, 19 nt, Human
uucauucuugaaagcugug

SEQ ID NO: 2429213 - RNA, 13 nt, Human
uucauucuugaaa

SEQ ID NO: 2429214 - RNA, 22 nt, Human
uucauugagaguuuugucuuga

SEQ ID NO: 2429215 - RNA, 19 nt, Human
uucauugagaguuuugucu

SEQ ID NO: 2429216 - RNA, 17 nt, Human
uucauugagaguuuugu

SEQ ID NO: 2429217 - RNA, 18 nt, Human
uucauucuucucuagcug

SEQ ID NO: 2429218 - RNA, 18 nt, Human
uucauugauaugaaaaau

SEQ ID NO: 2429219 - RNA, 16 nt, Human
uucauucuucucuagc

SEQ ID NO: 2429220 - RNA, 13 nt, Human
uucauucuuagcu

SEQ ID NO: 2429221 - RNA, 20 nt, Human
uucauuauuggaauuaaccu

SEQ ID NO: 2429222 - RNA, 13 nt, Human
uucauuauuggaa

SEQ ID NO: 2429223 - RNA, 17 nt, Human
uucauuauuggaauuaa

SEQ ID NO: 2429224 - RNA, 18 nt, Human
uucauuauuggaauuaac

SEQ ID NO: 2429225 - RNA, 21 nt, Human
uuccacaagagcccaggccuc

SEQ ID NO: 2429226 - RNA, 21 nt, Human
uuccacagccugcaagucagu

SEQ ID NO: 2429227 - RNA, 16 nt, Human
uuccacauauaaagcu

SEQ ID NO: 2429228 - RNA, 21 nt, Human
uuccaccacagccagcaccug

SEQ ID NO: 2429229 - RNA, 16 nt, Human
uuccaccacagccagc

SEQ ID NO: 2429230 - RNA, 15 nt, Human
uuccaccacagccag

SEQ ID NO: 2429231 - RNA, 22 nt, Human
uuccacaucuacguuuuuggug

SEQ ID NO: 2429232 - RNA, 14 nt, Human
uuccacgaugaaaa

SEQ ID NO: 2429233 - RNA, 19 nt, Human
uuccacgaugaaaaacuuc

SEQ ID NO: 2429234 - RNA, 15 nt, Human
uuccacgcugucucc

SEQ ID NO: 2429235 - RNA, 15 nt, Human
uuccaccuucccaug

SEQ ID NO: 2429236 - RNA, 21 nt, Human
uuccacggagccacuccucug

SEQ ID NO: 2429237 - RNA, 22 nt, Human
uuccacggagccacuccucuga

SEQ ID NO: 2429238 - RNA, 15 nt, Human
uuccacggagccacu

SEQ ID NO: 2429239 - RNA, 18 nt, Human
uuccacgcugucuccaga

SEQ ID NO: 2429240 - RNA, 19 nt, Human
uuccacgcugucuccagac

SEQ ID NO: 2429241 - RNA, 15 nt, Human
uuccaccucccuccc

SEQ ID NO: 2429242 - RNA, 14 nt, Human
uuccaccucccucc

SEQ ID NO: 2429243 - RNA, 12 nt, Human
uuccaccagccu

SEQ ID NO: 2429244 - RNA, 13 nt, Human
uuccaccucccuc

SEQ ID NO: 2429245 - RNA, 22 nt, Human
uuccaccacagccagcaccugg

SEQ ID NO: 2429246 - RNA, 11 nt, Human
uuccaccagcc

SEQ ID NO: 2429247 - RNA, 19 nt, Human
uuccacguguuuuauuccu

SEQ ID NO: 2429248 - RNA, 17 nt, Human
uuccaggcugggagagc

SEQ ID NO: 2429249 - RNA, 15 nt, Human
uuccaggcugggaga

SEQ ID NO: 2429250 - RNA, 13 nt, Human
uuccaggcuggga

SEQ ID NO: 2429251 - RNA, 24 nt, Human
uuccacggagccacuccucugacu

SEQ ID NO: 2429252 - RNA, 19 nt, Human
uuccacgucccccuggggc

SEQ ID NO: 2429253 - RNA, 18 nt, Human
uuccagguuuaagcuguu

SEQ ID NO: 2429254 - RNA, 17 nt, Human
uuccagguuuaagcugu

SEQ ID NO: 2429255 - RNA, 19 nt, Human
uuccaguaccuuugucaca

SEQ ID NO: 2429256 - RNA, 17 nt, Human
uuccaguaccuuuguca

SEQ ID NO: 2429257 - RNA, 18 nt, Human
uuccaguaccuuugucac

SEQ ID NO: 2429258 - RNA, 15 nt, Human
auauauuuucuguuu

SEQ ID NO: 2429259 - RNA, 18 nt, Human
auauauuuuacaauuuuu

SEQ ID NO: 2429260 - RNA, 14 nt, Human
auauauuuuuauau

SEQ ID NO: 2429261 - RNA, 23 nt, Human
auauauuuuuaagauaauaauau

SEQ ID NO: 2429262 - RNA, 16 nt, Human
auauauuuuuaagaua

SEQ ID NO: 2429263 - RNA, 14 nt, Human
auauauuuuuaaga

SEQ ID NO: 2429264 - RNA, 14 nt, Human
auaugaaauuuaau

SEQ ID NO: 2429265 - RNA, 16 nt, Human
auaugaagacauaaac

SEQ ID NO: 2429266 - RNA, 15 nt, Human
auaugaagacauaaa

SEQ ID NO: 2429267 - RNA, 14 nt, Human
auaugaagacauaa

SEQ ID NO: 2429268 - RNA, 19 nt, Human
auaugaacauauuguugaa

SEQ ID NO: 2429269 - RNA, 20 nt, Human
auaugaacauauuguugaaa

SEQ ID NO: 2429270 - RNA, 15 nt, Human
auaugaacauauugu

SEQ ID NO: 2429271 - RNA, 21 nt, Human
auaugaauuuaaauauaauuc

SEQ ID NO: 2429272 - RNA, 14 nt, Human
auaugacagcuguc

SEQ ID NO: 2429273 - RNA, 15 nt, Human
auaugacagcugucc

SEQ ID NO: 2429274 - RNA, 21 nt, Human
auaugacagcugucccuguca

SEQ ID NO: 2429275 - RNA, 21 nt, Human
auaugaagcucaccuguugcu

SEQ ID NO: 2429276 - RNA, 17 nt, Human
auaugaagcucaccugu

SEQ ID NO: 2429277 - RNA, 17 nt, Human
auaugaauuuaaauaua

SEQ ID NO: 2429278 - RNA, 22 nt, Human
auaugaauacagggcaugcauu

SEQ ID NO: 2429279 - RNA, 19 nt, Human
auaugacauucaugccugg

SEQ ID NO: 2429280 - RNA, 13 nt, Human
auaugaccucaug

SEQ ID NO: 2429281 - RNA, 16 nt, Human
auaugacggaagaaca

SEQ ID NO: 2429282 - RNA, 13 nt, Human
auaugacucacau

SEQ ID NO: 2429283 - RNA, 18 nt, Human
auaugacggaagaacaua

SEQ ID NO: 2429284 - RNA, 20 nt, Human
auaugacggaagaacauaga

SEQ ID NO: 2429285 - RNA, 21 nt, Human
auaugagcuuccuucugugaa

SEQ ID NO: 2429286 - RNA, 20 nt, Human
auaugacucacaugaugcau

SEQ ID NO: 2429287 - RNA, 23 nt, Human
auaugacggaagaacauagaacu

SEQ ID NO: 2429288 - RNA, 22 nt, Human
auaugauuuuauuugacaaaau

SEQ ID NO: 2429289 - RNA, 19 nt, Human
auaugauuuuauuugacaa

SEQ ID NO: 2429290 - RNA, 16 nt, Human
auaugauuuuauuuga

SEQ ID NO: 2429291 - RNA, 14 nt, Human
auaugauuuauagu

SEQ ID NO: 2429292 - RNA, 13 nt, Human
auaugauuuauag

SEQ ID NO: 2429293 - RNA, 12 nt, Human
auaugauuuaua

SEQ ID NO: 2429294 - RNA, 22 nt, Human
auaugagcuuccuucugugaaa

SEQ ID NO: 2429295 - RNA, 23 nt, Human
auaugagaaggugccucaagaau

SEQ ID NO: 2429296 - RNA, 13 nt, Human
auaugcaaagcac

SEQ ID NO: 2429297 - RNA, 14 nt, Human
auaugcaaagcacu

SEQ ID NO: 2429298 - RNA, 22 nt, Human
auauggcucuucauaauucuaa

SEQ ID NO: 2429299 - RNA, 15 nt, Human
auauggcuauaaaua

SEQ ID NO: 2429300 - RNA, 15 nt, Human
auaugggacauuuuu

SEQ ID NO: 2429301 - RNA, 16 nt, Human
auauggccucaagauc

SEQ ID NO: 2429302 - RNA, 15 nt, Human
auauggccucaagau

SEQ ID NO: 2429303 - RNA, 15 nt, Human
auaugcaaagcacug

SEQ ID NO: 2429304 - RNA, 23 nt, Human
auauggccacaguagucuugaug

SEQ ID NO: 2429305 - RNA, 17 nt, Human
auauguaggugucugca

SEQ ID NO: 2429306 - RNA, 16 nt, Human
auauguguauguacgu

SEQ ID NO: 2429307 - RNA, 14 nt, Human
auauguguauguac

SEQ ID NO: 2429308 - RNA, 12 nt, Human
auauguguaugu

SEQ ID NO: 2429309 - RNA, 16 nt, Human
auauguguguguaugu

SEQ ID NO: 2429310 - RNA, 22 nt, Human
auauguguauguacguuuguau

SEQ ID NO: 2429311 - RNA, 20 nt, Human
auauguguguguauguuugc

SEQ ID NO: 2429312 - RNA, 15 nt, Human
uucauggacacuuug

SEQ ID NO: 2429313 - RNA, 14 nt, Human
uucauggacacuuu

SEQ ID NO: 2429314 - RNA, 20 nt, Human
uucauggacacuuugaaaug

SEQ ID NO: 2429315 - RNA, 16 nt, Human
uucauggacacuuuga

SEQ ID NO: 2429316 - RNA, 13 nt, Human
uucauuaaagcau

SEQ ID NO: 2429317 - RNA, 15 nt, Human
uucauuaauaauaaa

SEQ ID NO: 2429318 - RNA, 18 nt, Human
uucauuaauaauaaauuc

SEQ ID NO: 2429319 - RNA, 21 nt, Human
uucauuaauaauaaauucccu

SEQ ID NO: 2429320 - RNA, 19 nt, Human
uucauuaagcccucuucca

SEQ ID NO: 2429321 - RNA, 23 nt, Human
uucauuaaaggcuucucucucac

SEQ ID NO: 2429322 - RNA, 15 nt, Human
uucauuaaagcauuu

SEQ ID NO: 2429323 - RNA, 23 nt, Human
auauguaccuaacgaaguauccu

SEQ ID NO: 2429324 - RNA, 17 nt, Human
auauguacuugucaaag

SEQ ID NO: 2429325 - RNA, 17 nt, Human
auauggguucuuuuuug

SEQ ID NO: 2429326 - RNA, 23 nt, Human
auauggggggccaacaccaggga

SEQ ID NO: 2429327 - RNA, 18 nt, Human
auauggggggccaacacc

SEQ ID NO: 2429328 - RNA, 17 nt, Human
auaugggacauuuuuga

SEQ ID NO: 2429329 - RNA, 14 nt, Human
auaugggagaaaua

SEQ ID NO: 2429330 - RNA, 17 nt, Human
auaugggcauuguaguu

SEQ ID NO: 2429331 - RNA, 15 nt, Human
auaugggagaaauag

SEQ ID NO: 2429332 - RNA, 20 nt, Human
auaugggggccuggauucau

SEQ ID NO: 2429333 - RNA, 17 nt, Human
auauggggggccaacac

SEQ ID NO: 2429334 - RNA, 20 nt, Human
auauggggaugcagcauuau

SEQ ID NO: 2429335 - RNA, 16 nt, Human
auauggggaugcagca

SEQ ID NO: 2429336 - RNA, 21 nt, Human
auauguggaguucaucuugaa

SEQ ID NO: 2429337 - RNA, 20 nt, Human
auauguggaguucaucuuga

SEQ ID NO: 2429338 - RNA, 21 nt, Human
auauguacuugucaaagaagg

SEQ ID NO: 2429339 - RNA, 20 nt, Human
auauguacuugucaaagaag

SEQ ID NO: 2429340 - RNA, 19 nt, Human
auauguacuugucaaagaa

SEQ ID NO: 2429341 - RNA, 18 nt, Human
auauguaguauaaagaaa

SEQ ID NO: 2429342 - RNA, 19 nt, Human
auauguaguauaaagaaaa

SEQ ID NO: 2429343 - RNA, 17 nt, Human
uuucaccagauuugcua

SEQ ID NO: 2429344 - RNA, 22 nt, Human
uuucaccauuugauuauguagc

SEQ ID NO: 2429345 - RNA, 14 nt, Human
uuucacauuuuccu

SEQ ID NO: 2429346 - RNA, 15 nt, Human
uuucaccacauucgu

SEQ ID NO: 2429347 - RNA, 13 nt, Human
uuucaaaaacauu

SEQ ID NO: 2429348 - RNA, 13 nt, Human
uuucacauuuucc

SEQ ID NO: 2429349 - RNA, 15 nt, Human
uuucaaaaacacagu

SEQ ID NO: 2429350 - RNA, 15 nt, Human
uuucaaaaaaauaaa

SEQ ID NO: 2429351 - RNA, 17 nt, Human
uuuauuuuuuucugaau

SEQ ID NO: 2429352 - RNA, 16 nt, Human
uuuauuuuuugggaaa

SEQ ID NO: 2429353 - RNA, 14 nt, Human
uuuauuuuuuucua

SEQ ID NO: 2429354 - RNA, 14 nt, Human
uuucacucuccuug

SEQ ID NO: 2429355 - RNA, 23 nt, Human
uuucacuccggagugagaagcuu

SEQ ID NO: 2429356 - RNA, 22 nt, Human
uuucaccccucccuuucucccc

SEQ ID NO: 2429357 - RNA, 20 nt, Human
uuucaccccucccuuucucc

SEQ ID NO: 2429358 - RNA, 18 nt, Human
uuucaccccucccuuucu

SEQ ID NO: 2429359 - RNA, 17 nt, Human
uuucaccccucccuuuc

SEQ ID NO: 2429360 - RNA, 15 nt, Human
uuucaccccucccuu

SEQ ID NO: 2429361 - RNA, 14 nt, Human
uuucaccccucccu

SEQ ID NO: 2429362 - RNA, 13 nt, Human
uuucaccccuccc

SEQ ID NO: 2429363 - RNA, 22 nt, Human
uuucaccccacccuuccccucc

SEQ ID NO: 2429364 - RNA, 19 nt, Human
uuucacuggaguuacauua

SEQ ID NO: 2429365 - RNA, 18 nt, Human
uuucacuggaguuacauu

SEQ ID NO: 2429366 - RNA, 17 nt, Human
uuucacuggaguuacau

SEQ ID NO: 2429367 - RNA, 24 nt, Human
uuucacuguagaaugauuucaugc

SEQ ID NO: 2429368 - RNA, 23 nt, Human
uuucacuggccacaguuguuuga

SEQ ID NO: 2429369 - RNA, 17 nt, Human
uuucacucccuccauca

SEQ ID NO: 2429370 - RNA, 24 nt, Human
uuucacugcuggcugccuuagaac

SEQ ID NO: 2429371 - RNA, 15 nt, Human
uuucacucuccuugg

SEQ ID NO: 2429372 - RNA, 24 nt, Human
uuucacucuuauugcccacgcugg

SEQ ID NO: 2429373 - RNA, 22 nt, Human
uuucagaaaauauuauguguuu

SEQ ID NO: 2429374 - RNA, 17 nt, Human
uuucacuuuagaugcug

SEQ ID NO: 2429375 - RNA, 12 nt, Human
uuucacuuuaga

SEQ ID NO: 2429376 - RNA, 17 nt, Human
uuucacuuugugauuau

SEQ ID NO: 2429377 - RNA, 21 nt, Human
uuucacuuucacauagauguc

SEQ ID NO: 2429378 - RNA, 19 nt, Human
uuucacuauuuuuauuuau

SEQ ID NO: 2429379 - RNA, 12 nt, Human
uuucauaaagca

SEQ ID NO: 2429380 - RNA, 21 nt, Human
uuucaguugaucacuggcaau

SEQ ID NO: 2429381 - RNA, 15 nt, Human
uuucaguuuucagga

SEQ ID NO: 2429382 - RNA, 23 nt, Human
uuucccacaccguguaaaccaaa

SEQ ID NO: 2429383 - RNA, 20 nt, Human
uuucccacaccguguaaacc

SEQ ID NO: 2429384 - RNA, 15 nt, Human
uuucccaauucacau

SEQ ID NO: 2429385 - RNA, 12 nt, Human
uuuccauauguu

SEQ ID NO: 2429386 - RNA, 22 nt, Human
uuuccauauggauuuucuauug

SEQ ID NO: 2429387 - RNA, 18 nt, Human
uuuccauauggauuuucu

SEQ ID NO: 2429388 - RNA, 15 nt, Human
uuuccauaaggaaug

SEQ ID NO: 2429389 - RNA, 15 nt, Human
uuuccaguaccuuug

SEQ ID NO: 2429390 - RNA, 15 nt, Human
uuuccagucuccacc

SEQ ID NO: 2429391 - RNA, 20 nt, Human
uuuccagucuccaccaggaa

SEQ ID NO: 2429392 - RNA, 21 nt, Human
uuuccagucuccaccaggaac

SEQ ID NO: 2429393 - RNA, 19 nt, Human
uuuccagugagcuuaucau

SEQ ID NO: 2429394 - RNA, 12 nt, Human
uuuccagugcaa

SEQ ID NO: 2429395 - RNA, 19 nt, Human
uuuccauaaagaagauguu

SEQ ID NO: 2429396 - RNA, 23 nt, Human
auggaauuggagcucgugggaca

SEQ ID NO: 2429397 - RNA, 13 nt, Human
uuucccaucugca

SEQ ID NO: 2429398 - RNA, 12 nt, Human
uuucccaucugc

SEQ ID NO: 2429399 - RNA, 17 nt, Human
auggaauugauuugcau

SEQ ID NO: 2429400 - RNA, 22 nt, Human
uuucccacugcacccccuccug

SEQ ID NO: 2429401 - RNA, 12 nt, Human
uuucccauaauu

SEQ ID NO: 2429402 - RNA, 14 nt, Human
uuucccauaauuuu

SEQ ID NO: 2429403 - RNA, 11 nt, Human
uuucccaggac

SEQ ID NO: 2429404 - RNA, 14 nt, Human
uuucccaggacccu

SEQ ID NO: 2429405 - RNA, 16 nt, Human
uuucccaggacccuga

SEQ ID NO: 2429406 - RNA, 18 nt, Human
uuucccaggacccugaag

SEQ ID NO: 2429407 - RNA, 18 nt, Human
uuucccacugcacccccu

SEQ ID NO: 2429408 - RNA, 15 nt, Human
uuucccacugcaccc

SEQ ID NO: 2429409 - RNA, 12 nt, Human
uuucccacugca

SEQ ID NO: 2429410 - RNA, 21 nt, Human
uuucccacuguuuaaggaguu

SEQ ID NO: 2429411 - RNA, 20 nt, Human
uuucccagcuacaccuuucu

SEQ ID NO: 2429412 - RNA, 14 nt, Human
uuucauaaguauuu

SEQ ID NO: 2429413 - RNA, 17 nt, Human
uuucauaaguauuucaa

SEQ ID NO: 2429414 - RNA, 14 nt, Human
uuucauacacuuau

SEQ ID NO: 2429415 - RNA, 21 nt, Human
uuucauacagcauuacaaauu

SEQ ID NO: 2429416 - RNA, 18 nt, Human
uuucauacucuagauuuu

SEQ ID NO: 2429417 - RNA, 17 nt, Human
uuucauacucuagauuu

SEQ ID NO: 2429418 - RNA, 16 nt, Human
uuucauacucuagauu

SEQ ID NO: 2429419 - RNA, 18 nt, Human
uuucauaaguauuucaaa

SEQ ID NO: 2429420 - RNA, 19 nt, Human
uuucauaaguauuucaaau

SEQ ID NO: 2429421 - RNA, 14 nt, Human
uuucauaaucuuug

SEQ ID NO: 2429422 - RNA, 12 nt, Human
uuucauaaucuu

SEQ ID NO: 2429423 - RNA, 15 nt, Human
uuucauaugcuguau

SEQ ID NO: 2429424 - RNA, 19 nt, Human
uuuccagguuuaagcuguu

SEQ ID NO: 2429425 - RNA, 22 nt, Human
uuucauacucuagauuuuguuu

SEQ ID NO: 2429426 - RNA, 19 nt, Human
uuucauacucuagauuuug

SEQ ID NO: 2429427 - RNA, 20 nt, Human
uuucauagcuaagaaauaaa

SEQ ID NO: 2429428 - RNA, 20 nt, Human
uuucauagauugagaaguuu

SEQ ID NO: 2429429 - RNA, 19 nt, Human
uuuauuacuguaagaaaau

SEQ ID NO: 2429430 - RNA, 12 nt, Human
uuuauuaagaug

SEQ ID NO: 2429431 - RNA, 22 nt, Human
augcuggcuguuggcugggggc

SEQ ID NO: 2429432 - RNA, 15 nt, Human
augcugggacucagc

SEQ ID NO: 2429433 - RNA, 10 nt, Human
augcugggac

SEQ ID NO: 2429434 - RNA, 23 nt, Human
augcugggaagacgccugagcuc

SEQ ID NO: 2429435 - RNA, 9 nt, Human
augcuggga

SEQ ID NO: 2429436 - RNA, 14 nt, Human
augcugggcugggu

SEQ ID NO: 2429437 - RNA, 21 nt, Human
augcugggcuggcucccucuu

SEQ ID NO: 2429438 - RNA, 14 nt, Human
augcugggcuggcu

SEQ ID NO: 2429439 - RNA, 12 nt, Human
augcugggcugg

SEQ ID NO: 2429440 - RNA, 16 nt, Human
augcugggacucagcc

SEQ ID NO: 2429441 - RNA, 16 nt, Human
augcugggcugacggu

SEQ ID NO: 2429442 - RNA, 19 nt, Human
augcuguauauccuuucua

SEQ ID NO: 2429443 - RNA, 23 nt, Human
augcuguacaucuauuuuggauu

SEQ ID NO: 2429444 - RNA, 23 nt, Human
augcuggguuggugcacagugau

SEQ ID NO: 2429445 - RNA, 19 nt, Human
augcuggguuggugcacag

SEQ ID NO: 2429446 - RNA, 11 nt, Human
augcuggguug

SEQ ID NO: 2429447 - RNA, 16 nt, Human
augcugggcugggugc

SEQ ID NO: 2429448 - RNA, 15 nt, Human
augcugggcugggug

SEQ ID NO: 2429449 - RNA, 22 nt, Human
augcuggggcaagucccugacu

SEQ ID NO: 2429450 - RNA, 23 nt, Human
augcugucuacacuaagagagaa

SEQ ID NO: 2429451 - RNA, 19 nt, Human
augcuguauucuucuuugg

SEQ ID NO: 2429452 - RNA, 14 nt, Human
augcuguauuuuaa

SEQ ID NO: 2429453 - RNA, 14 nt, Human
augcuguauauguu

SEQ ID NO: 2429454 - RNA, 13 nt, Human
augcuuacugaua

SEQ ID NO: 2429455 - RNA, 22 nt, Human
augcuuacugauauauuuuaca

SEQ ID NO: 2429456 - RNA, 23 nt, Human
augcuuacugauauauuuuacaa

SEQ ID NO: 2429457 - RNA, 17 nt, Human
augcuuagauguuccag

SEQ ID NO: 2429458 - RNA, 19 nt, Human
augcugugcccuaaagugu

SEQ ID NO: 2429459 - RNA, 23 nt, Human
augcugugacacauggccccucc

SEQ ID NO: 2429460 - RNA, 18 nt, Human
uuuauuuuguaauuauug

SEQ ID NO: 2429461 - RNA, 14 nt, Human
uuuauuuuuuaagu

SEQ ID NO: 2429462 - RNA, 15 nt, Human
uuuauuuuugcaugg

SEQ ID NO: 2429463 - RNA, 13 nt, Human
uuuauuuuuuggg

SEQ ID NO: 2429464 - RNA, 15 nt, Human
uuuauuuuuuacauu

SEQ ID NO: 2429465 - RNA, 17 nt, Human
uuuauuuuuuaaguauu

SEQ ID NO: 2429466 - RNA, 21 nt, Human
uuuauuuucuuuuguaaaugu

SEQ ID NO: 2429467 - RNA, 16 nt, Human
uuuauuuuccucccca

SEQ ID NO: 2429468 - RNA, 22 nt, Human
uuuauuuucugguagauagaaa

SEQ ID NO: 2429469 - RNA, 14 nt, Human
auggaauaacaugu

SEQ ID NO: 2429470 - RNA, 15 nt, Human
auggaauaacaugua

SEQ ID NO: 2429471 - RNA, 16 nt, Human
uuuauuuuaauaaugu

SEQ ID NO: 2429472 - RNA, 16 nt, Human
auggaaccgcaggaag

SEQ ID NO: 2429473 - RNA, 17 nt, Human
auggaagguuuguauau

SEQ ID NO: 2429474 - RNA, 22 nt, Human
auggaagguuuguauauuguca

SEQ ID NO: 2429475 - RNA, 17 nt, Human
auggaacacucugagac

SEQ ID NO: 2429476 - RNA, 18 nt, Human
auggaacacucugagacu

SEQ ID NO: 2429477 - RNA, 15 nt, Human
augcuuagucacugc

SEQ ID NO: 2429478 - RNA, 15 nt, Human
augcuuaguaaugcu

SEQ ID NO: 2429479 - RNA, 14 nt, Human
augcuuaguaaugc

SEQ ID NO: 2429480 - RNA, 15 nt, Human
augcuuacaaaaaag

SEQ ID NO: 2429481 - RNA, 15 nt, Human
augcuuagucccuca

SEQ ID NO: 2429482 - RNA, 21 nt, Human
augcuuagucccucaugcaaa

SEQ ID NO: 2429483 - RNA, 23 nt, Human
augcuuagucacugccugcagag

SEQ ID NO: 2429484 - RNA, 23 nt, Human
augcuuagucccucaugcaaauc

SEQ ID NO: 2429485 - RNA, 19 nt, Human
augcuuaucaucuaaagau

SEQ ID NO: 2429486 - RNA, 16 nt, Human
auggaacauaaaauac

SEQ ID NO: 2429487 - RNA, 14 nt, Human
augcuuauuuuaaa

SEQ ID NO: 2429488 - RNA, 15 nt, Human
auggaacaggcucag

SEQ ID NO: 2429489 - RNA, 16 nt, Human
augcuuauuuuaaaau

SEQ ID NO: 2429490 - RNA, 21 nt, Human
auggaaguacuauaauuuacc

SEQ ID NO: 2429491 - RNA, 23 nt, Human
auggaacccuuuuggcccccgag

SEQ ID NO: 2429492 - RNA, 16 nt, Human
auggaaggguuugugg

SEQ ID NO: 2429493 - RNA, 22 nt, Human
uuuagguuuuuguuuguuuccu

SEQ ID NO: 2429494 - RNA, 22 nt, Human
uuuagguguugauuuucuguug

SEQ ID NO: 2429495 - RNA, 22 nt, Human
uuuaggucaagaagaagaugga

SEQ ID NO: 2429496 - RNA, 16 nt, Human
uuuaguaaggcugugu

SEQ ID NO: 2429497 - RNA, 21 nt, Human
uuuaguaccugaaaaguaacu

SEQ ID NO: 2429498 - RNA, 15 nt, Human
uuuauauauacagua

SEQ ID NO: 2429499 - RNA, 13 nt, Human
uuuauauauacag

SEQ ID NO: 2429500 - RNA, 21 nt, Human
uuuagcugaugaacuuauucu

SEQ ID NO: 2429501 - RNA, 23 nt, Human
uuuagcugaugaacuuauucugu

SEQ ID NO: 2429502 - RNA, 19 nt, Human
uuuaggucucuuccccucu

SEQ ID NO: 2429503 - RNA, 20 nt, Human
uuuagcucaaacguggcuuu

SEQ ID NO: 2429504 - RNA, 16 nt, Human
uuuagccuucucuguu

SEQ ID NO: 2429505 - RNA, 23 nt, Human
uuuagcuacuauauaugugauga

SEQ ID NO: 2429506 - RNA, 15 nt, Human
uuuagccaccaucuu

SEQ ID NO: 2429507 - RNA, 18 nt, Human
uuuagccaaacccuuguc

SEQ ID NO: 2429508 - RNA, 15 nt, Human
uuuagccuaguucau

SEQ ID NO: 2429509 - RNA, 18 nt, Human
uuuagaguugauacuaca

SEQ ID NO: 2429510 - RNA, 13 nt, Human
uuuagauaauaca

SEQ ID NO: 2429511 - RNA, 23 nt, Human
uuuacuagggaucccucaucugu

SEQ ID NO: 2429512 - RNA, 18 nt, Human
uuuacuagggaucccuca

SEQ ID NO: 2429513 - RNA, 15 nt, Human
uuuacuaugccugug

SEQ ID NO: 2429514 - RNA, 23 nt, Human
uuuacuacuguggaaaaauauuu

SEQ ID NO: 2429515 - RNA, 20 nt, Human
uuuacuagaacacagaaagc

SEQ ID NO: 2429516 - RNA, 21 nt, Human
uuuacuacuguggaaaaauau

SEQ ID NO: 2429517 - RNA, 16 nt, Human
uuuagaucaaauacuu

SEQ ID NO: 2429518 - RNA, 17 nt, Human
uuuagaucaaauacuuu

SEQ ID NO: 2429519 - RNA, 15 nt, Human
uuuagccaaacccuu

SEQ ID NO: 2429520 - RNA, 12 nt, Human
uuuagcaugugu

SEQ ID NO: 2429521 - RNA, 16 nt, Human
uuuagcauaaaauuuu

SEQ ID NO: 2429522 - RNA, 20 nt, Human
uuuagcaugacaagccccag

SEQ ID NO: 2429523 - RNA, 23 nt, Human
uuuagcaugacaagccccaggca

SEQ ID NO: 2429524 - RNA, 15 nt, Human
uuuagauaauacacc

SEQ ID NO: 2429525 - RNA, 21 nt, Human
uuuacucaacccucucaggug

SEQ ID NO: 2429526 - RNA, 17 nt, Human
uuuacucaacccucuca

SEQ ID NO: 2429527 - RNA, 13 nt, Human
uuuacuauuuuac

SEQ ID NO: 2429528 - RNA, 18 nt, Human
uuuaugucuauuuaagcc

SEQ ID NO: 2429529 - RNA, 23 nt, Human
uuuauuaaacagauuuuuacaaa

SEQ ID NO: 2429530 - RNA, 15 nt, Human
uuuaugugaaacaug

SEQ ID NO: 2429531 - RNA, 14 nt, Human
uuuaugugaaacau

SEQ ID NO: 2429532 - RNA, 19 nt, Human
uuuaugucuaaagagcuuu

SEQ ID NO: 2429533 - RNA, 14 nt, Human
uuuaugucuaaaga

SEQ ID NO: 2429534 - RNA, 22 nt, Human
uuuaugucccuucacauaguuu

SEQ ID NO: 2429535 - RNA, 16 nt, Human
uuuaugguuucuccag

SEQ ID NO: 2429536 - RNA, 18 nt, Human
uuuauuaacaaauuaugu

SEQ ID NO: 2429537 - RNA, 12 nt, Human
uuuauuaacaaa

SEQ ID NO: 2429538 - RNA, 16 nt, Human
uuuauuacuguaagaa

SEQ ID NO: 2429539 - RNA, 19 nt, Human
uuuauuaaaugcccagccc

SEQ ID NO: 2429540 - RNA, 15 nt, Human
uuuauuaaauacaaa

SEQ ID NO: 2429541 - RNA, 21 nt, Human
uuuauuaaauacaaaacuucc

SEQ ID NO: 2429542 - RNA, 17 nt, Human
uuuauaucagccugagu

SEQ ID NO: 2429543 - RNA, 17 nt, Human
uuuauaucccauuuuua

SEQ ID NO: 2429544 - RNA, 13 nt, Human
uuuauauauuuau

SEQ ID NO: 2429545 - RNA, 15 nt, Human
uuuauauauuuauaa

SEQ ID NO: 2429546 - RNA, 15 nt, Human
uuuauaucacauguu

SEQ ID NO: 2429547 - RNA, 16 nt, Human
uuuauauauuuauaac

SEQ ID NO: 2429548 - RNA, 21 nt, Human
uuuauauauacaguaacuuua

SEQ ID NO: 2429549 - RNA, 13 nt, Human
uuuauauauguau

SEQ ID NO: 2429550 - RNA, 23 nt, Human
uuuauauauugguaacauccuuu

SEQ ID NO: 2429551 - RNA, 12 nt, Human
uuuauauauuua

SEQ ID NO: 2429552 - RNA, 17 nt, Human
uuuauaugcuucuguuu

SEQ ID NO: 2429553 - RNA, 14 nt, Human
uuuauaugaagaaa

SEQ ID NO: 2429554 - RNA, 21 nt, Human
uuuauaugaagaaaaucacuu

SEQ ID NO: 2429555 - RNA, 21 nt, Human
uuuaugguuucccccuucuac

SEQ ID NO: 2429556 - RNA, 20 nt, Human
uuuauaugcuuacugauaua

SEQ ID NO: 2429557 - RNA, 17 nt, Human
uuuauaugaagauaagu

SEQ ID NO: 2429558 - RNA, 19 nt, Human
uuuauaugaagauaagugu

SEQ ID NO: 2429559 - RNA, 22 nt, Human
uuuauguaaacugcauuagaaa

SEQ ID NO: 2429560 - RNA, 19 nt, Human
uuuauguaguaauugacau

SEQ ID NO: 2429561 - RNA, 24 nt, Human
uuuaaagcuuauuaaaacucauuu

SEQ ID NO: 2429562 - RNA, 17 nt, Human
uuuaaaggaaaaaaugu

SEQ ID NO: 2429563 - RNA, 15 nt, Human
uuuaaaggaaaaaau

SEQ ID NO: 2429564 - RNA, 12 nt, Human
uuuaaaggaaaa

SEQ ID NO: 2429565 - RNA, 17 nt, Human
uuuaaaggcccuaucug

SEQ ID NO: 2429566 - RNA, 16 nt, Human
augccggaugugcuuu

SEQ ID NO: 2429567 - RNA, 15 nt, Human
augccggaugugcuu

SEQ ID NO: 2429568 - RNA, 21 nt, Human
uuuaaaggaaaaaauguugga

SEQ ID NO: 2429569 - RNA, 14 nt, Human
augccggaugugcu

SEQ ID NO: 2429570 - RNA, 20 nt, Human
uuuaaagcaacugucuauuu

SEQ ID NO: 2429571 - RNA, 17 nt, Human
uuuaaagcaacugucua

SEQ ID NO: 2429572 - RNA, 23 nt, Human
uuuaaagcaacugucuauuucug

SEQ ID NO: 2429573 - RNA, 13 nt, Human
augcuaagugaaa

SEQ ID NO: 2429574 - RNA, 18 nt, Human
augcggcccagcccggcu

SEQ ID NO: 2429575 - RNA, 15 nt, Human
augcggcccagcccg

SEQ ID NO: 2429576 - RNA, 14 nt, Human
augcggcccagccc

SEQ ID NO: 2429577 - RNA, 13 nt, Human
augcggcccagcc

SEQ ID NO: 2429578 - RNA, 20 nt, Human
augcggcccaggauggcuuu

SEQ ID NO: 2429579 - RNA, 16 nt, Human
augcggcccaggaugg

SEQ ID NO: 2429580 - RNA, 22 nt, Human
augcgcccccuccgcccugcca

SEQ ID NO: 2429581 - RNA, 18 nt, Human
augcgcccccuccgcccu

SEQ ID NO: 2429582 - RNA, 13 nt, Human
augcgcccccucc

SEQ ID NO: 2429583 - RNA, 23 nt, Human
augcgcucagggccaugcugagg

SEQ ID NO: 2429584 - RNA, 15 nt, Human
augcgcucagggcca

SEQ ID NO: 2429585 - RNA, 12 nt, Human
augcggcccagc

SEQ ID NO: 2429586 - RNA, 18 nt, Human
augcggcaagaaggaauu

SEQ ID NO: 2429587 - RNA, 20 nt, Human
augccggugagaauaagaga

SEQ ID NO: 2429588 - RNA, 17 nt, Human
augccggaugugcuuuu

SEQ ID NO: 2429589 - RNA, 22 nt, Human
augccguggauugcacguggcc

SEQ ID NO: 2429590 - RNA, 15 nt, Human
augccucaaugugac

SEQ ID NO: 2429591 - RNA, 23 nt, Human
augcgcaggcuggcccugcccug

SEQ ID NO: 2429592 - RNA, 16 nt, Human
uuuaccugagaccagu

SEQ ID NO: 2429593 - RNA, 13 nt, Human
uuuaccugagacc

SEQ ID NO: 2429594 - RNA, 16 nt, Human
uuuaccugcaaaaaau

SEQ ID NO: 2429595 - RNA, 18 nt, Human
augcuacacacugcaugu

SEQ ID NO: 2429596 - RNA, 17 nt, Human
augcuacacacugcaug

SEQ ID NO: 2429597 - RNA, 21 nt, Human
augcuaauauaaguuucuuug

SEQ ID NO: 2429598 - RNA, 21 nt, Human
augcggcccagcccggcuccc

SEQ ID NO: 2429599 - RNA, 19 nt, Human
augcggccgcauucccuga

SEQ ID NO: 2429600 - RNA, 19 nt, Human
uuuaccuuuuuuauacaua

SEQ ID NO: 2429601 - RNA, 20 nt, Human
uuuaccuuuuuuauacauaa

SEQ ID NO: 2429602 - RNA, 14 nt, Human
uuuaccuuuuuuau

SEQ ID NO: 2429603 - RNA, 13 nt, Human
uuuaccuuguaua

SEQ ID NO: 2429604 - RNA, 21 nt, Human
uuuaccugugcguuacuaauu

SEQ ID NO: 2429605 - RNA, 15 nt, Human
uuuaccugugaaaua

SEQ ID NO: 2429606 - RNA, 16 nt, Human
uuuaccugugaaauag

SEQ ID NO: 2429607 - RNA, 14 nt, Human
uuuacuaauagaca

SEQ ID NO: 2429608 - RNA, 17 nt, Human
uuuacuaauagacaauu

SEQ ID NO: 2429609 - RNA, 19 nt, Human
uuuacuaauuuucuagauu

SEQ ID NO: 2429610 - RNA, 22 nt, Human
uuuacuaagccacaagaaauuu

SEQ ID NO: 2429611 - RNA, 21 nt, Human
uuuacuaagccacaagaaauu

SEQ ID NO: 2429612 - RNA, 20 nt, Human
uuuacuaagccacaagaaau

SEQ ID NO: 2429613 - RNA, 23 nt, Human
uuuacuaagaugacauugcuaag

SEQ ID NO: 2429614 - RNA, 21 nt, Human
uuuacuaagaugacauugcua

SEQ ID NO: 2429615 - RNA, 16 nt, Human
uuuacuaagaugacau

SEQ ID NO: 2429616 - RNA, 15 nt, Human
uuuacuaagaugaca

SEQ ID NO: 2429617 - RNA, 18 nt, Human
uuuacuaauagacaauuu

SEQ ID NO: 2429618 - RNA, 22 nt, Human
uuuacuaaagaaagauuacuua

SEQ ID NO: 2429619 - RNA, 17 nt, Human
uuuacuaaagaaagauu

SEQ ID NO: 2429620 - RNA, 15 nt, Human
uuuacuaaagaaaga

SEQ ID NO: 2429621 - RNA, 16 nt, Human
uuuaccuuuuaauuaa

SEQ ID NO: 2429622 - RNA, 18 nt, Human
uuuacgucugggagaaau

SEQ ID NO: 2429623 - RNA, 17 nt, Human
uuuacggacacccccuc

SEQ ID NO: 2429624 - RNA, 21 nt, Human
uuuaccuuuuuuauacauaaa

SEQ ID NO: 2429625 - RNA, 13 nt, Human
uuuacgcuuugau

SEQ ID NO: 2429626 - RNA, 18 nt, Human
uuuacgcuuugauucaua

SEQ ID NO: 2429627 - RNA, 13 nt, Human
uuuacggacaccc

SEQ ID NO: 2429628 - RNA, 15 nt, Human
uuuccuucagugccu

SEQ ID NO: 2429629 - RNA, 12 nt, Human
uuuccuucagug

SEQ ID NO: 2429630 - RNA, 13 nt, Human
uuuccuuaaucca

SEQ ID NO: 2429631 - RNA, 16 nt, Human
uuuccuuaauccagcu

SEQ ID NO: 2429632 - RNA, 11 nt, Human
uuuccuucagu

SEQ ID NO: 2429633 - RNA, 12 nt, Human
uuuccugugucu

SEQ ID NO: 2429634 - RNA, 17 nt, Human
augggccuccugugugu

SEQ ID NO: 2429635 - RNA, 23 nt, Human
uuuccuuaaacuguguggacugu

SEQ ID NO: 2429636 - RNA, 16 nt, Human
uuuccuuaaacugugu

SEQ ID NO: 2429637 - RNA, 19 nt, Human
uuuccuuaaauuaucuaaa

SEQ ID NO: 2429638 - RNA, 21 nt, Human
uuuccuucagugccuuaugga

SEQ ID NO: 2429639 - RNA, 18 nt, Human
uuuccuucagugccuuau

SEQ ID NO: 2429640 - RNA, 22 nt, Human
uuuccuucagugccuuauggaa

SEQ ID NO: 2429641 - RNA, 21 nt, Human
uuuccuucauucaacccaccu

SEQ ID NO: 2429642 - RNA, 19 nt, Human
uuuccuuccaucccuaccc

SEQ ID NO: 2429643 - RNA, 14 nt, Human
uuuccuuccauccc

SEQ ID NO: 2429644 - RNA, 15 nt, Human
uuuccuuccaucccu

SEQ ID NO: 2429645 - RNA, 16 nt, Human
uuuccuuccuucccug

SEQ ID NO: 2429646 - RNA, 15 nt, Human
uuuccuucucaucug

SEQ ID NO: 2429647 - RNA, 23 nt, Human
uuuccuucauucaacccaccugc

SEQ ID NO: 2429648 - RNA, 13 nt, Human
uuuccuucagugc

SEQ ID NO: 2429649 - RNA, 16 nt, Human
uuuccuuuuuuguuau

SEQ ID NO: 2429650 - RNA, 17 nt, Human
uuuccuuuuuuguuauu

SEQ ID NO: 2429651 - RNA, 15 nt, Human
uuuccuuuuuuaaaa

SEQ ID NO: 2429652 - RNA, 16 nt, Human
uuuccuuuuuuaaaaa

SEQ ID NO: 2429653 - RNA, 22 nt, Human
uuuccuuuuuuauacacauaau

SEQ ID NO: 2429654 - RNA, 18 nt, Human
uuuccuuuuuuauacaca

SEQ ID NO: 2429655 - RNA, 13 nt, Human
uuuccuuuuuuau

SEQ ID NO: 2429656 - RNA, 21 nt, Human
uuuccuuuuuuaaaaaugcaa

SEQ ID NO: 2429657 - RNA, 16 nt, Human
uuuccuuugucaucau

SEQ ID NO: 2429658 - RNA, 23 nt, Human
uuuccuuugucaucauuguauau

SEQ ID NO: 2429659 - RNA, 12 nt, Human
uuuccuuuggag

SEQ ID NO: 2429660 - RNA, 20 nt, Human
uuuccuuuccccagcccagg

SEQ ID NO: 2429661 - RNA, 14 nt, Human
uuuccuuucucacc

SEQ ID NO: 2429662 - RNA, 21 nt, Human
uuuccuuuuaaaacacuucca

SEQ ID NO: 2429663 - RNA, 19 nt, Human
uuuccuuuauauuuaguga

SEQ ID NO: 2429664 - RNA, 23 nt, Human
uuuccuuuaaaaaaauuuaagug

SEQ ID NO: 2429665 - RNA, 17 nt, Human
uuuccuuuccccagccc

SEQ ID NO: 2429666 - RNA, 16 nt, Human
uuuccuuuccccagcc

SEQ ID NO: 2429667 - RNA, 19 nt, Human
uuuccuuucauuuacugug

SEQ ID NO: 2429668 - RNA, 21 nt, Human
uuuccuuguccccacacuccu

SEQ ID NO: 2429669 - RNA, 22 nt, Human
uuuccuuuaaaaaaauuuaagu

SEQ ID NO: 2429670 - RNA, 21 nt, Human
uuuccuuuaaaaaaauuuaag

SEQ ID NO: 2429671 - RNA, 23 nt, Human
uuuccuuggcucccauucacucu

SEQ ID NO: 2429672 - RNA, 12 nt, Human
uuuccuugcuca

SEQ ID NO: 2429673 - RNA, 16 nt, Human
uuuccuuggcuggugc

SEQ ID NO: 2429674 - RNA, 18 nt, Human
uuuccuuggggcaggcag

SEQ ID NO: 2429675 - RNA, 19 nt, Human
uuuccuuguccccacacuc

SEQ ID NO: 2429676 - RNA, 19 nt, Human
uuuccuuggggcaggcagu

SEQ ID NO: 2429677 - RNA, 16 nt, Human
uuuccuucuugccuuc

SEQ ID NO: 2429678 - RNA, 13 nt, Human
uuuccuugaagcc

SEQ ID NO: 2429679 - RNA, 14 nt, Human
uuuccuugaagccg

SEQ ID NO: 2429680 - RNA, 18 nt, Human
uuuccuucucaucuguga

SEQ ID NO: 2429681 - RNA, 14 nt, Human
uuuccuucugaagu

SEQ ID NO: 2429682 - RNA, 18 nt, Human
uuuccuuccuucccuggc

SEQ ID NO: 2429683 - RNA, 19 nt, Human
uuucuaaaacuaaauagca

SEQ ID NO: 2429684 - RNA, 14 nt, Human
uuucuaaaaaacag

SEQ ID NO: 2429685 - RNA, 15 nt, Human
uuucuaaaacuaaau

SEQ ID NO: 2429686 - RNA, 12 nt, Human
uuucuaaaacua

SEQ ID NO: 2429687 - RNA, 13 nt, Human
uuucuaaacaaga

SEQ ID NO: 2429688 - RNA, 17 nt, Human
uuucuaaacaagauuuu

SEQ ID NO: 2429689 - RNA, 13 nt, Human
uuucguggggagg

SEQ ID NO: 2429690 - RNA, 21 nt, Human
uuucgucuguuuauaaacauu

SEQ ID NO: 2429691 - RNA, 21 nt, Human
uuucgugggucuguuuuccuu

SEQ ID NO: 2429692 - RNA, 14 nt, Human
uuucguuuguuugu

SEQ ID NO: 2429693 - RNA, 14 nt, Human
uuucguuucuguau

SEQ ID NO: 2429694 - RNA, 19 nt, Human
uuucgagaagcugcucugg

SEQ ID NO: 2429695 - RNA, 15 nt, Human
uuucgagaagcugcu

SEQ ID NO: 2429696 - RNA, 15 nt, Human
uuucgacuugcauuu

SEQ ID NO: 2429697 - RNA, 19 nt, Human
uuucgacuugcauuuuugc

SEQ ID NO: 2429698 - RNA, 18 nt, Human
uuucgcaggauucuuccu

SEQ ID NO: 2429699 - RNA, 22 nt, Human
uuucgcaggauucuuccucccu

SEQ ID NO: 2429700 - RNA, 19 nt, Human
uuucgccguugaagaggaa

SEQ ID NO: 2429701 - RNA, 22 nt, Human
uuucgauucguuaagagagcaa

SEQ ID NO: 2429702 - RNA, 21 nt, Human
auggcuauaggugcuacaaaa

SEQ ID NO: 2429703 - RNA, 17 nt, Human
auggccugagaagagag

SEQ ID NO: 2429704 - RNA, 17 nt, Human
auggacggugcuccagg

SEQ ID NO: 2429705 - RNA, 13 nt, Human
auggccuccuccc

SEQ ID NO: 2429706 - RNA, 23 nt, Human
auggcuauaggugcuacaaaaac

SEQ ID NO: 2429707 - RNA, 21 nt, Human
augggacauuugcucauggaa

SEQ ID NO: 2429708 - RNA, 22 nt, Human
augggacauuugcucauggaau

SEQ ID NO: 2429709 - RNA, 16 nt, Human
auggcuauaggugcua

SEQ ID NO: 2429710 - RNA, 19 nt, Human
auggcuauaggugcuacaa

SEQ ID NO: 2429711 - RNA, 20 nt, Human
auggccucauguggcuggaa

SEQ ID NO: 2429712 - RNA, 19 nt, Human
auggccucauguggcugga

SEQ ID NO: 2429713 - RNA, 18 nt, Human
auggccucauguggcugg

SEQ ID NO: 2429714 - RNA, 17 nt, Human
auggccucauguggcug

SEQ ID NO: 2429715 - RNA, 18 nt, Human
auggccucuucagaucuc

SEQ ID NO: 2429716 - RNA, 21 nt, Human
auggacccaauauuuaccaga

SEQ ID NO: 2429717 - RNA, 18 nt, Human
auggacccaaugcacaca

SEQ ID NO: 2429718 - RNA, 13 nt, Human
auggacccaaugc

SEQ ID NO: 2429719 - RNA, 14 nt, Human
auggaccugucacg

SEQ ID NO: 2429720 - RNA, 13 nt, Human
auggccucaugug

SEQ ID NO: 2429721 - RNA, 21 nt, Human
auggccucagcugccucacuu

SEQ ID NO: 2429722 - RNA, 18 nt, Human
auggccucagcugccuca

SEQ ID NO: 2429723 - RNA, 19 nt, Human
auggccucagcugccucac

SEQ ID NO: 2429724 - RNA, 15 nt, Human
auggccucagcugcc

SEQ ID NO: 2429725 - RNA, 15 nt, Human
auggacggugcucca

SEQ ID NO: 2429726 - RNA, 13 nt, Human
auggacggugcuc

SEQ ID NO: 2429727 - RNA, 16 nt, Human
auggccucagcugccu

SEQ ID NO: 2429728 - RNA, 17 nt, Human
auggccucagcugccuc

SEQ ID NO: 2429729 - RNA, 17 nt, Human
auggaauuuguaaguuu

SEQ ID NO: 2429730 - RNA, 15 nt, Human
auggaauuuguaagu

SEQ ID NO: 2429731 - RNA, 21 nt, Human
auggaauuuguaaguuuaugu

SEQ ID NO: 2429732 - RNA, 19 nt, Human
auggacaugaucuucuuua

SEQ ID NO: 2429733 - RNA, 17 nt, Human
auggaauuucucccagu

SEQ ID NO: 2429734 - RNA, 18 nt, Human
auggaauugauuugcauu

SEQ ID NO: 2429735 - RNA, 19 nt, Human
auggaauugauuugcauug

SEQ ID NO: 2429736 - RNA, 12 nt, Human
auggaauuugua

SEQ ID NO: 2429737 - RNA, 22 nt, Human
uuucccaucugcaccccuucuc

SEQ ID NO: 2429738 - RNA, 21 nt, Human
augggcaacccccagccugcu

SEQ ID NO: 2429739 - RNA, 19 nt, Human
augggcaacccccagccug

SEQ ID NO: 2429740 - RNA, 23 nt, Human
augggagcuccucuccuggagga

SEQ ID NO: 2429741 - RNA, 22 nt, Human
augggagcuccucuccuggagg

SEQ ID NO: 2429742 - RNA, 21 nt, Human
augggagcuccucuccuggag

SEQ ID NO: 2429743 - RNA, 20 nt, Human
augggagcuccucuccugga

SEQ ID NO: 2429744 - RNA, 19 nt, Human
augggagcuccucuccugg

SEQ ID NO: 2429745 - RNA, 15 nt, Human
augggagcuccucuc

SEQ ID NO: 2429746 - RNA, 14 nt, Human
augggagcuccucu

SEQ ID NO: 2429747 - RNA, 18 nt, Human
augggcaacccccagccu

SEQ ID NO: 2429748 - RNA, 13 nt, Human
augggacauuuuu

SEQ ID NO: 2429749 - RNA, 15 nt, Human
augggacuggccucu

SEQ ID NO: 2429750 - RNA, 23 nt, Human
augggagaguagauggugaaauu

SEQ ID NO: 2429751 - RNA, 13 nt, Human
augggagccccag

SEQ ID NO: 2429752 - RNA, 13 nt, Human
augggagcucaug

SEQ ID NO: 2429753 - RNA, 17 nt, Human
augggagccgggucugc

SEQ ID NO: 2429754 - RNA, 20 nt, Human
augggagccgggucugccuc

SEQ ID NO: 2429755 - RNA, 22 nt, Human
augggagccccagggucuuccc

SEQ ID NO: 2429756 - RNA, 23 nt, Human
augggcauggggugggccucugg

SEQ ID NO: 2429757 - RNA, 22 nt, Human
augggcauggggugggccucug

SEQ ID NO: 2429758 - RNA, 23 nt, Human
augggcacugcuggguggcccau

SEQ ID NO: 2429759 - RNA, 19 nt, Human
augggcaguuacaugcaua

SEQ ID NO: 2429760 - RNA, 14 nt, Human
augggcaguuacau

SEQ ID NO: 2429761 - RNA, 12 nt, Human
augggccaccgc

SEQ ID NO: 2429762 - RNA, 13 nt, Human
augggccaccgcc

SEQ ID NO: 2429763 - RNA, 15 nt, Human
augggccuccugugu

SEQ ID NO: 2429764 - RNA, 14 nt, Human
augggcagagcaga

SEQ ID NO: 2429765 - RNA, 13 nt, Human
augggcagagcag

SEQ ID NO: 2429766 - RNA, 15 nt, Human
augggcagagcagag

SEQ ID NO: 2429767 - RNA, 22 nt, Human
augggcacugcuggguggccca

SEQ ID NO: 2429768 - RNA, 18 nt, Human
augggcacugcugggugg

SEQ ID NO: 2429769 - RNA, 14 nt, Human
augggcagagccca

SEQ ID NO: 2429770 - RNA, 14 nt, Human
augggcacugcugg

SEQ ID NO: 2429771 - RNA, 24 nt, Human
augggagcuccucuccuggaggau

SEQ ID NO: 2429772 - RNA, 19 nt, Human
uuugaaaagcuauuagcca

SEQ ID NO: 2429773 - RNA, 18 nt, Human
uuugaaaagcuauuagcc

SEQ ID NO: 2429774 - RNA, 15 nt, Human
uuugaaaagcuauua

SEQ ID NO: 2429775 - RNA, 14 nt, Human
uuugaaaagcuauu

SEQ ID NO: 2429776 - RNA, 13 nt, Human
uuugaaaagcuau

SEQ ID NO: 2429777 - RNA, 16 nt, Human
uuucuuuucucuggua

SEQ ID NO: 2429778 - RNA, 22 nt, Human
uuucuuuucuggaauguaauca

SEQ ID NO: 2429779 - RNA, 14 nt, Human
uuucuuuucacaua

SEQ ID NO: 2429780 - RNA, 22 nt, Human
uuucuuuugcccuucacagugu

SEQ ID NO: 2429781 - RNA, 23 nt, Human
uuucuuuugguaaagacuggcuu

SEQ ID NO: 2429782 - RNA, 16 nt, Human
uuucuuuuguaaaugu

SEQ ID NO: 2429783 - RNA, 15 nt, Human
uuucuuuguguagcu

SEQ ID NO: 2429784 - RNA, 16 nt, Human
uuucuuuguuaucaaa

SEQ ID NO: 2429785 - RNA, 21 nt, Human
uuucuuuucuacccuagccau

SEQ ID NO: 2429786 - RNA, 13 nt, Human
uuucuuuguggcu

SEQ ID NO: 2429787 - RNA, 20 nt, Human
uuucuuuaagauaauaguuu

SEQ ID NO: 2429788 - RNA, 13 nt, Human
uuucuuuaaugcu

SEQ ID NO: 2429789 - RNA, 21 nt, Human
uuucuuuaguuuuugugaagu

SEQ ID NO: 2429790 - RNA, 14 nt, Human
uuucuuucaaaauu

SEQ ID NO: 2429791 - RNA, 20 nt, Human
uuucuuuagagcauugccau

SEQ ID NO: 2429792 - RNA, 18 nt, Human
uuucuuuaaugcuuuuau

SEQ ID NO: 2429793 - RNA, 13 nt, Human
uuucuuucaacuu

SEQ ID NO: 2429794 - RNA, 21 nt, Human
uuucuuuagagcauugccauu

SEQ ID NO: 2429795 - RNA, 19 nt, Human
uuucuuucaacuugcaucc

SEQ ID NO: 2429796 - RNA, 11 nt, Human
uuucuggaguc

SEQ ID NO: 2429797 - RNA, 22 nt, Human
uuucuggagguugauaacuuug

SEQ ID NO: 2429798 - RNA, 21 nt, Human
uuucuggagguugauaacuuu

SEQ ID NO: 2429799 - RNA, 17 nt, Human
uuucuggagguugauaa

SEQ ID NO: 2429800 - RNA, 21 nt, Human
uuucuggaauacaugaaauau

SEQ ID NO: 2429801 - RNA, 18 nt, Human
uuucuggaauguaaucaa

SEQ ID NO: 2429802 - RNA, 21 nt, Human
uuucuggacugaagccugcag

SEQ ID NO: 2429803 - RNA, 16 nt, Human
uuucuggagguugaua

SEQ ID NO: 2429804 - RNA, 23 nt, Human
uuucuggacugaagccugcagga

SEQ ID NO: 2429805 - RNA, 15 nt, Human
uuucuuuaaaagaau

SEQ ID NO: 2429806 - RNA, 20 nt, Human
uuucuuuaaaagaaugggca

SEQ ID NO: 2429807 - RNA, 16 nt, Human
uuucuuuaagaaagua

SEQ ID NO: 2429808 - RNA, 15 nt, Human
uuucuuuaagaaagu

SEQ ID NO: 2429809 - RNA, 14 nt, Human
uuucuuuaaaagaa

SEQ ID NO: 2429810 - RNA, 13 nt, Human
uuucuuuaaaaga

SEQ ID NO: 2429811 - RNA, 15 nt, Human
uuucuuuaaaaaaca

SEQ ID NO: 2429812 - RNA, 22 nt, Human
uuucugccuggaguguaugacu

SEQ ID NO: 2429813 - RNA, 14 nt, Human
uuucugccuggagu

SEQ ID NO: 2429814 - RNA, 15 nt, Human
uuucugccuuccuug

SEQ ID NO: 2429815 - RNA, 13 nt, Human
uuucugccuuccu

SEQ ID NO: 2429816 - RNA, 20 nt, Human
uuucugccuuccuugcuaau

SEQ ID NO: 2429817 - RNA, 20 nt, Human
uuucugcccuggcugcugcc

SEQ ID NO: 2429818 - RNA, 15 nt, Human
uuucugcccuggcug

SEQ ID NO: 2429819 - RNA, 14 nt, Human
uuucugccucucaa

SEQ ID NO: 2429820 - RNA, 13 nt, Human
uuucugccucuca

SEQ ID NO: 2429821 - RNA, 14 nt, Human
uuucugcccuggcu

SEQ ID NO: 2429822 - RNA, 13 nt, Human
uuucugcccuggc

SEQ ID NO: 2429823 - RNA, 12 nt, Human
uuucugcccugg

SEQ ID NO: 2429824 - RNA, 18 nt, Human
uuucuggaauacaugaaa

SEQ ID NO: 2429825 - RNA, 20 nt, Human
uuucuggaauacaugaaaua

SEQ ID NO: 2429826 - RNA, 15 nt, Human
uuucugcucagcuuc

SEQ ID NO: 2429827 - RNA, 18 nt, Human
uuucugcucagcuucucc

SEQ ID NO: 2429828 - RNA, 20 nt, Human
uuucugcugaauuuucacau

SEQ ID NO: 2429829 - RNA, 19 nt, Human
uuucugcucagcuucuccu

SEQ ID NO: 2429830 - RNA, 23 nt, Human
uuucugcugaauuuucacaugaa

SEQ ID NO: 2429831 - RNA, 21 nt, Human
uuucugcugaauuuucacaug

SEQ ID NO: 2429832 - RNA, 19 nt, Human
uuucugcuggaaacagacu

SEQ ID NO: 2429833 - RNA, 13 nt, Human
auggggcccugcc

SEQ ID NO: 2429834 - RNA, 14 nt, Human
auggggcccugccu

SEQ ID NO: 2429835 - RNA, 11 nt, Human
auggggaggga

SEQ ID NO: 2429836 - RNA, 15 nt, Human
auggggagaaaagac

SEQ ID NO: 2429837 - RNA, 18 nt, Human
augggcuuguuuucuugc

SEQ ID NO: 2429838 - RNA, 16 nt, Human
auggggaaggaggcug

SEQ ID NO: 2429839 - RNA, 14 nt, Human
uuugaaauauugac

SEQ ID NO: 2429840 - RNA, 23 nt, Human
augggcuggguucuacccaggug

SEQ ID NO: 2429841 - RNA, 15 nt, Human
augggcuucacugua

SEQ ID NO: 2429842 - RNA, 16 nt, Human
augggcuuagagcagu

SEQ ID NO: 2429843 - RNA, 20 nt, Human
augggcuucacuguauaaau

SEQ ID NO: 2429844 - RNA, 19 nt, Human
augggcuucacuguauaaa

SEQ ID NO: 2429845 - RNA, 23 nt, Human
augggcuuguuuucuugccaaug

SEQ ID NO: 2429846 - RNA, 19 nt, Human
uuugaaacacuuugcauaa

SEQ ID NO: 2429847 - RNA, 17 nt, Human
uuugaaacacuuugcau

SEQ ID NO: 2429848 - RNA, 16 nt, Human
uuugaaacaauacuca

SEQ ID NO: 2429849 - RNA, 14 nt, Human
uuugaaauaauaaa

SEQ ID NO: 2429850 - RNA, 19 nt, Human
uuugaaauagucuguguga

SEQ ID NO: 2429851 - RNA, 20 nt, Human
uuugaaauagucugugugaa

SEQ ID NO: 2429852 - RNA, 15 nt, Human
uuugaaacaaagaag

SEQ ID NO: 2429853 - RNA, 22 nt, Human
uuucucaacaaagcacaguguu

SEQ ID NO: 2429854 - RNA, 22 nt, Human
uuucucaaaguuuugaaaagcu

SEQ ID NO: 2429855 - RNA, 18 nt, Human
uuucucaaaguuuugaaa

SEQ ID NO: 2429856 - RNA, 16 nt, Human
uuucucaaaguuuuga

SEQ ID NO: 2429857 - RNA, 15 nt, Human
uuucucaaaguuuug

SEQ ID NO: 2429858 - RNA, 14 nt, Human
uuucucaaaguuuu

SEQ ID NO: 2429859 - RNA, 13 nt, Human
uuucucaaaguuu

SEQ ID NO: 2429860 - RNA, 20 nt, Human
uuucucagcucccauuucua

SEQ ID NO: 2429861 - RNA, 15 nt, Human
uuucucagcucccau

SEQ ID NO: 2429862 - RNA, 14 nt, Human
uuucucagcuccca

SEQ ID NO: 2429863 - RNA, 18 nt, Human
uuucucaugaaucugcaa

SEQ ID NO: 2429864 - RNA, 16 nt, Human
uuucucaguuuucaua

SEQ ID NO: 2429865 - RNA, 17 nt, Human
uuucucagauccuuguu

SEQ ID NO: 2429866 - RNA, 23 nt, Human
uuucucaccgcagucgucgcaca

SEQ ID NO: 2429867 - RNA, 19 nt, Human
uuucucagacuuuggaaaa

SEQ ID NO: 2429868 - RNA, 23 nt, Human
uuucucagauccuuguuucaaac

SEQ ID NO: 2429869 - RNA, 20 nt, Human
uuucucagauccuuguuuca

SEQ ID NO: 2429870 - RNA, 23 nt, Human
uuucucagccgcuucugacugcu

SEQ ID NO: 2429871 - RNA, 14 nt, Human
uuucuauuguuacu

SEQ ID NO: 2429872 - RNA, 13 nt, Human
uuucuauuguuac

SEQ ID NO: 2429873 - RNA, 16 nt, Human
uuucuauuguacagaa

SEQ ID NO: 2429874 - RNA, 13 nt, Human
uuucuauuguaca

SEQ ID NO: 2429875 - RNA, 17 nt, Human
uuucuauugaaaaauca

SEQ ID NO: 2429876 - RNA, 13 nt, Human
uuucuauuccaaa

SEQ ID NO: 2429877 - RNA, 14 nt, Human
uuucuauuccaaag

SEQ ID NO: 2429878 - RNA, 17 nt, Human
uuucuauuucuccucca

SEQ ID NO: 2429879 - RNA, 21 nt, Human
uuucuauuuucccucgcuggg

SEQ ID NO: 2429880 - RNA, 16 nt, Human
uuucugccgcagcccu

SEQ ID NO: 2429881 - RNA, 14 nt, Human
uuucugccgcagcc

SEQ ID NO: 2429882 - RNA, 19 nt, Human
uuucugcaguagucucugu

SEQ ID NO: 2429883 - RNA, 17 nt, Human
uuucugcauauguugaa

SEQ ID NO: 2429884 - RNA, 13 nt, Human
uuucugcauaugu

SEQ ID NO: 2429885 - RNA, 13 nt, Human
uuucugcauuuug

SEQ ID NO: 2429886 - RNA, 18 nt, Human
uuucugcauuuugcuauu

SEQ ID NO: 2429887 - RNA, 16 nt, Human
uuucugccagggagcu

SEQ ID NO: 2429888 - RNA, 17 nt, Human
uuucuccaauaucagug

SEQ ID NO: 2429889 - RNA, 11 nt, Human
uuucuccagcu

SEQ ID NO: 2429890 - RNA, 20 nt, Human
uuucuccaauaucagugcuc

SEQ ID NO: 2429891 - RNA, 22 nt, Human
uuucucauuugccaauaauaau

SEQ ID NO: 2429892 - RNA, 14 nt, Human
uuucugcaucagcu

SEQ ID NO: 2429893 - RNA, 12 nt, Human
uuucucccagcu

SEQ ID NO: 2429894 - RNA, 20 nt, Human
uuucucccaggccaggcucc

SEQ ID NO: 2429895 - RNA, 18 nt, Human
uuucuccagccagcaaug

SEQ ID NO: 2429896 - RNA, 12 nt, Human
uuucuccagcug

SEQ ID NO: 2429897 - RNA, 20 nt, Human
uuucuaugaaauauuauguu

SEQ ID NO: 2429898 - RNA, 14 nt, Human
uuucuaugaaauau

SEQ ID NO: 2429899 - RNA, 20 nt, Human
uuucuaucauuuuuguacag

SEQ ID NO: 2429900 - RNA, 15 nt, Human
uuucuauccucugua

SEQ ID NO: 2429901 - RNA, 14 nt, Human
uuucuaucacauau

SEQ ID NO: 2429902 - RNA, 13 nt, Human
uuucuaugaaaua

SEQ ID NO: 2429903 - RNA, 22 nt, Human
uuucuauuaaauuaaauuuugu

SEQ ID NO: 2429904 - RNA, 15 nt, Human
uuucuaugacacaug

SEQ ID NO: 2429905 - RNA, 21 nt, Human
uuucuaugacacaugcaaggu

SEQ ID NO: 2429906 - RNA, 19 nt, Human
uuucuaguggucuuuguaa

SEQ ID NO: 2429907 - RNA, 18 nt, Human
uuucuaguggucuuugua

SEQ ID NO: 2429908 - RNA, 17 nt, Human
uuucuaguggucuuugu

SEQ ID NO: 2429909 - RNA, 14 nt, Human
uuucuaguggucuu

SEQ ID NO: 2429910 - RNA, 21 nt, Human
uuucuaguggucuuuguaaga

SEQ ID NO: 2429911 - RNA, 20 nt, Human
uuucuaguggucuuuguaag

SEQ ID NO: 2429912 - RNA, 23 nt, Human
uuucuaguggucuuuguaagagu

SEQ ID NO: 2429913 - RNA, 20 nt, Human
uuucuaggccuacaugcuuu

SEQ ID NO: 2429914 - RNA, 14 nt, Human
uuucuagggaaaug

SEQ ID NO: 2429915 - RNA, 15 nt, Human
uuucuagggaaauga

SEQ ID NO: 2429916 - RNA, 18 nt, Human
uuucuagggaaaugaaag

SEQ ID NO: 2429917 - RNA, 18 nt, Human
uuucuaaagccuuaaguc

SEQ ID NO: 2429918 - RNA, 15 nt, Human
augagaggaaaucac

SEQ ID NO: 2429919 - RNA, 14 nt, Human
augagaggaaauca

SEQ ID NO: 2429920 - RNA, 16 nt, Human
augagaggaaaucacc

SEQ ID NO: 2429921 - RNA, 17 nt, Human
augagaguuuuggaugc

SEQ ID NO: 2429922 - RNA, 15 nt, Human
augagaguuuuggau

SEQ ID NO: 2429923 - RNA, 22 nt, Human
augagagcccagagguaacaga

SEQ ID NO: 2429924 - RNA, 18 nt, Human
augagagggcaguguuuc

SEQ ID NO: 2429925 - RNA, 19 nt, Human
augagagggcaguguuucc

SEQ ID NO: 2429926 - RNA, 18 nt, Human
augagaugccugaagcca

SEQ ID NO: 2429927 - RNA, 24 nt, Human
augagaugauacauccaaagcaga

SEQ ID NO: 2429928 - RNA, 23 nt, Human
augagaugauacauccaaagcag

SEQ ID NO: 2429929 - RNA, 22 nt, Human
augagaucuaggugaggauuga

SEQ ID NO: 2429930 - RNA, 13 nt, Human
augagauccuuua

SEQ ID NO: 2429931 - RNA, 22 nt, Human
augagaucuaagccuuuccaua

SEQ ID NO: 2429932 - RNA, 23 nt, Human
augagaucuaagccuuuccauaa

SEQ ID NO: 2429933 - RNA, 20 nt, Human
augagaguuuuggaugcagu

SEQ ID NO: 2429934 - RNA, 18 nt, Human
augagaguuuuggaugca

SEQ ID NO: 2429935 - RNA, 21 nt, Human
augagaguuuuggaugcagug

SEQ ID NO: 2429936 - RNA, 13 nt, Human
augagagucacuu

SEQ ID NO: 2429937 - RNA, 16 nt, Human
augagaucaggcucug

SEQ ID NO: 2429938 - RNA, 15 nt, Human
augagaucaggcucu

SEQ ID NO: 2429939 - RNA, 16 nt, Human
augagauauuaaacca

SEQ ID NO: 2429940 - RNA, 18 nt, Human
augagaucaggcucugcc

SEQ ID NO: 2429941 - RNA, 17 nt, Human
augagaucaggcucugc

SEQ ID NO: 2429942 - RNA, 20 nt, Human
augagaucaggcucugccuc

SEQ ID NO: 2429943 - RNA, 19 nt, Human
augagaucccgccucuucu

SEQ ID NO: 2429944 - RNA, 13 nt, Human
augagaggaaauc

SEQ ID NO: 2429945 - RNA, 12 nt, Human
augagaggaaau

SEQ ID NO: 2429946 - RNA, 20 nt, Human
augagagcccagagguaaca

SEQ ID NO: 2429947 - RNA, 18 nt, Human
augagagcccagagguaa

SEQ ID NO: 2429948 - RNA, 16 nt, Human
augagagcccagaggu

SEQ ID NO: 2429949 - RNA, 14 nt, Human
augagagcccagag

SEQ ID NO: 2429950 - RNA, 13 nt, Human
augagagcccaga

SEQ ID NO: 2429951 - RNA, 23 nt, Human
augacauguuauauauuuuuugu

SEQ ID NO: 2429952 - RNA, 17 nt, Human
augacauguuauauauu

SEQ ID NO: 2429953 - RNA, 16 nt, Human
augacauucaugccug

SEQ ID NO: 2429954 - RNA, 15 nt, Human
augacauguuauaua

SEQ ID NO: 2429955 - RNA, 18 nt, Human
augacaucucaggggcca

SEQ ID NO: 2429956 - RNA, 16 nt, Human
augacaucucaggggc

SEQ ID NO: 2429957 - RNA, 19 nt, Human
augacaucacuuguacaaa

SEQ ID NO: 2429958 - RNA, 20 nt, Human
augacaucacuuguacaaaa

SEQ ID NO: 2429959 - RNA, 24 nt, Human
augacaucuucaaagcuugaagau

SEQ ID NO: 2429960 - RNA, 14 nt, Human
augacaucacuugu

SEQ ID NO: 2429961 - RNA, 18 nt, Human
augacaucacuuguacaa

SEQ ID NO: 2429962 - RNA, 18 nt, Human
augacaucaccacaguuu

SEQ ID NO: 2429963 - RNA, 22 nt, Human
augacaguuauacugucgguuu

SEQ ID NO: 2429964 - RNA, 16 nt, Human
augagccucagcaucc

SEQ ID NO: 2429965 - RNA, 15 nt, Human
augagccucagcauc

SEQ ID NO: 2429966 - RNA, 12 nt, Human
augagccucagc

SEQ ID NO: 2429967 - RNA, 11 nt, Human
augagccagac

SEQ ID NO: 2429968 - RNA, 22 nt, Human
augagcaucaggccaggcccuc

SEQ ID NO: 2429969 - RNA, 15 nt, Human
augagcaucccagga

SEQ ID NO: 2429970 - RNA, 14 nt, Human
augagcaucccagg

SEQ ID NO: 2429971 - RNA, 14 nt, Human
augagccagacaaa

SEQ ID NO: 2429972 - RNA, 21 nt, Human
augagccaccgcgcccagccu

SEQ ID NO: 2429973 - RNA, 17 nt, Human
augagcauggagcuggc

SEQ ID NO: 2429974 - RNA, 15 nt, Human
augagcauggagcug

SEQ ID NO: 2429975 - RNA, 18 nt, Human
augagcauggagcuggcc

SEQ ID NO: 2429976 - RNA, 18 nt, Human
augagccaccgcgcccag

SEQ ID NO: 2429977 - RNA, 21 nt, Human
augagcaucaggccaggcccu

SEQ ID NO: 2429978 - RNA, 20 nt, Human
augagcaucaggccaggccc

SEQ ID NO: 2429979 - RNA, 19 nt, Human
augagcaucaggccaggcc

SEQ ID NO: 2429980 - RNA, 18 nt, Human
augagcaucaggccaggc

SEQ ID NO: 2429981 - RNA, 17 nt, Human
augagcaucaggccagg

SEQ ID NO: 2429982 - RNA, 16 nt, Human
augagcaucaggccag

SEQ ID NO: 2429983 - RNA, 15 nt, Human
augagcaucaggcca

SEQ ID NO: 2429984 - RNA, 22 nt, Human
augagauuguuuuaucaugaca

SEQ ID NO: 2429985 - RNA, 18 nt, Human
augagauuguuuuaucau

SEQ ID NO: 2429986 - RNA, 18 nt, Human
augagccucagcauccug

SEQ ID NO: 2429987 - RNA, 17 nt, Human
augagccucagcauccu

SEQ ID NO: 2429988 - RNA, 19 nt, Human
augagccuacgcugaagau

SEQ ID NO: 2429989 - RNA, 16 nt, Human
augagccuacgcugaa

SEQ ID NO: 2429990 - RNA, 23 nt, Human
augagccgcugugagccccuggu

SEQ ID NO: 2429991 - RNA, 20 nt, Human
augagccgcugugagccccu

SEQ ID NO: 2429992 - RNA, 14 nt, Human
augaggucccaggc

SEQ ID NO: 2429993 - RNA, 15 nt, Human
augaggucccaggca

SEQ ID NO: 2429994 - RNA, 16 nt, Human
augaggucccaggcag

SEQ ID NO: 2429995 - RNA, 17 nt, Human
augaggucccaggcaga

SEQ ID NO: 2429996 - RNA, 18 nt, Human
augaggucccaggcagag

SEQ ID NO: 2429997 - RNA, 19 nt, Human
augaggucccaggcagaga

SEQ ID NO: 2429998 - RNA, 20 nt, Human
augaggucccaggcagagaa

SEQ ID NO: 2429999 - RNA, 23 nt, Human
augagccuacgcugaagauggca

SEQ ID NO: 2430000 - RNA, 14 nt, Human
augaggucugaaau

SEQ ID NO: 2430001 - RNA, 17 nt, Human
augaggucugaaaugga

SEQ ID NO: 2430002 - RNA, 15 nt, Human
augaggucugaaaug

SEQ ID NO: 2430003 - RNA, 14 nt, Human
augaggugcuggga

SEQ ID NO: 2430004 - RNA, 22 nt, Human
augaggugggagguggaagaag

SEQ ID NO: 2430005 - RNA, 15 nt, Human
augaggugcugggag

SEQ ID NO: 2430006 - RNA, 16 nt, Human
augaggugcugggagg

SEQ ID NO: 2430007 - RNA, 17 nt, Human
augaggugcugggaggg

SEQ ID NO: 2430008 - RNA, 18 nt, Human
augaggugcugggaggga

SEQ ID NO: 2430009 - RNA, 21 nt, Human
augaguccuugaaaauauuuu

SEQ ID NO: 2430010 - RNA, 20 nt, Human
augaguccuugaaaauauuu

SEQ ID NO: 2430011 - RNA, 18 nt, Human
augaguccuugaaaauau

SEQ ID NO: 2430012 - RNA, 16 nt, Human
augaguccuugaaaau

SEQ ID NO: 2430013 - RNA, 14 nt, Human
augaggugggaggu

SEQ ID NO: 2430014 - RNA, 13 nt, Human
augaggugggagg

SEQ ID NO: 2430015 - RNA, 19 nt, Human
augaggugcugggagggau

SEQ ID NO: 2430016 - RNA, 14 nt, Human
augauaacuggaaa

SEQ ID NO: 2430017 - RNA, 18 nt, Human
uugucacacacuuuggcu

SEQ ID NO: 2430018 - RNA, 15 nt, Human
augauaaaacacaaa

SEQ ID NO: 2430019 - RNA, 21 nt, Human
augaguuuuugauagcuuuau

SEQ ID NO: 2430020 - RNA, 16 nt, Human
augagugaauaaaugu

SEQ ID NO: 2430021 - RNA, 15 nt, Human
augagugaauaaaug

SEQ ID NO: 2430022 - RNA, 17 nt, Human
augagugcgugcucagu

SEQ ID NO: 2430023 - RNA, 16 nt, Human
augagugcgugcucag

SEQ ID NO: 2430024 - RNA, 23 nt, Human
augagugcuucagaaugugauuu

SEQ ID NO: 2430025 - RNA, 17 nt, Human
augagugaauaaauguc

SEQ ID NO: 2430026 - RNA, 17 nt, Human
augaguggcuuuaauga

SEQ ID NO: 2430027 - RNA, 19 nt, Human
augaguuuuugauagcuuu

SEQ ID NO: 2430028 - RNA, 20 nt, Human
augaguuuuugauagcuuua

SEQ ID NO: 2430029 - RNA, 13 nt, Human
augaguuuuugau

SEQ ID NO: 2430030 - RNA, 13 nt, Human
augaguuuuuccc

SEQ ID NO: 2430031 - RNA, 12 nt, Human
uugucauuaaag

SEQ ID NO: 2430032 - RNA, 14 nt, Human
uugucauuaaaggu

SEQ ID NO: 2430033 - RNA, 15 nt, Human
uugucauuagccuga

SEQ ID NO: 2430034 - RNA, 14 nt, Human
uugucauuagccug

SEQ ID NO: 2430035 - RNA, 20 nt, Human
uugucauuagccugaguaga

SEQ ID NO: 2430036 - RNA, 19 nt, Human
uugucauuagccugaguag

SEQ ID NO: 2430037 - RNA, 18 nt, Human
uugucauuagccugagua

SEQ ID NO: 2430038 - RNA, 17 nt, Human
uugucauuagccugagu

SEQ ID NO: 2430039 - RNA, 15 nt, Human
uuguccccguggucu

SEQ ID NO: 2430040 - RNA, 15 nt, Human
uugucauuuucucca

SEQ ID NO: 2430041 - RNA, 12 nt, Human
uugucauuuucu

SEQ ID NO: 2430042 - RNA, 13 nt, Human
uugucauuuauaa

SEQ ID NO: 2430043 - RNA, 15 nt, Human
uugucauugcuguug

SEQ ID NO: 2430044 - RNA, 14 nt, Human
uugucauugcuguu

SEQ ID NO: 2430045 - RNA, 19 nt, Human
uugucacgcuucuucuuuu

SEQ ID NO: 2430046 - RNA, 18 nt, Human
uugucacgcuucuucuuu

SEQ ID NO: 2430047 - RNA, 23 nt, Human
uugucaucauuguauauaugugu

SEQ ID NO: 2430048 - RNA, 21 nt, Human
uugucaucuuucuucuauuuu

SEQ ID NO: 2430049 - RNA, 21 nt, Human
uugucaucauuguauauaugu

SEQ ID NO: 2430050 - RNA, 19 nt, Human
uugucaucuuucuucuauu

SEQ ID NO: 2430051 - RNA, 22 nt, Human
uugucacaugaaacauuugcaa

SEQ ID NO: 2430052 - RNA, 14 nt, Human
uugucgcucaugug

SEQ ID NO: 2430053 - RNA, 13 nt, Human
uugugaaauuauu

SEQ ID NO: 2430054 - RNA, 17 nt, Human
uuguccuuucccuucag

SEQ ID NO: 2430055 - RNA, 15 nt, Human
uuguccuuucccuuc

SEQ ID NO: 2430056 - RNA, 14 nt, Human
uuguccuugcuggu

SEQ ID NO: 2430057 - RNA, 15 nt, Human
uuguccuccccuugg

SEQ ID NO: 2430058 - RNA, 13 nt, Human
uuguccuccccuu

SEQ ID NO: 2430059 - RNA, 16 nt, Human
uuguccuaugggaguc

SEQ ID NO: 2430060 - RNA, 18 nt, Human
uuguccguguucauacau

SEQ ID NO: 2430061 - RNA, 16 nt, Human
uuguccgcuggguggu

SEQ ID NO: 2430062 - RNA, 15 nt, Human
uugucccugugccua

SEQ ID NO: 2430063 - RNA, 16 nt, Human
uugucccucugcuacg

SEQ ID NO: 2430064 - RNA, 17 nt, Human
uugucccucugccccau

SEQ ID NO: 2430065 - RNA, 18 nt, Human
uugucccugaagagaagg

SEQ ID NO: 2430066 - RNA, 21 nt, Human
uuguccccugccugugccugc

SEQ ID NO: 2430067 - RNA, 14 nt, Human
uuguccccucuuga

SEQ ID NO: 2430068 - RNA, 21 nt, Human
uuguccccuaagaguguuuaa

SEQ ID NO: 2430069 - RNA, 15 nt, Human
uugucccucugcccc

SEQ ID NO: 2430070 - RNA, 16 nt, Human
uugucccucugcccca

SEQ ID NO: 2430071 - RNA, 20 nt, Human
uuuaaaaaaauaaaacauuu

SEQ ID NO: 2430072 - RNA, 19 nt, Human
uuuaaaaaaauaaaacauu

SEQ ID NO: 2430073 - RNA, 18 nt, Human
uuuaaaaaaauaaaacau

SEQ ID NO: 2430074 - RNA, 17 nt, Human
uuuaaaaaaauaaaaca

SEQ ID NO: 2430075 - RNA, 20 nt, Human
uuuaaaaaagaaacauuugg

SEQ ID NO: 2430076 - RNA, 19 nt, Human
uuguuuuuuuuuuccacuu

SEQ ID NO: 2430077 - RNA, 15 nt, Human
uuuaaaaaaauaaaa

SEQ ID NO: 2430078 - RNA, 15 nt, Human
uuuaaacuguguaca

SEQ ID NO: 2430079 - RNA, 19 nt, Human
uuuaaacuguguacauaac

SEQ ID NO: 2430080 - RNA, 21 nt, Human
uuuaaacuguguacauaacug

SEQ ID NO: 2430081 - RNA, 22 nt, Human
uuuaaacuguguacauaacuga

SEQ ID NO: 2430082 - RNA, 20 nt, Human
uuuaaaaaauaacuaccaag

SEQ ID NO: 2430083 - RNA, 17 nt, Human
uuuaaaaaauuaaucug

SEQ ID NO: 2430084 - RNA, 19 nt, Human
uuguuuuucauucagucuu

SEQ ID NO: 2430085 - RNA, 12 nt, Human
uuguuuuuauga

SEQ ID NO: 2430086 - RNA, 13 nt, Human
uuguuuuuccuug

SEQ ID NO: 2430087 - RNA, 21 nt, Human
uuguuuuuccuuguauuuaaa

SEQ ID NO: 2430088 - RNA, 22 nt, Human
uuguuuuuccuuguauuuaaau

SEQ ID NO: 2430089 - RNA, 18 nt, Human
uuguuuuuuuuuuccacu

SEQ ID NO: 2430090 - RNA, 19 nt, Human
augcaccuggaauauauaa

SEQ ID NO: 2430091 - RNA, 18 nt, Human
augcaccuugugucugua

SEQ ID NO: 2430092 - RNA, 16 nt, Human
augcaccuugugucug

SEQ ID NO: 2430093 - RNA, 15 nt, Human
augcaccuugugucu

SEQ ID NO: 2430094 - RNA, 13 nt, Human
augaucccugugu

SEQ ID NO: 2430095 - RNA, 16 nt, Human
uuguuuuguuuuuugg

SEQ ID NO: 2430096 - RNA, 13 nt, Human
uuguuuuguuuua

SEQ ID NO: 2430097 - RNA, 14 nt, Human
uuguuuuguuuuaa

SEQ ID NO: 2430098 - RNA, 14 nt, Human
augcaaggucauuu

SEQ ID NO: 2430099 - RNA, 16 nt, Human
augcaaggucauuuuu

SEQ ID NO: 2430100 - RNA, 22 nt, Human
augcaaacuuuauuuuguguuu

SEQ ID NO: 2430101 - RNA, 16 nt, Human
augcaccuggaauaua

SEQ ID NO: 2430102 - RNA, 14 nt, Human
augcaccuggaaua

SEQ ID NO: 2430103 - RNA, 22 nt, Human
augcaaggucauuuuuuuuaag

SEQ ID NO: 2430104 - RNA, 18 nt, Human
augcaagggacugugugu

SEQ ID NO: 2430105 - RNA, 13 nt, Human
augcaagggacug

SEQ ID NO: 2430106 - RNA, 22 nt, Human
augcaaggaccaggacucccuc

SEQ ID NO: 2430107 - RNA, 15 nt, Human
augcaaagaaaauca

SEQ ID NO: 2430108 - RNA, 22 nt, Human
augcaaaccaucauugaaaucu

SEQ ID NO: 2430109 - RNA, 21 nt, Human
augcaaaccaucauugaaauc

SEQ ID NO: 2430110 - RNA, 20 nt, Human
augcaaaccaucauugaaau

SEQ ID NO: 2430111 - RNA, 19 nt, Human
augcaaaccaucauugaaa

SEQ ID NO: 2430112 - RNA, 18 nt, Human
augcaaaccaucauugaa

SEQ ID NO: 2430113 - RNA, 16 nt, Human
augcaaaccaucauug

SEQ ID NO: 2430114 - RNA, 15 nt, Human
augaucuucuuuaua

SEQ ID NO: 2430115 - RNA, 18 nt, Human
augaucuucuuuauaauu

SEQ ID NO: 2430116 - RNA, 20 nt, Human
uuguuccccuccuccacucu

SEQ ID NO: 2430117 - RNA, 19 nt, Human
uuguuccccuccuccacuc

SEQ ID NO: 2430118 - RNA, 18 nt, Human
uuguuccccuccuccacu

SEQ ID NO: 2430119 - RNA, 16 nt, Human
uuguuccccuccucca

SEQ ID NO: 2430120 - RNA, 23 nt, Human
uuguuccccuccuccacucuccc

SEQ ID NO: 2430121 - RNA, 14 nt, Human
uuguucccucuccc

SEQ ID NO: 2430122 - RNA, 16 nt, Human
uuguucuaguuuucag

SEQ ID NO: 2430123 - RNA, 15 nt, Human
uuguucuaguuuuca

SEQ ID NO: 2430124 - RNA, 16 nt, Human
uuguucgggugugcaa

SEQ ID NO: 2430125 - RNA, 17 nt, Human
uuguucgggugugcaau

SEQ ID NO: 2430126 - RNA, 13 nt, Human
uuguucucagcuc

SEQ ID NO: 2430127 - RNA, 14 nt, Human
uuguugaggugguc

SEQ ID NO: 2430128 - RNA, 21 nt, Human
uuguugagguggucugaaugu

SEQ ID NO: 2430129 - RNA, 20 nt, Human
uuguugauaaauuccacugg

SEQ ID NO: 2430130 - RNA, 10 nt, Human
uugugugugg

SEQ ID NO: 2430131 - RNA, 13 nt, Human
uugugugugggag

SEQ ID NO: 2430132 - RNA, 15 nt, Human
uuguguguaugugua

SEQ ID NO: 2430133 - RNA, 13 nt, Human
uugugugucuuaa

SEQ ID NO: 2430134 - RNA, 15 nt, Human
uuguuccccuccucc

SEQ ID NO: 2430135 - RNA, 14 nt, Human
uuguuccccuccuc

SEQ ID NO: 2430136 - RNA, 19 nt, Human
uuguuccccaucaucugug

SEQ ID NO: 2430137 - RNA, 13 nt, Human
uuguuccccuccu

SEQ ID NO: 2430138 - RNA, 16 nt, Human
uugugugugggagugu

SEQ ID NO: 2430139 - RNA, 19 nt, Human
uugugugucuuaauuauua

SEQ ID NO: 2430140 - RNA, 19 nt, Human
uugugugugggcugugagu

SEQ ID NO: 2430141 - RNA, 17 nt, Human
uugugaacuuuuuguag

SEQ ID NO: 2430142 - RNA, 23 nt, Human
uugugaacucagccaagcacagu

SEQ ID NO: 2430143 - RNA, 22 nt, Human
uugugaacucagccaagcacag

SEQ ID NO: 2430144 - RNA, 19 nt, Human
uugugaacucagccaagca

SEQ ID NO: 2430145 - RNA, 19 nt, Human
uugugaacaagucccugua

SEQ ID NO: 2430146 - RNA, 18 nt, Human
uugugaagcaaaauuuuu

SEQ ID NO: 2430147 - RNA, 13 nt, Human
uugugaaggcagg

SEQ ID NO: 2430148 - RNA, 11 nt, Human
uugugaagagg

SEQ ID NO: 2430149 - RNA, 19 nt, Human
uugugaagaaaaauaaagu

SEQ ID NO: 2430150 - RNA, 18 nt, Human
uugugaagguggaaauaa

SEQ ID NO: 2430151 - RNA, 17 nt, Human
uugugaagguggaaaua

SEQ ID NO: 2430152 - RNA, 18 nt, Human
uugugugguuuggcccuu

SEQ ID NO: 2430153 - RNA, 18 nt, Human
uugugaagacugggaagu

SEQ ID NO: 2430154 - RNA, 22 nt, Human
uugugaaguacccguucacauu

SEQ ID NO: 2430155 - RNA, 14 nt, Human
uugugaaguacaua

SEQ ID NO: 2430156 - RNA, 19 nt, Human
uuguugcaaguacugcugu

SEQ ID NO: 2430157 - RNA, 22 nt, Human
uuguugagguggucugaauguu

SEQ ID NO: 2430158 - RNA, 21 nt, Human
uuguugauaaauuccacugga

SEQ ID NO: 2430159 - RNA, 18 nt, Human
uuguugcuguugauguuu

SEQ ID NO: 2430160 - RNA, 13 nt, Human
uuguuggaaugaa

SEQ ID NO: 2430161 - RNA, 15 nt, Human
uuguuggaucuucaa

SEQ ID NO: 2430162 - RNA, 15 nt, Human
uuguuggagccugca

SEQ ID NO: 2430163 - RNA, 21 nt, Human
uuguuggaaaagaauacagaa

SEQ ID NO: 2430164 - RNA, 20 nt, Human
uuguuggaucuucaauggcu

SEQ ID NO: 2430165 - RNA, 13 nt, Human
augauauugcaua

SEQ ID NO: 2430166 - RNA, 18 nt, Human
augauauugcauaugcau

SEQ ID NO: 2430167 - RNA, 15 nt, Human
augaucacggcucac

SEQ ID NO: 2430168 - RNA, 19 nt, Human
augaucacggcucacugca

SEQ ID NO: 2430169 - RNA, 18 nt, Human
augaucacggcucacugc

SEQ ID NO: 2430170 - RNA, 23 nt, Human
augaucacggcucacugcagccu

SEQ ID NO: 2430171 - RNA, 22 nt, Human
augaucacuaauacuaauucau

SEQ ID NO: 2430172 - RNA, 18 nt, Human
augaucagcuguuuguca

SEQ ID NO: 2430173 - RNA, 19 nt, Human
augaucagcuguuugucau

SEQ ID NO: 2430174 - RNA, 16 nt, Human
augauccuaggcauuu

SEQ ID NO: 2430175 - RNA, 22 nt, Human
augauccggauuuaauuugaua

SEQ ID NO: 2430176 - RNA, 21 nt, Human
augauccggauuuaauuugau

SEQ ID NO: 2430177 - RNA, 20 nt, Human
augaucccuguguugucucu

SEQ ID NO: 2430178 - RNA, 18 nt, Human
augaucccuguguugucu

SEQ ID NO: 2430179 - RNA, 20 nt, Human
augaucagcuguuugucaua

SEQ ID NO: 2430180 - RNA, 15 nt, Human
augaucuacucagaa

SEQ ID NO: 2430181 - RNA, 14 nt, Human
augaucuacucaga

SEQ ID NO: 2430182 - RNA, 14 nt, Human
augaucucucugaa

SEQ ID NO: 2430183 - RNA, 23 nt, Human
augaucuaccagccucccuauuu

SEQ ID NO: 2430184 - RNA, 15 nt, Human
augauccuaaugaau

SEQ ID NO: 2430185 - RNA, 14 nt, Human
augaucuucuuuau

SEQ ID NO: 2430186 - RNA, 18 nt, Human
augaucuacucagaaauu

SEQ ID NO: 2430187 - RNA, 16 nt, Human
augaucuacucagaaa

SEQ ID NO: 2430188 - RNA, 22 nt, Human
augaucucuucuuuuggcuucc

SEQ ID NO: 2430189 - RNA, 21 nt, Human
augaucugagucccaggagcu

SEQ ID NO: 2430190 - RNA, 19 nt, Human
augaauuacauuuguauaa

SEQ ID NO: 2430191 - RNA, 18 nt, Human
augaauuacauuuguaua

SEQ ID NO: 2430192 - RNA, 18 nt, Human
augaacauguacuguucu

SEQ ID NO: 2430193 - RNA, 15 nt, Human
augaacauguuccug

SEQ ID NO: 2430194 - RNA, 21 nt, Human
augaacauauuguugaaaggu

SEQ ID NO: 2430195 - RNA, 13 nt, Human
augaaccacaucu

SEQ ID NO: 2430196 - RNA, 20 nt, Human
augaaccacaucuugcucug

SEQ ID NO: 2430197 - RNA, 23 nt, Human
uugggcagcgcccuuccucucca

SEQ ID NO: 2430198 - RNA, 21 nt, Human
uugggcagcgcccuuccucuc

SEQ ID NO: 2430199 - RNA, 19 nt, Human
uugggcagcgcccuuccuc

SEQ ID NO: 2430200 - RNA, 18 nt, Human
uugggcagcgcccuuccu

SEQ ID NO: 2430201 - RNA, 22 nt, Human
uugggcagcgcccuuccucucc

SEQ ID NO: 2430202 - RNA, 13 nt, Human
uugggccagacau

SEQ ID NO: 2430203 - RNA, 20 nt, Human
uugggccugcuccagaccug

SEQ ID NO: 2430204 - RNA, 21 nt, Human
uugggcagagcuggcucugag

SEQ ID NO: 2430205 - RNA, 17 nt, Human
uugggcagagcuggcuc

SEQ ID NO: 2430206 - RNA, 22 nt, Human
uugggcagagcuggcucugagc

SEQ ID NO: 2430207 - RNA, 19 nt, Human
uugggcagaagggagaagg

SEQ ID NO: 2430208 - RNA, 12 nt, Human
uugggcagagcu

SEQ ID NO: 2430209 - RNA, 20 nt, Human
uugggcagaagggagaagga

SEQ ID NO: 2430210 - RNA, 21 nt, Human
uugggcggcugagagccccag

SEQ ID NO: 2430211 - RNA, 18 nt, Human
uugggcggcugagagccc

SEQ ID NO: 2430212 - RNA, 16 nt, Human
uugggcggcugagagc

SEQ ID NO: 2430213 - RNA, 16 nt, Human
uugggcuccuuuuucu

SEQ ID NO: 2430214 - RNA, 15 nt, Human
uugggcuccuuuuuc

SEQ ID NO: 2430215 - RNA, 13 nt, Human
uugggcugagacu

SEQ ID NO: 2430216 - RNA, 22 nt, Human
uugggcugugcggaucucugga

SEQ ID NO: 2430217 - RNA, 19 nt, Human
uugggcuggaacagauuca

SEQ ID NO: 2430218 - RNA, 15 nt, Human
uugggcugagacugg

SEQ ID NO: 2430219 - RNA, 19 nt, Human
uuggggaagaacgaagcca

SEQ ID NO: 2430220 - RNA, 17 nt, Human
uugggguacccacugcu

SEQ ID NO: 2430221 - RNA, 15 nt, Human
uuggggucugacccc

SEQ ID NO: 2430222 - RNA, 14 nt, Human
uuggggucugaccc

SEQ ID NO: 2430223 - RNA, 16 nt, Human
uuggggucagccaggg

SEQ ID NO: 2430224 - RNA, 13 nt, Human
uuggggucagcca

SEQ ID NO: 2430225 - RNA, 18 nt, Human
uugguuaagucuguuuua

SEQ ID NO: 2430226 - RNA, 16 nt, Human
uuggggucugccacca

SEQ ID NO: 2430227 - RNA, 15 nt, Human
uuggggucagccagg

SEQ ID NO: 2430228 - RNA, 17 nt, Human
uuggggucuggcagccu

SEQ ID NO: 2430229 - RNA, 22 nt, Human
uugggguacccacugcucuggu

SEQ ID NO: 2430230 - RNA, 21 nt, Human
uugggguagcuagaggaacca

SEQ ID NO: 2430231 - RNA, 19 nt, Human
uugguuaggcauuguggga

SEQ ID NO: 2430232 - RNA, 16 nt, Human
uugguuaagucuguuu

SEQ ID NO: 2430233 - RNA, 17 nt, Human
uugguuuuguuccccuc

SEQ ID NO: 2430234 - RNA, 14 nt, Human
uugguuuuguuccc

SEQ ID NO: 2430235 - RNA, 15 nt, Human
uugguucauaaauga

SEQ ID NO: 2430236 - RNA, 14 nt, Human
uugguucauaaaug

SEQ ID NO: 2430237 - RNA, 14 nt, Human
uugguucauuaauu

SEQ ID NO: 2430238 - RNA, 20 nt, Human
uugguucauuaauucuauaa

SEQ ID NO: 2430239 - RNA, 20 nt, Human
uuguaacuaggcucagagau

SEQ ID NO: 2430240 - RNA, 11 nt, Human
uuguaagaaau

SEQ ID NO: 2430241 - RNA, 17 nt, Human
uuguaacuuggauguag

SEQ ID NO: 2430242 - RNA, 14 nt, Human
uuguaacuccacca

SEQ ID NO: 2430243 - RNA, 14 nt, Human
uuguaaggaaugau

SEQ ID NO: 2430244 - RNA, 22 nt, Human
uuguaagcaugcacaaauucug

SEQ ID NO: 2430245 - RNA, 13 nt, Human
uuguaagaaauac

SEQ ID NO: 2430246 - RNA, 14 nt, Human
uuguaagaaauacu

SEQ ID NO: 2430247 - RNA, 21 nt, Human
uuguaacguugcugugggaac

SEQ ID NO: 2430248 - RNA, 20 nt, Human
uuguaacguugcugugggaa

SEQ ID NO: 2430249 - RNA, 21 nt, Human
uuguaaaaacagcauugcuuu

SEQ ID NO: 2430250 - RNA, 19 nt, Human
uuguaacguugcuguggga

SEQ ID NO: 2430251 - RNA, 19 nt, Human
uuguaaaaacagcauugcu

SEQ ID NO: 2430252 - RNA, 20 nt, Human
uuguaaaaacagcauugcuu

SEQ ID NO: 2430253 - RNA, 23 nt, Human
uuguaaaaacagcauugcuuucu

SEQ ID NO: 2430254 - RNA, 23 nt, Human
uuguaaaaaaaaaugccuuugag

SEQ ID NO: 2430255 - RNA, 22 nt, Human
uuguaaaaaaaaaugccuuuga

SEQ ID NO: 2430256 - RNA, 21 nt, Human
uuguaaaaaaaaaugccuuug

SEQ ID NO: 2430257 - RNA, 20 nt, Human
uuguaaaaaaaaaugccuuu

SEQ ID NO: 2430258 - RNA, 19 nt, Human
uuguaaaaaaaaaugccuu

SEQ ID NO: 2430259 - RNA, 17 nt, Human
uuguaaaaaaaaaugcc

SEQ ID NO: 2430260 - RNA, 16 nt, Human
uuguaaaaaaaaaugc

SEQ ID NO: 2430261 - RNA, 18 nt, Human
uugguuuuuaaaacccag

SEQ ID NO: 2430262 - RNA, 18 nt, Human
uugguuuuguuccccucc

SEQ ID NO: 2430263 - RNA, 15 nt, Human
uuguaaaaaaaaaug

SEQ ID NO: 2430264 - RNA, 21 nt, Human
uuguauaagauuagaaugaaa

SEQ ID NO: 2430265 - RNA, 14 nt, Human
uuguauaacuucuu

SEQ ID NO: 2430266 - RNA, 17 nt, Human
uuguauaacagguuauu

SEQ ID NO: 2430267 - RNA, 16 nt, Human
uuguauaacagguuau

SEQ ID NO: 2430268 - RNA, 15 nt, Human
uuguauaacagguua

SEQ ID NO: 2430269 - RNA, 14 nt, Human
uuguauaacagguu

SEQ ID NO: 2430270 - RNA, 13 nt, Human
uuguauaacaggu

SEQ ID NO: 2430271 - RNA, 23 nt, Human
uuguauaaauuuauuuacugcua

SEQ ID NO: 2430272 - RNA, 21 nt, Human
uuguauauauguguguuuaaa

SEQ ID NO: 2430273 - RNA, 16 nt, Human
uuguauauaugugugu

SEQ ID NO: 2430274 - RNA, 15 nt, Human
uuguauauaugugug

SEQ ID NO: 2430275 - RNA, 14 nt, Human
uuguauauaugugu

SEQ ID NO: 2430276 - RNA, 19 nt, Human
uuguauauaucugcuucag

SEQ ID NO: 2430277 - RNA, 13 nt, Human
uuguauauaucug

SEQ ID NO: 2430278 - RNA, 11 nt, Human
uuguauauauc

SEQ ID NO: 2430279 - RNA, 20 nt, Human
uuguauaguugcuugccuga

SEQ ID NO: 2430280 - RNA, 13 nt, Human
uuguauaauugua

SEQ ID NO: 2430281 - RNA, 12 nt, Human
uuguauaauugu

SEQ ID NO: 2430282 - RNA, 19 nt, Human
uuguauaguugcuugccug

SEQ ID NO: 2430283 - RNA, 15 nt, Human
uuguauaguugcuug

SEQ ID NO: 2430284 - RNA, 14 nt, Human
uuguauaguugcuu

SEQ ID NO: 2430285 - RNA, 13 nt, Human
uuguauaaaauaa

SEQ ID NO: 2430286 - RNA, 17 nt, Human
uuguaguuuaccucuuu

SEQ ID NO: 2430287 - RNA, 13 nt, Human
uuguaguuuaccu

SEQ ID NO: 2430288 - RNA, 16 nt, Human
uuguauaaaaaaaaua

SEQ ID NO: 2430289 - RNA, 12 nt, Human
uuguauaaaaau

SEQ ID NO: 2430290 - RNA, 19 nt, Human
uuguauaaaauaauuuuua

SEQ ID NO: 2430291 - RNA, 12 nt, Human
uuguauaaauuu

SEQ ID NO: 2430292 - RNA, 19 nt, Human
uuguauaaauuuauuuacu

SEQ ID NO: 2430293 - RNA, 20 nt, Human
uuguauaaaaauagaagaau

SEQ ID NO: 2430294 - RNA, 23 nt, Human
uuguaguguuggagaagaacuga

SEQ ID NO: 2430295 - RNA, 14 nt, Human
uuguaaugucacca

SEQ ID NO: 2430296 - RNA, 15 nt, Human
uuguaauguuacuga

SEQ ID NO: 2430297 - RNA, 13 nt, Human
uuguaaugaaaac

SEQ ID NO: 2430298 - RNA, 14 nt, Human
uuguaaguuuaugu

SEQ ID NO: 2430299 - RNA, 12 nt, Human
uuguaaugaaaa

SEQ ID NO: 2430300 - RNA, 12 nt, Human
uuguaaguuuau

SEQ ID NO: 2430301 - RNA, 20 nt, Human
uuguaaggaaugauuaauua

SEQ ID NO: 2430302 - RNA, 22 nt, Human
augacacuuguccccaaauccg

SEQ ID NO: 2430303 - RNA, 13 nt, Human
augacagagccag

SEQ ID NO: 2430304 - RNA, 16 nt, Human
augacagauguugaau

SEQ ID NO: 2430305 - RNA, 15 nt, Human
augacagcugucccu

SEQ ID NO: 2430306 - RNA, 12 nt, Human
augacagagcga

SEQ ID NO: 2430307 - RNA, 16 nt, Human
augacagcugucccug

SEQ ID NO: 2430308 - RNA, 17 nt, Human
augacagcugucccugu

SEQ ID NO: 2430309 - RNA, 19 nt, Human
augacagcugucccuguca

SEQ ID NO: 2430310 - RNA, 23 nt, Human
augacaguaguaccaaaugcuuu

SEQ ID NO: 2430311 - RNA, 16 nt, Human
augacagguaaauuaa

SEQ ID NO: 2430312 - RNA, 21 nt, Human
augacagcugucccugucacc

SEQ ID NO: 2430313 - RNA, 20 nt, Human
augacacgaauauugcugau

SEQ ID NO: 2430314 - RNA, 18 nt, Human
augacaagccccaggcag

SEQ ID NO: 2430315 - RNA, 20 nt, Human
augacaagccccaggcaggc

SEQ ID NO: 2430316 - RNA, 19 nt, Human
augacacgaauauugcuga

SEQ ID NO: 2430317 - RNA, 15 nt, Human
augacaagccccagg

SEQ ID NO: 2430318 - RNA, 16 nt, Human
augacaagccccaggc

SEQ ID NO: 2430319 - RNA, 15 nt, Human
augacaacuuugcca

SEQ ID NO: 2430320 - RNA, 21 nt, Human
augaauuaguuuuauaugcuu

SEQ ID NO: 2430321 - RNA, 14 nt, Human
uuguauauucacuu

SEQ ID NO: 2430322 - RNA, 22 nt, Human
augaauuacauuuguauaaaau

SEQ ID NO: 2430323 - RNA, 13 nt, Human
uuguauauucacu

SEQ ID NO: 2430324 - RNA, 16 nt, Human
uuguauauuauuucua

SEQ ID NO: 2430325 - RNA, 21 nt, Human
uuguauauuauggaagauuuu

SEQ ID NO: 2430326 - RNA, 18 nt, Human
uuguauauuauggaagau

SEQ ID NO: 2430327 - RNA, 20 nt, Human
uuguauauuauggaagauuu

SEQ ID NO: 2430328 - RNA, 23 nt, Human
augaauuaguuuuauaugcuucu

SEQ ID NO: 2430329 - RNA, 17 nt, Human
augaauucuuaugcuua

SEQ ID NO: 2430330 - RNA, 23 nt, Human
augaauuuuuuucaucuucucug

SEQ ID NO: 2430331 - RNA, 22 nt, Human
augaauuuuuuucaucuucucu

SEQ ID NO: 2430332 - RNA, 19 nt, Human
augacaacuggaauaguuu

SEQ ID NO: 2430333 - RNA, 19 nt, Human
augacaacagaagcuucag

SEQ ID NO: 2430334 - RNA, 14 nt, Human
augacaacagaagc

SEQ ID NO: 2430335 - RNA, 18 nt, Human
augacaacuggaauaguu

SEQ ID NO: 2430336 - RNA, 19 nt, Human
augacaaaaauucaacuca

SEQ ID NO: 2430337 - RNA, 15 nt, Human
augacaaaaauucaa

SEQ ID NO: 2430338 - RNA, 23 nt, Human
augacaaaaauucaacucagacu

SEQ ID NO: 2430339 - RNA, 17 nt, Human
uuggaaagaguaggaag

SEQ ID NO: 2430340 - RNA, 18 nt, Human
uuggaaaccugcccugcc

SEQ ID NO: 2430341 - RNA, 17 nt, Human
uuggaaaccugcccugc

SEQ ID NO: 2430342 - RNA, 15 nt, Human
uuggaaaccugcccu

SEQ ID NO: 2430343 - RNA, 15 nt, Human
uugcuuuuucaccag

SEQ ID NO: 2430344 - RNA, 13 nt, Human
uugcuuuugugaa

SEQ ID NO: 2430345 - RNA, 20 nt, Human
uugcuuuuggcaaaacucua

SEQ ID NO: 2430346 - RNA, 15 nt, Human
uugcuuuuucugacu

SEQ ID NO: 2430347 - RNA, 13 nt, Human
uugcuuuuucuga

SEQ ID NO: 2430348 - RNA, 22 nt, Human
uugcuuuuucuaaugugguuau

SEQ ID NO: 2430349 - RNA, 15 nt, Human
uugcuuuuucuaaug

SEQ ID NO: 2430350 - RNA, 19 nt, Human
uugcuuuuccacugccugg

SEQ ID NO: 2430351 - RNA, 22 nt, Human
uugcuuuacugucaaaauaauu

SEQ ID NO: 2430352 - RNA, 16 nt, Human
uugcuuuaauuguuaa

SEQ ID NO: 2430353 - RNA, 18 nt, Human
uugcuuuaauuguuaaga

SEQ ID NO: 2430354 - RNA, 16 nt, Human
uugcuuuuaaaaucca

SEQ ID NO: 2430355 - RNA, 19 nt, Human
uugcuuuacugucaaaaua

SEQ ID NO: 2430356 - RNA, 16 nt, Human
uugcuuuacugucaaa

SEQ ID NO: 2430357 - RNA, 15 nt, Human
uugcuuuacugucaa

SEQ ID NO: 2430358 - RNA, 18 nt, Human
uugcugauggugcaauga

SEQ ID NO: 2430359 - RNA, 17 nt, Human
uugcugauggugcaaug

SEQ ID NO: 2430360 - RNA, 11 nt, Human
uugcugagccu

SEQ ID NO: 2430361 - RNA, 18 nt, Human
uugcugaauaggcgauca

SEQ ID NO: 2430362 - RNA, 18 nt, Human
uugcuugccugauauaaa

SEQ ID NO: 2430363 - RNA, 16 nt, Human
uugcuugccugauaua

SEQ ID NO: 2430364 - RNA, 16 nt, Human
uugcuugccucucugu

SEQ ID NO: 2430365 - RNA, 15 nt, Human
uugcuugccucucug

SEQ ID NO: 2430366 - RNA, 11 nt, Human
uugcuugccuc

SEQ ID NO: 2430367 - RNA, 22 nt, Human
uugcugagccucugcuccccag

SEQ ID NO: 2430368 - RNA, 14 nt, Human
uugcugagccucug

SEQ ID NO: 2430369 - RNA, 15 nt, Human
uugcugagccucugc

SEQ ID NO: 2430370 - RNA, 20 nt, Human
uugcuugcaguagauuuucu

SEQ ID NO: 2430371 - RNA, 15 nt, Human
uugcuugggaagggg

SEQ ID NO: 2430372 - RNA, 14 nt, Human
uugcuugggaaggg

SEQ ID NO: 2430373 - RNA, 19 nt, Human
uugcuuggcugcuuggccu

SEQ ID NO: 2430374 - RNA, 15 nt, Human
uugcuuggcugcuug

SEQ ID NO: 2430375 - RNA, 14 nt, Human
uugcuuggcugcuu

SEQ ID NO: 2430376 - RNA, 16 nt, Human
uugcuuggacuauuau

SEQ ID NO: 2430377 - RNA, 24 nt, Human
uugcuuguugggauuccugaccca

SEQ ID NO: 2430378 - RNA, 23 nt, Human
uugcuuguugggauuccugaccc

SEQ ID NO: 2430379 - RNA, 20 nt, Human
uugcuacuacuuaccuacca

SEQ ID NO: 2430380 - RNA, 17 nt, Human
uugcuaccucagucagu

SEQ ID NO: 2430381 - RNA, 13 nt, Human
uugcuaccucagu

SEQ ID NO: 2430382 - RNA, 19 nt, Human
aucuaauaccucugugugc

SEQ ID NO: 2430383 - RNA, 17 nt, Human
aucuaauaccucugugu

SEQ ID NO: 2430384 - RNA, 15 nt, Human
aucuaauaccucugu

SEQ ID NO: 2430385 - RNA, 20 nt, Human
uugcuaagugaggaugaaaa

SEQ ID NO: 2430386 - RNA, 14 nt, Human
uugcuaaucagugu

SEQ ID NO: 2430387 - RNA, 21 nt, Human
uugcuaaucagugucucacac

SEQ ID NO: 2430388 - RNA, 18 nt, Human
uugcuaaucagugucuca

SEQ ID NO: 2430389 - RNA, 16 nt, Human
uugcuaaucagugucu

SEQ ID NO: 2430390 - RNA, 15 nt, Human
uugcuaaucaguguc

SEQ ID NO: 2430391 - RNA, 11 nt, Human
uugcucaugga

SEQ ID NO: 2430392 - RNA, 15 nt, Human
uugcuaucuuaauuu

SEQ ID NO: 2430393 - RNA, 14 nt, Human
uugcuaucuuaauu

SEQ ID NO: 2430394 - RNA, 13 nt, Human
uugcuaucuuaau

SEQ ID NO: 2430395 - RNA, 12 nt, Human
uugcucauggaa

SEQ ID NO: 2430396 - RNA, 20 nt, Human
uugcuaugagcuggggaugu

SEQ ID NO: 2430397 - RNA, 18 nt, Human
uugcuaucuuaauuuugg

SEQ ID NO: 2430398 - RNA, 16 nt, Human
uugcuaucuuaauuuu

SEQ ID NO: 2430399 - RNA, 17 nt, Human
uugcuccuaauguugaa

SEQ ID NO: 2430400 - RNA, 14 nt, Human
uugcugaaagaucu

SEQ ID NO: 2430401 - RNA, 11 nt, Human
uugcugaaauu

SEQ ID NO: 2430402 - RNA, 16 nt, Human
uugcugaaauuuuaua

SEQ ID NO: 2430403 - RNA, 13 nt, Human
uugcuccgccucu

SEQ ID NO: 2430404 - RNA, 19 nt, Human
uugcugaauacagaggcaa

SEQ ID NO: 2430405 - RNA, 19 nt, Human
uugcugaaauuuuauaugc

SEQ ID NO: 2430406 - RNA, 11 nt, Human
uugcugaauag

SEQ ID NO: 2430407 - RNA, 15 nt, Human
uuggcugcugaaggc

SEQ ID NO: 2430408 - RNA, 11 nt, Human
uuggcugcuga

SEQ ID NO: 2430409 - RNA, 14 nt, Human
uuggcugcagggag

SEQ ID NO: 2430410 - RNA, 13 nt, Human
uuggcugcaggga

SEQ ID NO: 2430411 - RNA, 22 nt, Human
uuggcuagagguucaaagauau

SEQ ID NO: 2430412 - RNA, 22 nt, Human
uuggcuaggaccccuccaugug

SEQ ID NO: 2430413 - RNA, 21 nt, Human
uuggcuagagguucaaagaua

SEQ ID NO: 2430414 - RNA, 19 nt, Human
uuggcgcacccuccccucc

SEQ ID NO: 2430415 - RNA, 15 nt, Human
uuggcgcacccuccc

SEQ ID NO: 2430416 - RNA, 22 nt, Human
uuggccuucagaaccauccaua

SEQ ID NO: 2430417 - RNA, 22 nt, Human
uuggccugucucauccccaggg

SEQ ID NO: 2430418 - RNA, 21 nt, Human
uuggaaaccugcccugccuga

SEQ ID NO: 2430419 - RNA, 18 nt, Human
uuggaaagaguaggaaga

SEQ ID NO: 2430420 - RNA, 13 nt, Human
uuggacccuucca

SEQ ID NO: 2430421 - RNA, 14 nt, Human
uuggacccuuccau

SEQ ID NO: 2430422 - RNA, 19 nt, Human
uuggaccuaaauggccuca

SEQ ID NO: 2430423 - RNA, 16 nt, Human
uuggacccuuccaugg

SEQ ID NO: 2430424 - RNA, 23 nt, Human
uuggaccuaaauggccucaugug

SEQ ID NO: 2430425 - RNA, 21 nt, Human
uuggaccuaaauggccucaug

SEQ ID NO: 2430426 - RNA, 17 nt, Human
uuggaccuaauccaagc

SEQ ID NO: 2430427 - RNA, 13 nt, Human
uuggaccucugcu

SEQ ID NO: 2430428 - RNA, 12 nt, Human
uuggccuggagg

SEQ ID NO: 2430429 - RNA, 14 nt, Human
uuggccugcuguga

SEQ ID NO: 2430430 - RNA, 13 nt, Human
uuggccugcugug

SEQ ID NO: 2430431 - RNA, 21 nt, Human
uuggaccucugcucugaggcu

SEQ ID NO: 2430432 - RNA, 12 nt, Human
uuggccugcugu

SEQ ID NO: 2430433 - RNA, 16 nt, Human
uuggccuggagguggg

SEQ ID NO: 2430434 - RNA, 16 nt, Human
uuggccugucucaucc

SEQ ID NO: 2430435 - RNA, 23 nt, Human
uuggccugucucauccccagggg

SEQ ID NO: 2430436 - RNA, 16 nt, Human
uuggaccucugcucug

SEQ ID NO: 2430437 - RNA, 15 nt, Human
uuggaccucugcucu

SEQ ID NO: 2430438 - RNA, 14 nt, Human
uuggaccucugcuc

SEQ ID NO: 2430439 - RNA, 20 nt, Human
uuggaaaccugcccugccug

SEQ ID NO: 2430440 - RNA, 18 nt, Human
uuggaccucugcucugag

SEQ ID NO: 2430441 - RNA, 17 nt, Human
uuggaccucugcucuga

SEQ ID NO: 2430442 - RNA, 13 nt, Human
uuggacggccuga

SEQ ID NO: 2430443 - RNA, 19 nt, Human
uuggccugaucagaccacg

SEQ ID NO: 2430444 - RNA, 13 nt, Human
uuggacuauuaua

SEQ ID NO: 2430445 - RNA, 17 nt, Human
uuggccugaucagacca

SEQ ID NO: 2430446 - RNA, 21 nt, Human
uuggacggccugaugcucccu

SEQ ID NO: 2430447 - RNA, 17 nt, Human
uuggacggcugggcaca

SEQ ID NO: 2430448 - RNA, 16 nt, Human
aucuuuucacaaauaa

SEQ ID NO: 2430449 - RNA, 15 nt, Human
aucuuuucacaaaua

SEQ ID NO: 2430450 - RNA, 14 nt, Human
aucuuuucacaaau

SEQ ID NO: 2430451 - RNA, 13 nt, Human
aucuuuucacaaa

SEQ ID NO: 2430452 - RNA, 20 nt, Human
augaaagacuguacaaagua

SEQ ID NO: 2430453 - RNA, 23 nt, Human
augaaagauggcugugccucugc

SEQ ID NO: 2430454 - RNA, 20 nt, Human
augaaagauggcugugccuc

SEQ ID NO: 2430455 - RNA, 19 nt, Human
augaaagauggcugugccu

SEQ ID NO: 2430456 - RNA, 20 nt, Human
augaaauauuauguuaaaac

SEQ ID NO: 2430457 - RNA, 21 nt, Human
augaaauauuauguuaaaacu

SEQ ID NO: 2430458 - RNA, 18 nt, Human
augaaagaguaaaggaaa

SEQ ID NO: 2430459 - RNA, 13 nt, Human
augaaagaggagg

SEQ ID NO: 2430460 - RNA, 18 nt, Human
augaaaucuuacagcugg

SEQ ID NO: 2430461 - RNA, 14 nt, Human
augaaaugagguca

SEQ ID NO: 2430462 - RNA, 12 nt, Human
aucuuuccuguc

SEQ ID NO: 2430463 - RNA, 11 nt, Human
aucuuuccugu

SEQ ID NO: 2430464 - RNA, 19 nt, Human
aucuuucauuaaaggcuuc

SEQ ID NO: 2430465 - RNA, 20 nt, Human
aucuuucaucaaucauugua

SEQ ID NO: 2430466 - RNA, 20 nt, Human
aucuuucauuaaaggcuucu

SEQ ID NO: 2430467 - RNA, 17 nt, Human
aucuuucacacuuccac

SEQ ID NO: 2430468 - RNA, 22 nt, Human
aucuuucacacuuccaccagcc

SEQ ID NO: 2430469 - RNA, 12 nt, Human
aucuuucaggaa

SEQ ID NO: 2430470 - RNA, 14 nt, Human
aucuuuauuaauca

SEQ ID NO: 2430471 - RNA, 18 nt, Human
aucuuuauugagaaagag

SEQ ID NO: 2430472 - RNA, 17 nt, Human
aucuuuauugagaaaga

SEQ ID NO: 2430473 - RNA, 16 nt, Human
aucuuuauugagaaag

SEQ ID NO: 2430474 - RNA, 17 nt, Human
uuggcgcacccuccccu

SEQ ID NO: 2430475 - RNA, 22 nt, Human
aucuuuuacaacugccucgaaa

SEQ ID NO: 2430476 - RNA, 16 nt, Human
aucuuuguggccaagg

SEQ ID NO: 2430477 - RNA, 19 nt, Human
aucuuuguggccaaggagc

SEQ ID NO: 2430478 - RNA, 23 nt, Human
aucuuuguggccaaggagcugcu

SEQ ID NO: 2430479 - RNA, 11 nt, Human
aucuuuuacau

SEQ ID NO: 2430480 - RNA, 16 nt, Human
aucuuucuauuccaaa

SEQ ID NO: 2430481 - RNA, 23 nt, Human
aucuuucgcacagcaguuccgga

SEQ ID NO: 2430482 - RNA, 18 nt, Human
aucuuucgcacagcaguu

SEQ ID NO: 2430483 - RNA, 17 nt, Human
aucuuucgcacagcagu

SEQ ID NO: 2430484 - RNA, 16 nt, Human
aucuuucgcacagcag

SEQ ID NO: 2430485 - RNA, 14 nt, Human
aucuuuguggccaa

SEQ ID NO: 2430486 - RNA, 15 nt, Human
aucuuuguggccaag

SEQ ID NO: 2430487 - RNA, 13 nt, Human
aucuuuguggcca

SEQ ID NO: 2430488 - RNA, 18 nt, Human
auuuguauaaaauaauuu

SEQ ID NO: 2430489 - RNA, 15 nt, Human
auuuguauaaaauaa

SEQ ID NO: 2430490 - RNA, 19 nt, Human
auuuguauaaaauaauuuu

SEQ ID NO: 2430491 - RNA, 23 nt, Human
auuugugaagguggaaauaaacu

SEQ ID NO: 2430492 - RNA, 13 nt, Human
auuugaaggccag

SEQ ID NO: 2430493 - RNA, 16 nt, Human
auuugaagcaaagcac

SEQ ID NO: 2430494 - RNA, 19 nt, Human
auuugaagaaugaacaaau

SEQ ID NO: 2430495 - RNA, 23 nt, Human
auuugaaggucugcaagaaccug

SEQ ID NO: 2430496 - RNA, 14 nt, Human
auuugaaggucugc

SEQ ID NO: 2430497 - RNA, 20 nt, Human
auuugaaucuugucucaaug

SEQ ID NO: 2430498 - RNA, 18 nt, Human
auuugaaucuugucucaa

SEQ ID NO: 2430499 - RNA, 22 nt, Human
auuugaaucuugucucaaugcu

SEQ ID NO: 2430500 - RNA, 11 nt, Human
auuugaaugaa

SEQ ID NO: 2430501 - RNA, 16 nt, Human
auuugaaucuugucuc

SEQ ID NO: 2430502 - RNA, 15 nt, Human
auuugaaucuugucu

SEQ ID NO: 2430503 - RNA, 14 nt, Human
auuugaaucuuguc

SEQ ID NO: 2430504 - RNA, 13 nt, Human
auuuguuuucccg

SEQ ID NO: 2430505 - RNA, 15 nt, Human
auuuguuuucauggu

SEQ ID NO: 2430506 - RNA, 14 nt, Human
auuugugauacaau

SEQ ID NO: 2430507 - RNA, 22 nt, Human
auuugugacuaauuguauaaca

SEQ ID NO: 2430508 - RNA, 20 nt, Human
auuugugacuaauuguauaa

SEQ ID NO: 2430509 - RNA, 19 nt, Human
auuugugacuaauuguaua

SEQ ID NO: 2430510 - RNA, 18 nt, Human
auuugugacuaauuguau

SEQ ID NO: 2430511 - RNA, 16 nt, Human
auuugugacuaauugu

SEQ ID NO: 2430512 - RNA, 11 nt, Human
auuugugacua

SEQ ID NO: 2430513 - RNA, 13 nt, Human
auuugaaugaaaa

SEQ ID NO: 2430514 - RNA, 14 nt, Human
auuugaaugaaaaa

SEQ ID NO: 2430515 - RNA, 15 nt, Human
auuugaaugaaaaau

SEQ ID NO: 2430516 - RNA, 16 nt, Human
auuugaaugaaaaauu

SEQ ID NO: 2430517 - RNA, 22 nt, Human
auuuguuuuuguauuuuuaaug

SEQ ID NO: 2430518 - RNA, 17 nt, Human
auuuuaaaagaaugauu

SEQ ID NO: 2430519 - RNA, 18 nt, Human
auuuguuuugacggauga

SEQ ID NO: 2430520 - RNA, 19 nt, Human
auuuguuuucccgccaagc

SEQ ID NO: 2430521 - RNA, 21 nt, Human
auuuguuuugacggaugauug

SEQ ID NO: 2430522 - RNA, 13 nt, Human
auuuuaaacaaag

SEQ ID NO: 2430523 - RNA, 22 nt, Human
auuuuaaacaaagguugagaug

SEQ ID NO: 2430524 - RNA, 22 nt, Human
auuuuaaaccauaaaaagcuga

SEQ ID NO: 2430525 - RNA, 20 nt, Human
auuuuaaaccauaaaaagcu

SEQ ID NO: 2430526 - RNA, 21 nt, Human
auuuuaaugcaccugaauguu

SEQ ID NO: 2430527 - RNA, 14 nt, Human
auuuuaaagacaug

SEQ ID NO: 2430528 - RNA, 21 nt, Human
auuuuaaaccauaaaaagcug

SEQ ID NO: 2430529 - RNA, 19 nt, Human
auuuuaauuauuauucuuc

SEQ ID NO: 2430530 - RNA, 13 nt, Human
auuuuaauuauua

SEQ ID NO: 2430531 - RNA, 18 nt, Human
auuuuaauuaucuuuucu

SEQ ID NO: 2430532 - RNA, 22 nt, Human
auuuuaaaagaaugauuaugaa

SEQ ID NO: 2430533 - RNA, 18 nt, Human
auuuuaaaagaaugauua

SEQ ID NO: 2430534 - RNA, 19 nt, Human
auuuuaaaaagauuuguuu

SEQ ID NO: 2430535 - RNA, 17 nt, Human
auuuuaaaauuuuaucu

SEQ ID NO: 2430536 - RNA, 17 nt, Human
auuuuaaacaaaauaga

SEQ ID NO: 2430537 - RNA, 18 nt, Human
auuuuaaaauuuuaucuc

SEQ ID NO: 2430538 - RNA, 15 nt, Human
auuuuaauucaguug

SEQ ID NO: 2430539 - RNA, 24 nt, Human
auuuuaauucaucccaacugucuu

SEQ ID NO: 2430540 - RNA, 23 nt, Human
auuuuaauuauuauucuucauaa

SEQ ID NO: 2430541 - RNA, 12 nt, Human
auuuuaauucau

SEQ ID NO: 2430542 - RNA, 12 nt, Human
auuuuaauuuau

SEQ ID NO: 2430543 - RNA, 15 nt, Human
auuuuaccucuuauu

SEQ ID NO: 2430544 - RNA, 18 nt, Human
auuuuaccucuuauugca

SEQ ID NO: 2430545 - RNA, 16 nt, Human
auuuuacuuuuuccug

SEQ ID NO: 2430546 - RNA, 17 nt, Human
auuuuacuuuuuccugg

SEQ ID NO: 2430547 - RNA, 21 nt, Human
auuuuauuuuuuucugaauua

SEQ ID NO: 2430548 - RNA, 17 nt, Human
auuuuauuuuuuucuac

SEQ ID NO: 2430549 - RNA, 17 nt, Human
auuuuagccuucucugu

SEQ ID NO: 2430550 - RNA, 18 nt, Human
auuuuagccuucucuguu

SEQ ID NO: 2430551 - RNA, 19 nt, Human
auuuuagaagacucuacca

SEQ ID NO: 2430552 - RNA, 16 nt, Human
auuuuacuuuuauaau

SEQ ID NO: 2430553 - RNA, 14 nt, Human
auuuucaagaaacu

SEQ ID NO: 2430554 - RNA, 16 nt, Human
auuuucaagaaacuga

SEQ ID NO: 2430555 - RNA, 17 nt, Human
auuuucaagaaacugag

SEQ ID NO: 2430556 - RNA, 22 nt, Human
auuuucaagaaacugaggaauu

SEQ ID NO: 2430557 - RNA, 23 nt, Human
auuuucaagaaacugaggaauuu

SEQ ID NO: 2430558 - RNA, 24 nt, Human
auuuucaagaauaaucacgcuuuc

SEQ ID NO: 2430559 - RNA, 17 nt, Human
auuuucaaggcccucag

SEQ ID NO: 2430560 - RNA, 20 nt, Human
auuuucaacgcagcccugcu

SEQ ID NO: 2430561 - RNA, 13 nt, Human
auuuucaagaaac

SEQ ID NO: 2430562 - RNA, 18 nt, Human
auuuucaaauuguaucua

SEQ ID NO: 2430563 - RNA, 22 nt, Human
auuuucaaagcuuuuuccagag

SEQ ID NO: 2430564 - RNA, 18 nt, Human
auuuucaacgcagcccug

SEQ ID NO: 2430565 - RNA, 13 nt, Human
auuuucacuguag

SEQ ID NO: 2430566 - RNA, 14 nt, Human
auuuucacuuugug

SEQ ID NO: 2430567 - RNA, 21 nt, Human
auuuucaccuguuuuuaagcu

SEQ ID NO: 2430568 - RNA, 22 nt, Human
auuuucaccccacccuuccccu

SEQ ID NO: 2430569 - RNA, 22 nt, Human
auuuucacauucccaucuguca

SEQ ID NO: 2430570 - RNA, 17 nt, Human
auuuucacaugaacaua

SEQ ID NO: 2430571 - RNA, 16 nt, Human
auuuucacaugaacau

SEQ ID NO: 2430572 - RNA, 15 nt, Human
auuuucaccccaccc

SEQ ID NO: 2430573 - RNA, 16 nt, Human
auuuucaccccacccu

SEQ ID NO: 2430574 - RNA, 20 nt, Human
auuuucaaggcccucagcau

SEQ ID NO: 2430575 - RNA, 19 nt, Human
auuuucaaguaauugugaa

SEQ ID NO: 2430576 - RNA, 12 nt, Human
auuuucaaguaa

SEQ ID NO: 2430577 - RNA, 16 nt, Human
auuuucaaguaauugu

SEQ ID NO: 2430578 - RNA, 15 nt, Human
auuuucacauaaaau

SEQ ID NO: 2430579 - RNA, 20 nt, Human
auuuucacacaauacaauaa

SEQ ID NO: 2430580 - RNA, 18 nt, Human
auuuucagcaaacucuuu

SEQ ID NO: 2430581 - RNA, 19 nt, Human
auuuucagcaaacucuuuu

SEQ ID NO: 2430582 - RNA, 23 nt, Human
auuuucagcccauauuucaucgu

SEQ ID NO: 2430583 - RNA, 17 nt, Human
auuuucagcaaacucuu

SEQ ID NO: 2430584 - RNA, 17 nt, Human
auuuucagaaaauauua

SEQ ID NO: 2430585 - RNA, 14 nt, Human
auuuucagaaaaua

SEQ ID NO: 2430586 - RNA, 12 nt, Human
auuuucagaccc

SEQ ID NO: 2430587 - RNA, 22 nt, Human
auuuucaguuauuauauuuaca

SEQ ID NO: 2430588 - RNA, 20 nt, Human
auuuucauaaguauuucaaa

SEQ ID NO: 2430589 - RNA, 21 nt, Human
auuuucauaaguauuucaaau

SEQ ID NO: 2430590 - RNA, 22 nt, Human
auuuucauaaguauuucaaauu

SEQ ID NO: 2430591 - RNA, 12 nt, Human
auuuucaguauu

SEQ ID NO: 2430592 - RNA, 14 nt, Human
auuuucaguauuuu

SEQ ID NO: 2430593 - RNA, 21 nt, Human
auuuucaguagggcuacaaaa

SEQ ID NO: 2430594 - RNA, 22 nt, Human
auuuucaguagggcuacaaaac

SEQ ID NO: 2430595 - RNA, 11 nt, Human
auuuucaguau

SEQ ID NO: 2430596 - RNA, 19 nt, Human
auuuucaguauaauuuaac

SEQ ID NO: 2430597 - RNA, 21 nt, Human
auuuuccuaauaaaguucugu

SEQ ID NO: 2430598 - RNA, 12 nt, Human
auuuuccucccc

SEQ ID NO: 2430599 - RNA, 17 nt, Human
auuuuccaagugugcau

SEQ ID NO: 2430600 - RNA, 15 nt, Human
auuuuccaagugugc

SEQ ID NO: 2430601 - RNA, 17 nt, Human
auuuuccaaauguaaua

SEQ ID NO: 2430602 - RNA, 23 nt, Human
auuuuccacaagauucccagaga

SEQ ID NO: 2430603 - RNA, 20 nt, Human
auuuuccacaagauucccag

SEQ ID NO: 2430604 - RNA, 21 nt, Human
auuuuccacaagauucccaga

SEQ ID NO: 2430605 - RNA, 13 nt, Human
auuuuccucccca

SEQ ID NO: 2430606 - RNA, 14 nt, Human
auuuuccuccccag

SEQ ID NO: 2430607 - RNA, 15 nt, Human
auuuuccuccccagc

SEQ ID NO: 2430608 - RNA, 16 nt, Human
auuuuccuccccagca

SEQ ID NO: 2430609 - RNA, 13 nt, Human
auuuucaugacuu

SEQ ID NO: 2430610 - RNA, 22 nt, Human
auuuucauacagcauuacaaau

SEQ ID NO: 2430611 - RNA, 20 nt, Human
auuuucaugacuuuuccaug

SEQ ID NO: 2430612 - RNA, 19 nt, Human
auuuucaugacuuuuccau

SEQ ID NO: 2430613 - RNA, 17 nt, Human
auuuucauguauaugug

SEQ ID NO: 2430614 - RNA, 18 nt, Human
auuuucauguauaugugu

SEQ ID NO: 2430615 - RNA, 14 nt, Human
auuuuccaaaugua

SEQ ID NO: 2430616 - RNA, 14 nt, Human
auuuuccaaagagu

SEQ ID NO: 2430617 - RNA, 17 nt, Human
auuuucauuuucugcaa

SEQ ID NO: 2430618 - RNA, 15 nt, Human
auuuucauuuucugc

SEQ ID NO: 2430619 - RNA, 23 nt, Human
auuuucauuuucugcaagccugc

SEQ ID NO: 2430620 - RNA, 22 nt, Human
auuuuccaaaaguggccucuuu

SEQ ID NO: 2430621 - RNA, 15 nt, Human
auuuucauuauuccu

SEQ ID NO: 2430622 - RNA, 14 nt, Human
auuuucauuguaaa

SEQ ID NO: 2430623 - RNA, 15 nt, Human
auuuauuuaauguua

SEQ ID NO: 2430624 - RNA, 17 nt, Human
auuuauuuaauguuaug

SEQ ID NO: 2430625 - RNA, 13 nt, Human
auuuauucugcuc

SEQ ID NO: 2430626 - RNA, 23 nt, Human
auuuauuccauauucauguaaac

SEQ ID NO: 2430627 - RNA, 20 nt, Human
auuuauuccauauucaugua

SEQ ID NO: 2430628 - RNA, 19 nt, Human
auuuauuccauauucaugu

SEQ ID NO: 2430629 - RNA, 17 nt, Human
auuuauucauauuuucu

SEQ ID NO: 2430630 - RNA, 20 nt, Human
auuuauucagcuucauuugu

SEQ ID NO: 2430631 - RNA, 18 nt, Human
auuuauucagcuucauuu

SEQ ID NO: 2430632 - RNA, 19 nt, Human
auuuauucaauuccucugg

SEQ ID NO: 2430633 - RNA, 22 nt, Human
auuuauucaauaaaguauuuaa

SEQ ID NO: 2430634 - RNA, 18 nt, Human
auuuauucaauuccucug

SEQ ID NO: 2430635 - RNA, 17 nt, Human
auuuauuuuaauaaugu

SEQ ID NO: 2430636 - RNA, 14 nt, Human
auuuauuuauuauu

SEQ ID NO: 2430637 - RNA, 14 nt, Human
auuuauuuauuuaa

SEQ ID NO: 2430638 - RNA, 14 nt, Human
auuuauuuauuuau

SEQ ID NO: 2430639 - RNA, 17 nt, Human
auuuauuuauuaagaug

SEQ ID NO: 2430640 - RNA, 13 nt, Human
auuuauuuacaga

SEQ ID NO: 2430641 - RNA, 23 nt, Human
auuuauuuacagaugaauguauu

SEQ ID NO: 2430642 - RNA, 17 nt, Human
auuuauuuacugcuagu

SEQ ID NO: 2430643 - RNA, 24 nt, Human
auuuauuuacugagcuucucugug

SEQ ID NO: 2430644 - RNA, 13 nt, Human
auuuauuuauuau

SEQ ID NO: 2430645 - RNA, 14 nt, Human
auuuauuuauuaag

SEQ ID NO: 2430646 - RNA, 16 nt, Human
auuuauuuauuaagau

SEQ ID NO: 2430647 - RNA, 21 nt, Human
auuuauucaauaaaguauuua

SEQ ID NO: 2430648 - RNA, 18 nt, Human
auuuauucaauaaaguau

SEQ ID NO: 2430649 - RNA, 17 nt, Human
auuuauucaauaaagua

SEQ ID NO: 2430650 - RNA, 16 nt, Human
auuuauucaauaaagu

SEQ ID NO: 2430651 - RNA, 15 nt, Human
auuuauucaauaaag

SEQ ID NO: 2430652 - RNA, 14 nt, Human
auuuauucaauaaa

SEQ ID NO: 2430653 - RNA, 13 nt, Human
auuuauucaauaa

SEQ ID NO: 2430654 - RNA, 11 nt, Human
auuuauucaau

SEQ ID NO: 2430655 - RNA, 17 nt, Human
auuuauuauugaaauug

SEQ ID NO: 2430656 - RNA, 16 nt, Human
auuuauuauugaaauu

SEQ ID NO: 2430657 - RNA, 15 nt, Human
auuuauuauugaaau

SEQ ID NO: 2430658 - RNA, 11 nt, Human
auuuauuauuu

SEQ ID NO: 2430659 - RNA, 13 nt, Human
auuuauuauuuau

SEQ ID NO: 2430660 - RNA, 21 nt, Human
auuuauuauuuucaccuguuu

SEQ ID NO: 2430661 - RNA, 12 nt, Human
auuuauucaaga

SEQ ID NO: 2430662 - RNA, 14 nt, Human
auuuauucaagaaa

SEQ ID NO: 2430663 - RNA, 19 nt, Human
auuuauuauuuauuuauua

SEQ ID NO: 2430664 - RNA, 14 nt, Human
auuuauuauuuuca

SEQ ID NO: 2430665 - RNA, 12 nt, Human
auuucauuucuu

SEQ ID NO: 2430666 - RNA, 17 nt, Human
auuucauuguaugaugu

SEQ ID NO: 2430667 - RNA, 15 nt, Human
auuucauuguaugau

SEQ ID NO: 2430668 - RNA, 14 nt, Human
auuucauuguauga

SEQ ID NO: 2430669 - RNA, 12 nt, Human
auuucauuguau

SEQ ID NO: 2430670 - RNA, 20 nt, Human
auuucauuguaugauguguu

SEQ ID NO: 2430671 - RNA, 19 nt, Human
auuucauuguaugaugugu

SEQ ID NO: 2430672 - RNA, 18 nt, Human
auuucauuucaacuguuu

SEQ ID NO: 2430673 - RNA, 17 nt, Human
auuucaaauuggagcuu

SEQ ID NO: 2430674 - RNA, 16 nt, Human
auuucaaaaugcuuuu

SEQ ID NO: 2430675 - RNA, 16 nt, Human
auuucaaacggccuca

SEQ ID NO: 2430676 - RNA, 23 nt, Human
auuucaacaaguagcuaaagucu

SEQ ID NO: 2430677 - RNA, 14 nt, Human
auuucauucuucuc

SEQ ID NO: 2430678 - RNA, 20 nt, Human
auuuauuuuaauaauguuuc

SEQ ID NO: 2430679 - RNA, 19 nt, Human
auuuauuuuaauaauguuu

SEQ ID NO: 2430680 - RNA, 14 nt, Human
auuucaaaaugcuu

SEQ ID NO: 2430681 - RNA, 15 nt, Human
auuucaaaaugcuuu

SEQ ID NO: 2430682 - RNA, 21 nt, Human
auuucaaaaugcuuuuuauua

SEQ ID NO: 2430683 - RNA, 13 nt, Human
auuucaaaaugcu

SEQ ID NO: 2430684 - RNA, 13 nt, Human
auuucaaaauaua

SEQ ID NO: 2430685 - RNA, 20 nt, Human
auuuccagugaaaucaguua

SEQ ID NO: 2430686 - RNA, 17 nt, Human
auuuccagccagggcug

SEQ ID NO: 2430687 - RNA, 13 nt, Human
auuuccaguaccu

SEQ ID NO: 2430688 - RNA, 17 nt, Human
auuuccaguaccuuugu

SEQ ID NO: 2430689 - RNA, 20 nt, Human
auuuccaguaccuuugucac

SEQ ID NO: 2430690 - RNA, 18 nt, Human
auuuccagccagggcugc

SEQ ID NO: 2430691 - RNA, 14 nt, Human
auuuccagccaggg

SEQ ID NO: 2430692 - RNA, 10 nt, Human
auuuccagag

SEQ ID NO: 2430693 - RNA, 17 nt, Human
auuuccagccaaagccu

SEQ ID NO: 2430694 - RNA, 22 nt, Human
auuucauuugugccagaaugcu

SEQ ID NO: 2430695 - RNA, 19 nt, Human
auuucauuuuuacccuuac

SEQ ID NO: 2430696 - RNA, 21 nt, Human
auuucauuguaugauguguug

SEQ ID NO: 2430697 - RNA, 23 nt, Human
auuuccccagaccugagcucccc

SEQ ID NO: 2430698 - RNA, 17 nt, Human
auuuccccaccccagcu

SEQ ID NO: 2430699 - RNA, 15 nt, Human
auuuccccagaccug

SEQ ID NO: 2430700 - RNA, 20 nt, Human
auuuccccaggggaaaauga

SEQ ID NO: 2430701 - RNA, 21 nt, Human
auuuccccaggggaaaaugaa

SEQ ID NO: 2430702 - RNA, 19 nt, Human
auuuccccaacagugugaa

SEQ ID NO: 2430703 - RNA, 18 nt, Human
auuuccccaacaguguga

SEQ ID NO: 2430704 - RNA, 17 nt, Human
auuuccccaacagugug

SEQ ID NO: 2430705 - RNA, 16 nt, Human
auuuccccaacagugu

SEQ ID NO: 2430706 - RNA, 15 nt, Human
auuuccccaacagug

SEQ ID NO: 2430707 - RNA, 13 nt, Human
auuuccagucucc

SEQ ID NO: 2430708 - RNA, 17 nt, Human
auuuccagucuccacca

SEQ ID NO: 2430709 - RNA, 15 nt, Human
auuucccaucugcac

SEQ ID NO: 2430710 - RNA, 14 nt, Human
auuucccaucugca

SEQ ID NO: 2430711 - RNA, 13 nt, Human
auuucccaucugc

SEQ ID NO: 2430712 - RNA, 18 nt, Human
auuucuuuuuuaaaugaa

SEQ ID NO: 2430713 - RNA, 22 nt, Human
auuucuuuuuuaaaugaagaaa

SEQ ID NO: 2430714 - RNA, 19 nt, Human
auuucuaggaagaauuuua

SEQ ID NO: 2430715 - RNA, 17 nt, Human
auuucuaggaagaauuu

SEQ ID NO: 2430716 - RNA, 16 nt, Human
auuucuaggaagaauu

SEQ ID NO: 2430717 - RNA, 15 nt, Human
auuucuaggaagaau

SEQ ID NO: 2430718 - RNA, 22 nt, Human
auuucuaggaagaauuuuaaaa

SEQ ID NO: 2430719 - RNA, 20 nt, Human
auuucuaggaagaauuuuaa

SEQ ID NO: 2430720 - RNA, 14 nt, Human
auuugaaaauuuug

SEQ ID NO: 2430721 - RNA, 21 nt, Human
auuucuuuuuuaaaugaagaa

SEQ ID NO: 2430722 - RNA, 22 nt, Human
auuugaaaacauaaucugcaaa

SEQ ID NO: 2430723 - RNA, 14 nt, Human
auuugaaauauuga

SEQ ID NO: 2430724 - RNA, 18 nt, Human
auuugaaaauaauuguuc

SEQ ID NO: 2430725 - RNA, 17 nt, Human
auuugaaaauaauuguu

SEQ ID NO: 2430726 - RNA, 15 nt, Human
auuugaaauuuagcu

SEQ ID NO: 2430727 - RNA, 16 nt, Human
auuugaagaacaugug

SEQ ID NO: 2430728 - RNA, 11 nt, Human
auuugaaauuu

SEQ ID NO: 2430729 - RNA, 17 nt, Human
auuucuaccauuucaga

SEQ ID NO: 2430730 - RNA, 21 nt, Human
auuucuacucucccauggcuu

SEQ ID NO: 2430731 - RNA, 15 nt, Human
auuucuacucuccca

SEQ ID NO: 2430732 - RNA, 18 nt, Human
auuucuaccauuucagag

SEQ ID NO: 2430733 - RNA, 15 nt, Human
auuucuacugugacu

SEQ ID NO: 2430734 - RNA, 20 nt, Human
auuucuacucuuaaguuucu

SEQ ID NO: 2430735 - RNA, 21 nt, Human
auuucuacucuuaaguuucuc

SEQ ID NO: 2430736 - RNA, 17 nt, Human
auuucuacugugacuga

SEQ ID NO: 2430737 - RNA, 16 nt, Human
auuucuacugugacug

SEQ ID NO: 2430738 - RNA, 18 nt, Human
auuucuacuuugaaguca

SEQ ID NO: 2430739 - RNA, 18 nt, Human
auuucuacugugacugau

SEQ ID NO: 2430740 - RNA, 21 nt, Human
auuucuagaacaucccugcca

SEQ ID NO: 2430741 - RNA, 23 nt, Human
auuucuagaacaucccugccagc

SEQ ID NO: 2430742 - RNA, 15 nt, Human
auuuccguuaaaaua

SEQ ID NO: 2430743 - RNA, 16 nt, Human
auuuccguuaaaauac

SEQ ID NO: 2430744 - RNA, 23 nt, Human
auuucccuugaaauuuuaaacua

SEQ ID NO: 2430745 - RNA, 14 nt, Human
auuuauucugcuca

SEQ ID NO: 2430746 - RNA, 20 nt, Human
auuuagacaagagaugggaa

SEQ ID NO: 2430747 - RNA, 14 nt, Human
auuuagacaagaga

SEQ ID NO: 2430748 - RNA, 15 nt, Human
auuuagaaauauaau

SEQ ID NO: 2430749 - RNA, 14 nt, Human
auuuagaacuguau

SEQ ID NO: 2430750 - RNA, 22 nt, Human
auuuagaaagaagcccaauauu

SEQ ID NO: 2430751 - RNA, 14 nt, Human
auuuacuucuuaua

SEQ ID NO: 2430752 - RNA, 16 nt, Human
auuuacuucuuauaca

SEQ ID NO: 2430753 - RNA, 17 nt, Human
auuuacuucuuauacau

SEQ ID NO: 2430754 - RNA, 21 nt, Human
auuuacugcuagucuuaagaa

SEQ ID NO: 2430755 - RNA, 17 nt, Human
auuuaaauuuuuuuccu

SEQ ID NO: 2430756 - RNA, 13 nt, Human
auuuaacaagauc

SEQ ID NO: 2430757 - RNA, 19 nt, Human
auuuaaauuuuacccuuua

SEQ ID NO: 2430758 - RNA, 12 nt, Human
auuuaacagaaa

SEQ ID NO: 2430759 - RNA, 14 nt, Human
auuuaacagaaaug

SEQ ID NO: 2430760 - RNA, 21 nt, Human
auuuacugagcuucucuguga

SEQ ID NO: 2430761 - RNA, 18 nt, Human
auuuaaaaauauuuuugg

SEQ ID NO: 2430762 - RNA, 14 nt, Human
auuuaaaaauauuu

SEQ ID NO: 2430763 - RNA, 16 nt, Human
auuuaaaaauaagaaa

SEQ ID NO: 2430764 - RNA, 15 nt, Human
auuuaaaaaauaacu

SEQ ID NO: 2430765 - RNA, 13 nt, Human
auuuaaaaaauaa

SEQ ID NO: 2430766 - RNA, 16 nt, Human
auuuagucaugugacc

SEQ ID NO: 2430767 - RNA, 20 nt, Human
auuuaguaucuuuuuauuca

SEQ ID NO: 2430768 - RNA, 13 nt, Human
auuuaguguucau

SEQ ID NO: 2430769 - RNA, 15 nt, Human
auuuagugaacuacg

SEQ ID NO: 2430770 - RNA, 14 nt, Human
auuuagucauguga

SEQ ID NO: 2430771 - RNA, 20 nt, Human
auuuagugaaagcuagagau

SEQ ID NO: 2430772 - RNA, 13 nt, Human
auuuagauguaua

SEQ ID NO: 2430773 - RNA, 20 nt, Human
auuuagagaacuguggccgu

SEQ ID NO: 2430774 - RNA, 16 nt, Human
auuuagacaagagaug

SEQ ID NO: 2430775 - RNA, 16 nt, Human
auuuagagaggaaaag

SEQ ID NO: 2430776 - RNA, 17 nt, Human
auuuagagaugaauuaa

SEQ ID NO: 2430777 - RNA, 23 nt, Human
auuuagagaugaauuaaauuuaa

SEQ ID NO: 2430778 - RNA, 22 nt, Human
auuuagagaugaauuaaauuua

SEQ ID NO: 2430779 - RNA, 17 nt, Human
auuuagauugaaaacuu

SEQ ID NO: 2430780 - RNA, 18 nt, Human
auuuagauuguuaaaaua

SEQ ID NO: 2430781 - RNA, 23 nt, Human
auuuagcacauacuacacauuca

SEQ ID NO: 2430782 - RNA, 22 nt, Human
auuuagcaugacaagccccagg

SEQ ID NO: 2430783 - RNA, 13 nt, Human
auuuagcaaauaa

SEQ ID NO: 2430784 - RNA, 18 nt, Human
auuuagcaaauaauuucc

SEQ ID NO: 2430785 - RNA, 19 nt, Human
auuuaguuuuuguucuuaa

SEQ ID NO: 2430786 - RNA, 22 nt, Human
auuuauuaaaugcccagccccu

SEQ ID NO: 2430787 - RNA, 15 nt, Human
auuuauuaagaugga

SEQ ID NO: 2430788 - RNA, 16 nt, Human
auuuauuaagauggau

SEQ ID NO: 2430789 - RNA, 21 nt, Human
auuuauuaagauggauucuca

SEQ ID NO: 2430790 - RNA, 22 nt, Human
auuuauuaagauggauucucag

SEQ ID NO: 2430791 - RNA, 23 nt, Human
auuuauuaagauggauucucaga

SEQ ID NO: 2430792 - RNA, 22 nt, Human
auuuauaaaaauaaaaaacacu

SEQ ID NO: 2430793 - RNA, 17 nt, Human
auuuauaaaaauaaaaa

SEQ ID NO: 2430794 - RNA, 15 nt, Human
auuuaguuugauuau

SEQ ID NO: 2430795 - RNA, 22 nt, Human
auuuaguuugauuauucagugu

SEQ ID NO: 2430796 - RNA, 19 nt, Human
auuuaguuuuuguaauuua

SEQ ID NO: 2430797 - RNA, 20 nt, Human
auuuaguuuuuguaauuuau

SEQ ID NO: 2430798 - RNA, 16 nt, Human
auuuaguuuuuguucu

SEQ ID NO: 2430799 - RNA, 16 nt, Human
auucuuuuuaaaguau

SEQ ID NO: 2430800 - RNA, 18 nt, Human
auugaaaacuuuucucag

SEQ ID NO: 2430801 - RNA, 15 nt, Human
auugaaaaaucacca

SEQ ID NO: 2430802 - RNA, 13 nt, Human
auugaaaaggaca

SEQ ID NO: 2430803 - RNA, 21 nt, Human
auugaaaauaguaaaugcuuu

SEQ ID NO: 2430804 - RNA, 15 nt, Human
auugaaagagaacca

SEQ ID NO: 2430805 - RNA, 17 nt, Human
auugacauguacagaga

SEQ ID NO: 2430806 - RNA, 23 nt, Human
auugacauguacagagaacuaac

SEQ ID NO: 2430807 - RNA, 15 nt, Human
auugacauguacaga

SEQ ID NO: 2430808 - RNA, 18 nt, Human
auugaaagagaaccaguu

SEQ ID NO: 2430809 - RNA, 18 nt, Human
auugaaaggcauucucug

SEQ ID NO: 2430810 - RNA, 14 nt, Human
auugacauguacag

SEQ ID NO: 2430811 - RNA, 18 nt, Human
auugacccacaagaaaug

SEQ ID NO: 2430812 - RNA, 21 nt, Human
auugacauugcuuuacuguca

SEQ ID NO: 2430813 - RNA, 21 nt, Human
auuggguggggggcuucauac

SEQ ID NO: 2430814 - RNA, 18 nt, Human
auugggugggcaggaaaa

SEQ ID NO: 2430815 - RNA, 17 nt, Human
auugguccagcuugcuc

SEQ ID NO: 2430816 - RNA, 22 nt, Human
auuggguggggggcuucauaca

SEQ ID NO: 2430817 - RNA, 19 nt, Human
auuggguccugggucuuuc

SEQ ID NO: 2430818 - RNA, 20 nt, Human
auuggguggggggcuucaua

SEQ ID NO: 2430819 - RNA, 15 nt, Human
auuggggucccucua

SEQ ID NO: 2430820 - RNA, 22 nt, Human
auugggggcuggugccagccuu

SEQ ID NO: 2430821 - RNA, 19 nt, Human
auugggggcuggugccagc

SEQ ID NO: 2430822 - RNA, 20 nt, Human
auugggcagcgcccuuccuc

SEQ ID NO: 2430823 - RNA, 19 nt, Human
auugggcagcgcccuuccu

SEQ ID NO: 2430824 - RNA, 14 nt, Human
auugggcagcgccc

SEQ ID NO: 2430825 - RNA, 15 nt, Human
auugggccccugcca

SEQ ID NO: 2430826 - RNA, 16 nt, Human
auugggccccugccag

SEQ ID NO: 2430827 - RNA, 22 nt, Human
auugggcagcgcccuuccucuc

SEQ ID NO: 2430828 - RNA, 19 nt, Human
auuggggaagacuguggcu

SEQ ID NO: 2430829 - RNA, 18 nt, Human
auugggcaagugauugaa

SEQ ID NO: 2430830 - RNA, 21 nt, Human
auugggagcuugggaauggau

SEQ ID NO: 2430831 - RNA, 17 nt, Human
auugggcaagugauuga

SEQ ID NO: 2430832 - RNA, 14 nt, Human
auucuuauuuaaug

SEQ ID NO: 2430833 - RNA, 18 nt, Human
auucuuauuuaaugaaag

SEQ ID NO: 2430834 - RNA, 17 nt, Human
auucuuauuucaugaaa

SEQ ID NO: 2430835 - RNA, 15 nt, Human
auucuuacauguuuu

SEQ ID NO: 2430836 - RNA, 17 nt, Human
auucuuacauguuuucu

SEQ ID NO: 2430837 - RNA, 18 nt, Human
auucuuauaaauaugaag

SEQ ID NO: 2430838 - RNA, 16 nt, Human
auucuuauaaauauga

SEQ ID NO: 2430839 - RNA, 15 nt, Human
auucuuauaaauaug

SEQ ID NO: 2430840 - RNA, 14 nt, Human
auucuuauaaauau

SEQ ID NO: 2430841 - RNA, 19 nt, Human
auucuuaaaguacuuguua

SEQ ID NO: 2430842 - RNA, 12 nt, Human
auucuuauaaau

SEQ ID NO: 2430843 - RNA, 13 nt, Human
auucuuauuuaau

SEQ ID NO: 2430844 - RNA, 14 nt, Human
auucuuaugcuuau

SEQ ID NO: 2430845 - RNA, 20 nt, Human
auucuuauaaauaugaagcu

SEQ ID NO: 2430846 - RNA, 22 nt, Human
auucuuauguagcaggaaauaa

SEQ ID NO: 2430847 - RNA, 15 nt, Human
auucuucucuuccuu

SEQ ID NO: 2430848 - RNA, 15 nt, Human
auucuucucuagcug

SEQ ID NO: 2430849 - RNA, 13 nt, Human
auucuucuccacu

SEQ ID NO: 2430850 - RNA, 22 nt, Human
auucuuccucccucccucuuuc

SEQ ID NO: 2430851 - RNA, 13 nt, Human
auucuuccucccu

SEQ ID NO: 2430852 - RNA, 21 nt, Human
auucuuugauguuaacacauu

SEQ ID NO: 2430853 - RNA, 20 nt, Human
auucuuugauguuaacacau

SEQ ID NO: 2430854 - RNA, 19 nt, Human
auucuuugauguuaacaca

SEQ ID NO: 2430855 - RNA, 18 nt, Human
auucuuugauguuaacac

SEQ ID NO: 2430856 - RNA, 17 nt, Human
auucuuugauguuaaca

SEQ ID NO: 2430857 - RNA, 16 nt, Human
auucuuugauguuaac

SEQ ID NO: 2430858 - RNA, 21 nt, Human
auucuucucuuccuuuuauca

SEQ ID NO: 2430859 - RNA, 15 nt, Human
auucuuugauguuaa

SEQ ID NO: 2430860 - RNA, 13 nt, Human
auucuuuuaaaag

SEQ ID NO: 2430861 - RNA, 22 nt, Human
auucuuugauguuaacacauuu

SEQ ID NO: 2430862 - RNA, 18 nt, Human
auucuuuuaaaagacaag

SEQ ID NO: 2430863 - RNA, 22 nt, Human
auucuuuuaaaagacaagacuu

SEQ ID NO: 2430864 - RNA, 14 nt, Human
auucuuuuuaaagu

SEQ ID NO: 2430865 - RNA, 17 nt, Human
auucuuuuguaauuuaa

SEQ ID NO: 2430866 - RNA, 16 nt, Human
auucuuuuguaauuua

SEQ ID NO: 2430867 - RNA, 13 nt, Human
auucuuuuguaau

SEQ ID NO: 2430868 - RNA, 18 nt, Human
auucuguuuuagguuaaa

SEQ ID NO: 2430869 - RNA, 12 nt, Human
auucuguuucuu

SEQ ID NO: 2430870 - RNA, 22 nt, Human
auucuguguguuuucauaauaa

SEQ ID NO: 2430871 - RNA, 23 nt, Human
auucuguguguuuucauaauaaa

SEQ ID NO: 2430872 - RNA, 23 nt, Human
auucuuaaaauauauuucagaua

SEQ ID NO: 2430873 - RNA, 20 nt, Human
auucuuaaaauauauuucag

SEQ ID NO: 2430874 - RNA, 24 nt, Human
auucugucucuggauuauauuaug

SEQ ID NO: 2430875 - RNA, 17 nt, Human
auucuguggaacaagcc

SEQ ID NO: 2430876 - RNA, 14 nt, Human
auucugucuugaag

SEQ ID NO: 2430877 - RNA, 17 nt, Human
auucuguguguuuucau

SEQ ID NO: 2430878 - RNA, 21 nt, Human
auucuguguguuuucauaaua

SEQ ID NO: 2430879 - RNA, 19 nt, Human
auucugguuccaggguccc

SEQ ID NO: 2430880 - RNA, 18 nt, Human
auucugucgccuuagcau

SEQ ID NO: 2430881 - RNA, 21 nt, Human
auucugucgccuuagcauguu

SEQ ID NO: 2430882 - RNA, 20 nt, Human
auucugucgccuuagcaugu

SEQ ID NO: 2430883 - RNA, 19 nt, Human
auucugucgccuuagcaug

SEQ ID NO: 2430884 - RNA, 23 nt, Human
auucuccuucagcccucaccccu

SEQ ID NO: 2430885 - RNA, 13 nt, Human
auucugcagcaug

SEQ ID NO: 2430886 - RNA, 19 nt, Human
auucugauuuggaaaaaga

SEQ ID NO: 2430887 - RNA, 15 nt, Human
auucugcagcaugac

SEQ ID NO: 2430888 - RNA, 19 nt, Human
auucugcaagcacaucugc

SEQ ID NO: 2430889 - RNA, 22 nt, Human
auucugcaagcacaucugcauu

SEQ ID NO: 2430890 - RNA, 17 nt, Human
auucugcaguaaaucuu

SEQ ID NO: 2430891 - RNA, 18 nt, Human
auucugcaguaaaucuuu

SEQ ID NO: 2430892 - RNA, 20 nt, Human
auucugcaguaaaucuuuua

SEQ ID NO: 2430893 - RNA, 21 nt, Human
auucugcaguaaaucuuuuac

SEQ ID NO: 2430894 - RNA, 23 nt, Human
auucugcaguaaaucuuuuacaa

SEQ ID NO: 2430895 - RNA, 22 nt, Human
auucugcagcaugaccugugac

SEQ ID NO: 2430896 - RNA, 14 nt, Human
auucugccaggccc

SEQ ID NO: 2430897 - RNA, 16 nt, Human
auucugcccaaaaaua

SEQ ID NO: 2430898 - RNA, 23 nt, Human
auucugccaggcccccaagccug

SEQ ID NO: 2430899 - RNA, 16 nt, Human
auucugguuccagggu

SEQ ID NO: 2430900 - RNA, 17 nt, Human
auucuggccuagucccu

SEQ ID NO: 2430901 - RNA, 22 nt, Human
auucuggauggauuugaagcaa

SEQ ID NO: 2430902 - RNA, 21 nt, Human
auucuggauuuugucaagcag

SEQ ID NO: 2430903 - RNA, 23 nt, Human
auucuggccuagucccuuccaca

SEQ ID NO: 2430904 - RNA, 14 nt, Human
auucugcugucuca

SEQ ID NO: 2430905 - RNA, 19 nt, Human
auucugcccaaaaauaugg

SEQ ID NO: 2430906 - RNA, 18 nt, Human
auucugcccaaaaauaug

SEQ ID NO: 2430907 - RNA, 21 nt, Human
auucuggauaaagccacugaa

SEQ ID NO: 2430908 - RNA, 17 nt, Human
auucuggauaaagccac

SEQ ID NO: 2430909 - RNA, 14 nt, Human
auuuaaaacagaca

SEQ ID NO: 2430910 - RNA, 18 nt, Human
auugugucucuugguccu

SEQ ID NO: 2430911 - RNA, 15 nt, Human
auuguguauauucau

SEQ ID NO: 2430912 - RNA, 14 nt, Human
auugugucucuugg

SEQ ID NO: 2430913 - RNA, 23 nt, Human
auuguguaacaauuuuaaugcua

SEQ ID NO: 2430914 - RNA, 14 nt, Human
auuguggugccaca

SEQ ID NO: 2430915 - RNA, 14 nt, Human
auugugauuugacu

SEQ ID NO: 2430916 - RNA, 12 nt, Human
auugugauuuga

SEQ ID NO: 2430917 - RNA, 23 nt, Human
auugugauuucccguggccccag

SEQ ID NO: 2430918 - RNA, 16 nt, Human
auugugauuucccgug

SEQ ID NO: 2430919 - RNA, 14 nt, Human
auugugauuucccg

SEQ ID NO: 2430920 - RNA, 19 nt, Human
auugugauuugacuguuuu

SEQ ID NO: 2430921 - RNA, 18 nt, Human
auugugauuugacuguuu

SEQ ID NO: 2430922 - RNA, 17 nt, Human
auugugauuugacuguu

SEQ ID NO: 2430923 - RNA, 16 nt, Human
auugugauuugacugu

SEQ ID NO: 2430924 - RNA, 23 nt, Human
auugugauuugacuguuuuuacc

SEQ ID NO: 2430925 - RNA, 12 nt, Human
auuguggugcca

SEQ ID NO: 2430926 - RNA, 17 nt, Human
auugugccaauauguau

SEQ ID NO: 2430927 - RNA, 16 nt, Human
auugugccaauaugua

SEQ ID NO: 2430928 - RNA, 19 nt, Human
auugugcacauacuugaga

SEQ ID NO: 2430929 - RNA, 13 nt, Human
auugugauguguc

SEQ ID NO: 2430930 - RNA, 14 nt, Human
auugugaugugucc

SEQ ID NO: 2430931 - RNA, 18 nt, Human
auugugauucugccuuug

SEQ ID NO: 2430932 - RNA, 15 nt, Human
auugugauguguccu

SEQ ID NO: 2430933 - RNA, 16 nt, Human
auugugaccaaguuau

SEQ ID NO: 2430934 - RNA, 15 nt, Human
auugugaccaaguua

SEQ ID NO: 2430935 - RNA, 16 nt, Human
auugugaacugacagg

SEQ ID NO: 2430936 - RNA, 14 nt, Human
auugugaaguacau

SEQ ID NO: 2430937 - RNA, 15 nt, Human
auugugaaguacaua

SEQ ID NO: 2430938 - RNA, 23 nt, Human
auugugaucagaccauaauguua

SEQ ID NO: 2430939 - RNA, 16 nt, Human
auugugagccaccacg

SEQ ID NO: 2430940 - RNA, 21 nt, Human
auugugaugguucguucuguu

SEQ ID NO: 2430941 - RNA, 21 nt, Human
auugugaucuaucaauaguca

SEQ ID NO: 2430942 - RNA, 17 nt, Human
auugugaccaaguuaua

SEQ ID NO: 2430943 - RNA, 20 nt, Human
auuguccccgacccuugccg

SEQ ID NO: 2430944 - RNA, 19 nt, Human
auuguccccgacccuugcc

SEQ ID NO: 2430945 - RNA, 17 nt, Human
auuguccccgacccuug

SEQ ID NO: 2430946 - RNA, 18 nt, Human
auuguccaauccuauguu

SEQ ID NO: 2430947 - RNA, 13 nt, Human
auugucauuuaua

SEQ ID NO: 2430948 - RNA, 12 nt, Human
auugguguugac

SEQ ID NO: 2430949 - RNA, 14 nt, Human
auuggucuccucuc

SEQ ID NO: 2430950 - RNA, 17 nt, Human
auuggucuccucucagc

SEQ ID NO: 2430951 - RNA, 13 nt, Human
auuguauucagag

SEQ ID NO: 2430952 - RNA, 14 nt, Human
auuguauuuauuca

SEQ ID NO: 2430953 - RNA, 11 nt, Human
auuguauuuau

SEQ ID NO: 2430954 - RNA, 23 nt, Human
auuguauuaggugucauuuccau

SEQ ID NO: 2430955 - RNA, 20 nt, Human
auuguauuuauucaauaaag

SEQ ID NO: 2430956 - RNA, 19 nt, Human
auuguauuuauucaauaaa

SEQ ID NO: 2430957 - RNA, 18 nt, Human
auuguauuuauucaauaa

SEQ ID NO: 2430958 - RNA, 16 nt, Human
auuguauuuauucaau

SEQ ID NO: 2430959 - RNA, 14 nt, Human
auuguauuuauucc

SEQ ID NO: 2430960 - RNA, 23 nt, Human
auuguauuuauucaauaaaguau

SEQ ID NO: 2430961 - RNA, 23 nt, Human
auugucauuccuguauucacccg

SEQ ID NO: 2430962 - RNA, 18 nt, Human
auuguauuuauuccauau

SEQ ID NO: 2430963 - RNA, 19 nt, Human
auucuauaugaauuuaaau

SEQ ID NO: 2430964 - RNA, 17 nt, Human
auucuauaugaauuuaa

SEQ ID NO: 2430965 - RNA, 16 nt, Human
auucuauaugaauuua

SEQ ID NO: 2430966 - RNA, 15 nt, Human
auucuauaugaauuu

SEQ ID NO: 2430967 - RNA, 23 nt, Human
auucuauaugaauuuaaauauaa

SEQ ID NO: 2430968 - RNA, 15 nt, Human
auucuaucuauuccu

SEQ ID NO: 2430969 - RNA, 14 nt, Human
auucuauaugaauu

SEQ ID NO: 2430970 - RNA, 13 nt, Human
auucuauaugaau

SEQ ID NO: 2430971 - RNA, 22 nt, Human
auucuauugcaguuauagaaaa

SEQ ID NO: 2430972 - RNA, 14 nt, Human
auucuauuaacuuu

SEQ ID NO: 2430973 - RNA, 20 nt, Human
auucuauuuauauguacaug

SEQ ID NO: 2430974 - RNA, 18 nt, Human
auucuauaaguuuuaugu

SEQ ID NO: 2430975 - RNA, 15 nt, Human
auucuauaaggccau

SEQ ID NO: 2430976 - RNA, 17 nt, Human
auucuaguuuugucaaa

SEQ ID NO: 2430977 - RNA, 18 nt, Human
auucuaaaugaauguuua

SEQ ID NO: 2430978 - RNA, 17 nt, Human
auucuaaaugaauguuu

SEQ ID NO: 2430979 - RNA, 15 nt, Human
auucuaaaugaaugu

SEQ ID NO: 2430980 - RNA, 20 nt, Human
auucuccaccugccagggac

SEQ ID NO: 2430981 - RNA, 19 nt, Human
auucuccaccugccaggga

SEQ ID NO: 2430982 - RNA, 14 nt, Human
auucucaugccuca

SEQ ID NO: 2430983 - RNA, 15 nt, Human
auucucaugccucag

SEQ ID NO: 2430984 - RNA, 20 nt, Human
auucucagggucucugcugc

SEQ ID NO: 2430985 - RNA, 19 nt, Human
auucucagggucucugcug

SEQ ID NO: 2430986 - RNA, 21 nt, Human
auucucagggucucugcugcc

SEQ ID NO: 2430987 - RNA, 22 nt, Human
auucucagggucucugcugccg

SEQ ID NO: 2430988 - RNA, 18 nt, Human
auucucagggucucugcu

SEQ ID NO: 2430989 - RNA, 17 nt, Human
auucucagggucucugc

SEQ ID NO: 2430990 - RNA, 16 nt, Human
auucucagggucucug

SEQ ID NO: 2430991 - RNA, 21 nt, Human
auucucaaccuaccaccccuu

SEQ ID NO: 2430992 - RNA, 16 nt, Human
auucucaagcccugca

SEQ ID NO: 2430993 - RNA, 22 nt, Human
auucuauuuauauguacaugag

SEQ ID NO: 2430994 - RNA, 18 nt, Human
auucuauuugcugggcuu

SEQ ID NO: 2430995 - RNA, 15 nt, Human
auucuauuugcuggg

SEQ ID NO: 2430996 - RNA, 15 nt, Human
auucucaagcccugc

SEQ ID NO: 2430997 - RNA, 21 nt, Human
auucuauuuucauuuucugca

SEQ ID NO: 2430998 - RNA, 18 nt, Human
auucuauuuucauuuucu

SEQ ID NO: 2430999 - RNA, 15 nt, Human
auucucaaacacagu

SEQ ID NO: 2431000 - RNA, 17 nt, Human
auucuccugccucagcc

SEQ ID NO: 2431001 - RNA, 15 nt, Human
auucuccugccucag

SEQ ID NO: 2431002 - RNA, 19 nt, Human
auucuccugccucagccuc

SEQ ID NO: 2431003 - RNA, 20 nt, Human
auucuccugccucagccucc

SEQ ID NO: 2431004 - RNA, 22 nt, Human
auucuccuucagcccucacccc

SEQ ID NO: 2431005 - RNA, 18 nt, Human
auucuccuucagcccuca

SEQ ID NO: 2431006 - RNA, 17 nt, Human
auucuccuucagcccuc

SEQ ID NO: 2431007 - RNA, 16 nt, Human
auucuccuucagcccu

SEQ ID NO: 2431008 - RNA, 16 nt, Human
auucuccuuguguuac

SEQ ID NO: 2431009 - RNA, 15 nt, Human
auucuccuucagccc

SEQ ID NO: 2431010 - RNA, 14 nt, Human
auucuccuucagcc

SEQ ID NO: 2431011 - RNA, 14 nt, Human
auucuccugugcua

SEQ ID NO: 2431012 - RNA, 13 nt, Human
auucuccugugcu

SEQ ID NO: 2431013 - RNA, 13 nt, Human
auucuccuucagc

SEQ ID NO: 2431014 - RNA, 22 nt, Human
auucuccugccuguagcaguga

SEQ ID NO: 2431015 - RNA, 11 nt, Human
auucuccugga

SEQ ID NO: 2431016 - RNA, 18 nt, Human
auucuccugccucagccu

SEQ ID NO: 2431017 - RNA, 13 nt, Human
auucuccugccuc

SEQ ID NO: 2431018 - RNA, 14 nt, Human
auucuccugccuca

SEQ ID NO: 2431019 - RNA, 12 nt, Human
auucuccugccu

SEQ ID NO: 2431020 - RNA, 11 nt, Human
auucuccugcc

SEQ ID NO: 2431021 - RNA, 21 nt, Human
auucuccaccugccagggaca

SEQ ID NO: 2431022 - RNA, 24 nt, Human
auucucccagguaccagcugcgcu

SEQ ID NO: 2431023 - RNA, 22 nt, Human
auucucccagguaccagcugcg

SEQ ID NO: 2431024 - RNA, 21 nt, Human
auucucccagguaccagcugc

SEQ ID NO: 2431025 - RNA, 20 nt, Human
auucucccagguaccagcug

SEQ ID NO: 2431026 - RNA, 14 nt, Human
auucagagagcagc

SEQ ID NO: 2431027 - RNA, 13 nt, Human
auucagacaggca

SEQ ID NO: 2431028 - RNA, 14 nt, Human
auucagacaggcaa

SEQ ID NO: 2431029 - RNA, 23 nt, Human
auuauauagguugugcaaauuaa

SEQ ID NO: 2431030 - RNA, 20 nt, Human
auuauauagguugugcaaau

SEQ ID NO: 2431031 - RNA, 13 nt, Human
auuauauagguug

SEQ ID NO: 2431032 - RNA, 14 nt, Human
auucaggaagcuca

SEQ ID NO: 2431033 - RNA, 17 nt, Human
auucagaguugaugguu

SEQ ID NO: 2431034 - RNA, 15 nt, Human
auucaguaauaacuc

SEQ ID NO: 2431035 - RNA, 19 nt, Human
auucaguaauaacucuacc

SEQ ID NO: 2431036 - RNA, 23 nt, Human
auucagguauguugccuuuaugg

SEQ ID NO: 2431037 - RNA, 18 nt, Human
auucaguccuaagaaaga

SEQ ID NO: 2431038 - RNA, 19 nt, Human
auucaggaagcucagggcc

SEQ ID NO: 2431039 - RNA, 17 nt, Human
auucaggaagcucaggg

SEQ ID NO: 2431040 - RNA, 20 nt, Human
auucaggaagcucagggccu

SEQ ID NO: 2431041 - RNA, 20 nt, Human
auucagguauguugccuuua

SEQ ID NO: 2431042 - RNA, 18 nt, Human
auucagauauauuuuuca

SEQ ID NO: 2431043 - RNA, 21 nt, Human
auucagauauauuuuucacag

SEQ ID NO: 2431044 - RNA, 16 nt, Human
auucccucucucugac

SEQ ID NO: 2431045 - RNA, 15 nt, Human
auucccucucucuga

SEQ ID NO: 2431046 - RNA, 14 nt, Human
auucccucucucug

SEQ ID NO: 2431047 - RNA, 13 nt, Human
auucccucucucu

SEQ ID NO: 2431048 - RNA, 21 nt, Human
auucccuccugcuacucuguu

SEQ ID NO: 2431049 - RNA, 14 nt, Human
auucccuccugcua

SEQ ID NO: 2431050 - RNA, 13 nt, Human
auucccuggccuu

SEQ ID NO: 2431051 - RNA, 19 nt, Human
auucccuggccuuucauau

SEQ ID NO: 2431052 - RNA, 20 nt, Human
auucccucucucugacucuc

SEQ ID NO: 2431053 - RNA, 19 nt, Human
auucccucucucugacucu

SEQ ID NO: 2431054 - RNA, 22 nt, Human
auucccucucucugacucucaa

SEQ ID NO: 2431055 - RNA, 19 nt, Human
auucccugagucaccagga

SEQ ID NO: 2431056 - RNA, 20 nt, Human
auucccugagucaccaggaa

SEQ ID NO: 2431057 - RNA, 13 nt, Human
auucccugccugg

SEQ ID NO: 2431058 - RNA, 15 nt, Human
auucccaagcucugc

SEQ ID NO: 2431059 - RNA, 14 nt, Human
auucccaagcucug

SEQ ID NO: 2431060 - RNA, 16 nt, Human
auucccaagcucugcu

SEQ ID NO: 2431061 - RNA, 22 nt, Human
auucccaagcucuagugggaag

SEQ ID NO: 2431062 - RNA, 21 nt, Human
auuccaugaaucgcuucucuu

SEQ ID NO: 2431063 - RNA, 21 nt, Human
auucccuaucuuuuaguuuua

SEQ ID NO: 2431064 - RNA, 22 nt, Human
auucccuaucuuuuaguuuuag

SEQ ID NO: 2431065 - RNA, 16 nt, Human
auuccauauucaugua

SEQ ID NO: 2431066 - RNA, 15 nt, Human
auuccagcuccuccg

SEQ ID NO: 2431067 - RNA, 14 nt, Human
auuccaagacagua

SEQ ID NO: 2431068 - RNA, 17 nt, Human
auuccauauuuauucaa

SEQ ID NO: 2431069 - RNA, 18 nt, Human
auuccauauucauguaaa

SEQ ID NO: 2431070 - RNA, 17 nt, Human
auuccauauucauguaa

SEQ ID NO: 2431071 - RNA, 14 nt, Human
auuccauccauaua

SEQ ID NO: 2431072 - RNA, 13 nt, Human
auuccauauuuau

SEQ ID NO: 2431073 - RNA, 11 nt, Human
auuccauccuu

SEQ ID NO: 2431074 - RNA, 15 nt, Human
auuccaugaaucgcu

SEQ ID NO: 2431075 - RNA, 18 nt, Human
auuccauccauauacuuu

SEQ ID NO: 2431076 - RNA, 12 nt, Human
auuccaugaauc

SEQ ID NO: 2431077 - RNA, 19 nt, Human
auuccaugaaucgcuucuc

SEQ ID NO: 2431078 - RNA, 18 nt, Human
auuccaugaaucgcuucu

SEQ ID NO: 2431079 - RNA, 16 nt, Human
auuccaaccccaacuc

SEQ ID NO: 2431080 - RNA, 15 nt, Human
auuccaaccccaacu

SEQ ID NO: 2431081 - RNA, 11 nt, Human
auuccaaccuu

SEQ ID NO: 2431082 - RNA, 17 nt, Human
auuccaaccccaacucc

SEQ ID NO: 2431083 - RNA, 17 nt, Human
auuccagccccucuggu

SEQ ID NO: 2431084 - RNA, 13 nt, Human
auuccaagacagu

SEQ ID NO: 2431085 - RNA, 22 nt, Human
auuccaagacaugucuguucua

SEQ ID NO: 2431086 - RNA, 15 nt, Human
auuccaacagugagu

SEQ ID NO: 2431087 - RNA, 14 nt, Human
auuccaacagugag

SEQ ID NO: 2431088 - RNA, 14 nt, Human
auuccaacagcuca

SEQ ID NO: 2431089 - RNA, 20 nt, Human
auuccaacagcucaagucuu

SEQ ID NO: 2431090 - RNA, 15 nt, Human
auuccaacaaagggu

SEQ ID NO: 2431091 - RNA, 19 nt, Human
auuccaacaaaggguuuua

SEQ ID NO: 2431092 - RNA, 18 nt, Human
auuccaacaaaggguuuu

SEQ ID NO: 2431093 - RNA, 23 nt, Human
auuccaacaaaggguuuuaaugu

SEQ ID NO: 2431094 - RNA, 16 nt, Human
uuuuauuuuacuuuua

SEQ ID NO: 2431095 - RNA, 15 nt, Human
uuuuauuugacaaaa

SEQ ID NO: 2431096 - RNA, 15 nt, Human
uuuuauuugcaugug

SEQ ID NO: 2431097 - RNA, 15 nt, Human
uuuuauuuauuuuau

SEQ ID NO: 2431098 - RNA, 11 nt, Human
uuuuauuuuau

SEQ ID NO: 2431099 - RNA, 16 nt, Human
uuuucauauugugcca

SEQ ID NO: 2431100 - RNA, 14 nt, Human
uuuucauauugugc

SEQ ID NO: 2431101 - RNA, 13 nt, Human
uuuucauauugug

SEQ ID NO: 2431102 - RNA, 21 nt, Human
uuuucauagauugagaaguuu

SEQ ID NO: 2431103 - RNA, 18 nt, Human
uuuucauacuuuuaccuu

SEQ ID NO: 2431104 - RNA, 12 nt, Human
uuuucauaauaa

SEQ ID NO: 2431105 - RNA, 20 nt, Human
uuuucaguuucaauucagug

SEQ ID NO: 2431106 - RNA, 12 nt, Human
uuuucaguuuuc

SEQ ID NO: 2431107 - RNA, 14 nt, Human
uuuucaguuuucag

SEQ ID NO: 2431108 - RNA, 14 nt, Human
uuuuauuguuuuca

SEQ ID NO: 2431109 - RNA, 12 nt, Human
uuuuauuguuuu

SEQ ID NO: 2431110 - RNA, 20 nt, Human
uuuuauuguuuaaagcaacu

SEQ ID NO: 2431111 - RNA, 13 nt, Human
uuuuauuaugcau

SEQ ID NO: 2431112 - RNA, 19 nt, Human
uuuuauuaaugcacuuucu

SEQ ID NO: 2431113 - RNA, 14 nt, Human
uuuuauuaaugcac

SEQ ID NO: 2431114 - RNA, 19 nt, Human
uuuuaggcagggauuugag

SEQ ID NO: 2431115 - RNA, 18 nt, Human
uuuuaggcagggauuuga

SEQ ID NO: 2431116 - RNA, 20 nt, Human
uuuuaggccaaaaaaaugua

SEQ ID NO: 2431117 - RNA, 22 nt, Human
uuuuagguguugauuuucuguu

SEQ ID NO: 2431118 - RNA, 19 nt, Human
uuuuagguguugauuuucu

SEQ ID NO: 2431119 - RNA, 16 nt, Human
uuuuagguguugauuu

SEQ ID NO: 2431120 - RNA, 18 nt, Human
uuuuaggucucuuccccu

SEQ ID NO: 2431121 - RNA, 15 nt, Human
uuuucugagaaagac

SEQ ID NO: 2431122 - RNA, 18 nt, Human
uuuucugagaaagacuau

SEQ ID NO: 2431123 - RNA, 22 nt, Human
uuuucugagcccgggcugccug

SEQ ID NO: 2431124 - RNA, 16 nt, Human
uuuucugagcccgggc

SEQ ID NO: 2431125 - RNA, 12 nt, Human
uuuucugagccc

SEQ ID NO: 2431126 - RNA, 10 nt, Human
uuuucugagc

SEQ ID NO: 2431127 - RNA, 23 nt, Human
uuuucuggagguugauaacuuug

SEQ ID NO: 2431128 - RNA, 18 nt, Human
uuuucuggaauguaauca

SEQ ID NO: 2431129 - RNA, 15 nt, Human
uuuucugagcgauua

SEQ ID NO: 2431130 - RNA, 21 nt, Human
uuuucuggagguugauaacuu

SEQ ID NO: 2431131 - RNA, 16 nt, Human
uuuucucuaggaaaua

SEQ ID NO: 2431132 - RNA, 17 nt, Human
uuuucugaauaacauuu

SEQ ID NO: 2431133 - RNA, 14 nt, Human
uuuucucuaggaaa

SEQ ID NO: 2431134 - RNA, 13 nt, Human
uuuucuccuccca

SEQ ID NO: 2431135 - RNA, 14 nt, Human
uuuucuccucccag

SEQ ID NO: 2431136 - RNA, 19 nt, Human
uuuucuccucccaggaacu

SEQ ID NO: 2431137 - RNA, 17 nt, Human
uuuucucuaacucagaa

SEQ ID NO: 2431138 - RNA, 16 nt, Human
uuuucauuugccuauu

SEQ ID NO: 2431139 - RNA, 15 nt, Human
uuuucauuugccuau

SEQ ID NO: 2431140 - RNA, 13 nt, Human
uuuucauuugccu

SEQ ID NO: 2431141 - RNA, 13 nt, Human
uuuucauuguaaa

SEQ ID NO: 2431142 - RNA, 16 nt, Human
uuuucauuuucugcaa

SEQ ID NO: 2431143 - RNA, 17 nt, Human
uuuucauugauaugaaa

SEQ ID NO: 2431144 - RNA, 22 nt, Human
uuuucauggacacuuugaaaug

SEQ ID NO: 2431145 - RNA, 21 nt, Human
uuuuccaaaaaaauacugcca

SEQ ID NO: 2431146 - RNA, 22 nt, Human
uuuucauuuucugcaagccugc

SEQ ID NO: 2431147 - RNA, 18 nt, Human
uuuucauuuucugcaagc

SEQ ID NO: 2431148 - RNA, 15 nt, Human
uuuuccaaaauaauu

SEQ ID NO: 2431149 - RNA, 23 nt, Human
uuuuccaaaaguggccucuuugu

SEQ ID NO: 2431150 - RNA, 15 nt, Human
uuuuccaaaaaaaua

SEQ ID NO: 2431151 - RNA, 20 nt, Human
uuuuccaaaaguggccucuu

SEQ ID NO: 2431152 - RNA, 17 nt, Human
uuuucuccacuuuguug

SEQ ID NO: 2431153 - RNA, 20 nt, Human
uuuucauuuaggugaggaag

SEQ ID NO: 2431154 - RNA, 21 nt, Human
uuuucaugauuuugaaaccau

SEQ ID NO: 2431155 - RNA, 21 nt, Human
uuuucaugauuuugaaaucau

SEQ ID NO: 2431156 - RNA, 15 nt, Human
uuuucaucuguuguu

SEQ ID NO: 2431157 - RNA, 16 nt, Human
uuuucaucugggaaag

SEQ ID NO: 2431158 - RNA, 15 nt, Human
uuuucaucugggaaa

SEQ ID NO: 2431159 - RNA, 14 nt, Human
uuuucaucugggaa

SEQ ID NO: 2431160 - RNA, 21 nt, Human
uuuucaucuucucuggcgaca

SEQ ID NO: 2431161 - RNA, 19 nt, Human
uuuucauauugugccaaua

SEQ ID NO: 2431162 - RNA, 21 nt, Human
auguuuucaggcuagauguau

SEQ ID NO: 2431163 - RNA, 17 nt, Human
auguuuucaggcuagau

SEQ ID NO: 2431164 - RNA, 22 nt, Human
auguuuugauaaaguaguaaaa

SEQ ID NO: 2431165 - RNA, 21 nt, Human
auguuuugauaaaguaguaaa

SEQ ID NO: 2431166 - RNA, 16 nt, Human
auguuuuccagcuccu

SEQ ID NO: 2431167 - RNA, 20 nt, Human
auguuuugguaucuguucuu

SEQ ID NO: 2431168 - RNA, 17 nt, Human
auguuuugguaucuguu

SEQ ID NO: 2431169 - RNA, 15 nt, Human
auguuuugguaucug

SEQ ID NO: 2431170 - RNA, 23 nt, Human
auguuuugguaucuguucuuuaa

SEQ ID NO: 2431171 - RNA, 21 nt, Human
auguuuauauaaaugcuuuua

SEQ ID NO: 2431172 - RNA, 17 nt, Human
auguuuauauaaaugcu

SEQ ID NO: 2431173 - RNA, 16 nt, Human
auguuuauauaaaugc

SEQ ID NO: 2431174 - RNA, 14 nt, Human
auguuuauauaaau

SEQ ID NO: 2431175 - RNA, 13 nt, Human
auguuuauauaaa

SEQ ID NO: 2431176 - RNA, 19 nt, Human
auguuuauauaaaugcuuu

SEQ ID NO: 2431177 - RNA, 14 nt, Human
auguuuaugagcca

SEQ ID NO: 2431178 - RNA, 15 nt, Human
auguuuaugagccag

SEQ ID NO: 2431179 - RNA, 16 nt, Human
auguuuaugagccaga

SEQ ID NO: 2431180 - RNA, 20 nt, Human
auguuuaugagccagacaaa

SEQ ID NO: 2431181 - RNA, 21 nt, Human
auguuuaugagccagacaaau

SEQ ID NO: 2431182 - RNA, 15 nt, Human
auguuuucaggcuag

SEQ ID NO: 2431183 - RNA, 22 nt, Human
auguuuaugcaaggaaggaaag

SEQ ID NO: 2431184 - RNA, 18 nt, Human
auguuuaugcaaggaagg

SEQ ID NO: 2431185 - RNA, 20 nt, Human
auguuuaugcaaggaaggaa

SEQ ID NO: 2431186 - RNA, 17 nt, Human
auguuguuauuuaaaga

SEQ ID NO: 2431187 - RNA, 15 nt, Human
auguuguuauuuaaa

SEQ ID NO: 2431188 - RNA, 14 nt, Human
auguuguuauuuaa

SEQ ID NO: 2431189 - RNA, 13 nt, Human
auguuguuauuua

SEQ ID NO: 2431190 - RNA, 20 nt, Human
auguuguucauuauuggagg

SEQ ID NO: 2431191 - RNA, 17 nt, Human
auguuuaguaaucauau

SEQ ID NO: 2431192 - RNA, 17 nt, Human
uuuucugucucugccuc

SEQ ID NO: 2431193 - RNA, 15 nt, Human
uuuucugucucugcc

SEQ ID NO: 2431194 - RNA, 17 nt, Human
uuuucugugccugaaua

SEQ ID NO: 2431195 - RNA, 18 nt, Human
uuuucugugccugaauau

SEQ ID NO: 2431196 - RNA, 22 nt, Human
auguuguguuucuguucaccuu

SEQ ID NO: 2431197 - RNA, 12 nt, Human
auguuguuauuu

SEQ ID NO: 2431198 - RNA, 12 nt, Human
uuuucuguauuu

SEQ ID NO: 2431199 - RNA, 22 nt, Human
uuuucuggguguccaaaggaag

SEQ ID NO: 2431200 - RNA, 16 nt, Human
uuuucugguagauaga

SEQ ID NO: 2431201 - RNA, 19 nt, Human
uuuucugguagauagaaau

SEQ ID NO: 2431202 - RNA, 20 nt, Human
uuuucugguagauagaaaua

SEQ ID NO: 2431203 - RNA, 20 nt, Human
auuaaaaaucucaaauuucu

SEQ ID NO: 2431204 - RNA, 22 nt, Human
auuaaaaaucucaaauuucuaa

SEQ ID NO: 2431205 - RNA, 23 nt, Human
auuaaaacacaacaucuuuuucu

SEQ ID NO: 2431206 - RNA, 18 nt, Human
auguuuuuaaaaguuuca

SEQ ID NO: 2431207 - RNA, 16 nt, Human
auguuuuuaaaaguuu

SEQ ID NO: 2431208 - RNA, 15 nt, Human
auuaaaaaucucaaa

SEQ ID NO: 2431209 - RNA, 19 nt, Human
auuaaaaaucucaaauuuc

SEQ ID NO: 2431210 - RNA, 18 nt, Human
auguuuugugggaacaga

SEQ ID NO: 2431211 - RNA, 19 nt, Human
auguuuugugacuauauag

SEQ ID NO: 2431212 - RNA, 21 nt, Human
auguuuugugacuauauagag

SEQ ID NO: 2431213 - RNA, 17 nt, Human
auguuuugugacuauau

SEQ ID NO: 2431214 - RNA, 14 nt, Human
auguuuugugacua

SEQ ID NO: 2431215 - RNA, 21 nt, Human
auuaaacggauuauuuuuuca

SEQ ID NO: 2431216 - RNA, 20 nt, Human
auuaaacggauuauuuuuuc

SEQ ID NO: 2431217 - RNA, 19 nt, Human
auuaaacggauuauuuuuu

SEQ ID NO: 2431218 - RNA, 17 nt, Human
auuaaacggauuauuuu

SEQ ID NO: 2431219 - RNA, 16 nt, Human
auuaaacggauuauuu

SEQ ID NO: 2431220 - RNA, 15 nt, Human
auuaaacggauuauu

SEQ ID NO: 2431221 - RNA, 14 nt, Human
auuaaacggauuau

SEQ ID NO: 2431222 - RNA, 13 nt, Human
auuaaacggauua

SEQ ID NO: 2431223 - RNA, 19 nt, Human
auuaaacguaugcauguga

SEQ ID NO: 2431224 - RNA, 18 nt, Human
auuaaacguaugcaugug

SEQ ID NO: 2431225 - RNA, 23 nt, Human
auuaaacggauuauuuuuucaga

SEQ ID NO: 2431226 - RNA, 22 nt, Human
auuaaacggauuauuuuuucag

SEQ ID NO: 2431227 - RNA, 21 nt, Human
auuaaacguaugcaugugaag

SEQ ID NO: 2431228 - RNA, 20 nt, Human
auuaaacguaugcaugugaa

SEQ ID NO: 2431229 - RNA, 23 nt, Human
auuaaacucuucacaaaaucugu

SEQ ID NO: 2431230 - RNA, 15 nt, Human
auuaaaagaauauuu

SEQ ID NO: 2431231 - RNA, 14 nt, Human
auuaaaacugaauu

SEQ ID NO: 2431232 - RNA, 14 nt, Human
auuaaacccuggau

SEQ ID NO: 2431233 - RNA, 15 nt, Human
auuaaaacugaauug

SEQ ID NO: 2431234 - RNA, 22 nt, Human
auuaaaacugaagucugaaauu

SEQ ID NO: 2431235 - RNA, 21 nt, Human
auuaaaacugaagucugaaau

SEQ ID NO: 2431236 - RNA, 23 nt, Human
auuaaaagaaaauaaaaaaaaga

SEQ ID NO: 2431237 - RNA, 20 nt, Human
auuaaaacugaagucugaaa

SEQ ID NO: 2431238 - RNA, 19 nt, Human
auuaaaacugaagucugaa

SEQ ID NO: 2431239 - RNA, 18 nt, Human
auuaaaacugaagucuga

SEQ ID NO: 2431240 - RNA, 14 nt, Human
uuuuaauaauguuu

SEQ ID NO: 2431241 - RNA, 13 nt, Human
uuuuaauaauguu

SEQ ID NO: 2431242 - RNA, 15 nt, Human
uuuuaauaaacuuuu

SEQ ID NO: 2431243 - RNA, 14 nt, Human
uuuuaauaaacuuu

SEQ ID NO: 2431244 - RNA, 12 nt, Human
uuuuaauaaugu

SEQ ID NO: 2431245 - RNA, 14 nt, Human
uuuuaauaaacacu

SEQ ID NO: 2431246 - RNA, 18 nt, Human
uuuuaaguuguuugcaug

SEQ ID NO: 2431247 - RNA, 16 nt, Human
uuuuaaguuguuugca

SEQ ID NO: 2431248 - RNA, 19 nt, Human
auggggcugaacggggaga

SEQ ID NO: 2431249 - RNA, 20 nt, Human
auggggcccugccuccuuug

SEQ ID NO: 2431250 - RNA, 17 nt, Human
auggggcucccgcccgu

SEQ ID NO: 2431251 - RNA, 14 nt, Human
auggggccucuguu

SEQ ID NO: 2431252 - RNA, 12 nt, Human
auggggccucug

SEQ ID NO: 2431253 - RNA, 22 nt, Human
auggggcugaacggggagaaaa

SEQ ID NO: 2431254 - RNA, 14 nt, Human
uuuuaaguugcuga

SEQ ID NO: 2431255 - RNA, 16 nt, Human
uuuuaauaauguuuca

SEQ ID NO: 2431256 - RNA, 22 nt, Human
augugccagguuuuuggucuga

SEQ ID NO: 2431257 - RNA, 18 nt, Human
augugccgaaugugcagg

SEQ ID NO: 2431258 - RNA, 17 nt, Human
augugccgaaugugcag

SEQ ID NO: 2431259 - RNA, 22 nt, Human
augugccauuuuaaaaaaaaag

SEQ ID NO: 2431260 - RNA, 18 nt, Human
augugccauuuuaaaaaa

SEQ ID NO: 2431261 - RNA, 14 nt, Human
augugcccccagac

SEQ ID NO: 2431262 - RNA, 12 nt, Human
augugcccccag

SEQ ID NO: 2431263 - RNA, 14 nt, Human
augugccugggugg

SEQ ID NO: 2431264 - RNA, 20 nt, Human
augugccugauccagccucu

SEQ ID NO: 2431265 - RNA, 15 nt, Human
augugccugauccag

SEQ ID NO: 2431266 - RNA, 21 nt, Human
augugccguguuauuguauua

SEQ ID NO: 2431267 - RNA, 19 nt, Human
augugcuaguaauuggaaa

SEQ ID NO: 2431268 - RNA, 14 nt, Human
augugcgugugugc

SEQ ID NO: 2431269 - RNA, 15 nt, Human
augugcgugugugca

SEQ ID NO: 2431270 - RNA, 18 nt, Human
augugcgugugugcaagu

SEQ ID NO: 2431271 - RNA, 20 nt, Human
augugcgugugugcaagugu

SEQ ID NO: 2431272 - RNA, 20 nt, Human
auguggcuggaagauccugc

SEQ ID NO: 2431273 - RNA, 14 nt, Human
auguggcuggaaga

SEQ ID NO: 2431274 - RNA, 13 nt, Human
auguggcuggaag

SEQ ID NO: 2431275 - RNA, 17 nt, Human
auguggcugcagcagcg

SEQ ID NO: 2431276 - RNA, 15 nt, Human
auguggcugcagcag

SEQ ID NO: 2431277 - RNA, 11 nt, Human
augugugugca

SEQ ID NO: 2431278 - RNA, 16 nt, Human
augugugugcaagugu

SEQ ID NO: 2431279 - RNA, 19 nt, Human
augugugugcaagugugug

SEQ ID NO: 2431280 - RNA, 13 nt, Human
auguggcugcccc

SEQ ID NO: 2431281 - RNA, 20 nt, Human
auguggccccugaacaagaa

SEQ ID NO: 2431282 - RNA, 22 nt, Human
auguggccccugaacaagaauu

SEQ ID NO: 2431283 - RNA, 13 nt, Human
auguggcccuggc

SEQ ID NO: 2431284 - RNA, 14 nt, Human
auguggcccuggcc

SEQ ID NO: 2431285 - RNA, 15 nt, Human
auguggcccuggccu

SEQ ID NO: 2431286 - RNA, 16 nt, Human
auguggcccuggccug

SEQ ID NO: 2431287 - RNA, 19 nt, Human
auguggcccuggccugcug

SEQ ID NO: 2431288 - RNA, 20 nt, Human
auguggcccuggccugcugg

SEQ ID NO: 2431289 - RNA, 19 nt, Human
auguggccuguggccugug

SEQ ID NO: 2431290 - RNA, 19 nt, Human
auguggccuaaaaaugcaa

SEQ ID NO: 2431291 - RNA, 12 nt, Human
augugugugugc

SEQ ID NO: 2431292 - RNA, 15 nt, Human
auguguguguaugcu

SEQ ID NO: 2431293 - RNA, 16 nt, Human
auguguguguaugcua

SEQ ID NO: 2431294 - RNA, 19 nt, Human
auguguguguaugcuacua

SEQ ID NO: 2431295 - RNA, 21 nt, Human
auguguguguaugcuacuaca

SEQ ID NO: 2431296 - RNA, 10 nt, Human
augugugugu

SEQ ID NO: 2431297 - RNA, 22 nt, Human
augugugugguuuuuuuucuaa

SEQ ID NO: 2431298 - RNA, 15 nt, Human
augugugugcucagg

SEQ ID NO: 2431299 - RNA, 12 nt, Human
auguguguguau

SEQ ID NO: 2431300 - RNA, 13 nt, Human
auguguguguaug

SEQ ID NO: 2431301 - RNA, 23 nt, Human
auguguguuuuaaaaugagaaau

SEQ ID NO: 2431302 - RNA, 15 nt, Human
auguguguuuuaaaa

SEQ ID NO: 2431303 - RNA, 15 nt, Human
auguguguguauguu

SEQ ID NO: 2431304 - RNA, 21 nt, Human
auguguguguauguuugcaca

SEQ ID NO: 2431305 - RNA, 15 nt, Human
auguggaaguguggg

SEQ ID NO: 2431306 - RNA, 16 nt, Human
auguggaagugugggu

SEQ ID NO: 2431307 - RNA, 13 nt, Human
auguggaagugug

SEQ ID NO: 2431308 - RNA, 22 nt, Human
auguggaagugugggucugugu

SEQ ID NO: 2431309 - RNA, 23 nt, Human
auguggaagugugggucugugug

SEQ ID NO: 2431310 - RNA, 17 nt, Human
auguggaauauaaagau

SEQ ID NO: 2431311 - RNA, 15 nt, Human
auguggaauauaaag

SEQ ID NO: 2431312 - RNA, 14 nt, Human
augugcuacugauu

SEQ ID NO: 2431313 - RNA, 20 nt, Human
auguggaguucaucuugaau

SEQ ID NO: 2431314 - RNA, 16 nt, Human
auguggaguggggcag

SEQ ID NO: 2431315 - RNA, 19 nt, Human
auguggagaaacuguaguc

SEQ ID NO: 2431316 - RNA, 20 nt, Human
augugcuacugauuguuuca

SEQ ID NO: 2431317 - RNA, 24 nt, Human
auguggaguucaucuugaauugua

SEQ ID NO: 2431318 - RNA, 18 nt, Human
auguggccccugaacaag

SEQ ID NO: 2431319 - RNA, 18 nt, Human
auguggcaaggaaaaaca

SEQ ID NO: 2431320 - RNA, 23 nt, Human
auguggcaauaaauuuuuuuuaa

SEQ ID NO: 2431321 - RNA, 16 nt, Human
auguucaguguaauuu

SEQ ID NO: 2431322 - RNA, 14 nt, Human
auguucaguguaau

SEQ ID NO: 2431323 - RNA, 22 nt, Human
auguucagcacugucccuugcc

SEQ ID NO: 2431324 - RNA, 19 nt, Human
auguucagcacugucccuu

SEQ ID NO: 2431325 - RNA, 16 nt, Human
auguucagcacugucc

SEQ ID NO: 2431326 - RNA, 18 nt, Human
auguucaucaaugaauga

SEQ ID NO: 2431327 - RNA, 18 nt, Human
auguugcauagaauaaaa

SEQ ID NO: 2431328 - RNA, 17 nt, Human
auguugcauagaauaaa

SEQ ID NO: 2431329 - RNA, 15 nt, Human
auguugcauagaaua

SEQ ID NO: 2431330 - RNA, 21 nt, Human
auguucaguguaauuucuuug

SEQ ID NO: 2431331 - RNA, 18 nt, Human
auguucaguguaauuucu

SEQ ID NO: 2431332 - RNA, 22 nt, Human
auguucaguguaauuucuuugc

SEQ ID NO: 2431333 - RNA, 12 nt, Human
auguugcccagg

SEQ ID NO: 2431334 - RNA, 22 nt, Human
auguugccaguuuaaucauugc

SEQ ID NO: 2431335 - RNA, 16 nt, Human
auguugcccaggcagg

SEQ ID NO: 2431336 - RNA, 17 nt, Human
auguugcccaggcaggu

SEQ ID NO: 2431337 - RNA, 23 nt, Human
uuuuagaaagcauuugaaugcau

SEQ ID NO: 2431338 - RNA, 22 nt, Human
uuuuagaaagcauuugaaugca

SEQ ID NO: 2431339 - RNA, 21 nt, Human
uuuuagaaagcauuugaaugc

SEQ ID NO: 2431340 - RNA, 20 nt, Human
uuuuagaaagcauuugaaug

SEQ ID NO: 2431341 - RNA, 19 nt, Human
uuuuagaaagcauuugaau

SEQ ID NO: 2431342 - RNA, 18 nt, Human
uuuuagaaagcauuugaa

SEQ ID NO: 2431343 - RNA, 16 nt, Human
uuuuagaaagcauuug

SEQ ID NO: 2431344 - RNA, 14 nt, Human
uuuuagaaagcauu

SEQ ID NO: 2431345 - RNA, 15 nt, Human
uuuuaggaaaugaau

SEQ ID NO: 2431346 - RNA, 22 nt, Human
uuuuagcugguggcaauaaaua

SEQ ID NO: 2431347 - RNA, 21 nt, Human
uuuuagcugaugaacuuauuc

SEQ ID NO: 2431348 - RNA, 17 nt, Human
uuuuacuuuuaaacugu

SEQ ID NO: 2431349 - RNA, 22 nt, Human
uuuuacuugcauugaauauauu

SEQ ID NO: 2431350 - RNA, 18 nt, Human
uuuuacuuuuaaacugug

SEQ ID NO: 2431351 - RNA, 20 nt, Human
uuuuacuuuuaaacugugua

SEQ ID NO: 2431352 - RNA, 12 nt, Human
uuuuacuuuuau

SEQ ID NO: 2431353 - RNA, 15 nt, Human
uuuuacuuuuaaaug

SEQ ID NO: 2431354 - RNA, 19 nt, Human
uuuuacuuuuauaauaaaa

SEQ ID NO: 2431355 - RNA, 14 nt, Human
uuuuagaaaacagc

SEQ ID NO: 2431356 - RNA, 20 nt, Human
auguugcccuguugcugccu

SEQ ID NO: 2431357 - RNA, 20 nt, Human
auguugcccaggcaggucuu

SEQ ID NO: 2431358 - RNA, 19 nt, Human
auguuaaacuagcauaucu

SEQ ID NO: 2431359 - RNA, 15 nt, Human
auguuaaacuagcau

SEQ ID NO: 2431360 - RNA, 24 nt, Human
auguuaaacuagcauaucugccuu

SEQ ID NO: 2431361 - RNA, 17 nt, Human
auguuaaggaaacucuu

SEQ ID NO: 2431362 - RNA, 13 nt, Human
auguuaaggaaac

SEQ ID NO: 2431363 - RNA, 15 nt, Human
auguuaagcucuuua

SEQ ID NO: 2431364 - RNA, 13 nt, Human
auguuaagcucuu

SEQ ID NO: 2431365 - RNA, 23 nt, Human
auguuaaacuagcauaucugccu

SEQ ID NO: 2431366 - RNA, 21 nt, Human
auguuaaacuagcauaucugc

SEQ ID NO: 2431367 - RNA, 14 nt, Human
auguuaaaauguau

SEQ ID NO: 2431368 - RNA, 15 nt, Human
auguuaaaauguauu

SEQ ID NO: 2431369 - RNA, 14 nt, Human
auguguugugauag

SEQ ID NO: 2431370 - RNA, 17 nt, Human
auguguuuacuuuaugu

SEQ ID NO: 2431371 - RNA, 13 nt, Human
auguguugugaua

SEQ ID NO: 2431372 - RNA, 14 nt, Human
auguguugaaaaaa

SEQ ID NO: 2431373 - RNA, 19 nt, Human
auguuaaggaaacucuuau

SEQ ID NO: 2431374 - RNA, 18 nt, Human
auguuaaggaaacucuua

SEQ ID NO: 2431375 - RNA, 20 nt, Human
auguuaagggaagaauucca

SEQ ID NO: 2431376 - RNA, 23 nt, Human
auguuaaguuacuucacuuuaau

SEQ ID NO: 2431377 - RNA, 17 nt, Human
auguuaaguuacuucac

SEQ ID NO: 2431378 - RNA, 23 nt, Human
auguuaaggaaacucuuaucuca

SEQ ID NO: 2431379 - RNA, 15 nt, Human
auguuaaguuacuuc

SEQ ID NO: 2431380 - RNA, 13 nt, Human
auguuaauuucau

SEQ ID NO: 2431381 - RNA, 21 nt, Human
auguuaccuccuauaaacuua

SEQ ID NO: 2431382 - RNA, 13 nt, Human
auguuacugacca

SEQ ID NO: 2431383 - RNA, 14 nt, Human
auguuacugaccag

SEQ ID NO: 2431384 - RNA, 13 nt, Human
auguuacugauca

SEQ ID NO: 2431385 - RNA, 16 nt, Human
auguuacugaucaugc

SEQ ID NO: 2431386 - RNA, 17 nt, Human
auguuacuacaugcacu

SEQ ID NO: 2431387 - RNA, 23 nt, Human
auguuaauucagcacugauuuca

SEQ ID NO: 2431388 - RNA, 22 nt, Human
auguuaauucagcacugauuuc

SEQ ID NO: 2431389 - RNA, 23 nt, Human
auguuagaggaucccucucugga

SEQ ID NO: 2431390 - RNA, 22 nt, Human
auguuacugaucaugcauuguu

SEQ ID NO: 2431391 - RNA, 18 nt, Human
auguuacugaucaugcau

SEQ ID NO: 2431392 - RNA, 19 nt, Human
auguuacugaucaugcauu

SEQ ID NO: 2431393 - RNA, 20 nt, Human
auguuacugaucaugcauug

SEQ ID NO: 2431394 - RNA, 21 nt, Human
auguuacugaucaugcauugu

SEQ ID NO: 2431395 - RNA, 18 nt, Human
auguuaggaaaauuucac

SEQ ID NO: 2431396 - RNA, 21 nt, Human
auguuagagguuuuaaaguga

SEQ ID NO: 2431397 - RNA, 16 nt, Human
auguuagagguuuuaa

SEQ ID NO: 2431398 - RNA, 15 nt, Human
auguuagcaaagagu

SEQ ID NO: 2431399 - RNA, 20 nt, Human
auguucacuuuugacaaagg

SEQ ID NO: 2431400 - RNA, 22 nt, Human
auguucacuuuugacaaaggca

SEQ ID NO: 2431401 - RNA, 19 nt, Human
auguuaggaaaauuucaca

SEQ ID NO: 2431402 - RNA, 16 nt, Human
auguuagggugcucug

SEQ ID NO: 2431403 - RNA, 23 nt, Human
auguucagaagguugcucuagau

SEQ ID NO: 2431404 - RNA, 22 nt, Human
auguuagagguuuuaaagugau

SEQ ID NO: 2431405 - RNA, 20 nt, Human
auguucagauugcuuugauu

SEQ ID NO: 2431406 - RNA, 13 nt, Human
auuauauauauau

SEQ ID NO: 2431407 - RNA, 13 nt, Human
auuagugcuaagu

SEQ ID NO: 2431408 - RNA, 23 nt, Human
auuauagugauguaaucuugaau

SEQ ID NO: 2431409 - RNA, 15 nt, Human
auuagugcuaagugu

SEQ ID NO: 2431410 - RNA, 19 nt, Human
auuacuuaucauccacauu

SEQ ID NO: 2431411 - RNA, 18 nt, Human
auuaguauuuauuuaaug

SEQ ID NO: 2431412 - RNA, 23 nt, Human
auuaguauuuauuuaauguuaug

SEQ ID NO: 2431413 - RNA, 14 nt, Human
auuaguccuugcuu

SEQ ID NO: 2431414 - RNA, 13 nt, Human
auuaguccuugcu

SEQ ID NO: 2431415 - RNA, 23 nt, Human
auuagucauucaauaaauuguaa

SEQ ID NO: 2431416 - RNA, 14 nt, Human
auuagaauuauuua

SEQ ID NO: 2431417 - RNA, 16 nt, Human
auuacuuauuuuugac

SEQ ID NO: 2431418 - RNA, 17 nt, Human
auuacuuauuuuugaca

SEQ ID NO: 2431419 - RNA, 18 nt, Human
auuacuuauuuuugacag

SEQ ID NO: 2431420 - RNA, 19 nt, Human
auuacuuauuuuugacagu

SEQ ID NO: 2431421 - RNA, 23 nt, Human
auuacuuaucauccacauuguuu

SEQ ID NO: 2431422 - RNA, 15 nt, Human
auuacuuauuuuuga

SEQ ID NO: 2431423 - RNA, 15 nt, Human
auuacuuaucaucca

SEQ ID NO: 2431424 - RNA, 23 nt, Human
auuacuguuugucuucuccccag

SEQ ID NO: 2431425 - RNA, 22 nt, Human
auuacuguuugucuucucccca

SEQ ID NO: 2431426 - RNA, 18 nt, Human
auuacuaugacugcuccc

SEQ ID NO: 2431427 - RNA, 20 nt, Human
auuacuguuugucuucuccc

SEQ ID NO: 2431428 - RNA, 13 nt, Human
auuacuuagagga

SEQ ID NO: 2431429 - RNA, 20 nt, Human
auuacuacaaaauuugaaau

SEQ ID NO: 2431430 - RNA, 21 nt, Human
auuacuacaaaauuugaaauu

SEQ ID NO: 2431431 - RNA, 16 nt, Human
auuacgugagccaggu

SEQ ID NO: 2431432 - RNA, 14 nt, Human
auuacgugagccag

SEQ ID NO: 2431433 - RNA, 13 nt, Human
auuacgugagcca

SEQ ID NO: 2431434 - RNA, 20 nt, Human
auuacgugagccagguaaug

SEQ ID NO: 2431435 - RNA, 20 nt, Human
auuacuaaggaguaaucugu

SEQ ID NO: 2431436 - RNA, 15 nt, Human
auuacuacaaaauuu

SEQ ID NO: 2431437 - RNA, 20 nt, Human
auuaccuuuuuugauaaagu

SEQ ID NO: 2431438 - RNA, 20 nt, Human
auuacccccuccuucagaca

SEQ ID NO: 2431439 - RNA, 21 nt, Human
auuacccccuccuucagacac

SEQ ID NO: 2431440 - RNA, 17 nt, Human
auuaccgcguuguaaaa

SEQ ID NO: 2431441 - RNA, 16 nt, Human
auuaccgcguuguaaa

SEQ ID NO: 2431442 - RNA, 18 nt, Human
auuacccccuccuucaga

SEQ ID NO: 2431443 - RNA, 19 nt, Human
auuacccccuccuucagac

SEQ ID NO: 2431444 - RNA, 13 nt, Human
auuacccccuccu

SEQ ID NO: 2431445 - RNA, 15 nt, Human
auuacccaagcaaaa

SEQ ID NO: 2431446 - RNA, 22 nt, Human
auuacccccucauuguuuauua

SEQ ID NO: 2431447 - RNA, 13 nt, Human
auuacccaagcaa

SEQ ID NO: 2431448 - RNA, 13 nt, Human
auuaccauggaga

SEQ ID NO: 2431449 - RNA, 15 nt, Human
auuaccauggagaca

SEQ ID NO: 2431450 - RNA, 12 nt, Human
auuaccagggac

SEQ ID NO: 2431451 - RNA, 20 nt, Human
auuaccaugagaagagggcc

SEQ ID NO: 2431452 - RNA, 17 nt, Human
auuacauuuccaaauga

SEQ ID NO: 2431453 - RNA, 20 nt, Human
auuacauuuguauaaaauaa

SEQ ID NO: 2431454 - RNA, 18 nt, Human
auuacauuuguauaaaau

SEQ ID NO: 2431455 - RNA, 17 nt, Human
auuacauuuguauaaaa

SEQ ID NO: 2431456 - RNA, 19 nt, Human
auuacauguaaaacauuau

SEQ ID NO: 2431457 - RNA, 16 nt, Human
auuacauguaaaacau

SEQ ID NO: 2431458 - RNA, 15 nt, Human
auuacauuuccaaau

SEQ ID NO: 2431459 - RNA, 19 nt, Human
auuaauaaaaaauggaaag

SEQ ID NO: 2431460 - RNA, 22 nt, Human
auuaauaaaaaauggaaagaau

SEQ ID NO: 2431461 - RNA, 16 nt, Human
auuaauaaaaaaugga

SEQ ID NO: 2431462 - RNA, 13 nt, Human
auuaaguuguuaa

SEQ ID NO: 2431463 - RNA, 20 nt, Human
auuaaguuguuaauaaaagu

SEQ ID NO: 2431464 - RNA, 19 nt, Human
auuaaguuguuaauaaaag

SEQ ID NO: 2431465 - RNA, 14 nt, Human
auuaaguacuaugu

SEQ ID NO: 2431466 - RNA, 16 nt, Human
auuaaguacuauguau

SEQ ID NO: 2431467 - RNA, 14 nt, Human
auuaaguuguuaau

SEQ ID NO: 2431468 - RNA, 21 nt, Human
auuacauaaucuguacaauga

SEQ ID NO: 2431469 - RNA, 18 nt, Human
auuacauaaucuguacaa

SEQ ID NO: 2431470 - RNA, 15 nt, Human
auuacaucuuucaca

SEQ ID NO: 2431471 - RNA, 21 nt, Human
auuacauauuugcauauguau

SEQ ID NO: 2431472 - RNA, 16 nt, Human
auuacaucuuucacau

SEQ ID NO: 2431473 - RNA, 18 nt, Human
auuacaucuuucacauug

SEQ ID NO: 2431474 - RNA, 22 nt, Human
auuacaucuuucacauuggcua

SEQ ID NO: 2431475 - RNA, 13 nt, Human
auuaauagcuuuu

SEQ ID NO: 2431476 - RNA, 15 nt, Human
auuacagugggugcc

SEQ ID NO: 2431477 - RNA, 15 nt, Human
auuaauaauaaauuc

SEQ ID NO: 2431478 - RNA, 12 nt, Human
auuaauaaucuu

SEQ ID NO: 2431479 - RNA, 13 nt, Human
auuaauaaucuua

SEQ ID NO: 2431480 - RNA, 16 nt, Human
auuaauaaucuuauua

SEQ ID NO: 2431481 - RNA, 20 nt, Human
uuuuuauggcuuuugugcau

SEQ ID NO: 2431482 - RNA, 21 nt, Human
uuuuuauggcuuuugugcauu

SEQ ID NO: 2431483 - RNA, 22 nt, Human
uuuuuauggcuuuugugcauua

SEQ ID NO: 2431484 - RNA, 14 nt, Human
uuuuuaucuuuaua

SEQ ID NO: 2431485 - RNA, 12 nt, Human
uuuuuguacugu

SEQ ID NO: 2431486 - RNA, 16 nt, Human
uuuuuguaccugguga

SEQ ID NO: 2431487 - RNA, 18 nt, Human
uuuuuguacaguuugcug

SEQ ID NO: 2431488 - RNA, 13 nt, Human
uuuuuguaauuua

SEQ ID NO: 2431489 - RNA, 16 nt, Human
uuuuuguaaagugugg

SEQ ID NO: 2431490 - RNA, 13 nt, Human
uuuuuauuauuug

SEQ ID NO: 2431491 - RNA, 14 nt, Human
uuuuuauuauuugu

SEQ ID NO: 2431492 - RNA, 13 nt, Human
uuuuuauucauaa

SEQ ID NO: 2431493 - RNA, 23 nt, Human
uuuuuauugaaucuauuuaagua

SEQ ID NO: 2431494 - RNA, 19 nt, Human
uuuuugugaaaagcuccau

SEQ ID NO: 2431495 - RNA, 20 nt, Human
uuuuuguagagccagggucu

SEQ ID NO: 2431496 - RNA, 19 nt, Human
uuuuuguagagccaggguc

SEQ ID NO: 2431497 - RNA, 23 nt, Human
auuaaguaaugauaacuggaaac

SEQ ID NO: 2431498 - RNA, 21 nt, Human
auuaaguaaugauaacuggaa

SEQ ID NO: 2431499 - RNA, 12 nt, Human
uuuuugucauca

SEQ ID NO: 2431500 - RNA, 20 nt, Human
uuuuugugaaaaugucaaag

SEQ ID NO: 2431501 - RNA, 13 nt, Human
uuuuugucuuuuc

SEQ ID NO: 2431502 - RNA, 22 nt, Human
uuuuuguguuuuguucuuuaaa

SEQ ID NO: 2431503 - RNA, 14 nt, Human
uuuuuguacuguaa

SEQ ID NO: 2431504 - RNA, 15 nt, Human
uuuuuguguauuugu

SEQ ID NO: 2431505 - RNA, 19 nt, Human
uuuugugauuuagaacugu

SEQ ID NO: 2431506 - RNA, 18 nt, Human
uuuuguuaucagucaaua

SEQ ID NO: 2431507 - RNA, 17 nt, Human
uuuugugcauuaucuag

SEQ ID NO: 2431508 - RNA, 20 nt, Human
uuuugugcauuaucuagaua

SEQ ID NO: 2431509 - RNA, 13 nt, Human
uuuugcuggaaua

SEQ ID NO: 2431510 - RNA, 17 nt, Human
uuuugccuucauuaccu

SEQ ID NO: 2431511 - RNA, 13 nt, Human
uuuugccuucauu

SEQ ID NO: 2431512 - RNA, 17 nt, Human
uuuugcuauuguaaaua

SEQ ID NO: 2431513 - RNA, 21 nt, Human
uuuugcuauuagacuguagga

SEQ ID NO: 2431514 - RNA, 12 nt, Human
uuuugcuguaua

SEQ ID NO: 2431515 - RNA, 10 nt, Human
uuuugcuguu

SEQ ID NO: 2431516 - RNA, 13 nt, Human
uuuugcuguauau

SEQ ID NO: 2431517 - RNA, 21 nt, Human
uuuugugaugucccaacuugu

SEQ ID NO: 2431518 - RNA, 14 nt, Human
uuuugcuguagaag

SEQ ID NO: 2431519 - RNA, 13 nt, Human
uuuugcuguagaa

SEQ ID NO: 2431520 - RNA, 16 nt, Human
uuuuguucaaagccag

SEQ ID NO: 2431521 - RNA, 16 nt, Human
uuuugugauuuagaac

SEQ ID NO: 2431522 - RNA, 15 nt, Human
uuuuguuccacaagu

SEQ ID NO: 2431523 - RNA, 21 nt, Human
uuuuguuccacaaguuaaaua

SEQ ID NO: 2431524 - RNA, 22 nt, Human
uuuuguuugcuaucuuaauuuu

SEQ ID NO: 2431525 - RNA, 13 nt, Human
uuuuguuugcuau

SEQ ID NO: 2431526 - RNA, 15 nt, Human
uuuuguuucuuccaa

SEQ ID NO: 2431527 - RNA, 19 nt, Human
uuuuguuucauauugaugu

SEQ ID NO: 2431528 - RNA, 12 nt, Human
uuuuguuucaua

SEQ ID NO: 2431529 - RNA, 19 nt, Human
uuuuuauauuugaaauauu

SEQ ID NO: 2431530 - RNA, 23 nt, Human
uuuuuauacauaaacaagaccac

SEQ ID NO: 2431531 - RNA, 20 nt, Human
uuuuuaucgucacugcuuaa

SEQ ID NO: 2431532 - RNA, 12 nt, Human
uuuuuaucaugu

SEQ ID NO: 2431533 - RNA, 12 nt, Human
uuuuuauggcuu

SEQ ID NO: 2431534 - RNA, 13 nt, Human
uuuuuauacacau

SEQ ID NO: 2431535 - RNA, 17 nt, Human
uuuuuaucaugcauguc

SEQ ID NO: 2431536 - RNA, 17 nt, Human
uuuuuaucuugggacug

SEQ ID NO: 2431537 - RNA, 23 nt, Human
uuuuuaucuccccuucacaugca

SEQ ID NO: 2431538 - RNA, 14 nt, Human
uuuuguuugguauu

SEQ ID NO: 2431539 - RNA, 22 nt, Human
uuuuguuugguauuguauuuau

SEQ ID NO: 2431540 - RNA, 19 nt, Human
uuuuguuugguauuguauu

SEQ ID NO: 2431541 - RNA, 18 nt, Human
uuuuuacccauauccccu

SEQ ID NO: 2431542 - RNA, 11 nt, Human
uuuuuacuaau

SEQ ID NO: 2431543 - RNA, 15 nt, Human
uuuuuagaucaaaua

SEQ ID NO: 2431544 - RNA, 14 nt, Human
uuuuuagaucaaau

SEQ ID NO: 2431545 - RNA, 21 nt, Human
uuuuuagaucaaauacuuuaa

SEQ ID NO: 2431546 - RNA, 22 nt, Human
uuuuuagacagagucucacugu

SEQ ID NO: 2431547 - RNA, 12 nt, Human
uuuuuacugcca

SEQ ID NO: 2431548 - RNA, 14 nt, Human
uuuuuacugaacaa

SEQ ID NO: 2431549 - RNA, 13 nt, Human
uuuuuacugccac

SEQ ID NO: 2431550 - RNA, 20 nt, Human
uuuuuagaaagcauuugaau

SEQ ID NO: 2431551 - RNA, 19 nt, Human
uuuuuaccguuucuucccu

SEQ ID NO: 2431552 - RNA, 22 nt, Human
uuuuuaccuaccacagugucug

SEQ ID NO: 2431553 - RNA, 16 nt, Human
uuuuuacuacaguugu

SEQ ID NO: 2431554 - RNA, 22 nt, Human
uuuuuacccauauccccucucc

SEQ ID NO: 2431555 - RNA, 13 nt, Human
auuaagauuucca

SEQ ID NO: 2431556 - RNA, 20 nt, Human
auuaagauugaggccugccc

SEQ ID NO: 2431557 - RNA, 17 nt, Human
auuaagauugaggccug

SEQ ID NO: 2431558 - RNA, 16 nt, Human
auuaagauuuccaagu

SEQ ID NO: 2431559 - RNA, 17 nt, Human
auuaagccacuuaaaau

SEQ ID NO: 2431560 - RNA, 20 nt, Human
auuaagccacuuaaaauguu

SEQ ID NO: 2431561 - RNA, 24 nt, Human
auuaagauggauucucagauauuu

SEQ ID NO: 2431562 - RNA, 20 nt, Human
auuaaagcauuuacuuugaa

SEQ ID NO: 2431563 - RNA, 13 nt, Human
auuaaagacagag

SEQ ID NO: 2431564 - RNA, 15 nt, Human
auuaaagacuccagu

SEQ ID NO: 2431565 - RNA, 15 nt, Human
auuaaagcauuuacu

SEQ ID NO: 2431566 - RNA, 21 nt, Human
uuuugauaaaguuucucagau

SEQ ID NO: 2431567 - RNA, 19 nt, Human
uuuugauaaaguuucucag

SEQ ID NO: 2431568 - RNA, 23 nt, Human
uuuugauaaaguaguaaaaauua

SEQ ID NO: 2431569 - RNA, 20 nt, Human
uuuugauaaaguuucucaga

SEQ ID NO: 2431570 - RNA, 14 nt, Human
uuuugaguucuaca

SEQ ID NO: 2431571 - RNA, 22 nt, Human
uuuugauaaaguaguaaaaauu

SEQ ID NO: 2431572 - RNA, 18 nt, Human
uuuugauaaaguaguaaa

SEQ ID NO: 2431573 - RNA, 15 nt, Human
uuuugauagcaaagc

SEQ ID NO: 2431574 - RNA, 15 nt, Human
uuuugauagcuuuau

SEQ ID NO: 2431575 - RNA, 17 nt, Human
uuuugauccaagcuggu

SEQ ID NO: 2431576 - RNA, 17 nt, Human
uuuugagugccuuacac

SEQ ID NO: 2431577 - RNA, 14 nt, Human
uuuugaggcuuuca

SEQ ID NO: 2431578 - RNA, 18 nt, Human
uuuugaguggaugauguu

SEQ ID NO: 2431579 - RNA, 16 nt, Human
uuuugagcaacuuucu

SEQ ID NO: 2431580 - RNA, 11 nt, Human
uuuugagaaag

SEQ ID NO: 2431581 - RNA, 17 nt, Human
uuuugagacagaaucuc

SEQ ID NO: 2431582 - RNA, 22 nt, Human
uuuugagcugaaaugcugcauu

SEQ ID NO: 2431583 - RNA, 21 nt, Human
uuuugagcugaaaugcugcau

SEQ ID NO: 2431584 - RNA, 15 nt, Human
uuuugaggagcccca

SEQ ID NO: 2431585 - RNA, 17 nt, Human
uuuugagcaacuuucuu

SEQ ID NO: 2431586 - RNA, 13 nt, Human
uuuugcaccccuc

SEQ ID NO: 2431587 - RNA, 21 nt, Human
uuuugcaccccaugcuguuga

SEQ ID NO: 2431588 - RNA, 19 nt, Human
uuuugcaccccaugcuguu

SEQ ID NO: 2431589 - RNA, 18 nt, Human
uuuugcaccccaugcugu

SEQ ID NO: 2431590 - RNA, 17 nt, Human
uuuugcaccccaugcug

SEQ ID NO: 2431591 - RNA, 20 nt, Human
uuuugcacauguuuccucua

SEQ ID NO: 2431592 - RNA, 17 nt, Human
uuuugcaauggcuauau

SEQ ID NO: 2431593 - RNA, 10 nt, Human
uuuugcacag

SEQ ID NO: 2431594 - RNA, 23 nt, Human
uuuugcaagugaagguuuacaau

SEQ ID NO: 2431595 - RNA, 22 nt, Human
uuuugcaagugaagguuuacaa

SEQ ID NO: 2431596 - RNA, 17 nt, Human
uuuugcaaccucgcugg

SEQ ID NO: 2431597 - RNA, 21 nt, Human
uuuugcaaccucgcuggacuc

SEQ ID NO: 2431598 - RNA, 21 nt, Human
uuuugauuuguacugaaaaau

SEQ ID NO: 2431599 - RNA, 13 nt, Human
uuuugcaaaauuu

SEQ ID NO: 2431600 - RNA, 12 nt, Human
uuuugauugaag

SEQ ID NO: 2431601 - RNA, 18 nt, Human
uuuugauuauuguauuua

SEQ ID NO: 2431602 - RNA, 20 nt, Human
uuuugauuuaauguuuucag

SEQ ID NO: 2431603 - RNA, 20 nt, Human
uuuugauuuguacugaaaaa

SEQ ID NO: 2431604 - RNA, 15 nt, Human
uuuugauuuaugcau

SEQ ID NO: 2431605 - RNA, 20 nt, Human
uuuugauguuuguggccuca

SEQ ID NO: 2431606 - RNA, 22 nt, Human
uuuugauguuuguggccucaga

SEQ ID NO: 2431607 - RNA, 12 nt, Human
uuuugauuaugu

SEQ ID NO: 2431608 - RNA, 15 nt, Human
uuuugauuauuguau

SEQ ID NO: 2431609 - RNA, 23 nt, Human
uuuugaugaacaaaauuuccuaa

SEQ ID NO: 2431610 - RNA, 15 nt, Human
uuuugauguuugugg

SEQ ID NO: 2431611 - RNA, 16 nt, Human
uuuugaugaguuguga

SEQ ID NO: 2431612 - RNA, 15 nt, Human
uuuugccaacauugc

SEQ ID NO: 2431613 - RNA, 15 nt, Human
uuuugcauucaaauu

SEQ ID NO: 2431614 - RNA, 13 nt, Human
uuuugcauuuaug

SEQ ID NO: 2431615 - RNA, 19 nt, Human
uuuugcauuugaauaaagc

SEQ ID NO: 2431616 - RNA, 23 nt, Human
uuuugccauguuggccaggcugg

SEQ ID NO: 2431617 - RNA, 15 nt, Human
uuuugccauuaaacu

SEQ ID NO: 2431618 - RNA, 18 nt, Human
uuuugcccuucacagugu

SEQ ID NO: 2431619 - RNA, 13 nt, Human
uuuugcccuuuga

SEQ ID NO: 2431620 - RNA, 15 nt, Human
uuuugccucuuuucu

SEQ ID NO: 2431621 - RNA, 12 nt, Human
uuuugcacuuuu

SEQ ID NO: 2431622 - RNA, 17 nt, Human
uuuugcaccccucccau

SEQ ID NO: 2431623 - RNA, 16 nt, Human
uuuugcaccccuccca

SEQ ID NO: 2431624 - RNA, 13 nt, Human
uuuugcaggagca

SEQ ID NO: 2431625 - RNA, 21 nt, Human
uuuugcagcccagacaaaugu

SEQ ID NO: 2431626 - RNA, 14 nt, Human
uuuugcagcaguga

SEQ ID NO: 2431627 - RNA, 22 nt, Human
uuuugcaguagagucaucucca

SEQ ID NO: 2431628 - RNA, 18 nt, Human
uuuugcaucauuguuuua

SEQ ID NO: 2431629 - RNA, 13 nt, Human
uuuugcauucaaa

SEQ ID NO: 2431630 - RNA, 22 nt, Human
uuuugcauggcacuugcaucug

SEQ ID NO: 2431631 - RNA, 18 nt, Human
uuuugcauuuaaaacaga

SEQ ID NO: 2431632 - RNA, 19 nt, Human
uuuugcauggcacuugcau

SEQ ID NO: 2431633 - RNA, 16 nt, Human
uuuugcauggcacuug

SEQ ID NO: 2431634 - RNA, 12 nt, Human
uuuugcaugaaa

SEQ ID NO: 2431635 - RNA, 14 nt, Human
caauaggaaaaacu

SEQ ID NO: 2431636 - RNA, 14 nt, Human
caauguucucucuu

SEQ ID NO: 2431637 - RNA, 13 nt, Human
caauaauuuucua

SEQ ID NO: 2431638 - RNA, 14 nt, Human
caauaauuuucuac

SEQ ID NO: 2431639 - RNA, 19 nt, Human
caauacacuaguuguuucu

SEQ ID NO: 2431640 - RNA, 17 nt, Human
caauacacuaguuguuu

SEQ ID NO: 2431641 - RNA, 23 nt, Human
caauacaucccuuaccugggaaa

SEQ ID NO: 2431642 - RNA, 17 nt, Human
caauacaugcugcuaau

SEQ ID NO: 2431643 - RNA, 15 nt, Human
caauacaugcugcua

SEQ ID NO: 2431644 - RNA, 18 nt, Human
caauacaguacaggcagc

SEQ ID NO: 2431645 - RNA, 17 nt, Human
caauacaguacaggcag

SEQ ID NO: 2431646 - RNA, 19 nt, Human
caauacaguacaggcagca

SEQ ID NO: 2431647 - RNA, 12 nt, Human
caauaggaaaaa

SEQ ID NO: 2431648 - RNA, 19 nt, Human
caauacccaaauccucucc

SEQ ID NO: 2431649 - RNA, 13 nt, Human
caauaggaaaaac

SEQ ID NO: 2431650 - RNA, 18 nt, Human
caauagcuuuacccucag

SEQ ID NO: 2431651 - RNA, 21 nt, Human
caauagcuuuacccucaggca

SEQ ID NO: 2431652 - RNA, 20 nt, Human
caauauaaaacuguacuuca

SEQ ID NO: 2431653 - RNA, 23 nt, Human
caauagcuuuacccucaggcaua

SEQ ID NO: 2431654 - RNA, 22 nt, Human
caauauaaaaggcaaaugugua

SEQ ID NO: 2431655 - RNA, 22 nt, Human
caauauaaaacuguacuucacu

SEQ ID NO: 2431656 - RNA, 20 nt, Human
caaguuacagcugugacaau

SEQ ID NO: 2431657 - RNA, 16 nt, Human
caaguuauaaaucaau

SEQ ID NO: 2431658 - RNA, 20 nt, Human
caaguuauaaaucaauguca

SEQ ID NO: 2431659 - RNA, 18 nt, Human
caauaauaauaccucccu

SEQ ID NO: 2431660 - RNA, 14 nt, Human
caaguuagcucagg

SEQ ID NO: 2431661 - RNA, 16 nt, Human
caaguuagcucaggag

SEQ ID NO: 2431662 - RNA, 17 nt, Human
caaguuagcucaggagg

SEQ ID NO: 2431663 - RNA, 19 nt, Human
caaguuagcucaggaggcu

SEQ ID NO: 2431664 - RNA, 23 nt, Human
caagugugcauauuguacacuuu

SEQ ID NO: 2431665 - RNA, 21 nt, Human
caagugugcauauuguacacu

SEQ ID NO: 2431666 - RNA, 18 nt, Human
caagugugcauauuguac

SEQ ID NO: 2431667 - RNA, 19 nt, Human
caagugugcuuuagcuuga

SEQ ID NO: 2431668 - RNA, 22 nt, Human
caagugugcauauuguacacuu

SEQ ID NO: 2431669 - RNA, 16 nt, Human
caaguuagaaaacaua

SEQ ID NO: 2431670 - RNA, 13 nt, Human
caaguuagcucag

SEQ ID NO: 2431671 - RNA, 17 nt, Human
caauaauauauuuucug

SEQ ID NO: 2431672 - RNA, 16 nt, Human
caauaauauauuuucu

SEQ ID NO: 2431673 - RNA, 14 nt, Human
caauaauauauuuu

SEQ ID NO: 2431674 - RNA, 13 nt, Human
caauaauauauuu

SEQ ID NO: 2431675 - RNA, 20 nt, Human
caauaauauauuuucuguuu

SEQ ID NO: 2431676 - RNA, 18 nt, Human
caauaauggucccaucca

SEQ ID NO: 2431677 - RNA, 17 nt, Human
caauaauggucccaucc

SEQ ID NO: 2431678 - RNA, 18 nt, Human
caauaauauauuuucugu

SEQ ID NO: 2431679 - RNA, 20 nt, Human
caauaauggucccauccagg

SEQ ID NO: 2431680 - RNA, 19 nt, Human
caauaauggucccauccag

SEQ ID NO: 2431681 - RNA, 23 nt, Human
caauaauggucccauccaggcag

SEQ ID NO: 2431682 - RNA, 22 nt, Human
caauaauuucagguuuuguaaa

SEQ ID NO: 2431683 - RNA, 16 nt, Human
caauaauugcagaacu

SEQ ID NO: 2431684 - RNA, 14 nt, Human
caauaauuucaggu

SEQ ID NO: 2431685 - RNA, 14 nt, Human
caauauuguacagu

SEQ ID NO: 2431686 - RNA, 17 nt, Human
caauauugacuuugucu

SEQ ID NO: 2431687 - RNA, 17 nt, Human
caaucugacauucucag

SEQ ID NO: 2431688 - RNA, 16 nt, Human
caauauugacuuuguc

SEQ ID NO: 2431689 - RNA, 21 nt, Human
caauauuccugaaugaaauau

SEQ ID NO: 2431690 - RNA, 15 nt, Human
caauauugaacuuuu

SEQ ID NO: 2431691 - RNA, 14 nt, Human
caauauugacuuug

SEQ ID NO: 2431692 - RNA, 22 nt, Human
caauauaucuaaauugaauaau

SEQ ID NO: 2431693 - RNA, 21 nt, Human
caauauaucuaaauugaauaa

SEQ ID NO: 2431694 - RNA, 20 nt, Human
caauauaucuaaauugaaua

SEQ ID NO: 2431695 - RNA, 17 nt, Human
caauauucgcuguguca

SEQ ID NO: 2431696 - RNA, 14 nt, Human
caauauagaaacac

SEQ ID NO: 2431697 - RNA, 12 nt, Human
caauauagaaac

SEQ ID NO: 2431698 - RNA, 23 nt, Human
caauauaaaaggcaaauguguac

SEQ ID NO: 2431699 - RNA, 13 nt, Human
caauauagcaaga

SEQ ID NO: 2431700 - RNA, 19 nt, Human
caauauaucuaaauugaau

SEQ ID NO: 2431701 - RNA, 19 nt, Human
caauauagaaacacgaacu

SEQ ID NO: 2431702 - RNA, 12 nt, Human
caauauagcaag

SEQ ID NO: 2431703 - RNA, 23 nt, Human
caaugaccuuucaauaggaaaaa

SEQ ID NO: 2431704 - RNA, 18 nt, Human
caaucuguaaacugugua

SEQ ID NO: 2431705 - RNA, 18 nt, Human
caauauaaaacuguacuu

SEQ ID NO: 2431706 - RNA, 12 nt, Human
caaucuguaaac

SEQ ID NO: 2431707 - RNA, 15 nt, Human
caaucuguaaacugu

SEQ ID NO: 2431708 - RNA, 16 nt, Human
caaucuguaaacugug

SEQ ID NO: 2431709 - RNA, 17 nt, Human
caaucuguaaacugugu

SEQ ID NO: 2431710 - RNA, 19 nt, Human
caaucugacauucucagga

SEQ ID NO: 2431711 - RNA, 17 nt, Human
caaugacuuacuguaca

SEQ ID NO: 2431712 - RNA, 18 nt, Human
caaugacuuacuguacau

SEQ ID NO: 2431713 - RNA, 15 nt, Human
caaugacuuacugua

SEQ ID NO: 2431714 - RNA, 21 nt, Human
caaugaccuuucaauaggaaa

SEQ ID NO: 2431715 - RNA, 19 nt, Human
caaucuuaaggggcagcuu

SEQ ID NO: 2431716 - RNA, 19 nt, Human
caaugggcacugggaugag

SEQ ID NO: 2431717 - RNA, 17 nt, Human
caaugggcacugggaug

SEQ ID NO: 2431718 - RNA, 15 nt, Human
caaugggcacuggga

SEQ ID NO: 2431719 - RNA, 15 nt, Human
caaugggcaaugaca

SEQ ID NO: 2431720 - RNA, 21 nt, Human
caaugggagcugaggccacac

SEQ ID NO: 2431721 - RNA, 18 nt, Human
caaugggcacugggauga

SEQ ID NO: 2431722 - RNA, 22 nt, Human
caauggggauguuguguuucug

SEQ ID NO: 2431723 - RNA, 23 nt, Human
caauggguuuuucccuguacagu

SEQ ID NO: 2431724 - RNA, 17 nt, Human
caaugguguugcccuga

SEQ ID NO: 2431725 - RNA, 22 nt, Human
caaugguguucaccaucggcag

SEQ ID NO: 2431726 - RNA, 22 nt, Human
caaugguguugcccugagugga

SEQ ID NO: 2431727 - RNA, 23 nt, Human
caauguauuuauuuaaaagauuc

SEQ ID NO: 2431728 - RNA, 22 nt, Human
caauguauuuauuuaaaagauu

SEQ ID NO: 2431729 - RNA, 20 nt, Human
caauguauuuauuuaaaaga

SEQ ID NO: 2431730 - RNA, 18 nt, Human
caauguauuuauuuaaaa

SEQ ID NO: 2431731 - RNA, 14 nt, Human
caaugucacuuaaa

SEQ ID NO: 2431732 - RNA, 14 nt, Human
caaugucaggaaca

SEQ ID NO: 2431733 - RNA, 19 nt, Human
caaugucaggaacagaagg

SEQ ID NO: 2431734 - RNA, 22 nt, Human
caaugugacuuaaugccacuaa

SEQ ID NO: 2431735 - RNA, 17 nt, Human
caauguagaaagcuuug

SEQ ID NO: 2431736 - RNA, 15 nt, Human
caauguauuuauuua

SEQ ID NO: 2431737 - RNA, 20 nt, Human
caauguauugauaagagggc

SEQ ID NO: 2431738 - RNA, 19 nt, Human
caauguagaggggaaaaga

SEQ ID NO: 2431739 - RNA, 21 nt, Human
caaugcacuuuguucuggcuc

SEQ ID NO: 2431740 - RNA, 20 nt, Human
caaugcacuuuguucuggcu

SEQ ID NO: 2431741 - RNA, 22 nt, Human
caaugcacuuuguucuggcucu

SEQ ID NO: 2431742 - RNA, 23 nt, Human
caaugggagcugaggccacacuc

SEQ ID NO: 2431743 - RNA, 19 nt, Human
caaugggagcugaggccac

SEQ ID NO: 2431744 - RNA, 18 nt, Human
caaugaggucugaaaugg

SEQ ID NO: 2431745 - RNA, 17 nt, Human
caaugcacuuuguucug

SEQ ID NO: 2431746 - RNA, 17 nt, Human
caaugaggucugaaaug

SEQ ID NO: 2431747 - RNA, 14 nt, Human
caaugacucucugg

SEQ ID NO: 2431748 - RNA, 14 nt, Human
caauucuccugccu

SEQ ID NO: 2431749 - RNA, 15 nt, Human
caauucuccugccuc

SEQ ID NO: 2431750 - RNA, 22 nt, Human
caauuucuguguugccaagcuc

SEQ ID NO: 2431751 - RNA, 16 nt, Human
caauuugggagauaua

SEQ ID NO: 2431752 - RNA, 20 nt, Human
caauuaauuuuuuuauuguu

SEQ ID NO: 2431753 - RNA, 19 nt, Human
caauuaauuuuuuuauugu

SEQ ID NO: 2431754 - RNA, 13 nt, Human
caauuaauuuuuu

SEQ ID NO: 2431755 - RNA, 15 nt, Human
caauuaauaaaaaau

SEQ ID NO: 2431756 - RNA, 23 nt, Human
caauuaauuuuuuuauuguuuaa

SEQ ID NO: 2431757 - RNA, 22 nt, Human
caauuaauuuuuuuauuguuua

SEQ ID NO: 2431758 - RNA, 16 nt, Human
caauuacaggaaguac

SEQ ID NO: 2431759 - RNA, 13 nt, Human
caauucuccugcc

SEQ ID NO: 2431760 - RNA, 16 nt, Human
caauucgauauccgga

SEQ ID NO: 2431761 - RNA, 16 nt, Human
caauuccugggcccca

SEQ ID NO: 2431762 - RNA, 23 nt, Human
caauucucauuugucacacacuu

SEQ ID NO: 2431763 - RNA, 24 nt, Human
caauguuaaggaaacucuuaucuc

SEQ ID NO: 2431764 - RNA, 13 nt, Human
caauguucaucau

SEQ ID NO: 2431765 - RNA, 20 nt, Human
caauguuaaggaaacucuua

SEQ ID NO: 2431766 - RNA, 19 nt, Human
caauguuaaggaaacucuu

SEQ ID NO: 2431767 - RNA, 19 nt, Human
caauguuacuaucugcuuu

SEQ ID NO: 2431768 - RNA, 14 nt, Human
caauguucauccca

SEQ ID NO: 2431769 - RNA, 15 nt, Human
caauguucaucccau

SEQ ID NO: 2431770 - RNA, 12 nt, Human
caauguucauug

SEQ ID NO: 2431771 - RNA, 13 nt, Human
caauguucauugu

SEQ ID NO: 2431772 - RNA, 14 nt, Human
caauguucauugua

SEQ ID NO: 2431773 - RNA, 15 nt, Human
caauguucauuguaa

SEQ ID NO: 2431774 - RNA, 18 nt, Human
caauguucauuguaaugu

SEQ ID NO: 2431775 - RNA, 12 nt, Human
caauuaauuuuu

SEQ ID NO: 2431776 - RNA, 18 nt, Human
caauuaauaaaaaaugga

SEQ ID NO: 2431777 - RNA, 23 nt, Human
caauuaaggauuuuaugcuuuaa

SEQ ID NO: 2431778 - RNA, 22 nt, Human
caauguucauuguaauguuacu

SEQ ID NO: 2431779 - RNA, 23 nt, Human
caauguucauuguaauguuacug

SEQ ID NO: 2431780 - RNA, 15 nt, Human
caaugugauaaaacc

SEQ ID NO: 2431781 - RNA, 17 nt, Human
caaugugauaaaacccc

SEQ ID NO: 2431782 - RNA, 16 nt, Human
caaugucaggaacaga

SEQ ID NO: 2431783 - RNA, 18 nt, Human
caauguuaaggaaacucu

SEQ ID NO: 2431784 - RNA, 16 nt, Human
caauguuaaggaaacu

SEQ ID NO: 2431785 - RNA, 14 nt, Human
caauguuaaggaaa

SEQ ID NO: 2431786 - RNA, 12 nt, Human
caaugugcagug

SEQ ID NO: 2431787 - RNA, 15 nt, Human
caaugugauucuaau

SEQ ID NO: 2431788 - RNA, 11 nt, Human
caauguuaagg

SEQ ID NO: 2431789 - RNA, 19 nt, Human
caaccuucgccaccugggu

SEQ ID NO: 2431790 - RNA, 21 nt, Human
caacgcuuaaaggugucuucc

SEQ ID NO: 2431791 - RNA, 22 nt, Human
caacgcuuaaaggugucuuccu

SEQ ID NO: 2431792 - RNA, 21 nt, Human
caacggagagcgccugccccu

SEQ ID NO: 2431793 - RNA, 17 nt, Human
caaccuuagauguucua

SEQ ID NO: 2431794 - RNA, 18 nt, Human
caaccuuagauguucuaa

SEQ ID NO: 2431795 - RNA, 20 nt, Human
caaccuguucugcuuuccuc

SEQ ID NO: 2431796 - RNA, 22 nt, Human
caaccuguuaccuacuuugacu

SEQ ID NO: 2431797 - RNA, 23 nt, Human
caaccuguuaccuacuuugacuu

SEQ ID NO: 2431798 - RNA, 20 nt, Human
caaccuguuaccuacuuuga

SEQ ID NO: 2431799 - RNA, 14 nt, Human
caacgucugugcca

SEQ ID NO: 2431800 - RNA, 13 nt, Human
caacgucugugcc

SEQ ID NO: 2431801 - RNA, 16 nt, Human
caacgugcauugugcu

SEQ ID NO: 2431802 - RNA, 15 nt, Human
caacguagcuucuac

SEQ ID NO: 2431803 - RNA, 13 nt, Human
caacgugcauugu

SEQ ID NO: 2431804 - RNA, 17 nt, Human
caacugaccagccucca

SEQ ID NO: 2431805 - RNA, 15 nt, Human
caacugaccagccuc

SEQ ID NO: 2431806 - RNA, 22 nt, Human
caaccgccacacacacaggagc

SEQ ID NO: 2431807 - RNA, 22 nt, Human
caaccgaugcuccagccaaccc

SEQ ID NO: 2431808 - RNA, 21 nt, Human
caaccgguggauccucaaaca

SEQ ID NO: 2431809 - RNA, 19 nt, Human
caaccggggagcccccgcc

SEQ ID NO: 2431810 - RNA, 20 nt, Human
caaccggggagcccccgccc

SEQ ID NO: 2431811 - RNA, 14 nt, Human
caaccuccugggcu

SEQ ID NO: 2431812 - RNA, 18 nt, Human
caaccguuggaaacauaa

SEQ ID NO: 2431813 - RNA, 22 nt, Human
caaccuguaauaaauaugagug

SEQ ID NO: 2431814 - RNA, 21 nt, Human
caaccuguaauaaauaugagu

SEQ ID NO: 2431815 - RNA, 19 nt, Human
caaccuguaauaaauauga

SEQ ID NO: 2431816 - RNA, 18 nt, Human
caaccuguaauaaauaug

SEQ ID NO: 2431817 - RNA, 17 nt, Human
caaccuguaauaaauau

SEQ ID NO: 2431818 - RNA, 13 nt, Human
caaccucuggagc

SEQ ID NO: 2431819 - RNA, 16 nt, Human
caaccuguaauaaaua

SEQ ID NO: 2431820 - RNA, 15 nt, Human
caaccuccugggcua

SEQ ID NO: 2431821 - RNA, 13 nt, Human
caacccucagagc

SEQ ID NO: 2431822 - RNA, 18 nt, Human
caacccucccucagcccc

SEQ ID NO: 2431823 - RNA, 23 nt, Human
caacacuggugugaccugagggc

SEQ ID NO: 2431824 - RNA, 22 nt, Human
caacacuggugugaccugaggg

SEQ ID NO: 2431825 - RNA, 13 nt, Human
caacacugugccc

SEQ ID NO: 2431826 - RNA, 15 nt, Human
caacacugugcccug

SEQ ID NO: 2431827 - RNA, 14 nt, Human
caacacugugcccu

SEQ ID NO: 2431828 - RNA, 16 nt, Human
caacccgaggcccgca

SEQ ID NO: 2431829 - RNA, 17 nt, Human
caacccuggcacccagg

SEQ ID NO: 2431830 - RNA, 23 nt, Human
caacccugccccugccccgucac

SEQ ID NO: 2431831 - RNA, 13 nt, Human
caacccuggagag

SEQ ID NO: 2431832 - RNA, 22 nt, Human
caacccugccccugccccguca

SEQ ID NO: 2431833 - RNA, 19 nt, Human
caacccuggcauuaugucc

SEQ ID NO: 2431834 - RNA, 23 nt, Human
caacccuggagaguucaauggcu

SEQ ID NO: 2431835 - RNA, 14 nt, Human
caaccgaugcucca

SEQ ID NO: 2431836 - RNA, 17 nt, Human
caaccgaugcuccagcc

SEQ ID NO: 2431837 - RNA, 18 nt, Human
caaccgaugcuccagcca

SEQ ID NO: 2431838 - RNA, 21 nt, Human
caaccgaugcuccagccaacc

SEQ ID NO: 2431839 - RNA, 15 nt, Human
caacccuccuaucac

SEQ ID NO: 2431840 - RNA, 19 nt, Human
caacccuccuaucaccucc

SEQ ID NO: 2431841 - RNA, 22 nt, Human
caacccuccuaucaccuccccu

SEQ ID NO: 2431842 - RNA, 19 nt, Human
caacccucccucagccccu

SEQ ID NO: 2431843 - RNA, 20 nt, Human
caacccucccucagccccuc

SEQ ID NO: 2431844 - RNA, 21 nt, Human
caacccucccucagccccucu

SEQ ID NO: 2431845 - RNA, 22 nt, Human
caacccucccucagccccucuu

SEQ ID NO: 2431846 - RNA, 11 nt, Human
caacccugcaa

SEQ ID NO: 2431847 - RNA, 12 nt, Human
caacccugcaaa

SEQ ID NO: 2431848 - RNA, 22 nt, Human
caacccugcaaaggacuguuuu

SEQ ID NO: 2431849 - RNA, 11 nt, Human
caacccugccc

SEQ ID NO: 2431850 - RNA, 13 nt, Human
caacccugccccu

SEQ ID NO: 2431851 - RNA, 14 nt, Human
caacccugccccug

SEQ ID NO: 2431852 - RNA, 15 nt, Human
caacccugccccugc

SEQ ID NO: 2431853 - RNA, 16 nt, Human
caacccugccccugcc

SEQ ID NO: 2431854 - RNA, 22 nt, Human
caacacucauugaccugaggcc

SEQ ID NO: 2431855 - RNA, 20 nt, Human
caacacucauugaccugagg

SEQ ID NO: 2431856 - RNA, 18 nt, Human
caacacucauugaccuga

SEQ ID NO: 2431857 - RNA, 22 nt, Human
caacacucacauuuauucugcu

SEQ ID NO: 2431858 - RNA, 11 nt, Human
caaauuucaca

SEQ ID NO: 2431859 - RNA, 22 nt, Human
caaccccuucgcuccugugucu

SEQ ID NO: 2431860 - RNA, 18 nt, Human
caacacuggugugaccug

SEQ ID NO: 2431861 - RNA, 13 nt, Human
caacacuggugug

SEQ ID NO: 2431862 - RNA, 20 nt, Human
caacacugggaaacagaggc

SEQ ID NO: 2431863 - RNA, 15 nt, Human
caagaaaacaacuuc

SEQ ID NO: 2431864 - RNA, 13 nt, Human
caagaaauuugau

SEQ ID NO: 2431865 - RNA, 18 nt, Human
caagaaaacaacuucaau

SEQ ID NO: 2431866 - RNA, 22 nt, Human
caacuuuguggaugucuuccuu

SEQ ID NO: 2431867 - RNA, 20 nt, Human
caacuuuuccuuugaauccu

SEQ ID NO: 2431868 - RNA, 21 nt, Human
caacuuuguggaugucuuccu

SEQ ID NO: 2431869 - RNA, 22 nt, Human
caacugaggcagacagcagcuc

SEQ ID NO: 2431870 - RNA, 19 nt, Human
caacugaccagccuccaug

SEQ ID NO: 2431871 - RNA, 13 nt, Human
caacugaggcaga

SEQ ID NO: 2431872 - RNA, 14 nt, Human
caacugaggcagac

SEQ ID NO: 2431873 - RNA, 16 nt, Human
caacugaggcagacag

SEQ ID NO: 2431874 - RNA, 17 nt, Human
caacugaggcagacagc

SEQ ID NO: 2431875 - RNA, 20 nt, Human
caacugaggcagacagcagc

SEQ ID NO: 2431876 - RNA, 21 nt, Human
caacugaggcagacagcagcu

SEQ ID NO: 2431877 - RNA, 17 nt, Human
caagacgcugugcugcc

SEQ ID NO: 2431878 - RNA, 16 nt, Human
caagacgcugugcugc

SEQ ID NO: 2431879 - RNA, 18 nt, Human
caagaccuucuccuucac

SEQ ID NO: 2431880 - RNA, 17 nt, Human
caagaccuucuccuuca

SEQ ID NO: 2431881 - RNA, 16 nt, Human
caagaccuucuccuuc

SEQ ID NO: 2431882 - RNA, 14 nt, Human
caagaccuucuccu

SEQ ID NO: 2431883 - RNA, 20 nt, Human
caagaacuuuccaggaaggc

SEQ ID NO: 2431884 - RNA, 16 nt, Human
caagaaauuugauuuc

SEQ ID NO: 2431885 - RNA, 14 nt, Human
caagaacucugggc

SEQ ID NO: 2431886 - RNA, 15 nt, Human
caagagcccaggccu

SEQ ID NO: 2431887 - RNA, 14 nt, Human
caagagcccaggcc

SEQ ID NO: 2431888 - RNA, 13 nt, Human
caagagcccaggc

SEQ ID NO: 2431889 - RNA, 18 nt, Human
caagacucuuuggacacu

SEQ ID NO: 2431890 - RNA, 18 nt, Human
caagacgcugugcugccc

SEQ ID NO: 2431891 - RNA, 12 nt, Human
caagaagacaug

SEQ ID NO: 2431892 - RNA, 22 nt, Human
caagaagaaaugcuuuccaaaa

SEQ ID NO: 2431893 - RNA, 19 nt, Human
caagaagaagggcacccua

SEQ ID NO: 2431894 - RNA, 19 nt, Human
caagacgcugugcugcccu

SEQ ID NO: 2431895 - RNA, 18 nt, Human
caagaagacauggagacu

SEQ ID NO: 2431896 - RNA, 23 nt, Human
caagacgcugugcugcccugccc

SEQ ID NO: 2431897 - RNA, 22 nt, Human
caagacucccucgucgagcugg

SEQ ID NO: 2431898 - RNA, 15 nt, Human
caagacucugucuca

SEQ ID NO: 2431899 - RNA, 17 nt, Human
caagcaccuccugccuc

SEQ ID NO: 2431900 - RNA, 16 nt, Human
caagcaccuccugccu

SEQ ID NO: 2431901 - RNA, 15 nt, Human
caagagggcacuggu

SEQ ID NO: 2431902 - RNA, 14 nt, Human
caagagggcacugg

SEQ ID NO: 2431903 - RNA, 15 nt, Human
caagcaccuccugcc

SEQ ID NO: 2431904 - RNA, 14 nt, Human
caagaggcugcagc

SEQ ID NO: 2431905 - RNA, 16 nt, Human
caagaggcugcagcca

SEQ ID NO: 2431906 - RNA, 16 nt, Human
caagagcccaggccuc

SEQ ID NO: 2431907 - RNA, 17 nt, Human
caagagggacgccuggg

SEQ ID NO: 2431908 - RNA, 19 nt, Human
caagagggacgccuggggg

SEQ ID NO: 2431909 - RNA, 13 nt, Human
caagagggcacug

SEQ ID NO: 2431910 - RNA, 16 nt, Human
caagagggaauccccg

SEQ ID NO: 2431911 - RNA, 20 nt, Human
caagaggcuguucccaccag

SEQ ID NO: 2431912 - RNA, 17 nt, Human
caagugagagcugggug

SEQ ID NO: 2431913 - RNA, 15 nt, Human
caagugagagcuggg

SEQ ID NO: 2431914 - RNA, 14 nt, Human
caagugagagcugg

SEQ ID NO: 2431915 - RNA, 21 nt, Human
caaguccucuuuucugagagg

SEQ ID NO: 2431916 - RNA, 17 nt, Human
caagugauucucaugcc

SEQ ID NO: 2431917 - RNA, 18 nt, Human
caagugauucucaugccu

SEQ ID NO: 2431918 - RNA, 20 nt, Human
caagugauucucaugccuca

SEQ ID NO: 2431919 - RNA, 21 nt, Human
caagugauucucaugccucag

SEQ ID NO: 2431920 - RNA, 18 nt, Human
caagugagagcugggugu

SEQ ID NO: 2431921 - RNA, 15 nt, Human
caaguccugaagagg

SEQ ID NO: 2431922 - RNA, 14 nt, Human
caaguccugaagag

SEQ ID NO: 2431923 - RNA, 16 nt, Human
caaguccugaagaggc

SEQ ID NO: 2431924 - RNA, 18 nt, Human
caaguggacucagggcag

SEQ ID NO: 2431925 - RNA, 23 nt, Human
caaguggacucagggcagcgcca

SEQ ID NO: 2431926 - RNA, 23 nt, Human
caaguggcagagcuuggacugga

SEQ ID NO: 2431927 - RNA, 18 nt, Human
caaguggcagagcuugga

SEQ ID NO: 2431928 - RNA, 19 nt, Human
caaguggcucccacacccu

SEQ ID NO: 2431929 - RNA, 12 nt, Human
caaguggaccuu

SEQ ID NO: 2431930 - RNA, 21 nt, Human
caaguggaccuuaggccuucc

SEQ ID NO: 2431931 - RNA, 22 nt, Human
caaguggaccuuaggccuuccu

SEQ ID NO: 2431932 - RNA, 15 nt, Human
caaguggacucaggg

SEQ ID NO: 2431933 - RNA, 16 nt, Human
caaguggacucagggc

SEQ ID NO: 2431934 - RNA, 23 nt, Human
caaguggaccuuaggccuuccuc

SEQ ID NO: 2431935 - RNA, 19 nt, Human
caaguggaccuugagacca

SEQ ID NO: 2431936 - RNA, 14 nt, Human
caagugugaacaaa

SEQ ID NO: 2431937 - RNA, 15 nt, Human
caagugucuuccauc

SEQ ID NO: 2431938 - RNA, 19 nt, Human
caagugugaacaaaagaug

SEQ ID NO: 2431939 - RNA, 17 nt, Human
caagugugcauauugua

SEQ ID NO: 2431940 - RNA, 15 nt, Human
caagugugcauauug

SEQ ID NO: 2431941 - RNA, 14 nt, Human
caaguuaaauaaau

SEQ ID NO: 2431942 - RNA, 16 nt, Human
caaguguauaucagaa

SEQ ID NO: 2431943 - RNA, 18 nt, Human
caaguguauaucagaaaa

SEQ ID NO: 2431944 - RNA, 22 nt, Human
caaguguaugcacgugugcaca

SEQ ID NO: 2431945 - RNA, 14 nt, Human
caagugucuuccau

SEQ ID NO: 2431946 - RNA, 13 nt, Human
caagugucuucca

SEQ ID NO: 2431947 - RNA, 17 nt, Human
caagugucucaguccac

SEQ ID NO: 2431948 - RNA, 20 nt, Human
caagugucucaguccaccug

SEQ ID NO: 2431949 - RNA, 14 nt, Human
caaguguauaucag

SEQ ID NO: 2431950 - RNA, 23 nt, Human
caaguguaaaauauuuugaauca

SEQ ID NO: 2431951 - RNA, 21 nt, Human
caaguguaaaauauuuugaau

SEQ ID NO: 2431952 - RNA, 21 nt, Human
caagucccuguuuucugagcc

SEQ ID NO: 2431953 - RNA, 20 nt, Human
caagucccuguuuucugagc

SEQ ID NO: 2431954 - RNA, 19 nt, Human
caagucccuguuuucugag

SEQ ID NO: 2431955 - RNA, 23 nt, Human
caagucccuguuuucugagcccg

SEQ ID NO: 2431956 - RNA, 22 nt, Human
caagucccuguuuucugagccc

SEQ ID NO: 2431957 - RNA, 14 nt, Human
caaguccucuuuuc

SEQ ID NO: 2431958 - RNA, 11 nt, Human
caagucccugu

SEQ ID NO: 2431959 - RNA, 20 nt, Human
caagucccuguaauuguugu

SEQ ID NO: 2431960 - RNA, 20 nt, Human
caagguccucugucagucac

SEQ ID NO: 2431961 - RNA, 21 nt, Human
caagguccucugucagucaca

SEQ ID NO: 2431962 - RNA, 22 nt, Human
caagguccucugucagucacag

SEQ ID NO: 2431963 - RNA, 16 nt, Human
caaggucgguaaguug

SEQ ID NO: 2431964 - RNA, 14 nt, Human
caaggucauuuuuu

SEQ ID NO: 2431965 - RNA, 20 nt, Human
caaggucauuuuuuuuaaga

SEQ ID NO: 2431966 - RNA, 18 nt, Human
caaggguagggugggccu

SEQ ID NO: 2431967 - RNA, 21 nt, Human
caagggggaugacaugugacu

SEQ ID NO: 2431968 - RNA, 15 nt, Human
caagggggacugucu

SEQ ID NO: 2431969 - RNA, 14 nt, Human
caaggcuguugcau

SEQ ID NO: 2431970 - RNA, 18 nt, Human
caaggggcccaaauucuu

SEQ ID NO: 2431971 - RNA, 18 nt, Human
caaggcuguugcaugggc

SEQ ID NO: 2431972 - RNA, 17 nt, Human
caaggcugugcucccug

SEQ ID NO: 2431973 - RNA, 18 nt, Human
caaggcugugcucccugg

SEQ ID NO: 2431974 - RNA, 17 nt, Human
caaggggcccaaauucu

SEQ ID NO: 2431975 - RNA, 12 nt, Human
caaggcugcagu

SEQ ID NO: 2431976 - RNA, 15 nt, Human
caaggcugcagugag

SEQ ID NO: 2431977 - RNA, 23 nt, Human
caaggcugucaauuacaggaagu

SEQ ID NO: 2431978 - RNA, 21 nt, Human
caaggcugucaauuacaggaa

SEQ ID NO: 2431979 - RNA, 23 nt, Human
caaggcugaccaagagagaaaga

SEQ ID NO: 2431980 - RNA, 16 nt, Human
caagcaguagacaagc

SEQ ID NO: 2431981 - RNA, 15 nt, Human
caaggacugcaggga

SEQ ID NO: 2431982 - RNA, 16 nt, Human
caaggaagccacagcu

SEQ ID NO: 2431983 - RNA, 12 nt, Human
caaggaagucaa

SEQ ID NO: 2431984 - RNA, 18 nt, Human
caaggaaggaaagaaaga

SEQ ID NO: 2431985 - RNA, 23 nt, Human
caaggaaggaaagaaagaaggaa

SEQ ID NO: 2431986 - RNA, 19 nt, Human
caagcuggucccacucagu

SEQ ID NO: 2431987 - RNA, 12 nt, Human
caaggaaggaaa

SEQ ID NO: 2431988 - RNA, 13 nt, Human
caaggaaggaaag

SEQ ID NO: 2431989 - RNA, 16 nt, Human
caaggaaggaaagaaa

SEQ ID NO: 2431990 - RNA, 17 nt, Human
caaggaaggaaagaaag

SEQ ID NO: 2431991 - RNA, 22 nt, Human
caagcugggccccagcccaccc

SEQ ID NO: 2431992 - RNA, 20 nt, Human
caagcugggccccagcccac

SEQ ID NO: 2431993 - RNA, 19 nt, Human
caagcugggccccagccca

SEQ ID NO: 2431994 - RNA, 18 nt, Human
caagcugggccccagccc

SEQ ID NO: 2431995 - RNA, 17 nt, Human
caagcugggccccagcc

SEQ ID NO: 2431996 - RNA, 16 nt, Human
caagcugggccccagc

SEQ ID NO: 2431997 - RNA, 15 nt, Human
caagcugggccccag

SEQ ID NO: 2431998 - RNA, 12 nt, Human
caagcugggccc

SEQ ID NO: 2431999 - RNA, 17 nt, Human
caagcuggucccacuca

SEQ ID NO: 2432000 - RNA, 14 nt, Human
caaggagccaaaca

SEQ ID NO: 2432001 - RNA, 11 nt, Human
caaggagcugc

SEQ ID NO: 2432002 - RNA, 13 nt, Human
caaggagcugcua

SEQ ID NO: 2432003 - RNA, 15 nt, Human
caaggacuuugcagc

SEQ ID NO: 2432004 - RNA, 16 nt, Human
caaggacuugaaagca

SEQ ID NO: 2432005 - RNA, 18 nt, Human
caaggacuugaaagcauc

SEQ ID NO: 2432006 - RNA, 16 nt, Human
caaggacuuugcagcc

SEQ ID NO: 2432007 - RNA, 20 nt, Human
caaggacuugaaagcaucca

SEQ ID NO: 2432008 - RNA, 19 nt, Human
caaggacuuccuguccagc

SEQ ID NO: 2432009 - RNA, 21 nt, Human
caaggacuuccuguccagcuc

SEQ ID NO: 2432010 - RNA, 22 nt, Human
caaggacuuccuguccagcucc

SEQ ID NO: 2432011 - RNA, 23 nt, Human
caaggacuuccuguccagcucca

SEQ ID NO: 2432012 - RNA, 22 nt, Human
caaggacugcagggacugccag

SEQ ID NO: 2432013 - RNA, 14 nt, Human
caaggacuuccugu

SEQ ID NO: 2432014 - RNA, 14 nt, Human
caaggacugccgac

SEQ ID NO: 2432015 - RNA, 17 nt, Human
caaggcugauuaaacca

SEQ ID NO: 2432016 - RNA, 20 nt, Human
caaggcugaccaagagagaa

SEQ ID NO: 2432017 - RNA, 21 nt, Human
caaggcugaccaagagagaaa

SEQ ID NO: 2432018 - RNA, 17 nt, Human
caaggaggucugugcca

SEQ ID NO: 2432019 - RNA, 20 nt, Human
caaggagggugagugcaagg

SEQ ID NO: 2432020 - RNA, 22 nt, Human
caaggagcugcuauagccuggg

SEQ ID NO: 2432021 - RNA, 12 nt, Human
caaggaggaaaa

SEQ ID NO: 2432022 - RNA, 13 nt, Human
caaggaggaaaaa

SEQ ID NO: 2432023 - RNA, 14 nt, Human
caaggaggaaaaac

SEQ ID NO: 2432024 - RNA, 19 nt, Human
caaggaggcuggcuggggc

SEQ ID NO: 2432025 - RNA, 16 nt, Human
caaggaggcuggcugg

SEQ ID NO: 2432026 - RNA, 14 nt, Human
caaggaggcuggcu

SEQ ID NO: 2432027 - RNA, 20 nt, Human
caaggaggaaaaacagacaa

SEQ ID NO: 2432028 - RNA, 22 nt, Human
caaggaggcuggcuggggccua

SEQ ID NO: 2432029 - RNA, 21 nt, Human
caaggaggcuggcuggggccu

SEQ ID NO: 2432030 - RNA, 12 nt, Human
caaggagggaga

SEQ ID NO: 2432031 - RNA, 18 nt, Human
caaggaggggcuguaaaa

SEQ ID NO: 2432032 - RNA, 19 nt, Human
caaggagggugagugcaag

SEQ ID NO: 2432033 - RNA, 14 nt, Human
caagccuggcaagg

SEQ ID NO: 2432034 - RNA, 11 nt, Human
caagcugggcc

SEQ ID NO: 2432035 - RNA, 18 nt, Human
caagcuggaagcacaugu

SEQ ID NO: 2432036 - RNA, 22 nt, Human
caagcgauucuucugcuucagc

SEQ ID NO: 2432037 - RNA, 20 nt, Human
caagcgauucuucugcuuca

SEQ ID NO: 2432038 - RNA, 19 nt, Human
caagcgauucuucugcuuc

SEQ ID NO: 2432039 - RNA, 13 nt, Human
caagccugcaacu

SEQ ID NO: 2432040 - RNA, 23 nt, Human
caagccugcacaauaaaaauguu

SEQ ID NO: 2432041 - RNA, 22 nt, Human
caagccugcagucaucuugacc

SEQ ID NO: 2432042 - RNA, 14 nt, Human
caagccugccuagg

SEQ ID NO: 2432043 - RNA, 18 nt, Human
caagccguggcuucccgc

SEQ ID NO: 2432044 - RNA, 21 nt, Human
caagccugaccacgcuuucua

SEQ ID NO: 2432045 - RNA, 18 nt, Human
caagcaggacauggacaa

SEQ ID NO: 2432046 - RNA, 12 nt, Human
caagcagggagg

SEQ ID NO: 2432047 - RNA, 16 nt, Human
caagcaggaaguucaa

SEQ ID NO: 2432048 - RNA, 17 nt, Human
caagcaggaagcucaga

SEQ ID NO: 2432049 - RNA, 21 nt, Human
caagcaggaagcucagacugg

SEQ ID NO: 2432050 - RNA, 14 nt, Human
caagcaggacaugg

SEQ ID NO: 2432051 - RNA, 15 nt, Human
caagcaggaagcuca

SEQ ID NO: 2432052 - RNA, 16 nt, Human
caagcaggaagcucag

SEQ ID NO: 2432053 - RNA, 14 nt, Human
caagcaggaagcuc

SEQ ID NO: 2432054 - RNA, 16 nt, Human
caagccagaggcuggg

SEQ ID NO: 2432055 - RNA, 15 nt, Human
caagccagaggcugg

SEQ ID NO: 2432056 - RNA, 13 nt, Human
caagccagaggcu

SEQ ID NO: 2432057 - RNA, 22 nt, Human
caagccaccaacauacucccau

SEQ ID NO: 2432058 - RNA, 15 nt, Human
caagcagggcucugc

SEQ ID NO: 2432059 - RNA, 13 nt, Human
caagcagggagga

SEQ ID NO: 2432060 - RNA, 21 nt, Human
caagccagauuuuccugaaaa

SEQ ID NO: 2432061 - RNA, 17 nt, Human
caagccguggcuucccg

SEQ ID NO: 2432062 - RNA, 22 nt, Human
caagccagcgggaauggcagcu

SEQ ID NO: 2432063 - RNA, 17 nt, Human
caaauuguaagcaugca

SEQ ID NO: 2432064 - RNA, 18 nt, Human
caaauuauuuguguaaua

SEQ ID NO: 2432065 - RNA, 17 nt, Human
caaauuauuuguguaau

SEQ ID NO: 2432066 - RNA, 20 nt, Human
caaauuauuuguguaauaga

SEQ ID NO: 2432067 - RNA, 16 nt, Human
caaauuauuuguguaa

SEQ ID NO: 2432068 - RNA, 15 nt, Human
caaauuauuugugua

SEQ ID NO: 2432069 - RNA, 14 nt, Human
caaauuauuugugu

SEQ ID NO: 2432070 - RNA, 12 nt, Human
caaauuauuugu

SEQ ID NO: 2432071 - RNA, 17 nt, Human
caaauuauuaaugaaaa

SEQ ID NO: 2432072 - RNA, 15 nt, Human
caaauuauuaaugaa

SEQ ID NO: 2432073 - RNA, 18 nt, Human
caaauguccuccagaagc

SEQ ID NO: 2432074 - RNA, 19 nt, Human
caaauguccuccagaagcc

SEQ ID NO: 2432075 - RNA, 23 nt, Human
caaaugguuuaacuucugccugu

SEQ ID NO: 2432076 - RNA, 18 nt, Human
caaauguaauugaauaaa

SEQ ID NO: 2432077 - RNA, 18 nt, Human
caaaugucaucagaacuu

SEQ ID NO: 2432078 - RNA, 17 nt, Human
caaaugucaucagaacu

SEQ ID NO: 2432079 - RNA, 20 nt, Human
caaaugucagauacaaugua

SEQ ID NO: 2432080 - RNA, 19 nt, Human
caaaugucagauacaaugu

SEQ ID NO: 2432081 - RNA, 16 nt, Human
caaaugucagauacaa

SEQ ID NO: 2432082 - RNA, 21 nt, Human
caaauguaauugaauaaaguu

SEQ ID NO: 2432083 - RNA, 12 nt, Human
caaauuucuaaa

SEQ ID NO: 2432084 - RNA, 14 nt, Human
caaauuucuaaauc

SEQ ID NO: 2432085 - RNA, 11 nt, Human
caaauuucuaa

SEQ ID NO: 2432086 - RNA, 21 nt, Human
caaauuguaagcaugcacaaa

SEQ ID NO: 2432087 - RNA, 15 nt, Human
caaauugugugaaag

SEQ ID NO: 2432088 - RNA, 22 nt, Human
caaauuguaucuagugcagcug

SEQ ID NO: 2432089 - RNA, 18 nt, Human
caaauuguaucuagugca

SEQ ID NO: 2432090 - RNA, 19 nt, Human
caaauuguaucuagugcag

SEQ ID NO: 2432091 - RNA, 19 nt, Human
caaauaugcaaagcacuga

SEQ ID NO: 2432092 - RNA, 21 nt, Human
caaauaugcaaagcacugacu

SEQ ID NO: 2432093 - RNA, 17 nt, Human
caaauauguccuggggu

SEQ ID NO: 2432094 - RNA, 15 nt, Human
caaauauguccuggg

SEQ ID NO: 2432095 - RNA, 14 nt, Human
caaauauguccugg

SEQ ID NO: 2432096 - RNA, 13 nt, Human
caaauauguccug

SEQ ID NO: 2432097 - RNA, 19 nt, Human
caaauauuagaugugauuu

SEQ ID NO: 2432098 - RNA, 17 nt, Human
caaauauuagaugugau

SEQ ID NO: 2432099 - RNA, 16 nt, Human
caaauauuagauguga

SEQ ID NO: 2432100 - RNA, 15 nt, Human
caaauauuagaugug

SEQ ID NO: 2432101 - RNA, 23 nt, Human
caaauauuagaugugauuuaaua

SEQ ID NO: 2432102 - RNA, 20 nt, Human
caaauauuagaugugauuua

SEQ ID NO: 2432103 - RNA, 14 nt, Human
caaauggggccaga

SEQ ID NO: 2432104 - RNA, 15 nt, Human
caaauggggccagau

SEQ ID NO: 2432105 - RNA, 16 nt, Human
caaauggggccagauc

SEQ ID NO: 2432106 - RNA, 17 nt, Human
caaauggggccagaucc

SEQ ID NO: 2432107 - RNA, 18 nt, Human
caaauggggccagaucca

SEQ ID NO: 2432108 - RNA, 19 nt, Human
caaauggggccagauccag

SEQ ID NO: 2432109 - RNA, 20 nt, Human
caaauggggccagauccagc

SEQ ID NO: 2432110 - RNA, 23 nt, Human
caaauggggccagauccagccug

SEQ ID NO: 2432111 - RNA, 13 nt, Human
caaaugguaggca

SEQ ID NO: 2432112 - RNA, 15 nt, Human
caaaugguaggcauu

SEQ ID NO: 2432113 - RNA, 20 nt, Human
caaaugguaggcauuuccua

SEQ ID NO: 2432114 - RNA, 19 nt, Human
caaaggguaucaggugcug

SEQ ID NO: 2432115 - RNA, 19 nt, Human
caaagugcugggauuacag

SEQ ID NO: 2432116 - RNA, 23 nt, Human
caaagugcugggauuacaggugu

SEQ ID NO: 2432117 - RNA, 20 nt, Human
caaagugcugggauuacagg

SEQ ID NO: 2432118 - RNA, 13 nt, Human
caaaggcugggac

SEQ ID NO: 2432119 - RNA, 12 nt, Human
caaaggcuggga

SEQ ID NO: 2432120 - RNA, 22 nt, Human
caaagggggaggcuaaagccca

SEQ ID NO: 2432121 - RNA, 16 nt, Human
caaauacucaugugua

SEQ ID NO: 2432122 - RNA, 15 nt, Human
caaauacucaugugu

SEQ ID NO: 2432123 - RNA, 14 nt, Human
caaauacucaugug

SEQ ID NO: 2432124 - RNA, 18 nt, Human
caaauacucauguguaug

SEQ ID NO: 2432125 - RNA, 17 nt, Human
caaauacucauguguau

SEQ ID NO: 2432126 - RNA, 14 nt, Human
caaauacucuuagg

SEQ ID NO: 2432127 - RNA, 17 nt, Human
caaagccuugugucuac

SEQ ID NO: 2432128 - RNA, 18 nt, Human
caaagccuuaucaagugu

SEQ ID NO: 2432129 - RNA, 11 nt, Human
caaagccuuau

SEQ ID NO: 2432130 - RNA, 14 nt, Human
caaagcgaauuuua

SEQ ID NO: 2432131 - RNA, 19 nt, Human
caaagcgaauuuuaaaaga

SEQ ID NO: 2432132 - RNA, 17 nt, Human
caaagccuccuccagcc

SEQ ID NO: 2432133 - RNA, 18 nt, Human
caaagccuccuccagccg

SEQ ID NO: 2432134 - RNA, 20 nt, Human
caaagccagcguccuccucu

SEQ ID NO: 2432135 - RNA, 21 nt, Human
caaagccagcguccuccucug

SEQ ID NO: 2432136 - RNA, 23 nt, Human
caaagccagcguccuccucugug

SEQ ID NO: 2432137 - RNA, 22 nt, Human
caaagccagcguccuccucugu

SEQ ID NO: 2432138 - RNA, 18 nt, Human
caaagcccuuccaugucg

SEQ ID NO: 2432139 - RNA, 22 nt, Human
caaagccaacagucaaaacaga

SEQ ID NO: 2432140 - RNA, 22 nt, Human
caaagccaaagcuaggccuggc

SEQ ID NO: 2432141 - RNA, 12 nt, Human
caaagccagaac

SEQ ID NO: 2432142 - RNA, 11 nt, Human
caaagccagaa

SEQ ID NO: 2432143 - RNA, 13 nt, Human
caaagccagaagc

SEQ ID NO: 2432144 - RNA, 14 nt, Human
caaagccagaagcu

SEQ ID NO: 2432145 - RNA, 16 nt, Human
caaagccagaagcuga

SEQ ID NO: 2432146 - RNA, 18 nt, Human
caaagccagaagcugagc

SEQ ID NO: 2432147 - RNA, 14 nt, Human
caaagccagacagc

SEQ ID NO: 2432148 - RNA, 15 nt, Human
caaagccagacagca

SEQ ID NO: 2432149 - RNA, 14 nt, Human
caaacucagccuca

SEQ ID NO: 2432150 - RNA, 19 nt, Human
caaacucacugcucaagaa

SEQ ID NO: 2432151 - RNA, 18 nt, Human
caaacucacugcucaaga

SEQ ID NO: 2432152 - RNA, 16 nt, Human
caaacuggggccucca

SEQ ID NO: 2432153 - RNA, 19 nt, Human
caaacuggggccuccagaa

SEQ ID NO: 2432154 - RNA, 12 nt, Human
caaacuguaaau

SEQ ID NO: 2432155 - RNA, 17 nt, Human
caaacuggggccucccu

SEQ ID NO: 2432156 - RNA, 21 nt, Human
caaacuggggccuccagaacu

SEQ ID NO: 2432157 - RNA, 21 nt, Human
caaacuguaaauaaaaagaaa

SEQ ID NO: 2432158 - RNA, 14 nt, Human
caaacuguaaauaa

SEQ ID NO: 2432159 - RNA, 20 nt, Human
caaacuguaaauaaaaagaa

SEQ ID NO: 2432160 - RNA, 13 nt, Human
caaacuguugauu

SEQ ID NO: 2432161 - RNA, 16 nt, Human
caaacuacauguaauc

SEQ ID NO: 2432162 - RNA, 20 nt, Human
caaacuaagcccccgcugua

SEQ ID NO: 2432163 - RNA, 19 nt, Human
caaacuaagcccccgcugu

SEQ ID NO: 2432164 - RNA, 13 nt, Human
caaacuagggcca

SEQ ID NO: 2432165 - RNA, 18 nt, Human
caaacgcugccugcccac

SEQ ID NO: 2432166 - RNA, 13 nt, Human
caaacuaagcccc

SEQ ID NO: 2432167 - RNA, 14 nt, Human
caaacguauguaaa

SEQ ID NO: 2432168 - RNA, 17 nt, Human
caaacucaccugccccu

SEQ ID NO: 2432169 - RNA, 18 nt, Human
caaacuauuucuuauaua

SEQ ID NO: 2432170 - RNA, 14 nt, Human
caaacuauuucuua

SEQ ID NO: 2432171 - RNA, 19 nt, Human
caaacuagggccaagccca

SEQ ID NO: 2432172 - RNA, 20 nt, Human
caaagcgaauuuuaaaagau

SEQ ID NO: 2432173 - RNA, 19 nt, Human
caaagcuaggccuggccag

SEQ ID NO: 2432174 - RNA, 14 nt, Human
caaagcuaggccug

SEQ ID NO: 2432175 - RNA, 13 nt, Human
caaagcuaggccu

SEQ ID NO: 2432176 - RNA, 13 nt, Human
caaaggaagcaca

SEQ ID NO: 2432177 - RNA, 12 nt, Human
caaaggaagcac

SEQ ID NO: 2432178 - RNA, 19 nt, Human
caaagcugaugacaacuuc

SEQ ID NO: 2432179 - RNA, 23 nt, Human
caaagccuugugucuacagagaa

SEQ ID NO: 2432180 - RNA, 21 nt, Human
caaagccuugugucuacagag

SEQ ID NO: 2432181 - RNA, 21 nt, Human
caaagcuaggguggcccuugc

SEQ ID NO: 2432182 - RNA, 22 nt, Human
caaagcuaggguggcccuugca

SEQ ID NO: 2432183 - RNA, 23 nt, Human
caaagcucuauuaagauuuccaa

SEQ ID NO: 2432184 - RNA, 14 nt, Human
caaaggaagcacau

SEQ ID NO: 2432185 - RNA, 17 nt, Human
caaaggaagguggaugg

SEQ ID NO: 2432186 - RNA, 21 nt, Human
caaaggaaggacccugaggcc

SEQ ID NO: 2432187 - RNA, 20 nt, Human
caaaggcacagugaaggcug

SEQ ID NO: 2432188 - RNA, 22 nt, Human
caaaggaaucuccaguuuucag

SEQ ID NO: 2432189 - RNA, 19 nt, Human
caaaggaaucuccaguuuu

SEQ ID NO: 2432190 - RNA, 16 nt, Human
caaaggaagucuagga

SEQ ID NO: 2432191 - RNA, 18 nt, Human
caaaggguaucaggugcu

SEQ ID NO: 2432192 - RNA, 16 nt, Human
caaaggguaucaggug

SEQ ID NO: 2432193 - RNA, 13 nt, Human
caaaggcccccua

SEQ ID NO: 2432194 - RNA, 17 nt, Human
caaaggccccagcaucu

SEQ ID NO: 2432195 - RNA, 11 nt, Human
caaaggcuggg

SEQ ID NO: 2432196 - RNA, 23 nt, Human
caaaggcugagaacacugugaaa

SEQ ID NO: 2432197 - RNA, 14 nt, Human
caaaggcugagaac

SEQ ID NO: 2432198 - RNA, 23 nt, Human
caaaggcgcagugcuucucuaca

SEQ ID NO: 2432199 - RNA, 23 nt, Human
caaaggccauggagagcuggagc

SEQ ID NO: 2432200 - RNA, 21 nt, Human
caaaggccauggagagcugga

SEQ ID NO: 2432201 - RNA, 20 nt, Human
caaaggccauggagagcugg

SEQ ID NO: 2432202 - RNA, 19 nt, Human
caaaggccauggagagcug

SEQ ID NO: 2432203 - RNA, 13 nt, Human
caaaggccaugga

SEQ ID NO: 2432204 - RNA, 15 nt, Human
caaaggccaggguca

SEQ ID NO: 2432205 - RNA, 13 nt, Human
caaaggccagggu

SEQ ID NO: 2432206 - RNA, 12 nt, Human
caaacgcugccu

SEQ ID NO: 2432207 - RNA, 13 nt, Human
caaacgcugccug

SEQ ID NO: 2432208 - RNA, 14 nt, Human
caaacgcugccugc

SEQ ID NO: 2432209 - RNA, 15 nt, Human
caaacgcugccugcc

SEQ ID NO: 2432210 - RNA, 19 nt, Human
caaacguauguaaauguau

SEQ ID NO: 2432211 - RNA, 16 nt, Human
caaacgcugccugccc

SEQ ID NO: 2432212 - RNA, 17 nt, Human
caaacgcugccugccca

SEQ ID NO: 2432213 - RNA, 13 nt, Human
caaaccucuguuc

SEQ ID NO: 2432214 - RNA, 14 nt, Human
caaaccucuguuca

SEQ ID NO: 2432215 - RNA, 15 nt, Human
caaaccucuguucag

SEQ ID NO: 2432216 - RNA, 19 nt, Human
caaaccucuguucagugua

SEQ ID NO: 2432217 - RNA, 23 nt, Human
caaacgcuaaagagcccuugccu

SEQ ID NO: 2432218 - RNA, 22 nt, Human
caaacgcuaaagagcccuugcc

SEQ ID NO: 2432219 - RNA, 21 nt, Human
caaacgcuaaagagcccuugc

SEQ ID NO: 2432220 - RNA, 13 nt, Human
caaacgcuaaaga

SEQ ID NO: 2432221 - RNA, 14 nt, Human
caaacgccuccccu

SEQ ID NO: 2432222 - RNA, 17 nt, Human
caaacgccuccccugcc

SEQ ID NO: 2432223 - RNA, 20 nt, Human
caaacccuucagugccaaaa

SEQ ID NO: 2432224 - RNA, 14 nt, Human
caaacccuucagug

SEQ ID NO: 2432225 - RNA, 21 nt, Human
caaaccuccaaaacuccugcc

SEQ ID NO: 2432226 - RNA, 11 nt, Human
caaaccucugu

SEQ ID NO: 2432227 - RNA, 12 nt, Human
caaaccucuguu

SEQ ID NO: 2432228 - RNA, 20 nt, Human
caaaccuagccccuuagccc

SEQ ID NO: 2432229 - RNA, 15 nt, Human
caaaccuccucuucu

SEQ ID NO: 2432230 - RNA, 23 nt, Human
caaaccgccagcgaacuugacaa

SEQ ID NO: 2432231 - RNA, 21 nt, Human
caaaccgccagcgaacuugac

SEQ ID NO: 2432232 - RNA, 17 nt, Human
caaaccgccagcgaacu

SEQ ID NO: 2432233 - RNA, 13 nt, Human
caaacacauuaag

SEQ ID NO: 2432234 - RNA, 22 nt, Human
caaaauuuuuucucuaggaaau

SEQ ID NO: 2432235 - RNA, 21 nt, Human
caaaauuuuuucucuaggaaa

SEQ ID NO: 2432236 - RNA, 16 nt, Human
caaaauuuuuucucua

SEQ ID NO: 2432237 - RNA, 17 nt, Human
caaaauuuaguuuuugu

SEQ ID NO: 2432238 - RNA, 23 nt, Human
caaaauuguuuugagcuuuccau

SEQ ID NO: 2432239 - RNA, 22 nt, Human
caaaauuguuuugagcuuucca

SEQ ID NO: 2432240 - RNA, 20 nt, Human
caaaauuguuuugagcuuuc

SEQ ID NO: 2432241 - RNA, 22 nt, Human
caaaauugcaaaucuugaaauu

SEQ ID NO: 2432242 - RNA, 23 nt, Human
caaaauugggaaaggaguagaaa

SEQ ID NO: 2432243 - RNA, 22 nt, Human
caaacaauggaaacugaaugcu

SEQ ID NO: 2432244 - RNA, 21 nt, Human
caaacaauggaaacugaaugc

SEQ ID NO: 2432245 - RNA, 20 nt, Human
caaacaauggaaacugaaug

SEQ ID NO: 2432246 - RNA, 19 nt, Human
caaacaauggaaacugaau

SEQ ID NO: 2432247 - RNA, 15 nt, Human
caaacacaaaugcag

SEQ ID NO: 2432248 - RNA, 14 nt, Human
caaacacaaaugca

SEQ ID NO: 2432249 - RNA, 21 nt, Human
caaaauuuaguuuuuguucuu

SEQ ID NO: 2432250 - RNA, 20 nt, Human
caaaauuuaguuuuuguucu

SEQ ID NO: 2432251 - RNA, 24 nt, Human
caaacaauaguaauucucaggcca

SEQ ID NO: 2432252 - RNA, 17 nt, Human
caaacaauggaaacuga

SEQ ID NO: 2432253 - RNA, 15 nt, Human
caaacacauacagga

SEQ ID NO: 2432254 - RNA, 21 nt, Human
caaacacaguuacacuugugc

SEQ ID NO: 2432255 - RNA, 23 nt, Human
caaacacauuaagccuuccacac

SEQ ID NO: 2432256 - RNA, 16 nt, Human
caaaauugauguguuu

SEQ ID NO: 2432257 - RNA, 15 nt, Human
caaaauugauguguu

SEQ ID NO: 2432258 - RNA, 23 nt, Human
caaaauucgaccugauuuacagu

SEQ ID NO: 2432259 - RNA, 21 nt, Human
caaaauucgaccugauuuaca

SEQ ID NO: 2432260 - RNA, 13 nt, Human
caaaauucccagg

SEQ ID NO: 2432261 - RNA, 11 nt, Human
caaaauuccca

SEQ ID NO: 2432262 - RNA, 19 nt, Human
caaaauugacauugcuuua

SEQ ID NO: 2432263 - RNA, 17 nt, Human
caaaauugacauugcuu

SEQ ID NO: 2432264 - RNA, 13 nt, Human
caaaauugacauu

SEQ ID NO: 2432265 - RNA, 22 nt, Human
caaaauugauguguuuauuuau

SEQ ID NO: 2432266 - RNA, 16 nt, Human
caaaauugcaaaucuu

SEQ ID NO: 2432267 - RNA, 17 nt, Human
caaaauugcaaaucuug

SEQ ID NO: 2432268 - RNA, 16 nt, Human
caaaauuguuacaaau

SEQ ID NO: 2432269 - RNA, 17 nt, Human
caaaauguuggucauuu

SEQ ID NO: 2432270 - RNA, 18 nt, Human
caaaauguuggucauuuu

SEQ ID NO: 2432271 - RNA, 21 nt, Human
caaaauguuggucauuuuaug

SEQ ID NO: 2432272 - RNA, 20 nt, Human
caaaauuaccaaaaaucuug

SEQ ID NO: 2432273 - RNA, 15 nt, Human
caaaauuauuucaga

SEQ ID NO: 2432274 - RNA, 17 nt, Human
caaaauuauuucagaaa

SEQ ID NO: 2432275 - RNA, 16 nt, Human
caaaauuauuucagaa

SEQ ID NO: 2432276 - RNA, 12 nt, Human
caaaauaaaacu

SEQ ID NO: 2432277 - RNA, 23 nt, Human
caaaauaaaaagugacacagcag

SEQ ID NO: 2432278 - RNA, 22 nt, Human
caaaauaaaaagugacacagca

SEQ ID NO: 2432279 - RNA, 14 nt, Human
caaaauaaaacuuu

SEQ ID NO: 2432280 - RNA, 20 nt, Human
caaaaugauggacccaaugc

SEQ ID NO: 2432281 - RNA, 22 nt, Human
caaaaugaggaauguauauguu

SEQ ID NO: 2432282 - RNA, 18 nt, Human
caaaaugcucuagugccu

SEQ ID NO: 2432283 - RNA, 18 nt, Human
caaaaugcuuuuuauuuc

SEQ ID NO: 2432284 - RNA, 20 nt, Human
caaaaugcuuuuuauuucug

SEQ ID NO: 2432285 - RNA, 23 nt, Human
caaaaugcuuuuuauuucugcau

SEQ ID NO: 2432286 - RNA, 23 nt, Human
caaaauguaggcuuaguuugugu

SEQ ID NO: 2432287 - RNA, 22 nt, Human
caaaaugucuguagcuccucaa

SEQ ID NO: 2432288 - RNA, 13 nt, Human
caaaaugucugua

SEQ ID NO: 2432289 - RNA, 15 nt, Human
caaaauguaggguua

SEQ ID NO: 2432290 - RNA, 19 nt, Human
caaaaaucucaauauuuca

SEQ ID NO: 2432291 - RNA, 13 nt, Human
caaaaagcuuccc

SEQ ID NO: 2432292 - RNA, 14 nt, Human
caaaaagcuucccc

SEQ ID NO: 2432293 - RNA, 15 nt, Human
caaaaaguuuccaua

SEQ ID NO: 2432294 - RNA, 12 nt, Human
caaaaaguguuu

SEQ ID NO: 2432295 - RNA, 11 nt, Human
caaaaaguguu

SEQ ID NO: 2432296 - RNA, 20 nt, Human
caaaaagggaaacuauuguc

SEQ ID NO: 2432297 - RNA, 23 nt, Human
caaaaauauaaaauaugaagaca

SEQ ID NO: 2432298 - RNA, 12 nt, Human
caaaaauauaaa

SEQ ID NO: 2432299 - RNA, 15 nt, Human
caaaaauauaacuua

SEQ ID NO: 2432300 - RNA, 14 nt, Human
caaaaauauuuaua

SEQ ID NO: 2432301 - RNA, 22 nt, Human
caaaaauauuuauaaaacuucu

SEQ ID NO: 2432302 - RNA, 17 nt, Human
caaaaaguguuuauuuu

SEQ ID NO: 2432303 - RNA, 12 nt, Human
caaaaauaaaua

SEQ ID NO: 2432304 - RNA, 11 nt, Human
caaaaauauaa

SEQ ID NO: 2432305 - RNA, 17 nt, Human
caaaaaugaacugaagu

SEQ ID NO: 2432306 - RNA, 19 nt, Human
caaaaaugaaagcaugucu

SEQ ID NO: 2432307 - RNA, 17 nt, Human
caaaaauuagccgggca

SEQ ID NO: 2432308 - RNA, 15 nt, Human
caaaaauuagccggg

SEQ ID NO: 2432309 - RNA, 17 nt, Human
caaaaauuagccgggcg

SEQ ID NO: 2432310 - RNA, 20 nt, Human
caaaaauuagccgggcgugg

SEQ ID NO: 2432311 - RNA, 11 nt, Human
caaaaauuagg

SEQ ID NO: 2432312 - RNA, 16 nt, Human
caaaaauuagguauuu

SEQ ID NO: 2432313 - RNA, 18 nt, Human
caaaaauuagguauuuug

SEQ ID NO: 2432314 - RNA, 16 nt, Human
caaaaauucucaguuc

SEQ ID NO: 2432315 - RNA, 19 nt, Human
caaaaauucaacucagacu

SEQ ID NO: 2432316 - RNA, 17 nt, Human
caaaacaaaaauuaggu

SEQ ID NO: 2432317 - RNA, 19 nt, Human
caaaaauuugcuucacuca

SEQ ID NO: 2432318 - RNA, 18 nt, Human
caaaacaaaaauuaggua

SEQ ID NO: 2432319 - RNA, 22 nt, Human
caaaacaaaaauuagguauuuu

SEQ ID NO: 2432320 - RNA, 23 nt, Human
caaaacaaaaauuagguauuuug

SEQ ID NO: 2432321 - RNA, 21 nt, Human
caaaacucuccucugcugcug

SEQ ID NO: 2432322 - RNA, 20 nt, Human
caaaacucuccucugcugcu

SEQ ID NO: 2432323 - RNA, 22 nt, Human
caaaacucuccucugcugcugg

SEQ ID NO: 2432324 - RNA, 14 nt, Human
caaaacugugcaga

SEQ ID NO: 2432325 - RNA, 22 nt, Human
caaaacugccucaggaggcagg

SEQ ID NO: 2432326 - RNA, 21 nt, Human
caaaauaaaaagugacacagc

SEQ ID NO: 2432327 - RNA, 19 nt, Human
caaaauaaaaagugacaca

SEQ ID NO: 2432328 - RNA, 19 nt, Human
caaaagaacaagaauuucu

SEQ ID NO: 2432329 - RNA, 17 nt, Human
caaaauaaaaaugaggu

SEQ ID NO: 2432330 - RNA, 23 nt, Human
caaaacuucagacauagaauuaa

SEQ ID NO: 2432331 - RNA, 13 nt, Human
caaaacuuaacau

SEQ ID NO: 2432332 - RNA, 21 nt, Human
caaaagaaaaaaaaaagcacc

SEQ ID NO: 2432333 - RNA, 19 nt, Human
caaaaccccacuacacagu

SEQ ID NO: 2432334 - RNA, 18 nt, Human
caaaaccugauguuaaaa

SEQ ID NO: 2432335 - RNA, 21 nt, Human
caaaaccugauguuaaaauuc

SEQ ID NO: 2432336 - RNA, 13 nt, Human
caaaacccagacc

SEQ ID NO: 2432337 - RNA, 15 nt, Human
caaaacccagaccug

SEQ ID NO: 2432338 - RNA, 13 nt, Human
caaaacccaccuu

SEQ ID NO: 2432339 - RNA, 16 nt, Human
caaaaccacagcccug

SEQ ID NO: 2432340 - RNA, 18 nt, Human
caaaaccacagcccuguc

SEQ ID NO: 2432341 - RNA, 19 nt, Human
caaaaccacagcccuguca

SEQ ID NO: 2432342 - RNA, 21 nt, Human
caaaaccacagcccugucagu

SEQ ID NO: 2432343 - RNA, 19 nt, Human
caaaacacucggcauuuca

SEQ ID NO: 2432344 - RNA, 21 nt, Human
caaaacaaaugccacacauca

SEQ ID NO: 2432345 - RNA, 20 nt, Human
caaaacaaguuuuucuguca

SEQ ID NO: 2432346 - RNA, 13 nt, Human
caaaaccacagcc

SEQ ID NO: 2432347 - RNA, 22 nt, Human
caaaacaugucuccuauccugg

SEQ ID NO: 2432348 - RNA, 23 nt, Human
caaaacagcguuuaagacuguaa

SEQ ID NO: 2432349 - RNA, 19 nt, Human
caaaacagagaugugauaa

SEQ ID NO: 2432350 - RNA, 18 nt, Human
caaaacagcguuuaagac

SEQ ID NO: 2432351 - RNA, 17 nt, Human
auuuugguuguauucuu

SEQ ID NO: 2432352 - RNA, 16 nt, Human
auuuugguuguauucu

SEQ ID NO: 2432353 - RNA, 15 nt, Human
auuuugguuguauuc

SEQ ID NO: 2432354 - RNA, 14 nt, Human
auuuugguuguauu

SEQ ID NO: 2432355 - RNA, 20 nt, Human
auuuugguuguauucuuuga

SEQ ID NO: 2432356 - RNA, 19 nt, Human
auuuugguuguauucuuug

SEQ ID NO: 2432357 - RNA, 16 nt, Human
auuuugguuuuguucc

SEQ ID NO: 2432358 - RNA, 16 nt, Human
auuuuggugagaaaug

SEQ ID NO: 2432359 - RNA, 21 nt, Human
auuuuggugagaaaugggacu

SEQ ID NO: 2432360 - RNA, 14 nt, Human
auuuuggugagaaa

SEQ ID NO: 2432361 - RNA, 15 nt, Human
auuuuggugagaaau

SEQ ID NO: 2432362 - RNA, 18 nt, Human
auuuugguccaaguugug

SEQ ID NO: 2432363 - RNA, 23 nt, Human
auuuugguuuuguuccccuccuc

SEQ ID NO: 2432364 - RNA, 22 nt, Human
auuuugguuuuguuccccuccu

SEQ ID NO: 2432365 - RNA, 21 nt, Human
auuuugguuuuguuccccucc

SEQ ID NO: 2432366 - RNA, 17 nt, Human
auuuugguuuuguuccc

SEQ ID NO: 2432367 - RNA, 16 nt, Human
caaaaaaugcuugcuu

SEQ ID NO: 2432368 - RNA, 20 nt, Human
auuuugggguuguguuguca

SEQ ID NO: 2432369 - RNA, 15 nt, Human
auuuugggaaucuuu

SEQ ID NO: 2432370 - RNA, 16 nt, Human
auuuugggaaucuuuu

SEQ ID NO: 2432371 - RNA, 21 nt, Human
auuuugguauuacacuguauu

SEQ ID NO: 2432372 - RNA, 20 nt, Human
auuuugguauuacacuguau

SEQ ID NO: 2432373 - RNA, 15 nt, Human
auuuugguacuuuua

SEQ ID NO: 2432374 - RNA, 22 nt, Human
auuuugguaaaauacuucuuga

SEQ ID NO: 2432375 - RNA, 19 nt, Human
auuuuggguuuugggucuu

SEQ ID NO: 2432376 - RNA, 23 nt, Human
auuuugggguacccacugcucug

SEQ ID NO: 2432377 - RNA, 22 nt, Human
auuuugggguacccacugcucu

SEQ ID NO: 2432378 - RNA, 13 nt, Human
auuuuccugaaaa

SEQ ID NO: 2432379 - RNA, 15 nt, Human
auuuuccuugaagcc

SEQ ID NO: 2432380 - RNA, 14 nt, Human
auuuuccuugaagc

SEQ ID NO: 2432381 - RNA, 13 nt, Human
auuuuccuugaag

SEQ ID NO: 2432382 - RNA, 14 nt, Human
auuuuccuuuucaa

SEQ ID NO: 2432383 - RNA, 16 nt, Human
auuuuccuugaagccg

SEQ ID NO: 2432384 - RNA, 22 nt, Human
auuuuccuuuuuuauacacaua

SEQ ID NO: 2432385 - RNA, 21 nt, Human
auuuuccuuuuuuauacacau

SEQ ID NO: 2432386 - RNA, 20 nt, Human
auuuuccuuuuuuauacaca

SEQ ID NO: 2432387 - RNA, 18 nt, Human
auuuuccuuuuuuauaca

SEQ ID NO: 2432388 - RNA, 17 nt, Human
auuuuccuuuuuuauac

SEQ ID NO: 2432389 - RNA, 13 nt, Human
auuuuccuuuuuu

SEQ ID NO: 2432390 - RNA, 22 nt, Human
auuuuggagaguuuccugaaac

SEQ ID NO: 2432391 - RNA, 21 nt, Human
auuuuggagaguuuccugaaa

SEQ ID NO: 2432392 - RNA, 21 nt, Human
auuuugggguacccacugcuc

SEQ ID NO: 2432393 - RNA, 20 nt, Human
auuuuggagaguuuccugaa

SEQ ID NO: 2432394 - RNA, 19 nt, Human
auuuucuagacuuucuguu

SEQ ID NO: 2432395 - RNA, 14 nt, Human
auuuuggagaaauu

SEQ ID NO: 2432396 - RNA, 21 nt, Human
auuuuggagaaauuauuuaau

SEQ ID NO: 2432397 - RNA, 18 nt, Human
auuuucuagacuuucugu

SEQ ID NO: 2432398 - RNA, 16 nt, Human
auuuucuagacuuucu

SEQ ID NO: 2432399 - RNA, 21 nt, Human
auuuucuaccuggucucuccu

SEQ ID NO: 2432400 - RNA, 14 nt, Human
auuuucuacagugg

SEQ ID NO: 2432401 - RNA, 15 nt, Human
caaaaacacagcaag

SEQ ID NO: 2432402 - RNA, 17 nt, Human
caaaaacacagcaaggg

SEQ ID NO: 2432403 - RNA, 20 nt, Human
caaaaacauggccuuugcuu

SEQ ID NO: 2432404 - RNA, 20 nt, Human
caaaaacacaguguuuuugu

SEQ ID NO: 2432405 - RNA, 23 nt, Human
caaaaacacaguguuuuuguaaa

SEQ ID NO: 2432406 - RNA, 22 nt, Human
caaaaacacaguguuuuuguaa

SEQ ID NO: 2432407 - RNA, 13 nt, Human
caaaaacagccuc

SEQ ID NO: 2432408 - RNA, 14 nt, Human
caaaaacagccuca

SEQ ID NO: 2432409 - RNA, 13 nt, Human
caaaaacacagca

SEQ ID NO: 2432410 - RNA, 14 nt, Human
caaaaacacagcaa

SEQ ID NO: 2432411 - RNA, 10 nt, Human
auuuuguaaa

SEQ ID NO: 2432412 - RNA, 21 nt, Human
auuuugguuguauucuuugau

SEQ ID NO: 2432413 - RNA, 17 nt, Human
auuuuguaaacucaaaa

SEQ ID NO: 2432414 - RNA, 18 nt, Human
caaaaaauuagccgggcg

SEQ ID NO: 2432415 - RNA, 16 nt, Human
caaaaaauuagccggg

SEQ ID NO: 2432416 - RNA, 19 nt, Human
caaaaagaacaaaaaaauc

SEQ ID NO: 2432417 - RNA, 14 nt, Human
caaaaagaacaaaa

SEQ ID NO: 2432418 - RNA, 13 nt, Human
caaaaagaacaaa

SEQ ID NO: 2432419 - RNA, 12 nt, Human
caaaaagaacaa

SEQ ID NO: 2432420 - RNA, 15 nt, Human
caaaaagaccagacu

SEQ ID NO: 2432421 - RNA, 14 nt, Human
caaaaagaccagac

SEQ ID NO: 2432422 - RNA, 13 nt, Human
caaaaagaccaga

SEQ ID NO: 2432423 - RNA, 21 nt, Human
caaaaagaacaaaaaaaucug

SEQ ID NO: 2432424 - RNA, 16 nt, Human
caaaaagcaaaaucau

SEQ ID NO: 2432425 - RNA, 15 nt, Human
caaaaagcaaaauca

SEQ ID NO: 2432426 - RNA, 22 nt, Human
caaaaagcucuuacacuacauu

SEQ ID NO: 2432427 - RNA, 13 nt, Human
caaaaaggcagga

SEQ ID NO: 2432428 - RNA, 22 nt, Human
caaaaacagccucacagaagaa

SEQ ID NO: 2432429 - RNA, 15 nt, Human
caaaaacagccucac

SEQ ID NO: 2432430 - RNA, 16 nt, Human
caaaaacagccucaca

SEQ ID NO: 2432431 - RNA, 13 nt, Human
caaaaacuuguua

SEQ ID NO: 2432432 - RNA, 22 nt, Human
caaaaacuguauugaugacagu

SEQ ID NO: 2432433 - RNA, 23 nt, Human
caaaaacuuuggaguccccucac

SEQ ID NO: 2432434 - RNA, 17 nt, Human
caaaaaccucacccgag

SEQ ID NO: 2432435 - RNA, 16 nt, Human
caaaaacuacacauau

SEQ ID NO: 2432436 - RNA, 22 nt, Human
cacauaugcaccuugugucugu

SEQ ID NO: 2432437 - RNA, 21 nt, Human
cacauaugcaccuugugucug

SEQ ID NO: 2432438 - RNA, 20 nt, Human
cacauaugcaccuugugucu

SEQ ID NO: 2432439 - RNA, 19 nt, Human
cacauaugcaccuuguguc

SEQ ID NO: 2432440 - RNA, 13 nt, Human
cacauagcugucu

SEQ ID NO: 2432441 - RNA, 18 nt, Human
cacauaugcaccuugugu

SEQ ID NO: 2432442 - RNA, 16 nt, Human
cacauagcugucuaga

SEQ ID NO: 2432443 - RNA, 13 nt, Human
cacauaugagggg

SEQ ID NO: 2432444 - RNA, 16 nt, Human
cacaguuuucugagaa

SEQ ID NO: 2432445 - RNA, 17 nt, Human
cacaguuuucugagaaa

SEQ ID NO: 2432446 - RNA, 19 nt, Human
cacaguuuucugagaaaga

SEQ ID NO: 2432447 - RNA, 20 nt, Human
cacaguuuucugagaaagac

SEQ ID NO: 2432448 - RNA, 14 nt, Human
cacauaucugucau

SEQ ID NO: 2432449 - RNA, 15 nt, Human
cacauagagaucauc

SEQ ID NO: 2432450 - RNA, 18 nt, Human
cacauagcauguaauggu

SEQ ID NO: 2432451 - RNA, 20 nt, Human
cacauacgcaccacaucucu

SEQ ID NO: 2432452 - RNA, 16 nt, Human
cacauacuugagacug

SEQ ID NO: 2432453 - RNA, 19 nt, Human
cacauacccucuucaugga

SEQ ID NO: 2432454 - RNA, 22 nt, Human
cacauacccucuucauggaugg

SEQ ID NO: 2432455 - RNA, 15 nt, Human
cacauacccuccccc

SEQ ID NO: 2432456 - RNA, 13 nt, Human
cacauacccuccc

SEQ ID NO: 2432457 - RNA, 22 nt, Human
cacaguuccucgcccugggucu

SEQ ID NO: 2432458 - RNA, 22 nt, Human
cacagcuucauuuccugugucu

SEQ ID NO: 2432459 - RNA, 21 nt, Human
cacagcuucauuuccuguguc

SEQ ID NO: 2432460 - RNA, 14 nt, Human
cacagcuggccucc

SEQ ID NO: 2432461 - RNA, 20 nt, Human
cacagcugcuuucuguuguc

SEQ ID NO: 2432462 - RNA, 14 nt, Human
cacagcugcuuucu

SEQ ID NO: 2432463 - RNA, 20 nt, Human
cacagcugcuggagacuccu

SEQ ID NO: 2432464 - RNA, 15 nt, Human
cacagcugggcugug

SEQ ID NO: 2432465 - RNA, 14 nt, Human
cacagcugggcugu

SEQ ID NO: 2432466 - RNA, 17 nt, Human
cacagcuucagccagga

SEQ ID NO: 2432467 - RNA, 14 nt, Human
cacagcuucagcca

SEQ ID NO: 2432468 - RNA, 23 nt, Human
cacagcugggguggggaccucag

SEQ ID NO: 2432469 - RNA, 22 nt, Human
cacagcugggguggggaccuca

SEQ ID NO: 2432470 - RNA, 19 nt, Human
caauuugggagauauauuu

SEQ ID NO: 2432471 - RNA, 18 nt, Human
caauuugggagauauauu

SEQ ID NO: 2432472 - RNA, 19 nt, Human
caauuuguaaaaacagcau

SEQ ID NO: 2432473 - RNA, 15 nt, Human
cacagcugcuggaga

SEQ ID NO: 2432474 - RNA, 14 nt, Human
cacagcugcuggag

SEQ ID NO: 2432475 - RNA, 19 nt, Human
caauuuguuugugcuucua

SEQ ID NO: 2432476 - RNA, 12 nt, Human
cacagcugcugg

SEQ ID NO: 2432477 - RNA, 18 nt, Human
caauuuguuugugcuucu

SEQ ID NO: 2432478 - RNA, 16 nt, Human
caauuuguuugugcuu

SEQ ID NO: 2432479 - RNA, 23 nt, Human
caauuuguaauugcuuacauuuu

SEQ ID NO: 2432480 - RNA, 23 nt, Human
caauuuguaaaaacagcauugcu

SEQ ID NO: 2432481 - RNA, 15 nt, Human
cacaggagcauuugg

SEQ ID NO: 2432482 - RNA, 15 nt, Human
cacagcuuccccucu

SEQ ID NO: 2432483 - RNA, 19 nt, Human
cacagcuucagccaggagc

SEQ ID NO: 2432484 - RNA, 18 nt, Human
cacagcuucagccaggag

SEQ ID NO: 2432485 - RNA, 22 nt, Human
cacagcuucagccaggagcugg

SEQ ID NO: 2432486 - RNA, 14 nt, Human
cacagcuuccccuc

SEQ ID NO: 2432487 - RNA, 19 nt, Human
cacaggagggagggggaag

SEQ ID NO: 2432488 - RNA, 21 nt, Human
cacaggagggagggggaaggc

SEQ ID NO: 2432489 - RNA, 14 nt, Human
cacaggagggaggg

SEQ ID NO: 2432490 - RNA, 22 nt, Human
cacaggaggagaaaucucacuu

SEQ ID NO: 2432491 - RNA, 15 nt, Human
cacaggcagguccag

SEQ ID NO: 2432492 - RNA, 14 nt, Human
cacaggcaggucca

SEQ ID NO: 2432493 - RNA, 18 nt, Human
cacaggagugggaaaaca

SEQ ID NO: 2432494 - RNA, 11 nt, Human
cacaggcaggu

SEQ ID NO: 2432495 - RNA, 22 nt, Human
cacaguccuuaccagcagagca

SEQ ID NO: 2432496 - RNA, 21 nt, Human
cacaguccuuaccagcagagc

SEQ ID NO: 2432497 - RNA, 15 nt, Human
cacaguccuuaccag

SEQ ID NO: 2432498 - RNA, 13 nt, Human
cacaguccuuacc

SEQ ID NO: 2432499 - RNA, 21 nt, Human
cacagugagucgaggacaggg

SEQ ID NO: 2432500 - RNA, 22 nt, Human
cacagugagucgaggacaggga

SEQ ID NO: 2432501 - RNA, 14 nt, Human
cacagugauuuuuu

SEQ ID NO: 2432502 - RNA, 11 nt, Human
cacagugauuu

SEQ ID NO: 2432503 - RNA, 14 nt, Human
cacagugcaucuca

SEQ ID NO: 2432504 - RNA, 19 nt, Human
cacaguucgaccugcggcu

SEQ ID NO: 2432505 - RNA, 18 nt, Human
cacaguucuuugggccag

SEQ ID NO: 2432506 - RNA, 19 nt, Human
cacaguucuuugggccaga

SEQ ID NO: 2432507 - RNA, 20 nt, Human
cacaguucuuugggccagac

SEQ ID NO: 2432508 - RNA, 15 nt, Human
cacaguucucuccuu

SEQ ID NO: 2432509 - RNA, 14 nt, Human
cacaguucucuccu

SEQ ID NO: 2432510 - RNA, 16 nt, Human
cacaguuccucgcccu

SEQ ID NO: 2432511 - RNA, 19 nt, Human
cacaguuccucgcccuggg

SEQ ID NO: 2432512 - RNA, 20 nt, Human
cacaguuccucgcccugggu

SEQ ID NO: 2432513 - RNA, 19 nt, Human
cacagugguggcagggccu

SEQ ID NO: 2432514 - RNA, 17 nt, Human
cacagugguggcagggc

SEQ ID NO: 2432515 - RNA, 23 nt, Human
cacagugguggcagggccuagcu

SEQ ID NO: 2432516 - RNA, 15 nt, Human
cacagugguggcagg

SEQ ID NO: 2432517 - RNA, 19 nt, Human
cacagugggagccagggcu

SEQ ID NO: 2432518 - RNA, 18 nt, Human
cacagugggagccagggc

SEQ ID NO: 2432519 - RNA, 14 nt, Human
cacagugggagcca

SEQ ID NO: 2432520 - RNA, 13 nt, Human
cacagugucuggg

SEQ ID NO: 2432521 - RNA, 20 nt, Human
cacagugucugggcugacug

SEQ ID NO: 2432522 - RNA, 17 nt, Human
cacagugucugggcuga

SEQ ID NO: 2432523 - RNA, 16 nt, Human
cacagugucugggcug

SEQ ID NO: 2432524 - RNA, 14 nt, Human
cacagugucugggc

SEQ ID NO: 2432525 - RNA, 21 nt, Human
cacagugucugggcugacugg

SEQ ID NO: 2432526 - RNA, 18 nt, Human
cacagugucuguaucgga

SEQ ID NO: 2432527 - RNA, 14 nt, Human
cacugugcccuggu

SEQ ID NO: 2432528 - RNA, 21 nt, Human
cacugcacagagcucuccagc

SEQ ID NO: 2432529 - RNA, 19 nt, Human
cacugcacagagcucucca

SEQ ID NO: 2432530 - RNA, 16 nt, Human
cacugcacagagcucu

SEQ ID NO: 2432531 - RNA, 15 nt, Human
cacugcacagagcuc

SEQ ID NO: 2432532 - RNA, 14 nt, Human
cacugcacagagcu

SEQ ID NO: 2432533 - RNA, 13 nt, Human
cacugcacagagc

SEQ ID NO: 2432534 - RNA, 22 nt, Human
cacugcacacaccucagaggcu

SEQ ID NO: 2432535 - RNA, 19 nt, Human
cacugcacacaccucagag

SEQ ID NO: 2432536 - RNA, 18 nt, Human
cacugcacacaccucaga

SEQ ID NO: 2432537 - RNA, 19 nt, Human
cacugcaauccugucuuuc

SEQ ID NO: 2432538 - RNA, 16 nt, Human
cacugcaauccugucu

SEQ ID NO: 2432539 - RNA, 22 nt, Human
cacugcacagugcaucucagcc

SEQ ID NO: 2432540 - RNA, 21 nt, Human
cacugcacagugcaucucagc

SEQ ID NO: 2432541 - RNA, 19 nt, Human
cacugcacagugcaucuca

SEQ ID NO: 2432542 - RNA, 18 nt, Human
cacugcacagugcaucuc

SEQ ID NO: 2432543 - RNA, 20 nt, Human
cacugcaagagccuuggugu

SEQ ID NO: 2432544 - RNA, 17 nt, Human
cacugcaagagccuugg

SEQ ID NO: 2432545 - RNA, 18 nt, Human
cacugcaagagccuuggu

SEQ ID NO: 2432546 - RNA, 19 nt, Human
cacugcaagagccuuggug

SEQ ID NO: 2432547 - RNA, 13 nt, Human
cacugcaagagcc

SEQ ID NO: 2432548 - RNA, 15 nt, Human
cacugcaagagccuu

SEQ ID NO: 2432549 - RNA, 16 nt, Human
cacugcaagagccuug

SEQ ID NO: 2432550 - RNA, 17 nt, Human
cacugcaacuucugccu

SEQ ID NO: 2432551 - RNA, 14 nt, Human
cacugcaaccuucg

SEQ ID NO: 2432552 - RNA, 22 nt, Human
cacugcaaccuucgccaccugg

SEQ ID NO: 2432553 - RNA, 23 nt, Human
cacugcaaccuucgccaccuggg

SEQ ID NO: 2432554 - RNA, 16 nt, Human
cacugcaacuucugcc

SEQ ID NO: 2432555 - RNA, 16 nt, Human
cacugcaaccuccgcc

SEQ ID NO: 2432556 - RNA, 14 nt, Human
cacugcaaccuccg

SEQ ID NO: 2432557 - RNA, 23 nt, Human
cacugcaaccuccgccucuuggg

SEQ ID NO: 2432558 - RNA, 13 nt, Human
cacugcaaccucc

SEQ ID NO: 2432559 - RNA, 16 nt, Human
cacugauuuggagaua

SEQ ID NO: 2432560 - RNA, 14 nt, Human
cacugauuuggaga

SEQ ID NO: 2432561 - RNA, 13 nt, Human
cacugauuucaca

SEQ ID NO: 2432562 - RNA, 22 nt, Human
cacugauauuuuaccucuuauu

SEQ ID NO: 2432563 - RNA, 19 nt, Human
cacugauuucacaacagau

SEQ ID NO: 2432564 - RNA, 18 nt, Human
cacugauuucacaacaga

SEQ ID NO: 2432565 - RNA, 21 nt, Human
cacugauuucacaacagauca

SEQ ID NO: 2432566 - RNA, 24 nt, Human
cacugaugggcaacccccagccug

SEQ ID NO: 2432567 - RNA, 18 nt, Human
cacugaugggcaaccccc

SEQ ID NO: 2432568 - RNA, 14 nt, Human
cacugaugggcaac

SEQ ID NO: 2432569 - RNA, 19 nt, Human
cacugaugcugccccucau

SEQ ID NO: 2432570 - RNA, 15 nt, Human
cacugaugcuuagau

SEQ ID NO: 2432571 - RNA, 16 nt, Human
cacugaugcuuagaug

SEQ ID NO: 2432572 - RNA, 19 nt, Human
cacugauggacaaggaggu

SEQ ID NO: 2432573 - RNA, 14 nt, Human
cacugauccagccc

SEQ ID NO: 2432574 - RNA, 15 nt, Human
cacugauccagcccu

SEQ ID NO: 2432575 - RNA, 12 nt, Human
cacugaugcugc

SEQ ID NO: 2432576 - RNA, 17 nt, Human
cacugaugcugccccuc

SEQ ID NO: 2432577 - RNA, 16 nt, Human
cacugauccagcccug

SEQ ID NO: 2432578 - RNA, 20 nt, Human
cacugauauaucaugaguga

SEQ ID NO: 2432579 - RNA, 19 nt, Human
cacugauauuuuaccucuu

SEQ ID NO: 2432580 - RNA, 14 nt, Human
cacugagggccaca

SEQ ID NO: 2432581 - RNA, 13 nt, Human
cacugagggccac

SEQ ID NO: 2432582 - RNA, 18 nt, Human
cacugagggccacacuau

SEQ ID NO: 2432583 - RNA, 14 nt, Human
cacugagggcaguc

SEQ ID NO: 2432584 - RNA, 10 nt, Human
cacugagggc

SEQ ID NO: 2432585 - RNA, 18 nt, Human
cacugaggcagggaaguc

SEQ ID NO: 2432586 - RNA, 13 nt, Human
cacugagcagagu

SEQ ID NO: 2432587 - RNA, 15 nt, Human
cacugagcugucaug

SEQ ID NO: 2432588 - RNA, 17 nt, Human
cacugagcuccaugugc

SEQ ID NO: 2432589 - RNA, 12 nt, Human
cacugagcucca

SEQ ID NO: 2432590 - RNA, 16 nt, Human
cacugagcccccccaa

SEQ ID NO: 2432591 - RNA, 14 nt, Human
cacugagccccccc

SEQ ID NO: 2432592 - RNA, 13 nt, Human
cacugagcccccc

SEQ ID NO: 2432593 - RNA, 11 nt, Human
cacugagcccc

SEQ ID NO: 2432594 - RNA, 17 nt, Human
cacugaggaagaacggg

SEQ ID NO: 2432595 - RNA, 15 nt, Human
cacugaggaagaacg

SEQ ID NO: 2432596 - RNA, 14 nt, Human
cacugaggaagaac

SEQ ID NO: 2432597 - RNA, 13 nt, Human
cacugaggaagaa

SEQ ID NO: 2432598 - RNA, 13 nt, Human
cacugaggcaggg

SEQ ID NO: 2432599 - RNA, 14 nt, Human
cacugaggcaggga

SEQ ID NO: 2432600 - RNA, 16 nt, Human
cacugaggcagggaag

SEQ ID NO: 2432601 - RNA, 17 nt, Human
cacugaggcagggaagu

SEQ ID NO: 2432602 - RNA, 19 nt, Human
cacugaggcagggaagucc

SEQ ID NO: 2432603 - RNA, 20 nt, Human
cacugagaauguaagaacua

SEQ ID NO: 2432604 - RNA, 19 nt, Human
cacugagaauguaagaacu

SEQ ID NO: 2432605 - RNA, 19 nt, Human
cacugagaagauugugaau

SEQ ID NO: 2432606 - RNA, 21 nt, Human
cacugagaauguaagaacuac

SEQ ID NO: 2432607 - RNA, 23 nt, Human
cacugagacagcccgggcucugc

SEQ ID NO: 2432608 - RNA, 18 nt, Human
cacugagauaccagcgag

SEQ ID NO: 2432609 - RNA, 19 nt, Human
cacugagauaccagcgagg

SEQ ID NO: 2432610 - RNA, 23 nt, Human
cacugagauaccagcgaggaggc

SEQ ID NO: 2432611 - RNA, 14 nt, Human
cacugagcaaagca

SEQ ID NO: 2432612 - RNA, 22 nt, Human
cacugagacagcccgggcucug

SEQ ID NO: 2432613 - RNA, 19 nt, Human
cacugagacagcccgggcu

SEQ ID NO: 2432614 - RNA, 17 nt, Human
cacugagacagcccggg

SEQ ID NO: 2432615 - RNA, 14 nt, Human
cacugagacagccc

SEQ ID NO: 2432616 - RNA, 13 nt, Human
cacugagacagcc

SEQ ID NO: 2432617 - RNA, 12 nt, Human
cacugagacagc

SEQ ID NO: 2432618 - RNA, 21 nt, Human
cacugacuucuaaguaaaacc

SEQ ID NO: 2432619 - RNA, 18 nt, Human
cacugagaauguaagaac

SEQ ID NO: 2432620 - RNA, 16 nt, Human
cacugagaauguaaga

SEQ ID NO: 2432621 - RNA, 17 nt, Human
cacugagaagauuguga

SEQ ID NO: 2432622 - RNA, 14 nt, Human
cacugacuucuaag

SEQ ID NO: 2432623 - RNA, 15 nt, Human
cacugacuucuaagu

SEQ ID NO: 2432624 - RNA, 16 nt, Human
cacugacuucuaagua

SEQ ID NO: 2432625 - RNA, 20 nt, Human
cacugacuucuaaguaaaac

SEQ ID NO: 2432626 - RNA, 15 nt, Human
cacugacuacuggcu

SEQ ID NO: 2432627 - RNA, 22 nt, Human
cacugaccugucaugccccccu

SEQ ID NO: 2432628 - RNA, 23 nt, Human
cacugaccugucaugccccccuc

SEQ ID NO: 2432629 - RNA, 19 nt, Human
cacugacuacuggcucuca

SEQ ID NO: 2432630 - RNA, 18 nt, Human
cacugaccugucaugccc

SEQ ID NO: 2432631 - RNA, 23 nt, Human
cacugaccauccacucuacccuc

SEQ ID NO: 2432632 - RNA, 14 nt, Human
cacugaccagaacu

SEQ ID NO: 2432633 - RNA, 15 nt, Human
cacugaccagaacua

SEQ ID NO: 2432634 - RNA, 16 nt, Human
cacugaccauccacuc

SEQ ID NO: 2432635 - RNA, 17 nt, Human
cacugaccauccacucu

SEQ ID NO: 2432636 - RNA, 13 nt, Human
cacugaccagaac

SEQ ID NO: 2432637 - RNA, 20 nt, Human
cacugacagccucccacccc

SEQ ID NO: 2432638 - RNA, 16 nt, Human
cacugacagccuccca

SEQ ID NO: 2432639 - RNA, 17 nt, Human
cacugacagccucccac

SEQ ID NO: 2432640 - RNA, 13 nt, Human
cacugacagccuc

SEQ ID NO: 2432641 - RNA, 14 nt, Human
cacugacagccucc

SEQ ID NO: 2432642 - RNA, 15 nt, Human
cacugacagccuccc

SEQ ID NO: 2432643 - RNA, 23 nt, Human
cacugacauuguuggccaaagcc

SEQ ID NO: 2432644 - RNA, 19 nt, Human
cacucugucgcccagucug

SEQ ID NO: 2432645 - RNA, 16 nt, Human
cacucugucgcccagu

SEQ ID NO: 2432646 - RNA, 15 nt, Human
cacucugucgcccag

SEQ ID NO: 2432647 - RNA, 13 nt, Human
cacucuggccuca

SEQ ID NO: 2432648 - RNA, 16 nt, Human
cacucugggcuccaga

SEQ ID NO: 2432649 - RNA, 17 nt, Human
cacucugggcuccagag

SEQ ID NO: 2432650 - RNA, 19 nt, Human
cacucuggcagcucagaga

SEQ ID NO: 2432651 - RNA, 17 nt, Human
cacucuggcagcucaga

SEQ ID NO: 2432652 - RNA, 16 nt, Human
cacucuggcagcucag

SEQ ID NO: 2432653 - RNA, 15 nt, Human
cacucuggcagcuca

SEQ ID NO: 2432654 - RNA, 21 nt, Human
cacucuggcagcucagagagg

SEQ ID NO: 2432655 - RNA, 20 nt, Human
cacucuggcagcucagagag

SEQ ID NO: 2432656 - RNA, 23 nt, Human
cacucuggcagcucagagagggu

SEQ ID NO: 2432657 - RNA, 19 nt, Human
cacucuggcugguuuggaa

SEQ ID NO: 2432658 - RNA, 12 nt, Human
cacucuggccuc

SEQ ID NO: 2432659 - RNA, 14 nt, Human
cacucugggcucca

SEQ ID NO: 2432660 - RNA, 15 nt, Human
cacucugggcuccag

SEQ ID NO: 2432661 - RNA, 23 nt, Human
cacugcucccugaagccagccuu

SEQ ID NO: 2432662 - RNA, 22 nt, Human
cacugcucccugaagccagccu

SEQ ID NO: 2432663 - RNA, 21 nt, Human
cacugcucccugaagccagcc

SEQ ID NO: 2432664 - RNA, 20 nt, Human
cacugcucccugaagccagc

SEQ ID NO: 2432665 - RNA, 19 nt, Human
cacugcucccugaagccag

SEQ ID NO: 2432666 - RNA, 18 nt, Human
cacugcucccugaagcca

SEQ ID NO: 2432667 - RNA, 17 nt, Human
cacugcucccugaagcc

SEQ ID NO: 2432668 - RNA, 14 nt, Human
cacugcucccugaa

SEQ ID NO: 2432669 - RNA, 22 nt, Human
cacugcucaagaagacauggag

SEQ ID NO: 2432670 - RNA, 19 nt, Human
cacugcucaagaagacaug

SEQ ID NO: 2432671 - RNA, 23 nt, Human
cacugcuaggugggccagccccu

SEQ ID NO: 2432672 - RNA, 21 nt, Human
cacugcuaggcgagugccagg

SEQ ID NO: 2432673 - RNA, 20 nt, Human
cacugcuaggcgagugccag

SEQ ID NO: 2432674 - RNA, 21 nt, Human
cacugcggggcuuggcugaga

SEQ ID NO: 2432675 - RNA, 20 nt, Human
cacugcggggcuuggcugag

SEQ ID NO: 2432676 - RNA, 22 nt, Human
cacugcuaggcgagugccagga

SEQ ID NO: 2432677 - RNA, 16 nt, Human
cacugcuaggugggcc

SEQ ID NO: 2432678 - RNA, 17 nt, Human
cacugcuaggugggcca

SEQ ID NO: 2432679 - RNA, 22 nt, Human
cacugcuaggugggccagcccc

SEQ ID NO: 2432680 - RNA, 17 nt, Human
cacugcugcccagccuc

SEQ ID NO: 2432681 - RNA, 23 nt, Human
cacugcugcuucuccauggccac

SEQ ID NO: 2432682 - RNA, 22 nt, Human
cacugcugcaaggccuuucugu

SEQ ID NO: 2432683 - RNA, 16 nt, Human
cacugcugcugccuuu

SEQ ID NO: 2432684 - RNA, 19 nt, Human
cacugcugcaaggccuuuc

SEQ ID NO: 2432685 - RNA, 18 nt, Human
cacugcugcaaggccuuu

SEQ ID NO: 2432686 - RNA, 17 nt, Human
cacugcugcaaggccuu

SEQ ID NO: 2432687 - RNA, 15 nt, Human
cacugcugcccagcc

SEQ ID NO: 2432688 - RNA, 20 nt, Human
cacugcucugaugaagagga

SEQ ID NO: 2432689 - RNA, 16 nt, Human
cacugcugcaaggccu

SEQ ID NO: 2432690 - RNA, 12 nt, Human
cacugcucuggu

SEQ ID NO: 2432691 - RNA, 23 nt, Human
cacugccuucgcuucuugccucu

SEQ ID NO: 2432692 - RNA, 21 nt, Human
cacugccuucgcuucuugccu

SEQ ID NO: 2432693 - RNA, 19 nt, Human
cacugccuucgcuucuugc

SEQ ID NO: 2432694 - RNA, 18 nt, Human
cacugccuucgcuucuug

SEQ ID NO: 2432695 - RNA, 20 nt, Human
cacugccuucucaacuccaa

SEQ ID NO: 2432696 - RNA, 12 nt, Human
cacugccuuuga

SEQ ID NO: 2432697 - RNA, 19 nt, Human
cacugcggggcuuggcuga

SEQ ID NO: 2432698 - RNA, 22 nt, Human
cacugcggagaaccuugugccu

SEQ ID NO: 2432699 - RNA, 21 nt, Human
cacugcggagaaccuugugcc

SEQ ID NO: 2432700 - RNA, 20 nt, Human
cacugcggagaaccuugugc

SEQ ID NO: 2432701 - RNA, 18 nt, Human
cacugcuaagaauauuug

SEQ ID NO: 2432702 - RNA, 14 nt, Human
cacugccugcccac

SEQ ID NO: 2432703 - RNA, 15 nt, Human
cacugccugcccacc

SEQ ID NO: 2432704 - RNA, 18 nt, Human
cacugccucucccuggcc

SEQ ID NO: 2432705 - RNA, 19 nt, Human
cacugccucucccuggccc

SEQ ID NO: 2432706 - RNA, 22 nt, Human
cacugccugauggaccugucac

SEQ ID NO: 2432707 - RNA, 23 nt, Human
cacugccugcagaggucugugcu

SEQ ID NO: 2432708 - RNA, 22 nt, Human
cacugccugcagaggucugugc

SEQ ID NO: 2432709 - RNA, 13 nt, Human
cacugccugcaga

SEQ ID NO: 2432710 - RNA, 10 nt, Human
cacugccugc

SEQ ID NO: 2432711 - RNA, 22 nt, Human
cacugccuucgauacaccgggc

SEQ ID NO: 2432712 - RNA, 20 nt, Human
cacugccuucgauacaccgg

SEQ ID NO: 2432713 - RNA, 18 nt, Human
cacugcacuauagccuag

SEQ ID NO: 2432714 - RNA, 19 nt, Human
cacugcaccgggccacaga

SEQ ID NO: 2432715 - RNA, 18 nt, Human
cacugcaccgggccacag

SEQ ID NO: 2432716 - RNA, 16 nt, Human
cacugcaccgggccac

SEQ ID NO: 2432717 - RNA, 17 nt, Human
cacugcaccccgucuca

SEQ ID NO: 2432718 - RNA, 22 nt, Human
cacugcacccccuccugcugca

SEQ ID NO: 2432719 - RNA, 21 nt, Human
cacugcacccccuccugcugc

SEQ ID NO: 2432720 - RNA, 20 nt, Human
cacugcacccccuccugcug

SEQ ID NO: 2432721 - RNA, 19 nt, Human
cacugcacccccuccugcu

SEQ ID NO: 2432722 - RNA, 18 nt, Human
cacugcacccccuccugc

SEQ ID NO: 2432723 - RNA, 16 nt, Human
cacugcacccccuccu

SEQ ID NO: 2432724 - RNA, 15 nt, Human
cacugcacccccucc

SEQ ID NO: 2432725 - RNA, 14 nt, Human
cacugcacccccuc

SEQ ID NO: 2432726 - RNA, 13 nt, Human
cacugcacccccu

SEQ ID NO: 2432727 - RNA, 15 nt, Human
cacugcaccaccgag

SEQ ID NO: 2432728 - RNA, 22 nt, Human
cacugcacagagcucuccagcu

SEQ ID NO: 2432729 - RNA, 23 nt, Human
cacugcacagugcaucucagccc

SEQ ID NO: 2432730 - RNA, 15 nt, Human
cacugcaccgggcca

SEQ ID NO: 2432731 - RNA, 14 nt, Human
cacugcaccgggcc

SEQ ID NO: 2432732 - RNA, 18 nt, Human
cacugcccacccccucaa

SEQ ID NO: 2432733 - RNA, 17 nt, Human
cacugcccacccccuca

SEQ ID NO: 2432734 - RNA, 17 nt, Human
cacugcccauggacagg

SEQ ID NO: 2432735 - RNA, 18 nt, Human
cacugcccauggacaggc

SEQ ID NO: 2432736 - RNA, 21 nt, Human
cacugcccccagcucuucucc

SEQ ID NO: 2432737 - RNA, 15 nt, Human
cacugcccgagcugg

SEQ ID NO: 2432738 - RNA, 16 nt, Human
cacugcccgagcuggu

SEQ ID NO: 2432739 - RNA, 17 nt, Human
cacugcccgagcuggug

SEQ ID NO: 2432740 - RNA, 18 nt, Human
cacugcccgagcuggugc

SEQ ID NO: 2432741 - RNA, 19 nt, Human
cacugcccgagcuggugca

SEQ ID NO: 2432742 - RNA, 16 nt, Human
cacugcccacccccuc

SEQ ID NO: 2432743 - RNA, 15 nt, Human
cacugcccacccccu

SEQ ID NO: 2432744 - RNA, 14 nt, Human
cacugcccaccccc

SEQ ID NO: 2432745 - RNA, 21 nt, Human
cacugcccaaagugcuuccaa

SEQ ID NO: 2432746 - RNA, 20 nt, Human
cacugcccaaagugcuucca

SEQ ID NO: 2432747 - RNA, 22 nt, Human
cacugccauggaggcacacagc

SEQ ID NO: 2432748 - RNA, 19 nt, Human
cacugccauggaggcacac

SEQ ID NO: 2432749 - RNA, 17 nt, Human
cacugccauggaggcac

SEQ ID NO: 2432750 - RNA, 15 nt, Human
cacugccucagguuc

SEQ ID NO: 2432751 - RNA, 14 nt, Human
cacugccucagguu

SEQ ID NO: 2432752 - RNA, 13 nt, Human
cacugccucaggu

SEQ ID NO: 2432753 - RNA, 12 nt, Human
cacugccucagg

SEQ ID NO: 2432754 - RNA, 17 nt, Human
cacugccucagguuccu

SEQ ID NO: 2432755 - RNA, 16 nt, Human
cacugccucagguucc

SEQ ID NO: 2432756 - RNA, 21 nt, Human
cacugccucgggaaccucacu

SEQ ID NO: 2432757 - RNA, 15 nt, Human
cacugccuacugcau

SEQ ID NO: 2432758 - RNA, 16 nt, Human
cacugccuacugcauc

SEQ ID NO: 2432759 - RNA, 21 nt, Human
cacugcccgagcuggugcauu

SEQ ID NO: 2432760 - RNA, 16 nt, Human
cacugccucuuccucc

SEQ ID NO: 2432761 - RNA, 20 nt, Human
cacugccucucccuggcccu

SEQ ID NO: 2432762 - RNA, 16 nt, Human
cacugccucucccugg

SEQ ID NO: 2432763 - RNA, 23 nt, Human
cacugccucgggaaccucacucu

SEQ ID NO: 2432764 - RNA, 22 nt, Human
cacugccucgggaaccucacuc

SEQ ID NO: 2432765 - RNA, 21 nt, Human
cacugcuuccagugaggcucu

SEQ ID NO: 2432766 - RNA, 20 nt, Human
cacugcuuccagugaggcuc

SEQ ID NO: 2432767 - RNA, 19 nt, Human
cacugcuuccagugaggcu

SEQ ID NO: 2432768 - RNA, 18 nt, Human
cacugcuuccagugaggc

SEQ ID NO: 2432769 - RNA, 13 nt, Human
cacugcuugagga

SEQ ID NO: 2432770 - RNA, 14 nt, Human
cacugcuugaggaa

SEQ ID NO: 2432771 - RNA, 20 nt, Human
cacugcuugaggaaaacaag

SEQ ID NO: 2432772 - RNA, 20 nt, Human
cacugcuuuuggucugugug

SEQ ID NO: 2432773 - RNA, 22 nt, Human
cacugcuuccagugaggcucug

SEQ ID NO: 2432774 - RNA, 21 nt, Human
cacugcugugcugugcccaag

SEQ ID NO: 2432775 - RNA, 11 nt, Human
cacugcuguca

SEQ ID NO: 2432776 - RNA, 10 nt, Human
cacugcuguc

SEQ ID NO: 2432777 - RNA, 17 nt, Human
cacugcugugcugugcc

SEQ ID NO: 2432778 - RNA, 16 nt, Human
cacugcuuccagugag

SEQ ID NO: 2432779 - RNA, 15 nt, Human
cacugcuuccaguga

SEQ ID NO: 2432780 - RNA, 14 nt, Human
cacugcuuccagug

SEQ ID NO: 2432781 - RNA, 13 nt, Human
cacugcuuaacuu

SEQ ID NO: 2432782 - RNA, 23 nt, Human
cacugcuggguggcccauccccc

SEQ ID NO: 2432783 - RNA, 22 nt, Human
cacugcuggguggcccaucccc

SEQ ID NO: 2432784 - RNA, 20 nt, Human
cacugcuggguggcccaucc

SEQ ID NO: 2432785 - RNA, 19 nt, Human
cacugcuggguggcccauc

SEQ ID NO: 2432786 - RNA, 18 nt, Human
cacugcuggguggcccau

SEQ ID NO: 2432787 - RNA, 17 nt, Human
cacugcuggguggccca

SEQ ID NO: 2432788 - RNA, 14 nt, Human
cacugcuggguggc

SEQ ID NO: 2432789 - RNA, 13 nt, Human
cacugcugggugg

SEQ ID NO: 2432790 - RNA, 21 nt, Human
cacugcuggcugccuuagaac

SEQ ID NO: 2432791 - RNA, 16 nt, Human
cacugcuggcugccuu

SEQ ID NO: 2432792 - RNA, 15 nt, Human
cacugcuggcugccu

SEQ ID NO: 2432793 - RNA, 14 nt, Human
cacugcuggcugcc

SEQ ID NO: 2432794 - RNA, 13 nt, Human
cacugcuggcugc

SEQ ID NO: 2432795 - RNA, 12 nt, Human
cacugcuggcug

SEQ ID NO: 2432796 - RNA, 14 nt, Human
cacuggccaucccu

SEQ ID NO: 2432797 - RNA, 24 nt, Human
cacuggccaccaggcuggcgcagc

SEQ ID NO: 2432798 - RNA, 22 nt, Human
cacuggccaccaggcuggcgca

SEQ ID NO: 2432799 - RNA, 21 nt, Human
cacuggccaccaggcuggcgc

SEQ ID NO: 2432800 - RNA, 20 nt, Human
cacuggccaccaggcuggcg

SEQ ID NO: 2432801 - RNA, 19 nt, Human
cacuggccaccaggcuggc

SEQ ID NO: 2432802 - RNA, 18 nt, Human
cacuggccaccaggcugg

SEQ ID NO: 2432803 - RNA, 17 nt, Human
cacuggccaccaggcug

SEQ ID NO: 2432804 - RNA, 16 nt, Human
cacuggccaccaggcu

SEQ ID NO: 2432805 - RNA, 15 nt, Human
cacuggccaccaggc

SEQ ID NO: 2432806 - RNA, 14 nt, Human
cacuggccaccagg

SEQ ID NO: 2432807 - RNA, 12 nt, Human
cacuggccacca

SEQ ID NO: 2432808 - RNA, 10 nt, Human
cacuggccac

SEQ ID NO: 2432809 - RNA, 22 nt, Human
cacuggcauugucccugugccu

SEQ ID NO: 2432810 - RNA, 17 nt, Human
cacuggccacaguuguu

SEQ ID NO: 2432811 - RNA, 19 nt, Human
cacuggcauugucccugug

SEQ ID NO: 2432812 - RNA, 18 nt, Human
cacuggcauugucccugu

SEQ ID NO: 2432813 - RNA, 14 nt, Human
cacuggcauugucc

SEQ ID NO: 2432814 - RNA, 21 nt, Human
cacuggaugggcugcagcaga

SEQ ID NO: 2432815 - RNA, 16 nt, Human
cacuggcaaugaaaaa

SEQ ID NO: 2432816 - RNA, 15 nt, Human
cacuggaugcagaaa

SEQ ID NO: 2432817 - RNA, 23 nt, Human
cacuggaugcaaagaaaaucaga

SEQ ID NO: 2432818 - RNA, 22 nt, Human
cacuggaguuacauuaauguua

SEQ ID NO: 2432819 - RNA, 20 nt, Human
cacuggagugcagggaggag

SEQ ID NO: 2432820 - RNA, 19 nt, Human
cacuggaugcaaagaaaau

SEQ ID NO: 2432821 - RNA, 23 nt, Human
cacuggagugcagggaggagagg

SEQ ID NO: 2432822 - RNA, 18 nt, Human
cacuggagugcagggagg

SEQ ID NO: 2432823 - RNA, 17 nt, Human
cacuggagugcagggag

SEQ ID NO: 2432824 - RNA, 21 nt, Human
cacuggagguugaagccaagu

SEQ ID NO: 2432825 - RNA, 20 nt, Human
cacuggagguugaagccaag

SEQ ID NO: 2432826 - RNA, 16 nt, Human
cacuggagugcaggga

SEQ ID NO: 2432827 - RNA, 16 nt, Human
cacuggaguccagucu

SEQ ID NO: 2432828 - RNA, 18 nt, Human
cacuggagguugaagcca

SEQ ID NO: 2432829 - RNA, 22 nt, Human
cacuggaggagagaagaaugag

SEQ ID NO: 2432830 - RNA, 19 nt, Human
cacuggaggagagaagaau

SEQ ID NO: 2432831 - RNA, 18 nt, Human
cacuggaggagagaagaa

SEQ ID NO: 2432832 - RNA, 16 nt, Human
cacuggaggagagaag

SEQ ID NO: 2432833 - RNA, 15 nt, Human
cacuggagcccagga

SEQ ID NO: 2432834 - RNA, 11 nt, Human
cacuggagccc

SEQ ID NO: 2432835 - RNA, 12 nt, Human
cacuggagccca

SEQ ID NO: 2432836 - RNA, 13 nt, Human
cacuggagcccag

SEQ ID NO: 2432837 - RNA, 14 nt, Human
cacuggagcccagg

SEQ ID NO: 2432838 - RNA, 19 nt, Human
cacuggaacucagugugac

SEQ ID NO: 2432839 - RNA, 13 nt, Human
cacuggaacucag

SEQ ID NO: 2432840 - RNA, 24 nt, Human
cacuggaaaggggagagccugcug

SEQ ID NO: 2432841 - RNA, 23 nt, Human
cacuggaaaggggagagccugcu

SEQ ID NO: 2432842 - RNA, 22 nt, Human
cacuggaaaggggagagccugc

SEQ ID NO: 2432843 - RNA, 19 nt, Human
cacuggaaaggggagagcc

SEQ ID NO: 2432844 - RNA, 18 nt, Human
cacuggaaaggggagagc

SEQ ID NO: 2432845 - RNA, 16 nt, Human
cacuggaaaggggaga

SEQ ID NO: 2432846 - RNA, 17 nt, Human
cacuggaacacuaauga

SEQ ID NO: 2432847 - RNA, 15 nt, Human
cacuggaaaggggag

SEQ ID NO: 2432848 - RNA, 12 nt, Human
cacuggaaaggg

SEQ ID NO: 2432849 - RNA, 15 nt, Human
cacugcuugaggaaa

SEQ ID NO: 2432850 - RNA, 21 nt, Human
cacugcuuuuggucuguguga

SEQ ID NO: 2432851 - RNA, 16 nt, Human
cacuggagcaccaggc

SEQ ID NO: 2432852 - RNA, 17 nt, Human
cacuggagcaccaggca

SEQ ID NO: 2432853 - RNA, 20 nt, Human
cacuggagccaucucuuccu

SEQ ID NO: 2432854 - RNA, 21 nt, Human
cacuggagcaccaggcacgaa

SEQ ID NO: 2432855 - RNA, 19 nt, Human
cacuggacuccggcccucc

SEQ ID NO: 2432856 - RNA, 16 nt, Human
cacuggaccacugggc

SEQ ID NO: 2432857 - RNA, 15 nt, Human
cacuggacucaccuc

SEQ ID NO: 2432858 - RNA, 18 nt, Human
cacuggacucaccucccc

SEQ ID NO: 2432859 - RNA, 16 nt, Human
cacuggacuccggccc

SEQ ID NO: 2432860 - RNA, 15 nt, Human
cacuggacuccggcc

SEQ ID NO: 2432861 - RNA, 13 nt, Human
cacuugcagacuc

SEQ ID NO: 2432862 - RNA, 22 nt, Human
cacuugaggucaggaguuccua

SEQ ID NO: 2432863 - RNA, 16 nt, Human
cacuugaugugccauu

SEQ ID NO: 2432864 - RNA, 23 nt, Human
cacuugcacgcccaugugugagu

SEQ ID NO: 2432865 - RNA, 19 nt, Human
cacuugaugacccccaacc

SEQ ID NO: 2432866 - RNA, 18 nt, Human
cacuugaggucaggaguu

SEQ ID NO: 2432867 - RNA, 13 nt, Human
cacuugaguccag

SEQ ID NO: 2432868 - RNA, 19 nt, Human
cacuugacaucaacugcau

SEQ ID NO: 2432869 - RNA, 17 nt, Human
cacuugagaauuacccu

SEQ ID NO: 2432870 - RNA, 13 nt, Human
cacuugagaggau

SEQ ID NO: 2432871 - RNA, 15 nt, Human
cacuugaauccuagg

SEQ ID NO: 2432872 - RNA, 15 nt, Human
cacuucuuuuauaac

SEQ ID NO: 2432873 - RNA, 20 nt, Human
cacuugagaauuacccuuuu

SEQ ID NO: 2432874 - RNA, 20 nt, Human
cacuugaacccgggaggcag

SEQ ID NO: 2432875 - RNA, 21 nt, Human
cacuugaacccgggaggcaga

SEQ ID NO: 2432876 - RNA, 23 nt, Human
cacuugaacccgggaggcagagg

SEQ ID NO: 2432877 - RNA, 16 nt, Human
cacuugacaucaacug

SEQ ID NO: 2432878 - RNA, 18 nt, Human
cacuucuuguuccccacu

SEQ ID NO: 2432879 - RNA, 23 nt, Human
cacuucuucuuggucuuauuuau

SEQ ID NO: 2432880 - RNA, 22 nt, Human
cacuucugugagacccccacac

SEQ ID NO: 2432881 - RNA, 19 nt, Human
cacuucuggguggggcagu

SEQ ID NO: 2432882 - RNA, 20 nt, Human
cacuucugggcuucaucugg

SEQ ID NO: 2432883 - RNA, 18 nt, Human
cacuucuggguggggcag

SEQ ID NO: 2432884 - RNA, 19 nt, Human
cacuucuuacaauaauucu

SEQ ID NO: 2432885 - RNA, 20 nt, Human
cacuucugugagacccccac

SEQ ID NO: 2432886 - RNA, 21 nt, Human
cacuucugugagacccccaca

SEQ ID NO: 2432887 - RNA, 15 nt, Human
cacuuggucugugag

SEQ ID NO: 2432888 - RNA, 18 nt, Human
cacuuucuagccagagga

SEQ ID NO: 2432889 - RNA, 20 nt, Human
cacuuucuagccagaggaga

SEQ ID NO: 2432890 - RNA, 19 nt, Human
cacuuucuagccagaggag

SEQ ID NO: 2432891 - RNA, 11 nt, Human
cacuuggccaa

SEQ ID NO: 2432892 - RNA, 19 nt, Human
cacuuggcaucagcuggcg

SEQ ID NO: 2432893 - RNA, 17 nt, Human
cacuuggcaucagcugg

SEQ ID NO: 2432894 - RNA, 14 nt, Human
cacuuggcagcgcg

SEQ ID NO: 2432895 - RNA, 18 nt, Human
cacuuggacucuugcucu

SEQ ID NO: 2432896 - RNA, 17 nt, Human
cacuuggacucuugcuc

SEQ ID NO: 2432897 - RNA, 12 nt, Human
cacuuggagcca

SEQ ID NO: 2432898 - RNA, 22 nt, Human
cacuuggcccaaguggcagagc

SEQ ID NO: 2432899 - RNA, 19 nt, Human
cacuuggcccaaguggcag

SEQ ID NO: 2432900 - RNA, 20 nt, Human
cacuuggccaagcagggagg

SEQ ID NO: 2432901 - RNA, 18 nt, Human
cacuuggccaagcaggga

SEQ ID NO: 2432902 - RNA, 23 nt, Human
cacuuggcugcauaaauguggua

SEQ ID NO: 2432903 - RNA, 16 nt, Human
cacuuggccucuggau

SEQ ID NO: 2432904 - RNA, 22 nt, Human
cacuugcagacucuacagaggc

SEQ ID NO: 2432905 - RNA, 19 nt, Human
cacuugcagacucuacaga

SEQ ID NO: 2432906 - RNA, 18 nt, Human
cacuugcagacucuacag

SEQ ID NO: 2432907 - RNA, 14 nt, Human
cacuugcagacucu

SEQ ID NO: 2432908 - RNA, 24 nt, Human
cacuugcagacucuacagaggcca

SEQ ID NO: 2432909 - RNA, 12 nt, Human
cacuugcauuuc

SEQ ID NO: 2432910 - RNA, 13 nt, Human
cacuugcaucugu

SEQ ID NO: 2432911 - RNA, 14 nt, Human
cacuugauuccuug

SEQ ID NO: 2432912 - RNA, 18 nt, Human
cacuugccccuguuaccu

SEQ ID NO: 2432913 - RNA, 17 nt, Human
cacuugccucuuccuug

SEQ ID NO: 2432914 - RNA, 14 nt, Human
cacuugccucuucc

SEQ ID NO: 2432915 - RNA, 21 nt, Human
cacuugccucuuccuugaaga

SEQ ID NO: 2432916 - RNA, 13 nt, Human
cacuugccucuuc

SEQ ID NO: 2432917 - RNA, 12 nt, Human
cacuugccucuu

SEQ ID NO: 2432918 - RNA, 14 nt, Human
cacuugcccacacc

SEQ ID NO: 2432919 - RNA, 22 nt, Human
cacuugccgcgucgcccuccca

SEQ ID NO: 2432920 - RNA, 15 nt, Human
cacuucccugacacu

SEQ ID NO: 2432921 - RNA, 18 nt, Human
cacuucccucuguuucuc

SEQ ID NO: 2432922 - RNA, 17 nt, Human
cacuucccucuguuucu

SEQ ID NO: 2432923 - RNA, 16 nt, Human
cacuucccucuguuuc

SEQ ID NO: 2432924 - RNA, 15 nt, Human
cacuucccucuguuu

SEQ ID NO: 2432925 - RNA, 14 nt, Human
cacuucccucuguu

SEQ ID NO: 2432926 - RNA, 19 nt, Human
cacuucccucaucucuccu

SEQ ID NO: 2432927 - RNA, 21 nt, Human
cacuuccccuccuaccccucc

SEQ ID NO: 2432928 - RNA, 20 nt, Human
cacuucccugacacugcggg

SEQ ID NO: 2432929 - RNA, 19 nt, Human
cacuucccugggcaaauga

SEQ ID NO: 2432930 - RNA, 13 nt, Human
cacuucccugggc

SEQ ID NO: 2432931 - RNA, 11 nt, Human
cacuuccugcc

SEQ ID NO: 2432932 - RNA, 12 nt, Human
cacuuccugccu

SEQ ID NO: 2432933 - RNA, 17 nt, Human
cacuuccuacaagagca

SEQ ID NO: 2432934 - RNA, 23 nt, Human
cacuuccuacaagagcagccugu

SEQ ID NO: 2432935 - RNA, 14 nt, Human
cacuuccugccuaa

SEQ ID NO: 2432936 - RNA, 13 nt, Human
cacuuccugccua

SEQ ID NO: 2432937 - RNA, 12 nt, Human
cacuuccugucc

SEQ ID NO: 2432938 - RNA, 13 nt, Human
cacuuccugucca

SEQ ID NO: 2432939 - RNA, 14 nt, Human
cacuuccuguccag

SEQ ID NO: 2432940 - RNA, 17 nt, Human
cacuuccuguccagaga

SEQ ID NO: 2432941 - RNA, 24 nt, Human
cacuuccuguuugggccccucucc

SEQ ID NO: 2432942 - RNA, 18 nt, Human
cacuuccuguccagagag

SEQ ID NO: 2432943 - RNA, 20 nt, Human
cacuuccaccagccugcacu

SEQ ID NO: 2432944 - RNA, 20 nt, Human
cacuuccauaaucuggacuc

SEQ ID NO: 2432945 - RNA, 22 nt, Human
cacuucauugagaguuuugucu

SEQ ID NO: 2432946 - RNA, 14 nt, Human
cacuuccaccagcc

SEQ ID NO: 2432947 - RNA, 15 nt, Human
cacuuccaccagccu

SEQ ID NO: 2432948 - RNA, 16 nt, Human
cacuuccaccagccug

SEQ ID NO: 2432949 - RNA, 17 nt, Human
cacuuccaccagccugc

SEQ ID NO: 2432950 - RNA, 18 nt, Human
cacuuccaccagccugca

SEQ ID NO: 2432951 - RNA, 19 nt, Human
cacuuccaccagccugcac

SEQ ID NO: 2432952 - RNA, 15 nt, Human
cacuuccccuccuac

SEQ ID NO: 2432953 - RNA, 13 nt, Human
cacuuccccuccu

SEQ ID NO: 2432954 - RNA, 12 nt, Human
cacuuccccucc

SEQ ID NO: 2432955 - RNA, 23 nt, Human
cacuucccagguaagcaggagga

SEQ ID NO: 2432956 - RNA, 18 nt, Human
cacuuccauacagcucua

SEQ ID NO: 2432957 - RNA, 16 nt, Human
cacuucccuacaugga

SEQ ID NO: 2432958 - RNA, 17 nt, Human
cacuucuaaaugaagug

SEQ ID NO: 2432959 - RNA, 18 nt, Human
cacuucuaaaugaagugc

SEQ ID NO: 2432960 - RNA, 21 nt, Human
cacuucgcgugcccucgcugc

SEQ ID NO: 2432961 - RNA, 23 nt, Human
cacuucgugggaucugccccucc

SEQ ID NO: 2432962 - RNA, 17 nt, Human
cacuucuaaauagcaau

SEQ ID NO: 2432963 - RNA, 21 nt, Human
cacuucgggaggucgaggcag

SEQ ID NO: 2432964 - RNA, 23 nt, Human
cacuucgggaggucgaggcagga

SEQ ID NO: 2432965 - RNA, 18 nt, Human
cacuucugggcuucaucu

SEQ ID NO: 2432966 - RNA, 22 nt, Human
cacuucugccauauucuguugg

SEQ ID NO: 2432967 - RNA, 13 nt, Human
cacuucugaccac

SEQ ID NO: 2432968 - RNA, 19 nt, Human
cacuucugaccacacuucc

SEQ ID NO: 2432969 - RNA, 16 nt, Human
cacuucugaccacacu

SEQ ID NO: 2432970 - RNA, 20 nt, Human
cacuucaggcucuucuccuu

SEQ ID NO: 2432971 - RNA, 16 nt, Human
cacuucaggcucuucu

SEQ ID NO: 2432972 - RNA, 15 nt, Human
cacuucaggcucuuc

SEQ ID NO: 2432973 - RNA, 14 nt, Human
cacuucaggcucuu

SEQ ID NO: 2432974 - RNA, 12 nt, Human
cacuucagcuga

SEQ ID NO: 2432975 - RNA, 21 nt, Human
cacuucagcugacuuuucugu

SEQ ID NO: 2432976 - RNA, 22 nt, Human
cacuucaggguucuccucuccc

SEQ ID NO: 2432977 - RNA, 18 nt, Human
cacuucagagagcuggua

SEQ ID NO: 2432978 - RNA, 23 nt, Human
cacuucaggcucuucuccuuuca

SEQ ID NO: 2432979 - RNA, 18 nt, Human
cacuucaucuucucagcu

SEQ ID NO: 2432980 - RNA, 15 nt, Human
cacuucaucuucuca

SEQ ID NO: 2432981 - RNA, 13 nt, Human
cacuucaucuucu

SEQ ID NO: 2432982 - RNA, 16 nt, Human
cacuucauugagaguu

SEQ ID NO: 2432983 - RNA, 22 nt, Human
cacuucauucuugaaagcugug

SEQ ID NO: 2432984 - RNA, 14 nt, Human
cacuucauaaucca

SEQ ID NO: 2432985 - RNA, 15 nt, Human
cacuucauaauccag

SEQ ID NO: 2432986 - RNA, 18 nt, Human
cacuucaggucaggaguu

SEQ ID NO: 2432987 - RNA, 17 nt, Human
cacuuauuucauaaaca

SEQ ID NO: 2432988 - RNA, 21 nt, Human
cacuguugaaaauuauuuuaa

SEQ ID NO: 2432989 - RNA, 14 nt, Human
cacuuauuucauaa

SEQ ID NO: 2432990 - RNA, 22 nt, Human
cacuuauuggaacucugcuuga

SEQ ID NO: 2432991 - RNA, 17 nt, Human
cacuguugaauuuucuc

SEQ ID NO: 2432992 - RNA, 21 nt, Human
cacuuauuggaacucugcuug

SEQ ID NO: 2432993 - RNA, 16 nt, Human
cacuguugaaaauuau

SEQ ID NO: 2432994 - RNA, 14 nt, Human
cacuguugaaaauu

SEQ ID NO: 2432995 - RNA, 22 nt, Human
cacuguucccucugcuccugga

SEQ ID NO: 2432996 - RNA, 19 nt, Human
cacuguucugaaagugacu

SEQ ID NO: 2432997 - RNA, 18 nt, Human
cacuguugaaaauuauuu

SEQ ID NO: 2432998 - RNA, 17 nt, Human
cacuguugaaaauuauu

SEQ ID NO: 2432999 - RNA, 13 nt, Human
cacuguugaauuu

SEQ ID NO: 2433000 - RNA, 15 nt, Human
cacuucacagagugu

SEQ ID NO: 2433001 - RNA, 14 nt, Human
cacuucacagagug

SEQ ID NO: 2433002 - RNA, 14 nt, Human
cacuucacccugga

SEQ ID NO: 2433003 - RNA, 21 nt, Human
cacuucaagugaccaccagga

SEQ ID NO: 2433004 - RNA, 13 nt, Human
cacuucacagagu

SEQ ID NO: 2433005 - RNA, 18 nt, Human
cacuucacacacaggcaa

SEQ ID NO: 2433006 - RNA, 13 nt, Human
cacuucagagagc

SEQ ID NO: 2433007 - RNA, 15 nt, Human
cacuucagagagcug

SEQ ID NO: 2433008 - RNA, 16 nt, Human
cacuucagagagcugg

SEQ ID NO: 2433009 - RNA, 17 nt, Human
cacuucagagagcuggu

SEQ ID NO: 2433010 - RNA, 18 nt, Human
cacuucacuccagccugg

SEQ ID NO: 2433011 - RNA, 19 nt, Human
cacuucacagagugugcug

SEQ ID NO: 2433012 - RNA, 22 nt, Human
cacugugcugagucugaaggcu

SEQ ID NO: 2433013 - RNA, 21 nt, Human
cacugugcugagucugaaggc

SEQ ID NO: 2433014 - RNA, 20 nt, Human
cacugugcugagucugaagg

SEQ ID NO: 2433015 - RNA, 17 nt, Human
cacugugcugagucuga

SEQ ID NO: 2433016 - RNA, 15 nt, Human
cacugugcucagggc

SEQ ID NO: 2433017 - RNA, 13 nt, Human
cacugugcucagg

SEQ ID NO: 2433018 - RNA, 16 nt, Human
cacugugcucagggcu

SEQ ID NO: 2433019 - RNA, 17 nt, Human
cacugugcuuucuauug

SEQ ID NO: 2433020 - RNA, 23 nt, Human
cacugugcuuucuauuguacaga

SEQ ID NO: 2433021 - RNA, 22 nt, Human
cacugugcuuucuauuguacag

SEQ ID NO: 2433022 - RNA, 19 nt, Human
cacuguggguagacacaca

SEQ ID NO: 2433023 - RNA, 21 nt, Human
cacugugggaaggccagcugc

SEQ ID NO: 2433024 - RNA, 20 nt, Human
cacugugggaaggccagcug

SEQ ID NO: 2433025 - RNA, 17 nt, Human
cacugugggaaggccag

SEQ ID NO: 2433026 - RNA, 14 nt, Human
cacugugggaaggc

SEQ ID NO: 2433027 - RNA, 23 nt, Human
cacuguggacuuggucaccagcu

SEQ ID NO: 2433028 - RNA, 13 nt, Human
cacuguggacuug

SEQ ID NO: 2433029 - RNA, 24 nt, Human
cacuguggacuuggucaccagcuc

SEQ ID NO: 2433030 - RNA, 15 nt, Human
cacugugcugagucu

SEQ ID NO: 2433031 - RNA, 13 nt, Human
cacugugcugagu

SEQ ID NO: 2433032 - RNA, 16 nt, Human
cacugugcccuggugg

SEQ ID NO: 2433033 - RNA, 15 nt, Human
cacugugcccuggug

SEQ ID NO: 2433034 - RNA, 13 nt, Human
cacugugcccugg

SEQ ID NO: 2433035 - RNA, 12 nt, Human
cacugugcccug

SEQ ID NO: 2433036 - RNA, 18 nt, Human
cacugugcccugguggag

SEQ ID NO: 2433037 - RNA, 17 nt, Human
cacugugcccuggugga

SEQ ID NO: 2433038 - RNA, 21 nt, Human
cacugugcuaauaacagugca

SEQ ID NO: 2433039 - RNA, 19 nt, Human
cacugugcuaauaacagug

SEQ ID NO: 2433040 - RNA, 16 nt, Human
cacugugccaugugcc

SEQ ID NO: 2433041 - RNA, 15 nt, Human
cacugugccaugugc

SEQ ID NO: 2433042 - RNA, 18 nt, Human
cacugugccaugugccag

SEQ ID NO: 2433043 - RNA, 22 nt, Human
cacugugcccagcccggaccuu

SEQ ID NO: 2433044 - RNA, 17 nt, Human
cacugugcccagcccgg

SEQ ID NO: 2433045 - RNA, 22 nt, Human
cacugugcacaucugugucuug

SEQ ID NO: 2433046 - RNA, 20 nt, Human
cacugugcacaucugugucu

SEQ ID NO: 2433047 - RNA, 22 nt, Human
cacuguucucugcccuccaaga

SEQ ID NO: 2433048 - RNA, 21 nt, Human
cacuguucucugcccuccaag

SEQ ID NO: 2433049 - RNA, 19 nt, Human
cacuguucucugcccucca

SEQ ID NO: 2433050 - RNA, 17 nt, Human
cacuguucucugcccuc

SEQ ID NO: 2433051 - RNA, 16 nt, Human
cacuguucucugcccu

SEQ ID NO: 2433052 - RNA, 15 nt, Human
cacuguucucugccc

SEQ ID NO: 2433053 - RNA, 14 nt, Human
cacuguucucugcc

SEQ ID NO: 2433054 - RNA, 13 nt, Human
cacuguucucugc

SEQ ID NO: 2433055 - RNA, 24 nt, Human
cacuguggguagacacacaugaag

SEQ ID NO: 2433056 - RNA, 22 nt, Human
cacuguggguagacacacauga

SEQ ID NO: 2433057 - RNA, 15 nt, Human
cacuguggugucugu

SEQ ID NO: 2433058 - RNA, 12 nt, Human
cacuguguaagc

SEQ ID NO: 2433059 - RNA, 14 nt, Human
cacuguggugucug

SEQ ID NO: 2433060 - RNA, 16 nt, Human
cacugugggacucuuc

SEQ ID NO: 2433061 - RNA, 23 nt, Human
cacuguucuauucaucucaagga

SEQ ID NO: 2433062 - RNA, 20 nt, Human
cacuguucccucugcuccug

SEQ ID NO: 2433063 - RNA, 17 nt, Human
cacuguucccucugcuc

SEQ ID NO: 2433064 - RNA, 16 nt, Human
cacuguucccucugcu

SEQ ID NO: 2433065 - RNA, 14 nt, Human
cacuguucccucug

SEQ ID NO: 2433066 - RNA, 19 nt, Human
cacuguucccccugugcag

SEQ ID NO: 2433067 - RNA, 20 nt, Human
cacuguuccagccugcccuc

SEQ ID NO: 2433068 - RNA, 17 nt, Human
cacuguucccccugugc

SEQ ID NO: 2433069 - RNA, 23 nt, Human
cacuguuacuuucguacauuggc

SEQ ID NO: 2433070 - RNA, 15 nt, Human
cacuguuaucaaaac

SEQ ID NO: 2433071 - RNA, 12 nt, Human
cacuguguccug

SEQ ID NO: 2433072 - RNA, 15 nt, Human
cacuguguauuuaac

SEQ ID NO: 2433073 - RNA, 17 nt, Human
cacuguguccuggugcu

SEQ ID NO: 2433074 - RNA, 14 nt, Human
cacuguauaaauag

SEQ ID NO: 2433075 - RNA, 13 nt, Human
cacuguauaaaua

SEQ ID NO: 2433076 - RNA, 22 nt, Human
cacuguaguaaauggcaauucu

SEQ ID NO: 2433077 - RNA, 16 nt, Human
cacuguaugcuggacg

SEQ ID NO: 2433078 - RNA, 18 nt, Human
cacuguaugcuggacggc

SEQ ID NO: 2433079 - RNA, 18 nt, Human
cacuguauaaauaggaga

SEQ ID NO: 2433080 - RNA, 17 nt, Human
cacuguauaaauaggag

SEQ ID NO: 2433081 - RNA, 16 nt, Human
cacuguauaaauagga

SEQ ID NO: 2433082 - RNA, 15 nt, Human
cacuguauaaauagg

SEQ ID NO: 2433083 - RNA, 21 nt, Human
cacuguauaaauaggagagga

SEQ ID NO: 2433084 - RNA, 19 nt, Human
cacuguauaaauaggagag

SEQ ID NO: 2433085 - RNA, 23 nt, Human
cacuguauaaauaggagaggaug

SEQ ID NO: 2433086 - RNA, 18 nt, Human
cacuguacuugcucuuga

SEQ ID NO: 2433087 - RNA, 15 nt, Human
cacuguacuugcucu

SEQ ID NO: 2433088 - RNA, 19 nt, Human
cacuguacuugcucuugau

SEQ ID NO: 2433089 - RNA, 20 nt, Human
cacuguacaagguaccccuu

SEQ ID NO: 2433090 - RNA, 18 nt, Human
cacuguaaaaugaaauua

SEQ ID NO: 2433091 - RNA, 18 nt, Human
cacuguagaaugauuuca

SEQ ID NO: 2433092 - RNA, 21 nt, Human
cacuguagcauuacagugggu

SEQ ID NO: 2433093 - RNA, 15 nt, Human
cacuggcucuccaag

SEQ ID NO: 2433094 - RNA, 14 nt, Human
cacuggcucuccaa

SEQ ID NO: 2433095 - RNA, 12 nt, Human
cacuggcucucc

SEQ ID NO: 2433096 - RNA, 11 nt, Human
cacuggcucuc

SEQ ID NO: 2433097 - RNA, 23 nt, Human
cacuggcguagaaguuuuuguac

SEQ ID NO: 2433098 - RNA, 23 nt, Human
cacuggcgcaucauaugcaguga

SEQ ID NO: 2433099 - RNA, 17 nt, Human
cacuggccaucuccacc

SEQ ID NO: 2433100 - RNA, 20 nt, Human
cacuggccggagucagugcc

SEQ ID NO: 2433101 - RNA, 24 nt, Human
cacuggccccucaaaucguccagc

SEQ ID NO: 2433102 - RNA, 13 nt, Human
cacuggccccuca

SEQ ID NO: 2433103 - RNA, 17 nt, Human
cacuggccccugagauc

SEQ ID NO: 2433104 - RNA, 22 nt, Human
cacuggccccuagaaucagccu

SEQ ID NO: 2433105 - RNA, 18 nt, Human
cacuggcucucuccagga

SEQ ID NO: 2433106 - RNA, 17 nt, Human
cacuggcucucuccagg

SEQ ID NO: 2433107 - RNA, 16 nt, Human
cacuggcucucuccag

SEQ ID NO: 2433108 - RNA, 15 nt, Human
cacuggcucucucca

SEQ ID NO: 2433109 - RNA, 19 nt, Human
cacuggcucuccaagugcc

SEQ ID NO: 2433110 - RNA, 18 nt, Human
cacuggcucuccaagugc

SEQ ID NO: 2433111 - RNA, 17 nt, Human
cacuggcucuccaagug

SEQ ID NO: 2433112 - RNA, 16 nt, Human
cacuggcucuccaagu

SEQ ID NO: 2433113 - RNA, 22 nt, Human
cacuggcucuccaagugccaga

SEQ ID NO: 2433114 - RNA, 21 nt, Human
cacuggcucuccaagugccag

SEQ ID NO: 2433115 - RNA, 22 nt, Human
cacuguaagacucauucccuag

SEQ ID NO: 2433116 - RNA, 16 nt, Human
cacuguaaaaugaaau

SEQ ID NO: 2433117 - RNA, 17 nt, Human
cacuguaaaaugaaauu

SEQ ID NO: 2433118 - RNA, 13 nt, Human
cacuguaaaauga

SEQ ID NO: 2433119 - RNA, 21 nt, Human
cacuggcugagcggaugcauc

SEQ ID NO: 2433120 - RNA, 14 nt, Human
cacuguaaaaugaa

SEQ ID NO: 2433121 - RNA, 14 nt, Human
cacugucaagauga

SEQ ID NO: 2433122 - RNA, 16 nt, Human
cacugucacccuccac

SEQ ID NO: 2433123 - RNA, 14 nt, Human
cacuguauuuguau

SEQ ID NO: 2433124 - RNA, 20 nt, Human
cacugucacccuccaccucu

SEQ ID NO: 2433125 - RNA, 17 nt, Human
cacuguauuuguaucuc

SEQ ID NO: 2433126 - RNA, 16 nt, Human
cacugucacuguuucu

SEQ ID NO: 2433127 - RNA, 23 nt, Human
cacugucccucaaaugacccaaa

SEQ ID NO: 2433128 - RNA, 16 nt, Human
cacugucccucaaaug

SEQ ID NO: 2433129 - RNA, 20 nt, Human
cacugucacuuugcucuggg

SEQ ID NO: 2433130 - RNA, 19 nt, Human
cacugucacuuugcucugg

SEQ ID NO: 2433131 - RNA, 17 nt, Human
cacugucacuuugcucu

SEQ ID NO: 2433132 - RNA, 15 nt, Human
cacugucaggaagaa

SEQ ID NO: 2433133 - RNA, 18 nt, Human
cacugucacuguuucucu

SEQ ID NO: 2433134 - RNA, 19 nt, Human
cacugucacuguuucucug

SEQ ID NO: 2433135 - RNA, 16 nt, Human
cacugucacuuugcuc

SEQ ID NO: 2433136 - RNA, 13 nt, Human
cacugucacuuug

SEQ ID NO: 2433137 - RNA, 22 nt, Human
cacugucacuguuucucugcug

SEQ ID NO: 2433138 - RNA, 12 nt, Human
cacuguccuggg

SEQ ID NO: 2433139 - RNA, 11 nt, Human
cacuguccugg

SEQ ID NO: 2433140 - RNA, 21 nt, Human
cacuguccugcuccacagugu

SEQ ID NO: 2433141 - RNA, 20 nt, Human
cacuguccugcuccacagug

SEQ ID NO: 2433142 - RNA, 16 nt, Human
cacuguccugcuccac

SEQ ID NO: 2433143 - RNA, 15 nt, Human
cacuguccugcucca

SEQ ID NO: 2433144 - RNA, 13 nt, Human
cacuguccugcuc

SEQ ID NO: 2433145 - RNA, 12 nt, Human
cacuguccugcu

SEQ ID NO: 2433146 - RNA, 16 nt, Human
cacuguccugggcgcc

SEQ ID NO: 2433147 - RNA, 15 nt, Human
cacuguccugggcgc

SEQ ID NO: 2433148 - RNA, 14 nt, Human
cacuguccugggcg

SEQ ID NO: 2433149 - RNA, 13 nt, Human
cacuguccugggc

SEQ ID NO: 2433150 - RNA, 15 nt, Human
cacuguccugggccu

SEQ ID NO: 2433151 - RNA, 18 nt, Human
cacuguccugggccugca

SEQ ID NO: 2433152 - RNA, 17 nt, Human
cacugucccuugccuca

SEQ ID NO: 2433153 - RNA, 12 nt, Human
cacugucccuug

SEQ ID NO: 2433154 - RNA, 18 nt, Human
cacugucccuugccucaa

SEQ ID NO: 2433155 - RNA, 14 nt, Human
cacuguccuccaag

SEQ ID NO: 2433156 - RNA, 17 nt, Human
cacuguccuccaagcca

SEQ ID NO: 2433157 - RNA, 11 nt, Human
cacuguccugc

SEQ ID NO: 2433158 - RNA, 18 nt, Human
cacugucccucaaaugac

SEQ ID NO: 2433159 - RNA, 18 nt, Human
cacuguccuccaagccag

SEQ ID NO: 2433160 - RNA, 13 nt, Human
cacugugaaggac

SEQ ID NO: 2433161 - RNA, 14 nt, Human
cacugugaaggacc

SEQ ID NO: 2433162 - RNA, 13 nt, Human
cacugucuuuccu

SEQ ID NO: 2433163 - RNA, 13 nt, Human
cacugugaagaga

SEQ ID NO: 2433164 - RNA, 18 nt, Human
cacugucugagaguuuag

SEQ ID NO: 2433165 - RNA, 13 nt, Human
cacugucugagag

SEQ ID NO: 2433166 - RNA, 11 nt, Human
cacugucugag

SEQ ID NO: 2433167 - RNA, 10 nt, Human
cacugucuga

SEQ ID NO: 2433168 - RNA, 21 nt, Human
cacuguccugggcgcccugga

SEQ ID NO: 2433169 - RNA, 19 nt, Human
cacuguccugggcgcccug

SEQ ID NO: 2433170 - RNA, 23 nt, Human
cacuguccugggcgcccuggaag

SEQ ID NO: 2433171 - RNA, 12 nt, Human
cacugucucagu

SEQ ID NO: 2433172 - RNA, 23 nt, Human
cacugucugagaguuuaguugua

SEQ ID NO: 2433173 - RNA, 14 nt, Human
cacugucuucuuca

SEQ ID NO: 2433174 - RNA, 14 nt, Human
cacugucuugaaga

SEQ ID NO: 2433175 - RNA, 17 nt, Human
cacugugaaggacccuu

SEQ ID NO: 2433176 - RNA, 15 nt, Human
cacugugaaggaccc

SEQ ID NO: 2433177 - RNA, 14 nt, Human
cacugugaccccca

SEQ ID NO: 2433178 - RNA, 15 nt, Human
cacugugacccccag

SEQ ID NO: 2433179 - RNA, 19 nt, Human
cacugugacccccagcucc

SEQ ID NO: 2433180 - RNA, 20 nt, Human
cacugugacccccagcuccg

SEQ ID NO: 2433181 - RNA, 22 nt, Human
cacugugacccccagcuccggc

SEQ ID NO: 2433182 - RNA, 14 nt, Human
cacugugccaugug

SEQ ID NO: 2433183 - RNA, 23 nt, Human
cacugugacccccagcuccggcc

SEQ ID NO: 2433184 - RNA, 16 nt, Human
cacucccugcaaccug

SEQ ID NO: 2433185 - RNA, 13 nt, Human
cacucccugcaac

SEQ ID NO: 2433186 - RNA, 12 nt, Human
cacucccugcaa

SEQ ID NO: 2433187 - RNA, 13 nt, Human
cacucauuccugu

SEQ ID NO: 2433188 - RNA, 21 nt, Human
cacucccggcacuccaugcuu

SEQ ID NO: 2433189 - RNA, 22 nt, Human
cacucauugaccugaggcccuu

SEQ ID NO: 2433190 - RNA, 20 nt, Human
cacucauugaccugaggccc

SEQ ID NO: 2433191 - RNA, 19 nt, Human
cacucauugaccugaggcc

SEQ ID NO: 2433192 - RNA, 18 nt, Human
cacucauugaccugaggc

SEQ ID NO: 2433193 - RNA, 16 nt, Human
cacucaguccauagca

SEQ ID NO: 2433194 - RNA, 21 nt, Human
cacucaggaggcugaggcagg

SEQ ID NO: 2433195 - RNA, 19 nt, Human
cacucaggaggcugaggca

SEQ ID NO: 2433196 - RNA, 20 nt, Human
cacucaggaggcugaggcag

SEQ ID NO: 2433197 - RNA, 19 nt, Human
cacucaggccaacaagcca

SEQ ID NO: 2433198 - RNA, 22 nt, Human
cacucagcucuuggcuccacug

SEQ ID NO: 2433199 - RNA, 15 nt, Human
cacucauuccuguag

SEQ ID NO: 2433200 - RNA, 17 nt, Human
cacucaugcugaaagcc

SEQ ID NO: 2433201 - RNA, 15 nt, Human
cacucaugcugaaag

SEQ ID NO: 2433202 - RNA, 15 nt, Human
cacucauugaccuga

SEQ ID NO: 2433203 - RNA, 14 nt, Human
cacucaugcugaaa

SEQ ID NO: 2433204 - RNA, 13 nt, Human
cacucaugcugaa

SEQ ID NO: 2433205 - RNA, 12 nt, Human
cacucaugcuga

SEQ ID NO: 2433206 - RNA, 19 nt, Human
cacucagcuuccuacccac

SEQ ID NO: 2433207 - RNA, 16 nt, Human
cacucauccccucacu

SEQ ID NO: 2433208 - RNA, 22 nt, Human
cacuccuagagaacgcagcccu

SEQ ID NO: 2433209 - RNA, 21 nt, Human
cacuccuagagaacgcagccc

SEQ ID NO: 2433210 - RNA, 19 nt, Human
cacuccuagagaacgcagc

SEQ ID NO: 2433211 - RNA, 12 nt, Human
cacuccuagaga

SEQ ID NO: 2433212 - RNA, 14 nt, Human
cacuccuaccuggu

SEQ ID NO: 2433213 - RNA, 13 nt, Human
cacuccuaccugg

SEQ ID NO: 2433214 - RNA, 18 nt, Human
cacuccuacaccuaacuc

SEQ ID NO: 2433215 - RNA, 20 nt, Human
cacuccggccugaugacaga

SEQ ID NO: 2433216 - RNA, 22 nt, Human
cacuccggugugccugcagccc

SEQ ID NO: 2433217 - RNA, 21 nt, Human
cacucccuugguggcaagagc

SEQ ID NO: 2433218 - RNA, 19 nt, Human
cacuccgagaggugggcca

SEQ ID NO: 2433219 - RNA, 17 nt, Human
cacuccggugugccugc

SEQ ID NO: 2433220 - RNA, 19 nt, Human
cacuccggugugccugcag

SEQ ID NO: 2433221 - RNA, 20 nt, Human
cacuccggugugccugcagc

SEQ ID NO: 2433222 - RNA, 21 nt, Human
cacuccggugugccugcagcc

SEQ ID NO: 2433223 - RNA, 17 nt, Human
cacucccugcaaccuga

SEQ ID NO: 2433224 - RNA, 14 nt, Human
cacucccuccauca

SEQ ID NO: 2433225 - RNA, 15 nt, Human
cacucccuccaucaa

SEQ ID NO: 2433226 - RNA, 22 nt, Human
cacucccuucccaugacccagg

SEQ ID NO: 2433227 - RNA, 19 nt, Human
cacucccuucccauaagcu

SEQ ID NO: 2433228 - RNA, 23 nt, Human
cacucccuucuaccugccacuca

SEQ ID NO: 2433229 - RNA, 22 nt, Human
cacucccuucuaccugccacuc

SEQ ID NO: 2433230 - RNA, 13 nt, Human
cacucccuugggc

SEQ ID NO: 2433231 - RNA, 16 nt, Human
cacucccuugggcucc

SEQ ID NO: 2433232 - RNA, 20 nt, Human
cacucccuugggcucccugu

SEQ ID NO: 2433233 - RNA, 20 nt, Human
cacucccuucuaccugccac

SEQ ID NO: 2433234 - RNA, 19 nt, Human
cacucccuucuaccugcca

SEQ ID NO: 2433235 - RNA, 18 nt, Human
cacucccuucuaccugcc

SEQ ID NO: 2433236 - RNA, 17 nt, Human
cacucccuucuaccugc

SEQ ID NO: 2433237 - RNA, 12 nt, Human
cacuccucugac

SEQ ID NO: 2433238 - RNA, 13 nt, Human
cacuccucugacu

SEQ ID NO: 2433239 - RNA, 18 nt, Human
cacuccuccuagccaccc

SEQ ID NO: 2433240 - RNA, 13 nt, Human
cacuccuccuagc

SEQ ID NO: 2433241 - RNA, 15 nt, Human
cacuccuccaaagga

SEQ ID NO: 2433242 - RNA, 20 nt, Human
cacuccugagaccccuggcc

SEQ ID NO: 2433243 - RNA, 16 nt, Human
cacuccugagaccccu

SEQ ID NO: 2433244 - RNA, 14 nt, Human
cacuccugagaccc

SEQ ID NO: 2433245 - RNA, 20 nt, Human
cacuccucugacucagggcu

SEQ ID NO: 2433246 - RNA, 21 nt, Human
cacuccucugacucagggcuc

SEQ ID NO: 2433247 - RNA, 23 nt, Human
cacuccucugacucagggcuccu

SEQ ID NO: 2433248 - RNA, 21 nt, Human
cacuccuucacagaugggugc

SEQ ID NO: 2433249 - RNA, 14 nt, Human
cacuccuucacaga

SEQ ID NO: 2433250 - RNA, 22 nt, Human
cacuccugagaccccuggccuc

SEQ ID NO: 2433251 - RNA, 21 nt, Human
cacuccugagaccccuggccu

SEQ ID NO: 2433252 - RNA, 13 nt, Human
cacuccugccaag

SEQ ID NO: 2433253 - RNA, 14 nt, Human
cacuccugccaagg

SEQ ID NO: 2433254 - RNA, 23 nt, Human
cacuccugagaccccuggccucc

SEQ ID NO: 2433255 - RNA, 14 nt, Human
cacucuggcagcuc

SEQ ID NO: 2433256 - RNA, 13 nt, Human
cacucuggcagcu

SEQ ID NO: 2433257 - RNA, 12 nt, Human
cacucuggcagc

SEQ ID NO: 2433258 - RNA, 15 nt, Human
cacucugcuucucug

SEQ ID NO: 2433259 - RNA, 14 nt, Human
cacucugcuucucu

SEQ ID NO: 2433260 - RNA, 13 nt, Human
cacucugcuucuc

SEQ ID NO: 2433261 - RNA, 12 nt, Human
cacucugcuucu

SEQ ID NO: 2433262 - RNA, 12 nt, Human
cacucugcugcu

SEQ ID NO: 2433263 - RNA, 11 nt, Human
cacucugcugc

SEQ ID NO: 2433264 - RNA, 14 nt, Human
cacucugcugcuua

SEQ ID NO: 2433265 - RNA, 21 nt, Human
cacucugcucugcccuuguuc

SEQ ID NO: 2433266 - RNA, 16 nt, Human
cacucugcucugcccu

SEQ ID NO: 2433267 - RNA, 15 nt, Human
cacucugcucugccc

SEQ ID NO: 2433268 - RNA, 19 nt, Human
cacucugcuucucugacuu

SEQ ID NO: 2433269 - RNA, 18 nt, Human
cacucugcuucucugacu

SEQ ID NO: 2433270 - RNA, 17 nt, Human
cacucugcuucucugac

SEQ ID NO: 2433271 - RNA, 16 nt, Human
cacucugcuucucuga

SEQ ID NO: 2433272 - RNA, 21 nt, Human
cacucugcuucucugacuucu

SEQ ID NO: 2433273 - RNA, 16 nt, Human
cacucugcuuguuauu

SEQ ID NO: 2433274 - RNA, 19 nt, Human
cacucugcuuugacugagc

SEQ ID NO: 2433275 - RNA, 21 nt, Human
cacucugcuuugacugagcag

SEQ ID NO: 2433276 - RNA, 20 nt, Human
cacucucugaagaugaucau

SEQ ID NO: 2433277 - RNA, 14 nt, Human
cacucucugaagau

SEQ ID NO: 2433278 - RNA, 13 nt, Human
cacucucugaaga

SEQ ID NO: 2433279 - RNA, 23 nt, Human
cacucucugaagaugaucauuug

SEQ ID NO: 2433280 - RNA, 19 nt, Human
cacucugacuggcacaguc

SEQ ID NO: 2433281 - RNA, 12 nt, Human
cacucugcucug

SEQ ID NO: 2433282 - RNA, 18 nt, Human
cacucugcucgccuuagc

SEQ ID NO: 2433283 - RNA, 15 nt, Human
cacucugcucgccuu

SEQ ID NO: 2433284 - RNA, 20 nt, Human
cacucugccucugccugcau

SEQ ID NO: 2433285 - RNA, 15 nt, Human
cacucugccucugcc

SEQ ID NO: 2433286 - RNA, 17 nt, Human
cacucugccucugccug

SEQ ID NO: 2433287 - RNA, 19 nt, Human
cacucugccucugccugca

SEQ ID NO: 2433288 - RNA, 23 nt, Human
cacucugagacucgcgacaaugc

SEQ ID NO: 2433289 - RNA, 12 nt, Human
cacucugagacu

SEQ ID NO: 2433290 - RNA, 12 nt, Human
cacucuccuugg

SEQ ID NO: 2433291 - RNA, 20 nt, Human
cacucuccuugcuacccaga

SEQ ID NO: 2433292 - RNA, 17 nt, Human
cacucuccuugcuaccc

SEQ ID NO: 2433293 - RNA, 21 nt, Human
cacucuccuugcuacccagaa

SEQ ID NO: 2433294 - RNA, 14 nt, Human
cacucuacuuagca

SEQ ID NO: 2433295 - RNA, 18 nt, Human
cacucuacccucccaccc

SEQ ID NO: 2433296 - RNA, 19 nt, Human
cacucuacccucccacccc

SEQ ID NO: 2433297 - RNA, 17 nt, Human
cacucuacccuauacaa

SEQ ID NO: 2433298 - RNA, 15 nt, Human
cacucuacccuccca

SEQ ID NO: 2433299 - RNA, 16 nt, Human
cacucuacccucccac

SEQ ID NO: 2433300 - RNA, 17 nt, Human
cacucuacccucccacc

SEQ ID NO: 2433301 - RNA, 19 nt, Human
cacucuaggggucaggcuc

SEQ ID NO: 2433302 - RNA, 17 nt, Human
cacucuaggggucaggc

SEQ ID NO: 2433303 - RNA, 22 nt, Human
cacucuaggggucaggcuccau

SEQ ID NO: 2433304 - RNA, 19 nt, Human
cacucuagggcaguggagu

SEQ ID NO: 2433305 - RNA, 15 nt, Human
cacucuagggcagug

SEQ ID NO: 2433306 - RNA, 15 nt, Human
cacucuagccugggc

SEQ ID NO: 2433307 - RNA, 13 nt, Human
cacucuagccugg

SEQ ID NO: 2433308 - RNA, 21 nt, Human
cacucuacccucccacccccu

SEQ ID NO: 2433309 - RNA, 17 nt, Human
cacucucauuccccagg

SEQ ID NO: 2433310 - RNA, 20 nt, Human
cacucucccccacccccucc

SEQ ID NO: 2433311 - RNA, 18 nt, Human
cacucucccccacccccu

SEQ ID NO: 2433312 - RNA, 16 nt, Human
cacucucccccacccc

SEQ ID NO: 2433313 - RNA, 21 nt, Human
cacucuccccacacuaaccug

SEQ ID NO: 2433314 - RNA, 18 nt, Human
cacucucauuccccaggu

SEQ ID NO: 2433315 - RNA, 12 nt, Human
cacucuccccac

SEQ ID NO: 2433316 - RNA, 14 nt, Human
cacucuccccacac

SEQ ID NO: 2433317 - RNA, 15 nt, Human
cacucuccccacacu

SEQ ID NO: 2433318 - RNA, 19 nt, Human
cacucuaaaagguucaggg

SEQ ID NO: 2433319 - RNA, 18 nt, Human
cacucuaaaagguucagg

SEQ ID NO: 2433320 - RNA, 20 nt, Human
cacucuaaaagguucaggga

SEQ ID NO: 2433321 - RNA, 22 nt, Human
cacucgggaggcugagacagga

SEQ ID NO: 2433322 - RNA, 22 nt, Human
cacucggcauuucaaaugugcu

SEQ ID NO: 2433323 - RNA, 18 nt, Human
cacucgggaggcugagac

SEQ ID NO: 2433324 - RNA, 16 nt, Human
cacucgcuucccccau

SEQ ID NO: 2433325 - RNA, 20 nt, Human
cacucgcuucccccauagcc

SEQ ID NO: 2433326 - RNA, 22 nt, Human
cacucgcccgcccacuguccug

SEQ ID NO: 2433327 - RNA, 18 nt, Human
cacucgcccgcccacugu

SEQ ID NO: 2433328 - RNA, 17 nt, Human
cacucgcccgcccacug

SEQ ID NO: 2433329 - RNA, 16 nt, Human
cacucgcccgcccacu

SEQ ID NO: 2433330 - RNA, 23 nt, Human
cacucgcccgcccacuguccugg

SEQ ID NO: 2433331 - RNA, 13 nt, Human
cacucgcuucccc

SEQ ID NO: 2433332 - RNA, 15 nt, Human
cacucgcccgcccac

SEQ ID NO: 2433333 - RNA, 15 nt, Human
cacuccuuccugcca

SEQ ID NO: 2433334 - RNA, 17 nt, Human
cacuccuuccugccacc

SEQ ID NO: 2433335 - RNA, 18 nt, Human
cacuccuuccugccaccu

SEQ ID NO: 2433336 - RNA, 21 nt, Human
cacuccuuccugccaccugcu

SEQ ID NO: 2433337 - RNA, 24 nt, Human
cacuccuuccugccaccugcugcu

SEQ ID NO: 2433338 - RNA, 19 nt, Human
cacuccuggggccucuugg

SEQ ID NO: 2433339 - RNA, 13 nt, Human
cacuccuguacac

SEQ ID NO: 2433340 - RNA, 18 nt, Human
cacuccuguuacuuaccu

SEQ ID NO: 2433341 - RNA, 11 nt, Human
cacuccuuccu

SEQ ID NO: 2433342 - RNA, 11 nt, Human
cacuccugggg

SEQ ID NO: 2433343 - RNA, 12 nt, Human
cacuccuggggc

SEQ ID NO: 2433344 - RNA, 10 nt, Human
cacuccuggg

SEQ ID NO: 2433345 - RNA, 17 nt, Human
cacuaagagagaaugag

SEQ ID NO: 2433346 - RNA, 11 nt, Human
cacuaacuaga

SEQ ID NO: 2433347 - RNA, 20 nt, Human
cacuaacuagagcagcccug

SEQ ID NO: 2433348 - RNA, 18 nt, Human
cacuaaccacgcuggacc

SEQ ID NO: 2433349 - RNA, 14 nt, Human
cacuaaccugaccg

SEQ ID NO: 2433350 - RNA, 13 nt, Human
cacuaaccugacc

SEQ ID NO: 2433351 - RNA, 20 nt, Human
cacuaacguugagccccugg

SEQ ID NO: 2433352 - RNA, 19 nt, Human
cacuaacgacuucagggca

SEQ ID NO: 2433353 - RNA, 12 nt, Human
cacuaaggggcc

SEQ ID NO: 2433354 - RNA, 13 nt, Human
cacuaaggggccc

SEQ ID NO: 2433355 - RNA, 23 nt, Human
cacuaaggggcccggccagccau

SEQ ID NO: 2433356 - RNA, 14 nt, Human
cacuaaguuauagu

SEQ ID NO: 2433357 - RNA, 18 nt, Human
cacuaaggugugcucuga

SEQ ID NO: 2433358 - RNA, 13 nt, Human
cacuaagcagagg

SEQ ID NO: 2433359 - RNA, 14 nt, Human
cacuaagcagagga

SEQ ID NO: 2433360 - RNA, 15 nt, Human
cacuaagcagaggag

SEQ ID NO: 2433361 - RNA, 16 nt, Human
cacuaagcagaggagg

SEQ ID NO: 2433362 - RNA, 17 nt, Human
cacuaagcagaggaggg

SEQ ID NO: 2433363 - RNA, 18 nt, Human
cacuaagcagaggagggg

SEQ ID NO: 2433364 - RNA, 20 nt, Human
cacuaagcagaggaggggcc

SEQ ID NO: 2433365 - RNA, 21 nt, Human
cacuaagcagaggaggggccg

SEQ ID NO: 2433366 - RNA, 17 nt, Human
cacuaaggugugcucug

SEQ ID NO: 2433367 - RNA, 16 nt, Human
cacuaaccacgcugga

SEQ ID NO: 2433368 - RNA, 15 nt, Human
cacuaaccacgcugg

SEQ ID NO: 2433369 - RNA, 14 nt, Human
cacuaaccacgcug

SEQ ID NO: 2433370 - RNA, 21 nt, Human
cacuaaauugacacuuaaaaa

SEQ ID NO: 2433371 - RNA, 16 nt, Human
cacuaacaugauuugg

SEQ ID NO: 2433372 - RNA, 22 nt, Human
cacuaaaguauguaaaguaugu

SEQ ID NO: 2433373 - RNA, 16 nt, Human
cacuaaaguauguaaa

SEQ ID NO: 2433374 - RNA, 15 nt, Human
cacuaaaguauguaa

SEQ ID NO: 2433375 - RNA, 13 nt, Human
cacuaaagcagug

SEQ ID NO: 2433376 - RNA, 19 nt, Human
cacuauaucuguauauaaa

SEQ ID NO: 2433377 - RNA, 14 nt, Human
cacuauaucuguau

SEQ ID NO: 2433378 - RNA, 23 nt, Human
cacuauauaggcaucacauuuuu

SEQ ID NO: 2433379 - RNA, 14 nt, Human
cacuauacagauuc

SEQ ID NO: 2433380 - RNA, 19 nt, Human
cacuauaaaugguguuuuu

SEQ ID NO: 2433381 - RNA, 21 nt, Human
cacuauagccuaggugacaga

SEQ ID NO: 2433382 - RNA, 14 nt, Human
cacuauagccuagg

SEQ ID NO: 2433383 - RNA, 18 nt, Human
cacuauaauguaagcucu

SEQ ID NO: 2433384 - RNA, 19 nt, Human
cacuaguauuucuaugaaa

SEQ ID NO: 2433385 - RNA, 14 nt, Human
cacuaguauuucua

SEQ ID NO: 2433386 - RNA, 14 nt, Human
cacuauaauguaag

SEQ ID NO: 2433387 - RNA, 15 nt, Human
cacuagugcaaauca

SEQ ID NO: 2433388 - RNA, 17 nt, Human
cacuaaguuauaguaua

SEQ ID NO: 2433389 - RNA, 12 nt, Human
cacuaguuuugu

SEQ ID NO: 2433390 - RNA, 16 nt, Human
cacuagugcaaaucau

SEQ ID NO: 2433391 - RNA, 17 nt, Human
cacuaguuuugugccag

SEQ ID NO: 2433392 - RNA, 12 nt, Human
cacuauaaaugg

SEQ ID NO: 2433393 - RNA, 19 nt, Human
cacuauguugcccaggcag

SEQ ID NO: 2433394 - RNA, 18 nt, Human
cacuauguugcccaggca

SEQ ID NO: 2433395 - RNA, 17 nt, Human
cacuauguugcccaggc

SEQ ID NO: 2433396 - RNA, 16 nt, Human
cacuauguugcccagg

SEQ ID NO: 2433397 - RNA, 18 nt, Human
cacuaucccggcugcccu

SEQ ID NO: 2433398 - RNA, 19 nt, Human
cacuaucccggcugcccuu

SEQ ID NO: 2433399 - RNA, 14 nt, Human
cacuaugaagaugu

SEQ ID NO: 2433400 - RNA, 17 nt, Human
cacuaucugggugcaug

SEQ ID NO: 2433401 - RNA, 11 nt, Human
cacuaucuggg

SEQ ID NO: 2433402 - RNA, 21 nt, Human
cacuaugaagauguuucaaaa

SEQ ID NO: 2433403 - RNA, 15 nt, Human
cacuauguugcccag

SEQ ID NO: 2433404 - RNA, 17 nt, Human
cacuaugguauuugagu

SEQ ID NO: 2433405 - RNA, 13 nt, Human
cacuauggugcca

SEQ ID NO: 2433406 - RNA, 14 nt, Human
cacuaugaaucuau

SEQ ID NO: 2433407 - RNA, 18 nt, Human
cacuaucugggugcauga

SEQ ID NO: 2433408 - RNA, 17 nt, Human
cacuaugaagcuaccuc

SEQ ID NO: 2433409 - RNA, 17 nt, Human
cacucagaagacacuga

SEQ ID NO: 2433410 - RNA, 16 nt, Human
cacucagaagacacug

SEQ ID NO: 2433411 - RNA, 14 nt, Human
cacucacuccugag

SEQ ID NO: 2433412 - RNA, 12 nt, Human
cacucacuccug

SEQ ID NO: 2433413 - RNA, 22 nt, Human
cacucacuaggcccccacuugc

SEQ ID NO: 2433414 - RNA, 17 nt, Human
cacucacuaggccccca

SEQ ID NO: 2433415 - RNA, 16 nt, Human
cacucacuaggccccc

SEQ ID NO: 2433416 - RNA, 12 nt, Human
cacucagaagac

SEQ ID NO: 2433417 - RNA, 20 nt, Human
cacucacauuuauucugcuc

SEQ ID NO: 2433418 - RNA, 19 nt, Human
cacucacauuuauucugcu

SEQ ID NO: 2433419 - RNA, 21 nt, Human
cacucacccaugugccaaggu

SEQ ID NO: 2433420 - RNA, 16 nt, Human
cacucacccaugugcc

SEQ ID NO: 2433421 - RNA, 21 nt, Human
cacucaccaguguccccucca

SEQ ID NO: 2433422 - RNA, 14 nt, Human
cacucaccgaagcc

SEQ ID NO: 2433423 - RNA, 22 nt, Human
cacucacccaugugccaaggug

SEQ ID NO: 2433424 - RNA, 17 nt, Human
cacucaccgaagccacu

SEQ ID NO: 2433425 - RNA, 23 nt, Human
cacucacagaccuggagccccug

SEQ ID NO: 2433426 - RNA, 19 nt, Human
cacucacagaccuggagcc

SEQ ID NO: 2433427 - RNA, 18 nt, Human
cacucaccaguguccccu

SEQ ID NO: 2433428 - RNA, 19 nt, Human
cacucagaagacacugaug

SEQ ID NO: 2433429 - RNA, 18 nt, Human
cacucagaagacacugau

SEQ ID NO: 2433430 - RNA, 17 nt, Human
cacucacugcggagaac

SEQ ID NO: 2433431 - RNA, 15 nt, Human
cacucacuccugaga

SEQ ID NO: 2433432 - RNA, 22 nt, Human
cacucagaagacacugaugggc

SEQ ID NO: 2433433 - RNA, 12 nt, Human
cacucagaccug

SEQ ID NO: 2433434 - RNA, 12 nt, Human
cacucagcacaa

SEQ ID NO: 2433435 - RNA, 13 nt, Human
cacucagcacaag

SEQ ID NO: 2433436 - RNA, 15 nt, Human
cacucagcacaaggc

SEQ ID NO: 2433437 - RNA, 22 nt, Human
cacucagcacaaggccaucugg

SEQ ID NO: 2433438 - RNA, 21 nt, Human
cacuauguugcccaggcaggu

SEQ ID NO: 2433439 - RNA, 20 nt, Human
cacuauguugcccaggcagg

SEQ ID NO: 2433440 - RNA, 14 nt, Human
cacuauuuccuuua

SEQ ID NO: 2433441 - RNA, 13 nt, Human
cacuauuuccuuu

SEQ ID NO: 2433442 - RNA, 22 nt, Human
cacuauuggcugggaguggugg

SEQ ID NO: 2433443 - RNA, 22 nt, Human
cacuauggugccaauggaaccu

SEQ ID NO: 2433444 - RNA, 15 nt, Human
cacuauggugccaau

SEQ ID NO: 2433445 - RNA, 19 nt, Human
cacuauuuaucugugcaaa

SEQ ID NO: 2433446 - RNA, 17 nt, Human
cacuauuuuuauuuaua

SEQ ID NO: 2433447 - RNA, 13 nt, Human
cacuauuuuaugc

SEQ ID NO: 2433448 - RNA, 17 nt, Human
cacuauuuccuuuauaa

SEQ ID NO: 2433449 - RNA, 14 nt, Human
cacuauuuuaugca

SEQ ID NO: 2433450 - RNA, 22 nt, Human
cacuauuuuuauuuauauuuuu

SEQ ID NO: 2433451 - RNA, 15 nt, Human
cacucaaaagcuggg

SEQ ID NO: 2433452 - RNA, 17 nt, Human
cacucaaaagcugggca

SEQ ID NO: 2433453 - RNA, 18 nt, Human
cacucaaaagcugggcag

SEQ ID NO: 2433454 - RNA, 19 nt, Human
cacucaaaagcugggcagg

SEQ ID NO: 2433455 - RNA, 20 nt, Human
cacucaagaagcaggcuaca

SEQ ID NO: 2433456 - RNA, 19 nt, Human
cacucaagaagcaggcuac

SEQ ID NO: 2433457 - RNA, 23 nt, Human
cacucaagaagcaggcuacacug

SEQ ID NO: 2433458 - RNA, 12 nt, Human
cacucaagccaa

SEQ ID NO: 2433459 - RNA, 17 nt, Human
cacucaaugcagccaga

SEQ ID NO: 2433460 - RNA, 15 nt, Human
cacucaagccaagca

SEQ ID NO: 2433461 - RNA, 16 nt, Human
cacucaagccaagcag

SEQ ID NO: 2433462 - RNA, 13 nt, Human
cacucaagcuugg

SEQ ID NO: 2433463 - RNA, 18 nt, Human
cacucaagccaagcagcc

SEQ ID NO: 2433464 - RNA, 16 nt, Human
cacucacagaccugga

SEQ ID NO: 2433465 - RNA, 22 nt, Human
cacucacacaggacccccuucc

SEQ ID NO: 2433466 - RNA, 21 nt, Human
cacucacacaggacccccuuc

SEQ ID NO: 2433467 - RNA, 14 nt, Human
cacucacacaggac

SEQ ID NO: 2433468 - RNA, 13 nt, Human
cacucacacagga

SEQ ID NO: 2433469 - RNA, 12 nt, Human
cacucacacagg

SEQ ID NO: 2433470 - RNA, 23 nt, Human
cacucacacagccaggugccuug

SEQ ID NO: 2433471 - RNA, 22 nt, Human
cacucacacagccaggugccuu

SEQ ID NO: 2433472 - RNA, 22 nt, Human
cacucaaugcagccagaccuau

SEQ ID NO: 2433473 - RNA, 18 nt, Human
cacucacacagccaggug

SEQ ID NO: 2433474 - RNA, 16 nt, Human
cacucacacagccagg

SEQ ID NO: 2433475 - RNA, 15 nt, Human
cacucacacagccag

SEQ ID NO: 2433476 - RNA, 16 nt, Human
cacucaaaucaagaaa

SEQ ID NO: 2433477 - RNA, 20 nt, Human
cacucaaaagcugggcaggu

SEQ ID NO: 2433478 - RNA, 20 nt, Human
cacucaaauuaaucuuucuu

SEQ ID NO: 2433479 - RNA, 19 nt, Human
cacucaaauuaaucuuucu

SEQ ID NO: 2433480 - RNA, 16 nt, Human
cacucaaauuaaucuu

SEQ ID NO: 2433481 - RNA, 17 nt, Human
cacucaagaagcaggcu

SEQ ID NO: 2433482 - RNA, 15 nt, Human
cacucaagaagcagg

SEQ ID NO: 2433483 - RNA, 14 nt, Human
cacucaagaagcag

SEQ ID NO: 2433484 - RNA, 14 nt, Human
cacucaacaugagu

SEQ ID NO: 2433485 - RNA, 23 nt, Human
cacuauuuuuauuuauauuuuug

SEQ ID NO: 2433486 - RNA, 23 nt, Human
cacguccugucagugccgccgcc

SEQ ID NO: 2433487 - RNA, 19 nt, Human
cacguccugucagugccgc

SEQ ID NO: 2433488 - RNA, 17 nt, Human
cacguccugucagugcc

SEQ ID NO: 2433489 - RNA, 16 nt, Human
cacguccugucagugc

SEQ ID NO: 2433490 - RNA, 16 nt, Human
cacgucugacccucuc

SEQ ID NO: 2433491 - RNA, 17 nt, Human
cacgucugacccucucc

SEQ ID NO: 2433492 - RNA, 18 nt, Human
cacgucugacccucucca

SEQ ID NO: 2433493 - RNA, 14 nt, Human
cacgucugucuuca

SEQ ID NO: 2433494 - RNA, 16 nt, Human
cacgucuuccuucugc

SEQ ID NO: 2433495 - RNA, 15 nt, Human
cacgucuuccuucug

SEQ ID NO: 2433496 - RNA, 15 nt, Human
cacgucugucuucac

SEQ ID NO: 2433497 - RNA, 23 nt, Human
cacgucuuccuucugccugagcu

SEQ ID NO: 2433498 - RNA, 18 nt, Human
cacgucuuccuucugccu

SEQ ID NO: 2433499 - RNA, 13 nt, Human
cacgugacagccg

SEQ ID NO: 2433500 - RNA, 16 nt, Human
cacgugcagcucaagg

SEQ ID NO: 2433501 - RNA, 20 nt, Human
cacgugagaaucccuggcaa

SEQ ID NO: 2433502 - RNA, 18 nt, Human
cacgugacagugccuggg

SEQ ID NO: 2433503 - RNA, 21 nt, Human
cacgugagaaucccuggcaaa

SEQ ID NO: 2433504 - RNA, 13 nt, Human
cacgugccaggcc

SEQ ID NO: 2433505 - RNA, 14 nt, Human
cacgugccaggccc

SEQ ID NO: 2433506 - RNA, 15 nt, Human
cacgugccaggcccg

SEQ ID NO: 2433507 - RNA, 18 nt, Human
cacguggccucuugagca

SEQ ID NO: 2433508 - RNA, 17 nt, Human
cacguggccucuugagc

SEQ ID NO: 2433509 - RNA, 13 nt, Human
cacguggccucuu

SEQ ID NO: 2433510 - RNA, 12 nt, Human
cacguggccucu

SEQ ID NO: 2433511 - RNA, 23 nt, Human
cacguggccucuugagcaguggc

SEQ ID NO: 2433512 - RNA, 20 nt, Human
cacguggccucuugagcagu

SEQ ID NO: 2433513 - RNA, 21 nt, Human
cacgugggaaccccccuccca

SEQ ID NO: 2433514 - RNA, 22 nt, Human
cacguggcauguggccuguggc

SEQ ID NO: 2433515 - RNA, 15 nt, Human
cacgugggaaccccc

SEQ ID NO: 2433516 - RNA, 16 nt, Human
cacgugccaggcccgg

SEQ ID NO: 2433517 - RNA, 13 nt, Human
cacguggagagcu

SEQ ID NO: 2433518 - RNA, 15 nt, Human
cacguggagagcugg

SEQ ID NO: 2433519 - RNA, 23 nt, Human
cacguggagagcuggugcccgga

SEQ ID NO: 2433520 - RNA, 20 nt, Human
cacguggcauguggccugug

SEQ ID NO: 2433521 - RNA, 19 nt, Human
cacguggcauguggccugu

SEQ ID NO: 2433522 - RNA, 18 nt, Human
cacguggcauguggccug

SEQ ID NO: 2433523 - RNA, 21 nt, Human
cacguggaggagcagugcagg

SEQ ID NO: 2433524 - RNA, 20 nt, Human
cacguggaggagcagugcag

SEQ ID NO: 2433525 - RNA, 18 nt, Human
cacguggaggagcagugc

SEQ ID NO: 2433526 - RNA, 19 nt, Human
cacgugcuacccccaugcu

SEQ ID NO: 2433527 - RNA, 20 nt, Human
cacguggaggaaugcucccc

SEQ ID NO: 2433528 - RNA, 16 nt, Human
cacguaaugaaacuug

SEQ ID NO: 2433529 - RNA, 19 nt, Human
cacguaaugaaacuuggau

SEQ ID NO: 2433530 - RNA, 14 nt, Human
cacguacacacaca

SEQ ID NO: 2433531 - RNA, 19 nt, Human
cacguacacacacauacac

SEQ ID NO: 2433532 - RNA, 18 nt, Human
cacguacacacacauaca

SEQ ID NO: 2433533 - RNA, 20 nt, Human
cacgucccccuggggcuucu

SEQ ID NO: 2433534 - RNA, 17 nt, Human
cacgucccccuggggcu

SEQ ID NO: 2433535 - RNA, 16 nt, Human
cacgucccccuggggc

SEQ ID NO: 2433536 - RNA, 15 nt, Human
cacgucccccugggg

SEQ ID NO: 2433537 - RNA, 14 nt, Human
cacguccugucagu

SEQ ID NO: 2433538 - RNA, 17 nt, Human
cacgucaucuaguuuua

SEQ ID NO: 2433539 - RNA, 13 nt, Human
cacgucccccugg

SEQ ID NO: 2433540 - RNA, 16 nt, Human
cacguccagaauuuuu

SEQ ID NO: 2433541 - RNA, 14 nt, Human
cacgucaugggagg

SEQ ID NO: 2433542 - RNA, 17 nt, Human
cacgucauguuucuuca

SEQ ID NO: 2433543 - RNA, 23 nt, Human
cacguaguagggucaggccacgg

SEQ ID NO: 2433544 - RNA, 21 nt, Human
cacguaguagggucaggccac

SEQ ID NO: 2433545 - RNA, 20 nt, Human
cacguaguagggucaggcca

SEQ ID NO: 2433546 - RNA, 19 nt, Human
cacguaguagggucaggcc

SEQ ID NO: 2433547 - RNA, 15 nt, Human
cacguacaaaaucca

SEQ ID NO: 2433548 - RNA, 19 nt, Human
cacgguuugaagccuggaa

SEQ ID NO: 2433549 - RNA, 20 nt, Human
cacgguuugaagccuggaac

SEQ ID NO: 2433550 - RNA, 16 nt, Human
cacguacuuaaaugaa

SEQ ID NO: 2433551 - RNA, 23 nt, Human
cacguagcccccaggcugcugga

SEQ ID NO: 2433552 - RNA, 17 nt, Human
cacguaguagggucagg

SEQ ID NO: 2433553 - RNA, 19 nt, Human
cacgugguccuaaucuucu

SEQ ID NO: 2433554 - RNA, 16 nt, Human
cacgugguccuaaucu

SEQ ID NO: 2433555 - RNA, 16 nt, Human
cacguguccuguaguu

SEQ ID NO: 2433556 - RNA, 15 nt, Human
cacguguccuguagu

SEQ ID NO: 2433557 - RNA, 19 nt, Human
cacguguggccuguucuuc

SEQ ID NO: 2433558 - RNA, 16 nt, Human
cacgugggcucauaug

SEQ ID NO: 2433559 - RNA, 20 nt, Human
cacguguaacugucagccgg

SEQ ID NO: 2433560 - RNA, 16 nt, Human
cacguguuugugcugu

SEQ ID NO: 2433561 - RNA, 22 nt, Human
cacguguuuuauuccuguaugu

SEQ ID NO: 2433562 - RNA, 23 nt, Human
cacguguuuuauuccuguauguu

SEQ ID NO: 2433563 - RNA, 13 nt, Human
cacguuauggugu

SEQ ID NO: 2433564 - RNA, 11 nt, Human
cacguguguga

SEQ ID NO: 2433565 - RNA, 12 nt, Human
cacgugugugac

SEQ ID NO: 2433566 - RNA, 16 nt, Human
cacgugugugacucag

SEQ ID NO: 2433567 - RNA, 22 nt, Human
cacguucuuacuaguuucccuu

SEQ ID NO: 2433568 - RNA, 19 nt, Human
cacguucucacacccaccg

SEQ ID NO: 2433569 - RNA, 18 nt, Human
cacguucucacacccacc

SEQ ID NO: 2433570 - RNA, 20 nt, Human
cacguuccuucccccgcaau

SEQ ID NO: 2433571 - RNA, 18 nt, Human
cacguuaugguguuucuc

SEQ ID NO: 2433572 - RNA, 19 nt, Human
cacguuccuuacugcagaa

SEQ ID NO: 2433573 - RNA, 13 nt, Human
cacguucaccccu

SEQ ID NO: 2433574 - RNA, 12 nt, Human
cacguuucuaaa

SEQ ID NO: 2433575 - RNA, 14 nt, Human
cacguuucuaaagg

SEQ ID NO: 2433576 - RNA, 23 nt, Human
cacguuucuaaaggcuaccuuug

SEQ ID NO: 2433577 - RNA, 22 nt, Human
cacguucucacacccaccgucc

SEQ ID NO: 2433578 - RNA, 13 nt, Human
cacuaaacaaaga

SEQ ID NO: 2433579 - RNA, 17 nt, Human
cacuaaacagacuauuu

SEQ ID NO: 2433580 - RNA, 12 nt, Human
cacuaaagcagu

SEQ ID NO: 2433581 - RNA, 22 nt, Human
cacuaaacuuuacccaaaaacu

SEQ ID NO: 2433582 - RNA, 18 nt, Human
cacgguuugaagccugga

SEQ ID NO: 2433583 - RNA, 17 nt, Human
cacgguuugaagccugg

SEQ ID NO: 2433584 - RNA, 14 nt, Human
cacggugggccuug

SEQ ID NO: 2433585 - RNA, 16 nt, Human
cacggugggccuugcu

SEQ ID NO: 2433586 - RNA, 17 nt, Human
cacggugccuuuuuuca

SEQ ID NO: 2433587 - RNA, 15 nt, Human
cacggugccuuuuuu

SEQ ID NO: 2433588 - RNA, 15 nt, Human
cacgguagugccuga

SEQ ID NO: 2433589 - RNA, 21 nt, Human
cacggucgccaccuggcauuc

SEQ ID NO: 2433590 - RNA, 14 nt, Human
cacgguagugccug

SEQ ID NO: 2433591 - RNA, 14 nt, Human
cacggucuguucuu

SEQ ID NO: 2433592 - RNA, 15 nt, Human
cacgggggccaagga

SEQ ID NO: 2433593 - RNA, 22 nt, Human
cacgggggcagcugauacaaau

SEQ ID NO: 2433594 - RNA, 15 nt, Human
cacgggggcagcuga

SEQ ID NO: 2433595 - RNA, 15 nt, Human
cacgggguauuuuag

SEQ ID NO: 2433596 - RNA, 20 nt, Human
cacggcucuagguggggcgg

SEQ ID NO: 2433597 - RNA, 13 nt, Human
cacggcugcugag

SEQ ID NO: 2433598 - RNA, 12 nt, Human
cacggcugcuga

SEQ ID NO: 2433599 - RNA, 15 nt, Human
cacgggagauuucuu

SEQ ID NO: 2433600 - RNA, 20 nt, Human
cacggcucacugcagccuca

SEQ ID NO: 2433601 - RNA, 19 nt, Human
cacggcucacugcagccuc

SEQ ID NO: 2433602 - RNA, 17 nt, Human
cacggcucacugcagcc

SEQ ID NO: 2433603 - RNA, 16 nt, Human
cacggcucacugcagc

SEQ ID NO: 2433604 - RNA, 14 nt, Human
cacgcuccuuccuc

SEQ ID NO: 2433605 - RNA, 17 nt, Human
cacgcuggaccuugaac

SEQ ID NO: 2433606 - RNA, 20 nt, Human
cacgcuggaccuugaacugg

SEQ ID NO: 2433607 - RNA, 17 nt, Human
cacgccuguaaucccag

SEQ ID NO: 2433608 - RNA, 18 nt, Human
cacgccuguaaucccagc

SEQ ID NO: 2433609 - RNA, 19 nt, Human
cacgccuguaaucccagca

SEQ ID NO: 2433610 - RNA, 23 nt, Human
cacgccugcaaacgcugccugcc

SEQ ID NO: 2433611 - RNA, 16 nt, Human
cacgccuguaauccca

SEQ ID NO: 2433612 - RNA, 21 nt, Human
cacgccugcaaacgcugccug

SEQ ID NO: 2433613 - RNA, 22 nt, Human
cacgccugcaaacgcugccugc

SEQ ID NO: 2433614 - RNA, 14 nt, Human
cacgccuguaaucc

SEQ ID NO: 2433615 - RNA, 19 nt, Human
cacgccuguaauccuagca

SEQ ID NO: 2433616 - RNA, 20 nt, Human
cacgccuguaauccuagcac

SEQ ID NO: 2433617 - RNA, 24 nt, Human
cacgcccuccccuccccugcugca

SEQ ID NO: 2433618 - RNA, 20 nt, Human
cacgcccuccccuccccugc

SEQ ID NO: 2433619 - RNA, 16 nt, Human
cacgcccuccccuccc

SEQ ID NO: 2433620 - RNA, 21 nt, Human
cacgcccuccccuccccugcu

SEQ ID NO: 2433621 - RNA, 18 nt, Human
cacgccuaugaucccagc

SEQ ID NO: 2433622 - RNA, 19 nt, Human
cacgccuaugaucccagca

SEQ ID NO: 2433623 - RNA, 21 nt, Human
cacgccuaugaucccagcacu

SEQ ID NO: 2433624 - RNA, 22 nt, Human
cacgccuaugaucccagcacuu

SEQ ID NO: 2433625 - RNA, 16 nt, Human
cacgccucccacuggg

SEQ ID NO: 2433626 - RNA, 15 nt, Human
cacgccucccacugg

SEQ ID NO: 2433627 - RNA, 14 nt, Human
cacgccucccacug

SEQ ID NO: 2433628 - RNA, 13 nt, Human
cacgccucccacu

SEQ ID NO: 2433629 - RNA, 18 nt, Human
cacgccucccacuggggu

SEQ ID NO: 2433630 - RNA, 17 nt, Human
cacgccucccacugggg

SEQ ID NO: 2433631 - RNA, 17 nt, Human
cacgccugcaaacgcug

SEQ ID NO: 2433632 - RNA, 22 nt, Human
cacgccucccacugggguccag

SEQ ID NO: 2433633 - RNA, 23 nt, Human
cacgcuccucccucugaggcugu

SEQ ID NO: 2433634 - RNA, 18 nt, Human
cacgcuccucccucugag

SEQ ID NO: 2433635 - RNA, 21 nt, Human
cacgcuccccgccuguucccc

SEQ ID NO: 2433636 - RNA, 20 nt, Human
cacgcuccccgccuguuccc

SEQ ID NO: 2433637 - RNA, 19 nt, Human
cacgcuccccgccuguucc

SEQ ID NO: 2433638 - RNA, 18 nt, Human
cacgcuccccgccuguuc

SEQ ID NO: 2433639 - RNA, 16 nt, Human
cacgcuccccgccugu

SEQ ID NO: 2433640 - RNA, 15 nt, Human
cacgcuccccgccug

SEQ ID NO: 2433641 - RNA, 23 nt, Human
cacgcgugcacacaccagagccc

SEQ ID NO: 2433642 - RNA, 22 nt, Human
cacgcuaaucccgauucacccu

SEQ ID NO: 2433643 - RNA, 20 nt, Human
cacgccuguaaucccagcag

SEQ ID NO: 2433644 - RNA, 21 nt, Human
cacgccuguaaucccagcagu

SEQ ID NO: 2433645 - RNA, 21 nt, Human
cacgcgugcacacaccagagc

SEQ ID NO: 2433646 - RNA, 16 nt, Human
cacgcgugcacacacc

SEQ ID NO: 2433647 - RNA, 15 nt, Human
cacgcgugcacacac

SEQ ID NO: 2433648 - RNA, 12 nt, Human
cacgccugugca

SEQ ID NO: 2433649 - RNA, 22 nt, Human
cacgccuguaaucccagcacuu

SEQ ID NO: 2433650 - RNA, 21 nt, Human
cacgccuguaaucccagcacu

SEQ ID NO: 2433651 - RNA, 20 nt, Human
cacgccuguaaucccagcac

SEQ ID NO: 2433652 - RNA, 17 nt, Human
cacgaaauguuauuuuu

SEQ ID NO: 2433653 - RNA, 22 nt, Human
caccuugaagaaccucucacuu

SEQ ID NO: 2433654 - RNA, 18 nt, Human
caccuugacagggcacac

SEQ ID NO: 2433655 - RNA, 16 nt, Human
caccuugacagggcac

SEQ ID NO: 2433656 - RNA, 15 nt, Human
caccuugacagggca

SEQ ID NO: 2433657 - RNA, 13 nt, Human
caccuuccucacu

SEQ ID NO: 2433658 - RNA, 14 nt, Human
caccuucccaugcc

SEQ ID NO: 2433659 - RNA, 13 nt, Human
caccuucccaugc

SEQ ID NO: 2433660 - RNA, 17 nt, Human
caccuucccagcucucc

SEQ ID NO: 2433661 - RNA, 19 nt, Human
caccuucccagcucucccu

SEQ ID NO: 2433662 - RNA, 21 nt, Human
caccuucccagcucucccucu

SEQ ID NO: 2433663 - RNA, 22 nt, Human
caccuucccagcucucccucug

SEQ ID NO: 2433664 - RNA, 20 nt, Human
caccuuccucacuuccauac

SEQ ID NO: 2433665 - RNA, 14 nt, Human
caccuuccucacuu

SEQ ID NO: 2433666 - RNA, 21 nt, Human
caccuucguuuacuaugccug

SEQ ID NO: 2433667 - RNA, 22 nt, Human
caccuucguuuacuaugccugu

SEQ ID NO: 2433668 - RNA, 23 nt, Human
caccuucguuuacuaugccugug

SEQ ID NO: 2433669 - RNA, 13 nt, Human
caccuugacaggg

SEQ ID NO: 2433670 - RNA, 19 nt, Human
cacgaccucggcucacugc

SEQ ID NO: 2433671 - RNA, 13 nt, Human
cacgacugucucc

SEQ ID NO: 2433672 - RNA, 16 nt, Human
cacgacugucuccaug

SEQ ID NO: 2433673 - RNA, 17 nt, Human
cacgacugcccggcagg

SEQ ID NO: 2433674 - RNA, 22 nt, Human
cacgaauuugcuggggaaucuc

SEQ ID NO: 2433675 - RNA, 18 nt, Human
cacgaaguguugcaugga

SEQ ID NO: 2433676 - RNA, 18 nt, Human
cacgaauuugcuggggaa

SEQ ID NO: 2433677 - RNA, 16 nt, Human
cacgacugcccggcag

SEQ ID NO: 2433678 - RNA, 22 nt, Human
cacgaauauugcugauggugca

SEQ ID NO: 2433679 - RNA, 19 nt, Human
cacgaauauugcugauggu

SEQ ID NO: 2433680 - RNA, 16 nt, Human
cacgaauauugcugau

SEQ ID NO: 2433681 - RNA, 14 nt, Human
cacgaacccaccug

SEQ ID NO: 2433682 - RNA, 16 nt, Human
cacgaacccaccugcu

SEQ ID NO: 2433683 - RNA, 18 nt, Human
cacgaacccaccugcuga

SEQ ID NO: 2433684 - RNA, 16 nt, Human
cacgaaguguugcaug

SEQ ID NO: 2433685 - RNA, 15 nt, Human
cacgaaguguugcau

SEQ ID NO: 2433686 - RNA, 19 nt, Human
cacgaacuuuagcugcauc

SEQ ID NO: 2433687 - RNA, 22 nt, Human
cacgaacccaccugcugagaga

SEQ ID NO: 2433688 - RNA, 19 nt, Human
caccuuagacagucccugc

SEQ ID NO: 2433689 - RNA, 18 nt, Human
caccuuagacagucccug

SEQ ID NO: 2433690 - RNA, 16 nt, Human
caccuuagacaguccc

SEQ ID NO: 2433691 - RNA, 14 nt, Human
caccuuagacaguc

SEQ ID NO: 2433692 - RNA, 11 nt, Human
caccuguuacu

SEQ ID NO: 2433693 - RNA, 23 nt, Human
caccugugcagcgaagcuuagcg

SEQ ID NO: 2433694 - RNA, 19 nt, Human
caccugugcuucgggcccu

SEQ ID NO: 2433695 - RNA, 20 nt, Human
caccuguuuuuaagcuguuu

SEQ ID NO: 2433696 - RNA, 19 nt, Human
caccuguugcuuacaauuu

SEQ ID NO: 2433697 - RNA, 16 nt, Human
caccuguugcuuacaa

SEQ ID NO: 2433698 - RNA, 19 nt, Human
caccuguuuuuaagcuguu

SEQ ID NO: 2433699 - RNA, 20 nt, Human
caccugugaguuuaaagcaa

SEQ ID NO: 2433700 - RNA, 19 nt, Human
caccugugaguuuaaagca

SEQ ID NO: 2433701 - RNA, 23 nt, Human
caccuuagacagucccugccaau

SEQ ID NO: 2433702 - RNA, 21 nt, Human
caccuuagacagucccugcca

SEQ ID NO: 2433703 - RNA, 19 nt, Human
caccuuaccaacuuucugu

SEQ ID NO: 2433704 - RNA, 18 nt, Human
caccuuaccaacuuucug

SEQ ID NO: 2433705 - RNA, 20 nt, Human
caccuguugcuuacaauuuu

SEQ ID NO: 2433706 - RNA, 17 nt, Human
caccuuaccaacuuucu

SEQ ID NO: 2433707 - RNA, 13 nt, Human
caccuuagcuggc

SEQ ID NO: 2433708 - RNA, 22 nt, Human
caccuuagccugcccuccuuuc

SEQ ID NO: 2433709 - RNA, 13 nt, Human
caccuuaggcagg

SEQ ID NO: 2433710 - RNA, 14 nt, Human
caccuuaggcaggg

SEQ ID NO: 2433711 - RNA, 17 nt, Human
caccuuaggcagggaag

SEQ ID NO: 2433712 - RNA, 15 nt, Human
caccuuaguggcuuu

SEQ ID NO: 2433713 - RNA, 18 nt, Human
caccuuaggcagggaagu

SEQ ID NO: 2433714 - RNA, 15 nt, Human
caccuuauauuuacg

SEQ ID NO: 2433715 - RNA, 17 nt, Human
caccuucaauuccuggg

SEQ ID NO: 2433716 - RNA, 18 nt, Human
caccuucaauuccugggc

SEQ ID NO: 2433717 - RNA, 19 nt, Human
caccuucaauuccugggcc

SEQ ID NO: 2433718 - RNA, 18 nt, Human
caccuuccagcuccugua

SEQ ID NO: 2433719 - RNA, 16 nt, Human
caccuuccagcuccug

SEQ ID NO: 2433720 - RNA, 12 nt, Human
caccuucccagc

SEQ ID NO: 2433721 - RNA, 13 nt, Human
caccuucccagcu

SEQ ID NO: 2433722 - RNA, 15 nt, Human
caccuucccagcucu

SEQ ID NO: 2433723 - RNA, 15 nt, Human
caccuuccagcuccu

SEQ ID NO: 2433724 - RNA, 14 nt, Human
caccuuccagcucc

SEQ ID NO: 2433725 - RNA, 19 nt, Human
cacgagcaggcuacuguca

SEQ ID NO: 2433726 - RNA, 20 nt, Human
cacgagcaggcuacugucag

SEQ ID NO: 2433727 - RNA, 17 nt, Human
cacgagcaggcuacugu

SEQ ID NO: 2433728 - RNA, 13 nt, Human
cacgagagcccgg

SEQ ID NO: 2433729 - RNA, 23 nt, Human
cacgagcaaagugaagacacugg

SEQ ID NO: 2433730 - RNA, 12 nt, Human
cacgaugaaaaa

SEQ ID NO: 2433731 - RNA, 20 nt, Human
cacgauaaauaaucggccca

SEQ ID NO: 2433732 - RNA, 15 nt, Human
cacgaugaaaaacuu

SEQ ID NO: 2433733 - RNA, 14 nt, Human
cacgauguggcccu

SEQ ID NO: 2433734 - RNA, 15 nt, Human
cacgauguggcccug

SEQ ID NO: 2433735 - RNA, 16 nt, Human
cacgauguggcccugg

SEQ ID NO: 2433736 - RNA, 17 nt, Human
cacgauguggcccuggc

SEQ ID NO: 2433737 - RNA, 18 nt, Human
cacgauguggcccuggcc

SEQ ID NO: 2433738 - RNA, 22 nt, Human
cacgauguggcccuggccugcu

SEQ ID NO: 2433739 - RNA, 22 nt, Human
cacgagcaggcuacugucagcu

SEQ ID NO: 2433740 - RNA, 20 nt, Human
cacgagcuguuuacuaggga

SEQ ID NO: 2433741 - RNA, 15 nt, Human
cacgcacgcacacac

SEQ ID NO: 2433742 - RNA, 14 nt, Human
cacgcacgcacaca

SEQ ID NO: 2433743 - RNA, 13 nt, Human
cacgcacgcacac

SEQ ID NO: 2433744 - RNA, 12 nt, Human
cacgcacgcaca

SEQ ID NO: 2433745 - RNA, 13 nt, Human
cacgcaccugggu

SEQ ID NO: 2433746 - RNA, 16 nt, Human
cacgcaccugccucag

SEQ ID NO: 2433747 - RNA, 17 nt, Human
cacgcacuucgggaggu

SEQ ID NO: 2433748 - RNA, 12 nt, Human
cacgcaccugcc

SEQ ID NO: 2433749 - RNA, 15 nt, Human
cacgcaccugccuca

SEQ ID NO: 2433750 - RNA, 22 nt, Human
cacgcacacacacacacaggag

SEQ ID NO: 2433751 - RNA, 14 nt, Human
cacgcaccucccau

SEQ ID NO: 2433752 - RNA, 15 nt, Human
cacgcaccucccauc

SEQ ID NO: 2433753 - RNA, 19 nt, Human
cacgcaccucccauccuaa

SEQ ID NO: 2433754 - RNA, 12 nt, Human
cacgcaccuccc

SEQ ID NO: 2433755 - RNA, 15 nt, Human
cacgcacacacacac

SEQ ID NO: 2433756 - RNA, 20 nt, Human
cacgcacacacacacacagg

SEQ ID NO: 2433757 - RNA, 12 nt, Human
cacgauuucugu

SEQ ID NO: 2433758 - RNA, 14 nt, Human
cacgauuucuguuu

SEQ ID NO: 2433759 - RNA, 16 nt, Human
cacgauuucuguuuag

SEQ ID NO: 2433760 - RNA, 12 nt, Human
cacgcacacaca

SEQ ID NO: 2433761 - RNA, 21 nt, Human
cacgauguggcccuggccugc

SEQ ID NO: 2433762 - RNA, 15 nt, Human
cacgcacacacacaa

SEQ ID NO: 2433763 - RNA, 13 nt, Human
cacgcacacacac

SEQ ID NO: 2433764 - RNA, 14 nt, Human
cacgcacacacaca

SEQ ID NO: 2433765 - RNA, 15 nt, Human
cacgcccccacuggu

SEQ ID NO: 2433766 - RNA, 13 nt, Human
cacgcccccacug

SEQ ID NO: 2433767 - RNA, 23 nt, Human
cacgccagauucuuuccugaggc

SEQ ID NO: 2433768 - RNA, 14 nt, Human
cacgcccaugugug

SEQ ID NO: 2433769 - RNA, 15 nt, Human
cacgcccauguguga

SEQ ID NO: 2433770 - RNA, 23 nt, Human
cacgcccaugugugagugugugc

SEQ ID NO: 2433771 - RNA, 14 nt, Human
cacgccacugcacu

SEQ ID NO: 2433772 - RNA, 22 nt, Human
cacgccacugcacuccagccug

SEQ ID NO: 2433773 - RNA, 18 nt, Human
cacgcccccacuggugac

SEQ ID NO: 2433774 - RNA, 17 nt, Human
cacgcccccacugguga

SEQ ID NO: 2433775 - RNA, 19 nt, Human
cacgcccguccugccugug

SEQ ID NO: 2433776 - RNA, 16 nt, Human
cacgcccguccugccu

SEQ ID NO: 2433777 - RNA, 15 nt, Human
cacgcccguccugcc

SEQ ID NO: 2433778 - RNA, 14 nt, Human
cacgcccguccugc

SEQ ID NO: 2433779 - RNA, 21 nt, Human
cacgcccguccugccuguggc

SEQ ID NO: 2433780 - RNA, 20 nt, Human
cacgcccguccugccugugg

SEQ ID NO: 2433781 - RNA, 15 nt, Human
cacgcccuccccucc

SEQ ID NO: 2433782 - RNA, 13 nt, Human
cacgcccuccccu

SEQ ID NO: 2433783 - RNA, 22 nt, Human
cacgccagauucuuuccugagg

SEQ ID NO: 2433784 - RNA, 20 nt, Human
cacgccagauucuuuccuga

SEQ ID NO: 2433785 - RNA, 19 nt, Human
cacgccagauucuuuccug

SEQ ID NO: 2433786 - RNA, 15 nt, Human
cacgccacugcacua

SEQ ID NO: 2433787 - RNA, 13 nt, Human
cacgccacugcac

SEQ ID NO: 2433788 - RNA, 16 nt, Human
cacgcacgcacacaca

SEQ ID NO: 2433789 - RNA, 17 nt, Human
cacgcaggaacucccag

SEQ ID NO: 2433790 - RNA, 16 nt, Human
cacgcaggaacuccca

SEQ ID NO: 2433791 - RNA, 13 nt, Human
cacgcaggaacuc

SEQ ID NO: 2433792 - RNA, 20 nt, Human
cacgcaggaacucccagcaa

SEQ ID NO: 2433793 - RNA, 19 nt, Human
cacgcaggaacucccagca

SEQ ID NO: 2433794 - RNA, 16 nt, Human
cacgccagauucuuuc

SEQ ID NO: 2433795 - RNA, 20 nt, Human
caccuggccucugcacuccc

SEQ ID NO: 2433796 - RNA, 19 nt, Human
caccuggccucugcacucc

SEQ ID NO: 2433797 - RNA, 18 nt, Human
caccuggccucugcacuc

SEQ ID NO: 2433798 - RNA, 17 nt, Human
caccuggccucugcacu

SEQ ID NO: 2433799 - RNA, 21 nt, Human
caccuggcugagguuccucug

SEQ ID NO: 2433800 - RNA, 20 nt, Human
caccuggcugagguuccucu

SEQ ID NO: 2433801 - RNA, 19 nt, Human
caccuggcugagguuccuc

SEQ ID NO: 2433802 - RNA, 19 nt, Human
caccuggcugagccuggcu

SEQ ID NO: 2433803 - RNA, 23 nt, Human
caccuggcugagguuccucugcc

SEQ ID NO: 2433804 - RNA, 22 nt, Human
caccuggcugagguuccucugc

SEQ ID NO: 2433805 - RNA, 11 nt, Human
caccugggcac

SEQ ID NO: 2433806 - RNA, 23 nt, Human
caccuggccucugcacuccccug

SEQ ID NO: 2433807 - RNA, 15 nt, Human
caccuggccucugca

SEQ ID NO: 2433808 - RNA, 14 nt, Human
caccuggccucugc

SEQ ID NO: 2433809 - RNA, 13 nt, Human
caccuggccucug

SEQ ID NO: 2433810 - RNA, 12 nt, Human
caccuggccucu

SEQ ID NO: 2433811 - RNA, 15 nt, Human
caccuggccaccuga

SEQ ID NO: 2433812 - RNA, 14 nt, Human
caccuggccaccug

SEQ ID NO: 2433813 - RNA, 13 nt, Human
caccuggccaccu

SEQ ID NO: 2433814 - RNA, 12 nt, Human
caccuggccacc

SEQ ID NO: 2433815 - RNA, 11 nt, Human
caccuggccac

SEQ ID NO: 2433816 - RNA, 18 nt, Human
caccuggcacugcugugc

SEQ ID NO: 2433817 - RNA, 23 nt, Human
caccuggcaucgcaccauucuga

SEQ ID NO: 2433818 - RNA, 17 nt, Human
caccuggcacugcugug

SEQ ID NO: 2433819 - RNA, 20 nt, Human
caccuggccccaugucucuc

SEQ ID NO: 2433820 - RNA, 22 nt, Human
caccuggccccaugucucucag

SEQ ID NO: 2433821 - RNA, 21 nt, Human
caccuggccaccugagguggg

SEQ ID NO: 2433822 - RNA, 20 nt, Human
caccuggccaccugaggugg

SEQ ID NO: 2433823 - RNA, 19 nt, Human
caccuggccaccugaggug

SEQ ID NO: 2433824 - RNA, 17 nt, Human
caccuggccaccugagg

SEQ ID NO: 2433825 - RNA, 11 nt, Human
caccuggcccc

SEQ ID NO: 2433826 - RNA, 14 nt, Human
caccuggccccaug

SEQ ID NO: 2433827 - RNA, 15 nt, Human
caccuggccccaugu

SEQ ID NO: 2433828 - RNA, 16 nt, Human
caccuggccccauguc

SEQ ID NO: 2433829 - RNA, 19 nt, Human
caccugucucagccuccca

SEQ ID NO: 2433830 - RNA, 14 nt, Human
caccugucccagaa

SEQ ID NO: 2433831 - RNA, 15 nt, Human
caccugucucagccu

SEQ ID NO: 2433832 - RNA, 17 nt, Human
caccugucucagccucc

SEQ ID NO: 2433833 - RNA, 18 nt, Human
caccugucucagccuccc

SEQ ID NO: 2433834 - RNA, 15 nt, Human
caccugucccagaaa

SEQ ID NO: 2433835 - RNA, 14 nt, Human
caccugucaggccu

SEQ ID NO: 2433836 - RNA, 23 nt, Human
caccugucaaacaaagccagaag

SEQ ID NO: 2433837 - RNA, 18 nt, Human
caccuguagcacuuacug

SEQ ID NO: 2433838 - RNA, 17 nt, Human
caccuguacucuuccga

SEQ ID NO: 2433839 - RNA, 15 nt, Human
caccuguacucuucc

SEQ ID NO: 2433840 - RNA, 23 nt, Human
caccuguacucaggaggcugagg

SEQ ID NO: 2433841 - RNA, 15 nt, Human
caccuguacucagga

SEQ ID NO: 2433842 - RNA, 16 nt, Human
caccuguacucaggag

SEQ ID NO: 2433843 - RNA, 22 nt, Human
caccuguacucaggaggcugag

SEQ ID NO: 2433844 - RNA, 15 nt, Human
caccuguagcagcca

SEQ ID NO: 2433845 - RNA, 22 nt, Human
caccuguagcacuuacugguag

SEQ ID NO: 2433846 - RNA, 15 nt, Human
caccuguagucccag

SEQ ID NO: 2433847 - RNA, 16 nt, Human
caccuguagucccagc

SEQ ID NO: 2433848 - RNA, 18 nt, Human
caccuguacucuuccgaa

SEQ ID NO: 2433849 - RNA, 18 nt, Human
caccuguagucccagcua

SEQ ID NO: 2433850 - RNA, 20 nt, Human
caccuguagucccagcuacu

SEQ ID NO: 2433851 - RNA, 19 nt, Human
caccuguagucccagcuac

SEQ ID NO: 2433852 - RNA, 13 nt, Human
caccugucaaaca

SEQ ID NO: 2433853 - RNA, 20 nt, Human
caccugucaaacaaagccag

SEQ ID NO: 2433854 - RNA, 21 nt, Human
caccugucaaacaaagccaga

SEQ ID NO: 2433855 - RNA, 15 nt, Human
caccuggggcugcug

SEQ ID NO: 2433856 - RNA, 14 nt, Human
caccuggggcugcu

SEQ ID NO: 2433857 - RNA, 23 nt, Human
caccuggggcagucaccugccca

SEQ ID NO: 2433858 - RNA, 10 nt, Human
caccuggggu

SEQ ID NO: 2433859 - RNA, 18 nt, Human
caccuggggugugggagg

SEQ ID NO: 2433860 - RNA, 22 nt, Human
caccuggggugugggaggcccg

SEQ ID NO: 2433861 - RNA, 14 nt, Human
caccuggggagugg

SEQ ID NO: 2433862 - RNA, 15 nt, Human
caccuggggaguggg

SEQ ID NO: 2433863 - RNA, 17 nt, Human
caccuggggagugggac

SEQ ID NO: 2433864 - RNA, 22 nt, Human
caccuggggagugggacagagu

SEQ ID NO: 2433865 - RNA, 14 nt, Human
caccuggggcaguc

SEQ ID NO: 2433866 - RNA, 15 nt, Human
caccuggggcaguca

SEQ ID NO: 2433867 - RNA, 19 nt, Human
caccuggggcagucaccug

SEQ ID NO: 2433868 - RNA, 20 nt, Human
caccuggggcagucaccugc

SEQ ID NO: 2433869 - RNA, 19 nt, Human
caccugggcuuaagaaauc

SEQ ID NO: 2433870 - RNA, 16 nt, Human
caccugggcuuaagaa

SEQ ID NO: 2433871 - RNA, 12 nt, Human
caccugggcacc

SEQ ID NO: 2433872 - RNA, 15 nt, Human
caccugggcaccugg

SEQ ID NO: 2433873 - RNA, 19 nt, Human
caccugggcaccuggggag

SEQ ID NO: 2433874 - RNA, 20 nt, Human
caccuggggugugggaggcc

SEQ ID NO: 2433875 - RNA, 15 nt, Human
caccugguggccucu

SEQ ID NO: 2433876 - RNA, 17 nt, Human
caccugguggccucugc

SEQ ID NO: 2433877 - RNA, 23 nt, Human
caccugguuccggaauccugucc

SEQ ID NO: 2433878 - RNA, 21 nt, Human
caccugguuccggaauccugu

SEQ ID NO: 2433879 - RNA, 20 nt, Human
caccugguuccggaauccug

SEQ ID NO: 2433880 - RNA, 16 nt, Human
caccugguuccggaau

SEQ ID NO: 2433881 - RNA, 15 nt, Human
caccuguaaaccuga

SEQ ID NO: 2433882 - RNA, 16 nt, Human
caccuguaaaccugag

SEQ ID NO: 2433883 - RNA, 14 nt, Human
caccuguaaaccug

SEQ ID NO: 2433884 - RNA, 21 nt, Human
caccuguaaucccagcuacuu

SEQ ID NO: 2433885 - RNA, 16 nt, Human
caccuguaaucccagc

SEQ ID NO: 2433886 - RNA, 18 nt, Human
caccuguaaucccagcac

SEQ ID NO: 2433887 - RNA, 19 nt, Human
caccucucucacuccuuga

SEQ ID NO: 2433888 - RNA, 18 nt, Human
caccucucucacuccuug

SEQ ID NO: 2433889 - RNA, 17 nt, Human
caccucucucacuccuu

SEQ ID NO: 2433890 - RNA, 15 nt, Human
caccucucucacucc

SEQ ID NO: 2433891 - RNA, 18 nt, Human
caccucugcacaagcugc

SEQ ID NO: 2433892 - RNA, 19 nt, Human
caccucugcacaagcugca

SEQ ID NO: 2433893 - RNA, 22 nt, Human
caccucugaccuaucacuucca

SEQ ID NO: 2433894 - RNA, 22 nt, Human
caccucugaaaacggcccucuu

SEQ ID NO: 2433895 - RNA, 16 nt, Human
caccucucuccuuugc

SEQ ID NO: 2433896 - RNA, 23 nt, Human
caccucucccucaacaagggaga

SEQ ID NO: 2433897 - RNA, 13 nt, Human
caccucugccaga

SEQ ID NO: 2433898 - RNA, 12 nt, Human
caccucugccag

SEQ ID NO: 2433899 - RNA, 19 nt, Human
caccucugccagaagaucc

SEQ ID NO: 2433900 - RNA, 13 nt, Human
caccucugccuca

SEQ ID NO: 2433901 - RNA, 19 nt, Human
caccucugcggaccccagc

SEQ ID NO: 2433902 - RNA, 18 nt, Human
caccucugcggaccccag

SEQ ID NO: 2433903 - RNA, 12 nt, Human
caccucugcgga

SEQ ID NO: 2433904 - RNA, 14 nt, Human
caccucugccucaa

SEQ ID NO: 2433905 - RNA, 21 nt, Human
caccucugcggaccccagcug

SEQ ID NO: 2433906 - RNA, 20 nt, Human
caccucugcggaccccagcu

SEQ ID NO: 2433907 - RNA, 22 nt, Human
caccucugcggaccccagcugu

SEQ ID NO: 2433908 - RNA, 13 nt, Human
caccucuggacug

SEQ ID NO: 2433909 - RNA, 17 nt, Human
caccucuggacuggcua

SEQ ID NO: 2433910 - RNA, 18 nt, Human
caccucuggacuggcuag

SEQ ID NO: 2433911 - RNA, 19 nt, Human
caccucugugaccucaggc

SEQ ID NO: 2433912 - RNA, 18 nt, Human
caccucugugaccucagg

SEQ ID NO: 2433913 - RNA, 17 nt, Human
caccucugugaccucag

SEQ ID NO: 2433914 - RNA, 15 nt, Human
caccucugugaccuc

SEQ ID NO: 2433915 - RNA, 14 nt, Human
caccucugugaccu

SEQ ID NO: 2433916 - RNA, 13 nt, Human
caccucugugacc

SEQ ID NO: 2433917 - RNA, 19 nt, Human
caccucuggacuggcuaga

SEQ ID NO: 2433918 - RNA, 22 nt, Human
caccucuuaaagaaaacccacc

SEQ ID NO: 2433919 - RNA, 20 nt, Human
caccucugugaccucaggca

SEQ ID NO: 2433920 - RNA, 22 nt, Human
caccucugugaccucaggcacu

SEQ ID NO: 2433921 - RNA, 20 nt, Human
caccucuucaccccccacuc

SEQ ID NO: 2433922 - RNA, 14 nt, Human
caccucuucacccc

SEQ ID NO: 2433923 - RNA, 18 nt, Human
caccucuucucuuccugu

SEQ ID NO: 2433924 - RNA, 17 nt, Human
caccucuucucuuccug

SEQ ID NO: 2433925 - RNA, 19 nt, Human
caccucuuuguguuuuauu

SEQ ID NO: 2433926 - RNA, 22 nt, Human
caccucuucucuuccuguaaca

SEQ ID NO: 2433927 - RNA, 15 nt, Human
caccugaagacucau

SEQ ID NO: 2433928 - RNA, 14 nt, Human
caccugaagacuca

SEQ ID NO: 2433929 - RNA, 23 nt, Human
caccugaagacucauucuucugu

SEQ ID NO: 2433930 - RNA, 16 nt, Human
caccugauguguacau

SEQ ID NO: 2433931 - RNA, 15 nt, Human
caccugauucaacua

SEQ ID NO: 2433932 - RNA, 16 nt, Human
caccugauucaacuaa

SEQ ID NO: 2433933 - RNA, 17 nt, Human
caccugauucaacuaaa

SEQ ID NO: 2433934 - RNA, 18 nt, Human
caccugauucaacuaaaa

SEQ ID NO: 2433935 - RNA, 19 nt, Human
caccugauucaacuaaaaa

SEQ ID NO: 2433936 - RNA, 21 nt, Human
caccugauucaacuaaaaaaa

SEQ ID NO: 2433937 - RNA, 19 nt, Human
caccugagucacccuaccu

SEQ ID NO: 2433938 - RNA, 23 nt, Human
caccugagucacccuaccugugc

SEQ ID NO: 2433939 - RNA, 15 nt, Human
caccugauguguaca

SEQ ID NO: 2433940 - RNA, 11 nt, Human
caccugaugug

SEQ ID NO: 2433941 - RNA, 24 nt, Human
caccugaggugggcccaggaccag

SEQ ID NO: 2433942 - RNA, 23 nt, Human
caccugcacuuaaggcacucugu

SEQ ID NO: 2433943 - RNA, 22 nt, Human
caccugcaccuccccccacugc

SEQ ID NO: 2433944 - RNA, 17 nt, Human
caccugcaccucccccc

SEQ ID NO: 2433945 - RNA, 19 nt, Human
caccugcaccuccccccac

SEQ ID NO: 2433946 - RNA, 11 nt, Human
caccugcaccu

SEQ ID NO: 2433947 - RNA, 13 nt, Human
caccugcaccucc

SEQ ID NO: 2433948 - RNA, 14 nt, Human
caccugcaccuccc

SEQ ID NO: 2433949 - RNA, 15 nt, Human
caccugcaccucccc

SEQ ID NO: 2433950 - RNA, 16 nt, Human
caccugagcaggaccu

SEQ ID NO: 2433951 - RNA, 19 nt, Human
caccugagcaggaccucug

SEQ ID NO: 2433952 - RNA, 20 nt, Human
caccugagcaggaccucuga

SEQ ID NO: 2433953 - RNA, 21 nt, Human
caccugagcaggaccucugaa

SEQ ID NO: 2433954 - RNA, 23 nt, Human
caccugacucugaaaucugaaga

SEQ ID NO: 2433955 - RNA, 20 nt, Human
caccugacucugaaaucuga

SEQ ID NO: 2433956 - RNA, 15 nt, Human
caccugacucugaaa

SEQ ID NO: 2433957 - RNA, 15 nt, Human
caccugaggugggcc

SEQ ID NO: 2433958 - RNA, 21 nt, Human
caccugagcccggaugcuucu

SEQ ID NO: 2433959 - RNA, 23 nt, Human
caccugagcccggaugcuucucc

SEQ ID NO: 2433960 - RNA, 19 nt, Human
caccugaggugggcccagg

SEQ ID NO: 2433961 - RNA, 18 nt, Human
caccugaggugggcccag

SEQ ID NO: 2433962 - RNA, 17 nt, Human
caccugaggugggccca

SEQ ID NO: 2433963 - RNA, 21 nt, Human
caccugaggugggcccaggac

SEQ ID NO: 2433964 - RNA, 20 nt, Human
caccugaggugggcccagga

SEQ ID NO: 2433965 - RNA, 18 nt, Human
caccugagguuaggaguu

SEQ ID NO: 2433966 - RNA, 20 nt, Human
caccuggaauauauaaccag

SEQ ID NO: 2433967 - RNA, 22 nt, Human
caccugcuggccccucaccugg

SEQ ID NO: 2433968 - RNA, 13 nt, Human
caccugcuggccc

SEQ ID NO: 2433969 - RNA, 14 nt, Human
caccugcuggcccc

SEQ ID NO: 2433970 - RNA, 15 nt, Human
caccugcuggccccu

SEQ ID NO: 2433971 - RNA, 16 nt, Human
caccugcuggccccuc

SEQ ID NO: 2433972 - RNA, 17 nt, Human
caccugcuggccccuca

SEQ ID NO: 2433973 - RNA, 18 nt, Human
caccugcuggccccucac

SEQ ID NO: 2433974 - RNA, 20 nt, Human
caccugcuggccccucaccu

SEQ ID NO: 2433975 - RNA, 14 nt, Human
caccugcucuucua

SEQ ID NO: 2433976 - RNA, 18 nt, Human
caccugcugagagaccca

SEQ ID NO: 2433977 - RNA, 19 nt, Human
caccugcugagagacccaa

SEQ ID NO: 2433978 - RNA, 22 nt, Human
caccugcugagagacccaagga

SEQ ID NO: 2433979 - RNA, 13 nt, Human
caccugcugcugc

SEQ ID NO: 2433980 - RNA, 15 nt, Human
caccugcuggaguga

SEQ ID NO: 2433981 - RNA, 23 nt, Human
caccugcggugcuaucuccccca

SEQ ID NO: 2433982 - RNA, 23 nt, Human
caccugcugagaaaacaugccuc

SEQ ID NO: 2433983 - RNA, 14 nt, Human
caccugcucccagg

SEQ ID NO: 2433984 - RNA, 13 nt, Human
caccugcucccag

SEQ ID NO: 2433985 - RNA, 19 nt, Human
caccugcucccaggccagu

SEQ ID NO: 2433986 - RNA, 18 nt, Human
caccugcagguugggcca

SEQ ID NO: 2433987 - RNA, 23 nt, Human
caccugcagguugggccauacug

SEQ ID NO: 2433988 - RNA, 22 nt, Human
caccugcagguugggccauacu

SEQ ID NO: 2433989 - RNA, 22 nt, Human
caccugcauccguaguucccug

SEQ ID NO: 2433990 - RNA, 20 nt, Human
caccuccacaguucaguggc

SEQ ID NO: 2433991 - RNA, 18 nt, Human
caccuccacaguucagug

SEQ ID NO: 2433992 - RNA, 14 nt, Human
caccuccacaguuc

SEQ ID NO: 2433993 - RNA, 13 nt, Human
caccuccacaguu

SEQ ID NO: 2433994 - RNA, 22 nt, Human
caccucaugcccacccccugcc

SEQ ID NO: 2433995 - RNA, 21 nt, Human
caccucaugcccacccccugc

SEQ ID NO: 2433996 - RNA, 20 nt, Human
caccucaugcccacccccug

SEQ ID NO: 2433997 - RNA, 19 nt, Human
caccucaugcccacccccu

SEQ ID NO: 2433998 - RNA, 14 nt, Human
caccucauggaauu

SEQ ID NO: 2433999 - RNA, 12 nt, Human
caccucauggaa

SEQ ID NO: 2434000 - RNA, 11 nt, Human
caccucaugga

SEQ ID NO: 2434001 - RNA, 17 nt, Human
caccuccacauccucca

SEQ ID NO: 2434002 - RNA, 16 nt, Human
caccuccacauccucc

SEQ ID NO: 2434003 - RNA, 10 nt, Human
caccucccag

SEQ ID NO: 2434004 - RNA, 21 nt, Human
caccuccccacgcccuccccu

SEQ ID NO: 2434005 - RNA, 19 nt, Human
caccuccccacgcccuccc

SEQ ID NO: 2434006 - RNA, 17 nt, Human
caccuccccacgcccuc

SEQ ID NO: 2434007 - RNA, 14 nt, Human
caccuccccacgcc

SEQ ID NO: 2434008 - RNA, 16 nt, Human
caccuccccagcauuc

SEQ ID NO: 2434009 - RNA, 14 nt, Human
caccuccccagcau

SEQ ID NO: 2434010 - RNA, 11 nt, Human
caccucccagg

SEQ ID NO: 2434011 - RNA, 12 nt, Human
caccucccagga

SEQ ID NO: 2434012 - RNA, 13 nt, Human
caccuccccacgc

SEQ ID NO: 2434013 - RNA, 9 nt, Human
caccucccc

SEQ ID NO: 2434014 - RNA, 13 nt, Human
caccucccauccu

SEQ ID NO: 2434015 - RNA, 16 nt, Human
caccucccauccuaau

SEQ ID NO: 2434016 - RNA, 10 nt, Human
caccucccuc

SEQ ID NO: 2434017 - RNA, 10 nt, Human
caccucccug

SEQ ID NO: 2434018 - RNA, 15 nt, Human
caccuccccuccuug

SEQ ID NO: 2434019 - RNA, 23 nt, Human
caccuccccuccuugccuccugu

SEQ ID NO: 2434020 - RNA, 19 nt, Human
caccuccccuauccaccca

SEQ ID NO: 2434021 - RNA, 20 nt, Human
caccuccccuauccacccag

SEQ ID NO: 2434022 - RNA, 11 nt, Human
caccuccccuc

SEQ ID NO: 2434023 - RNA, 14 nt, Human
caccuccccuccuu

SEQ ID NO: 2434024 - RNA, 14 nt, Human
caccuccccccacu

SEQ ID NO: 2434025 - RNA, 15 nt, Human
caccuccccccacug

SEQ ID NO: 2434026 - RNA, 16 nt, Human
caccuccccccacugc

SEQ ID NO: 2434027 - RNA, 17 nt, Human
caccuccccccacugca

SEQ ID NO: 2434028 - RNA, 18 nt, Human
caccuccccccacugcag

SEQ ID NO: 2434029 - RNA, 21 nt, Human
caccuccccccacugcaggcc

SEQ ID NO: 2434030 - RNA, 22 nt, Human
caccuccccccacugcaggccc

SEQ ID NO: 2434031 - RNA, 20 nt, Human
caccucccccucccccuucu

SEQ ID NO: 2434032 - RNA, 23 nt, Human
caccuccccccacugcaggcccc

SEQ ID NO: 2434033 - RNA, 16 nt, Human
caccucccccugcccc

SEQ ID NO: 2434034 - RNA, 13 nt, Human
caccuccccuauc

SEQ ID NO: 2434035 - RNA, 14 nt, Human
caccuccccuaucc

SEQ ID NO: 2434036 - RNA, 18 nt, Human
caccuccccuauccaccc

SEQ ID NO: 2434037 - RNA, 14 nt, Human
caccucccccaucu

SEQ ID NO: 2434038 - RNA, 21 nt, Human
caccucccccaucucuucugg

SEQ ID NO: 2434039 - RNA, 15 nt, Human
caccuccccaggccg

SEQ ID NO: 2434040 - RNA, 14 nt, Human
caccuccccaggcc

SEQ ID NO: 2434041 - RNA, 14 nt, Human
caccuccccagccu

SEQ ID NO: 2434042 - RNA, 21 nt, Human
caccuccccaggccguggcug

SEQ ID NO: 2434043 - RNA, 11 nt, Human
caccuccugcc

SEQ ID NO: 2434044 - RNA, 13 nt, Human
caccuccugccuc

SEQ ID NO: 2434045 - RNA, 14 nt, Human
caccuccugccucg

SEQ ID NO: 2434046 - RNA, 14 nt, Human
caccucccugaccc

SEQ ID NO: 2434047 - RNA, 13 nt, Human
caccucccugccu

SEQ ID NO: 2434048 - RNA, 14 nt, Human
caccucccugccuc

SEQ ID NO: 2434049 - RNA, 15 nt, Human
caccucccugccucc

SEQ ID NO: 2434050 - RNA, 17 nt, Human
caccucccugccuccag

SEQ ID NO: 2434051 - RNA, 14 nt, Human
caccuccucaugua

SEQ ID NO: 2434052 - RNA, 12 nt, Human
caccucccugcc

SEQ ID NO: 2434053 - RNA, 12 nt, Human
caccucccuccc

SEQ ID NO: 2434054 - RNA, 16 nt, Human
caccucccucccggca

SEQ ID NO: 2434055 - RNA, 19 nt, Human
caccucccugaaccauccc

SEQ ID NO: 2434056 - RNA, 16 nt, Human
caccucuccaagggcu

SEQ ID NO: 2434057 - RNA, 15 nt, Human
caccucuccaagggc

SEQ ID NO: 2434058 - RNA, 13 nt, Human
caccucuccaagg

SEQ ID NO: 2434059 - RNA, 12 nt, Human
caccucuccaag

SEQ ID NO: 2434060 - RNA, 11 nt, Human
caccucuccaa

SEQ ID NO: 2434061 - RNA, 12 nt, Human
caccuccuucuc

SEQ ID NO: 2434062 - RNA, 17 nt, Human
caccucucccuuggauu

SEQ ID NO: 2434063 - RNA, 14 nt, Human
caccucucccuugg

SEQ ID NO: 2434064 - RNA, 13 nt, Human
caccucucccuug

SEQ ID NO: 2434065 - RNA, 13 nt, Human
caccucucccuca

SEQ ID NO: 2434066 - RNA, 12 nt, Human
caccucucccuc

SEQ ID NO: 2434067 - RNA, 22 nt, Human
caccucuccaagggcuucugca

SEQ ID NO: 2434068 - RNA, 18 nt, Human
caccucuccaagggcuuc

SEQ ID NO: 2434069 - RNA, 19 nt, Human
caccucucccucaacaagg

SEQ ID NO: 2434070 - RNA, 14 nt, Human
caccucucccucaa

SEQ ID NO: 2434071 - RNA, 19 nt, Human
caccucucccugacccugu

SEQ ID NO: 2434072 - RNA, 16 nt, Human
caccggcuggccuggc

SEQ ID NO: 2434073 - RNA, 15 nt, Human
caccggcuggccugg

SEQ ID NO: 2434074 - RNA, 14 nt, Human
caccggcuggccug

SEQ ID NO: 2434075 - RNA, 15 nt, Human
caccggauccugggu

SEQ ID NO: 2434076 - RNA, 21 nt, Human
caccggauccuggguggucug

SEQ ID NO: 2434077 - RNA, 22 nt, Human
caccggauccuggguggucugc

SEQ ID NO: 2434078 - RNA, 18 nt, Human
caccggcuggccuggccc

SEQ ID NO: 2434079 - RNA, 17 nt, Human
caccggcuggccuggcc

SEQ ID NO: 2434080 - RNA, 20 nt, Human
caccggcuggccuggccccu

SEQ ID NO: 2434081 - RNA, 14 nt, Human
caccgggcacucag

SEQ ID NO: 2434082 - RNA, 22 nt, Human
caccgccgacuuuguacccccc

SEQ ID NO: 2434083 - RNA, 19 nt, Human
caccgccgacuuuguaccc

SEQ ID NO: 2434084 - RNA, 22 nt, Human
caccgccauggcuuccaaggug

SEQ ID NO: 2434085 - RNA, 16 nt, Human
caccgccauggcuucc

SEQ ID NO: 2434086 - RNA, 23 nt, Human
caccgccauggcuuccaaggugg

SEQ ID NO: 2434087 - RNA, 13 nt, Human
caccgccauggcu

SEQ ID NO: 2434088 - RNA, 18 nt, Human
caccgccacauggcuucc

SEQ ID NO: 2434089 - RNA, 21 nt, Human
caccgccacaauaaagaucgc

SEQ ID NO: 2434090 - RNA, 22 nt, Human
caccgcaugcccccucgugcca

SEQ ID NO: 2434091 - RNA, 19 nt, Human
caccgcaugcccccucgug

SEQ ID NO: 2434092 - RNA, 18 nt, Human
caccgcaugcccccucgu

SEQ ID NO: 2434093 - RNA, 16 nt, Human
caccgcaugcccccuc

SEQ ID NO: 2434094 - RNA, 15 nt, Human
caccgcaugcccccu

SEQ ID NO: 2434095 - RNA, 21 nt, Human
caccgcagacaggaccaggga

SEQ ID NO: 2434096 - RNA, 14 nt, Human
caccgcaugccccc

SEQ ID NO: 2434097 - RNA, 19 nt, Human
caccgcagucgucgcacag

SEQ ID NO: 2434098 - RNA, 13 nt, Human
caccgcagucguc

SEQ ID NO: 2434099 - RNA, 21 nt, Human
caccgagaguagccgagagcc

SEQ ID NO: 2434100 - RNA, 13 nt, Human
caccgcuccccag

SEQ ID NO: 2434101 - RNA, 17 nt, Human
caccgccuccuacagcc

SEQ ID NO: 2434102 - RNA, 23 nt, Human
caccgcuuccggcuccugugcuu

SEQ ID NO: 2434103 - RNA, 22 nt, Human
caccggagcuuucaaagaagga

SEQ ID NO: 2434104 - RNA, 22 nt, Human
caccgcugccuaaguggcugcu

SEQ ID NO: 2434105 - RNA, 22 nt, Human
caccgcuuccggcuccugugcu

SEQ ID NO: 2434106 - RNA, 19 nt, Human
caccgcugccuaaguggcu

SEQ ID NO: 2434107 - RNA, 14 nt, Human
caccgcuccccagc

SEQ ID NO: 2434108 - RNA, 16 nt, Human
caccgcuccccagccc

SEQ ID NO: 2434109 - RNA, 17 nt, Human
caccgcuccccagccca

SEQ ID NO: 2434110 - RNA, 18 nt, Human
caccgcuccccagcccag

SEQ ID NO: 2434111 - RNA, 20 nt, Human
caccgcuccccagcccaggg

SEQ ID NO: 2434112 - RNA, 21 nt, Human
caccgcuccccagcccagggu

SEQ ID NO: 2434113 - RNA, 12 nt, Human
caccgcugccua

SEQ ID NO: 2434114 - RNA, 13 nt, Human
caccgcugccuaa

SEQ ID NO: 2434115 - RNA, 15 nt, Human
caccggggccucgga

SEQ ID NO: 2434116 - RNA, 13 nt, Human
caccgggccugga

SEQ ID NO: 2434117 - RNA, 18 nt, Human
caccgggccacagagaaa

SEQ ID NO: 2434118 - RNA, 15 nt, Human
caccgggccacagag

SEQ ID NO: 2434119 - RNA, 22 nt, Human
caccgggcacucagaagacacu

SEQ ID NO: 2434120 - RNA, 15 nt, Human
caccgggcacucaga

SEQ ID NO: 2434121 - RNA, 17 nt, Human
caccgugggcucccuga

SEQ ID NO: 2434122 - RNA, 18 nt, Human
caccgugggcucccugac

SEQ ID NO: 2434123 - RNA, 13 nt, Human
caccgugggcucc

SEQ ID NO: 2434124 - RNA, 15 nt, Human
caccgugggcaggga

SEQ ID NO: 2434125 - RNA, 23 nt, Human
caccucaggccaggugcaguggc

SEQ ID NO: 2434126 - RNA, 15 nt, Human
caccguguaaaccaa

SEQ ID NO: 2434127 - RNA, 11 nt, Human
caccucaguuc

SEQ ID NO: 2434128 - RNA, 17 nt, Human
caccucaguucccuugg

SEQ ID NO: 2434129 - RNA, 18 nt, Human
caccucaguucccuuggc

SEQ ID NO: 2434130 - RNA, 19 nt, Human
caccucaguucccuuggcc

SEQ ID NO: 2434131 - RNA, 20 nt, Human
caccucaguucccuuggccu

SEQ ID NO: 2434132 - RNA, 21 nt, Human
caccucaguucccuuggccuc

SEQ ID NO: 2434133 - RNA, 22 nt, Human
caccucaguucccuuggccuca

SEQ ID NO: 2434134 - RNA, 18 nt, Human
caccucaugcccaccccc

SEQ ID NO: 2434135 - RNA, 17 nt, Human
caccucaugcccacccc

SEQ ID NO: 2434136 - RNA, 16 nt, Human
caccucaugcccaccc

SEQ ID NO: 2434137 - RNA, 15 nt, Human
caccucaugcccacc

SEQ ID NO: 2434138 - RNA, 14 nt, Human
caccucaugcccac

SEQ ID NO: 2434139 - RNA, 12 nt, Human
caccucaugccc

SEQ ID NO: 2434140 - RNA, 23 nt, Human
caccucaguucccuuggccucag

SEQ ID NO: 2434141 - RNA, 19 nt, Human
caccguccgcccugcuccu

SEQ ID NO: 2434142 - RNA, 18 nt, Human
caccguccgcccugcucc

SEQ ID NO: 2434143 - RNA, 15 nt, Human
caccguggaccuucc

SEQ ID NO: 2434144 - RNA, 20 nt, Human
caccgugccuggccacgccc

SEQ ID NO: 2434145 - RNA, 19 nt, Human
caccguggaccuuccugcc

SEQ ID NO: 2434146 - RNA, 18 nt, Human
caccguggaccuuccugc

SEQ ID NO: 2434147 - RNA, 17 nt, Human
caccguggaccuuccug

SEQ ID NO: 2434148 - RNA, 16 nt, Human
caccguggaccuuccu

SEQ ID NO: 2434149 - RNA, 23 nt, Human
caccguggaccuuccugccacca

SEQ ID NO: 2434150 - RNA, 20 nt, Human
caccguggaccuuccugcca

SEQ ID NO: 2434151 - RNA, 17 nt, Human
caccguggaggaggaag

SEQ ID NO: 2434152 - RNA, 15 nt, Human
caccguggcuaagag

SEQ ID NO: 2434153 - RNA, 15 nt, Human
caccgugccuggcca

SEQ ID NO: 2434154 - RNA, 16 nt, Human
caccguccgcccugcu

SEQ ID NO: 2434155 - RNA, 15 nt, Human
caccguccgcccugc

SEQ ID NO: 2434156 - RNA, 14 nt, Human
caccguccgcccug

SEQ ID NO: 2434157 - RNA, 19 nt, Human
caccgucauggcuuaaugu

SEQ ID NO: 2434158 - RNA, 15 nt, Human
caccgucauggcuua

SEQ ID NO: 2434159 - RNA, 23 nt, Human
caccgucauggcuuaauguuuau

SEQ ID NO: 2434160 - RNA, 14 nt, Human
caccguacugugga

SEQ ID NO: 2434161 - RNA, 20 nt, Human
cacauauugauuuccguuaa

SEQ ID NO: 2434162 - RNA, 13 nt, Human
cacauauugauuu

SEQ ID NO: 2434163 - RNA, 20 nt, Human
caccccucaacaccucugca

SEQ ID NO: 2434164 - RNA, 17 nt, Human
caccccucacucuggcc

SEQ ID NO: 2434165 - RNA, 12 nt, Human
caccccucacuc

SEQ ID NO: 2434166 - RNA, 15 nt, Human
caccccuaaagagau

SEQ ID NO: 2434167 - RNA, 13 nt, Human
caccccucccauu

SEQ ID NO: 2434168 - RNA, 12 nt, Human
caccccucccau

SEQ ID NO: 2434169 - RNA, 10 nt, Human
caccccuccc

SEQ ID NO: 2434170 - RNA, 13 nt, Human
caccccuccagga

SEQ ID NO: 2434171 - RNA, 17 nt, Human
caccccucccauuagga

SEQ ID NO: 2434172 - RNA, 13 nt, Human
caccccuccccau

SEQ ID NO: 2434173 - RNA, 15 nt, Human
caccccuccccugcc

SEQ ID NO: 2434174 - RNA, 15 nt, Human
caccccucccuuucu

SEQ ID NO: 2434175 - RNA, 22 nt, Human
caccccuccccugcccuagagc

SEQ ID NO: 2434176 - RNA, 18 nt, Human
caccccucccuuucuccc

SEQ ID NO: 2434177 - RNA, 12 nt, Human
caccccuccuuc

SEQ ID NO: 2434178 - RNA, 14 nt, Human
caccccuccuuccu

SEQ ID NO: 2434179 - RNA, 18 nt, Human
caccccugcccccacuuc

SEQ ID NO: 2434180 - RNA, 14 nt, Human
caccccugccccca

SEQ ID NO: 2434181 - RNA, 13 nt, Human
caccccugccccc

SEQ ID NO: 2434182 - RNA, 15 nt, Human
caccccucucugcau

SEQ ID NO: 2434183 - RNA, 11 nt, Human
caccccugccc

SEQ ID NO: 2434184 - RNA, 12 nt, Human
caccccucucug

SEQ ID NO: 2434185 - RNA, 23 nt, Human
caccccuccuuccuugaccagca

SEQ ID NO: 2434186 - RNA, 18 nt, Human
caccccugccuccacccu

SEQ ID NO: 2434187 - RNA, 16 nt, Human
caccccugccuccacc

SEQ ID NO: 2434188 - RNA, 15 nt, Human
caccccugccuccac

SEQ ID NO: 2434189 - RNA, 14 nt, Human
caccccugccucca

SEQ ID NO: 2434190 - RNA, 22 nt, Human
caccccugccuccacccucuga

SEQ ID NO: 2434191 - RNA, 20 nt, Human
caccccugccuccacccucu

SEQ ID NO: 2434192 - RNA, 23 nt, Human
caccccugccuccacccucugag

SEQ ID NO: 2434193 - RNA, 18 nt, Human
caccccugcccccagccc

SEQ ID NO: 2434194 - RNA, 21 nt, Human
caccccugcccccacuuccug

SEQ ID NO: 2434195 - RNA, 19 nt, Human
caccccugcccccagcccc

SEQ ID NO: 2434196 - RNA, 15 nt, Human
caccccugcccuggg

SEQ ID NO: 2434197 - RNA, 13 nt, Human
caccccugccucc

SEQ ID NO: 2434198 - RNA, 12 nt, Human
caccccugccuc

SEQ ID NO: 2434199 - RNA, 16 nt, Human
caccccugcccuggga

SEQ ID NO: 2434200 - RNA, 24 nt, Human
caccccugcccugggauguccaca

SEQ ID NO: 2434201 - RNA, 14 nt, Human
cacccgacuccuca

SEQ ID NO: 2434202 - RNA, 15 nt, Human
cacccgacuccucaa

SEQ ID NO: 2434203 - RNA, 16 nt, Human
cacccgacuccucaaa

SEQ ID NO: 2434204 - RNA, 12 nt, Human
cacccgaggcug

SEQ ID NO: 2434205 - RNA, 15 nt, Human
cacccgaggcugccc

SEQ ID NO: 2434206 - RNA, 16 nt, Human
cacccgaggcugccca

SEQ ID NO: 2434207 - RNA, 19 nt, Human
cacccgaugcugcuuuccc

SEQ ID NO: 2434208 - RNA, 18 nt, Human
cacccgaugcugcuuucc

SEQ ID NO: 2434209 - RNA, 16 nt, Human
cacccgaugcugcuuu

SEQ ID NO: 2434210 - RNA, 15 nt, Human
cacccgaugcugcuu

SEQ ID NO: 2434211 - RNA, 14 nt, Human
cacccgaugcugcu

SEQ ID NO: 2434212 - RNA, 13 nt, Human
cacccgaugcugc

SEQ ID NO: 2434213 - RNA, 17 nt, Human
cacccgaggcugcccac

SEQ ID NO: 2434214 - RNA, 18 nt, Human
cacccgaggcugcccacu

SEQ ID NO: 2434215 - RNA, 13 nt, Human
cacccgaccacac

SEQ ID NO: 2434216 - RNA, 19 nt, Human
caccccuugcucucaaccc

SEQ ID NO: 2434217 - RNA, 21 nt, Human
caccccuucucuccuccccaa

SEQ ID NO: 2434218 - RNA, 18 nt, Human
caccccuucucuccuccc

SEQ ID NO: 2434219 - RNA, 12 nt, Human
caccccuucucu

SEQ ID NO: 2434220 - RNA, 22 nt, Human
caccccuuccugucccaccucu

SEQ ID NO: 2434221 - RNA, 16 nt, Human
caccccuuccuguccc

SEQ ID NO: 2434222 - RNA, 14 nt, Human
caccccuuccuguc

SEQ ID NO: 2434223 - RNA, 13 nt, Human
caccccuuccugu

SEQ ID NO: 2434224 - RNA, 14 nt, Human
caccccuuccccac

SEQ ID NO: 2434225 - RNA, 15 nt, Human
caccccuuccccacu

SEQ ID NO: 2434226 - RNA, 12 nt, Human
caccccuuccug

SEQ ID NO: 2434227 - RNA, 18 nt, Human
caccccuuccccacugcc

SEQ ID NO: 2434228 - RNA, 13 nt, Human
caccccugugcuc

SEQ ID NO: 2434229 - RNA, 12 nt, Human
caccccugugcu

SEQ ID NO: 2434230 - RNA, 13 nt, Human
caccccugucucu

SEQ ID NO: 2434231 - RNA, 23 nt, Human
caccccuguccucacugcucccu

SEQ ID NO: 2434232 - RNA, 21 nt, Human
caccccuguccucacugcucc

SEQ ID NO: 2434233 - RNA, 20 nt, Human
caccccuguccucacugcuc

SEQ ID NO: 2434234 - RNA, 18 nt, Human
caccccuguccucacugc

SEQ ID NO: 2434235 - RNA, 17 nt, Human
caccccuguccucacug

SEQ ID NO: 2434236 - RNA, 12 nt, Human
caccccuggggg

SEQ ID NO: 2434237 - RNA, 14 nt, Human
caccccugggggcu

SEQ ID NO: 2434238 - RNA, 18 nt, Human
caccccugggggcucuca

SEQ ID NO: 2434239 - RNA, 18 nt, Human
caccccugguucucaucu

SEQ ID NO: 2434240 - RNA, 17 nt, Human
caccccugguucucauc

SEQ ID NO: 2434241 - RNA, 19 nt, Human
caccccuuauccaggacuc

SEQ ID NO: 2434242 - RNA, 18 nt, Human
caccccuuauccaggacu

SEQ ID NO: 2434243 - RNA, 17 nt, Human
caccccuuauccaggac

SEQ ID NO: 2434244 - RNA, 16 nt, Human
caccccuuauccagga

SEQ ID NO: 2434245 - RNA, 23 nt, Human
caccccugugcuccgugccucca

SEQ ID NO: 2434246 - RNA, 22 nt, Human
caccccugugcuccgugccucc

SEQ ID NO: 2434247 - RNA, 21 nt, Human
caccccugugcuccgugccuc

SEQ ID NO: 2434248 - RNA, 17 nt, Human
caccccugugcuccgug

SEQ ID NO: 2434249 - RNA, 15 nt, Human
caccccuuccaugug

SEQ ID NO: 2434250 - RNA, 14 nt, Human
caccccuuccaugu

SEQ ID NO: 2434251 - RNA, 11 nt, Human
caccccuucca

SEQ ID NO: 2434252 - RNA, 20 nt, Human
caccccuuauccaggacucu

SEQ ID NO: 2434253 - RNA, 16 nt, Human
caccccuuccaugugg

SEQ ID NO: 2434254 - RNA, 11 nt, Human
caccccuuccc

SEQ ID NO: 2434255 - RNA, 12 nt, Human
caccccuucccc

SEQ ID NO: 2434256 - RNA, 13 nt, Human
caccccuucccca

SEQ ID NO: 2434257 - RNA, 21 nt, Human
cacccggccccugcugguuca

SEQ ID NO: 2434258 - RNA, 18 nt, Human
cacccggccccugcuggu

SEQ ID NO: 2434259 - RNA, 17 nt, Human
cacccggccccugcugg

SEQ ID NO: 2434260 - RNA, 16 nt, Human
cacccggccccugcug

SEQ ID NO: 2434261 - RNA, 14 nt, Human
cacccggccccugc

SEQ ID NO: 2434262 - RNA, 13 nt, Human
cacccggccccug

SEQ ID NO: 2434263 - RNA, 19 nt, Human
cacccgcuaagagggaggg

SEQ ID NO: 2434264 - RNA, 12 nt, Human
cacccggccccu

SEQ ID NO: 2434265 - RNA, 16 nt, Human
cacccgccuuuuauaa

SEQ ID NO: 2434266 - RNA, 14 nt, Human
cacccgccucuccc

SEQ ID NO: 2434267 - RNA, 13 nt, Human
cacccgccucucc

SEQ ID NO: 2434268 - RNA, 23 nt, Human
cacccgaugcugcuuuccccugu

SEQ ID NO: 2434269 - RNA, 21 nt, Human
cacccggcugcagaggccaga

SEQ ID NO: 2434270 - RNA, 15 nt, Human
cacccggcugcagag

SEQ ID NO: 2434271 - RNA, 23 nt, Human
cacccgggcucagggaccacagc

SEQ ID NO: 2434272 - RNA, 13 nt, Human
cacccgggcucag

SEQ ID NO: 2434273 - RNA, 16 nt, Human
cacccguggagauggg

SEQ ID NO: 2434274 - RNA, 18 nt, Human
cacccguucugcuggccu

SEQ ID NO: 2434275 - RNA, 17 nt, Human
cacccguggagauggga

SEQ ID NO: 2434276 - RNA, 20 nt, Human
cacccguucugcuggccugg

SEQ ID NO: 2434277 - RNA, 19 nt, Human
cacccguucugcuggccug

SEQ ID NO: 2434278 - RNA, 21 nt, Human
cacccguucugcuggccugga

SEQ ID NO: 2434279 - RNA, 12 nt, Human
cacccuaccugu

SEQ ID NO: 2434280 - RNA, 16 nt, Human
cacccuaccuguucag

SEQ ID NO: 2434281 - RNA, 14 nt, Human
cacccuaccuguuc

SEQ ID NO: 2434282 - RNA, 16 nt, Human
cacccuaccugugccu

SEQ ID NO: 2434283 - RNA, 16 nt, Human
cacccuagucccuucc

SEQ ID NO: 2434284 - RNA, 17 nt, Human
cacccuagucccuuccc

SEQ ID NO: 2434285 - RNA, 20 nt, Human
cacccugucccccagcucug

SEQ ID NO: 2434286 - RNA, 19 nt, Human
cacccugucccccagcucu

SEQ ID NO: 2434287 - RNA, 18 nt, Human
cacccugucccccagcuc

SEQ ID NO: 2434288 - RNA, 16 nt, Human
cacccugucccccagc

SEQ ID NO: 2434289 - RNA, 23 nt, Human
cacccugucccccagcucuggug

SEQ ID NO: 2434290 - RNA, 22 nt, Human
cacccugucccccagcucuggu

SEQ ID NO: 2434291 - RNA, 17 nt, Human
cacccugucuaaaaaac

SEQ ID NO: 2434292 - RNA, 18 nt, Human
cacccucagcaccccuuc

SEQ ID NO: 2434293 - RNA, 15 nt, Human
cacccugucccccag

SEQ ID NO: 2434294 - RNA, 17 nt, Human
cacccucagcaccccuu

SEQ ID NO: 2434295 - RNA, 16 nt, Human
cacccucagcaccccu

SEQ ID NO: 2434296 - RNA, 12 nt, Human
cacccucacacu

SEQ ID NO: 2434297 - RNA, 17 nt, Human
cacccuaguuucccuga

SEQ ID NO: 2434298 - RNA, 16 nt, Human
cacccuaguuucccug

SEQ ID NO: 2434299 - RNA, 18 nt, Human
cacccucaaccucuucug

SEQ ID NO: 2434300 - RNA, 18 nt, Human
cacccuagucccuucccc

SEQ ID NO: 2434301 - RNA, 20 nt, Human
cacccuagucccuuccccuc

SEQ ID NO: 2434302 - RNA, 23 nt, Human
cacccugugauggggcccugccu

SEQ ID NO: 2434303 - RNA, 22 nt, Human
cacccugugauggggcccugcc

SEQ ID NO: 2434304 - RNA, 21 nt, Human
cacccugugauggggcccugc

SEQ ID NO: 2434305 - RNA, 20 nt, Human
cacccugugauggggcccug

SEQ ID NO: 2434306 - RNA, 18 nt, Human
cacccugugauggggccc

SEQ ID NO: 2434307 - RNA, 15 nt, Human
cacccugugaugggg

SEQ ID NO: 2434308 - RNA, 12 nt, Human
cacccugugaug

SEQ ID NO: 2434309 - RNA, 11 nt, Human
cacccugugau

SEQ ID NO: 2434310 - RNA, 14 nt, Human
cacccuuggacuug

SEQ ID NO: 2434311 - RNA, 13 nt, Human
cacccuuggacuu

SEQ ID NO: 2434312 - RNA, 23 nt, Human
cacccuugcccaccccaccccca

SEQ ID NO: 2434313 - RNA, 12 nt, Human
cacccuugccca

SEQ ID NO: 2434314 - RNA, 21 nt, Human
cacccuucuuuccucuucccc

SEQ ID NO: 2434315 - RNA, 20 nt, Human
cacccuucuuuccucuuccc

SEQ ID NO: 2434316 - RNA, 19 nt, Human
cacccuucuuuccucuucc

SEQ ID NO: 2434317 - RNA, 18 nt, Human
cacccuucuuuccucuuc

SEQ ID NO: 2434318 - RNA, 16 nt, Human
cacccuucuuuccucu

SEQ ID NO: 2434319 - RNA, 15 nt, Human
cacccuucuuuccuc

SEQ ID NO: 2434320 - RNA, 13 nt, Human
cacccuucuuucc

SEQ ID NO: 2434321 - RNA, 16 nt, Human
cacccuuggacuugag

SEQ ID NO: 2434322 - RNA, 17 nt, Human
cacccuuggaggcuguc

SEQ ID NO: 2434323 - RNA, 19 nt, Human
cacccuuggaggcugucuu

SEQ ID NO: 2434324 - RNA, 20 nt, Human
cacccuuggaggcugucuuc

SEQ ID NO: 2434325 - RNA, 21 nt, Human
cacccuuggaggcugucuucu

SEQ ID NO: 2434326 - RNA, 12 nt, Human
cacccuuggccu

SEQ ID NO: 2434327 - RNA, 13 nt, Human
cacccuuggccug

SEQ ID NO: 2434328 - RNA, 15 nt, Human
cacccuuggccuguc

SEQ ID NO: 2434329 - RNA, 18 nt, Human
cacccuuggccugucuca

SEQ ID NO: 2434330 - RNA, 16 nt, Human
cacccuuaccaugugc

SEQ ID NO: 2434331 - RNA, 20 nt, Human
cacccuucacauacccuccc

SEQ ID NO: 2434332 - RNA, 22 nt, Human
cacccuucacauacccuccccc

SEQ ID NO: 2434333 - RNA, 13 nt, Human
cacccuuccccuc

SEQ ID NO: 2434334 - RNA, 14 nt, Human
cacccuuccccucc

SEQ ID NO: 2434335 - RNA, 22 nt, Human
cacccuuccccuccuucucccu

SEQ ID NO: 2434336 - RNA, 23 nt, Human
cacccuuccccuccuucucccuu

SEQ ID NO: 2434337 - RNA, 18 nt, Human
caccgcagacaggaccag

SEQ ID NO: 2434338 - RNA, 17 nt, Human
caccgcagacaggacca

SEQ ID NO: 2434339 - RNA, 15 nt, Human
caccgcagacaggac

SEQ ID NO: 2434340 - RNA, 14 nt, Human
caccgcagacagga

SEQ ID NO: 2434341 - RNA, 13 nt, Human
caccgcagacagg

SEQ ID NO: 2434342 - RNA, 12 nt, Human
caccgcagacag

SEQ ID NO: 2434343 - RNA, 18 nt, Human
caccgacgcgucuccugu

SEQ ID NO: 2434344 - RNA, 17 nt, Human
caccgacgcgucuccug

SEQ ID NO: 2434345 - RNA, 23 nt, Human
caccgaaguggacuggccccugg

SEQ ID NO: 2434346 - RNA, 22 nt, Human
caccgaaguggacuggccccug

SEQ ID NO: 2434347 - RNA, 19 nt, Human
caccgacgcgucuccuguu

SEQ ID NO: 2434348 - RNA, 12 nt, Human
caccgagugggg

SEQ ID NO: 2434349 - RNA, 17 nt, Human
caccgagggcgaccccg

SEQ ID NO: 2434350 - RNA, 13 nt, Human
caccgagaauguu

SEQ ID NO: 2434351 - RNA, 18 nt, Human
caccgagaguagccgaga

SEQ ID NO: 2434352 - RNA, 18 nt, Human
caccgaaaacguggcugc

SEQ ID NO: 2434353 - RNA, 15 nt, Human
caccgaaaacguggc

SEQ ID NO: 2434354 - RNA, 22 nt, Human
cacccuuugcugugaggcuguc

SEQ ID NO: 2434355 - RNA, 20 nt, Human
cacccuuugcugugaggcug

SEQ ID NO: 2434356 - RNA, 15 nt, Human
cacccuuuuccagcu

SEQ ID NO: 2434357 - RNA, 17 nt, Human
cacccuuuuccagcugg

SEQ ID NO: 2434358 - RNA, 22 nt, Human
cacccuuggaggcugucuucuc

SEQ ID NO: 2434359 - RNA, 21 nt, Human
cacccuuggccugucucaucc

SEQ ID NO: 2434360 - RNA, 23 nt, Human
cacccuuggccugucucaucccc

SEQ ID NO: 2434361 - RNA, 21 nt, Human
caccgaaaacguggcugcuuc

SEQ ID NO: 2434362 - RNA, 19 nt, Human
caccgaaaacguggcugcu

SEQ ID NO: 2434363 - RNA, 22 nt, Human
caccgaaaacguggcugcuuca

SEQ ID NO: 2434364 - RNA, 21 nt, Human
caccgaaguggacuggccccu

SEQ ID NO: 2434365 - RNA, 21 nt, Human
cacccuuuuccagcuggauga

SEQ ID NO: 2434366 - RNA, 22 nt, Human
cagaggcagccccauucugccu

SEQ ID NO: 2434367 - RNA, 20 nt, Human
cagaggcagccccauucugc

SEQ ID NO: 2434368 - RNA, 19 nt, Human
cagaggcagccccauucug

SEQ ID NO: 2434369 - RNA, 18 nt, Human
cagaggcagccccauucu

SEQ ID NO: 2434370 - RNA, 15 nt, Human
cagaggcagccccau

SEQ ID NO: 2434371 - RNA, 14 nt, Human
cagaggcagcccca

SEQ ID NO: 2434372 - RNA, 13 nt, Human
cagaggcagcccc

SEQ ID NO: 2434373 - RNA, 12 nt, Human
cagaggcagccc

SEQ ID NO: 2434374 - RNA, 20 nt, Human
cagaggccagaggcccccag

SEQ ID NO: 2434375 - RNA, 14 nt, Human
cagaggccauggca

SEQ ID NO: 2434376 - RNA, 21 nt, Human
cagaggccaugggccuccugu

SEQ ID NO: 2434377 - RNA, 20 nt, Human
cagaggccaugggccuccug

SEQ ID NO: 2434378 - RNA, 16 nt, Human
cagaggccaugggccu

SEQ ID NO: 2434379 - RNA, 19 nt, Human
cagaggccaugggccuccu

SEQ ID NO: 2434380 - RNA, 23 nt, Human
cagaggcagccccauucugccug

SEQ ID NO: 2434381 - RNA, 22 nt, Human
cagaggauggccagugucuguc

SEQ ID NO: 2434382 - RNA, 19 nt, Human
cagaggauggccagugucu

SEQ ID NO: 2434383 - RNA, 21 nt, Human
cagaggauugcugccccauca

SEQ ID NO: 2434384 - RNA, 19 nt, Human
cagagggagugacagaggc

SEQ ID NO: 2434385 - RNA, 18 nt, Human
cagagggagugacagagg

SEQ ID NO: 2434386 - RNA, 16 nt, Human
cagagggagugacaga

SEQ ID NO: 2434387 - RNA, 14 nt, Human
cagagggagugaca

SEQ ID NO: 2434388 - RNA, 23 nt, Human
cagaggcugccucucccaucacu

SEQ ID NO: 2434389 - RNA, 14 nt, Human
cagaggcugcccca

SEQ ID NO: 2434390 - RNA, 13 nt, Human
cagaggcuggagg

SEQ ID NO: 2434391 - RNA, 17 nt, Human
cagaggcuaauucugca

SEQ ID NO: 2434392 - RNA, 14 nt, Human
cagaggcuggaggc

SEQ ID NO: 2434393 - RNA, 16 nt, Human
cagaggcuggaggcag

SEQ ID NO: 2434394 - RNA, 17 nt, Human
cagaggcuggaggcagg

SEQ ID NO: 2434395 - RNA, 18 nt, Human
cagaggcuggaggcaggg

SEQ ID NO: 2434396 - RNA, 13 nt, Human
cagaggcuggguu

SEQ ID NO: 2434397 - RNA, 12 nt, Human
cagaggcugggu

SEQ ID NO: 2434398 - RNA, 19 nt, Human
cagaggcuggaggcagggc

SEQ ID NO: 2434399 - RNA, 20 nt, Human
cagaggcuggaggcagggcc

SEQ ID NO: 2434400 - RNA, 14 nt, Human
cagaggcuggguuc

SEQ ID NO: 2434401 - RNA, 21 nt, Human
cagaggcuggaggcagggccu

SEQ ID NO: 2434402 - RNA, 15 nt, Human
cagaggcuucuucag

SEQ ID NO: 2434403 - RNA, 16 nt, Human
cagaggcuucuucaga

SEQ ID NO: 2434404 - RNA, 20 nt, Human
cagaggcuucuucagaucag

SEQ ID NO: 2434405 - RNA, 23 nt, Human
cagagggaaaguaaauauuucag

SEQ ID NO: 2434406 - RNA, 19 nt, Human
cagagggaagaaaagagcu

SEQ ID NO: 2434407 - RNA, 17 nt, Human
cagaggcgcacugugac

SEQ ID NO: 2434408 - RNA, 14 nt, Human
cagaggccugcccg

SEQ ID NO: 2434409 - RNA, 13 nt, Human
cagaggccugccc

SEQ ID NO: 2434410 - RNA, 23 nt, Human
cagaggcgcaugaauuugugaag

SEQ ID NO: 2434411 - RNA, 18 nt, Human
cagaggcgcacugugacc

SEQ ID NO: 2434412 - RNA, 20 nt, Human
cagaggcuauuauuuucacu

SEQ ID NO: 2434413 - RNA, 13 nt, Human
cagaggcugccuc

SEQ ID NO: 2434414 - RNA, 22 nt, Human
cagaggcccccagcccagggcu

SEQ ID NO: 2434415 - RNA, 19 nt, Human
cagaggcccccagcccagg

SEQ ID NO: 2434416 - RNA, 17 nt, Human
cagaggcccccagccca

SEQ ID NO: 2434417 - RNA, 16 nt, Human
cagaggcccccagccc

SEQ ID NO: 2434418 - RNA, 13 nt, Human
cagaggccccagc

SEQ ID NO: 2434419 - RNA, 14 nt, Human
cagaggccccagcc

SEQ ID NO: 2434420 - RNA, 16 nt, Human
cagaggccccagccuc

SEQ ID NO: 2434421 - RNA, 17 nt, Human
cagaggccccagccucc

SEQ ID NO: 2434422 - RNA, 24 nt, Human
cagaggcccccagcccagggcucc

SEQ ID NO: 2434423 - RNA, 23 nt, Human
cagaggcccccagcccagggcuc

SEQ ID NO: 2434424 - RNA, 19 nt, Human
cagaggcccucgcugccag

SEQ ID NO: 2434425 - RNA, 20 nt, Human
cagaggccuauaaugaagcu

SEQ ID NO: 2434426 - RNA, 20 nt, Human
cagaggcccucgcugccagc

SEQ ID NO: 2434427 - RNA, 16 nt, Human
cagaggccuauaauga

SEQ ID NO: 2434428 - RNA, 23 nt, Human
cagagggagugacagaggcagcc

SEQ ID NO: 2434429 - RNA, 22 nt, Human
cagagggagugacagaggcagc

SEQ ID NO: 2434430 - RNA, 21 nt, Human
cagagggagugacagaggcag

SEQ ID NO: 2434431 - RNA, 20 nt, Human
cagagggagugacagaggca

SEQ ID NO: 2434432 - RNA, 19 nt, Human
cagagggccugcaagggag

SEQ ID NO: 2434433 - RNA, 15 nt, Human
cagagggccugcaag

SEQ ID NO: 2434434 - RNA, 14 nt, Human
cagagggcacucug

SEQ ID NO: 2434435 - RNA, 19 nt, Human
cagagggacuuuguauaga

SEQ ID NO: 2434436 - RNA, 22 nt, Human
cagagggaggaaucgaggaacc

SEQ ID NO: 2434437 - RNA, 23 nt, Human
cagagggaggaaucgaggaacca

SEQ ID NO: 2434438 - RNA, 16 nt, Human
cagagggcagaggcug

SEQ ID NO: 2434439 - RNA, 17 nt, Human
cagagggcagaggcugg

SEQ ID NO: 2434440 - RNA, 18 nt, Human
cagagggcagaggcugga

SEQ ID NO: 2434441 - RNA, 13 nt, Human
cagagggcccagg

SEQ ID NO: 2434442 - RNA, 15 nt, Human
cagagggcccaggca

SEQ ID NO: 2434443 - RNA, 16 nt, Human
cagagggcccaggcag

SEQ ID NO: 2434444 - RNA, 18 nt, Human
cagagggcccaggcaggc

SEQ ID NO: 2434445 - RNA, 21 nt, Human
cagagucucacuguugcccag

SEQ ID NO: 2434446 - RNA, 20 nt, Human
cagagucucacuguugccca

SEQ ID NO: 2434447 - RNA, 19 nt, Human
cagagucucacuguugccc

SEQ ID NO: 2434448 - RNA, 17 nt, Human
cagagucucacuguugc

SEQ ID NO: 2434449 - RNA, 14 nt, Human
cagaguccaggccc

SEQ ID NO: 2434450 - RNA, 15 nt, Human
cagaguccaggcccc

SEQ ID NO: 2434451 - RNA, 16 nt, Human
cagaguccaggcccca

SEQ ID NO: 2434452 - RNA, 22 nt, Human
cagagggcccaggcaggccacc

SEQ ID NO: 2434453 - RNA, 15 nt, Human
cagagucagcagaac

SEQ ID NO: 2434454 - RNA, 15 nt, Human
cagaguccuuuccaa

SEQ ID NO: 2434455 - RNA, 14 nt, Human
cagaguccuuucca

SEQ ID NO: 2434456 - RNA, 13 nt, Human
cagagucucacug

SEQ ID NO: 2434457 - RNA, 18 nt, Human
cagagugagacucugucu

SEQ ID NO: 2434458 - RNA, 17 nt, Human
cagagugagacucuguc

SEQ ID NO: 2434459 - RNA, 16 nt, Human
cagagugagacucugu

SEQ ID NO: 2434460 - RNA, 17 nt, Human
cagagugagacccagcc

SEQ ID NO: 2434461 - RNA, 20 nt, Human
cagagugagacccagcccuc

SEQ ID NO: 2434462 - RNA, 15 nt, Human
cagagugagacccug

SEQ ID NO: 2434463 - RNA, 19 nt, Human
cagagugagacccugucuc

SEQ ID NO: 2434464 - RNA, 23 nt, Human
cagagucucacuguugcccaggc

SEQ ID NO: 2434465 - RNA, 22 nt, Human
cagagucucacuguugcccagg

SEQ ID NO: 2434466 - RNA, 18 nt, Human
cagagucuugcuaccuca

SEQ ID NO: 2434467 - RNA, 20 nt, Human
cagagucuggugaagcucac

SEQ ID NO: 2434468 - RNA, 14 nt, Human
cagagugagaccca

SEQ ID NO: 2434469 - RNA, 15 nt, Human
cagagugagacccag

SEQ ID NO: 2434470 - RNA, 23 nt, Human
cagagucggaacggagaaaggug

SEQ ID NO: 2434471 - RNA, 15 nt, Human
cagagucggaacgga

SEQ ID NO: 2434472 - RNA, 18 nt, Human
cagagucggaacggagaa

SEQ ID NO: 2434473 - RNA, 23 nt, Human
cagagucucgcucuguugcccag

SEQ ID NO: 2434474 - RNA, 15 nt, Human
cagaguggccuggcc

SEQ ID NO: 2434475 - RNA, 16 nt, Human
cagaguggccuggcca

SEQ ID NO: 2434476 - RNA, 17 nt, Human
cagaguggccuggccag

SEQ ID NO: 2434477 - RNA, 18 nt, Human
cagaguggccuggccagg

SEQ ID NO: 2434478 - RNA, 21 nt, Human
cagaguggccuggccaggagc

SEQ ID NO: 2434479 - RNA, 22 nt, Human
cagaguggccuggccaggagcu

SEQ ID NO: 2434480 - RNA, 23 nt, Human
cagaguggccuggccaggagcuc

SEQ ID NO: 2434481 - RNA, 15 nt, Human
cagaguggucuuucu

SEQ ID NO: 2434482 - RNA, 14 nt, Human
cagaguggaaugcu

SEQ ID NO: 2434483 - RNA, 12 nt, Human
cagaguggccug

SEQ ID NO: 2434484 - RNA, 13 nt, Human
cagaguggccugg

SEQ ID NO: 2434485 - RNA, 15 nt, Human
cagagugcccagaac

SEQ ID NO: 2434486 - RNA, 13 nt, Human
cagagugcccaga

SEQ ID NO: 2434487 - RNA, 14 nt, Human
cagagugcccagaa

SEQ ID NO: 2434488 - RNA, 20 nt, Human
cagagugcaagccccugcuc

SEQ ID NO: 2434489 - RNA, 20 nt, Human
cagagugagacucugucuca

SEQ ID NO: 2434490 - RNA, 19 nt, Human
cagagugagacucugucuc

SEQ ID NO: 2434491 - RNA, 20 nt, Human
cagagugagacccugucucu

SEQ ID NO: 2434492 - RNA, 18 nt, Human
cagagugcaagccccugc

SEQ ID NO: 2434493 - RNA, 23 nt, Human
cagagugcaagccccugcuccag

SEQ ID NO: 2434494 - RNA, 16 nt, Human
cagauaacuguuauuu

SEQ ID NO: 2434495 - RNA, 19 nt, Human
cagauaacuguuauuuaua

SEQ ID NO: 2434496 - RNA, 14 nt, Human
cagauaacuguuau

SEQ ID NO: 2434497 - RNA, 17 nt, Human
cagauaaccagcuguaa

SEQ ID NO: 2434498 - RNA, 20 nt, Human
cagauaacuguuauuuauaa

SEQ ID NO: 2434499 - RNA, 21 nt, Human
cagauaacuguuauuuauaau

SEQ ID NO: 2434500 - RNA, 20 nt, Human
cagauaagcaagagagaugu

SEQ ID NO: 2434501 - RNA, 22 nt, Human
cagauaagcaagagagauguuu

SEQ ID NO: 2434502 - RNA, 19 nt, Human
cagauaagaaugcugguuu

SEQ ID NO: 2434503 - RNA, 21 nt, Human
cagauaagaaugcugguuuuc

SEQ ID NO: 2434504 - RNA, 13 nt, Human
cagauaaugugaa

SEQ ID NO: 2434505 - RNA, 14 nt, Human
cagauaaugugaaa

SEQ ID NO: 2434506 - RNA, 14 nt, Human
cagauacaauguau

SEQ ID NO: 2434507 - RNA, 13 nt, Human
cagauacaaugua

SEQ ID NO: 2434508 - RNA, 16 nt, Human
cagauaaugugaaaau

SEQ ID NO: 2434509 - RNA, 14 nt, Human
cagauaaucagugu

SEQ ID NO: 2434510 - RNA, 19 nt, Human
cagauaaucagccucuuaa

SEQ ID NO: 2434511 - RNA, 14 nt, Human
cagauaaucacaau

SEQ ID NO: 2434512 - RNA, 15 nt, Human
cagauaaucagccuc

SEQ ID NO: 2434513 - RNA, 16 nt, Human
cagauaaucagccucu

SEQ ID NO: 2434514 - RNA, 17 nt, Human
cagauaaucagccucuu

SEQ ID NO: 2434515 - RNA, 18 nt, Human
cagauaaucagccucuua

SEQ ID NO: 2434516 - RNA, 23 nt, Human
cagauaaauaguuuaugauucca

SEQ ID NO: 2434517 - RNA, 22 nt, Human
cagauaaagguucaugcaaacu

SEQ ID NO: 2434518 - RNA, 14 nt, Human
cagauaaacaguag

SEQ ID NO: 2434519 - RNA, 16 nt, Human
cagauaaaauuauaga

SEQ ID NO: 2434520 - RNA, 15 nt, Human
cagaguuuuuaugua

SEQ ID NO: 2434521 - RNA, 21 nt, Human
cagauaaaauuauagauggga

SEQ ID NO: 2434522 - RNA, 15 nt, Human
cagaguuguuacauu

SEQ ID NO: 2434523 - RNA, 18 nt, Human
cagaguuguuacauuuuu

SEQ ID NO: 2434524 - RNA, 19 nt, Human
cagaguuguuacauuuuua

SEQ ID NO: 2434525 - RNA, 23 nt, Human
cagaguuuagaggaaaaaaauga

SEQ ID NO: 2434526 - RNA, 22 nt, Human
cagaguuuguguguugucuuga

SEQ ID NO: 2434527 - RNA, 19 nt, Human
cagaguuuguguguugucu

SEQ ID NO: 2434528 - RNA, 17 nt, Human
cagaguuuguguguugu

SEQ ID NO: 2434529 - RNA, 23 nt, Human
cagaguugugcacauggcuuagu

SEQ ID NO: 2434530 - RNA, 20 nt, Human
cagaguugaagacagagcua

SEQ ID NO: 2434531 - RNA, 19 nt, Human
cagaguugaagacagagcu

SEQ ID NO: 2434532 - RNA, 18 nt, Human
cagaguugaagacagagc

SEQ ID NO: 2434533 - RNA, 17 nt, Human
cagaguugaagacagag

SEQ ID NO: 2434534 - RNA, 23 nt, Human
cagaguuguaaauauauaaauau

SEQ ID NO: 2434535 - RNA, 20 nt, Human
cagaguuguaaauauauaaa

SEQ ID NO: 2434536 - RNA, 19 nt, Human
cagaguuguaaauauauaa

SEQ ID NO: 2434537 - RNA, 18 nt, Human
cagaguuguaaauauaua

SEQ ID NO: 2434538 - RNA, 17 nt, Human
cagaguuguaaauauau

SEQ ID NO: 2434539 - RNA, 16 nt, Human
cagaguuguaaauaua

SEQ ID NO: 2434540 - RNA, 14 nt, Human
cagaguuguaaaua

SEQ ID NO: 2434541 - RNA, 13 nt, Human
cagaguuguaaau

SEQ ID NO: 2434542 - RNA, 14 nt, Human
cagaguuguuacau

SEQ ID NO: 2434543 - RNA, 12 nt, Human
cagaguuguaaa

SEQ ID NO: 2434544 - RNA, 20 nt, Human
cagaguugcugggagcugaa

SEQ ID NO: 2434545 - RNA, 19 nt, Human
cagaguugcugggagcuga

SEQ ID NO: 2434546 - RNA, 15 nt, Human
cagaguugcugggag

SEQ ID NO: 2434547 - RNA, 20 nt, Human
cagaguugacaugagauuua

SEQ ID NO: 2434548 - RNA, 20 nt, Human
cagaguugcugcaaaccuga

SEQ ID NO: 2434549 - RNA, 22 nt, Human
cagaguugaagacagagcuaca

SEQ ID NO: 2434550 - RNA, 16 nt, Human
cagaguugaagacaga

SEQ ID NO: 2434551 - RNA, 15 nt, Human
cagaguugaagacag

SEQ ID NO: 2434552 - RNA, 15 nt, Human
cagaguucugcucua

SEQ ID NO: 2434553 - RNA, 22 nt, Human
cagaguuccugcggagugaaga

SEQ ID NO: 2434554 - RNA, 23 nt, Human
cagaguuccugcggagugaagag

SEQ ID NO: 2434555 - RNA, 17 nt, Human
cagaguuccugcggagu

SEQ ID NO: 2434556 - RNA, 24 nt, Human
cagaguuccccaugcagacaugag

SEQ ID NO: 2434557 - RNA, 18 nt, Human
cagaguuccccaugcaga

SEQ ID NO: 2434558 - RNA, 16 nt, Human
cagaguuccccaugca

SEQ ID NO: 2434559 - RNA, 14 nt, Human
cagaguugaagaca

SEQ ID NO: 2434560 - RNA, 12 nt, Human
cagaguucacua

SEQ ID NO: 2434561 - RNA, 14 nt, Human
cagaguucacuaua

SEQ ID NO: 2434562 - RNA, 20 nt, Human
cagaguucacuauaaauggu

SEQ ID NO: 2434563 - RNA, 16 nt, Human
cagagugugcuggagg

SEQ ID NO: 2434564 - RNA, 15 nt, Human
cagagugugcuggag

SEQ ID NO: 2434565 - RNA, 18 nt, Human
cagagugugcuggaggac

SEQ ID NO: 2434566 - RNA, 22 nt, Human
cagaguggucuuucuggagagg

SEQ ID NO: 2434567 - RNA, 12 nt, Human
cagagugugcug

SEQ ID NO: 2434568 - RNA, 21 nt, Human
cagaguggucuuucuggagag

SEQ ID NO: 2434569 - RNA, 23 nt, Human
cagaguguggccuucggacaacu

SEQ ID NO: 2434570 - RNA, 19 nt, Human
cagagugugggaagggaga

SEQ ID NO: 2434571 - RNA, 20 nt, Human
cagagugugggaagggagag

SEQ ID NO: 2434572 - RNA, 22 nt, Human
cagauacaggaaaagcugcuga

SEQ ID NO: 2434573 - RNA, 13 nt, Human
cagauccuggaaa

SEQ ID NO: 2434574 - RNA, 21 nt, Human
cagauacaggaaaagcugcug

SEQ ID NO: 2434575 - RNA, 20 nt, Human
cagauacaggaaaagcugcu

SEQ ID NO: 2434576 - RNA, 14 nt, Human
cagauccuggaaau

SEQ ID NO: 2434577 - RNA, 18 nt, Human
cagauccuuguuucaaac

SEQ ID NO: 2434578 - RNA, 16 nt, Human
cagauccuuguuucaa

SEQ ID NO: 2434579 - RNA, 15 nt, Human
cagauccuuguuuca

SEQ ID NO: 2434580 - RNA, 14 nt, Human
cagauccuuguuuc

SEQ ID NO: 2434581 - RNA, 17 nt, Human
cagauacaauguauuua

SEQ ID NO: 2434582 - RNA, 13 nt, Human
cagauccuuguuu

SEQ ID NO: 2434583 - RNA, 20 nt, Human
cagaucucuaacuucaccau

SEQ ID NO: 2434584 - RNA, 19 nt, Human
cagaucuaccccuuacuua

SEQ ID NO: 2434585 - RNA, 14 nt, Human
cagaucuccuggca

SEQ ID NO: 2434586 - RNA, 18 nt, Human
cagaucggaucuguugca

SEQ ID NO: 2434587 - RNA, 19 nt, Human
cagauccuuguuucaaaca

SEQ ID NO: 2434588 - RNA, 22 nt, Human
cagaucugacaugauuccuucc

SEQ ID NO: 2434589 - RNA, 23 nt, Human
cagaucugacaugauuccuuccu

SEQ ID NO: 2434590 - RNA, 14 nt, Human
cagaucuggaaccu

SEQ ID NO: 2434591 - RNA, 15 nt, Human
cagaucuggaaccuc

SEQ ID NO: 2434592 - RNA, 18 nt, Human
cagaucuggaaccucagc

SEQ ID NO: 2434593 - RNA, 19 nt, Human
cagaucuggaaccucagcc

SEQ ID NO: 2434594 - RNA, 20 nt, Human
cagaucuggaaccucagccu

SEQ ID NO: 2434595 - RNA, 21 nt, Human
cagaucuggaaccucagccug

SEQ ID NO: 2434596 - RNA, 22 nt, Human
cagaucuggaaccucagccugg

SEQ ID NO: 2434597 - RNA, 23 nt, Human
cagaucuggaaccucagccuggc

SEQ ID NO: 2434598 - RNA, 24 nt, Human
cagaucugacaugauuccuuccug

SEQ ID NO: 2434599 - RNA, 17 nt, Human
cagaucuggucccuugc

SEQ ID NO: 2434600 - RNA, 18 nt, Human
cagaucuggucccuugca

SEQ ID NO: 2434601 - RNA, 13 nt, Human
cagaucugucuga

SEQ ID NO: 2434602 - RNA, 12 nt, Human
cagaucugugcc

SEQ ID NO: 2434603 - RNA, 13 nt, Human
cagaucugugccc

SEQ ID NO: 2434604 - RNA, 14 nt, Human
cagaucugugcccc

SEQ ID NO: 2434605 - RNA, 15 nt, Human
cagaucugugcccca

SEQ ID NO: 2434606 - RNA, 15 nt, Human
cagaugaauguauuu

SEQ ID NO: 2434607 - RNA, 19 nt, Human
cagaugaauguauuuauuu

SEQ ID NO: 2434608 - RNA, 20 nt, Human
cagaugacaaaaauucaacu

SEQ ID NO: 2434609 - RNA, 19 nt, Human
cagaugaaugauaaacucu

SEQ ID NO: 2434610 - RNA, 23 nt, Human
cagaugaauguauuuauuuggga

SEQ ID NO: 2434611 - RNA, 14 nt, Human
cagaugaaugauaa

SEQ ID NO: 2434612 - RNA, 20 nt, Human
cagaugaacucuuagaaaug

SEQ ID NO: 2434613 - RNA, 17 nt, Human
cagaugaaugccgugga

SEQ ID NO: 2434614 - RNA, 18 nt, Human
cagaucugucugauagga

SEQ ID NO: 2434615 - RNA, 18 nt, Human
cagaucugugccccaugc

SEQ ID NO: 2434616 - RNA, 20 nt, Human
cagaucugugccccaugccu

SEQ ID NO: 2434617 - RNA, 21 nt, Human
cagaucugugccccaugccug

SEQ ID NO: 2434618 - RNA, 23 nt, Human
cagaucugugccccaugccuguc

SEQ ID NO: 2434619 - RNA, 16 nt, Human
cagaugaguaaaggag

SEQ ID NO: 2434620 - RNA, 17 nt, Human
cagaugagaaacucuug

SEQ ID NO: 2434621 - RNA, 12 nt, Human
cagaugagcugu

SEQ ID NO: 2434622 - RNA, 16 nt, Human
cagaugcaaagaggca

SEQ ID NO: 2434623 - RNA, 14 nt, Human
cagaugauccauga

SEQ ID NO: 2434624 - RNA, 23 nt, Human
cagaugaugccaaccucuggagc

SEQ ID NO: 2434625 - RNA, 17 nt, Human
cagaugcaaagaggcaa

SEQ ID NO: 2434626 - RNA, 18 nt, Human
cagaugcaaagaggcaag

SEQ ID NO: 2434627 - RNA, 23 nt, Human
cagaugcaaagaggcaagaggcu

SEQ ID NO: 2434628 - RNA, 19 nt, Human
cagaugagaaacucuugag

SEQ ID NO: 2434629 - RNA, 18 nt, Human
cagaugaccccuccccua

SEQ ID NO: 2434630 - RNA, 14 nt, Human
cagaugaccccucc

SEQ ID NO: 2434631 - RNA, 13 nt, Human
cagaugaccccuc

SEQ ID NO: 2434632 - RNA, 13 nt, Human
cagaugcagggca

SEQ ID NO: 2434633 - RNA, 14 nt, Human
cagaugcagggcag

SEQ ID NO: 2434634 - RNA, 18 nt, Human
cagaugcagagagccauu

SEQ ID NO: 2434635 - RNA, 16 nt, Human
cagaugcagagagcca

SEQ ID NO: 2434636 - RNA, 20 nt, Human
cagaugcagagagccauuuu

SEQ ID NO: 2434637 - RNA, 22 nt, Human
cagaugcaccagcccuuagcag

SEQ ID NO: 2434638 - RNA, 17 nt, Human
cagaugcaccagcccuu

SEQ ID NO: 2434639 - RNA, 16 nt, Human
cagaugcaccagcccu

SEQ ID NO: 2434640 - RNA, 14 nt, Human
cagaugcaccagcc

SEQ ID NO: 2434641 - RNA, 13 nt, Human
cagaugcaccagc

SEQ ID NO: 2434642 - RNA, 15 nt, Human
cagaugcaaugugcu

SEQ ID NO: 2434643 - RNA, 21 nt, Human
cagaugcaaugugcuacugau

SEQ ID NO: 2434644 - RNA, 14 nt, Human
cagaugcaaugacu

SEQ ID NO: 2434645 - RNA, 16 nt, Human
cagagaccaucccuga

SEQ ID NO: 2434646 - RNA, 14 nt, Human
cagagaccaucccu

SEQ ID NO: 2434647 - RNA, 19 nt, Human
cagagacauuccuccgagc

SEQ ID NO: 2434648 - RNA, 13 nt, Human
cagagacauuccu

SEQ ID NO: 2434649 - RNA, 13 nt, Human
cagagaccauccc

SEQ ID NO: 2434650 - RNA, 17 nt, Human
cagagacauacuugaag

SEQ ID NO: 2434651 - RNA, 19 nt, Human
cagagacauacuugaaggg

SEQ ID NO: 2434652 - RNA, 20 nt, Human
cagagacauacuugaagggc

SEQ ID NO: 2434653 - RNA, 21 nt, Human
cagagacauacuugaagggcc

SEQ ID NO: 2434654 - RNA, 23 nt, Human
cagagacauacuugaagggccag

SEQ ID NO: 2434655 - RNA, 23 nt, Human
cagagacaggcccaagagaugaa

SEQ ID NO: 2434656 - RNA, 15 nt, Human
cagagacauacuuga

SEQ ID NO: 2434657 - RNA, 16 nt, Human
cagagacauacuugaa

SEQ ID NO: 2434658 - RNA, 22 nt, Human
cagagacaggaagucuucaggg

SEQ ID NO: 2434659 - RNA, 14 nt, Human
cagagacaggccca

SEQ ID NO: 2434660 - RNA, 19 nt, Human
cagagacaggcccaagaga

SEQ ID NO: 2434661 - RNA, 13 nt, Human
cagagacaggaaa

SEQ ID NO: 2434662 - RNA, 14 nt, Human
cagagacaggaaaa

SEQ ID NO: 2434663 - RNA, 15 nt, Human
cagagacaggaaaau

SEQ ID NO: 2434664 - RNA, 21 nt, Human
cagagacaggaaaauccucug

SEQ ID NO: 2434665 - RNA, 22 nt, Human
cagagacaggaaaauccucugg

SEQ ID NO: 2434666 - RNA, 23 nt, Human
cagagacaggaaaauccucuggc

SEQ ID NO: 2434667 - RNA, 15 nt, Human
cagagacacaagccu

SEQ ID NO: 2434668 - RNA, 14 nt, Human
cagagacacaagcc

SEQ ID NO: 2434669 - RNA, 13 nt, Human
cagagaauuucua

SEQ ID NO: 2434670 - RNA, 15 nt, Human
cagagaauuucuacc

SEQ ID NO: 2434671 - RNA, 16 nt, Human
cagagaauuucuacca

SEQ ID NO: 2434672 - RNA, 22 nt, Human
cagagaauuucuaccauuucag

SEQ ID NO: 2434673 - RNA, 23 nt, Human
cagagaauuucuaccauuucaga

SEQ ID NO: 2434674 - RNA, 17 nt, Human
cagagacacaagccuuc

SEQ ID NO: 2434675 - RNA, 16 nt, Human
cagagacacaagccuu

SEQ ID NO: 2434676 - RNA, 13 nt, Human
cagagacaccugc

SEQ ID NO: 2434677 - RNA, 14 nt, Human
cagagacaccugca

SEQ ID NO: 2434678 - RNA, 15 nt, Human
cagagacaccugcac

SEQ ID NO: 2434679 - RNA, 16 nt, Human
cagagacaccugcacc

SEQ ID NO: 2434680 - RNA, 17 nt, Human
cagagacaccugcaccu

SEQ ID NO: 2434681 - RNA, 18 nt, Human
cagagacaccugcaccuc

SEQ ID NO: 2434682 - RNA, 20 nt, Human
cagagacaccugcaccuccc

SEQ ID NO: 2434683 - RNA, 22 nt, Human
cagagacaccugcaccuccccc

SEQ ID NO: 2434684 - RNA, 16 nt, Human
cagagacagagaggac

SEQ ID NO: 2434685 - RNA, 14 nt, Human
cagagacagagagg

SEQ ID NO: 2434686 - RNA, 21 nt, Human
cagagaaugaaagggcccaga

SEQ ID NO: 2434687 - RNA, 20 nt, Human
cagagaaugaaagggcccag

SEQ ID NO: 2434688 - RNA, 11 nt, Human
cagagaauaua

SEQ ID NO: 2434689 - RNA, 11 nt, Human
cagagaaguuc

SEQ ID NO: 2434690 - RNA, 19 nt, Human
cagagaaucauacuuagca

SEQ ID NO: 2434691 - RNA, 14 nt, Human
cagagaauucuuag

SEQ ID NO: 2434692 - RNA, 21 nt, Human
cagagaauugcugauucuuga

SEQ ID NO: 2434693 - RNA, 15 nt, Human
cagagaauucucuua

SEQ ID NO: 2434694 - RNA, 24 nt, Human
cagagaagugacagggaagcuaca

SEQ ID NO: 2434695 - RNA, 23 nt, Human
cagagaagugacagggaagcuac

SEQ ID NO: 2434696 - RNA, 22 nt, Human
cagagaagugacagggaagcua

SEQ ID NO: 2434697 - RNA, 21 nt, Human
cagagaagugacagggaagcu

SEQ ID NO: 2434698 - RNA, 20 nt, Human
cagagaagugacagggaagc

SEQ ID NO: 2434699 - RNA, 19 nt, Human
cagagaagugacagggaag

SEQ ID NO: 2434700 - RNA, 18 nt, Human
cagagaagugacagggaa

SEQ ID NO: 2434701 - RNA, 17 nt, Human
cagagaagugacaggga

SEQ ID NO: 2434702 - RNA, 19 nt, Human
cagagaaugaaagggccca

SEQ ID NO: 2434703 - RNA, 16 nt, Human
cagagaagugacaggg

SEQ ID NO: 2434704 - RNA, 15 nt, Human
cagagaagugacagg

SEQ ID NO: 2434705 - RNA, 14 nt, Human
cagagaagugacag

SEQ ID NO: 2434706 - RNA, 13 nt, Human
cagagaagugaca

SEQ ID NO: 2434707 - RNA, 20 nt, Human
cagagaaggcaggaaugugu

SEQ ID NO: 2434708 - RNA, 13 nt, Human
cagagaaggcagg

SEQ ID NO: 2434709 - RNA, 14 nt, Human
cagagaaggcagga

SEQ ID NO: 2434710 - RNA, 17 nt, Human
cagagaaggcaggaaug

SEQ ID NO: 2434711 - RNA, 18 nt, Human
cagagaacuaacacuauu

SEQ ID NO: 2434712 - RNA, 19 nt, Human
cagagaaaggggagcccac

SEQ ID NO: 2434713 - RNA, 22 nt, Human
cagagaacuaacacuauuuuau

SEQ ID NO: 2434714 - RNA, 21 nt, Human
cagagaacuaacacuauuuua

SEQ ID NO: 2434715 - RNA, 20 nt, Human
cagagaacuaacacuauuuu

SEQ ID NO: 2434716 - RNA, 23 nt, Human
cagagaacuaacacuauuuuaug

SEQ ID NO: 2434717 - RNA, 23 nt, Human
cagagaagagaguauuggguaga

SEQ ID NO: 2434718 - RNA, 20 nt, Human
cagagaagccaaaagauugg

SEQ ID NO: 2434719 - RNA, 18 nt, Human
cagagaagccccuucccc

SEQ ID NO: 2434720 - RNA, 17 nt, Human
cagagaagccccuuccc

SEQ ID NO: 2434721 - RNA, 24 nt, Human
cagagaagccccuuccccauggga

SEQ ID NO: 2434722 - RNA, 15 nt, Human
cagagaagccccuuc

SEQ ID NO: 2434723 - RNA, 21 nt, Human
cagagaagcuauaaauuccuc

SEQ ID NO: 2434724 - RNA, 23 nt, Human
cagagaagcuauaaauuccucuu

SEQ ID NO: 2434725 - RNA, 20 nt, Human
cagagaccaucccugaaggc

SEQ ID NO: 2434726 - RNA, 19 nt, Human
cagagaccaucccugaagg

SEQ ID NO: 2434727 - RNA, 18 nt, Human
cagagaccaucccugaag

SEQ ID NO: 2434728 - RNA, 17 nt, Human
cagagaccaucccugaa

SEQ ID NO: 2434729 - RNA, 15 nt, Human
cagagacccucugcc

SEQ ID NO: 2434730 - RNA, 14 nt, Human
cagagaccauugca

SEQ ID NO: 2434731 - RNA, 21 nt, Human
cagagaccaucccugaaggcc

SEQ ID NO: 2434732 - RNA, 19 nt, Human
cagagaccguccucacccc

SEQ ID NO: 2434733 - RNA, 18 nt, Human
cagagaccguccucaccc

SEQ ID NO: 2434734 - RNA, 17 nt, Human
cagagaccguccucacc

SEQ ID NO: 2434735 - RNA, 16 nt, Human
cagagaccguccucac

SEQ ID NO: 2434736 - RNA, 13 nt, Human
cagagaccguccu

SEQ ID NO: 2434737 - RNA, 20 nt, Human
cagagacccucugccaccag

SEQ ID NO: 2434738 - RNA, 19 nt, Human
cagagacccucugccacca

SEQ ID NO: 2434739 - RNA, 18 nt, Human
cagagaccuccugccucc

SEQ ID NO: 2434740 - RNA, 20 nt, Human
cagagaccguccucaccccu

SEQ ID NO: 2434741 - RNA, 19 nt, Human
cagagacucagggccccag

SEQ ID NO: 2434742 - RNA, 19 nt, Human
cagagacuccugcaggcag

SEQ ID NO: 2434743 - RNA, 18 nt, Human
cagagacuccugcaggca

SEQ ID NO: 2434744 - RNA, 17 nt, Human
cagagacuccugcaggc

SEQ ID NO: 2434745 - RNA, 16 nt, Human
cagagacuccugcagg

SEQ ID NO: 2434746 - RNA, 15 nt, Human
cagagacuccugcag

SEQ ID NO: 2434747 - RNA, 14 nt, Human
cagagacuccugca

SEQ ID NO: 2434748 - RNA, 13 nt, Human
cagagacuccugc

SEQ ID NO: 2434749 - RNA, 20 nt, Human
cagagacucagggccccagc

SEQ ID NO: 2434750 - RNA, 21 nt, Human
cagagacucagggccccagca

SEQ ID NO: 2434751 - RNA, 22 nt, Human
cagagacucagggccccagcac

SEQ ID NO: 2434752 - RNA, 23 nt, Human
cagagacucagggccccagcacu

SEQ ID NO: 2434753 - RNA, 16 nt, Human
cagagcaccuuagaca

SEQ ID NO: 2434754 - RNA, 18 nt, Human
cagagcaagucugcaggu

SEQ ID NO: 2434755 - RNA, 18 nt, Human
cagagcacagcagccccu

SEQ ID NO: 2434756 - RNA, 14 nt, Human
cagagcaagugaga

SEQ ID NO: 2434757 - RNA, 20 nt, Human
cagagcaagugagacccugu

SEQ ID NO: 2434758 - RNA, 23 nt, Human
cagagauuggaaugggcagcuca

SEQ ID NO: 2434759 - RNA, 22 nt, Human
cagagauuggaaugggcagcuc

SEQ ID NO: 2434760 - RNA, 21 nt, Human
cagagauuggaaugggcagcu

SEQ ID NO: 2434761 - RNA, 16 nt, Human
cagagaugugcaccca

SEQ ID NO: 2434762 - RNA, 14 nt, Human
cagagcaaaauaau

SEQ ID NO: 2434763 - RNA, 16 nt, Human
cagagcaaaauaauuu

SEQ ID NO: 2434764 - RNA, 20 nt, Human
cagagcaagacucugucuca

SEQ ID NO: 2434765 - RNA, 18 nt, Human
cagagcaagauccugucu

SEQ ID NO: 2434766 - RNA, 20 nt, Human
cagagcaagauccugucuuu

SEQ ID NO: 2434767 - RNA, 17 nt, Human
cagagcaagucugcagg

SEQ ID NO: 2434768 - RNA, 16 nt, Human
cagagcaagucugcag

SEQ ID NO: 2434769 - RNA, 15 nt, Human
cagagcaagucugca

SEQ ID NO: 2434770 - RNA, 14 nt, Human
cagagaugugcacc

SEQ ID NO: 2434771 - RNA, 23 nt, Human
cagagaugggacugggagggccc

SEQ ID NO: 2434772 - RNA, 19 nt, Human
cagagaugggacugggagg

SEQ ID NO: 2434773 - RNA, 22 nt, Human
cagagaugggacugggagggcc

SEQ ID NO: 2434774 - RNA, 21 nt, Human
cagagauggagguucucucgg

SEQ ID NO: 2434775 - RNA, 23 nt, Human
cagagauggagguucucucggag

SEQ ID NO: 2434776 - RNA, 15 nt, Human
cagagaugggacugg

SEQ ID NO: 2434777 - RNA, 18 nt, Human
cagagaugggacugggag

SEQ ID NO: 2434778 - RNA, 21 nt, Human
cagagaugcaccaccaagcca

SEQ ID NO: 2434779 - RNA, 20 nt, Human
cagagaugcaccaccaagcc

SEQ ID NO: 2434780 - RNA, 21 nt, Human
cagagauccaaaagaagcccc

SEQ ID NO: 2434781 - RNA, 23 nt, Human
cagagauccaaaagaagccccca

SEQ ID NO: 2434782 - RNA, 13 nt, Human
cagagaugccucc

SEQ ID NO: 2434783 - RNA, 14 nt, Human
cagagaugccucca

SEQ ID NO: 2434784 - RNA, 15 nt, Human
cagagaugccuccac

SEQ ID NO: 2434785 - RNA, 16 nt, Human
cagagaugccuccacc

SEQ ID NO: 2434786 - RNA, 18 nt, Human
cagagaugccuccaccgc

SEQ ID NO: 2434787 - RNA, 19 nt, Human
cagagaugccuccaccgcu

SEQ ID NO: 2434788 - RNA, 21 nt, Human
cagagaugccuccaccgcugc

SEQ ID NO: 2434789 - RNA, 19 nt, Human
cagagaguccucuggaugg

SEQ ID NO: 2434790 - RNA, 18 nt, Human
cagagaguccucuggaug

SEQ ID NO: 2434791 - RNA, 17 nt, Human
cagagaguccucuggau

SEQ ID NO: 2434792 - RNA, 16 nt, Human
cagagaguccucugga

SEQ ID NO: 2434793 - RNA, 15 nt, Human
cagagaguccucugg

SEQ ID NO: 2434794 - RNA, 14 nt, Human
cagagaguccucug

SEQ ID NO: 2434795 - RNA, 23 nt, Human
cagagagucccacugccucaggu

SEQ ID NO: 2434796 - RNA, 16 nt, Human
cagagaccuccugccu

SEQ ID NO: 2434797 - RNA, 14 nt, Human
cagagaguggcucc

SEQ ID NO: 2434798 - RNA, 13 nt, Human
cagagaguggcuc

SEQ ID NO: 2434799 - RNA, 18 nt, Human
cagagaguggcuccuccc

SEQ ID NO: 2434800 - RNA, 15 nt, Human
cagagaguggcuccu

SEQ ID NO: 2434801 - RNA, 19 nt, Human
cagagauccaaaagaagcc

SEQ ID NO: 2434802 - RNA, 20 nt, Human
cagagauccaaaagaagccc

SEQ ID NO: 2434803 - RNA, 22 nt, Human
cagagauaguggggagacuucu

SEQ ID NO: 2434804 - RNA, 16 nt, Human
cagagcccacgccccc

SEQ ID NO: 2434805 - RNA, 20 nt, Human
cagagcccaccuuggcucaa

SEQ ID NO: 2434806 - RNA, 19 nt, Human
cagagcccaccuuggcuca

SEQ ID NO: 2434807 - RNA, 17 nt, Human
cagagcccaccuuggcu

SEQ ID NO: 2434808 - RNA, 15 nt, Human
cagagcccaccuugg

SEQ ID NO: 2434809 - RNA, 23 nt, Human
cagagccaggggggugaggagcu

SEQ ID NO: 2434810 - RNA, 17 nt, Human
cagagccaugcugggaa

SEQ ID NO: 2434811 - RNA, 11 nt, Human
cagagccaugg

SEQ ID NO: 2434812 - RNA, 14 nt, Human
cagagccauggacu

SEQ ID NO: 2434813 - RNA, 22 nt, Human
cagagcagugggccuggccagc

SEQ ID NO: 2434814 - RNA, 23 nt, Human
cagagcagggguccuugguguga

SEQ ID NO: 2434815 - RNA, 18 nt, Human
cagagcauuacgugagcc

SEQ ID NO: 2434816 - RNA, 22 nt, Human
cagagcauuacgugagccaggu

SEQ ID NO: 2434817 - RNA, 21 nt, Human
cagagcauuacgugagccagg

SEQ ID NO: 2434818 - RNA, 20 nt, Human
cagagcauuacgugagccag

SEQ ID NO: 2434819 - RNA, 19 nt, Human
cagagcauuacgugagcca

SEQ ID NO: 2434820 - RNA, 23 nt, Human
cagagcauuacgugagccaggua

SEQ ID NO: 2434821 - RNA, 21 nt, Human
cagagcauuuccaacaccaca

SEQ ID NO: 2434822 - RNA, 22 nt, Human
cagagccaccccuaaagagaua

SEQ ID NO: 2434823 - RNA, 15 nt, Human
cagagcagugggccu

SEQ ID NO: 2434824 - RNA, 17 nt, Human
cagagcagugggccugg

SEQ ID NO: 2434825 - RNA, 20 nt, Human
cagagcagugggccuggcca

SEQ ID NO: 2434826 - RNA, 21 nt, Human
cagagcagugggccuggccag

SEQ ID NO: 2434827 - RNA, 15 nt, Human
cagagcaggaggccc

SEQ ID NO: 2434828 - RNA, 14 nt, Human
cagagcaggaggcc

SEQ ID NO: 2434829 - RNA, 14 nt, Human
cagagcaggacugc

SEQ ID NO: 2434830 - RNA, 20 nt, Human
cagagcagcagugaaaacaa

SEQ ID NO: 2434831 - RNA, 21 nt, Human
cagagcaggaagcauucagag

SEQ ID NO: 2434832 - RNA, 23 nt, Human
cagagcaggaggccccuggccca

SEQ ID NO: 2434833 - RNA, 19 nt, Human
cagagcaggaggccccugg

SEQ ID NO: 2434834 - RNA, 18 nt, Human
cagagcaggaggccccug

SEQ ID NO: 2434835 - RNA, 17 nt, Human
cagagcaggaggccccu

SEQ ID NO: 2434836 - RNA, 14 nt, Human
cagagcaggggcag

SEQ ID NO: 2434837 - RNA, 15 nt, Human
cagagcaggggcagg

SEQ ID NO: 2434838 - RNA, 13 nt, Human
cagagcagcagug

SEQ ID NO: 2434839 - RNA, 21 nt, Human
cagagcagaugcagagagcca

SEQ ID NO: 2434840 - RNA, 20 nt, Human
cagagcagaugcagagagcc

SEQ ID NO: 2434841 - RNA, 19 nt, Human
cagagcagaugcagagagc

SEQ ID NO: 2434842 - RNA, 16 nt, Human
cagagcagaugcagag

SEQ ID NO: 2434843 - RNA, 15 nt, Human
cagagcagaugcaga

SEQ ID NO: 2434844 - RNA, 14 nt, Human
cagagcagaugcag

SEQ ID NO: 2434845 - RNA, 13 nt, Human
cagagcagaugca

SEQ ID NO: 2434846 - RNA, 21 nt, Human
cagagcagagaccaucccuga

SEQ ID NO: 2434847 - RNA, 19 nt, Human
cagagcagagaccaucccu

SEQ ID NO: 2434848 - RNA, 18 nt, Human
cagagcagagaccauccc

SEQ ID NO: 2434849 - RNA, 17 nt, Human
cagagcagagaccaucc

SEQ ID NO: 2434850 - RNA, 15 nt, Human
cagagcagagaccau

SEQ ID NO: 2434851 - RNA, 14 nt, Human
cagagcagagacca

SEQ ID NO: 2434852 - RNA, 13 nt, Human
cagagcagagacc

SEQ ID NO: 2434853 - RNA, 22 nt, Human
cagagcaccuuagacagucccu

SEQ ID NO: 2434854 - RNA, 21 nt, Human
cagagcaccuuagacaguccc

SEQ ID NO: 2434855 - RNA, 19 nt, Human
cagagcaccuuagacaguc

SEQ ID NO: 2434856 - RNA, 18 nt, Human
cagagcaccuuagacagu

SEQ ID NO: 2434857 - RNA, 12 nt, Human
cagagcagagac

SEQ ID NO: 2434858 - RNA, 11 nt, Human
cagagcagaga

SEQ ID NO: 2434859 - RNA, 23 nt, Human
cagagcaccuuagacagucccug

SEQ ID NO: 2434860 - RNA, 20 nt, Human
cagagcacuggguugcaggg

SEQ ID NO: 2434861 - RNA, 20 nt, Human
cagaggaaagcaaaggagau

SEQ ID NO: 2434862 - RNA, 19 nt, Human
cagaggaacuguccagaga

SEQ ID NO: 2434863 - RNA, 17 nt, Human
cagaggaacuguccaga

SEQ ID NO: 2434864 - RNA, 13 nt, Human
cagagccugcagu

SEQ ID NO: 2434865 - RNA, 13 nt, Human
cagaggaaggaga

SEQ ID NO: 2434866 - RNA, 16 nt, Human
cagaggaaggggccag

SEQ ID NO: 2434867 - RNA, 14 nt, Human
cagaggaagagcag

SEQ ID NO: 2434868 - RNA, 15 nt, Human
cagaggaagagcagg

SEQ ID NO: 2434869 - RNA, 21 nt, Human
cagaggaacuguccagagagc

SEQ ID NO: 2434870 - RNA, 20 nt, Human
cagaggaacuguccagagag

SEQ ID NO: 2434871 - RNA, 22 nt, Human
cagaggaacuguccagagagca

SEQ ID NO: 2434872 - RNA, 12 nt, Human
cagaggaagagc

SEQ ID NO: 2434873 - RNA, 19 nt, Human
cagagccgugguccuuugg

SEQ ID NO: 2434874 - RNA, 20 nt, Human
cagagccgugguccuuuggg

SEQ ID NO: 2434875 - RNA, 12 nt, Human
cagagccugcag

SEQ ID NO: 2434876 - RNA, 21 nt, Human
cagagcccacgcccccacugg

SEQ ID NO: 2434877 - RNA, 20 nt, Human
cagagcccacgcccccacug

SEQ ID NO: 2434878 - RNA, 19 nt, Human
cagagcccacgcccccacu

SEQ ID NO: 2434879 - RNA, 17 nt, Human
cagagcccacgccccca

SEQ ID NO: 2434880 - RNA, 11 nt, Human
cagagcccagc

SEQ ID NO: 2434881 - RNA, 13 nt, Human
cagagcccagcuc

SEQ ID NO: 2434882 - RNA, 23 nt, Human
cagagcccacgcccccacuggug

SEQ ID NO: 2434883 - RNA, 14 nt, Human
cagagcccagcucc

SEQ ID NO: 2434884 - RNA, 13 nt, Human
cagagccccacac

SEQ ID NO: 2434885 - RNA, 16 nt, Human
cagagccccacacgga

SEQ ID NO: 2434886 - RNA, 23 nt, Human
cagagccccacacggaggcaucu

SEQ ID NO: 2434887 - RNA, 20 nt, Human
cagagccccacacggaggca

SEQ ID NO: 2434888 - RNA, 22 nt, Human
cagaggacaguauuugugggga

SEQ ID NO: 2434889 - RNA, 23 nt, Human
cagaggacagaucaauggcgcag

SEQ ID NO: 2434890 - RNA, 13 nt, Human
cagaggacagauc

SEQ ID NO: 2434891 - RNA, 18 nt, Human
cagaggaaggggccagag

SEQ ID NO: 2434892 - RNA, 19 nt, Human
cagaggaaggggccagagg

SEQ ID NO: 2434893 - RNA, 20 nt, Human
cagaggaaggggccagaggc

SEQ ID NO: 2434894 - RNA, 21 nt, Human
cagaggaaggggccagaggcu

SEQ ID NO: 2434895 - RNA, 23 nt, Human
cagaggaaucacucuuguggaug

SEQ ID NO: 2434896 - RNA, 18 nt, Human
cagaggaaucacucuugu

SEQ ID NO: 2434897 - RNA, 16 nt, Human
cagaggaagagcaggc

SEQ ID NO: 2434898 - RNA, 19 nt, Human
cagaggagagaggaccccc

SEQ ID NO: 2434899 - RNA, 15 nt, Human
cagaggagagaggac

SEQ ID NO: 2434900 - RNA, 13 nt, Human
cagaggagagagg

SEQ ID NO: 2434901 - RNA, 22 nt, Human
cagaggacucacuugcccacac

SEQ ID NO: 2434902 - RNA, 15 nt, Human
cagaggaugagcucu

SEQ ID NO: 2434903 - RNA, 17 nt, Human
cagaggaugagcucuac

SEQ ID NO: 2434904 - RNA, 19 nt, Human
cagaggaugagcucuaccc

SEQ ID NO: 2434905 - RNA, 21 nt, Human
cagaggaugagcucuacccag

SEQ ID NO: 2434906 - RNA, 14 nt, Human
cagaggaggggccg

SEQ ID NO: 2434907 - RNA, 19 nt, Human
cagaggaggggccgcugcc

SEQ ID NO: 2434908 - RNA, 17 nt, Human
cagaggaguacagguga

SEQ ID NO: 2434909 - RNA, 20 nt, Human
cagaggaggggccgcugcca

SEQ ID NO: 2434910 - RNA, 22 nt, Human
cagaggagggcagcagaagggg

SEQ ID NO: 2434911 - RNA, 13 nt, Human
cagaggaggggcc

SEQ ID NO: 2434912 - RNA, 18 nt, Human
cagaggauggccaguguc

SEQ ID NO: 2434913 - RNA, 17 nt, Human
cagaggauggccagugu

SEQ ID NO: 2434914 - RNA, 16 nt, Human
cagaggauggccagug

SEQ ID NO: 2434915 - RNA, 15 nt, Human
cagaggauggccagu

SEQ ID NO: 2434916 - RNA, 13 nt, Human
cagaggauggcca

SEQ ID NO: 2434917 - RNA, 21 nt, Human
cagaggaguacaggugaagca

SEQ ID NO: 2434918 - RNA, 23 nt, Human
cagaggaugagcucuacccaggg

SEQ ID NO: 2434919 - RNA, 11 nt, Human
cagaggcagcc

SEQ ID NO: 2434920 - RNA, 23 nt, Human
cagaggagagucccagagcagga

SEQ ID NO: 2434921 - RNA, 18 nt, Human
cagaggagggcagcagaa

SEQ ID NO: 2434922 - RNA, 14 nt, Human
cagaggagggcagc

SEQ ID NO: 2434923 - RNA, 20 nt, Human
cagaggagagaggacccccu

SEQ ID NO: 2434924 - RNA, 22 nt, Human
cagaggagagucccagagcagg

SEQ ID NO: 2434925 - RNA, 20 nt, Human
cagaggagagucccagagca

SEQ ID NO: 2434926 - RNA, 16 nt, Human
cagacaacaaaccugu

SEQ ID NO: 2434927 - RNA, 18 nt, Human
cagaaaauguugagaauc

SEQ ID NO: 2434928 - RNA, 23 nt, Human
cagaaaauguugagaaucccaaa

SEQ ID NO: 2434929 - RNA, 16 nt, Human
cagaaaauugcacaau

SEQ ID NO: 2434930 - RNA, 18 nt, Human
cagaaacaaaaacacuaa

SEQ ID NO: 2434931 - RNA, 20 nt, Human
cagaaacaaaaacacuaaaa

SEQ ID NO: 2434932 - RNA, 19 nt, Human
cagaaaauauuauguguuu

SEQ ID NO: 2434933 - RNA, 14 nt, Human
cagaaaauguugag

SEQ ID NO: 2434934 - RNA, 23 nt, Human
cagaaaauggaagacagcucuua

SEQ ID NO: 2434935 - RNA, 22 nt, Human
cagaaaauggaagacagcucuu

SEQ ID NO: 2434936 - RNA, 21 nt, Human
cagaaaauggaagacagcucu

SEQ ID NO: 2434937 - RNA, 20 nt, Human
cagaaaauggaagacagcuc

SEQ ID NO: 2434938 - RNA, 16 nt, Human
cagaaaauggaagaca

SEQ ID NO: 2434939 - RNA, 14 nt, Human
cagaaaauauacug

SEQ ID NO: 2434940 - RNA, 15 nt, Human
cagaaaauauacugu

SEQ ID NO: 2434941 - RNA, 16 nt, Human
cagaaaauauacugua

SEQ ID NO: 2434942 - RNA, 17 nt, Human
cagaaaauauacuguaa

SEQ ID NO: 2434943 - RNA, 12 nt, Human
cagaaaauauac

SEQ ID NO: 2434944 - RNA, 13 nt, Human
cagaaaauauacu

SEQ ID NO: 2434945 - RNA, 11 nt, Human
cagaaaauaua

SEQ ID NO: 2434946 - RNA, 18 nt, Human
cagaaaauauacuguaaa

SEQ ID NO: 2434947 - RNA, 19 nt, Human
cagaaaauauacuguaaag

SEQ ID NO: 2434948 - RNA, 20 nt, Human
cagaaaauauacuguaaaga

SEQ ID NO: 2434949 - RNA, 21 nt, Human
cagaaaauauacuguaaagaa

SEQ ID NO: 2434950 - RNA, 18 nt, Human
cagaaaagggaaguugug

SEQ ID NO: 2434951 - RNA, 17 nt, Human
cagaaaagggaaguugu

SEQ ID NO: 2434952 - RNA, 14 nt, Human
cagaaaaggacaga

SEQ ID NO: 2434953 - RNA, 13 nt, Human
cagaaaaggacag

SEQ ID NO: 2434954 - RNA, 15 nt, Human
cagaaaagcaccugc

SEQ ID NO: 2434955 - RNA, 16 nt, Human
cagaaaagcaccugcc

SEQ ID NO: 2434956 - RNA, 17 nt, Human
cagaaaagcaccugccg

SEQ ID NO: 2434957 - RNA, 19 nt, Human
cagaaaagcaccugccgac

SEQ ID NO: 2434958 - RNA, 14 nt, Human
cagaaaagcaccug

SEQ ID NO: 2434959 - RNA, 20 nt, Human
cagaaaacgguuaaaacugu

SEQ ID NO: 2434960 - RNA, 19 nt, Human
cagaaagcagaacagugau

SEQ ID NO: 2434961 - RNA, 16 nt, Human
cagaaagcauuacauu

SEQ ID NO: 2434962 - RNA, 18 nt, Human
cagaaagcauaaaauucu

SEQ ID NO: 2434963 - RNA, 21 nt, Human
cagaaagauggaugugcuuug

SEQ ID NO: 2434964 - RNA, 22 nt, Human
cagaaagccugggugacauuug

SEQ ID NO: 2434965 - RNA, 19 nt, Human
cagaaagccugggugacau

SEQ ID NO: 2434966 - RNA, 14 nt, Human
cagaaagcugccug

SEQ ID NO: 2434967 - RNA, 15 nt, Human
cagaaagcugccugg

SEQ ID NO: 2434968 - RNA, 22 nt, Human
cagaaagccuaucaaagaccuu

SEQ ID NO: 2434969 - RNA, 16 nt, Human
cagaaagccuaucaaa

SEQ ID NO: 2434970 - RNA, 14 nt, Human
cagaaagccuauca

SEQ ID NO: 2434971 - RNA, 18 nt, Human
cagaaccagaugaguaaa

SEQ ID NO: 2434972 - RNA, 18 nt, Human
cagaacaucauuagaaca

SEQ ID NO: 2434973 - RNA, 17 nt, Human
cagaacaucauuagaac

SEQ ID NO: 2434974 - RNA, 15 nt, Human
cagaacaucauuaga

SEQ ID NO: 2434975 - RNA, 16 nt, Human
cagaacaucauuagaa

SEQ ID NO: 2434976 - RNA, 23 nt, Human
cagaacagugauuaccagggacu

SEQ ID NO: 2434977 - RNA, 16 nt, Human
cagaacaguuuguaca

SEQ ID NO: 2434978 - RNA, 18 nt, Human
cagaaagcagaacaguga

SEQ ID NO: 2434979 - RNA, 20 nt, Human
cagaaagacugagcucaagg

SEQ ID NO: 2434980 - RNA, 19 nt, Human
cagaaagauggaugugcuu

SEQ ID NO: 2434981 - RNA, 24 nt, Human
cagaaagaaguggggacagagcag

SEQ ID NO: 2434982 - RNA, 15 nt, Human
cagaaaccaguuaug

SEQ ID NO: 2434983 - RNA, 23 nt, Human
cagaaacaucaguuacucugaag

SEQ ID NO: 2434984 - RNA, 15 nt, Human
cagaaacagugaguu

SEQ ID NO: 2434985 - RNA, 13 nt, Human
cagaaaccaguua

SEQ ID NO: 2434986 - RNA, 20 nt, Human
cagaaacuugugaaguggaa

SEQ ID NO: 2434987 - RNA, 20 nt, Human
cagaaacgaaguagaaaggg

SEQ ID NO: 2434988 - RNA, 14 nt, Human
cagaaaccaguuau

SEQ ID NO: 2434989 - RNA, 19 nt, Human
cagaaacuguucccaccug

SEQ ID NO: 2434990 - RNA, 20 nt, Human
cagaaacacccucacacugg

SEQ ID NO: 2434991 - RNA, 21 nt, Human
cagaaacacccucacacuggg

SEQ ID NO: 2434992 - RNA, 18 nt, Human
cagaaacacccucacacu

SEQ ID NO: 2434993 - RNA, 22 nt, Human
cagaaacacccucacacuggga

SEQ ID NO: 2434994 - RNA, 23 nt, Human
cagaaacacccucacacugggac

SEQ ID NO: 2434995 - RNA, 18 nt, Human
cagaaacaggugcaucug

SEQ ID NO: 2434996 - RNA, 22 nt, Human
cagaaacaggugcaucugggga

SEQ ID NO: 2434997 - RNA, 17 nt, Human
cagaaacaucaguuacu

SEQ ID NO: 2434998 - RNA, 19 nt, Human
cagaaacaucaguuacucu

SEQ ID NO: 2434999 - RNA, 22 nt, Human
cagaaacaucaguuacucugaa

SEQ ID NO: 2435000 - RNA, 22 nt, Human
cacuuuuguucuugguuuguaa

SEQ ID NO: 2435001 - RNA, 22 nt, Human
cacuuuugguuaagucuguuuu

SEQ ID NO: 2435002 - RNA, 20 nt, Human
cacuuuuucauuugccuauu

SEQ ID NO: 2435003 - RNA, 19 nt, Human
cacuuuuucauuugccuau

SEQ ID NO: 2435004 - RNA, 14 nt, Human
cacuuuuguucuug

SEQ ID NO: 2435005 - RNA, 16 nt, Human
cacuuuuccucccuca

SEQ ID NO: 2435006 - RNA, 17 nt, Human
cacuuuugacaaaggca

SEQ ID NO: 2435007 - RNA, 18 nt, Human
cacuuuugacaaaggcaa

SEQ ID NO: 2435008 - RNA, 12 nt, Human
cacuuuucucca

SEQ ID NO: 2435009 - RNA, 18 nt, Human
cacuuuuauuuagcacca

SEQ ID NO: 2435010 - RNA, 13 nt, Human
cacuuuucaguga

SEQ ID NO: 2435011 - RNA, 21 nt, Human
cacuuuguuucguggggaggu

SEQ ID NO: 2435012 - RNA, 20 nt, Human
cacuuuguuucguggggagg

SEQ ID NO: 2435013 - RNA, 17 nt, Human
cacuuuuaauaaacuuu

SEQ ID NO: 2435014 - RNA, 14 nt, Human
cacuuuguucuuua

SEQ ID NO: 2435015 - RNA, 20 nt, Human
cacuuugucgcccaggcugg

SEQ ID NO: 2435016 - RNA, 18 nt, Human
cacuuuguucuuuaggag

SEQ ID NO: 2435017 - RNA, 12 nt, Human
cacuuuguucuu

SEQ ID NO: 2435018 - RNA, 19 nt, Human
cacuuugggaggccaagga

SEQ ID NO: 2435019 - RNA, 21 nt, Human
cagaaaaauaacuucaagcaa

SEQ ID NO: 2435020 - RNA, 16 nt, Human
cagaaaaacucuggga

SEQ ID NO: 2435021 - RNA, 19 nt, Human
cagaaaaacguguugccuu

SEQ ID NO: 2435022 - RNA, 19 nt, Human
cagaaaaacucugggaaau

SEQ ID NO: 2435023 - RNA, 18 nt, Human
cagaaaacauuguuccag

SEQ ID NO: 2435024 - RNA, 16 nt, Human
cagaaaacauuguucc

SEQ ID NO: 2435025 - RNA, 14 nt, Human
cagaaaacauuguu

SEQ ID NO: 2435026 - RNA, 13 nt, Human
cagaaaacauugu

SEQ ID NO: 2435027 - RNA, 12 nt, Human
cagaaaacauug

SEQ ID NO: 2435028 - RNA, 11 nt, Human
cagaaaacauu

SEQ ID NO: 2435029 - RNA, 16 nt, Human
cagaaaacauguuucc

SEQ ID NO: 2435030 - RNA, 14 nt, Human
cagaaaaccccagc

SEQ ID NO: 2435031 - RNA, 19 nt, Human
cagaaaacgguuaaaacug

SEQ ID NO: 2435032 - RNA, 14 nt, Human
cacuuuuuuccaca

SEQ ID NO: 2435033 - RNA, 12 nt, Human
cacuuuuuucca

SEQ ID NO: 2435034 - RNA, 21 nt, Human
cacuuuuuuggggauaugcuu

SEQ ID NO: 2435035 - RNA, 21 nt, Human
cacuuuuuugaguggaugaug

SEQ ID NO: 2435036 - RNA, 16 nt, Human
cacuuuuuuuuuccaa

SEQ ID NO: 2435037 - RNA, 14 nt, Human
cacuuuuuuuuucc

SEQ ID NO: 2435038 - RNA, 23 nt, Human
cacuuuuuuuuuccaaaaaaaua

SEQ ID NO: 2435039 - RNA, 23 nt, Human
cacuuuguucuggcucuuccagg

SEQ ID NO: 2435040 - RNA, 16 nt, Human
cacuuuguucuggcuc

SEQ ID NO: 2435041 - RNA, 14 nt, Human
cacuuuguucuggc

SEQ ID NO: 2435042 - RNA, 13 nt, Human
cacuuuguucugg

SEQ ID NO: 2435043 - RNA, 12 nt, Human
cacuuugggagg

SEQ ID NO: 2435044 - RNA, 13 nt, Human
cacuuugggaggc

SEQ ID NO: 2435045 - RNA, 16 nt, Human
cacuuugggaggccaa

SEQ ID NO: 2435046 - RNA, 19 nt, Human
cacuuugguacauggccag

SEQ ID NO: 2435047 - RNA, 20 nt, Human
cacuuugguacauggccagu

SEQ ID NO: 2435048 - RNA, 14 nt, Human
cacuuugggaggcc

SEQ ID NO: 2435049 - RNA, 23 nt, Human
cacuuugggaggccaaggagggc

SEQ ID NO: 2435050 - RNA, 17 nt, Human
cacuuugcacagcucuc

SEQ ID NO: 2435051 - RNA, 19 nt, Human
cacuuugcacugauauauc

SEQ ID NO: 2435052 - RNA, 14 nt, Human
cacuuugcacagcu

SEQ ID NO: 2435053 - RNA, 12 nt, Human
cacuuugcauaa

SEQ ID NO: 2435054 - RNA, 22 nt, Human
cacuuugcacugauauaucaug

SEQ ID NO: 2435055 - RNA, 19 nt, Human
cacuuugcucuggguggaa

SEQ ID NO: 2435056 - RNA, 12 nt, Human
cacuuugcucug

SEQ ID NO: 2435057 - RNA, 13 nt, Human
cacuuugcucugg

SEQ ID NO: 2435058 - RNA, 22 nt, Human
cacuuucuagccagaggagaga

SEQ ID NO: 2435059 - RNA, 20 nt, Human
cacuuucuauccucuguaaa

SEQ ID NO: 2435060 - RNA, 16 nt, Human
cacuuucuauagcaga

SEQ ID NO: 2435061 - RNA, 16 nt, Human
cacuugggucuucccu

SEQ ID NO: 2435062 - RNA, 20 nt, Human
cacuuugaaauguguuucug

SEQ ID NO: 2435063 - RNA, 19 nt, Human
cacuuugaaauguguuucu

SEQ ID NO: 2435064 - RNA, 17 nt, Human
cacuuugaaauguguuu

SEQ ID NO: 2435065 - RNA, 15 nt, Human
cacuuugaaaugugu

SEQ ID NO: 2435066 - RNA, 19 nt, Human
cacuuucucaguuuucaua

SEQ ID NO: 2435067 - RNA, 14 nt, Human
cagaacccuuggcu

SEQ ID NO: 2435068 - RNA, 19 nt, Human
cagaacccuuggcuugccc

SEQ ID NO: 2435069 - RNA, 12 nt, Human
cagaaccucuuc

SEQ ID NO: 2435070 - RNA, 14 nt, Human
cagaaccucuuccc

SEQ ID NO: 2435071 - RNA, 15 nt, Human
cagaaccucuucccc

SEQ ID NO: 2435072 - RNA, 16 nt, Human
cagaaccucuucccca

SEQ ID NO: 2435073 - RNA, 18 nt, Human
cagaaccucuuccccaga

SEQ ID NO: 2435074 - RNA, 15 nt, Human
cagaaccauccauag

SEQ ID NO: 2435075 - RNA, 23 nt, Human
cagaaccccuacaugaaacagaa

SEQ ID NO: 2435076 - RNA, 10 nt, Human
cagaaccagg

SEQ ID NO: 2435077 - RNA, 23 nt, Human
cagaaccccuggcuccaggccag

SEQ ID NO: 2435078 - RNA, 22 nt, Human
cagaacccuuggagccaaugga

SEQ ID NO: 2435079 - RNA, 19 nt, Human
cagaacuagaauuugauua

SEQ ID NO: 2435080 - RNA, 13 nt, Human
cagaacuagaauu

SEQ ID NO: 2435081 - RNA, 19 nt, Human
cagaacuaaacucauuuau

SEQ ID NO: 2435082 - RNA, 20 nt, Human
cagaacuaaacucauuuaua

SEQ ID NO: 2435083 - RNA, 19 nt, Human
cagaacguggcucugcugg

SEQ ID NO: 2435084 - RNA, 18 nt, Human
cagaacguggcucugcug

SEQ ID NO: 2435085 - RNA, 17 nt, Human
cagaacuaaacucauuu

SEQ ID NO: 2435086 - RNA, 18 nt, Human
cagaacuaaacucauuua

SEQ ID NO: 2435087 - RNA, 16 nt, Human
cagaaccuuguuauuu

SEQ ID NO: 2435088 - RNA, 17 nt, Human
cagaaccuuguuauuuc

SEQ ID NO: 2435089 - RNA, 18 nt, Human
cagaaccuuguuauuucu

SEQ ID NO: 2435090 - RNA, 21 nt, Human
cagaaccuuguuauuucucag

SEQ ID NO: 2435091 - RNA, 15 nt, Human
cagaacguggcucug

SEQ ID NO: 2435092 - RNA, 13 nt, Human
cagaacguggcuc

SEQ ID NO: 2435093 - RNA, 21 nt, Human
cagaacggagccccaggccuc

SEQ ID NO: 2435094 - RNA, 12 nt, Human
cagaaccuggag

SEQ ID NO: 2435095 - RNA, 21 nt, Human
cagaaccucuuccccagaaag

SEQ ID NO: 2435096 - RNA, 20 nt, Human
cagaaccuggagggcuagaa

SEQ ID NO: 2435097 - RNA, 13 nt, Human
cagaaccuggagg

SEQ ID NO: 2435098 - RNA, 21 nt, Human
cagaaccuggagggcuagaac

SEQ ID NO: 2435099 - RNA, 14 nt, Human
cagaaccuguccuu

SEQ ID NO: 2435100 - RNA, 15 nt, Human
cagaacuagaauuug

SEQ ID NO: 2435101 - RNA, 20 nt, Human
cagaacucaaauggggccag

SEQ ID NO: 2435102 - RNA, 21 nt, Human
cagaacucaaauggggccaga

SEQ ID NO: 2435103 - RNA, 22 nt, Human
cagaacucaaauggggccagau

SEQ ID NO: 2435104 - RNA, 15 nt, Human
cagaacucacugggg

SEQ ID NO: 2435105 - RNA, 18 nt, Human
cagaacucacuggggccu

SEQ ID NO: 2435106 - RNA, 14 nt, Human
cagaacucuuucaa

SEQ ID NO: 2435107 - RNA, 15 nt, Human
cagaacucuuucaaa

SEQ ID NO: 2435108 - RNA, 16 nt, Human
cagaacucuuucaaaa

SEQ ID NO: 2435109 - RNA, 21 nt, Human
cagaacugaaccggcuuuacc

SEQ ID NO: 2435110 - RNA, 22 nt, Human
cagaacugaaccggcuuuacca

SEQ ID NO: 2435111 - RNA, 13 nt, Human
cagaacugagcuc

SEQ ID NO: 2435112 - RNA, 15 nt, Human
cagaacugagcuccu

SEQ ID NO: 2435113 - RNA, 16 nt, Human
cagaacugagcuccuc

SEQ ID NO: 2435114 - RNA, 17 nt, Human
cagaacugagcuccucu

SEQ ID NO: 2435115 - RNA, 20 nt, Human
cagaacugagcuccucuggg

SEQ ID NO: 2435116 - RNA, 23 nt, Human
cagaacugagcuccucugggcag

SEQ ID NO: 2435117 - RNA, 24 nt, Human
cagaacugagcuccucugggcagg

SEQ ID NO: 2435118 - RNA, 13 nt, Human
cagaacuggacuc

SEQ ID NO: 2435119 - RNA, 18 nt, Human
cagaacuggacucaggau

SEQ ID NO: 2435120 - RNA, 11 nt, Human
cagaagcccag

SEQ ID NO: 2435121 - RNA, 17 nt, Human
cagaagccaggagcaaa

SEQ ID NO: 2435122 - RNA, 16 nt, Human
cagaagccaggagcaa

SEQ ID NO: 2435123 - RNA, 15 nt, Human
cagaagccaggagca

SEQ ID NO: 2435124 - RNA, 14 nt, Human
cagaagcauuaacu

SEQ ID NO: 2435125 - RNA, 16 nt, Human
cagaagcaggcuggag

SEQ ID NO: 2435126 - RNA, 15 nt, Human
cagaagcaggcugga

SEQ ID NO: 2435127 - RNA, 23 nt, Human
cagaagcaguugagucgucauca

SEQ ID NO: 2435128 - RNA, 12 nt, Human
cagaagcccaga

SEQ ID NO: 2435129 - RNA, 14 nt, Human
cagaagcccagaau

SEQ ID NO: 2435130 - RNA, 19 nt, Human
cagaagccaggagcaaaug

SEQ ID NO: 2435131 - RNA, 20 nt, Human
cagaagccucacugcaagca

SEQ ID NO: 2435132 - RNA, 22 nt, Human
cagaagccuccccagcucaccc

SEQ ID NO: 2435133 - RNA, 18 nt, Human
cagaagccuccccagcuc

SEQ ID NO: 2435134 - RNA, 13 nt, Human
cagaagccucugg

SEQ ID NO: 2435135 - RNA, 19 nt, Human
cagaagcaacccaaauguu

SEQ ID NO: 2435136 - RNA, 20 nt, Human
cagaagcaacccaaauguuc

SEQ ID NO: 2435137 - RNA, 14 nt, Human
cagaagcagcucuu

SEQ ID NO: 2435138 - RNA, 14 nt, Human
cagaagcaggcugg

SEQ ID NO: 2435139 - RNA, 14 nt, Human
cagaagcaggauag

SEQ ID NO: 2435140 - RNA, 13 nt, Human
cagaagcagcucu

SEQ ID NO: 2435141 - RNA, 23 nt, Human
cagaagauccccucaggacugca

SEQ ID NO: 2435142 - RNA, 11 nt, Human
cagaagaaaga

SEQ ID NO: 2435143 - RNA, 14 nt, Human
cagaagaaggcagc

SEQ ID NO: 2435144 - RNA, 20 nt, Human
cagaagaauauucaggacuu

SEQ ID NO: 2435145 - RNA, 19 nt, Human
cagaagaauauucaggacu

SEQ ID NO: 2435146 - RNA, 18 nt, Human
cagaagaauauucaggac

SEQ ID NO: 2435147 - RNA, 17 nt, Human
cagaagaauauucagga

SEQ ID NO: 2435148 - RNA, 17 nt, Human
cagaagaauugaaccca

SEQ ID NO: 2435149 - RNA, 19 nt, Human
cagaagaauugaacccagg

SEQ ID NO: 2435150 - RNA, 20 nt, Human
cagaagaauugaacccagga

SEQ ID NO: 2435151 - RNA, 21 nt, Human
cagaagaauugaacccaggag

SEQ ID NO: 2435152 - RNA, 16 nt, Human
cagaagaauauucagg

SEQ ID NO: 2435153 - RNA, 15 nt, Human
cagaagaauauucag

SEQ ID NO: 2435154 - RNA, 14 nt, Human
cagaagaauauuca

SEQ ID NO: 2435155 - RNA, 12 nt, Human
cagaagaauauu

SEQ ID NO: 2435156 - RNA, 18 nt, Human
cagaagaauaugacagcu

SEQ ID NO: 2435157 - RNA, 15 nt, Human
cagaagaaggcagca

SEQ ID NO: 2435158 - RNA, 21 nt, Human
cagaagacacugaugggcaac

SEQ ID NO: 2435159 - RNA, 19 nt, Human
cagaagacaccagagcaga

SEQ ID NO: 2435160 - RNA, 18 nt, Human
cagaagacaccagagcag

SEQ ID NO: 2435161 - RNA, 17 nt, Human
cagaagacaccagagca

SEQ ID NO: 2435162 - RNA, 16 nt, Human
cagaagacaccagagc

SEQ ID NO: 2435163 - RNA, 15 nt, Human
cagaagacaccagag

SEQ ID NO: 2435164 - RNA, 14 nt, Human
cagaagacaccaga

SEQ ID NO: 2435165 - RNA, 22 nt, Human
cagaagaauugaacccaggagg

SEQ ID NO: 2435166 - RNA, 21 nt, Human
cagaagaccacaaaaauugac

SEQ ID NO: 2435167 - RNA, 21 nt, Human
cagaagacaccagagcagaug

SEQ ID NO: 2435168 - RNA, 20 nt, Human
cagaagacaccagagcagau

SEQ ID NO: 2435169 - RNA, 19 nt, Human
cagaagacacugcaaaggc

SEQ ID NO: 2435170 - RNA, 21 nt, Human
cagaagagaugggcuuguuuu

SEQ ID NO: 2435171 - RNA, 19 nt, Human
cagaagauccccucaggac

SEQ ID NO: 2435172 - RNA, 18 nt, Human
cagaagauccccucagga

SEQ ID NO: 2435173 - RNA, 15 nt, Human
cagaagauccccuca

SEQ ID NO: 2435174 - RNA, 22 nt, Human
cagaagauaacuugagcaccgu

SEQ ID NO: 2435175 - RNA, 15 nt, Human
cagaagauaacuuga

SEQ ID NO: 2435176 - RNA, 20 nt, Human
cagaagagaugggcuuguuu

SEQ ID NO: 2435177 - RNA, 20 nt, Human
cagaagauagcuucacccca

SEQ ID NO: 2435178 - RNA, 18 nt, Human
cagaaggaagacuucauc

SEQ ID NO: 2435179 - RNA, 17 nt, Human
cagaaggaagacuucau

SEQ ID NO: 2435180 - RNA, 16 nt, Human
cagaaggaagacuuca

SEQ ID NO: 2435181 - RNA, 12 nt, Human
cagaagcuucca

SEQ ID NO: 2435182 - RNA, 19 nt, Human
cagaagcugagcaccaggg

SEQ ID NO: 2435183 - RNA, 21 nt, Human
cagaagcugagcaccagggga

SEQ ID NO: 2435184 - RNA, 16 nt, Human
cagaagcugagcacca

SEQ ID NO: 2435185 - RNA, 18 nt, Human
cagaagccugaugcugac

SEQ ID NO: 2435186 - RNA, 19 nt, Human
cagaagccugaggcuggga

SEQ ID NO: 2435187 - RNA, 14 nt, Human
cagaagccugaggc

SEQ ID NO: 2435188 - RNA, 15 nt, Human
cagaagccugaggcu

SEQ ID NO: 2435189 - RNA, 16 nt, Human
cagaagccucuggguc

SEQ ID NO: 2435190 - RNA, 19 nt, Human
cagaagccucuggcuagag

SEQ ID NO: 2435191 - RNA, 14 nt, Human
cagaagccucuggc

SEQ ID NO: 2435192 - RNA, 15 nt, Human
cagaagccucuggcu

SEQ ID NO: 2435193 - RNA, 18 nt, Human
cagaagcgggacgagacc

SEQ ID NO: 2435194 - RNA, 20 nt, Human
cagaaggaaaaauguguaau

SEQ ID NO: 2435195 - RNA, 19 nt, Human
cagaaggaaaaauguguaa

SEQ ID NO: 2435196 - RNA, 17 nt, Human
cagaaggaaaaaugugu

SEQ ID NO: 2435197 - RNA, 14 nt, Human
cagaagcuucagaa

SEQ ID NO: 2435198 - RNA, 16 nt, Human
cagaagcuucugccca

SEQ ID NO: 2435199 - RNA, 19 nt, Human
cagaaggaagacuucaucc

SEQ ID NO: 2435200 - RNA, 21 nt, Human
cagaaggaagggcauccuucu

SEQ ID NO: 2435201 - RNA, 14 nt, Human
cagaaggaccuccu

SEQ ID NO: 2435202 - RNA, 14 nt, Human
cagaaggagaagga

SEQ ID NO: 2435203 - RNA, 18 nt, Human
cagaaggagaaggaagga

SEQ ID NO: 2435204 - RNA, 20 nt, Human
cagaaggagaaggaaggaga

SEQ ID NO: 2435205 - RNA, 18 nt, Human
cagaaggccaagaggcug

SEQ ID NO: 2435206 - RNA, 14 nt, Human
cagaaggccaagag

SEQ ID NO: 2435207 - RNA, 20 nt, Human
cagaaggcaaaugacuuugg

SEQ ID NO: 2435208 - RNA, 23 nt, Human
cagaaggcauaucagucucugag

SEQ ID NO: 2435209 - RNA, 13 nt, Human
cagaaggcaggga

SEQ ID NO: 2435210 - RNA, 18 nt, Human
cagaaggccaagaaucaa

SEQ ID NO: 2435211 - RNA, 14 nt, Human
cagaaggccaagaa

SEQ ID NO: 2435212 - RNA, 13 nt, Human
cagaaggccaaga

SEQ ID NO: 2435213 - RNA, 18 nt, Human
cagaaggcaaaugacuuu

SEQ ID NO: 2435214 - RNA, 19 nt, Human
cagaaggcaaaugacuuug

SEQ ID NO: 2435215 - RNA, 18 nt, Human
cagaaggcaaacccauca

SEQ ID NO: 2435216 - RNA, 17 nt, Human
cagaaggaugaaugagg

SEQ ID NO: 2435217 - RNA, 13 nt, Human
cagaaggaggagg

SEQ ID NO: 2435218 - RNA, 14 nt, Human
cagaaggaggagga

SEQ ID NO: 2435219 - RNA, 16 nt, Human
cagaagucaagcccag

SEQ ID NO: 2435220 - RNA, 17 nt, Human
cagaaucucaaauaacu

SEQ ID NO: 2435221 - RNA, 18 nt, Human
cagaaucucaaauaacua

SEQ ID NO: 2435222 - RNA, 16 nt, Human
cagaaucuaaagccag

SEQ ID NO: 2435223 - RNA, 15 nt, Human
cagaaucuaaagcca

SEQ ID NO: 2435224 - RNA, 17 nt, Human
cagaaucuaaagccagu

SEQ ID NO: 2435225 - RNA, 16 nt, Human
cagaagucaugaagcc

SEQ ID NO: 2435226 - RNA, 17 nt, Human
cagaagucaugaagccc

SEQ ID NO: 2435227 - RNA, 22 nt, Human
cagaagggguuuggucugggac

SEQ ID NO: 2435228 - RNA, 20 nt, Human
cagaagggguuuggucuggg

SEQ ID NO: 2435229 - RNA, 21 nt, Human
cagaaggggguggugucucca

SEQ ID NO: 2435230 - RNA, 20 nt, Human
cagaaggggguggugucucc

SEQ ID NO: 2435231 - RNA, 19 nt, Human
cagaaggggguggugucuc

SEQ ID NO: 2435232 - RNA, 15 nt, Human
cagaagguauuccuu

SEQ ID NO: 2435233 - RNA, 23 nt, Human
cagaagguugcucuagauugaga

SEQ ID NO: 2435234 - RNA, 16 nt, Human
cagaagguugugauga

SEQ ID NO: 2435235 - RNA, 15 nt, Human
cagaaggggagggga

SEQ ID NO: 2435236 - RNA, 20 nt, Human
cagaaggggaggggagacag

SEQ ID NO: 2435237 - RNA, 14 nt, Human
cagaaggggguggu

SEQ ID NO: 2435238 - RNA, 18 nt, Human
cagaagggggccaugagg

SEQ ID NO: 2435239 - RNA, 17 nt, Human
cagaagggggagaccaa

SEQ ID NO: 2435240 - RNA, 14 nt, Human
cagaagggggccau

SEQ ID NO: 2435241 - RNA, 15 nt, Human
cagaagggggccaug

SEQ ID NO: 2435242 - RNA, 16 nt, Human
cagaagggggccauga

SEQ ID NO: 2435243 - RNA, 15 nt, Human
cagaagggaggcugg

SEQ ID NO: 2435244 - RNA, 12 nt, Human
cagaagggaggc

SEQ ID NO: 2435245 - RNA, 14 nt, Human
cagaaggcucuucu

SEQ ID NO: 2435246 - RNA, 12 nt, Human
cagaaggcucuu

SEQ ID NO: 2435247 - RNA, 10 nt, Human
cagaagggag

SEQ ID NO: 2435248 - RNA, 17 nt, Human
cagaaggcucuucugac

SEQ ID NO: 2435249 - RNA, 19 nt, Human
cagaagggacuucacgaag

SEQ ID NO: 2435250 - RNA, 15 nt, Human
cagaagggagaagga

SEQ ID NO: 2435251 - RNA, 15 nt, Human
cagacggcacccacc

SEQ ID NO: 2435252 - RNA, 16 nt, Human
cagacggcacccaccc

SEQ ID NO: 2435253 - RNA, 17 nt, Human
cagacggcacccaccca

SEQ ID NO: 2435254 - RNA, 17 nt, Human
cagacgguucaccagcc

SEQ ID NO: 2435255 - RNA, 17 nt, Human
cagacguaggggagggg

SEQ ID NO: 2435256 - RNA, 19 nt, Human
cagacgguucaccagccuc

SEQ ID NO: 2435257 - RNA, 20 nt, Human
cagacguaugcuuauuuuaa

SEQ ID NO: 2435258 - RNA, 15 nt, Human
cagacgucccuccac

SEQ ID NO: 2435259 - RNA, 23 nt, Human
cagacuagaauucuagugcugcu

SEQ ID NO: 2435260 - RNA, 22 nt, Human
cagacuagaauucuagugcugc

SEQ ID NO: 2435261 - RNA, 18 nt, Human
cagacuauuuaacuugag

SEQ ID NO: 2435262 - RNA, 22 nt, Human
cagacuaguuuaguuaaaugag

SEQ ID NO: 2435263 - RNA, 19 nt, Human
cagacuauuuaacuugagg

SEQ ID NO: 2435264 - RNA, 22 nt, Human
cagacucaaaugcucagaccag

SEQ ID NO: 2435265 - RNA, 23 nt, Human
cagacucaaaugcucagaccagc

SEQ ID NO: 2435266 - RNA, 19 nt, Human
cagacucacaaccugaacc

SEQ ID NO: 2435267 - RNA, 22 nt, Human
cagaccuggagccccugggugg

SEQ ID NO: 2435268 - RNA, 21 nt, Human
cagaccuggagccccugggug

SEQ ID NO: 2435269 - RNA, 20 nt, Human
cagaccuggagccccugggu

SEQ ID NO: 2435270 - RNA, 19 nt, Human
cagaccuggagccccuggg

SEQ ID NO: 2435271 - RNA, 18 nt, Human
cagaccuggagccccugg

SEQ ID NO: 2435272 - RNA, 17 nt, Human
cagaccuggagccccug

SEQ ID NO: 2435273 - RNA, 16 nt, Human
cagaccuggagccccu

SEQ ID NO: 2435274 - RNA, 15 nt, Human
cagaccuggagcccc

SEQ ID NO: 2435275 - RNA, 17 nt, Human
cagaccuguccuccugg

SEQ ID NO: 2435276 - RNA, 13 nt, Human
cagaccuguccuc

SEQ ID NO: 2435277 - RNA, 12 nt, Human
cagaccuguccu

SEQ ID NO: 2435278 - RNA, 23 nt, Human
cagaccuggagccccuggguggg

SEQ ID NO: 2435279 - RNA, 19 nt, Human
cagaccuguuagcagacag

SEQ ID NO: 2435280 - RNA, 20 nt, Human
cagaccuguuagcagacagg

SEQ ID NO: 2435281 - RNA, 17 nt, Human
cagacgcacgugggucu

SEQ ID NO: 2435282 - RNA, 19 nt, Human
cagaccuuguucacacucu

SEQ ID NO: 2435283 - RNA, 21 nt, Human
cagaccuucuaggacgccacc

SEQ ID NO: 2435284 - RNA, 15 nt, Human
cagaccuuugaggau

SEQ ID NO: 2435285 - RNA, 16 nt, Human
cagacgccugaggaac

SEQ ID NO: 2435286 - RNA, 13 nt, Human
cagaccuuuuauc

SEQ ID NO: 2435287 - RNA, 23 nt, Human
cagacgccggggacagaggccug

SEQ ID NO: 2435288 - RNA, 22 nt, Human
cagaccuccccagccccuagcc

SEQ ID NO: 2435289 - RNA, 21 nt, Human
cagaccuccccagccccuagc

SEQ ID NO: 2435290 - RNA, 19 nt, Human
cagaccuccccagccccua

SEQ ID NO: 2435291 - RNA, 18 nt, Human
cagaccuccccagccccu

SEQ ID NO: 2435292 - RNA, 16 nt, Human
cagaccuccccagccc

SEQ ID NO: 2435293 - RNA, 15 nt, Human
cagaccuccccagcc

SEQ ID NO: 2435294 - RNA, 14 nt, Human
cagaccuccccagc

SEQ ID NO: 2435295 - RNA, 12 nt, Human
cagaccucccca

SEQ ID NO: 2435296 - RNA, 13 nt, Human
cagaccugauccu

SEQ ID NO: 2435297 - RNA, 14 nt, Human
cagaccugauccug

SEQ ID NO: 2435298 - RNA, 23 nt, Human
cagaccuccccagccccuagccc

SEQ ID NO: 2435299 - RNA, 12 nt, Human
cagaccugagcu

SEQ ID NO: 2435300 - RNA, 17 nt, Human
cagaccugagcucccca

SEQ ID NO: 2435301 - RNA, 17 nt, Human
cagaccugauccuggag

SEQ ID NO: 2435302 - RNA, 20 nt, Human
cagaccugauccuggaggcc

SEQ ID NO: 2435303 - RNA, 22 nt, Human
cagaccugauccuggaggccca

SEQ ID NO: 2435304 - RNA, 23 nt, Human
cagaccugauccuggaggcccag

SEQ ID NO: 2435305 - RNA, 14 nt, Human
cagaccuggagccc

SEQ ID NO: 2435306 - RNA, 13 nt, Human
cagaccuggagcc

SEQ ID NO: 2435307 - RNA, 22 nt, Human
cagaccugagcuccccaccacc

SEQ ID NO: 2435308 - RNA, 16 nt, Human
cagaccugccucuucc

SEQ ID NO: 2435309 - RNA, 13 nt, Human
cagaccugccucu

SEQ ID NO: 2435310 - RNA, 20 nt, Human
cagacuuugcuucccauugu

SEQ ID NO: 2435311 - RNA, 21 nt, Human
cagacuuuacaugacacagcu

SEQ ID NO: 2435312 - RNA, 20 nt, Human
cagacuuuacaugacacagc

SEQ ID NO: 2435313 - RNA, 19 nt, Human
cagacuuuggaaaaugcau

SEQ ID NO: 2435314 - RNA, 22 nt, Human
cagacuuuggaaaaugcauugu

SEQ ID NO: 2435315 - RNA, 23 nt, Human
cagacuuuggaaaaugcauugua

SEQ ID NO: 2435316 - RNA, 20 nt, Human
cagacuucuccagacccacc

SEQ ID NO: 2435317 - RNA, 15 nt, Human
cagacuuuaaagaau

SEQ ID NO: 2435318 - RNA, 24 nt, Human
cagacuuccuugagacacggagcc

SEQ ID NO: 2435319 - RNA, 13 nt, Human
cagacuucuccag

SEQ ID NO: 2435320 - RNA, 14 nt, Human
cagacuucuccaga

SEQ ID NO: 2435321 - RNA, 15 nt, Human
cagacuucuccagac

SEQ ID NO: 2435322 - RNA, 16 nt, Human
cagacuucuccagacc

SEQ ID NO: 2435323 - RNA, 15 nt, Human
cagacuuccuugaga

SEQ ID NO: 2435324 - RNA, 21 nt, Human
cagacuucccugaauguauug

SEQ ID NO: 2435325 - RNA, 15 nt, Human
cagacuucacacugc

SEQ ID NO: 2435326 - RNA, 14 nt, Human
cagacuucacacug

SEQ ID NO: 2435327 - RNA, 16 nt, Human
cagacucaguuuguca

SEQ ID NO: 2435328 - RNA, 14 nt, Human
cagacucaauaaaa

SEQ ID NO: 2435329 - RNA, 17 nt, Human
cagacucaguuugucag

SEQ ID NO: 2435330 - RNA, 18 nt, Human
cagacucaguuugucaga

SEQ ID NO: 2435331 - RNA, 14 nt, Human
cagacucagacauu

SEQ ID NO: 2435332 - RNA, 21 nt, Human
cagacucacaaccugaaccua

SEQ ID NO: 2435333 - RNA, 20 nt, Human
cagacucacaaccugaaccu

SEQ ID NO: 2435334 - RNA, 17 nt, Human
cagacucccauuccuga

SEQ ID NO: 2435335 - RNA, 18 nt, Human
cagacucccauuccugaa

SEQ ID NO: 2435336 - RNA, 14 nt, Human
cagacucccauucc

SEQ ID NO: 2435337 - RNA, 18 nt, Human
cagagaaagaagagacag

SEQ ID NO: 2435338 - RNA, 15 nt, Human
cagagaaagaagaga

SEQ ID NO: 2435339 - RNA, 20 nt, Human
cagacuuuuuuuaaauagua

SEQ ID NO: 2435340 - RNA, 23 nt, Human
cagagaaaguacuucuccacccu

SEQ ID NO: 2435341 - RNA, 19 nt, Human
cagagaaaguacuucucca

SEQ ID NO: 2435342 - RNA, 17 nt, Human
cagagaaagaggaagcu

SEQ ID NO: 2435343 - RNA, 15 nt, Human
cagagaaagaggaag

SEQ ID NO: 2435344 - RNA, 13 nt, Human
cagagaaagagga

SEQ ID NO: 2435345 - RNA, 23 nt, Human
cagagaaagaagagacaggaggg

SEQ ID NO: 2435346 - RNA, 22 nt, Human
cagagaaagaagagacaggagg

SEQ ID NO: 2435347 - RNA, 21 nt, Human
cagagaaagaagagacaggag

SEQ ID NO: 2435348 - RNA, 20 nt, Human
cagagaaagaagagacagga

SEQ ID NO: 2435349 - RNA, 19 nt, Human
cagagaaagaagagacagg

SEQ ID NO: 2435350 - RNA, 18 nt, Human
cagagaaagaggaagcuu

SEQ ID NO: 2435351 - RNA, 18 nt, Human
cagagaaaggggagccca

SEQ ID NO: 2435352 - RNA, 21 nt, Human
cagacccugcccugugggccc

SEQ ID NO: 2435353 - RNA, 17 nt, Human
cagacccugcccugugg

SEQ ID NO: 2435354 - RNA, 16 nt, Human
cagacccugcccugug

SEQ ID NO: 2435355 - RNA, 15 nt, Human
cagacccugcccugu

SEQ ID NO: 2435356 - RNA, 19 nt, Human
cagaccuauuccuccuggg

SEQ ID NO: 2435357 - RNA, 18 nt, Human
cagaccuauuccuccugg

SEQ ID NO: 2435358 - RNA, 22 nt, Human
cagaccuaggauuucaugauuu

SEQ ID NO: 2435359 - RNA, 15 nt, Human
cagaccuaaugcucc

SEQ ID NO: 2435360 - RNA, 16 nt, Human
cagaccuaaugcuccu

SEQ ID NO: 2435361 - RNA, 17 nt, Human
cagaccuaaugcuccuu

SEQ ID NO: 2435362 - RNA, 18 nt, Human
cagaccuaaugcuccuug

SEQ ID NO: 2435363 - RNA, 21 nt, Human
cagaccgaacuguuguauaaa

SEQ ID NO: 2435364 - RNA, 22 nt, Human
cagacccugcccugugggcccc

SEQ ID NO: 2435365 - RNA, 18 nt, Human
cagacccuaccccaccac

SEQ ID NO: 2435366 - RNA, 15 nt, Human
cagacccuaccccac

SEQ ID NO: 2435367 - RNA, 16 nt, Human
cagacccuaccccacc

SEQ ID NO: 2435368 - RNA, 17 nt, Human
cagacccuaccccacca

SEQ ID NO: 2435369 - RNA, 22 nt, Human
cagaccccuggcuuuucacugc

SEQ ID NO: 2435370 - RNA, 21 nt, Human
cagaccccuggcuuuucacug

SEQ ID NO: 2435371 - RNA, 23 nt, Human
cagaccccuggcuuuucacugcu

SEQ ID NO: 2435372 - RNA, 16 nt, Human
cagaccccuucagcca

SEQ ID NO: 2435373 - RNA, 22 nt, Human
cagaccccucuggccaggaugg

SEQ ID NO: 2435374 - RNA, 14 nt, Human
cagacccggcugcg

SEQ ID NO: 2435375 - RNA, 12 nt, Human
cagacccggcug

SEQ ID NO: 2435376 - RNA, 14 nt, Human
cagacccugcccug

SEQ ID NO: 2435377 - RNA, 13 nt, Human
cagacccugcccu

SEQ ID NO: 2435378 - RNA, 12 nt, Human
cagacccugccc

SEQ ID NO: 2435379 - RNA, 16 nt, Human
cagacccggcugcgug

SEQ ID NO: 2435380 - RNA, 18 nt, Human
cagaccccuggcuuuuca

SEQ ID NO: 2435381 - RNA, 16 nt, Human
cagaccccuggcuuuu

SEQ ID NO: 2435382 - RNA, 15 nt, Human
cagaccccuggcuuu

SEQ ID NO: 2435383 - RNA, 14 nt, Human
cagaccccuggcuu

SEQ ID NO: 2435384 - RNA, 13 nt, Human
cagaccccuggcu

SEQ ID NO: 2435385 - RNA, 17 nt, Human
cagaccccucuggccag

SEQ ID NO: 2435386 - RNA, 18 nt, Human
cagaccccucuggccagg

SEQ ID NO: 2435387 - RNA, 20 nt, Human
cagaccccucuggccaggau

SEQ ID NO: 2435388 - RNA, 21 nt, Human
cagaccccucuggccaggaug

SEQ ID NO: 2435389 - RNA, 15 nt, Human
cagacccccuggaga

SEQ ID NO: 2435390 - RNA, 18 nt, Human
cagacccccagcaacccu

SEQ ID NO: 2435391 - RNA, 13 nt, Human
cagaccccucugg

SEQ ID NO: 2435392 - RNA, 16 nt, Human
cagaccccucuggcca

SEQ ID NO: 2435393 - RNA, 12 nt, Human
cagacccagugg

SEQ ID NO: 2435394 - RNA, 12 nt, Human
cagaccccagcg

SEQ ID NO: 2435395 - RNA, 14 nt, Human
cagaccccagcggc

SEQ ID NO: 2435396 - RNA, 16 nt, Human
cagaccccagcggcug

SEQ ID NO: 2435397 - RNA, 15 nt, Human
cagaccccagcggcu

SEQ ID NO: 2435398 - RNA, 13 nt, Human
cagacccccaccc

SEQ ID NO: 2435399 - RNA, 14 nt, Human
cagacccccacccc

SEQ ID NO: 2435400 - RNA, 15 nt, Human
cagacccccaccccu

SEQ ID NO: 2435401 - RNA, 17 nt, Human
cagacccccaccccuuc

SEQ ID NO: 2435402 - RNA, 18 nt, Human
cagacccccaccccuucc

SEQ ID NO: 2435403 - RNA, 19 nt, Human
cagacccccaccccuuccc

SEQ ID NO: 2435404 - RNA, 20 nt, Human
cagacccccaccccuucccc

SEQ ID NO: 2435405 - RNA, 21 nt, Human
cagacccccaccccuucccca

SEQ ID NO: 2435406 - RNA, 22 nt, Human
cagacccccaccccuuccccac

SEQ ID NO: 2435407 - RNA, 23 nt, Human
cagacccccaccccuuccccacu

SEQ ID NO: 2435408 - RNA, 13 nt, Human
cagacccccacuc

SEQ ID NO: 2435409 - RNA, 14 nt, Human
cagacccccacucu

SEQ ID NO: 2435410 - RNA, 16 nt, Human
cagacccccacucuca

SEQ ID NO: 2435411 - RNA, 13 nt, Human
cagacccccagca

SEQ ID NO: 2435412 - RNA, 17 nt, Human
cagacccccagcaaccc

SEQ ID NO: 2435413 - RNA, 19 nt, Human
cagacauuguuuugccaac

SEQ ID NO: 2435414 - RNA, 15 nt, Human
cagacauuguuuugc

SEQ ID NO: 2435415 - RNA, 13 nt, Human
cagacauuguuuu

SEQ ID NO: 2435416 - RNA, 21 nt, Human
cagacauugucagcaaauuaa

SEQ ID NO: 2435417 - RNA, 17 nt, Human
cagacauugucagcaaa

SEQ ID NO: 2435418 - RNA, 15 nt, Human
cagacauugucagca

SEQ ID NO: 2435419 - RNA, 11 nt, Human
cagacauuguu

SEQ ID NO: 2435420 - RNA, 14 nt, Human
cagacauugucagc

SEQ ID NO: 2435421 - RNA, 11 nt, Human
cagacauuguc

SEQ ID NO: 2435422 - RNA, 14 nt, Human
cagacauuggcacc

SEQ ID NO: 2435423 - RNA, 14 nt, Human
cagaccacaaaacu

SEQ ID NO: 2435424 - RNA, 20 nt, Human
cagaccacaaaacuuuucua

SEQ ID NO: 2435425 - RNA, 22 nt, Human
cagaccacgcccguccugccug

SEQ ID NO: 2435426 - RNA, 22 nt, Human
cagaccaccccgccugcccuca

SEQ ID NO: 2435427 - RNA, 19 nt, Human
cagaccaccccgccugccc

SEQ ID NO: 2435428 - RNA, 15 nt, Human
cagaccaccccgccu

SEQ ID NO: 2435429 - RNA, 13 nt, Human
cagaccaccccgc

SEQ ID NO: 2435430 - RNA, 22 nt, Human
cagacauuguuuugccaacauu

SEQ ID NO: 2435431 - RNA, 20 nt, Human
cagacauuguuuugccaaca

SEQ ID NO: 2435432 - RNA, 20 nt, Human
cagaccacaucuuuaucugu

SEQ ID NO: 2435433 - RNA, 24 nt, Human
cagaccacgcccguccugccugug

SEQ ID NO: 2435434 - RNA, 23 nt, Human
cagaccacgcccguccugccugu

SEQ ID NO: 2435435 - RNA, 13 nt, Human
cagaccacggcuc

SEQ ID NO: 2435436 - RNA, 16 nt, Human
cagaccauaauguuac

SEQ ID NO: 2435437 - RNA, 13 nt, Human
cagaccagcucuu

SEQ ID NO: 2435438 - RNA, 22 nt, Human
cagacaccuugacagggcacac

SEQ ID NO: 2435439 - RNA, 20 nt, Human
cagacaccuugacagggcac

SEQ ID NO: 2435440 - RNA, 14 nt, Human
cagacacccucaac

SEQ ID NO: 2435441 - RNA, 15 nt, Human
cagacacccucaacc

SEQ ID NO: 2435442 - RNA, 21 nt, Human
cagacacccucaaccucuucu

SEQ ID NO: 2435443 - RNA, 15 nt, Human
cagacaccgccacau

SEQ ID NO: 2435444 - RNA, 19 nt, Human
cagacaccuugacagggca

SEQ ID NO: 2435445 - RNA, 16 nt, Human
cagacacucugcucug

SEQ ID NO: 2435446 - RNA, 14 nt, Human
cagacacucugcuc

SEQ ID NO: 2435447 - RNA, 13 nt, Human
cagacacucugcu

SEQ ID NO: 2435448 - RNA, 12 nt, Human
cagacacucugc

SEQ ID NO: 2435449 - RNA, 21 nt, Human
cagacacuaaguuauaguaua

SEQ ID NO: 2435450 - RNA, 18 nt, Human
cagacacuaaguuauagu

SEQ ID NO: 2435451 - RNA, 12 nt, Human
cagacacuaagu

SEQ ID NO: 2435452 - RNA, 11 nt, Human
cagacacuaag

SEQ ID NO: 2435453 - RNA, 22 nt, Human
cagacacggaucugagaaucuu

SEQ ID NO: 2435454 - RNA, 17 nt, Human
cagacacggaucugaga

SEQ ID NO: 2435455 - RNA, 14 nt, Human
cagacaccuuggac

SEQ ID NO: 2435456 - RNA, 18 nt, Human
cagacaccuuggacaucc

SEQ ID NO: 2435457 - RNA, 20 nt, Human
cagacaguuaagagaaauga

SEQ ID NO: 2435458 - RNA, 14 nt, Human
cagacacucuggcu

SEQ ID NO: 2435459 - RNA, 13 nt, Human
cagacacucuggc

SEQ ID NO: 2435460 - RNA, 20 nt, Human
cagacacucugcucugcccu

SEQ ID NO: 2435461 - RNA, 19 nt, Human
cagacacucugcucugccc

SEQ ID NO: 2435462 - RNA, 21 nt, Human
cagacacuuuuuugaguggau

SEQ ID NO: 2435463 - RNA, 17 nt, Human
cagacauagaauuaaca

SEQ ID NO: 2435464 - RNA, 19 nt, Human
cagacauagaauuaacaca

SEQ ID NO: 2435465 - RNA, 19 nt, Human
cagacauacuaaccagcag

SEQ ID NO: 2435466 - RNA, 21 nt, Human
cagacacugaccauccacucu

SEQ ID NO: 2435467 - RNA, 19 nt, Human
cagacauccauguuuguaa

SEQ ID NO: 2435468 - RNA, 17 nt, Human
cagacaucucugcaccc

SEQ ID NO: 2435469 - RNA, 15 nt, Human
cagacaucucugcac

SEQ ID NO: 2435470 - RNA, 23 nt, Human
cagacauccauguuuguaaaacu

SEQ ID NO: 2435471 - RNA, 22 nt, Human
cagacauccauguuuguaaaac

SEQ ID NO: 2435472 - RNA, 18 nt, Human
cagacaugccacaaggac

SEQ ID NO: 2435473 - RNA, 18 nt, Human
cagacauguggugggaca

SEQ ID NO: 2435474 - RNA, 12 nt, Human
cagacauguuuu

SEQ ID NO: 2435475 - RNA, 22 nt, Human
cagacauguggugggacaggga

SEQ ID NO: 2435476 - RNA, 18 nt, Human
cagacauguuuuccguga

SEQ ID NO: 2435477 - RNA, 22 nt, Human
cagacauguuuuccgugaaaac

SEQ ID NO: 2435478 - RNA, 13 nt, Human
cagacauucugcc

SEQ ID NO: 2435479 - RNA, 16 nt, Human
cagacauucugccagg

SEQ ID NO: 2435480 - RNA, 21 nt, Human
cagacauucugccaggccccc

SEQ ID NO: 2435481 - RNA, 23 nt, Human
cagacacaggcccggcuccaggc

SEQ ID NO: 2435482 - RNA, 22 nt, Human
cagacacaggcccggcuccagg

SEQ ID NO: 2435483 - RNA, 21 nt, Human
cagacacaggcccggcuccag

SEQ ID NO: 2435484 - RNA, 18 nt, Human
cagacacaggcccggcuc

SEQ ID NO: 2435485 - RNA, 17 nt, Human
cagacacaggcccggcu

SEQ ID NO: 2435486 - RNA, 15 nt, Human
cagacacaggcccgg

SEQ ID NO: 2435487 - RNA, 14 nt, Human
cagacacaggcccg

SEQ ID NO: 2435488 - RNA, 13 nt, Human
cagacacaggccc

SEQ ID NO: 2435489 - RNA, 21 nt, Human
cagacacagggacuugaaguu

SEQ ID NO: 2435490 - RNA, 20 nt, Human
cagacacagggacuugaagu

SEQ ID NO: 2435491 - RNA, 18 nt, Human
cagacacagggacuugaa

SEQ ID NO: 2435492 - RNA, 17 nt, Human
cagacacagggacuuga

SEQ ID NO: 2435493 - RNA, 13 nt, Human
cagacacccaccc

SEQ ID NO: 2435494 - RNA, 22 nt, Human
cagacacagggacuugaaguug

SEQ ID NO: 2435495 - RNA, 12 nt, Human
cagacacccagg

SEQ ID NO: 2435496 - RNA, 13 nt, Human
cagacacccagga

SEQ ID NO: 2435497 - RNA, 14 nt, Human
cagacacccaggac

SEQ ID NO: 2435498 - RNA, 15 nt, Human
cagacacccaggacu

SEQ ID NO: 2435499 - RNA, 17 nt, Human
cagacacccaggacuua

SEQ ID NO: 2435500 - RNA, 23 nt, Human
cagacacauguccaagaagccca

SEQ ID NO: 2435501 - RNA, 22 nt, Human
cagacacauguccaagaagccc

SEQ ID NO: 2435502 - RNA, 21 nt, Human
cagacacauguccaagaagcc

SEQ ID NO: 2435503 - RNA, 17 nt, Human
cagacacauguccaaga

SEQ ID NO: 2435504 - RNA, 14 nt, Human
cagacacaugucca

SEQ ID NO: 2435505 - RNA, 15 nt, Human
cagacacaggcccuc

SEQ ID NO: 2435506 - RNA, 18 nt, Human
cagacacaggcccucccu

SEQ ID NO: 2435507 - RNA, 14 nt, Human
cagacacaggcccu

SEQ ID NO: 2435508 - RNA, 14 nt, Human
cagacacagaagag

SEQ ID NO: 2435509 - RNA, 18 nt, Human
cagacacacgcacacaca

SEQ ID NO: 2435510 - RNA, 22 nt, Human
cagacacacacacgcacgcaca

SEQ ID NO: 2435511 - RNA, 21 nt, Human
cagacacacacacgcacgcac

SEQ ID NO: 2435512 - RNA, 18 nt, Human
cagacacacacacgcacg

SEQ ID NO: 2435513 - RNA, 17 nt, Human
cagacacacacacgcac

SEQ ID NO: 2435514 - RNA, 16 nt, Human
cagacacacacacgca

SEQ ID NO: 2435515 - RNA, 15 nt, Human
cagacacacacacgc

SEQ ID NO: 2435516 - RNA, 14 nt, Human
cagacacacacacg

SEQ ID NO: 2435517 - RNA, 13 nt, Human
cagacacacacac

SEQ ID NO: 2435518 - RNA, 11 nt, Human
cagacacacac

SEQ ID NO: 2435519 - RNA, 14 nt, Human
cagacacacacaca

SEQ ID NO: 2435520 - RNA, 12 nt, Human
cagacacacaca

SEQ ID NO: 2435521 - RNA, 16 nt, Human
cagacaagguagcccu

SEQ ID NO: 2435522 - RNA, 23 nt, Human
cagacaagguagcccuggccaga

SEQ ID NO: 2435523 - RNA, 23 nt, Human
cagacaagcaacagguuuuauaa

SEQ ID NO: 2435524 - RNA, 19 nt, Human
cagacaagcaacagguuuu

SEQ ID NO: 2435525 - RNA, 21 nt, Human
cagacaaaguaauuccucuca

SEQ ID NO: 2435526 - RNA, 17 nt, Human
cagacaacagaagucau

SEQ ID NO: 2435527 - RNA, 22 nt, Human
cagacaacagaagucaugaagc

SEQ ID NO: 2435528 - RNA, 22 nt, Human
cagacaaagcgugguggacaug

SEQ ID NO: 2435529 - RNA, 22 nt, Human
cagacaaaugugguuacacacu

SEQ ID NO: 2435530 - RNA, 17 nt, Human
cagacaaaccagaagca

SEQ ID NO: 2435531 - RNA, 22 nt, Human
cagacaaaaacagccucacaga

SEQ ID NO: 2435532 - RNA, 20 nt, Human
cagacaacaaaccuguuucu

SEQ ID NO: 2435533 - RNA, 13 nt, Human
cagacaacagaag

SEQ ID NO: 2435534 - RNA, 14 nt, Human
cagacaacagaagu

SEQ ID NO: 2435535 - RNA, 15 nt, Human
cagacaacagaaguc

SEQ ID NO: 2435536 - RNA, 16 nt, Human
cagacaacagaaguca

SEQ ID NO: 2435537 - RNA, 20 nt, Human
cagaauuucccaaagcagug

SEQ ID NO: 2435538 - RNA, 19 nt, Human
cagaauuucccaaagcagu

SEQ ID NO: 2435539 - RNA, 18 nt, Human
cagaauuucccaaagcag

SEQ ID NO: 2435540 - RNA, 17 nt, Human
cagaauuucccaaagca

SEQ ID NO: 2435541 - RNA, 19 nt, Human
cagaauuuggguucugccu

SEQ ID NO: 2435542 - RNA, 24 nt, Human
cagaauuucccaaagcagugcaug

SEQ ID NO: 2435543 - RNA, 12 nt, Human
cagacaaagcgu

SEQ ID NO: 2435544 - RNA, 18 nt, Human
cagacaaaaacagccuca

SEQ ID NO: 2435545 - RNA, 19 nt, Human
cagacaaaaacagccucac

SEQ ID NO: 2435546 - RNA, 20 nt, Human
cagacaaaaacagccucaca

SEQ ID NO: 2435547 - RNA, 21 nt, Human
cagacaaaaacagccucacag

SEQ ID NO: 2435548 - RNA, 23 nt, Human
cagaauuggauacauacaccagc

SEQ ID NO: 2435549 - RNA, 18 nt, Human
cagaauugugucugcagg

SEQ ID NO: 2435550 - RNA, 17 nt, Human
cagaauugugucugcag

SEQ ID NO: 2435551 - RNA, 16 nt, Human
cagaauugugucugca

SEQ ID NO: 2435552 - RNA, 14 nt, Human
cagaauuucccaaa

SEQ ID NO: 2435553 - RNA, 13 nt, Human
cagaauugaucau

SEQ ID NO: 2435554 - RNA, 21 nt, Human
cagaauucugcuaccucacug

SEQ ID NO: 2435555 - RNA, 23 nt, Human
cagaauucugcuaccucacuggg

SEQ ID NO: 2435556 - RNA, 15 nt, Human
cagaauuccuuuucu

SEQ ID NO: 2435557 - RNA, 13 nt, Human
cagaauucugcua

SEQ ID NO: 2435558 - RNA, 14 nt, Human
cagaauucugcuac

SEQ ID NO: 2435559 - RNA, 15 nt, Human
cagaauucucuaguu

SEQ ID NO: 2435560 - RNA, 18 nt, Human
cagaauucucuaguuuga

SEQ ID NO: 2435561 - RNA, 15 nt, Human
cagaauuaacuccau

SEQ ID NO: 2435562 - RNA, 11 nt, Human
cagaauucuca

SEQ ID NO: 2435563 - RNA, 16 nt, Human
cagaaugagugcuuca

SEQ ID NO: 2435564 - RNA, 18 nt, Human
cagaaugaggaauaauaa

SEQ ID NO: 2435565 - RNA, 21 nt, Human
cagaaugcuagcucugagcca

SEQ ID NO: 2435566 - RNA, 17 nt, Human
cagaaugcuagcucuga

SEQ ID NO: 2435567 - RNA, 18 nt, Human
cagaaugcugcaggacuu

SEQ ID NO: 2435568 - RNA, 14 nt, Human
cagaaugaggcugc

SEQ ID NO: 2435569 - RNA, 15 nt, Human
cagaaugaggcugcu

SEQ ID NO: 2435570 - RNA, 15 nt, Human
cagaaucucgcucug

SEQ ID NO: 2435571 - RNA, 18 nt, Human
cagaaucuacccaaagga

SEQ ID NO: 2435572 - RNA, 17 nt, Human
cagaauguuuuuaaaau

SEQ ID NO: 2435573 - RNA, 20 nt, Human
cagaauguuuuacugugaaa

SEQ ID NO: 2435574 - RNA, 16 nt, Human
cagaauguuuuacugu

SEQ ID NO: 2435575 - RNA, 14 nt, Human
cagaaugugauuuc

SEQ ID NO: 2435576 - RNA, 11 nt, Human
cagaaugcugu

SEQ ID NO: 2435577 - RNA, 16 nt, Human
cagaaugcuguacauc

SEQ ID NO: 2435578 - RNA, 17 nt, Human
cagaaugcuguacaucu

SEQ ID NO: 2435579 - RNA, 18 nt, Human
cagaaugcuguacaucua

SEQ ID NO: 2435580 - RNA, 21 nt, Human
cagaaugcuguacaucuauuu

SEQ ID NO: 2435581 - RNA, 18 nt, Human
cagaauggggugcaugaa

SEQ ID NO: 2435582 - RNA, 20 nt, Human
cagccuggcccagcuccccc

SEQ ID NO: 2435583 - RNA, 19 nt, Human
cagccuggcccagcucccc

SEQ ID NO: 2435584 - RNA, 18 nt, Human
cagccuggcccagcuccc

SEQ ID NO: 2435585 - RNA, 17 nt, Human
cagccuggcccagcucc

SEQ ID NO: 2435586 - RNA, 16 nt, Human
cagccuggcccagcuc

SEQ ID NO: 2435587 - RNA, 15 nt, Human
cagccuggcccagcu

SEQ ID NO: 2435588 - RNA, 14 nt, Human
cagccuggcccagc

SEQ ID NO: 2435589 - RNA, 11 nt, Human
cagccuggccc

SEQ ID NO: 2435590 - RNA, 13 nt, Human
cagccuggcccag

SEQ ID NO: 2435591 - RNA, 12 nt, Human
cagccuggccca

SEQ ID NO: 2435592 - RNA, 13 nt, Human
cagccuggccaga

SEQ ID NO: 2435593 - RNA, 14 nt, Human
cagccuggccagac

SEQ ID NO: 2435594 - RNA, 15 nt, Human
cagccuggccagaca

SEQ ID NO: 2435595 - RNA, 17 nt, Human
cagccuggccagacaca

SEQ ID NO: 2435596 - RNA, 18 nt, Human
cagccuggccagacacag

SEQ ID NO: 2435597 - RNA, 20 nt, Human
cagccuggccagacacaggc

SEQ ID NO: 2435598 - RNA, 14 nt, Human
cagccuggcuucug

SEQ ID NO: 2435599 - RNA, 15 nt, Human
cagccuggcuucugg

SEQ ID NO: 2435600 - RNA, 16 nt, Human
cagccuggcuucugga

SEQ ID NO: 2435601 - RNA, 17 nt, Human
cagccuggcuucuggag

SEQ ID NO: 2435602 - RNA, 19 nt, Human
cagccuggcuucuggagcc

SEQ ID NO: 2435603 - RNA, 23 nt, Human
cagccuggcucccacaggcagcu

SEQ ID NO: 2435604 - RNA, 22 nt, Human
cagccuggcucccacaggcagc

SEQ ID NO: 2435605 - RNA, 21 nt, Human
cagccuggcucccacaggcag

SEQ ID NO: 2435606 - RNA, 12 nt, Human
cagccuggcucc

SEQ ID NO: 2435607 - RNA, 23 nt, Human
cagccuggcgaaaccccaucucu

SEQ ID NO: 2435608 - RNA, 10 nt, Human
cagccuggca

SEQ ID NO: 2435609 - RNA, 13 nt, Human
cagccuggaggcc

SEQ ID NO: 2435610 - RNA, 16 nt, Human
cagccuggagaugaaa

SEQ ID NO: 2435611 - RNA, 18 nt, Human
cagccuggacccccagcu

SEQ ID NO: 2435612 - RNA, 17 nt, Human
cagccuggacccccagc

SEQ ID NO: 2435613 - RNA, 17 nt, Human
cagccuggaucuccuca

SEQ ID NO: 2435614 - RNA, 12 nt, Human
cagccuggaggc

SEQ ID NO: 2435615 - RNA, 20 nt, Human
cagccuggcacagggcagug

SEQ ID NO: 2435616 - RNA, 13 nt, Human
cagccuggcacag

SEQ ID NO: 2435617 - RNA, 21 nt, Human
cagccuggcacagggcagugg

SEQ ID NO: 2435618 - RNA, 21 nt, Human
cagccugcuccuucccaggag

SEQ ID NO: 2435619 - RNA, 20 nt, Human
cagccugcuccuucccagga

SEQ ID NO: 2435620 - RNA, 21 nt, Human
cagccucuagggaccccuccu

SEQ ID NO: 2435621 - RNA, 16 nt, Human
cagccuggacccccag

SEQ ID NO: 2435622 - RNA, 15 nt, Human
cagccuggaccccca

SEQ ID NO: 2435623 - RNA, 13 nt, Human
cagccuggacccc

SEQ ID NO: 2435624 - RNA, 16 nt, Human
cagccuggacauagag

SEQ ID NO: 2435625 - RNA, 22 nt, Human
cagccugcuccuucccaggagu

SEQ ID NO: 2435626 - RNA, 15 nt, Human
cagccuggacccugu

SEQ ID NO: 2435627 - RNA, 19 nt, Human
cagccuggacccuguggau

SEQ ID NO: 2435628 - RNA, 21 nt, Human
cagccucccuauuuuuuuucu

SEQ ID NO: 2435629 - RNA, 13 nt, Human
cagccucccucug

SEQ ID NO: 2435630 - RNA, 14 nt, Human
cagccucccucuga

SEQ ID NO: 2435631 - RNA, 15 nt, Human
cagccucccucugac

SEQ ID NO: 2435632 - RNA, 21 nt, Human
cagccucccucugaccugcag

SEQ ID NO: 2435633 - RNA, 22 nt, Human
cagccucccucugaccugcagg

SEQ ID NO: 2435634 - RNA, 23 nt, Human
cagccucccucugaccugcaggc

SEQ ID NO: 2435635 - RNA, 23 nt, Human
cagccucccgaguagcugggacu

SEQ ID NO: 2435636 - RNA, 22 nt, Human
cagccucccgaguagcugggac

SEQ ID NO: 2435637 - RNA, 21 nt, Human
cagccucccgaguagcuggga

SEQ ID NO: 2435638 - RNA, 20 nt, Human
cagccucccgaguagcuggg

SEQ ID NO: 2435639 - RNA, 19 nt, Human
cagccucccgaguagcugg

SEQ ID NO: 2435640 - RNA, 23 nt, Human
cagccucccgaauagcugggacu

SEQ ID NO: 2435641 - RNA, 12 nt, Human
cagccucccuga

SEQ ID NO: 2435642 - RNA, 14 nt, Human
cagccucccugaag

SEQ ID NO: 2435643 - RNA, 16 nt, Human
cagccucccugaagcc

SEQ ID NO: 2435644 - RNA, 17 nt, Human
cagccucccugaagccu

SEQ ID NO: 2435645 - RNA, 17 nt, Human
cagccuccgagagggag

SEQ ID NO: 2435646 - RNA, 21 nt, Human
cagccucccugucggccuggu

SEQ ID NO: 2435647 - RNA, 18 nt, Human
cagccucccugaagccuu

SEQ ID NO: 2435648 - RNA, 20 nt, Human
cagccuccgagagggagaga

SEQ ID NO: 2435649 - RNA, 19 nt, Human
cagccuccgagagggagag

SEQ ID NO: 2435650 - RNA, 17 nt, Human
cagccuccucugucugc

SEQ ID NO: 2435651 - RNA, 23 nt, Human
cagccuccucuggacggcaggcu

SEQ ID NO: 2435652 - RNA, 22 nt, Human
cagccuccucuggacggcaggc

SEQ ID NO: 2435653 - RNA, 21 nt, Human
cagccuccucuggacggcagg

SEQ ID NO: 2435654 - RNA, 17 nt, Human
cagccuccucuggacgg

SEQ ID NO: 2435655 - RNA, 14 nt, Human
cagccuccucugga

SEQ ID NO: 2435656 - RNA, 12 nt, Human
cagccuccucug

SEQ ID NO: 2435657 - RNA, 15 nt, Human
cagccuccuccugac

SEQ ID NO: 2435658 - RNA, 13 nt, Human
cagccuccuccug

SEQ ID NO: 2435659 - RNA, 23 nt, Human
cagccuccucaucugggggagug

SEQ ID NO: 2435660 - RNA, 17 nt, Human
cagccuccucaucuggg

SEQ ID NO: 2435661 - RNA, 16 nt, Human
cagccuccucaucugg

SEQ ID NO: 2435662 - RNA, 18 nt, Human
cagccuccguauuucaga

SEQ ID NO: 2435663 - RNA, 19 nt, Human
cagccuccguauuucagac

SEQ ID NO: 2435664 - RNA, 20 nt, Human
cagccucuagggaccccucc

SEQ ID NO: 2435665 - RNA, 19 nt, Human
cagccucuagggaccccuc

SEQ ID NO: 2435666 - RNA, 15 nt, Human
cagccucuagggacc

SEQ ID NO: 2435667 - RNA, 14 nt, Human
cagccucuagggac

SEQ ID NO: 2435668 - RNA, 20 nt, Human
cagccugcuccagcuguuca

SEQ ID NO: 2435669 - RNA, 23 nt, Human
cagccuccucugucugcccuuca

SEQ ID NO: 2435670 - RNA, 15 nt, Human
cagccuccugaguag

SEQ ID NO: 2435671 - RNA, 20 nt, Human
cagccuccugaguagcugga

SEQ ID NO: 2435672 - RNA, 24 nt, Human
cagccuugaccauucuccaccugc

SEQ ID NO: 2435673 - RNA, 17 nt, Human
cagccuucuuugcuugc

SEQ ID NO: 2435674 - RNA, 14 nt, Human
cagccuucuuugcu

SEQ ID NO: 2435675 - RNA, 23 nt, Human
cagccuucuuccaucccaggaca

SEQ ID NO: 2435676 - RNA, 21 nt, Human
cagccuucuuccaucccagga

SEQ ID NO: 2435677 - RNA, 23 nt, Human
cagccuugaccauucuccaccug

SEQ ID NO: 2435678 - RNA, 22 nt, Human
cagccuugaccauucuccaccu

SEQ ID NO: 2435679 - RNA, 13 nt, Human
cagccuugccaga

SEQ ID NO: 2435680 - RNA, 14 nt, Human
cagccuugccagag

SEQ ID NO: 2435681 - RNA, 15 nt, Human
cagccuugccagaga

SEQ ID NO: 2435682 - RNA, 16 nt, Human
cagccuugccagagau

SEQ ID NO: 2435683 - RNA, 21 nt, Human
cagccuucuuugcuugccucu

SEQ ID NO: 2435684 - RNA, 21 nt, Human
cagccuuggauaaugcuguug

SEQ ID NO: 2435685 - RNA, 17 nt, Human
cagccuuggcaucuaga

SEQ ID NO: 2435686 - RNA, 17 nt, Human
cagccuuucucccaggc

SEQ ID NO: 2435687 - RNA, 18 nt, Human
cagccuuucucccaggcc

SEQ ID NO: 2435688 - RNA, 19 nt, Human
cagccuuucucccaggcca

SEQ ID NO: 2435689 - RNA, 20 nt, Human
cagccuuucucccaggccag

SEQ ID NO: 2435690 - RNA, 23 nt, Human
cagccuuucucccaggccaggcu

SEQ ID NO: 2435691 - RNA, 19 nt, Human
cagccuuugaucagguggg

SEQ ID NO: 2435692 - RNA, 22 nt, Human
cagccuuugaucagguggggag

SEQ ID NO: 2435693 - RNA, 23 nt, Human
cagccuuugaucagguggggagu

SEQ ID NO: 2435694 - RNA, 17 nt, Human
cagccuuugccuccccg

SEQ ID NO: 2435695 - RNA, 21 nt, Human
cagcgaaaggauguaaacagu

SEQ ID NO: 2435696 - RNA, 21 nt, Human
cagccuugaccauucuccacc

SEQ ID NO: 2435697 - RNA, 20 nt, Human
cagccuugaccauucuccac

SEQ ID NO: 2435698 - RNA, 18 nt, Human
cagccuucuuccauccca

SEQ ID NO: 2435699 - RNA, 23 nt, Human
cagccuuccucugcagcugaccu

SEQ ID NO: 2435700 - RNA, 22 nt, Human
cagccuuccucugcagcugacc

SEQ ID NO: 2435701 - RNA, 21 nt, Human
cagccuuccucugcagcugac

SEQ ID NO: 2435702 - RNA, 16 nt, Human
cagccuucuuccaucc

SEQ ID NO: 2435703 - RNA, 17 nt, Human
cagccuugaccauucuc

SEQ ID NO: 2435704 - RNA, 22 nt, Human
cagccuguggcggugccugggu

SEQ ID NO: 2435705 - RNA, 23 nt, Human
cagccuucagacagagaggacug

SEQ ID NO: 2435706 - RNA, 14 nt, Human
cagccuucccccuc

SEQ ID NO: 2435707 - RNA, 16 nt, Human
cagccuguuggacccg

SEQ ID NO: 2435708 - RNA, 18 nt, Human
cagccuguggcggugccu

SEQ ID NO: 2435709 - RNA, 19 nt, Human
cagccuguggcggugccug

SEQ ID NO: 2435710 - RNA, 20 nt, Human
cagccuguggcggugccugg

SEQ ID NO: 2435711 - RNA, 21 nt, Human
cagccuguggcggugccuggg

SEQ ID NO: 2435712 - RNA, 20 nt, Human
cagccuuccucugcagcuga

SEQ ID NO: 2435713 - RNA, 19 nt, Human
cagccuuccucugcagcug

SEQ ID NO: 2435714 - RNA, 18 nt, Human
cagccuuccucugcagcu

SEQ ID NO: 2435715 - RNA, 15 nt, Human
cagccuuccucugca

SEQ ID NO: 2435716 - RNA, 14 nt, Human
cagccuuccucugc

SEQ ID NO: 2435717 - RNA, 23 nt, Human
cagccuuccccuugcccagggcu

SEQ ID NO: 2435718 - RNA, 20 nt, Human
cagccuucccccucccaggg

SEQ ID NO: 2435719 - RNA, 21 nt, Human
cagccuucccccucccagggc

SEQ ID NO: 2435720 - RNA, 16 nt, Human
cagccuuccccuugcc

SEQ ID NO: 2435721 - RNA, 21 nt, Human
cagccuuccccuugcccaggg

SEQ ID NO: 2435722 - RNA, 20 nt, Human
cagccugggcaacacagcga

SEQ ID NO: 2435723 - RNA, 19 nt, Human
cagccugggcaacagagca

SEQ ID NO: 2435724 - RNA, 20 nt, Human
cagccugggcaacagagcaa

SEQ ID NO: 2435725 - RNA, 20 nt, Human
cagccuggcuucuggagccc

SEQ ID NO: 2435726 - RNA, 21 nt, Human
cagccuggcuucuggagcccu

SEQ ID NO: 2435727 - RNA, 16 nt, Human
cagccugggcaaugug

SEQ ID NO: 2435728 - RNA, 19 nt, Human
cagccugggcaaugugaua

SEQ ID NO: 2435729 - RNA, 11 nt, Human
cagccugggcg

SEQ ID NO: 2435730 - RNA, 15 nt, Human
cagccugggcgacag

SEQ ID NO: 2435731 - RNA, 20 nt, Human
cagccugggcagcauagcaa

SEQ ID NO: 2435732 - RNA, 17 nt, Human
cagccugggcagccagg

SEQ ID NO: 2435733 - RNA, 18 nt, Human
cagccugggcagccaggc

SEQ ID NO: 2435734 - RNA, 19 nt, Human
cagccugggcagccaggcu

SEQ ID NO: 2435735 - RNA, 20 nt, Human
cagccugggcagccaggcug

SEQ ID NO: 2435736 - RNA, 21 nt, Human
cagccugggcagccaggcugc

SEQ ID NO: 2435737 - RNA, 17 nt, Human
cagccuggggcuggccu

SEQ ID NO: 2435738 - RNA, 18 nt, Human
cagccuggggcuggccuc

SEQ ID NO: 2435739 - RNA, 21 nt, Human
cagccuggggcuggccuccca

SEQ ID NO: 2435740 - RNA, 15 nt, Human
cagccuggggucugg

SEQ ID NO: 2435741 - RNA, 20 nt, Human
cagccugggugacagaguga

SEQ ID NO: 2435742 - RNA, 19 nt, Human
cagccuggggucuggaguu

SEQ ID NO: 2435743 - RNA, 20 nt, Human
cagccuggucaacaugguga

SEQ ID NO: 2435744 - RNA, 15 nt, Human
cagccuggugggccu

SEQ ID NO: 2435745 - RNA, 16 nt, Human
cagccuggugggccuc

SEQ ID NO: 2435746 - RNA, 17 nt, Human
cagccuggugggccucc

SEQ ID NO: 2435747 - RNA, 18 nt, Human
cagccuggugggccuccu

SEQ ID NO: 2435748 - RNA, 17 nt, Human
cagccugucucuuccau

SEQ ID NO: 2435749 - RNA, 16 nt, Human
cagccugucucuucca

SEQ ID NO: 2435750 - RNA, 14 nt, Human
cagccugugcugcc

SEQ ID NO: 2435751 - RNA, 16 nt, Human
cagccugugcugcccg

SEQ ID NO: 2435752 - RNA, 12 nt, Human
cagccuguggca

SEQ ID NO: 2435753 - RNA, 15 nt, Human
cagccuguggcaucu

SEQ ID NO: 2435754 - RNA, 19 nt, Human
cagccuguggcaucuuugc

SEQ ID NO: 2435755 - RNA, 21 nt, Human
cagccuguggcaucuuugccu

SEQ ID NO: 2435756 - RNA, 19 nt, Human
cagccugucucuuccauau

SEQ ID NO: 2435757 - RNA, 12 nt, Human
cagccuguggcg

SEQ ID NO: 2435758 - RNA, 15 nt, Human
cagccugucucuucc

SEQ ID NO: 2435759 - RNA, 19 nt, Human
cagccuguccugggcuggu

SEQ ID NO: 2435760 - RNA, 15 nt, Human
cagccuguccugggc

SEQ ID NO: 2435761 - RNA, 12 nt, Human
cagccuguccug

SEQ ID NO: 2435762 - RNA, 22 nt, Human
cagccugucccauggacacucc

SEQ ID NO: 2435763 - RNA, 21 nt, Human
cagccugucccauggacacuc

SEQ ID NO: 2435764 - RNA, 19 nt, Human
cagccugucccauggacac

SEQ ID NO: 2435765 - RNA, 23 nt, Human
cagccuggugggccuccucuguc

SEQ ID NO: 2435766 - RNA, 17 nt, Human
cagccuguaucuugggg

SEQ ID NO: 2435767 - RNA, 17 nt, Human
cagcucaccucucccuu

SEQ ID NO: 2435768 - RNA, 16 nt, Human
cagcucaccucucccu

SEQ ID NO: 2435769 - RNA, 15 nt, Human
cagcucaccucuccc

SEQ ID NO: 2435770 - RNA, 13 nt, Human
cagcucaccucuc

SEQ ID NO: 2435771 - RNA, 21 nt, Human
cagcucaccagccccagugcc

SEQ ID NO: 2435772 - RNA, 20 nt, Human
cagcucaccagccccagugc

SEQ ID NO: 2435773 - RNA, 22 nt, Human
cagcucaccagccccagugccc

SEQ ID NO: 2435774 - RNA, 20 nt, Human
cagcucaauggacuggaagg

SEQ ID NO: 2435775 - RNA, 18 nt, Human
cagcucaccccccacacu

SEQ ID NO: 2435776 - RNA, 12 nt, Human
cagcucaccccc

SEQ ID NO: 2435777 - RNA, 20 nt, Human
cagcucacccagccccaggg

SEQ ID NO: 2435778 - RNA, 22 nt, Human
cagcucaagucuucccugauca

SEQ ID NO: 2435779 - RNA, 21 nt, Human
cagcucagaaguuucuucuuu

SEQ ID NO: 2435780 - RNA, 22 nt, Human
cagcucagaaguuucuucuuua

SEQ ID NO: 2435781 - RNA, 12 nt, Human
cagcucagagag

SEQ ID NO: 2435782 - RNA, 21 nt, Human
cagcucacugcaaccuucgcc

SEQ ID NO: 2435783 - RNA, 15 nt, Human
cagcucacugcaacc

SEQ ID NO: 2435784 - RNA, 20 nt, Human
cagcucaccucucccuugga

SEQ ID NO: 2435785 - RNA, 19 nt, Human
cagcucaccucucccuugg

SEQ ID NO: 2435786 - RNA, 14 nt, Human
cagcucaccccugg

SEQ ID NO: 2435787 - RNA, 22 nt, Human
cagcucaccccccacacucacu

SEQ ID NO: 2435788 - RNA, 20 nt, Human
cagcucaccccccacacuca

SEQ ID NO: 2435789 - RNA, 19 nt, Human
cagcucaccccccacacuc

SEQ ID NO: 2435790 - RNA, 12 nt, Human
cagcucacugca

SEQ ID NO: 2435791 - RNA, 14 nt, Human
cagcucacugcaac

SEQ ID NO: 2435792 - RNA, 17 nt, Human
cagcucacgucacacuu

SEQ ID NO: 2435793 - RNA, 17 nt, Human
cagcuauaccugugccu

SEQ ID NO: 2435794 - RNA, 19 nt, Human
cagcuauaccugugccucg

SEQ ID NO: 2435795 - RNA, 21 nt, Human
cagcuauaccugugccucggc

SEQ ID NO: 2435796 - RNA, 22 nt, Human
cagcuauaccugugccucggcu

SEQ ID NO: 2435797 - RNA, 23 nt, Human
cagcuaucuggucaaccuccugg

SEQ ID NO: 2435798 - RNA, 18 nt, Human
cagcuaucucucagugaa

SEQ ID NO: 2435799 - RNA, 23 nt, Human
cagcuauaccugugccucggcuu

SEQ ID NO: 2435800 - RNA, 20 nt, Human
cagcuauaacaguagggaug

SEQ ID NO: 2435801 - RNA, 17 nt, Human
cagcuaucucucaguga

SEQ ID NO: 2435802 - RNA, 13 nt, Human
cagcuaugggagc

SEQ ID NO: 2435803 - RNA, 15 nt, Human
cagcuaugggagccc

SEQ ID NO: 2435804 - RNA, 17 nt, Human
cagcuaugggagcccca

SEQ ID NO: 2435805 - RNA, 18 nt, Human
cagcuaugggagccccag

SEQ ID NO: 2435806 - RNA, 20 nt, Human
cagcuaugggagccccaggg

SEQ ID NO: 2435807 - RNA, 21 nt, Human
cagcuaugggagccccagggu

SEQ ID NO: 2435808 - RNA, 22 nt, Human
cagcuaugggagccccaggguc

SEQ ID NO: 2435809 - RNA, 23 nt, Human
cagcuaugggagccccagggucu

SEQ ID NO: 2435810 - RNA, 23 nt, Human
cagcuagaaauaagcccaacaga

SEQ ID NO: 2435811 - RNA, 17 nt, Human
cagcuacuuuaacacca

SEQ ID NO: 2435812 - RNA, 16 nt, Human
cagcuacuugggaggc

SEQ ID NO: 2435813 - RNA, 16 nt, Human
cagcuacuugggaagc

SEQ ID NO: 2435814 - RNA, 15 nt, Human
cagcuacuugggaag

SEQ ID NO: 2435815 - RNA, 15 nt, Human
cagcuacuugggagg

SEQ ID NO: 2435816 - RNA, 18 nt, Human
cagcuauaacaguaggga

SEQ ID NO: 2435817 - RNA, 15 nt, Human
cagcuauaccugugc

SEQ ID NO: 2435818 - RNA, 16 nt, Human
cagcuauaccugugcc

SEQ ID NO: 2435819 - RNA, 19 nt, Human
cagcuagguggggccuaga

SEQ ID NO: 2435820 - RNA, 19 nt, Human
cagcucaccagccccagug

SEQ ID NO: 2435821 - RNA, 17 nt, Human
cagcucaccagccccag

SEQ ID NO: 2435822 - RNA, 16 nt, Human
cagcucaccagcccca

SEQ ID NO: 2435823 - RNA, 15 nt, Human
cagcucaccagcccc

SEQ ID NO: 2435824 - RNA, 13 nt, Human
cagcucaccagcc

SEQ ID NO: 2435825 - RNA, 19 nt, Human
cagcucaaggaaaggccug

SEQ ID NO: 2435826 - RNA, 20 nt, Human
cagcucaaggaaaggccuga

SEQ ID NO: 2435827 - RNA, 16 nt, Human
cagcucaauggacugg

SEQ ID NO: 2435828 - RNA, 13 nt, Human
cagcucaagucuu

SEQ ID NO: 2435829 - RNA, 19 nt, Human
cagcucaagucuucccuga

SEQ ID NO: 2435830 - RNA, 20 nt, Human
cagcuauguuauauugaaaa

SEQ ID NO: 2435831 - RNA, 21 nt, Human
cagcuauguuauauugaaaaa

SEQ ID NO: 2435832 - RNA, 13 nt, Human
cagcuaugcuggu

SEQ ID NO: 2435833 - RNA, 18 nt, Human
cagcuauugauauaaaua

SEQ ID NO: 2435834 - RNA, 19 nt, Human
cagcucaaaggcacaguga

SEQ ID NO: 2435835 - RNA, 18 nt, Human
cagcuauuuuuacuagaa

SEQ ID NO: 2435836 - RNA, 15 nt, Human
cagcucaaaggcaca

SEQ ID NO: 2435837 - RNA, 16 nt, Human
cagcuauuuuuacuag

SEQ ID NO: 2435838 - RNA, 13 nt, Human
cagcuauuuuuau

SEQ ID NO: 2435839 - RNA, 18 nt, Human
cagcuaacauggaaguac

SEQ ID NO: 2435840 - RNA, 19 nt, Human
cagcuaacauggaaguacu

SEQ ID NO: 2435841 - RNA, 22 nt, Human
cagcgauguaugcagcuaucug

SEQ ID NO: 2435842 - RNA, 18 nt, Human
cagcgauguaugcagcua

SEQ ID NO: 2435843 - RNA, 23 nt, Human
cagcgauguaugcagcuaucugg

SEQ ID NO: 2435844 - RNA, 23 nt, Human
cagcgccaagcaaccugggucca

SEQ ID NO: 2435845 - RNA, 19 nt, Human
cagcgccaagcaaccuggg

SEQ ID NO: 2435846 - RNA, 17 nt, Human
cagcgccaagcaaccug

SEQ ID NO: 2435847 - RNA, 16 nt, Human
cagcgccaagcaaccu

SEQ ID NO: 2435848 - RNA, 14 nt, Human
cagcgccaagcaac

SEQ ID NO: 2435849 - RNA, 16 nt, Human
cagcgaggaggcucca

SEQ ID NO: 2435850 - RNA, 17 nt, Human
cagcgaggaggcuccag

SEQ ID NO: 2435851 - RNA, 18 nt, Human
cagcgaggaggcuccaga

SEQ ID NO: 2435852 - RNA, 22 nt, Human
cagcgaguuguggaaagccucu

SEQ ID NO: 2435853 - RNA, 20 nt, Human
cagcgagaggcagagaaaga

SEQ ID NO: 2435854 - RNA, 18 nt, Human
cagcgagaggcagagaaa

SEQ ID NO: 2435855 - RNA, 13 nt, Human
cagcgagaggcag

SEQ ID NO: 2435856 - RNA, 21 nt, Human
cagcgagcccugguggcagug

SEQ ID NO: 2435857 - RNA, 20 nt, Human
cagcgagcccugguggcagu

SEQ ID NO: 2435858 - RNA, 19 nt, Human
cagcgagcccugguggcag

SEQ ID NO: 2435859 - RNA, 17 nt, Human
cagcgagcccugguggc

SEQ ID NO: 2435860 - RNA, 16 nt, Human
cagcgagcccuggugg

SEQ ID NO: 2435861 - RNA, 22 nt, Human
cagcgacuccguuggccacucc

SEQ ID NO: 2435862 - RNA, 21 nt, Human
cagcgacuccguuggccacuc

SEQ ID NO: 2435863 - RNA, 17 nt, Human
cagcgacuccguuggcc

SEQ ID NO: 2435864 - RNA, 18 nt, Human
cagcgaccuuccucaucc

SEQ ID NO: 2435865 - RNA, 13 nt, Human
cagcgagcccugg

SEQ ID NO: 2435866 - RNA, 18 nt, Human
cagcgaccgcccccuccu

SEQ ID NO: 2435867 - RNA, 17 nt, Human
cagcgaccgcccccucc

SEQ ID NO: 2435868 - RNA, 21 nt, Human
cagcgaccaccccugccucca

SEQ ID NO: 2435869 - RNA, 20 nt, Human
cagcgaccaccccugccucc

SEQ ID NO: 2435870 - RNA, 16 nt, Human
cagcgaccgcccccuc

SEQ ID NO: 2435871 - RNA, 16 nt, Human
cagcgaccaccccugc

SEQ ID NO: 2435872 - RNA, 14 nt, Human
cagcgaccaccccu

SEQ ID NO: 2435873 - RNA, 20 nt, Human
cagcgacauagcccaucccu

SEQ ID NO: 2435874 - RNA, 14 nt, Human
cagcgaagggagug

SEQ ID NO: 2435875 - RNA, 19 nt, Human
cagcgacauagcccauccc

SEQ ID NO: 2435876 - RNA, 18 nt, Human
cagcuaagcuaggaauga

SEQ ID NO: 2435877 - RNA, 15 nt, Human
cagcuaagcuaggaa

SEQ ID NO: 2435878 - RNA, 23 nt, Human
cagcuaagaaccuggaacuuggg

SEQ ID NO: 2435879 - RNA, 14 nt, Human
cagcuaagaaccug

SEQ ID NO: 2435880 - RNA, 16 nt, Human
cagcuaagaaccugga

SEQ ID NO: 2435881 - RNA, 18 nt, Human
cagcuaagaaccuggaac

SEQ ID NO: 2435882 - RNA, 19 nt, Human
cagcuaagaaccuggaacu

SEQ ID NO: 2435883 - RNA, 22 nt, Human
cagcgccaagcaaccugggucc

SEQ ID NO: 2435884 - RNA, 14 nt, Human
cagcgccagccugu

SEQ ID NO: 2435885 - RNA, 13 nt, Human
cagcuaagaaccu

SEQ ID NO: 2435886 - RNA, 12 nt, Human
cagcuaagaaaa

SEQ ID NO: 2435887 - RNA, 23 nt, Human
cagcuaagaaaagauuuuaauca

SEQ ID NO: 2435888 - RNA, 20 nt, Human
cagcuaacauggaaguacua

SEQ ID NO: 2435889 - RNA, 19 nt, Human
cagcuaaucuguagggcug

SEQ ID NO: 2435890 - RNA, 17 nt, Human
cagcuaaucuguagggc

SEQ ID NO: 2435891 - RNA, 16 nt, Human
cagcuaaucuguaggg

SEQ ID NO: 2435892 - RNA, 14 nt, Human
cagcuaaucuguag

SEQ ID NO: 2435893 - RNA, 12 nt, Human
cagcuaaucugu

SEQ ID NO: 2435894 - RNA, 19 nt, Human
cagcuaaucagcauucuca

SEQ ID NO: 2435895 - RNA, 19 nt, Human
cagcuaaggacauuuccca

SEQ ID NO: 2435896 - RNA, 16 nt, Human
cagcuaaugggacacu

SEQ ID NO: 2435897 - RNA, 15 nt, Human
cagcuaaugggacac

SEQ ID NO: 2435898 - RNA, 21 nt, Human
cagcuacuuccuccuccccac

SEQ ID NO: 2435899 - RNA, 17 nt, Human
cagcuacuuccuccucc

SEQ ID NO: 2435900 - RNA, 19 nt, Human
cagcuacugauuuuuguga

SEQ ID NO: 2435901 - RNA, 15 nt, Human
cagcuacuuccuccu

SEQ ID NO: 2435902 - RNA, 19 nt, Human
cagcuacuugggaggcuga

SEQ ID NO: 2435903 - RNA, 16 nt, Human
cagcuacugauuuuug

SEQ ID NO: 2435904 - RNA, 22 nt, Human
cagcuacucagaagccugaggc

SEQ ID NO: 2435905 - RNA, 23 nt, Human
cagcuacucagaagccugaggcu

SEQ ID NO: 2435906 - RNA, 12 nt, Human
cagcuacucagg

SEQ ID NO: 2435907 - RNA, 13 nt, Human
cagcuacucagga

SEQ ID NO: 2435908 - RNA, 16 nt, Human
cagcuacucaggaggc

SEQ ID NO: 2435909 - RNA, 18 nt, Human
cagcuacucaggaggcug

SEQ ID NO: 2435910 - RNA, 19 nt, Human
cagcuacuaaugauguuuu

SEQ ID NO: 2435911 - RNA, 19 nt, Human
cagcuacucaagaggcuga

SEQ ID NO: 2435912 - RNA, 20 nt, Human
cagcuacucaagaggcugag

SEQ ID NO: 2435913 - RNA, 23 nt, Human
cagcuacucaagaggcugaggca

SEQ ID NO: 2435914 - RNA, 14 nt, Human
cagcuacucagaag

SEQ ID NO: 2435915 - RNA, 15 nt, Human
cagcuacucagaagc

SEQ ID NO: 2435916 - RNA, 16 nt, Human
cagcuacucagaagcc

SEQ ID NO: 2435917 - RNA, 19 nt, Human
cagcuacucagaagccuga

SEQ ID NO: 2435918 - RNA, 20 nt, Human
cagcuacucagaagccugag

SEQ ID NO: 2435919 - RNA, 21 nt, Human
cagcuacucagaagccugagg

SEQ ID NO: 2435920 - RNA, 21 nt, Human
cagcuaaucuguagggcugga

SEQ ID NO: 2435921 - RNA, 18 nt, Human
cagcuaccagguguucua

SEQ ID NO: 2435922 - RNA, 18 nt, Human
cagcuacaccuuucuccu

SEQ ID NO: 2435923 - RNA, 24 nt, Human
cagcuacccuuuuucuccagcugg

SEQ ID NO: 2435924 - RNA, 21 nt, Human
cagcuacccuuuuucuccagc

SEQ ID NO: 2435925 - RNA, 17 nt, Human
cagcuacuaaugauguu

SEQ ID NO: 2435926 - RNA, 21 nt, Human
cagcuaccucaaccaaugcca

SEQ ID NO: 2435927 - RNA, 14 nt, Human
cagccccauccucu

SEQ ID NO: 2435928 - RNA, 13 nt, Human
cagccccauccuc

SEQ ID NO: 2435929 - RNA, 12 nt, Human
cagccccauccu

SEQ ID NO: 2435930 - RNA, 22 nt, Human
cagccccaucccaaacccuuca

SEQ ID NO: 2435931 - RNA, 22 nt, Human
cagccccauccucuguacagag

SEQ ID NO: 2435932 - RNA, 16 nt, Human
cagccccauccucugu

SEQ ID NO: 2435933 - RNA, 14 nt, Human
cagccccauucugc

SEQ ID NO: 2435934 - RNA, 13 nt, Human
cagccccauucug

SEQ ID NO: 2435935 - RNA, 16 nt, Human
cagccccuucucagaa

SEQ ID NO: 2435936 - RNA, 15 nt, Human
cagccccuucucaga

SEQ ID NO: 2435937 - RNA, 20 nt, Human
cagccccuguauggcacugg

SEQ ID NO: 2435938 - RNA, 21 nt, Human
cagccccuguucuggcagagu

SEQ ID NO: 2435939 - RNA, 13 nt, Human
cagccccuggccc

SEQ ID NO: 2435940 - RNA, 21 nt, Human
cagccccuggccccaggaccu

SEQ ID NO: 2435941 - RNA, 22 nt, Human
cagccccuggaugcagccucac

SEQ ID NO: 2435942 - RNA, 20 nt, Human
cagccccuguucuggcagag

SEQ ID NO: 2435943 - RNA, 23 nt, Human
cagccccuggaugcagccucaca

SEQ ID NO: 2435944 - RNA, 18 nt, Human
cagccccauucugccugc

SEQ ID NO: 2435945 - RNA, 17 nt, Human
cagccccauucugccug

SEQ ID NO: 2435946 - RNA, 16 nt, Human
cagccccauucugccu

SEQ ID NO: 2435947 - RNA, 15 nt, Human
cagccccagagcagg

SEQ ID NO: 2435948 - RNA, 18 nt, Human
cagccccacagcccacgu

SEQ ID NO: 2435949 - RNA, 16 nt, Human
cagccccacagcccac

SEQ ID NO: 2435950 - RNA, 15 nt, Human
cagccccacagccca

SEQ ID NO: 2435951 - RNA, 14 nt, Human
cagccccacagccc

SEQ ID NO: 2435952 - RNA, 13 nt, Human
cagccccacagcc

SEQ ID NO: 2435953 - RNA, 12 nt, Human
cagccccacagc

SEQ ID NO: 2435954 - RNA, 11 nt, Human
cagccccaccc

SEQ ID NO: 2435955 - RNA, 12 nt, Human
cagccccaccca

SEQ ID NO: 2435956 - RNA, 13 nt, Human
cagccccacccag

SEQ ID NO: 2435957 - RNA, 14 nt, Human
cagccccacccagg

SEQ ID NO: 2435958 - RNA, 20 nt, Human
cagccccacagcccacgucc

SEQ ID NO: 2435959 - RNA, 15 nt, Human
cagccccacccagga

SEQ ID NO: 2435960 - RNA, 16 nt, Human
cagccccacccaggag

SEQ ID NO: 2435961 - RNA, 21 nt, Human
cagccccacccaggagggagg

SEQ ID NO: 2435962 - RNA, 22 nt, Human
cagccccacccaggagggaggg

SEQ ID NO: 2435963 - RNA, 21 nt, Human
cagccccaucccaaacccuuc

SEQ ID NO: 2435964 - RNA, 11 nt, Human
cagccccaucc

SEQ ID NO: 2435965 - RNA, 18 nt, Human
cagccccagugcccacag

SEQ ID NO: 2435966 - RNA, 17 nt, Human
cagccccagugcccaca

SEQ ID NO: 2435967 - RNA, 16 nt, Human
cagccccagugcccac

SEQ ID NO: 2435968 - RNA, 15 nt, Human
cagccccagugccca

SEQ ID NO: 2435969 - RNA, 14 nt, Human
cagccccagugccc

SEQ ID NO: 2435970 - RNA, 13 nt, Human
cagccccagugcc

SEQ ID NO: 2435971 - RNA, 16 nt, Human
cagcccuagagccugc

SEQ ID NO: 2435972 - RNA, 15 nt, Human
cagcccuagagccug

SEQ ID NO: 2435973 - RNA, 12 nt, Human
cagcccuagagc

SEQ ID NO: 2435974 - RNA, 22 nt, Human
cagcccuaaggaucucucagga

SEQ ID NO: 2435975 - RNA, 21 nt, Human
cagcccuaaggaucucucagg

SEQ ID NO: 2435976 - RNA, 20 nt, Human
cagcccuaaggaucucucag

SEQ ID NO: 2435977 - RNA, 19 nt, Human
cagcccuaaggaucucuca

SEQ ID NO: 2435978 - RNA, 18 nt, Human
cagcccuaaggaucucuc

SEQ ID NO: 2435979 - RNA, 22 nt, Human
cagcccuagagccugccuggag

SEQ ID NO: 2435980 - RNA, 21 nt, Human
cagcccuagagccugccugga

SEQ ID NO: 2435981 - RNA, 20 nt, Human
cagcccuagagccugccugg

SEQ ID NO: 2435982 - RNA, 18 nt, Human
cagcccuagagccugccu

SEQ ID NO: 2435983 - RNA, 23 nt, Human
cagcccuagagccugccuggagc

SEQ ID NO: 2435984 - RNA, 18 nt, Human
cagcccuaggguggagag

SEQ ID NO: 2435985 - RNA, 20 nt, Human
cagcccuauggauguggggu

SEQ ID NO: 2435986 - RNA, 15 nt, Human
cagcccuauggaugu

SEQ ID NO: 2435987 - RNA, 14 nt, Human
cagcccuauggaug

SEQ ID NO: 2435988 - RNA, 18 nt, Human
cagcccucaccccugguu

SEQ ID NO: 2435989 - RNA, 15 nt, Human
cagcccucaccccug

SEQ ID NO: 2435990 - RNA, 14 nt, Human
cagcccucaccccu

SEQ ID NO: 2435991 - RNA, 13 nt, Human
cagcccucacccc

SEQ ID NO: 2435992 - RNA, 18 nt, Human
cagcccucauuggcucuu

SEQ ID NO: 2435993 - RNA, 22 nt, Human
cagcccuccaucuaaacugccc

SEQ ID NO: 2435994 - RNA, 13 nt, Human
cagcccucauccc

SEQ ID NO: 2435995 - RNA, 14 nt, Human
cagcccucaucccg

SEQ ID NO: 2435996 - RNA, 17 nt, Human
cagcccucaucccgagc

SEQ ID NO: 2435997 - RNA, 20 nt, Human
cagcccuccccauggagcca

SEQ ID NO: 2435998 - RNA, 23 nt, Human
cagcccuccaucuaaacugcccc

SEQ ID NO: 2435999 - RNA, 15 nt, Human
cagcccucccugccc

SEQ ID NO: 2436000 - RNA, 13 nt, Human
cagcccucccugc

SEQ ID NO: 2436001 - RNA, 20 nt, Human
cagcccgggcucugccuccc

SEQ ID NO: 2436002 - RNA, 19 nt, Human
cagcccgggcucugccucc

SEQ ID NO: 2436003 - RNA, 18 nt, Human
cagcccgggcucugccuc

SEQ ID NO: 2436004 - RNA, 17 nt, Human
cagcccgggcucugccu

SEQ ID NO: 2436005 - RNA, 22 nt, Human
cagcccgggcucugccucccau

SEQ ID NO: 2436006 - RNA, 21 nt, Human
cagcccgggcucugccuccca

SEQ ID NO: 2436007 - RNA, 21 nt, Human
cagcccuaaaucuagacucaa

SEQ ID NO: 2436008 - RNA, 17 nt, Human
cagcccuaaggaucucu

SEQ ID NO: 2436009 - RNA, 17 nt, Human
cagcccguguggccccu

SEQ ID NO: 2436010 - RNA, 18 nt, Human
cagcccguguggccccuu

SEQ ID NO: 2436011 - RNA, 20 nt, Human
cagcccguguggccccuuca

SEQ ID NO: 2436012 - RNA, 21 nt, Human
cagcccguguggccccuucac

SEQ ID NO: 2436013 - RNA, 22 nt, Human
cagcccggcugguuuuguaaga

SEQ ID NO: 2436014 - RNA, 14 nt, Human
cagcccggcugguu

SEQ ID NO: 2436015 - RNA, 13 nt, Human
cagcccggcuggu

SEQ ID NO: 2436016 - RNA, 19 nt, Human
cagcccggcugguuuugua

SEQ ID NO: 2436017 - RNA, 15 nt, Human
cagcccguguggccc

SEQ ID NO: 2436018 - RNA, 21 nt, Human
cagccccuucugacccaugcu

SEQ ID NO: 2436019 - RNA, 19 nt, Human
cagccccuucugacccaug

SEQ ID NO: 2436020 - RNA, 17 nt, Human
cagccccuucugaccca

SEQ ID NO: 2436021 - RNA, 16 nt, Human
cagccccuucugaccc

SEQ ID NO: 2436022 - RNA, 23 nt, Human
cagccccuucugacccaugcugc

SEQ ID NO: 2436023 - RNA, 22 nt, Human
cagccccuucugacccaugcug

SEQ ID NO: 2436024 - RNA, 24 nt, Human
cagccccuucugacccaugcugcc

SEQ ID NO: 2436025 - RNA, 22 nt, Human
cagccccuucucagaaucuacc

SEQ ID NO: 2436026 - RNA, 20 nt, Human
cagccccuucucagaaucua

SEQ ID NO: 2436027 - RNA, 17 nt, Human
cagccccuugagaaacc

SEQ ID NO: 2436028 - RNA, 18 nt, Human
cagccccuugagaaaccu

SEQ ID NO: 2436029 - RNA, 16 nt, Human
cagcccgggcucugcc

SEQ ID NO: 2436030 - RNA, 15 nt, Human
cagcccgggcucugc

SEQ ID NO: 2436031 - RNA, 14 nt, Human
cagcccgggcucug

SEQ ID NO: 2436032 - RNA, 13 nt, Human
cagcccgggcucu

SEQ ID NO: 2436033 - RNA, 15 nt, Human
cagcccggcucccac

SEQ ID NO: 2436034 - RNA, 21 nt, Human
cagcccggcgccaccauccug

SEQ ID NO: 2436035 - RNA, 15 nt, Human
cagcccggcgccacc

SEQ ID NO: 2436036 - RNA, 23 nt, Human
cagcccggccugcucccagcagc

SEQ ID NO: 2436037 - RNA, 21 nt, Human
cagcccggccugcucccagca

SEQ ID NO: 2436038 - RNA, 20 nt, Human
cagcccggccugcucccagc

SEQ ID NO: 2436039 - RNA, 14 nt, Human
cagcccggccugcu

SEQ ID NO: 2436040 - RNA, 12 nt, Human
cagcccggccug

SEQ ID NO: 2436041 - RNA, 18 nt, Human
cagcccggaccuuggcag

SEQ ID NO: 2436042 - RNA, 15 nt, Human
cagcccggaccuugg

SEQ ID NO: 2436043 - RNA, 17 nt, Human
cagcccgcugaguggac

SEQ ID NO: 2436044 - RNA, 16 nt, Human
cagcccgcugagugga

SEQ ID NO: 2436045 - RNA, 16 nt, Human
cagccuaguugaucag

SEQ ID NO: 2436046 - RNA, 19 nt, Human
cagccuaggggucagggac

SEQ ID NO: 2436047 - RNA, 21 nt, Human
cagccuagggcugagcugggg

SEQ ID NO: 2436048 - RNA, 15 nt, Human
cagccuaccaugaga

SEQ ID NO: 2436049 - RNA, 18 nt, Human
cagccuaggggucaggga

SEQ ID NO: 2436050 - RNA, 18 nt, Human
cagccucaaccuccuggg

SEQ ID NO: 2436051 - RNA, 17 nt, Human
cagccucaaccuccugg

SEQ ID NO: 2436052 - RNA, 19 nt, Human
cagccucaauaagccuugu

SEQ ID NO: 2436053 - RNA, 18 nt, Human
cagccucaauaagccuug

SEQ ID NO: 2436054 - RNA, 21 nt, Human
cagccucaagucacucccaag

SEQ ID NO: 2436055 - RNA, 19 nt, Human
cagccucaagucacuccca

SEQ ID NO: 2436056 - RNA, 21 nt, Human
cagccucaaccuccugggcua

SEQ ID NO: 2436057 - RNA, 20 nt, Human
cagccucaaccuccugggcu

SEQ ID NO: 2436058 - RNA, 19 nt, Human
cagccucaaccuccugggc

SEQ ID NO: 2436059 - RNA, 16 nt, Human
cagccucaguccuccc

SEQ ID NO: 2436060 - RNA, 15 nt, Human
cagccucaguccucc

SEQ ID NO: 2436061 - RNA, 22 nt, Human
cagccucagggacgacucugac

SEQ ID NO: 2436062 - RNA, 20 nt, Human
cagccuccaagcuccaucuc

SEQ ID NO: 2436063 - RNA, 12 nt, Human
cagccuccagcc

SEQ ID NO: 2436064 - RNA, 23 nt, Human
cagccucaguccuccccucacag

SEQ ID NO: 2436065 - RNA, 22 nt, Human
cagccucaguccuccccucaca

SEQ ID NO: 2436066 - RNA, 21 nt, Human
cagccucaguccuccccucac

SEQ ID NO: 2436067 - RNA, 19 nt, Human
cagccucaguccuccccuc

SEQ ID NO: 2436068 - RNA, 14 nt, Human
cagccuccaagcuc

SEQ ID NO: 2436069 - RNA, 15 nt, Human
cagccucacaguccu

SEQ ID NO: 2436070 - RNA, 14 nt, Human
cagccucacagucc

SEQ ID NO: 2436071 - RNA, 20 nt, Human
cagccucacaguccuuacca

SEQ ID NO: 2436072 - RNA, 21 nt, Human
cagccucaauaagccuugucg

SEQ ID NO: 2436073 - RNA, 20 nt, Human
cagccucaauaagccuuguc

SEQ ID NO: 2436074 - RNA, 12 nt, Human
cagccucacaga

SEQ ID NO: 2436075 - RNA, 13 nt, Human
cagccucacagaa

SEQ ID NO: 2436076 - RNA, 14 nt, Human
cagccucacagaag

SEQ ID NO: 2436077 - RNA, 22 nt, Human
cagccucccgaauagcugggac

SEQ ID NO: 2436078 - RNA, 21 nt, Human
cagccucccgaauagcuggga

SEQ ID NO: 2436079 - RNA, 18 nt, Human
cagccuccccugccaggg

SEQ ID NO: 2436080 - RNA, 19 nt, Human
cagccuccccugccagggc

SEQ ID NO: 2436081 - RNA, 20 nt, Human
cagccuccccugccagggca

SEQ ID NO: 2436082 - RNA, 22 nt, Human
cagccuccccugccagggcagg

SEQ ID NO: 2436083 - RNA, 20 nt, Human
cagccucccgaauagcuggg

SEQ ID NO: 2436084 - RNA, 19 nt, Human
cagccucccaaguagcugg

SEQ ID NO: 2436085 - RNA, 14 nt, Human
cagccucccacccc

SEQ ID NO: 2436086 - RNA, 14 nt, Human
cagccucccaucca

SEQ ID NO: 2436087 - RNA, 19 nt, Human
cagccucccacccccaucu

SEQ ID NO: 2436088 - RNA, 16 nt, Human
cagccucccaccccca

SEQ ID NO: 2436089 - RNA, 18 nt, Human
cagccucccacccccauc

SEQ ID NO: 2436090 - RNA, 16 nt, Human
cagccucccauccagg

SEQ ID NO: 2436091 - RNA, 18 nt, Human
cagccucccauccagggc

SEQ ID NO: 2436092 - RNA, 19 nt, Human
cagccucccauccagggcc

SEQ ID NO: 2436093 - RNA, 20 nt, Human
cagccucccauccagggccc

SEQ ID NO: 2436094 - RNA, 16 nt, Human
cagccuccccugccag

SEQ ID NO: 2436095 - RNA, 17 nt, Human
cagccuccccugccagg

SEQ ID NO: 2436096 - RNA, 23 nt, Human
cagccucccauccagggccccca

SEQ ID NO: 2436097 - RNA, 16 nt, Human
cagccuccagccucug

SEQ ID NO: 2436098 - RNA, 15 nt, Human
cagccuccagccucu

SEQ ID NO: 2436099 - RNA, 14 nt, Human
cagccuccagccuc

SEQ ID NO: 2436100 - RNA, 13 nt, Human
cagccuccagccu

SEQ ID NO: 2436101 - RNA, 14 nt, Human
cagccuccaugcug

SEQ ID NO: 2436102 - RNA, 17 nt, Human
cagccuccagccucugu

SEQ ID NO: 2436103 - RNA, 20 nt, Human
cagccuccaugcugccucca

SEQ ID NO: 2436104 - RNA, 17 nt, Human
cagccuccaugcugccu

SEQ ID NO: 2436105 - RNA, 15 nt, Human
cagccuccaugcugc

SEQ ID NO: 2436106 - RNA, 23 nt, Human
cagccucccaaagugcugggauu

SEQ ID NO: 2436107 - RNA, 21 nt, Human
cagccucccaaagugcuggga

SEQ ID NO: 2436108 - RNA, 20 nt, Human
cagccucccaaagugcuggg

SEQ ID NO: 2436109 - RNA, 19 nt, Human
cagccucccaaagugcugg

SEQ ID NO: 2436110 - RNA, 12 nt, Human
cagcccuggagg

SEQ ID NO: 2436111 - RNA, 21 nt, Human
cagcccugcuggccgccucac

SEQ ID NO: 2436112 - RNA, 23 nt, Human
cagcccugcuggccgccucaccc

SEQ ID NO: 2436113 - RNA, 23 nt, Human
cagcccugcuuugggcugcccug

SEQ ID NO: 2436114 - RNA, 22 nt, Human
cagcccugcuuugggcugcccu

SEQ ID NO: 2436115 - RNA, 21 nt, Human
cagcccugcuuugggcugccc

SEQ ID NO: 2436116 - RNA, 20 nt, Human
cagcccugcuuugggcugcc

SEQ ID NO: 2436117 - RNA, 19 nt, Human
cagcccugcuuugggcugc

SEQ ID NO: 2436118 - RNA, 13 nt, Human
cagcccugcuuug

SEQ ID NO: 2436119 - RNA, 11 nt, Human
cagcccugcuu

SEQ ID NO: 2436120 - RNA, 15 nt, Human
cagccgguaccuggg

SEQ ID NO: 2436121 - RNA, 23 nt, Human
cagcccugggccccaccaccuag

SEQ ID NO: 2436122 - RNA, 12 nt, Human
cagcccugggcc

SEQ ID NO: 2436123 - RNA, 13 nt, Human
cagcccugggccc

SEQ ID NO: 2436124 - RNA, 17 nt, Human
cagcccugggccccacc

SEQ ID NO: 2436125 - RNA, 18 nt, Human
cagcccugggccccacca

SEQ ID NO: 2436126 - RNA, 19 nt, Human
cagcccugggccccaccac

SEQ ID NO: 2436127 - RNA, 20 nt, Human
cagcccugggccccaccacc

SEQ ID NO: 2436128 - RNA, 21 nt, Human
cagcccugggccccaccaccu

SEQ ID NO: 2436129 - RNA, 22 nt, Human
cagcccugggccccaccaccua

SEQ ID NO: 2436130 - RNA, 12 nt, Human
cagcccuggcuc

SEQ ID NO: 2436131 - RNA, 14 nt, Human
cagcccuggaguca

SEQ ID NO: 2436132 - RNA, 20 nt, Human
cagcccuggagucaugccaa

SEQ ID NO: 2436133 - RNA, 22 nt, Human
cagcccuggaggugccagcaaa

SEQ ID NO: 2436134 - RNA, 19 nt, Human
cagcccuggaggugccagc

SEQ ID NO: 2436135 - RNA, 18 nt, Human
cagcccuggaggugccag

SEQ ID NO: 2436136 - RNA, 17 nt, Human
cagcccuggaggugcca

SEQ ID NO: 2436137 - RNA, 15 nt, Human
cagcccuggcugaag

SEQ ID NO: 2436138 - RNA, 13 nt, Human
cagcccuggcuga

SEQ ID NO: 2436139 - RNA, 16 nt, Human
cagcccuggcucugca

SEQ ID NO: 2436140 - RNA, 15 nt, Human
cagcccuggcucugc

SEQ ID NO: 2436141 - RNA, 17 nt, Human
cagcccuggcugaagga

SEQ ID NO: 2436142 - RNA, 16 nt, Human
cagcccuggcugaagg

SEQ ID NO: 2436143 - RNA, 20 nt, Human
cagcccuggcugaaggacug

SEQ ID NO: 2436144 - RNA, 11 nt, Human
cagcccugggc

SEQ ID NO: 2436145 - RNA, 19 nt, Human
cagccgugaugcucaggcu

SEQ ID NO: 2436146 - RNA, 17 nt, Human
cagccgugaugcucagg

SEQ ID NO: 2436147 - RNA, 20 nt, Human
cagccgugccuucagcucua

SEQ ID NO: 2436148 - RNA, 18 nt, Human
cagccgugccuucagcuc

SEQ ID NO: 2436149 - RNA, 16 nt, Human
cagccgugccuucagc

SEQ ID NO: 2436150 - RNA, 14 nt, Human
cagccgugccuuca

SEQ ID NO: 2436151 - RNA, 9 nt, Human
cagccgugc

SEQ ID NO: 2436152 - RNA, 19 nt, Human
cagccgguaccugggaagg

SEQ ID NO: 2436153 - RNA, 17 nt, Human
cagccgguaccugggaa

SEQ ID NO: 2436154 - RNA, 18 nt, Human
cagccgucagccaaaugu

SEQ ID NO: 2436155 - RNA, 16 nt, Human
cagccgugaugcucag

SEQ ID NO: 2436156 - RNA, 21 nt, Human
cagccgguaccugggaagggg

SEQ ID NO: 2436157 - RNA, 19 nt, Human
cagccgucagccaaaugua

SEQ ID NO: 2436158 - RNA, 16 nt, Human
cagccuaagaugaaga

SEQ ID NO: 2436159 - RNA, 21 nt, Human
cagccguguaaccauggaccc

SEQ ID NO: 2436160 - RNA, 15 nt, Human
cagccuagccgaccu

SEQ ID NO: 2436161 - RNA, 17 nt, Human
cagccuagccgaccuca

SEQ ID NO: 2436162 - RNA, 18 nt, Human
cagccuagccgaccucag

SEQ ID NO: 2436163 - RNA, 19 nt, Human
cagccuagccgaccucagc

SEQ ID NO: 2436164 - RNA, 20 nt, Human
cagccuagccgaccucagcc

SEQ ID NO: 2436165 - RNA, 21 nt, Human
cagccuagccgaccucagccu

SEQ ID NO: 2436166 - RNA, 22 nt, Human
cagccuagccgaccucagccuu

SEQ ID NO: 2436167 - RNA, 16 nt, Human
cagcccugcagagggc

SEQ ID NO: 2436168 - RNA, 15 nt, Human
cagcccugcagaggg

SEQ ID NO: 2436169 - RNA, 14 nt, Human
cagcccugcagagg

SEQ ID NO: 2436170 - RNA, 13 nt, Human
cagcccugcagag

SEQ ID NO: 2436171 - RNA, 20 nt, Human
cagcccugcuggccgccuca

SEQ ID NO: 2436172 - RNA, 18 nt, Human
cagcccugcuggccgccu

SEQ ID NO: 2436173 - RNA, 16 nt, Human
cagcccugcuggccgc

SEQ ID NO: 2436174 - RNA, 14 nt, Human
cagcccugcuggcc

SEQ ID NO: 2436175 - RNA, 13 nt, Human
cagcccugcuggc

SEQ ID NO: 2436176 - RNA, 20 nt, Human
cagcccugcagagggcacag

SEQ ID NO: 2436177 - RNA, 18 nt, Human
cagcccugcagagggcac

SEQ ID NO: 2436178 - RNA, 22 nt, Human
cagcccucccugccccucccuu

SEQ ID NO: 2436179 - RNA, 18 nt, Human
cagcccucccugccccuc

SEQ ID NO: 2436180 - RNA, 17 nt, Human
cagcccucccugccccu

SEQ ID NO: 2436181 - RNA, 16 nt, Human
cagcccucccugcccc

SEQ ID NO: 2436182 - RNA, 21 nt, Human
cagcccuccccauggagccag

SEQ ID NO: 2436183 - RNA, 20 nt, Human
cagcccucccgccccuuccc

SEQ ID NO: 2436184 - RNA, 13 nt, Human
cagcccucccugu

SEQ ID NO: 2436185 - RNA, 14 nt, Human
cagcccucccuguc

SEQ ID NO: 2436186 - RNA, 15 nt, Human
cagcccucccugucc

SEQ ID NO: 2436187 - RNA, 16 nt, Human
cagcccucccuguccu

SEQ ID NO: 2436188 - RNA, 18 nt, Human
cagcccucccuguccucc

SEQ ID NO: 2436189 - RNA, 19 nt, Human
cagcccucccuguccuccu

SEQ ID NO: 2436190 - RNA, 20 nt, Human
cagcccucccuguccuccuc

SEQ ID NO: 2436191 - RNA, 21 nt, Human
cagcccucccuguccuccucg

SEQ ID NO: 2436192 - RNA, 22 nt, Human
cagcccucccuguccuccucgg

SEQ ID NO: 2436193 - RNA, 12 nt, Human
cagcccuccuca

SEQ ID NO: 2436194 - RNA, 13 nt, Human
cagcccuccucac

SEQ ID NO: 2436195 - RNA, 14 nt, Human
cagcccuccucacc

SEQ ID NO: 2436196 - RNA, 16 nt, Human
cagcccuccucacccc

SEQ ID NO: 2436197 - RNA, 18 nt, Human
cagcccugaguuccuagc

SEQ ID NO: 2436198 - RNA, 19 nt, Human
cagcccugaguuccuagcc

SEQ ID NO: 2436199 - RNA, 21 nt, Human
cagcccugaguuccuagccac

SEQ ID NO: 2436200 - RNA, 22 nt, Human
cagcccuccucaccccgucugg

SEQ ID NO: 2436201 - RNA, 12 nt, Human
cagcccugaggu

SEQ ID NO: 2436202 - RNA, 22 nt, Human
cagcccugaggugaaagggagc

SEQ ID NO: 2436203 - RNA, 16 nt, Human
cagcccugacccugug

SEQ ID NO: 2436204 - RNA, 13 nt, Human
cagcccugacccu

SEQ ID NO: 2436205 - RNA, 22 nt, Human
caggaagcucagggccuggcuc

SEQ ID NO: 2436206 - RNA, 20 nt, Human
cagcuggggccaggcugggu

SEQ ID NO: 2436207 - RNA, 19 nt, Human
cagcuggggccaggcuggg

SEQ ID NO: 2436208 - RNA, 14 nt, Human
cagcugggcugugg

SEQ ID NO: 2436209 - RNA, 12 nt, Human
cagcugggcugu

SEQ ID NO: 2436210 - RNA, 18 nt, Human
cagcugggcucugccacc

SEQ ID NO: 2436211 - RNA, 16 nt, Human
cagcugggcucugcca

SEQ ID NO: 2436212 - RNA, 15 nt, Human
cagcugggcucugcc

SEQ ID NO: 2436213 - RNA, 14 nt, Human
cagcugggcucugc

SEQ ID NO: 2436214 - RNA, 17 nt, Human
cagcugggcucugcaau

SEQ ID NO: 2436215 - RNA, 18 nt, Human
cagcuggggccaggcugg

SEQ ID NO: 2436216 - RNA, 11 nt, Human
cagcugggcuc

SEQ ID NO: 2436217 - RNA, 17 nt, Human
cagcugggcccaacccu

SEQ ID NO: 2436218 - RNA, 21 nt, Human
cagcugggcccaacccugucu

SEQ ID NO: 2436219 - RNA, 16 nt, Human
cagcugggcucugcaa

SEQ ID NO: 2436220 - RNA, 15 nt, Human
cagcugggcucugca

SEQ ID NO: 2436221 - RNA, 23 nt, Human
cagcugggaucacauguggacuu

SEQ ID NO: 2436222 - RNA, 15 nt, Human
cagcugggcccaacc

SEQ ID NO: 2436223 - RNA, 23 nt, Human
cagcugggaggcaagaggggugg

SEQ ID NO: 2436224 - RNA, 14 nt, Human
cagcugggcccaac

SEQ ID NO: 2436225 - RNA, 19 nt, Human
cagcuggcccgugacagac

SEQ ID NO: 2436226 - RNA, 17 nt, Human
cagcuggccgucacuug

SEQ ID NO: 2436227 - RNA, 22 nt, Human
cagcugggaggcaagaggggug

SEQ ID NO: 2436228 - RNA, 14 nt, Human
cagcugggaggcaa

SEQ ID NO: 2436229 - RNA, 13 nt, Human
cagcugggaggca

SEQ ID NO: 2436230 - RNA, 12 nt, Human
cagcugggaggc

SEQ ID NO: 2436231 - RNA, 22 nt, Human
cagcugcuuuugucuaugggac

SEQ ID NO: 2436232 - RNA, 23 nt, Human
cagcugcuggagacuccuaggca

SEQ ID NO: 2436233 - RNA, 19 nt, Human
cagcugcuggagacuccua

SEQ ID NO: 2436234 - RNA, 18 nt, Human
cagcugcuggagacuccu

SEQ ID NO: 2436235 - RNA, 15 nt, Human
cagcugcuugugucc

SEQ ID NO: 2436236 - RNA, 14 nt, Human
cagcugcuuguguc

SEQ ID NO: 2436237 - RNA, 15 nt, Human
cagcugcuucuccca

SEQ ID NO: 2436238 - RNA, 12 nt, Human
cagcugcuucuc

SEQ ID NO: 2436239 - RNA, 22 nt, Human
cagcuggaaaagggucuuggga

SEQ ID NO: 2436240 - RNA, 23 nt, Human
cagcugcuugugucccuccuggg

SEQ ID NO: 2436241 - RNA, 22 nt, Human
cagcugcuugugucccuccugg

SEQ ID NO: 2436242 - RNA, 16 nt, Human
cagcugcuuguguccc

SEQ ID NO: 2436243 - RNA, 23 nt, Human
cagcugcuuuugucuaugggacu

SEQ ID NO: 2436244 - RNA, 19 nt, Human
cagcuggccgggagccuga

SEQ ID NO: 2436245 - RNA, 18 nt, Human
cagcuggcccgugacaga

SEQ ID NO: 2436246 - RNA, 17 nt, Human
cagcuggcccgugacag

SEQ ID NO: 2436247 - RNA, 15 nt, Human
cagcuggcagcagag

SEQ ID NO: 2436248 - RNA, 18 nt, Human
cagcuggcagcagagugu

SEQ ID NO: 2436249 - RNA, 23 nt, Human
cagcuggaugagaauuugagugc

SEQ ID NO: 2436250 - RNA, 18 nt, Human
cagcuggaugauggucuu

SEQ ID NO: 2436251 - RNA, 15 nt, Human
cagcuggauuggguu

SEQ ID NO: 2436252 - RNA, 21 nt, Human
cagcuggaugagacuuccaaa

SEQ ID NO: 2436253 - RNA, 19 nt, Human
cagcuggauuggguuauga

SEQ ID NO: 2436254 - RNA, 14 nt, Human
cagcuggcagcaga

SEQ ID NO: 2436255 - RNA, 16 nt, Human
cagcuggagaagaccc

SEQ ID NO: 2436256 - RNA, 18 nt, Human
cagcuggagaaauauggu

SEQ ID NO: 2436257 - RNA, 14 nt, Human
cagcugggucaggc

SEQ ID NO: 2436258 - RNA, 15 nt, Human
cagcugggucaggca

SEQ ID NO: 2436259 - RNA, 16 nt, Human
cagcugggucaggcag

SEQ ID NO: 2436260 - RNA, 18 nt, Human
cagcuggguggcacugcc

SEQ ID NO: 2436261 - RNA, 17 nt, Human
cagcuggguggcacugc

SEQ ID NO: 2436262 - RNA, 16 nt, Human
cagcuggguggcacug

SEQ ID NO: 2436263 - RNA, 18 nt, Human
cagcugggucaggcaggg

SEQ ID NO: 2436264 - RNA, 20 nt, Human
cagcugggucaggcagggug

SEQ ID NO: 2436265 - RNA, 23 nt, Human
cagcugggguggggaccucaggc

SEQ ID NO: 2436266 - RNA, 22 nt, Human
cagcugggguggggaccucagg

SEQ ID NO: 2436267 - RNA, 21 nt, Human
cagcuggggcguggggagggc

SEQ ID NO: 2436268 - RNA, 20 nt, Human
cagcuggggcguggggaggg

SEQ ID NO: 2436269 - RNA, 19 nt, Human
cagcuggggcguggggagg

SEQ ID NO: 2436270 - RNA, 18 nt, Human
cagcuggggcguggggag

SEQ ID NO: 2436271 - RNA, 21 nt, Human
cagcugggguggggaccucag

SEQ ID NO: 2436272 - RNA, 22 nt, Human
cagcuggggccaggcugggucg

SEQ ID NO: 2436273 - RNA, 21 nt, Human
cagcuggggccaggcuggguc

SEQ ID NO: 2436274 - RNA, 17 nt, Human
cagcuggguuggaaaac

SEQ ID NO: 2436275 - RNA, 22 nt, Human
cagcuggguggcacugccaugc

SEQ ID NO: 2436276 - RNA, 21 nt, Human
cagcuggguggcacugccaug

SEQ ID NO: 2436277 - RNA, 20 nt, Human
cagcuggguggcacugccau

SEQ ID NO: 2436278 - RNA, 19 nt, Human
cagcuggguggcacugcca

SEQ ID NO: 2436279 - RNA, 16 nt, Human
cagcuggguuggaaaa

SEQ ID NO: 2436280 - RNA, 18 nt, Human
cagcuguaugauucccag

SEQ ID NO: 2436281 - RNA, 20 nt, Human
cagcuguaacacagcugaga

SEQ ID NO: 2436282 - RNA, 18 nt, Human
cagcuguaacacagcuga

SEQ ID NO: 2436283 - RNA, 19 nt, Human
cagcuguaagaagagacug

SEQ ID NO: 2436284 - RNA, 20 nt, Human
cagcuguaagaagagacugg

SEQ ID NO: 2436285 - RNA, 18 nt, Human
cagcugguugagguuuca

SEQ ID NO: 2436286 - RNA, 20 nt, Human
cagcuggugggaagcgucug

SEQ ID NO: 2436287 - RNA, 22 nt, Human
cagcuggugggaagcgucuguc

SEQ ID NO: 2436288 - RNA, 19 nt, Human
cagcuggugguaucugagu

SEQ ID NO: 2436289 - RNA, 22 nt, Human
cagcugcuugggcuucauccuc

SEQ ID NO: 2436290 - RNA, 21 nt, Human
cagcugcuugggcuucauccu

SEQ ID NO: 2436291 - RNA, 19 nt, Human
cagcugcuugggcuucauc

SEQ ID NO: 2436292 - RNA, 18 nt, Human
cagcugcuugggcuucau

SEQ ID NO: 2436293 - RNA, 16 nt, Human
cagcugcuugggcuuc

SEQ ID NO: 2436294 - RNA, 15 nt, Human
cagcugcuugggcuu

SEQ ID NO: 2436295 - RNA, 14 nt, Human
cagcugcuugggcu

SEQ ID NO: 2436296 - RNA, 13 nt, Human
cagcugcuugggc

SEQ ID NO: 2436297 - RNA, 20 nt, Human
cagcugcugaaacaacaaau

SEQ ID NO: 2436298 - RNA, 21 nt, Human
cagcugcugaaacaacaaaua

SEQ ID NO: 2436299 - RNA, 15 nt, Human
cagcugcuggagacu

SEQ ID NO: 2436300 - RNA, 14 nt, Human
cagcugcuggagac

SEQ ID NO: 2436301 - RNA, 21 nt, Human
cagcugcucaauaaaguacaa

SEQ ID NO: 2436302 - RNA, 17 nt, Human
cagcugcgcuugcuuuu

SEQ ID NO: 2436303 - RNA, 17 nt, Human
cagcugcuacuacuccu

SEQ ID NO: 2436304 - RNA, 19 nt, Human
cagcugcgcuugcuuuucu

SEQ ID NO: 2436305 - RNA, 13 nt, Human
cagcugcuccccu

SEQ ID NO: 2436306 - RNA, 15 nt, Human
cagcugcuccccucc

SEQ ID NO: 2436307 - RNA, 16 nt, Human
cagcugcuccccuccc

SEQ ID NO: 2436308 - RNA, 17 nt, Human
cagcugcuccccucccu

SEQ ID NO: 2436309 - RNA, 18 nt, Human
cagcugcuccccucccuc

SEQ ID NO: 2436310 - RNA, 12 nt, Human
cagcugcuccua

SEQ ID NO: 2436311 - RNA, 18 nt, Human
cagcugcuccuagaggga

SEQ ID NO: 2436312 - RNA, 19 nt, Human
cagcugcuccuagagggag

SEQ ID NO: 2436313 - RNA, 23 nt, Human
cagcugcuccuagagggaggggc

SEQ ID NO: 2436314 - RNA, 20 nt, Human
cagcugcuccccucccuccu

SEQ ID NO: 2436315 - RNA, 21 nt, Human
cagcugcuccccucccuccuc

SEQ ID NO: 2436316 - RNA, 24 nt, Human
cagcugcgguccacccaggagccc

SEQ ID NO: 2436317 - RNA, 23 nt, Human
cagcugcgguccacccaggagcc

SEQ ID NO: 2436318 - RNA, 22 nt, Human
cagcugcgguccacccaggagc

SEQ ID NO: 2436319 - RNA, 21 nt, Human
cagcugcgguccacccaggag

SEQ ID NO: 2436320 - RNA, 20 nt, Human
cagcugcgguccacccagga

SEQ ID NO: 2436321 - RNA, 19 nt, Human
cagcugcgguccacccagg

SEQ ID NO: 2436322 - RNA, 15 nt, Human
cagcugccugggauc

SEQ ID NO: 2436323 - RNA, 18 nt, Human
cagcugcgguccacccag

SEQ ID NO: 2436324 - RNA, 23 nt, Human
cagcugccugggaucccucaucc

SEQ ID NO: 2436325 - RNA, 18 nt, Human
cagcugccugggaucccu

SEQ ID NO: 2436326 - RNA, 13 nt, Human
cagcugaccucug

SEQ ID NO: 2436327 - RNA, 17 nt, Human
cagcugaccauggaaga

SEQ ID NO: 2436328 - RNA, 21 nt, Human
cagcugacaguccucuccacc

SEQ ID NO: 2436329 - RNA, 18 nt, Human
cagcugacaguccucucc

SEQ ID NO: 2436330 - RNA, 16 nt, Human
cagcugacaguccucu

SEQ ID NO: 2436331 - RNA, 15 nt, Human
cagcugacaguccuc

SEQ ID NO: 2436332 - RNA, 14 nt, Human
cagcugacaguccu

SEQ ID NO: 2436333 - RNA, 18 nt, Human
cagcugaccucuguuguc

SEQ ID NO: 2436334 - RNA, 17 nt, Human
cagcugaccucuguugu

SEQ ID NO: 2436335 - RNA, 16 nt, Human
cagcugaccuuuguca

SEQ ID NO: 2436336 - RNA, 15 nt, Human
cagcugaacagccaa

SEQ ID NO: 2436337 - RNA, 16 nt, Human
cagcugaauuaucuau

SEQ ID NO: 2436338 - RNA, 22 nt, Human
cagcucuuuccuccuuccaugg

SEQ ID NO: 2436339 - RNA, 15 nt, Human
cagcugaaauacuga

SEQ ID NO: 2436340 - RNA, 19 nt, Human
cagcugaaauaugcuggcu

SEQ ID NO: 2436341 - RNA, 22 nt, Human
cagcugaaauaugcuggcugga

SEQ ID NO: 2436342 - RNA, 21 nt, Human
cagcugaaauaugcuggcugg

SEQ ID NO: 2436343 - RNA, 14 nt, Human
cagcucuuuccucc

SEQ ID NO: 2436344 - RNA, 16 nt, Human
cagcucuuuccuccuu

SEQ ID NO: 2436345 - RNA, 17 nt, Human
cagcucuuuccuccuuc

SEQ ID NO: 2436346 - RNA, 18 nt, Human
cagcucuuuccuccuucc

SEQ ID NO: 2436347 - RNA, 19 nt, Human
cagcucuuuccuccuucca

SEQ ID NO: 2436348 - RNA, 21 nt, Human
cagcucuuuccuccuuccaug

SEQ ID NO: 2436349 - RNA, 22 nt, Human
cagcucuuugaaauagucugug

SEQ ID NO: 2436350 - RNA, 16 nt, Human
cagcucuuggcuccac

SEQ ID NO: 2436351 - RNA, 17 nt, Human
cagcucuuggcuccacu

SEQ ID NO: 2436352 - RNA, 24 nt, Human
cagcucuugcuaaucagugucuca

SEQ ID NO: 2436353 - RNA, 13 nt, Human
cagcucuuuccuc

SEQ ID NO: 2436354 - RNA, 18 nt, Human
cagcucuuggcuccacug

SEQ ID NO: 2436355 - RNA, 18 nt, Human
cagcucuucuccccaggu

SEQ ID NO: 2436356 - RNA, 23 nt, Human
cagcucuucuccaggcuguaucc

SEQ ID NO: 2436357 - RNA, 23 nt, Human
cagcucuugcuaaucagugucuc

SEQ ID NO: 2436358 - RNA, 22 nt, Human
cagcucuugcuaaucagugucu

SEQ ID NO: 2436359 - RNA, 21 nt, Human
cagcucuugcuaaucaguguc

SEQ ID NO: 2436360 - RNA, 20 nt, Human
cagcucuugcuaaucagugu

SEQ ID NO: 2436361 - RNA, 14 nt, Human
cagcucuugcuaau

SEQ ID NO: 2436362 - RNA, 23 nt, Human
cagcucuugcccuucccuguccc

SEQ ID NO: 2436363 - RNA, 21 nt, Human
cagcucuugcccuucccuguc

SEQ ID NO: 2436364 - RNA, 20 nt, Human
cagcucuugcccuucccugu

SEQ ID NO: 2436365 - RNA, 19 nt, Human
cagcucuugcccuucccug

SEQ ID NO: 2436366 - RNA, 18 nt, Human
cagcucuugcccuucccu

SEQ ID NO: 2436367 - RNA, 17 nt, Human
cagcucuugcccuuccc

SEQ ID NO: 2436368 - RNA, 16 nt, Human
cagcucuugcccuucc

SEQ ID NO: 2436369 - RNA, 13 nt, Human
cagcucuucugcc

SEQ ID NO: 2436370 - RNA, 22 nt, Human
cagcucuucugccggcccuggg

SEQ ID NO: 2436371 - RNA, 15 nt, Human
cagcucuugcccuuc

SEQ ID NO: 2436372 - RNA, 23 nt, Human
cagcucuucugccggcccugggg

SEQ ID NO: 2436373 - RNA, 19 nt, Human
cagcucuucuccaggcugu

SEQ ID NO: 2436374 - RNA, 18 nt, Human
cagcucuucuccaggcug

SEQ ID NO: 2436375 - RNA, 17 nt, Human
cagcucuucuccaggcu

SEQ ID NO: 2436376 - RNA, 16 nt, Human
cagcucuucuccaggc

SEQ ID NO: 2436377 - RNA, 15 nt, Human
cagcucuucuccagg

SEQ ID NO: 2436378 - RNA, 14 nt, Human
cagcucuucuccag

SEQ ID NO: 2436379 - RNA, 15 nt, Human
cagcucugggagagg

SEQ ID NO: 2436380 - RNA, 13 nt, Human
cagcucuucucca

SEQ ID NO: 2436381 - RNA, 21 nt, Human
cagcucuuauauugccauuuc

SEQ ID NO: 2436382 - RNA, 10 nt, Human
cagcucuuau

SEQ ID NO: 2436383 - RNA, 23 nt, Human
cagcucuguccugggagugagcu

SEQ ID NO: 2436384 - RNA, 22 nt, Human
cagcucugggccauucuccaca

SEQ ID NO: 2436385 - RNA, 23 nt, Human
cagcucugggccauucuccacag

SEQ ID NO: 2436386 - RNA, 17 nt, Human
cagcucuguguugccau

SEQ ID NO: 2436387 - RNA, 21 nt, Human
cagcucuguguugccaugugu

SEQ ID NO: 2436388 - RNA, 18 nt, Human
cagcucuguccugggagu

SEQ ID NO: 2436389 - RNA, 17 nt, Human
cagcucuguccugggag

SEQ ID NO: 2436390 - RNA, 16 nt, Human
cagcucuguccuggga

SEQ ID NO: 2436391 - RNA, 14 nt, Human
cagcucuguccugg

SEQ ID NO: 2436392 - RNA, 23 nt, Human
cagcucugguccauagagagcaa

SEQ ID NO: 2436393 - RNA, 22 nt, Human
cagcucugguccauagagagca

SEQ ID NO: 2436394 - RNA, 13 nt, Human
cagcucuguccug

SEQ ID NO: 2436395 - RNA, 12 nt, Human
cagcucuguccu

SEQ ID NO: 2436396 - RNA, 21 nt, Human
cagcucugguccauagagagc

SEQ ID NO: 2436397 - RNA, 18 nt, Human
cagcucugguccauagag

SEQ ID NO: 2436398 - RNA, 17 nt, Human
cagcucugguccauaga

SEQ ID NO: 2436399 - RNA, 16 nt, Human
cagcucugguccauag

SEQ ID NO: 2436400 - RNA, 13 nt, Human
cagcucuggucca

SEQ ID NO: 2436401 - RNA, 10 nt, Human
cagcucuggu

SEQ ID NO: 2436402 - RNA, 14 nt, Human
cagcucuggagggg

SEQ ID NO: 2436403 - RNA, 18 nt, Human
cagcucuggaggggaggg

SEQ ID NO: 2436404 - RNA, 16 nt, Human
cagcucuggagggggu

SEQ ID NO: 2436405 - RNA, 12 nt, Human
cagcucuggcuu

SEQ ID NO: 2436406 - RNA, 12 nt, Human
cagcucugggcc

SEQ ID NO: 2436407 - RNA, 19 nt, Human
cagcucugggccauucucc

SEQ ID NO: 2436408 - RNA, 14 nt, Human
cagcucugggagag

SEQ ID NO: 2436409 - RNA, 14 nt, Human
cagcucuggcuucc

SEQ ID NO: 2436410 - RNA, 15 nt, Human
cagcucugcaagaau

SEQ ID NO: 2436411 - RNA, 16 nt, Human
cagcucugcaagaauu

SEQ ID NO: 2436412 - RNA, 18 nt, Human
cagcucugaaaccagugu

SEQ ID NO: 2436413 - RNA, 19 nt, Human
cagcucugaaaccaguguu

SEQ ID NO: 2436414 - RNA, 19 nt, Human
cagcucucccucuggcccu

SEQ ID NO: 2436415 - RNA, 20 nt, Human
cagcucucccucuggcccug

SEQ ID NO: 2436416 - RNA, 21 nt, Human
cagcucucccucuggcccugc

SEQ ID NO: 2436417 - RNA, 23 nt, Human
cagcucucccucuggcccugccu

SEQ ID NO: 2436418 - RNA, 20 nt, Human
cagcucugcauacucauuag

SEQ ID NO: 2436419 - RNA, 21 nt, Human
cagcucugcaagaauugaagc

SEQ ID NO: 2436420 - RNA, 18 nt, Human
cagcucuggacagcccca

SEQ ID NO: 2436421 - RNA, 21 nt, Human
cagcucuggacagccccaccc

SEQ ID NO: 2436422 - RNA, 11 nt, Human
cagcucuggag

SEQ ID NO: 2436423 - RNA, 23 nt, Human
cagcucuggacagccccacccug

SEQ ID NO: 2436424 - RNA, 17 nt, Human
cagcucuggacagcccc

SEQ ID NO: 2436425 - RNA, 13 nt, Human
cagcuccuuccug

SEQ ID NO: 2436426 - RNA, 14 nt, Human
cagcuccuuccugg

SEQ ID NO: 2436427 - RNA, 16 nt, Human
cagcuccuugggagga

SEQ ID NO: 2436428 - RNA, 12 nt, Human
cagcuccuuggg

SEQ ID NO: 2436429 - RNA, 16 nt, Human
cagcuccuuccuggag

SEQ ID NO: 2436430 - RNA, 21 nt, Human
cagcuccuugggaggaagcag

SEQ ID NO: 2436431 - RNA, 20 nt, Human
cagcuccuugggaggaagca

SEQ ID NO: 2436432 - RNA, 18 nt, Human
cagcuccuugggaggaag

SEQ ID NO: 2436433 - RNA, 17 nt, Human
cagcuccuugggaggaa

SEQ ID NO: 2436434 - RNA, 23 nt, Human
cagcuccuugggaggaagcagaa

SEQ ID NO: 2436435 - RNA, 22 nt, Human
cagcuccuugggaggaagcaga

SEQ ID NO: 2436436 - RNA, 21 nt, Human
cagcucuagacaacccugcaa

SEQ ID NO: 2436437 - RNA, 13 nt, Human
cagcucucagcca

SEQ ID NO: 2436438 - RNA, 20 nt, Human
cagcucuagacacugccaca

SEQ ID NO: 2436439 - RNA, 12 nt, Human
cagcucucagcc

SEQ ID NO: 2436440 - RNA, 15 nt, Human
cagcucuacuggucu

SEQ ID NO: 2436441 - RNA, 17 nt, Human
cagcucuagacaacccu

SEQ ID NO: 2436442 - RNA, 20 nt, Human
cagcucuagacaacccugca

SEQ ID NO: 2436443 - RNA, 14 nt, Human
cagcucuccaguca

SEQ ID NO: 2436444 - RNA, 13 nt, Human
cagcucuccaguc

SEQ ID NO: 2436445 - RNA, 12 nt, Human
cagcucuccagu

SEQ ID NO: 2436446 - RNA, 11 nt, Human
cagcucuccag

SEQ ID NO: 2436447 - RNA, 15 nt, Human
cagcucucccucugg

SEQ ID NO: 2436448 - RNA, 16 nt, Human
cagcucucccucuggc

SEQ ID NO: 2436449 - RNA, 17 nt, Human
cagcucucccucuggcc

SEQ ID NO: 2436450 - RNA, 18 nt, Human
cagcucucccucuggccc

SEQ ID NO: 2436451 - RNA, 12 nt, Human
cagcucucccuc

SEQ ID NO: 2436452 - RNA, 14 nt, Human
cagcucucccucug

SEQ ID NO: 2436453 - RNA, 12 nt, Human
cagcucuccccu

SEQ ID NO: 2436454 - RNA, 23 nt, Human
cagcuccuucuguccuacucugu

SEQ ID NO: 2436455 - RNA, 21 nt, Human
cagcuccuucuguccuacucu

SEQ ID NO: 2436456 - RNA, 17 nt, Human
cagcuccuucuguccua

SEQ ID NO: 2436457 - RNA, 16 nt, Human
cagcuccuucuguccu

SEQ ID NO: 2436458 - RNA, 15 nt, Human
cagcuccuguaacau

SEQ ID NO: 2436459 - RNA, 23 nt, Human
cagcucaggcacacuucuucuug

SEQ ID NO: 2436460 - RNA, 12 nt, Human
cagcucaguccc

SEQ ID NO: 2436461 - RNA, 18 nt, Human
cagcucagucccaucaga

SEQ ID NO: 2436462 - RNA, 17 nt, Human
cagcucaugcccccuuu

SEQ ID NO: 2436463 - RNA, 15 nt, Human
cagcucaucucuguc

SEQ ID NO: 2436464 - RNA, 23 nt, Human
cagcucaguucuagucucucugg

SEQ ID NO: 2436465 - RNA, 20 nt, Human
cagcucagagagggugggag

SEQ ID NO: 2436466 - RNA, 19 nt, Human
cagcucagagaggguggga

SEQ ID NO: 2436467 - RNA, 17 nt, Human
cagcucagagagggugg

SEQ ID NO: 2436468 - RNA, 13 nt, Human
cagcucagagagg

SEQ ID NO: 2436469 - RNA, 13 nt, Human
cagcucaggacag

SEQ ID NO: 2436470 - RNA, 16 nt, Human
cagcucaggacagaug

SEQ ID NO: 2436471 - RNA, 18 nt, Human
cagcucaggacagaugcc

SEQ ID NO: 2436472 - RNA, 19 nt, Human
cagcucaggacagaugcca

SEQ ID NO: 2436473 - RNA, 22 nt, Human
cagcucaggacagaugccacac

SEQ ID NO: 2436474 - RNA, 11 nt, Human
cagcucaggau

SEQ ID NO: 2436475 - RNA, 13 nt, Human
cagcucaggaucu

SEQ ID NO: 2436476 - RNA, 12 nt, Human
cagcucaggcac

SEQ ID NO: 2436477 - RNA, 21 nt, Human
cagcucaggcacacuucuucu

SEQ ID NO: 2436478 - RNA, 17 nt, Human
cagcucagcgccagccu

SEQ ID NO: 2436479 - RNA, 13 nt, Human
cagcucagcgcca

SEQ ID NO: 2436480 - RNA, 11 nt, Human
cagcucagcgc

SEQ ID NO: 2436481 - RNA, 12 nt, Human
cagcucaggaca

SEQ ID NO: 2436482 - RNA, 18 nt, Human
cagcucagcgccagccug

SEQ ID NO: 2436483 - RNA, 10 nt, Human
cagcucagga

SEQ ID NO: 2436484 - RNA, 15 nt, Human
caggaaguagaggag

SEQ ID NO: 2436485 - RNA, 20 nt, Human
caggaaguacuggagaaaau

SEQ ID NO: 2436486 - RNA, 18 nt, Human
caggaaguacuggagaaa

SEQ ID NO: 2436487 - RNA, 17 nt, Human
caggaaguacuggagaa

SEQ ID NO: 2436488 - RNA, 16 nt, Human
caggaagucuucaggg

SEQ ID NO: 2436489 - RNA, 10 nt, Human
caggaaguga

SEQ ID NO: 2436490 - RNA, 12 nt, Human
caggaauaaggc

SEQ ID NO: 2436491 - RNA, 23 nt, Human
caggaaucaagagcugcccuccu

SEQ ID NO: 2436492 - RNA, 18 nt, Human
caggaaucaagagcugcc

SEQ ID NO: 2436493 - RNA, 17 nt, Human
caggaaucaagagcugc

SEQ ID NO: 2436494 - RNA, 16 nt, Human
caggaaucaagagcug

SEQ ID NO: 2436495 - RNA, 17 nt, Human
caggaauauuuuccaaa

SEQ ID NO: 2436496 - RNA, 23 nt, Human
caggaauaaggccuuaauauguu

SEQ ID NO: 2436497 - RNA, 16 nt, Human
caggaaguagaggagg

SEQ ID NO: 2436498 - RNA, 23 nt, Human
caggaaggggguccacccagcaa

SEQ ID NO: 2436499 - RNA, 21 nt, Human
caggaaggggguccacccagc

SEQ ID NO: 2436500 - RNA, 16 nt, Human
caggaaguacuggaga

SEQ ID NO: 2436501 - RNA, 14 nt, Human
caggaaguacugga

SEQ ID NO: 2436502 - RNA, 12 nt, Human
caggaaguacug

SEQ ID NO: 2436503 - RNA, 21 nt, Human
caggaagggcaggaaggagag

SEQ ID NO: 2436504 - RNA, 22 nt, Human
caggaagggccuacagcccauu

SEQ ID NO: 2436505 - RNA, 18 nt, Human
caggaaggggguccaccc

SEQ ID NO: 2436506 - RNA, 15 nt, Human
caggaaggcuaaagg

SEQ ID NO: 2436507 - RNA, 19 nt, Human
caggaaggcugagaggaga

SEQ ID NO: 2436508 - RNA, 17 nt, Human
caggaaggagagccugc

SEQ ID NO: 2436509 - RNA, 18 nt, Human
caggaaggagagccugcu

SEQ ID NO: 2436510 - RNA, 18 nt, Human
caggaaggaugagcauuu

SEQ ID NO: 2436511 - RNA, 16 nt, Human
caggaauuucccagga

SEQ ID NO: 2436512 - RNA, 17 nt, Human
caggaauuucccaggac

SEQ ID NO: 2436513 - RNA, 18 nt, Human
caggaauuucccaggacc

SEQ ID NO: 2436514 - RNA, 19 nt, Human
caggaauuucccaggaccc

SEQ ID NO: 2436515 - RNA, 20 nt, Human
caggaauuucccaggacccu

SEQ ID NO: 2436516 - RNA, 21 nt, Human
caggaauuucccaggacccug

SEQ ID NO: 2436517 - RNA, 15 nt, Human
caggacaacgaggaa

SEQ ID NO: 2436518 - RNA, 16 nt, Human
caggacaacgaggaag

SEQ ID NO: 2436519 - RNA, 18 nt, Human
caggacaacgaggaagcc

SEQ ID NO: 2436520 - RNA, 17 nt, Human
caggacaaugucugaac

SEQ ID NO: 2436521 - RNA, 19 nt, Human
caggacaacgaggaagccc

SEQ ID NO: 2436522 - RNA, 20 nt, Human
caggaaugaagccuuagcca

SEQ ID NO: 2436523 - RNA, 19 nt, Human
caggaauguguggccugca

SEQ ID NO: 2436524 - RNA, 21 nt, Human
caggaauguguggccugcaca

SEQ ID NO: 2436525 - RNA, 23 nt, Human
caggaauguguggccugcacagu

SEQ ID NO: 2436526 - RNA, 18 nt, Human
caggaauguuaaagucag

SEQ ID NO: 2436527 - RNA, 19 nt, Human
caggaauguuaaagucagu

SEQ ID NO: 2436528 - RNA, 16 nt, Human
caggaauguguggccu

SEQ ID NO: 2436529 - RNA, 17 nt, Human
caggaauguguggccug

SEQ ID NO: 2436530 - RNA, 21 nt, Human
caggaaugccaaggagacauc

SEQ ID NO: 2436531 - RNA, 14 nt, Human
caggaaugaucucu

SEQ ID NO: 2436532 - RNA, 13 nt, Human
caggaaugggcug

SEQ ID NO: 2436533 - RNA, 17 nt, Human
caggaauguguggcaga

SEQ ID NO: 2436534 - RNA, 14 nt, Human
caggaccugccugu

SEQ ID NO: 2436535 - RNA, 15 nt, Human
caggaccugccugua

SEQ ID NO: 2436536 - RNA, 19 nt, Human
caggaccugccuguagccc

SEQ ID NO: 2436537 - RNA, 14 nt, Human
caggaccuggcugc

SEQ ID NO: 2436538 - RNA, 16 nt, Human
caggaccuggcugcca

SEQ ID NO: 2436539 - RNA, 17 nt, Human
caggaccuggcugccau

SEQ ID NO: 2436540 - RNA, 20 nt, Human
caggaccugggaccuccccu

SEQ ID NO: 2436541 - RNA, 18 nt, Human
caggaccuggcugccaua

SEQ ID NO: 2436542 - RNA, 21 nt, Human
caggacaccacacccagccuc

SEQ ID NO: 2436543 - RNA, 20 nt, Human
caggacaccacacccagccu

SEQ ID NO: 2436544 - RNA, 19 nt, Human
caggacaccacacccagcc

SEQ ID NO: 2436545 - RNA, 17 nt, Human
caggacaccacacccag

SEQ ID NO: 2436546 - RNA, 13 nt, Human
caggacacaguca

SEQ ID NO: 2436547 - RNA, 14 nt, Human
caggacaccacacc

SEQ ID NO: 2436548 - RNA, 15 nt, Human
caggacacagucaga

SEQ ID NO: 2436549 - RNA, 21 nt, Human
caggaccucugaaacccugga

SEQ ID NO: 2436550 - RNA, 13 nt, Human
caggaccugccug

SEQ ID NO: 2436551 - RNA, 13 nt, Human
caggaccugacua

SEQ ID NO: 2436552 - RNA, 20 nt, Human
caggacggggccggccaggu

SEQ ID NO: 2436553 - RNA, 19 nt, Human
caggacggggccggccagg

SEQ ID NO: 2436554 - RNA, 16 nt, Human
caggacggggccggcc

SEQ ID NO: 2436555 - RNA, 22 nt, Human
caggacgcuucugaaugcugcu

SEQ ID NO: 2436556 - RNA, 21 nt, Human
caggacgcuucugaaugcugc

SEQ ID NO: 2436557 - RNA, 16 nt, Human
caggacgcuucugaau

SEQ ID NO: 2436558 - RNA, 15 nt, Human
caggacgcuucugaa

SEQ ID NO: 2436559 - RNA, 14 nt, Human
caggacgcuucuga

SEQ ID NO: 2436560 - RNA, 20 nt, Human
caggaccuuuugaaguaguu

SEQ ID NO: 2436561 - RNA, 13 nt, Human
caggaccuuuuga

SEQ ID NO: 2436562 - RNA, 21 nt, Human
caggaccuucgggcugugccc

SEQ ID NO: 2436563 - RNA, 22 nt, Human
caggaccuucgggcugugcccg

SEQ ID NO: 2436564 - RNA, 20 nt, Human
caggaccuucgggcugugcc

SEQ ID NO: 2436565 - RNA, 17 nt, Human
caggaccuguggccaag

SEQ ID NO: 2436566 - RNA, 19 nt, Human
caggaagcucagggccugg

SEQ ID NO: 2436567 - RNA, 18 nt, Human
caggaagcucagggccug

SEQ ID NO: 2436568 - RNA, 17 nt, Human
caggaagcucagggccu

SEQ ID NO: 2436569 - RNA, 16 nt, Human
caggaagcucagggcc

SEQ ID NO: 2436570 - RNA, 15 nt, Human
caggaagcucagggc

SEQ ID NO: 2436571 - RNA, 14 nt, Human
caggaagcucaggg

SEQ ID NO: 2436572 - RNA, 19 nt, Human
caggaagccugcaguccug

SEQ ID NO: 2436573 - RNA, 13 nt, Human
caggaagccugca

SEQ ID NO: 2436574 - RNA, 19 nt, Human
caggaagcccccaaguuga

SEQ ID NO: 2436575 - RNA, 13 nt, Human
caggaagccccca

SEQ ID NO: 2436576 - RNA, 13 nt, Human
caggaagcucagg

SEQ ID NO: 2436577 - RNA, 21 nt, Human
caggaagcucagggccuggcu

SEQ ID NO: 2436578 - RNA, 20 nt, Human
caggaagcucagggccuggc

SEQ ID NO: 2436579 - RNA, 23 nt, Human
caggaagcucagggccuggcuca

SEQ ID NO: 2436580 - RNA, 21 nt, Human
caggaagccugcaguccugga

SEQ ID NO: 2436581 - RNA, 12 nt, Human
caggaagcucag

SEQ ID NO: 2436582 - RNA, 21 nt, Human
caggaagccgugcccugcccc

SEQ ID NO: 2436583 - RNA, 17 nt, Human
caggaagcucagacugg

SEQ ID NO: 2436584 - RNA, 12 nt, Human
caggaaggagag

SEQ ID NO: 2436585 - RNA, 14 nt, Human
caggaaggaaguca

SEQ ID NO: 2436586 - RNA, 13 nt, Human
caggaaggagagc

SEQ ID NO: 2436587 - RNA, 14 nt, Human
caggaaggagagcc

SEQ ID NO: 2436588 - RNA, 15 nt, Human
caggaaggagagccu

SEQ ID NO: 2436589 - RNA, 16 nt, Human
caggaaggagagccug

SEQ ID NO: 2436590 - RNA, 18 nt, Human
caggaagcugcuccgugc

SEQ ID NO: 2436591 - RNA, 15 nt, Human
caggaagcugcuccg

SEQ ID NO: 2436592 - RNA, 17 nt, Human
caggaagcugcuccgug

SEQ ID NO: 2436593 - RNA, 18 nt, Human
caggaagccagcaggcuc

SEQ ID NO: 2436594 - RNA, 17 nt, Human
caggaagccagcaggcu

SEQ ID NO: 2436595 - RNA, 16 nt, Human
caggaagccagcaggc

SEQ ID NO: 2436596 - RNA, 14 nt, Human
caggaagccagcag

SEQ ID NO: 2436597 - RNA, 21 nt, Human
caggaagccagcaggcucuca

SEQ ID NO: 2436598 - RNA, 19 nt, Human
caggaagccagcaggcucu

SEQ ID NO: 2436599 - RNA, 20 nt, Human
caggaagcauucagagagca

SEQ ID NO: 2436600 - RNA, 19 nt, Human
caggaagcauucagagagc

SEQ ID NO: 2436601 - RNA, 18 nt, Human
caggaagcauucagagag

SEQ ID NO: 2436602 - RNA, 23 nt, Human
caggaagcaaacuaagcccccgc

SEQ ID NO: 2436603 - RNA, 22 nt, Human
caggaagcauucagagagcagc

SEQ ID NO: 2436604 - RNA, 22 nt, Human
caggaagccagcaggcucucag

SEQ ID NO: 2436605 - RNA, 17 nt, Human
caggaacucccagcaac

SEQ ID NO: 2436606 - RNA, 16 nt, Human
caggaacucccagcaa

SEQ ID NO: 2436607 - RNA, 15 nt, Human
caggaacucccagca

SEQ ID NO: 2436608 - RNA, 14 nt, Human
caggaacucccagc

SEQ ID NO: 2436609 - RNA, 12 nt, Human
caggaacugggc

SEQ ID NO: 2436610 - RNA, 13 nt, Human
caggaacugggcc

SEQ ID NO: 2436611 - RNA, 16 nt, Human
caggaaccacaccaca

SEQ ID NO: 2436612 - RNA, 19 nt, Human
caggaaccacaccacaucu

SEQ ID NO: 2436613 - RNA, 17 nt, Human
caggaacuauaaaaaca

SEQ ID NO: 2436614 - RNA, 15 nt, Human
caggaacuauaaaaa

SEQ ID NO: 2436615 - RNA, 14 nt, Human
caggaagcagcuuu

SEQ ID NO: 2436616 - RNA, 16 nt, Human
caggaagcaccccaug

SEQ ID NO: 2436617 - RNA, 17 nt, Human
caggaagcaccccaugc

SEQ ID NO: 2436618 - RNA, 14 nt, Human
caggaagcacccca

SEQ ID NO: 2436619 - RNA, 15 nt, Human
caggaagcaccccau

SEQ ID NO: 2436620 - RNA, 18 nt, Human
caggaagaucuuaaauuu

SEQ ID NO: 2436621 - RNA, 21 nt, Human
caggaagaugaaagaggaggu

SEQ ID NO: 2436622 - RNA, 14 nt, Human
caggaagagagcau

SEQ ID NO: 2436623 - RNA, 21 nt, Human
caggaagaaaucacagaauca

SEQ ID NO: 2436624 - RNA, 14 nt, Human
caggaagaaaucac

SEQ ID NO: 2436625 - RNA, 22 nt, Human
caggaagaaaggagucugcaca

SEQ ID NO: 2436626 - RNA, 22 nt, Human
caggaagaaaucacagaaucau

SEQ ID NO: 2436627 - RNA, 15 nt, Human
cagcuucauuugugu

SEQ ID NO: 2436628 - RNA, 13 nt, Human
cagcuucauuugu

SEQ ID NO: 2436629 - RNA, 17 nt, Human
cagcuguacuucgucuu

SEQ ID NO: 2436630 - RNA, 17 nt, Human
cagcuucauuuguguca

SEQ ID NO: 2436631 - RNA, 18 nt, Human
cagcuuccccucucuccu

SEQ ID NO: 2436632 - RNA, 22 nt, Human
cagcuuccccucucuccuccug

SEQ ID NO: 2436633 - RNA, 20 nt, Human
cagcuucguuuauuuucaag

SEQ ID NO: 2436634 - RNA, 22 nt, Human
cagcuuccuacccacaccucug

SEQ ID NO: 2436635 - RNA, 20 nt, Human
cagcuuccuacccacaccuc

SEQ ID NO: 2436636 - RNA, 19 nt, Human
cagcuuccuacccacaccu

SEQ ID NO: 2436637 - RNA, 14 nt, Human
cagcuuccuaccca

SEQ ID NO: 2436638 - RNA, 23 nt, Human
cagcuuccccucucuccuccugc

SEQ ID NO: 2436639 - RNA, 21 nt, Human
cagcuucauuuccugugucuu

SEQ ID NO: 2436640 - RNA, 20 nt, Human
cagcuucauuuccugugucu

SEQ ID NO: 2436641 - RNA, 19 nt, Human
cagcuguaugauucccagc

SEQ ID NO: 2436642 - RNA, 16 nt, Human
cagcuguaaucuauga

SEQ ID NO: 2436643 - RNA, 21 nt, Human
cagcuguaagaagagacuggg

SEQ ID NO: 2436644 - RNA, 22 nt, Human
cagcuguaagaagagacuggga

SEQ ID NO: 2436645 - RNA, 19 nt, Human
cagcuucauuuccuguguc

SEQ ID NO: 2436646 - RNA, 14 nt, Human
cagcuucugguacu

SEQ ID NO: 2436647 - RNA, 18 nt, Human
cagcuucugcugggcugg

SEQ ID NO: 2436648 - RNA, 17 nt, Human
cagcuucugcugggcug

SEQ ID NO: 2436649 - RNA, 16 nt, Human
cagcuucugcugggcu

SEQ ID NO: 2436650 - RNA, 15 nt, Human
cagcuucugcugggc

SEQ ID NO: 2436651 - RNA, 14 nt, Human
cagcuucugcuggg

SEQ ID NO: 2436652 - RNA, 19 nt, Human
cagcuucugccacuuccca

SEQ ID NO: 2436653 - RNA, 18 nt, Human
cagcuucugccacuuccc

SEQ ID NO: 2436654 - RNA, 17 nt, Human
cagcuucugccacuucc

SEQ ID NO: 2436655 - RNA, 15 nt, Human
cagcuucugccacuu

SEQ ID NO: 2436656 - RNA, 23 nt, Human
cagcuucugccacuucccaggua

SEQ ID NO: 2436657 - RNA, 20 nt, Human
cagcuucugccacuucccag

SEQ ID NO: 2436658 - RNA, 18 nt, Human
cagcuugaaacugagaug

SEQ ID NO: 2436659 - RNA, 22 nt, Human
cagcuucugguacucuccuaga

SEQ ID NO: 2436660 - RNA, 21 nt, Human
cagcuucugguacucuccuag

SEQ ID NO: 2436661 - RNA, 20 nt, Human
cagcuucugguacucuccua

SEQ ID NO: 2436662 - RNA, 19 nt, Human
cagcuucugguacucuccu

SEQ ID NO: 2436663 - RNA, 14 nt, Human
cagcuucuucaucu

SEQ ID NO: 2436664 - RNA, 23 nt, Human
cagcuucugguacucuccuagag

SEQ ID NO: 2436665 - RNA, 22 nt, Human
cagcuucuuaauauaacugccu

SEQ ID NO: 2436666 - RNA, 22 nt, Human
cagcuucguuuauuuucaagaa

SEQ ID NO: 2436667 - RNA, 18 nt, Human
cagcuucuauccuugacu

SEQ ID NO: 2436668 - RNA, 18 nt, Human
cagcuucucauccugcag

SEQ ID NO: 2436669 - RNA, 20 nt, Human
cagcuucucauccugcaggc

SEQ ID NO: 2436670 - RNA, 19 nt, Human
cagcuucucauccugcagg

SEQ ID NO: 2436671 - RNA, 15 nt, Human
cagcuucuccaggcu

SEQ ID NO: 2436672 - RNA, 14 nt, Human
cagcuucuccaggc

SEQ ID NO: 2436673 - RNA, 15 nt, Human
cagcuucuccugugu

SEQ ID NO: 2436674 - RNA, 16 nt, Human
cagcuucuccugugug

SEQ ID NO: 2436675 - RNA, 12 nt, Human
cagcuucugcca

SEQ ID NO: 2436676 - RNA, 11 nt, Human
cagcuucugcc

SEQ ID NO: 2436677 - RNA, 13 nt, Human
cagcuucugccac

SEQ ID NO: 2436678 - RNA, 14 nt, Human
cagcuucugccacu

SEQ ID NO: 2436679 - RNA, 13 nt, Human
cagcuucuccagg

SEQ ID NO: 2436680 - RNA, 12 nt, Human
cagcuucuccag

SEQ ID NO: 2436681 - RNA, 19 nt, Human
cagcuucuauuagccaguc

SEQ ID NO: 2436682 - RNA, 21 nt, Human
cagcuucucauccugcaggca

SEQ ID NO: 2436683 - RNA, 21 nt, Human
cagcuugaccgugaggccaga

SEQ ID NO: 2436684 - RNA, 20 nt, Human
cagcuugaccgugaggccag

SEQ ID NO: 2436685 - RNA, 19 nt, Human
cagcuugaccgugaggcca

SEQ ID NO: 2436686 - RNA, 18 nt, Human
cagcuugaccgugaggcc

SEQ ID NO: 2436687 - RNA, 23 nt, Human
cagcuugaccugaggcugugguc

SEQ ID NO: 2436688 - RNA, 22 nt, Human
cagcuugaccugaggcuguggu

SEQ ID NO: 2436689 - RNA, 21 nt, Human
cagcuugaccugaggcugugg

SEQ ID NO: 2436690 - RNA, 20 nt, Human
cagcuugaccugaggcugug

SEQ ID NO: 2436691 - RNA, 19 nt, Human
cagcuugaccugaggcugu

SEQ ID NO: 2436692 - RNA, 17 nt, Human
cagcuugaccugaggcu

SEQ ID NO: 2436693 - RNA, 16 nt, Human
cagcuugaccugaggc

SEQ ID NO: 2436694 - RNA, 15 nt, Human
cagcuugaccugagg

SEQ ID NO: 2436695 - RNA, 15 nt, Human
cagcuugaggguugg

SEQ ID NO: 2436696 - RNA, 14 nt, Human
cagcuugaggguug

SEQ ID NO: 2436697 - RNA, 21 nt, Human
cagcuugaggguugggcuggu

SEQ ID NO: 2436698 - RNA, 20 nt, Human
cagcuugaggguugggcugg

SEQ ID NO: 2436699 - RNA, 19 nt, Human
cagcuugaggguugggcug

SEQ ID NO: 2436700 - RNA, 18 nt, Human
cagcuugaggguugggcu

SEQ ID NO: 2436701 - RNA, 17 nt, Human
cagcuugggcccagcug

SEQ ID NO: 2436702 - RNA, 16 nt, Human
cagcuugggcccagcu

SEQ ID NO: 2436703 - RNA, 14 nt, Human
cagcuugggcccag

SEQ ID NO: 2436704 - RNA, 13 nt, Human
cagcuugggccca

SEQ ID NO: 2436705 - RNA, 17 nt, Human
cagcuugcugcccuagg

SEQ ID NO: 2436706 - RNA, 19 nt, Human
cagcuugcugcccuaggcu

SEQ ID NO: 2436707 - RNA, 15 nt, Human
cagcuugcucuucag

SEQ ID NO: 2436708 - RNA, 23 nt, Human
cagcuugcucuucagugggagaa

SEQ ID NO: 2436709 - RNA, 14 nt, Human
cagcuugcugcccu

SEQ ID NO: 2436710 - RNA, 12 nt, Human
cagcuugccccg

SEQ ID NO: 2436711 - RNA, 16 nt, Human
cagcuugccccggccc

SEQ ID NO: 2436712 - RNA, 13 nt, Human
cagcuugccccgg

SEQ ID NO: 2436713 - RNA, 22 nt, Human
cagcuugcguuagaaugaggag

SEQ ID NO: 2436714 - RNA, 22 nt, Human
cagcuugagccgggccccuggg

SEQ ID NO: 2436715 - RNA, 21 nt, Human
cagcuugagccgggccccugg

SEQ ID NO: 2436716 - RNA, 14 nt, Human
cagcuugagccggg

SEQ ID NO: 2436717 - RNA, 15 nt, Human
cagcuucuucaucuu

SEQ ID NO: 2436718 - RNA, 23 nt, Human
cagcuugaucaaaggcacacagc

SEQ ID NO: 2436719 - RNA, 19 nt, Human
cagcuugaucaaaggcaca

SEQ ID NO: 2436720 - RNA, 20 nt, Human
cagcuuguaaauagcucagg

SEQ ID NO: 2436721 - RNA, 19 nt, Human
cagcuuguaaauagcucag

SEQ ID NO: 2436722 - RNA, 22 nt, Human
cagcuugggcccagcugggcuc

SEQ ID NO: 2436723 - RNA, 23 nt, Human
cagcuugggcccagcugggcucu

SEQ ID NO: 2436724 - RNA, 21 nt, Human
cagcuugggcccagcugggcu

SEQ ID NO: 2436725 - RNA, 20 nt, Human
cagcuugggcccagcugggc

SEQ ID NO: 2436726 - RNA, 19 nt, Human
cagcuugggcccagcuggg

SEQ ID NO: 2436727 - RNA, 18 nt, Human
cagcuugggcccagcugg

SEQ ID NO: 2436728 - RNA, 18 nt, Human
cagcuuguaaauagcuca

SEQ ID NO: 2436729 - RNA, 21 nt, Human
cagcuuguggagccccacacu

SEQ ID NO: 2436730 - RNA, 18 nt, Human
cagcuuguggagccccac

SEQ ID NO: 2436731 - RNA, 17 nt, Human
cagcuuguggagcccca

SEQ ID NO: 2436732 - RNA, 15 nt, Human
cagcuuguggagccc

SEQ ID NO: 2436733 - RNA, 15 nt, Human
cagcuugugcacaau

SEQ ID NO: 2436734 - RNA, 14 nt, Human
cagcuugugcacaa

SEQ ID NO: 2436735 - RNA, 13 nt, Human
cagcuuguauuuu

SEQ ID NO: 2436736 - RNA, 22 nt, Human
cagcuuguaaauagcucaggug

SEQ ID NO: 2436737 - RNA, 21 nt, Human
cagcuuguaaauagcucaggu

SEQ ID NO: 2436738 - RNA, 21 nt, Human
cagcuuuaaacucagggacag

SEQ ID NO: 2436739 - RNA, 20 nt, Human
cagcuuuaaacucagggaca

SEQ ID NO: 2436740 - RNA, 19 nt, Human
cagcuuuaaacucagggac

SEQ ID NO: 2436741 - RNA, 18 nt, Human
cagcuuuaaacucaggga

SEQ ID NO: 2436742 - RNA, 17 nt, Human
cagcuuuaaacucaggg

SEQ ID NO: 2436743 - RNA, 15 nt, Human
cagcuuuaaacaaau

SEQ ID NO: 2436744 - RNA, 13 nt, Human
cagcuuuaaacaa

SEQ ID NO: 2436745 - RNA, 15 nt, Human
cagcuuuacaugcaa

SEQ ID NO: 2436746 - RNA, 20 nt, Human
cagcuuuaaccauuaaaacu

SEQ ID NO: 2436747 - RNA, 15 nt, Human
cagcuuuaaccauua

SEQ ID NO: 2436748 - RNA, 22 nt, Human
cagcuuuaaacucagggacaga

SEQ ID NO: 2436749 - RNA, 21 nt, Human
cagcuuuacaugcaauuuauu

SEQ ID NO: 2436750 - RNA, 19 nt, Human
cagcuuuacaugcaauuua

SEQ ID NO: 2436751 - RNA, 22 nt, Human
cagcuuuaaaaaauuaaucugg

SEQ ID NO: 2436752 - RNA, 15 nt, Human
cagcuuguguuguca

SEQ ID NO: 2436753 - RNA, 17 nt, Human
cagcuuguuauuuauaa

SEQ ID NO: 2436754 - RNA, 17 nt, Human
cagcuuucccugccucu

SEQ ID NO: 2436755 - RNA, 19 nt, Human
cagcuuucccugccucuca

SEQ ID NO: 2436756 - RNA, 23 nt, Human
cagcuuuccucaaaacuucagac

SEQ ID NO: 2436757 - RNA, 23 nt, Human
cagcuuuccccaugucucgacuc

SEQ ID NO: 2436758 - RNA, 17 nt, Human
cagcuuucaugauuagc

SEQ ID NO: 2436759 - RNA, 20 nt, Human
cagcuuucaugauuagcaag

SEQ ID NO: 2436760 - RNA, 16 nt, Human
cagcuuucaugauuag

SEQ ID NO: 2436761 - RNA, 12 nt, Human
cagcuuuguuug

SEQ ID NO: 2436762 - RNA, 21 nt, Human
cagcuuuguuuguugucagcu

SEQ ID NO: 2436763 - RNA, 22 nt, Human
cagcuuuguuuguugucagcug

SEQ ID NO: 2436764 - RNA, 23 nt, Human
cagcuuuguuuguugucagcuga

SEQ ID NO: 2436765 - RNA, 16 nt, Human
cagcuuugaucccuga

SEQ ID NO: 2436766 - RNA, 17 nt, Human
cagcuuugaucccugac

SEQ ID NO: 2436767 - RNA, 20 nt, Human
cagcuuugaucccugacauc

SEQ ID NO: 2436768 - RNA, 14 nt, Human
cagcuuugauauuu

SEQ ID NO: 2436769 - RNA, 13 nt, Human
cagcuuugcugcu

SEQ ID NO: 2436770 - RNA, 12 nt, Human
cagcuuugcugc

SEQ ID NO: 2436771 - RNA, 22 nt, Human
cagcuuugcuaccaaagcaccu

SEQ ID NO: 2436772 - RNA, 18 nt, Human
cagcuuugccuuccacgc

SEQ ID NO: 2436773 - RNA, 11 nt, Human
cagcuuugcua

SEQ ID NO: 2436774 - RNA, 15 nt, Human
cagcuuugccuucca

SEQ ID NO: 2436775 - RNA, 16 nt, Human
cagcuuugccuuccac

SEQ ID NO: 2436776 - RNA, 22 nt, Human
cagcuuugcccaacaccagccc

SEQ ID NO: 2436777 - RNA, 23 nt, Human
cagcuuugcccaacaccagcccc

SEQ ID NO: 2436778 - RNA, 14 nt, Human
cagcuuugccuucc

SEQ ID NO: 2436779 - RNA, 17 nt, Human
cagcuuuuuaccaaguu

SEQ ID NO: 2436780 - RNA, 19 nt, Human
cagcuuuuuaaaguggguu

SEQ ID NO: 2436781 - RNA, 15 nt, Human
cagcuuuugcuucau

SEQ ID NO: 2436782 - RNA, 16 nt, Human
cagcuuuuccucccuu

SEQ ID NO: 2436783 - RNA, 13 nt, Human
cagcuuuuugucu

SEQ ID NO: 2436784 - RNA, 16 nt, Human
cagcuuuuugucuuuu

SEQ ID NO: 2436785 - RNA, 19 nt, Human
cagcuuuuuuuuccccccu

SEQ ID NO: 2436786 - RNA, 19 nt, Human
cagcuuuuugucuuuucug

SEQ ID NO: 2436787 - RNA, 18 nt, Human
cagcuuuucccaaaagcc

SEQ ID NO: 2436788 - RNA, 20 nt, Human
cagcuuuucccaaaagccca

SEQ ID NO: 2436789 - RNA, 18 nt, Human
cagcuuugugacuguaua

SEQ ID NO: 2436790 - RNA, 14 nt, Human
cagcuuugcugcug

SEQ ID NO: 2436791 - RNA, 19 nt, Human
cagcuuugugacuguauau

SEQ ID NO: 2436792 - RNA, 18 nt, Human
caggaaccacaagacugc

SEQ ID NO: 2436793 - RNA, 14 nt, Human
caggaacagcuaug

SEQ ID NO: 2436794 - RNA, 20 nt, Human
caggaacagcuaugggagcc

SEQ ID NO: 2436795 - RNA, 22 nt, Human
caggaacagcuaugggagcccc

SEQ ID NO: 2436796 - RNA, 23 nt, Human
caggaacagcuaugggagcccca

SEQ ID NO: 2436797 - RNA, 23 nt, Human
caggaaaacgggaccggccaggc

SEQ ID NO: 2436798 - RNA, 19 nt, Human
caggaaaacugacagagga

SEQ ID NO: 2436799 - RNA, 14 nt, Human
caggaacagaagga

SEQ ID NO: 2436800 - RNA, 20 nt, Human
caggaaaacugacagaggag

SEQ ID NO: 2436801 - RNA, 15 nt, Human
caggaacagaaggau

SEQ ID NO: 2436802 - RNA, 18 nt, Human
caggaacagaaggaugaa

SEQ ID NO: 2436803 - RNA, 21 nt, Human
caggaaaaaaaaaaaaaagac

SEQ ID NO: 2436804 - RNA, 18 nt, Human
cagccuccaugcugccuc

SEQ ID NO: 2436805 - RNA, 14 nt, Human
cagcucaccagccc

SEQ ID NO: 2436806 - RNA, 15 nt, Human
cagcaggcucucagg

SEQ ID NO: 2436807 - RNA, 14 nt, Human
cagcaggcucucag

SEQ ID NO: 2436808 - RNA, 12 nt, Human
cagcaggcucuc

SEQ ID NO: 2436809 - RNA, 14 nt, Human
cagcaggaggccag

SEQ ID NO: 2436810 - RNA, 15 nt, Human
cagcaggaggccagg

SEQ ID NO: 2436811 - RNA, 18 nt, Human
cagcaggaggccaggccg

SEQ ID NO: 2436812 - RNA, 13 nt, Human
cagcagcccuccu

SEQ ID NO: 2436813 - RNA, 16 nt, Human
cagcagcuucaccaga

SEQ ID NO: 2436814 - RNA, 12 nt, Human
cagcagcuucac

SEQ ID NO: 2436815 - RNA, 20 nt, Human
cagcagcugaacagccaaau

SEQ ID NO: 2436816 - RNA, 18 nt, Human
cagcagcuucaccagagc

SEQ ID NO: 2436817 - RNA, 17 nt, Human
cagcagcuucaccagag

SEQ ID NO: 2436818 - RNA, 17 nt, Human
cagcagcuuuuaauaca

SEQ ID NO: 2436819 - RNA, 14 nt, Human
cagcagcucaggca

SEQ ID NO: 2436820 - RNA, 15 nt, Human
cagcagcucaggcac

SEQ ID NO: 2436821 - RNA, 18 nt, Human
cagcagcugaacagccaa

SEQ ID NO: 2436822 - RNA, 16 nt, Human
cagcagcgguggccuc

SEQ ID NO: 2436823 - RNA, 16 nt, Human
cagcagcucaggcaca

SEQ ID NO: 2436824 - RNA, 19 nt, Human
cagcagccuggacccugug

SEQ ID NO: 2436825 - RNA, 22 nt, Human
cagcagccuggacccuguggau

SEQ ID NO: 2436826 - RNA, 20 nt, Human
cagcagccuggggcuggccu

SEQ ID NO: 2436827 - RNA, 21 nt, Human
cagcagccuggggcuggccuc

SEQ ID NO: 2436828 - RNA, 20 nt, Human
cagcagcgaccaccccugcc

SEQ ID NO: 2436829 - RNA, 17 nt, Human
cagcagccuuuaaugca

SEQ ID NO: 2436830 - RNA, 15 nt, Human
cagcagcgguggccu

SEQ ID NO: 2436831 - RNA, 17 nt, Human
cagcagcggaaccgccc

SEQ ID NO: 2436832 - RNA, 21 nt, Human
cagcagcgaccaccccugccu

SEQ ID NO: 2436833 - RNA, 17 nt, Human
cagcagcgccuuuccca

SEQ ID NO: 2436834 - RNA, 12 nt, Human
cagcagcucagg

SEQ ID NO: 2436835 - RNA, 13 nt, Human
cagcagcucaggc

SEQ ID NO: 2436836 - RNA, 12 nt, Human
cagcagccugga

SEQ ID NO: 2436837 - RNA, 14 nt, Human
cagcagccuggacc

SEQ ID NO: 2436838 - RNA, 15 nt, Human
cagcagccuggaccc

SEQ ID NO: 2436839 - RNA, 18 nt, Human
cagcagccuggacccugu

SEQ ID NO: 2436840 - RNA, 17 nt, Human
cagcauccuggcacccg

SEQ ID NO: 2436841 - RNA, 16 nt, Human
cagcauccuggcaccc

SEQ ID NO: 2436842 - RNA, 15 nt, Human
cagcauccuggcacc

SEQ ID NO: 2436843 - RNA, 14 nt, Human
cagcauccuggcac

SEQ ID NO: 2436844 - RNA, 22 nt, Human
cagcagggaaaaugcagcaggg

SEQ ID NO: 2436845 - RNA, 23 nt, Human
cagcagggaaaaugcagcaggga

SEQ ID NO: 2436846 - RNA, 15 nt, Human
cagcagggaugcccu

SEQ ID NO: 2436847 - RNA, 24 nt, Human
cagcagggaaaaugcagcagggau

SEQ ID NO: 2436848 - RNA, 20 nt, Human
cagcagggagggcuucugcc

SEQ ID NO: 2436849 - RNA, 16 nt, Human
cagcagggaugcccug

SEQ ID NO: 2436850 - RNA, 18 nt, Human
cagcagggaugcccugga

SEQ ID NO: 2436851 - RNA, 21 nt, Human
cagcagggaugcccuggaggu

SEQ ID NO: 2436852 - RNA, 22 nt, Human
cagcagggaugcccuggaggug

SEQ ID NO: 2436853 - RNA, 17 nt, Human
cagcagggccacucccg

SEQ ID NO: 2436854 - RNA, 16 nt, Human
cagcagggccacuccc

SEQ ID NO: 2436855 - RNA, 19 nt, Human
cagcagggcuacccugagc

SEQ ID NO: 2436856 - RNA, 21 nt, Human
cagcagggcuacccugagcug

SEQ ID NO: 2436857 - RNA, 11 nt, Human
cagcagggcua

SEQ ID NO: 2436858 - RNA, 14 nt, Human
cagcagggccucaa

SEQ ID NO: 2436859 - RNA, 15 nt, Human
cagcagggccucaaa

SEQ ID NO: 2436860 - RNA, 19 nt, Human
cagcaggcucucaggccag

SEQ ID NO: 2436861 - RNA, 18 nt, Human
cagcaggcucucaggcca

SEQ ID NO: 2436862 - RNA, 17 nt, Human
cagcaggcucucaggcc

SEQ ID NO: 2436863 - RNA, 16 nt, Human
cagcaggcucucaggc

SEQ ID NO: 2436864 - RNA, 22 nt, Human
cagcaggcucucaggccagcug

SEQ ID NO: 2436865 - RNA, 20 nt, Human
cagcaggcucucaggccagc

SEQ ID NO: 2436866 - RNA, 18 nt, Human
cagcagggagggcuucug

SEQ ID NO: 2436867 - RNA, 18 nt, Human
cagccaaagccuccucca

SEQ ID NO: 2436868 - RNA, 21 nt, Human
cagccaaagccuccuccagcc

SEQ ID NO: 2436869 - RNA, 20 nt, Human
cagccaacacgcaccugccu

SEQ ID NO: 2436870 - RNA, 22 nt, Human
cagccaacacgcaccugccuca

SEQ ID NO: 2436871 - RNA, 23 nt, Human
cagccaacacgcaccugccucag

SEQ ID NO: 2436872 - RNA, 17 nt, Human
cagccaaagauaaucuc

SEQ ID NO: 2436873 - RNA, 20 nt, Human
cagccaaagauaaucucuca

SEQ ID NO: 2436874 - RNA, 19 nt, Human
cagccaacacgcaccugcc

SEQ ID NO: 2436875 - RNA, 22 nt, Human
cagccaaauguaauugaauaaa

SEQ ID NO: 2436876 - RNA, 11 nt, Human
cagccaagcac

SEQ ID NO: 2436877 - RNA, 13 nt, Human
cagccaacucauu

SEQ ID NO: 2436878 - RNA, 18 nt, Human
cagccaacuauggccugu

SEQ ID NO: 2436879 - RNA, 22 nt, Human
cagccaacagguggcaggacca

SEQ ID NO: 2436880 - RNA, 19 nt, Human
cagccaacagguggcagga

SEQ ID NO: 2436881 - RNA, 18 nt, Human
cagccaacagguggcagg

SEQ ID NO: 2436882 - RNA, 23 nt, Human
cagccaacagguggcaggaccag

SEQ ID NO: 2436883 - RNA, 12 nt, Human
cagccaaccccu

SEQ ID NO: 2436884 - RNA, 14 nt, Human
cagccaaccccugu

SEQ ID NO: 2436885 - RNA, 15 nt, Human
cagccaaccccugug

SEQ ID NO: 2436886 - RNA, 21 nt, Human
cagccaaccccuguggagccc

SEQ ID NO: 2436887 - RNA, 16 nt, Human
cagccaaccccugugg

SEQ ID NO: 2436888 - RNA, 18 nt, Human
cagccaaccccuguggag

SEQ ID NO: 2436889 - RNA, 21 nt, Human
cagccaacgaguaauuuauug

SEQ ID NO: 2436890 - RNA, 20 nt, Human
cagcauuuccacaccaagca

SEQ ID NO: 2436891 - RNA, 21 nt, Human
cagcauuuccacaccaagcag

SEQ ID NO: 2436892 - RNA, 14 nt, Human
cagcauugcuuucu

SEQ ID NO: 2436893 - RNA, 16 nt, Human
cagcauugcuuucuga

SEQ ID NO: 2436894 - RNA, 17 nt, Human
cagcauugcugguucua

SEQ ID NO: 2436895 - RNA, 16 nt, Human
cagcauugcugguucu

SEQ ID NO: 2436896 - RNA, 12 nt, Human
cagcauugcuuu

SEQ ID NO: 2436897 - RNA, 13 nt, Human
cagcauugcuuuc

SEQ ID NO: 2436898 - RNA, 15 nt, Human
cagcauugcugguuc

SEQ ID NO: 2436899 - RNA, 14 nt, Human
cagcauugcugguu

SEQ ID NO: 2436900 - RNA, 16 nt, Human
cagcauuucugaagug

SEQ ID NO: 2436901 - RNA, 15 nt, Human
cagcauuucugaagu

SEQ ID NO: 2436902 - RNA, 23 nt, Human
cagcauuuccacaccaagcagca

SEQ ID NO: 2436903 - RNA, 18 nt, Human
cagcauuuuacugauuca

SEQ ID NO: 2436904 - RNA, 15 nt, Human
cagccaaagccuccu

SEQ ID NO: 2436905 - RNA, 16 nt, Human
cagccaaagccuccuc

SEQ ID NO: 2436906 - RNA, 19 nt, Human
cagccaaacccaugaggca

SEQ ID NO: 2436907 - RNA, 15 nt, Human
cagccaaacccuguc

SEQ ID NO: 2436908 - RNA, 16 nt, Human
cagccaaacccugucu

SEQ ID NO: 2436909 - RNA, 17 nt, Human
cagccaaacccugucug

SEQ ID NO: 2436910 - RNA, 16 nt, Human
cagccaaacccaugag

SEQ ID NO: 2436911 - RNA, 17 nt, Human
cagccaaacccaugagg

SEQ ID NO: 2436912 - RNA, 18 nt, Human
cagcaugucuauucagcu

SEQ ID NO: 2436913 - RNA, 18 nt, Human
cagcauuacaaauugcuu

SEQ ID NO: 2436914 - RNA, 18 nt, Human
cagcauguugcugaggag

SEQ ID NO: 2436915 - RNA, 17 nt, Human
cagcauguugcugagga

SEQ ID NO: 2436916 - RNA, 22 nt, Human
cagcauguguauuuccagugca

SEQ ID NO: 2436917 - RNA, 21 nt, Human
cagcaugaccugugaccagca

SEQ ID NO: 2436918 - RNA, 20 nt, Human
cagcaugggcccaggaaugc

SEQ ID NO: 2436919 - RNA, 17 nt, Human
cagcaugaggaacuagc

SEQ ID NO: 2436920 - RNA, 23 nt, Human
cagcaugaccugugaccagcacu

SEQ ID NO: 2436921 - RNA, 21 nt, Human
cagcauuccagccccucuggu

SEQ ID NO: 2436922 - RNA, 20 nt, Human
cagcauuccagccccucugg

SEQ ID NO: 2436923 - RNA, 16 nt, Human
cagcauuccagccccu

SEQ ID NO: 2436924 - RNA, 14 nt, Human
cagcauuccagccc

SEQ ID NO: 2436925 - RNA, 14 nt, Human
cagcauucucacuc

SEQ ID NO: 2436926 - RNA, 15 nt, Human
cagcauucucacucc

SEQ ID NO: 2436927 - RNA, 20 nt, Human
cagcauccuggcacccggcc

SEQ ID NO: 2436928 - RNA, 19 nt, Human
cagcauccuggcacccggc

SEQ ID NO: 2436929 - RNA, 21 nt, Human
cagcauccuggcacccggccc

SEQ ID NO: 2436930 - RNA, 18 nt, Human
cagcagggcugcugugaa

SEQ ID NO: 2436931 - RNA, 23 nt, Human
cagcauccuuuucugcagagggg

SEQ ID NO: 2436932 - RNA, 20 nt, Human
cagcaggguagucugguuuc

SEQ ID NO: 2436933 - RNA, 17 nt, Human
cagcagggcugcuguga

SEQ ID NO: 2436934 - RNA, 17 nt, Human
cagcagggccucaaagu

SEQ ID NO: 2436935 - RNA, 23 nt, Human
cagcaucucccucacugaaacca

SEQ ID NO: 2436936 - RNA, 21 nt, Human
cagccaccgaagccgccugug

SEQ ID NO: 2436937 - RNA, 18 nt, Human
cagccacgaggugcaaca

SEQ ID NO: 2436938 - RNA, 15 nt, Human
cagccaccucucuuu

SEQ ID NO: 2436939 - RNA, 16 nt, Human
cagccaccucucuuuu

SEQ ID NO: 2436940 - RNA, 22 nt, Human
cagccaccccgggcucucugcu

SEQ ID NO: 2436941 - RNA, 12 nt, Human
cagccaccagcg

SEQ ID NO: 2436942 - RNA, 23 nt, Human
cagccacaguuuccucaucuguc

SEQ ID NO: 2436943 - RNA, 17 nt, Human
cagccaccccgggcucu

SEQ ID NO: 2436944 - RNA, 20 nt, Human
cagccaccccgggcucucug

SEQ ID NO: 2436945 - RNA, 21 nt, Human
cagccaccccgggcucucugc

SEQ ID NO: 2436946 - RNA, 17 nt, Human
cagccacauuccugaug

SEQ ID NO: 2436947 - RNA, 15 nt, Human
cagccacauuccuga

SEQ ID NO: 2436948 - RNA, 19 nt, Human
cagccacauuccugaugcu

SEQ ID NO: 2436949 - RNA, 11 nt, Human
cagccaccccg

SEQ ID NO: 2436950 - RNA, 11 nt, Human
cagccacacac

SEQ ID NO: 2436951 - RNA, 12 nt, Human
cagccacacaca

SEQ ID NO: 2436952 - RNA, 13 nt, Human
cagccacacacac

SEQ ID NO: 2436953 - RNA, 14 nt, Human
cagccacacacaca

SEQ ID NO: 2436954 - RNA, 9 nt, Human
cagccacac

SEQ ID NO: 2436955 - RNA, 18 nt, Human
cagccaauuauguuaaac

SEQ ID NO: 2436956 - RNA, 17 nt, Human
cagccaauuauguuaaa

SEQ ID NO: 2436957 - RNA, 17 nt, Human
cagccaagcacaguggu

SEQ ID NO: 2436958 - RNA, 16 nt, Human
cagccaagcacagugg

SEQ ID NO: 2436959 - RNA, 14 nt, Human
cagccaagcacagu

SEQ ID NO: 2436960 - RNA, 13 nt, Human
cagccaagcacag

SEQ ID NO: 2436961 - RNA, 23 nt, Human
cagccaagcacagugguggcagg

SEQ ID NO: 2436962 - RNA, 19 nt, Human
cagccaagcacaguggugg

SEQ ID NO: 2436963 - RNA, 20 nt, Human
cagccaagggaugaaagaga

SEQ ID NO: 2436964 - RNA, 23 nt, Human
cagccaaggccgaagcucuggcu

SEQ ID NO: 2436965 - RNA, 22 nt, Human
cagccaaggccgaagcucuggc

SEQ ID NO: 2436966 - RNA, 21 nt, Human
cagccaaggccgaagcucugg

SEQ ID NO: 2436967 - RNA, 23 nt, Human
cagccaagguuuuauaaggcuga

SEQ ID NO: 2436968 - RNA, 15 nt, Human
cagccacacacacag

SEQ ID NO: 2436969 - RNA, 16 nt, Human
cagccacacacacaga

SEQ ID NO: 2436970 - RNA, 17 nt, Human
cagccacacacacagaa

SEQ ID NO: 2436971 - RNA, 18 nt, Human
cagccacacacacagaaa

SEQ ID NO: 2436972 - RNA, 19 nt, Human
cagccacacacacagaaaa

SEQ ID NO: 2436973 - RNA, 20 nt, Human
cagccacacacacagaaaau

SEQ ID NO: 2436974 - RNA, 21 nt, Human
cagccacacacacagaaaaua

SEQ ID NO: 2436975 - RNA, 22 nt, Human
cagccacacacacagaaaauau

SEQ ID NO: 2436976 - RNA, 14 nt, Human
cagccacauuccug

SEQ ID NO: 2436977 - RNA, 23 nt, Human
cagccacacacacagaaaauaua

SEQ ID NO: 2436978 - RNA, 12 nt, Human
cagccacacugu

SEQ ID NO: 2436979 - RNA, 22 nt, Human
cagccacggccaggccagaggg

SEQ ID NO: 2436980 - RNA, 21 nt, Human
cagccacggccaggccagagg

SEQ ID NO: 2436981 - RNA, 19 nt, Human
cagccacggccaggccaga

SEQ ID NO: 2436982 - RNA, 18 nt, Human
cagccacggccaggccag

SEQ ID NO: 2436983 - RNA, 17 nt, Human
cagccacggccaggcca

SEQ ID NO: 2436984 - RNA, 16 nt, Human
cagccacggccaggcc

SEQ ID NO: 2436985 - RNA, 15 nt, Human
cagccacggccaggc

SEQ ID NO: 2436986 - RNA, 14 nt, Human
cagccacggccagg

SEQ ID NO: 2436987 - RNA, 22 nt, Human
cagccagaacguggcucugcug

SEQ ID NO: 2436988 - RNA, 21 nt, Human
cagccagaacguggcucugcu

SEQ ID NO: 2436989 - RNA, 20 nt, Human
cagccagaacguggcucugc

SEQ ID NO: 2436990 - RNA, 23 nt, Human
cagccagaacguggcucugcugg

SEQ ID NO: 2436991 - RNA, 23 nt, Human
cagccacucgggaggcugagaca

SEQ ID NO: 2436992 - RNA, 17 nt, Human
cagccagaacguggcuc

SEQ ID NO: 2436993 - RNA, 21 nt, Human
cagccacucgggaggcugaga

SEQ ID NO: 2436994 - RNA, 14 nt, Human
cagccacucgggag

SEQ ID NO: 2436995 - RNA, 23 nt, Human
cagccacggccaggccagaggga

SEQ ID NO: 2436996 - RNA, 22 nt, Human
cagccaguaaaugggggugcau

SEQ ID NO: 2436997 - RNA, 13 nt, Human
cagccaguaaaug

SEQ ID NO: 2436998 - RNA, 22 nt, Human
cagccagucccguuucauuuag

SEQ ID NO: 2436999 - RNA, 16 nt, Human
cagccagugaccugag

SEQ ID NO: 2437000 - RNA, 19 nt, Human
cagccagugaccugaggaa

SEQ ID NO: 2437001 - RNA, 13 nt, Human
cagccaucaaaau

SEQ ID NO: 2437002 - RNA, 21 nt, Human
cagccauacuuaucucucugu

SEQ ID NO: 2437003 - RNA, 20 nt, Human
cagccauacuuaucucucug

SEQ ID NO: 2437004 - RNA, 23 nt, Human
cagccauacuuaucucucugugc

SEQ ID NO: 2437005 - RNA, 20 nt, Human
cagccagugaccugaggaag

SEQ ID NO: 2437006 - RNA, 21 nt, Human
cagccagugaccugaggaagc

SEQ ID NO: 2437007 - RNA, 22 nt, Human
cagccagugaccugaggaagcg

SEQ ID NO: 2437008 - RNA, 13 nt, Human
cagcccagcccag

SEQ ID NO: 2437009 - RNA, 15 nt, Human
cagcccagcccagcu

SEQ ID NO: 2437010 - RNA, 17 nt, Human
cagcccagcccagcugg

SEQ ID NO: 2437011 - RNA, 21 nt, Human
cagcccagggcuccugcacuu

SEQ ID NO: 2437012 - RNA, 19 nt, Human
cagcccagggcuccugcac

SEQ ID NO: 2437013 - RNA, 18 nt, Human
cagcccagggcuccugca

SEQ ID NO: 2437014 - RNA, 17 nt, Human
cagcccagggcuccugc

SEQ ID NO: 2437015 - RNA, 23 nt, Human
cagcccaggccgggguggagcau

SEQ ID NO: 2437016 - RNA, 16 nt, Human
cagcccagggcuccug

SEQ ID NO: 2437017 - RNA, 12 nt, Human
cagcccagggac

SEQ ID NO: 2437018 - RNA, 13 nt, Human
cagcccagagaca

SEQ ID NO: 2437019 - RNA, 21 nt, Human
cagcccagagacauacuugaa

SEQ ID NO: 2437020 - RNA, 22 nt, Human
cagcccagagacauacuugaag

SEQ ID NO: 2437021 - RNA, 18 nt, Human
cagcccacuucugccaua

SEQ ID NO: 2437022 - RNA, 11 nt, Human
cagcccagaga

SEQ ID NO: 2437023 - RNA, 12 nt, Human
cagcccagagac

SEQ ID NO: 2437024 - RNA, 20 nt, Human
cagcccacguccugucagug

SEQ ID NO: 2437025 - RNA, 21 nt, Human
cagccccaaaacucuccucug

SEQ ID NO: 2437026 - RNA, 20 nt, Human
cagccccaaaacucuccucu

SEQ ID NO: 2437027 - RNA, 22 nt, Human
cagccccaaaacucuccucugc

SEQ ID NO: 2437028 - RNA, 11 nt, Human
cagcccagggu

SEQ ID NO: 2437029 - RNA, 17 nt, Human
cagcccaggguuccccc

SEQ ID NO: 2437030 - RNA, 18 nt, Human
cagcccaggguuccccca

SEQ ID NO: 2437031 - RNA, 19 nt, Human
cagcccaggguucccccag

SEQ ID NO: 2437032 - RNA, 15 nt, Human
cagcccaugcccacc

SEQ ID NO: 2437033 - RNA, 16 nt, Human
cagcccaugcccaccu

SEQ ID NO: 2437034 - RNA, 17 nt, Human
cagcccaugcccaccug

SEQ ID NO: 2437035 - RNA, 24 nt, Human
cagcccaugcccaccugcccauca

SEQ ID NO: 2437036 - RNA, 19 nt, Human
cagcccaugcccaccugcc

SEQ ID NO: 2437037 - RNA, 21 nt, Human
cagcccaugcccaccugccca

SEQ ID NO: 2437038 - RNA, 18 nt, Human
cagcccauucucucuccu

SEQ ID NO: 2437039 - RNA, 20 nt, Human
cagcccauucucucuccugu

SEQ ID NO: 2437040 - RNA, 21 nt, Human
cagcccauucucucuccuguc

SEQ ID NO: 2437041 - RNA, 22 nt, Human
cagcccauucucucuccugucc

SEQ ID NO: 2437042 - RNA, 23 nt, Human
cagcccauucucucuccugucca

SEQ ID NO: 2437043 - RNA, 18 nt, Human
cagcccacccuccugucu

SEQ ID NO: 2437044 - RNA, 17 nt, Human
cagcccacccuccuguc

SEQ ID NO: 2437045 - RNA, 16 nt, Human
cagcccacccuccugu

SEQ ID NO: 2437046 - RNA, 15 nt, Human
cagcccacccuccug

SEQ ID NO: 2437047 - RNA, 13 nt, Human
cagcccacccucc

SEQ ID NO: 2437048 - RNA, 12 nt, Human
cagcccacccuc

SEQ ID NO: 2437049 - RNA, 24 nt, Human
cagcccacccuccugucuucccag

SEQ ID NO: 2437050 - RNA, 22 nt, Human
cagcccacccuccugucuuccc

SEQ ID NO: 2437051 - RNA, 21 nt, Human
cagcccacccuccugucuucc

SEQ ID NO: 2437052 - RNA, 16 nt, Human
cagcccaccuggcuuu

SEQ ID NO: 2437053 - RNA, 19 nt, Human
cagcccacguccugucagu

SEQ ID NO: 2437054 - RNA, 18 nt, Human
cagcccacguccugucag

SEQ ID NO: 2437055 - RNA, 16 nt, Human
cagcccacguccuguc

SEQ ID NO: 2437056 - RNA, 15 nt, Human
cagcccacguccugu

SEQ ID NO: 2437057 - RNA, 15 nt, Human
cagcccacuucugcc

SEQ ID NO: 2437058 - RNA, 10 nt, Human
cagcccaagu

SEQ ID NO: 2437059 - RNA, 22 nt, Human
cagccauuggcuauuuaaaacu

SEQ ID NO: 2437060 - RNA, 21 nt, Human
cagccaugugcugcgugccug

SEQ ID NO: 2437061 - RNA, 11 nt, Human
cagcccacccc

SEQ ID NO: 2437062 - RNA, 12 nt, Human
cagcccaccccc

SEQ ID NO: 2437063 - RNA, 19 nt, Human
cagcccacauagugauggu

SEQ ID NO: 2437064 - RNA, 14 nt, Human
cagcccaccccccu

SEQ ID NO: 2437065 - RNA, 16 nt, Human
cagcccaccccccuca

SEQ ID NO: 2437066 - RNA, 17 nt, Human
cagcccaccccccucau

SEQ ID NO: 2437067 - RNA, 19 nt, Human
cagcccaccccccucauuu

SEQ ID NO: 2437068 - RNA, 15 nt, Human
cagcccaccccucaa

SEQ ID NO: 2437069 - RNA, 18 nt, Human
cagccaucauaggaaggg

SEQ ID NO: 2437070 - RNA, 17 nt, Human
cagccaucccagccuug

SEQ ID NO: 2437071 - RNA, 19 nt, Human
cagccaucauaggaaggga

SEQ ID NO: 2437072 - RNA, 13 nt, Human
cagccaucugccc

SEQ ID NO: 2437073 - RNA, 16 nt, Human
cagccaucaaaaugcu

SEQ ID NO: 2437074 - RNA, 17 nt, Human
cagccaucaaaaugcuu

SEQ ID NO: 2437075 - RNA, 21 nt, Human
cagccaucugcccaggggugc

SEQ ID NO: 2437076 - RNA, 19 nt, Human
cagccaucugcccaggggu

SEQ ID NO: 2437077 - RNA, 17 nt, Human
cagccaugucugcauuu

SEQ ID NO: 2437078 - RNA, 18 nt, Human
cagccaugaggaguugcu

SEQ ID NO: 2437079 - RNA, 17 nt, Human
cagccaugugcugcgug

SEQ ID NO: 2437080 - RNA, 13 nt, Human
cagccaugugcug

SEQ ID NO: 2437081 - RNA, 16 nt, Human
cagccauuaccaugga

SEQ ID NO: 2437082 - RNA, 18 nt, Human
cagccaucugcccagggg

SEQ ID NO: 2437083 - RNA, 17 nt, Human
cagccaucugcccaggg

SEQ ID NO: 2437084 - RNA, 16 nt, Human
cagccaucugcccagg

SEQ ID NO: 2437085 - RNA, 15 nt, Human
cagccaucugcccag

SEQ ID NO: 2437086 - RNA, 22 nt, Human
cagccaugaggaguugcuguuu

SEQ ID NO: 2437087 - RNA, 16 nt, Human
cagcccaaaccaccag

SEQ ID NO: 2437088 - RNA, 19 nt, Human
cagcccaaaccaccagaag

SEQ ID NO: 2437089 - RNA, 20 nt, Human
cagccauuggcuauuuaaaa

SEQ ID NO: 2437090 - RNA, 19 nt, Human
cagccauuggcuauuuaaa

SEQ ID NO: 2437091 - RNA, 19 nt, Human
cagccauucacugccccca

SEQ ID NO: 2437092 - RNA, 20 nt, Human
cagccauuaccauggagaca

SEQ ID NO: 2437093 - RNA, 20 nt, Human
cagcccaaaccaccagaagc

SEQ ID NO: 2437094 - RNA, 21 nt, Human
cagcccaaaccaccagaagcc

SEQ ID NO: 2437095 - RNA, 23 nt, Human
cagcccaaaccaccagaagccca

SEQ ID NO: 2437096 - RNA, 17 nt, Human
cagcccaaagaaggaaa

SEQ ID NO: 2437097 - RNA, 14 nt, Human
cagaugcugauguu

SEQ ID NO: 2437098 - RNA, 13 nt, Human
cagaugcugaugu

SEQ ID NO: 2437099 - RNA, 18 nt, Human
cagaugcuggucaugugu

SEQ ID NO: 2437100 - RNA, 22 nt, Human
cagaugcugauguucaguguaa

SEQ ID NO: 2437101 - RNA, 21 nt, Human
cagaugcugauguucagugua

SEQ ID NO: 2437102 - RNA, 20 nt, Human
cagaugcugauguucagugu

SEQ ID NO: 2437103 - RNA, 18 nt, Human
cagaugcugauguucagu

SEQ ID NO: 2437104 - RNA, 17 nt, Human
cagaugcugauguucag

SEQ ID NO: 2437105 - RNA, 16 nt, Human
cagaugcugauguuca

SEQ ID NO: 2437106 - RNA, 15 nt, Human
cagaugcugauguuc

SEQ ID NO: 2437107 - RNA, 15 nt, Human
cagaugcugugcaaa

SEQ ID NO: 2437108 - RNA, 12 nt, Human
cagaugcuucug

SEQ ID NO: 2437109 - RNA, 13 nt, Human
cagaugcuucugg

SEQ ID NO: 2437110 - RNA, 17 nt, Human
cagaugcuucugggaga

SEQ ID NO: 2437111 - RNA, 22 nt, Human
cagaugccuccaccccccagaa

SEQ ID NO: 2437112 - RNA, 14 nt, Human
cagaugccuccacc

SEQ ID NO: 2437113 - RNA, 18 nt, Human
cagaugccccagagcugu

SEQ ID NO: 2437114 - RNA, 15 nt, Human
cagaugccccagagc

SEQ ID NO: 2437115 - RNA, 17 nt, Human
cagaugcagggcaguca

SEQ ID NO: 2437116 - RNA, 15 nt, Human
cagaugcccagaggg

SEQ ID NO: 2437117 - RNA, 19 nt, Human
cagaugcccagagggccca

SEQ ID NO: 2437118 - RNA, 20 nt, Human
cagaugcccagagggcccag

SEQ ID NO: 2437119 - RNA, 22 nt, Human
cagaugcccagagggcccaggc

SEQ ID NO: 2437120 - RNA, 13 nt, Human
cagaugccccaga

SEQ ID NO: 2437121 - RNA, 16 nt, Human
cagaugccccagagcu

SEQ ID NO: 2437122 - RNA, 14 nt, Human
cagauggggccucu

SEQ ID NO: 2437123 - RNA, 22 nt, Human
cagauggcauguguuuacuuua

SEQ ID NO: 2437124 - RNA, 18 nt, Human
cagaugggugcuuggagg

SEQ ID NO: 2437125 - RNA, 16 nt, Human
cagauggcauguguuu

SEQ ID NO: 2437126 - RNA, 12 nt, Human
cagauggcacuu

SEQ ID NO: 2437127 - RNA, 22 nt, Human
cagauggauuugccugugccac

SEQ ID NO: 2437128 - RNA, 19 nt, Human
cagauggacuccagccugc

SEQ ID NO: 2437129 - RNA, 18 nt, Human
cagauggacuccagccug

SEQ ID NO: 2437130 - RNA, 21 nt, Human
cagauggaaccgcaggaagcu

SEQ ID NO: 2437131 - RNA, 22 nt, Human
cagauggaaccgcaggaagcug

SEQ ID NO: 2437132 - RNA, 23 nt, Human
cagauggauugauaauugcauuc

SEQ ID NO: 2437133 - RNA, 22 nt, Human
cagauggauugauaauugcauu

SEQ ID NO: 2437134 - RNA, 15 nt, Human
cagauggauuugccu

SEQ ID NO: 2437135 - RNA, 21 nt, Human
cagauggauuugccugugcca

SEQ ID NO: 2437136 - RNA, 21 nt, Human
cagauggaaugcuguguuaaa

SEQ ID NO: 2437137 - RNA, 19 nt, Human
cagauggaaugcuguguua

SEQ ID NO: 2437138 - RNA, 17 nt, Human
cagauggaaugcugugu

SEQ ID NO: 2437139 - RNA, 16 nt, Human
cagauggaaugcugug

SEQ ID NO: 2437140 - RNA, 21 nt, Human
cagaugcuuuccugcacauua

SEQ ID NO: 2437141 - RNA, 14 nt, Human
cagaugcuuuccug

SEQ ID NO: 2437142 - RNA, 14 nt, Human
cagauggaaccgca

SEQ ID NO: 2437143 - RNA, 18 nt, Human
cagauggaaccgcaggaa

SEQ ID NO: 2437144 - RNA, 19 nt, Human
cagauggaaccgcaggaag

SEQ ID NO: 2437145 - RNA, 20 nt, Human
cagauggaaccgcaggaagc

SEQ ID NO: 2437146 - RNA, 14 nt, Human
cagaugcuuuucug

SEQ ID NO: 2437147 - RNA, 22 nt, Human
cagaugguuuuauaaucugauu

SEQ ID NO: 2437148 - RNA, 19 nt, Human
cagaugggggaaagcacag

SEQ ID NO: 2437149 - RNA, 14 nt, Human
cagaugggggaaag

SEQ ID NO: 2437150 - RNA, 21 nt, Human
cagauggggcucccgcccgug

SEQ ID NO: 2437151 - RNA, 15 nt, Human
cagauggggccucug

SEQ ID NO: 2437152 - RNA, 23 nt, Human
cagaugggugcuuggaggaagga

SEQ ID NO: 2437153 - RNA, 16 nt, Human
cagaugucuucugccu

SEQ ID NO: 2437154 - RNA, 15 nt, Human
cagaugucuucugcc

SEQ ID NO: 2437155 - RNA, 13 nt, Human
cagaugucuucug

SEQ ID NO: 2437156 - RNA, 20 nt, Human
cagaugugguaacuguuaaa

SEQ ID NO: 2437157 - RNA, 18 nt, Human
cagaugucuucugccugu

SEQ ID NO: 2437158 - RNA, 17 nt, Human
cagaugucuucugccug

SEQ ID NO: 2437159 - RNA, 22 nt, Human
cagaugucuucugccuguuaua

SEQ ID NO: 2437160 - RNA, 15 nt, Human
cagauguuuccagac

SEQ ID NO: 2437161 - RNA, 16 nt, Human
cagauguuuccagacu

SEQ ID NO: 2437162 - RNA, 14 nt, Human
cagauguuuccaga

SEQ ID NO: 2437163 - RNA, 19 nt, Human
cagauguucucucccaggg

SEQ ID NO: 2437164 - RNA, 23 nt, Human
cagauguugaaugcccacaggca

SEQ ID NO: 2437165 - RNA, 14 nt, Human
cagauucccagagc

SEQ ID NO: 2437166 - RNA, 17 nt, Human
cagauucccagagcaaa

SEQ ID NO: 2437167 - RNA, 15 nt, Human
cagauucauuuuucu

SEQ ID NO: 2437168 - RNA, 21 nt, Human
cagauuccaggcgaugugcaa

SEQ ID NO: 2437169 - RNA, 23 nt, Human
cagauuccaggcgaugugcaagu

SEQ ID NO: 2437170 - RNA, 18 nt, Human
cagauucccagagcaaaa

SEQ ID NO: 2437171 - RNA, 19 nt, Human
cagauucccagagcaaaau

SEQ ID NO: 2437172 - RNA, 21 nt, Human
cagauucccagagcaaaauaa

SEQ ID NO: 2437173 - RNA, 19 nt, Human
cagauucacacugucuggu

SEQ ID NO: 2437174 - RNA, 14 nt, Human
cagauucacacugu

SEQ ID NO: 2437175 - RNA, 18 nt, Human
cagauguuuccagacuuc

SEQ ID NO: 2437176 - RNA, 23 nt, Human
cagauguuuccagacuuccuuga

SEQ ID NO: 2437177 - RNA, 22 nt, Human
cagauguuucuuuuguauguaa

SEQ ID NO: 2437178 - RNA, 19 nt, Human
cagauguuucuuuuguaug

SEQ ID NO: 2437179 - RNA, 14 nt, Human
cagauguuucuuuu

SEQ ID NO: 2437180 - RNA, 22 nt, Human
cagauguuuuacgucugggaga

SEQ ID NO: 2437181 - RNA, 18 nt, Human
cagauguuuuacgucugg

SEQ ID NO: 2437182 - RNA, 17 nt, Human
cagauguuuuacgucug

SEQ ID NO: 2437183 - RNA, 14 nt, Human
cagauuacugccca

SEQ ID NO: 2437184 - RNA, 21 nt, Human
cagcaaagccccaugcuggag

SEQ ID NO: 2437185 - RNA, 14 nt, Human
cagcaaagccccau

SEQ ID NO: 2437186 - RNA, 13 nt, Human
cagcaaagcccca

SEQ ID NO: 2437187 - RNA, 12 nt, Human
cagcaaagcccc

SEQ ID NO: 2437188 - RNA, 19 nt, Human
cagcaaagagugggcugca

SEQ ID NO: 2437189 - RNA, 20 nt, Human
cagcaaacucuuuucccacu

SEQ ID NO: 2437190 - RNA, 22 nt, Human
cagcaaaaugugaaugggaaaa

SEQ ID NO: 2437191 - RNA, 14 nt, Human
cagcaaaccggggc

SEQ ID NO: 2437192 - RNA, 16 nt, Human
cagcaaaccggggccu

SEQ ID NO: 2437193 - RNA, 15 nt, Human
cagcaaaaagcaaaa

SEQ ID NO: 2437194 - RNA, 18 nt, Human
cagcaaaagaugcuucuc

SEQ ID NO: 2437195 - RNA, 15 nt, Human
cagcaaaacuccauc

SEQ ID NO: 2437196 - RNA, 23 nt, Human
cagcaaagccccaugcuggagcc

SEQ ID NO: 2437197 - RNA, 22 nt, Human
cagcaaagccccaugcuggagc

SEQ ID NO: 2437198 - RNA, 17 nt, Human
cagcaaauuaauuggca

SEQ ID NO: 2437199 - RNA, 16 nt, Human
cagcaacacaagcugg

SEQ ID NO: 2437200 - RNA, 23 nt, Human
cagcaaauuaauuggcagcagau

SEQ ID NO: 2437201 - RNA, 22 nt, Human
cagcaaauuaauuggcagcaga

SEQ ID NO: 2437202 - RNA, 19 nt, Human
cagcaaauuaauuggcagc

SEQ ID NO: 2437203 - RNA, 20 nt, Human
cagcaacggggaggccaagu

SEQ ID NO: 2437204 - RNA, 13 nt, Human
cagcaacugaaua

SEQ ID NO: 2437205 - RNA, 12 nt, Human
cagcaacugaau

SEQ ID NO: 2437206 - RNA, 14 nt, Human
cagcaacuccaacu

SEQ ID NO: 2437207 - RNA, 21 nt, Human
cagcaacugaauaaauaccuc

SEQ ID NO: 2437208 - RNA, 15 nt, Human
cagcaacugaauaaa

SEQ ID NO: 2437209 - RNA, 14 nt, Human
cagcaacugaauaa

SEQ ID NO: 2437210 - RNA, 20 nt, Human
cagcaacugaauaaauaccu

SEQ ID NO: 2437211 - RNA, 15 nt, Human
cagcaacuugucuuu

SEQ ID NO: 2437212 - RNA, 18 nt, Human
cagcaacuugucuuuuuc

SEQ ID NO: 2437213 - RNA, 19 nt, Human
cagcaacuugucuuuuucu

SEQ ID NO: 2437214 - RNA, 22 nt, Human
cagcaacuugucuuuuucugga

SEQ ID NO: 2437215 - RNA, 23 nt, Human
cagcaacgcaggcccccaggugc

SEQ ID NO: 2437216 - RNA, 13 nt, Human
cagcaaccccagg

SEQ ID NO: 2437217 - RNA, 16 nt, Human
cagcaaccccaggcug

SEQ ID NO: 2437218 - RNA, 17 nt, Human
cagcaaccccaggcuga

SEQ ID NO: 2437219 - RNA, 14 nt, Human
cagcaacccuccua

SEQ ID NO: 2437220 - RNA, 12 nt, Human
cagcaaccccag

SEQ ID NO: 2437221 - RNA, 21 nt, Human
cagcaacacaagcuggaagca

SEQ ID NO: 2437222 - RNA, 17 nt, Human
cagcaacacaagcugga

SEQ ID NO: 2437223 - RNA, 13 nt, Human
cagauuuucagca

SEQ ID NO: 2437224 - RNA, 15 nt, Human
cagauuuucagcaaa

SEQ ID NO: 2437225 - RNA, 23 nt, Human
cagauuugugaacucagccaagc

SEQ ID NO: 2437226 - RNA, 17 nt, Human
cagauuugugaacucag

SEQ ID NO: 2437227 - RNA, 16 nt, Human
cagauuugugaacuca

SEQ ID NO: 2437228 - RNA, 15 nt, Human
cagauuugugaacuc

SEQ ID NO: 2437229 - RNA, 14 nt, Human
cagauuugugaacu

SEQ ID NO: 2437230 - RNA, 12 nt, Human
cagauuugugaa

SEQ ID NO: 2437231 - RNA, 14 nt, Human
cagauucuuuccug

SEQ ID NO: 2437232 - RNA, 18 nt, Human
cagauuuuaggaaaugaa

SEQ ID NO: 2437233 - RNA, 22 nt, Human
cagauuuuaaaaagucuucacu

SEQ ID NO: 2437234 - RNA, 14 nt, Human
cagauuuguguuau

SEQ ID NO: 2437235 - RNA, 24 nt, Human
cagauuugugaacucagccaagca

SEQ ID NO: 2437236 - RNA, 23 nt, Human
cagauuuuaauuuugaauaaaua

SEQ ID NO: 2437237 - RNA, 15 nt, Human
cagauuuuaauuuug

SEQ ID NO: 2437238 - RNA, 15 nt, Human
cagauuuuccugaaa

SEQ ID NO: 2437239 - RNA, 14 nt, Human
cagauuuuccugaa

SEQ ID NO: 2437240 - RNA, 19 nt, Human
cagauuuugauagcaaagc

SEQ ID NO: 2437241 - RNA, 18 nt, Human
cagauuuugauagcaaag

SEQ ID NO: 2437242 - RNA, 20 nt, Human
cagauuuugauagcaaagcg

SEQ ID NO: 2437243 - RNA, 16 nt, Human
cagauuuugcuguaua

SEQ ID NO: 2437244 - RNA, 17 nt, Human
cagauuuugcuguauau

SEQ ID NO: 2437245 - RNA, 19 nt, Human
cagauuuucagcaaacucu

SEQ ID NO: 2437246 - RNA, 22 nt, Human
cagauuuucagcaaacucuuuu

SEQ ID NO: 2437247 - RNA, 16 nt, Human
cagauuuugauagcaa

SEQ ID NO: 2437248 - RNA, 23 nt, Human
cagauuuugggguuguguuguca

SEQ ID NO: 2437249 - RNA, 21 nt, Human
cagauuuugggguuguguugu

SEQ ID NO: 2437250 - RNA, 19 nt, Human
cagauuuugcuguauauuu

SEQ ID NO: 2437251 - RNA, 23 nt, Human
cagauuuugcuguauauuuguga

SEQ ID NO: 2437252 - RNA, 20 nt, Human
cagauuuugggguuguguug

SEQ ID NO: 2437253 - RNA, 16 nt, Human
cagauuuuuacacaug

SEQ ID NO: 2437254 - RNA, 19 nt, Human
cagauuuuuuacagcugcc

SEQ ID NO: 2437255 - RNA, 20 nt, Human
cagcaaaaagcaaaaucauu

SEQ ID NO: 2437256 - RNA, 14 nt, Human
cagcaaaaagcaaa

SEQ ID NO: 2437257 - RNA, 13 nt, Human
cagcaaaaagcaa

SEQ ID NO: 2437258 - RNA, 22 nt, Human
cagauuuuuuacagcugccugc

SEQ ID NO: 2437259 - RNA, 15 nt, Human
cagauuuuuacaaau

SEQ ID NO: 2437260 - RNA, 14 nt, Human
cagauuuuuacaaa

SEQ ID NO: 2437261 - RNA, 13 nt, Human
cagcagauuuuag

SEQ ID NO: 2437262 - RNA, 17 nt, Human
cagcagaucccagcuca

SEQ ID NO: 2437263 - RNA, 18 nt, Human
cagcagaucccagcucac

SEQ ID NO: 2437264 - RNA, 21 nt, Human
cagcagaucccagcucacguc

SEQ ID NO: 2437265 - RNA, 16 nt, Human
cagcagaggcacuggg

SEQ ID NO: 2437266 - RNA, 15 nt, Human
cagcagaggcacugg

SEQ ID NO: 2437267 - RNA, 13 nt, Human
cagcagagugugg

SEQ ID NO: 2437268 - RNA, 15 nt, Human
cagcagaucccagcu

SEQ ID NO: 2437269 - RNA, 16 nt, Human
cagcagaucccagcuc

SEQ ID NO: 2437270 - RNA, 23 nt, Human
cagcagcccuaaggaucucucag

SEQ ID NO: 2437271 - RNA, 20 nt, Human
cagcagcccuaaggaucucu

SEQ ID NO: 2437272 - RNA, 16 nt, Human
cagcagcccuaaggau

SEQ ID NO: 2437273 - RNA, 11 nt, Human
cagcagcccua

SEQ ID NO: 2437274 - RNA, 23 nt, Human
cagcagccccugcacaaagcccu

SEQ ID NO: 2437275 - RNA, 16 nt, Human
cagcagccccugcaca

SEQ ID NO: 2437276 - RNA, 13 nt, Human
cagcagccccugc

SEQ ID NO: 2437277 - RNA, 18 nt, Human
cagcagcccuccucaccc

SEQ ID NO: 2437278 - RNA, 24 nt, Human
cagcagcccuaaggaucucucagg

SEQ ID NO: 2437279 - RNA, 11 nt, Human
cagcagcccuc

SEQ ID NO: 2437280 - RNA, 12 nt, Human
cagcagcccucc

SEQ ID NO: 2437281 - RNA, 14 nt, Human
cagcagcccuccuc

SEQ ID NO: 2437282 - RNA, 15 nt, Human
cagcagcccuccuca

SEQ ID NO: 2437283 - RNA, 17 nt, Human
cagcagcccuccucacc

SEQ ID NO: 2437284 - RNA, 19 nt, Human
cagcagcccuccucacccc

SEQ ID NO: 2437285 - RNA, 22 nt, Human
cagcagccaucauaggaaggga

SEQ ID NO: 2437286 - RNA, 21 nt, Human
cagcagccaucauaggaaggg

SEQ ID NO: 2437287 - RNA, 18 nt, Human
cagcagccaucauaggaa

SEQ ID NO: 2437288 - RNA, 20 nt, Human
cagcagccagcucucagcca

SEQ ID NO: 2437289 - RNA, 21 nt, Human
cagcagccagcucucagccaa

SEQ ID NO: 2437290 - RNA, 13 nt, Human
cagcagccagcuc

SEQ ID NO: 2437291 - RNA, 14 nt, Human
cagcagccagcucu

SEQ ID NO: 2437292 - RNA, 15 nt, Human
cagcagccagcucuc

SEQ ID NO: 2437293 - RNA, 17 nt, Human
cagcagccagcucucag

SEQ ID NO: 2437294 - RNA, 18 nt, Human
cagcagccagcucucagc

SEQ ID NO: 2437295 - RNA, 19 nt, Human
cagcagccagcucucagcc

SEQ ID NO: 2437296 - RNA, 15 nt, Human
cagcagaaaugccuu

SEQ ID NO: 2437297 - RNA, 17 nt, Human
cagcagaaaugccuuac

SEQ ID NO: 2437298 - RNA, 20 nt, Human
cagcacuuugggaggccaag

SEQ ID NO: 2437299 - RNA, 22 nt, Human
cagcacuuugggaggccaagga

SEQ ID NO: 2437300 - RNA, 23 nt, Human
cagcacuuugggaggccaaggag

SEQ ID NO: 2437301 - RNA, 22 nt, Human
cagcacuuugggaggccuaggc

SEQ ID NO: 2437302 - RNA, 18 nt, Human
cagcacuuugggaggcug

SEQ ID NO: 2437303 - RNA, 19 nt, Human
cagcacuuugggaggcuga

SEQ ID NO: 2437304 - RNA, 20 nt, Human
cagcacuuugggaggcugag

SEQ ID NO: 2437305 - RNA, 22 nt, Human
cagcacuuugggaggcugaggc

SEQ ID NO: 2437306 - RNA, 23 nt, Human
cagcacuuugggaggcugaggcg

SEQ ID NO: 2437307 - RNA, 18 nt, Human
cagcacuuguccagcuga

SEQ ID NO: 2437308 - RNA, 19 nt, Human
cagcacuuguccagcugag

SEQ ID NO: 2437309 - RNA, 15 nt, Human
cagcacuuugggagg

SEQ ID NO: 2437310 - RNA, 16 nt, Human
cagcacuuugggaggc

SEQ ID NO: 2437311 - RNA, 18 nt, Human
cagcacuuugggaggcca

SEQ ID NO: 2437312 - RNA, 13 nt, Human
cagcacuuguaua

SEQ ID NO: 2437313 - RNA, 15 nt, Human
cagcacuuguccagc

SEQ ID NO: 2437314 - RNA, 17 nt, Human
cagcacuuguccagcug

SEQ ID NO: 2437315 - RNA, 19 nt, Human
cagcacuuggagaggcuga

SEQ ID NO: 2437316 - RNA, 13 nt, Human
cagcacuuauuua

SEQ ID NO: 2437317 - RNA, 15 nt, Human
cagcacugucucagu

SEQ ID NO: 2437318 - RNA, 23 nt, Human
cagcacugucucaguuucacuuu

SEQ ID NO: 2437319 - RNA, 19 nt, Human
cagcagaaaugccuuaccc

SEQ ID NO: 2437320 - RNA, 22 nt, Human
cagcagaaaugccuuacccuca

SEQ ID NO: 2437321 - RNA, 17 nt, Human
cagcagaaggggguggu

SEQ ID NO: 2437322 - RNA, 13 nt, Human
cagcagaaggggg

SEQ ID NO: 2437323 - RNA, 18 nt, Human
cagcacuuugggaggccu

SEQ ID NO: 2437324 - RNA, 13 nt, Human
cagcagagcaccu

SEQ ID NO: 2437325 - RNA, 11 nt, Human
cagcagagcac

SEQ ID NO: 2437326 - RNA, 16 nt, Human
cagcagacauugucag

SEQ ID NO: 2437327 - RNA, 14 nt, Human
cagcagacauuguc

SEQ ID NO: 2437328 - RNA, 13 nt, Human
cagcagacauugu

SEQ ID NO: 2437329 - RNA, 17 nt, Human
cagcagacauugucagc

SEQ ID NO: 2437330 - RNA, 14 nt, Human
cagcagacuaugaa

SEQ ID NO: 2437331 - RNA, 21 nt, Human
cagcagagacuugggacauug

SEQ ID NO: 2437332 - RNA, 19 nt, Human
cagcagagacuugggacau

SEQ ID NO: 2437333 - RNA, 18 nt, Human
cagcagagacuugggaca

SEQ ID NO: 2437334 - RNA, 13 nt, Human
cagcaauaaagca

SEQ ID NO: 2437335 - RNA, 21 nt, Human
cagcaauaaagcagcguuucu

SEQ ID NO: 2437336 - RNA, 21 nt, Human
cagcaagugagagcugggugu

SEQ ID NO: 2437337 - RNA, 19 nt, Human
cagcaagugagagcugggu

SEQ ID NO: 2437338 - RNA, 22 nt, Human
cagcaauaaagcagcguuucua

SEQ ID NO: 2437339 - RNA, 20 nt, Human
cagcaaugauguccagaaga

SEQ ID NO: 2437340 - RNA, 18 nt, Human
cagcaaugauguccagaa

SEQ ID NO: 2437341 - RNA, 21 nt, Human
cagcaaugacaucucaggggc

SEQ ID NO: 2437342 - RNA, 20 nt, Human
cagcaaugacaucucagggg

SEQ ID NO: 2437343 - RNA, 22 nt, Human
cagcaaugauguccagaagaau

SEQ ID NO: 2437344 - RNA, 15 nt, Human
cagcaauauguaaau

SEQ ID NO: 2437345 - RNA, 19 nt, Human
cagcaaugacaucucaggg

SEQ ID NO: 2437346 - RNA, 16 nt, Human
cagcaauauguaaaua

SEQ ID NO: 2437347 - RNA, 18 nt, Human
cagcaaugacaucucagg

SEQ ID NO: 2437348 - RNA, 15 nt, Human
cagcaauucuccugc

SEQ ID NO: 2437349 - RNA, 16 nt, Human
cagcaauucuccugcc

SEQ ID NO: 2437350 - RNA, 17 nt, Human
cagcaauucuccugccu

SEQ ID NO: 2437351 - RNA, 18 nt, Human
cagcaauucuccugccuc

SEQ ID NO: 2437352 - RNA, 19 nt, Human
cagcaauucuccugccuca

SEQ ID NO: 2437353 - RNA, 20 nt, Human
cagcaauucuccugccucag

SEQ ID NO: 2437354 - RNA, 13 nt, Human
cagcacaaggcca

SEQ ID NO: 2437355 - RNA, 16 nt, Human
cagcacaaggccaucu

SEQ ID NO: 2437356 - RNA, 13 nt, Human
cagcacacagggc

SEQ ID NO: 2437357 - RNA, 14 nt, Human
cagcacacagggca

SEQ ID NO: 2437358 - RNA, 14 nt, Human
cagcacugucccuu

SEQ ID NO: 2437359 - RNA, 13 nt, Human
cagcacugucccu

SEQ ID NO: 2437360 - RNA, 12 nt, Human
cagcacuguccc

SEQ ID NO: 2437361 - RNA, 15 nt, Human
cagcacacagggcag

SEQ ID NO: 2437362 - RNA, 18 nt, Human
cagcacugucccuugccu

SEQ ID NO: 2437363 - RNA, 16 nt, Human
cagcacugucccuugc

SEQ ID NO: 2437364 - RNA, 20 nt, Human
cagcacugucccuugccuca

SEQ ID NO: 2437365 - RNA, 14 nt, Human
cagcacugucucag

SEQ ID NO: 2437366 - RNA, 23 nt, Human
cagcacuggcucucuccaggauc

SEQ ID NO: 2437367 - RNA, 23 nt, Human
cagcaaggcaccugcagguuggg

SEQ ID NO: 2437368 - RNA, 19 nt, Human
cagcaagggugaugggaaa

SEQ ID NO: 2437369 - RNA, 17 nt, Human
cagcaaggcaccugcag

SEQ ID NO: 2437370 - RNA, 16 nt, Human
cagcaaggcaccugca

SEQ ID NO: 2437371 - RNA, 15 nt, Human
cagcaaggcaccugc

SEQ ID NO: 2437372 - RNA, 22 nt, Human
cagcaaggaggcuggcuggggc

SEQ ID NO: 2437373 - RNA, 21 nt, Human
cagcaaggaggcuggcugggg

SEQ ID NO: 2437374 - RNA, 20 nt, Human
cagcaaggaggcuggcuggg

SEQ ID NO: 2437375 - RNA, 19 nt, Human
cagcaaggaggcuggcugg

SEQ ID NO: 2437376 - RNA, 18 nt, Human
cagcaaggaggcuggcug

SEQ ID NO: 2437377 - RNA, 18 nt, Human
cagcaaggagauuuacaa

SEQ ID NO: 2437378 - RNA, 17 nt, Human
cagcaaggagauuuaca

SEQ ID NO: 2437379 - RNA, 22 nt, Human
cagcaagaagauccuaaaacaa

SEQ ID NO: 2437380 - RNA, 20 nt, Human
cagcaacuugucuuuuucug

SEQ ID NO: 2437381 - RNA, 17 nt, Human
cagcaagugagagcugg

SEQ ID NO: 2437382 - RNA, 16 nt, Human
cagcaagugagagcug

SEQ ID NO: 2437383 - RNA, 15 nt, Human
cagcaagugagagcu

SEQ ID NO: 2437384 - RNA, 14 nt, Human
cagcaagugagagc

SEQ ID NO: 2437385 - RNA, 22 nt, Human
cagcaagggugaugggaaagca

SEQ ID NO: 2437386 - RNA, 23 nt, Human
cagcaagggugaugggaaagcau

SEQ ID NO: 2437387 - RNA, 12 nt, Human
cagcaagugaga

SEQ ID NO: 2437388 - RNA, 14 nt, Human
cagcaagucucuuu

SEQ ID NO: 2437389 - RNA, 15 nt, Human
cagcaagucaggguu

SEQ ID NO: 2437390 - RNA, 22 nt, Human
cagugcucgcuguugcugaaua

SEQ ID NO: 2437391 - RNA, 21 nt, Human
cagugcucgcuguugcugaau

SEQ ID NO: 2437392 - RNA, 20 nt, Human
cagugcucgcuguugcugaa

SEQ ID NO: 2437393 - RNA, 19 nt, Human
cagugcucgcuguugcuga

SEQ ID NO: 2437394 - RNA, 18 nt, Human
cagugcucgcuguugcug

SEQ ID NO: 2437395 - RNA, 17 nt, Human
cagugcucgcuguugcu

SEQ ID NO: 2437396 - RNA, 16 nt, Human
cagugcucgcuguugc

SEQ ID NO: 2437397 - RNA, 15 nt, Human
cagugcucgcuguug

SEQ ID NO: 2437398 - RNA, 14 nt, Human
cagugcucgcuguu

SEQ ID NO: 2437399 - RNA, 14 nt, Human
cagugcucccucac

SEQ ID NO: 2437400 - RNA, 23 nt, Human
cagugcuauuuugugcccacugu

SEQ ID NO: 2437401 - RNA, 22 nt, Human
cagugcuaaaaaugggacuucu

SEQ ID NO: 2437402 - RNA, 20 nt, Human
cagugcuaaaaaugggacuu

SEQ ID NO: 2437403 - RNA, 19 nt, Human
cagugcuaaaaaugggacu

SEQ ID NO: 2437404 - RNA, 17 nt, Human
cagugcuaaaaauggga

SEQ ID NO: 2437405 - RNA, 16 nt, Human
cagugcuaaaaauggg

SEQ ID NO: 2437406 - RNA, 15 nt, Human
cagugcuaaaaaugg

SEQ ID NO: 2437407 - RNA, 14 nt, Human
cagugcuaaaaaug

SEQ ID NO: 2437408 - RNA, 22 nt, Human
cagugccuuggggaauuuccuc

SEQ ID NO: 2437409 - RNA, 21 nt, Human
cagugccuuggggaauuuccu

SEQ ID NO: 2437410 - RNA, 14 nt, Human
cagugccuugggga

SEQ ID NO: 2437411 - RNA, 22 nt, Human
cagugccuuccuguuuuucaca

SEQ ID NO: 2437412 - RNA, 18 nt, Human
cagugcgauucuggauaa

SEQ ID NO: 2437413 - RNA, 24 nt, Human
cagugcgcgugcacguggagagcu

SEQ ID NO: 2437414 - RNA, 23 nt, Human
cagugccuuauggaacacucuga

SEQ ID NO: 2437415 - RNA, 16 nt, Human
cagugccuucaauaaa

SEQ ID NO: 2437416 - RNA, 15 nt, Human
cagugccuucaauaa

SEQ ID NO: 2437417 - RNA, 18 nt, Human
cagugccuucaauaaaug

SEQ ID NO: 2437418 - RNA, 14 nt, Human
cagugccuuccaua

SEQ ID NO: 2437419 - RNA, 15 nt, Human
cagugccuuccauaa

SEQ ID NO: 2437420 - RNA, 16 nt, Human
cagugccuuccauaau

SEQ ID NO: 2437421 - RNA, 17 nt, Human
cagugccuuccauaauu

SEQ ID NO: 2437422 - RNA, 23 nt, Human
cagugccuuccauaauuaugaca

SEQ ID NO: 2437423 - RNA, 12 nt, Human
cagugcccccac

SEQ ID NO: 2437424 - RNA, 15 nt, Human
cagugcccccacuga

SEQ ID NO: 2437425 - RNA, 17 nt, Human
cagugcccccacugacc

SEQ ID NO: 2437426 - RNA, 20 nt, Human
cagugcccccacugaccaga

SEQ ID NO: 2437427 - RNA, 21 nt, Human
cagugcccccacugaccagaa

SEQ ID NO: 2437428 - RNA, 22 nt, Human
cagugcccccacugaccagaac

SEQ ID NO: 2437429 - RNA, 23 nt, Human
cagugcccccacugaccagaacu

SEQ ID NO: 2437430 - RNA, 19 nt, Human
cagugcccauuccucaccu

SEQ ID NO: 2437431 - RNA, 14 nt, Human
cagugccccuagcu

SEQ ID NO: 2437432 - RNA, 17 nt, Human
cagugcccucauuuuau

SEQ ID NO: 2437433 - RNA, 19 nt, Human
cagugcccucauuuuaugu

SEQ ID NO: 2437434 - RNA, 15 nt, Human
cagugcccuccagga

SEQ ID NO: 2437435 - RNA, 18 nt, Human
cagugauuaccagggacu

SEQ ID NO: 2437436 - RNA, 17 nt, Human
cagugaugggagaguag

SEQ ID NO: 2437437 - RNA, 23 nt, Human
cagugauguaccaugaaacaaag

SEQ ID NO: 2437438 - RNA, 14 nt, Human
cagugcccauuccu

SEQ ID NO: 2437439 - RNA, 18 nt, Human
cagugcccauuccucacc

SEQ ID NO: 2437440 - RNA, 17 nt, Human
cagugauuaccagggac

SEQ ID NO: 2437441 - RNA, 17 nt, Human
cagugaucaaaguccga

SEQ ID NO: 2437442 - RNA, 13 nt, Human
cagugaucuccau

SEQ ID NO: 2437443 - RNA, 15 nt, Human
cagugaucuccauau

SEQ ID NO: 2437444 - RNA, 16 nt, Human
cagugaucuccauaug

SEQ ID NO: 2437445 - RNA, 21 nt, Human
cagugaucuccauauguuaca

SEQ ID NO: 2437446 - RNA, 18 nt, Human
cagugaugcuggaugcuc

SEQ ID NO: 2437447 - RNA, 20 nt, Human
cagugaugcuggaugcuccu

SEQ ID NO: 2437448 - RNA, 18 nt, Human
cagugauauggcagaaga

SEQ ID NO: 2437449 - RNA, 15 nt, Human
cagugauauggcaga

SEQ ID NO: 2437450 - RNA, 23 nt, Human
cagugaguuacagcgagaggcag

SEQ ID NO: 2437451 - RNA, 22 nt, Human
cagugaguuacagcgagaggca

SEQ ID NO: 2437452 - RNA, 18 nt, Human
cagugaguuacagcgaga

SEQ ID NO: 2437453 - RNA, 21 nt, Human
cagugagugagccuggcucuu

SEQ ID NO: 2437454 - RNA, 20 nt, Human
cagugagugagccuggcucu

SEQ ID NO: 2437455 - RNA, 19 nt, Human
cagugagugagccuggcuc

SEQ ID NO: 2437456 - RNA, 23 nt, Human
cagugauauggcagaagacacca

SEQ ID NO: 2437457 - RNA, 22 nt, Human
cagugauauggcagaagacacc

SEQ ID NO: 2437458 - RNA, 21 nt, Human
cagugauauggcagaagacac

SEQ ID NO: 2437459 - RNA, 20 nt, Human
cagugauauggcagaagaca

SEQ ID NO: 2437460 - RNA, 15 nt, Human
cagugaggugcccag

SEQ ID NO: 2437461 - RNA, 16 nt, Human
cagugagggucuucuu

SEQ ID NO: 2437462 - RNA, 23 nt, Human
cagugagggucuucuuacaugca

SEQ ID NO: 2437463 - RNA, 16 nt, Human
cagugaggugcccagc

SEQ ID NO: 2437464 - RNA, 18 nt, Human
cagugagugagccuggcu

SEQ ID NO: 2437465 - RNA, 17 nt, Human
cagugagugagccuggc

SEQ ID NO: 2437466 - RNA, 16 nt, Human
cagugagugagccugg

SEQ ID NO: 2437467 - RNA, 15 nt, Human
cagugagugagccug

SEQ ID NO: 2437468 - RNA, 15 nt, Human
cagugagucucuuca

SEQ ID NO: 2437469 - RNA, 17 nt, Human
cagugagucucuucaga

SEQ ID NO: 2437470 - RNA, 14 nt, Human
cagugagugagccu

SEQ ID NO: 2437471 - RNA, 18 nt, Human
cagugagucucuucagaa

SEQ ID NO: 2437472 - RNA, 23 nt, Human
cagugagucgaggacagggaggu

SEQ ID NO: 2437473 - RNA, 22 nt, Human
cagugagucgaggacagggagg

SEQ ID NO: 2437474 - RNA, 20 nt, Human
cagugagucgaggacaggga

SEQ ID NO: 2437475 - RNA, 19 nt, Human
cagugagucgaggacaggg

SEQ ID NO: 2437476 - RNA, 22 nt, Human
cagugccuuauggaacacucug

SEQ ID NO: 2437477 - RNA, 21 nt, Human
cagugccuuauggaacacucu

SEQ ID NO: 2437478 - RNA, 20 nt, Human
cagugccuuauggaacacuc

SEQ ID NO: 2437479 - RNA, 19 nt, Human
cagugccuuauggaacacu

SEQ ID NO: 2437480 - RNA, 18 nt, Human
cagugccuuauggaacac

SEQ ID NO: 2437481 - RNA, 17 nt, Human
cagugccuuauggaaca

SEQ ID NO: 2437482 - RNA, 16 nt, Human
cagugccuuauggaac

SEQ ID NO: 2437483 - RNA, 15 nt, Human
cagugccuuauggaa

SEQ ID NO: 2437484 - RNA, 23 nt, Human
cagugccgccgccucgcccaccg

SEQ ID NO: 2437485 - RNA, 22 nt, Human
cagugccgccgccucgcccacc

SEQ ID NO: 2437486 - RNA, 20 nt, Human
cagugccgccgccucgccca

SEQ ID NO: 2437487 - RNA, 19 nt, Human
cagugccgccgccucgccc

SEQ ID NO: 2437488 - RNA, 18 nt, Human
cagugccgccgccucgcc

SEQ ID NO: 2437489 - RNA, 17 nt, Human
cagugccgccgccucgc

SEQ ID NO: 2437490 - RNA, 15 nt, Human
cagugccgagaagga

SEQ ID NO: 2437491 - RNA, 18 nt, Human
cagugccgagaaggaagc

SEQ ID NO: 2437492 - RNA, 13 nt, Human
cagugccuuaugg

SEQ ID NO: 2437493 - RNA, 11 nt, Human
cagugccuuau

SEQ ID NO: 2437494 - RNA, 10 nt, Human
cagugccugc

SEQ ID NO: 2437495 - RNA, 11 nt, Human
cagugccugcu

SEQ ID NO: 2437496 - RNA, 13 nt, Human
cagugccugcuga

SEQ ID NO: 2437497 - RNA, 12 nt, Human
cagugccugcug

SEQ ID NO: 2437498 - RNA, 14 nt, Human
cagugccugggaau

SEQ ID NO: 2437499 - RNA, 20 nt, Human
cagugccugggaauguauua

SEQ ID NO: 2437500 - RNA, 18 nt, Human
cagugccugggaauguau

SEQ ID NO: 2437501 - RNA, 17 nt, Human
cagugccuuaccuccug

SEQ ID NO: 2437502 - RNA, 18 nt, Human
cagugccuuaccuccugc

SEQ ID NO: 2437503 - RNA, 19 nt, Human
cagugccuuaccuccugcc

SEQ ID NO: 2437504 - RNA, 20 nt, Human
cagugccuuaccuccugccc

SEQ ID NO: 2437505 - RNA, 21 nt, Human
cagugccuuaccuccugccca

SEQ ID NO: 2437506 - RNA, 22 nt, Human
cagugccuuaccuccugcccag

SEQ ID NO: 2437507 - RNA, 23 nt, Human
cagugccuuaccuccugcccagg

SEQ ID NO: 2437508 - RNA, 17 nt, Human
cagugcuguggccuggg

SEQ ID NO: 2437509 - RNA, 17 nt, Human
caguccucccaucucac

SEQ ID NO: 2437510 - RNA, 16 nt, Human
caguccucccaucuca

SEQ ID NO: 2437511 - RNA, 21 nt, Human
caguccuccccucacagccuc

SEQ ID NO: 2437512 - RNA, 20 nt, Human
caguccuccccucacagccu

SEQ ID NO: 2437513 - RNA, 19 nt, Human
caguccuccccucacagcc

SEQ ID NO: 2437514 - RNA, 18 nt, Human
caguccuccccucacagc

SEQ ID NO: 2437515 - RNA, 15 nt, Human
caguccuccccucac

SEQ ID NO: 2437516 - RNA, 14 nt, Human
caguccuccccuca

SEQ ID NO: 2437517 - RNA, 13 nt, Human
caguccuccccuc

SEQ ID NO: 2437518 - RNA, 12 nt, Human
caguccuccccu

SEQ ID NO: 2437519 - RNA, 13 nt, Human
caguccucuccac

SEQ ID NO: 2437520 - RNA, 22 nt, Human
caguccuccccucacagccucu

SEQ ID NO: 2437521 - RNA, 23 nt, Human
caguccuccccucacagccucug

SEQ ID NO: 2437522 - RNA, 22 nt, Human
caguccucuccaccuaguggcu

SEQ ID NO: 2437523 - RNA, 20 nt, Human
caguccucuccaccuagugg

SEQ ID NO: 2437524 - RNA, 13 nt, Human
caguccucuuuca

SEQ ID NO: 2437525 - RNA, 22 nt, Human
caguccugaucagagccguggu

SEQ ID NO: 2437526 - RNA, 17 nt, Human
caguccugccucagccu

SEQ ID NO: 2437527 - RNA, 19 nt, Human
caguccugccucagccucc

SEQ ID NO: 2437528 - RNA, 12 nt, Human
caguccugccug

SEQ ID NO: 2437529 - RNA, 13 nt, Human
caguccugccugg

SEQ ID NO: 2437530 - RNA, 14 nt, Human
caguccugccuggc

SEQ ID NO: 2437531 - RNA, 15 nt, Human
caguccugccuggcc

SEQ ID NO: 2437532 - RNA, 17 nt, Human
caguccuggaagccagc

SEQ ID NO: 2437533 - RNA, 22 nt, Human
caguccuggaagccagcuuucc

SEQ ID NO: 2437534 - RNA, 18 nt, Human
caguccugccuggccagg

SEQ ID NO: 2437535 - RNA, 16 nt, Human
caguccugccuggcca

SEQ ID NO: 2437536 - RNA, 17 nt, Human
caguccugccuggccag

SEQ ID NO: 2437537 - RNA, 21 nt, Human
caguccugccuggccaggcag

SEQ ID NO: 2437538 - RNA, 18 nt, Human
caguccuuaccagcagag

SEQ ID NO: 2437539 - RNA, 15 nt, Human
caguccuuaccagca

SEQ ID NO: 2437540 - RNA, 19 nt, Human
caguccuggccuggcuucu

SEQ ID NO: 2437541 - RNA, 13 nt, Human
caguccuggccug

SEQ ID NO: 2437542 - RNA, 11 nt, Human
caguccuggcc

SEQ ID NO: 2437543 - RNA, 12 nt, Human
caguccugggag

SEQ ID NO: 2437544 - RNA, 13 nt, Human
caguccugggaga

SEQ ID NO: 2437545 - RNA, 21 nt, Human
caguccugggagaaccucagg

SEQ ID NO: 2437546 - RNA, 22 nt, Human
caguccugggagaaccucaggc

SEQ ID NO: 2437547 - RNA, 23 nt, Human
caguccugggagaaccucaggcu

SEQ ID NO: 2437548 - RNA, 20 nt, Human
caguccuuaccagcagagca

SEQ ID NO: 2437549 - RNA, 19 nt, Human
caguccuuaccagcagagc

SEQ ID NO: 2437550 - RNA, 21 nt, Human
caguccuuaccagcagagcac

SEQ ID NO: 2437551 - RNA, 18 nt, Human
cagucuggaaugcagugg

SEQ ID NO: 2437552 - RNA, 16 nt, Human
cagugaaagaaaauaa

SEQ ID NO: 2437553 - RNA, 20 nt, Human
cagugaaagaaaauaacaau

SEQ ID NO: 2437554 - RNA, 22 nt, Human
cagucuuuuuggugaggguaac

SEQ ID NO: 2437555 - RNA, 14 nt, Human
cagugaaaaacuau

SEQ ID NO: 2437556 - RNA, 18 nt, Human
cagugaaaacaagugcug

SEQ ID NO: 2437557 - RNA, 16 nt, Human
cagugaaaacaagugc

SEQ ID NO: 2437558 - RNA, 17 nt, Human
cagugaaaaacuauuaa

SEQ ID NO: 2437559 - RNA, 22 nt, Human
cagucuuuaaucugagaggcca

SEQ ID NO: 2437560 - RNA, 14 nt, Human
cagucuugcagcag

SEQ ID NO: 2437561 - RNA, 13 nt, Human
cagucuugugcuu

SEQ ID NO: 2437562 - RNA, 17 nt, Human
cagucuuguauuaaguu

SEQ ID NO: 2437563 - RNA, 16 nt, Human
cagucuuggcucacug

SEQ ID NO: 2437564 - RNA, 15 nt, Human
cagucuugcagcagg

SEQ ID NO: 2437565 - RNA, 18 nt, Human
cagucuugacgaguguga

SEQ ID NO: 2437566 - RNA, 15 nt, Human
cagucuuccauuugc

SEQ ID NO: 2437567 - RNA, 17 nt, Human
cagucuuccauuugcaa

SEQ ID NO: 2437568 - RNA, 18 nt, Human
cagucuuccauuugcaag

SEQ ID NO: 2437569 - RNA, 21 nt, Human
cagucuuccauuugcaaggga

SEQ ID NO: 2437570 - RNA, 13 nt, Human
cagucuuccugac

SEQ ID NO: 2437571 - RNA, 16 nt, Human
cagucuuccugacacu

SEQ ID NO: 2437572 - RNA, 17 nt, Human
cagucuuccugacacuu

SEQ ID NO: 2437573 - RNA, 18 nt, Human
cagucuuccugacacuuu

SEQ ID NO: 2437574 - RNA, 21 nt, Human
cagucuuccugacacuuuaau

SEQ ID NO: 2437575 - RNA, 15 nt, Human
cagucuugaauuucu

SEQ ID NO: 2437576 - RNA, 22 nt, Human
cagucuugaauuucuaaaaaac

SEQ ID NO: 2437577 - RNA, 23 nt, Human
cagucuugaauuucuaaaaaaca

SEQ ID NO: 2437578 - RNA, 24 nt, Human
cagucugucaugaacauguuccug

SEQ ID NO: 2437579 - RNA, 12 nt, Human
cagucugucaug

SEQ ID NO: 2437580 - RNA, 20 nt, Human
cagucuggcugagcccugcu

SEQ ID NO: 2437581 - RNA, 18 nt, Human
cagucuggcugagcccug

SEQ ID NO: 2437582 - RNA, 21 nt, Human
cagucuggaggggcauggcca

SEQ ID NO: 2437583 - RNA, 15 nt, Human
cagucuguggaucag

SEQ ID NO: 2437584 - RNA, 23 nt, Human
cagucugucaugaacauguuccu

SEQ ID NO: 2437585 - RNA, 21 nt, Human
cagucuguuccccauggccac

SEQ ID NO: 2437586 - RNA, 19 nt, Human
cagucuggaaugcaguggu

SEQ ID NO: 2437587 - RNA, 12 nt, Human
cagucuggaggg

SEQ ID NO: 2437588 - RNA, 13 nt, Human
cagucuggagggg

SEQ ID NO: 2437589 - RNA, 16 nt, Human
cagucuggaggggcau

SEQ ID NO: 2437590 - RNA, 18 nt, Human
cagucuggaggggcaugg

SEQ ID NO: 2437591 - RNA, 12 nt, Human
caguccuuccac

SEQ ID NO: 2437592 - RNA, 16 nt, Human
cagugacgugcaccug

SEQ ID NO: 2437593 - RNA, 17 nt, Human
cagugaccugaggaagc

SEQ ID NO: 2437594 - RNA, 18 nt, Human
cagugaccugaggaagcg

SEQ ID NO: 2437595 - RNA, 19 nt, Human
cagugaccugcuggguaaa

SEQ ID NO: 2437596 - RNA, 19 nt, Human
cagugaccugaggaagcgu

SEQ ID NO: 2437597 - RNA, 14 nt, Human
cagugaccugagga

SEQ ID NO: 2437598 - RNA, 16 nt, Human
cagugaccugaggaag

SEQ ID NO: 2437599 - RNA, 19 nt, Human
cagugacucgggcuccugu

SEQ ID NO: 2437600 - RNA, 18 nt, Human
cagugacucgggcuccug

SEQ ID NO: 2437601 - RNA, 17 nt, Human
cagugacucgggcuccu

SEQ ID NO: 2437602 - RNA, 16 nt, Human
cagugacucgggcucc

SEQ ID NO: 2437603 - RNA, 21 nt, Human
cagugacuccaggagaggagc

SEQ ID NO: 2437604 - RNA, 17 nt, Human
cagugacuccaggagag

SEQ ID NO: 2437605 - RNA, 16 nt, Human
cagugacuccaggaga

SEQ ID NO: 2437606 - RNA, 15 nt, Human
cagugacuccaggag

SEQ ID NO: 2437607 - RNA, 17 nt, Human
cagugacgugcaccugu

SEQ ID NO: 2437608 - RNA, 18 nt, Human
cagugacgugcaccugua

SEQ ID NO: 2437609 - RNA, 14 nt, Human
cagugacuccagga

SEQ ID NO: 2437610 - RNA, 13 nt, Human
cagugacuccagg

SEQ ID NO: 2437611 - RNA, 22 nt, Human
cagugacgugcaccuguacuca

SEQ ID NO: 2437612 - RNA, 20 nt, Human
cagugagaaaaagcuccugu

SEQ ID NO: 2437613 - RNA, 19 nt, Human
cagugagaaaaagcuccug

SEQ ID NO: 2437614 - RNA, 14 nt, Human
cagugagaaaaagc

SEQ ID NO: 2437615 - RNA, 22 nt, Human
cagugagaaaaagcuccugucc

SEQ ID NO: 2437616 - RNA, 21 nt, Human
cagugagaaaaagcuccuguc

SEQ ID NO: 2437617 - RNA, 16 nt, Human
cagugagcacucccaa

SEQ ID NO: 2437618 - RNA, 20 nt, Human
cagugagauuacagaggaag

SEQ ID NO: 2437619 - RNA, 19 nt, Human
cagugagauuacagaggaa

SEQ ID NO: 2437620 - RNA, 18 nt, Human
cagugagauuacagagga

SEQ ID NO: 2437621 - RNA, 15 nt, Human
cagugagacagcucu

SEQ ID NO: 2437622 - RNA, 23 nt, Human
cagugacucgggcuccugugccc

SEQ ID NO: 2437623 - RNA, 22 nt, Human
cagugacucgggcuccugugcc

SEQ ID NO: 2437624 - RNA, 21 nt, Human
cagugacucgggcuccugugc

SEQ ID NO: 2437625 - RNA, 20 nt, Human
cagugacucgggcuccugug

SEQ ID NO: 2437626 - RNA, 12 nt, Human
cagugaauucuu

SEQ ID NO: 2437627 - RNA, 18 nt, Human
cagugaaugauucagugu

SEQ ID NO: 2437628 - RNA, 20 nt, Human
cagugaaugauucaguguua

SEQ ID NO: 2437629 - RNA, 16 nt, Human
cagugacacuucagag

SEQ ID NO: 2437630 - RNA, 16 nt, Human
cagugacagacaggcu

SEQ ID NO: 2437631 - RNA, 15 nt, Human
cagugacagacaggc

SEQ ID NO: 2437632 - RNA, 17 nt, Human
cagugacacuucagaga

SEQ ID NO: 2437633 - RNA, 18 nt, Human
cagugacacuucagagag

SEQ ID NO: 2437634 - RNA, 19 nt, Human
cagugacacuucagagagc

SEQ ID NO: 2437635 - RNA, 22 nt, Human
cagugacacuucagagagcugg

SEQ ID NO: 2437636 - RNA, 18 nt, Human
cagugacagacaggcucu

SEQ ID NO: 2437637 - RNA, 17 nt, Human
cagugacagacaggcuc

SEQ ID NO: 2437638 - RNA, 23 nt, Human
cagugacacuucagagagcuggu

SEQ ID NO: 2437639 - RNA, 16 nt, Human
cagugacagaguucac

SEQ ID NO: 2437640 - RNA, 18 nt, Human
cagugacagaguucacua

SEQ ID NO: 2437641 - RNA, 20 nt, Human
cagugacagaguucacuaua

SEQ ID NO: 2437642 - RNA, 23 nt, Human
cagugaaccaaagagacuggagc

SEQ ID NO: 2437643 - RNA, 17 nt, Human
cagugaaugauucagug

SEQ ID NO: 2437644 - RNA, 18 nt, Human
cagugaaaauguaagcug

SEQ ID NO: 2437645 - RNA, 15 nt, Human
cagugaaaauguaag

SEQ ID NO: 2437646 - RNA, 12 nt, Human
cagugaaaaugu

SEQ ID NO: 2437647 - RNA, 21 nt, Human
cagugaaaacaagugcuggca

SEQ ID NO: 2437648 - RNA, 20 nt, Human
cagugaaaacaagugcuggc

SEQ ID NO: 2437649 - RNA, 21 nt, Human
cagugaaccaaagagacugga

SEQ ID NO: 2437650 - RNA, 20 nt, Human
cagugaaccaaagagacugg

SEQ ID NO: 2437651 - RNA, 14 nt, Human
cagugaaccaaaga

SEQ ID NO: 2437652 - RNA, 21 nt, Human
cagugaaaauguaagcuguuu

SEQ ID NO: 2437653 - RNA, 14 nt, Human
cagugaaagcauca

SEQ ID NO: 2437654 - RNA, 13 nt, Human
cagugaaagcauc

SEQ ID NO: 2437655 - RNA, 20 nt, Human
cagugaggcucugcccuugg

SEQ ID NO: 2437656 - RNA, 19 nt, Human
cagugaggcucugcccuug

SEQ ID NO: 2437657 - RNA, 18 nt, Human
cagugaggcucugcccuu

SEQ ID NO: 2437658 - RNA, 17 nt, Human
cagugaggcucugcccu

SEQ ID NO: 2437659 - RNA, 18 nt, Human
cagugagucgaggacagg

SEQ ID NO: 2437660 - RNA, 17 nt, Human
cagugagucgaggacag

SEQ ID NO: 2437661 - RNA, 21 nt, Human
cagugaggcucugcccuuggu

SEQ ID NO: 2437662 - RNA, 21 nt, Human
cagugaggcccagggagaggc

SEQ ID NO: 2437663 - RNA, 21 nt, Human
cagugagggagggcugucauc

SEQ ID NO: 2437664 - RNA, 16 nt, Human
cagugaggcccaggga

SEQ ID NO: 2437665 - RNA, 17 nt, Human
cagugaggcccagggag

SEQ ID NO: 2437666 - RNA, 16 nt, Human
cagugaggcucugccc

SEQ ID NO: 2437667 - RNA, 15 nt, Human
cagugaggcucugcc

SEQ ID NO: 2437668 - RNA, 14 nt, Human
cagugaggcucugc

SEQ ID NO: 2437669 - RNA, 13 nt, Human
cagugaggcucug

SEQ ID NO: 2437670 - RNA, 12 nt, Human
cagugaggcucu

SEQ ID NO: 2437671 - RNA, 13 nt, Human
cagugagcugaga

SEQ ID NO: 2437672 - RNA, 17 nt, Human
cagugagcggagaucgc

SEQ ID NO: 2437673 - RNA, 19 nt, Human
cagugagccgcaucuucuc

SEQ ID NO: 2437674 - RNA, 13 nt, Human
cagugaggcccag

SEQ ID NO: 2437675 - RNA, 22 nt, Human
cagugagcuuggaaaggaccag

SEQ ID NO: 2437676 - RNA, 24 nt, Human
cagugagccgagauugcaccacug

SEQ ID NO: 2437677 - RNA, 13 nt, Human
cagugagccaaga

SEQ ID NO: 2437678 - RNA, 23 nt, Human
cagugagccaagaucgcgccacu

SEQ ID NO: 2437679 - RNA, 12 nt, Human
cagugagccuga

SEQ ID NO: 2437680 - RNA, 16 nt, Human
cagucccccaacccca

SEQ ID NO: 2437681 - RNA, 14 nt, Human
caguccccccaccc

SEQ ID NO: 2437682 - RNA, 20 nt, Human
caguccccccacccucauuc

SEQ ID NO: 2437683 - RNA, 20 nt, Human
caguccccaccccugccccc

SEQ ID NO: 2437684 - RNA, 19 nt, Human
caguccccaccccugcccc

SEQ ID NO: 2437685 - RNA, 21 nt, Human
caguccccaccccugccccca

SEQ ID NO: 2437686 - RNA, 17 nt, Human
cagucccccugccccag

SEQ ID NO: 2437687 - RNA, 16 nt, Human
cagucccccugcccca

SEQ ID NO: 2437688 - RNA, 13 nt, Human
caguccccuccca

SEQ ID NO: 2437689 - RNA, 12 nt, Human
caguccccuccc

SEQ ID NO: 2437690 - RNA, 18 nt, Human
caguccccgugccccgcc

SEQ ID NO: 2437691 - RNA, 18 nt, Human
cagucccccaaccccagc

SEQ ID NO: 2437692 - RNA, 23 nt, Human
caguccccgugaaggagagcccu

SEQ ID NO: 2437693 - RNA, 16 nt, Human
cagucccugccaaugg

SEQ ID NO: 2437694 - RNA, 15 nt, Human
cagucccugccaaug

SEQ ID NO: 2437695 - RNA, 14 nt, Human
cagucccugccaau

SEQ ID NO: 2437696 - RNA, 13 nt, Human
cagucccugccaa

SEQ ID NO: 2437697 - RNA, 14 nt, Human
cagucccugaggca

SEQ ID NO: 2437698 - RNA, 14 nt, Human
cagucccuaaagaa

SEQ ID NO: 2437699 - RNA, 17 nt, Human
caguccccucccaucug

SEQ ID NO: 2437700 - RNA, 16 nt, Human
caguccccucccaucu

SEQ ID NO: 2437701 - RNA, 15 nt, Human
caguccccucccauc

SEQ ID NO: 2437702 - RNA, 14 nt, Human
caguccccucccau

SEQ ID NO: 2437703 - RNA, 22 nt, Human
caguccccucccaucugggagu

SEQ ID NO: 2437704 - RNA, 19 nt, Human
caguccccucccaucuggg

SEQ ID NO: 2437705 - RNA, 20 nt, Human
cagucccugaggcagguccc

SEQ ID NO: 2437706 - RNA, 23 nt, Human
cagucccugaggcagguccccag

SEQ ID NO: 2437707 - RNA, 12 nt, Human
cagucccugcca

SEQ ID NO: 2437708 - RNA, 15 nt, Human
caguccucccaucuc

SEQ ID NO: 2437709 - RNA, 14 nt, Human
caguccucccaucu

SEQ ID NO: 2437710 - RNA, 13 nt, Human
caguccucccauc

SEQ ID NO: 2437711 - RNA, 12 nt, Human
caguccucccau

SEQ ID NO: 2437712 - RNA, 23 nt, Human
caguccuagcugcacagggcagc

SEQ ID NO: 2437713 - RNA, 18 nt, Human
caguccuagcugcacagg

SEQ ID NO: 2437714 - RNA, 17 nt, Human
caguccuagcugcacag

SEQ ID NO: 2437715 - RNA, 13 nt, Human
caguccuagcugc

SEQ ID NO: 2437716 - RNA, 19 nt, Human
caguccuaagaaagaggag

SEQ ID NO: 2437717 - RNA, 15 nt, Human
caguccuaagaaaga

SEQ ID NO: 2437718 - RNA, 17 nt, Human
cagucccugccaaugga

SEQ ID NO: 2437719 - RNA, 15 nt, Human
cagucccuauguauu

SEQ ID NO: 2437720 - RNA, 12 nt, Human
cagucccugggg

SEQ ID NO: 2437721 - RNA, 20 nt, Human
cagucccugggggaagcccu

SEQ ID NO: 2437722 - RNA, 21 nt, Human
cagucccugggggaagcccug

SEQ ID NO: 2437723 - RNA, 22 nt, Human
cagucccugggggaagcccugg

SEQ ID NO: 2437724 - RNA, 16 nt, Human
caguauccacuuugca

SEQ ID NO: 2437725 - RNA, 20 nt, Human
caguaucaugcccugugcaa

SEQ ID NO: 2437726 - RNA, 17 nt, Human
caguaucaugcccugug

SEQ ID NO: 2437727 - RNA, 19 nt, Human
caguaucaugcccugugca

SEQ ID NO: 2437728 - RNA, 22 nt, Human
caguaucuauauauguguaugu

SEQ ID NO: 2437729 - RNA, 21 nt, Human
caguaucuauauauguguaug

SEQ ID NO: 2437730 - RNA, 20 nt, Human
caguaucuauauauguguau

SEQ ID NO: 2437731 - RNA, 19 nt, Human
caguaucuauauaugugua

SEQ ID NO: 2437732 - RNA, 16 nt, Human
caguaucuauauaugu

SEQ ID NO: 2437733 - RNA, 18 nt, Human
caguaucuauauaugugu

SEQ ID NO: 2437734 - RNA, 13 nt, Human
caguaucucaggg

SEQ ID NO: 2437735 - RNA, 13 nt, Human
caguaucaugccc

SEQ ID NO: 2437736 - RNA, 16 nt, Human
caguaucaugcccugu

SEQ ID NO: 2437737 - RNA, 14 nt, Human
caguaucaugaagc

SEQ ID NO: 2437738 - RNA, 15 nt, Human
caguaucaugaagcc

SEQ ID NO: 2437739 - RNA, 14 nt, Human
caguaucacugucu

SEQ ID NO: 2437740 - RNA, 22 nt, Human
caguaucacugucuuuccuaga

SEQ ID NO: 2437741 - RNA, 14 nt, Human
caguauauuuauag

SEQ ID NO: 2437742 - RNA, 15 nt, Human
caguauauuuauagu

SEQ ID NO: 2437743 - RNA, 14 nt, Human
caguaucaggccug

SEQ ID NO: 2437744 - RNA, 17 nt, Human
caguaucaggccugcca

SEQ ID NO: 2437745 - RNA, 20 nt, Human
caguaucaggccugccagac

SEQ ID NO: 2437746 - RNA, 24 nt, Human
caguaucaggccugccagacggca

SEQ ID NO: 2437747 - RNA, 20 nt, Human
caguauaauucuguacugau

SEQ ID NO: 2437748 - RNA, 19 nt, Human
caguauaauucuguacuga

SEQ ID NO: 2437749 - RNA, 23 nt, Human
caguauaauugaguuuucagugg

SEQ ID NO: 2437750 - RNA, 22 nt, Human
caguauaauucuguacugauuu

SEQ ID NO: 2437751 - RNA, 14 nt, Human
caguauacaguccu

SEQ ID NO: 2437752 - RNA, 13 nt, Human
caguauauuuaua

SEQ ID NO: 2437753 - RNA, 22 nt, Human
caguauauuuauagucacaaga

SEQ ID NO: 2437754 - RNA, 23 nt, Human
caguaugagucaaugugcagugu

SEQ ID NO: 2437755 - RNA, 21 nt, Human
caguaugagucaaugugcagu

SEQ ID NO: 2437756 - RNA, 20 nt, Human
caguaugagucaaugugcag

SEQ ID NO: 2437757 - RNA, 14 nt, Human
caguaugaaaauaa

SEQ ID NO: 2437758 - RNA, 12 nt, Human
caguauggcagc

SEQ ID NO: 2437759 - RNA, 23 nt, Human
caguaucuauauauguguaugua

SEQ ID NO: 2437760 - RNA, 13 nt, Human
caguaugaaaaua

SEQ ID NO: 2437761 - RNA, 21 nt, Human
caguaucuugaagacuuuucu

SEQ ID NO: 2437762 - RNA, 18 nt, Human
caguaucuugaagacuuu

SEQ ID NO: 2437763 - RNA, 12 nt, Human
caguaucuugaa

SEQ ID NO: 2437764 - RNA, 15 nt, Human
caguaucucagggcc

SEQ ID NO: 2437765 - RNA, 19 nt, Human
caguauaaacaaaguuacu

SEQ ID NO: 2437766 - RNA, 14 nt, Human
caguauaaacaaag

SEQ ID NO: 2437767 - RNA, 14 nt, Human
caguauaauucugu

SEQ ID NO: 2437768 - RNA, 12 nt, Human
caguauaauucu

SEQ ID NO: 2437769 - RNA, 12 nt, Human
caguagugauag

SEQ ID NO: 2437770 - RNA, 23 nt, Human
caguagucucugugcuuugacuc

SEQ ID NO: 2437771 - RNA, 17 nt, Human
caguagucucugugcuu

SEQ ID NO: 2437772 - RNA, 23 nt, Human
caguagucuugaugaccaaaguc

SEQ ID NO: 2437773 - RNA, 22 nt, Human
caguaggugcccagaauaaguu

SEQ ID NO: 2437774 - RNA, 22 nt, Human
caguaggagcccagcucugaaa

SEQ ID NO: 2437775 - RNA, 18 nt, Human
caguaggcucaacuaggg

SEQ ID NO: 2437776 - RNA, 15 nt, Human
caguagguuggcagu

SEQ ID NO: 2437777 - RNA, 16 nt, Human
caguagucucugugcu

SEQ ID NO: 2437778 - RNA, 14 nt, Human
caguaguaccaaau

SEQ ID NO: 2437779 - RNA, 22 nt, Human
caguaguagccuccagguuucc

SEQ ID NO: 2437780 - RNA, 23 nt, Human
caguagaaggucggaggcuuggg

SEQ ID NO: 2437781 - RNA, 20 nt, Human
caguagaccuuguuacuucu

SEQ ID NO: 2437782 - RNA, 20 nt, Human
caguagaaggucggaggcuu

SEQ ID NO: 2437783 - RNA, 23 nt, Human
caguagaggcuauggacagggca

SEQ ID NO: 2437784 - RNA, 17 nt, Human
caguagagucaucucca

SEQ ID NO: 2437785 - RNA, 15 nt, Human
caguagagucaucuc

SEQ ID NO: 2437786 - RNA, 16 nt, Human
caguagagucaucucc

SEQ ID NO: 2437787 - RNA, 20 nt, Human
caguacuuuggaggccccua

SEQ ID NO: 2437788 - RNA, 16 nt, Human
caguacuuuggaggcc

SEQ ID NO: 2437789 - RNA, 19 nt, Human
caguacuuuggaggccccu

SEQ ID NO: 2437790 - RNA, 18 nt, Human
caguagaaauaauaugca

SEQ ID NO: 2437791 - RNA, 12 nt, Human
caguagacaagc

SEQ ID NO: 2437792 - RNA, 19 nt, Human
caguagaaauaauaugcau

SEQ ID NO: 2437793 - RNA, 12 nt, Human
caguaggagccc

SEQ ID NO: 2437794 - RNA, 14 nt, Human
caguaggagcccag

SEQ ID NO: 2437795 - RNA, 15 nt, Human
caguaggagcccagc

SEQ ID NO: 2437796 - RNA, 21 nt, Human
caguaggagcccagcucugaa

SEQ ID NO: 2437797 - RNA, 20 nt, Human
caguagcuguggugaggugg

SEQ ID NO: 2437798 - RNA, 14 nt, Human
caguagauuuucuu

SEQ ID NO: 2437799 - RNA, 13 nt, Human
caguagauuuucu

SEQ ID NO: 2437800 - RNA, 18 nt, Human
caguagauuuuccaaaug

SEQ ID NO: 2437801 - RNA, 16 nt, Human
caguagauuuuccaaa

SEQ ID NO: 2437802 - RNA, 23 nt, Human
caguagauuuucuuuaaaagaau

SEQ ID NO: 2437803 - RNA, 19 nt, Human
caguagauuuucuuuaaaa

SEQ ID NO: 2437804 - RNA, 18 nt, Human
caguagcaguagaugcau

SEQ ID NO: 2437805 - RNA, 18 nt, Human
cagucaggaaagagaacu

SEQ ID NO: 2437806 - RNA, 15 nt, Human
cagucaggaaagaga

SEQ ID NO: 2437807 - RNA, 22 nt, Human
cagucaggaaagagaacuucca

SEQ ID NO: 2437808 - RNA, 22 nt, Human
cagucagccucucucccagucu

SEQ ID NO: 2437809 - RNA, 21 nt, Human
cagucaggaaaggaaucauuu

SEQ ID NO: 2437810 - RNA, 12 nt, Human
cagucaggauga

SEQ ID NO: 2437811 - RNA, 18 nt, Human
cagucagugcaaauguca

SEQ ID NO: 2437812 - RNA, 18 nt, Human
cagucaucuugaccaagc

SEQ ID NO: 2437813 - RNA, 17 nt, Human
cagucagugcaaauguc

SEQ ID NO: 2437814 - RNA, 15 nt, Human
cagucaguauuguuu

SEQ ID NO: 2437815 - RNA, 16 nt, Human
cagucaguaauugcca

SEQ ID NO: 2437816 - RNA, 18 nt, Human
cagucaugcauaaauaug

SEQ ID NO: 2437817 - RNA, 17 nt, Human
cagucaugcauaaauau

SEQ ID NO: 2437818 - RNA, 16 nt, Human
cagucaugcauaaaua

SEQ ID NO: 2437819 - RNA, 14 nt, Human
cagucaugcauaaa

SEQ ID NO: 2437820 - RNA, 21 nt, Human
cagucaucuugaccaagcagg

SEQ ID NO: 2437821 - RNA, 22 nt, Human
cagucaucuugaccaagcagga

SEQ ID NO: 2437822 - RNA, 13 nt, Human
cagucaugcauaa

SEQ ID NO: 2437823 - RNA, 24 nt, Human
cagucaucuugaccaagcaggaag

SEQ ID NO: 2437824 - RNA, 15 nt, Human
cagucauaacuaaau

SEQ ID NO: 2437825 - RNA, 17 nt, Human
cagucaggggcagcuga

SEQ ID NO: 2437826 - RNA, 12 nt, Human
cagucaggggca

SEQ ID NO: 2437827 - RNA, 21 nt, Human
cagucagguaguugcaauuga

SEQ ID NO: 2437828 - RNA, 23 nt, Human
cagucacuggagguugaagccaa

SEQ ID NO: 2437829 - RNA, 15 nt, Human
caguauguugucaaa

SEQ ID NO: 2437830 - RNA, 14 nt, Human
cagucacuggaggu

SEQ ID NO: 2437831 - RNA, 22 nt, Human
cagucacugucccucaaaugac

SEQ ID NO: 2437832 - RNA, 21 nt, Human
cagucacugucccucaaauga

SEQ ID NO: 2437833 - RNA, 17 nt, Human
cagucagauuuccaguc

SEQ ID NO: 2437834 - RNA, 21 nt, Human
cagucagccucucucccaguc

SEQ ID NO: 2437835 - RNA, 18 nt, Human
cagucagccucucuccca

SEQ ID NO: 2437836 - RNA, 17 nt, Human
cagucagccucucuccc

SEQ ID NO: 2437837 - RNA, 14 nt, Human
cagucagccucucu

SEQ ID NO: 2437838 - RNA, 13 nt, Human
cagucagccucuc

SEQ ID NO: 2437839 - RNA, 12 nt, Human
cagucagccucu

SEQ ID NO: 2437840 - RNA, 20 nt, Human
cagucagauuuccagucucc

SEQ ID NO: 2437841 - RNA, 23 nt, Human
cagucagauuuccagucuccacc

SEQ ID NO: 2437842 - RNA, 19 nt, Human
caguauuacuucugcuaca

SEQ ID NO: 2437843 - RNA, 17 nt, Human
cagucacugaauuccau

SEQ ID NO: 2437844 - RNA, 18 nt, Human
caguauuacuucugcuac

SEQ ID NO: 2437845 - RNA, 16 nt, Human
caguauggguuaggga

SEQ ID NO: 2437846 - RNA, 21 nt, Human
caguauggguuagggaaaaca

SEQ ID NO: 2437847 - RNA, 12 nt, Human
caguauguggaa

SEQ ID NO: 2437848 - RNA, 16 nt, Human
caguauuacuucugcu

SEQ ID NO: 2437849 - RNA, 16 nt, Human
caguaugucccauagg

SEQ ID NO: 2437850 - RNA, 23 nt, Human
caguauggguuagggaaaacauu

SEQ ID NO: 2437851 - RNA, 18 nt, Human
caguauguugucaaagag

SEQ ID NO: 2437852 - RNA, 13 nt, Human
caguauguuguca

SEQ ID NO: 2437853 - RNA, 16 nt, Human
caguccagccuggaga

SEQ ID NO: 2437854 - RNA, 18 nt, Human
caguccccaccccugccc

SEQ ID NO: 2437855 - RNA, 17 nt, Human
caguccccaccccugcc

SEQ ID NO: 2437856 - RNA, 16 nt, Human
caguccccaccccugc

SEQ ID NO: 2437857 - RNA, 15 nt, Human
caguccccaccccug

SEQ ID NO: 2437858 - RNA, 14 nt, Human
caguccccaccccu

SEQ ID NO: 2437859 - RNA, 13 nt, Human
caguccccacccc

SEQ ID NO: 2437860 - RNA, 12 nt, Human
caguccccaccc

SEQ ID NO: 2437861 - RNA, 13 nt, Human
cagucccaggggc

SEQ ID NO: 2437862 - RNA, 19 nt, Human
cagucccaucagagagcga

SEQ ID NO: 2437863 - RNA, 13 nt, Human
caguccaugaaga

SEQ ID NO: 2437864 - RNA, 14 nt, Human
caguccauugaaag

SEQ ID NO: 2437865 - RNA, 18 nt, Human
caguccaggcugccgugg

SEQ ID NO: 2437866 - RNA, 15 nt, Human
caguccaggcugccg

SEQ ID NO: 2437867 - RNA, 17 nt, Human
caguccagccuggagau

SEQ ID NO: 2437868 - RNA, 23 nt, Human
caguccaggaugcuaacaucuaa

SEQ ID NO: 2437869 - RNA, 16 nt, Human
caguccauagcagaga

SEQ ID NO: 2437870 - RNA, 13 nt, Human
cagucauuaugag

SEQ ID NO: 2437871 - RNA, 23 nt, Human
cagucauuaugagaggcaaugau

SEQ ID NO: 2437872 - RNA, 23 nt, Human
cagucaugcauaaauaugcagug

SEQ ID NO: 2437873 - RNA, 20 nt, Human
cagucaugcauaaauaugca

SEQ ID NO: 2437874 - RNA, 19 nt, Human
cagucaugcauaaauaugc

SEQ ID NO: 2437875 - RNA, 18 nt, Human
cagucauuagacuccucc

SEQ ID NO: 2437876 - RNA, 24 nt, Human
cagucauggcaccaaagccaccag

SEQ ID NO: 2437877 - RNA, 13 nt, Human
cagucauuggcug

SEQ ID NO: 2437878 - RNA, 17 nt, Human
cagucauuggcugucuc

SEQ ID NO: 2437879 - RNA, 21 nt, Human
cagucauuggcugucuccuag

SEQ ID NO: 2437880 - RNA, 11 nt, Human
cagucauuuaa

SEQ ID NO: 2437881 - RNA, 22 nt, Human
cagucauuagacuccuccucca

SEQ ID NO: 2437882 - RNA, 12 nt, Human
cagucauuuaaa

SEQ ID NO: 2437883 - RNA, 15 nt, Human
caguccagccuggag

SEQ ID NO: 2437884 - RNA, 14 nt, Human
caguccagccugga

SEQ ID NO: 2437885 - RNA, 13 nt, Human
caguccagccugg

SEQ ID NO: 2437886 - RNA, 13 nt, Human
caguccacaaaau

SEQ ID NO: 2437887 - RNA, 24 nt, Human
caguccaaggaaaccacagcugcu

SEQ ID NO: 2437888 - RNA, 15 nt, Human
caguccaccugagcu

SEQ ID NO: 2437889 - RNA, 16 nt, Human
caguccaccugagcug

SEQ ID NO: 2437890 - RNA, 18 nt, Human
caguccaccugagcugcc

SEQ ID NO: 2437891 - RNA, 20 nt, Human
caguccaccugagcugccau

SEQ ID NO: 2437892 - RNA, 23 nt, Human
caguccaaggaaaccacagcugc

SEQ ID NO: 2437893 - RNA, 22 nt, Human
caguccaaggaaaccacagcug

SEQ ID NO: 2437894 - RNA, 19 nt, Human
caguccaaggaaaccacag

SEQ ID NO: 2437895 - RNA, 23 nt, Human
cagucauuuuuguuucuaccucc

SEQ ID NO: 2437896 - RNA, 22 nt, Human
caguccaaauguccuccagaag

SEQ ID NO: 2437897 - RNA, 23 nt, Human
caguccaaauguccuccagaagc

SEQ ID NO: 2437898 - RNA, 18 nt, Human
caguccaaauguccucca

SEQ ID NO: 2437899 - RNA, 21 nt, Human
caguccaaauguccuccagaa

SEQ ID NO: 2437900 - RNA, 17 nt, Human
caguccaaauguccucc

SEQ ID NO: 2437901 - RNA, 21 nt, Human
cagucauuuuuguuucuaccu

SEQ ID NO: 2437902 - RNA, 18 nt, Human
caggugugagccaccacg

SEQ ID NO: 2437903 - RNA, 21 nt, Human
caggugucauauauggggggc

SEQ ID NO: 2437904 - RNA, 16 nt, Human
caggugugagucacca

SEQ ID NO: 2437905 - RNA, 21 nt, Human
caggugugagucaccaagccc

SEQ ID NO: 2437906 - RNA, 20 nt, Human
caggugugagucaccaagcc

SEQ ID NO: 2437907 - RNA, 23 nt, Human
caggugugaaccaccacacccag

SEQ ID NO: 2437908 - RNA, 22 nt, Human
caggugugaaccaccacaccca

SEQ ID NO: 2437909 - RNA, 19 nt, Human
caggugugaaccaccacac

SEQ ID NO: 2437910 - RNA, 16 nt, Human
caggugugaaccacca

SEQ ID NO: 2437911 - RNA, 19 nt, Human
caggugugccgacagaagg

SEQ ID NO: 2437912 - RNA, 18 nt, Human
caggugugccgacagaag

SEQ ID NO: 2437913 - RNA, 23 nt, Human
caggugugcacguggcauguggc

SEQ ID NO: 2437914 - RNA, 21 nt, Human
cagguguguccaccugggcau

SEQ ID NO: 2437915 - RNA, 20 nt, Human
cagguguguccaccugggca

SEQ ID NO: 2437916 - RNA, 21 nt, Human
caggugugagccaccacgccc

SEQ ID NO: 2437917 - RNA, 15 nt, Human
caggugugcacgugg

SEQ ID NO: 2437918 - RNA, 13 nt, Human
caggugugcacgu

SEQ ID NO: 2437919 - RNA, 23 nt, Human
caggugugagucaccaagcccag

SEQ ID NO: 2437920 - RNA, 22 nt, Human
caggugugagucaccaagccca

SEQ ID NO: 2437921 - RNA, 21 nt, Human
cagguuacaacagauuuguga

SEQ ID NO: 2437922 - RNA, 19 nt, Human
cagguuacaacagauuugu

SEQ ID NO: 2437923 - RNA, 17 nt, Human
cagguuacaacagauuu

SEQ ID NO: 2437924 - RNA, 16 nt, Human
cagguuacaacagauu

SEQ ID NO: 2437925 - RNA, 15 nt, Human
cagguuacaacagau

SEQ ID NO: 2437926 - RNA, 14 nt, Human
cagguuacaacaga

SEQ ID NO: 2437927 - RNA, 13 nt, Human
cagguuacaacag

SEQ ID NO: 2437928 - RNA, 12 nt, Human
cagguuacaaca

SEQ ID NO: 2437929 - RNA, 11 nt, Human
cagguuacaac

SEQ ID NO: 2437930 - RNA, 22 nt, Human
cagguguuacuguaauuccuca

SEQ ID NO: 2437931 - RNA, 12 nt, Human
cagguguucuuc

SEQ ID NO: 2437932 - RNA, 14 nt, Human
cagguguugccaaa

SEQ ID NO: 2437933 - RNA, 13 nt, Human
cagguguugccaa

SEQ ID NO: 2437934 - RNA, 20 nt, Human
cagguguucuacacucaucu

SEQ ID NO: 2437935 - RNA, 16 nt, Human
cagguguuuaguugca

SEQ ID NO: 2437936 - RNA, 12 nt, Human
caggugugaacc

SEQ ID NO: 2437937 - RNA, 19 nt, Human
caggugucccugcacuugc

SEQ ID NO: 2437938 - RNA, 18 nt, Human
caggugucccugcacuug

SEQ ID NO: 2437939 - RNA, 16 nt, Human
caggugucccugcacu

SEQ ID NO: 2437940 - RNA, 15 nt, Human
caggugucccugcac

SEQ ID NO: 2437941 - RNA, 14 nt, Human
caguaacucaucug

SEQ ID NO: 2437942 - RNA, 16 nt, Human
caguaacucaucuguc

SEQ ID NO: 2437943 - RNA, 21 nt, Human
caguaacgcgucuuccugagu

SEQ ID NO: 2437944 - RNA, 18 nt, Human
caguaacgcaggggaaac

SEQ ID NO: 2437945 - RNA, 20 nt, Human
caguaacgcgucuuccugag

SEQ ID NO: 2437946 - RNA, 19 nt, Human
caguaacgcgucuuccuga

SEQ ID NO: 2437947 - RNA, 18 nt, Human
caguaacgcgucuuccug

SEQ ID NO: 2437948 - RNA, 20 nt, Human
caguaacuuuauguguaaau

SEQ ID NO: 2437949 - RNA, 19 nt, Human
caguaacuuuauguguaaa

SEQ ID NO: 2437950 - RNA, 18 nt, Human
caguaacuuuauguguaa

SEQ ID NO: 2437951 - RNA, 17 nt, Human
caguaacuuuaugugua

SEQ ID NO: 2437952 - RNA, 16 nt, Human
caguaacuuuaugugu

SEQ ID NO: 2437953 - RNA, 14 nt, Human
caguaacuuuaugu

SEQ ID NO: 2437954 - RNA, 21 nt, Human
caguaaaugggggugcauuug

SEQ ID NO: 2437955 - RNA, 21 nt, Human
cagguucuauuuggaauuuau

SEQ ID NO: 2437956 - RNA, 19 nt, Human
cagguucuauuuggaauuu

SEQ ID NO: 2437957 - RNA, 17 nt, Human
cagguucuauuuggaau

SEQ ID NO: 2437958 - RNA, 16 nt, Human
cagguucuauuuggaa

SEQ ID NO: 2437959 - RNA, 20 nt, Human
caguaaaugggggugcauuu

SEQ ID NO: 2437960 - RNA, 22 nt, Human
caguaaaugggggugcauuuga

SEQ ID NO: 2437961 - RNA, 20 nt, Human
cagguucuccguuagcuccu

SEQ ID NO: 2437962 - RNA, 15 nt, Human
cagguucuauuugga

SEQ ID NO: 2437963 - RNA, 17 nt, Human
cagguuccuauggcugg

SEQ ID NO: 2437964 - RNA, 14 nt, Human
cagguuccaucccg

SEQ ID NO: 2437965 - RNA, 15 nt, Human
cagguucccaagcuc

SEQ ID NO: 2437966 - RNA, 17 nt, Human
cagguucccaagcucag

SEQ ID NO: 2437967 - RNA, 14 nt, Human
cagguucccaagcu

SEQ ID NO: 2437968 - RNA, 13 nt, Human
cagguucagcuug

SEQ ID NO: 2437969 - RNA, 23 nt, Human
cagguuagaaccuagaagggcua

SEQ ID NO: 2437970 - RNA, 23 nt, Human
cagguuacaacagauuugugaac

SEQ ID NO: 2437971 - RNA, 22 nt, Human
cagguuacaacagauuugugaa

SEQ ID NO: 2437972 - RNA, 19 nt, Human
cagguuagaaccuagaagg

SEQ ID NO: 2437973 - RNA, 16 nt, Human
cagguuaucugggcau

SEQ ID NO: 2437974 - RNA, 23 nt, Human
cagguuaucgaaauaacaauguu

SEQ ID NO: 2437975 - RNA, 20 nt, Human
cagguuaucgaaauaacaau

SEQ ID NO: 2437976 - RNA, 19 nt, Human
cagguuaucgaaauaacaa

SEQ ID NO: 2437977 - RNA, 22 nt, Human
cagguucacaggcgaggccugg

SEQ ID NO: 2437978 - RNA, 20 nt, Human
cagguucacaggcgaggccu

SEQ ID NO: 2437979 - RNA, 21 nt, Human
cagguuauuuuaguuucuguu

SEQ ID NO: 2437980 - RNA, 16 nt, Human
cagguuauuuuaguuu

SEQ ID NO: 2437981 - RNA, 14 nt, Human
cagguuauuuuagu

SEQ ID NO: 2437982 - RNA, 24 nt, Human
cagguuaucgaaauaacaauguua

SEQ ID NO: 2437983 - RNA, 12 nt, Human
cagguucagcuu

SEQ ID NO: 2437984 - RNA, 15 nt, Human
caguaccuggaggag

SEQ ID NO: 2437985 - RNA, 14 nt, Human
caguaccuggagga

SEQ ID NO: 2437986 - RNA, 13 nt, Human
caguaccuggagg

SEQ ID NO: 2437987 - RNA, 12 nt, Human
caguaccuggag

SEQ ID NO: 2437988 - RNA, 12 nt, Human
caguaccuccug

SEQ ID NO: 2437989 - RNA, 22 nt, Human
caguaccuauaaaguaaagcua

SEQ ID NO: 2437990 - RNA, 20 nt, Human
caguaccuccugucucuggc

SEQ ID NO: 2437991 - RNA, 20 nt, Human
caguaccuauaaaguaaagc

SEQ ID NO: 2437992 - RNA, 23 nt, Human
caguaccuucaaacuagggccaa

SEQ ID NO: 2437993 - RNA, 21 nt, Human
caguaccuggaggaggagcag

SEQ ID NO: 2437994 - RNA, 17 nt, Human
caguaccuuugucacaa

SEQ ID NO: 2437995 - RNA, 15 nt, Human
caguaccuuugucac

SEQ ID NO: 2437996 - RNA, 16 nt, Human
caguaccuuugucaca

SEQ ID NO: 2437997 - RNA, 24 nt, Human
caguacccucucagcuccaggugg

SEQ ID NO: 2437998 - RNA, 22 nt, Human
caguacccucucagcuccaggu

SEQ ID NO: 2437999 - RNA, 20 nt, Human
caguacccucucagcuccag

SEQ ID NO: 2438000 - RNA, 19 nt, Human
caguacccucucagcucca

SEQ ID NO: 2438001 - RNA, 16 nt, Human
caguacccucucagcu

SEQ ID NO: 2438002 - RNA, 15 nt, Human
caguacccucucagc

SEQ ID NO: 2438003 - RNA, 14 nt, Human
caguacccucucag

SEQ ID NO: 2438004 - RNA, 13 nt, Human
caguaauauuuau

SEQ ID NO: 2438005 - RNA, 20 nt, Human
caguaauauuuauauauuua

SEQ ID NO: 2438006 - RNA, 14 nt, Human
caguaauugugaaa

SEQ ID NO: 2438007 - RNA, 21 nt, Human
caguaauugguccgaucuuug

SEQ ID NO: 2438008 - RNA, 16 nt, Human
caguaauugugaaaau

SEQ ID NO: 2438009 - RNA, 17 nt, Human
caguaauuugaggacaa

SEQ ID NO: 2438010 - RNA, 12 nt, Human
caguacaggcag

SEQ ID NO: 2438011 - RNA, 13 nt, Human
caguacaggcagc

SEQ ID NO: 2438012 - RNA, 14 nt, Human
caguacaggcagca

SEQ ID NO: 2438013 - RNA, 16 nt, Human
caguacaggcagcaca

SEQ ID NO: 2438014 - RNA, 19 nt, Human
caguacaggcagcacagag

SEQ ID NO: 2438015 - RNA, 20 nt, Human
caguacaggcagcacagaga

SEQ ID NO: 2438016 - RNA, 18 nt, Human
caguaagggaaauagaaa

SEQ ID NO: 2438017 - RNA, 15 nt, Human
caguaagggaaauag

SEQ ID NO: 2438018 - RNA, 13 nt, Human
caguaaggcaggg

SEQ ID NO: 2438019 - RNA, 19 nt, Human
caguaagcugcucuauugu

SEQ ID NO: 2438020 - RNA, 15 nt, Human
caguaagccacugcc

SEQ ID NO: 2438021 - RNA, 18 nt, Human
caguaaguaucuggagga

SEQ ID NO: 2438022 - RNA, 14 nt, Human
caguaagucuuuuu

SEQ ID NO: 2438023 - RNA, 13 nt, Human
caguaaguuccua

SEQ ID NO: 2438024 - RNA, 12 nt, Human
caguaauaacuc

SEQ ID NO: 2438025 - RNA, 13 nt, Human
caguaauaacucu

SEQ ID NO: 2438026 - RNA, 14 nt, Human
caggugucccugca

SEQ ID NO: 2438027 - RNA, 11 nt, Human
caggugucccu

SEQ ID NO: 2438028 - RNA, 20 nt, Human
caggugguuauggagagggu

SEQ ID NO: 2438029 - RNA, 21 nt, Human
caggugguggcugcaaggugg

SEQ ID NO: 2438030 - RNA, 22 nt, Human
caggugguggcacugagccccc

SEQ ID NO: 2438031 - RNA, 21 nt, Human
caggugguggcacugagcccc

SEQ ID NO: 2438032 - RNA, 22 nt, Human
cagguggggucacucuggcagc

SEQ ID NO: 2438033 - RNA, 21 nt, Human
cagguggggucacucuggcag

SEQ ID NO: 2438034 - RNA, 20 nt, Human
cagguggggucacucuggca

SEQ ID NO: 2438035 - RNA, 19 nt, Human
cagguggggucacucuggc

SEQ ID NO: 2438036 - RNA, 20 nt, Human
caggugguggcacugagccc

SEQ ID NO: 2438037 - RNA, 19 nt, Human
caggugguggcacugagcc

SEQ ID NO: 2438038 - RNA, 15 nt, Human
caggugguggcacug

SEQ ID NO: 2438039 - RNA, 20 nt, Human
caggugguccugagaccuga

SEQ ID NO: 2438040 - RNA, 16 nt, Human
caggugguccugagac

SEQ ID NO: 2438041 - RNA, 22 nt, Human
cagguggggugaggcagugggu

SEQ ID NO: 2438042 - RNA, 18 nt, Human
caggugguuauggagagg

SEQ ID NO: 2438043 - RNA, 23 nt, Human
cagguggggucacucuggcagcu

SEQ ID NO: 2438044 - RNA, 17 nt, Human
cagguggggugaggcag

SEQ ID NO: 2438045 - RNA, 15 nt, Human
cagguggggaggggg

SEQ ID NO: 2438046 - RNA, 23 nt, Human
cagguggggagucagggaccccu
